United States Patent Application Publication US 2019/0048337 A1 - sequence listing, part 21

SEQ ID NO: 694277 - RNA, 20 nt, Artificial Sequence
  Synthetic
gaaagcuggcacauagaagg

SEQ ID NO: 694278 - RNA, 20 nt, Artificial Sequence
  Synthetic
gggcacucaacgcaugaagg

SEQ ID NO: 694279 - RNA, 20 nt, Artificial Sequence
  Synthetic
guaucuauaaugauauaagg

SEQ ID NO: 694280 - RNA, 20 nt, Artificial Sequence
  Synthetic
gggucccacugucacuaagg

SEQ ID NO: 694281 - RNA, 20 nt, Artificial Sequence
  Synthetic
ggaaguauugggacguaagg

SEQ ID NO: 694282 - RNA, 20 nt, Artificial Sequence
  Synthetic
gcaacgcugaucugaacagg

SEQ ID NO: 694283 - RNA, 20 nt, Artificial Sequence
  Synthetic
gugaacauuaucuccacagg

SEQ ID NO: 694284 - RNA, 20 nt, Artificial Sequence
  Synthetic
gauggcauacacaaaucagg

SEQ ID NO: 694285 - RNA, 20 nt, Artificial Sequence
  Synthetic
gcaagugaaguucaaucagg

SEQ ID NO: 694286 - RNA, 20 nt, Artificial Sequence
  Synthetic
guccaucaucguccaucagg

SEQ ID NO: 694287 - RNA, 20 nt, Artificial Sequence
  Synthetic
gcccagcagugaacuucagg

SEQ ID NO: 694288 - RNA, 20 nt, Artificial Sequence
  Synthetic
ggaccucaaacuuuuucagg

SEQ ID NO: 694289 - RNA, 20 nt, Artificial Sequence
  Synthetic
guaguagaaacaaauagagg

SEQ ID NO: 694290 - RNA, 20 nt, Artificial Sequence
  Synthetic
gagugugcaagcaaacgagg

SEQ ID NO: 694291 - RNA, 20 nt, Artificial Sequence
  Synthetic
ggguaaagauuaacaugagg

SEQ ID NO: 694292 - RNA, 20 nt, Artificial Sequence
  Synthetic
gggauggacaacaacugagg

SEQ ID NO: 694293 - RNA, 20 nt, Artificial Sequence
  Synthetic
ggaaugaagugcuccugagg

SEQ ID NO: 694294 - RNA, 20 nt, Artificial Sequence
  Synthetic
gaguacuggccuaugugagg

SEQ ID NO: 694295 - RNA, 20 nt, Artificial Sequence
  Synthetic
gaccuugacugacauugagg

SEQ ID NO: 694296 - RNA, 20 nt, Artificial Sequence
  Synthetic
gauuaggguaaguggauagg

SEQ ID NO: 694297 - RNA, 20 nt, Artificial Sequence
  Synthetic
gaaguuaaaagcgauauagg

SEQ ID NO: 694298 - RNA, 20 nt, Artificial Sequence
  Synthetic
gugcgcgcgcgugcgcuagg

SEQ ID NO: 694299 - RNA, 20 nt, Artificial Sequence
  Synthetic
guuucaccuucuauucuagg

SEQ ID NO: 694300 - RNA, 20 nt, Artificial Sequence
  Synthetic
gggaauuaggcauggguagg

SEQ ID NO: 694301 - RNA, 20 nt, Artificial Sequence
  Synthetic
gugguaguuucccuuguagg

SEQ ID NO: 694302 - RNA, 20 nt, Artificial Sequence
  Synthetic
guugacucuaagaauuuagg

SEQ ID NO: 694303 - RNA, 20 nt, Artificial Sequence
  Synthetic
gaguccuggaaaccuuuagg

SEQ ID NO: 694304 - RNA, 20 nt, Artificial Sequence
  Synthetic
guagaaacauuauaagacgg

SEQ ID NO: 694305 - RNA, 20 nt, Artificial Sequence
  Synthetic
gcuaagaaaccaauguacgg

SEQ ID NO: 694306 - RNA, 20 nt, Artificial Sequence
  Synthetic
gauucuaaucuaaccaccgg

SEQ ID NO: 694307 - RNA, 20 nt, Artificial Sequence
  Synthetic
gacacuucaggacaagccgg

SEQ ID NO: 694308 - RNA, 20 nt, Artificial Sequence
  Synthetic
gaauauguggauuuuugcgg

SEQ ID NO: 694309 - RNA, 20 nt, Artificial Sequence
  Synthetic
gugguguugaccuuugucgg

SEQ ID NO: 694310 - RNA, 20 nt, Artificial Sequence
  Synthetic
gauaucccugauuacuucgg

SEQ ID NO: 694311 - RNA, 20 nt, Artificial Sequence
  Synthetic
gaagcauaagaacucuucgg

SEQ ID NO: 694312 - RNA, 20 nt, Artificial Sequence
  Synthetic
guuggacguuuaaauuucgg

SEQ ID NO: 694313 - RNA, 20 nt, Artificial Sequence
  Synthetic
guacggacugugcuaaaggg

SEQ ID NO: 694314 - RNA, 20 nt, Artificial Sequence
  Synthetic
gguaaccugggaaucaaggg

SEQ ID NO: 694315 - RNA, 20 nt, Artificial Sequence
  Synthetic
ggacuauuagcaagacaggg

SEQ ID NO: 694316 - RNA, 20 nt, Artificial Sequence
  Synthetic
gcaagagagcauaaaacggg

SEQ ID NO: 694317 - RNA, 20 nt, Artificial Sequence
  Synthetic
guuuuccaagagagggcggg

SEQ ID NO: 694318 - RNA, 20 nt, Artificial Sequence
  Synthetic
gacucuaagaauuuaggggg

SEQ ID NO: 694319 - RNA, 20 nt, Artificial Sequence
  Synthetic
ggccauauguauaauugggg

SEQ ID NO: 694320 - RNA, 20 nt, Artificial Sequence
  Synthetic
gacagcacaccuaaaauggg

SEQ ID NO: 694321 - RNA, 20 nt, Artificial Sequence
  Synthetic
gcuagagauacggagauggg

SEQ ID NO: 694322 - RNA, 20 nt, Artificial Sequence
  Synthetic
gcagguaucuaagaccuggg

SEQ ID NO: 694323 - RNA, 20 nt, Artificial Sequence
  Synthetic
gcuuaaugagccauucuggg

SEQ ID NO: 694324 - RNA, 20 nt, Artificial Sequence
  Synthetic
guauagauuuaaccaguggg

SEQ ID NO: 694325 - RNA, 20 nt, Artificial Sequence
  Synthetic
gccaaauacaugaucguggg

SEQ ID NO: 694326 - RNA, 20 nt, Artificial Sequence
  Synthetic
gaagucccuuaccuuguggg

SEQ ID NO: 694327 - RNA, 20 nt, Artificial Sequence
  Synthetic
gauccuauuggguaauuggg

SEQ ID NO: 694328 - RNA, 20 nt, Artificial Sequence
  Synthetic
ggcccuggaucaagaaaugg

SEQ ID NO: 694329 - RNA, 20 nt, Artificial Sequence
  Synthetic
gaaccuaugaacaauaaugg

SEQ ID NO: 694330 - RNA, 20 nt, Artificial Sequence
  Synthetic
guaucccagagguguaaugg

SEQ ID NO: 694331 - RNA, 20 nt, Artificial Sequence
  Synthetic
gaccuauauaaacuuaaugg

SEQ ID NO: 694332 - RNA, 20 nt, Artificial Sequence
  Synthetic
gccaagcagaacccucaugg

SEQ ID NO: 694333 - RNA, 20 nt, Artificial Sequence
  Synthetic
gcagcgggaaggucauaugg

SEQ ID NO: 694334 - RNA, 20 nt, Artificial Sequence
  Synthetic
gcaggucugugauacuaugg

SEQ ID NO: 694335 - RNA, 20 nt, Artificial Sequence
  Synthetic
gcagccaagaagucuuaugg

SEQ ID NO: 694336 - RNA, 20 nt, Artificial Sequence
  Synthetic
gacuauuuauguucuccugg

SEQ ID NO: 694337 - RNA, 20 nt, Artificial Sequence
  Synthetic
gcaguugccggugccgcugg

SEQ ID NO: 694338 - RNA, 20 nt, Artificial Sequence
  Synthetic
gaguguugcuccagaucugg

SEQ ID NO: 694339 - RNA, 20 nt, Artificial Sequence
  Synthetic
guuuuagcugauuugucugg

SEQ ID NO: 694340 - RNA, 20 nt, Artificial Sequence
  Synthetic
guuuuaaccccugcaagugg

SEQ ID NO: 694341 - RNA, 20 nt, Artificial Sequence
  Synthetic
guuuugcaauaguuccgugg

SEQ ID NO: 694342 - RNA, 20 nt, Artificial Sequence
  Synthetic
guugccggugccgcuggugg

SEQ ID NO: 694343 - RNA, 20 nt, Artificial Sequence
  Synthetic
gucaaaaguaacaggugugg

SEQ ID NO: 694344 - RNA, 20 nt, Artificial Sequence
  Synthetic
ggguaaagacgaggaauugg

SEQ ID NO: 694345 - RNA, 20 nt, Artificial Sequence
  Synthetic
guaauguucacugacauugg

SEQ ID NO: 694346 - RNA, 20 nt, Artificial Sequence
  Synthetic
gguacacaaucuugcauugg

SEQ ID NO: 694347 - RNA, 20 nt, Artificial Sequence
  Synthetic
gcuguaacuuggaagauugg

SEQ ID NO: 694348 - RNA, 20 nt, Artificial Sequence
  Synthetic
gaaucucccccgaggauugg

SEQ ID NO: 694349 - RNA, 20 nt, Artificial Sequence
  Synthetic
gaagccuugacauaacuugg

SEQ ID NO: 694350 - RNA, 20 nt, Artificial Sequence
  Synthetic
gguuucaugcacaaccuugg

SEQ ID NO: 694351 - RNA, 20 nt, Artificial Sequence
  Synthetic
gaaaguagacacuaccuugg

SEQ ID NO: 694352 - RNA, 20 nt, Artificial Sequence
  Synthetic
gccuguaaauaggcgcuugg

SEQ ID NO: 694353 - RNA, 20 nt, Artificial Sequence
  Synthetic
guauaagcuccccuaguugg

SEQ ID NO: 694354 - RNA, 20 nt, Artificial Sequence
  Synthetic
gcuucuggcaaguggguugg

SEQ ID NO: 694355 - RNA, 20 nt, Artificial Sequence
  Synthetic
ggguuuuuaccacugguugg

SEQ ID NO: 694356 - RNA, 20 nt, Artificial Sequence
  Synthetic
guugaaagcuauuugguugg

SEQ ID NO: 694357 - RNA, 20 nt, Artificial Sequence
  Synthetic
ggcaggagucccggcuuugg

SEQ ID NO: 694358 - RNA, 20 nt, Artificial Sequence
  Synthetic
gacugucuaacacaguuugg

SEQ ID NO: 694359 - RNA, 20 nt, Artificial Sequence
  Synthetic
gcagaucagauuguuuuugg

SEQ ID NO: 694360 - RNA, 20 nt, Artificial Sequence
  Synthetic
gaguaaugggcuuaacaaug

SEQ ID NO: 694361 - RNA, 20 nt, Artificial Sequence
  Synthetic
gagucuuugcuuccacaaug

SEQ ID NO: 694362 - RNA, 20 nt, Artificial Sequence
  Synthetic
gauggagaggucuagcaaug

SEQ ID NO: 694363 - RNA, 20 nt, Artificial Sequence
  Synthetic
gaucuuggagagagucaaug

SEQ ID NO: 694364 - RNA, 20 nt, Artificial Sequence
  Synthetic
gcaaaaccuccuaaagaaug

SEQ ID NO: 694365 - RNA, 20 nt, Artificial Sequence
  Synthetic
guaucuucuugaugauaaug

SEQ ID NO: 694366 - RNA, 20 nt, Artificial Sequence
  Synthetic
gucacuuguuucggcuaaug

SEQ ID NO: 694367 - RNA, 20 nt, Artificial Sequence
  Synthetic
gucuagugaggcaaguaaug

SEQ ID NO: 694368 - RNA, 20 nt, Artificial Sequence
  Synthetic
gggcugucuaguacuuaaug

SEQ ID NO: 694369 - RNA, 20 nt, Artificial Sequence
  Synthetic
gaaaaccuuggcagcacaug

SEQ ID NO: 694370 - RNA, 20 nt, Artificial Sequence
  Synthetic
guucaaaaugcuucaccaug

SEQ ID NO: 694371 - RNA, 20 nt, Artificial Sequence
  Synthetic
gugaaacuggauggaccaug

SEQ ID NO: 694372 - RNA, 20 nt, Artificial Sequence
  Synthetic
gguaaugcuuauggaccaug

SEQ ID NO: 694373 - RNA, 20 nt, Artificial Sequence
  Synthetic
gucagcuagaaaucaucaug

SEQ ID NO: 694374 - RNA, 20 nt, Artificial Sequence
  Synthetic
gcagcaugauauuuaucaug

SEQ ID NO: 694375 - RNA, 20 nt, Artificial Sequence
  Synthetic
gggauacuacuguacucaug

SEQ ID NO: 694376 - RNA, 20 nt, Artificial Sequence
  Synthetic
gcucauugaccugccucaug

SEQ ID NO: 694377 - RNA, 20 nt, Artificial Sequence
  Synthetic
gcucauuaguaugucucaug

SEQ ID NO: 694378 - RNA, 20 nt, Artificial Sequence
  Synthetic
gccaccugaaguaauucaug

SEQ ID NO: 694379 - RNA, 20 nt, Artificial Sequence
  Synthetic
gagagcuauaacuucagaug

SEQ ID NO: 694380 - RNA, 20 nt, Artificial Sequence
  Synthetic
gugaaaguagggacgagaug

SEQ ID NO: 694381 - RNA, 20 nt, Artificial Sequence
  Synthetic
gcuugauaccucuugagaug

SEQ ID NO: 694382 - RNA, 20 nt, Artificial Sequence
  Synthetic
ggaaaggagauuacuagaug

SEQ ID NO: 694383 - RNA, 20 nt, Artificial Sequence
  Synthetic
gcccaacaugugcuuagaug

SEQ ID NO: 694384 - RNA, 20 nt, Artificial Sequence
  Synthetic
gguuuuuacugugugcgaug

SEQ ID NO: 694385 - RNA, 20 nt, Artificial Sequence
  Synthetic
gauugaacuuacgagggaug

SEQ ID NO: 694386 - RNA, 20 nt, Artificial Sequence
  Synthetic
gucaagucaugcacuggaug

SEQ ID NO: 694387 - RNA, 20 nt, Artificial Sequence
  Synthetic
gaaacaccuuacucuggaug

SEQ ID NO: 694388 - RNA, 20 nt, Artificial Sequence
  Synthetic
guucaccucagggacugaug

SEQ ID NO: 694389 - RNA, 20 nt, Artificial Sequence
  Synthetic
gcaauuucagcuuauugaug

SEQ ID NO: 694390 - RNA, 20 nt, Artificial Sequence
  Synthetic
gaauacgaauuccaaauaug

SEQ ID NO: 694391 - RNA, 20 nt, Artificial Sequence
  Synthetic
gaccaacagccaaggauaug

SEQ ID NO: 694392 - RNA, 20 nt, Artificial Sequence
  Synthetic
gucagcauggugugacuaug

SEQ ID NO: 694393 - RNA, 20 nt, Artificial Sequence
  Synthetic
ggcaccugccaaacccuaug

SEQ ID NO: 694394 - RNA, 20 nt, Artificial Sequence
  Synthetic
gcuuuagaguaaacccuaug

SEQ ID NO: 694395 - RNA, 20 nt, Artificial Sequence
  Synthetic
gugcaauucaacuaaguaug

SEQ ID NO: 694396 - RNA, 20 nt, Artificial Sequence
  Synthetic
guaccacguuccucaguaug

SEQ ID NO: 694397 - RNA, 20 nt, Artificial Sequence
  Synthetic
gaauaagagacuuagguaug

SEQ ID NO: 694398 - RNA, 20 nt, Artificial Sequence
  Synthetic
gcaggaagccccacuuuaug

SEQ ID NO: 694399 - RNA, 20 nt, Artificial Sequence
  Synthetic
gaggguagaauagguuuaug

SEQ ID NO: 694400 - RNA, 20 nt, Artificial Sequence
  Synthetic
gucagaguacuaugcaacug

SEQ ID NO: 694401 - RNA, 20 nt, Artificial Sequence
  Synthetic
gugacggacaugacuaacug

SEQ ID NO: 694402 - RNA, 20 nt, Artificial Sequence
  Synthetic
gauuaccguagcgaacacug

SEQ ID NO: 694403 - RNA, 20 nt, Artificial Sequence
  Synthetic
guauaaggcugcaaccacug

SEQ ID NO: 694404 - RNA, 20 nt, Artificial Sequence
  Synthetic
gauauuuuguuccaccacug

SEQ ID NO: 694405 - RNA, 20 nt, Artificial Sequence
  Synthetic
ggcccuuuaauuacgcacug

SEQ ID NO: 694406 - RNA, 20 nt, Artificial Sequence
  Synthetic
ggcuaaucaaaucaucacug

SEQ ID NO: 694407 - RNA, 20 nt, Artificial Sequence
  Synthetic
gggguuucgucagaugacug

SEQ ID NO: 694408 - RNA, 20 nt, Artificial Sequence
  Synthetic
gagaguuggucgugugacug

SEQ ID NO: 694409 - RNA, 20 nt, Artificial Sequence
  Synthetic
ggguguuccauauuauacug

SEQ ID NO: 694410 - RNA, 20 nt, Artificial Sequence
  Synthetic
gacacaaggaguccuuacug

SEQ ID NO: 694411 - RNA, 20 nt, Artificial Sequence
  Synthetic
gcaagcugcccugcuuacug

SEQ ID NO: 694412 - RNA, 20 nt, Artificial Sequence
  Synthetic
gcaaccuccuccuugaccug

SEQ ID NO: 694413 - RNA, 20 nt, Artificial Sequence
  Synthetic
gacagguccuuuacuaccug

SEQ ID NO: 694414 - RNA, 20 nt, Artificial Sequence
  Synthetic
ggagcuaauagacacuccug

SEQ ID NO: 694415 - RNA, 20 nt, Artificial Sequence
  Synthetic
gguugguuguaaacuuccug

SEQ ID NO: 694416 - RNA, 20 nt, Artificial Sequence
  Synthetic
gucuuuuugacauguuccug

SEQ ID NO: 694417 - RNA, 20 nt, Artificial Sequence
  Synthetic
gaguuaauucugagcagcug

SEQ ID NO: 694418 - RNA, 20 nt, Artificial Sequence
  Synthetic
gaguucugauaagguagcug

SEQ ID NO: 694419 - RNA, 20 nt, Artificial Sequence
  Synthetic
ggugagccaacccaaugcug

SEQ ID NO: 694420 - RNA, 20 nt, Artificial Sequence
  Synthetic
ggcuuugugauaauaugcug

SEQ ID NO: 694421 - RNA, 20 nt, Artificial Sequence
  Synthetic
gauucuaaggucagaaucug

SEQ ID NO: 694422 - RNA, 20 nt, Artificial Sequence
  Synthetic
gaggcugccacgguaaucug

SEQ ID NO: 694423 - RNA, 20 nt, Artificial Sequence
  Synthetic
ggucuuuaaccuggcaucug

SEQ ID NO: 694424 - RNA, 20 nt, Artificial Sequence
  Synthetic
gggaguaauucgguacucug

SEQ ID NO: 694425 - RNA, 20 nt, Artificial Sequence
  Synthetic
gauuucagcgacccucucug

SEQ ID NO: 694426 - RNA, 20 nt, Artificial Sequence
  Synthetic
gaugguagcauaagcgucug

SEQ ID NO: 694427 - RNA, 20 nt, Artificial Sequence
  Synthetic
gugacccuacuaugauucug

SEQ ID NO: 694428 - RNA, 20 nt, Artificial Sequence
  Synthetic
gcaauaagaaccuaguucug

SEQ ID NO: 694429 - RNA, 20 nt, Artificial Sequence
  Synthetic
gauaguguccacauuuucug

SEQ ID NO: 694430 - RNA, 20 nt, Artificial Sequence
  Synthetic
gcacaugacaucgagaagug

SEQ ID NO: 694431 - RNA, 20 nt, Artificial Sequence
  Synthetic
gauguacuaucacagcagug

SEQ ID NO: 694432 - RNA, 20 nt, Artificial Sequence
  Synthetic
gcguaaaacacuucagagug

SEQ ID NO: 694433 - RNA, 20 nt, Artificial Sequence
  Synthetic
gcccaugggcuuugcgagug

SEQ ID NO: 694434 - RNA, 20 nt, Artificial Sequence
  Synthetic
ggguauuauugucuauagug

SEQ ID NO: 694435 - RNA, 20 nt, Artificial Sequence
  Synthetic
guguaaauuggaguauagug

SEQ ID NO: 694436 - RNA, 20 nt, Artificial Sequence
  Synthetic
gugcauaucuaacucccgug

SEQ ID NO: 694437 - RNA, 20 nt, Artificial Sequence
  Synthetic
gggaaccaaacccacucgug

SEQ ID NO: 694438 - RNA, 20 nt, Artificial Sequence
  Synthetic
gguuauaaguugagacggug

SEQ ID NO: 694439 - RNA, 20 nt, Artificial Sequence
  Synthetic
gugcuaaagggauaucggug

SEQ ID NO: 694440 - RNA, 20 nt, Artificial Sequence
  Synthetic
gcuauaacauccucggggug

SEQ ID NO: 694441 - RNA, 20 nt, Artificial Sequence
  Synthetic
gccccgaaaugguaguggug

SEQ ID NO: 694442 - RNA, 20 nt, Artificial Sequence
  Synthetic
ggauggaauacgucaaugug

SEQ ID NO: 694443 - RNA, 20 nt, Artificial Sequence
  Synthetic
guguagcauauaauaaugug

SEQ ID NO: 694444 - RNA, 20 nt, Artificial Sequence
  Synthetic
guaagcauugucaguaugug

SEQ ID NO: 694445 - RNA, 20 nt, Artificial Sequence
  Synthetic
gucagucaaaaguccgugug

SEQ ID NO: 694446 - RNA, 20 nt, Artificial Sequence
  Synthetic
gaagcucuugugagggugug

SEQ ID NO: 694447 - RNA, 20 nt, Artificial Sequence
  Synthetic
ggaacaggaagucaauugug

SEQ ID NO: 694448 - RNA, 20 nt, Artificial Sequence
  Synthetic
gcuuuuacaaggagauugug

SEQ ID NO: 694449 - RNA, 20 nt, Artificial Sequence
  Synthetic
gaagcaauuuacaacuugug

SEQ ID NO: 694450 - RNA, 20 nt, Artificial Sequence
  Synthetic
gccgauuguucucccuugug

SEQ ID NO: 694451 - RNA, 20 nt, Artificial Sequence
  Synthetic
gaaucuuuucggcucuugug

SEQ ID NO: 694452 - RNA, 20 nt, Artificial Sequence
  Synthetic
gcucucauggguaaaaauug

SEQ ID NO: 694453 - RNA, 20 nt, Artificial Sequence
  Synthetic
gugggccauauguauaauug

SEQ ID NO: 694454 - RNA, 20 nt, Artificial Sequence
  Synthetic
gcagguaucaacguuaauug

SEQ ID NO: 694455 - RNA, 20 nt, Artificial Sequence
  Synthetic
gaccaaaaguuucaacauug

SEQ ID NO: 694456 - RNA, 20 nt, Artificial Sequence
  Synthetic
guguaaguacagaaccauug

SEQ ID NO: 694457 - RNA, 20 nt, Artificial Sequence
  Synthetic
gcagaaauuaagucccauug

SEQ ID NO: 694458 - RNA, 20 nt, Artificial Sequence
  Synthetic
gaaaguuuguugcugcauug

SEQ ID NO: 694459 - RNA, 20 nt, Artificial Sequence
  Synthetic
gaauaugagcuaccucauug

SEQ ID NO: 694460 - RNA, 20 nt, Artificial Sequence
  Synthetic
gagcaggucacaauucauug

SEQ ID NO: 694461 - RNA, 20 nt, Artificial Sequence
  Synthetic
gguaaucguaaaucagauug

SEQ ID NO: 694462 - RNA, 20 nt, Artificial Sequence
  Synthetic
gcauucuuuuacccugauug

SEQ ID NO: 694463 - RNA, 20 nt, Artificial Sequence
  Synthetic
gugcagcaggaacuugauug

SEQ ID NO: 694464 - RNA, 20 nt, Artificial Sequence
  Synthetic
gaauggccauguaaauauug

SEQ ID NO: 694465 - RNA, 20 nt, Artificial Sequence
  Synthetic
guccaauaaaguagcuauug

SEQ ID NO: 694466 - RNA, 20 nt, Artificial Sequence
  Synthetic
gcaccucgaacauuuuauug

SEQ ID NO: 694467 - RNA, 20 nt, Artificial Sequence
  Synthetic
gcacagcgggaacacacuug

SEQ ID NO: 694468 - RNA, 20 nt, Artificial Sequence
  Synthetic
gucccgugacaauuuacuug

SEQ ID NO: 694469 - RNA, 20 nt, Artificial Sequence
  Synthetic
gaggaggaauccuuagcuug

SEQ ID NO: 694470 - RNA, 20 nt, Artificial Sequence
  Synthetic
gcaccaccauaaaaaucuug

SEQ ID NO: 694471 - RNA, 20 nt, Artificial Sequence
  Synthetic
gcacccagauaagcaucuug

SEQ ID NO: 694472 - RNA, 20 nt, Artificial Sequence
  Synthetic
guaugcccucuggauucuug

SEQ ID NO: 694473 - RNA, 20 nt, Artificial Sequence
  Synthetic
gcuuauuagcccaugaguug

SEQ ID NO: 694474 - RNA, 20 nt, Artificial Sequence
  Synthetic
gacagauauaacucccguug

SEQ ID NO: 694475 - RNA, 20 nt, Artificial Sequence
  Synthetic
gaaagaauaagaauucguug

SEQ ID NO: 694476 - RNA, 20 nt, Artificial Sequence
  Synthetic
guggcuguacuacaugguug

SEQ ID NO: 694477 - RNA, 20 nt, Artificial Sequence
  Synthetic
gacaacacuugaggugguug

SEQ ID NO: 694478 - RNA, 20 nt, Artificial Sequence
  Synthetic
gguugaaagcuauuugguug

SEQ ID NO: 694479 - RNA, 20 nt, Artificial Sequence
  Synthetic
guuuccaagugaccauguug

SEQ ID NO: 694480 - RNA, 20 nt, Artificial Sequence
  Synthetic
guauacugcugugcauguug

SEQ ID NO: 694481 - RNA, 20 nt, Artificial Sequence
  Synthetic
gugaugagacccucauguug

SEQ ID NO: 694482 - RNA, 20 nt, Artificial Sequence
  Synthetic
gagguuggcaaacaguguug

SEQ ID NO: 694483 - RNA, 20 nt, Artificial Sequence
  Synthetic
ggcucuaaccagcccauuug

SEQ ID NO: 694484 - RNA, 20 nt, Artificial Sequence
  Synthetic
guacaaaaugacccgauuug

SEQ ID NO: 694485 - RNA, 20 nt, Artificial Sequence
  Synthetic
ggccuaaucaaacagcuuug

SEQ ID NO: 694486 - RNA, 20 nt, Artificial Sequence
  Synthetic
ggacugucuaacacaguuug

SEQ ID NO: 694487 - RNA, 20 nt, Artificial Sequence
  Synthetic
gguugcgugggaguauuuug

SEQ ID NO: 694488 - RNA, 20 nt, Artificial Sequence
  Synthetic
gugaucgcuuaguggcaaau

SEQ ID NO: 694489 - RNA, 20 nt, Artificial Sequence
  Synthetic
guggcagccaguaugcaaau

SEQ ID NO: 694490 - RNA, 20 nt, Artificial Sequence
  Synthetic
guccccuuauacucucaaau

SEQ ID NO: 694491 - RNA, 20 nt, Artificial Sequence
  Synthetic
gaggcccuggaucaagaaau

SEQ ID NO: 694492 - RNA, 20 nt, Artificial Sequence
  Synthetic
gcuauaauagccugagaaau

SEQ ID NO: 694493 - RNA, 20 nt, Artificial Sequence
  Synthetic
guaccacacucccaguaaau

SEQ ID NO: 694494 - RNA, 20 nt, Artificial Sequence
  Synthetic
gauuguccaagauacacaau

SEQ ID NO: 694495 - RNA, 20 nt, Artificial Sequence
  Synthetic
guuuuagccacguagacaau

SEQ ID NO: 694496 - RNA, 20 nt, Artificial Sequence
  Synthetic
gaaccacccaauuacccaau

SEQ ID NO: 694497 - RNA, 20 nt, Artificial Sequence
  Synthetic
gcggcaccggcaacugcaau

SEQ ID NO: 694498 - RNA, 20 nt, Artificial Sequence
  Synthetic
gguuacuaauauccaucaau

SEQ ID NO: 694499 - RNA, 20 nt, Artificial Sequence
  Synthetic
gccacgacucuucugucaau

SEQ ID NO: 694500 - RNA, 20 nt, Artificial Sequence
  Synthetic
guacaauuucacaauucaau

SEQ ID NO: 694501 - RNA, 20 nt, Artificial Sequence
  Synthetic
gcguuccuaaguuuuucaau

SEQ ID NO: 694502 - RNA, 20 nt, Artificial Sequence
  Synthetic
gcuacagcauuccaaagaau

SEQ ID NO: 694503 - RNA, 20 nt, Artificial Sequence
  Synthetic
gaguaacuagccagaagaau

SEQ ID NO: 694504 - RNA, 20 nt, Artificial Sequence
  Synthetic
gauuacucuggcugaagaau

SEQ ID NO: 694505 - RNA, 20 nt, Artificial Sequence
  Synthetic
gaguuaccuauuugaagaau

SEQ ID NO: 694506 - RNA, 20 nt, Artificial Sequence
  Synthetic
gucuuuuaguauagcagaau

SEQ ID NO: 694507 - RNA, 20 nt, Artificial Sequence
  Synthetic
ggugcaacucccggcagaau

SEQ ID NO: 694508 - RNA, 20 nt, Artificial Sequence
  Synthetic
guaugcucuguacucagaau

SEQ ID NO: 694509 - RNA, 20 nt, Artificial Sequence
  Synthetic
gccccaagucggccgagaau

SEQ ID NO: 694510 - RNA, 20 nt, Artificial Sequence
  Synthetic
guaacuacacauaaacgaau

SEQ ID NO: 694511 - RNA, 20 nt, Artificial Sequence
  Synthetic
gaaugcaauuacccgggaau

SEQ ID NO: 694512 - RNA, 20 nt, Artificial Sequence
  Synthetic
gagcuaucacguaggggaau

SEQ ID NO: 694513 - RNA, 20 nt, Artificial Sequence
  Synthetic
ggcucugcgcccaguugaau

SEQ ID NO: 694514 - RNA, 20 nt, Artificial Sequence
  Synthetic
gguaaaccuagaguuugaau

SEQ ID NO: 694515 - RNA, 20 nt, Artificial Sequence
  Synthetic
gaggacuggggcuaaauaau

SEQ ID NO: 694516 - RNA, 20 nt, Artificial Sequence
  Synthetic
gcacauggccuacggauaau

SEQ ID NO: 694517 - RNA, 20 nt, Artificial Sequence
  Synthetic
gcaguguuuacgaauauaau

SEQ ID NO: 694518 - RNA, 20 nt, Artificial Sequence
  Synthetic
ggagacgaauagauuauaau

SEQ ID NO: 694519 - RNA, 20 nt, Artificial Sequence
  Synthetic
gcucauuacugcucacuaau

SEQ ID NO: 694520 - RNA, 20 nt, Artificial Sequence
  Synthetic
ggaaggcauguacuacuaau

SEQ ID NO: 694521 - RNA, 20 nt, Artificial Sequence
  Synthetic
gugucauugaaagaccuaau

SEQ ID NO: 694522 - RNA, 20 nt, Artificial Sequence
  Synthetic
guacaauacuacuugcuaau

SEQ ID NO: 694523 - RNA, 20 nt, Artificial Sequence
  Synthetic
gguagggcgacagaucuaau

SEQ ID NO: 694524 - RNA, 20 nt, Artificial Sequence
  Synthetic
ggggagggauuacuucuaau

SEQ ID NO: 694525 - RNA, 20 nt, Artificial Sequence
  Synthetic
guuacugcauagggaguaau

SEQ ID NO: 694526 - RNA, 20 nt, Artificial Sequence
  Synthetic
guuagagucggcaguguaau

SEQ ID NO: 694527 - RNA, 20 nt, Artificial Sequence
  Synthetic
guugaaaaaggguuuguaau

SEQ ID NO: 694528 - RNA, 20 nt, Artificial Sequence
  Synthetic
gcauggccuggaccauuaau

SEQ ID NO: 694529 - RNA, 20 nt, Artificial Sequence
  Synthetic
gguacuuaucauugcuuaau

SEQ ID NO: 694530 - RNA, 20 nt, Artificial Sequence
  Synthetic
ggggauauucaaagcaacau

SEQ ID NO: 694531 - RNA, 20 nt, Artificial Sequence
  Synthetic
ggaggguguauuaauaacau

SEQ ID NO: 694532 - RNA, 20 nt, Artificial Sequence
  Synthetic
guaggcuguuguuaccacau

SEQ ID NO: 694533 - RNA, 20 nt, Artificial Sequence
  Synthetic
ggucaaguuucaaaagacau

SEQ ID NO: 694534 - RNA, 20 nt, Artificial Sequence
  Synthetic
gacuuuaucuuuagcuacau

SEQ ID NO: 694535 - RNA, 20 nt, Artificial Sequence
  Synthetic
gagcaaauaguuaaguacau

SEQ ID NO: 694536 - RNA, 20 nt, Artificial Sequence
  Synthetic
guguuuugcacgcauuacau

SEQ ID NO: 694537 - RNA, 20 nt, Artificial Sequence
  Synthetic
gucugggugauggucaccau

SEQ ID NO: 694538 - RNA, 20 nt, Artificial Sequence
  Synthetic
gcaauucaacauuagaccau

SEQ ID NO: 694539 - RNA, 20 nt, Artificial Sequence
  Synthetic
gccccacucgcaaagcccau

SEQ ID NO: 694540 - RNA, 20 nt, Artificial Sequence
  Synthetic
gagcacagaucuacucccau

SEQ ID NO: 694541 - RNA, 20 nt, Artificial Sequence
  Synthetic
gugagauaacguacucccau

SEQ ID NO: 694542 - RNA, 20 nt, Artificial Sequence
  Synthetic
gcuauggggucuguucccau

SEQ ID NO: 694543 - RNA, 20 nt, Artificial Sequence
  Synthetic
gaguuauguaucuuugccau

SEQ ID NO: 694544 - RNA, 20 nt, Artificial Sequence
  Synthetic
gguaguaguucucaaagcau

SEQ ID NO: 694545 - RNA, 20 nt, Artificial Sequence
  Synthetic
gucauccugagucuuagcau

SEQ ID NO: 694546 - RNA, 20 nt, Artificial Sequence
  Synthetic
gucugauucagaucaugcau

SEQ ID NO: 694547 - RNA, 20 nt, Artificial Sequence
  Synthetic
gcucaacuagcuugcugcau

SEQ ID NO: 694548 - RNA, 20 nt, Artificial Sequence
  Synthetic
gguggguuuagagggugcau

SEQ ID NO: 694549 - RNA, 20 nt, Artificial Sequence
  Synthetic
gguaaugaaacugacaucau

SEQ ID NO: 694550 - RNA, 20 nt, Artificial Sequence
  Synthetic
gcacguauaaugaguaucau

SEQ ID NO: 694551 - RNA, 20 nt, Artificial Sequence
  Synthetic
gaggcuaucacugguaucau

SEQ ID NO: 694552 - RNA, 20 nt, Artificial Sequence
  Synthetic
gguacgugucauccacucau

SEQ ID NO: 694553 - RNA, 20 nt, Artificial Sequence
  Synthetic
gucuaccacaauaugcucau

SEQ ID NO: 694554 - RNA, 20 nt, Artificial Sequence
  Synthetic
gcggcauucuaagcucucau

SEQ ID NO: 694555 - RNA, 20 nt, Artificial Sequence
  Synthetic
gcugucugagggccagucau

SEQ ID NO: 694556 - RNA, 20 nt, Artificial Sequence
  Synthetic
gcagugcucucucuguucau

SEQ ID NO: 694557 - RNA, 20 nt, Artificial Sequence
  Synthetic
gagcccuucggggaaaagau

SEQ ID NO: 694558 - RNA, 20 nt, Artificial Sequence
  Synthetic
guucccuaggcuuuuaagau

SEQ ID NO: 694559 - RNA, 20 nt, Artificial Sequence
  Synthetic
gacugguugaaauugcagau

SEQ ID NO: 694560 - RNA, 20 nt, Artificial Sequence
  Synthetic
gauaccguguacguucagau

SEQ ID NO: 694561 - RNA, 20 nt, Artificial Sequence
  Synthetic
gucccauuguggaaugagau

SEQ ID NO: 694562 - RNA, 20 nt, Artificial Sequence
  Synthetic
guaacacaauuccauuagau

SEQ ID NO: 694563 - RNA, 20 nt, Artificial Sequence
  Synthetic
guccaacacuaugauccgau

SEQ ID NO: 694564 - RNA, 20 nt, Artificial Sequence
  Synthetic
ggaaggcuguuagucaggau

SEQ ID NO: 694565 - RNA, 20 nt, Artificial Sequence
  Synthetic
guaauauacaugcugaggau

SEQ ID NO: 694566 - RNA, 20 nt, Artificial Sequence
  Synthetic
gggaacgugaucucugggau

SEQ ID NO: 694567 - RNA, 20 nt, Artificial Sequence
  Synthetic
gccuccaucacacaauggau

SEQ ID NO: 694568 - RNA, 20 nt, Artificial Sequence
  Synthetic
gaaucuauuaugagauggau

SEQ ID NO: 694569 - RNA, 20 nt, Artificial Sequence
  Synthetic
gacauaagaacucucuggau

SEQ ID NO: 694570 - RNA, 20 nt, Artificial Sequence
  Synthetic
ggcaaucagauuucuuggau

SEQ ID NO: 694571 - RNA, 20 nt, Artificial Sequence
  Synthetic
ggucauacugaaacaaugau

SEQ ID NO: 694572 - RNA, 20 nt, Artificial Sequence
  Synthetic
guuuacaauagguuaaugau

SEQ ID NO: 694573 - RNA, 20 nt, Artificial Sequence
  Synthetic
guaccugagcaagagaugau

SEQ ID NO: 694574 - RNA, 20 nt, Artificial Sequence
  Synthetic
gcuaaggcacaugcccugau

SEQ ID NO: 694575 - RNA, 20 nt, Artificial Sequence
  Synthetic
gcuuccauggauauucugau

SEQ ID NO: 694576 - RNA, 20 nt, Artificial Sequence
  Synthetic
ggcugauagacgaaagugau

SEQ ID NO: 694577 - RNA, 20 nt, Artificial Sequence
  Synthetic
gugugaguaacagaagugau

SEQ ID NO: 694578 - RNA, 20 nt, Artificial Sequence
  Synthetic
gauguagacguagaagugau

SEQ ID NO: 694579 - RNA, 20 nt, Artificial Sequence
  Synthetic
gacuuagguccucaauugau

SEQ ID NO: 694580 - RNA, 20 nt, Artificial Sequence
  Synthetic
gggugcagcaggaacuugau

SEQ ID NO: 694581 - RNA, 20 nt, Artificial Sequence
  Synthetic
ggcugcacguauugguugau

SEQ ID NO: 694582 - RNA, 20 nt, Artificial Sequence
  Synthetic
gcuucaugaaugcuuuugau

SEQ ID NO: 694583 - RNA, 20 nt, Artificial Sequence
  Synthetic
gcgcaacacuacagaaauau

SEQ ID NO: 694584 - RNA, 20 nt, Artificial Sequence
  Synthetic
gcuauagacuugcgcaauau

SEQ ID NO: 694585 - RNA, 20 nt, Artificial Sequence
  Synthetic
gucacguucauuuagaauau

SEQ ID NO: 694586 - RNA, 20 nt, Artificial Sequence
  Synthetic
gaaaucguagaaaugaauau

SEQ ID NO: 694587 - RNA, 20 nt, Artificial Sequence
  Synthetic
gcauugaacacagauaauau

SEQ ID NO: 694588 - RNA, 20 nt, Artificial Sequence
  Synthetic
gcaucacuguguuauaauau

SEQ ID NO: 694589 - RNA, 20 nt, Artificial Sequence
  Synthetic
gccgaacaggccauacauau

SEQ ID NO: 694590 - RNA, 20 nt, Artificial Sequence
  Synthetic
gcccaaugcuacugccauau

SEQ ID NO: 694591 - RNA, 20 nt, Artificial Sequence
  Synthetic
gaagguucaugaaugcauau

SEQ ID NO: 694592 - RNA, 20 nt, Artificial Sequence
  Synthetic
gguauuggauauggucauau

SEQ ID NO: 694593 - RNA, 20 nt, Artificial Sequence
  Synthetic
gagcuguccuauuuagauau

SEQ ID NO: 694594 - RNA, 20 nt, Artificial Sequence
  Synthetic
guugcaugacaacgggauau

SEQ ID NO: 694595 - RNA, 20 nt, Artificial Sequence
  Synthetic
guaaacgcugggcaugauau

SEQ ID NO: 694596 - RNA, 20 nt, Artificial Sequence
  Synthetic
gacauggucuaacuugauau

SEQ ID NO: 694597 - RNA, 20 nt, Artificial Sequence
  Synthetic
gugaguuauuagcuugauau

SEQ ID NO: 694598 - RNA, 20 nt, Artificial Sequence
  Synthetic
guucuauuccaguaauauau

SEQ ID NO: 694599 - RNA, 20 nt, Artificial Sequence
  Synthetic
guacagcccucgguguauau

SEQ ID NO: 694600 - RNA, 20 nt, Artificial Sequence
  Synthetic
gcuccuggacugaccacuau

SEQ ID NO: 694601 - RNA, 20 nt, Artificial Sequence
  Synthetic
gggucaaguagaaugccuau

SEQ ID NO: 694602 - RNA, 20 nt, Artificial Sequence
  Synthetic
gaaagggcauauagagcuau

SEQ ID NO: 694603 - RNA, 20 nt, Artificial Sequence
  Synthetic
guaaucuguaggauggcuau

SEQ ID NO: 694604 - RNA, 20 nt, Artificial Sequence
  Synthetic
gaggacaacagaccugcuau

SEQ ID NO: 694605 - RNA, 20 nt, Artificial Sequence
  Synthetic
gaagcaacgagcuuugcuau

SEQ ID NO: 694606 - RNA, 20 nt, Artificial Sequence
  Synthetic
guaauacccuuaccaucuau

SEQ ID NO: 694607 - RNA, 20 nt, Artificial Sequence
  Synthetic
gggcuuaacugaauaucuau

SEQ ID NO: 694608 - RNA, 20 nt, Artificial Sequence
  Synthetic
ggcagauaucuuuacaguau

SEQ ID NO: 694609 - RNA, 20 nt, Artificial Sequence
  Synthetic
gaccauuaacucucuaguau

SEQ ID NO: 694610 - RNA, 20 nt, Artificial Sequence
  Synthetic
guucccaggaauuuucguau

SEQ ID NO: 694611 - RNA, 20 nt, Artificial Sequence
  Synthetic
gaucagacuucucuggguau

SEQ ID NO: 694612 - RNA, 20 nt, Artificial Sequence
  Synthetic
gcccggcugccaauauguau

SEQ ID NO: 694613 - RNA, 20 nt, Artificial Sequence
  Synthetic
guucaguggacaacuuguau

SEQ ID NO: 694614 - RNA, 20 nt, Artificial Sequence
  Synthetic
ggccuauaaaugaagcuuau

SEQ ID NO: 694615 - RNA, 20 nt, Artificial Sequence
  Synthetic
gugacgaauuauugauuuau

SEQ ID NO: 694616 - RNA, 20 nt, Artificial Sequence
  Synthetic
gacccaagguagcuguuuau

SEQ ID NO: 694617 - RNA, 20 nt, Artificial Sequence
  Synthetic
gaaccauagaaauccaaacu

SEQ ID NO: 694618 - RNA, 20 nt, Artificial Sequence
  Synthetic
guuuaaaccugagcgaaacu

SEQ ID NO: 694619 - RNA, 20 nt, Artificial Sequence
  Synthetic
gagaugaugugggaucaacu

SEQ ID NO: 694620 - RNA, 20 nt, Artificial Sequence
  Synthetic
gcugacuugccaccucaacu

SEQ ID NO: 694621 - RNA, 20 nt, Artificial Sequence
  Synthetic
gagacuaagcucuaagaacu

SEQ ID NO: 694622 - RNA, 20 nt, Artificial Sequence
  Synthetic
gguccauaauaaggugaacu

SEQ ID NO: 694623 - RNA, 20 nt, Artificial Sequence
  Synthetic
ggauuacagcacugauaacu

SEQ ID NO: 694624 - RNA, 20 nt, Artificial Sequence
  Synthetic
gggccuguaguuugauaacu

SEQ ID NO: 694625 - RNA, 20 nt, Artificial Sequence
  Synthetic
gugccuacuccuguauaacu

SEQ ID NO: 694626 - RNA, 20 nt, Artificial Sequence
  Synthetic
gugucauaccauaacuaacu

SEQ ID NO: 694627 - RNA, 20 nt, Artificial Sequence
  Synthetic
gucuuauuuccuguuuaacu

SEQ ID NO: 694628 - RNA, 20 nt, Artificial Sequence
  Synthetic
gacuagggagauuauacacu

SEQ ID NO: 694629 - RNA, 20 nt, Artificial Sequence
  Synthetic
gaagacauguuguaaccacu

SEQ ID NO: 694630 - RNA, 20 nt, Artificial Sequence
  Synthetic
gcagggauguuuguaccacu

SEQ ID NO: 694631 - RNA, 20 nt, Artificial Sequence
  Synthetic
gaaguuaauccguccccacu

SEQ ID NO: 694632 - RNA, 20 nt, Artificial Sequence
  Synthetic
gucucugcuggcaaagcacu

SEQ ID NO: 694633 - RNA, 20 nt, Artificial Sequence
  Synthetic
gauuagcauacaaccgcacu

SEQ ID NO: 694634 - RNA, 20 nt, Artificial Sequence
  Synthetic
guugccaucugagaaagacu

SEQ ID NO: 694635 - RNA, 20 nt, Artificial Sequence
  Synthetic
gucgaaggugcagccagacu

SEQ ID NO: 694636 - RNA, 20 nt, Artificial Sequence
  Synthetic
gcuccaccucuaaaaugacu

SEQ ID NO: 694637 - RNA, 20 nt, Artificial Sequence
  Synthetic
gcuaaccaaauuacaugacu

SEQ ID NO: 694638 - RNA, 20 nt, Artificial Sequence
  Synthetic
gucucauguuggagaugacu

SEQ ID NO: 694639 - RNA, 20 nt, Artificial Sequence
  Synthetic
gccaagucuucauagauacu

SEQ ID NO: 694640 - RNA, 20 nt, Artificial Sequence
  Synthetic
gcugacgcccacuggauacu

SEQ ID NO: 694641 - RNA, 20 nt, Artificial Sequence
  Synthetic
gcguauguagggcuuauacu

SEQ ID NO: 694642 - RNA, 20 nt, Artificial Sequence
  Synthetic
guauauagccaacugcuacu

SEQ ID NO: 694643 - RNA, 20 nt, Artificial Sequence
  Synthetic
ggaggagaugcuuugguacu

SEQ ID NO: 694644 - RNA, 20 nt, Artificial Sequence
  Synthetic
guucuuaugucuacuguacu

SEQ ID NO: 694645 - RNA, 20 nt, Artificial Sequence
  Synthetic
gcucuguucaugccauuacu

SEQ ID NO: 694646 - RNA, 20 nt, Artificial Sequence
  Synthetic
guagugugcaggauauuacu

SEQ ID NO: 694647 - RNA, 20 nt, Artificial Sequence
  Synthetic
gacguccuaucucacuuacu

SEQ ID NO: 694648 - RNA, 20 nt, Artificial Sequence
  Synthetic
gugguguagguauaguuacu

SEQ ID NO: 694649 - RNA, 20 nt, Artificial Sequence
  Synthetic
gugucccgugacaauuuacu

SEQ ID NO: 694650 - RNA, 20 nt, Artificial Sequence
  Synthetic
gcauucgugaaagaaaaccu

SEQ ID NO: 694651 - RNA, 20 nt, Artificial Sequence
  Synthetic
ggcucgucacgagaaaaccu

SEQ ID NO: 694652 - RNA, 20 nt, Artificial Sequence
  Synthetic
ggacggagcaguuugcaccu

SEQ ID NO: 694653 - RNA, 20 nt, Artificial Sequence
  Synthetic
gucaguaacgguggagaccu

SEQ ID NO: 694654 - RNA, 20 nt, Artificial Sequence
  Synthetic
gauacauacgugggauaccu

SEQ ID NO: 694655 - RNA, 20 nt, Artificial Sequence
  Synthetic
ggacagguccuuuacuaccu

SEQ ID NO: 694656 - RNA, 20 nt, Artificial Sequence
  Synthetic
ggcccaauaaacagcuaccu

SEQ ID NO: 694657 - RNA, 20 nt, Artificial Sequence
  Synthetic
guugaggucuuugucuaccu

SEQ ID NO: 694658 - RNA, 20 nt, Artificial Sequence
  Synthetic
ggaguauagaaacaguaccu

SEQ ID NO: 694659 - RNA, 20 nt, Artificial Sequence
  Synthetic
ggagacauuccggaguaccu

SEQ ID NO: 694660 - RNA, 20 nt, Artificial Sequence
  Synthetic
guugucacuacuuauuaccu

SEQ ID NO: 694661 - RNA, 20 nt, Artificial Sequence
  Synthetic
gauagaguuucaguaacccu

SEQ ID NO: 694662 - RNA, 20 nt, Artificial Sequence
  Synthetic
ggguucacucagaagacccu

SEQ ID NO: 694663 - RNA, 20 nt, Artificial Sequence
  Synthetic
gucagucugggacugacccu

SEQ ID NO: 694664 - RNA, 20 nt, Artificial Sequence
  Synthetic
gagucuuuuaauccaccccu

SEQ ID NO: 694665 - RNA, 20 nt, Artificial Sequence
  Synthetic
ggauacucagggaaggcccu

SEQ ID NO: 694666 - RNA, 20 nt, Artificial Sequence
  Synthetic
gucacuggagcuuuaucccu

SEQ ID NO: 694667 - RNA, 20 nt, Artificial Sequence
  Synthetic
gcugcagguuuucagucccu

SEQ ID NO: 694668 - RNA, 20 nt, Artificial Sequence
  Synthetic
gucauaaauugaauuagccu

SEQ ID NO: 694669 - RNA, 20 nt, Artificial Sequence
  Synthetic
guguucaaagcccuuagccu

SEQ ID NO: 694670 - RNA, 20 nt, Artificial Sequence
  Synthetic
gauaagaauuaguacggccu

SEQ ID NO: 694671 - RNA, 20 nt, Artificial Sequence
  Synthetic
guauccauaacuuccggccu

SEQ ID NO: 694672 - RNA, 20 nt, Artificial Sequence
  Synthetic
gcaagguugcuuaguggccu

SEQ ID NO: 694673 - RNA, 20 nt, Artificial Sequence
  Synthetic
gggcuuugggcauacugccu

SEQ ID NO: 694674 - RNA, 20 nt, Artificial Sequence
  Synthetic
gagcaauggggcuauugccu

SEQ ID NO: 694675 - RNA, 20 nt, Artificial Sequence
  Synthetic
gguaagauauuaaagauccu

SEQ ID NO: 694676 - RNA, 20 nt, Artificial Sequence
  Synthetic
gguacuguuucuauacuccu

SEQ ID NO: 694677 - RNA, 20 nt, Artificial Sequence
  Synthetic
gaguucauuuaagaucuccu

SEQ ID NO: 694678 - RNA, 20 nt, Artificial Sequence
  Synthetic
gcaaauuuguugagaguccu

SEQ ID NO: 694679 - RNA, 20 nt, Artificial Sequence
  Synthetic
gcucuuuccgcuaggguccu

SEQ ID NO: 694680 - RNA, 20 nt, Artificial Sequence
  Synthetic
gcauuugcgcaauuguuccu

SEQ ID NO: 694681 - RNA, 20 nt, Artificial Sequence
  Synthetic
gguaacacacacgcaaagcu

SEQ ID NO: 694682 - RNA, 20 nt, Artificial Sequence
  Synthetic
gagucacaggugacacagcu

SEQ ID NO: 694683 - RNA, 20 nt, Artificial Sequence
  Synthetic
gcaauucuuagguaccagcu

SEQ ID NO: 694684 - RNA, 20 nt, Artificial Sequence
  Synthetic
gaagucgucuggaggcagcu

SEQ ID NO: 694685 - RNA, 20 nt, Artificial Sequence
  Synthetic
gauucuauagcuacagagcu

SEQ ID NO: 694686 - RNA, 20 nt, Artificial Sequence
  Synthetic
ggacacauugugauggagcu

SEQ ID NO: 694687 - RNA, 20 nt, Artificial Sequence
  Synthetic
gacaugagucagaaguagcu

SEQ ID NO: 694688 - RNA, 20 nt, Artificial Sequence
  Synthetic
gugucacaauuugcguagcu

SEQ ID NO: 694689 - RNA, 20 nt, Artificial Sequence
  Synthetic
gccccaucuccucuuuagcu

SEQ ID NO: 694690 - RNA, 20 nt, Artificial Sequence
  Synthetic
guuuagggguggguugcgcu

SEQ ID NO: 694691 - RNA, 20 nt, Artificial Sequence
  Synthetic
gcaguauugagcaagaggcu

SEQ ID NO: 694692 - RNA, 20 nt, Artificial Sequence
  Synthetic
gacgcagccauucgacggcu

SEQ ID NO: 694693 - RNA, 20 nt, Artificial Sequence
  Synthetic
gauaaaauguucucucggcu

SEQ ID NO: 694694 - RNA, 20 nt, Artificial Sequence
  Synthetic
gaacggucaguuuaggggcu

SEQ ID NO: 694695 - RNA, 20 nt, Artificial Sequence
  Synthetic
gugugcaagguauuggggcu

SEQ ID NO: 694696 - RNA, 20 nt, Artificial Sequence
  Synthetic
gaagaccgguaaagugggcu

SEQ ID NO: 694697 - RNA, 20 nt, Artificial Sequence
  Synthetic
ggauugagagccuaauggcu

SEQ ID NO: 694698 - RNA, 20 nt, Artificial Sequence
  Synthetic
gcucaguaucuuauguggcu

SEQ ID NO: 694699 - RNA, 20 nt, Artificial Sequence
  Synthetic
gaaaggauucuuauguggcu

SEQ ID NO: 694700 - RNA, 20 nt, Artificial Sequence
  Synthetic
ggauugggauuauagaugcu

SEQ ID NO: 694701 - RNA, 20 nt, Artificial Sequence
  Synthetic
guggucauauugccagugcu

SEQ ID NO: 694702 - RNA, 20 nt, Artificial Sequence
  Synthetic
gccuaaaaagaggaggugcu

SEQ ID NO: 694703 - RNA, 20 nt, Artificial Sequence
  Synthetic
gucaaaaucaagcaauugcu

SEQ ID NO: 694704 - RNA, 20 nt, Artificial Sequence
  Synthetic
guucauuagacaaacaaucu

SEQ ID NO: 694705 - RNA, 20 nt, Artificial Sequence
  Synthetic
ggagugccccauaauaaucu

SEQ ID NO: 694706 - RNA, 20 nt, Artificial Sequence
  Synthetic
guaagaacaccuaaacaucu

SEQ ID NO: 694707 - RNA, 20 nt, Artificial Sequence
  Synthetic
gaaaggacuuaaguccaucu

SEQ ID NO: 694708 - RNA, 20 nt, Artificial Sequence
  Synthetic
gcuuccgggcaauaucaucu

SEQ ID NO: 694709 - RNA, 20 nt, Artificial Sequence
  Synthetic
ggugguagauuagcucaucu

SEQ ID NO: 694710 - RNA, 20 nt, Artificial Sequence
  Synthetic
gccucgacgcugugucaucu

SEQ ID NO: 694711 - RNA, 20 nt, Artificial Sequence
  Synthetic
gggcuauaaaccaaugaucu

SEQ ID NO: 694712 - RNA, 20 nt, Artificial Sequence
  Synthetic
gcucuugagucugguuaucu

SEQ ID NO: 694713 - RNA, 20 nt, Artificial Sequence
  Synthetic
gaggaagaugcuguaacucu

SEQ ID NO: 694714 - RNA, 20 nt, Artificial Sequence
  Synthetic
gagcuaaaucaagaaccucu

SEQ ID NO: 694715 - RNA, 20 nt, Artificial Sequence
  Synthetic
guuacaaggcauuggccucu

SEQ ID NO: 694716 - RNA, 20 nt, Artificial Sequence
  Synthetic
gaaagcggagguagggcucu

SEQ ID NO: 694717 - RNA, 20 nt, Artificial Sequence
  Synthetic
gagacgauaagggagucucu

SEQ ID NO: 694718 - RNA, 20 nt, Artificial Sequence
  Synthetic
ggcuguuuauugaucagucu

SEQ ID NO: 694719 - RNA, 20 nt, Artificial Sequence
  Synthetic
gauccucugaaauggggucu

SEQ ID NO: 694720 - RNA, 20 nt, Artificial Sequence
  Synthetic
gguacuaugauagagugucu

SEQ ID NO: 694721 - RNA, 20 nt, Artificial Sequence
  Synthetic
guacguggaaaaccaauucu

SEQ ID NO: 694722 - RNA, 20 nt, Artificial Sequence
  Synthetic
ggaaacaacguugguauucu

SEQ ID NO: 694723 - RNA, 20 nt, Artificial Sequence
  Synthetic
gaugagcggaggagacuucu

SEQ ID NO: 694724 - RNA, 20 nt, Artificial Sequence
  Synthetic
gcuaggguguacuaucuucu

SEQ ID NO: 694725 - RNA, 20 nt, Artificial Sequence
  Synthetic
gccacuugauguuaucuucu

SEQ ID NO: 694726 - RNA, 20 nt, Artificial Sequence
  Synthetic
gaacuugguagcacucuucu

SEQ ID NO: 694727 - RNA, 20 nt, Artificial Sequence
  Synthetic
gaugucauuuaaucaguucu

SEQ ID NO: 694728 - RNA, 20 nt, Artificial Sequence
  Synthetic
gguuuuauauccaauguucu

SEQ ID NO: 694729 - RNA, 20 nt, Artificial Sequence
  Synthetic
guauggucccucguuuuucu

SEQ ID NO: 694730 - RNA, 20 nt, Artificial Sequence
  Synthetic
gccuuugcuacacacaaagu

SEQ ID NO: 694731 - RNA, 20 nt, Artificial Sequence
  Synthetic
gaggaguucagcuucaaagu

SEQ ID NO: 694732 - RNA, 20 nt, Artificial Sequence
  Synthetic
guagggaagguugaccaagu

SEQ ID NO: 694733 - RNA, 20 nt, Artificial Sequence
  Synthetic
guucuaacucagccccaagu

SEQ ID NO: 694734 - RNA, 20 nt, Artificial Sequence
  Synthetic
guugaaccucauccucaagu

SEQ ID NO: 694735 - RNA, 20 nt, Artificial Sequence
  Synthetic
gugauaauuauuccagaagu

SEQ ID NO: 694736 - RNA, 20 nt, Artificial Sequence
  Synthetic
gagaugcaaguacaggaagu

SEQ ID NO: 694737 - RNA, 20 nt, Artificial Sequence
  Synthetic
gcuguucaagcuugugaagu

SEQ ID NO: 694738 - RNA, 20 nt, Artificial Sequence
  Synthetic
gccaagaagcaugcuuaagu

SEQ ID NO: 694739 - RNA, 20 nt, Artificial Sequence
  Synthetic
guccauggagucauaacagu

SEQ ID NO: 694740 - RNA, 20 nt, Artificial Sequence
  Synthetic
gacuuauugguuuggacagu

SEQ ID NO: 694741 - RNA, 20 nt, Artificial Sequence
  Synthetic
gugauugaacaccacgcagu

SEQ ID NO: 694742 - RNA, 20 nt, Artificial Sequence
  Synthetic
guauauuuacaagccgcagu

SEQ ID NO: 694743 - RNA, 20 nt, Artificial Sequence
  Synthetic
gacggagccgagaaggcagu

SEQ ID NO: 694744 - RNA, 20 nt, Artificial Sequence
  Synthetic
ggcucccaucuucaugcagu

SEQ ID NO: 694745 - RNA, 20 nt, Artificial Sequence
  Synthetic
guucuaaccuacucgucagu

SEQ ID NO: 694746 - RNA, 20 nt, Artificial Sequence
  Synthetic
guauguguugaccauagagu

SEQ ID NO: 694747 - RNA, 20 nt, Artificial Sequence
  Synthetic
gcaauaaguccaaguagagu

SEQ ID NO: 694748 - RNA, 20 nt, Artificial Sequence
  Synthetic
gucuccaacuggggacgagu

SEQ ID NO: 694749 - RNA, 20 nt, Artificial Sequence
  Synthetic
gaaauaccaaaacuucgagu

SEQ ID NO: 694750 - RNA, 20 nt, Artificial Sequence
  Synthetic
gguggcauuugccugggagu

SEQ ID NO: 694751 - RNA, 20 nt, Artificial Sequence
  Synthetic
gcuaacaugguaacuggagu

SEQ ID NO: 694752 - RNA, 20 nt, Artificial Sequence
  Synthetic
gacauugaggaugagugagu

SEQ ID NO: 694753 - RNA, 20 nt, Artificial Sequence
  Synthetic
gcuucuacauauuuaauagu

SEQ ID NO: 694754 - RNA, 20 nt, Artificial Sequence
  Synthetic
gcccgucucggggacauagu

SEQ ID NO: 694755 - RNA, 20 nt, Artificial Sequence
  Synthetic
gccaauacuuugcuuauagu

SEQ ID NO: 694756 - RNA, 20 nt, Artificial Sequence
  Synthetic
gauauuuccuuguaacuagu

SEQ ID NO: 694757 - RNA, 20 nt, Artificial Sequence
  Synthetic
ggaauggcccaagggcuagu

SEQ ID NO: 694758 - RNA, 20 nt, Artificial Sequence
  Synthetic
gcuucagcacacuugguagu

SEQ ID NO: 694759 - RNA, 20 nt, Artificial Sequence
  Synthetic
gucacaaugccauauguagu

SEQ ID NO: 694760 - RNA, 20 nt, Artificial Sequence
  Synthetic
gauacggacuuuggauuagu

SEQ ID NO: 694761 - RNA, 20 nt, Artificial Sequence
  Synthetic
gguuauauacuuacuuuagu

SEQ ID NO: 694762 - RNA, 20 nt, Artificial Sequence
  Synthetic
ggcuagcuguucauuuuagu

SEQ ID NO: 694763 - RNA, 20 nt, Artificial Sequence
  Synthetic
gguauuuggcauguaaacgu

SEQ ID NO: 694764 - RNA, 20 nt, Artificial Sequence
  Synthetic
gccauaaguuuaagcaacgu

SEQ ID NO: 694765 - RNA, 20 nt, Artificial Sequence
  Synthetic
gcaggcauguuauuccacgu

SEQ ID NO: 694766 - RNA, 20 nt, Artificial Sequence
  Synthetic
gaaguacggagcuaucacgu

SEQ ID NO: 694767 - RNA, 20 nt, Artificial Sequence
  Synthetic
guuaaugaagucugucacgu

SEQ ID NO: 694768 - RNA, 20 nt, Artificial Sequence
  Synthetic
ggacagaaaaguaacgacgu

SEQ ID NO: 694769 - RNA, 20 nt, Artificial Sequence
  Synthetic
guaguugcaaacacauacgu

SEQ ID NO: 694770 - RNA, 20 nt, Artificial Sequence
  Synthetic
gauucgaaucuugucaccgu

SEQ ID NO: 694771 - RNA, 20 nt, Artificial Sequence
  Synthetic
gggagcuuauacaagaccgu

SEQ ID NO: 694772 - RNA, 20 nt, Artificial Sequence
  Synthetic
ggcgggcagaauauuaccgu

SEQ ID NO: 694773 - RNA, 20 nt, Artificial Sequence
  Synthetic
gccuguauauauacagccgu

SEQ ID NO: 694774 - RNA, 20 nt, Artificial Sequence
  Synthetic
gcacuaaauuuagcauccgu

SEQ ID NO: 694775 - RNA, 20 nt, Artificial Sequence
  Synthetic
gcugcaggaaaguuaaucgu

SEQ ID NO: 694776 - RNA, 20 nt, Artificial Sequence
  Synthetic
gccagucuguuccagaucgu

SEQ ID NO: 694777 - RNA, 20 nt, Artificial Sequence
  Synthetic
ggugaaguaaugugauucgu

SEQ ID NO: 694778 - RNA, 20 nt, Artificial Sequence
  Synthetic
gucuuuuagggaaguuucgu

SEQ ID NO: 694779 - RNA, 20 nt, Artificial Sequence
  Synthetic
gaauucuaccuuccaaaggu

SEQ ID NO: 694780 - RNA, 20 nt, Artificial Sequence
  Synthetic
gauggaagggccguaaaggu

SEQ ID NO: 694781 - RNA, 20 nt, Artificial Sequence
  Synthetic
ggaccauuugacguuaaggu

SEQ ID NO: 694782 - RNA, 20 nt, Artificial Sequence
  Synthetic
gacuucucacccguuaaggu

SEQ ID NO: 694783 - RNA, 20 nt, Artificial Sequence
  Synthetic
ggucaacccacuuuuaaggu

SEQ ID NO: 694784 - RNA, 20 nt, Artificial Sequence
  Synthetic
gagcauggcacggaagaggu

SEQ ID NO: 694785 - RNA, 20 nt, Artificial Sequence
  Synthetic
gcaugcuacaccaaggaggu

SEQ ID NO: 694786 - RNA, 20 nt, Artificial Sequence
  Synthetic
ggguugggugucgaugaggu

SEQ ID NO: 694787 - RNA, 20 nt, Artificial Sequence
  Synthetic
ggccgacuuuucgaugaggu

SEQ ID NO: 694788 - RNA, 20 nt, Artificial Sequence
  Synthetic
ggguuugaaccuuaauaggu

SEQ ID NO: 694789 - RNA, 20 nt, Artificial Sequence
  Synthetic
gcccuguacuagggaagggu

SEQ ID NO: 694790 - RNA, 20 nt, Artificial Sequence
  Synthetic
gauucacucaggggaagggu

SEQ ID NO: 694791 - RNA, 20 nt, Artificial Sequence
  Synthetic
gcuaagauugucuacagggu

SEQ ID NO: 694792 - RNA, 20 nt, Artificial Sequence
  Synthetic
gcugagggauaaaugagggu

SEQ ID NO: 694793 - RNA, 20 nt, Artificial Sequence
  Synthetic
gugcugggaggcuccggggu

SEQ ID NO: 694794 - RNA, 20 nt, Artificial Sequence
  Synthetic
gagaucaucuccuuaugggu

SEQ ID NO: 694795 - RNA, 20 nt, Artificial Sequence
  Synthetic
gucagauucguucacugggu

SEQ ID NO: 694796 - RNA, 20 nt, Artificial Sequence
  Synthetic
gaagaaccccgcucgauggu

SEQ ID NO: 694797 - RNA, 20 nt, Artificial Sequence
  Synthetic
guuggauuggagccacuggu

SEQ ID NO: 694798 - RNA, 20 nt, Artificial Sequence
  Synthetic
guaauccgggggaaccuggu

SEQ ID NO: 694799 - RNA, 20 nt, Artificial Sequence
  Synthetic
gaccugguaugagaccuggu

SEQ ID NO: 694800 - RNA, 20 nt, Artificial Sequence
  Synthetic
gcauaucggccauuccuggu

SEQ ID NO: 694801 - RNA, 20 nt, Artificial Sequence
  Synthetic
gacaauuauuguuuaguggu

SEQ ID NO: 694802 - RNA, 20 nt, Artificial Sequence
  Synthetic
gaauugaggugaaauguggu

SEQ ID NO: 694803 - RNA, 20 nt, Artificial Sequence
  Synthetic
gcugagguuagcuuuguggu

SEQ ID NO: 694804 - RNA, 20 nt, Artificial Sequence
  Synthetic
gucaacaaggcuuaauuggu

SEQ ID NO: 694805 - RNA, 20 nt, Artificial Sequence
  Synthetic
gcuuaucgaaaacggaaugu

SEQ ID NO: 694806 - RNA, 20 nt, Artificial Sequence
  Synthetic
gaagcuuucaucacacaugu

SEQ ID NO: 694807 - RNA, 20 nt, Artificial Sequence
  Synthetic
gaucuuaucuggucccaugu

SEQ ID NO: 694808 - RNA, 20 nt, Artificial Sequence
  Synthetic
ggggcuucuagugagcaugu

SEQ ID NO: 694809 - RNA, 20 nt, Artificial Sequence
  Synthetic
guauagacuaucaggcaugu

SEQ ID NO: 694810 - RNA, 20 nt, Artificial Sequence
  Synthetic
ggugucucccuaggucaugu

SEQ ID NO: 694811 - RNA, 20 nt, Artificial Sequence
  Synthetic
ggguucagaaaaggcgaugu

SEQ ID NO: 694812 - RNA, 20 nt, Artificial Sequence
  Synthetic
gcauucccucuaagggaugu

SEQ ID NO: 694813 - RNA, 20 nt, Artificial Sequence
  Synthetic
guugggcgaccuugggaugu

SEQ ID NO: 694814 - RNA, 20 nt, Artificial Sequence
  Synthetic
gaaauuccuugugcguaugu

SEQ ID NO: 694815 - RNA, 20 nt, Artificial Sequence
  Synthetic
guguacuuugguaacacugu

SEQ ID NO: 694816 - RNA, 20 nt, Artificial Sequence
  Synthetic
gaucugugaucaagcccugu

SEQ ID NO: 694817 - RNA, 20 nt, Artificial Sequence
  Synthetic
gauucuagauauauagcugu

SEQ ID NO: 694818 - RNA, 20 nt, Artificial Sequence
  Synthetic
gacaugcaguuuccggcugu

SEQ ID NO: 694819 - RNA, 20 nt, Artificial Sequence
  Synthetic
gaaacauuaugaggggcugu

SEQ ID NO: 694820 - RNA, 20 nt, Artificial Sequence
  Synthetic
gguuaauaucucuaugcugu

SEQ ID NO: 694821 - RNA, 20 nt, Artificial Sequence
  Synthetic
gaacacuaauuguaugcugu

SEQ ID NO: 694822 - RNA, 20 nt, Artificial Sequence
  Synthetic
gaaaguacuucccuaucugu

SEQ ID NO: 694823 - RNA, 20 nt, Artificial Sequence
  Synthetic
gugguuuaccccuuaucugu

SEQ ID NO: 694824 - RNA, 20 nt, Artificial Sequence
  Synthetic
ggaacucuggcguacucugu

SEQ ID NO: 694825 - RNA, 20 nt, Artificial Sequence
  Synthetic
gaucccagucagaaaagugu

SEQ ID NO: 694826 - RNA, 20 nt, Artificial Sequence
  Synthetic
gccuaggcuuugaaacgugu

SEQ ID NO: 694827 - RNA, 20 nt, Artificial Sequence
  Synthetic
ggaacucuugguaagcgugu

SEQ ID NO: 694828 - RNA, 20 nt, Artificial Sequence
  Synthetic
guuauaaguugagacggugu

SEQ ID NO: 694829 - RNA, 20 nt, Artificial Sequence
  Synthetic
gaauugaugggacaaugugu

SEQ ID NO: 694830 - RNA, 20 nt, Artificial Sequence
  Synthetic
gaaaucauguacgacugugu

SEQ ID NO: 694831 - RNA, 20 nt, Artificial Sequence
  Synthetic
ggcccaguaguugagugugu

SEQ ID NO: 694832 - RNA, 20 nt, Artificial Sequence
  Synthetic
gucaguguguugcaacuugu

SEQ ID NO: 694833 - RNA, 20 nt, Artificial Sequence
  Synthetic
gccauuacuguuugccuugu

SEQ ID NO: 694834 - RNA, 20 nt, Artificial Sequence
  Synthetic
guucaaagcuucaaucuugu

SEQ ID NO: 694835 - RNA, 20 nt, Artificial Sequence
  Synthetic
guccucauuugaucucuugu

SEQ ID NO: 694836 - RNA, 20 nt, Artificial Sequence
  Synthetic
gcugccgaaaucgcaguugu

SEQ ID NO: 694837 - RNA, 20 nt, Artificial Sequence
  Synthetic
gcgauuagggagcuaguugu

SEQ ID NO: 694838 - RNA, 20 nt, Artificial Sequence
  Synthetic
gaagggguaguaagcuuugu

SEQ ID NO: 694839 - RNA, 20 nt, Artificial Sequence
  Synthetic
gauccuguauacuguuuugu

SEQ ID NO: 694840 - RNA, 20 nt, Artificial Sequence
  Synthetic
gugacaccaucguauaaauu

SEQ ID NO: 694841 - RNA, 20 nt, Artificial Sequence
  Synthetic
gcacugaugauaguuaaauu

SEQ ID NO: 694842 - RNA, 20 nt, Artificial Sequence
  Synthetic
gggccauuuuaccgacaauu

SEQ ID NO: 694843 - RNA, 20 nt, Artificial Sequence
  Synthetic
gugccaacaaagaugcaauu

SEQ ID NO: 694844 - RNA, 20 nt, Artificial Sequence
  Synthetic
guaauggaggacugucaauu

SEQ ID NO: 694845 - RNA, 20 nt, Artificial Sequence
  Synthetic
gaauccuuagcuguucaauu

SEQ ID NO: 694846 - RNA, 20 nt, Artificial Sequence
  Synthetic
gacucuagggcguaagaauu

SEQ ID NO: 694847 - RNA, 20 nt, Artificial Sequence
  Synthetic
gauuuggcuaagcuagaauu

SEQ ID NO: 694848 - RNA, 20 nt, Artificial Sequence
  Synthetic
gcaaauuuccaacacgaauu

SEQ ID NO: 694849 - RNA, 20 nt, Artificial Sequence
  Synthetic
ggcuagcaguguguugaauu

SEQ ID NO: 694850 - RNA, 20 nt, Artificial Sequence
  Synthetic
gguccagcuccugauacauu

SEQ ID NO: 694851 - RNA, 20 nt, Artificial Sequence
  Synthetic
gggucugaggccuugccauu

SEQ ID NO: 694852 - RNA, 20 nt, Artificial Sequence
  Synthetic
guguugguucacauuccauu

SEQ ID NO: 694853 - RNA, 20 nt, Artificial Sequence
  Synthetic
ggcuucaauauauggucauu

SEQ ID NO: 694854 - RNA, 20 nt, Artificial Sequence
  Synthetic
gguaggagguugaucagauu

SEQ ID NO: 694855 - RNA, 20 nt, Artificial Sequence
  Synthetic
guggaccugcgcuggagauu

SEQ ID NO: 694856 - RNA, 20 nt, Artificial Sequence
  Synthetic
gaaauuccaauacuccgauu

SEQ ID NO: 694857 - RNA, 20 nt, Artificial Sequence
  Synthetic
gguauuucaugauaaggauu

SEQ ID NO: 694858 - RNA, 20 nt, Artificial Sequence
  Synthetic
ggugaguggguaucaggauu

SEQ ID NO: 694859 - RNA, 20 nt, Artificial Sequence
  Synthetic
ggcacuacauacucaggauu

SEQ ID NO: 694860 - RNA, 20 nt, Artificial Sequence
  Synthetic
gcauagcagugaagaggauu

SEQ ID NO: 694861 - RNA, 20 nt, Artificial Sequence
  Synthetic
gagaaucucccccgaggauu

SEQ ID NO: 694862 - RNA, 20 nt, Artificial Sequence
  Synthetic
gcaaacuugcugguaggauu

SEQ ID NO: 694863 - RNA, 20 nt, Artificial Sequence
  Synthetic
gauauacuaccucacggauu

SEQ ID NO: 694864 - RNA, 20 nt, Artificial Sequence
  Synthetic
guuaauuacagcuagggauu

SEQ ID NO: 694865 - RNA, 20 nt, Artificial Sequence
  Synthetic
ggcagagaagccaauggauu

SEQ ID NO: 694866 - RNA, 20 nt, Artificial Sequence
  Synthetic
gcuacuccgcuagccugauu

SEQ ID NO: 694867 - RNA, 20 nt, Artificial Sequence
  Synthetic
ggugcagcaggaacuugauu

SEQ ID NO: 694868 - RNA, 20 nt, Artificial Sequence
  Synthetic
gcaacaggagagucuugauu

SEQ ID NO: 694869 - RNA, 20 nt, Artificial Sequence
  Synthetic
gagauacgcauguacauauu

SEQ ID NO: 694870 - RNA, 20 nt, Artificial Sequence
  Synthetic
guaacaagcgcagucauauu

SEQ ID NO: 694871 - RNA, 20 nt, Artificial Sequence
  Synthetic
gugucuauuauggggcuauu

SEQ ID NO: 694872 - RNA, 20 nt, Artificial Sequence
  Synthetic
gcuggggaccguuaucuauu

SEQ ID NO: 694873 - RNA, 20 nt, Artificial Sequence
  Synthetic
gcuccccuuuggggucuauu

SEQ ID NO: 694874 - RNA, 20 nt, Artificial Sequence
  Synthetic
gcaucaauauacgugguauu

SEQ ID NO: 694875 - RNA, 20 nt, Artificial Sequence
  Synthetic
guaggaaggaugguauuauu

SEQ ID NO: 694876 - RNA, 20 nt, Artificial Sequence
  Synthetic
gguagcauuaacaagaacuu

SEQ ID NO: 694877 - RNA, 20 nt, Artificial Sequence
  Synthetic
gugucaaccaaggugaacuu

SEQ ID NO: 694878 - RNA, 20 nt, Artificial Sequence
  Synthetic
gagguacccaagucuaacuu

SEQ ID NO: 694879 - RNA, 20 nt, Artificial Sequence
  Synthetic
ggggacauaguggguaacuu

SEQ ID NO: 694880 - RNA, 20 nt, Artificial Sequence
  Synthetic
gcaugggcuggcaagcacuu

SEQ ID NO: 694881 - RNA, 20 nt, Artificial Sequence
  Synthetic
gacuaccccaaguuagacuu

SEQ ID NO: 694882 - RNA, 20 nt, Artificial Sequence
  Synthetic
gucuucaaucgauuggacuu

SEQ ID NO: 694883 - RNA, 20 nt, Artificial Sequence
  Synthetic
ggcuauuuguagauugacuu

SEQ ID NO: 694884 - RNA, 20 nt, Artificial Sequence
  Synthetic
ggagguuuagguuuauacuu

SEQ ID NO: 694885 - RNA, 20 nt, Artificial Sequence
  Synthetic
guuaacuggcauggcuacuu

SEQ ID NO: 694886 - RNA, 20 nt, Artificial Sequence
  Synthetic
gcaaacuauuucugcuacuu

SEQ ID NO: 694887 - RNA, 20 nt, Artificial Sequence
  Synthetic
gucaacucucgaaaguacuu

SEQ ID NO: 694888 - RNA, 20 nt, Artificial Sequence
  Synthetic
guacuuaauuguucaaccuu

SEQ ID NO: 694889 - RNA, 20 nt, Artificial Sequence
  Synthetic
ggauuaaggugggcgaccuu

SEQ ID NO: 694890 - RNA, 20 nt, Artificial Sequence
  Synthetic
gccacaauuguagcuaccuu

SEQ ID NO: 694891 - RNA, 20 nt, Artificial Sequence
  Synthetic
guuguacuggcuuaccccuu

SEQ ID NO: 694892 - RNA, 20 nt, Artificial Sequence
  Synthetic
gacccauauuuuagggccuu

SEQ ID NO: 694893 - RNA, 20 nt, Artificial Sequence
  Synthetic
guaggaucugaauuggccuu

SEQ ID NO: 694894 - RNA, 20 nt, Artificial Sequence
  Synthetic
gagcaccguaggcauuccuu

SEQ ID NO: 694895 - RNA, 20 nt, Artificial Sequence
  Synthetic
gugaucugcccgcuuuccuu

SEQ ID NO: 694896 - RNA, 20 nt, Artificial Sequence
  Synthetic
ggacucuaaguggggagcuu

SEQ ID NO: 694897 - RNA, 20 nt, Artificial Sequence
  Synthetic
gcauaagggguagguagcuu

SEQ ID NO: 694898 - RNA, 20 nt, Artificial Sequence
  Synthetic
ggcacgcacucuguaggcuu

SEQ ID NO: 694899 - RNA, 20 nt, Artificial Sequence
  Synthetic
gcugugcauguugagggcuu

SEQ ID NO: 694900 - RNA, 20 nt, Artificial Sequence
  Synthetic
gacuacaugcugauuggcuu

SEQ ID NO: 694901 - RNA, 20 nt, Artificial Sequence
  Synthetic
guacagaacuuaaaaugcuu

SEQ ID NO: 694902 - RNA, 20 nt, Artificial Sequence
  Synthetic
gcagaggcuuaacaaugcuu

SEQ ID NO: 694903 - RNA, 20 nt, Artificial Sequence
  Synthetic
gcuauuguacaugcgugcuu

SEQ ID NO: 694904 - RNA, 20 nt, Artificial Sequence
  Synthetic
guacuauuuaguaugugcuu

SEQ ID NO: 694905 - RNA, 20 nt, Artificial Sequence
  Synthetic
gaagcacuaggcuaaaucuu

SEQ ID NO: 694906 - RNA, 20 nt, Artificial Sequence
  Synthetic
ggcagugacuguuugaucuu

SEQ ID NO: 694907 - RNA, 20 nt, Artificial Sequence
  Synthetic
gggauguucauuccacucuu

SEQ ID NO: 694908 - RNA, 20 nt, Artificial Sequence
  Synthetic
guuaggcagcuuagagucuu

SEQ ID NO: 694909 - RNA, 20 nt, Artificial Sequence
  Synthetic
gacauacugacauacuucuu

SEQ ID NO: 694910 - RNA, 20 nt, Artificial Sequence
  Synthetic
gagggcaauaucuacaaguu

SEQ ID NO: 694911 - RNA, 20 nt, Artificial Sequence
  Synthetic
ggaaaugaccuacagaaguu

SEQ ID NO: 694912 - RNA, 20 nt, Artificial Sequence
  Synthetic
gagucugagaugaaacaguu

SEQ ID NO: 694913 - RNA, 20 nt, Artificial Sequence
  Synthetic
ggccaucuacuaagacaguu

SEQ ID NO: 694914 - RNA, 20 nt, Artificial Sequence
  Synthetic
gauaacuggcaguugcaguu

SEQ ID NO: 694915 - RNA, 20 nt, Artificial Sequence
  Synthetic
ggcaguaggggauuucaguu

SEQ ID NO: 694916 - RNA, 20 nt, Artificial Sequence
  Synthetic
gauuucgaggccaacgaguu

SEQ ID NO: 694917 - RNA, 20 nt, Artificial Sequence
  Synthetic
gcauuuguuagacuggaguu

SEQ ID NO: 694918 - RNA, 20 nt, Artificial Sequence
  Synthetic
ggcuuauuagcccaugaguu

SEQ ID NO: 694919 - RNA, 20 nt, Artificial Sequence
  Synthetic
gaacuguugcuaggugaguu

SEQ ID NO: 694920 - RNA, 20 nt, Artificial Sequence
  Synthetic
gugaaaccuguucucuaguu

SEQ ID NO: 694921 - RNA, 20 nt, Artificial Sequence
  Synthetic
ggaguagcagcacgguaguu

SEQ ID NO: 694922 - RNA, 20 nt, Artificial Sequence
  Synthetic
ggcuaccuaguuuuguaguu

SEQ ID NO: 694923 - RNA, 20 nt, Artificial Sequence
  Synthetic
gcuuauacaaccacaccguu

SEQ ID NO: 694924 - RNA, 20 nt, Artificial Sequence
  Synthetic
gauggugacaaaaucccguu

SEQ ID NO: 694925 - RNA, 20 nt, Artificial Sequence
  Synthetic
gauccuguggugugagcguu

SEQ ID NO: 694926 - RNA, 20 nt, Artificial Sequence
  Synthetic
guaucacucagaaauagguu

SEQ ID NO: 694927 - RNA, 20 nt, Artificial Sequence
  Synthetic
gcaucuaguaauugacgguu

SEQ ID NO: 694928 - RNA, 20 nt, Artificial Sequence
  Synthetic
ggaauaccgcaaauaggguu

SEQ ID NO: 694929 - RNA, 20 nt, Artificial Sequence
  Synthetic
gccaaauaugcugggggguu

SEQ ID NO: 694930 - RNA, 20 nt, Artificial Sequence
  Synthetic
guuaugcugcccagcugguu

SEQ ID NO: 694931 - RNA, 20 nt, Artificial Sequence
  Synthetic
guacuagcugguaucugguu

SEQ ID NO: 694932 - RNA, 20 nt, Artificial Sequence
  Synthetic
gcucuacuaccaaauugguu

SEQ ID NO: 694933 - RNA, 20 nt, Artificial Sequence
  Synthetic
gaagucauuuccccuugguu

SEQ ID NO: 694934 - RNA, 20 nt, Artificial Sequence
  Synthetic
ggugaugagacccucauguu

SEQ ID NO: 694935 - RNA, 20 nt, Artificial Sequence
  Synthetic
gcccucagcucaaagcuguu

SEQ ID NO: 694936 - RNA, 20 nt, Artificial Sequence
  Synthetic
gguaaauaaauccuucuguu

SEQ ID NO: 694937 - RNA, 20 nt, Artificial Sequence
  Synthetic
ggguaccucuuccauguguu

SEQ ID NO: 694938 - RNA, 20 nt, Artificial Sequence
  Synthetic
gcuguuagcaggcaauuguu

SEQ ID NO: 694939 - RNA, 20 nt, Artificial Sequence
  Synthetic
gagagcagguacagcaauuu

SEQ ID NO: 694940 - RNA, 20 nt, Artificial Sequence
  Synthetic
gauuauauacuaguacauuu

SEQ ID NO: 694941 - RNA, 20 nt, Artificial Sequence
  Synthetic
gccuuagucggcucgcauuu

SEQ ID NO: 694942 - RNA, 20 nt, Artificial Sequence
  Synthetic
gauuggcuacuuaaagauuu

SEQ ID NO: 694943 - RNA, 20 nt, Artificial Sequence
  Synthetic
guuccuccaguaacagauuu

SEQ ID NO: 694944 - RNA, 20 nt, Artificial Sequence
  Synthetic
gagguguccauaggggauuu

SEQ ID NO: 694945 - RNA, 20 nt, Artificial Sequence
  Synthetic
guagcaagguacuaugauuu

SEQ ID NO: 694946 - RNA, 20 nt, Artificial Sequence
  Synthetic
guucuggauauccacuauuu

SEQ ID NO: 694947 - RNA, 20 nt, Artificial Sequence
  Synthetic
gaacgccauacaaagccuuu

SEQ ID NO: 694948 - RNA, 20 nt, Artificial Sequence
  Synthetic
guugauacccuacagccuuu

SEQ ID NO: 694949 - RNA, 20 nt, Artificial Sequence
  Synthetic
gaugguuugaguaauccuuu

SEQ ID NO: 694950 - RNA, 20 nt, Artificial Sequence
  Synthetic
gcucuaaauaguagagcuuu

SEQ ID NO: 694951 - RNA, 20 nt, Artificial Sequence
  Synthetic
gggcacaaaaauguagcuuu

SEQ ID NO: 694952 - RNA, 20 nt, Artificial Sequence
  Synthetic
gaccguagcugcuaaucuuu

SEQ ID NO: 694953 - RNA, 20 nt, Artificial Sequence
  Synthetic
gcuugugcaugcagaucuuu

SEQ ID NO: 694954 - RNA, 20 nt, Artificial Sequence
  Synthetic
ggcguuuuauuaaccucuuu

SEQ ID NO: 694955 - RNA, 20 nt, Artificial Sequence
  Synthetic
guucuacccucuuagucuuu

SEQ ID NO: 694956 - RNA, 20 nt, Artificial Sequence
  Synthetic
gucuuuaggccucauucuuu

SEQ ID NO: 694957 - RNA, 20 nt, Artificial Sequence
  Synthetic
gucccggagcuauaaaguuu

SEQ ID NO: 694958 - RNA, 20 nt, Artificial Sequence
  Synthetic
guaauuacccauagaaguuu

SEQ ID NO: 694959 - RNA, 20 nt, Artificial Sequence
  Synthetic
gaccagaacaguguaaguuu

SEQ ID NO: 694960 - RNA, 20 nt, Artificial Sequence
  Synthetic
gcugacuuuaugcacaguuu

SEQ ID NO: 694961 - RNA, 20 nt, Artificial Sequence
  Synthetic
gcuaugcauuuaaaggguuu

SEQ ID NO: 694962 - RNA, 20 nt, Artificial Sequence
  Synthetic
ggauuucggcgcccugguuu

SEQ ID NO: 694963 - RNA, 20 nt, Artificial Sequence
  Synthetic
gagcuaguccagcuauguuu

SEQ ID NO: 694964 - RNA, 20 nt, Artificial Sequence
  Synthetic
gauuacagaggcuaguguuu

SEQ ID NO: 694965 - RNA, 20 nt, Artificial Sequence
  Synthetic
ggucccgggaacacgauuuu

SEQ ID NO: 694966 - RNA, 20 nt, Artificial Sequence
  Synthetic
gugugaguauucuagcuuuu

SEQ ID NO: 694967 - RNA, 20 nt, Artificial Sequence
  Synthetic
gcugcagacauagggcuuuu

SEQ ID NO: 694968 - RNA, 20 nt, Artificial Sequence
  Synthetic
gcccuaugaacauugcuuuu

SEQ ID NO: 694969 - RNA, 20 nt, Artificial Sequence
  Synthetic
gguuggggaaacaaucuuuu

SEQ ID NO: 694970 - RNA, 20 nt, Artificial Sequence
  Synthetic
guaaguggauaggcgguuuu

SEQ ID NO: 694971 - RNA, 20 nt, Artificial Sequence
  Synthetic
guguaccuagucacuguuuu

SEQ ID NO: 694972 - RNA, 20 nt, Artificial Sequence
  Synthetic
gucucauaacugaacuuuuu

SEQ ID NO: 694973 - RNA, 17 nt, Artificial Sequence
  Synthetic
cuaggcggcaaacaaaa

SEQ ID NO: 694974 - RNA, 17 nt, Artificial Sequence
  Synthetic
ccuacaccgcagcaaaa

SEQ ID NO: 694975 - RNA, 17 nt, Artificial Sequence
  Synthetic
cccuucggccgucaaaa

SEQ ID NO: 694976 - RNA, 17 nt, Artificial Sequence
  Synthetic
uuauacuggcccgaaaa

SEQ ID NO: 694977 - RNA, 17 nt, Artificial Sequence
  Synthetic
agcuuacgcaaggaaaa

SEQ ID NO: 694978 - RNA, 17 nt, Artificial Sequence
  Synthetic
ccgccccuuaaauaaaa

SEQ ID NO: 694979 - RNA, 17 nt, Artificial Sequence
  Synthetic
ucucgguaccaauaaaa

SEQ ID NO: 694980 - RNA, 17 nt, Artificial Sequence
  Synthetic
cgugucauagucuaaaa

SEQ ID NO: 694981 - RNA, 17 nt, Artificial Sequence
  Synthetic
ucguuaccuugguaaaa

SEQ ID NO: 694982 - RNA, 17 nt, Artificial Sequence
  Synthetic
caacgaguuaguuaaaa

SEQ ID NO: 694983 - RNA, 17 nt, Artificial Sequence
  Synthetic
uauucagccagcccaaa

SEQ ID NO: 694984 - RNA, 17 nt, Artificial Sequence
  Synthetic
cugguagacuauccaaa

SEQ ID NO: 694985 - RNA, 17 nt, Artificial Sequence
  Synthetic
cuccucuggagcgcaaa

SEQ ID NO: 694986 - RNA, 17 nt, Artificial Sequence
  Synthetic
accuuuuaucucgcaaa

SEQ ID NO: 694987 - RNA, 17 nt, Artificial Sequence
  Synthetic
acuaccaucuucgcaaa

SEQ ID NO: 694988 - RNA, 17 nt, Artificial Sequence
  Synthetic
ucugucgguaaugcaaa

SEQ ID NO: 694989 - RNA, 17 nt, Artificial Sequence
  Synthetic
ccacaucgcauaucaaa

SEQ ID NO: 694990 - RNA, 17 nt, Artificial Sequence
  Synthetic
ccuguggcaaccucaaa

SEQ ID NO: 694991 - RNA, 17 nt, Artificial Sequence
  Synthetic
ccccuucggccgucaaa

SEQ ID NO: 694992 - RNA, 17 nt, Artificial Sequence
  Synthetic
cgguauagcaggucaaa

SEQ ID NO: 694993 - RNA, 17 nt, Artificial Sequence
  Synthetic
uauccaugcgggucaaa

SEQ ID NO: 694994 - RNA, 17 nt, Artificial Sequence
  Synthetic
agcaagcggcugucaaa

SEQ ID NO: 694995 - RNA, 17 nt, Artificial Sequence
  Synthetic
cucgauaaauugucaaa

SEQ ID NO: 694996 - RNA, 17 nt, Artificial Sequence
  Synthetic
aaccguacacccagaaa

SEQ ID NO: 694997 - RNA, 17 nt, Artificial Sequence
  Synthetic
augagcugaacacgaaa

SEQ ID NO: 694998 - RNA, 17 nt, Artificial Sequence
  Synthetic
agccguccagugggaaa

SEQ ID NO: 694999 - RNA, 17 nt, Artificial Sequence
  Synthetic
acuuauacgaguggaaa

SEQ ID NO: 695000 - RNA, 17 nt, Artificial Sequence
  Synthetic
ucggugucaggaugaaa

SEQ ID NO: 695001 - RNA, 17 nt, Artificial Sequence
  Synthetic
cacucaacguucauaaa

SEQ ID NO: 695002 - RNA, 17 nt, Artificial Sequence
  Synthetic
caagugcacuaccuaaa

SEQ ID NO: 695003 - RNA, 17 nt, Artificial Sequence
  Synthetic
aucaccgcauagcuaaa

SEQ ID NO: 695004 - RNA, 17 nt, Artificial Sequence
  Synthetic
cauaaucgagugcuaaa

SEQ ID NO: 695005 - RNA, 17 nt, Artificial Sequence
  Synthetic
ucuugacguccucuaaa

SEQ ID NO: 695006 - RNA, 17 nt, Artificial Sequence
  Synthetic
uggaagaagcccguaaa

SEQ ID NO: 695007 - RNA, 17 nt, Artificial Sequence
  Synthetic
auggacgauuucuuaaa

SEQ ID NO: 695008 - RNA, 17 nt, Artificial Sequence
  Synthetic
agaugccaaacguuaaa

SEQ ID NO: 695009 - RNA, 17 nt, Artificial Sequence
  Synthetic
agcggggauguaaacaa

SEQ ID NO: 695010 - RNA, 17 nt, Artificial Sequence
  Synthetic
uaguuccagcgucacaa

SEQ ID NO: 695011 - RNA, 17 nt, Artificial Sequence
  Synthetic
cacguaccccccgacaa

SEQ ID NO: 695012 - RNA, 17 nt, Artificial Sequence
  Synthetic
cgggcuagacgcgacaa

SEQ ID NO: 695013 - RNA, 17 nt, Artificial Sequence
  Synthetic
acccccgggacauacaa

SEQ ID NO: 695014 - RNA, 17 nt, Artificial Sequence
  Synthetic
cgccauagcaacuacaa

SEQ ID NO: 695015 - RNA, 17 nt, Artificial Sequence
  Synthetic
acaucaucguaaaccaa

SEQ ID NO: 695016 - RNA, 17 nt, Artificial Sequence
  Synthetic
uguaaggaccucaccaa

SEQ ID NO: 695017 - RNA, 17 nt, Artificial Sequence
  Synthetic
ccuccaaauaguaccaa

SEQ ID NO: 695018 - RNA, 17 nt, Artificial Sequence
  Synthetic
auuuggucgaggcccaa

SEQ ID NO: 695019 - RNA, 17 nt, Artificial Sequence
  Synthetic
aaaauugaggcggccaa

SEQ ID NO: 695020 - RNA, 17 nt, Artificial Sequence
  Synthetic
cuuauauguacguccaa

SEQ ID NO: 695021 - RNA, 17 nt, Artificial Sequence
  Synthetic
acgcugaauugaagcaa

SEQ ID NO: 695022 - RNA, 17 nt, Artificial Sequence
  Synthetic
acguucuaucagagcaa

SEQ ID NO: 695023 - RNA, 17 nt, Artificial Sequence
  Synthetic
aagaacuuacggagcaa

SEQ ID NO: 695024 - RNA, 17 nt, Artificial Sequence
  Synthetic
ccugacucacaacgcaa

SEQ ID NO: 695025 - RNA, 17 nt, Artificial Sequence
  Synthetic
uucaugauuuuacgcaa

SEQ ID NO: 695026 - RNA, 17 nt, Artificial Sequence
  Synthetic
cauccgugcuuccgcaa

SEQ ID NO: 695027 - RNA, 17 nt, Artificial Sequence
  Synthetic
cguguguagcagcgcaa

SEQ ID NO: 695028 - RNA, 17 nt, Artificial Sequence
  Synthetic
ucgacauaaggaggcaa

SEQ ID NO: 695029 - RNA, 17 nt, Artificial Sequence
  Synthetic
agguagcuacccggcaa

SEQ ID NO: 695030 - RNA, 17 nt, Artificial Sequence
  Synthetic
auuccuuccgggggcaa

SEQ ID NO: 695031 - RNA, 17 nt, Artificial Sequence
  Synthetic
ucaccgccuuuuggcaa

SEQ ID NO: 695032 - RNA, 17 nt, Artificial Sequence
  Synthetic
cggcguuuacuaugcaa

SEQ ID NO: 695033 - RNA, 17 nt, Artificial Sequence
  Synthetic
cacggucacauaaucaa

SEQ ID NO: 695034 - RNA, 17 nt, Artificial Sequence
  Synthetic
auuaucgcucuuaucaa

SEQ ID NO: 695035 - RNA, 17 nt, Artificial Sequence
  Synthetic
cacucacgaaaccucaa

SEQ ID NO: 695036 - RNA, 17 nt, Artificial Sequence
  Synthetic
uaaugaccaccccucaa

SEQ ID NO: 695037 - RNA, 17 nt, Artificial Sequence
  Synthetic
augcaaacuagccucaa

SEQ ID NO: 695038 - RNA, 17 nt, Artificial Sequence
  Synthetic
ucccgugcauccgucaa

SEQ ID NO: 695039 - RNA, 17 nt, Artificial Sequence
  Synthetic
ucuaguauuggguucaa

SEQ ID NO: 695040 - RNA, 17 nt, Artificial Sequence
  Synthetic
cgauuuaggugguucaa

SEQ ID NO: 695041 - RNA, 17 nt, Artificial Sequence
  Synthetic
aacgaucuauguuucaa

SEQ ID NO: 695042 - RNA, 17 nt, Artificial Sequence
  Synthetic
auaggggcgguaaagaa

SEQ ID NO: 695043 - RNA, 17 nt, Artificial Sequence
  Synthetic
cacaccgguuaacagaa

SEQ ID NO: 695044 - RNA, 17 nt, Artificial Sequence
  Synthetic
acgauaauuacucagaa

SEQ ID NO: 695045 - RNA, 17 nt, Artificial Sequence
  Synthetic
aauccuacggcucagaa

SEQ ID NO: 695046 - RNA, 17 nt, Artificial Sequence
  Synthetic
cccaagucggccgagaa

SEQ ID NO: 695047 - RNA, 17 nt, Artificial Sequence
  Synthetic
auauuaccguaggagaa

SEQ ID NO: 695048 - RNA, 17 nt, Artificial Sequence
  Synthetic
ucgcugaccauugagaa

SEQ ID NO: 695049 - RNA, 17 nt, Artificial Sequence
  Synthetic
ccuuucgguaacuagaa

SEQ ID NO: 695050 - RNA, 17 nt, Artificial Sequence
  Synthetic
uguugcggauguuagaa

SEQ ID NO: 695051 - RNA, 17 nt, Artificial Sequence
  Synthetic
ccauaaucuagaacgaa

SEQ ID NO: 695052 - RNA, 17 nt, Artificial Sequence
  Synthetic
cgagaggcacuuacgaa

SEQ ID NO: 695053 - RNA, 17 nt, Artificial Sequence
  Synthetic
ccuuucuaguuaccgaa

SEQ ID NO: 695054 - RNA, 17 nt, Artificial Sequence
  Synthetic
cccuuuugacggccgaa

SEQ ID NO: 695055 - RNA, 17 nt, Artificial Sequence
  Synthetic
cacagacaacauccgaa

SEQ ID NO: 695056 - RNA, 17 nt, Artificial Sequence
  Synthetic
cagguaguaucagcgaa

SEQ ID NO: 695057 - RNA, 17 nt, Artificial Sequence
  Synthetic
uaugcagaaugggcgaa

SEQ ID NO: 695058 - RNA, 17 nt, Artificial Sequence
  Synthetic
agacuauuggacucgaa

SEQ ID NO: 695059 - RNA, 17 nt, Artificial Sequence
  Synthetic
cacuuuuccuacucgaa

SEQ ID NO: 695060 - RNA, 17 nt, Artificial Sequence
  Synthetic
ucagaccagaagucgaa

SEQ ID NO: 695061 - RNA, 17 nt, Artificial Sequence
  Synthetic
aauuccuagccgucgaa

SEQ ID NO: 695062 - RNA, 17 nt, Artificial Sequence
  Synthetic
uagaacuggucgaggaa

SEQ ID NO: 695063 - RNA, 17 nt, Artificial Sequence
  Synthetic
cauccgauugggaggaa

SEQ ID NO: 695064 - RNA, 17 nt, Artificial Sequence
  Synthetic
ccccuauugaauaggaa

SEQ ID NO: 695065 - RNA, 17 nt, Artificial Sequence
  Synthetic
cacucacaacuuaggaa

SEQ ID NO: 695066 - RNA, 17 nt, Artificial Sequence
  Synthetic
ugcuggcuaaaacggaa

SEQ ID NO: 695067 - RNA, 17 nt, Artificial Sequence
  Synthetic
agcaagauguccgggaa

SEQ ID NO: 695068 - RNA, 17 nt, Artificial Sequence
  Synthetic
uuaaaccggucaaugaa

SEQ ID NO: 695069 - RNA, 17 nt, Artificial Sequence
  Synthetic
uugcacugcggcaugaa

SEQ ID NO: 695070 - RNA, 17 nt, Artificial Sequence
  Synthetic
accacgcuauugaugaa

SEQ ID NO: 695071 - RNA, 17 nt, Artificial Sequence
  Synthetic
agugucagcgcuaugaa

SEQ ID NO: 695072 - RNA, 17 nt, Artificial Sequence
  Synthetic
ugcuuguucgguaugaa

SEQ ID NO: 695073 - RNA, 17 nt, Artificial Sequence
  Synthetic
cgguauagugugcugaa

SEQ ID NO: 695074 - RNA, 17 nt, Artificial Sequence
  Synthetic
cgauuacguuugcugaa

SEQ ID NO: 695075 - RNA, 17 nt, Artificial Sequence
  Synthetic
uguuaaacggaugugaa

SEQ ID NO: 695076 - RNA, 17 nt, Artificial Sequence
  Synthetic
caugcccuuaacuugaa

SEQ ID NO: 695077 - RNA, 17 nt, Artificial Sequence
  Synthetic
uccaccuggcgcuugaa

SEQ ID NO: 695078 - RNA, 17 nt, Artificial Sequence
  Synthetic
uuuguauacucguugaa

SEQ ID NO: 695079 - RNA, 17 nt, Artificial Sequence
  Synthetic
uaagucgggccaaauaa

SEQ ID NO: 695080 - RNA, 17 nt, Artificial Sequence
  Synthetic
cgacuugaugauaauaa

SEQ ID NO: 695081 - RNA, 17 nt, Artificial Sequence
  Synthetic
cacgggaauuuccauaa

SEQ ID NO: 695082 - RNA, 17 nt, Artificial Sequence
  Synthetic
auugauaagagcgauaa

SEQ ID NO: 695083 - RNA, 17 nt, Artificial Sequence
  Synthetic
cgagaauaaggggauaa

SEQ ID NO: 695084 - RNA, 17 nt, Artificial Sequence
  Synthetic
cuacacaggauggauaa

SEQ ID NO: 695085 - RNA, 17 nt, Artificial Sequence
  Synthetic
auugaggcucgugauaa

SEQ ID NO: 695086 - RNA, 17 nt, Artificial Sequence
  Synthetic
aagcccuuaauugauaa

SEQ ID NO: 695087 - RNA, 17 nt, Artificial Sequence
  Synthetic
aguuccgugucauauaa

SEQ ID NO: 695088 - RNA, 17 nt, Artificial Sequence
  Synthetic
aaggcauaaccguauaa

SEQ ID NO: 695089 - RNA, 17 nt, Artificial Sequence
  Synthetic
uugcacuaggauacuaa

SEQ ID NO: 695090 - RNA, 17 nt, Artificial Sequence
  Synthetic
cacccucuggauacuaa

SEQ ID NO: 695091 - RNA, 17 nt, Artificial Sequence
  Synthetic
cuccagucaguaccuaa

SEQ ID NO: 695092 - RNA, 17 nt, Artificial Sequence
  Synthetic
cuaacauagaggccuaa

SEQ ID NO: 695093 - RNA, 17 nt, Artificial Sequence
  Synthetic
agguauguugcuccuaa

SEQ ID NO: 695094 - RNA, 17 nt, Artificial Sequence
  Synthetic
aaacaaucgauuccuaa

SEQ ID NO: 695095 - RNA, 17 nt, Artificial Sequence
  Synthetic
uucaaagauuacgcuaa

SEQ ID NO: 695096 - RNA, 17 nt, Artificial Sequence
  Synthetic
ccauaaauuuacgcuaa

SEQ ID NO: 695097 - RNA, 17 nt, Artificial Sequence
  Synthetic
ugacgagccaaggcuaa

SEQ ID NO: 695098 - RNA, 17 nt, Artificial Sequence
  Synthetic
uuacuggguauggcuaa

SEQ ID NO: 695099 - RNA, 17 nt, Artificial Sequence
  Synthetic
acguauauugaugcuaa

SEQ ID NO: 695100 - RNA, 17 nt, Artificial Sequence
  Synthetic
ugcguuugauaugcuaa

SEQ ID NO: 695101 - RNA, 17 nt, Artificial Sequence
  Synthetic
uuaauccggagugcuaa

SEQ ID NO: 695102 - RNA, 17 nt, Artificial Sequence
  Synthetic
aguacggacugugcuaa

SEQ ID NO: 695103 - RNA, 17 nt, Artificial Sequence
  Synthetic
cauacguagccaucuaa

SEQ ID NO: 695104 - RNA, 17 nt, Artificial Sequence
  Synthetic
aguacucggaccucuaa

SEQ ID NO: 695105 - RNA, 17 nt, Artificial Sequence
  Synthetic
aucuugacguccucuaa

SEQ ID NO: 695106 - RNA, 17 nt, Artificial Sequence
  Synthetic
cgggaauucaguucuaa

SEQ ID NO: 695107 - RNA, 17 nt, Artificial Sequence
  Synthetic
uacugcauagggaguaa

SEQ ID NO: 695108 - RNA, 17 nt, Artificial Sequence
  Synthetic
ugacgcagucuuaguaa

SEQ ID NO: 695109 - RNA, 17 nt, Artificial Sequence
  Synthetic
uuaacacuacuucguaa

SEQ ID NO: 695110 - RNA, 17 nt, Artificial Sequence
  Synthetic
aaccauacacccgguaa

SEQ ID NO: 695111 - RNA, 17 nt, Artificial Sequence
  Synthetic
ugacuuuuucgggguaa

SEQ ID NO: 695112 - RNA, 17 nt, Artificial Sequence
  Synthetic
agacacgucguugguaa

SEQ ID NO: 695113 - RNA, 17 nt, Artificial Sequence
  Synthetic
uugaggcgguuugguaa

SEQ ID NO: 695114 - RNA, 17 nt, Artificial Sequence
  Synthetic
ccuaucaucggcuguaa

SEQ ID NO: 695115 - RNA, 17 nt, Artificial Sequence
  Synthetic
agugccgugaucuguaa

SEQ ID NO: 695116 - RNA, 17 nt, Artificial Sequence
  Synthetic
uuccggauacauuguaa

SEQ ID NO: 695117 - RNA, 17 nt, Artificial Sequence
  Synthetic
ccaccuguccauuguaa

SEQ ID NO: 695118 - RNA, 17 nt, Artificial Sequence
  Synthetic
ccucagugcguaauuaa

SEQ ID NO: 695119 - RNA, 17 nt, Artificial Sequence
  Synthetic
auggccuggaccauuaa

SEQ ID NO: 695120 - RNA, 17 nt, Artificial Sequence
  Synthetic
uacgagugugagauuaa

SEQ ID NO: 695121 - RNA, 17 nt, Artificial Sequence
  Synthetic
uuguugaccaaucuuaa

SEQ ID NO: 695122 - RNA, 17 nt, Artificial Sequence
  Synthetic
auaaggguuguaguuaa

SEQ ID NO: 695123 - RNA, 17 nt, Artificial Sequence
  Synthetic
cgcaguuguaggguuaa

SEQ ID NO: 695124 - RNA, 17 nt, Artificial Sequence
  Synthetic
cucacauccgcuguuaa

SEQ ID NO: 695125 - RNA, 17 nt, Artificial Sequence
  Synthetic
cuaaccucauguguuaa

SEQ ID NO: 695126 - RNA, 17 nt, Artificial Sequence
  Synthetic
acggguaucauuguuaa

SEQ ID NO: 695127 - RNA, 17 nt, Artificial Sequence
  Synthetic
cacuccuauccauuuaa

SEQ ID NO: 695128 - RNA, 17 nt, Artificial Sequence
  Synthetic
uacgguuugaacuuuaa

SEQ ID NO: 695129 - RNA, 17 nt, Artificial Sequence
  Synthetic
uuucagagccgcuuuaa

SEQ ID NO: 695130 - RNA, 17 nt, Artificial Sequence
  Synthetic
acgagucauugcuuuaa

SEQ ID NO: 695131 - RNA, 17 nt, Artificial Sequence
  Synthetic
cggguucucagaaaaca

SEQ ID NO: 695132 - RNA, 17 nt, Artificial Sequence
  Synthetic
aacaugccagcgaaaca

SEQ ID NO: 695133 - RNA, 17 nt, Artificial Sequence
  Synthetic
cgugcugaucuuaaaca

SEQ ID NO: 695134 - RNA, 17 nt, Artificial Sequence
  Synthetic
cucccccgcaaagaaca

SEQ ID NO: 695135 - RNA, 17 nt, Artificial Sequence
  Synthetic
ucgggagguaaggaaca

SEQ ID NO: 695136 - RNA, 17 nt, Artificial Sequence
  Synthetic
agcugaguacgugaaca

SEQ ID NO: 695137 - RNA, 17 nt, Artificial Sequence
  Synthetic
ucugcggguggugaaca

SEQ ID NO: 695138 - RNA, 17 nt, Artificial Sequence
  Synthetic
cacgaaaagcuugaaca

SEQ ID NO: 695139 - RNA, 17 nt, Artificial Sequence
  Synthetic
cuggccaggcauuaaca

SEQ ID NO: 695140 - RNA, 17 nt, Artificial Sequence
  Synthetic
ugaguaaaccguuaaca

SEQ ID NO: 695141 - RNA, 17 nt, Artificial Sequence
  Synthetic
ucguuuuaauucacaca

SEQ ID NO: 695142 - RNA, 17 nt, Artificial Sequence
  Synthetic
ugaccacaaacgacaca

SEQ ID NO: 695143 - RNA, 17 nt, Artificial Sequence
  Synthetic
ccuugcgcugcuacaca

SEQ ID NO: 695144 - RNA, 17 nt, Artificial Sequence
  Synthetic
caagcuauuauaccaca

SEQ ID NO: 695145 - RNA, 17 nt, Artificial Sequence
  Synthetic
uaucgccaccucccaca

SEQ ID NO: 695146 - RNA, 17 nt, Artificial Sequence
  Synthetic
agcccuacauacgcaca

SEQ ID NO: 695147 - RNA, 17 nt, Artificial Sequence
  Synthetic
uuaaaaguaugcgcaca

SEQ ID NO: 695148 - RNA, 17 nt, Artificial Sequence
  Synthetic
uauacgugccaugcaca

SEQ ID NO: 695149 - RNA, 17 nt, Artificial Sequence
  Synthetic
uucacacuuccgagaca

SEQ ID NO: 695150 - RNA, 17 nt, Artificial Sequence
  Synthetic
agcuaauagugacgaca

SEQ ID NO: 695151 - RNA, 17 nt, Artificial Sequence
  Synthetic
uugaugauagccugaca

SEQ ID NO: 695152 - RNA, 17 nt, Artificial Sequence
  Synthetic
aacugcgguagcugaca

SEQ ID NO: 695153 - RNA, 17 nt, Artificial Sequence
  Synthetic
ccccuacaaaggauaca

SEQ ID NO: 695154 - RNA, 17 nt, Artificial Sequence
  Synthetic
aaccgaugcaugauaca

SEQ ID NO: 695155 - RNA, 17 nt, Artificial Sequence
  Synthetic
agaguaguuugccuaca

SEQ ID NO: 695156 - RNA, 17 nt, Artificial Sequence
  Synthetic
ucacuggguauccuaca

SEQ ID NO: 695157 - RNA, 17 nt, Artificial Sequence
  Synthetic
ucuuaguggcuccuaca

SEQ ID NO: 695158 - RNA, 17 nt, Artificial Sequence
  Synthetic
cguucauacuagcuaca

SEQ ID NO: 695159 - RNA, 17 nt, Artificial Sequence
  Synthetic
ucaacugcugcucuaca

SEQ ID NO: 695160 - RNA, 17 nt, Artificial Sequence
  Synthetic
cgucgugacauaguaca

SEQ ID NO: 695161 - RNA, 17 nt, Artificial Sequence
  Synthetic
ucccaucugaacguaca

SEQ ID NO: 695162 - RNA, 17 nt, Artificial Sequence
  Synthetic
uaggcugaugucaacca

SEQ ID NO: 695163 - RNA, 17 nt, Artificial Sequence
  Synthetic
uguagaacaccuaacca

SEQ ID NO: 695164 - RNA, 17 nt, Artificial Sequence
  Synthetic
auaccauacaaccacca

SEQ ID NO: 695165 - RNA, 17 nt, Artificial Sequence
  Synthetic
aacuuauaucgccacca

SEQ ID NO: 695166 - RNA, 17 nt, Artificial Sequence
  Synthetic
agccauauguuucacca

SEQ ID NO: 695167 - RNA, 17 nt, Artificial Sequence
  Synthetic
auugcacguaucuacca

SEQ ID NO: 695168 - RNA, 17 nt, Artificial Sequence
  Synthetic
uaguguggcuuaaccca

SEQ ID NO: 695169 - RNA, 17 nt, Artificial Sequence
  Synthetic
accaguugcaauaccca

SEQ ID NO: 695170 - RNA, 17 nt, Artificial Sequence
  Synthetic
uauaugccuagcuccca

SEQ ID NO: 695171 - RNA, 17 nt, Artificial Sequence
  Synthetic
uacccccauacaagcca

SEQ ID NO: 695172 - RNA, 17 nt, Artificial Sequence
  Synthetic
uuucucgugacgagcca

SEQ ID NO: 695173 - RNA, 17 nt, Artificial Sequence
  Synthetic
cacccaugaaucggcca

SEQ ID NO: 695174 - RNA, 17 nt, Artificial Sequence
  Synthetic
ucuacaaguuugggcca

SEQ ID NO: 695175 - RNA, 17 nt, Artificial Sequence
  Synthetic
ccguauaccaccugcca

SEQ ID NO: 695176 - RNA, 17 nt, Artificial Sequence
  Synthetic
cauacaucaucgugcca

SEQ ID NO: 695177 - RNA, 17 nt, Artificial Sequence
  Synthetic
acgccugguuacaucca

SEQ ID NO: 695178 - RNA, 17 nt, Artificial Sequence
  Synthetic
auuauagggaaccucca

SEQ ID NO: 695179 - RNA, 17 nt, Artificial Sequence
  Synthetic
uaauucagacgccucca

SEQ ID NO: 695180 - RNA, 17 nt, Artificial Sequence
  Synthetic
cuagccaccguccucca

SEQ ID NO: 695181 - RNA, 17 nt, Artificial Sequence
  Synthetic
cuaaacgaguuccucca

SEQ ID NO: 695182 - RNA, 17 nt, Artificial Sequence
  Synthetic
cugcacuagacggucca

SEQ ID NO: 695183 - RNA, 17 nt, Artificial Sequence
  Synthetic
acgaaagcguggaagca

SEQ ID NO: 695184 - RNA, 17 nt, Artificial Sequence
  Synthetic
acuuccguuguccagca

SEQ ID NO: 695185 - RNA, 17 nt, Artificial Sequence
  Synthetic
accaguaacgagcagca

SEQ ID NO: 695186 - RNA, 17 nt, Artificial Sequence
  Synthetic
aaagaacuuacggagca

SEQ ID NO: 695187 - RNA, 17 nt, Artificial Sequence
  Synthetic
agcguccaugaauagca

SEQ ID NO: 695188 - RNA, 17 nt, Artificial Sequence
  Synthetic
ccugugauguacuagca

SEQ ID NO: 695189 - RNA, 17 nt, Artificial Sequence
  Synthetic
cucaaccgcaccuagca

SEQ ID NO: 695190 - RNA, 17 nt, Artificial Sequence
  Synthetic
uugugugggcucuagca

SEQ ID NO: 695191 - RNA, 17 nt, Artificial Sequence
  Synthetic
uauccauggggguagca

SEQ ID NO: 695192 - RNA, 17 nt, Artificial Sequence
  Synthetic
acuacuuagcuuacgca

SEQ ID NO: 695193 - RNA, 17 nt, Artificial Sequence
  Synthetic
accaaaauuuuggcgca

SEQ ID NO: 695194 - RNA, 17 nt, Artificial Sequence
  Synthetic
aaguaccaugagucgca

SEQ ID NO: 695195 - RNA, 17 nt, Artificial Sequence
  Synthetic
acuuuuaugacgaggca

SEQ ID NO: 695196 - RNA, 17 nt, Artificial Sequence
  Synthetic
aaacuacccgaauggca

SEQ ID NO: 695197 - RNA, 17 nt, Artificial Sequence
  Synthetic
accuagacacauuggca

SEQ ID NO: 695198 - RNA, 17 nt, Artificial Sequence
  Synthetic
ccacgcuaagauuggca

SEQ ID NO: 695199 - RNA, 17 nt, Artificial Sequence
  Synthetic
ugucgauguuuaaugca

SEQ ID NO: 695200 - RNA, 17 nt, Artificial Sequence
  Synthetic
ccauuuacccucaugca

SEQ ID NO: 695201 - RNA, 17 nt, Artificial Sequence
  Synthetic
uaagcguguuggaugca

SEQ ID NO: 695202 - RNA, 17 nt, Artificial Sequence
  Synthetic
acggcguuuacuaugca

SEQ ID NO: 695203 - RNA, 17 nt, Artificial Sequence
  Synthetic
cggauuuuaaaucugca

SEQ ID NO: 695204 - RNA, 17 nt, Artificial Sequence
  Synthetic
ccccgaacccuagugca

SEQ ID NO: 695205 - RNA, 17 nt, Artificial Sequence
  Synthetic
uugauccaccgugugca

SEQ ID NO: 695206 - RNA, 17 nt, Artificial Sequence
  Synthetic
uuuaaauaccgguugca

SEQ ID NO: 695207 - RNA, 17 nt, Artificial Sequence
  Synthetic
acguaacccuauuugca

SEQ ID NO: 695208 - RNA, 17 nt, Artificial Sequence
  Synthetic
aacguugguccgaauca

SEQ ID NO: 695209 - RNA, 17 nt, Artificial Sequence
  Synthetic
aaccagguacggaauca

SEQ ID NO: 695210 - RNA, 17 nt, Artificial Sequence
  Synthetic
auccaccgaaguaauca

SEQ ID NO: 695211 - RNA, 17 nt, Artificial Sequence
  Synthetic
agcauuaguccauauca

SEQ ID NO: 695212 - RNA, 17 nt, Artificial Sequence
  Synthetic
cggaguacuggaacuca

SEQ ID NO: 695213 - RNA, 17 nt, Artificial Sequence
  Synthetic
caaggaucgaacacuca

SEQ ID NO: 695214 - RNA, 17 nt, Artificial Sequence
  Synthetic
uacgugucauccacuca

SEQ ID NO: 695215 - RNA, 17 nt, Artificial Sequence
  Synthetic
auuggaaacgagacuca

SEQ ID NO: 695216 - RNA, 17 nt, Artificial Sequence
  Synthetic
aauagccuugcgacuca

SEQ ID NO: 695217 - RNA, 17 nt, Artificial Sequence
  Synthetic
ccucgaaaugauacuca

SEQ ID NO: 695218 - RNA, 17 nt, Artificial Sequence
  Synthetic
uuguuggagaacccuca

SEQ ID NO: 695219 - RNA, 17 nt, Artificial Sequence
  Synthetic
aucguauacaucccuca

SEQ ID NO: 695220 - RNA, 17 nt, Artificial Sequence
  Synthetic
caaacgguuauagcuca

SEQ ID NO: 695221 - RNA, 17 nt, Artificial Sequence
  Synthetic
agaucuguuucggcuca

SEQ ID NO: 695222 - RNA, 17 nt, Artificial Sequence
  Synthetic
cuauucaccaucaguca

SEQ ID NO: 695223 - RNA, 17 nt, Artificial Sequence
  Synthetic
uuaggauaauaccguca

SEQ ID NO: 695224 - RNA, 17 nt, Artificial Sequence
  Synthetic
agcagcuaucuccguca

SEQ ID NO: 695225 - RNA, 17 nt, Artificial Sequence
  Synthetic
cucacaaagguccguca

SEQ ID NO: 695226 - RNA, 17 nt, Artificial Sequence
  Synthetic
acuuaacaguaucguca

SEQ ID NO: 695227 - RNA, 17 nt, Artificial Sequence
  Synthetic
ugggauuaacgggguca

SEQ ID NO: 695228 - RNA, 17 nt, Artificial Sequence
  Synthetic
acccccaaguuauguca

SEQ ID NO: 695229 - RNA, 17 nt, Artificial Sequence
  Synthetic
agcuugcuauuguguca

SEQ ID NO: 695230 - RNA, 17 nt, Artificial Sequence
  Synthetic
uaaacagugcguuguca

SEQ ID NO: 695231 - RNA, 17 nt, Artificial Sequence
  Synthetic
uacuauuccguuuguca

SEQ ID NO: 695232 - RNA, 17 nt, Artificial Sequence
  Synthetic
uggcggugguucauuca

SEQ ID NO: 695233 - RNA, 17 nt, Artificial Sequence
  Synthetic
ugcaaaugcgguauuca

SEQ ID NO: 695234 - RNA, 17 nt, Artificial Sequence
  Synthetic
ucgucagucagacuuca

SEQ ID NO: 695235 - RNA, 17 nt, Artificial Sequence
  Synthetic
uacgaccuauuacuuca

SEQ ID NO: 695236 - RNA, 17 nt, Artificial Sequence
  Synthetic
cguuauauugaccuuca

SEQ ID NO: 695237 - RNA, 17 nt, Artificial Sequence
  Synthetic
agcacguauggccuuca

SEQ ID NO: 695238 - RNA, 17 nt, Artificial Sequence
  Synthetic
cguaagacccagcuuca

SEQ ID NO: 695239 - RNA, 17 nt, Artificial Sequence
  Synthetic
uguaguuagacgcuuca

SEQ ID NO: 695240 - RNA, 17 nt, Artificial Sequence
  Synthetic
aucuggacggcucuuca

SEQ ID NO: 695241 - RNA, 17 nt, Artificial Sequence
  Synthetic
agcucucucuacguuca

SEQ ID NO: 695242 - RNA, 17 nt, Artificial Sequence
  Synthetic
acgcagauccaguuuca

SEQ ID NO: 695243 - RNA, 17 nt, Artificial Sequence
  Synthetic
cccgauacagauaaaga

SEQ ID NO: 695244 - RNA, 17 nt, Artificial Sequence
  Synthetic
ucgauaggggauaaaga

SEQ ID NO: 695245 - RNA, 17 nt, Artificial Sequence
  Synthetic
aauccuugguaucaaga

SEQ ID NO: 695246 - RNA, 17 nt, Artificial Sequence
  Synthetic
uuguagguuuccgaaga

SEQ ID NO: 695247 - RNA, 17 nt, Artificial Sequence
  Synthetic
uaacuccggagggaaga

SEQ ID NO: 695248 - RNA, 17 nt, Artificial Sequence
  Synthetic
uacgugguagccuaaga

SEQ ID NO: 695249 - RNA, 17 nt, Artificial Sequence
  Synthetic
agugaaugcgauuaaga

SEQ ID NO: 695250 - RNA, 17 nt, Artificial Sequence
  Synthetic
caagccccgccaacaga

SEQ ID NO: 695251 - RNA, 17 nt, Artificial Sequence
  Synthetic
cguugcuaggugacaga

SEQ ID NO: 695252 - RNA, 17 nt, Artificial Sequence
  Synthetic
aucagccggaauacaga

SEQ ID NO: 695253 - RNA, 17 nt, Artificial Sequence
  Synthetic
uucucguauugcccaga

SEQ ID NO: 695254 - RNA, 17 nt, Artificial Sequence
  Synthetic
ugccgaguaaucccaga

SEQ ID NO: 695255 - RNA, 17 nt, Artificial Sequence
  Synthetic
cacagcgucuagucaga

SEQ ID NO: 695256 - RNA, 17 nt, Artificial Sequence
  Synthetic
uaccguguacguucaga

SEQ ID NO: 695257 - RNA, 17 nt, Artificial Sequence
  Synthetic
aucugggcaauacgaga

SEQ ID NO: 695258 - RNA, 17 nt, Artificial Sequence
  Synthetic
acuggagcuaaccgaga

SEQ ID NO: 695259 - RNA, 17 nt, Artificial Sequence
  Synthetic
ccacuauguccccgaga

SEQ ID NO: 695260 - RNA, 17 nt, Artificial Sequence
  Synthetic
uaucuacccuaucgaga

SEQ ID NO: 695261 - RNA, 17 nt, Artificial Sequence
  Synthetic
cagugguaccccggaga

SEQ ID NO: 695262 - RNA, 17 nt, Artificial Sequence
  Synthetic
cagcacgaccuuggaga

SEQ ID NO: 695263 - RNA, 17 nt, Artificial Sequence
  Synthetic
acacuauauccaugaga

SEQ ID NO: 695264 - RNA, 17 nt, Artificial Sequence
  Synthetic
ucucgugucagcugaga

SEQ ID NO: 695265 - RNA, 17 nt, Artificial Sequence
  Synthetic
uacuccccacggugaga

SEQ ID NO: 695266 - RNA, 17 nt, Artificial Sequence
  Synthetic
cgguguccaaauugaga

SEQ ID NO: 695267 - RNA, 17 nt, Artificial Sequence
  Synthetic
ugccaacggcagauaga

SEQ ID NO: 695268 - RNA, 17 nt, Artificial Sequence
  Synthetic
accaagccugcacuaga

SEQ ID NO: 695269 - RNA, 17 nt, Artificial Sequence
  Synthetic
uucuauauggaccuaga

SEQ ID NO: 695270 - RNA, 17 nt, Artificial Sequence
  Synthetic
accuaaggccagcuaga

SEQ ID NO: 695271 - RNA, 17 nt, Artificial Sequence
  Synthetic
uuuagucguuaaguaga

SEQ ID NO: 695272 - RNA, 17 nt, Artificial Sequence
  Synthetic
caugauggacgauuaga

SEQ ID NO: 695273 - RNA, 17 nt, Artificial Sequence
  Synthetic
uagcgcuccuacuuaga

SEQ ID NO: 695274 - RNA, 17 nt, Artificial Sequence
  Synthetic
ccccuacaucccuuaga

SEQ ID NO: 695275 - RNA, 17 nt, Artificial Sequence
  Synthetic
uugcugcagauaaacga

SEQ ID NO: 695276 - RNA, 17 nt, Artificial Sequence
  Synthetic
agucgagaaguaaacga

SEQ ID NO: 695277 - RNA, 17 nt, Artificial Sequence
  Synthetic
ccuucauuugccaacga

SEQ ID NO: 695278 - RNA, 17 nt, Artificial Sequence
  Synthetic
uuacaggagggcaacga

SEQ ID NO: 695279 - RNA, 17 nt, Artificial Sequence
  Synthetic
uguuucguucucaacga

SEQ ID NO: 695280 - RNA, 17 nt, Artificial Sequence
  Synthetic
acuauuaucuucaacga

SEQ ID NO: 695281 - RNA, 17 nt, Artificial Sequence
  Synthetic
cuucaauaacuuaacga

SEQ ID NO: 695282 - RNA, 17 nt, Artificial Sequence
  Synthetic
uucuacacuuuacacga

SEQ ID NO: 695283 - RNA, 17 nt, Artificial Sequence
  Synthetic
augcugacaacucacga

SEQ ID NO: 695284 - RNA, 17 nt, Artificial Sequence
  Synthetic
uccccgacugacuacga

SEQ ID NO: 695285 - RNA, 17 nt, Artificial Sequence
  Synthetic
aguggaugcauguacga

SEQ ID NO: 695286 - RNA, 17 nt, Artificial Sequence
  Synthetic
ccagauugaacuuacga

SEQ ID NO: 695287 - RNA, 17 nt, Artificial Sequence
  Synthetic
aaauucuaauccaccga

SEQ ID NO: 695288 - RNA, 17 nt, Artificial Sequence
  Synthetic
uaagucacuuucaccga

SEQ ID NO: 695289 - RNA, 17 nt, Artificial Sequence
  Synthetic
ugaagcgacuugaccga

SEQ ID NO: 695290 - RNA, 17 nt, Artificial Sequence
  Synthetic
uauuaaguggauaccga

SEQ ID NO: 695291 - RNA, 17 nt, Artificial Sequence
  Synthetic
uacucuaguuguaccga

SEQ ID NO: 695292 - RNA, 17 nt, Artificial Sequence
  Synthetic
cucccaacaggacccga

SEQ ID NO: 695293 - RNA, 17 nt, Artificial Sequence
  Synthetic
aaguugacccuucccga

SEQ ID NO: 695294 - RNA, 17 nt, Artificial Sequence
  Synthetic
acccuuuugacggccga

SEQ ID NO: 695295 - RNA, 17 nt, Artificial Sequence
  Synthetic
ccaggagcgcuugccga

SEQ ID NO: 695296 - RNA, 17 nt, Artificial Sequence
  Synthetic
ccaacacuaugauccga

SEQ ID NO: 695297 - RNA, 17 nt, Artificial Sequence
  Synthetic
aagacuaacgaaagcga

SEQ ID NO: 695298 - RNA, 17 nt, Artificial Sequence
  Synthetic
uugcugcuauagggcga

SEQ ID NO: 695299 - RNA, 17 nt, Artificial Sequence
  Synthetic
augggucaagaaugcga

SEQ ID NO: 695300 - RNA, 17 nt, Artificial Sequence
  Synthetic
uggcuuuauagcugcga

SEQ ID NO: 695301 - RNA, 17 nt, Artificial Sequence
  Synthetic
aagacuuuuggcugcga

SEQ ID NO: 695302 - RNA, 17 nt, Artificial Sequence
  Synthetic
auacacuuggggugcga

SEQ ID NO: 695303 - RNA, 17 nt, Artificial Sequence
  Synthetic
aaguuaacuuugugcga

SEQ ID NO: 695304 - RNA, 17 nt, Artificial Sequence
  Synthetic
cauagccauuuuaucga

SEQ ID NO: 695305 - RNA, 17 nt, Artificial Sequence
  Synthetic
caucgcaacgaacucga

SEQ ID NO: 695306 - RNA, 17 nt, Artificial Sequence
  Synthetic
cagacuauuggacucga

SEQ ID NO: 695307 - RNA, 17 nt, Artificial Sequence
  Synthetic
agaagaaccccgcucga

SEQ ID NO: 695308 - RNA, 17 nt, Artificial Sequence
  Synthetic
caaagcugaagucucga

SEQ ID NO: 695309 - RNA, 17 nt, Artificial Sequence
  Synthetic
aucuuugugugagucga

SEQ ID NO: 695310 - RNA, 17 nt, Artificial Sequence
  Synthetic
aucugcuaagaugucga

SEQ ID NO: 695311 - RNA, 17 nt, Artificial Sequence
  Synthetic
auacguuaaaaauucga

SEQ ID NO: 695312 - RNA, 17 nt, Artificial Sequence
  Synthetic
uugacgcagccauucga

SEQ ID NO: 695313 - RNA, 17 nt, Artificial Sequence
  Synthetic
uuggccuauagauucga

SEQ ID NO: 695314 - RNA, 17 nt, Artificial Sequence
  Synthetic
acauuagaacaguucga

SEQ ID NO: 695315 - RNA, 17 nt, Artificial Sequence
  Synthetic
accguaugaagcaagga

SEQ ID NO: 695316 - RNA, 17 nt, Artificial Sequence
  Synthetic
acgcucccgagucagga

SEQ ID NO: 695317 - RNA, 17 nt, Artificial Sequence
  Synthetic
uaagaauucguugagga

SEQ ID NO: 695318 - RNA, 17 nt, Artificial Sequence
  Synthetic
auuacucccaguuagga

SEQ ID NO: 695319 - RNA, 17 nt, Artificial Sequence
  Synthetic
ucaggcauuacuacgga

SEQ ID NO: 695320 - RNA, 17 nt, Artificial Sequence
  Synthetic
ugauaaugaccuacgga

SEQ ID NO: 695321 - RNA, 17 nt, Artificial Sequence
  Synthetic
agcuaaguaacuccgga

SEQ ID NO: 695322 - RNA, 17 nt, Artificial Sequence
  Synthetic
aguacagagcaagcgga

SEQ ID NO: 695323 - RNA, 17 nt, Artificial Sequence
  Synthetic
uacauggaaacagcgga

SEQ ID NO: 695324 - RNA, 17 nt, Artificial Sequence
  Synthetic
aaagccuacacaucgga

SEQ ID NO: 695325 - RNA, 17 nt, Artificial Sequence
  Synthetic
aguguguugaauucgga

SEQ ID NO: 695326 - RNA, 17 nt, Artificial Sequence
  Synthetic
uugguuuucccucggga

SEQ ID NO: 695327 - RNA, 17 nt, Artificial Sequence
  Synthetic
caacgguccuuagggga

SEQ ID NO: 695328 - RNA, 17 nt, Artificial Sequence
  Synthetic
augacccgauuugggga

SEQ ID NO: 695329 - RNA, 17 nt, Artificial Sequence
  Synthetic
uuagaguacggcuggga

SEQ ID NO: 695330 - RNA, 17 nt, Artificial Sequence
  Synthetic
uucuucggguuguggga

SEQ ID NO: 695331 - RNA, 17 nt, Artificial Sequence
  Synthetic
ucagaaccacguaugga

SEQ ID NO: 695332 - RNA, 17 nt, Artificial Sequence
  Synthetic
caaauucgacuccugga

SEQ ID NO: 695333 - RNA, 17 nt, Artificial Sequence
  Synthetic
ucaguuacggaagugga

SEQ ID NO: 695334 - RNA, 17 nt, Artificial Sequence
  Synthetic
uaugcuuucgaugugga

SEQ ID NO: 695335 - RNA, 17 nt, Artificial Sequence
  Synthetic
agcucgaagagguugga

SEQ ID NO: 695336 - RNA, 17 nt, Artificial Sequence
  Synthetic
cuaaucgcucuguugga

SEQ ID NO: 695337 - RNA, 17 nt, Artificial Sequence
  Synthetic
uccgcuugucuuaauga

SEQ ID NO: 695338 - RNA, 17 nt, Artificial Sequence
  Synthetic
agcuagcuaggccauga

SEQ ID NO: 695339 - RNA, 17 nt, Artificial Sequence
  Synthetic
cgagaagcuuuccauga

SEQ ID NO: 695340 - RNA, 17 nt, Artificial Sequence
  Synthetic
caccugauggacgauga

SEQ ID NO: 695341 - RNA, 17 nt, Artificial Sequence
  Synthetic
caacuucuaucggauga

SEQ ID NO: 695342 - RNA, 17 nt, Artificial Sequence
  Synthetic
cuagaucaaaacuauga

SEQ ID NO: 695343 - RNA, 17 nt, Artificial Sequence
  Synthetic
cuagaucaacauuauga

SEQ ID NO: 695344 - RNA, 17 nt, Artificial Sequence
  Synthetic
caauuggcagguacuga

SEQ ID NO: 695345 - RNA, 17 nt, Artificial Sequence
  Synthetic
aagguaugcuccccuga

SEQ ID NO: 695346 - RNA, 17 nt, Artificial Sequence
  Synthetic
uagguuacaacuccuga

SEQ ID NO: 695347 - RNA, 17 nt, Artificial Sequence
  Synthetic
cuaugcauaugcgcuga

SEQ ID NO: 695348 - RNA, 17 nt, Artificial Sequence
  Synthetic
aaccggagauuggcuga

SEQ ID NO: 695349 - RNA, 17 nt, Artificial Sequence
  Synthetic
augauagcgggaucuga

SEQ ID NO: 695350 - RNA, 17 nt, Artificial Sequence
  Synthetic
ucucgauugaugucuga

SEQ ID NO: 695351 - RNA, 17 nt, Artificial Sequence
  Synthetic
uguagacguagaaguga

SEQ ID NO: 695352 - RNA, 17 nt, Artificial Sequence
  Synthetic
augagcaagucgaguga

SEQ ID NO: 695353 - RNA, 17 nt, Artificial Sequence
  Synthetic
auacgcucugggaguga

SEQ ID NO: 695354 - RNA, 17 nt, Artificial Sequence
  Synthetic
augggucacaaacguga

SEQ ID NO: 695355 - RNA, 17 nt, Artificial Sequence
  Synthetic
aguuccauguaacguga

SEQ ID NO: 695356 - RNA, 17 nt, Artificial Sequence
  Synthetic
aguucugcucuacguga

SEQ ID NO: 695357 - RNA, 17 nt, Artificial Sequence
  Synthetic
cuucaauucaaucguga

SEQ ID NO: 695358 - RNA, 17 nt, Artificial Sequence
  Synthetic
cggcuugacuacuguga

SEQ ID NO: 695359 - RNA, 17 nt, Artificial Sequence
  Synthetic
aauccguuuaucuguga

SEQ ID NO: 695360 - RNA, 17 nt, Artificial Sequence
  Synthetic
aaagacgaucucuguga

SEQ ID NO: 695361 - RNA, 17 nt, Artificial Sequence
  Synthetic
uaauccguaaguuguga

SEQ ID NO: 695362 - RNA, 17 nt, Artificial Sequence
  Synthetic
acaggagacguaauuga

SEQ ID NO: 695363 - RNA, 17 nt, Artificial Sequence
  Synthetic
cguagguacuuaauuga

SEQ ID NO: 695364 - RNA, 17 nt, Artificial Sequence
  Synthetic
cuuggcaccccuauuga

SEQ ID NO: 695365 - RNA, 17 nt, Artificial Sequence
  Synthetic
uaguugguggguauuga

SEQ ID NO: 695366 - RNA, 17 nt, Artificial Sequence
  Synthetic
agcccgaucauuauuga

SEQ ID NO: 695367 - RNA, 17 nt, Artificial Sequence
  Synthetic
cacucguuuugacuuga

SEQ ID NO: 695368 - RNA, 17 nt, Artificial Sequence
  Synthetic
ccauacuggaaccuuga

SEQ ID NO: 695369 - RNA, 17 nt, Artificial Sequence
  Synthetic
auagaggcuacgcuuga

SEQ ID NO: 695370 - RNA, 17 nt, Artificial Sequence
  Synthetic
aggguagacccucuuga

SEQ ID NO: 695371 - RNA, 17 nt, Artificial Sequence
  Synthetic
uuauggccgucucuuga

SEQ ID NO: 695372 - RNA, 17 nt, Artificial Sequence
  Synthetic
uacagacguaaaguuga

SEQ ID NO: 695373 - RNA, 17 nt, Artificial Sequence
  Synthetic
cacugguuaaucguuga

SEQ ID NO: 695374 - RNA, 17 nt, Artificial Sequence
  Synthetic
cugcacguauugguuga

SEQ ID NO: 695375 - RNA, 17 nt, Artificial Sequence
  Synthetic
cuaugcuaucacuuuga

SEQ ID NO: 695376 - RNA, 17 nt, Artificial Sequence
  Synthetic
cuguagggguauuuuga

SEQ ID NO: 695377 - RNA, 17 nt, Artificial Sequence
  Synthetic
cacuagaugcccaaaua

SEQ ID NO: 695378 - RNA, 17 nt, Artificial Sequence
  Synthetic
cguauuguagggaaaua

SEQ ID NO: 695379 - RNA, 17 nt, Artificial Sequence
  Synthetic
cacagcgauguacaaua

SEQ ID NO: 695380 - RNA, 17 nt, Artificial Sequence
  Synthetic
uauagacuugcgcaaua

SEQ ID NO: 695381 - RNA, 17 nt, Artificial Sequence
  Synthetic
ccccgaagcaaagaaua

SEQ ID NO: 695382 - RNA, 17 nt, Artificial Sequence
  Synthetic
uaaggggauuucgaaua

SEQ ID NO: 695383 - RNA, 17 nt, Artificial Sequence
  Synthetic
cgguggcccagauaaua

SEQ ID NO: 695384 - RNA, 17 nt, Artificial Sequence
  Synthetic
cagccauacuccuaaua

SEQ ID NO: 695385 - RNA, 17 nt, Artificial Sequence
  Synthetic
acuugccuaccuuaaua

SEQ ID NO: 695386 - RNA, 17 nt, Artificial Sequence
  Synthetic
cauucgcaaucaacaua

SEQ ID NO: 695387 - RNA, 17 nt, Artificial Sequence
  Synthetic
aaaggugaucgaacaua

SEQ ID NO: 695388 - RNA, 17 nt, Artificial Sequence
  Synthetic
aggaugcauaccacaua

SEQ ID NO: 695389 - RNA, 17 nt, Artificial Sequence
  Synthetic
acggggcugcagacaua

SEQ ID NO: 695390 - RNA, 17 nt, Artificial Sequence
  Synthetic
uuaguaaugucgacaua

SEQ ID NO: 695391 - RNA, 17 nt, Artificial Sequence
  Synthetic
ucuugccccgaaccaua

SEQ ID NO: 695392 - RNA, 17 nt, Artificial Sequence
  Synthetic
aauuuuccggaaccaua

SEQ ID NO: 695393 - RNA, 17 nt, Artificial Sequence
  Synthetic
agccacuuaaacccaua

SEQ ID NO: 695394 - RNA, 17 nt, Artificial Sequence
  Synthetic
cgggaguugcacccaua

SEQ ID NO: 695395 - RNA, 17 nt, Artificial Sequence
  Synthetic
ugcauacuccauccaua

SEQ ID NO: 695396 - RNA, 17 nt, Artificial Sequence
  Synthetic
ccacgggaauuuccaua

SEQ ID NO: 695397 - RNA, 17 nt, Artificial Sequence
  Synthetic
cacccuacuacggcaua

SEQ ID NO: 695398 - RNA, 17 nt, Artificial Sequence
  Synthetic
uucaacgacccugcaua

SEQ ID NO: 695399 - RNA, 17 nt, Artificial Sequence
  Synthetic
ccuucacguugugcaua

SEQ ID NO: 695400 - RNA, 17 nt, Artificial Sequence
  Synthetic
acacgaaucguaucaua

SEQ ID NO: 695401 - RNA, 17 nt, Artificial Sequence
  Synthetic
acucuccucguaucaua

SEQ ID NO: 695402 - RNA, 17 nt, Artificial Sequence
  Synthetic
uagucucuuagcucaua

SEQ ID NO: 695403 - RNA, 17 nt, Artificial Sequence
  Synthetic
uggaaacugcggucaua

SEQ ID NO: 695404 - RNA, 17 nt, Artificial Sequence
  Synthetic
ugggacucuguuagaua

SEQ ID NO: 695405 - RNA, 17 nt, Artificial Sequence
  Synthetic
aauugugcagaacgaua

SEQ ID NO: 695406 - RNA, 17 nt, Artificial Sequence
  Synthetic
cuguaaggacuacgaua

SEQ ID NO: 695407 - RNA, 17 nt, Artificial Sequence
  Synthetic
ucucacuuaguacgaua

SEQ ID NO: 695408 - RNA, 17 nt, Artificial Sequence
  Synthetic
uaaaccuacuaccgaua

SEQ ID NO: 695409 - RNA, 17 nt, Artificial Sequence
  Synthetic
agauaccuucaucgaua

SEQ ID NO: 695410 - RNA, 17 nt, Artificial Sequence
  Synthetic
ucgugguuuccucgaua

SEQ ID NO: 695411 - RNA, 17 nt, Artificial Sequence
  Synthetic
uucucuuagugucgaua

SEQ ID NO: 695412 - RNA, 17 nt, Artificial Sequence
  Synthetic
augauacugguaggaua

SEQ ID NO: 695413 - RNA, 17 nt, Artificial Sequence
  Synthetic
aacuuauauuacggaua

SEQ ID NO: 695414 - RNA, 17 nt, Artificial Sequence
  Synthetic
ugcaugacaacgggaua

SEQ ID NO: 695415 - RNA, 17 nt, Artificial Sequence
  Synthetic
cccuuugaccaaugaua

SEQ ID NO: 695416 - RNA, 17 nt, Artificial Sequence
  Synthetic
ucagucgcuauaugaua

SEQ ID NO: 695417 - RNA, 17 nt, Artificial Sequence
  Synthetic
uucgaaacucuaugaua

SEQ ID NO: 695418 - RNA, 17 nt, Artificial Sequence
  Synthetic
ucguaggaguucugaua

SEQ ID NO: 695419 - RNA, 17 nt, Artificial Sequence
  Synthetic
ccccucucgggaauaua

SEQ ID NO: 695420 - RNA, 17 nt, Artificial Sequence
  Synthetic
cuuuggacguacauaua

SEQ ID NO: 695421 - RNA, 17 nt, Artificial Sequence
  Synthetic
aacaucgcauugauaua

SEQ ID NO: 695422 - RNA, 17 nt, Artificial Sequence
  Synthetic
auugucggauugauaua

SEQ ID NO: 695423 - RNA, 17 nt, Artificial Sequence
  Synthetic
augacggauaaacuaua

SEQ ID NO: 695424 - RNA, 17 nt, Artificial Sequence
  Synthetic
ucaugacaccaacuaua

SEQ ID NO: 695425 - RNA, 17 nt, Artificial Sequence
  Synthetic
aaauucaggucccuaua

SEQ ID NO: 695426 - RNA, 17 nt, Artificial Sequence
  Synthetic
uacgucaacaagcuaua

SEQ ID NO: 695427 - RNA, 17 nt, Artificial Sequence
  Synthetic
ucaaucaugacaguaua

SEQ ID NO: 695428 - RNA, 17 nt, Artificial Sequence
  Synthetic
auugguccuagaguaua

SEQ ID NO: 695429 - RNA, 17 nt, Artificial Sequence
  Synthetic
uuaccuccucuaguaua

SEQ ID NO: 695430 - RNA, 17 nt, Artificial Sequence
  Synthetic
acgugaugugagguaua

SEQ ID NO: 695431 - RNA, 17 nt, Artificial Sequence
  Synthetic
acccuagccaacuuaua

SEQ ID NO: 695432 - RNA, 17 nt, Artificial Sequence
  Synthetic
ucgaggagacguuuaua

SEQ ID NO: 695433 - RNA, 17 nt, Artificial Sequence
  Synthetic
cguaugcugagaaacua

SEQ ID NO: 695434 - RNA, 17 nt, Artificial Sequence
  Synthetic
uguggacagacgaacua

SEQ ID NO: 695435 - RNA, 17 nt, Artificial Sequence
  Synthetic
cuagggagugcacacua

SEQ ID NO: 695436 - RNA, 17 nt, Artificial Sequence
  Synthetic
aguaaucucauagacua

SEQ ID NO: 695437 - RNA, 17 nt, Artificial Sequence
  Synthetic
uaaaugcgagccgacua

SEQ ID NO: 695438 - RNA, 17 nt, Artificial Sequence
  Synthetic
uaagauggguuggacua

SEQ ID NO: 695439 - RNA, 17 nt, Artificial Sequence
  Synthetic
uucauuucgcuauacua

SEQ ID NO: 695440 - RNA, 17 nt, Artificial Sequence
  Synthetic
caacucugaucuuacua

SEQ ID NO: 695441 - RNA, 17 nt, Artificial Sequence
  Synthetic
acaaggcucacaaccua

SEQ ID NO: 695442 - RNA, 17 nt, Artificial Sequence
  Synthetic
cgguuggccaguaccua

SEQ ID NO: 695443 - RNA, 17 nt, Artificial Sequence
  Synthetic
uugugaccucaacccua

SEQ ID NO: 695444 - RNA, 17 nt, Artificial Sequence
  Synthetic
uuauuuggggcacccua

SEQ ID NO: 695445 - RNA, 17 nt, Artificial Sequence
  Synthetic
ccaaagacuuaccccua

SEQ ID NO: 695446 - RNA, 17 nt, Artificial Sequence
  Synthetic
agacaacacugccccua

SEQ ID NO: 695447 - RNA, 17 nt, Artificial Sequence
  Synthetic
uacuagagagagcccua

SEQ ID NO: 695448 - RNA, 17 nt, Artificial Sequence
  Synthetic
uaaguccuaacgcccua

SEQ ID NO: 695449 - RNA, 17 nt, Artificial Sequence
  Synthetic
acucacuugcggcccua

SEQ ID NO: 695450 - RNA, 17 nt, Artificial Sequence
  Synthetic
uagacuccuaugcccua

SEQ ID NO: 695451 - RNA, 17 nt, Artificial Sequence
  Synthetic
uuugccgcagcagccua

SEQ ID NO: 695452 - RNA, 17 nt, Artificial Sequence
  Synthetic
uagaguaagucagccua

SEQ ID NO: 695453 - RNA, 17 nt, Artificial Sequence
  Synthetic
uugcaacuuugagccua

SEQ ID NO: 695454 - RNA, 17 nt, Artificial Sequence
  Synthetic
agaauuaguacggccua

SEQ ID NO: 695455 - RNA, 17 nt, Artificial Sequence
  Synthetic
ccauaacuuccggccua

SEQ ID NO: 695456 - RNA, 17 nt, Artificial Sequence
  Synthetic
aaaugaggcuaguccua

SEQ ID NO: 695457 - RNA, 17 nt, Artificial Sequence
  Synthetic
ucauuggagagguccua

SEQ ID NO: 695458 - RNA, 17 nt, Artificial Sequence
  Synthetic
ucuuaaacgagcagcua

SEQ ID NO: 695459 - RNA, 17 nt, Artificial Sequence
  Synthetic
ccaaucuaaaugagcua

SEQ ID NO: 695460 - RNA, 17 nt, Artificial Sequence
  Synthetic
ucuaggaagcaccgcua

SEQ ID NO: 695461 - RNA, 17 nt, Artificial Sequence
  Synthetic
ugcgcgcgcgugcgcua

SEQ ID NO: 695462 - RNA, 17 nt, Artificial Sequence
  Synthetic
cuacagauuaccggcua

SEQ ID NO: 695463 - RNA, 17 nt, Artificial Sequence
  Synthetic
augccaagcuauggcua

SEQ ID NO: 695464 - RNA, 17 nt, Artificial Sequence
  Synthetic
uucacgaucaguggcua

SEQ ID NO: 695465 - RNA, 17 nt, Artificial Sequence
  Synthetic
ccauaagggggcugcua

SEQ ID NO: 695466 - RNA, 17 nt, Artificial Sequence
  Synthetic
auuaauccggagugcua

SEQ ID NO: 695467 - RNA, 17 nt, Artificial Sequence
  Synthetic
uuacuaugauagugcua

SEQ ID NO: 695468 - RNA, 17 nt, Artificial Sequence
  Synthetic
auugcuaugccaaucua

SEQ ID NO: 695469 - RNA, 17 nt, Artificial Sequence
  Synthetic
acuauggcccugaucua

SEQ ID NO: 695470 - RNA, 17 nt, Artificial Sequence
  Synthetic
acauuaacuccuaucua

SEQ ID NO: 695471 - RNA, 17 nt, Artificial Sequence
  Synthetic
uaguacacaucuaucua

SEQ ID NO: 695472 - RNA, 17 nt, Artificial Sequence
  Synthetic
augaaacggacacucua

SEQ ID NO: 695473 - RNA, 17 nt, Artificial Sequence
  Synthetic
ccgccucuugaccucua

SEQ ID NO: 695474 - RNA, 17 nt, Artificial Sequence
  Synthetic
cggaaucccucagucua

SEQ ID NO: 695475 - RNA, 17 nt, Artificial Sequence
  Synthetic
caauuacugcacgucua

SEQ ID NO: 695476 - RNA, 17 nt, Artificial Sequence
  Synthetic
cuaugauagagugucua

SEQ ID NO: 695477 - RNA, 17 nt, Artificial Sequence
  Synthetic
acccguguugcuuucua

SEQ ID NO: 695478 - RNA, 17 nt, Artificial Sequence
  Synthetic
accgcuuaaauuuucua

SEQ ID NO: 695479 - RNA, 17 nt, Artificial Sequence
  Synthetic
accguacuuauaaagua

SEQ ID NO: 695480 - RNA, 17 nt, Artificial Sequence
  Synthetic
ugauuucgaggcaagua

SEQ ID NO: 695481 - RNA, 17 nt, Artificial Sequence
  Synthetic
cuccuuaacgagaagua

SEQ ID NO: 695482 - RNA, 17 nt, Artificial Sequence
  Synthetic
agauguccuaaacagua

SEQ ID NO: 695483 - RNA, 17 nt, Artificial Sequence
  Synthetic
acaaggugcauccagua

SEQ ID NO: 695484 - RNA, 17 nt, Artificial Sequence
  Synthetic
uaauagagacgucagua

SEQ ID NO: 695485 - RNA, 17 nt, Artificial Sequence
  Synthetic
auuaacacagccgagua

SEQ ID NO: 695486 - RNA, 17 nt, Artificial Sequence
  Synthetic
cgugccuuacucgagua

SEQ ID NO: 695487 - RNA, 17 nt, Artificial Sequence
  Synthetic
uaccuuaugccguagua

SEQ ID NO: 695488 - RNA, 17 nt, Artificial Sequence
  Synthetic
uagcucagaaccacgua

SEQ ID NO: 695489 - RNA, 17 nt, Artificial Sequence
  Synthetic
uacggagcuaucacgua

SEQ ID NO: 695490 - RNA, 17 nt, Artificial Sequence
  Synthetic
uuuccagaugauacgua

SEQ ID NO: 695491 - RNA, 17 nt, Artificial Sequence
  Synthetic
aggagacacuuuacgua

SEQ ID NO: 695492 - RNA, 17 nt, Artificial Sequence
  Synthetic
cucccuuucaccccgua

SEQ ID NO: 695493 - RNA, 17 nt, Artificial Sequence
  Synthetic
cagcucaucuuuccgua

SEQ ID NO: 695494 - RNA, 17 nt, Artificial Sequence
  Synthetic
uacugcagguaagcgua

SEQ ID NO: 695495 - RNA, 17 nt, Artificial Sequence
  Synthetic
uauaucauaagagcgua

SEQ ID NO: 695496 - RNA, 17 nt, Artificial Sequence
  Synthetic
ugcaaaggaagcgcgua

SEQ ID NO: 695497 - RNA, 17 nt, Artificial Sequence
  Synthetic
cacacacaaauugcgua

SEQ ID NO: 695498 - RNA, 17 nt, Artificial Sequence
  Synthetic
cauguucuacauucgua

SEQ ID NO: 695499 - RNA, 17 nt, Artificial Sequence
  Synthetic
cauuugacguuaaggua

SEQ ID NO: 695500 - RNA, 17 nt, Artificial Sequence
  Synthetic
uacguuggguacaggua

SEQ ID NO: 695501 - RNA, 17 nt, Artificial Sequence
  Synthetic
cuuuuuacguucaggua

SEQ ID NO: 695502 - RNA, 17 nt, Artificial Sequence
  Synthetic
uugccuaagucgaggua

SEQ ID NO: 695503 - RNA, 17 nt, Artificial Sequence
  Synthetic
cugguacacaauaggua

SEQ ID NO: 695504 - RNA, 17 nt, Artificial Sequence
  Synthetic
cauucucuaaguaggua

SEQ ID NO: 695505 - RNA, 17 nt, Artificial Sequence
  Synthetic
aaaccauacacccggua

SEQ ID NO: 695506 - RNA, 17 nt, Artificial Sequence
  Synthetic
agcaaucaacaucggua

SEQ ID NO: 695507 - RNA, 17 nt, Artificial Sequence
  Synthetic
aucacuaguauucggua

SEQ ID NO: 695508 - RNA, 17 nt, Artificial Sequence
  Synthetic
ccacgcuuucgugggua

SEQ ID NO: 695509 - RNA, 17 nt, Artificial Sequence
  Synthetic
cacuaauaaccauggua

SEQ ID NO: 695510 - RNA, 17 nt, Artificial Sequence
  Synthetic
aaccccgcucgauggua

SEQ ID NO: 695511 - RNA, 17 nt, Artificial Sequence
  Synthetic
ucuagagcaugauggua

SEQ ID NO: 695512 - RNA, 17 nt, Artificial Sequence
  Synthetic
uugguggcucuauggua

SEQ ID NO: 695513 - RNA, 17 nt, Artificial Sequence
  Synthetic
uaguacuuaugcuggua

SEQ ID NO: 695514 - RNA, 17 nt, Artificial Sequence
  Synthetic
caggcaacggauuggua

SEQ ID NO: 695515 - RNA, 17 nt, Artificial Sequence
  Synthetic
ucgauuaaguauuggua

SEQ ID NO: 695516 - RNA, 17 nt, Artificial Sequence
  Synthetic
cucgcccuuacaaugua

SEQ ID NO: 695517 - RNA, 17 nt, Artificial Sequence
  Synthetic
aucgaaaacggaaugua

SEQ ID NO: 695518 - RNA, 17 nt, Artificial Sequence
  Synthetic
ccucccaaucggaugua

SEQ ID NO: 695519 - RNA, 17 nt, Artificial Sequence
  Synthetic
cauggcacgaugaugua

SEQ ID NO: 695520 - RNA, 17 nt, Artificial Sequence
  Synthetic
acugaucacuaacugua

SEQ ID NO: 695521 - RNA, 17 nt, Artificial Sequence
  Synthetic
accaacuugcugcugua

SEQ ID NO: 695522 - RNA, 17 nt, Artificial Sequence
  Synthetic
cagugccgugaucugua

SEQ ID NO: 695523 - RNA, 17 nt, Artificial Sequence
  Synthetic
cguuuacaucuagugua

SEQ ID NO: 695524 - RNA, 17 nt, Artificial Sequence
  Synthetic
cuuggggucaacgugua

SEQ ID NO: 695525 - RNA, 17 nt, Artificial Sequence
  Synthetic
accauaagcuacgugua

SEQ ID NO: 695526 - RNA, 17 nt, Artificial Sequence
  Synthetic
aaauguuacgcugugua

SEQ ID NO: 695527 - RNA, 17 nt, Artificial Sequence
  Synthetic
aguggccggcuugugua

SEQ ID NO: 695528 - RNA, 17 nt, Artificial Sequence
  Synthetic
aagacagacguauugua

SEQ ID NO: 695529 - RNA, 17 nt, Artificial Sequence
  Synthetic
ucaguggacaacuugua

SEQ ID NO: 695530 - RNA, 17 nt, Artificial Sequence
  Synthetic
cuaguauacuacuugua

SEQ ID NO: 695531 - RNA, 17 nt, Artificial Sequence
  Synthetic
ccgaaaucgcaguugua

SEQ ID NO: 695532 - RNA, 17 nt, Artificial Sequence
  Synthetic
auguuaauagcguugua

SEQ ID NO: 695533 - RNA, 17 nt, Artificial Sequence
  Synthetic
auaccuuggugguugua

SEQ ID NO: 695534 - RNA, 17 nt, Artificial Sequence
  Synthetic
aauaccucgugaaauua

SEQ ID NO: 695535 - RNA, 17 nt, Artificial Sequence
  Synthetic
uauuccagacggaauua

SEQ ID NO: 695536 - RNA, 17 nt, Artificial Sequence
  Synthetic
uaacugcgagggaauua

SEQ ID NO: 695537 - RNA, 17 nt, Artificial Sequence
  Synthetic
cccaugauugcuaauua

SEQ ID NO: 695538 - RNA, 17 nt, Artificial Sequence
  Synthetic
cacuuaagcgcacauua

SEQ ID NO: 695539 - RNA, 17 nt, Artificial Sequence
  Synthetic
aacgcccuacuagauua

SEQ ID NO: 695540 - RNA, 17 nt, Artificial Sequence
  Synthetic
ccguucguucuagauua

SEQ ID NO: 695541 - RNA, 17 nt, Artificial Sequence
  Synthetic
caauccacauaggauua

SEQ ID NO: 695542 - RNA, 17 nt, Artificial Sequence
  Synthetic
aauaaaccagcggauua

SEQ ID NO: 695543 - RNA, 17 nt, Artificial Sequence
  Synthetic
cguggggcuuaauauua

SEQ ID NO: 695544 - RNA, 17 nt, Artificial Sequence
  Synthetic
ccauaguuaggauauua

SEQ ID NO: 695545 - RNA, 17 nt, Artificial Sequence
  Synthetic
agucgacaacuauauua

SEQ ID NO: 695546 - RNA, 17 nt, Artificial Sequence
  Synthetic
augucugggcccuauua

SEQ ID NO: 695547 - RNA, 17 nt, Artificial Sequence
  Synthetic
uguguaguuacguauua

SEQ ID NO: 695548 - RNA, 17 nt, Artificial Sequence
  Synthetic
uuaacggauauguauua

SEQ ID NO: 695549 - RNA, 17 nt, Artificial Sequence
  Synthetic
ccuaguucaccuuauua

SEQ ID NO: 695550 - RNA, 17 nt, Artificial Sequence
  Synthetic
uagcguggucuuuauua

SEQ ID NO: 695551 - RNA, 17 nt, Artificial Sequence
  Synthetic
caagccaucacaacuua

SEQ ID NO: 695552 - RNA, 17 nt, Artificial Sequence
  Synthetic
ccauagcagcccccuua

SEQ ID NO: 695553 - RNA, 17 nt, Artificial Sequence
  Synthetic
caaucacgagcuccuua

SEQ ID NO: 695554 - RNA, 17 nt, Artificial Sequence
  Synthetic
uacuugugcuguccuua

SEQ ID NO: 695555 - RNA, 17 nt, Artificial Sequence
  Synthetic
uccauacacguagcuua

SEQ ID NO: 695556 - RNA, 17 nt, Artificial Sequence
  Synthetic
cacuuagcguaaucuua

SEQ ID NO: 695557 - RNA, 17 nt, Artificial Sequence
  Synthetic
agggggacaugaucuua

SEQ ID NO: 695558 - RNA, 17 nt, Artificial Sequence
  Synthetic
ugauauagagccucuua

SEQ ID NO: 695559 - RNA, 17 nt, Artificial Sequence
  Synthetic
cccuaggccggaaguua

SEQ ID NO: 695560 - RNA, 17 nt, Artificial Sequence
  Synthetic
aaccccccaaacaguua

SEQ ID NO: 695561 - RNA, 17 nt, Artificial Sequence
  Synthetic
uggcgcaaaugcaguua

SEQ ID NO: 695562 - RNA, 17 nt, Artificial Sequence
  Synthetic
cgauaauggcucaguua

SEQ ID NO: 695563 - RNA, 17 nt, Artificial Sequence
  Synthetic
aguggccuugugaguua

SEQ ID NO: 695564 - RNA, 17 nt, Artificial Sequence
  Synthetic
ccaaacugugcacguua

SEQ ID NO: 695565 - RNA, 17 nt, Artificial Sequence
  Synthetic
agacuucucacccguua

SEQ ID NO: 695566 - RNA, 17 nt, Artificial Sequence
  Synthetic
ccucuuacuugagguua

SEQ ID NO: 695567 - RNA, 17 nt, Artificial Sequence
  Synthetic
caugcagagcgggguua

SEQ ID NO: 695568 - RNA, 17 nt, Artificial Sequence
  Synthetic
aguauucaaguggguua

SEQ ID NO: 695569 - RNA, 17 nt, Artificial Sequence
  Synthetic
aguugcucguaauguua

SEQ ID NO: 695570 - RNA, 17 nt, Artificial Sequence
  Synthetic
ccaguggauaacuguua

SEQ ID NO: 695571 - RNA, 17 nt, Artificial Sequence
  Synthetic
cuccuccguaucuguua

SEQ ID NO: 695572 - RNA, 17 nt, Artificial Sequence
  Synthetic
uagggcgaaguguguua

SEQ ID NO: 695573 - RNA, 17 nt, Artificial Sequence
  Synthetic
aggauccgaacuuguua

SEQ ID NO: 695574 - RNA, 17 nt, Artificial Sequence
  Synthetic
aaggacccuacuuguua

SEQ ID NO: 695575 - RNA, 17 nt, Artificial Sequence
  Synthetic
aguaguggggcacuuua

SEQ ID NO: 695576 - RNA, 17 nt, Artificial Sequence
  Synthetic
uaagucccuggccuuua

SEQ ID NO: 695577 - RNA, 17 nt, Artificial Sequence
  Synthetic
auuccgauacuaguuua

SEQ ID NO: 695578 - RNA, 17 nt, Artificial Sequence
  Synthetic
uucugagguuccguuua

SEQ ID NO: 695579 - RNA, 17 nt, Artificial Sequence
  Synthetic
aggacguguccuguuua

SEQ ID NO: 695580 - RNA, 17 nt, Artificial Sequence
  Synthetic
uagcucuccaacaaaac

SEQ ID NO: 695581 - RNA, 17 nt, Artificial Sequence
  Synthetic
auaaggagacgcaaaac

SEQ ID NO: 695582 - RNA, 17 nt, Artificial Sequence
  Synthetic
cggaacuauugcaaaac

SEQ ID NO: 695583 - RNA, 17 nt, Artificial Sequence
  Synthetic
ucggguucucagaaaac

SEQ ID NO: 695584 - RNA, 17 nt, Artificial Sequence
  Synthetic
acuggaggucuacaaac

SEQ ID NO: 695585 - RNA, 17 nt, Artificial Sequence
  Synthetic
auaggggcauaagaaac

SEQ ID NO: 695586 - RNA, 17 nt, Artificial Sequence
  Synthetic
uaaguguguuucgaaac

SEQ ID NO: 695587 - RNA, 17 nt, Artificial Sequence
  Synthetic
uuggauauucccuaaac

SEQ ID NO: 695588 - RNA, 17 nt, Artificial Sequence
  Synthetic
uggauugcucauuaaac

SEQ ID NO: 695589 - RNA, 17 nt, Artificial Sequence
  Synthetic
aacccaccuaguuaaac

SEQ ID NO: 695590 - RNA, 17 nt, Artificial Sequence
  Synthetic
uucgggacuguuuaaac

SEQ ID NO: 695591 - RNA, 17 nt, Artificial Sequence
  Synthetic
uggcacguggaaacaac

SEQ ID NO: 695592 - RNA, 17 nt, Artificial Sequence
  Synthetic
uccuaggguagaacaac

SEQ ID NO: 695593 - RNA, 17 nt, Artificial Sequence
  Synthetic
aguauaggcaucacaac

SEQ ID NO: 695594 - RNA, 17 nt, Artificial Sequence
  Synthetic
aaggaguccgggacaac

SEQ ID NO: 695595 - RNA, 17 nt, Artificial Sequence
  Synthetic
uuauugguagauacaac

SEQ ID NO: 695596 - RNA, 17 nt, Artificial Sequence
  Synthetic
uacguagggcaaccaac

SEQ ID NO: 695597 - RNA, 17 nt, Artificial Sequence
  Synthetic
ucaaucguugccccaac

SEQ ID NO: 695598 - RNA, 17 nt, Artificial Sequence
  Synthetic
uauaacaaggucccaac

SEQ ID NO: 695599 - RNA, 17 nt, Artificial Sequence
  Synthetic
cauagguacuggccaac

SEQ ID NO: 695600 - RNA, 17 nt, Artificial Sequence
  Synthetic
uuaggacugcuuccaac

SEQ ID NO: 695601 - RNA, 17 nt, Artificial Sequence
  Synthetic
aagacgauuuuugcaac

SEQ ID NO: 695602 - RNA, 17 nt, Artificial Sequence
  Synthetic
auaacgauggaaucaac

SEQ ID NO: 695603 - RNA, 17 nt, Artificial Sequence
  Synthetic
cucauggucuagucaac

SEQ ID NO: 695604 - RNA, 17 nt, Artificial Sequence
  Synthetic
cucuuugucacgucaac

SEQ ID NO: 695605 - RNA, 17 nt, Artificial Sequence
  Synthetic
ccaccaguguguucaac

SEQ ID NO: 695606 - RNA, 17 nt, Artificial Sequence
  Synthetic
acuaguagcuaaagaac

SEQ ID NO: 695607 - RNA, 17 nt, Artificial Sequence
  Synthetic
uacgguaggauaagaac

SEQ ID NO: 695608 - RNA, 17 nt, Artificial Sequence
  Synthetic
acgcuuuagaugagaac

SEQ ID NO: 695609 - RNA, 17 nt, Artificial Sequence
  Synthetic
cauaaucuagaacgaac

SEQ ID NO: 695610 - RNA, 17 nt, Artificial Sequence
  Synthetic
ugcagguccugccgaac

SEQ ID NO: 695611 - RNA, 17 nt, Artificial Sequence
  Synthetic
aguacugcuugccgaac

SEQ ID NO: 695612 - RNA, 17 nt, Artificial Sequence
  Synthetic
cauauguaacgaggaac

SEQ ID NO: 695613 - RNA, 17 nt, Artificial Sequence
  Synthetic
uuaucuagcaagugaac

SEQ ID NO: 695614 - RNA, 17 nt, Artificial Sequence
  Synthetic
cuuauuggacagugaac

SEQ ID NO: 695615 - RNA, 17 nt, Artificial Sequence
  Synthetic
ugugacuaucggugaac

SEQ ID NO: 695616 - RNA, 17 nt, Artificial Sequence
  Synthetic
cccuuagaacugugaac

SEQ ID NO: 695617 - RNA, 17 nt, Artificial Sequence
  Synthetic
caguuaccgaacauaac

SEQ ID NO: 695618 - RNA, 17 nt, Artificial Sequence
  Synthetic
cguugcaggcauauaac

SEQ ID NO: 695619 - RNA, 17 nt, Artificial Sequence
  Synthetic
cugcuuguagcuauaac

SEQ ID NO: 695620 - RNA, 17 nt, Artificial Sequence
  Synthetic
caaagcacaacccuaac

SEQ ID NO: 695621 - RNA, 17 nt, Artificial Sequence
  Synthetic
cgaaucgggucccuaac

SEQ ID NO: 695622 - RNA, 17 nt, Artificial Sequence
  Synthetic
aagugguacaagcuaac

SEQ ID NO: 695623 - RNA, 17 nt, Artificial Sequence
  Synthetic
aauggaacugcgcuaac

SEQ ID NO: 695624 - RNA, 17 nt, Artificial Sequence
  Synthetic
cgucaagaaguucuaac

SEQ ID NO: 695625 - RNA, 17 nt, Artificial Sequence
  Synthetic
auuuuccaucacguaac

SEQ ID NO: 695626 - RNA, 17 nt, Artificial Sequence
  Synthetic
agaacguacauauuaac

SEQ ID NO: 695627 - RNA, 17 nt, Artificial Sequence
  Synthetic
caccagaacguauuaac

SEQ ID NO: 695628 - RNA, 17 nt, Artificial Sequence
  Synthetic
cuuuuggcuugcuuaac

SEQ ID NO: 695629 - RNA, 17 nt, Artificial Sequence
  Synthetic
uugaguaaaccguuaac

SEQ ID NO: 695630 - RNA, 17 nt, Artificial Sequence
  Synthetic
uagacugagcccaacac

SEQ ID NO: 695631 - RNA, 17 nt, Artificial Sequence
  Synthetic
ucccccgcaaagaacac

SEQ ID NO: 695632 - RNA, 17 nt, Artificial Sequence
  Synthetic
acgugugaggugaacac

SEQ ID NO: 695633 - RNA, 17 nt, Artificial Sequence
  Synthetic
aggacuaugauuaacac

SEQ ID NO: 695634 - RNA, 17 nt, Artificial Sequence
  Synthetic
uugccgucuuaacacac

SEQ ID NO: 695635 - RNA, 17 nt, Artificial Sequence
  Synthetic
uauuaauugguacacac

SEQ ID NO: 695636 - RNA, 17 nt, Artificial Sequence
  Synthetic
ucacuucaaucccacac

SEQ ID NO: 695637 - RNA, 17 nt, Artificial Sequence
  Synthetic
uccacuagaccgcacac

SEQ ID NO: 695638 - RNA, 17 nt, Artificial Sequence
  Synthetic
ccguauuuugugcacac

SEQ ID NO: 695639 - RNA, 17 nt, Artificial Sequence
  Synthetic
aaugcgaguugucacac

SEQ ID NO: 695640 - RNA, 17 nt, Artificial Sequence
  Synthetic
aguagccugaucgacac

SEQ ID NO: 695641 - RNA, 17 nt, Artificial Sequence
  Synthetic
augcuuaagugggacac

SEQ ID NO: 695642 - RNA, 17 nt, Artificial Sequence
  Synthetic
auucauagcgcugacac

SEQ ID NO: 695643 - RNA, 17 nt, Artificial Sequence
  Synthetic
aauuuaagcggugacac

SEQ ID NO: 695644 - RNA, 17 nt, Artificial Sequence
  Synthetic
agugcaugacuugacac

SEQ ID NO: 695645 - RNA, 17 nt, Artificial Sequence
  Synthetic
aucucuacacaauacac

SEQ ID NO: 695646 - RNA, 17 nt, Artificial Sequence
  Synthetic
agacuauguccauacac

SEQ ID NO: 695647 - RNA, 17 nt, Artificial Sequence
  Synthetic
acuucuccgguauacac

SEQ ID NO: 695648 - RNA, 17 nt, Artificial Sequence
  Synthetic
aguuggggaaccuacac

SEQ ID NO: 695649 - RNA, 17 nt, Artificial Sequence
  Synthetic
auaaggagguccuacac

SEQ ID NO: 695650 - RNA, 17 nt, Artificial Sequence
  Synthetic
aagucuaugugcuacac

SEQ ID NO: 695651 - RNA, 17 nt, Artificial Sequence
  Synthetic
acuugguggugguacac

SEQ ID NO: 695652 - RNA, 17 nt, Artificial Sequence
  Synthetic
acacugaaggcuuacac

SEQ ID NO: 695653 - RNA, 17 nt, Artificial Sequence
  Synthetic
auaaacccccuaaccac

SEQ ID NO: 695654 - RNA, 17 nt, Artificial Sequence
  Synthetic
ccaaacgcucacaccac

SEQ ID NO: 695655 - RNA, 17 nt, Artificial Sequence
  Synthetic
cgacuaacuuagaccac

SEQ ID NO: 695656 - RNA, 17 nt, Artificial Sequence
  Synthetic
augacuucgcauaccac

SEQ ID NO: 695657 - RNA, 17 nt, Artificial Sequence
  Synthetic
aaugaagugccuaccac

SEQ ID NO: 695658 - RNA, 17 nt, Artificial Sequence
  Synthetic
cacuaccucaguaccac

SEQ ID NO: 695659 - RNA, 17 nt, Artificial Sequence
  Synthetic
cgauguuaaugucccac

SEQ ID NO: 695660 - RNA, 17 nt, Artificial Sequence
  Synthetic
cuugauuggcuagccac

SEQ ID NO: 695661 - RNA, 17 nt, Artificial Sequence
  Synthetic
auaacucacaaggccac

SEQ ID NO: 695662 - RNA, 17 nt, Artificial Sequence
  Synthetic
cuuuacgaaugggccac

SEQ ID NO: 695663 - RNA, 17 nt, Artificial Sequence
  Synthetic
uacguuguaauugccac

SEQ ID NO: 695664 - RNA, 17 nt, Artificial Sequence
  Synthetic
cuuguaguuaaauccac

SEQ ID NO: 695665 - RNA, 17 nt, Artificial Sequence
  Synthetic
auauaccuaucauccac

SEQ ID NO: 695666 - RNA, 17 nt, Artificial Sequence
  Synthetic
ccauaacaguuauccac

SEQ ID NO: 695667 - RNA, 17 nt, Artificial Sequence
  Synthetic
uagguauucgccuccac

SEQ ID NO: 695668 - RNA, 17 nt, Artificial Sequence
  Synthetic
ccccaacguggcagcac

SEQ ID NO: 695669 - RNA, 17 nt, Artificial Sequence
  Synthetic
auacagggagauagcac

SEQ ID NO: 695670 - RNA, 17 nt, Artificial Sequence
  Synthetic
uaacguauauuuagcac

SEQ ID NO: 695671 - RNA, 17 nt, Artificial Sequence
  Synthetic
cauuaaaggacccgcac

SEQ ID NO: 695672 - RNA, 17 nt, Artificial Sequence
  Synthetic
ugcaauuuugggcgcac

SEQ ID NO: 695673 - RNA, 17 nt, Artificial Sequence
  Synthetic
cgccuauuuacaggcac

SEQ ID NO: 695674 - RNA, 17 nt, Artificial Sequence
  Synthetic
uauggcuaaauaggcac

SEQ ID NO: 695675 - RNA, 17 nt, Artificial Sequence
  Synthetic
cgugucaagucaugcac

SEQ ID NO: 695676 - RNA, 17 nt, Artificial Sequence
  Synthetic
uaaccuugcuuaugcac

SEQ ID NO: 695677 - RNA, 17 nt, Artificial Sequence
  Synthetic
ccaugcuaguacaucac

SEQ ID NO: 695678 - RNA, 17 nt, Artificial Sequence
  Synthetic
aucauauagcggaucac

SEQ ID NO: 695679 - RNA, 17 nt, Artificial Sequence
  Synthetic
uauauugaggcuaucac

SEQ ID NO: 695680 - RNA, 17 nt, Artificial Sequence
  Synthetic
cuacuauuauaccucac

SEQ ID NO: 695681 - RNA, 17 nt, Artificial Sequence
  Synthetic
uuuguacguaggcucac

SEQ ID NO: 695682 - RNA, 17 nt, Artificial Sequence
  Synthetic
acgcuagcgggucucac

SEQ ID NO: 695683 - RNA, 17 nt, Artificial Sequence
  Synthetic
aagccuaacuaagucac

SEQ ID NO: 695684 - RNA, 17 nt, Artificial Sequence
  Synthetic
uagagccuuguagucac

SEQ ID NO: 695685 - RNA, 17 nt, Artificial Sequence
  Synthetic
acccagguauaggucac

SEQ ID NO: 695686 - RNA, 17 nt, Artificial Sequence
  Synthetic
uaacaacaguacuucac

SEQ ID NO: 695687 - RNA, 17 nt, Artificial Sequence
  Synthetic
acgaccuauuacuucac

SEQ ID NO: 695688 - RNA, 17 nt, Artificial Sequence
  Synthetic
cagucagauucguucac

SEQ ID NO: 695689 - RNA, 17 nt, Artificial Sequence
  Synthetic
auuuaauggugguucac

SEQ ID NO: 695690 - RNA, 17 nt, Artificial Sequence
  Synthetic
cgaugauucaaaaagac

SEQ ID NO: 695691 - RNA, 17 nt, Artificial Sequence
  Synthetic
aaacgagucuuaaagac

SEQ ID NO: 695692 - RNA, 17 nt, Artificial Sequence
  Synthetic
uauacuuagcacaagac

SEQ ID NO: 695693 - RNA, 17 nt, Artificial Sequence
  Synthetic
ugacaaccgaucaagac

SEQ ID NO: 695694 - RNA, 17 nt, Artificial Sequence
  Synthetic
ugguuacucaugaagac

SEQ ID NO: 695695 - RNA, 17 nt, Artificial Sequence
  Synthetic
aucaagaccgguaagac

SEQ ID NO: 695696 - RNA, 17 nt, Artificial Sequence
  Synthetic
cacgaucuggaacagac

SEQ ID NO: 695697 - RNA, 17 nt, Artificial Sequence
  Synthetic
aaucauccugaccagac

SEQ ID NO: 695698 - RNA, 17 nt, Artificial Sequence
  Synthetic
uagggcuccugcgagac

SEQ ID NO: 695699 - RNA, 17 nt, Artificial Sequence
  Synthetic
aauaaggguugauagac

SEQ ID NO: 695700 - RNA, 17 nt, Artificial Sequence
  Synthetic
auuaggaagcacuagac

SEQ ID NO: 695701 - RNA, 17 nt, Artificial Sequence
  Synthetic
ugugcauccaaguagac

SEQ ID NO: 695702 - RNA, 17 nt, Artificial Sequence
  Synthetic
aaaaccccggauuagac

SEQ ID NO: 695703 - RNA, 17 nt, Artificial Sequence
  Synthetic
cccacauuguauuagac

SEQ ID NO: 695704 - RNA, 17 nt, Artificial Sequence
  Synthetic
acccaucuaacuuagac

SEQ ID NO: 695705 - RNA, 17 nt, Artificial Sequence
  Synthetic
cagcuaauagugacgac

SEQ ID NO: 695706 - RNA, 17 nt, Artificial Sequence
  Synthetic
auaggaaguacuacgac

SEQ ID NO: 695707 - RNA, 17 nt, Artificial Sequence
  Synthetic
agauuuaaaagaccgac

SEQ ID NO: 695708 - RNA, 17 nt, Artificial Sequence
  Synthetic
aauuacaaguuugcgac

SEQ ID NO: 695709 - RNA, 17 nt, Artificial Sequence
  Synthetic
aaguggauuaaaucgac

SEQ ID NO: 695710 - RNA, 17 nt, Artificial Sequence
  Synthetic
uuuucaaggcccucgac

SEQ ID NO: 695711 - RNA, 17 nt, Artificial Sequence
  Synthetic
acguaucauaaaaggac

SEQ ID NO: 695712 - RNA, 17 nt, Artificial Sequence
  Synthetic
uaggcuuggcauaggac

SEQ ID NO: 695713 - RNA, 17 nt, Artificial Sequence
  Synthetic
acauaaguugguaggac

SEQ ID NO: 695714 - RNA, 17 nt, Artificial Sequence
  Synthetic
uggugauucuuacggac

SEQ ID NO: 695715 - RNA, 17 nt, Artificial Sequence
  Synthetic
acguacucccaucggac

SEQ ID NO: 695716 - RNA, 17 nt, Artificial Sequence
  Synthetic
uccuuccauauagggac

SEQ ID NO: 695717 - RNA, 17 nt, Artificial Sequence
  Synthetic
ccuaacucugaggggac

SEQ ID NO: 695718 - RNA, 17 nt, Artificial Sequence
  Synthetic
caggaagucuaguggac

SEQ ID NO: 695719 - RNA, 17 nt, Artificial Sequence
  Synthetic
uacaacguaauaaugac

SEQ ID NO: 695720 - RNA, 17 nt, Artificial Sequence
  Synthetic
uguguucgaucgaugac

SEQ ID NO: 695721 - RNA, 17 nt, Artificial Sequence
  Synthetic
aaacgaguagugaugac

SEQ ID NO: 695722 - RNA, 17 nt, Artificial Sequence
  Synthetic
cucagaacuuauaugac

SEQ ID NO: 695723 - RNA, 17 nt, Artificial Sequence
  Synthetic
uagauguccaguaugac

SEQ ID NO: 695724 - RNA, 17 nt, Artificial Sequence
  Synthetic
uuccuuuagguacugac

SEQ ID NO: 695725 - RNA, 17 nt, Artificial Sequence
  Synthetic
uuaccacugaugcugac

SEQ ID NO: 695726 - RNA, 17 nt, Artificial Sequence
  Synthetic
cgcacuaucucagugac

SEQ ID NO: 695727 - RNA, 17 nt, Artificial Sequence
  Synthetic
aucauaguuugggugac

SEQ ID NO: 695728 - RNA, 17 nt, Artificial Sequence
  Synthetic
cauuaaagcauggugac

SEQ ID NO: 695729 - RNA, 17 nt, Artificial Sequence
  Synthetic
cguucagguauggugac

SEQ ID NO: 695730 - RNA, 17 nt, Artificial Sequence
  Synthetic
caggagacguaauugac

SEQ ID NO: 695731 - RNA, 17 nt, Artificial Sequence
  Synthetic
uugugucgaauauugac

SEQ ID NO: 695732 - RNA, 17 nt, Artificial Sequence
  Synthetic
cuuacgaauggcuugac

SEQ ID NO: 695733 - RNA, 17 nt, Artificial Sequence
  Synthetic
cguuugaaccaaaauac

SEQ ID NO: 695734 - RNA, 17 nt, Artificial Sequence
  Synthetic
auauggcuacgaaauac

SEQ ID NO: 695735 - RNA, 17 nt, Artificial Sequence
  Synthetic
agaccuauagauaauac

SEQ ID NO: 695736 - RNA, 17 nt, Artificial Sequence
  Synthetic
uuagcguauuaacauac

SEQ ID NO: 695737 - RNA, 17 nt, Artificial Sequence
  Synthetic
aaacgaccaguacauac

SEQ ID NO: 695738 - RNA, 17 nt, Artificial Sequence
  Synthetic
agcuagaagaaccauac

SEQ ID NO: 695739 - RNA, 17 nt, Artificial Sequence
  Synthetic
uccccgaggcaccauac

SEQ ID NO: 695740 - RNA, 17 nt, Artificial Sequence
  Synthetic
uuagcauuguuccauac

SEQ ID NO: 695741 - RNA, 17 nt, Artificial Sequence
  Synthetic
caagucuucauagauac

SEQ ID NO: 695742 - RNA, 17 nt, Artificial Sequence
  Synthetic
ugacgcccacuggauac

SEQ ID NO: 695743 - RNA, 17 nt, Artificial Sequence
  Synthetic
uauggcuuggcauauac

SEQ ID NO: 695744 - RNA, 17 nt, Artificial Sequence
  Synthetic
ugucgaacuaacuauac

SEQ ID NO: 695745 - RNA, 17 nt, Artificial Sequence
  Synthetic
auguggccagacuauac

SEQ ID NO: 695746 - RNA, 17 nt, Artificial Sequence
  Synthetic
aggugcccuuacuauac

SEQ ID NO: 695747 - RNA, 17 nt, Artificial Sequence
  Synthetic
cggggucagggguauac

SEQ ID NO: 695748 - RNA, 17 nt, Artificial Sequence
  Synthetic
cccucaccaguguauac

SEQ ID NO: 695749 - RNA, 17 nt, Artificial Sequence
  Synthetic
acauacccuacuuauac

SEQ ID NO: 695750 - RNA, 17 nt, Artificial Sequence
  Synthetic
agccaaucuaugacuac

SEQ ID NO: 695751 - RNA, 17 nt, Artificial Sequence
  Synthetic
auaauaccacugacuac

SEQ ID NO: 695752 - RNA, 17 nt, Artificial Sequence
  Synthetic
ucugacgugaguacuac

SEQ ID NO: 695753 - RNA, 17 nt, Artificial Sequence
  Synthetic
aaccucggacuaccuac

SEQ ID NO: 695754 - RNA, 17 nt, Artificial Sequence
  Synthetic
aauaaagcaaccccuac

SEQ ID NO: 695755 - RNA, 17 nt, Artificial Sequence
  Synthetic
cagacguggaagccuac

SEQ ID NO: 695756 - RNA, 17 nt, Artificial Sequence
  Synthetic
aucacuacccauccuac

SEQ ID NO: 695757 - RNA, 17 nt, Artificial Sequence
  Synthetic
aucacuggguauccuac

SEQ ID NO: 695758 - RNA, 17 nt, Artificial Sequence
  Synthetic
caccuuggagguccuac

SEQ ID NO: 695759 - RNA, 17 nt, Artificial Sequence
  Synthetic
agggacaguacagcuac

SEQ ID NO: 695760 - RNA, 17 nt, Artificial Sequence
  Synthetic
aggaugggcauagcuac

SEQ ID NO: 695761 - RNA, 17 nt, Artificial Sequence
  Synthetic
aauaugcuggaggcuac

SEQ ID NO: 695762 - RNA, 17 nt, Artificial Sequence
  Synthetic
uacuaugauagugcuac

SEQ ID NO: 695763 - RNA, 17 nt, Artificial Sequence
  Synthetic
agaagugauagugcuac

SEQ ID NO: 695764 - RNA, 17 nt, Artificial Sequence
  Synthetic
uuaacauugcaaucuac

SEQ ID NO: 695765 - RNA, 17 nt, Artificial Sequence
  Synthetic
accaaugugcacucuac

SEQ ID NO: 695766 - RNA, 17 nt, Artificial Sequence
  Synthetic
aaacaucacaggucuac

SEQ ID NO: 695767 - RNA, 17 nt, Artificial Sequence
  Synthetic
uggcuaagauugucuac

SEQ ID NO: 695768 - RNA, 17 nt, Artificial Sequence
  Synthetic
aaacuagcuccaaguac

SEQ ID NO: 695769 - RNA, 17 nt, Artificial Sequence
  Synthetic
aauauaugccgaaguac

SEQ ID NO: 695770 - RNA, 17 nt, Artificial Sequence
  Synthetic
auuagcuacugaaguac

SEQ ID NO: 695771 - RNA, 17 nt, Artificial Sequence
  Synthetic
ccagacuaagagaguac

SEQ ID NO: 695772 - RNA, 17 nt, Artificial Sequence
  Synthetic
acaaaggacgguaguac

SEQ ID NO: 695773 - RNA, 17 nt, Artificial Sequence
  Synthetic
uuaucaugcuuagguac

SEQ ID NO: 695774 - RNA, 17 nt, Artificial Sequence
  Synthetic
uucccauuauucgguac

SEQ ID NO: 695775 - RNA, 17 nt, Artificial Sequence
  Synthetic
aaacugucuagggguac

SEQ ID NO: 695776 - RNA, 17 nt, Artificial Sequence
  Synthetic
accuguguaagugguac

SEQ ID NO: 695777 - RNA, 17 nt, Artificial Sequence
  Synthetic
uccuuagaguuuuguac

SEQ ID NO: 695778 - RNA, 17 nt, Artificial Sequence
  Synthetic
cgcaaaguauagauuac

SEQ ID NO: 695779 - RNA, 17 nt, Artificial Sequence
  Synthetic
cugcaauggaguauuac

SEQ ID NO: 695780 - RNA, 17 nt, Artificial Sequence
  Synthetic
uugcuaguuaugcuuac

SEQ ID NO: 695781 - RNA, 17 nt, Artificial Sequence
  Synthetic
cgaugaagguaucuuac

SEQ ID NO: 695782 - RNA, 17 nt, Artificial Sequence
  Synthetic
accuugcugcucguuac

SEQ ID NO: 695783 - RNA, 17 nt, Artificial Sequence
  Synthetic
ccacccaaaucuguuac

SEQ ID NO: 695784 - RNA, 17 nt, Artificial Sequence
  Synthetic
uagaguacuuccaaacc

SEQ ID NO: 695785 - RNA, 17 nt, Artificial Sequence
  Synthetic
cuucaagccacgaaacc

SEQ ID NO: 695786 - RNA, 17 nt, Artificial Sequence
  Synthetic
uccgugguauguaaacc

SEQ ID NO: 695787 - RNA, 17 nt, Artificial Sequence
  Synthetic
acuugaggcuaccaacc

SEQ ID NO: 695788 - RNA, 17 nt, Artificial Sequence
  Synthetic
auagguacuggccaacc

SEQ ID NO: 695789 - RNA, 17 nt, Artificial Sequence
  Synthetic
uaacgauggaaucaacc

SEQ ID NO: 695790 - RNA, 17 nt, Artificial Sequence
  Synthetic
aauugaagcucucaacc

SEQ ID NO: 695791 - RNA, 17 nt, Artificial Sequence
  Synthetic
auuaacgaaauucaacc

SEQ ID NO: 695792 - RNA, 17 nt, Artificial Sequence
  Synthetic
acacagauagcggaacc

SEQ ID NO: 695793 - RNA, 17 nt, Artificial Sequence
  Synthetic
uguaauccgggggaacc

SEQ ID NO: 695794 - RNA, 17 nt, Artificial Sequence
  Synthetic
ugauugcuaccauaacc

SEQ ID NO: 695795 - RNA, 17 nt, Artificial Sequence
  Synthetic
accugauuucccuaacc

SEQ ID NO: 695796 - RNA, 17 nt, Artificial Sequence
  Synthetic
acuauuugugauacacc

SEQ ID NO: 695797 - RNA, 17 nt, Artificial Sequence
  Synthetic
uagugugacuguacacc

SEQ ID NO: 695798 - RNA, 17 nt, Artificial Sequence
  Synthetic
caacgauaauccccacc

SEQ ID NO: 695799 - RNA, 17 nt, Artificial Sequence
  Synthetic
ugaagucuaauuccacc

SEQ ID NO: 695800 - RNA, 17 nt, Artificial Sequence
  Synthetic
uaaugaacgugcgcacc

SEQ ID NO: 695801 - RNA, 17 nt, Artificial Sequence
  Synthetic
acuaauagccaggcacc

SEQ ID NO: 695802 - RNA, 17 nt, Artificial Sequence
  Synthetic
uccgagucaaucagacc

SEQ ID NO: 695803 - RNA, 17 nt, Artificial Sequence
  Synthetic
uuaaauuccucgagacc

SEQ ID NO: 695804 - RNA, 17 nt, Artificial Sequence
  Synthetic
uuguguuuagguagacc

SEQ ID NO: 695805 - RNA, 17 nt, Artificial Sequence
  Synthetic
accagagaguguagacc

SEQ ID NO: 695806 - RNA, 17 nt, Artificial Sequence
  Synthetic
agaggacuugaacgacc

SEQ ID NO: 695807 - RNA, 17 nt, Artificial Sequence
  Synthetic
agucaauauaugcgacc

SEQ ID NO: 695808 - RNA, 17 nt, Artificial Sequence
  Synthetic
cuaagugagguucgacc

SEQ ID NO: 695809 - RNA, 17 nt, Artificial Sequence
  Synthetic
caauaaagugcaugacc

SEQ ID NO: 695810 - RNA, 17 nt, Artificial Sequence
  Synthetic
aaguacaugcucugacc

SEQ ID NO: 695811 - RNA, 17 nt, Artificial Sequence
  Synthetic
cucuaucugccaauacc

SEQ ID NO: 695812 - RNA, 17 nt, Artificial Sequence
  Synthetic
caguuaauccacauacc

SEQ ID NO: 695813 - RNA, 17 nt, Artificial Sequence
  Synthetic
aacaugucuaccauacc

SEQ ID NO: 695814 - RNA, 17 nt, Artificial Sequence
  Synthetic
caacaauuuaccauacc

SEQ ID NO: 695815 - RNA, 17 nt, Artificial Sequence
  Synthetic
ccuucaaguauacuacc

SEQ ID NO: 695816 - RNA, 17 nt, Artificial Sequence
  Synthetic
ccuguacguauacuacc

SEQ ID NO: 695817 - RNA, 17 nt, Artificial Sequence
  Synthetic
ccaaaaagguagcuacc

SEQ ID NO: 695818 - RNA, 17 nt, Artificial Sequence
  Synthetic
aguaacguguugcuacc

SEQ ID NO: 695819 - RNA, 17 nt, Artificial Sequence
  Synthetic
uaaucugaaugaguacc

SEQ ID NO: 695820 - RNA, 17 nt, Artificial Sequence
  Synthetic
uaccaugauuccguacc

SEQ ID NO: 695821 - RNA, 17 nt, Artificial Sequence
  Synthetic
aaaacugucccgguacc

SEQ ID NO: 695822 - RNA, 17 nt, Artificial Sequence
  Synthetic
uacggaaucaugguacc

SEQ ID NO: 695823 - RNA, 17 nt, Artificial Sequence
  Synthetic
uaggaggaguauguacc

SEQ ID NO: 695824 - RNA, 17 nt, Artificial Sequence
  Synthetic
aguuauggacaauuacc

SEQ ID NO: 695825 - RNA, 17 nt, Artificial Sequence
  Synthetic
ucguacuuuuaauuacc

SEQ ID NO: 695826 - RNA, 17 nt, Artificial Sequence
  Synthetic
uucucgaaagcauuacc

SEQ ID NO: 695827 - RNA, 17 nt, Artificial Sequence
  Synthetic
uuauaccagauauuacc

SEQ ID NO: 695828 - RNA, 17 nt, Artificial Sequence
  Synthetic
ucggggaagaccuuacc

SEQ ID NO: 695829 - RNA, 17 nt, Artificial Sequence
  Synthetic
uucgaaauccccuuacc

SEQ ID NO: 695830 - RNA, 17 nt, Artificial Sequence
  Synthetic
uccgggcaaggguuacc

SEQ ID NO: 695831 - RNA, 17 nt, Artificial Sequence
  Synthetic
uuagacauccccaaccc

SEQ ID NO: 695832 - RNA, 17 nt, Artificial Sequence
  Synthetic
uagguaucaaguaaccc

SEQ ID NO: 695833 - RNA, 17 nt, Artificial Sequence
  Synthetic
cucauguagaguaaccc

SEQ ID NO: 695834 - RNA, 17 nt, Artificial Sequence
  Synthetic
cacucuagcauuaaccc

SEQ ID NO: 695835 - RNA, 17 nt, Artificial Sequence
  Synthetic
acgcgaauagaacaccc

SEQ ID NO: 695836 - RNA, 17 nt, Artificial Sequence
  Synthetic
uguccuagcuaacaccc

SEQ ID NO: 695837 - RNA, 17 nt, Artificial Sequence
  Synthetic
ccguuggaggcacaccc

SEQ ID NO: 695838 - RNA, 17 nt, Artificial Sequence
  Synthetic
ccaauaacauuacaccc

SEQ ID NO: 695839 - RNA, 17 nt, Artificial Sequence
  Synthetic
uucacaaguuugcaccc

SEQ ID NO: 695840 - RNA, 17 nt, Artificial Sequence
  Synthetic
cuagauuccacucaccc

SEQ ID NO: 695841 - RNA, 17 nt, Artificial Sequence
  Synthetic
cuugcgacacuucaccc

SEQ ID NO: 695842 - RNA, 17 nt, Artificial Sequence
  Synthetic
cuuuacuccuaugaccc

SEQ ID NO: 695843 - RNA, 17 nt, Artificial Sequence
  Synthetic
agcuaccuuuaugaccc

SEQ ID NO: 695844 - RNA, 17 nt, Artificial Sequence
  Synthetic
ugcgugcagugaacccc

SEQ ID NO: 695845 - RNA, 17 nt, Artificial Sequence
  Synthetic
cuaggguggauuacccc

SEQ ID NO: 695846 - RNA, 17 nt, Artificial Sequence
  Synthetic
agaugauaauacccccc

SEQ ID NO: 695847 - RNA, 17 nt, Artificial Sequence
  Synthetic
aucccgaucacagcccc

SEQ ID NO: 695848 - RNA, 17 nt, Artificial Sequence
  Synthetic
acauaacugucagcccc

SEQ ID NO: 695849 - RNA, 17 nt, Artificial Sequence
  Synthetic
uucaaacggguagcccc

SEQ ID NO: 695850 - RNA, 17 nt, Artificial Sequence
  Synthetic
ucauuugauacaucccc

SEQ ID NO: 695851 - RNA, 17 nt, Artificial Sequence
  Synthetic
uagccauacuguucccc

SEQ ID NO: 695852 - RNA, 17 nt, Artificial Sequence
  Synthetic
aauggauuucggcgccc

SEQ ID NO: 695853 - RNA, 17 nt, Artificial Sequence
  Synthetic
cagaucucggugggccc

SEQ ID NO: 695854 - RNA, 17 nt, Artificial Sequence
  Synthetic
ugucucugaauuggccc

SEQ ID NO: 695855 - RNA, 17 nt, Artificial Sequence
  Synthetic
aaacggggugaaugccc

SEQ ID NO: 695856 - RNA, 17 nt, Artificial Sequence
  Synthetic
ugguuagcuaacugccc

SEQ ID NO: 695857 - RNA, 17 nt, Artificial Sequence
  Synthetic
aagaggacggucugccc

SEQ ID NO: 695858 - RNA, 17 nt, Artificial Sequence
  Synthetic
acaaaagcgaagugccc

SEQ ID NO: 695859 - RNA, 17 nt, Artificial Sequence
  Synthetic
acaauaugaaggugccc

SEQ ID NO: 695860 - RNA, 17 nt, Artificial Sequence
  Synthetic
agcugccuaaccauccc

SEQ ID NO: 695861 - RNA, 17 nt, Artificial Sequence
  Synthetic
auagauuggaugauccc

SEQ ID NO: 695862 - RNA, 17 nt, Artificial Sequence
  Synthetic
aguuguuacucuauccc

SEQ ID NO: 695863 - RNA, 17 nt, Artificial Sequence
  Synthetic
cugcauauagguauccc

SEQ ID NO: 695864 - RNA, 17 nt, Artificial Sequence
  Synthetic
auacgaguacaucuccc

SEQ ID NO: 695865 - RNA, 17 nt, Artificial Sequence
  Synthetic
agaggaccuuacguccc

SEQ ID NO: 695866 - RNA, 17 nt, Artificial Sequence
  Synthetic
acuagggcuuaauuccc

SEQ ID NO: 695867 - RNA, 17 nt, Artificial Sequence
  Synthetic
agcggguacauguuccc

SEQ ID NO: 695868 - RNA, 17 nt, Artificial Sequence
  Synthetic
uuccacacgacaaagcc

SEQ ID NO: 695869 - RNA, 17 nt, Artificial Sequence
  Synthetic
uuacccccauacaagcc

SEQ ID NO: 695870 - RNA, 17 nt, Artificial Sequence
  Synthetic
uaagccuccauuaagcc

SEQ ID NO: 695871 - RNA, 17 nt, Artificial Sequence
  Synthetic
uugcgugauaugcagcc

SEQ ID NO: 695872 - RNA, 17 nt, Artificial Sequence
  Synthetic
augggcugguuagagcc

SEQ ID NO: 695873 - RNA, 17 nt, Artificial Sequence
  Synthetic
cuguagucuagauagcc

SEQ ID NO: 695874 - RNA, 17 nt, Artificial Sequence
  Synthetic
cgcacuaaacaguagcc

SEQ ID NO: 695875 - RNA, 17 nt, Artificial Sequence
  Synthetic
aaaauaugaucaacgcc

SEQ ID NO: 695876 - RNA, 17 nt, Artificial Sequence
  Synthetic
uauaggguggccacgcc

SEQ ID NO: 695877 - RNA, 17 nt, Artificial Sequence
  Synthetic
aauccuucgggcacgcc

SEQ ID NO: 695878 - RNA, 17 nt, Artificial Sequence
  Synthetic
cacuaagcgaucacgcc

SEQ ID NO: 695879 - RNA, 17 nt, Artificial Sequence
  Synthetic
agguaaaauucagcgcc

SEQ ID NO: 695880 - RNA, 17 nt, Artificial Sequence
  Synthetic
aauguagugguuucgcc

SEQ ID NO: 695881 - RNA, 17 nt, Artificial Sequence
  Synthetic
auaauaacucaucggcc

SEQ ID NO: 695882 - RNA, 17 nt, Artificial Sequence
  Synthetic
agaacaguuacucggcc

SEQ ID NO: 695883 - RNA, 17 nt, Artificial Sequence
  Synthetic
cccacauacucucggcc

SEQ ID NO: 695884 - RNA, 17 nt, Artificial Sequence
  Synthetic
cgguguauauuggggcc

SEQ ID NO: 695885 - RNA, 17 nt, Artificial Sequence
  Synthetic
ccuguuaaugccuggcc

SEQ ID NO: 695886 - RNA, 17 nt, Artificial Sequence
  Synthetic
agggguuauaucuggcc

SEQ ID NO: 695887 - RNA, 17 nt, Artificial Sequence
  Synthetic
agaguuauggguuggcc

SEQ ID NO: 695888 - RNA, 17 nt, Artificial Sequence
  Synthetic
uucaauuccguuuggcc

SEQ ID NO: 695889 - RNA, 17 nt, Artificial Sequence
  Synthetic
uacucuauaacaaugcc

SEQ ID NO: 695890 - RNA, 17 nt, Artificial Sequence
  Synthetic
augcguaucguaaugcc

SEQ ID NO: 695891 - RNA, 17 nt, Artificial Sequence
  Synthetic
uacugucaguacaugcc

SEQ ID NO: 695892 - RNA, 17 nt, Artificial Sequence
  Synthetic
ucugcuacucuuaugcc

SEQ ID NO: 695893 - RNA, 17 nt, Artificial Sequence
  Synthetic
cucucggaauuucugcc

SEQ ID NO: 695894 - RNA, 17 nt, Artificial Sequence
  Synthetic
auuacuccuaccgugcc

SEQ ID NO: 695895 - RNA, 17 nt, Artificial Sequence
  Synthetic
uaaucgaguuuugugcc

SEQ ID NO: 695896 - RNA, 17 nt, Artificial Sequence
  Synthetic
cauuaggcucucaaucc

SEQ ID NO: 695897 - RNA, 17 nt, Artificial Sequence
  Synthetic
acgguuccacagaaucc

SEQ ID NO: 695898 - RNA, 17 nt, Artificial Sequence
  Synthetic
cgauggggucuuaaucc

SEQ ID NO: 695899 - RNA, 17 nt, Artificial Sequence
  Synthetic
cuuaccauucaacaucc

SEQ ID NO: 695900 - RNA, 17 nt, Artificial Sequence
  Synthetic
cuauaggaaggccaucc

SEQ ID NO: 695901 - RNA, 17 nt, Artificial Sequence
  Synthetic
cagcuugcuugccaucc

SEQ ID NO: 695902 - RNA, 17 nt, Artificial Sequence
  Synthetic
uuaccaaagguccaucc

SEQ ID NO: 695903 - RNA, 17 nt, Artificial Sequence
  Synthetic
acugcgggacugcaucc

SEQ ID NO: 695904 - RNA, 17 nt, Artificial Sequence
  Synthetic
uauaauuccugcgaucc

SEQ ID NO: 695905 - RNA, 17 nt, Artificial Sequence
  Synthetic
ucaagcaaaacugaucc

SEQ ID NO: 695906 - RNA, 17 nt, Artificial Sequence
  Synthetic
acccacucauaauaucc

SEQ ID NO: 695907 - RNA, 17 nt, Artificial Sequence
  Synthetic
cuauuaucuagauaucc

SEQ ID NO: 695908 - RNA, 17 nt, Artificial Sequence
  Synthetic
uaucuuacaggaacucc

SEQ ID NO: 695909 - RNA, 17 nt, Artificial Sequence
  Synthetic
aacguauagaguacucc

SEQ ID NO: 695910 - RNA, 17 nt, Artificial Sequence
  Synthetic
cucacuaguugcccucc

SEQ ID NO: 695911 - RNA, 17 nt, Artificial Sequence
  Synthetic
ccuucggcaagcgcucc

SEQ ID NO: 695912 - RNA, 17 nt, Artificial Sequence
  Synthetic
uaccauuuagaggcucc

SEQ ID NO: 695913 - RNA, 17 nt, Artificial Sequence
  Synthetic
caauuggcuguaucucc

SEQ ID NO: 695914 - RNA, 17 nt, Artificial Sequence
  Synthetic
ccaauaguggucagucc

SEQ ID NO: 695915 - RNA, 17 nt, Artificial Sequence
  Synthetic
aacucacagugacgucc

SEQ ID NO: 695916 - RNA, 17 nt, Artificial Sequence
  Synthetic
uuuugaggcuagcgucc

SEQ ID NO: 695917 - RNA, 17 nt, Artificial Sequence
  Synthetic
ucuuuccgcuagggucc

SEQ ID NO: 695918 - RNA, 17 nt, Artificial Sequence
  Synthetic
cuaaguugaaugggucc

SEQ ID NO: 695919 - RNA, 17 nt, Artificial Sequence
  Synthetic
acuugcgauugaugucc

SEQ ID NO: 695920 - RNA, 17 nt, Artificial Sequence
  Synthetic
cuauucacaagcugucc

SEQ ID NO: 695921 - RNA, 17 nt, Artificial Sequence
  Synthetic
acccuguugaugugucc

SEQ ID NO: 695922 - RNA, 17 nt, Artificial Sequence
  Synthetic
agcauaucggccauucc

SEQ ID NO: 695923 - RNA, 17 nt, Artificial Sequence
  Synthetic
cgaacguuugcacuucc

SEQ ID NO: 695924 - RNA, 17 nt, Artificial Sequence
  Synthetic
aaaguucguugccuucc

SEQ ID NO: 695925 - RNA, 17 nt, Artificial Sequence
  Synthetic
cguucauuaauccuucc

SEQ ID NO: 695926 - RNA, 17 nt, Artificial Sequence
  Synthetic
uggcggagauugcuucc

SEQ ID NO: 695927 - RNA, 17 nt, Artificial Sequence
  Synthetic
aaauugaguuacguucc

SEQ ID NO: 695928 - RNA, 17 nt, Artificial Sequence
  Synthetic
auuugcgcaauuguucc

SEQ ID NO: 695929 - RNA, 17 nt, Artificial Sequence
  Synthetic
cagucuaccagauuucc

SEQ ID NO: 695930 - RNA, 17 nt, Artificial Sequence
  Synthetic
ugcgcucagugaaaagc

SEQ ID NO: 695931 - RNA, 17 nt, Artificial Sequence
  Synthetic
auaucuucggggaaagc

SEQ ID NO: 695932 - RNA, 17 nt, Artificial Sequence
  Synthetic
ugccugauagcuaaagc

SEQ ID NO: 695933 - RNA, 17 nt, Artificial Sequence
  Synthetic
cacgcgaacugagaagc

SEQ ID NO: 695934 - RNA, 17 nt, Artificial Sequence
  Synthetic
cuacuuaguaacgaagc

SEQ ID NO: 695935 - RNA, 17 nt, Artificial Sequence
  Synthetic
ucggauggcuaggaagc

SEQ ID NO: 695936 - RNA, 17 nt, Artificial Sequence
  Synthetic
ugauauugcccggaagc

SEQ ID NO: 695937 - RNA, 17 nt, Artificial Sequence
  Synthetic
auaggaauacgauaagc

SEQ ID NO: 695938 - RNA, 17 nt, Artificial Sequence
  Synthetic
aagauuggucuuuaagc

SEQ ID NO: 695939 - RNA, 17 nt, Artificial Sequence
  Synthetic
ucaccgauagucacagc

SEQ ID NO: 695940 - RNA, 17 nt, Artificial Sequence
  Synthetic
aaucuacaguaagcagc

SEQ ID NO: 695941 - RNA, 17 nt, Artificial Sequence
  Synthetic
uccuuuuacuacgcagc

SEQ ID NO: 695942 - RNA, 17 nt, Artificial Sequence
  Synthetic
auauaguuacaggcagc

SEQ ID NO: 695943 - RNA, 17 nt, Artificial Sequence
  Synthetic
uucguuagaaaaucagc

SEQ ID NO: 695944 - RNA, 17 nt, Artificial Sequence
  Synthetic
uuccagagucggucagc

SEQ ID NO: 695945 - RNA, 17 nt, Artificial Sequence
  Synthetic
augcacucguggucagc

SEQ ID NO: 695946 - RNA, 17 nt, Artificial Sequence
  Synthetic
cgugguagcuugucagc

SEQ ID NO: 695947 - RNA, 17 nt, Artificial Sequence
  Synthetic
aucuugaugaguucagc

SEQ ID NO: 695948 - RNA, 17 nt, Artificial Sequence
  Synthetic
aacugccaccauagagc

SEQ ID NO: 695949 - RNA, 17 nt, Artificial Sequence
  Synthetic
aaaaggaucaagcgagc

SEQ ID NO: 695950 - RNA, 17 nt, Artificial Sequence
  Synthetic
uuccccuaccaucgagc

SEQ ID NO: 695951 - RNA, 17 nt, Artificial Sequence
  Synthetic
cugucucgcaggggagc

SEQ ID NO: 695952 - RNA, 17 nt, Artificial Sequence
  Synthetic
augucucgauauggagc

SEQ ID NO: 695953 - RNA, 17 nt, Artificial Sequence
  Synthetic
cauacggaaagaugagc

SEQ ID NO: 695954 - RNA, 17 nt, Artificial Sequence
  Synthetic
caagucuuuauaugagc

SEQ ID NO: 695955 - RNA, 17 nt, Artificial Sequence
  Synthetic
aauuaacuacccugagc

SEQ ID NO: 695956 - RNA, 17 nt, Artificial Sequence
  Synthetic
aguaggccguccugagc

SEQ ID NO: 695957 - RNA, 17 nt, Artificial Sequence
  Synthetic
uggggcaacgauugagc

SEQ ID NO: 695958 - RNA, 17 nt, Artificial Sequence
  Synthetic
uaccuaccuaguugagc

SEQ ID NO: 695959 - RNA, 17 nt, Artificial Sequence
  Synthetic
ugcucuagcggaauagc

SEQ ID NO: 695960 - RNA, 17 nt, Artificial Sequence
  Synthetic
cccuaaaguuuaauagc

SEQ ID NO: 695961 - RNA, 17 nt, Artificial Sequence
  Synthetic
uuagcauaugccauagc

SEQ ID NO: 695962 - RNA, 17 nt, Artificial Sequence
  Synthetic
agggcuuaacgcauagc

SEQ ID NO: 695963 - RNA, 17 nt, Artificial Sequence
  Synthetic
uagaggggauauauagc

SEQ ID NO: 695964 - RNA, 17 nt, Artificial Sequence
  Synthetic
uuuauccacgguauagc

SEQ ID NO: 695965 - RNA, 17 nt, Artificial Sequence
  Synthetic
ucucaggcuauuauagc

SEQ ID NO: 695966 - RNA, 17 nt, Artificial Sequence
  Synthetic
uucaaauagggacuagc

SEQ ID NO: 695967 - RNA, 17 nt, Artificial Sequence
  Synthetic
agaccucaugcccuagc

SEQ ID NO: 695968 - RNA, 17 nt, Artificial Sequence
  Synthetic
ucagggaagacgcuagc

SEQ ID NO: 695969 - RNA, 17 nt, Artificial Sequence
  Synthetic
augcguuuauugcuagc

SEQ ID NO: 695970 - RNA, 17 nt, Artificial Sequence
  Synthetic
ugugcccacuuaguagc

SEQ ID NO: 695971 - RNA, 17 nt, Artificial Sequence
  Synthetic
uauaugcuaacuguagc

SEQ ID NO: 695972 - RNA, 17 nt, Artificial Sequence
  Synthetic
aucuagggaaguuuagc

SEQ ID NO: 695973 - RNA, 17 nt, Artificial Sequence
  Synthetic
ccaagcuccaguuuagc

SEQ ID NO: 695974 - RNA, 17 nt, Artificial Sequence
  Synthetic
uauacaaaugccaacgc

SEQ ID NO: 695975 - RNA, 17 nt, Artificial Sequence
  Synthetic
augauacauuauaacgc

SEQ ID NO: 695976 - RNA, 17 nt, Artificial Sequence
  Synthetic
cagcauguuacuaacgc

SEQ ID NO: 695977 - RNA, 17 nt, Artificial Sequence
  Synthetic
auuuugggcaguaacgc

SEQ ID NO: 695978 - RNA, 17 nt, Artificial Sequence
  Synthetic
auuauuucugcccacgc

SEQ ID NO: 695979 - RNA, 17 nt, Artificial Sequence
  Synthetic
auccacuaggaugccgc

SEQ ID NO: 695980 - RNA, 17 nt, Artificial Sequence
  Synthetic
cccacaccguaauccgc

SEQ ID NO: 695981 - RNA, 17 nt, Artificial Sequence
  Synthetic
uugaaauaauauagcgc

SEQ ID NO: 695982 - RNA, 17 nt, Artificial Sequence
  Synthetic
aauacguggaccugcgc

SEQ ID NO: 695983 - RNA, 17 nt, Artificial Sequence
  Synthetic
cagcuugcuaggugcgc

SEQ ID NO: 695984 - RNA, 17 nt, Artificial Sequence
  Synthetic
cguguagccaucaucgc

SEQ ID NO: 695985 - RNA, 17 nt, Artificial Sequence
  Synthetic
ugauuggacugucucgc

SEQ ID NO: 695986 - RNA, 17 nt, Artificial Sequence
  Synthetic
cagggauuggcagucgc

SEQ ID NO: 695987 - RNA, 17 nt, Artificial Sequence
  Synthetic
auguacuacuacuucgc

SEQ ID NO: 695988 - RNA, 17 nt, Artificial Sequence
  Synthetic
aauagguugucgaaggc

SEQ ID NO: 695989 - RNA, 17 nt, Artificial Sequence
  Synthetic
auggggucucggaaggc

SEQ ID NO: 695990 - RNA, 17 nt, Artificial Sequence
  Synthetic
auccacccuucuaaggc

SEQ ID NO: 695991 - RNA, 17 nt, Artificial Sequence
  Synthetic
acccuccacuagcaggc

SEQ ID NO: 695992 - RNA, 17 nt, Artificial Sequence
  Synthetic
uagccugcgaugcaggc

SEQ ID NO: 695993 - RNA, 17 nt, Artificial Sequence
  Synthetic
agcuuuagcuaucaggc

SEQ ID NO: 695994 - RNA, 17 nt, Artificial Sequence
  Synthetic
cuuccucgaucucaggc

SEQ ID NO: 695995 - RNA, 17 nt, Artificial Sequence
  Synthetic
uaaucaagucacgaggc

SEQ ID NO: 695996 - RNA, 17 nt, Artificial Sequence
  Synthetic
agaccaaucuacuaggc

SEQ ID NO: 695997 - RNA, 17 nt, Artificial Sequence
  Synthetic
agacuacguaccuaggc

SEQ ID NO: 695998 - RNA, 17 nt, Artificial Sequence
  Synthetic
ugcguuaagcccuaggc

SEQ ID NO: 695999 - RNA, 17 nt, Artificial Sequence
  Synthetic
aguacaguugaguaggc

SEQ ID NO: 696000 - RNA, 17 nt, Artificial Sequence
  Synthetic
uagguaucugcuuaggc

SEQ ID NO: 696001 - RNA, 17 nt, Artificial Sequence
  Synthetic
auacgaaguaguuaggc

SEQ ID NO: 696002 - RNA, 17 nt, Artificial Sequence
  Synthetic
agugggcgcguuuaggc

SEQ ID NO: 696003 - RNA, 17 nt, Artificial Sequence
  Synthetic
cuagacgcgacaacggc

SEQ ID NO: 696004 - RNA, 17 nt, Artificial Sequence
  Synthetic
agaugcuugucuacggc

SEQ ID NO: 696005 - RNA, 17 nt, Artificial Sequence
  Synthetic
uuuguuuagaguacggc

SEQ ID NO: 696006 - RNA, 17 nt, Artificial Sequence
  Synthetic
aacuguauagaaccggc

SEQ ID NO: 696007 - RNA, 17 nt, Artificial Sequence
  Synthetic
caauacagggcagcggc

SEQ ID NO: 696008 - RNA, 17 nt, Artificial Sequence
  Synthetic
cucguacugauagcggc

SEQ ID NO: 696009 - RNA, 17 nt, Artificial Sequence
  Synthetic
agguguuacuuggcggc

SEQ ID NO: 696010 - RNA, 17 nt, Artificial Sequence
  Synthetic
uauaauaacucaucggc

SEQ ID NO: 696011 - RNA, 17 nt, Artificial Sequence
  Synthetic
aaugaucuagcaagggc

SEQ ID NO: 696012 - RNA, 17 nt, Artificial Sequence
  Synthetic
cacugcgaauagagggc

SEQ ID NO: 696013 - RNA, 17 nt, Artificial Sequence
  Synthetic
aucacuaacuguagggc

SEQ ID NO: 696014 - RNA, 17 nt, Artificial Sequence
  Synthetic
agaccgguaagacgggc

SEQ ID NO: 696015 - RNA, 17 nt, Artificial Sequence
  Synthetic
aagaaauuguaccgggc

SEQ ID NO: 696016 - RNA, 17 nt, Artificial Sequence
  Synthetic
acugucaauuagggggc

SEQ ID NO: 696017 - RNA, 17 nt, Artificial Sequence
  Synthetic
uuaguugucaucugggc

SEQ ID NO: 696018 - RNA, 17 nt, Artificial Sequence
  Synthetic
cauacucaggauugggc

SEQ ID NO: 696019 - RNA, 17 nt, Artificial Sequence
  Synthetic
uccaggauguacauggc

SEQ ID NO: 696020 - RNA, 17 nt, Artificial Sequence
  Synthetic
uaugaucaacgccuggc

SEQ ID NO: 696021 - RNA, 17 nt, Artificial Sequence
  Synthetic
uagcuaauuauaguggc

SEQ ID NO: 696022 - RNA, 17 nt, Artificial Sequence
  Synthetic
aguagauacuuaguggc

SEQ ID NO: 696023 - RNA, 17 nt, Artificial Sequence
  Synthetic
aucguccaucagguggc

SEQ ID NO: 696024 - RNA, 17 nt, Artificial Sequence
  Synthetic
aaccuuaaagggguggc

SEQ ID NO: 696025 - RNA, 17 nt, Artificial Sequence
  Synthetic
aggguucgucaauuggc

SEQ ID NO: 696026 - RNA, 17 nt, Artificial Sequence
  Synthetic
uaagcaugcuucuuggc

SEQ ID NO: 696027 - RNA, 17 nt, Artificial Sequence
  Synthetic
auaacguaagaguuggc

SEQ ID NO: 696028 - RNA, 17 nt, Artificial Sequence
  Synthetic
ccuccgaagcaaaaugc

SEQ ID NO: 696029 - RNA, 17 nt, Artificial Sequence
  Synthetic
cuuacaggcaacaaugc

SEQ ID NO: 696030 - RNA, 17 nt, Artificial Sequence
  Synthetic
uggauucuugccaaugc

SEQ ID NO: 696031 - RNA, 17 nt, Artificial Sequence
  Synthetic
caggauguuucgaaugc

SEQ ID NO: 696032 - RNA, 17 nt, Artificial Sequence
  Synthetic
cauggcaauguuaaugc

SEQ ID NO: 696033 - RNA, 17 nt, Artificial Sequence
  Synthetic
augucgauguuuaaugc

SEQ ID NO: 696034 - RNA, 17 nt, Artificial Sequence
  Synthetic
cguauuccuauccaugc

SEQ ID NO: 696035 - RNA, 17 nt, Artificial Sequence
  Synthetic
acacuagugcugcaugc

SEQ ID NO: 696036 - RNA, 17 nt, Artificial Sequence
  Synthetic
caggaccuaaaucaugc

SEQ ID NO: 696037 - RNA, 17 nt, Artificial Sequence
  Synthetic
ucgaaaacguaugaugc

SEQ ID NO: 696038 - RNA, 17 nt, Artificial Sequence
  Synthetic
ugacacacccaauaugc

SEQ ID NO: 696039 - RNA, 17 nt, Artificial Sequence
  Synthetic
cugggauaccuauaugc

SEQ ID NO: 696040 - RNA, 17 nt, Artificial Sequence
  Synthetic
cuagggaguaccuaugc

SEQ ID NO: 696041 - RNA, 17 nt, Artificial Sequence
  Synthetic
auuguacagggguaugc

SEQ ID NO: 696042 - RNA, 17 nt, Artificial Sequence
  Synthetic
cugucuuaagcuuaugc

SEQ ID NO: 696043 - RNA, 17 nt, Artificial Sequence
  Synthetic
uagaugccucuaacugc

SEQ ID NO: 696044 - RNA, 17 nt, Artificial Sequence
  Synthetic
uuacuauccuccacugc

SEQ ID NO: 696045 - RNA, 17 nt, Artificial Sequence
  Synthetic
uggauauaaggcacugc

SEQ ID NO: 696046 - RNA, 17 nt, Artificial Sequence
  Synthetic
uuggagauguagacugc

SEQ ID NO: 696047 - RNA, 17 nt, Artificial Sequence
  Synthetic
uacgaaugagauacugc

SEQ ID NO: 696048 - RNA, 17 nt, Artificial Sequence
  Synthetic
cauucacguauuacugc

SEQ ID NO: 696049 - RNA, 17 nt, Artificial Sequence
  Synthetic
uccagguaugaaccugc

SEQ ID NO: 696050 - RNA, 17 nt, Artificial Sequence
  Synthetic
cgggcugguuagccugc

SEQ ID NO: 696051 - RNA, 17 nt, Artificial Sequence
  Synthetic
ucugucaaaucgccugc

SEQ ID NO: 696052 - RNA, 17 nt, Artificial Sequence
  Synthetic
agagacuauuauccugc

SEQ ID NO: 696053 - RNA, 17 nt, Artificial Sequence
  Synthetic
aacgcaguucuagcugc

SEQ ID NO: 696054 - RNA, 17 nt, Artificial Sequence
  Synthetic
accaucgaacaugcugc

SEQ ID NO: 696055 - RNA, 17 nt, Artificial Sequence
  Synthetic
cugcgacaacguucugc

SEQ ID NO: 696056 - RNA, 17 nt, Artificial Sequence
  Synthetic
aucauguucuagagugc

SEQ ID NO: 696057 - RNA, 17 nt, Artificial Sequence
  Synthetic
cuuggaccgucuagugc

SEQ ID NO: 696058 - RNA, 17 nt, Artificial Sequence
  Synthetic
cagaagacuuacggugc

SEQ ID NO: 696059 - RNA, 17 nt, Artificial Sequence
  Synthetic
ccucuauuugaaugugc

SEQ ID NO: 696060 - RNA, 17 nt, Artificial Sequence
  Synthetic
ccuuguacguagugugc

SEQ ID NO: 696061 - RNA, 17 nt, Artificial Sequence
  Synthetic
uugugcggaggcauugc

SEQ ID NO: 696062 - RNA, 17 nt, Artificial Sequence
  Synthetic
cuauacggggagauugc

SEQ ID NO: 696063 - RNA, 17 nt, Artificial Sequence
  Synthetic
agccaaucggauauugc

SEQ ID NO: 696064 - RNA, 17 nt, Artificial Sequence
  Synthetic
ccaggcuuguaacuugc

SEQ ID NO: 696065 - RNA, 17 nt, Artificial Sequence
  Synthetic
aaaacgagcugacuugc

SEQ ID NO: 696066 - RNA, 17 nt, Artificial Sequence
  Synthetic
ccaaaugccauacuugc

SEQ ID NO: 696067 - RNA, 17 nt, Artificial Sequence
  Synthetic
uuaugucacuaccuugc

SEQ ID NO: 696068 - RNA, 17 nt, Artificial Sequence
  Synthetic
auagaucagcauguugc

SEQ ID NO: 696069 - RNA, 17 nt, Artificial Sequence
  Synthetic
ccuuaagggccauuugc

SEQ ID NO: 696070 - RNA, 17 nt, Artificial Sequence
  Synthetic
ccacccguguucuuugc

SEQ ID NO: 696071 - RNA, 17 nt, Artificial Sequence
  Synthetic
acuaacucugcguuugc

SEQ ID NO: 696072 - RNA, 17 nt, Artificial Sequence
  Synthetic
ccaacuaugugguuugc

SEQ ID NO: 696073 - RNA, 17 nt, Artificial Sequence
  Synthetic
acuugauucgauuuugc

SEQ ID NO: 696074 - RNA, 17 nt, Artificial Sequence
  Synthetic
aacgcuaguuauaaauc

SEQ ID NO: 696075 - RNA, 17 nt, Artificial Sequence
  Synthetic
cuggagguucguaaauc

SEQ ID NO: 696076 - RNA, 17 nt, Artificial Sequence
  Synthetic
uagccaugcuaacaauc

SEQ ID NO: 696077 - RNA, 17 nt, Artificial Sequence
  Synthetic
uugucucaaccccaauc

SEQ ID NO: 696078 - RNA, 17 nt, Artificial Sequence
  Synthetic
cauuacguuaagcaauc

SEQ ID NO: 696079 - RNA, 17 nt, Artificial Sequence
  Synthetic
cccucguaaguucaauc

SEQ ID NO: 696080 - RNA, 17 nt, Artificial Sequence
  Synthetic
uagaaauacguagaauc

SEQ ID NO: 696081 - RNA, 17 nt, Artificial Sequence
  Synthetic
cguaaggaaggauaauc

SEQ ID NO: 696082 - RNA, 17 nt, Artificial Sequence
  Synthetic
ugaguagauuacuaauc

SEQ ID NO: 696083 - RNA, 17 nt, Artificial Sequence
  Synthetic
auggucuauaucuaauc

SEQ ID NO: 696084 - RNA, 17 nt, Artificial Sequence
  Synthetic
agugacaccgucuaauc

SEQ ID NO: 696085 - RNA, 17 nt, Artificial Sequence
  Synthetic
aauccaccgaaguaauc

SEQ ID NO: 696086 - RNA, 17 nt, Artificial Sequence
  Synthetic
acaugauggguguaauc

SEQ ID NO: 696087 - RNA, 17 nt, Artificial Sequence
  Synthetic
cauaaguugcauuaauc

SEQ ID NO: 696088 - RNA, 17 nt, Artificial Sequence
  Synthetic
uauaugugcgauuaauc

SEQ ID NO: 696089 - RNA, 17 nt, Artificial Sequence
  Synthetic
agagauacggguuaauc

SEQ ID NO: 696090 - RNA, 17 nt, Artificial Sequence
  Synthetic
agguaagucugaacauc

SEQ ID NO: 696091 - RNA, 17 nt, Artificial Sequence
  Synthetic
uagucgcuccuaacauc

SEQ ID NO: 696092 - RNA, 17 nt, Artificial Sequence
  Synthetic
cgcaggagcccuacauc

SEQ ID NO: 696093 - RNA, 17 nt, Artificial Sequence
  Synthetic
ucgugguuggcuacauc

SEQ ID NO: 696094 - RNA, 17 nt, Artificial Sequence
  Synthetic
accauagaugcuacauc

SEQ ID NO: 696095 - RNA, 17 nt, Artificial Sequence
  Synthetic
acguagaaacguacauc

SEQ ID NO: 696096 - RNA, 17 nt, Artificial Sequence
  Synthetic
uuaaaguugcuaccauc

SEQ ID NO: 696097 - RNA, 17 nt, Artificial Sequence
  Synthetic
auccauauauacccauc

SEQ ID NO: 696098 - RNA, 17 nt, Artificial Sequence
  Synthetic
acgaauuuugagccauc

SEQ ID NO: 696099 - RNA, 17 nt, Artificial Sequence
  Synthetic
aacccccacgcagcauc

SEQ ID NO: 696100 - RNA, 17 nt, Artificial Sequence
  Synthetic
uaacacuucaccgcauc

SEQ ID NO: 696101 - RNA, 17 nt, Artificial Sequence
  Synthetic
uaacaaucaagcgcauc

SEQ ID NO: 696102 - RNA, 17 nt, Artificial Sequence
  Synthetic
ucucgguaguaaucauc

SEQ ID NO: 696103 - RNA, 17 nt, Artificial Sequence
  Synthetic
uaacccuacguaucauc

SEQ ID NO: 696104 - RNA, 17 nt, Artificial Sequence
  Synthetic
cucugggcgaggucauc

SEQ ID NO: 696105 - RNA, 17 nt, Artificial Sequence
  Synthetic
acccuuucaaggagauc

SEQ ID NO: 696106 - RNA, 17 nt, Artificial Sequence
  Synthetic
acaaguggcccacgauc

SEQ ID NO: 696107 - RNA, 17 nt, Artificial Sequence
  Synthetic
ccaauacuuaaucgauc

SEQ ID NO: 696108 - RNA, 17 nt, Artificial Sequence
  Synthetic
aaaguccagugucgauc

SEQ ID NO: 696109 - RNA, 17 nt, Artificial Sequence
  Synthetic
uuaagaguauuucgauc

SEQ ID NO: 696110 - RNA, 17 nt, Artificial Sequence
  Synthetic
aacuauuuguugggauc

SEQ ID NO: 696111 - RNA, 17 nt, Artificial Sequence
  Synthetic
accccucaauaaugauc

SEQ ID NO: 696112 - RNA, 17 nt, Artificial Sequence
  Synthetic
uccccgugaugcugauc

SEQ ID NO: 696113 - RNA, 17 nt, Artificial Sequence
  Synthetic
uagguagaagauugauc

SEQ ID NO: 696114 - RNA, 17 nt, Artificial Sequence
  Synthetic
ugggagucuacuugauc

SEQ ID NO: 696115 - RNA, 17 nt, Artificial Sequence
  Synthetic
ugcaucauaccaauauc

SEQ ID NO: 696116 - RNA, 17 nt, Artificial Sequence
  Synthetic
acuagcgggucaauauc

SEQ ID NO: 696117 - RNA, 17 nt, Artificial Sequence
  Synthetic
uagcauuaguccauauc

SEQ ID NO: 696118 - RNA, 17 nt, Artificial Sequence
  Synthetic
ugugcauuuacgauauc

SEQ ID NO: 696119 - RNA, 17 nt, Artificial Sequence
  Synthetic
cagaccaaaucgauauc

SEQ ID NO: 696120 - RNA, 17 nt, Artificial Sequence
  Synthetic
agcauuaaccguguauc

SEQ ID NO: 696121 - RNA, 17 nt, Artificial Sequence
  Synthetic
cgaucaugaaaauuauc

SEQ ID NO: 696122 - RNA, 17 nt, Artificial Sequence
  Synthetic
ucggcugacaacuuauc

SEQ ID NO: 696123 - RNA, 17 nt, Artificial Sequence
  Synthetic
caggguagagacuuauc

SEQ ID NO: 696124 - RNA, 17 nt, Artificial Sequence
  Synthetic
cuaguauggaaguuauc

SEQ ID NO: 696125 - RNA, 17 nt, Artificial Sequence
  Synthetic
aggcacguucauuuauc

SEQ ID NO: 696126 - RNA, 17 nt, Artificial Sequence
  Synthetic
ugguuuccaauuaacuc

SEQ ID NO: 696127 - RNA, 17 nt, Artificial Sequence
  Synthetic
caaccuuagcuacacuc

SEQ ID NO: 696128 - RNA, 17 nt, Artificial Sequence
  Synthetic
cugucagcuuaccacuc

SEQ ID NO: 696129 - RNA, 17 nt, Artificial Sequence
  Synthetic
uaguugaagucccacuc

SEQ ID NO: 696130 - RNA, 17 nt, Artificial Sequence
  Synthetic
uugucguuagaagacuc

SEQ ID NO: 696131 - RNA, 17 nt, Artificial Sequence
  Synthetic
uucuacacccuagacuc

SEQ ID NO: 696132 - RNA, 17 nt, Artificial Sequence
  Synthetic
caaggcacuacauacuc

SEQ ID NO: 696133 - RNA, 17 nt, Artificial Sequence
  Synthetic
caguuccaaggauacuc

SEQ ID NO: 696134 - RNA, 17 nt, Artificial Sequence
  Synthetic
cuucuucguuuauacuc

SEQ ID NO: 696135 - RNA, 17 nt, Artificial Sequence
  Synthetic
agggacaucagcuacuc

SEQ ID NO: 696136 - RNA, 17 nt, Artificial Sequence
  Synthetic
agucaccuuaucuacuc

SEQ ID NO: 696137 - RNA, 17 nt, Artificial Sequence
  Synthetic
uacuacgacagguacuc

SEQ ID NO: 696138 - RNA, 17 nt, Artificial Sequence
  Synthetic
cauacaagguuguacuc

SEQ ID NO: 696139 - RNA, 17 nt, Artificial Sequence
  Synthetic
cgugaaacaccuuacuc

SEQ ID NO: 696140 - RNA, 17 nt, Artificial Sequence
  Synthetic
uaacgcaguccuuacuc

SEQ ID NO: 696141 - RNA, 17 nt, Artificial Sequence
  Synthetic
cagcccgcaucuuacuc

SEQ ID NO: 696142 - RNA, 17 nt, Artificial Sequence
  Synthetic
uauuagguaagaaccuc

SEQ ID NO: 696143 - RNA, 17 nt, Artificial Sequence
  Synthetic
aucugguuaggaaccuc

SEQ ID NO: 696144 - RNA, 17 nt, Artificial Sequence
  Synthetic
uacuauccgugaaccuc

SEQ ID NO: 696145 - RNA, 17 nt, Artificial Sequence
  Synthetic
cagcaguacuauaccuc

SEQ ID NO: 696146 - RNA, 17 nt, Artificial Sequence
  Synthetic
uaauauggaacacccuc

SEQ ID NO: 696147 - RNA, 17 nt, Artificial Sequence
  Synthetic
aaaaaggacgcccccuc

SEQ ID NO: 696148 - RNA, 17 nt, Artificial Sequence
  Synthetic
cuauuuagaugucccuc

SEQ ID NO: 696149 - RNA, 17 nt, Artificial Sequence
  Synthetic
cauccgcuaguagccuc

SEQ ID NO: 696150 - RNA, 17 nt, Artificial Sequence
  Synthetic
caccuaguaaccuccuc

SEQ ID NO: 696151 - RNA, 17 nt, Artificial Sequence
  Synthetic
agucuacaacaaagcuc

SEQ ID NO: 696152 - RNA, 17 nt, Artificial Sequence
  Synthetic
uaagcuuccuuaagcuc

SEQ ID NO: 696153 - RNA, 17 nt, Artificial Sequence
  Synthetic
ccaugagacacgagcuc

SEQ ID NO: 696154 - RNA, 17 nt, Artificial Sequence
  Synthetic
caucuaggagggagcuc

SEQ ID NO: 696155 - RNA, 17 nt, Artificial Sequence
  Synthetic
ucaaacgguuauagcuc

SEQ ID NO: 696156 - RNA, 17 nt, Artificial Sequence
  Synthetic
aacacauaugcuagcuc

SEQ ID NO: 696157 - RNA, 17 nt, Artificial Sequence
  Synthetic
ugcuuauugauacgcuc

SEQ ID NO: 696158 - RNA, 17 nt, Artificial Sequence
  Synthetic
uaacccuaguuucgcuc

SEQ ID NO: 696159 - RNA, 17 nt, Artificial Sequence
  Synthetic
auaugagucuuaugcuc

SEQ ID NO: 696160 - RNA, 17 nt, Artificial Sequence
  Synthetic
ucgguugucacuugcuc

SEQ ID NO: 696161 - RNA, 17 nt, Artificial Sequence
  Synthetic
acgauucccuuuugcuc

SEQ ID NO: 696162 - RNA, 17 nt, Artificial Sequence
  Synthetic
caugauuacaggaucuc

SEQ ID NO: 696163 - RNA, 17 nt, Artificial Sequence
  Synthetic
auggguccuaauaucuc

SEQ ID NO: 696164 - RNA, 17 nt, Artificial Sequence
  Synthetic
auaaucgcaaguaucuc

SEQ ID NO: 696165 - RNA, 17 nt, Artificial Sequence
  Synthetic
cucugacaccguaucuc

SEQ ID NO: 696166 - RNA, 17 nt, Artificial Sequence
  Synthetic
uccgaguuucuuaucuc

SEQ ID NO: 696167 - RNA, 17 nt, Artificial Sequence
  Synthetic
aguuaacguucacucuc

SEQ ID NO: 696168 - RNA, 17 nt, Artificial Sequence
  Synthetic
auuucccguauacucuc

SEQ ID NO: 696169 - RNA, 17 nt, Artificial Sequence
  Synthetic
uguuaaaccuagcucuc

SEQ ID NO: 696170 - RNA, 17 nt, Artificial Sequence
  Synthetic
uacgugcagcccgucuc

SEQ ID NO: 696171 - RNA, 17 nt, Artificial Sequence
  Synthetic
ucuacaacuagggucuc

SEQ ID NO: 696172 - RNA, 17 nt, Artificial Sequence
  Synthetic
uaagauugacgugucuc

SEQ ID NO: 696173 - RNA, 17 nt, Artificial Sequence
  Synthetic
aggucaggucuaaaguc

SEQ ID NO: 696174 - RNA, 17 nt, Artificial Sequence
  Synthetic
acgguagccaccaaguc

SEQ ID NO: 696175 - RNA, 17 nt, Artificial Sequence
  Synthetic
aggacccccaauaaguc

SEQ ID NO: 696176 - RNA, 17 nt, Artificial Sequence
  Synthetic
acucaguuacuuaaguc

SEQ ID NO: 696177 - RNA, 17 nt, Artificial Sequence
  Synthetic
aaccaucguagucaguc

SEQ ID NO: 696178 - RNA, 17 nt, Artificial Sequence
  Synthetic
ugcuaucaauuucaguc

SEQ ID NO: 696179 - RNA, 17 nt, Artificial Sequence
  Synthetic
uaugaucucgaagaguc

SEQ ID NO: 696180 - RNA, 17 nt, Artificial Sequence
  Synthetic
ucugcaguuagagaguc

SEQ ID NO: 696181 - RNA, 17 nt, Artificial Sequence
  Synthetic
uaugacgcucccgaguc

SEQ ID NO: 696182 - RNA, 17 nt, Artificial Sequence
  Synthetic
ugcacaauuaaggaguc

SEQ ID NO: 696183 - RNA, 17 nt, Artificial Sequence
  Synthetic
ccauuggcauaugaguc

SEQ ID NO: 696184 - RNA, 17 nt, Artificial Sequence
  Synthetic
aaucuccccguauaguc

SEQ ID NO: 696185 - RNA, 17 nt, Artificial Sequence
  Synthetic
aguaguaaaugcuaguc

SEQ ID NO: 696186 - RNA, 17 nt, Artificial Sequence
  Synthetic
uaguauaucacguaguc

SEQ ID NO: 696187 - RNA, 17 nt, Artificial Sequence
  Synthetic
uacauagcaaauacguc

SEQ ID NO: 696188 - RNA, 17 nt, Artificial Sequence
  Synthetic
ucaaagucuaauacguc

SEQ ID NO: 696189 - RNA, 17 nt, Artificial Sequence
  Synthetic
aaugcagcaguuacguc

SEQ ID NO: 696190 - RNA, 17 nt, Artificial Sequence
  Synthetic
auucauuguugaccguc

SEQ ID NO: 696191 - RNA, 17 nt, Artificial Sequence
  Synthetic
ucaucuauagacccguc

SEQ ID NO: 696192 - RNA, 17 nt, Artificial Sequence
  Synthetic
ucaucugucaggccguc

SEQ ID NO: 696193 - RNA, 17 nt, Artificial Sequence
  Synthetic
augguagcauaagcguc

SEQ ID NO: 696194 - RNA, 17 nt, Artificial Sequence
  Synthetic
aguagaaugacagcguc

SEQ ID NO: 696195 - RNA, 17 nt, Artificial Sequence
  Synthetic
aggcaagccauagcguc

SEQ ID NO: 696196 - RNA, 17 nt, Artificial Sequence
  Synthetic
aaauggcacuaaucguc

SEQ ID NO: 696197 - RNA, 17 nt, Artificial Sequence
  Synthetic
cagaauuugaagucguc

SEQ ID NO: 696198 - RNA, 17 nt, Artificial Sequence
  Synthetic
uauacacuagguucguc

SEQ ID NO: 696199 - RNA, 17 nt, Artificial Sequence
  Synthetic
caaguaaucuuaagguc

SEQ ID NO: 696200 - RNA, 17 nt, Artificial Sequence
  Synthetic
acuugcauagccagguc

SEQ ID NO: 696201 - RNA, 17 nt, Artificial Sequence
  Synthetic
uacauuuagagcagguc

SEQ ID NO: 696202 - RNA, 17 nt, Artificial Sequence
  Synthetic
ugucgugguguuagguc

SEQ ID NO: 696203 - RNA, 17 nt, Artificial Sequence
  Synthetic
uuugcaugaggucgguc

SEQ ID NO: 696204 - RNA, 17 nt, Artificial Sequence
  Synthetic
ugcuuuauacuucgguc

SEQ ID NO: 696205 - RNA, 17 nt, Artificial Sequence
  Synthetic
auccugguuauuugguc

SEQ ID NO: 696206 - RNA, 17 nt, Artificial Sequence
  Synthetic
uaacgccaaaacauguc

SEQ ID NO: 696207 - RNA, 17 nt, Artificial Sequence
  Synthetic
aguucggaggagauguc

SEQ ID NO: 696208 - RNA, 17 nt, Artificial Sequence
  Synthetic
aguuaaauggguauguc

SEQ ID NO: 696209 - RNA, 17 nt, Artificial Sequence
  Synthetic
auugauuacuaacuguc

SEQ ID NO: 696210 - RNA, 17 nt, Artificial Sequence
  Synthetic
acauaggcgcaaguguc

SEQ ID NO: 696211 - RNA, 17 nt, Artificial Sequence
  Synthetic
ugcuaugauucgguguc

SEQ ID NO: 696212 - RNA, 17 nt, Artificial Sequence
  Synthetic
aucugacuccaauuguc

SEQ ID NO: 696213 - RNA, 17 nt, Artificial Sequence
  Synthetic
ucgcuaguaguauuguc

SEQ ID NO: 696214 - RNA, 17 nt, Artificial Sequence
  Synthetic
ccaagcuaauccuuguc

SEQ ID NO: 696215 - RNA, 17 nt, Artificial Sequence
  Synthetic
uauucuacccaguuguc

SEQ ID NO: 696216 - RNA, 17 nt, Artificial Sequence
  Synthetic
acuagggucacaaauuc

SEQ ID NO: 696217 - RNA, 17 nt, Artificial Sequence
  Synthetic
aggcgaauaccuaauuc

SEQ ID NO: 696218 - RNA, 17 nt, Artificial Sequence
  Synthetic
acugcgcaccaucauuc

SEQ ID NO: 696219 - RNA, 17 nt, Artificial Sequence
  Synthetic
auccccuuaacagauuc

SEQ ID NO: 696220 - RNA, 17 nt, Artificial Sequence
  Synthetic
cgguaugacuuagauuc

SEQ ID NO: 696221 - RNA, 17 nt, Artificial Sequence
  Synthetic
uagacgaggcuugauuc

SEQ ID NO: 696222 - RNA, 17 nt, Artificial Sequence
  Synthetic
uuaacccgguaauauuc

SEQ ID NO: 696223 - RNA, 17 nt, Artificial Sequence
  Synthetic
cacacaaguuccuauuc

SEQ ID NO: 696224 - RNA, 17 nt, Artificial Sequence
  Synthetic
ucagacgugagcuauuc

SEQ ID NO: 696225 - RNA, 17 nt, Artificial Sequence
  Synthetic
aaacaacguugguauuc

SEQ ID NO: 696226 - RNA, 17 nt, Artificial Sequence
  Synthetic
uauaagcgaaauuauuc

SEQ ID NO: 696227 - RNA, 17 nt, Artificial Sequence
  Synthetic
auuaguggguguuauuc

SEQ ID NO: 696228 - RNA, 17 nt, Artificial Sequence
  Synthetic
ccccaguuaauuuauuc

SEQ ID NO: 696229 - RNA, 17 nt, Artificial Sequence
  Synthetic
cuuagacguucaacuuc

SEQ ID NO: 696230 - RNA, 17 nt, Artificial Sequence
  Synthetic
acgaacguuugcacuuc

SEQ ID NO: 696231 - RNA, 17 nt, Artificial Sequence
  Synthetic
uuuugcaugacgacuuc

SEQ ID NO: 696232 - RNA, 17 nt, Artificial Sequence
  Synthetic
cgucguccuuguacuuc

SEQ ID NO: 696233 - RNA, 17 nt, Artificial Sequence
  Synthetic
accccaugaauuacuuc

SEQ ID NO: 696234 - RNA, 17 nt, Artificial Sequence
  Synthetic
ucgcauugcuaaccuuc

SEQ ID NO: 696235 - RNA, 17 nt, Artificial Sequence
  Synthetic
cgcaauuauuaaccuuc

SEQ ID NO: 696236 - RNA, 17 nt, Artificial Sequence
  Synthetic
ccguuauauugaccuuc

SEQ ID NO: 696237 - RNA, 17 nt, Artificial Sequence
  Synthetic
uccccaacaacggcuuc

SEQ ID NO: 696238 - RNA, 17 nt, Artificial Sequence
  Synthetic
cuccuuaauagcucuuc

SEQ ID NO: 696239 - RNA, 17 nt, Artificial Sequence
  Synthetic
ugccuacggugcucuuc

SEQ ID NO: 696240 - RNA, 17 nt, Artificial Sequence
  Synthetic
uauuacaauacgucuuc

SEQ ID NO: 696241 - RNA, 17 nt, Artificial Sequence
  Synthetic
aaaaggcggacaaguuc

SEQ ID NO: 696242 - RNA, 17 nt, Artificial Sequence
  Synthetic
ucacuuauagggaguuc

SEQ ID NO: 696243 - RNA, 17 nt, Artificial Sequence
  Synthetic
agcucagugacacguuc

SEQ ID NO: 696244 - RNA, 17 nt, Artificial Sequence
  Synthetic
ugccuguuaauacguuc

SEQ ID NO: 696245 - RNA, 17 nt, Artificial Sequence
  Synthetic
auucucaaaccucguuc

SEQ ID NO: 696246 - RNA, 17 nt, Artificial Sequence
  Synthetic
cccaugcacuaggguuc

SEQ ID NO: 696247 - RNA, 17 nt, Artificial Sequence
  Synthetic
uaccagucgagggguuc

SEQ ID NO: 696248 - RNA, 17 nt, Artificial Sequence
  Synthetic
uuagcacccgaugguuc

SEQ ID NO: 696249 - RNA, 17 nt, Artificial Sequence
  Synthetic
auuauaucacgugguuc

SEQ ID NO: 696250 - RNA, 17 nt, Artificial Sequence
  Synthetic
cgauaacgaaaauguuc

SEQ ID NO: 696251 - RNA, 17 nt, Artificial Sequence
  Synthetic
cuaaacuuacacuguuc

SEQ ID NO: 696252 - RNA, 17 nt, Artificial Sequence
  Synthetic
uuuaccgccccuauuuc

SEQ ID NO: 696253 - RNA, 17 nt, Artificial Sequence
  Synthetic
uaccuauggaaucuuuc

SEQ ID NO: 696254 - RNA, 17 nt, Artificial Sequence
  Synthetic
auguuggugcacguuuc

SEQ ID NO: 696255 - RNA, 17 nt, Artificial Sequence
  Synthetic
ugagcagccacgguuuc

SEQ ID NO: 696256 - RNA, 17 nt, Artificial Sequence
  Synthetic
aauguggauacgguuuc

SEQ ID NO: 696257 - RNA, 17 nt, Artificial Sequence
  Synthetic
aagaucacgguauuuuc

SEQ ID NO: 696258 - RNA, 17 nt, Artificial Sequence
  Synthetic
ugcccggaccccuuuuc

SEQ ID NO: 696259 - RNA, 17 nt, Artificial Sequence
  Synthetic
caccuucgacauuuuuc

SEQ ID NO: 696260 - RNA, 17 nt, Artificial Sequence
  Synthetic
ccguaagagccacaaag

SEQ ID NO: 696261 - RNA, 17 nt, Artificial Sequence
  Synthetic
cuguugacgugacaaag

SEQ ID NO: 696262 - RNA, 17 nt, Artificial Sequence
  Synthetic
ugguagacuauccaaag

SEQ ID NO: 696263 - RNA, 17 nt, Artificial Sequence
  Synthetic
aacguauaugcugaaag

SEQ ID NO: 696264 - RNA, 17 nt, Artificial Sequence
  Synthetic
cucgauagaagcuaaag

SEQ ID NO: 696265 - RNA, 17 nt, Artificial Sequence
  Synthetic
acuucgaguagguaaag

SEQ ID NO: 696266 - RNA, 17 nt, Artificial Sequence
  Synthetic
ugagaagaccgguaaag

SEQ ID NO: 696267 - RNA, 17 nt, Artificial Sequence
  Synthetic
caacucacccguuaaag

SEQ ID NO: 696268 - RNA, 17 nt, Artificial Sequence
  Synthetic
aaaugaccucgaacaag

SEQ ID NO: 696269 - RNA, 17 nt, Artificial Sequence
  Synthetic
cguccaugaauagcaag

SEQ ID NO: 696270 - RNA, 17 nt, Artificial Sequence
  Synthetic
ugcucggguuucgcaag

SEQ ID NO: 696271 - RNA, 17 nt, Artificial Sequence
  Synthetic
uuccuuccgggggcaag

SEQ ID NO: 696272 - RNA, 17 nt, Artificial Sequence
  Synthetic
agggcuaucuaugcaag

SEQ ID NO: 696273 - RNA, 17 nt, Artificial Sequence
  Synthetic
cuugacugacccucaag

SEQ ID NO: 696274 - RNA, 17 nt, Artificial Sequence
  Synthetic
cguaagcugaucucaag

SEQ ID NO: 696275 - RNA, 17 nt, Artificial Sequence
  Synthetic
cuauaagacgagucaag

SEQ ID NO: 696276 - RNA, 17 nt, Artificial Sequence
  Synthetic
cugacgcaguccagaag

SEQ ID NO: 696277 - RNA, 17 nt, Artificial Sequence
  Synthetic
accgaagguagccgaag

SEQ ID NO: 696278 - RNA, 17 nt, Artificial Sequence
  Synthetic
ccuuuugacggccgaag

SEQ ID NO: 696279 - RNA, 17 nt, Artificial Sequence
  Synthetic
cuuguagguuuccgaag

SEQ ID NO: 696280 - RNA, 17 nt, Artificial Sequence
  Synthetic
uuaaugucagcucgaag

SEQ ID NO: 696281 - RNA, 17 nt, Artificial Sequence
  Synthetic
acguagacaauuggaag

SEQ ID NO: 696282 - RNA, 17 nt, Artificial Sequence
  Synthetic
cucgaagagguuggaag

SEQ ID NO: 696283 - RNA, 17 nt, Artificial Sequence
  Synthetic
ucagcggaauagugaag

SEQ ID NO: 696284 - RNA, 17 nt, Artificial Sequence
  Synthetic
cccuauauugauugaag

SEQ ID NO: 696285 - RNA, 17 nt, Artificial Sequence
  Synthetic
acgggaauuuccauaag

SEQ ID NO: 696286 - RNA, 17 nt, Artificial Sequence
  Synthetic
augcaccucauuauaag

SEQ ID NO: 696287 - RNA, 17 nt, Artificial Sequence
  Synthetic
uuguaggagccacuaag

SEQ ID NO: 696288 - RNA, 17 nt, Artificial Sequence
  Synthetic
cccgcgugcgcacuaag

SEQ ID NO: 696289 - RNA, 17 nt, Artificial Sequence
  Synthetic
aauauguacuagcuaag

SEQ ID NO: 696290 - RNA, 17 nt, Artificial Sequence
  Synthetic
cauuugaaaccgcuaag

SEQ ID NO: 696291 - RNA, 17 nt, Artificial Sequence
  Synthetic
aaucgucauuugcuaag

SEQ ID NO: 696292 - RNA, 17 nt, Artificial Sequence
  Synthetic
augcgcugucuucuaag

SEQ ID NO: 696293 - RNA, 17 nt, Artificial Sequence
  Synthetic
uugccauaucacguaag

SEQ ID NO: 696294 - RNA, 17 nt, Artificial Sequence
  Synthetic
ccccuguaccagguaag

SEQ ID NO: 696295 - RNA, 17 nt, Artificial Sequence
  Synthetic
cauagaguacguaacag

SEQ ID NO: 696296 - RNA, 17 nt, Artificial Sequence
  Synthetic
ucacacuuccgagacag

SEQ ID NO: 696297 - RNA, 17 nt, Artificial Sequence
  Synthetic
ucuuuuacuugcgacag

SEQ ID NO: 696298 - RNA, 17 nt, Artificial Sequence
  Synthetic
uacuacuaaggggacag

SEQ ID NO: 696299 - RNA, 17 nt, Artificial Sequence
  Synthetic
uugccgauaauugacag

SEQ ID NO: 696300 - RNA, 17 nt, Artificial Sequence
  Synthetic
auauaggaccacuacag

SEQ ID NO: 696301 - RNA, 17 nt, Artificial Sequence
  Synthetic
uaguucccuuaguacag

SEQ ID NO: 696302 - RNA, 17 nt, Artificial Sequence
  Synthetic
uugccuccguauuacag

SEQ ID NO: 696303 - RNA, 17 nt, Artificial Sequence
  Synthetic
ucuaacucggacaccag

SEQ ID NO: 696304 - RNA, 17 nt, Artificial Sequence
  Synthetic
aaugcccuauggaccag

SEQ ID NO: 696305 - RNA, 17 nt, Artificial Sequence
  Synthetic
cuaacuauaaugcccag

SEQ ID NO: 696306 - RNA, 17 nt, Artificial Sequence
  Synthetic
cagugaacuauucccag

SEQ ID NO: 696307 - RNA, 17 nt, Artificial Sequence
  Synthetic
aacuccugccgagccag

SEQ ID NO: 696308 - RNA, 17 nt, Artificial Sequence
  Synthetic
ccaaagaccuccgccag

SEQ ID NO: 696309 - RNA, 17 nt, Artificial Sequence
  Synthetic
uaccauuugcgcuccag

SEQ ID NO: 696310 - RNA, 17 nt, Artificial Sequence
  Synthetic
caugacacuuauagcag

SEQ ID NO: 696311 - RNA, 17 nt, Artificial Sequence
  Synthetic
ucaacguguaggggcag

SEQ ID NO: 696312 - RNA, 17 nt, Artificial Sequence
  Synthetic
uaagucguguguggcag

SEQ ID NO: 696313 - RNA, 17 nt, Artificial Sequence
  Synthetic
cccgugcugauaaucag

SEQ ID NO: 696314 - RNA, 17 nt, Artificial Sequence
  Synthetic
uaguagaucacgaucag

SEQ ID NO: 696315 - RNA, 17 nt, Artificial Sequence
  Synthetic
uagcuguucacgaucag

SEQ ID NO: 696316 - RNA, 17 nt, Artificial Sequence
  Synthetic
uuuaaauagcguaucag

SEQ ID NO: 696317 - RNA, 17 nt, Artificial Sequence
  Synthetic
ccuugaugauaccucag

SEQ ID NO: 696318 - RNA, 17 nt, Artificial Sequence
  Synthetic
aaaggacgcccccucag

SEQ ID NO: 696319 - RNA, 17 nt, Artificial Sequence
  Synthetic
accagguuaucccucag

SEQ ID NO: 696320 - RNA, 17 nt, Artificial Sequence
  Synthetic
cguauuauuugucucag

SEQ ID NO: 696321 - RNA, 17 nt, Artificial Sequence
  Synthetic
aauacuuagcgagucag

SEQ ID NO: 696322 - RNA, 17 nt, Artificial Sequence
  Synthetic
caacagagcgaugucag

SEQ ID NO: 696323 - RNA, 17 nt, Artificial Sequence
  Synthetic
agguugcacgacuucag

SEQ ID NO: 696324 - RNA, 17 nt, Artificial Sequence
  Synthetic
caguaguaucccaagag

SEQ ID NO: 696325 - RNA, 17 nt, Artificial Sequence
  Synthetic
uguagguuuccgaagag

SEQ ID NO: 696326 - RNA, 17 nt, Artificial Sequence
  Synthetic
uccauguuuccgaagag

SEQ ID NO: 696327 - RNA, 17 nt, Artificial Sequence
  Synthetic
ccauauauucccgagag

SEQ ID NO: 696328 - RNA, 17 nt, Artificial Sequence
  Synthetic
auguguugaccauagag

SEQ ID NO: 696329 - RNA, 17 nt, Artificial Sequence
  Synthetic
ccuaaggccagcuagag

SEQ ID NO: 696330 - RNA, 17 nt, Artificial Sequence
  Synthetic
auacucaucaucuagag

SEQ ID NO: 696331 - RNA, 17 nt, Artificial Sequence
  Synthetic
cacacuuacggguagag

SEQ ID NO: 696332 - RNA, 17 nt, Artificial Sequence
  Synthetic
cauucacugccaacgag

SEQ ID NO: 696333 - RNA, 17 nt, Artificial Sequence
  Synthetic
aucagaacuccuacgag

SEQ ID NO: 696334 - RNA, 17 nt, Artificial Sequence
  Synthetic
aacuggagcuaaccgag

SEQ ID NO: 696335 - RNA, 17 nt, Artificial Sequence
  Synthetic
caggcagaaauuccgag

SEQ ID NO: 696336 - RNA, 17 nt, Artificial Sequence
  Synthetic
cccaugggcuuugcgag

SEQ ID NO: 696337 - RNA, 17 nt, Artificial Sequence
  Synthetic
accagacaaaucucgag

SEQ ID NO: 696338 - RNA, 17 nt, Artificial Sequence
  Synthetic
aagacauaccagucgag

SEQ ID NO: 696339 - RNA, 17 nt, Artificial Sequence
  Synthetic
cuauguugcuauucgag

SEQ ID NO: 696340 - RNA, 17 nt, Artificial Sequence
  Synthetic
cagauuguuccuaggag

SEQ ID NO: 696341 - RNA, 17 nt, Artificial Sequence
  Synthetic
auauggcuaaaacggag

SEQ ID NO: 696342 - RNA, 17 nt, Artificial Sequence
  Synthetic
auucucagguuucggag

SEQ ID NO: 696343 - RNA, 17 nt, Artificial Sequence
  Synthetic
cagaaccacguauggag

SEQ ID NO: 696344 - RNA, 17 nt, Artificial Sequence
  Synthetic
uggcacuucuguaugag

SEQ ID NO: 696345 - RNA, 17 nt, Artificial Sequence
  Synthetic
ccuacuaaugaacugag

SEQ ID NO: 696346 - RNA, 17 nt, Artificial Sequence
  Synthetic
ugaucgggaugauugag

SEQ ID NO: 696347 - RNA, 17 nt, Artificial Sequence
  Synthetic
uauucgaauguauugag

SEQ ID NO: 696348 - RNA, 17 nt, Artificial Sequence
  Synthetic
cuuuuaugaacguugag

SEQ ID NO: 696349 - RNA, 17 nt, Artificial Sequence
  Synthetic
ccacuuaaauccaauag

SEQ ID NO: 696350 - RNA, 17 nt, Artificial Sequence
  Synthetic
ugcguuuagacacauag

SEQ ID NO: 696351 - RNA, 17 nt, Artificial Sequence
  Synthetic
ccgucucggggacauag

SEQ ID NO: 696352 - RNA, 17 nt, Artificial Sequence
  Synthetic
cuagcauaguuccauag

SEQ ID NO: 696353 - RNA, 17 nt, Artificial Sequence
  Synthetic
caucguacaaggcauag

SEQ ID NO: 696354 - RNA, 17 nt, Artificial Sequence
  Synthetic
cuuguaacccaagauag

SEQ ID NO: 696355 - RNA, 17 nt, Artificial Sequence
  Synthetic
cgugguuuccucgauag

SEQ ID NO: 696356 - RNA, 17 nt, Artificial Sequence
  Synthetic
cuugccaauggguauag

SEQ ID NO: 696357 - RNA, 17 nt, Artificial Sequence
  Synthetic
uucgaaucugcuuauag

SEQ ID NO: 696358 - RNA, 17 nt, Artificial Sequence
  Synthetic
caauacccaccaacuag

SEQ ID NO: 696359 - RNA, 17 nt, Artificial Sequence
  Synthetic
ugauugacucggacuag

SEQ ID NO: 696360 - RNA, 17 nt, Artificial Sequence
  Synthetic
cuggaaauacgaccuag

SEQ ID NO: 696361 - RNA, 17 nt, Artificial Sequence
  Synthetic
accgauuauguaccuag

SEQ ID NO: 696362 - RNA, 17 nt, Artificial Sequence
  Synthetic
uugcaguuaucuccuag

SEQ ID NO: 696363 - RNA, 17 nt, Artificial Sequence
  Synthetic
aacuguaucucagcuag

SEQ ID NO: 696364 - RNA, 17 nt, Artificial Sequence
  Synthetic
agucacaaguuagcuag

SEQ ID NO: 696365 - RNA, 17 nt, Artificial Sequence
  Synthetic
ucacgaucaguggcuag

SEQ ID NO: 696366 - RNA, 17 nt, Artificial Sequence
  Synthetic
cccagugugcggucuag

SEQ ID NO: 696367 - RNA, 17 nt, Artificial Sequence
  Synthetic
ccuaggcaaacaaguag

SEQ ID NO: 696368 - RNA, 17 nt, Artificial Sequence
  Synthetic
ugacguaacugaaguag

SEQ ID NO: 696369 - RNA, 17 nt, Artificial Sequence
  Synthetic
ucggauucuauaaguag

SEQ ID NO: 696370 - RNA, 17 nt, Artificial Sequence
  Synthetic
aagggccauguaaguag

SEQ ID NO: 696371 - RNA, 17 nt, Artificial Sequence
  Synthetic
uguggacuauauaguag

SEQ ID NO: 696372 - RNA, 17 nt, Artificial Sequence
  Synthetic
uuaccuaaacguaguag

SEQ ID NO: 696373 - RNA, 17 nt, Artificial Sequence
  Synthetic
ccaaguagacaacguag

SEQ ID NO: 696374 - RNA, 17 nt, Artificial Sequence
  Synthetic
acggagcuaucacguag

SEQ ID NO: 696375 - RNA, 17 nt, Artificial Sequence
  Synthetic
aauuaaaugugucguag

SEQ ID NO: 696376 - RNA, 17 nt, Artificial Sequence
  Synthetic
uaaagccaacuucguag

SEQ ID NO: 696377 - RNA, 17 nt, Artificial Sequence
  Synthetic
ugccuaagucgagguag

SEQ ID NO: 696378 - RNA, 17 nt, Artificial Sequence
  Synthetic
agccauuuggcggguag

SEQ ID NO: 696379 - RNA, 17 nt, Artificial Sequence
  Synthetic
uagccccgaaaugguag

SEQ ID NO: 696380 - RNA, 17 nt, Artificial Sequence
  Synthetic
accccgcucgaugguag

SEQ ID NO: 696381 - RNA, 17 nt, Artificial Sequence
  Synthetic
ucgaaaacggaauguag

SEQ ID NO: 696382 - RNA, 17 nt, Artificial Sequence
  Synthetic
uucaaucaaccauguag

SEQ ID NO: 696383 - RNA, 17 nt, Artificial Sequence
  Synthetic
uacgucuaccccuguag

SEQ ID NO: 696384 - RNA, 17 nt, Artificial Sequence
  Synthetic
ccaacuugcugcuguag

SEQ ID NO: 696385 - RNA, 17 nt, Artificial Sequence
  Synthetic
uuggggucaacguguag

SEQ ID NO: 696386 - RNA, 17 nt, Artificial Sequence
  Synthetic
auaccucgugaaauuag

SEQ ID NO: 696387 - RNA, 17 nt, Artificial Sequence
  Synthetic
cguagugugcagauuag

SEQ ID NO: 696388 - RNA, 17 nt, Artificial Sequence
  Synthetic
cuggcuugguagauuag

SEQ ID NO: 696389 - RNA, 17 nt, Artificial Sequence
  Synthetic
acaugauggacgauuag

SEQ ID NO: 696390 - RNA, 17 nt, Artificial Sequence
  Synthetic
auuggcgucucuauuag

SEQ ID NO: 696391 - RNA, 17 nt, Artificial Sequence
  Synthetic
caugaacuguaacuuag

SEQ ID NO: 696392 - RNA, 17 nt, Artificial Sequence
  Synthetic
auagcgcuccuacuuag

SEQ ID NO: 696393 - RNA, 17 nt, Artificial Sequence
  Synthetic
auaggcucuuuacuuag

SEQ ID NO: 696394 - RNA, 17 nt, Artificial Sequence
  Synthetic
accucaacgguccuuag

SEQ ID NO: 696395 - RNA, 17 nt, Artificial Sequence
  Synthetic
cuggcgugaucgcuuag

SEQ ID NO: 696396 - RNA, 17 nt, Artificial Sequence
  Synthetic
cuguauaacgugcuuag

SEQ ID NO: 696397 - RNA, 17 nt, Artificial Sequence
  Synthetic
ccaaccccuagucuuag

SEQ ID NO: 696398 - RNA, 17 nt, Artificial Sequence
  Synthetic
caaacugugcacguuag

SEQ ID NO: 696399 - RNA, 17 nt, Artificial Sequence
  Synthetic
cucaacccuaagguuag

SEQ ID NO: 696400 - RNA, 17 nt, Artificial Sequence
  Synthetic
uaucaacaacugguuag

SEQ ID NO: 696401 - RNA, 17 nt, Artificial Sequence
  Synthetic
agggcgaaguguguuag

SEQ ID NO: 696402 - RNA, 17 nt, Artificial Sequence
  Synthetic
uggaggaacucguuuag

SEQ ID NO: 696403 - RNA, 17 nt, Artificial Sequence
  Synthetic
uaaggagacgcaaaacg

SEQ ID NO: 696404 - RNA, 17 nt, Artificial Sequence
  Synthetic
ugcuucgcuauaaaacg

SEQ ID NO: 696405 - RNA, 17 nt, Artificial Sequence
  Synthetic
uaggggcauaagaaacg

SEQ ID NO: 696406 - RNA, 17 nt, Artificial Sequence
  Synthetic
accgaaggaacuaaacg

SEQ ID NO: 696407 - RNA, 17 nt, Artificial Sequence
  Synthetic
uuguuucguucucaacg

SEQ ID NO: 696408 - RNA, 17 nt, Artificial Sequence
  Synthetic
uggggauuauuggaacg

SEQ ID NO: 696409 - RNA, 17 nt, Artificial Sequence
  Synthetic
uaaauccaucaugaacg

SEQ ID NO: 696410 - RNA, 17 nt, Artificial Sequence
  Synthetic
uacugugguagugaacg

SEQ ID NO: 696411 - RNA, 17 nt, Artificial Sequence
  Synthetic
acagcauguuacuaacg

SEQ ID NO: 696412 - RNA, 17 nt, Artificial Sequence
  Synthetic
auauaucacagcuaacg

SEQ ID NO: 696413 - RNA, 17 nt, Artificial Sequence
  Synthetic
uaguucaagggcuaacg

SEQ ID NO: 696414 - RNA, 17 nt, Artificial Sequence
  Synthetic
cucgaugggcaaacacg

SEQ ID NO: 696415 - RNA, 17 nt, Artificial Sequence
  Synthetic
uugcgcugcuacacacg

SEQ ID NO: 696416 - RNA, 17 nt, Artificial Sequence
  Synthetic
aaagaauuacuaccacg

SEQ ID NO: 696417 - RNA, 17 nt, Artificial Sequence
  Synthetic
agccagucccuaccacg

SEQ ID NO: 696418 - RNA, 17 nt, Artificial Sequence
  Synthetic
cacguuugugguccacg

SEQ ID NO: 696419 - RNA, 17 nt, Artificial Sequence
  Synthetic
uuaucuauguaagcacg

SEQ ID NO: 696420 - RNA, 17 nt, Artificial Sequence
  Synthetic
cucuacgugauggcacg

SEQ ID NO: 696421 - RNA, 17 nt, Artificial Sequence
  Synthetic
aagugauacuuggcacg

SEQ ID NO: 696422 - RNA, 17 nt, Artificial Sequence
  Synthetic
uaacguucauuugcacg

SEQ ID NO: 696423 - RNA, 17 nt, Artificial Sequence
  Synthetic
acaccauuguagucacg

SEQ ID NO: 696424 - RNA, 17 nt, Artificial Sequence
  Synthetic
aacgaauaugggucacg

SEQ ID NO: 696425 - RNA, 17 nt, Artificial Sequence
  Synthetic
ugaccucauacuucacg

SEQ ID NO: 696426 - RNA, 17 nt, Artificial Sequence
  Synthetic
aucaaauggauuucacg

SEQ ID NO: 696427 - RNA, 17 nt, Artificial Sequence
  Synthetic
aguaucaaggacagacg

SEQ ID NO: 696428 - RNA, 17 nt, Artificial Sequence
  Synthetic
uuaccuucagggagacg

SEQ ID NO: 696429 - RNA, 17 nt, Artificial Sequence
  Synthetic
uugcaaggagugagacg

SEQ ID NO: 696430 - RNA, 17 nt, Artificial Sequence
  Synthetic
uauucugaucacggacg

SEQ ID NO: 696431 - RNA, 17 nt, Artificial Sequence
  Synthetic
aagcuacuuuuaugacg

SEQ ID NO: 696432 - RNA, 17 nt, Artificial Sequence
  Synthetic
aauacugcuaucugacg

SEQ ID NO: 696433 - RNA, 17 nt, Artificial Sequence
  Synthetic
aggagacguaauugacg

SEQ ID NO: 696434 - RNA, 17 nt, Artificial Sequence
  Synthetic
uacauuugccauugacg

SEQ ID NO: 696435 - RNA, 17 nt, Artificial Sequence
  Synthetic
uaacgcugagcaauacg

SEQ ID NO: 696436 - RNA, 17 nt, Artificial Sequence
  Synthetic
ucucuccccaacauacg

SEQ ID NO: 696437 - RNA, 17 nt, Artificial Sequence
  Synthetic
ugaccaagauacauacg

SEQ ID NO: 696438 - RNA, 17 nt, Artificial Sequence
  Synthetic
uucauccccuccauacg

SEQ ID NO: 696439 - RNA, 17 nt, Artificial Sequence
  Synthetic
aagauccuuaugauacg

SEQ ID NO: 696440 - RNA, 17 nt, Artificial Sequence
  Synthetic
aaaguuuggauuauacg

SEQ ID NO: 696441 - RNA, 17 nt, Artificial Sequence
  Synthetic
uuccaagcuauacuacg

SEQ ID NO: 696442 - RNA, 17 nt, Artificial Sequence
  Synthetic
uaucagguuucccuacg

SEQ ID NO: 696443 - RNA, 17 nt, Artificial Sequence
  Synthetic
aauucuagguuccuacg

SEQ ID NO: 696444 - RNA, 17 nt, Artificial Sequence
  Synthetic
aaccccacugggcuacg

SEQ ID NO: 696445 - RNA, 17 nt, Artificial Sequence
  Synthetic
uaguggaugcauguacg

SEQ ID NO: 696446 - RNA, 17 nt, Artificial Sequence
  Synthetic
uuggaugcaguuguacg

SEQ ID NO: 696447 - RNA, 17 nt, Artificial Sequence
  Synthetic
uauuucaguucauuacg

SEQ ID NO: 696448 - RNA, 17 nt, Artificial Sequence
  Synthetic
uccagauugaacuuacg

SEQ ID NO: 696449 - RNA, 17 nt, Artificial Sequence
  Synthetic
acaauuaggauuaaccg

SEQ ID NO: 696450 - RNA, 17 nt, Artificial Sequence
  Synthetic
caggugcccucucaccg

SEQ ID NO: 696451 - RNA, 17 nt, Artificial Sequence
  Synthetic
cuaagucacuuucaccg

SEQ ID NO: 696452 - RNA, 17 nt, Artificial Sequence
  Synthetic
auaaaccgaguagaccg

SEQ ID NO: 696453 - RNA, 17 nt, Artificial Sequence
  Synthetic
ugcuuucaaauggaccg

SEQ ID NO: 696454 - RNA, 17 nt, Artificial Sequence
  Synthetic
augaagcgacuugaccg

SEQ ID NO: 696455 - RNA, 17 nt, Artificial Sequence
  Synthetic
uuugaccugcuauaccg

SEQ ID NO: 696456 - RNA, 17 nt, Artificial Sequence
  Synthetic
aauuuuucuacguaccg

SEQ ID NO: 696457 - RNA, 17 nt, Artificial Sequence
  Synthetic
auaugaaacuauuaccg

SEQ ID NO: 696458 - RNA, 17 nt, Artificial Sequence
  Synthetic
ucuuauucacuuuaccg

SEQ ID NO: 696459 - RNA, 17 nt, Artificial Sequence
  Synthetic
aacuuucaguguacccg

SEQ ID NO: 696460 - RNA, 17 nt, Artificial Sequence
  Synthetic
agagagaaucucccccg

SEQ ID NO: 696461 - RNA, 17 nt, Artificial Sequence
  Synthetic
uugcuuacauauccccg

SEQ ID NO: 696462 - RNA, 17 nt, Artificial Sequence
  Synthetic
uaugauuuuaaagcccg

SEQ ID NO: 696463 - RNA, 17 nt, Artificial Sequence
  Synthetic
augugcaucgcgucccg

SEQ ID NO: 696464 - RNA, 17 nt, Artificial Sequence
  Synthetic
uaaguugacccuucccg

SEQ ID NO: 696465 - RNA, 17 nt, Artificial Sequence
  Synthetic
acucaaucuaguucccg

SEQ ID NO: 696466 - RNA, 17 nt, Artificial Sequence
  Synthetic
aaaggcacagcaauccg

SEQ ID NO: 696467 - RNA, 17 nt, Artificial Sequence
  Synthetic
ugucccagucuaauccg

SEQ ID NO: 696468 - RNA, 17 nt, Artificial Sequence
  Synthetic
ugaacuaaaagcauccg

SEQ ID NO: 696469 - RNA, 17 nt, Artificial Sequence
  Synthetic
caguagacuguucuccg

SEQ ID NO: 696470 - RNA, 17 nt, Artificial Sequence
  Synthetic
ccacaucuacuaguccg

SEQ ID NO: 696471 - RNA, 17 nt, Artificial Sequence
  Synthetic
ugccaguagguaguccg

SEQ ID NO: 696472 - RNA, 17 nt, Artificial Sequence
  Synthetic
aacgccuaagcuguccg

SEQ ID NO: 696473 - RNA, 17 nt, Artificial Sequence
  Synthetic
aguaaagaugguguccg

SEQ ID NO: 696474 - RNA, 17 nt, Artificial Sequence
  Synthetic
aaacuuguugcuuuccg

SEQ ID NO: 696475 - RNA, 17 nt, Artificial Sequence
  Synthetic
ccuuacccacgaaagcg

SEQ ID NO: 696476 - RNA, 17 nt, Artificial Sequence
  Synthetic
agcuuaucuugaaagcg

SEQ ID NO: 696477 - RNA, 17 nt, Artificial Sequence
  Synthetic
auucucaauggucagcg

SEQ ID NO: 696478 - RNA, 17 nt, Artificial Sequence
  Synthetic
auuuggguuauugagcg

SEQ ID NO: 696479 - RNA, 17 nt, Artificial Sequence
  Synthetic
acccuucaucaauagcg

SEQ ID NO: 696480 - RNA, 17 nt, Artificial Sequence
  Synthetic
ucacccacaaucacgcg

SEQ ID NO: 696481 - RNA, 17 nt, Artificial Sequence
  Synthetic
acagcuuuuggcccgcg

SEQ ID NO: 696482 - RNA, 17 nt, Artificial Sequence
  Synthetic
auuaacauuuauccgcg

SEQ ID NO: 696483 - RNA, 17 nt, Artificial Sequence
  Synthetic
aggguagauaugaggcg

SEQ ID NO: 696484 - RNA, 17 nt, Artificial Sequence
  Synthetic
augaucuagcaagggcg

SEQ ID NO: 696485 - RNA, 17 nt, Artificial Sequence
  Synthetic
auuuggagcuaggggcg

SEQ ID NO: 696486 - RNA, 17 nt, Artificial Sequence
  Synthetic
acaagaggcucuuggcg

SEQ ID NO: 696487 - RNA, 17 nt, Artificial Sequence
  Synthetic
cccucacuucaaaugcg

SEQ ID NO: 696488 - RNA, 17 nt, Artificial Sequence
  Synthetic
cauuauuccaaacugcg

SEQ ID NO: 696489 - RNA, 17 nt, Artificial Sequence
  Synthetic
ucagaacaacaagugcg

SEQ ID NO: 696490 - RNA, 17 nt, Artificial Sequence
  Synthetic
uugcacccuuuugugcg

SEQ ID NO: 696491 - RNA, 17 nt, Artificial Sequence
  Synthetic
cacacaaaagccuugcg

SEQ ID NO: 696492 - RNA, 17 nt, Artificial Sequence
  Synthetic
cacccguguucuuugcg

SEQ ID NO: 696493 - RNA, 17 nt, Artificial Sequence
  Synthetic
ucccaugaacgaaaucg

SEQ ID NO: 696494 - RNA, 17 nt, Artificial Sequence
  Synthetic
aacaucgucaaucaucg

SEQ ID NO: 696495 - RNA, 17 nt, Artificial Sequence
  Synthetic
uggggcuugguucaucg

SEQ ID NO: 696496 - RNA, 17 nt, Artificial Sequence
  Synthetic
cauuaaauguuucaucg

SEQ ID NO: 696497 - RNA, 17 nt, Artificial Sequence
  Synthetic
cgaguauacaaagaucg

SEQ ID NO: 696498 - RNA, 17 nt, Artificial Sequence
  Synthetic
cagucuguuccagaucg

SEQ ID NO: 696499 - RNA, 17 nt, Artificial Sequence
  Synthetic
ugccaaauacaugaucg

SEQ ID NO: 696500 - RNA, 17 nt, Artificial Sequence
  Synthetic
uucuuuauccccuaucg

SEQ ID NO: 696501 - RNA, 17 nt, Artificial Sequence
  Synthetic
ugaacugguaucuaucg

SEQ ID NO: 696502 - RNA, 17 nt, Artificial Sequence
  Synthetic
uuuaccucucaaacucg

SEQ ID NO: 696503 - RNA, 17 nt, Artificial Sequence
  Synthetic
uaugacacuguaacucg

SEQ ID NO: 696504 - RNA, 17 nt, Artificial Sequence
  Synthetic
agcacugagcgcacucg

SEQ ID NO: 696505 - RNA, 17 nt, Artificial Sequence
  Synthetic
cuuagcuuagucacucg

SEQ ID NO: 696506 - RNA, 17 nt, Artificial Sequence
  Synthetic
aacauauguuguacucg

SEQ ID NO: 696507 - RNA, 17 nt, Artificial Sequence
  Synthetic
cuuuuucaccuuacucg

SEQ ID NO: 696508 - RNA, 17 nt, Artificial Sequence
  Synthetic
uccuguauggugccucg

SEQ ID NO: 696509 - RNA, 17 nt, Artificial Sequence
  Synthetic
aagcuauaacauccucg

SEQ ID NO: 696510 - RNA, 17 nt, Artificial Sequence
  Synthetic
uuguaaauacuagcucg

SEQ ID NO: 696511 - RNA, 17 nt, Artificial Sequence
  Synthetic
uuuuucacuggggcucg

SEQ ID NO: 696512 - RNA, 17 nt, Artificial Sequence
  Synthetic
agcgagguuucugcucg

SEQ ID NO: 696513 - RNA, 17 nt, Artificial Sequence
  Synthetic
acaaagcugaagucucg

SEQ ID NO: 696514 - RNA, 17 nt, Artificial Sequence
  Synthetic
acgugcagcccgucucg

SEQ ID NO: 696515 - RNA, 17 nt, Artificial Sequence
  Synthetic
aaaggauauucuucucg

SEQ ID NO: 696516 - RNA, 17 nt, Artificial Sequence
  Synthetic
ucuguuugccuaagucg

SEQ ID NO: 696517 - RNA, 17 nt, Artificial Sequence
  Synthetic
cucuuaaauuccagucg

SEQ ID NO: 696518 - RNA, 17 nt, Artificial Sequence
  Synthetic
accaucguagucagucg

SEQ ID NO: 696519 - RNA, 17 nt, Artificial Sequence
  Synthetic
uagaugacacagcgucg

SEQ ID NO: 696520 - RNA, 17 nt, Artificial Sequence
  Synthetic
aaugauacacaucgucg

SEQ ID NO: 696521 - RNA, 17 nt, Artificial Sequence
  Synthetic
aaacguagaacuggucg

SEQ ID NO: 696522 - RNA, 17 nt, Artificial Sequence
  Synthetic
cguacuugauuuggucg

SEQ ID NO: 696523 - RNA, 17 nt, Artificial Sequence
  Synthetic
cucuagccccacugucg

SEQ ID NO: 696524 - RNA, 17 nt, Artificial Sequence
  Synthetic
ugagugcuugcuugucg

SEQ ID NO: 696525 - RNA, 17 nt, Artificial Sequence
  Synthetic
uguagcauugagauucg

SEQ ID NO: 696526 - RNA, 17 nt, Artificial Sequence
  Synthetic
uaggggucauauauucg

SEQ ID NO: 696527 - RNA, 17 nt, Artificial Sequence
  Synthetic
uuuuagacuuggcuucg

SEQ ID NO: 696528 - RNA, 17 nt, Artificial Sequence
  Synthetic
uuccaaugucuaguucg

SEQ ID NO: 696529 - RNA, 17 nt, Artificial Sequence
  Synthetic
aacagugugaggguucg

SEQ ID NO: 696530 - RNA, 17 nt, Artificial Sequence
  Synthetic
ccaugcacuaggguucg

SEQ ID NO: 696531 - RNA, 17 nt, Artificial Sequence
  Synthetic
uaaugguaauguguucg

SEQ ID NO: 696532 - RNA, 17 nt, Artificial Sequence
  Synthetic
uuucagccacuuguucg

SEQ ID NO: 696533 - RNA, 17 nt, Artificial Sequence
  Synthetic
cccugaguaucauuucg

SEQ ID NO: 696534 - RNA, 17 nt, Artificial Sequence
  Synthetic
augcuuccacgcuuucg

SEQ ID NO: 696535 - RNA, 17 nt, Artificial Sequence
  Synthetic
cauuagugacuuuuucg

SEQ ID NO: 696536 - RNA, 17 nt, Artificial Sequence
  Synthetic
uuaggcacuccgaaagg

SEQ ID NO: 696537 - RNA, 17 nt, Artificial Sequence
  Synthetic
aguugucaaccacaagg

SEQ ID NO: 696538 - RNA, 17 nt, Artificial Sequence
  Synthetic
caaaacuaccgugaagg

SEQ ID NO: 696539 - RNA, 17 nt, Artificial Sequence
  Synthetic
ugccccgaaccauaagg

SEQ ID NO: 696540 - RNA, 17 nt, Artificial Sequence
  Synthetic
cgggaauuuccauaagg

SEQ ID NO: 696541 - RNA, 17 nt, Artificial Sequence
  Synthetic
cucuaguagcuguaagg

SEQ ID NO: 696542 - RNA, 17 nt, Artificial Sequence
  Synthetic
uuggcucgggauuaagg

SEQ ID NO: 696543 - RNA, 17 nt, Artificial Sequence
  Synthetic
uucgggauugcuuaagg

SEQ ID NO: 696544 - RNA, 17 nt, Artificial Sequence
  Synthetic
acgcugaucugaacagg

SEQ ID NO: 696545 - RNA, 17 nt, Artificial Sequence
  Synthetic
accuacaauuccacagg

SEQ ID NO: 696546 - RNA, 17 nt, Artificial Sequence
  Synthetic
uugacacuagguacagg

SEQ ID NO: 696547 - RNA, 17 nt, Artificial Sequence
  Synthetic
uacguuaagcaaucagg

SEQ ID NO: 696548 - RNA, 17 nt, Artificial Sequence
  Synthetic
uagguauaguuaagagg

SEQ ID NO: 696549 - RNA, 17 nt, Artificial Sequence
  Synthetic
cuaguccacaucagagg

SEQ ID NO: 696550 - RNA, 17 nt, Artificial Sequence
  Synthetic
uaaacgugaauaugagg

SEQ ID NO: 696551 - RNA, 17 nt, Artificial Sequence
  Synthetic
acgcauuugaagugagg

SEQ ID NO: 696552 - RNA, 17 nt, Artificial Sequence
  Synthetic
uacuggccuaugugagg

SEQ ID NO: 696553 - RNA, 17 nt, Artificial Sequence
  Synthetic
auaccuuacuugugagg

SEQ ID NO: 696554 - RNA, 17 nt, Artificial Sequence
  Synthetic
cgcuaguacaccauagg

SEQ ID NO: 696555 - RNA, 17 nt, Artificial Sequence
  Synthetic
auguccuggaguauagg

SEQ ID NO: 696556 - RNA, 17 nt, Artificial Sequence
  Synthetic
uggcuagcuacacuagg

SEQ ID NO: 696557 - RNA, 17 nt, Artificial Sequence
  Synthetic
aacgguggagaccuagg

SEQ ID NO: 696558 - RNA, 17 nt, Artificial Sequence
  Synthetic
cgcgcgcgugcgcuagg

SEQ ID NO: 696559 - RNA, 17 nt, Artificial Sequence
  Synthetic
uaucuuauguggcuagg

SEQ ID NO: 696560 - RNA, 17 nt, Artificial Sequence
  Synthetic
ugauacguauuucuagg

SEQ ID NO: 696561 - RNA, 17 nt, Artificial Sequence
  Synthetic
caaguagacaacguagg

SEQ ID NO: 696562 - RNA, 17 nt, Artificial Sequence
  Synthetic
acgcaguuguauguagg

SEQ ID NO: 696563 - RNA, 17 nt, Artificial Sequence
  Synthetic
ccacaauuaaccuuagg

SEQ ID NO: 696564 - RNA, 17 nt, Artificial Sequence
  Synthetic
aucaacaacugguuagg

SEQ ID NO: 696565 - RNA, 17 nt, Artificial Sequence
  Synthetic
acaucgauugcuuuagg

SEQ ID NO: 696566 - RNA, 17 nt, Artificial Sequence
  Synthetic
cgguaccaauaaaacgg

SEQ ID NO: 696567 - RNA, 17 nt, Artificial Sequence
  Synthetic
uguuguguugcaaacgg

SEQ ID NO: 696568 - RNA, 17 nt, Artificial Sequence
  Synthetic
aggacugcuuccaacgg

SEQ ID NO: 696569 - RNA, 17 nt, Artificial Sequence
  Synthetic
uauaucacagcuaacgg

SEQ ID NO: 696570 - RNA, 17 nt, Artificial Sequence
  Synthetic
ugcgcugcuacacacgg

SEQ ID NO: 696571 - RNA, 17 nt, Artificial Sequence
  Synthetic
acuuuagcuuuagacgg

SEQ ID NO: 696572 - RNA, 17 nt, Artificial Sequence
  Synthetic
acaaccuuggaggacgg

SEQ ID NO: 696573 - RNA, 17 nt, Artificial Sequence
  Synthetic
aagcaguaaauggacgg

SEQ ID NO: 696574 - RNA, 17 nt, Artificial Sequence
  Synthetic
aguuaugcaucugacgg

SEQ ID NO: 696575 - RNA, 17 nt, Artificial Sequence
  Synthetic
cucaggcauuacuacgg

SEQ ID NO: 696576 - RNA, 17 nt, Artificial Sequence
  Synthetic
cugauaaugaccuacgg

SEQ ID NO: 696577 - RNA, 17 nt, Artificial Sequence
  Synthetic
aaauacugagaguacgg

SEQ ID NO: 696578 - RNA, 17 nt, Artificial Sequence
  Synthetic
ucuaaucuaaccaccgg

SEQ ID NO: 696579 - RNA, 17 nt, Artificial Sequence
  Synthetic
aggaccuuacgucccgg

SEQ ID NO: 696580 - RNA, 17 nt, Artificial Sequence
  Synthetic
uccauuguaugucccgg

SEQ ID NO: 696581 - RNA, 17 nt, Artificial Sequence
  Synthetic
cuagaacuguaauccgg

SEQ ID NO: 696582 - RNA, 17 nt, Artificial Sequence
  Synthetic
accacuauuccuuccgg

SEQ ID NO: 696583 - RNA, 17 nt, Artificial Sequence
  Synthetic
auaaacagcucuuccgg

SEQ ID NO: 696584 - RNA, 17 nt, Artificial Sequence
  Synthetic
cuuguuucucaaagcgg

SEQ ID NO: 696585 - RNA, 17 nt, Artificial Sequence
  Synthetic
acucaugaguaaagcgg

SEQ ID NO: 696586 - RNA, 17 nt, Artificial Sequence
  Synthetic
acuccaaugaggcgcgg

SEQ ID NO: 696587 - RNA, 17 nt, Artificial Sequence
  Synthetic
ucucugaguaagggcgg

SEQ ID NO: 696588 - RNA, 17 nt, Artificial Sequence
  Synthetic
uugucugccacuggcgg

SEQ ID NO: 696589 - RNA, 17 nt, Artificial Sequence
  Synthetic
auucauuggaccugcgg

SEQ ID NO: 696590 - RNA, 17 nt, Artificial Sequence
  Synthetic
acccguguucuuugcgg

SEQ ID NO: 696591 - RNA, 17 nt, Artificial Sequence
  Synthetic
ugaacugcauuuugcgg

SEQ ID NO: 696592 - RNA, 17 nt, Artificial Sequence
  Synthetic
uauguggauuuuugcgg

SEQ ID NO: 696593 - RNA, 17 nt, Artificial Sequence
  Synthetic
agagcuaauauaaucgg

SEQ ID NO: 696594 - RNA, 17 nt, Artificial Sequence
  Synthetic
ucuacuucauccaucgg

SEQ ID NO: 696595 - RNA, 17 nt, Artificial Sequence
  Synthetic
ugcuaaagggauaucgg

SEQ ID NO: 696596 - RNA, 17 nt, Artificial Sequence
  Synthetic
ucaacaagacaccucgg

SEQ ID NO: 696597 - RNA, 17 nt, Artificial Sequence
  Synthetic
cagcccccaauccucgg

SEQ ID NO: 696598 - RNA, 17 nt, Artificial Sequence
  Synthetic
aauuuggcagaucucgg

SEQ ID NO: 696599 - RNA, 17 nt, Artificial Sequence
  Synthetic
aucccugauuacuucgg

SEQ ID NO: 696600 - RNA, 17 nt, Artificial Sequence
  Synthetic
uaagaaagugccuucgg

SEQ ID NO: 696601 - RNA, 17 nt, Artificial Sequence
  Synthetic
uacuacgaggcaaaggg

SEQ ID NO: 696602 - RNA, 17 nt, Artificial Sequence
  Synthetic
cggacugugcuaaaggg

SEQ ID NO: 696603 - RNA, 17 nt, Artificial Sequence
  Synthetic
acgcuauugaugaaggg

SEQ ID NO: 696604 - RNA, 17 nt, Artificial Sequence
  Synthetic
uucguucucaacgaggg

SEQ ID NO: 696605 - RNA, 17 nt, Artificial Sequence
  Synthetic
acuagauaucaggaggg

SEQ ID NO: 696606 - RNA, 17 nt, Artificial Sequence
  Synthetic
aggcucacaaccuaggg

SEQ ID NO: 696607 - RNA, 17 nt, Artificial Sequence
  Synthetic
cuuaugccguaguaggg

SEQ ID NO: 696608 - RNA, 17 nt, Artificial Sequence
  Synthetic
cuucuuaaaugguaggg

SEQ ID NO: 696609 - RNA, 17 nt, Artificial Sequence
  Synthetic
cccgcaaagaacacggg

SEQ ID NO: 696610 - RNA, 17 nt, Artificial Sequence
  Synthetic
aaauuuuagccggcggg

SEQ ID NO: 696611 - RNA, 17 nt, Artificial Sequence
  Synthetic
ccauucuacauggcggg

SEQ ID NO: 696612 - RNA, 17 nt, Artificial Sequence
  Synthetic
agcugaucaucugcggg

SEQ ID NO: 696613 - RNA, 17 nt, Artificial Sequence
  Synthetic
uguugaccuuugucggg

SEQ ID NO: 696614 - RNA, 17 nt, Artificial Sequence
  Synthetic
uaaaagugguguucggg

SEQ ID NO: 696615 - RNA, 17 nt, Artificial Sequence
  Synthetic
auccaucaugaacgggg

SEQ ID NO: 696616 - RNA, 17 nt, Artificial Sequence
  Synthetic
aucaaggacagacgggg

SEQ ID NO: 696617 - RNA, 17 nt, Artificial Sequence
  Synthetic
aauuuuagccggcgggg

SEQ ID NO: 696618 - RNA, 17 nt, Artificial Sequence
  Synthetic
ugcuucauuggucgggg

SEQ ID NO: 696619 - RNA, 17 nt, Artificial Sequence
  Synthetic
uuaacguagaugggggg

SEQ ID NO: 696620 - RNA, 17 nt, Artificial Sequence
  Synthetic
caauuaacguagauggg

SEQ ID NO: 696621 - RNA, 17 nt, Artificial Sequence
  Synthetic
cuacuugccauuauggg

SEQ ID NO: 696622 - RNA, 17 nt, Artificial Sequence
  Synthetic
uggaccuauucacuggg

SEQ ID NO: 696623 - RNA, 17 nt, Artificial Sequence
  Synthetic
ccuauuggguaauuggg

SEQ ID NO: 696624 - RNA, 17 nt, Artificial Sequence
  Synthetic
ccuuacauccgauuggg

SEQ ID NO: 696625 - RNA, 17 nt, Artificial Sequence
  Synthetic
aagacgugccauuuggg

SEQ ID NO: 696626 - RNA, 17 nt, Artificial Sequence
  Synthetic
cacuaaccuaguuuggg

SEQ ID NO: 696627 - RNA, 17 nt, Artificial Sequence
  Synthetic
aagcggcugucaaaugg

SEQ ID NO: 696628 - RNA, 17 nt, Artificial Sequence
  Synthetic
uccccuauugacaaugg

SEQ ID NO: 696629 - RNA, 17 nt, Artificial Sequence
  Synthetic
uacguauagucacaugg

SEQ ID NO: 696630 - RNA, 17 nt, Artificial Sequence
  Synthetic
acggguaggagacaugg

SEQ ID NO: 696631 - RNA, 17 nt, Artificial Sequence
  Synthetic
cuaguacuaugacaugg

SEQ ID NO: 696632 - RNA, 17 nt, Artificial Sequence
  Synthetic
ccaauuaacguagaugg

SEQ ID NO: 696633 - RNA, 17 nt, Artificial Sequence
  Synthetic
uaagaaguuaccgaugg

SEQ ID NO: 696634 - RNA, 17 nt, Artificial Sequence
  Synthetic
ugcagcauguucgaugg

SEQ ID NO: 696635 - RNA, 17 nt, Artificial Sequence
  Synthetic
uaaaggcguuuguaugg

SEQ ID NO: 696636 - RNA, 17 nt, Artificial Sequence
  Synthetic
cgugauaugcagccugg

SEQ ID NO: 696637 - RNA, 17 nt, Artificial Sequence
  Synthetic
auaucggccauuccugg

SEQ ID NO: 696638 - RNA, 17 nt, Artificial Sequence
  Synthetic
uaucacccuccaucugg

SEQ ID NO: 696639 - RNA, 17 nt, Artificial Sequence
  Synthetic
agguuauaauccucugg

SEQ ID NO: 696640 - RNA, 17 nt, Artificial Sequence
  Synthetic
augcauaguucuucugg

SEQ ID NO: 696641 - RNA, 17 nt, Artificial Sequence
  Synthetic
cuguuaauacguucugg

SEQ ID NO: 696642 - RNA, 17 nt, Artificial Sequence
  Synthetic
ccccgaaaugguagugg

SEQ ID NO: 696643 - RNA, 17 nt, Artificial Sequence
  Synthetic
cugcauuagguccgugg

SEQ ID NO: 696644 - RNA, 17 nt, Artificial Sequence
  Synthetic
uugcaauaguuccgugg

SEQ ID NO: 696645 - RNA, 17 nt, Artificial Sequence
  Synthetic
ucuaagcagaagcgugg

SEQ ID NO: 696646 - RNA, 17 nt, Artificial Sequence
  Synthetic
auccagaugcugcgugg

SEQ ID NO: 696647 - RNA, 17 nt, Artificial Sequence
  Synthetic
cgcuagaacauaauugg

SEQ ID NO: 696648 - RNA, 17 nt, Artificial Sequence
  Synthetic
cucuagcggcagauugg

SEQ ID NO: 696649 - RNA, 17 nt, Artificial Sequence
  Synthetic
ucucccccgaggauugg

SEQ ID NO: 696650 - RNA, 17 nt, Artificial Sequence
  Synthetic
uucaugcacaaccuugg

SEQ ID NO: 696651 - RNA, 17 nt, Artificial Sequence
  Synthetic
uguaaauaggcgcuugg

SEQ ID NO: 696652 - RNA, 17 nt, Artificial Sequence
  Synthetic
ucaguauaagggcuugg

SEQ ID NO: 696653 - RNA, 17 nt, Artificial Sequence
  Synthetic
agcaaacgaccucuugg

SEQ ID NO: 696654 - RNA, 17 nt, Artificial Sequence
  Synthetic
agcuuaggcacaguugg

SEQ ID NO: 696655 - RNA, 17 nt, Artificial Sequence
  Synthetic
ccuaaucgcucuguugg

SEQ ID NO: 696656 - RNA, 17 nt, Artificial Sequence
  Synthetic
caguaagccggaaaaug

SEQ ID NO: 696657 - RNA, 17 nt, Artificial Sequence
  Synthetic
ugguggaacguuaaaug

SEQ ID NO: 696658 - RNA, 17 nt, Artificial Sequence
  Synthetic
uaaugggcuuaacaaug

SEQ ID NO: 696659 - RNA, 17 nt, Artificial Sequence
  Synthetic
aggcuacaacuuuaaug

SEQ ID NO: 696660 - RNA, 17 nt, Artificial Sequence
  Synthetic
uacgaauguagaacaug

SEQ ID NO: 696661 - RNA, 17 nt, Artificial Sequence
  Synthetic
ugucaacgggguacaug

SEQ ID NO: 696662 - RNA, 17 nt, Artificial Sequence
  Synthetic
acacgugcuaacccaug

SEQ ID NO: 696663 - RNA, 17 nt, Artificial Sequence
  Synthetic
uguacugacuacccaug

SEQ ID NO: 696664 - RNA, 17 nt, Artificial Sequence
  Synthetic
cguauguuaaucccaug

SEQ ID NO: 696665 - RNA, 17 nt, Artificial Sequence
  Synthetic
ucguauuccuauccaug

SEQ ID NO: 696666 - RNA, 17 nt, Artificial Sequence
  Synthetic
uuuuaugacgaggcaug

SEQ ID NO: 696667 - RNA, 17 nt, Artificial Sequence
  Synthetic
caaccagcuagggcaug

SEQ ID NO: 696668 - RNA, 17 nt, Artificial Sequence
  Synthetic
accacaauaugcucaug

SEQ ID NO: 696669 - RNA, 17 nt, Artificial Sequence
  Synthetic
acuaccaacuucucaug

SEQ ID NO: 696670 - RNA, 17 nt, Artificial Sequence
  Synthetic
cacuugcagcuuagaug

SEQ ID NO: 696671 - RNA, 17 nt, Artificial Sequence
  Synthetic
uuuggccaaauacgaug

SEQ ID NO: 696672 - RNA, 17 nt, Artificial Sequence
  Synthetic
cccuuugauaugcgaug

SEQ ID NO: 696673 - RNA, 17 nt, Artificial Sequence
  Synthetic
cacauaaaagcucgaug

SEQ ID NO: 696674 - RNA, 17 nt, Artificial Sequence
  Synthetic
acaccuuacucuggaug

SEQ ID NO: 696675 - RNA, 17 nt, Artificial Sequence
  Synthetic
uuuauacgaauuggaug

SEQ ID NO: 696676 - RNA, 17 nt, Artificial Sequence
  Synthetic
uagacuugcgcaauaug

SEQ ID NO: 696677 - RNA, 17 nt, Artificial Sequence
  Synthetic
caacagccaaggauaug

SEQ ID NO: 696678 - RNA, 17 nt, Artificial Sequence
  Synthetic
ccacguuccucaguaug

SEQ ID NO: 696679 - RNA, 17 nt, Artificial Sequence
  Synthetic
acggacugauaauuaug

SEQ ID NO: 696680 - RNA, 17 nt, Artificial Sequence
  Synthetic
ccuaugcuuaccuuaug

SEQ ID NO: 696681 - RNA, 17 nt, Artificial Sequence
  Synthetic
ugcgugucccucuuaug

SEQ ID NO: 696682 - RNA, 17 nt, Artificial Sequence
  Synthetic
uaacguggaaaguuaug

SEQ ID NO: 696683 - RNA, 17 nt, Artificial Sequence
  Synthetic
cuaggcuggacuuuaug

SEQ ID NO: 696684 - RNA, 17 nt, Artificial Sequence
  Synthetic
cgggacuguuuaaacug

SEQ ID NO: 696685 - RNA, 17 nt, Artificial Sequence
  Synthetic
ccuuuaauuacgcacug

SEQ ID NO: 696686 - RNA, 17 nt, Artificial Sequence
  Synthetic
uagaacugaccggacug

SEQ ID NO: 696687 - RNA, 17 nt, Artificial Sequence
  Synthetic
aguuggucgugugacug

SEQ ID NO: 696688 - RNA, 17 nt, Artificial Sequence
  Synthetic
ucgugcgcucuugacug

SEQ ID NO: 696689 - RNA, 17 nt, Artificial Sequence
  Synthetic
cgguuggguagauacug

SEQ ID NO: 696690 - RNA, 17 nt, Artificial Sequence
  Synthetic
aucggugcauuauacug

SEQ ID NO: 696691 - RNA, 17 nt, Artificial Sequence
  Synthetic
uacuauaacuuguacug

SEQ ID NO: 696692 - RNA, 17 nt, Artificial Sequence
  Synthetic
cuagaugaggauaccug

SEQ ID NO: 696693 - RNA, 17 nt, Artificial Sequence
  Synthetic
acggaggguauggccug

SEQ ID NO: 696694 - RNA, 17 nt, Artificial Sequence
  Synthetic
uugagcgcuuaguccug

SEQ ID NO: 696695 - RNA, 17 nt, Artificial Sequence
  Synthetic
uugcgcaauuguuccug

SEQ ID NO: 696696 - RNA, 17 nt, Artificial Sequence
  Synthetic
cgauauaguuccagcug

SEQ ID NO: 696697 - RNA, 17 nt, Artificial Sequence
  Synthetic
acuaugcauaugcgcug

SEQ ID NO: 696698 - RNA, 17 nt, Artificial Sequence
  Synthetic
cuaugugggcgaugcug

SEQ ID NO: 696699 - RNA, 17 nt, Artificial Sequence
  Synthetic
acgcacaacuuuugcug

SEQ ID NO: 696700 - RNA, 17 nt, Artificial Sequence
  Synthetic
ugcuagcugaucaucug

SEQ ID NO: 696701 - RNA, 17 nt, Artificial Sequence
  Synthetic
ccacuuccguaacucug

SEQ ID NO: 696702 - RNA, 17 nt, Artificial Sequence
  Synthetic
aguaauucgguacucug

SEQ ID NO: 696703 - RNA, 17 nt, Artificial Sequence
  Synthetic
uuugucgacuagcucug

SEQ ID NO: 696704 - RNA, 17 nt, Artificial Sequence
  Synthetic
uucagcgacccucucug

SEQ ID NO: 696705 - RNA, 17 nt, Artificial Sequence
  Synthetic
cgauaagggagucucug

SEQ ID NO: 696706 - RNA, 17 nt, Artificial Sequence
  Synthetic
cgauagaagcuaaagug

SEQ ID NO: 696707 - RNA, 17 nt, Artificial Sequence
  Synthetic
cccgucacaaggaagug

SEQ ID NO: 696708 - RNA, 17 nt, Artificial Sequence
  Synthetic
aauacgcuaaggaagug

SEQ ID NO: 696709 - RNA, 17 nt, Artificial Sequence
  Synthetic
uagguuuggcuuaagug

SEQ ID NO: 696710 - RNA, 17 nt, Artificial Sequence
  Synthetic
cagaacuccuacgagug

SEQ ID NO: 696711 - RNA, 17 nt, Artificial Sequence
  Synthetic
uuuaugaacguugagug

SEQ ID NO: 696712 - RNA, 17 nt, Artificial Sequence
  Synthetic
accucaaacuacuagug

SEQ ID NO: 696713 - RNA, 17 nt, Artificial Sequence
  Synthetic
uaacuaggcuccuagug

SEQ ID NO: 696714 - RNA, 17 nt, Artificial Sequence
  Synthetic
aacgagucagucuagug

SEQ ID NO: 696715 - RNA, 17 nt, Artificial Sequence
  Synthetic
uagcacaugucguagug

SEQ ID NO: 696716 - RNA, 17 nt, Artificial Sequence
  Synthetic
ucuauagugauaacgug

SEQ ID NO: 696717 - RNA, 17 nt, Artificial Sequence
  Synthetic
uauaacuguauaacgug

SEQ ID NO: 696718 - RNA, 17 nt, Artificial Sequence
  Synthetic
uuagaggguaagacgug

SEQ ID NO: 696719 - RNA, 17 nt, Artificial Sequence
  Synthetic
cauaucuaacucccgug

SEQ ID NO: 696720 - RNA, 17 nt, Artificial Sequence
  Synthetic
uucagaaggcucccgug

SEQ ID NO: 696721 - RNA, 17 nt, Artificial Sequence
  Synthetic
acaaaugaauugccgug

SEQ ID NO: 696722 - RNA, 17 nt, Artificial Sequence
  Synthetic
aacuaaaagcauccgug

SEQ ID NO: 696723 - RNA, 17 nt, Artificial Sequence
  Synthetic
uagguuaacacuccgug

SEQ ID NO: 696724 - RNA, 17 nt, Artificial Sequence
  Synthetic
auccuuuaaguuccgug

SEQ ID NO: 696725 - RNA, 17 nt, Artificial Sequence
  Synthetic
ucaagugcuaacgcgug

SEQ ID NO: 696726 - RNA, 17 nt, Artificial Sequence
  Synthetic
cuagacuuaccaucgug

SEQ ID NO: 696727 - RNA, 17 nt, Artificial Sequence
  Synthetic
auugguaauuuaucgug

SEQ ID NO: 696728 - RNA, 17 nt, Artificial Sequence
  Synthetic
ucauaguuugucucgug

SEQ ID NO: 696729 - RNA, 17 nt, Artificial Sequence
  Synthetic
cucuagucauauucgug

SEQ ID NO: 696730 - RNA, 17 nt, Artificial Sequence
  Synthetic
uaaaagaccuaacggug

SEQ ID NO: 696731 - RNA, 17 nt, Artificial Sequence
  Synthetic
uauaaguugagacggug

SEQ ID NO: 696732 - RNA, 17 nt, Artificial Sequence
  Synthetic
accagcggauuacggug

SEQ ID NO: 696733 - RNA, 17 nt, Artificial Sequence
  Synthetic
acaugugccuuccggug

SEQ ID NO: 696734 - RNA, 17 nt, Artificial Sequence
  Synthetic
auugccaaaaggcggug

SEQ ID NO: 696735 - RNA, 17 nt, Artificial Sequence
  Synthetic
cuaaagggauaucggug

SEQ ID NO: 696736 - RNA, 17 nt, Artificial Sequence
  Synthetic
cacuuagugauagggug

SEQ ID NO: 696737 - RNA, 17 nt, Artificial Sequence
  Synthetic
cacaauagacaugggug

SEQ ID NO: 696738 - RNA, 17 nt, Artificial Sequence
  Synthetic
aucggccauuccuggug

SEQ ID NO: 696739 - RNA, 17 nt, Artificial Sequence
  Synthetic
uggaauacgucaaugug

SEQ ID NO: 696740 - RNA, 17 nt, Artificial Sequence
  Synthetic
uagcguuguaacaugug

SEQ ID NO: 696741 - RNA, 17 nt, Artificial Sequence
  Synthetic
auaguagacgugaugug

SEQ ID NO: 696742 - RNA, 17 nt, Artificial Sequence
  Synthetic
cugauagcuguuaugug

SEQ ID NO: 696743 - RNA, 17 nt, Artificial Sequence
  Synthetic
uuacauuaagucgugug

SEQ ID NO: 696744 - RNA, 17 nt, Artificial Sequence
  Synthetic
ccgagcguacgugugug

SEQ ID NO: 696745 - RNA, 17 nt, Artificial Sequence
  Synthetic
aggcgugauuaauugug

SEQ ID NO: 696746 - RNA, 17 nt, Artificial Sequence
  Synthetic
aucgcucuaccauugug

SEQ ID NO: 696747 - RNA, 17 nt, Artificial Sequence
  Synthetic
cauuacgacuacuugug

SEQ ID NO: 696748 - RNA, 17 nt, Artificial Sequence
  Synthetic
uucacgguaguuuugug

SEQ ID NO: 696749 - RNA, 17 nt, Artificial Sequence
  Synthetic
uacgaggaguuaaauug

SEQ ID NO: 696750 - RNA, 17 nt, Artificial Sequence
  Synthetic
auagaccaggugaauug

SEQ ID NO: 696751 - RNA, 17 nt, Artificial Sequence
  Synthetic
caauagccuacuaauug

SEQ ID NO: 696752 - RNA, 17 nt, Artificial Sequence
  Synthetic
uucgaaacagaccauug

SEQ ID NO: 696753 - RNA, 17 nt, Artificial Sequence
  Synthetic
ugaucgcucuaccauug

SEQ ID NO: 696754 - RNA, 17 nt, Artificial Sequence
  Synthetic
auguuagucuagcauug

SEQ ID NO: 696755 - RNA, 17 nt, Artificial Sequence
  Synthetic
uacgaaaggcugcauug

SEQ ID NO: 696756 - RNA, 17 nt, Artificial Sequence
  Synthetic
caggucacaauucauug

SEQ ID NO: 696757 - RNA, 17 nt, Artificial Sequence
  Synthetic
aucucccccgaggauug

SEQ ID NO: 696758 - RNA, 17 nt, Artificial Sequence
  Synthetic
cgaagguucacugauug

SEQ ID NO: 696759 - RNA, 17 nt, Artificial Sequence
  Synthetic
cgacaauuuggugauug

SEQ ID NO: 696760 - RNA, 17 nt, Artificial Sequence
  Synthetic
agcacggguaaauauug

SEQ ID NO: 696761 - RNA, 17 nt, Artificial Sequence
  Synthetic
accccaugagcauauug

SEQ ID NO: 696762 - RNA, 17 nt, Artificial Sequence
  Synthetic
cagccaacuguauauug

SEQ ID NO: 696763 - RNA, 17 nt, Artificial Sequence
  Synthetic
aagcccgaucauuauug

SEQ ID NO: 696764 - RNA, 17 nt, Artificial Sequence
  Synthetic
uugggaucgauuuauug

SEQ ID NO: 696765 - RNA, 17 nt, Artificial Sequence
  Synthetic
cccaaugcauaaacuug

SEQ ID NO: 696766 - RNA, 17 nt, Artificial Sequence
  Synthetic
agccuuacgugaacuug

SEQ ID NO: 696767 - RNA, 17 nt, Artificial Sequence
  Synthetic
cagcgggaacacacuug

SEQ ID NO: 696768 - RNA, 17 nt, Artificial Sequence
  Synthetic
cauucucggccgacuug

SEQ ID NO: 696769 - RNA, 17 nt, Artificial Sequence
  Synthetic
acuacuacucauacuug

SEQ ID NO: 696770 - RNA, 17 nt, Artificial Sequence
  Synthetic
acucucgaaaguacuug

SEQ ID NO: 696771 - RNA, 17 nt, Artificial Sequence
  Synthetic
caugaaccucuuacuug

SEQ ID NO: 696772 - RNA, 17 nt, Artificial Sequence
  Synthetic
ccgugacaauuuacuug

SEQ ID NO: 696773 - RNA, 17 nt, Artificial Sequence
  Synthetic
accauacuggaaccuug

SEQ ID NO: 696774 - RNA, 17 nt, Artificial Sequence
  Synthetic
aacucgagguaagcuug

SEQ ID NO: 696775 - RNA, 17 nt, Artificial Sequence
  Synthetic
cagugaacuacggcuug

SEQ ID NO: 696776 - RNA, 17 nt, Artificial Sequence
  Synthetic
agucaugugcaaucuug

SEQ ID NO: 696777 - RNA, 17 nt, Artificial Sequence
  Synthetic
ccgcuuuagcacucuug

SEQ ID NO: 696778 - RNA, 17 nt, Artificial Sequence
  Synthetic
auuacccgagacucuug

SEQ ID NO: 696779 - RNA, 17 nt, Artificial Sequence
  Synthetic
cguagcaccaggucuug

SEQ ID NO: 696780 - RNA, 17 nt, Artificial Sequence
  Synthetic
auaaauucccgcaguug

SEQ ID NO: 696781 - RNA, 17 nt, Artificial Sequence
  Synthetic
ugauagucauagaguug

SEQ ID NO: 696782 - RNA, 17 nt, Artificial Sequence
  Synthetic
ccguauaauccuaguug

SEQ ID NO: 696783 - RNA, 17 nt, Artificial Sequence
  Synthetic
ccggugcugccacguug

SEQ ID NO: 696784 - RNA, 17 nt, Artificial Sequence
  Synthetic
uccccuaaggaccguug

SEQ ID NO: 696785 - RNA, 17 nt, Artificial Sequence
  Synthetic
agauauaacucccguug

SEQ ID NO: 696786 - RNA, 17 nt, Artificial Sequence
  Synthetic
ugugacagcggccguug

SEQ ID NO: 696787 - RNA, 17 nt, Artificial Sequence
  Synthetic
cacaucccacgagguug

SEQ ID NO: 696788 - RNA, 17 nt, Artificial Sequence
  Synthetic
cacuaaccuuaggguug

SEQ ID NO: 696789 - RNA, 17 nt, Artificial Sequence
  Synthetic
aaggauucuucggguug

SEQ ID NO: 696790 - RNA, 17 nt, Artificial Sequence
  Synthetic
aguaagggcggugguug

SEQ ID NO: 696791 - RNA, 17 nt, Artificial Sequence
  Synthetic
uuaagacgcaaauguug

SEQ ID NO: 696792 - RNA, 17 nt, Artificial Sequence
  Synthetic
acuccggcucgguguug

SEQ ID NO: 696793 - RNA, 17 nt, Artificial Sequence
  Synthetic
auauggccuccuuguug

SEQ ID NO: 696794 - RNA, 17 nt, Artificial Sequence
  Synthetic
accugaagccguuguug

SEQ ID NO: 696795 - RNA, 17 nt, Artificial Sequence
  Synthetic
acaacgucccuuuguug

SEQ ID NO: 696796 - RNA, 17 nt, Artificial Sequence
  Synthetic
cccguauaacccauuug

SEQ ID NO: 696797 - RNA, 17 nt, Artificial Sequence
  Synthetic
ugacguauuagacuuug

SEQ ID NO: 696798 - RNA, 17 nt, Artificial Sequence
  Synthetic
caaucaaauacgcuuug

SEQ ID NO: 696799 - RNA, 17 nt, Artificial Sequence
  Synthetic
accacccguguucuuug

SEQ ID NO: 696800 - RNA, 17 nt, Artificial Sequence
  Synthetic
caguccguguuaaaaau

SEQ ID NO: 696801 - RNA, 17 nt, Artificial Sequence
  Synthetic
uguagaccuacuaaaau

SEQ ID NO: 696802 - RNA, 17 nt, Artificial Sequence
  Synthetic
agugccagacgacaaau

SEQ ID NO: 696803 - RNA, 17 nt, Artificial Sequence
  Synthetic
ccauaagguuagcaaau

SEQ ID NO: 696804 - RNA, 17 nt, Artificial Sequence
  Synthetic
cgaaagcgaaggcaaau

SEQ ID NO: 696805 - RNA, 17 nt, Artificial Sequence
  Synthetic
aucgcuuaguggcaaau

SEQ ID NO: 696806 - RNA, 17 nt, Artificial Sequence
  Synthetic
accguacacccagaaau

SEQ ID NO: 696807 - RNA, 17 nt, Artificial Sequence
  Synthetic
aaugcaucgacugaaau

SEQ ID NO: 696808 - RNA, 17 nt, Artificial Sequence
  Synthetic
uaccugugggcauaaau

SEQ ID NO: 696809 - RNA, 17 nt, Artificial Sequence
  Synthetic
ugguguucaaucacaau

SEQ ID NO: 696810 - RNA, 17 nt, Artificial Sequence
  Synthetic
cuuccccuauugacaau

SEQ ID NO: 696811 - RNA, 17 nt, Artificial Sequence
  Synthetic
uacgugugaaauccaau

SEQ ID NO: 696812 - RNA, 17 nt, Artificial Sequence
  Synthetic
auggauaccauugcaau

SEQ ID NO: 696813 - RNA, 17 nt, Artificial Sequence
  Synthetic
ccuucuaagagcucaau

SEQ ID NO: 696814 - RNA, 17 nt, Artificial Sequence
  Synthetic
acgacucuucugucaau

SEQ ID NO: 696815 - RNA, 17 nt, Artificial Sequence
  Synthetic
aggcccccauugucaau

SEQ ID NO: 696816 - RNA, 17 nt, Artificial Sequence
  Synthetic
cuagcaucaccuucaau

SEQ ID NO: 696817 - RNA, 17 nt, Artificial Sequence
  Synthetic
cucuagggcguaagaau

SEQ ID NO: 696818 - RNA, 17 nt, Artificial Sequence
  Synthetic
acguccgugaucagaau

SEQ ID NO: 696819 - RNA, 17 nt, Artificial Sequence
  Synthetic
ccaagucggccgagaau

SEQ ID NO: 696820 - RNA, 17 nt, Artificial Sequence
  Synthetic
uuuauagcuuuacgaau

SEQ ID NO: 696821 - RNA, 17 nt, Artificial Sequence
  Synthetic
uguuauaaauuccgaau

SEQ ID NO: 696822 - RNA, 17 nt, Artificial Sequence
  Synthetic
aacuuugcaaagcgaau

SEQ ID NO: 696823 - RNA, 17 nt, Artificial Sequence
  Synthetic
aguaauaucagcggaau

SEQ ID NO: 696824 - RNA, 17 nt, Artificial Sequence
  Synthetic
cgcuauguuuagggaau

SEQ ID NO: 696825 - RNA, 17 nt, Artificial Sequence
  Synthetic
acuuacggugcuggaau

SEQ ID NO: 696826 - RNA, 17 nt, Artificial Sequence
  Synthetic
uaauuguacuggugaau

SEQ ID NO: 696827 - RNA, 17 nt, Artificial Sequence
  Synthetic
uuuacgucagauugaau

SEQ ID NO: 696828 - RNA, 17 nt, Artificial Sequence
  Synthetic
ucggguuagcauauaau

SEQ ID NO: 696829 - RNA, 17 nt, Artificial Sequence
  Synthetic
uagugcuuucggcuaau

SEQ ID NO: 696830 - RNA, 17 nt, Artificial Sequence
  Synthetic
uugugggagugucuaau

SEQ ID NO: 696831 - RNA, 17 nt, Artificial Sequence
  Synthetic
acccuuaagcuucuaau

SEQ ID NO: 696832 - RNA, 17 nt, Artificial Sequence
  Synthetic
augacacguacaguaau

SEQ ID NO: 696833 - RNA, 17 nt, Artificial Sequence
  Synthetic
uagguaggcccaguaau

SEQ ID NO: 696834 - RNA, 17 nt, Artificial Sequence
  Synthetic
ugauccuauuggguaau

SEQ ID NO: 696835 - RNA, 17 nt, Artificial Sequence
  Synthetic
agagucggcaguguaau

SEQ ID NO: 696836 - RNA, 17 nt, Artificial Sequence
  Synthetic
caagugguggguguaau

SEQ ID NO: 696837 - RNA, 17 nt, Artificial Sequence
  Synthetic
cgucaaugucuuguaau

SEQ ID NO: 696838 - RNA, 17 nt, Artificial Sequence
  Synthetic
cgcgcgcaaaaauuaau

SEQ ID NO: 696839 - RNA, 17 nt, Artificial Sequence
  Synthetic
ugucucgcuccauuaau

SEQ ID NO: 696840 - RNA, 17 nt, Artificial Sequence
  Synthetic
uggguuugaaccuuaau

SEQ ID NO: 696841 - RNA, 17 nt, Artificial Sequence
  Synthetic
cccccaucuacguuaau

SEQ ID NO: 696842 - RNA, 17 nt, Artificial Sequence
  Synthetic
ugcgguacuauguuaau

SEQ ID NO: 696843 - RNA, 17 nt, Artificial Sequence
  Synthetic
cuggcacguuuaaacau

SEQ ID NO: 696844 - RNA, 17 nt, Artificial Sequence
  Synthetic
aaguaaaccgagaacau

SEQ ID NO: 696845 - RNA, 17 nt, Artificial Sequence
  Synthetic
acgaaaagcuugaacau

SEQ ID NO: 696846 - RNA, 17 nt, Artificial Sequence
  Synthetic
aucccacuaucacacau

SEQ ID NO: 696847 - RNA, 17 nt, Artificial Sequence
  Synthetic
cuccucgaacuagacau

SEQ ID NO: 696848 - RNA, 17 nt, Artificial Sequence
  Synthetic
acugcgguagcugacau

SEQ ID NO: 696849 - RNA, 17 nt, Artificial Sequence
  Synthetic
uuaauaggccuauacau

SEQ ID NO: 696850 - RNA, 17 nt, Artificial Sequence
  Synthetic
augcuuguacucuacau

SEQ ID NO: 696851 - RNA, 17 nt, Artificial Sequence
  Synthetic
ugaaugcuagucuacau

SEQ ID NO: 696852 - RNA, 17 nt, Artificial Sequence
  Synthetic
accaaaggugaguacau

SEQ ID NO: 696853 - RNA, 17 nt, Artificial Sequence
  Synthetic
uucuggccuccguacau

SEQ ID NO: 696854 - RNA, 17 nt, Artificial Sequence
  Synthetic
caucaaucuggccccau

SEQ ID NO: 696855 - RNA, 17 nt, Artificial Sequence
  Synthetic
cguagguuaacucccau

SEQ ID NO: 696856 - RNA, 17 nt, Artificial Sequence
  Synthetic
cacagaucuacucccau

SEQ ID NO: 696857 - RNA, 17 nt, Artificial Sequence
  Synthetic
agauaacguacucccau

SEQ ID NO: 696858 - RNA, 17 nt, Artificial Sequence
  Synthetic
cuuaacucaauucccau

SEQ ID NO: 696859 - RNA, 17 nt, Artificial Sequence
  Synthetic
acgaccaaaagagccau

SEQ ID NO: 696860 - RNA, 17 nt, Artificial Sequence
  Synthetic
aucauuagaugauccau

SEQ ID NO: 696861 - RNA, 17 nt, Artificial Sequence
  Synthetic
ucuacuagcaccuccau

SEQ ID NO: 696862 - RNA, 17 nt, Artificial Sequence
  Synthetic
uaaacgaguuccuccau

SEQ ID NO: 696863 - RNA, 17 nt, Artificial Sequence
  Synthetic
agacuaagcagcuccau

SEQ ID NO: 696864 - RNA, 17 nt, Artificial Sequence
  Synthetic
cauacgugcaucuccau

SEQ ID NO: 696865 - RNA, 17 nt, Artificial Sequence
  Synthetic
aaccggggucauuccau

SEQ ID NO: 696866 - RNA, 17 nt, Artificial Sequence
  Synthetic
aucggauauuaaagcau

SEQ ID NO: 696867 - RNA, 17 nt, Artificial Sequence
  Synthetic
uacguacaaggaagcau

SEQ ID NO: 696868 - RNA, 17 nt, Artificial Sequence
  Synthetic
uccguuuuagccagcau

SEQ ID NO: 696869 - RNA, 17 nt, Artificial Sequence
  Synthetic
aagacgaauaucagcau

SEQ ID NO: 696870 - RNA, 17 nt, Artificial Sequence
  Synthetic
agaaggcgauucagcau

SEQ ID NO: 696871 - RNA, 17 nt, Artificial Sequence
  Synthetic
uuucacucaucgagcau

SEQ ID NO: 696872 - RNA, 17 nt, Artificial Sequence
  Synthetic
ugagugacuucuagcau

SEQ ID NO: 696873 - RNA, 17 nt, Artificial Sequence
  Synthetic
ugcuuaugaugccgcau

SEQ ID NO: 696874 - RNA, 17 nt, Artificial Sequence
  Synthetic
uaacauucuugucgcau

SEQ ID NO: 696875 - RNA, 17 nt, Artificial Sequence
  Synthetic
cuuuuaugacgaggcau

SEQ ID NO: 696876 - RNA, 17 nt, Artificial Sequence
  Synthetic
cacaauagguuaggcau

SEQ ID NO: 696877 - RNA, 17 nt, Artificial Sequence
  Synthetic
cgugugcgagcaugcau

SEQ ID NO: 696878 - RNA, 17 nt, Artificial Sequence
  Synthetic
caacuagcuugcugcau

SEQ ID NO: 696879 - RNA, 17 nt, Artificial Sequence
  Synthetic
cccgaacccuagugcau

SEQ ID NO: 696880 - RNA, 17 nt, Artificial Sequence
  Synthetic
uucaauggcucuugcau

SEQ ID NO: 696881 - RNA, 17 nt, Artificial Sequence
  Synthetic
uagucuaggucuugcau

SEQ ID NO: 696882 - RNA, 17 nt, Artificial Sequence
  Synthetic
acgugucauccacucau

SEQ ID NO: 696883 - RNA, 17 nt, Artificial Sequence
  Synthetic
aagucuuggacccucau

SEQ ID NO: 696884 - RNA, 17 nt, Artificial Sequence
  Synthetic
uagcagcaaaggcucau

SEQ ID NO: 696885 - RNA, 17 nt, Artificial Sequence
  Synthetic
aucccugcgccagucau

SEQ ID NO: 696886 - RNA, 17 nt, Artificial Sequence
  Synthetic
cguuaucuaucagucau

SEQ ID NO: 696887 - RNA, 17 nt, Artificial Sequence
  Synthetic
cccguggauucagucau

SEQ ID NO: 696888 - RNA, 17 nt, Artificial Sequence
  Synthetic
accggguuaaaggucau

SEQ ID NO: 696889 - RNA, 17 nt, Artificial Sequence
  Synthetic
uggucucucguggucau

SEQ ID NO: 696890 - RNA, 17 nt, Artificial Sequence
  Synthetic
uaauguacugcugucau

SEQ ID NO: 696891 - RNA, 17 nt, Artificial Sequence
  Synthetic
ucgucauucccauucau

SEQ ID NO: 696892 - RNA, 17 nt, Artificial Sequence
  Synthetic
uuccacuuacgcuucau

SEQ ID NO: 696893 - RNA, 17 nt, Artificial Sequence
  Synthetic
uagcaccacgcuaagau

SEQ ID NO: 696894 - RNA, 17 nt, Artificial Sequence
  Synthetic
ugucaaguauagcagau

SEQ ID NO: 696895 - RNA, 17 nt, Artificial Sequence
  Synthetic
aggaacaaccgucagau

SEQ ID NO: 696896 - RNA, 17 nt, Artificial Sequence
  Synthetic
accguguacguucagau

SEQ ID NO: 696897 - RNA, 17 nt, Artificial Sequence
  Synthetic
cuaguacuaauugagau

SEQ ID NO: 696898 - RNA, 17 nt, Artificial Sequence
  Synthetic
cuccuguagucauagau

SEQ ID NO: 696899 - RNA, 17 nt, Artificial Sequence
  Synthetic
uuagucguuaaguagau

SEQ ID NO: 696900 - RNA, 17 nt, Artificial Sequence
  Synthetic
cccagucuaaguuagau

SEQ ID NO: 696901 - RNA, 17 nt, Artificial Sequence
  Synthetic
uuuaagguguacacgau

SEQ ID NO: 696902 - RNA, 17 nt, Artificial Sequence
  Synthetic
ugagggauguauacgau

SEQ ID NO: 696903 - RNA, 17 nt, Artificial Sequence
  Synthetic
cacaggaaugggccgau

SEQ ID NO: 696904 - RNA, 17 nt, Artificial Sequence
  Synthetic
uggaccuuacauccgau

SEQ ID NO: 696905 - RNA, 17 nt, Artificial Sequence
  Synthetic
cuuccuagccauccgau

SEQ ID NO: 696906 - RNA, 17 nt, Artificial Sequence
  Synthetic
caacacuaugauccgau

SEQ ID NO: 696907 - RNA, 17 nt, Artificial Sequence
  Synthetic
agccugcaauauccgau

SEQ ID NO: 696908 - RNA, 17 nt, Artificial Sequence
  Synthetic
acuuguuccaguccgau

SEQ ID NO: 696909 - RNA, 17 nt, Artificial Sequence
  Synthetic
cucacuaacauggcgau

SEQ ID NO: 696910 - RNA, 17 nt, Artificial Sequence
  Synthetic
uguaaaugucaaucgau

SEQ ID NO: 696911 - RNA, 17 nt, Artificial Sequence
  Synthetic
accaauacuuaaucgau

SEQ ID NO: 696912 - RNA, 17 nt, Artificial Sequence
  Synthetic
cuuggcaacaacucgau

SEQ ID NO: 696913 - RNA, 17 nt, Artificial Sequence
  Synthetic
cucgugguuuccucgau

SEQ ID NO: 696914 - RNA, 17 nt, Artificial Sequence
  Synthetic
auucucuuagugucgau

SEQ ID NO: 696915 - RNA, 17 nt, Artificial Sequence
  Synthetic
aauaggcaauuuucgau

SEQ ID NO: 696916 - RNA, 17 nt, Artificial Sequence
  Synthetic
cacuacauacucaggau

SEQ ID NO: 696917 - RNA, 17 nt, Artificial Sequence
  Synthetic
aagaauucguugaggau

SEQ ID NO: 696918 - RNA, 17 nt, Artificial Sequence
  Synthetic
ucauaguaguaagggau

SEQ ID NO: 696919 - RNA, 17 nt, Artificial Sequence
  Synthetic
aguuucaaaggcgggau

SEQ ID NO: 696920 - RNA, 17 nt, Artificial Sequence
  Synthetic
aacgugaucucugggau

SEQ ID NO: 696921 - RNA, 17 nt, Artificial Sequence
  Synthetic
ugaauucgaugugggau

SEQ ID NO: 696922 - RNA, 17 nt, Artificial Sequence
  Synthetic
uuuugacccgcauggau

SEQ ID NO: 696923 - RNA, 17 nt, Artificial Sequence
  Synthetic
cuccaguuuagcuggau

SEQ ID NO: 696924 - RNA, 17 nt, Artificial Sequence
  Synthetic
ccgcaaggaguuuggau

SEQ ID NO: 696925 - RNA, 17 nt, Artificial Sequence
  Synthetic
cccuuacagccgaugau

SEQ ID NO: 696926 - RNA, 17 nt, Artificial Sequence
  Synthetic
cuagugggcugacugau

SEQ ID NO: 696927 - RNA, 17 nt, Artificial Sequence
  Synthetic
uaaccgaguuuacugau

SEQ ID NO: 696928 - RNA, 17 nt, Artificial Sequence
  Synthetic
acgggaagguuccugau

SEQ ID NO: 696929 - RNA, 17 nt, Artificial Sequence
  Synthetic
acaguuacuacucugau

SEQ ID NO: 696930 - RNA, 17 nt, Artificial Sequence
  Synthetic
aggaaccuaugagugau

SEQ ID NO: 696931 - RNA, 17 nt, Artificial Sequence
  Synthetic
cccucuucaaucaauau

SEQ ID NO: 696932 - RNA, 17 nt, Artificial Sequence
  Synthetic
aaugggugcacgaauau

SEQ ID NO: 696933 - RNA, 17 nt, Artificial Sequence
  Synthetic
aauggaccguggaauau

SEQ ID NO: 696934 - RNA, 17 nt, Artificial Sequence
  Synthetic
accuucgucuauaauau

SEQ ID NO: 696935 - RNA, 17 nt, Artificial Sequence
  Synthetic
cgugaagaugcuaauau

SEQ ID NO: 696936 - RNA, 17 nt, Artificial Sequence
  Synthetic
auuuuccggaaccauau

SEQ ID NO: 696937 - RNA, 17 nt, Artificial Sequence
  Synthetic
auacacgagagccauau

SEQ ID NO: 696938 - RNA, 17 nt, Artificial Sequence
  Synthetic
agcuuauacaagcauau

SEQ ID NO: 696939 - RNA, 17 nt, Artificial Sequence
  Synthetic
ucguuuagggaucauau

SEQ ID NO: 696940 - RNA, 17 nt, Artificial Sequence
  Synthetic
cugagcuuaguucauau

SEQ ID NO: 696941 - RNA, 17 nt, Artificial Sequence
  Synthetic
auggucuaacuugauau

SEQ ID NO: 696942 - RNA, 17 nt, Artificial Sequence
  Synthetic
cgcauaguuuaguauau

SEQ ID NO: 696943 - RNA, 17 nt, Artificial Sequence
  Synthetic
uacguaccgagguauau

SEQ ID NO: 696944 - RNA, 17 nt, Artificial Sequence
  Synthetic
cagcccucgguguauau

SEQ ID NO: 696945 - RNA, 17 nt, Artificial Sequence
  Synthetic
uguaacguggcuuauau

SEQ ID NO: 696946 - RNA, 17 nt, Artificial Sequence
  Synthetic
ucguggcagagaccuau

SEQ ID NO: 696947 - RNA, 17 nt, Artificial Sequence
  Synthetic
aaaauuguagacccuau

SEQ ID NO: 696948 - RNA, 17 nt, Artificial Sequence
  Synthetic
uaggcuuuaaagccuau

SEQ ID NO: 696949 - RNA, 17 nt, Artificial Sequence
  Synthetic
aaugcaaaggacgcuau

SEQ ID NO: 696950 - RNA, 17 nt, Artificial Sequence
  Synthetic
auggcugcaaucgcuau

SEQ ID NO: 696951 - RNA, 17 nt, Artificial Sequence
  Synthetic
aucuguaggauggcuau

SEQ ID NO: 696952 - RNA, 17 nt, Artificial Sequence
  Synthetic
uaguccacuagcucuau

SEQ ID NO: 696953 - RNA, 17 nt, Artificial Sequence
  Synthetic
ugaacgugacauucuau

SEQ ID NO: 696954 - RNA, 17 nt, Artificial Sequence
  Synthetic
aaaacuggccgaaguau

SEQ ID NO: 696955 - RNA, 17 nt, Artificial Sequence
  Synthetic
cccgaucgauuaaguau

SEQ ID NO: 696956 - RNA, 17 nt, Artificial Sequence
  Synthetic
uuucccaaucggaguau

SEQ ID NO: 696957 - RNA, 17 nt, Artificial Sequence
  Synthetic
acagcggaugugaguau

SEQ ID NO: 696958 - RNA, 17 nt, Artificial Sequence
  Synthetic
cauuaacucucuaguau

SEQ ID NO: 696959 - RNA, 17 nt, Artificial Sequence
  Synthetic
cuuucuuuggcacguau

SEQ ID NO: 696960 - RNA, 17 nt, Artificial Sequence
  Synthetic
agacgggcugcacguau

SEQ ID NO: 696961 - RNA, 17 nt, Artificial Sequence
  Synthetic
agcucaucuuuccguau

SEQ ID NO: 696962 - RNA, 17 nt, Artificial Sequence
  Synthetic
cccaggaauuuucguau

SEQ ID NO: 696963 - RNA, 17 nt, Artificial Sequence
  Synthetic
auccccaacccagguau

SEQ ID NO: 696964 - RNA, 17 nt, Artificial Sequence
  Synthetic
cggcugccaauauguau

SEQ ID NO: 696965 - RNA, 17 nt, Artificial Sequence
  Synthetic
cuacaugagaaguguau

SEQ ID NO: 696966 - RNA, 17 nt, Artificial Sequence
  Synthetic
cguaggaauaauuguau

SEQ ID NO: 696967 - RNA, 17 nt, Artificial Sequence
  Synthetic
caguggacaacuuguau

SEQ ID NO: 696968 - RNA, 17 nt, Artificial Sequence
  Synthetic
cuuaaaggcguuuguau

SEQ ID NO: 696969 - RNA, 17 nt, Artificial Sequence
  Synthetic
uaucgagcuuuaauuau

SEQ ID NO: 696970 - RNA, 17 nt, Artificial Sequence
  Synthetic
cucgccuuucagauuau

SEQ ID NO: 696971 - RNA, 17 nt, Artificial Sequence
  Synthetic
acuaucgguaggauuau

SEQ ID NO: 696972 - RNA, 17 nt, Artificial Sequence
  Synthetic
auugacacguauauuau

SEQ ID NO: 696973 - RNA, 17 nt, Artificial Sequence
  Synthetic
ugggcugugucuauuau

SEQ ID NO: 696974 - RNA, 17 nt, Artificial Sequence
  Synthetic
aggcccaucaaacuuau

SEQ ID NO: 696975 - RNA, 17 nt, Artificial Sequence
  Synthetic
cauuagcguaaauuuau

SEQ ID NO: 696976 - RNA, 17 nt, Artificial Sequence
  Synthetic
uuccgauacuaguuuau

SEQ ID NO: 696977 - RNA, 17 nt, Artificial Sequence
  Synthetic
agcguggugugguuuau

SEQ ID NO: 696978 - RNA, 17 nt, Artificial Sequence
  Synthetic
auaucgacaacuuuuau

SEQ ID NO: 696979 - RNA, 17 nt, Artificial Sequence
  Synthetic
ucgggacuguuuaaacu

SEQ ID NO: 696980 - RNA, 17 nt, Artificial Sequence
  Synthetic
ucgcucauucuacaacu

SEQ ID NO: 696981 - RNA, 17 nt, Artificial Sequence
  Synthetic
acguagggcaaccaacu

SEQ ID NO: 696982 - RNA, 17 nt, Artificial Sequence
  Synthetic
uucaauacccaccaacu

SEQ ID NO: 696983 - RNA, 17 nt, Artificial Sequence
  Synthetic
cauacguugccagaacu

SEQ ID NO: 696984 - RNA, 17 nt, Artificial Sequence
  Synthetic
uuaauugauuccgaacu

SEQ ID NO: 696985 - RNA, 17 nt, Artificial Sequence
  Synthetic
ccauaauaaggugaacu

SEQ ID NO: 696986 - RNA, 17 nt, Artificial Sequence
  Synthetic
ccuguaguuugauaacu

SEQ ID NO: 696987 - RNA, 17 nt, Artificial Sequence
  Synthetic
ucauaccauaacuaacu

SEQ ID NO: 696988 - RNA, 17 nt, Artificial Sequence
  Synthetic
acucuaguguucuaacu

SEQ ID NO: 696989 - RNA, 17 nt, Artificial Sequence
  Synthetic
uggucgcaguaaacacu

SEQ ID NO: 696990 - RNA, 17 nt, Artificial Sequence
  Synthetic
ccacuagaccgcacacu

SEQ ID NO: 696991 - RNA, 17 nt, Artificial Sequence
  Synthetic
uuguuagagccgacacu

SEQ ID NO: 696992 - RNA, 17 nt, Artificial Sequence
  Synthetic
uagggagauuauacacu

SEQ ID NO: 696993 - RNA, 17 nt, Artificial Sequence
  Synthetic
accgauacagagccacu

SEQ ID NO: 696994 - RNA, 17 nt, Artificial Sequence
  Synthetic
ccgagagcuaugccacu

SEQ ID NO: 696995 - RNA, 17 nt, Artificial Sequence
  Synthetic
uaagguaacgaagcacu

SEQ ID NO: 696996 - RNA, 17 nt, Artificial Sequence
  Synthetic
uagcauacaaccgcacu

SEQ ID NO: 696997 - RNA, 17 nt, Artificial Sequence
  Synthetic
uugaggacaggcgcacu

SEQ ID NO: 696998 - RNA, 17 nt, Artificial Sequence
  Synthetic
cgaugguagcuugcacu

SEQ ID NO: 696999 - RNA, 17 nt, Artificial Sequence
  Synthetic
uuguacguaggcucacu

SEQ ID NO: 697000 - RNA, 17 nt, Artificial Sequence
  Synthetic
cgcuagcgggucucacu

SEQ ID NO: 697001 - RNA, 17 nt, Artificial Sequence
  Synthetic
uuaaccugccauucacu

SEQ ID NO: 697002 - RNA, 17 nt, Artificial Sequence
  Synthetic
agucagauucguucacu

SEQ ID NO: 697003 - RNA, 17 nt, Artificial Sequence
  Synthetic
cccauucucggccgacu

SEQ ID NO: 697004 - RNA, 17 nt, Artificial Sequence
  Synthetic
uauacguucuuaggacu

SEQ ID NO: 697005 - RNA, 17 nt, Artificial Sequence
  Synthetic
aggucccuauagggacu

SEQ ID NO: 697006 - RNA, 17 nt, Artificial Sequence
  Synthetic
ugggcaaaaacgggacu

SEQ ID NO: 697007 - RNA, 17 nt, Artificial Sequence
  Synthetic
uggcuaaaugccauacu

SEQ ID NO: 697008 - RNA, 17 nt, Artificial Sequence
  Synthetic
uuaagacuaugcauacu

SEQ ID NO: 697009 - RNA, 17 nt, Artificial Sequence
  Synthetic
ucgugcuuuucgauacu

SEQ ID NO: 697010 - RNA, 17 nt, Artificial Sequence
  Synthetic
uaccccuaucaucuacu

SEQ ID NO: 697011 - RNA, 17 nt, Artificial Sequence
  Synthetic
ccaaugugcacucuacu

SEQ ID NO: 697012 - RNA, 17 nt, Artificial Sequence
  Synthetic
uucuaccacggucuacu

SEQ ID NO: 697013 - RNA, 17 nt, Artificial Sequence
  Synthetic
ccccuacguugucuacu

SEQ ID NO: 697014 - RNA, 17 nt, Artificial Sequence
  Synthetic
caacucucgaaaguacu

SEQ ID NO: 697015 - RNA, 17 nt, Artificial Sequence
  Synthetic
aucucuagauugguacu

SEQ ID NO: 697016 - RNA, 17 nt, Artificial Sequence
  Synthetic
ucggccaguuuuguacu

SEQ ID NO: 697017 - RNA, 17 nt, Artificial Sequence
  Synthetic
ucccgugacaauuuacu

SEQ ID NO: 697018 - RNA, 17 nt, Artificial Sequence
  Synthetic
cggacaccaucuuuacu

SEQ ID NO: 697019 - RNA, 17 nt, Artificial Sequence
  Synthetic
ucgucacgagaaaaccu

SEQ ID NO: 697020 - RNA, 17 nt, Artificial Sequence
  Synthetic
ucuugugcggaaaaccu

SEQ ID NO: 697021 - RNA, 17 nt, Artificial Sequence
  Synthetic
acugguaaauuacaccu

SEQ ID NO: 697022 - RNA, 17 nt, Artificial Sequence
  Synthetic
cggagcaguuugcaccu

SEQ ID NO: 697023 - RNA, 17 nt, Artificial Sequence
  Synthetic
aguaacgguggagaccu

SEQ ID NO: 697024 - RNA, 17 nt, Artificial Sequence
  Synthetic
auuaaggugggcgaccu

SEQ ID NO: 697025 - RNA, 17 nt, Artificial Sequence
  Synthetic
auuaagcuaaaggaccu

SEQ ID NO: 697026 - RNA, 17 nt, Artificial Sequence
  Synthetic
cacgugguucaggaccu

SEQ ID NO: 697027 - RNA, 17 nt, Artificial Sequence
  Synthetic
cgucuucauaaugaccu

SEQ ID NO: 697028 - RNA, 17 nt, Artificial Sequence
  Synthetic
acauacgugggauaccu

SEQ ID NO: 697029 - RNA, 17 nt, Artificial Sequence
  Synthetic
ccagucaauauauaccu

SEQ ID NO: 697030 - RNA, 17 nt, Artificial Sequence
  Synthetic
accugugaccuauaccu

SEQ ID NO: 697031 - RNA, 17 nt, Artificial Sequence
  Synthetic
ucgaaauccccuuaccu

SEQ ID NO: 697032 - RNA, 17 nt, Artificial Sequence
  Synthetic
aacaaguuucguuaccu

SEQ ID NO: 697033 - RNA, 17 nt, Artificial Sequence
  Synthetic
ccgggcaaggguuaccu

SEQ ID NO: 697034 - RNA, 17 nt, Artificial Sequence
  Synthetic
uaggguuacguuuaccu

SEQ ID NO: 697035 - RNA, 17 nt, Artificial Sequence
  Synthetic
cggggguaauccacccu

SEQ ID NO: 697036 - RNA, 17 nt, Artificial Sequence
  Synthetic
auuggaaauugaccccu

SEQ ID NO: 697037 - RNA, 17 nt, Artificial Sequence
  Synthetic
uguuaacuacaagcccu

SEQ ID NO: 697038 - RNA, 17 nt, Artificial Sequence
  Synthetic
cuugcccaacuagcccu

SEQ ID NO: 697039 - RNA, 17 nt, Artificial Sequence
  Synthetic
caaaagcgaagugcccu

SEQ ID NO: 697040 - RNA, 17 nt, Artificial Sequence
  Synthetic
auguuagguugugcccu

SEQ ID NO: 697041 - RNA, 17 nt, Artificial Sequence
  Synthetic
ugcgacugccaaucccu

SEQ ID NO: 697042 - RNA, 17 nt, Artificial Sequence
  Synthetic
cuugagugugcaucccu

SEQ ID NO: 697043 - RNA, 17 nt, Artificial Sequence
  Synthetic
cuacaaauaccgucccu

SEQ ID NO: 697044 - RNA, 17 nt, Artificial Sequence
  Synthetic
cguaacacaaauucccu

SEQ ID NO: 697045 - RNA, 17 nt, Artificial Sequence
  Synthetic
aggugccauuguucccu

SEQ ID NO: 697046 - RNA, 17 nt, Artificial Sequence
  Synthetic
agaucuguuauaagccu

SEQ ID NO: 697047 - RNA, 17 nt, Artificial Sequence
  Synthetic
ugcgugauaugcagccu

SEQ ID NO: 697048 - RNA, 17 nt, Artificial Sequence
  Synthetic
ugaucacuagucagccu

SEQ ID NO: 697049 - RNA, 17 nt, Artificial Sequence
  Synthetic
agcucgugauugagccu

SEQ ID NO: 697050 - RNA, 17 nt, Artificial Sequence
  Synthetic
uccauaacuuccggccu

SEQ ID NO: 697051 - RNA, 17 nt, Artificial Sequence
  Synthetic
cuacagagugcgugccu

SEQ ID NO: 697052 - RNA, 17 nt, Artificial Sequence
  Synthetic
cggacgggacagauccu

SEQ ID NO: 697053 - RNA, 17 nt, Artificial Sequence
  Synthetic
auaauuccugcgauccu

SEQ ID NO: 697054 - RNA, 17 nt, Artificial Sequence
  Synthetic
uaaaacgcgguccuccu

SEQ ID NO: 697055 - RNA, 17 nt, Artificial Sequence
  Synthetic
ucuagauaauagcuccu

SEQ ID NO: 697056 - RNA, 17 nt, Artificial Sequence
  Synthetic
cuuuccgcuaggguccu

SEQ ID NO: 697057 - RNA, 17 nt, Artificial Sequence
  Synthetic
cauagguugcuuguccu

SEQ ID NO: 697058 - RNA, 17 nt, Artificial Sequence
  Synthetic
ccaauacgaaaauuccu

SEQ ID NO: 697059 - RNA, 17 nt, Artificial Sequence
  Synthetic
ugccuaaccugauuccu

SEQ ID NO: 697060 - RNA, 17 nt, Artificial Sequence
  Synthetic
uagauaucacccuuccu

SEQ ID NO: 697061 - RNA, 17 nt, Artificial Sequence
  Synthetic
uuaugcuugaccaagcu

SEQ ID NO: 697062 - RNA, 17 nt, Artificial Sequence
  Synthetic
auuacuacgaagaagcu

SEQ ID NO: 697063 - RNA, 17 nt, Artificial Sequence
  Synthetic
auaauguagccgaagcu

SEQ ID NO: 697064 - RNA, 17 nt, Artificial Sequence
  Synthetic
ucuugggugcaacagcu

SEQ ID NO: 697065 - RNA, 17 nt, Artificial Sequence
  Synthetic
cuagcauaagcgcagcu

SEQ ID NO: 697066 - RNA, 17 nt, Artificial Sequence
  Synthetic
acucuaaguggggagcu

SEQ ID NO: 697067 - RNA, 17 nt, Artificial Sequence
  Synthetic
cgugugguauaauagcu

SEQ ID NO: 697068 - RNA, 17 nt, Artificial Sequence
  Synthetic
ugccucguaguauagcu

SEQ ID NO: 697069 - RNA, 17 nt, Artificial Sequence
  Synthetic
aacaacucuaccuagcu

SEQ ID NO: 697070 - RNA, 17 nt, Artificial Sequence
  Synthetic
ucacaauuugcguagcu

SEQ ID NO: 697071 - RNA, 17 nt, Artificial Sequence
  Synthetic
accuaagaauucacgcu

SEQ ID NO: 697072 - RNA, 17 nt, Artificial Sequence
  Synthetic
uguggauugaagacgcu

SEQ ID NO: 697073 - RNA, 17 nt, Artificial Sequence
  Synthetic
cuaggaaaacauacgcu

SEQ ID NO: 697074 - RNA, 17 nt, Artificial Sequence
  Synthetic
ccacacacacguacgcu

SEQ ID NO: 697075 - RNA, 17 nt, Artificial Sequence
  Synthetic
aaaauaacuauaccgcu

SEQ ID NO: 697076 - RNA, 17 nt, Artificial Sequence
  Synthetic
aagcugcucuuuccgcu

SEQ ID NO: 697077 - RNA, 17 nt, Artificial Sequence
  Synthetic
uuaguuucccuugcgcu

SEQ ID NO: 697078 - RNA, 17 nt, Artificial Sequence
  Synthetic
accgucuagugcaggcu

SEQ ID NO: 697079 - RNA, 17 nt, Artificial Sequence
  Synthetic
caauggucagcgaggcu

SEQ ID NO: 697080 - RNA, 17 nt, Artificial Sequence
  Synthetic
uuguuuagaguacggcu

SEQ ID NO: 697081 - RNA, 17 nt, Artificial Sequence
  Synthetic
auucaagcuaugcggcu

SEQ ID NO: 697082 - RNA, 17 nt, Artificial Sequence
  Synthetic
ugaucaguauaagggcu

SEQ ID NO: 697083 - RNA, 17 nt, Artificial Sequence
  Synthetic
agaaauuguaccgggcu

SEQ ID NO: 697084 - RNA, 17 nt, Artificial Sequence
  Synthetic
uugagagccuaauggcu

SEQ ID NO: 697085 - RNA, 17 nt, Artificial Sequence
  Synthetic
aggccaaucggauggcu

SEQ ID NO: 697086 - RNA, 17 nt, Artificial Sequence
  Synthetic
augaucaacgccuggcu

SEQ ID NO: 697087 - RNA, 17 nt, Artificial Sequence
  Synthetic
aacuggaauacguggcu

SEQ ID NO: 697088 - RNA, 17 nt, Artificial Sequence
  Synthetic
cccugaacgcuuuggcu

SEQ ID NO: 697089 - RNA, 17 nt, Artificial Sequence
  Synthetic
uagcgguuucaaaugcu

SEQ ID NO: 697090 - RNA, 17 nt, Artificial Sequence
  Synthetic
agcaucgauagcaugcu

SEQ ID NO: 697091 - RNA, 17 nt, Artificial Sequence
  Synthetic
cuuauccacaagcugcu

SEQ ID NO: 697092 - RNA, 17 nt, Artificial Sequence
  Synthetic
aacauucacgaucugcu

SEQ ID NO: 697093 - RNA, 17 nt, Artificial Sequence
  Synthetic
augugguuacaauugcu

SEQ ID NO: 697094 - RNA, 17 nt, Artificial Sequence
  Synthetic
aagaucagcacguugcu

SEQ ID NO: 697095 - RNA, 17 nt, Artificial Sequence
  Synthetic
cggcaugaacuguugcu

SEQ ID NO: 697096 - RNA, 17 nt, Artificial Sequence
  Synthetic
ugugcguaaaguuugcu

SEQ ID NO: 697097 - RNA, 17 nt, Artificial Sequence
  Synthetic
aguucgagauccaaucu

SEQ ID NO: 697098 - RNA, 17 nt, Artificial Sequence
  Synthetic
cguagaaacguacaucu

SEQ ID NO: 697099 - RNA, 17 nt, Artificial Sequence
  Synthetic
ucgacgcugugucaucu

SEQ ID NO: 697100 - RNA, 17 nt, Artificial Sequence
  Synthetic
cuuucucgaggugaucu

SEQ ID NO: 697101 - RNA, 17 nt, Artificial Sequence
  Synthetic
uugacgcaaucauaucu

SEQ ID NO: 697102 - RNA, 17 nt, Artificial Sequence
  Synthetic
uaccuacuagucuaucu

SEQ ID NO: 697103 - RNA, 17 nt, Artificial Sequence
  Synthetic
aucccacguauguaucu

SEQ ID NO: 697104 - RNA, 17 nt, Artificial Sequence
  Synthetic
auuggaucucgaacucu

SEQ ID NO: 697105 - RNA, 17 nt, Artificial Sequence
  Synthetic
aaccuuagcuacacucu

SEQ ID NO: 697106 - RNA, 17 nt, Artificial Sequence
  Synthetic
aguuaugcaacgacucu

SEQ ID NO: 697107 - RNA, 17 nt, Artificial Sequence
  Synthetic
aaugcagcuaauacucu

SEQ ID NO: 697108 - RNA, 17 nt, Artificial Sequence
  Synthetic
acuacgacagguacucu

SEQ ID NO: 697109 - RNA, 17 nt, Artificial Sequence
  Synthetic
uaaccguuugacccucu

SEQ ID NO: 697110 - RNA, 17 nt, Artificial Sequence
  Synthetic
uaggacuuagagccucu

SEQ ID NO: 697111 - RNA, 17 nt, Artificial Sequence
  Synthetic
augugcagcgaagcucu

SEQ ID NO: 697112 - RNA, 17 nt, Artificial Sequence
  Synthetic
agcggagguagggcucu

SEQ ID NO: 697113 - RNA, 17 nt, Artificial Sequence
  Synthetic
acugccccuaagucucu

SEQ ID NO: 697114 - RNA, 17 nt, Artificial Sequence
  Synthetic
acgauaagggagucucu

SEQ ID NO: 697115 - RNA, 17 nt, Artificial Sequence
  Synthetic
aagauugacgugucucu

SEQ ID NO: 697116 - RNA, 17 nt, Artificial Sequence
  Synthetic
uacccauugcaaagucu

SEQ ID NO: 697117 - RNA, 17 nt, Artificial Sequence
  Synthetic
augggguacacuagucu

SEQ ID NO: 697118 - RNA, 17 nt, Artificial Sequence
  Synthetic
auacgugcagcccgucu

SEQ ID NO: 697119 - RNA, 17 nt, Artificial Sequence
  Synthetic
acugagggauuccgucu

SEQ ID NO: 697120 - RNA, 17 nt, Artificial Sequence
  Synthetic
ugguagcauaagcgucu

SEQ ID NO: 697121 - RNA, 17 nt, Artificial Sequence
  Synthetic
uucguagcaccaggucu

SEQ ID NO: 697122 - RNA, 17 nt, Artificial Sequence
  Synthetic
acaacggcuucaggucu

SEQ ID NO: 697123 - RNA, 17 nt, Artificial Sequence
  Synthetic
ucccacaaguauggucu

SEQ ID NO: 697124 - RNA, 17 nt, Artificial Sequence
  Synthetic
ucguauucugggugucu

SEQ ID NO: 697125 - RNA, 17 nt, Artificial Sequence
  Synthetic
cguggaaaaccaauucu

SEQ ID NO: 697126 - RNA, 17 nt, Artificial Sequence
  Synthetic
auacgggauguaauucu

SEQ ID NO: 697127 - RNA, 17 nt, Artificial Sequence
  Synthetic
aagccgagugacauucu

SEQ ID NO: 697128 - RNA, 17 nt, Artificial Sequence
  Synthetic
agcuguaccuacauucu

SEQ ID NO: 697129 - RNA, 17 nt, Artificial Sequence
  Synthetic
uucauuuggcggauucu

SEQ ID NO: 697130 - RNA, 17 nt, Artificial Sequence
  Synthetic
aacaacguugguauucu

SEQ ID NO: 697131 - RNA, 17 nt, Artificial Sequence
  Synthetic
acauagacuaaccuucu

SEQ ID NO: 697132 - RNA, 17 nt, Artificial Sequence
  Synthetic
cuaggguauugccuucu

SEQ ID NO: 697133 - RNA, 17 nt, Artificial Sequence
  Synthetic
accgauaaguauguucu

SEQ ID NO: 697134 - RNA, 17 nt, Artificial Sequence
  Synthetic
caauccgauggauuucu

SEQ ID NO: 697135 - RNA, 17 nt, Artificial Sequence
  Synthetic
uggaguaucguauuucu

SEQ ID NO: 697136 - RNA, 17 nt, Artificial Sequence
  Synthetic
cgcggcauaauuuuucu

SEQ ID NO: 697137 - RNA, 17 nt, Artificial Sequence
  Synthetic
ucgauagaagcuaaagu

SEQ ID NO: 697138 - RNA, 17 nt, Artificial Sequence
  Synthetic
cauacugucuaacaagu

SEQ ID NO: 697139 - RNA, 17 nt, Artificial Sequence
  Synthetic
cgguuacuucuagaagu

SEQ ID NO: 697140 - RNA, 17 nt, Artificial Sequence
  Synthetic
caauaccucuacgaagu

SEQ ID NO: 697141 - RNA, 17 nt, Artificial Sequence
  Synthetic
caaaggccuccggaagu

SEQ ID NO: 697142 - RNA, 17 nt, Artificial Sequence
  Synthetic
agcaacgauacugaagu

SEQ ID NO: 697143 - RNA, 17 nt, Artificial Sequence
  Synthetic
uaacgcuuuagugaagu

SEQ ID NO: 697144 - RNA, 17 nt, Artificial Sequence
  Synthetic
acgcuauuuaaauaagu

SEQ ID NO: 697145 - RNA, 17 nt, Artificial Sequence
  Synthetic
cugcuucguuacuaagu

SEQ ID NO: 697146 - RNA, 17 nt, Artificial Sequence
  Synthetic
cucuauuggauuuaagu

SEQ ID NO: 697147 - RNA, 17 nt, Artificial Sequence
  Synthetic
acuccucguagcccagu

SEQ ID NO: 697148 - RNA, 17 nt, Artificial Sequence
  Synthetic
ccgauucgcaaagcagu

SEQ ID NO: 697149 - RNA, 17 nt, Artificial Sequence
  Synthetic
acacuugacguagcagu

SEQ ID NO: 697150 - RNA, 17 nt, Artificial Sequence
  Synthetic
auugaacaccacgcagu

SEQ ID NO: 697151 - RNA, 17 nt, Artificial Sequence
  Synthetic
uauuuacaagccgcagu

SEQ ID NO: 697152 - RNA, 17 nt, Artificial Sequence
  Synthetic
cacagcuuucgcucagu

SEQ ID NO: 697153 - RNA, 17 nt, Artificial Sequence
  Synthetic
acaguucgauggucagu

SEQ ID NO: 697154 - RNA, 17 nt, Artificial Sequence
  Synthetic
acaacaucgggaagagu

SEQ ID NO: 697155 - RNA, 17 nt, Artificial Sequence
  Synthetic
uccaacuggggacgagu

SEQ ID NO: 697156 - RNA, 17 nt, Artificial Sequence
  Synthetic
aagcccaacugacgagu

SEQ ID NO: 697157 - RNA, 17 nt, Artificial Sequence
  Synthetic
ccaugggcuuugcgagu

SEQ ID NO: 697158 - RNA, 17 nt, Artificial Sequence
  Synthetic
uuaucaugcugucgagu

SEQ ID NO: 697159 - RNA, 17 nt, Artificial Sequence
  Synthetic
ccaaguuauacaggagu

SEQ ID NO: 697160 - RNA, 17 nt, Artificial Sequence
  Synthetic
cgcuuuaacgggugagu

SEQ ID NO: 697161 - RNA, 17 nt, Artificial Sequence
  Synthetic
cgucucggggacauagu

SEQ ID NO: 697162 - RNA, 17 nt, Artificial Sequence
  Synthetic
cacccaugugugauagu

SEQ ID NO: 697163 - RNA, 17 nt, Artificial Sequence
  Synthetic
uuagcugaaaugcuagu

SEQ ID NO: 697164 - RNA, 17 nt, Artificial Sequence
  Synthetic
aacauaccaguucuagu

SEQ ID NO: 697165 - RNA, 17 nt, Artificial Sequence
  Synthetic
cacauguuauaaguagu

SEQ ID NO: 697166 - RNA, 17 nt, Artificial Sequence
  Synthetic
cuggcauugauaguagu

SEQ ID NO: 697167 - RNA, 17 nt, Artificial Sequence
  Synthetic
uauaccuuaucgguagu

SEQ ID NO: 697168 - RNA, 17 nt, Artificial Sequence
  Synthetic
ucagcacacuugguagu

SEQ ID NO: 697169 - RNA, 17 nt, Artificial Sequence
  Synthetic
caaaggccccaauuagu

SEQ ID NO: 697170 - RNA, 17 nt, Artificial Sequence
  Synthetic
caagaaguugccuuagu

SEQ ID NO: 697171 - RNA, 17 nt, Artificial Sequence
  Synthetic
ugccgucaauauuuagu

SEQ ID NO: 697172 - RNA, 17 nt, Artificial Sequence
  Synthetic
uacaucaguccuuuagu

SEQ ID NO: 697173 - RNA, 17 nt, Artificial Sequence
  Synthetic
aaguccgugaguuuagu

SEQ ID NO: 697174 - RNA, 17 nt, Artificial Sequence
  Synthetic
auuuggcauguaaacgu

SEQ ID NO: 697175 - RNA, 17 nt, Artificial Sequence
  Synthetic
cgccaaguagacaacgu

SEQ ID NO: 697176 - RNA, 17 nt, Artificial Sequence
  Synthetic
cuagcuucggacaacgu

SEQ ID NO: 697177 - RNA, 17 nt, Artificial Sequence
  Synthetic
uaucuauguaagcacgu

SEQ ID NO: 697178 - RNA, 17 nt, Artificial Sequence
  Synthetic
aauauauaggcucacgu

SEQ ID NO: 697179 - RNA, 17 nt, Artificial Sequence
  Synthetic
acgaauaugggucacgu

SEQ ID NO: 697180 - RNA, 17 nt, Artificial Sequence
  Synthetic
aaugaagucugucacgu

SEQ ID NO: 697181 - RNA, 17 nt, Artificial Sequence
  Synthetic
acuacagggguagacgu

SEQ ID NO: 697182 - RNA, 17 nt, Artificial Sequence
  Synthetic
aguaugugugaugacgu

SEQ ID NO: 697183 - RNA, 17 nt, Artificial Sequence
  Synthetic
cgggucauuuuguacgu

SEQ ID NO: 697184 - RNA, 17 nt, Artificial Sequence
  Synthetic
aucggguuccauuacgu

SEQ ID NO: 697185 - RNA, 17 nt, Artificial Sequence
  Synthetic
aaggagacacuuuacgu

SEQ ID NO: 697186 - RNA, 17 nt, Artificial Sequence
  Synthetic
ucgaaucuugucaccgu

SEQ ID NO: 697187 - RNA, 17 nt, Artificial Sequence
  Synthetic
agcuuauacaagaccgu

SEQ ID NO: 697188 - RNA, 17 nt, Artificial Sequence
  Synthetic
uggugacaaaaucccgu

SEQ ID NO: 697189 - RNA, 17 nt, Artificial Sequence
  Synthetic
uguauauauacagccgu

SEQ ID NO: 697190 - RNA, 17 nt, Artificial Sequence
  Synthetic
uuuacuuguacagccgu

SEQ ID NO: 697191 - RNA, 17 nt, Artificial Sequence
  Synthetic
uuguaaagauuugccgu

SEQ ID NO: 697192 - RNA, 17 nt, Artificial Sequence
  Synthetic
cuaaauuuagcauccgu

SEQ ID NO: 697193 - RNA, 17 nt, Artificial Sequence
  Synthetic
uuaguccuauuauccgu

SEQ ID NO: 697194 - RNA, 17 nt, Artificial Sequence
  Synthetic
caggccauacccuccgu

SEQ ID NO: 697195 - RNA, 17 nt, Artificial Sequence
  Synthetic
ccaacuguuagaagcgu

SEQ ID NO: 697196 - RNA, 17 nt, Artificial Sequence
  Synthetic
uaaccagugggaggcgu

SEQ ID NO: 697197 - RNA, 17 nt, Artificial Sequence
  Synthetic
aguggauagaccugcgu

SEQ ID NO: 697198 - RNA, 17 nt, Artificial Sequence
  Synthetic
uacaucguguugugcgu

SEQ ID NO: 697199 - RNA, 17 nt, Artificial Sequence
  Synthetic
uuaacaaugaagaucgu

SEQ ID NO: 697200 - RNA, 17 nt, Artificial Sequence
  Synthetic
agucuguuccagaucgu

SEQ ID NO: 697201 - RNA, 17 nt, Artificial Sequence
  Synthetic
aaaugacccaaacucgu

SEQ ID NO: 697202 - RNA, 17 nt, Artificial Sequence
  Synthetic
ucguaagugccucucgu

SEQ ID NO: 697203 - RNA, 17 nt, Artificial Sequence
  Synthetic
agggcuagacacgucgu

SEQ ID NO: 697204 - RNA, 17 nt, Artificial Sequence
  Synthetic
cgugacaaagaggucgu

SEQ ID NO: 697205 - RNA, 17 nt, Artificial Sequence
  Synthetic
accugcugugccuucgu

SEQ ID NO: 697206 - RNA, 17 nt, Artificial Sequence
  Synthetic
aucauugguugcuucgu

SEQ ID NO: 697207 - RNA, 17 nt, Artificial Sequence
  Synthetic
uuaucugucauguucgu

SEQ ID NO: 697208 - RNA, 17 nt, Artificial Sequence
  Synthetic
ugcuuccacgcuuucgu

SEQ ID NO: 697209 - RNA, 17 nt, Artificial Sequence
  Synthetic
uuuuagggaaguuucgu

SEQ ID NO: 697210 - RNA, 17 nt, Artificial Sequence
  Synthetic
uuaccgaggaaaaaggu

SEQ ID NO: 697211 - RNA, 17 nt, Artificial Sequence
  Synthetic
uguucuggccauaaggu

SEQ ID NO: 697212 - RNA, 17 nt, Artificial Sequence
  Synthetic
uucucacccguuaaggu

SEQ ID NO: 697213 - RNA, 17 nt, Artificial Sequence
  Synthetic
aacuuauccugacaggu

SEQ ID NO: 697214 - RNA, 17 nt, Artificial Sequence
  Synthetic
caucaggggacgcaggu

SEQ ID NO: 697215 - RNA, 17 nt, Artificial Sequence
  Synthetic
cauggcacggaagaggu

SEQ ID NO: 697216 - RNA, 17 nt, Artificial Sequence
  Synthetic
cgacagugcauagaggu

SEQ ID NO: 697217 - RNA, 17 nt, Artificial Sequence
  Synthetic
aguagguaguccgaggu

SEQ ID NO: 697218 - RNA, 17 nt, Artificial Sequence
  Synthetic
uuugccuaagucgaggu

SEQ ID NO: 697219 - RNA, 17 nt, Artificial Sequence
  Synthetic
ucggggaaagcggaggu

SEQ ID NO: 697220 - RNA, 17 nt, Artificial Sequence
  Synthetic
cgacuuuucgaugaggu

SEQ ID NO: 697221 - RNA, 17 nt, Artificial Sequence
  Synthetic
ucgacuagcucugaggu

SEQ ID NO: 697222 - RNA, 17 nt, Artificial Sequence
  Synthetic
uuugaaccuuaauaggu

SEQ ID NO: 697223 - RNA, 17 nt, Artificial Sequence
  Synthetic
auaugggcaaguuaggu

SEQ ID NO: 697224 - RNA, 17 nt, Artificial Sequence
  Synthetic
cauagugaacucacggu

SEQ ID NO: 697225 - RNA, 17 nt, Artificial Sequence
  Synthetic
cuuuagcuuuagacggu

SEQ ID NO: 697226 - RNA, 17 nt, Artificial Sequence
  Synthetic
aucuaguaauugacggu

SEQ ID NO: 697227 - RNA, 17 nt, Artificial Sequence
  Synthetic
agaauguaaguuacggu

SEQ ID NO: 697228 - RNA, 17 nt, Artificial Sequence
  Synthetic
ucuguaucuugagcggu

SEQ ID NO: 697229 - RNA, 17 nt, Artificial Sequence
  Synthetic
cugugcaaguaaucggu

SEQ ID NO: 697230 - RNA, 17 nt, Artificial Sequence
  Synthetic
uacuguaaacuaucggu

SEQ ID NO: 697231 - RNA, 17 nt, Artificial Sequence
  Synthetic
auuuggcagaucucggu

SEQ ID NO: 697232 - RNA, 17 nt, Artificial Sequence
  Synthetic
caaggaccgacaagggu

SEQ ID NO: 697233 - RNA, 17 nt, Artificial Sequence
  Synthetic
cgguuauagcucagggu

SEQ ID NO: 697234 - RNA, 17 nt, Artificial Sequence
  Synthetic
aacgauguacauagggu

SEQ ID NO: 697235 - RNA, 17 nt, Artificial Sequence
  Synthetic
uuaugccguaguagggu

SEQ ID NO: 697236 - RNA, 17 nt, Artificial Sequence
  Synthetic
auggaucaggggcgggu

SEQ ID NO: 697237 - RNA, 17 nt, Artificial Sequence
  Synthetic
uauaacauccucggggu

SEQ ID NO: 697238 - RNA, 17 nt, Artificial Sequence
  Synthetic
acaguuuaggcaugggu

SEQ ID NO: 697239 - RNA, 17 nt, Artificial Sequence
  Synthetic
agcuuuagacggugggu

SEQ ID NO: 697240 - RNA, 17 nt, Artificial Sequence
  Synthetic
accugagguauuauggu

SEQ ID NO: 697241 - RNA, 17 nt, Artificial Sequence
  Synthetic
auccuaagucuuauggu

SEQ ID NO: 697242 - RNA, 17 nt, Artificial Sequence
  Synthetic
caacaaguuggacuggu

SEQ ID NO: 697243 - RNA, 17 nt, Artificial Sequence
  Synthetic
auccgggggaaccuggu

SEQ ID NO: 697244 - RNA, 17 nt, Artificial Sequence
  Synthetic
cugguaugagaccuggu

SEQ ID NO: 697245 - RNA, 17 nt, Artificial Sequence
  Synthetic
uaucggccauuccuggu

SEQ ID NO: 697246 - RNA, 17 nt, Artificial Sequence
  Synthetic
uaguguaggguucuggu

SEQ ID NO: 697247 - RNA, 17 nt, Artificial Sequence
  Synthetic
aacaaggcuuaauuggu

SEQ ID NO: 697248 - RNA, 17 nt, Artificial Sequence
  Synthetic
uaucgaaaacggaaugu

SEQ ID NO: 697249 - RNA, 17 nt, Artificial Sequence
  Synthetic
agguaugguagacaugu

SEQ ID NO: 697250 - RNA, 17 nt, Artificial Sequence
  Synthetic
uauuggcuaggccaugu

SEQ ID NO: 697251 - RNA, 17 nt, Artificial Sequence
  Synthetic
cggugagucuagcaugu

SEQ ID NO: 697252 - RNA, 17 nt, Artificial Sequence
  Synthetic
auguuucgcuggcaugu

SEQ ID NO: 697253 - RNA, 17 nt, Artificial Sequence
  Synthetic
cgcggacuaguagaugu

SEQ ID NO: 697254 - RNA, 17 nt, Artificial Sequence
  Synthetic
uuacggauuaucuaugu

SEQ ID NO: 697255 - RNA, 17 nt, Artificial Sequence
  Synthetic
cacguuccucaguaugu

SEQ ID NO: 697256 - RNA, 17 nt, Artificial Sequence
  Synthetic
ccuggccgagaguaugu

SEQ ID NO: 697257 - RNA, 17 nt, Artificial Sequence
  Synthetic
uuuacgcaguuguaugu

SEQ ID NO: 697258 - RNA, 17 nt, Artificial Sequence
  Synthetic
uaggcuggacuuuaugu

SEQ ID NO: 697259 - RNA, 17 nt, Artificial Sequence
  Synthetic
agcgucgaucgaacugu

SEQ ID NO: 697260 - RNA, 17 nt, Artificial Sequence
  Synthetic
cacuaacucauaacugu

SEQ ID NO: 697261 - RNA, 17 nt, Artificial Sequence
  Synthetic
cggacaugacuaacugu

SEQ ID NO: 697262 - RNA, 17 nt, Artificial Sequence
  Synthetic
uucauagggcacacugu

SEQ ID NO: 697263 - RNA, 17 nt, Artificial Sequence
  Synthetic
uaugccuucgagacugu

SEQ ID NO: 697264 - RNA, 17 nt, Artificial Sequence
  Synthetic
acuauaacuuguacugu

SEQ ID NO: 697265 - RNA, 17 nt, Artificial Sequence
  Synthetic
aguaauugcuacgcugu

SEQ ID NO: 697266 - RNA, 17 nt, Artificial Sequence
  Synthetic
cauagccgguaaucugu

SEQ ID NO: 697267 - RNA, 17 nt, Artificial Sequence
  Synthetic
aguacuucccuaucugu

SEQ ID NO: 697268 - RNA, 17 nt, Artificial Sequence
  Synthetic
ugggucuuacgcucugu

SEQ ID NO: 697269 - RNA, 17 nt, Artificial Sequence
  Synthetic
agucggcccuaaagugu

SEQ ID NO: 697270 - RNA, 17 nt, Artificial Sequence
  Synthetic
ccaucggaucauagugu

SEQ ID NO: 697271 - RNA, 17 nt, Artificial Sequence
  Synthetic
ccucaaacuacuagugu

SEQ ID NO: 697272 - RNA, 17 nt, Artificial Sequence
  Synthetic
uaggcuuugaaacgugu

SEQ ID NO: 697273 - RNA, 17 nt, Artificial Sequence
  Synthetic
ucuuggggucaacgugu

SEQ ID NO: 697274 - RNA, 17 nt, Artificial Sequence
  Synthetic
acucuugguaagcgugu

SEQ ID NO: 697275 - RNA, 17 nt, Artificial Sequence
  Synthetic
caagugcuaacgcgugu

SEQ ID NO: 697276 - RNA, 17 nt, Artificial Sequence
  Synthetic
auaaguugagacggugu

SEQ ID NO: 697277 - RNA, 17 nt, Artificial Sequence
  Synthetic
ccagcggauuacggugu

SEQ ID NO: 697278 - RNA, 17 nt, Artificial Sequence
  Synthetic
caugugccuuccggugu

SEQ ID NO: 697279 - RNA, 17 nt, Artificial Sequence
  Synthetic
ccauuuugcugcggugu

SEQ ID NO: 697280 - RNA, 17 nt, Artificial Sequence
  Synthetic
aucauguacgacugugu

SEQ ID NO: 697281 - RNA, 17 nt, Artificial Sequence
  Synthetic
cuccuaagguuaauugu

SEQ ID NO: 697282 - RNA, 17 nt, Artificial Sequence
  Synthetic
aguguguugcaacuugu

SEQ ID NO: 697283 - RNA, 17 nt, Artificial Sequence
  Synthetic
uacgagguuuaucuugu

SEQ ID NO: 697284 - RNA, 17 nt, Artificial Sequence
  Synthetic
aucacggacgugguugu

SEQ ID NO: 697285 - RNA, 17 nt, Artificial Sequence
  Synthetic
cggcuaauacauguugu

SEQ ID NO: 697286 - RNA, 17 nt, Artificial Sequence
  Synthetic
cacacucuaaguguugu

SEQ ID NO: 697287 - RNA, 17 nt, Artificial Sequence
  Synthetic
uaggacuaacaauuugu

SEQ ID NO: 697288 - RNA, 17 nt, Artificial Sequence
  Synthetic
acagucacgccuuuugu

SEQ ID NO: 697289 - RNA, 17 nt, Artificial Sequence
  Synthetic
caagugcauacgaaauu

SEQ ID NO: 697290 - RNA, 17 nt, Artificial Sequence
  Synthetic
caauaccucgugaaauu

SEQ ID NO: 697291 - RNA, 17 nt, Artificial Sequence
  Synthetic
acaccaucguauaaauu

SEQ ID NO: 697292 - RNA, 17 nt, Artificial Sequence
  Synthetic
auggauaccuaucaauu

SEQ ID NO: 697293 - RNA, 17 nt, Artificial Sequence
  Synthetic
auggaggacugucaauu

SEQ ID NO: 697294 - RNA, 17 nt, Artificial Sequence
  Synthetic
ucuagggcguaagaauu

SEQ ID NO: 697295 - RNA, 17 nt, Artificial Sequence
  Synthetic
cuagucugaacagaauu

SEQ ID NO: 697296 - RNA, 17 nt, Artificial Sequence
  Synthetic
aggguuaacuaggaauu

SEQ ID NO: 697297 - RNA, 17 nt, Artificial Sequence
  Synthetic
aguacagcgagggaauu

SEQ ID NO: 697298 - RNA, 17 nt, Artificial Sequence
  Synthetic
cuaacugcgagggaauu

SEQ ID NO: 697299 - RNA, 17 nt, Artificial Sequence
  Synthetic
agcgaugaaugugaauu

SEQ ID NO: 697300 - RNA, 17 nt, Artificial Sequence
  Synthetic
agcacugucguugaauu

SEQ ID NO: 697301 - RNA, 17 nt, Artificial Sequence
  Synthetic
cguggaggcagcuaauu

SEQ ID NO: 697302 - RNA, 17 nt, Artificial Sequence
  Synthetic
aaucgcaacagguaauu

SEQ ID NO: 697303 - RNA, 17 nt, Artificial Sequence
  Synthetic
cuagggcgugcaacauu

SEQ ID NO: 697304 - RNA, 17 nt, Artificial Sequence
  Synthetic
acaugcguauggacauu

SEQ ID NO: 697305 - RNA, 17 nt, Artificial Sequence
  Synthetic
acugagggguaaccauu

SEQ ID NO: 697306 - RNA, 17 nt, Artificial Sequence
  Synthetic
cccccugauccaccauu

SEQ ID NO: 697307 - RNA, 17 nt, Artificial Sequence
  Synthetic
cuuccacgagagccauu

SEQ ID NO: 697308 - RNA, 17 nt, Artificial Sequence
  Synthetic
ugugaagacgugccauu

SEQ ID NO: 697309 - RNA, 17 nt, Artificial Sequence
  Synthetic
ucggauauuaaagcauu

SEQ ID NO: 697310 - RNA, 17 nt, Artificial Sequence
  Synthetic
aguuagcaucaagcauu

SEQ ID NO: 697311 - RNA, 17 nt, Artificial Sequence
  Synthetic
uauguuagucuagcauu

SEQ ID NO: 697312 - RNA, 17 nt, Artificial Sequence
  Synthetic
cugcagcagcacgcauu

SEQ ID NO: 697313 - RNA, 17 nt, Artificial Sequence
  Synthetic
uucacuagggcgucauu

SEQ ID NO: 697314 - RNA, 17 nt, Artificial Sequence
  Synthetic
agcguagugugcagauu

SEQ ID NO: 697315 - RNA, 17 nt, Artificial Sequence
  Synthetic
uaaucguaaaucagauu

SEQ ID NO: 697316 - RNA, 17 nt, Artificial Sequence
  Synthetic
auuccaauacuccgauu

SEQ ID NO: 697317 - RNA, 17 nt, Artificial Sequence
  Synthetic
uuguccugauaucgauu

SEQ ID NO: 697318 - RNA, 17 nt, Artificial Sequence
  Synthetic
acaaaguaguuucgauu

SEQ ID NO: 697319 - RNA, 17 nt, Artificial Sequence
  Synthetic
auacuaccucacggauu

SEQ ID NO: 697320 - RNA, 17 nt, Artificial Sequence
  Synthetic
augacggaaccaugauu

SEQ ID NO: 697321 - RNA, 17 nt, Artificial Sequence
  Synthetic
caaucuaggguaugauu

SEQ ID NO: 697322 - RNA, 17 nt, Artificial Sequence
  Synthetic
acgaagguucacugauu

SEQ ID NO: 697323 - RNA, 17 nt, Artificial Sequence
  Synthetic
acuccgcuagccugauu

SEQ ID NO: 697324 - RNA, 17 nt, Artificial Sequence
  Synthetic
aucaacccaaccauauu

SEQ ID NO: 697325 - RNA, 17 nt, Artificial Sequence
  Synthetic
uucauacuccgcauauu

SEQ ID NO: 697326 - RNA, 17 nt, Artificial Sequence
  Synthetic
acaagcgcagucauauu

SEQ ID NO: 697327 - RNA, 17 nt, Artificial Sequence
  Synthetic
uacgaaaagguacuauu

SEQ ID NO: 697328 - RNA, 17 nt, Artificial Sequence
  Synthetic
cagauacgugagcuauu

SEQ ID NO: 697329 - RNA, 17 nt, Artificial Sequence
  Synthetic
caaggguaaaggcuauu

SEQ ID NO: 697330 - RNA, 17 nt, Artificial Sequence
  Synthetic
ucgauuggcuugcuauu

SEQ ID NO: 697331 - RNA, 17 nt, Artificial Sequence
  Synthetic
auaguggucccucuauu

SEQ ID NO: 697332 - RNA, 17 nt, Artificial Sequence
  Synthetic
ccccuuuggggucuauu

SEQ ID NO: 697333 - RNA, 17 nt, Artificial Sequence
  Synthetic
uagacacaccugguauu

SEQ ID NO: 697334 - RNA, 17 nt, Artificial Sequence
  Synthetic
ucaauauacgugguauu

SEQ ID NO: 697335 - RNA, 17 nt, Artificial Sequence
  Synthetic
uggaugucaagcaacuu

SEQ ID NO: 697336 - RNA, 17 nt, Artificial Sequence
  Synthetic
cauacagagcucaacuu

SEQ ID NO: 697337 - RNA, 17 nt, Artificial Sequence
  Synthetic
acguuaagaacgaacuu

SEQ ID NO: 697338 - RNA, 17 nt, Artificial Sequence
  Synthetic
cgauccuucuauaacuu

SEQ ID NO: 697339 - RNA, 17 nt, Artificial Sequence
  Synthetic
auucgguugauuaacuu

SEQ ID NO: 697340 - RNA, 17 nt, Artificial Sequence
  Synthetic
agugcuguaauccacuu

SEQ ID NO: 697341 - RNA, 17 nt, Artificial Sequence
  Synthetic
ccauucucggccgacuu

SEQ ID NO: 697342 - RNA, 17 nt, Artificial Sequence
  Synthetic
agccccuaccucgacuu

SEQ ID NO: 697343 - RNA, 17 nt, Artificial Sequence
  Synthetic
ucacuuaaugucgacuu

SEQ ID NO: 697344 - RNA, 17 nt, Artificial Sequence
  Synthetic
uucaaucgauuggacuu

SEQ ID NO: 697345 - RNA, 17 nt, Artificial Sequence
  Synthetic
uccggucaguucuacuu

SEQ ID NO: 697346 - RNA, 17 nt, Artificial Sequence
  Synthetic
uaggcaaucguguacuu

SEQ ID NO: 697347 - RNA, 17 nt, Artificial Sequence
  Synthetic
aacuuguauacaaccuu

SEQ ID NO: 697348 - RNA, 17 nt, Artificial Sequence
  Synthetic
auacuccacagcaccuu

SEQ ID NO: 697349 - RNA, 17 nt, Artificial Sequence
  Synthetic
accucuucggcuaccuu

SEQ ID NO: 697350 - RNA, 17 nt, Artificial Sequence
  Synthetic
cgcacauaauguaccuu

SEQ ID NO: 697351 - RNA, 17 nt, Artificial Sequence
  Synthetic
ugcuaucggauuaccuu

SEQ ID NO: 697352 - RNA, 17 nt, Artificial Sequence
  Synthetic
uugauaguuguacccuu

SEQ ID NO: 697353 - RNA, 17 nt, Artificial Sequence
  Synthetic
uuggaaauugaccccuu

SEQ ID NO: 697354 - RNA, 17 nt, Artificial Sequence
  Synthetic
cggccuaagauccccuu

SEQ ID NO: 697355 - RNA, 17 nt, Artificial Sequence
  Synthetic
ccacgccuaaaucccuu

SEQ ID NO: 697356 - RNA, 17 nt, Artificial Sequence
  Synthetic
ccacuuccggaggccuu

SEQ ID NO: 697357 - RNA, 17 nt, Artificial Sequence
  Synthetic
acggauugcugugccuu

SEQ ID NO: 697358 - RNA, 17 nt, Artificial Sequence
  Synthetic
ugcaguauagucuccuu

SEQ ID NO: 697359 - RNA, 17 nt, Artificial Sequence
  Synthetic
aaaccucaacgguccuu

SEQ ID NO: 697360 - RNA, 17 nt, Artificial Sequence
  Synthetic
acgaauccacauuccuu

SEQ ID NO: 697361 - RNA, 17 nt, Artificial Sequence
  Synthetic
caccguaggcauuccuu

SEQ ID NO: 697362 - RNA, 17 nt, Artificial Sequence
  Synthetic
aucugcccgcuuuccuu

SEQ ID NO: 697363 - RNA, 17 nt, Artificial Sequence
  Synthetic
uuacggacaggcagcuu

SEQ ID NO: 697364 - RNA, 17 nt, Artificial Sequence
  Synthetic
cucuaaguggggagcuu

SEQ ID NO: 697365 - RNA, 17 nt, Artificial Sequence
  Synthetic
uaagggguagguagcuu

SEQ ID NO: 697366 - RNA, 17 nt, Artificial Sequence
  Synthetic
auggggaauugucgcuu

SEQ ID NO: 697367 - RNA, 17 nt, Artificial Sequence
  Synthetic
aauggucagcgaggcuu

SEQ ID NO: 697368 - RNA, 17 nt, Artificial Sequence
  Synthetic
acgcacucuguaggcuu

SEQ ID NO: 697369 - RNA, 17 nt, Artificial Sequence
  Synthetic
aucuguuggcggggcuu

SEQ ID NO: 697370 - RNA, 17 nt, Artificial Sequence
  Synthetic
cgcuggagauuuggcuu

SEQ ID NO: 697371 - RNA, 17 nt, Artificial Sequence
  Synthetic
auuguacaugcgugcuu

SEQ ID NO: 697372 - RNA, 17 nt, Artificial Sequence
  Synthetic
aaccugaccguuugcuu

SEQ ID NO: 697373 - RNA, 17 nt, Artificial Sequence
  Synthetic
uagcuucuaacuaucuu

SEQ ID NO: 697374 - RNA, 17 nt, Artificial Sequence
  Synthetic
aguguaagccagcucuu

SEQ ID NO: 697375 - RNA, 17 nt, Artificial Sequence
  Synthetic
agcacaaugccgcucuu

SEQ ID NO: 697376 - RNA, 17 nt, Artificial Sequence
  Synthetic
cccuagggguaagucuu

SEQ ID NO: 697377 - RNA, 17 nt, Artificial Sequence
  Synthetic
ucguagcaccaggucuu

SEQ ID NO: 697378 - RNA, 17 nt, Artificial Sequence
  Synthetic
acccagcgugaauucuu

SEQ ID NO: 697379 - RNA, 17 nt, Artificial Sequence
  Synthetic
auuaugugucgaaaguu

SEQ ID NO: 697380 - RNA, 17 nt, Artificial Sequence
  Synthetic
ugagaggguugcaaguu

SEQ ID NO: 697381 - RNA, 17 nt, Artificial Sequence
  Synthetic
augcgugcuaaacaguu

SEQ ID NO: 697382 - RNA, 17 nt, Artificial Sequence
  Synthetic
caucuacuaagacaguu

SEQ ID NO: 697383 - RNA, 17 nt, Artificial Sequence
  Synthetic
uacugucccucgcaguu

SEQ ID NO: 697384 - RNA, 17 nt, Artificial Sequence
  Synthetic
uaaccuacucgucaguu

SEQ ID NO: 697385 - RNA, 17 nt, Artificial Sequence
  Synthetic
caguucgauggucaguu

SEQ ID NO: 697386 - RNA, 17 nt, Artificial Sequence
  Synthetic
aggucgaacauucaguu

SEQ ID NO: 697387 - RNA, 17 nt, Artificial Sequence
  Synthetic
cgaacggguaaagaguu

SEQ ID NO: 697388 - RNA, 17 nt, Artificial Sequence
  Synthetic
cacguauuaccagaguu

SEQ ID NO: 697389 - RNA, 17 nt, Artificial Sequence
  Synthetic
uucgaggccaacgaguu

SEQ ID NO: 697390 - RNA, 17 nt, Artificial Sequence
  Synthetic
uacaaugcuagcgaguu

SEQ ID NO: 697391 - RNA, 17 nt, Artificial Sequence
  Synthetic
uaucaugcugucgaguu

SEQ ID NO: 697392 - RNA, 17 nt, Artificial Sequence
  Synthetic
cuguugcuaggugaguu

SEQ ID NO: 697393 - RNA, 17 nt, Artificial Sequence
  Synthetic
cuccaagguuacuaguu

SEQ ID NO: 697394 - RNA, 17 nt, Artificial Sequence
  Synthetic
uuuacacuaaccuaguu

SEQ ID NO: 697395 - RNA, 17 nt, Artificial Sequence
  Synthetic
acagauacgaaguaguu

SEQ ID NO: 697396 - RNA, 17 nt, Artificial Sequence
  Synthetic
cccggaagcugguaguu

SEQ ID NO: 697397 - RNA, 17 nt, Artificial Sequence
  Synthetic
cggucagcaccuuaguu

SEQ ID NO: 697398 - RNA, 17 nt, Artificial Sequence
  Synthetic
auauuugaggccacguu

SEQ ID NO: 697399 - RNA, 17 nt, Artificial Sequence
  Synthetic
cccggugcugccacguu

SEQ ID NO: 697400 - RNA, 17 nt, Artificial Sequence
  Synthetic
uugugacagcggccguu

SEQ ID NO: 697401 - RNA, 17 nt, Artificial Sequence
  Synthetic
acugcacgucuaagguu

SEQ ID NO: 697402 - RNA, 17 nt, Artificial Sequence
  Synthetic
ucuaguaauugacgguu

SEQ ID NO: 697403 - RNA, 17 nt, Artificial Sequence
  Synthetic
ugaggcggccaaggguu

SEQ ID NO: 697404 - RNA, 17 nt, Artificial Sequence
  Synthetic
agauugucuacaggguu

SEQ ID NO: 697405 - RNA, 17 nt, Artificial Sequence
  Synthetic
auaccgcaaauaggguu

SEQ ID NO: 697406 - RNA, 17 nt, Artificial Sequence
  Synthetic
cccuaagacuagggguu

SEQ ID NO: 697407 - RNA, 17 nt, Artificial Sequence
  Synthetic
acuucuucggguggguu

SEQ ID NO: 697408 - RNA, 17 nt, Artificial Sequence
  Synthetic
uuauccaccuuaugguu

SEQ ID NO: 697409 - RNA, 17 nt, Artificial Sequence
  Synthetic
cuacuaccaaauugguu

SEQ ID NO: 697410 - RNA, 17 nt, Artificial Sequence
  Synthetic
aaguugcucguaauguu

SEQ ID NO: 697411 - RNA, 17 nt, Artificial Sequence
  Synthetic
caguagauugccauguu

SEQ ID NO: 697412 - RNA, 17 nt, Artificial Sequence
  Synthetic
ucgguuuaucugcuguu

SEQ ID NO: 697413 - RNA, 17 nt, Artificial Sequence
  Synthetic
ccaugugucgugguguu

SEQ ID NO: 697414 - RNA, 17 nt, Artificial Sequence
  Synthetic
uuagggcgaaguguguu

SEQ ID NO: 697415 - RNA, 17 nt, Artificial Sequence
  Synthetic
agaucaauccaauuguu

SEQ ID NO: 697416 - RNA, 17 nt, Artificial Sequence
  Synthetic
aauauggccuccuuguu

SEQ ID NO: 697417 - RNA, 17 nt, Artificial Sequence
  Synthetic
acacucuaaguguuguu

SEQ ID NO: 697418 - RNA, 17 nt, Artificial Sequence
  Synthetic
uccgugcgccaaaauuu

SEQ ID NO: 697419 - RNA, 17 nt, Artificial Sequence
  Synthetic
cuggguuagcccaauuu

SEQ ID NO: 697420 - RNA, 17 nt, Artificial Sequence
  Synthetic
uacaggacgugcaauuu

SEQ ID NO: 697421 - RNA, 17 nt, Artificial Sequence
  Synthetic
ccgaacaugaauaauuu

SEQ ID NO: 697422 - RNA, 17 nt, Artificial Sequence
  Synthetic
aggacagccuaccauuu

SEQ ID NO: 697423 - RNA, 17 nt, Artificial Sequence
  Synthetic
ucaggcaccacccauuu

SEQ ID NO: 697424 - RNA, 17 nt, Artificial Sequence
  Synthetic
aguucccguggccauuu

SEQ ID NO: 697425 - RNA, 17 nt, Artificial Sequence
  Synthetic
uuagucggcucgcauuu

SEQ ID NO: 697426 - RNA, 17 nt, Artificial Sequence
  Synthetic
ccaacggagcugcauuu

SEQ ID NO: 697427 - RNA, 17 nt, Artificial Sequence
  Synthetic
cuuagaaucgaagauuu

SEQ ID NO: 697428 - RNA, 17 nt, Artificial Sequence
  Synthetic
agucaacgauaagauuu

SEQ ID NO: 697429 - RNA, 17 nt, Artificial Sequence
  Synthetic
ucccgggaacacgauuu

SEQ ID NO: 697430 - RNA, 17 nt, Artificial Sequence
  Synthetic
uucaauacgcuauauuu

SEQ ID NO: 697431 - RNA, 17 nt, Artificial Sequence
  Synthetic
cacucuaucgcaacuuu

SEQ ID NO: 697432 - RNA, 17 nt, Artificial Sequence
  Synthetic
aagcggaaacggacuuu

SEQ ID NO: 697433 - RNA, 17 nt, Artificial Sequence
  Synthetic
agugauaagguaccuuu

SEQ ID NO: 697434 - RNA, 17 nt, Artificial Sequence
  Synthetic
cgccauacaaagccuuu

SEQ ID NO: 697435 - RNA, 17 nt, Artificial Sequence
  Synthetic
ccggagcuauaaaguuu

SEQ ID NO: 697436 - RNA, 17 nt, Artificial Sequence
  Synthetic
uuaccuacucgaaguuu

SEQ ID NO: 697437 - RNA, 17 nt, Artificial Sequence
  Synthetic
ucgaggccaacgaguuu

SEQ ID NO: 697438 - RNA, 17 nt, Artificial Sequence
  Synthetic
acaaugcuagcgaguuu

SEQ ID NO: 697439 - RNA, 17 nt, Artificial Sequence
  Synthetic
acgcuucauacacguuu

SEQ ID NO: 697440 - RNA, 17 nt, Artificial Sequence
  Synthetic
uaaguguuguaccguuu

SEQ ID NO: 697441 - RNA, 17 nt, Artificial Sequence
  Synthetic
agaguuccaacccguuu

SEQ ID NO: 697442 - RNA, 17 nt, Artificial Sequence
  Synthetic
uaagagugggcgcguuu

SEQ ID NO: 697443 - RNA, 17 nt, Artificial Sequence
  Synthetic
ucuaacaguuggcguuu

SEQ ID NO: 697444 - RNA, 17 nt, Artificial Sequence
  Synthetic
aguuacguuccagguuu

SEQ ID NO: 697445 - RNA, 17 nt, Artificial Sequence
  Synthetic
uuaaugcacguagguuu

SEQ ID NO: 697446 - RNA, 17 nt, Artificial Sequence
  Synthetic
uuucggcgcccugguuu

SEQ ID NO: 697447 - RNA, 17 nt, Artificial Sequence
  Synthetic
cuaacgaauuuugguuu

SEQ ID NO: 697448 - RNA, 17 nt, Artificial Sequence
  Synthetic
uaggacguguccuguuu

SEQ ID NO: 697449 - RNA, 17 nt, Artificial Sequence
  Synthetic
cgguuuaucugcuguuu

SEQ ID NO: 697450 - RNA, 17 nt, Artificial Sequence
  Synthetic
acaggacgugcaauuuu

SEQ ID NO: 697451 - RNA, 17 nt, Artificial Sequence
  Synthetic
cccgggaacacgauuuu

SEQ ID NO: 697452 - RNA, 17 nt, Artificial Sequence
  Synthetic
ccgcauuguucuauuuu

SEQ ID NO: 697453 - RNA, 17 nt, Artificial Sequence
  Synthetic
ccggguagcuaccuuuu

SEQ ID NO: 697454 - RNA, 17 nt, Artificial Sequence
  Synthetic
uucaaagcccgccuuuu

SEQ ID NO: 697455 - RNA, 17 nt, Artificial Sequence
  Synthetic
acaccguuaggucuuuu

SEQ ID NO: 697456 - RNA, 17 nt, Artificial Sequence
  Synthetic
cuaacaguuggcguuuu

SEQ ID NO: 697457 - RNA, 17 nt, Artificial Sequence
  Synthetic
cuggacggaacuuuuuu

SEQ ID NO: 697458 - RNA, 20 nt, Artificial Sequence
  Synthetic
uugaaccaagccacaaaaaa

SEQ ID NO: 697459 - RNA, 20 nt, Artificial Sequence
  Synthetic
auagcuagucguuacaaaaa

SEQ ID NO: 697460 - RNA, 20 nt, Artificial Sequence
  Synthetic
uagggugccccaaauaaaaa

SEQ ID NO: 697461 - RNA, 20 nt, Artificial Sequence
  Synthetic
cgguaugugaagccuaaaaa

SEQ ID NO: 697462 - RNA, 20 nt, Artificial Sequence
  Synthetic
ccacuguauggguaacaaaa

SEQ ID NO: 697463 - RNA, 20 nt, Artificial Sequence
  Synthetic
accggagcaaaagcucaaaa

SEQ ID NO: 697464 - RNA, 20 nt, Artificial Sequence
  Synthetic
aaguacccuaccgcucaaaa

SEQ ID NO: 697465 - RNA, 20 nt, Artificial Sequence
  Synthetic
cuaagcagguggccagaaaa

SEQ ID NO: 697466 - RNA, 20 nt, Artificial Sequence
  Synthetic
ucccuguguugaauagaaaa

SEQ ID NO: 697467 - RNA, 20 nt, Artificial Sequence
  Synthetic
aaguuauacuggcccgaaaa

SEQ ID NO: 697468 - RNA, 20 nt, Artificial Sequence
  Synthetic
agagaggcauguggcgaaaa

SEQ ID NO: 697469 - RNA, 20 nt, Artificial Sequence
  Synthetic
cuuagcuuacgcaaggaaaa

SEQ ID NO: 697470 - RNA, 20 nt, Artificial Sequence
  Synthetic
uucaagcgccagguggaaaa

SEQ ID NO: 697471 - RNA, 20 nt, Artificial Sequence
  Synthetic
aaaccgccccuuaaauaaaa

SEQ ID NO: 697472 - RNA, 20 nt, Artificial Sequence
  Synthetic
acugcccagacaguauaaaa

SEQ ID NO: 697473 - RNA, 20 nt, Artificial Sequence
  Synthetic
ccgguaugugaagccuaaaa

SEQ ID NO: 697474 - RNA, 20 nt, Artificial Sequence
  Synthetic
cauuagcaagaacucuaaaa

SEQ ID NO: 697475 - RNA, 20 nt, Artificial Sequence
  Synthetic
uaguuucugacccucuaaaa

SEQ ID NO: 697476 - RNA, 20 nt, Artificial Sequence
  Synthetic
aauggcguucaaaaguaaaa

SEQ ID NO: 697477 - RNA, 20 nt, Artificial Sequence
  Synthetic
ucggagaugucaugguaaaa

SEQ ID NO: 697478 - RNA, 20 nt, Artificial Sequence
  Synthetic
cuuguagauaacuuguaaaa

SEQ ID NO: 697479 - RNA, 20 nt, Artificial Sequence
  Synthetic
ccucaggaugcaagaacaaa

SEQ ID NO: 697480 - RNA, 20 nt, Artificial Sequence
  Synthetic
cauucucuccaaguaacaaa

SEQ ID NO: 697481 - RNA, 20 nt, Artificial Sequence
  Synthetic
uugcagggauugcacacaaa

SEQ ID NO: 697482 - RNA, 20 nt, Artificial Sequence
  Synthetic
ccuaggauuccacgcacaaa

SEQ ID NO: 697483 - RNA, 20 nt, Artificial Sequence
  Synthetic
aucaagggcagcucaccaaa

SEQ ID NO: 697484 - RNA, 20 nt, Artificial Sequence
  Synthetic
uaugugcuagguuucccaaa

SEQ ID NO: 697485 - RNA, 20 nt, Artificial Sequence
  Synthetic
aucacccucuacccgccaaa

SEQ ID NO: 697486 - RNA, 20 nt, Artificial Sequence
  Synthetic
accuaacauuuugggccaaa

SEQ ID NO: 697487 - RNA, 20 nt, Artificial Sequence
  Synthetic
aagcaaguuccauugccaaa

SEQ ID NO: 697488 - RNA, 20 nt, Artificial Sequence
  Synthetic
ucagauacugguuuagcaaa

SEQ ID NO: 697489 - RNA, 20 nt, Artificial Sequence
  Synthetic
acucuccucuggagcgcaaa

SEQ ID NO: 697490 - RNA, 20 nt, Artificial Sequence
  Synthetic
caaaccuuuuaucucgcaaa

SEQ ID NO: 697491 - RNA, 20 nt, Artificial Sequence
  Synthetic
agaacuaccaucuucgcaaa

SEQ ID NO: 697492 - RNA, 20 nt, Artificial Sequence
  Synthetic
cagcuaugauacaaggcaaa

SEQ ID NO: 697493 - RNA, 20 nt, Artificial Sequence
  Synthetic
uguuauuccacguaggcaaa

SEQ ID NO: 697494 - RNA, 20 nt, Artificial Sequence
  Synthetic
aguuaaccugcuuaggcaaa

SEQ ID NO: 697495 - RNA, 20 nt, Artificial Sequence
  Synthetic
ugacucacaugcauggcaaa

SEQ ID NO: 697496 - RNA, 20 nt, Artificial Sequence
  Synthetic
cgugaucgcuuaguggcaaa

SEQ ID NO: 697497 - RNA, 20 nt, Artificial Sequence
  Synthetic
aucuucaaaugagcugcaaa

SEQ ID NO: 697498 - RNA, 20 nt, Artificial Sequence
  Synthetic
uuggccacucuuucugcaaa

SEQ ID NO: 697499 - RNA, 20 nt, Artificial Sequence
  Synthetic
acugugagcucuuaaucaaa

SEQ ID NO: 697500 - RNA, 20 nt, Artificial Sequence
  Synthetic
cggaaaccaaagucaucaaa

SEQ ID NO: 697501 - RNA, 20 nt, Artificial Sequence
  Synthetic
uagugcacaagauacucaaa

SEQ ID NO: 697502 - RNA, 20 nt, Artificial Sequence
  Synthetic
ucuagcugguuauacucaaa

SEQ ID NO: 697503 - RNA, 20 nt, Artificial Sequence
  Synthetic
cguaucuguugauccucaaa

SEQ ID NO: 697504 - RNA, 20 nt, Artificial Sequence
  Synthetic
uaucacccuggcaagucaaa

SEQ ID NO: 697505 - RNA, 20 nt, Artificial Sequence
  Synthetic
cguccccuucggccgucaaa

SEQ ID NO: 697506 - RNA, 20 nt, Artificial Sequence
  Synthetic
uccuauccaugcgggucaaa

SEQ ID NO: 697507 - RNA, 20 nt, Artificial Sequence
  Synthetic
cgugucuuccaagauucaaa

SEQ ID NO: 697508 - RNA, 20 nt, Artificial Sequence
  Synthetic
ccuacauauguagcuucaaa

SEQ ID NO: 697509 - RNA, 20 nt, Artificial Sequence
  Synthetic
cagcgcuauauuauuucaaa

SEQ ID NO: 697510 - RNA, 20 nt, Artificial Sequence
  Synthetic
caagauaggggcauaagaaa

SEQ ID NO: 697511 - RNA, 20 nt, Artificial Sequence
  Synthetic
uucgagaucaguagcagaaa

SEQ ID NO: 697512 - RNA, 20 nt, Artificial Sequence
  Synthetic
agucggucagcaggcagaaa

SEQ ID NO: 697513 - RNA, 20 nt, Artificial Sequence
  Synthetic
ucaggccuccaugucagaaa

SEQ ID NO: 697514 - RNA, 20 nt, Artificial Sequence
  Synthetic
uacgcucaguguuagagaaa

SEQ ID NO: 697515 - RNA, 20 nt, Artificial Sequence
  Synthetic
ucugcugauacaauacgaaa

SEQ ID NO: 697516 - RNA, 20 nt, Artificial Sequence
  Synthetic
uaaguuauacuggcccgaaa

SEQ ID NO: 697517 - RNA, 20 nt, Artificial Sequence
  Synthetic
uaaccgcaacuacaaggaaa

SEQ ID NO: 697518 - RNA, 20 nt, Artificial Sequence
  Synthetic
ccuaguucuaagcaaggaaa

SEQ ID NO: 697519 - RNA, 20 nt, Artificial Sequence
  Synthetic
aacuugcccauauaaggaaa

SEQ ID NO: 697520 - RNA, 20 nt, Artificial Sequence
  Synthetic
uggcauguaaacguaggaaa

SEQ ID NO: 697521 - RNA, 20 nt, Artificial Sequence
  Synthetic
agcagccguccagugggaaa

SEQ ID NO: 697522 - RNA, 20 nt, Artificial Sequence
  Synthetic
agcacaacccuaacuggaaa

SEQ ID NO: 697523 - RNA, 20 nt, Artificial Sequence
  Synthetic
uaaaagcgaggucuuggaaa

SEQ ID NO: 697524 - RNA, 20 nt, Artificial Sequence
  Synthetic
cauacaugauccucaugaaa

SEQ ID NO: 697525 - RNA, 20 nt, Artificial Sequence
  Synthetic
acauucguauguuuaugaaa

SEQ ID NO: 697526 - RNA, 20 nt, Artificial Sequence
  Synthetic
augugagguuucaccugaaa

SEQ ID NO: 697527 - RNA, 20 nt, Artificial Sequence
  Synthetic
aaucgaauuugcucuugaaa

SEQ ID NO: 697528 - RNA, 20 nt, Artificial Sequence
  Synthetic
augccaaucuaugguugaaa

SEQ ID NO: 697529 - RNA, 20 nt, Artificial Sequence
  Synthetic
aaccuugcaaggguuugaaa

SEQ ID NO: 697530 - RNA, 20 nt, Artificial Sequence
  Synthetic
uucaaccguuugugaauaaa

SEQ ID NO: 697531 - RNA, 20 nt, Artificial Sequence
  Synthetic
cuaggaccauauauaauaaa

SEQ ID NO: 697532 - RNA, 20 nt, Artificial Sequence
  Synthetic
cccuugguuuagcuaauaaa

SEQ ID NO: 697533 - RNA, 20 nt, Artificial Sequence
  Synthetic
uggucauaacaaagcauaaa

SEQ ID NO: 697534 - RNA, 20 nt, Artificial Sequence
  Synthetic
uaggcaacauguugcauaaa

SEQ ID NO: 697535 - RNA, 20 nt, Artificial Sequence
  Synthetic
uugaccucauaacucauaaa

SEQ ID NO: 697536 - RNA, 20 nt, Artificial Sequence
  Synthetic
ccccacucaacguucauaaa

SEQ ID NO: 697537 - RNA, 20 nt, Artificial Sequence
  Synthetic
uagaccagguguuauauaaa

SEQ ID NO: 697538 - RNA, 20 nt, Artificial Sequence
  Synthetic
caagaccgaaaagcacuaaa

SEQ ID NO: 697539 - RNA, 20 nt, Artificial Sequence
  Synthetic
agccuaagcagauaccuaaa

SEQ ID NO: 697540 - RNA, 20 nt, Artificial Sequence
  Synthetic
cucagauagguugcccuaaa

SEQ ID NO: 697541 - RNA, 20 nt, Artificial Sequence
  Synthetic
uucauuaaagcgaagcuaaa

SEQ ID NO: 697542 - RNA, 20 nt, Artificial Sequence
  Synthetic
uagaucaccgcauagcuaaa

SEQ ID NO: 697543 - RNA, 20 nt, Artificial Sequence
  Synthetic
cgugacgagccaaggcuaaa

SEQ ID NO: 697544 - RNA, 20 nt, Artificial Sequence
  Synthetic
acacauaaucgagugcuaaa

SEQ ID NO: 697545 - RNA, 20 nt, Artificial Sequence
  Synthetic
caaguacggacugugcuaaa

SEQ ID NO: 697546 - RNA, 20 nt, Artificial Sequence
  Synthetic
augauccauauggaucuaaa

SEQ ID NO: 697547 - RNA, 20 nt, Artificial Sequence
  Synthetic
cccacuggggaaauucuaaa

SEQ ID NO: 697548 - RNA, 20 nt, Artificial Sequence
  Synthetic
cacguuaauucucuucuaaa

SEQ ID NO: 697549 - RNA, 20 nt, Artificial Sequence
  Synthetic
ugguugcucaggaaaguaaa

SEQ ID NO: 697550 - RNA, 20 nt, Artificial Sequence
  Synthetic
aaugacacguguacaguaaa

SEQ ID NO: 697551 - RNA, 20 nt, Artificial Sequence
  Synthetic
uaugccugcugcguaguaaa

SEQ ID NO: 697552 - RNA, 20 nt, Artificial Sequence
  Synthetic
cauuucaugugauacguaaa

SEQ ID NO: 697553 - RNA, 20 nt, Artificial Sequence
  Synthetic
cuuuggaagaagcccguaaa

SEQ ID NO: 697554 - RNA, 20 nt, Artificial Sequence
  Synthetic
aguggguggguauagguaaa

SEQ ID NO: 697555 - RNA, 20 nt, Artificial Sequence
  Synthetic
caagaccuucacccuguaaa

SEQ ID NO: 697556 - RNA, 20 nt, Artificial Sequence
  Synthetic
cuuugaggacuuccuguaaa

SEQ ID NO: 697557 - RNA, 20 nt, Artificial Sequence
  Synthetic
uuccucagugcguaauuaaa

SEQ ID NO: 697558 - RNA, 20 nt, Artificial Sequence
  Synthetic
auucugcgcagcccauuaaa

SEQ ID NO: 697559 - RNA, 20 nt, Artificial Sequence
  Synthetic
ugccuccaggagccauuaaa

SEQ ID NO: 697560 - RNA, 20 nt, Artificial Sequence
  Synthetic
uccugcuuaauucacuuaaa

SEQ ID NO: 697561 - RNA, 20 nt, Artificial Sequence
  Synthetic
uaucuauaggucuccuuaaa

SEQ ID NO: 697562 - RNA, 20 nt, Artificial Sequence
  Synthetic
aggguucggggaaauuuaaa

SEQ ID NO: 697563 - RNA, 20 nt, Artificial Sequence
  Synthetic
agaacgcggugcagaaacaa

SEQ ID NO: 697564 - RNA, 20 nt, Artificial Sequence
  Synthetic
cccagccguacucuaaacaa

SEQ ID NO: 697565 - RNA, 20 nt, Artificial Sequence
  Synthetic
agaagcggggauguaaacaa

SEQ ID NO: 697566 - RNA, 20 nt, Artificial Sequence
  Synthetic
uguuccuccuggcacaacaa

SEQ ID NO: 697567 - RNA, 20 nt, Artificial Sequence
  Synthetic
auuuguccaacacccaacaa

SEQ ID NO: 697568 - RNA, 20 nt, Artificial Sequence
  Synthetic
ugguacacugggagcaacaa

SEQ ID NO: 697569 - RNA, 20 nt, Artificial Sequence
  Synthetic
cucuugugggccuggaacaa

SEQ ID NO: 697570 - RNA, 20 nt, Artificial Sequence
  Synthetic
uagggacuagguuguaacaa

SEQ ID NO: 697571 - RNA, 20 nt, Artificial Sequence
  Synthetic
uugugaguugugauuaacaa

SEQ ID NO: 697572 - RNA, 20 nt, Artificial Sequence
  Synthetic
cugagagcuagguuuaacaa

SEQ ID NO: 697573 - RNA, 20 nt, Artificial Sequence
  Synthetic
cugcgaggaauaaaacacaa

SEQ ID NO: 697574 - RNA, 20 nt, Artificial Sequence
  Synthetic
cuugcagggauugcacacaa

SEQ ID NO: 697575 - RNA, 20 nt, Artificial Sequence
  Synthetic
uguaagccacucucccacaa

SEQ ID NO: 697576 - RNA, 20 nt, Artificial Sequence
  Synthetic
aaacacguggucucucacaa

SEQ ID NO: 697577 - RNA, 20 nt, Artificial Sequence
  Synthetic
uagcuauuucugagucacaa

SEQ ID NO: 697578 - RNA, 20 nt, Artificial Sequence
  Synthetic
aaacacucgguauaagacaa

SEQ ID NO: 697579 - RNA, 20 nt, Artificial Sequence
  Synthetic
ugacacguaccccccgacaa

SEQ ID NO: 697580 - RNA, 20 nt, Artificial Sequence
  Synthetic
uccacccccgggacauacaa

SEQ ID NO: 697581 - RNA, 20 nt, Artificial Sequence
  Synthetic
acuuacacguagccauacaa

SEQ ID NO: 697582 - RNA, 20 nt, Artificial Sequence
  Synthetic
uaaccgucaucaucauacaa

SEQ ID NO: 697583 - RNA, 20 nt, Artificial Sequence
  Synthetic
cuaauggauuagggauacaa

SEQ ID NO: 697584 - RNA, 20 nt, Artificial Sequence
  Synthetic
uaucgccauagcaacuacaa

SEQ ID NO: 697585 - RNA, 20 nt, Artificial Sequence
  Synthetic
uuggauccacgugacuacaa

SEQ ID NO: 697586 - RNA, 20 nt, Artificial Sequence
  Synthetic
uuugagaucgauuucuacaa

SEQ ID NO: 697587 - RNA, 20 nt, Artificial Sequence
  Synthetic
agcauuaaauauucguacaa

SEQ ID NO: 697588 - RNA, 20 nt, Artificial Sequence
  Synthetic
agagaaaaacguccuuacaa

SEQ ID NO: 697589 - RNA, 20 nt, Artificial Sequence
  Synthetic
ccuuggggauugucuuacaa

SEQ ID NO: 697590 - RNA, 20 nt, Artificial Sequence
  Synthetic
uacacaucaucguaaaccaa

SEQ ID NO: 697591 - RNA, 20 nt, Artificial Sequence
  Synthetic
cuggaauagcacuuaaccaa

SEQ ID NO: 697592 - RNA, 20 nt, Artificial Sequence
  Synthetic
aucugagauuaagagaccaa

SEQ ID NO: 697593 - RNA, 20 nt, Artificial Sequence
  Synthetic
caggugggguguaggaccaa

SEQ ID NO: 697594 - RNA, 20 nt, Artificial Sequence
  Synthetic
ucagcaauaagccauaccaa

SEQ ID NO: 697595 - RNA, 20 nt, Artificial Sequence
  Synthetic
acaggaucuauuuguaccaa

SEQ ID NO: 697596 - RNA, 20 nt, Artificial Sequence
  Synthetic
aucucacuccacacacccaa

SEQ ID NO: 697597 - RNA, 20 nt, Artificial Sequence
  Synthetic
uugauacaucacauacccaa

SEQ ID NO: 697598 - RNA, 20 nt, Artificial Sequence
  Synthetic
uugucuauaguuugccccaa

SEQ ID NO: 697599 - RNA, 20 nt, Artificial Sequence
  Synthetic
aguguagauaaaauccccaa

SEQ ID NO: 697600 - RNA, 20 nt, Artificial Sequence
  Synthetic
uugauuuggucgaggcccaa

SEQ ID NO: 697601 - RNA, 20 nt, Artificial Sequence
  Synthetic
cugaagaccgugcugcccaa

SEQ ID NO: 697602 - RNA, 20 nt, Artificial Sequence
  Synthetic
aggggccuggauuuucccaa

SEQ ID NO: 697603 - RNA, 20 nt, Artificial Sequence
  Synthetic
ucuauaguguuaaaagccaa

SEQ ID NO: 697604 - RNA, 20 nt, Artificial Sequence
  Synthetic
ccuauacuauuugcagccaa

SEQ ID NO: 697605 - RNA, 20 nt, Artificial Sequence
  Synthetic
ucugagggaacuucugccaa

SEQ ID NO: 697606 - RNA, 20 nt, Artificial Sequence
  Synthetic
uuggcaguuuuaggugccaa

SEQ ID NO: 697607 - RNA, 20 nt, Artificial Sequence
  Synthetic
caauggcuaggacuugccaa

SEQ ID NO: 697608 - RNA, 20 nt, Artificial Sequence
  Synthetic
uaggcaauugaucacuccaa

SEQ ID NO: 697609 - RNA, 20 nt, Artificial Sequence
  Synthetic
ccccuuauauguacguccaa

SEQ ID NO: 697610 - RNA, 20 nt, Artificial Sequence
  Synthetic
cgugaaagcauagauuccaa

SEQ ID NO: 697611 - RNA, 20 nt, Artificial Sequence
  Synthetic
ccgugagugaugacuuccaa

SEQ ID NO: 697612 - RNA, 20 nt, Artificial Sequence
  Synthetic
aggcacaacgucuaaagcaa

SEQ ID NO: 697613 - RNA, 20 nt, Artificial Sequence
  Synthetic
cggaugaagaugguaagcaa

SEQ ID NO: 697614 - RNA, 20 nt, Artificial Sequence
  Synthetic
auauguuagcagaacagcaa

SEQ ID NO: 697615 - RNA, 20 nt, Artificial Sequence
  Synthetic
ucaguaucgacacacagcaa

SEQ ID NO: 697616 - RNA, 20 nt, Artificial Sequence
  Synthetic
ccuucguuuaucugcagcaa

SEQ ID NO: 697617 - RNA, 20 nt, Artificial Sequence
  Synthetic
cccauaaaaagcaucagcaa

SEQ ID NO: 697618 - RNA, 20 nt, Artificial Sequence
  Synthetic
uucacguucuaucagagcaa

SEQ ID NO: 697619 - RNA, 20 nt, Artificial Sequence
  Synthetic
uacacaugacuacugagcaa

SEQ ID NO: 697620 - RNA, 20 nt, Artificial Sequence
  Synthetic
caagcguccaugaauagcaa

SEQ ID NO: 697621 - RNA, 20 nt, Artificial Sequence
  Synthetic
agauuacagaacccuagcaa

SEQ ID NO: 697622 - RNA, 20 nt, Artificial Sequence
  Synthetic
uagauuucagccauuagcaa

SEQ ID NO: 697623 - RNA, 20 nt, Artificial Sequence
  Synthetic
acaccugacucacaacgcaa

SEQ ID NO: 697624 - RNA, 20 nt, Artificial Sequence
  Synthetic
cacuucaugauuuuacgcaa

SEQ ID NO: 697625 - RNA, 20 nt, Artificial Sequence
  Synthetic
caguccagaaguggaggcaa

SEQ ID NO: 697626 - RNA, 20 nt, Artificial Sequence
  Synthetic
aaguuaaccugcuuaggcaa

SEQ ID NO: 697627 - RNA, 20 nt, Artificial Sequence
  Synthetic
aaaagguagcuacccggcaa

SEQ ID NO: 697628 - RNA, 20 nt, Artificial Sequence
  Synthetic
cgugucuaagaacagggcaa

SEQ ID NO: 697629 - RNA, 20 nt, Artificial Sequence
  Synthetic
agggguaagucuuugggcaa

SEQ ID NO: 697630 - RNA, 20 nt, Artificial Sequence
  Synthetic
uguagccaaacuaauggcaa

SEQ ID NO: 697631 - RNA, 20 nt, Artificial Sequence
  Synthetic
auaaagaauugaguuggcaa

SEQ ID NO: 697632 - RNA, 20 nt, Artificial Sequence
  Synthetic
uccucaccgccuuuuggcaa

SEQ ID NO: 697633 - RNA, 20 nt, Artificial Sequence
  Synthetic
aaacggcguuuacuaugcaa

SEQ ID NO: 697634 - RNA, 20 nt, Artificial Sequence
  Synthetic
uauaaucccaaucccugcaa

SEQ ID NO: 697635 - RNA, 20 nt, Artificial Sequence
  Synthetic
agcuaauuugucuauugcaa

SEQ ID NO: 697636 - RNA, 20 nt, Artificial Sequence
  Synthetic
uuagaguugguaacuugcaa

SEQ ID NO: 697637 - RNA, 20 nt, Artificial Sequence
  Synthetic
cacauuuacuacuguugcaa

SEQ ID NO: 697638 - RNA, 20 nt, Artificial Sequence
  Synthetic
agacuauauaccuaaaucaa

SEQ ID NO: 697639 - RNA, 20 nt, Artificial Sequence
  Synthetic
cguauaaaagguucaaucaa

SEQ ID NO: 697640 - RNA, 20 nt, Artificial Sequence
  Synthetic
uuacacggucacauaaucaa

SEQ ID NO: 697641 - RNA, 20 nt, Artificial Sequence
  Synthetic
cgagacagaaauaacaucaa

SEQ ID NO: 697642 - RNA, 20 nt, Artificial Sequence
  Synthetic
ugaguacauaggaauaucaa

SEQ ID NO: 697643 - RNA, 20 nt, Artificial Sequence
  Synthetic
uagaaucuggcacuuaucaa

SEQ ID NO: 697644 - RNA, 20 nt, Artificial Sequence
  Synthetic
cgccagauggaagaacucaa

SEQ ID NO: 697645 - RNA, 20 nt, Artificial Sequence
  Synthetic
ccuggaacagugccacucaa

SEQ ID NO: 697646 - RNA, 20 nt, Artificial Sequence
  Synthetic
uugcacucacgaaaccucaa

SEQ ID NO: 697647 - RNA, 20 nt, Artificial Sequence
  Synthetic
cacuguauggacaaccucaa

SEQ ID NO: 697648 - RNA, 20 nt, Artificial Sequence
  Synthetic
uaauaaugaccaccccucaa

SEQ ID NO: 697649 - RNA, 20 nt, Artificial Sequence
  Synthetic
cuaggauguguuccccucaa

SEQ ID NO: 697650 - RNA, 20 nt, Artificial Sequence
  Synthetic
ugcaugcaaacuagccucaa

SEQ ID NO: 697651 - RNA, 20 nt, Artificial Sequence
  Synthetic
aaaacuuuaccaggccucaa

SEQ ID NO: 697652 - RNA, 20 nt, Artificial Sequence
  Synthetic
aauuguacuuccuggcucaa

SEQ ID NO: 697653 - RNA, 20 nt, Artificial Sequence
  Synthetic
ccacugacacuauugcucaa

SEQ ID NO: 697654 - RNA, 20 nt, Artificial Sequence
  Synthetic
agcucuuuugagucucucaa

SEQ ID NO: 697655 - RNA, 20 nt, Artificial Sequence
  Synthetic
auccaacacaagucagucaa

SEQ ID NO: 697656 - RNA, 20 nt, Artificial Sequence
  Synthetic
cuaucuguggauccugucaa

SEQ ID NO: 697657 - RNA, 20 nt, Artificial Sequence
  Synthetic
ugaggauuugauauauucaa

SEQ ID NO: 697658 - RNA, 20 nt, Artificial Sequence
  Synthetic
uuugcaaaugcgguauucaa

SEQ ID NO: 697659 - RNA, 20 nt, Artificial Sequence
  Synthetic
auggagacagaguuauucaa

SEQ ID NO: 697660 - RNA, 20 nt, Artificial Sequence
  Synthetic
ucauaauguuaagacuucaa

SEQ ID NO: 697661 - RNA, 20 nt, Artificial Sequence
  Synthetic
uguaaugaagggugcuucaa

SEQ ID NO: 697662 - RNA, 20 nt, Artificial Sequence
  Synthetic
uagguguggcaggucuucaa

SEQ ID NO: 697663 - RNA, 20 nt, Artificial Sequence
  Synthetic
agagauacgcuugaguucaa

SEQ ID NO: 697664 - RNA, 20 nt, Artificial Sequence
  Synthetic
auaugaguauuaggguucaa

SEQ ID NO: 697665 - RNA, 20 nt, Artificial Sequence
  Synthetic
cagcgauuuaggugguucaa

SEQ ID NO: 697666 - RNA, 20 nt, Artificial Sequence
  Synthetic
ccagcgcuauauuauuucaa

SEQ ID NO: 697667 - RNA, 20 nt, Artificial Sequence
  Synthetic
cagaguuguccaacuuucaa

SEQ ID NO: 697668 - RNA, 20 nt, Artificial Sequence
  Synthetic
cacaacgaucuauguuucaa

SEQ ID NO: 697669 - RNA, 20 nt, Artificial Sequence
  Synthetic
ugucuacuguccugaaagaa

SEQ ID NO: 697670 - RNA, 20 nt, Artificial Sequence
  Synthetic
augucucaccauaaccagaa

SEQ ID NO: 697671 - RNA, 20 nt, Artificial Sequence
  Synthetic
caagguacaugguaccagaa

SEQ ID NO: 697672 - RNA, 20 nt, Artificial Sequence
  Synthetic
uuugggacugcuugccagaa

SEQ ID NO: 697673 - RNA, 20 nt, Artificial Sequence
  Synthetic
acuuucauacucgagcagaa

SEQ ID NO: 697674 - RNA, 20 nt, Artificial Sequence
  Synthetic
uugaggaguagcuaucagaa

SEQ ID NO: 697675 - RNA, 20 nt, Artificial Sequence
  Synthetic
uccauggcaacucuagagaa

SEQ ID NO: 697676 - RNA, 20 nt, Artificial Sequence
  Synthetic
agggacucaacuuucgagaa

SEQ ID NO: 697677 - RNA, 20 nt, Artificial Sequence
  Synthetic
agaauauuaccguaggagaa

SEQ ID NO: 697678 - RNA, 20 nt, Artificial Sequence
  Synthetic
aacccuuucgguaacuagaa

SEQ ID NO: 697679 - RNA, 20 nt, Artificial Sequence
  Synthetic
auacuuguacaaagguagaa

SEQ ID NO: 697680 - RNA, 20 nt, Artificial Sequence
  Synthetic
uaaucacuacuagauuagaa

SEQ ID NO: 697681 - RNA, 20 nt, Artificial Sequence
  Synthetic
aacgcaagcagauguuagaa

SEQ ID NO: 697682 - RNA, 20 nt, Artificial Sequence
  Synthetic
cgcaguagaccacuuuagaa

SEQ ID NO: 697683 - RNA, 20 nt, Artificial Sequence
  Synthetic
cguaacuacacauaaacgaa

SEQ ID NO: 697684 - RNA, 20 nt, Artificial Sequence
  Synthetic
aauguggaugucaggacgaa

SEQ ID NO: 697685 - RNA, 20 nt, Artificial Sequence
  Synthetic
uucuagaauauacauacgaa

SEQ ID NO: 697686 - RNA, 20 nt, Artificial Sequence
  Synthetic
uaggagccuaguuauacgaa

SEQ ID NO: 697687 - RNA, 20 nt, Artificial Sequence
  Synthetic
uagccuuucuaguuaccgaa

SEQ ID NO: 697688 - RNA, 20 nt, Artificial Sequence
  Synthetic
cuacccuuuugacggccgaa

SEQ ID NO: 697689 - RNA, 20 nt, Artificial Sequence
  Synthetic
ucacacagacaacauccgaa

SEQ ID NO: 697690 - RNA, 20 nt, Artificial Sequence
  Synthetic
cuacagguaguaucagcgaa

SEQ ID NO: 697691 - RNA, 20 nt, Artificial Sequence
  Synthetic
uuugucuuaacaagaucgaa

SEQ ID NO: 697692 - RNA, 20 nt, Artificial Sequence
  Synthetic
ucccacuuuuccuacucgaa

SEQ ID NO: 697693 - RNA, 20 nt, Artificial Sequence
  Synthetic
ucuucagaccagaagucgaa

SEQ ID NO: 697694 - RNA, 20 nt, Artificial Sequence
  Synthetic
uguucacgcagacagucgaa

SEQ ID NO: 697695 - RNA, 20 nt, Artificial Sequence
  Synthetic
cucaggacgugauauucgaa

SEQ ID NO: 697696 - RNA, 20 nt, Artificial Sequence
  Synthetic
cauccugacuugccaaggaa

SEQ ID NO: 697697 - RNA, 20 nt, Artificial Sequence
  Synthetic
ucguugucacaaauaaggaa

SEQ ID NO: 697698 - RNA, 20 nt, Artificial Sequence
  Synthetic
ucuuuaauaugccacaggaa

SEQ ID NO: 697699 - RNA, 20 nt, Artificial Sequence
  Synthetic
uuaggcaucuugcacaggaa

SEQ ID NO: 697700 - RNA, 20 nt, Artificial Sequence
  Synthetic
uugacuucggcugccaggaa

SEQ ID NO: 697701 - RNA, 20 nt, Artificial Sequence
  Synthetic
cucuagcggaauagcaggaa

SEQ ID NO: 697702 - RNA, 20 nt, Artificial Sequence
  Synthetic
acuuugcuaacacucaggaa

SEQ ID NO: 697703 - RNA, 20 nt, Artificial Sequence
  Synthetic
cguaauauugcgaagaggaa

SEQ ID NO: 697704 - RNA, 20 nt, Artificial Sequence
  Synthetic
acguagaacuggucgaggaa

SEQ ID NO: 697705 - RNA, 20 nt, Artificial Sequence
  Synthetic
aacaccugugagcggaggaa

SEQ ID NO: 697706 - RNA, 20 nt, Artificial Sequence
  Synthetic
accuuugaauugcauaggaa

SEQ ID NO: 697707 - RNA, 20 nt, Artificial Sequence
  Synthetic
ugccacucacaacuuaggaa

SEQ ID NO: 697708 - RNA, 20 nt, Artificial Sequence
  Synthetic
caaugcuggcuaaaacggaa

SEQ ID NO: 697709 - RNA, 20 nt, Artificial Sequence
  Synthetic
cccuuaaggauuuuacggaa

SEQ ID NO: 697710 - RNA, 20 nt, Artificial Sequence
  Synthetic
ccagucugugccccccggaa

SEQ ID NO: 697711 - RNA, 20 nt, Artificial Sequence
  Synthetic
accgcaggcuguucucggaa

SEQ ID NO: 697712 - RNA, 20 nt, Artificial Sequence
  Synthetic
uaaaacacgagauuagggaa

SEQ ID NO: 697713 - RNA, 20 nt, Artificial Sequence
  Synthetic
acacuagguucgucugggaa

SEQ ID NO: 697714 - RNA, 20 nt, Artificial Sequence
  Synthetic
uggacagcccauaaauggaa

SEQ ID NO: 697715 - RNA, 20 nt, Artificial Sequence
  Synthetic
cgcgaacugagaagcuggaa

SEQ ID NO: 697716 - RNA, 20 nt, Artificial Sequence
  Synthetic
auauggaacaccagcuggaa

SEQ ID NO: 697717 - RNA, 20 nt, Artificial Sequence
  Synthetic
cuuagugauaggguguggaa

SEQ ID NO: 697718 - RNA, 20 nt, Artificial Sequence
  Synthetic
augugggacagacauuggaa

SEQ ID NO: 697719 - RNA, 20 nt, Artificial Sequence
  Synthetic
ugucuaaccugagauuggaa

SEQ ID NO: 697720 - RNA, 20 nt, Artificial Sequence
  Synthetic
auugcacaaccugauuggaa

SEQ ID NO: 697721 - RNA, 20 nt, Artificial Sequence
  Synthetic
ucagcucgaagagguuggaa

SEQ ID NO: 697722 - RNA, 20 nt, Artificial Sequence
  Synthetic
ccuuaguauagcgaaaugaa

SEQ ID NO: 697723 - RNA, 20 nt, Artificial Sequence
  Synthetic
cccagacggucaacaaugaa

SEQ ID NO: 697724 - RNA, 20 nt, Artificial Sequence
  Synthetic
aacgcacugauuguaaugaa

SEQ ID NO: 697725 - RNA, 20 nt, Artificial Sequence
  Synthetic
caaaugugucuucagaugaa

SEQ ID NO: 697726 - RNA, 20 nt, Artificial Sequence
  Synthetic
ccacguauggaggggaugaa

SEQ ID NO: 697727 - RNA, 20 nt, Artificial Sequence
  Synthetic
cccagugucagcgcuaugaa

SEQ ID NO: 697728 - RNA, 20 nt, Artificial Sequence
  Synthetic
uuuugcuuguucgguaugaa

SEQ ID NO: 697729 - RNA, 20 nt, Artificial Sequence
  Synthetic
auauaggccaggccacugaa

SEQ ID NO: 697730 - RNA, 20 nt, Artificial Sequence
  Synthetic
uagugcucuauacgacugaa

SEQ ID NO: 697731 - RNA, 20 nt, Artificial Sequence
  Synthetic
ugucuuaaagggugacugaa

SEQ ID NO: 697732 - RNA, 20 nt, Artificial Sequence
  Synthetic
acaagcaagaaucuacugaa

SEQ ID NO: 697733 - RNA, 20 nt, Artificial Sequence
  Synthetic
augaacguccaaucccugaa

SEQ ID NO: 697734 - RNA, 20 nt, Artificial Sequence
  Synthetic
cuuaagucuaugggccugaa

SEQ ID NO: 697735 - RNA, 20 nt, Artificial Sequence
  Synthetic
uuggaguuauuagaucugaa

SEQ ID NO: 697736 - RNA, 20 nt, Artificial Sequence
  Synthetic
cggaagaacgauugucugaa

SEQ ID NO: 697737 - RNA, 20 nt, Artificial Sequence
  Synthetic
cguugcaacuguugucugaa

SEQ ID NO: 697738 - RNA, 20 nt, Artificial Sequence
  Synthetic
cguuuccuagcacuucugaa

SEQ ID NO: 697739 - RNA, 20 nt, Artificial Sequence
  Synthetic
cgagggaacauuaaagugaa

SEQ ID NO: 697740 - RNA, 20 nt, Artificial Sequence
  Synthetic
agucccccuuagucauugaa

SEQ ID NO: 697741 - RNA, 20 nt, Artificial Sequence
  Synthetic
ccuaaauauagcguauugaa

SEQ ID NO: 697742 - RNA, 20 nt, Artificial Sequence
  Synthetic
ugaaacuuauguuacuugaa

SEQ ID NO: 697743 - RNA, 20 nt, Artificial Sequence
  Synthetic
uuguaacucagaaccuugaa

SEQ ID NO: 697744 - RNA, 20 nt, Artificial Sequence
  Synthetic
uuuuccaccuggcgcuugaa

SEQ ID NO: 697745 - RNA, 20 nt, Artificial Sequence
  Synthetic
uauggacaggcuaaguugaa

SEQ ID NO: 697746 - RNA, 20 nt, Artificial Sequence
  Synthetic
uaacagguacugccguugaa

SEQ ID NO: 697747 - RNA, 20 nt, Artificial Sequence
  Synthetic
aucuuuguauacucguugaa

SEQ ID NO: 697748 - RNA, 20 nt, Artificial Sequence
  Synthetic
ugauaaaugcgaguguugaa

SEQ ID NO: 697749 - RNA, 20 nt, Artificial Sequence
  Synthetic
cucuaagucgggccaaauaa

SEQ ID NO: 697750 - RNA, 20 nt, Artificial Sequence
  Synthetic
agugauuaauucgguaauaa

SEQ ID NO: 697751 - RNA, 20 nt, Artificial Sequence
  Synthetic
cagaagacguauuguaauaa

SEQ ID NO: 697752 - RNA, 20 nt, Artificial Sequence
  Synthetic
ucucacaccaaguuuaauaa

SEQ ID NO: 697753 - RNA, 20 nt, Artificial Sequence
  Synthetic
ugcucaccuuuucaacauaa

SEQ ID NO: 697754 - RNA, 20 nt, Artificial Sequence
  Synthetic
uuccuuauucccucacauaa

SEQ ID NO: 697755 - RNA, 20 nt, Artificial Sequence
  Synthetic
caaaagcaacuggaucauaa

SEQ ID NO: 697756 - RNA, 20 nt, Artificial Sequence
  Synthetic
cauuacuuuccaacucauaa

SEQ ID NO: 697757 - RNA, 20 nt, Artificial Sequence
  Synthetic
uucucugaucuuacucauaa

SEQ ID NO: 697758 - RNA, 20 nt, Artificial Sequence
  Synthetic
ugacccagaaaaagucauaa

SEQ ID NO: 697759 - RNA, 20 nt, Artificial Sequence
  Synthetic
ccuagaaaugcguaagauaa

SEQ ID NO: 697760 - RNA, 20 nt, Artificial Sequence
  Synthetic
caaauuguccuaauagauaa

SEQ ID NO: 697761 - RNA, 20 nt, Artificial Sequence
  Synthetic
ccagucagacaguuagauaa

SEQ ID NO: 697762 - RNA, 20 nt, Artificial Sequence
  Synthetic
cggcaguaccuguuagauaa

SEQ ID NO: 697763 - RNA, 20 nt, Artificial Sequence
  Synthetic
ucucccagauucuaggauaa

SEQ ID NO: 697764 - RNA, 20 nt, Artificial Sequence
  Synthetic
cagcgagaauaaggggauaa

SEQ ID NO: 697765 - RNA, 20 nt, Artificial Sequence
  Synthetic
ccaguaccuaagcaugauaa

SEQ ID NO: 697766 - RNA, 20 nt, Artificial Sequence
  Synthetic
aauaaguucacagcugauaa

SEQ ID NO: 697767 - RNA, 20 nt, Artificial Sequence
  Synthetic
ugaauugaggcucgugauaa

SEQ ID NO: 697768 - RNA, 20 nt, Artificial Sequence
  Synthetic
uucaagcccuuaauugauaa

SEQ ID NO: 697769 - RNA, 20 nt, Artificial Sequence
  Synthetic
accuuuggacguacauauaa

SEQ ID NO: 697770 - RNA, 20 nt, Artificial Sequence
  Synthetic
cuaaguuccgugucauauaa

SEQ ID NO: 697771 - RNA, 20 nt, Artificial Sequence
  Synthetic
cagcgccauguaaacuauaa

SEQ ID NO: 697772 - RNA, 20 nt, Artificial Sequence
  Synthetic
agcaacugagaagacuauaa

SEQ ID NO: 697773 - RNA, 20 nt, Artificial Sequence
  Synthetic
cggguuuguuaccuguauaa

SEQ ID NO: 697774 - RNA, 20 nt, Artificial Sequence
  Synthetic
caugaguuauaaguguauaa

SEQ ID NO: 697775 - RNA, 20 nt, Artificial Sequence
  Synthetic
uaucaguaaggaggaacuaa

SEQ ID NO: 697776 - RNA, 20 nt, Artificial Sequence
  Synthetic
accauuuauuucaggacuaa

SEQ ID NO: 697777 - RNA, 20 nt, Artificial Sequence
  Synthetic
cacauuugguauaauacuaa

SEQ ID NO: 697778 - RNA, 20 nt, Artificial Sequence
  Synthetic
agcuugcacuaggauacuaa

SEQ ID NO: 697779 - RNA, 20 nt, Artificial Sequence
  Synthetic
uagcacccucuggauacuaa

SEQ ID NO: 697780 - RNA, 20 nt, Artificial Sequence
  Synthetic
cgagaaauauuuacuacuaa

SEQ ID NO: 697781 - RNA, 20 nt, Artificial Sequence
  Synthetic
cucucuguccaagaaccuaa

SEQ ID NO: 697782 - RNA, 20 nt, Artificial Sequence
  Synthetic
aggaacuaugaauaaccuaa

SEQ ID NO: 697783 - RNA, 20 nt, Artificial Sequence
  Synthetic
cuaagccagaugacaccuaa

SEQ ID NO: 697784 - RNA, 20 nt, Artificial Sequence
  Synthetic
ugcuuucaugccccaccuaa

SEQ ID NO: 697785 - RNA, 20 nt, Artificial Sequence
  Synthetic
cucucucuuaggggaccuaa

SEQ ID NO: 697786 - RNA, 20 nt, Artificial Sequence
  Synthetic
caggguuacuugauaccuaa

SEQ ID NO: 697787 - RNA, 20 nt, Artificial Sequence
  Synthetic
auacugcuaaguguaccuaa

SEQ ID NO: 697788 - RNA, 20 nt, Artificial Sequence
  Synthetic
cugcuaacauagaggccuaa

SEQ ID NO: 697789 - RNA, 20 nt, Artificial Sequence
  Synthetic
cauagguauguugcuccuaa

SEQ ID NO: 697790 - RNA, 20 nt, Artificial Sequence
  Synthetic
acgaaacaaucgauuccuaa

SEQ ID NO: 697791 - RNA, 20 nt, Artificial Sequence
  Synthetic
uauucucgguggcuuccuaa

SEQ ID NO: 697792 - RNA, 20 nt, Artificial Sequence
  Synthetic
uuugcauguggcuuuccuaa

SEQ ID NO: 697793 - RNA, 20 nt, Artificial Sequence
  Synthetic
agccaaucuaaaugagcuaa

SEQ ID NO: 697794 - RNA, 20 nt, Artificial Sequence
  Synthetic
uuguucaaagauuacgcuaa

SEQ ID NO: 697795 - RNA, 20 nt, Artificial Sequence
  Synthetic
uacccauaaauuuacgcuaa

SEQ ID NO: 697796 - RNA, 20 nt, Artificial Sequence
  Synthetic
cuagcauuugaaaccgcuaa

SEQ ID NO: 697797 - RNA, 20 nt, Artificial Sequence
  Synthetic
ucgugacgagccaaggcuaa

SEQ ID NO: 697798 - RNA, 20 nt, Artificial Sequence
  Synthetic
auggcuuuguuugaggcuaa

SEQ ID NO: 697799 - RNA, 20 nt, Artificial Sequence
  Synthetic
uaauagcguuguauggcuaa

SEQ ID NO: 697800 - RNA, 20 nt, Artificial Sequence
  Synthetic
uaggaugaggagcuggcuaa

SEQ ID NO: 697801 - RNA, 20 nt, Artificial Sequence
  Synthetic
uaccaacauuguuuggcuaa

SEQ ID NO: 697802 - RNA, 20 nt, Artificial Sequence
  Synthetic
uccagugcugugaaugcuaa

SEQ ID NO: 697803 - RNA, 20 nt, Artificial Sequence
  Synthetic
accacguauauugaugcuaa

SEQ ID NO: 697804 - RNA, 20 nt, Artificial Sequence
  Synthetic
ugaguauguuggccugcuaa

SEQ ID NO: 697805 - RNA, 20 nt, Artificial Sequence
  Synthetic
caaguagcucagagugcuaa

SEQ ID NO: 697806 - RNA, 20 nt, Artificial Sequence
  Synthetic
cgauuaauccggagugcuaa

SEQ ID NO: 697807 - RNA, 20 nt, Artificial Sequence
  Synthetic
acaaguacggacugugcuaa

SEQ ID NO: 697808 - RNA, 20 nt, Artificial Sequence
  Synthetic
uguacaauacuacuugcuaa

SEQ ID NO: 697809 - RNA, 20 nt, Artificial Sequence
  Synthetic
uaacaauccuguuuugcuaa

SEQ ID NO: 697810 - RNA, 20 nt, Artificial Sequence
  Synthetic
uuacauacguagccaucuaa

SEQ ID NO: 697811 - RNA, 20 nt, Artificial Sequence
  Synthetic
agaguguccguuucaucuaa

SEQ ID NO: 697812 - RNA, 20 nt, Artificial Sequence
  Synthetic
uuacuauggcccugaucuaa

SEQ ID NO: 697813 - RNA, 20 nt, Artificial Sequence
  Synthetic
auaaguacucggaccucuaa

SEQ ID NO: 697814 - RNA, 20 nt, Artificial Sequence
  Synthetic
ccaaucuugacguccucuaa

SEQ ID NO: 697815 - RNA, 20 nt, Artificial Sequence
  Synthetic
uaucuguuauugggcucuaa

SEQ ID NO: 697816 - RNA, 20 nt, Artificial Sequence
  Synthetic
auguuggauaaccagucuaa

SEQ ID NO: 697817 - RNA, 20 nt, Artificial Sequence
  Synthetic
uaugugaaacgagagucuaa

SEQ ID NO: 697818 - RNA, 20 nt, Artificial Sequence
  Synthetic
acauuugugggagugucuaa

SEQ ID NO: 697819 - RNA, 20 nt, Artificial Sequence
  Synthetic
agccgggaauucaguucuaa

SEQ ID NO: 697820 - RNA, 20 nt, Artificial Sequence
  Synthetic
aaaugacacguguacaguaa

SEQ ID NO: 697821 - RNA, 20 nt, Artificial Sequence
  Synthetic
cauuuuaacgcagugaguaa

SEQ ID NO: 697822 - RNA, 20 nt, Artificial Sequence
  Synthetic
aguaauuuccaagguaguaa

SEQ ID NO: 697823 - RNA, 20 nt, Artificial Sequence
  Synthetic
cucugacgcagucuuaguaa

SEQ ID NO: 697824 - RNA, 20 nt, Artificial Sequence
  Synthetic
cgaugcuguggauuuaguaa

SEQ ID NO: 697825 - RNA, 20 nt, Artificial Sequence
  Synthetic
ucugucaacacugcccguaa

SEQ ID NO: 697826 - RNA, 20 nt, Artificial Sequence
  Synthetic
cauaacccauuaugagguaa

SEQ ID NO: 697827 - RNA, 20 nt, Artificial Sequence
  Synthetic
cauuuucuaucggaugguaa

SEQ ID NO: 697828 - RNA, 20 nt, Artificial Sequence
  Synthetic
aguaagucagccuaugguaa

SEQ ID NO: 697829 - RNA, 20 nt, Artificial Sequence
  Synthetic
uaguacaccauaggugguaa

SEQ ID NO: 697830 - RNA, 20 nt, Artificial Sequence
  Synthetic
acuacugccuacuuugguaa

SEQ ID NO: 697831 - RNA, 20 nt, Artificial Sequence
  Synthetic
uaguugccagguuuauguaa

SEQ ID NO: 697832 - RNA, 20 nt, Artificial Sequence
  Synthetic
ucucaaaaguugaccuguaa

SEQ ID NO: 697833 - RNA, 20 nt, Artificial Sequence
  Synthetic
acuuguguggauuaguguaa

SEQ ID NO: 697834 - RNA, 20 nt, Artificial Sequence
  Synthetic
uagguaucccagagguguaa

SEQ ID NO: 697835 - RNA, 20 nt, Artificial Sequence
  Synthetic
aggccaccuguccauuguaa

SEQ ID NO: 697836 - RNA, 20 nt, Artificial Sequence
  Synthetic
cuaauuccauaaguuuguaa

SEQ ID NO: 697837 - RNA, 20 nt, Artificial Sequence
  Synthetic
acaguagucuucguuuguaa

SEQ ID NO: 697838 - RNA, 20 nt, Artificial Sequence
  Synthetic
uucaugggcagcccaauuaa

SEQ ID NO: 697839 - RNA, 20 nt, Artificial Sequence
  Synthetic
aguguuauuccaaccauuaa

SEQ ID NO: 697840 - RNA, 20 nt, Artificial Sequence
  Synthetic
ugcauggccuggaccauuaa

SEQ ID NO: 697841 - RNA, 20 nt, Artificial Sequence
  Synthetic
uguuuuagaaaaccgauuaa

SEQ ID NO: 697842 - RNA, 20 nt, Artificial Sequence
  Synthetic
agugcagcaauacguauuaa

SEQ ID NO: 697843 - RNA, 20 nt, Artificial Sequence
  Synthetic
agguaggauaaucaacuuaa

SEQ ID NO: 697844 - RNA, 20 nt, Artificial Sequence
  Synthetic
aggaugucgucaauacuuaa

SEQ ID NO: 697845 - RNA, 20 nt, Artificial Sequence
  Synthetic
aaugaaugugggaaccuuaa

SEQ ID NO: 697846 - RNA, 20 nt, Artificial Sequence
  Synthetic
ccauuccguaaaauccuuaa

SEQ ID NO: 697847 - RNA, 20 nt, Artificial Sequence
  Synthetic
cuccccaauuagaagcuuaa

SEQ ID NO: 697848 - RNA, 20 nt, Artificial Sequence
  Synthetic
aucggauauugcaggcuuaa

SEQ ID NO: 697849 - RNA, 20 nt, Artificial Sequence
  Synthetic
cgcacuccagaaaugcuuaa

SEQ ID NO: 697850 - RNA, 20 nt, Artificial Sequence
  Synthetic
cggccggaaauggaucuuaa

SEQ ID NO: 697851 - RNA, 20 nt, Artificial Sequence
  Synthetic
ccagggggacaugaucuuaa

SEQ ID NO: 697852 - RNA, 20 nt, Artificial Sequence
  Synthetic
aaagaccguccuccucuuaa

SEQ ID NO: 697853 - RNA, 20 nt, Artificial Sequence
  Synthetic
cccauagguugccuucuuaa

SEQ ID NO: 697854 - RNA, 20 nt, Artificial Sequence
  Synthetic
agagauggacgauuucuuaa

SEQ ID NO: 697855 - RNA, 20 nt, Artificial Sequence
  Synthetic
acccaauacuagagaguuaa

SEQ ID NO: 697856 - RNA, 20 nt, Artificial Sequence
  Synthetic
aggauaaggguuguaguuaa

SEQ ID NO: 697857 - RNA, 20 nt, Artificial Sequence
  Synthetic
aaucgcaguuguaggguuaa

SEQ ID NO: 697858 - RNA, 20 nt, Artificial Sequence
  Synthetic
ccagaauauuaccggguuaa

SEQ ID NO: 697859 - RNA, 20 nt, Artificial Sequence
  Synthetic
uuauugcgguacuauguuaa

SEQ ID NO: 697860 - RNA, 20 nt, Artificial Sequence
  Synthetic
augcuucacugcccuguuaa

SEQ ID NO: 697861 - RNA, 20 nt, Artificial Sequence
  Synthetic
uaacuaaccucauguguuaa

SEQ ID NO: 697862 - RNA, 20 nt, Artificial Sequence
  Synthetic
uaagacuguagguguguuaa

SEQ ID NO: 697863 - RNA, 20 nt, Artificial Sequence
  Synthetic
cuuacggguaucauuguuaa

SEQ ID NO: 697864 - RNA, 20 nt, Artificial Sequence
  Synthetic
aaggaaccgccaaaauuuaa

SEQ ID NO: 697865 - RNA, 20 nt, Artificial Sequence
  Synthetic
acguagauuucgaaauuuaa

SEQ ID NO: 697866 - RNA, 20 nt, Artificial Sequence
  Synthetic
ugcacagugacagaauuuaa

SEQ ID NO: 697867 - RNA, 20 nt, Artificial Sequence
  Synthetic
auacacuccuauccauuuaa

SEQ ID NO: 697868 - RNA, 20 nt, Artificial Sequence
  Synthetic
ccuuggguaagacuauuuaa

SEQ ID NO: 697869 - RNA, 20 nt, Artificial Sequence
  Synthetic
agcuuuacuuagagcuuuaa

SEQ ID NO: 697870 - RNA, 20 nt, Artificial Sequence
  Synthetic
aagcaugccacaauguuuaa

SEQ ID NO: 697871 - RNA, 20 nt, Artificial Sequence
  Synthetic
acaguaggccagauguuuaa

SEQ ID NO: 697872 - RNA, 20 nt, Artificial Sequence
  Synthetic
aaugccgcucuucggaaaca

SEQ ID NO: 697873 - RNA, 20 nt, Artificial Sequence
  Synthetic
cuggucuuguuguauaaaca

SEQ ID NO: 697874 - RNA, 20 nt, Artificial Sequence
  Synthetic
cauaucagcugcacuaaaca

SEQ ID NO: 697875 - RNA, 20 nt, Artificial Sequence
  Synthetic
cauggaauggcacguaaaca

SEQ ID NO: 697876 - RNA, 20 nt, Artificial Sequence
  Synthetic
cuggucaaauguagacaaca

SEQ ID NO: 697877 - RNA, 20 nt, Artificial Sequence
  Synthetic
ccaaacauguuaguacaaca

SEQ ID NO: 697878 - RNA, 20 nt, Artificial Sequence
  Synthetic
cauguguugcaaccccaaca

SEQ ID NO: 697879 - RNA, 20 nt, Artificial Sequence
  Synthetic
cauaucuagccuuuccaaca

SEQ ID NO: 697880 - RNA, 20 nt, Artificial Sequence
  Synthetic
aauucugaagucuaucaaca

SEQ ID NO: 697881 - RNA, 20 nt, Artificial Sequence
  Synthetic
cugggccgugucuaagaaca

SEQ ID NO: 697882 - RNA, 20 nt, Artificial Sequence
  Synthetic
acugccguaucuuuagaaca

SEQ ID NO: 697883 - RNA, 20 nt, Artificial Sequence
  Synthetic
cauaaaacaaagcacgaaca

SEQ ID NO: 697884 - RNA, 20 nt, Artificial Sequence
  Synthetic
uuuaagguuaguuuggaaca

SEQ ID NO: 697885 - RNA, 20 nt, Artificial Sequence
  Synthetic
auucuaauagaguaugaaca

SEQ ID NO: 697886 - RNA, 20 nt, Artificial Sequence
  Synthetic
cccaccucacauuaugaaca

SEQ ID NO: 697887 - RNA, 20 nt, Artificial Sequence
  Synthetic
aucagcugaguacgugaaca

SEQ ID NO: 697888 - RNA, 20 nt, Artificial Sequence
  Synthetic
ucaucugcggguggugaaca

SEQ ID NO: 697889 - RNA, 20 nt, Artificial Sequence
  Synthetic
uguggucucgaacuugaaca

SEQ ID NO: 697890 - RNA, 20 nt, Artificial Sequence
  Synthetic
accuuuggaaguauguaaca

SEQ ID NO: 697891 - RNA, 20 nt, Artificial Sequence
  Synthetic
aaccuggccaggcauuaaca

SEQ ID NO: 697892 - RNA, 20 nt, Artificial Sequence
  Synthetic
ugagaacguacauauuaaca

SEQ ID NO: 697893 - RNA, 20 nt, Artificial Sequence
  Synthetic
caucuuauaaugccuuaaca

SEQ ID NO: 697894 - RNA, 20 nt, Artificial Sequence
  Synthetic
cuaucaucaugaucuuaaca

SEQ ID NO: 697895 - RNA, 20 nt, Artificial Sequence
  Synthetic
uauugaguaaaccguuaaca

SEQ ID NO: 697896 - RNA, 20 nt, Artificial Sequence
  Synthetic
ugcugaugccucccaacaca

SEQ ID NO: 697897 - RNA, 20 nt, Artificial Sequence
  Synthetic
auacugacuacuaccacaca

SEQ ID NO: 697898 - RNA, 20 nt, Artificial Sequence
  Synthetic
uaugaucccacuaucacaca

SEQ ID NO: 697899 - RNA, 20 nt, Artificial Sequence
  Synthetic
aagcucggaaaccucacaca

SEQ ID NO: 697900 - RNA, 20 nt, Artificial Sequence
  Synthetic
aggucguuuuaauucacaca

SEQ ID NO: 697901 - RNA, 20 nt, Artificial Sequence
  Synthetic
aucccuugcgcugcuacaca

SEQ ID NO: 697902 - RNA, 20 nt, Artificial Sequence
  Synthetic
cuugugcaguuaguuacaca

SEQ ID NO: 697903 - RNA, 20 nt, Artificial Sequence
  Synthetic
ccucaaaguugucaaccaca

SEQ ID NO: 697904 - RNA, 20 nt, Artificial Sequence
  Synthetic
ugacaaugguguacaccaca

SEQ ID NO: 697905 - RNA, 20 nt, Artificial Sequence
  Synthetic
uguucaaguucgagaccaca

SEQ ID NO: 697906 - RNA, 20 nt, Artificial Sequence
  Synthetic
uagugaucauagugaccaca

SEQ ID NO: 697907 - RNA, 20 nt, Artificial Sequence
  Synthetic
uauccucaggugcucccaca

SEQ ID NO: 697908 - RNA, 20 nt, Artificial Sequence
  Synthetic
aauuuaaguaagcagccaca

SEQ ID NO: 697909 - RNA, 20 nt, Artificial Sequence
  Synthetic
cuucucucaagggauccaca

SEQ ID NO: 697910 - RNA, 20 nt, Artificial Sequence
  Synthetic
auuacuucuuggucuccaca

SEQ ID NO: 697911 - RNA, 20 nt, Artificial Sequence
  Synthetic
aagcuaacauuccuuccaca

SEQ ID NO: 697912 - RNA, 20 nt, Artificial Sequence
  Synthetic
ugaaaccugagcucagcaca

SEQ ID NO: 697913 - RNA, 20 nt, Artificial Sequence
  Synthetic
aaugggucuacauuagcaca

SEQ ID NO: 697914 - RNA, 20 nt, Artificial Sequence
  Synthetic
auaagcccuacauacgcaca

SEQ ID NO: 697915 - RNA, 20 nt, Artificial Sequence
  Synthetic
aaauuaaaaguaugcgcaca

SEQ ID NO: 697916 - RNA, 20 nt, Artificial Sequence
  Synthetic
cacauacuaauauaggcaca

SEQ ID NO: 697917 - RNA, 20 nt, Artificial Sequence
  Synthetic
augagcuagaggacugcaca

SEQ ID NO: 697918 - RNA, 20 nt, Artificial Sequence
  Synthetic
augaagagcccccuugcaca

SEQ ID NO: 697919 - RNA, 20 nt, Artificial Sequence
  Synthetic
caggguauuuuaguugcaca

SEQ ID NO: 697920 - RNA, 20 nt, Artificial Sequence
  Synthetic
auaaggcuugaguggucaca

SEQ ID NO: 697921 - RNA, 20 nt, Artificial Sequence
  Synthetic
cagaauaacgcuaugucaca

SEQ ID NO: 697922 - RNA, 20 nt, Artificial Sequence
  Synthetic
ucguuuaccccugaaagaca

SEQ ID NO: 697923 - RNA, 20 nt, Artificial Sequence
  Synthetic
acuggacuauuagcaagaca

SEQ ID NO: 697924 - RNA, 20 nt, Artificial Sequence
  Synthetic
uauaagcagauucgaagaca

SEQ ID NO: 697925 - RNA, 20 nt, Artificial Sequence
  Synthetic
agcggaugacagugcagaca

SEQ ID NO: 697926 - RNA, 20 nt, Artificial Sequence
  Synthetic
accuucacacuuccgagaca

SEQ ID NO: 697927 - RNA, 20 nt, Artificial Sequence
  Synthetic
aagcucacggguaggagaca

SEQ ID NO: 697928 - RNA, 20 nt, Artificial Sequence
  Synthetic
agcagcuaauagugacgaca

SEQ ID NO: 697929 - RNA, 20 nt, Artificial Sequence
  Synthetic
ugcuaaaaacacuuacgaca

SEQ ID NO: 697930 - RNA, 20 nt, Artificial Sequence
  Synthetic
uguaucggguuugaaggaca

SEQ ID NO: 697931 - RNA, 20 nt, Artificial Sequence
  Synthetic
aacgcuaugucacauggaca

SEQ ID NO: 697932 - RNA, 20 nt, Artificial Sequence
  Synthetic
cuaguccacacucaaugaca

SEQ ID NO: 697933 - RNA, 20 nt, Artificial Sequence
  Synthetic
ucaaacugcgguagcugaca

SEQ ID NO: 697934 - RNA, 20 nt, Artificial Sequence
  Synthetic
acucuaaagauaggcugaca

SEQ ID NO: 697935 - RNA, 20 nt, Artificial Sequence
  Synthetic
uaccauauauagcucugaca

SEQ ID NO: 697936 - RNA, 20 nt, Artificial Sequence
  Synthetic
cuauguguuuaacggugaca

SEQ ID NO: 697937 - RNA, 20 nt, Artificial Sequence
  Synthetic
aaaucagcaaaccggugaca

SEQ ID NO: 697938 - RNA, 20 nt, Artificial Sequence
  Synthetic
aacucuggucaucugugaca

SEQ ID NO: 697939 - RNA, 20 nt, Artificial Sequence
  Synthetic
cuugucguagcagauugaca

SEQ ID NO: 697940 - RNA, 20 nt, Artificial Sequence
  Synthetic
auccagugcaugacuugaca

SEQ ID NO: 697941 - RNA, 20 nt, Artificial Sequence
  Synthetic
cuugugcuugaugcuugaca

SEQ ID NO: 697942 - RNA, 20 nt, Artificial Sequence
  Synthetic
ugggaccugggaguuauaca

SEQ ID NO: 697943 - RNA, 20 nt, Artificial Sequence
  Synthetic
agucugcuuugacaacuaca

SEQ ID NO: 697944 - RNA, 20 nt, Artificial Sequence
  Synthetic
caugcauaaccgcaacuaca

SEQ ID NO: 697945 - RNA, 20 nt, Artificial Sequence
  Synthetic
ucguaacugccuccacuaca

SEQ ID NO: 697946 - RNA, 20 nt, Artificial Sequence
  Synthetic
ccagugauguuugcacuaca

SEQ ID NO: 697947 - RNA, 20 nt, Artificial Sequence
  Synthetic
uggagaguggcuguacuaca

SEQ ID NO: 697948 - RNA, 20 nt, Artificial Sequence
  Synthetic
ucguaggacagccaccuaca

SEQ ID NO: 697949 - RNA, 20 nt, Artificial Sequence
  Synthetic
uccucuuaguggcuccuaca

SEQ ID NO: 697950 - RNA, 20 nt, Artificial Sequence
  Synthetic
cccccuuauccugaaguaca

SEQ ID NO: 697951 - RNA, 20 nt, Artificial Sequence
  Synthetic
cugacugcaacgggaguaca

SEQ ID NO: 697952 - RNA, 20 nt, Artificial Sequence
  Synthetic
uaauaauauacgugaguaca

SEQ ID NO: 697953 - RNA, 20 nt, Artificial Sequence
  Synthetic
auucgucgugacauaguaca

SEQ ID NO: 697954 - RNA, 20 nt, Artificial Sequence
  Synthetic
aaaucccaucugaacguaca

SEQ ID NO: 697955 - RNA, 20 nt, Artificial Sequence
  Synthetic
uauccugcacacuacguaca

SEQ ID NO: 697956 - RNA, 20 nt, Artificial Sequence
  Synthetic
agaaugcaucaucugguaca

SEQ ID NO: 697957 - RNA, 20 nt, Artificial Sequence
  Synthetic
aggaagucccuucauguaca

SEQ ID NO: 697958 - RNA, 20 nt, Artificial Sequence
  Synthetic
auacguauucuguauguaca

SEQ ID NO: 697959 - RNA, 20 nt, Artificial Sequence
  Synthetic
cguguacaacauuaauuaca

SEQ ID NO: 697960 - RNA, 20 nt, Artificial Sequence
  Synthetic
uacauugacucagcauuaca

SEQ ID NO: 697961 - RNA, 20 nt, Artificial Sequence
  Synthetic
uuugccccuacaucauuaca

SEQ ID NO: 697962 - RNA, 20 nt, Artificial Sequence
  Synthetic
auccaagugacacgauuaca

SEQ ID NO: 697963 - RNA, 20 nt, Artificial Sequence
  Synthetic
aaacccucagagcuauuaca

SEQ ID NO: 697964 - RNA, 20 nt, Artificial Sequence
  Synthetic
acaggucuaaguaacuuaca

SEQ ID NO: 697965 - RNA, 20 nt, Artificial Sequence
  Synthetic
cuagcauuccacuacuuaca

SEQ ID NO: 697966 - RNA, 20 nt, Artificial Sequence
  Synthetic
aaggggucuuccugcuuaca

SEQ ID NO: 697967 - RNA, 20 nt, Artificial Sequence
  Synthetic
cuuuaguggauauaguuaca

SEQ ID NO: 697968 - RNA, 20 nt, Artificial Sequence
  Synthetic
cauggaaccaucacguuaca

SEQ ID NO: 697969 - RNA, 20 nt, Artificial Sequence
  Synthetic
aaggcuacacguaauuuaca

SEQ ID NO: 697970 - RNA, 20 nt, Artificial Sequence
  Synthetic
accuguguucacccuuuaca

SEQ ID NO: 697971 - RNA, 20 nt, Artificial Sequence
  Synthetic
agguccuuuugcaguuuaca

SEQ ID NO: 697972 - RNA, 20 nt, Artificial Sequence
  Synthetic
agcauaguacuugaaaacca

SEQ ID NO: 697973 - RNA, 20 nt, Artificial Sequence
  Synthetic
uuaggagacccaggaaacca

SEQ ID NO: 697974 - RNA, 20 nt, Artificial Sequence
  Synthetic
cuuuaguugguucucaacca

SEQ ID NO: 697975 - RNA, 20 nt, Artificial Sequence
  Synthetic
aguguucgauccuugaacca

SEQ ID NO: 697976 - RNA, 20 nt, Artificial Sequence
  Synthetic
uacauuugccaugcuaacca

SEQ ID NO: 697977 - RNA, 20 nt, Artificial Sequence
  Synthetic
aguguuaaguccucuaacca

SEQ ID NO: 697978 - RNA, 20 nt, Artificial Sequence
  Synthetic
aaauugcuggagcuuaacca

SEQ ID NO: 697979 - RNA, 20 nt, Artificial Sequence
  Synthetic
auuauuacuuaugaacacca

SEQ ID NO: 697980 - RNA, 20 nt, Artificial Sequence
  Synthetic
cugagaaacuucccacacca

SEQ ID NO: 697981 - RNA, 20 nt, Artificial Sequence
  Synthetic
accaacagucaaugccacca

SEQ ID NO: 697982 - RNA, 20 nt, Artificial Sequence
  Synthetic
ccuggucucaugcagcacca

SEQ ID NO: 697983 - RNA, 20 nt, Artificial Sequence
  Synthetic
cguagccauauguuucacca

SEQ ID NO: 697984 - RNA, 20 nt, Artificial Sequence
  Synthetic
uauucugggauauacgacca

SEQ ID NO: 697985 - RNA, 20 nt, Artificial Sequence
  Synthetic
ccacauaaaggcacugacca

SEQ ID NO: 697986 - RNA, 20 nt, Artificial Sequence
  Synthetic
cugaaaaguggaugugacca

SEQ ID NO: 697987 - RNA, 20 nt, Artificial Sequence
  Synthetic
ugggcaugcauaauugacca

SEQ ID NO: 697988 - RNA, 20 nt, Artificial Sequence
  Synthetic
uguaugaugcuauaauacca

SEQ ID NO: 697989 - RNA, 20 nt, Artificial Sequence
  Synthetic
ugcauugcacguaucuacca

SEQ ID NO: 697990 - RNA, 20 nt, Artificial Sequence
  Synthetic
ucaguuuuuggucucuacca

SEQ ID NO: 697991 - RNA, 20 nt, Artificial Sequence
  Synthetic
uuucguacuuuuaauuacca

SEQ ID NO: 697992 - RNA, 20 nt, Artificial Sequence
  Synthetic
uuauguccaaucaguuacca

SEQ ID NO: 697993 - RNA, 20 nt, Artificial Sequence
  Synthetic
agcuucuucuauuguuacca

SEQ ID NO: 697994 - RNA, 20 nt, Artificial Sequence
  Synthetic
auguccauagugcuuuacca

SEQ ID NO: 697995 - RNA, 20 nt, Artificial Sequence
  Synthetic
uuucaaugauauccaaccca

SEQ ID NO: 697996 - RNA, 20 nt, Artificial Sequence
  Synthetic
aaguauugggaaagaaccca

SEQ ID NO: 697997 - RNA, 20 nt, Artificial Sequence
  Synthetic
ucguaguguggcuuaaccca

SEQ ID NO: 697998 - RNA, 20 nt, Artificial Sequence
  Synthetic
ugcauagcuguaagcaccca

SEQ ID NO: 697999 - RNA, 20 nt, Artificial Sequence
  Synthetic
uagaacucuguuugcaccca

SEQ ID NO: 698000 - RNA, 20 nt, Artificial Sequence
  Synthetic
auguguggugauaucaccca

SEQ ID NO: 698001 - RNA, 20 nt, Artificial Sequence
  Synthetic
agaagucucccuaagaccca

SEQ ID NO: 698002 - RNA, 20 nt, Artificial Sequence
  Synthetic
ucugugaaaauagauaccca

SEQ ID NO: 698003 - RNA, 20 nt, Artificial Sequence
  Synthetic
acuuaugauacaacuaccca

SEQ ID NO: 698004 - RNA, 20 nt, Artificial Sequence
  Synthetic
cauuggagguguccuaccca

SEQ ID NO: 698005 - RNA, 20 nt, Artificial Sequence
  Synthetic
ccuuuaaauagucuuaccca

SEQ ID NO: 698006 - RNA, 20 nt, Artificial Sequence
  Synthetic
uacaggggcgguuaucccca

SEQ ID NO: 698007 - RNA, 20 nt, Artificial Sequence
  Synthetic
aaaaccucuuucggucccca

SEQ ID NO: 698008 - RNA, 20 nt, Artificial Sequence
  Synthetic
uagaguugcucuauucccca

SEQ ID NO: 698009 - RNA, 20 nt, Artificial Sequence
  Synthetic
cuugauuuggucgaggccca

SEQ ID NO: 698010 - RNA, 20 nt, Artificial Sequence
  Synthetic
caaaaccaauacagggccca

SEQ ID NO: 698011 - RNA, 20 nt, Artificial Sequence
  Synthetic
uggucaauuaugcaugccca

SEQ ID NO: 698012 - RNA, 20 nt, Artificial Sequence
  Synthetic
uaagcugccuaaccauccca

SEQ ID NO: 698013 - RNA, 20 nt, Artificial Sequence
  Synthetic
agcuacccuccagauuccca

SEQ ID NO: 698014 - RNA, 20 nt, Artificial Sequence
  Synthetic
uacuuguaacugacaagcca

SEQ ID NO: 698015 - RNA, 20 nt, Artificial Sequence
  Synthetic
uauuacccccauacaagcca

SEQ ID NO: 698016 - RNA, 20 nt, Artificial Sequence
  Synthetic
uaaugacuuuugagcagcca

SEQ ID NO: 698017 - RNA, 20 nt, Artificial Sequence
  Synthetic
acccuggaaguuugcagcca

SEQ ID NO: 698018 - RNA, 20 nt, Artificial Sequence
  Synthetic
aucaauuuaguuaucagcca

SEQ ID NO: 698019 - RNA, 20 nt, Artificial Sequence
  Synthetic
agaucuuuagaacucagcca

SEQ ID NO: 698020 - RNA, 20 nt, Artificial Sequence
  Synthetic
aaucccuacaugcucagcca

SEQ ID NO: 698021 - RNA, 20 nt, Artificial Sequence
  Synthetic
uaaggaucugucuagagcca

SEQ ID NO: 698022 - RNA, 20 nt, Artificial Sequence
  Synthetic
aagaugauucucuuuagcca

SEQ ID NO: 698023 - RNA, 20 nt, Artificial Sequence
  Synthetic
uugagguccuuggaaggcca

SEQ ID NO: 698024 - RNA, 20 nt, Artificial Sequence
  Synthetic
ccaguguguucaacaggcca

SEQ ID NO: 698025 - RNA, 20 nt, Artificial Sequence
  Synthetic
ucuacucuaagaagaggcca

SEQ ID NO: 698026 - RNA, 20 nt, Artificial Sequence
  Synthetic
aaugacuacagaaccggcca

SEQ ID NO: 698027 - RNA, 20 nt, Artificial Sequence
  Synthetic
aagcacccaugaaucggcca

SEQ ID NO: 698028 - RNA, 20 nt, Artificial Sequence
  Synthetic
auaucuacaaguuugggcca

SEQ ID NO: 698029 - RNA, 20 nt, Artificial Sequence
  Synthetic
ucagacuauuaggguggcca

SEQ ID NO: 698030 - RNA, 20 nt, Artificial Sequence
  Synthetic
uauaguagguaucuuggcca

SEQ ID NO: 698031 - RNA, 20 nt, Artificial Sequence
  Synthetic
uaagaguuauggguuggcca

SEQ ID NO: 698032 - RNA, 20 nt, Artificial Sequence
  Synthetic
ugcacacuagguguuggcca

SEQ ID NO: 698033 - RNA, 20 nt, Artificial Sequence
  Synthetic
uacaggcuugccuuaugcca

SEQ ID NO: 698034 - RNA, 20 nt, Artificial Sequence
  Synthetic
uugccguauaccaccugcca

SEQ ID NO: 698035 - RNA, 20 nt, Artificial Sequence
  Synthetic
auccuaaugccagucugcca

SEQ ID NO: 698036 - RNA, 20 nt, Artificial Sequence
  Synthetic
agggucguauuguugugcca

SEQ ID NO: 698037 - RNA, 20 nt, Artificial Sequence
  Synthetic
ccccuucucuagaguugcca

SEQ ID NO: 698038 - RNA, 20 nt, Artificial Sequence
  Synthetic
uauuaguggugggguugcca

SEQ ID NO: 698039 - RNA, 20 nt, Artificial Sequence
  Synthetic
cccaagccacugguuugcca

SEQ ID NO: 698040 - RNA, 20 nt, Artificial Sequence
  Synthetic
ugaaaaaucaucccaaucca

SEQ ID NO: 698041 - RNA, 20 nt, Artificial Sequence
  Synthetic
accuauucacauauaaucca

SEQ ID NO: 698042 - RNA, 20 nt, Artificial Sequence
  Synthetic
auuuaguggugacuaaucca

SEQ ID NO: 698043 - RNA, 20 nt, Artificial Sequence
  Synthetic
ucucaauccacuugcaucca

SEQ ID NO: 698044 - RNA, 20 nt, Artificial Sequence
  Synthetic
auuguagucacguggaucca

SEQ ID NO: 698045 - RNA, 20 nt, Artificial Sequence
  Synthetic
uagaauugcaaacguaucca

SEQ ID NO: 698046 - RNA, 20 nt, Artificial Sequence
  Synthetic
aucacgauaaugcuuaucca

SEQ ID NO: 698047 - RNA, 20 nt, Artificial Sequence
  Synthetic
ugcaucucaagauuuaucca

SEQ ID NO: 698048 - RNA, 20 nt, Artificial Sequence
  Synthetic
uagauacaacugguacucca

SEQ ID NO: 698049 - RNA, 20 nt, Artificial Sequence
  Synthetic
auaauuauagggaaccucca

SEQ ID NO: 698050 - RNA, 20 nt, Artificial Sequence
  Synthetic
auguaauucagacgccucca

SEQ ID NO: 698051 - RNA, 20 nt, Artificial Sequence
  Synthetic
aagcccucacgcugccucca

SEQ ID NO: 698052 - RNA, 20 nt, Artificial Sequence
  Synthetic
uuuauguaggaacuccucca

SEQ ID NO: 698053 - RNA, 20 nt, Artificial Sequence
  Synthetic
uggucuccuauauuccucca

SEQ ID NO: 698054 - RNA, 20 nt, Artificial Sequence
  Synthetic
uagagcugaaaacaucucca

SEQ ID NO: 698055 - RNA, 20 nt, Artificial Sequence
  Synthetic
uggguagguaauccucucca

SEQ ID NO: 698056 - RNA, 20 nt, Artificial Sequence
  Synthetic
auagcuucuaaaucucucca

SEQ ID NO: 698057 - RNA, 20 nt, Artificial Sequence
  Synthetic
aacaguguucucauagucca

SEQ ID NO: 698058 - RNA, 20 nt, Artificial Sequence
  Synthetic
uaugauauaaacagcgucca

SEQ ID NO: 698059 - RNA, 20 nt, Artificial Sequence
  Synthetic
cuaacuaaauugcaggucca

SEQ ID NO: 698060 - RNA, 20 nt, Artificial Sequence
  Synthetic
cauuuccauuguggauucca

SEQ ID NO: 698061 - RNA, 20 nt, Artificial Sequence
  Synthetic
cucuaccacagaugauucca

SEQ ID NO: 698062 - RNA, 20 nt, Artificial Sequence
  Synthetic
caaagcaauuugauauucca

SEQ ID NO: 698063 - RNA, 20 nt, Artificial Sequence
  Synthetic
uccgugagugaugacuucca

SEQ ID NO: 698064 - RNA, 20 nt, Artificial Sequence
  Synthetic
cauugaguggcacuguucca

SEQ ID NO: 698065 - RNA, 20 nt, Artificial Sequence
  Synthetic
uguaaaauaucguuguucca

SEQ ID NO: 698066 - RNA, 20 nt, Artificial Sequence
  Synthetic
cucuacacaaaugguuucca

SEQ ID NO: 698067 - RNA, 20 nt, Artificial Sequence
  Synthetic
uaaaggauccuacuaaagca

SEQ ID NO: 698068 - RNA, 20 nt, Artificial Sequence
  Synthetic
ugucuaauugcacugaagca

SEQ ID NO: 698069 - RNA, 20 nt, Artificial Sequence
  Synthetic
ucucccccagugcauaagca

SEQ ID NO: 698070 - RNA, 20 nt, Artificial Sequence
  Synthetic
augggucucuugcaacagca

SEQ ID NO: 698071 - RNA, 20 nt, Artificial Sequence
  Synthetic
caaucacacuuugcacagca

SEQ ID NO: 698072 - RNA, 20 nt, Artificial Sequence
  Synthetic
aaugugacgggagaccagca

SEQ ID NO: 698073 - RNA, 20 nt, Artificial Sequence
  Synthetic
uagacuuccguuguccagca

SEQ ID NO: 698074 - RNA, 20 nt, Artificial Sequence
  Synthetic
cauaccaguaacgagcagca

SEQ ID NO: 698075 - RNA, 20 nt, Artificial Sequence
  Synthetic
auugauuuugacuugcagca

SEQ ID NO: 698076 - RNA, 20 nt, Artificial Sequence
  Synthetic
uuuaaccucuguagagagca

SEQ ID NO: 698077 - RNA, 20 nt, Artificial Sequence
  Synthetic
cagaaagaacuuacggagca

SEQ ID NO: 698078 - RNA, 20 nt, Artificial Sequence
  Synthetic
ccgauggauuucuuggagca

SEQ ID NO: 698079 - RNA, 20 nt, Artificial Sequence
  Synthetic
uauauaacauugucauagca

SEQ ID NO: 698080 - RNA, 20 nt, Artificial Sequence
  Synthetic
uucaaucacacuguauagca

SEQ ID NO: 698081 - RNA, 20 nt, Artificial Sequence
  Synthetic
aaauucuguucagacuagca

SEQ ID NO: 698082 - RNA, 20 nt, Artificial Sequence
  Synthetic
aaaccugugauguacuagca

SEQ ID NO: 698083 - RNA, 20 nt, Artificial Sequence
  Synthetic
agcuuugcaaggucguagca

SEQ ID NO: 698084 - RNA, 20 nt, Artificial Sequence
  Synthetic
aaaacuacuuagcuuacgca

SEQ ID NO: 698085 - RNA, 20 nt, Artificial Sequence
  Synthetic
aggguaacaauauuuacgca

SEQ ID NO: 698086 - RNA, 20 nt, Artificial Sequence
  Synthetic
uaggcaaguauucucccgca

SEQ ID NO: 698087 - RNA, 20 nt, Artificial Sequence
  Synthetic
cccccguguguagcagcgca

SEQ ID NO: 698088 - RNA, 20 nt, Artificial Sequence
  Synthetic
uuugagaauucccuggcgca

SEQ ID NO: 698089 - RNA, 20 nt, Artificial Sequence
  Synthetic
cucaccaaaauuuuggcgca

SEQ ID NO: 698090 - RNA, 20 nt, Artificial Sequence
  Synthetic
auugauuggacugucucgca

SEQ ID NO: 698091 - RNA, 20 nt, Artificial Sequence
  Synthetic
cucaaguaccaugagucgca

SEQ ID NO: 698092 - RNA, 20 nt, Artificial Sequence
  Synthetic
agucgggccaaauaaaggca

SEQ ID NO: 698093 - RNA, 20 nt, Artificial Sequence
  Synthetic
cauagccugcgaugcaggca

SEQ ID NO: 698094 - RNA, 20 nt, Artificial Sequence
  Synthetic
agaguacaguugaguaggca

SEQ ID NO: 698095 - RNA, 20 nt, Artificial Sequence
  Synthetic
aacuauuaugcaauuaggca

SEQ ID NO: 698096 - RNA, 20 nt, Artificial Sequence
  Synthetic
uacagcgagggaauuaggca

SEQ ID NO: 698097 - RNA, 20 nt, Artificial Sequence
  Synthetic
uguauggggguaauagggca

SEQ ID NO: 698098 - RNA, 20 nt, Artificial Sequence
  Synthetic
aaagauacacuugaugggca

SEQ ID NO: 698099 - RNA, 20 nt, Artificial Sequence
  Synthetic
acuaccugggguagugggca

SEQ ID NO: 698100 - RNA, 20 nt, Artificial Sequence
  Synthetic
acuacuuuuucucaauggca

SEQ ID NO: 698101 - RNA, 20 nt, Artificial Sequence
  Synthetic
aacaaacuacccgaauggca

SEQ ID NO: 698102 - RNA, 20 nt, Artificial Sequence
  Synthetic
auguagccaaacuaauggca

SEQ ID NO: 698103 - RNA, 20 nt, Artificial Sequence
  Synthetic
aauccaggauguacauggca

SEQ ID NO: 698104 - RNA, 20 nt, Artificial Sequence
  Synthetic
ugaugggugcugaaguggca

SEQ ID NO: 698105 - RNA, 20 nt, Artificial Sequence
  Synthetic
agagguucuccauaguggca

SEQ ID NO: 698106 - RNA, 20 nt, Artificial Sequence
  Synthetic
agucugaaaaauagguggca

SEQ ID NO: 698107 - RNA, 20 nt, Artificial Sequence
  Synthetic
auauugugaguaaguuggca

SEQ ID NO: 698108 - RNA, 20 nt, Artificial Sequence
  Synthetic
cugagucaggcaauuuggca

SEQ ID NO: 698109 - RNA, 20 nt, Artificial Sequence
  Synthetic
cucuuaaaguacguuuggca

SEQ ID NO: 698110 - RNA, 20 nt, Artificial Sequence
  Synthetic
cguuugugacccauaaugca

SEQ ID NO: 698111 - RNA, 20 nt, Artificial Sequence
  Synthetic
acaguugcugaagacaugca

SEQ ID NO: 698112 - RNA, 20 nt, Artificial Sequence
  Synthetic
cucauuggauuugacaugca

SEQ ID NO: 698113 - RNA, 20 nt, Artificial Sequence
  Synthetic
ccuccuugguguagcaugca

SEQ ID NO: 698114 - RNA, 20 nt, Artificial Sequence
  Synthetic
uuacacuagugcugcaugca

SEQ ID NO: 698115 - RNA, 20 nt, Artificial Sequence
  Synthetic
ucgccauuuacccucaugca

SEQ ID NO: 698116 - RNA, 20 nt, Artificial Sequence
  Synthetic
auagguacggaauggaugca

SEQ ID NO: 698117 - RNA, 20 nt, Artificial Sequence
  Synthetic
ugguaagcguguuggaugca

SEQ ID NO: 698118 - RNA, 20 nt, Artificial Sequence
  Synthetic
cuucaagggcuacugaugca

SEQ ID NO: 698119 - RNA, 20 nt, Artificial Sequence
  Synthetic
ccaagccuucacaauaugca

SEQ ID NO: 698120 - RNA, 20 nt, Artificial Sequence
  Synthetic
uagcccucugaugaacugca

SEQ ID NO: 698121 - RNA, 20 nt, Artificial Sequence
  Synthetic
uuguccauuugugcacugca

SEQ ID NO: 698122 - RNA, 20 nt, Artificial Sequence
  Synthetic
ucgugucuguuaauacugca

SEQ ID NO: 698123 - RNA, 20 nt, Artificial Sequence
  Synthetic
cuauaaucccaaucccugca

SEQ ID NO: 698124 - RNA, 20 nt, Artificial Sequence
  Synthetic
agaccuugcuaauugcugca

SEQ ID NO: 698125 - RNA, 20 nt, Artificial Sequence
  Synthetic
auuugauacauugcucugca

SEQ ID NO: 698126 - RNA, 20 nt, Artificial Sequence
  Synthetic
acuuggaucaguaaagugca

SEQ ID NO: 698127 - RNA, 20 nt, Artificial Sequence
  Synthetic
acuagggaccuccuagugca

SEQ ID NO: 698128 - RNA, 20 nt, Artificial Sequence
  Synthetic
cuagaaauugaccgugugca

SEQ ID NO: 698129 - RNA, 20 nt, Artificial Sequence
  Synthetic
aggcccuaccuccacuugca

SEQ ID NO: 698130 - RNA, 20 nt, Artificial Sequence
  Synthetic
uacguaauuaaaaccuugca

SEQ ID NO: 698131 - RNA, 20 nt, Artificial Sequence
  Synthetic
ugcccaaagaggcccuugca

SEQ ID NO: 698132 - RNA, 20 nt, Artificial Sequence
  Synthetic
agguuuacuuauuaguugca

SEQ ID NO: 698133 - RNA, 20 nt, Artificial Sequence
  Synthetic
cguuauggcaguuaguugca

SEQ ID NO: 698134 - RNA, 20 nt, Artificial Sequence
  Synthetic
ugguuaagaguaauguugca

SEQ ID NO: 698135 - RNA, 20 nt, Artificial Sequence
  Synthetic
ugguuugaauucgauuugca

SEQ ID NO: 698136 - RNA, 20 nt, Artificial Sequence
  Synthetic
cuaacguaacccuauuugca

SEQ ID NO: 698137 - RNA, 20 nt, Artificial Sequence
  Synthetic
uagguagacaggacuuugca

SEQ ID NO: 698138 - RNA, 20 nt, Artificial Sequence
  Synthetic
aaugacuugaaugguuugca

SEQ ID NO: 698139 - RNA, 20 nt, Artificial Sequence
  Synthetic
aucguuuagucauuuuugca

SEQ ID NO: 698140 - RNA, 20 nt, Artificial Sequence
  Synthetic
caccagcggcaucaaaauca

SEQ ID NO: 698141 - RNA, 20 nt, Artificial Sequence
  Synthetic
acuugugcugcuugaaauca

SEQ ID NO: 698142 - RNA, 20 nt, Artificial Sequence
  Synthetic
uauauaagcaccaacaauca

SEQ ID NO: 698143 - RNA, 20 nt, Artificial Sequence
  Synthetic
uauucaccuuuaagcaauca

SEQ ID NO: 698144 - RNA, 20 nt, Artificial Sequence
  Synthetic
cugguacagcuacugaauca

SEQ ID NO: 698145 - RNA, 20 nt, Artificial Sequence
  Synthetic
cuauucacagugcauaauca

SEQ ID NO: 698146 - RNA, 20 nt, Artificial Sequence
  Synthetic
agggauaggcaggguaauca

SEQ ID NO: 698147 - RNA, 20 nt, Artificial Sequence
  Synthetic
uggggaugucuaauuaauca

SEQ ID NO: 698148 - RNA, 20 nt, Artificial Sequence
  Synthetic
auguaucuaguucuuaauca

SEQ ID NO: 698149 - RNA, 20 nt, Artificial Sequence
  Synthetic
uacccucucaaaaaacauca

SEQ ID NO: 698150 - RNA, 20 nt, Artificial Sequence
  Synthetic
agugcuacggguguacauca

SEQ ID NO: 698151 - RNA, 20 nt, Artificial Sequence
  Synthetic
acagacuucgugaaccauca

SEQ ID NO: 698152 - RNA, 20 nt, Artificial Sequence
  Synthetic
uauguaaaacaacgccauca

SEQ ID NO: 698153 - RNA, 20 nt, Artificial Sequence
  Synthetic
ccuuaauccaacaugcauca

SEQ ID NO: 698154 - RNA, 20 nt, Artificial Sequence
  Synthetic
uuguuuaucauguugcauca

SEQ ID NO: 698155 - RNA, 20 nt, Artificial Sequence
  Synthetic
ugacaaagugacaaucauca

SEQ ID NO: 698156 - RNA, 20 nt, Artificial Sequence
  Synthetic
uagaucauccuuacucauca

SEQ ID NO: 698157 - RNA, 20 nt, Artificial Sequence
  Synthetic
uguaugaauagagcucauca

SEQ ID NO: 698158 - RNA, 20 nt, Artificial Sequence
  Synthetic
auaccuuucuaugcagauca

SEQ ID NO: 698159 - RNA, 20 nt, Artificial Sequence
  Synthetic
caaaacaguauacaggauca

SEQ ID NO: 698160 - RNA, 20 nt, Artificial Sequence
  Synthetic
ucucuuaaagauacugauca

SEQ ID NO: 698161 - RNA, 20 nt, Artificial Sequence
  Synthetic
aauugcuuguguggugauca

SEQ ID NO: 698162 - RNA, 20 nt, Artificial Sequence
  Synthetic
uuagcauuaaccguguauca

SEQ ID NO: 698163 - RNA, 20 nt, Artificial Sequence
  Synthetic
ucccagcaauuauaaacuca

SEQ ID NO: 698164 - RNA, 20 nt, Artificial Sequence
  Synthetic
uguaaaucauagugaacuca

SEQ ID NO: 698165 - RNA, 20 nt, Artificial Sequence
  Synthetic
aauacuauucagguaacuca

SEQ ID NO: 698166 - RNA, 20 nt, Artificial Sequence
  Synthetic
cagugcuaaggauucacuca

SEQ ID NO: 698167 - RNA, 20 nt, Artificial Sequence
  Synthetic
accaaccuauauuugacuca

SEQ ID NO: 698168 - RNA, 20 nt, Artificial Sequence
  Synthetic
auugcacucacgaaaccuca

SEQ ID NO: 698169 - RNA, 20 nt, Artificial Sequence
  Synthetic
cuacucuccuuaugaccuca

SEQ ID NO: 698170 - RNA, 20 nt, Artificial Sequence
  Synthetic
aacuuguuggagaacccuca

SEQ ID NO: 698171 - RNA, 20 nt, Artificial Sequence
  Synthetic
uggaugaccaaugccccuca

SEQ ID NO: 698172 - RNA, 20 nt, Artificial Sequence
  Synthetic
ccuaaucugccuuccccuca

SEQ ID NO: 698173 - RNA, 20 nt, Artificial Sequence
  Synthetic
uaugaucguggucauccuca

SEQ ID NO: 698174 - RNA, 20 nt, Artificial Sequence
  Synthetic
ugcacauauucguguccuca

SEQ ID NO: 698175 - RNA, 20 nt, Artificial Sequence
  Synthetic
aguugaauuugucaagcuca

SEQ ID NO: 698176 - RNA, 20 nt, Artificial Sequence
  Synthetic
ugguuacaugguguagcuca

SEQ ID NO: 698177 - RNA, 20 nt, Artificial Sequence
  Synthetic
ugaagaucuguuucggcuca

SEQ ID NO: 698178 - RNA, 20 nt, Artificial Sequence
  Synthetic
agucuaccacaauaugcuca

SEQ ID NO: 698179 - RNA, 20 nt, Artificial Sequence
  Synthetic
uguuagagccuuuuugcuca

SEQ ID NO: 698180 - RNA, 20 nt, Artificial Sequence
  Synthetic
ccaaauagaaaaggaucuca

SEQ ID NO: 698181 - RNA, 20 nt, Artificial Sequence
  Synthetic
acaugcuaacagaccucuca

SEQ ID NO: 698182 - RNA, 20 nt, Artificial Sequence
  Synthetic
ucgcaacuguaguucucuca

SEQ ID NO: 698183 - RNA, 20 nt, Artificial Sequence
  Synthetic
caaaacacaucaucgucuca

SEQ ID NO: 698184 - RNA, 20 nt, Artificial Sequence
  Synthetic
cuaaacaucugagugucuca

SEQ ID NO: 698185 - RNA, 20 nt, Artificial Sequence
  Synthetic
cuguaucagagcacuucuca

SEQ ID NO: 698186 - RNA, 20 nt, Artificial Sequence
  Synthetic
ucaauacacgcaccuucuca

SEQ ID NO: 698187 - RNA, 20 nt, Artificial Sequence
  Synthetic
uaguaucagaaagguucuca

SEQ ID NO: 698188 - RNA, 20 nt, Artificial Sequence
  Synthetic
caccuagaccccuguucuca

SEQ ID NO: 698189 - RNA, 20 nt, Artificial Sequence
  Synthetic
aauuauaggaggcaaaguca

SEQ ID NO: 698190 - RNA, 20 nt, Artificial Sequence
  Synthetic
auggcugagaagguaaguca

SEQ ID NO: 698191 - RNA, 20 nt, Artificial Sequence
  Synthetic
cauaaaagauagggcaguca

SEQ ID NO: 698192 - RNA, 20 nt, Artificial Sequence
  Synthetic
agcccccucaaugucaguca

SEQ ID NO: 698193 - RNA, 20 nt, Artificial Sequence
  Synthetic
uuugcacaauuaaggaguca

SEQ ID NO: 698194 - RNA, 20 nt, Artificial Sequence
  Synthetic
ugcuagcaggauuggaguca

SEQ ID NO: 698195 - RNA, 20 nt, Artificial Sequence
  Synthetic
uugacuaguugcaugaguca

SEQ ID NO: 698196 - RNA, 20 nt, Artificial Sequence
  Synthetic
uaguaagaaggacuuaguca

SEQ ID NO: 698197 - RNA, 20 nt, Artificial Sequence
  Synthetic
acguuaggauaauaccguca

SEQ ID NO: 698198 - RNA, 20 nt, Artificial Sequence
  Synthetic
uuucucacaaagguccguca

SEQ ID NO: 698199 - RNA, 20 nt, Artificial Sequence
  Synthetic
cuuggagugcauuuccguca

SEQ ID NO: 698200 - RNA, 20 nt, Artificial Sequence
  Synthetic
ugucaagauggaccagguca

SEQ ID NO: 698201 - RNA, 20 nt, Artificial Sequence
  Synthetic
uaaaaccagagcuucgguca

SEQ ID NO: 698202 - RNA, 20 nt, Artificial Sequence
  Synthetic
aacugggauuaacgggguca

SEQ ID NO: 698203 - RNA, 20 nt, Artificial Sequence
  Synthetic
ccuucagggagacgggguca

SEQ ID NO: 698204 - RNA, 20 nt, Artificial Sequence
  Synthetic
uugaccauuucuggugguca

SEQ ID NO: 698205 - RNA, 20 nt, Artificial Sequence
  Synthetic
acgucuauuaacauugguca

SEQ ID NO: 698206 - RNA, 20 nt, Artificial Sequence
  Synthetic
uuauacaagcauauugguca

SEQ ID NO: 698207 - RNA, 20 nt, Artificial Sequence
  Synthetic
auugcacaugacacauguca

SEQ ID NO: 698208 - RNA, 20 nt, Artificial Sequence
  Synthetic
uagcaugagccagucuguca

SEQ ID NO: 698209 - RNA, 20 nt, Artificial Sequence
  Synthetic
ucaccuucugugaaguguca

SEQ ID NO: 698210 - RNA, 20 nt, Artificial Sequence
  Synthetic
accaauuacuguacguguca

SEQ ID NO: 698211 - RNA, 20 nt, Artificial Sequence
  Synthetic
aagggccgcucaggguguca

SEQ ID NO: 698212 - RNA, 20 nt, Artificial Sequence
  Synthetic
uguccccaaguaaauuguca

SEQ ID NO: 698213 - RNA, 20 nt, Artificial Sequence
  Synthetic
cuugacaauuucauuuguca

SEQ ID NO: 698214 - RNA, 20 nt, Artificial Sequence
  Synthetic
acguacuauuccguuuguca

SEQ ID NO: 698215 - RNA, 20 nt, Artificial Sequence
  Synthetic
caucuguaacugucaauuca

SEQ ID NO: 698216 - RNA, 20 nt, Artificial Sequence
  Synthetic
cugagaucuacaggaauuca

SEQ ID NO: 698217 - RNA, 20 nt, Artificial Sequence
  Synthetic
auaguuaggucacgcauuca

SEQ ID NO: 698218 - RNA, 20 nt, Artificial Sequence
  Synthetic
uauaggugguccuggauuca

SEQ ID NO: 698219 - RNA, 20 nt, Artificial Sequence
  Synthetic
cgcaaaagauuuuugauuca

SEQ ID NO: 698220 - RNA, 20 nt, Artificial Sequence
  Synthetic
auggcgccccuugcuauuca

SEQ ID NO: 698221 - RNA, 20 nt, Artificial Sequence
  Synthetic
acgauacuccaauuuauuca

SEQ ID NO: 698222 - RNA, 20 nt, Artificial Sequence
  Synthetic
accucgucagucagacuuca

SEQ ID NO: 698223 - RNA, 20 nt, Artificial Sequence
  Synthetic
cuccguuauauugaccuuca

SEQ ID NO: 698224 - RNA, 20 nt, Artificial Sequence
  Synthetic
aagguuccugauuaccuuca

SEQ ID NO: 698225 - RNA, 20 nt, Artificial Sequence
  Synthetic
ugaagcacguauggccuuca

SEQ ID NO: 698226 - RNA, 20 nt, Artificial Sequence
  Synthetic
aaaacgaggugaugccuuca

SEQ ID NO: 698227 - RNA, 20 nt, Artificial Sequence
  Synthetic
acuuguaguuagacgcuuca

SEQ ID NO: 698228 - RNA, 20 nt, Artificial Sequence
  Synthetic
ccgucuacuucuuugcuuca

SEQ ID NO: 698229 - RNA, 20 nt, Artificial Sequence
  Synthetic
uugugcaagggggcucuuca

SEQ ID NO: 698230 - RNA, 20 nt, Artificial Sequence
  Synthetic
caaggucucuggauucuuca

SEQ ID NO: 698231 - RNA, 20 nt, Artificial Sequence
  Synthetic
cauaucuauccauacguuca

SEQ ID NO: 698232 - RNA, 20 nt, Artificial Sequence
  Synthetic
cggggaagggacagcguuca

SEQ ID NO: 698233 - RNA, 20 nt, Artificial Sequence
  Synthetic
cagggccucgauuucguuca

SEQ ID NO: 698234 - RNA, 20 nt, Artificial Sequence
  Synthetic
cuuguguacuuaaugguuca

SEQ ID NO: 698235 - RNA, 20 nt, Artificial Sequence
  Synthetic
agaagucuaacgcauguuca

SEQ ID NO: 698236 - RNA, 20 nt, Artificial Sequence
  Synthetic
acucuacauaucccauuuca

SEQ ID NO: 698237 - RNA, 20 nt, Artificial Sequence
  Synthetic
auaccauuuggaugguuuca

SEQ ID NO: 698238 - RNA, 20 nt, Artificial Sequence
  Synthetic
uuccgggugcugcauuuuca

SEQ ID NO: 698239 - RNA, 20 nt, Artificial Sequence
  Synthetic
uuaggaacucgacuaaaaga

SEQ ID NO: 698240 - RNA, 20 nt, Artificial Sequence
  Synthetic
cuuccuaugggucucaaaga

SEQ ID NO: 698241 - RNA, 20 nt, Artificial Sequence
  Synthetic
uuugaaccuagagugaaaga

SEQ ID NO: 698242 - RNA, 20 nt, Artificial Sequence
  Synthetic
uggguagggcccguuaaaga

SEQ ID NO: 698243 - RNA, 20 nt, Artificial Sequence
  Synthetic
uuaaucaagcaccaacaaga

SEQ ID NO: 698244 - RNA, 20 nt, Artificial Sequence
  Synthetic
auuguuccaggcccacaaga

SEQ ID NO: 698245 - RNA, 20 nt, Artificial Sequence
  Synthetic
auuccgauguagucacaaga

SEQ ID NO: 698246 - RNA, 20 nt, Artificial Sequence
  Synthetic
auaauaguggacauccaaga

SEQ ID NO: 698247 - RNA, 20 nt, Artificial Sequence
  Synthetic
cgccagaaguauauccaaga

SEQ ID NO: 698248 - RNA, 20 nt, Artificial Sequence
  Synthetic
uagaauccuugguaucaaga

SEQ ID NO: 698249 - RNA, 20 nt, Artificial Sequence
  Synthetic
agggccauaguagcagaaga

SEQ ID NO: 698250 - RNA, 20 nt, Artificial Sequence
  Synthetic
acaccuuuaaacgcagaaga

SEQ ID NO: 698251 - RNA, 20 nt, Artificial Sequence
  Synthetic
ugcuuguagguuuccgaaga

SEQ ID NO: 698252 - RNA, 20 nt, Artificial Sequence
  Synthetic
aaaaaacgcugggcauaaga

SEQ ID NO: 698253 - RNA, 20 nt, Artificial Sequence
  Synthetic
ugcuacgugguagccuaaga

SEQ ID NO: 698254 - RNA, 20 nt, Artificial Sequence
  Synthetic
uuaacauacuggcucuaaga

SEQ ID NO: 698255 - RNA, 20 nt, Artificial Sequence
  Synthetic
uagagcuugaguuaguaaga

SEQ ID NO: 698256 - RNA, 20 nt, Artificial Sequence
  Synthetic
agccccuguaccagguaaga

SEQ ID NO: 698257 - RNA, 20 nt, Artificial Sequence
  Synthetic
accgaucaagaccgguaaga

SEQ ID NO: 698258 - RNA, 20 nt, Artificial Sequence
  Synthetic
aauggcuggugucuaacaga

SEQ ID NO: 698259 - RNA, 20 nt, Artificial Sequence
  Synthetic
uauguuacgaccuugacaga

SEQ ID NO: 698260 - RNA, 20 nt, Artificial Sequence
  Synthetic
aacguguguuucugcccaga

SEQ ID NO: 698261 - RNA, 20 nt, Artificial Sequence
  Synthetic
cgagaugaucaucaagcaga

SEQ ID NO: 698262 - RNA, 20 nt, Artificial Sequence
  Synthetic
aguugcacccauaaggcaga

SEQ ID NO: 698263 - RNA, 20 nt, Artificial Sequence
  Synthetic
acgucauugaaaacugcaga

SEQ ID NO: 698264 - RNA, 20 nt, Artificial Sequence
  Synthetic
cggcaauuggcuauugcaga

SEQ ID NO: 698265 - RNA, 20 nt, Artificial Sequence
  Synthetic
auuguggaggcuuuaucaga

SEQ ID NO: 698266 - RNA, 20 nt, Artificial Sequence
  Synthetic
augcacagcgucuagucaga

SEQ ID NO: 698267 - RNA, 20 nt, Artificial Sequence
  Synthetic
uuuaauacgcuaaugucaga

SEQ ID NO: 698268 - RNA, 20 nt, Artificial Sequence
  Synthetic
cuuguagcaaugacuucaga

SEQ ID NO: 698269 - RNA, 20 nt, Artificial Sequence
  Synthetic
aaaauuaaucguucuucaga

SEQ ID NO: 698270 - RNA, 20 nt, Artificial Sequence
  Synthetic
cguauauuguggcuuucaga

SEQ ID NO: 698271 - RNA, 20 nt, Artificial Sequence
  Synthetic
acgacuaggaaguuuucaga

SEQ ID NO: 698272 - RNA, 20 nt, Artificial Sequence
  Synthetic
ucagacaguugcucuagaga

SEQ ID NO: 698273 - RNA, 20 nt, Artificial Sequence
  Synthetic
cccaggguuagacuuagaga

SEQ ID NO: 698274 - RNA, 20 nt, Artificial Sequence
  Synthetic
aaaacuggagcuaaccgaga

SEQ ID NO: 698275 - RNA, 20 nt, Artificial Sequence
  Synthetic
aucuacauaauaacaggaga

SEQ ID NO: 698276 - RNA, 20 nt, Artificial Sequence
  Synthetic
aagacccagcuucacggaga

SEQ ID NO: 698277 - RNA, 20 nt, Artificial Sequence
  Synthetic
uacaucuaguuaaggggaga

SEQ ID NO: 698278 - RNA, 20 nt, Artificial Sequence
  Synthetic
aguagagucuacaggggaga

SEQ ID NO: 698279 - RNA, 20 nt, Artificial Sequence
  Synthetic
ccucacuagacgcugggaga

SEQ ID NO: 698280 - RNA, 20 nt, Artificial Sequence
  Synthetic
cuuaguuugagagcaugaga

SEQ ID NO: 698281 - RNA, 20 nt, Artificial Sequence
  Synthetic
cugucucgugucagcugaga

SEQ ID NO: 698282 - RNA, 20 nt, Artificial Sequence
  Synthetic
aauaggagcuauggcugaga

SEQ ID NO: 698283 - RNA, 20 nt, Artificial Sequence
  Synthetic
aauuaagcuaguugcugaga

SEQ ID NO: 698284 - RNA, 20 nt, Artificial Sequence
  Synthetic
ucguaauagagacugugaga

SEQ ID NO: 698285 - RNA, 20 nt, Artificial Sequence
  Synthetic
auacgguguccaaauugaga

SEQ ID NO: 698286 - RNA, 20 nt, Artificial Sequence
  Synthetic
agcuagaguggguauugaga

SEQ ID NO: 698287 - RNA, 20 nt, Artificial Sequence
  Synthetic
uaaacccucccuguuugaga

SEQ ID NO: 698288 - RNA, 20 nt, Artificial Sequence
  Synthetic
ugguaaaaacuugacauaga

SEQ ID NO: 698289 - RNA, 20 nt, Artificial Sequence
  Synthetic
cuuauuagaacaaccauaga

SEQ ID NO: 698290 - RNA, 20 nt, Artificial Sequence
  Synthetic
cugguauacagggccauaga

SEQ ID NO: 698291 - RNA, 20 nt, Artificial Sequence
  Synthetic
uuauaaagggugaucauaga

SEQ ID NO: 698292 - RNA, 20 nt, Artificial Sequence
  Synthetic
accauuguuucacaacuaga

SEQ ID NO: 698293 - RNA, 20 nt, Artificial Sequence
  Synthetic
ccaucagucagcccacuaga

SEQ ID NO: 698294 - RNA, 20 nt, Artificial Sequence
  Synthetic
uacaccaagccugcacuaga

SEQ ID NO: 698295 - RNA, 20 nt, Artificial Sequence
  Synthetic
uaacuagaguuuggacuaga

SEQ ID NO: 698296 - RNA, 20 nt, Artificial Sequence
  Synthetic
auaguagccccuacccuaga

SEQ ID NO: 698297 - RNA, 20 nt, Artificial Sequence
  Synthetic
uuacuguaaugauuccuaga

SEQ ID NO: 698298 - RNA, 20 nt, Artificial Sequence
  Synthetic
acuuuggggaagucucuaga

SEQ ID NO: 698299 - RNA, 20 nt, Artificial Sequence
  Synthetic
caauuuagucguuaaguaga

SEQ ID NO: 698300 - RNA, 20 nt, Artificial Sequence
  Synthetic
uuuaguugaacgccaguaga

SEQ ID NO: 698301 - RNA, 20 nt, Artificial Sequence
  Synthetic
aaagccauuuggcggguaga

SEQ ID NO: 698302 - RNA, 20 nt, Artificial Sequence
  Synthetic
ucauaaaacauugggguaga

SEQ ID NO: 698303 - RNA, 20 nt, Artificial Sequence
  Synthetic
ucgcugauacuaccuguaga

SEQ ID NO: 698304 - RNA, 20 nt, Artificial Sequence
  Synthetic
aguaccucauaagcauuaga

SEQ ID NO: 698305 - RNA, 20 nt, Artificial Sequence
  Synthetic
ucacaugauggacgauuaga

SEQ ID NO: 698306 - RNA, 20 nt, Artificial Sequence
  Synthetic
cucagguauugucuauuaga

SEQ ID NO: 698307 - RNA, 20 nt, Artificial Sequence
  Synthetic
caguagcaaaggcacuuaga

SEQ ID NO: 698308 - RNA, 20 nt, Artificial Sequence
  Synthetic
ucauagcgcuccuacuuaga

SEQ ID NO: 698309 - RNA, 20 nt, Artificial Sequence
  Synthetic
uccuucacuacuccuuuaga

SEQ ID NO: 698310 - RNA, 20 nt, Artificial Sequence
  Synthetic
cauggaggaacucguuuaga

SEQ ID NO: 698311 - RNA, 20 nt, Artificial Sequence
  Synthetic
ccuuugcugcagauaaacga

SEQ ID NO: 698312 - RNA, 20 nt, Artificial Sequence
  Synthetic
caguacauaguuaccaacga

SEQ ID NO: 698313 - RNA, 20 nt, Artificial Sequence
  Synthetic
auuuuacaggagggcaacga

SEQ ID NO: 698314 - RNA, 20 nt, Artificial Sequence
  Synthetic
cuuuguuucguucucaacga

SEQ ID NO: 698315 - RNA, 20 nt, Artificial Sequence
  Synthetic
aguauuuaagguguacacga

SEQ ID NO: 698316 - RNA, 20 nt, Artificial Sequence
  Synthetic
aggaggacauuauaccacga

SEQ ID NO: 698317 - RNA, 20 nt, Artificial Sequence
  Synthetic
aaacaauuuuuacaucacga

SEQ ID NO: 698318 - RNA, 20 nt, Artificial Sequence
  Synthetic
auguacuuuuucuaagacga

SEQ ID NO: 698319 - RNA, 20 nt, Artificial Sequence
  Synthetic
auccugaaguacaaggacga

SEQ ID NO: 698320 - RNA, 20 nt, Artificial Sequence
  Synthetic
ucuuccccgacugacuacga

SEQ ID NO: 698321 - RNA, 20 nt, Artificial Sequence
  Synthetic
uguaguggaugcauguacga

SEQ ID NO: 698322 - RNA, 20 nt, Artificial Sequence
  Synthetic
auuaguuagcagaauuacga

SEQ ID NO: 698323 - RNA, 20 nt, Artificial Sequence
  Synthetic
auuccagauugaacuuacga

SEQ ID NO: 698324 - RNA, 20 nt, Artificial Sequence
  Synthetic
uguaguggaggcaguuacga

SEQ ID NO: 698325 - RNA, 20 nt, Artificial Sequence
  Synthetic
uccguagcaaacagaaccga

SEQ ID NO: 698326 - RNA, 20 nt, Artificial Sequence
  Synthetic
auagacccgaacagaaccga

SEQ ID NO: 698327 - RNA, 20 nt, Artificial Sequence
  Synthetic
caggccccaauauacaccga

SEQ ID NO: 698328 - RNA, 20 nt, Artificial Sequence
  Synthetic
uacaaauucuaauccaccga

SEQ ID NO: 698329 - RNA, 20 nt, Artificial Sequence
  Synthetic
uccuaagucacuuucaccga

SEQ ID NO: 698330 - RNA, 20 nt, Artificial Sequence
  Synthetic
aaaugaagcgacuugaccga

SEQ ID NO: 698331 - RNA, 20 nt, Artificial Sequence
  Synthetic
aucuauuaaguggauaccga

SEQ ID NO: 698332 - RNA, 20 nt, Artificial Sequence
  Synthetic
aauuaaagaagagcuaccga

SEQ ID NO: 698333 - RNA, 20 nt, Artificial Sequence
  Synthetic
aucuacucuaguuguaccga

SEQ ID NO: 698334 - RNA, 20 nt, Artificial Sequence
  Synthetic
uugggugaauuagcacccga

SEQ ID NO: 698335 - RNA, 20 nt, Artificial Sequence
  Synthetic
aaacucccaacaggacccga

SEQ ID NO: 698336 - RNA, 20 nt, Artificial Sequence
  Synthetic
uuaaccuaucuuuuccccga

SEQ ID NO: 698337 - RNA, 20 nt, Artificial Sequence
  Synthetic
ucuacccuuuugacggccga

SEQ ID NO: 698338 - RNA, 20 nt, Artificial Sequence
  Synthetic
agcccaggagcgcuugccga

SEQ ID NO: 698339 - RNA, 20 nt, Artificial Sequence
  Synthetic
ccgcuacuuauagaauccga

SEQ ID NO: 698340 - RNA, 20 nt, Artificial Sequence
  Synthetic
uguccaacacuaugauccga

SEQ ID NO: 698341 - RNA, 20 nt, Artificial Sequence
  Synthetic
auuaagacuaacgaaagcga

SEQ ID NO: 698342 - RNA, 20 nt, Artificial Sequence
  Synthetic
acuaugugguuugcuggcga

SEQ ID NO: 698343 - RNA, 20 nt, Artificial Sequence
  Synthetic
cacugcauagcuguuggcga

SEQ ID NO: 698344 - RNA, 20 nt, Artificial Sequence
  Synthetic
uuuaagacuuuuggcugcga

SEQ ID NO: 698345 - RNA, 20 nt, Artificial Sequence
  Synthetic
ugguguuugaaugucugcga

SEQ ID NO: 698346 - RNA, 20 nt, Artificial Sequence
  Synthetic
cagguuuuuacugugugcga

SEQ ID NO: 698347 - RNA, 20 nt, Artificial Sequence
  Synthetic
aauaaguuaacuuugugcga

SEQ ID NO: 698348 - RNA, 20 nt, Artificial Sequence
  Synthetic
ugucauagccauuuuaucga

SEQ ID NO: 698349 - RNA, 20 nt, Artificial Sequence
  Synthetic
aguccuuggcaacaacucga

SEQ ID NO: 698350 - RNA, 20 nt, Artificial Sequence
  Synthetic
auucaucgcaacgaacucga

SEQ ID NO: 698351 - RNA, 20 nt, Artificial Sequence
  Synthetic
aggcagacuauuggacucga

SEQ ID NO: 698352 - RNA, 20 nt, Artificial Sequence
  Synthetic
acagcgagguuucugcucga

SEQ ID NO: 698353 - RNA, 20 nt, Artificial Sequence
  Synthetic
uucucuuaaauuccagucga

SEQ ID NO: 698354 - RNA, 20 nt, Artificial Sequence
  Synthetic
aacaucugcuaagaugucga

SEQ ID NO: 698355 - RNA, 20 nt, Artificial Sequence
  Synthetic
aguuugacgcagccauucga

SEQ ID NO: 698356 - RNA, 20 nt, Artificial Sequence
  Synthetic
agcuuggccuauagauucga

SEQ ID NO: 698357 - RNA, 20 nt, Artificial Sequence
  Synthetic
uggacauuagaacaguucga

SEQ ID NO: 698358 - RNA, 20 nt, Artificial Sequence
  Synthetic
ccccuuagucauugaaagga

SEQ ID NO: 698359 - RNA, 20 nt, Artificial Sequence
  Synthetic
uaguacuugaaaaccaagga

SEQ ID NO: 698360 - RNA, 20 nt, Artificial Sequence
  Synthetic
ucuaagcaauaacucaagga

SEQ ID NO: 698361 - RNA, 20 nt, Artificial Sequence
  Synthetic
agcucuuacuuauuacagga

SEQ ID NO: 698362 - RNA, 20 nt, Artificial Sequence
  Synthetic
augacgcucccgagucagga

SEQ ID NO: 698363 - RNA, 20 nt, Artificial Sequence
  Synthetic
uacauguuggcaauucagga

SEQ ID NO: 698364 - RNA, 20 nt, Artificial Sequence
  Synthetic
ccguggaccggguuggagga

SEQ ID NO: 698365 - RNA, 20 nt, Artificial Sequence
  Synthetic
aguaguauugugaaugagga

SEQ ID NO: 698366 - RNA, 20 nt, Artificial Sequence
  Synthetic
cccgcucaaacugcugagga

SEQ ID NO: 698367 - RNA, 20 nt, Artificial Sequence
  Synthetic
uaggagucaccucaauagga

SEQ ID NO: 698368 - RNA, 20 nt, Artificial Sequence
  Synthetic
acauccccuauugaauagga

SEQ ID NO: 698369 - RNA, 20 nt, Artificial Sequence
  Synthetic
cggagauugaagacauagga

SEQ ID NO: 698370 - RNA, 20 nt, Artificial Sequence
  Synthetic
acgcuucaugguuuauagga

SEQ ID NO: 698371 - RNA, 20 nt, Artificial Sequence
  Synthetic
aaaucuaguuaucacuagga

SEQ ID NO: 698372 - RNA, 20 nt, Artificial Sequence
  Synthetic
caugauacguauuucuagga

SEQ ID NO: 698373 - RNA, 20 nt, Artificial Sequence
  Synthetic
aggguugccaaacuguagga

SEQ ID NO: 698374 - RNA, 20 nt, Artificial Sequence
  Synthetic
auagccgguaaucuguagga

SEQ ID NO: 698375 - RNA, 20 nt, Artificial Sequence
  Synthetic
uggucggcuggcacuuagga

SEQ ID NO: 698376 - RNA, 20 nt, Artificial Sequence
  Synthetic
ucggugaaagugacuuagga

SEQ ID NO: 698377 - RNA, 20 nt, Artificial Sequence
  Synthetic
cugugguauuaaaacacgga

SEQ ID NO: 698378 - RNA, 20 nt, Artificial Sequence
  Synthetic
aguauacuagaagauacgga

SEQ ID NO: 698379 - RNA, 20 nt, Artificial Sequence
  Synthetic
cacucaggcauuacuacgga

SEQ ID NO: 698380 - RNA, 20 nt, Artificial Sequence
  Synthetic
auuaaaauugaaugaccgga

SEQ ID NO: 698381 - RNA, 20 nt, Artificial Sequence
  Synthetic
uugaguacagagcaagcgga

SEQ ID NO: 698382 - RNA, 20 nt, Artificial Sequence
  Synthetic
aagaaagccuacacaucgga

SEQ ID NO: 698383 - RNA, 20 nt, Artificial Sequence
  Synthetic
cuccaaauaguaccaaggga

SEQ ID NO: 698384 - RNA, 20 nt, Artificial Sequence
  Synthetic
uagaguacggcugggaggga

SEQ ID NO: 698385 - RNA, 20 nt, Artificial Sequence
  Synthetic
ugggggcccuguacuaggga

SEQ ID NO: 698386 - RNA, 20 nt, Artificial Sequence
  Synthetic
ugcaccucauuauaagggga

SEQ ID NO: 698387 - RNA, 20 nt, Artificial Sequence
  Synthetic
cuaaguggaaauaaggggga

SEQ ID NO: 698388 - RNA, 20 nt, Artificial Sequence
  Synthetic
uaguuuugguucuaggggga

SEQ ID NO: 698389 - RNA, 20 nt, Artificial Sequence
  Synthetic
aaaggcguuuguauggggga

SEQ ID NO: 698390 - RNA, 20 nt, Artificial Sequence
  Synthetic
agucuggucaaauuggggga

SEQ ID NO: 698391 - RNA, 20 nt, Artificial Sequence
  Synthetic
cugcuugaaauuaaguggga

SEQ ID NO: 698392 - RNA, 20 nt, Artificial Sequence
  Synthetic
ccaaauacaugaucguggga

SEQ ID NO: 698393 - RNA, 20 nt, Artificial Sequence
  Synthetic
cuaguagcuguaagguggga

SEQ ID NO: 698394 - RNA, 20 nt, Artificial Sequence
  Synthetic
acccuaccgcucaaaaugga

SEQ ID NO: 698395 - RNA, 20 nt, Artificial Sequence
  Synthetic
aacgaguuaguuaaaaugga

SEQ ID NO: 698396 - RNA, 20 nt, Artificial Sequence
  Synthetic
cauacguauagucacaugga

SEQ ID NO: 698397 - RNA, 20 nt, Artificial Sequence
  Synthetic
agacuagcuggcuacaugga

SEQ ID NO: 698398 - RNA, 20 nt, Artificial Sequence
  Synthetic
ccucauuauaaggggaugga

SEQ ID NO: 698399 - RNA, 20 nt, Artificial Sequence
  Synthetic
uagaggcuacgcuugaugga

SEQ ID NO: 698400 - RNA, 20 nt, Artificial Sequence
  Synthetic
uacagacuuuuauguaugga

SEQ ID NO: 698401 - RNA, 20 nt, Artificial Sequence
  Synthetic
uuccaaccuguccaacugga

SEQ ID NO: 698402 - RNA, 20 nt, Artificial Sequence
  Synthetic
caaaccagguuuguacugga

SEQ ID NO: 698403 - RNA, 20 nt, Artificial Sequence
  Synthetic
agccauacuguuccccugga

SEQ ID NO: 698404 - RNA, 20 nt, Artificial Sequence
  Synthetic
uaccagugugugucccugga

SEQ ID NO: 698405 - RNA, 20 nt, Artificial Sequence
  Synthetic
uuaccauucaacauccugga

SEQ ID NO: 698406 - RNA, 20 nt, Artificial Sequence
  Synthetic
aaacaaauucgacuccugga

SEQ ID NO: 698407 - RNA, 20 nt, Artificial Sequence
  Synthetic
aauauggaacaccagcugga

SEQ ID NO: 698408 - RNA, 20 nt, Artificial Sequence
  Synthetic
aaggauuuccgccagcugga

SEQ ID NO: 698409 - RNA, 20 nt, Artificial Sequence
  Synthetic
uagaauuuuacguugcugga

SEQ ID NO: 698410 - RNA, 20 nt, Artificial Sequence
  Synthetic
ugccaauggacuucucugga

SEQ ID NO: 698411 - RNA, 20 nt, Artificial Sequence
  Synthetic
agcucaguuacggaagugga

SEQ ID NO: 698412 - RNA, 20 nt, Artificial Sequence
  Synthetic
agacccugccugcuagugga

SEQ ID NO: 698413 - RNA, 20 nt, Artificial Sequence
  Synthetic
ccagugugcggucuagugga

SEQ ID NO: 698414 - RNA, 20 nt, Artificial Sequence
  Synthetic
aaccaaauggcucucgugga

SEQ ID NO: 698415 - RNA, 20 nt, Artificial Sequence
  Synthetic
uaugggcaccagaaggugga

SEQ ID NO: 698416 - RNA, 20 nt, Artificial Sequence
  Synthetic
cgcaguuguauguaggugga

SEQ ID NO: 698417 - RNA, 20 nt, Artificial Sequence
  Synthetic
ugagguaugguuggggugga

SEQ ID NO: 698418 - RNA, 20 nt, Artificial Sequence
  Synthetic
uuacaaccaaccauggugga

SEQ ID NO: 698419 - RNA, 20 nt, Artificial Sequence
  Synthetic
ugucugcauuaacuggugga

SEQ ID NO: 698420 - RNA, 20 nt, Artificial Sequence
  Synthetic
agggauuccgucuuggugga

SEQ ID NO: 698421 - RNA, 20 nt, Artificial Sequence
  Synthetic
cuuuaugcuuucgaugugga

SEQ ID NO: 698422 - RNA, 20 nt, Artificial Sequence
  Synthetic
cauacugggcaugcugugga

SEQ ID NO: 698423 - RNA, 20 nt, Artificial Sequence
  Synthetic
aucgcuagaacauaauugga

SEQ ID NO: 698424 - RNA, 20 nt, Artificial Sequence
  Synthetic
aagcuuuagcauauauugga

SEQ ID NO: 698425 - RNA, 20 nt, Artificial Sequence
  Synthetic
ucuucaauaccucacuugga

SEQ ID NO: 698426 - RNA, 20 nt, Artificial Sequence
  Synthetic
uugagggaauucugcuugga

SEQ ID NO: 698427 - RNA, 20 nt, Artificial Sequence
  Synthetic
accuacauccuauucuugga

SEQ ID NO: 698428 - RNA, 20 nt, Artificial Sequence
  Synthetic
uugaaccuuaauagguugga

SEQ ID NO: 698429 - RNA, 20 nt, Artificial Sequence
  Synthetic
ugaucgaagauauauuugga

SEQ ID NO: 698430 - RNA, 20 nt, Artificial Sequence
  Synthetic
uugagucauagggguuugga

SEQ ID NO: 698431 - RNA, 20 nt, Artificial Sequence
  Synthetic
aaguuagugcaucuuuugga

SEQ ID NO: 698432 - RNA, 20 nt, Artificial Sequence
  Synthetic
caauauucgacacaaaauga

SEQ ID NO: 698433 - RNA, 20 nt, Artificial Sequence
  Synthetic
ccugcacccuuguaaaauga

SEQ ID NO: 698434 - RNA, 20 nt, Artificial Sequence
  Synthetic
caaaucacugacuacaauga

SEQ ID NO: 698435 - RNA, 20 nt, Artificial Sequence
  Synthetic
ucuagaaaucuaaccaauga

SEQ ID NO: 698436 - RNA, 20 nt, Artificial Sequence
  Synthetic
uggguagcuucaugcaauga

SEQ ID NO: 698437 - RNA, 20 nt, Artificial Sequence
  Synthetic
cguugucauggacauaauga

SEQ ID NO: 698438 - RNA, 20 nt, Artificial Sequence
  Synthetic
aaacgcacugauuguaauga

SEQ ID NO: 698439 - RNA, 20 nt, Artificial Sequence
  Synthetic
accagcacucuagaacauga

SEQ ID NO: 698440 - RNA, 20 nt, Artificial Sequence
  Synthetic
aguaaccugggaguacauga

SEQ ID NO: 698441 - RNA, 20 nt, Artificial Sequence
  Synthetic
aucacacaauugguacauga

SEQ ID NO: 698442 - RNA, 20 nt, Artificial Sequence
  Synthetic
ccaauuuuccuuguacauga

SEQ ID NO: 698443 - RNA, 20 nt, Artificial Sequence
  Synthetic
cucagugguuaucaccauga

SEQ ID NO: 698444 - RNA, 20 nt, Artificial Sequence
  Synthetic
augggguggguaacccauga

SEQ ID NO: 698445 - RNA, 20 nt, Artificial Sequence
  Synthetic
agucgagaagcuuuccauga

SEQ ID NO: 698446 - RNA, 20 nt, Artificial Sequence
  Synthetic
cacuaguacuuuuuccauga

SEQ ID NO: 698447 - RNA, 20 nt, Artificial Sequence
  Synthetic
ucaggugaugccgagcauga

SEQ ID NO: 698448 - RNA, 20 nt, Artificial Sequence
  Synthetic
agguauagguaccaucauga

SEQ ID NO: 698449 - RNA, 20 nt, Artificial Sequence
  Synthetic
ccacuaccaacuucucauga

SEQ ID NO: 698450 - RNA, 20 nt, Artificial Sequence
  Synthetic
uuugacaggugaauucauga

SEQ ID NO: 698451 - RNA, 20 nt, Artificial Sequence
  Synthetic
ucguacagcuuuccagauga

SEQ ID NO: 698452 - RNA, 20 nt, Artificial Sequence
  Synthetic
aagacucuuguucuagauga

SEQ ID NO: 698453 - RNA, 20 nt, Artificial Sequence
  Synthetic
uguccgugaagaaacgauga

SEQ ID NO: 698454 - RNA, 20 nt, Artificial Sequence
  Synthetic
uaguuuuaguggaacgauga

SEQ ID NO: 698455 - RNA, 20 nt, Artificial Sequence
  Synthetic
ugccaccugauggacgauga

SEQ ID NO: 698456 - RNA, 20 nt, Artificial Sequence
  Synthetic
uugauuugccuuaucgauga

SEQ ID NO: 698457 - RNA, 20 nt, Artificial Sequence
  Synthetic
uuucaacuucuaucggauga

SEQ ID NO: 698458 - RNA, 20 nt, Artificial Sequence
  Synthetic
uccaccuauuauguggauga

SEQ ID NO: 698459 - RNA, 20 nt, Artificial Sequence
  Synthetic
aaagaccacgcuauugauga

SEQ ID NO: 698460 - RNA, 20 nt, Artificial Sequence
  Synthetic
uauaaguucaucugauauga

SEQ ID NO: 698461 - RNA, 20 nt, Artificial Sequence
  Synthetic
cacuagaguguguuauauga

SEQ ID NO: 698462 - RNA, 20 nt, Artificial Sequence
  Synthetic
cuauuucaaaggcccuauga

SEQ ID NO: 698463 - RNA, 20 nt, Artificial Sequence
  Synthetic
uauuuuaagcaagcguauga

SEQ ID NO: 698464 - RNA, 20 nt, Artificial Sequence
  Synthetic
acacaccagugaaguuauga

SEQ ID NO: 698465 - RNA, 20 nt, Artificial Sequence
  Synthetic
uguauguuuacgaaaacuga

SEQ ID NO: 698466 - RNA, 20 nt, Artificial Sequence
  Synthetic
uuaauagaccucuaaacuga

SEQ ID NO: 698467 - RNA, 20 nt, Artificial Sequence
  Synthetic
acauccugccaaugaacuga

SEQ ID NO: 698468 - RNA, 20 nt, Artificial Sequence
  Synthetic
uugcugcaaaauguaacuga

SEQ ID NO: 698469 - RNA, 20 nt, Artificial Sequence
  Synthetic
acucucaucaaggacacuga

SEQ ID NO: 698470 - RNA, 20 nt, Artificial Sequence
  Synthetic
cauauaggccaggccacuga

SEQ ID NO: 698471 - RNA, 20 nt, Artificial Sequence
  Synthetic
aaacauccaguaaagacuga

SEQ ID NO: 698472 - RNA, 20 nt, Artificial Sequence
  Synthetic
ugaaguaguggagagacuga

SEQ ID NO: 698473 - RNA, 20 nt, Artificial Sequence
  Synthetic
caguucaccucagggacuga

SEQ ID NO: 698474 - RNA, 20 nt, Artificial Sequence
  Synthetic
uauuacccaccccugacuga

SEQ ID NO: 698475 - RNA, 20 nt, Artificial Sequence
  Synthetic
cacuuggcaugauugacuga

SEQ ID NO: 698476 - RNA, 20 nt, Artificial Sequence
  Synthetic
ugucaauggaucaaaccuga

SEQ ID NO: 698477 - RNA, 20 nt, Artificial Sequence
  Synthetic
uuuaagcuugaagcaccuga

SEQ ID NO: 698478 - RNA, 20 nt, Artificial Sequence
  Synthetic
aucaagguaugcuccccuga

SEQ ID NO: 698479 - RNA, 20 nt, Artificial Sequence
  Synthetic
aagggcugauaagggccuga

SEQ ID NO: 698480 - RNA, 20 nt, Artificial Sequence
  Synthetic
aauucguacauaucuccuga

SEQ ID NO: 698481 - RNA, 20 nt, Artificial Sequence
  Synthetic
aaacuaugcauaugcgcuga

SEQ ID NO: 698482 - RNA, 20 nt, Artificial Sequence
  Synthetic
acuucuguaugagaggcuga

SEQ ID NO: 698483 - RNA, 20 nt, Artificial Sequence
  Synthetic
uuguguauggcaagggcuga

SEQ ID NO: 698484 - RNA, 20 nt, Artificial Sequence
  Synthetic
aaaaaccggagauuggcuga

SEQ ID NO: 698485 - RNA, 20 nt, Artificial Sequence
  Synthetic
acaggucauuaggaugcuga

SEQ ID NO: 698486 - RNA, 20 nt, Artificial Sequence
  Synthetic
auguagcaacacguugcuga

SEQ ID NO: 698487 - RNA, 20 nt, Artificial Sequence
  Synthetic
aggcugccacgguaaucuga

SEQ ID NO: 698488 - RNA, 20 nt, Artificial Sequence
  Synthetic
cuacuuuagcauccaucuga

SEQ ID NO: 698489 - RNA, 20 nt, Artificial Sequence
  Synthetic
uuaucuuagcccugaucuga

SEQ ID NO: 698490 - RNA, 20 nt, Artificial Sequence
  Synthetic
acuagugaucauggcucuga

SEQ ID NO: 698491 - RNA, 20 nt, Artificial Sequence
  Synthetic
uuuucucgauugaugucuga

SEQ ID NO: 698492 - RNA, 20 nt, Artificial Sequence
  Synthetic
ucguuuccuagcacuucuga

SEQ ID NO: 698493 - RNA, 20 nt, Artificial Sequence
  Synthetic
aaugucucugcccaaaguga

SEQ ID NO: 698494 - RNA, 20 nt, Artificial Sequence
  Synthetic
accugggcaguauucaguga

SEQ ID NO: 698495 - RNA, 20 nt, Artificial Sequence
  Synthetic
uuaaugagcaagucgaguga

SEQ ID NO: 698496 - RNA, 20 nt, Artificial Sequence
  Synthetic
uugauacgcucugggaguga

SEQ ID NO: 698497 - RNA, 20 nt, Artificial Sequence
  Synthetic
ucuagaggaggauauaguga

SEQ ID NO: 698498 - RNA, 20 nt, Artificial Sequence
  Synthetic
auuaugggucacaaacguga

SEQ ID NO: 698499 - RNA, 20 nt, Artificial Sequence
  Synthetic
agaaguucugcucuacguga

SEQ ID NO: 698500 - RNA, 20 nt, Artificial Sequence
  Synthetic
uuacuucaauucaaucguga

SEQ ID NO: 698501 - RNA, 20 nt, Artificial Sequence
  Synthetic
ucuguuuaagucuaagguga

SEQ ID NO: 698502 - RNA, 20 nt, Artificial Sequence
  Synthetic
cagauacgucucauagguga

SEQ ID NO: 698503 - RNA, 20 nt, Artificial Sequence
  Synthetic
uggguucccuacuucgguga

SEQ ID NO: 698504 - RNA, 20 nt, Artificial Sequence
  Synthetic
aaacaugaguauggggguga

SEQ ID NO: 698505 - RNA, 20 nt, Artificial Sequence
  Synthetic
cuagauaugggauuggguga

SEQ ID NO: 698506 - RNA, 20 nt, Artificial Sequence
  Synthetic
ccgcaaauaggguuggguga

SEQ ID NO: 698507 - RNA, 20 nt, Artificial Sequence
  Synthetic
caccauauuucuccugguga

SEQ ID NO: 698508 - RNA, 20 nt, Artificial Sequence
  Synthetic
cgauugauauagcuauguga

SEQ ID NO: 698509 - RNA, 20 nt, Artificial Sequence
  Synthetic
uuuaaagacgaucucuguga

SEQ ID NO: 698510 - RNA, 20 nt, Artificial Sequence
  Synthetic
caacuuguucuagucuguga

SEQ ID NO: 698511 - RNA, 20 nt, Artificial Sequence
  Synthetic
ccccugucucggaaguguga

SEQ ID NO: 698512 - RNA, 20 nt, Artificial Sequence
  Synthetic
cgagaacaaguucuguguga

SEQ ID NO: 698513 - RNA, 20 nt, Artificial Sequence
  Synthetic
aaggagggccuggauuguga

SEQ ID NO: 698514 - RNA, 20 nt, Artificial Sequence
  Synthetic
cggugcccugcauauuguga

SEQ ID NO: 698515 - RNA, 20 nt, Artificial Sequence
  Synthetic
agucuauguacaccuuguga

SEQ ID NO: 698516 - RNA, 20 nt, Artificial Sequence
  Synthetic
ugacguaaaaguggaauuga

SEQ ID NO: 698517 - RNA, 20 nt, Artificial Sequence
  Synthetic
aauacaggagacguaauuga

SEQ ID NO: 698518 - RNA, 20 nt, Artificial Sequence
  Synthetic
cuucucgguaaauuaauuga

SEQ ID NO: 698519 - RNA, 20 nt, Artificial Sequence
  Synthetic
cuucguagguacuuaauuga

SEQ ID NO: 698520 - RNA, 20 nt, Artificial Sequence
  Synthetic
aguugcaaagcaugcauuga

SEQ ID NO: 698521 - RNA, 20 nt, Artificial Sequence
  Synthetic
aaucuguacuaugucauuga

SEQ ID NO: 698522 - RNA, 20 nt, Artificial Sequence
  Synthetic
cgaagacugcuauguauuga

SEQ ID NO: 698523 - RNA, 20 nt, Artificial Sequence
  Synthetic
cccaauuugaccagacuuga

SEQ ID NO: 698524 - RNA, 20 nt, Artificial Sequence
  Synthetic
cacugcuggcauauacuuga

SEQ ID NO: 698525 - RNA, 20 nt, Artificial Sequence
  Synthetic
uccgucuuugacaaccuuga

SEQ ID NO: 698526 - RNA, 20 nt, Artificial Sequence
  Synthetic
ccaccauacuggaaccuuga

SEQ ID NO: 698527 - RNA, 20 nt, Artificial Sequence
  Synthetic
caugcaucaguagcccuuga

SEQ ID NO: 698528 - RNA, 20 nt, Artificial Sequence
  Synthetic
uacucaugcuuugagcuuga

SEQ ID NO: 698529 - RNA, 20 nt, Artificial Sequence
  Synthetic
uauauagaggcuacgcuuga

SEQ ID NO: 698530 - RNA, 20 nt, Artificial Sequence
  Synthetic
augggcuaguuacggcuuga

SEQ ID NO: 698531 - RNA, 20 nt, Artificial Sequence
  Synthetic
aagaggguagacccucuuga

SEQ ID NO: 698532 - RNA, 20 nt, Artificial Sequence
  Synthetic
auguuauggccgucucuuga

SEQ ID NO: 698533 - RNA, 20 nt, Artificial Sequence
  Synthetic
ccucccaaaaaucuucuuga

SEQ ID NO: 698534 - RNA, 20 nt, Artificial Sequence
  Synthetic
uguauuacuugggaaguuga

SEQ ID NO: 698535 - RNA, 20 nt, Artificial Sequence
  Synthetic
uuaggacucuuguuaguuga

SEQ ID NO: 698536 - RNA, 20 nt, Artificial Sequence
  Synthetic
agguuggcaaacaguguuga

SEQ ID NO: 698537 - RNA, 20 nt, Artificial Sequence
  Synthetic
caaaacagaggauaguuuga

SEQ ID NO: 698538 - RNA, 20 nt, Artificial Sequence
  Synthetic
uggauguguaucggguuuga

SEQ ID NO: 698539 - RNA, 20 nt, Artificial Sequence
  Synthetic
uguaguacauacugguuuga

SEQ ID NO: 698540 - RNA, 20 nt, Artificial Sequence
  Synthetic
uauuucacgcagauguuuga

SEQ ID NO: 698541 - RNA, 20 nt, Artificial Sequence
  Synthetic
aaccuuauugggcuguuuga

SEQ ID NO: 698542 - RNA, 20 nt, Artificial Sequence
  Synthetic
auuggguagucucauuuuga

SEQ ID NO: 698543 - RNA, 20 nt, Artificial Sequence
  Synthetic
cuggcuccacauggaaaaua

SEQ ID NO: 698544 - RNA, 20 nt, Artificial Sequence
  Synthetic
uucaguaacucguuaaaaua

SEQ ID NO: 698545 - RNA, 20 nt, Artificial Sequence
  Synthetic
uaaaaggaauaccgcaaaua

SEQ ID NO: 698546 - RNA, 20 nt, Artificial Sequence
  Synthetic
cagcacagcgauguacaaua

SEQ ID NO: 698547 - RNA, 20 nt, Artificial Sequence
  Synthetic
ugcuauagacuugcgcaaua

SEQ ID NO: 698548 - RNA, 20 nt, Artificial Sequence
  Synthetic
acaggcccccauugucaaua

SEQ ID NO: 698549 - RNA, 20 nt, Artificial Sequence
  Synthetic
accuagcaucaccuucaaua

SEQ ID NO: 698550 - RNA, 20 nt, Artificial Sequence
  Synthetic
agaccccgaagcaaagaaua

SEQ ID NO: 698551 - RNA, 20 nt, Artificial Sequence
  Synthetic
agguaaggggauuucgaaua

SEQ ID NO: 698552 - RNA, 20 nt, Artificial Sequence
  Synthetic
acuuggagcuuaaaggaaua

SEQ ID NO: 698553 - RNA, 20 nt, Artificial Sequence
  Synthetic
cugaucucagaugaggaaua

SEQ ID NO: 698554 - RNA, 20 nt, Artificial Sequence
  Synthetic
ucauauccucuccaugaaua

SEQ ID NO: 698555 - RNA, 20 nt, Artificial Sequence
  Synthetic
uguuaaucuuugggugaaua

SEQ ID NO: 698556 - RNA, 20 nt, Artificial Sequence
  Synthetic
ugacucaacuucucauaaua

SEQ ID NO: 698557 - RNA, 20 nt, Artificial Sequence
  Synthetic
uuccgguggcccagauaaua

SEQ ID NO: 698558 - RNA, 20 nt, Artificial Sequence
  Synthetic
cugaaccacgugauauaaua

SEQ ID NO: 698559 - RNA, 20 nt, Artificial Sequence
  Synthetic
cuugaccuucgucuauaaua

SEQ ID NO: 698560 - RNA, 20 nt, Artificial Sequence
  Synthetic
accaagcaugcacuguaaua

SEQ ID NO: 698561 - RNA, 20 nt, Artificial Sequence
  Synthetic
acucaacucauuguguaaua

SEQ ID NO: 698562 - RNA, 20 nt, Artificial Sequence
  Synthetic
uagaacuucaccgguuaaua

SEQ ID NO: 698563 - RNA, 20 nt, Artificial Sequence
  Synthetic
cuauuauuccaauguuaaua

SEQ ID NO: 698564 - RNA, 20 nt, Artificial Sequence
  Synthetic
agacuuauccaguguuaaua

SEQ ID NO: 698565 - RNA, 20 nt, Artificial Sequence
  Synthetic
uucccaauugaccaaacaua

SEQ ID NO: 698566 - RNA, 20 nt, Artificial Sequence
  Synthetic
uugcauucgcaaucaacaua

SEQ ID NO: 698567 - RNA, 20 nt, Artificial Sequence
  Synthetic
aggauaggcagcauaacaua

SEQ ID NO: 698568 - RNA, 20 nt, Artificial Sequence
  Synthetic
cuagggcacaaccuaacaua

SEQ ID NO: 698569 - RNA, 20 nt, Artificial Sequence
  Synthetic
ugcacggggcugcagacaua

SEQ ID NO: 698570 - RNA, 20 nt, Artificial Sequence
  Synthetic
cuguuaguaaugucgacaua

SEQ ID NO: 698571 - RNA, 20 nt, Artificial Sequence
  Synthetic
ugguguagcucauggacaua

SEQ ID NO: 698572 - RNA, 20 nt, Artificial Sequence
  Synthetic
uuagaguaucaggauacaua

SEQ ID NO: 698573 - RNA, 20 nt, Artificial Sequence
  Synthetic
uuuaggagcagugguacaua

SEQ ID NO: 698574 - RNA, 20 nt, Artificial Sequence
  Synthetic
cgcaggaauuauauuacaua

SEQ ID NO: 698575 - RNA, 20 nt, Artificial Sequence
  Synthetic
uggucuugccccgaaccaua

SEQ ID NO: 698576 - RNA, 20 nt, Artificial Sequence
  Synthetic
uuaaauuuuccggaaccaua

SEQ ID NO: 698577 - RNA, 20 nt, Artificial Sequence
  Synthetic
uauaaacucaagggcccaua

SEQ ID NO: 698578 - RNA, 20 nt, Artificial Sequence
  Synthetic
uacccuuaacuucagccaua

SEQ ID NO: 698579 - RNA, 20 nt, Artificial Sequence
  Synthetic
uaggaagcuaauaugccaua

SEQ ID NO: 698580 - RNA, 20 nt, Artificial Sequence
  Synthetic
aauauagacaguuugccaua

SEQ ID NO: 698581 - RNA, 20 nt, Artificial Sequence
  Synthetic
agagagugucaugauccaua

SEQ ID NO: 698582 - RNA, 20 nt, Artificial Sequence
  Synthetic
aacaacugcucuacuccaua

SEQ ID NO: 698583 - RNA, 20 nt, Artificial Sequence
  Synthetic
uagccacgggaauuuccaua

SEQ ID NO: 698584 - RNA, 20 nt, Artificial Sequence
  Synthetic
cugcucaugauuauagcaua

SEQ ID NO: 698585 - RNA, 20 nt, Artificial Sequence
  Synthetic
augugcaguacuguagcaua

SEQ ID NO: 698586 - RNA, 20 nt, Artificial Sequence
  Synthetic
cgcuuagaagacagcgcaua

SEQ ID NO: 698587 - RNA, 20 nt, Artificial Sequence
  Synthetic
ucaugugugaguuaggcaua

SEQ ID NO: 698588 - RNA, 20 nt, Artificial Sequence
  Synthetic
aaccacagugugcuggcaua

SEQ ID NO: 698589 - RNA, 20 nt, Artificial Sequence
  Synthetic
ugauagacucuuuuggcaua

SEQ ID NO: 698590 - RNA, 20 nt, Artificial Sequence
  Synthetic
uguuucaacgacccugcaua

SEQ ID NO: 698591 - RNA, 20 nt, Artificial Sequence
  Synthetic
auccuccccauaucugcaua

SEQ ID NO: 698592 - RNA, 20 nt, Artificial Sequence
  Synthetic
ucuagcuuagccaaaucaua

SEQ ID NO: 698593 - RNA, 20 nt, Artificial Sequence
  Synthetic
ucaugauugacuaaaucaua

SEQ ID NO: 698594 - RNA, 20 nt, Artificial Sequence
  Synthetic
uuagauaugggagcaucaua

SEQ ID NO: 698595 - RNA, 20 nt, Artificial Sequence
  Synthetic
uucucuugacacauaucaua

SEQ ID NO: 698596 - RNA, 20 nt, Artificial Sequence
  Synthetic
aaaacacgaaucguaucaua

SEQ ID NO: 698597 - RNA, 20 nt, Artificial Sequence
  Synthetic
agcaaggguacauacucaua

SEQ ID NO: 698598 - RNA, 20 nt, Artificial Sequence
  Synthetic
cuucucugaucuuacucaua

SEQ ID NO: 698599 - RNA, 20 nt, Artificial Sequence
  Synthetic
cugacccagaaaaagucaua

SEQ ID NO: 698600 - RNA, 20 nt, Artificial Sequence
  Synthetic
cgaaagaccaugaggucaua

SEQ ID NO: 698601 - RNA, 20 nt, Artificial Sequence
  Synthetic
agcccuguccacaugucaua

SEQ ID NO: 698602 - RNA, 20 nt, Artificial Sequence
  Synthetic
uaagcugagcuuaguucaua

SEQ ID NO: 698603 - RNA, 20 nt, Artificial Sequence
  Synthetic
uguaaccaaccacaaagaua

SEQ ID NO: 698604 - RNA, 20 nt, Artificial Sequence
  Synthetic
ugguauuuccgagaaagaua

SEQ ID NO: 698605 - RNA, 20 nt, Artificial Sequence
  Synthetic
acuacuauaguguuaagaua

SEQ ID NO: 698606 - RNA, 20 nt, Artificial Sequence
  Synthetic
uagcacuuccauaacagaua

SEQ ID NO: 698607 - RNA, 20 nt, Artificial Sequence
  Synthetic
uuacugaccugucacagaua

SEQ ID NO: 698608 - RNA, 20 nt, Artificial Sequence
  Synthetic
uaggauucagccuacagaua

SEQ ID NO: 698609 - RNA, 20 nt, Artificial Sequence
  Synthetic
uucaucuucccagucagaua

SEQ ID NO: 698610 - RNA, 20 nt, Artificial Sequence
  Synthetic
acguaaauagaccagagaua

SEQ ID NO: 698611 - RNA, 20 nt, Artificial Sequence
  Synthetic
ccuaagaguacugagagaua

SEQ ID NO: 698612 - RNA, 20 nt, Artificial Sequence
  Synthetic
uagauaugcucugggagaua

SEQ ID NO: 698613 - RNA, 20 nt, Artificial Sequence
  Synthetic
cccugggacucuguuagaua

SEQ ID NO: 698614 - RNA, 20 nt, Artificial Sequence
  Synthetic
ugagcuguccuauuuagaua

SEQ ID NO: 698615 - RNA, 20 nt, Artificial Sequence
  Synthetic
uguaauugugcagaacgaua

SEQ ID NO: 698616 - RNA, 20 nt, Artificial Sequence
  Synthetic
acucuguaaggacuacgaua

SEQ ID NO: 698617 - RNA, 20 nt, Artificial Sequence
  Synthetic
aacucgugguuuccucgaua

SEQ ID NO: 698618 - RNA, 20 nt, Artificial Sequence
  Synthetic
cuauucucuuagugucgaua

SEQ ID NO: 698619 - RNA, 20 nt, Artificial Sequence
  Synthetic
uguugcaugacaacgggaua

SEQ ID NO: 698620 - RNA, 20 nt, Artificial Sequence
  Synthetic
acugaauucgaugugggaua

SEQ ID NO: 698621 - RNA, 20 nt, Artificial Sequence
  Synthetic
aaaauaccaucugugggaua

SEQ ID NO: 698622 - RNA, 20 nt, Artificial Sequence
  Synthetic
ccuagacuucaacauggaua

SEQ ID NO: 698623 - RNA, 20 nt, Artificial Sequence
  Synthetic
aucauccaaauaggaugaua

SEQ ID NO: 698624 - RNA, 20 nt, Artificial Sequence
  Synthetic
uuguaugaugaauccugaua

SEQ ID NO: 698625 - RNA, 20 nt, Artificial Sequence
  Synthetic
cacucguaggaguucugaua

SEQ ID NO: 698626 - RNA, 20 nt, Artificial Sequence
  Synthetic
uagccugucacuuagugaua

SEQ ID NO: 698627 - RNA, 20 nt, Artificial Sequence
  Synthetic
ucuuuaccacuuacgugaua

SEQ ID NO: 698628 - RNA, 20 nt, Artificial Sequence
  Synthetic
cucugcuugaguuugugaua

SEQ ID NO: 698629 - RNA, 20 nt, Artificial Sequence
  Synthetic
acuggcuuauccucuugaua

SEQ ID NO: 698630 - RNA, 20 nt, Artificial Sequence
  Synthetic
auccaguuauggcuuugaua

SEQ ID NO: 698631 - RNA, 20 nt, Artificial Sequence
  Synthetic
agcccucuucaaucaauaua

SEQ ID NO: 698632 - RNA, 20 nt, Artificial Sequence
  Synthetic
uaccuuuggacguacauaua

SEQ ID NO: 698633 - RNA, 20 nt, Artificial Sequence
  Synthetic
aaccucacauuacccauaua

SEQ ID NO: 698634 - RNA, 20 nt, Artificial Sequence
  Synthetic
caaccuaacuugcccauaua

SEQ ID NO: 698635 - RNA, 20 nt, Artificial Sequence
  Synthetic
aggagauugagucugauaua

SEQ ID NO: 698636 - RNA, 20 nt, Artificial Sequence
  Synthetic
uaaauugucggauugauaua

SEQ ID NO: 698637 - RNA, 20 nt, Artificial Sequence
  Synthetic
uuuggggcuuaccauauaua

SEQ ID NO: 698638 - RNA, 20 nt, Artificial Sequence
  Synthetic
ccagaauguccugauauaua

SEQ ID NO: 698639 - RNA, 20 nt, Artificial Sequence
  Synthetic
ugcaugacggauaaacuaua

SEQ ID NO: 698640 - RNA, 20 nt, Artificial Sequence
  Synthetic
aggagcuacucuugacuaua

SEQ ID NO: 698641 - RNA, 20 nt, Artificial Sequence
  Synthetic
agccugauucuaucccuaua

SEQ ID NO: 698642 - RNA, 20 nt, Artificial Sequence
  Synthetic
cacaaauucaggucccuaua

SEQ ID NO: 698643 - RNA, 20 nt, Artificial Sequence
  Synthetic
cagauauuggcaauccuaua

SEQ ID NO: 698644 - RNA, 20 nt, Artificial Sequence
  Synthetic
acuaauaugauuauccuaua

SEQ ID NO: 698645 - RNA, 20 nt, Artificial Sequence
  Synthetic
auauacgucaacaagcuaua

SEQ ID NO: 698646 - RNA, 20 nt, Artificial Sequence
  Synthetic
agagaacuaagguaucuaua

SEQ ID NO: 698647 - RNA, 20 nt, Artificial Sequence
  Synthetic
ugucacaacugcccucuaua

SEQ ID NO: 698648 - RNA, 20 nt, Artificial Sequence
  Synthetic
auucaagcuagaugucuaua

SEQ ID NO: 698649 - RNA, 20 nt, Artificial Sequence
  Synthetic
uuggauagggaucuucuaua

SEQ ID NO: 698650 - RNA, 20 nt, Artificial Sequence
  Synthetic
uggcucuuccuugcaguaua

SEQ ID NO: 698651 - RNA, 20 nt, Artificial Sequence
  Synthetic
ugaacauacugaucaguaua

SEQ ID NO: 698652 - RNA, 20 nt, Artificial Sequence
  Synthetic
aaguucaugguugugguaua

SEQ ID NO: 698653 - RNA, 20 nt, Artificial Sequence
  Synthetic
ucugguaccugguauguaua

SEQ ID NO: 698654 - RNA, 20 nt, Artificial Sequence
  Synthetic
accgagcuguuuacauuaua

SEQ ID NO: 698655 - RNA, 20 nt, Artificial Sequence
  Synthetic
agcucaugcaccucauuaua

SEQ ID NO: 698656 - RNA, 20 nt, Artificial Sequence
  Synthetic
acaguuggcacuggauuaua

SEQ ID NO: 698657 - RNA, 20 nt, Artificial Sequence
  Synthetic
cauguguaacguggcuuaua

SEQ ID NO: 698658 - RNA, 20 nt, Artificial Sequence
  Synthetic
agcaauuaucugaucuuaua

SEQ ID NO: 698659 - RNA, 20 nt, Artificial Sequence
  Synthetic
cuaguuagggcuccuuuaua

SEQ ID NO: 698660 - RNA, 20 nt, Artificial Sequence
  Synthetic
cagcugacuagagaaaacua

SEQ ID NO: 698661 - RNA, 20 nt, Artificial Sequence
  Synthetic
uuuaaaccugagcgaaacua

SEQ ID NO: 698662 - RNA, 20 nt, Artificial Sequence
  Synthetic
ugguagaaauuacuaaacua

SEQ ID NO: 698663 - RNA, 20 nt, Artificial Sequence
  Synthetic
auauaucacucugguaacua

SEQ ID NO: 698664 - RNA, 20 nt, Artificial Sequence
  Synthetic
ucucagccugcuuaacacua

SEQ ID NO: 698665 - RNA, 20 nt, Artificial Sequence
  Synthetic
agggcaguuugcacacacua

SEQ ID NO: 698666 - RNA, 20 nt, Artificial Sequence
  Synthetic
cugcuagggagugcacacua

SEQ ID NO: 698667 - RNA, 20 nt, Artificial Sequence
  Synthetic
uaauauggccagggacacua

SEQ ID NO: 698668 - RNA, 20 nt, Artificial Sequence
  Synthetic
ccacauggcuagcuacacua

SEQ ID NO: 698669 - RNA, 20 nt, Artificial Sequence
  Synthetic
agcaauauaccaugccacua

SEQ ID NO: 698670 - RNA, 20 nt, Artificial Sequence
  Synthetic
uauauuguucccaugcacua

SEQ ID NO: 698671 - RNA, 20 nt, Artificial Sequence
  Synthetic
auaaugugcuucaaagacua

SEQ ID NO: 698672 - RNA, 20 nt, Artificial Sequence
  Synthetic
auggccaaccccuaagacua

SEQ ID NO: 698673 - RNA, 20 nt, Artificial Sequence
  Synthetic
uccuaaaugcgagccgacua

SEQ ID NO: 698674 - RNA, 20 nt, Artificial Sequence
  Synthetic
agggucagucaagaggacua

SEQ ID NO: 698675 - RNA, 20 nt, Artificial Sequence
  Synthetic
cccuaagauggguuggacua

SEQ ID NO: 698676 - RNA, 20 nt, Artificial Sequence
  Synthetic
cuugcuuugacaauugacua

SEQ ID NO: 698677 - RNA, 20 nt, Artificial Sequence
  Synthetic
uuugcagcagcacuugacua

SEQ ID NO: 698678 - RNA, 20 nt, Artificial Sequence
  Synthetic
uauuaguucugaguugacua

SEQ ID NO: 698679 - RNA, 20 nt, Artificial Sequence
  Synthetic
uacagugauagauuugacua

SEQ ID NO: 698680 - RNA, 20 nt, Artificial Sequence
  Synthetic
auagcacccucuggauacua

SEQ ID NO: 698681 - RNA, 20 nt, Artificial Sequence
  Synthetic
acaggacauugcugauacua

SEQ ID NO: 698682 - RNA, 20 nt, Artificial Sequence
  Synthetic
ucaauacacuguugauacua

SEQ ID NO: 698683 - RNA, 20 nt, Artificial Sequence
  Synthetic
ccuuucauuucgcuauacua

SEQ ID NO: 698684 - RNA, 20 nt, Artificial Sequence
  Synthetic
aguuccugcccacccuacua

SEQ ID NO: 698685 - RNA, 20 nt, Artificial Sequence
  Synthetic
aggcuggguaacuucuacua

SEQ ID NO: 698686 - RNA, 20 nt, Artificial Sequence
  Synthetic
acuuuucagugaccuuacua

SEQ ID NO: 698687 - RNA, 20 nt, Artificial Sequence
  Synthetic
cauacacaguagcuuuacua

SEQ ID NO: 698688 - RNA, 20 nt, Artificial Sequence
  Synthetic
uguuaggacaaguaaaccua

SEQ ID NO: 698689 - RNA, 20 nt, Artificial Sequence
  Synthetic
auauaagccagaggaaccua

SEQ ID NO: 698690 - RNA, 20 nt, Artificial Sequence
  Synthetic
uauccacuaguuugaaccua

SEQ ID NO: 698691 - RNA, 20 nt, Artificial Sequence
  Synthetic
auaaucucaaacuuaaccua

SEQ ID NO: 698692 - RNA, 20 nt, Artificial Sequence
  Synthetic
ccaggguuacuugauaccua

SEQ ID NO: 698693 - RNA, 20 nt, Artificial Sequence
  Synthetic
agagaaguagguacuaccua

SEQ ID NO: 698694 - RNA, 20 nt, Artificial Sequence
  Synthetic
uugaggucuuugucuaccua

SEQ ID NO: 698695 - RNA, 20 nt, Artificial Sequence
  Synthetic
acccgguuggccaguaccua

SEQ ID NO: 698696 - RNA, 20 nt, Artificial Sequence
  Synthetic
ugauugugaccucaacccua

SEQ ID NO: 698697 - RNA, 20 nt, Artificial Sequence
  Synthetic
agaucaaagggagaccccua

SEQ ID NO: 698698 - RNA, 20 nt, Artificial Sequence
  Synthetic
auaagacaacacugccccua

SEQ ID NO: 698699 - RNA, 20 nt, Artificial Sequence
  Synthetic
acccauuuggcagagcccua

SEQ ID NO: 698700 - RNA, 20 nt, Artificial Sequence
  Synthetic
ucaacucacuugcggcccua

SEQ ID NO: 698701 - RNA, 20 nt, Artificial Sequence
  Synthetic
aagcaguuaacuuggcccua

SEQ ID NO: 698702 - RNA, 20 nt, Artificial Sequence
  Synthetic
cauuagacuccuaugcccua

SEQ ID NO: 698703 - RNA, 20 nt, Artificial Sequence
  Synthetic
aguagagcacauuaagccua

SEQ ID NO: 698704 - RNA, 20 nt, Artificial Sequence
  Synthetic
auaagaauuaguacggccua

SEQ ID NO: 698705 - RNA, 20 nt, Artificial Sequence
  Synthetic
uauccauaacuuccggccua

SEQ ID NO: 698706 - RNA, 20 nt, Artificial Sequence
  Synthetic
aguuaauggcacauggccua

SEQ ID NO: 698707 - RNA, 20 nt, Artificial Sequence
  Synthetic
uuaccaaaagccaaugccua

SEQ ID NO: 698708 - RNA, 20 nt, Artificial Sequence
  Synthetic
agggucaaguagaaugccua

SEQ ID NO: 698709 - RNA, 20 nt, Artificial Sequence
  Synthetic
cauaggacuguuacugccua

SEQ ID NO: 698710 - RNA, 20 nt, Artificial Sequence
  Synthetic
ucuguggguguauuugccua

SEQ ID NO: 698711 - RNA, 20 nt, Artificial Sequence
  Synthetic
ccuucuacuacuuaauccua

SEQ ID NO: 698712 - RNA, 20 nt, Artificial Sequence
  Synthetic
uaagggucugauuacuccua

SEQ ID NO: 698713 - RNA, 20 nt, Artificial Sequence
  Synthetic
uaugaaguacuuaccuccua

SEQ ID NO: 698714 - RNA, 20 nt, Artificial Sequence
  Synthetic
uaucuacagguucccuccua

SEQ ID NO: 698715 - RNA, 20 nt, Artificial Sequence
  Synthetic
uauuaaaguaguuccuccua

SEQ ID NO: 698716 - RNA, 20 nt, Artificial Sequence
  Synthetic
cuuaggcaguaacaguccua

SEQ ID NO: 698717 - RNA, 20 nt, Artificial Sequence
  Synthetic
ccaaaaugaggcuaguccua

SEQ ID NO: 698718 - RNA, 20 nt, Artificial Sequence
  Synthetic
cucaagccuuucugguccua

SEQ ID NO: 698719 - RNA, 20 nt, Artificial Sequence
  Synthetic
ugucagcuccuucauuccua

SEQ ID NO: 698720 - RNA, 20 nt, Artificial Sequence
  Synthetic
uuuaacauaacagguuccua

SEQ ID NO: 698721 - RNA, 20 nt, Artificial Sequence
  Synthetic
acuguaguucaggguuccua

SEQ ID NO: 698722 - RNA, 20 nt, Artificial Sequence
  Synthetic
cccgauacuuuuauuuccua

SEQ ID NO: 698723 - RNA, 20 nt, Artificial Sequence
  Synthetic
uaacuccuaagguuuuccua

SEQ ID NO: 698724 - RNA, 20 nt, Artificial Sequence
  Synthetic
ucgggucaaugcaaaagcua

SEQ ID NO: 698725 - RNA, 20 nt, Artificial Sequence
  Synthetic
ucucuugggugcaacagcua

SEQ ID NO: 698726 - RNA, 20 nt, Artificial Sequence
  Synthetic
aaggccuaauugaacagcua

SEQ ID NO: 698727 - RNA, 20 nt, Artificial Sequence
  Synthetic
uguggcauuggaagcagcua

SEQ ID NO: 698728 - RNA, 20 nt, Artificial Sequence
  Synthetic
uuccaaaaagcuaucagcua

SEQ ID NO: 698729 - RNA, 20 nt, Artificial Sequence
  Synthetic
aaagcuagcuaggggagcua

SEQ ID NO: 698730 - RNA, 20 nt, Artificial Sequence
  Synthetic
aguguggcaaguuggagcua

SEQ ID NO: 698731 - RNA, 20 nt, Artificial Sequence
  Synthetic
caaaccuucauaaugagcua

SEQ ID NO: 698732 - RNA, 20 nt, Artificial Sequence
  Synthetic
augaucccagaguguagcua

SEQ ID NO: 698733 - RNA, 20 nt, Artificial Sequence
  Synthetic
aguaucugggagcuuagcua

SEQ ID NO: 698734 - RNA, 20 nt, Artificial Sequence
  Synthetic
ccaaaguaaacauuuagcua

SEQ ID NO: 698735 - RNA, 20 nt, Artificial Sequence
  Synthetic
caggcuguagccugacgcua

SEQ ID NO: 698736 - RNA, 20 nt, Artificial Sequence
  Synthetic
uuggaacucuuccaccgcua

SEQ ID NO: 698737 - RNA, 20 nt, Artificial Sequence
  Synthetic
aagucuaggaagcaccgcua

SEQ ID NO: 698738 - RNA, 20 nt, Artificial Sequence
  Synthetic
aggcacuuaagggaaggcua

SEQ ID NO: 698739 - RNA, 20 nt, Artificial Sequence
  Synthetic
ccacaguuacauacaggcua

SEQ ID NO: 698740 - RNA, 20 nt, Artificial Sequence
  Synthetic
auccuacagauuaccggcua

SEQ ID NO: 698741 - RNA, 20 nt, Artificial Sequence
  Synthetic
auuauaugauccuagggcua

SEQ ID NO: 698742 - RNA, 20 nt, Artificial Sequence
  Synthetic
auaacuauaccgcugggcua

SEQ ID NO: 698743 - RNA, 20 nt, Artificial Sequence
  Synthetic
cuguucacgaucaguggcua

SEQ ID NO: 698744 - RNA, 20 nt, Artificial Sequence
  Synthetic
cauacuaaacccugaugcua

SEQ ID NO: 698745 - RNA, 20 nt, Artificial Sequence
  Synthetic
cagcaagcuacgguaugcua

SEQ ID NO: 698746 - RNA, 20 nt, Artificial Sequence
  Synthetic
uuuccauaagggggcugcua

SEQ ID NO: 698747 - RNA, 20 nt, Artificial Sequence
  Synthetic
uaaguccuaguuuucugcua

SEQ ID NO: 698748 - RNA, 20 nt, Artificial Sequence
  Synthetic
cgucuuuuguaugauugcua

SEQ ID NO: 698749 - RNA, 20 nt, Artificial Sequence
  Synthetic
uucaagaggacauauugcua

SEQ ID NO: 698750 - RNA, 20 nt, Artificial Sequence
  Synthetic
uuauguuucucagcuugcua

SEQ ID NO: 698751 - RNA, 20 nt, Artificial Sequence
  Synthetic
auagucccuuguaguugcua

SEQ ID NO: 698752 - RNA, 20 nt, Artificial Sequence
  Synthetic
uggucaguuuauauuugcua

SEQ ID NO: 698753 - RNA, 20 nt, Artificial Sequence
  Synthetic
aacuguuuugcccuuugcua

SEQ ID NO: 698754 - RNA, 20 nt, Artificial Sequence
  Synthetic
aacgguuaaguucuuugcua

SEQ ID NO: 698755 - RNA, 20 nt, Artificial Sequence
  Synthetic
uugcccuguaucuuuugcua

SEQ ID NO: 698756 - RNA, 20 nt, Artificial Sequence
  Synthetic
aacuuucgacacauaaucua

SEQ ID NO: 698757 - RNA, 20 nt, Artificial Sequence
  Synthetic
caaugcaaugaugucaucua

SEQ ID NO: 698758 - RNA, 20 nt, Artificial Sequence
  Synthetic
uuuacuauggcccugaucua

SEQ ID NO: 698759 - RNA, 20 nt, Artificial Sequence
  Synthetic
agacuggggauauugaucua

SEQ ID NO: 698760 - RNA, 20 nt, Artificial Sequence
  Synthetic
ugcauaauaguguugaucua

SEQ ID NO: 698761 - RNA, 20 nt, Artificial Sequence
  Synthetic
acaacauuaacuccuaucua

SEQ ID NO: 698762 - RNA, 20 nt, Artificial Sequence
  Synthetic
agcuaguacacaucuaucua

SEQ ID NO: 698763 - RNA, 20 nt, Artificial Sequence
  Synthetic
uguuaguuauaucuacucua

SEQ ID NO: 698764 - RNA, 20 nt, Artificial Sequence
  Synthetic
uaccugucagaaaaccucua

SEQ ID NO: 698765 - RNA, 20 nt, Artificial Sequence
  Synthetic
uaagucuuccuggggcucua

SEQ ID NO: 698766 - RNA, 20 nt, Artificial Sequence
  Synthetic
uccuagucugcauugcucua

SEQ ID NO: 698767 - RNA, 20 nt, Artificial Sequence
  Synthetic
cauguuggauaaccagucua

SEQ ID NO: 698768 - RNA, 20 nt, Artificial Sequence
  Synthetic
agacggaaucccucagucua

SEQ ID NO: 698769 - RNA, 20 nt, Artificial Sequence
  Synthetic
uuucaauuacugcacgucua

SEQ ID NO: 698770 - RNA, 20 nt, Artificial Sequence
  Synthetic
augcuugugacucaugucua

SEQ ID NO: 698771 - RNA, 20 nt, Artificial Sequence
  Synthetic
cuauaauugagagcugucua

SEQ ID NO: 698772 - RNA, 20 nt, Artificial Sequence
  Synthetic
aauuacuagaugcuugucua

SEQ ID NO: 698773 - RNA, 20 nt, Artificial Sequence
  Synthetic
cuccuguguguuagauucua

SEQ ID NO: 698774 - RNA, 20 nt, Artificial Sequence
  Synthetic
uagauauugcccuccuucua

SEQ ID NO: 698775 - RNA, 20 nt, Artificial Sequence
  Synthetic
acuacucaauguccuuucua

SEQ ID NO: 698776 - RNA, 20 nt, Artificial Sequence
  Synthetic
aacacccguguugcuuucua

SEQ ID NO: 698777 - RNA, 20 nt, Artificial Sequence
  Synthetic
ccgcaguguuacccaaagua

SEQ ID NO: 698778 - RNA, 20 nt, Artificial Sequence
  Synthetic
agaucucagcugugaaagua

SEQ ID NO: 698779 - RNA, 20 nt, Artificial Sequence
  Synthetic
uauaccguacuuauaaagua

SEQ ID NO: 698780 - RNA, 20 nt, Artificial Sequence
  Synthetic
uguaccuaggcaaacaagua

SEQ ID NO: 698781 - RNA, 20 nt, Artificial Sequence
  Synthetic
augcaccugugugacaagua

SEQ ID NO: 698782 - RNA, 20 nt, Artificial Sequence
  Synthetic
aauuuacagcaacccaagua

SEQ ID NO: 698783 - RNA, 20 nt, Artificial Sequence
  Synthetic
uggacuuaugguuccaagua

SEQ ID NO: 698784 - RNA, 20 nt, Artificial Sequence
  Synthetic
uuuugauuucgaggcaagua

SEQ ID NO: 698785 - RNA, 20 nt, Artificial Sequence
  Synthetic
uuuaacgugagaaagaagua

SEQ ID NO: 698786 - RNA, 20 nt, Artificial Sequence
  Synthetic
uucagucuugccuugaagua

SEQ ID NO: 698787 - RNA, 20 nt, Artificial Sequence
  Synthetic
cuauuguaugucuauaagua

SEQ ID NO: 698788 - RNA, 20 nt, Artificial Sequence
  Synthetic
cacuccauacuuuauaagua

SEQ ID NO: 698789 - RNA, 20 nt, Artificial Sequence
  Synthetic
aauuguugacuacaacagua

SEQ ID NO: 698790 - RNA, 20 nt, Artificial Sequence
  Synthetic
augcauaacacaucacagua

SEQ ID NO: 698791 - RNA, 20 nt, Artificial Sequence
  Synthetic
aaaauauagucucaccagua

SEQ ID NO: 698792 - RNA, 20 nt, Artificial Sequence
  Synthetic
aaaacaaggugcauccagua

SEQ ID NO: 698793 - RNA, 20 nt, Artificial Sequence
  Synthetic
ucauaggacauagugcagua

SEQ ID NO: 698794 - RNA, 20 nt, Artificial Sequence
  Synthetic
cacaacacgauguaucagua

SEQ ID NO: 698795 - RNA, 20 nt, Artificial Sequence
  Synthetic
agccguaauaggccucagua

SEQ ID NO: 698796 - RNA, 20 nt, Artificial Sequence
  Synthetic
agcuaauagagacgucagua

SEQ ID NO: 698797 - RNA, 20 nt, Artificial Sequence
  Synthetic
cacuagaaaguuauagagua

SEQ ID NO: 698798 - RNA, 20 nt, Artificial Sequence
  Synthetic
aagcuucacugcugggagua

SEQ ID NO: 698799 - RNA, 20 nt, Artificial Sequence
  Synthetic
cccaaucuuacaacugagua

SEQ ID NO: 698800 - RNA, 20 nt, Artificial Sequence
  Synthetic
cgacauaaugccacugagua

SEQ ID NO: 698801 - RNA, 20 nt, Artificial Sequence
  Synthetic
cauuuguaagauacugagua

SEQ ID NO: 698802 - RNA, 20 nt, Artificial Sequence
  Synthetic
auugagucuucuaaauagua

SEQ ID NO: 698803 - RNA, 20 nt, Artificial Sequence
  Synthetic
ugauguacaucuccauagua

SEQ ID NO: 698804 - RNA, 20 nt, Artificial Sequence
  Synthetic
uggcuuuaacguagauagua

SEQ ID NO: 698805 - RNA, 20 nt, Artificial Sequence
  Synthetic
auccuaacaccaaacuagua

SEQ ID NO: 698806 - RNA, 20 nt, Artificial Sequence
  Synthetic
ugaguaggccgaaacuagua

SEQ ID NO: 698807 - RNA, 20 nt, Artificial Sequence
  Synthetic
acucaauuuagacucuagua

SEQ ID NO: 698808 - RNA, 20 nt, Artificial Sequence
  Synthetic
uaugcuuccucauaguagua

SEQ ID NO: 698809 - RNA, 20 nt, Artificial Sequence
  Synthetic
cuguaccuuaugccguagua

SEQ ID NO: 698810 - RNA, 20 nt, Artificial Sequence
  Synthetic
aaugguaauagacuguagua

SEQ ID NO: 698811 - RNA, 20 nt, Artificial Sequence
  Synthetic
uucgccaaguagacaacgua

SEQ ID NO: 698812 - RNA, 20 nt, Artificial Sequence
  Synthetic
ccaguggcaauuacaacgua

SEQ ID NO: 698813 - RNA, 20 nt, Artificial Sequence
  Synthetic
ccacaagcaccaugaacgua

SEQ ID NO: 698814 - RNA, 20 nt, Artificial Sequence
  Synthetic
aaguagcucagaaccacgua

SEQ ID NO: 698815 - RNA, 20 nt, Artificial Sequence
  Synthetic
agugaguugauaagcacgua

SEQ ID NO: 698816 - RNA, 20 nt, Artificial Sequence
  Synthetic
uaggcauuaucaaucacgua

SEQ ID NO: 698817 - RNA, 20 nt, Artificial Sequence
  Synthetic
aaguacggagcuaucacgua

SEQ ID NO: 698818 - RNA, 20 nt, Artificial Sequence
  Synthetic
ugaguuucccccgggacgua

SEQ ID NO: 698819 - RNA, 20 nt, Artificial Sequence
  Synthetic
uguuuuccagaugauacgua

SEQ ID NO: 698820 - RNA, 20 nt, Artificial Sequence
  Synthetic
uaugccugcaacgcuacgua

SEQ ID NO: 698821 - RNA, 20 nt, Artificial Sequence
  Synthetic
cagcucccuuucaccccgua

SEQ ID NO: 698822 - RNA, 20 nt, Artificial Sequence
  Synthetic
aagagcaaagcuaaagcgua

SEQ ID NO: 698823 - RNA, 20 nt, Artificial Sequence
  Synthetic
aacugcaaaggaagcgcgua

SEQ ID NO: 698824 - RNA, 20 nt, Artificial Sequence
  Synthetic
auuugcugccugugugcgua

SEQ ID NO: 698825 - RNA, 20 nt, Artificial Sequence
  Synthetic
ccucauguucuacauucgua

SEQ ID NO: 698826 - RNA, 20 nt, Artificial Sequence
  Synthetic
acguguggccaucaaaggua

SEQ ID NO: 698827 - RNA, 20 nt, Artificial Sequence
  Synthetic
uuauuacuaugggacaggua

SEQ ID NO: 698828 - RNA, 20 nt, Artificial Sequence
  Synthetic
cuguacguuggguacaggua

SEQ ID NO: 698829 - RNA, 20 nt, Artificial Sequence
  Synthetic
ccucggggaaagcggaggua

SEQ ID NO: 698830 - RNA, 20 nt, Artificial Sequence
  Synthetic
auccugguacacaauaggua

SEQ ID NO: 698831 - RNA, 20 nt, Artificial Sequence
  Synthetic
uggagcucuacuucuaggua

SEQ ID NO: 698832 - RNA, 20 nt, Artificial Sequence
  Synthetic
ccuaucacuaguauucggua

SEQ ID NO: 698833 - RNA, 20 nt, Artificial Sequence
  Synthetic
auaaugaccuacggagggua

SEQ ID NO: 698834 - RNA, 20 nt, Artificial Sequence
  Synthetic
aacaccugagagugagggua

SEQ ID NO: 698835 - RNA, 20 nt, Artificial Sequence
  Synthetic
acacugagugggcacgggua

SEQ ID NO: 698836 - RNA, 20 nt, Artificial Sequence
  Synthetic
ugaugcaggugagacgggua

SEQ ID NO: 698837 - RNA, 20 nt, Artificial Sequence
  Synthetic
uagugugcagauuaggggua

SEQ ID NO: 698838 - RNA, 20 nt, Artificial Sequence
  Synthetic
aagcccuuguguauggggua

SEQ ID NO: 698839 - RNA, 20 nt, Artificial Sequence
  Synthetic
cuuccacgcuuucgugggua

SEQ ID NO: 698840 - RNA, 20 nt, Artificial Sequence
  Synthetic
augaauuuggcgaaauggua

SEQ ID NO: 698841 - RNA, 20 nt, Artificial Sequence
  Synthetic
aaucacuaauaaccauggua

SEQ ID NO: 698842 - RNA, 20 nt, Artificial Sequence
  Synthetic
aagaaccccgcucgauggua

SEQ ID NO: 698843 - RNA, 20 nt, Artificial Sequence
  Synthetic
uuuuugguggcucuauggua

SEQ ID NO: 698844 - RNA, 20 nt, Artificial Sequence
  Synthetic
cuagugcuacuauacuggua

SEQ ID NO: 698845 - RNA, 20 nt, Artificial Sequence
  Synthetic
uaauaguacuuaugcuggua

SEQ ID NO: 698846 - RNA, 20 nt, Artificial Sequence
  Synthetic
aauuauucacaccuguggua

SEQ ID NO: 698847 - RNA, 20 nt, Artificial Sequence
  Synthetic
cgaucgauuaaguauuggua

SEQ ID NO: 698848 - RNA, 20 nt, Artificial Sequence
  Synthetic
uccuaggagcauuaaaugua

SEQ ID NO: 698849 - RNA, 20 nt, Artificial Sequence
  Synthetic
caacucgcccuuacaaugua

SEQ ID NO: 698850 - RNA, 20 nt, Artificial Sequence
  Synthetic
uacguaacaguggcaaugua

SEQ ID NO: 698851 - RNA, 20 nt, Artificial Sequence
  Synthetic
cuuaucgaaaacggaaugua

SEQ ID NO: 698852 - RNA, 20 nt, Artificial Sequence
  Synthetic
uugggugguucuaacaugua

SEQ ID NO: 698853 - RNA, 20 nt, Artificial Sequence
  Synthetic
uauagacuaucaggcaugua

SEQ ID NO: 698854 - RNA, 20 nt, Artificial Sequence
  Synthetic
aaggcaauccaaaggaugua

SEQ ID NO: 698855 - RNA, 20 nt, Artificial Sequence
  Synthetic
cuuccucccaaucggaugua

SEQ ID NO: 698856 - RNA, 20 nt, Artificial Sequence
  Synthetic
cauucccucuaagggaugua

SEQ ID NO: 698857 - RNA, 20 nt, Artificial Sequence
  Synthetic
cuccauggcacgaugaugua

SEQ ID NO: 698858 - RNA, 20 nt, Artificial Sequence
  Synthetic
aaauuccuugugcguaugua

SEQ ID NO: 698859 - RNA, 20 nt, Artificial Sequence
  Synthetic
uucggggcaagaccacugua

SEQ ID NO: 698860 - RNA, 20 nt, Artificial Sequence
  Synthetic
aguaucagcaauguccugua

SEQ ID NO: 698861 - RNA, 20 nt, Artificial Sequence
  Synthetic
cuagacucacacuaagugua

SEQ ID NO: 698862 - RNA, 20 nt, Artificial Sequence
  Synthetic
caucuugauccaugagugua

SEQ ID NO: 698863 - RNA, 20 nt, Artificial Sequence
  Synthetic
caacguuuacaucuagugua

SEQ ID NO: 698864 - RNA, 20 nt, Artificial Sequence
  Synthetic
acucacguaagcaaggugua

SEQ ID NO: 698865 - RNA, 20 nt, Artificial Sequence
  Synthetic
uugaaauguuacgcugugua

SEQ ID NO: 698866 - RNA, 20 nt, Artificial Sequence
  Synthetic
uauaguggccggcuugugua

SEQ ID NO: 698867 - RNA, 20 nt, Artificial Sequence
  Synthetic
cuguaggaguuugaauugua

SEQ ID NO: 698868 - RNA, 20 nt, Artificial Sequence
  Synthetic
uucaagaaucuaccauugua

SEQ ID NO: 698869 - RNA, 20 nt, Artificial Sequence
  Synthetic
auuaagacagacguauugua

SEQ ID NO: 698870 - RNA, 20 nt, Artificial Sequence
  Synthetic
cugagacaacuauucuugua

SEQ ID NO: 698871 - RNA, 20 nt, Artificial Sequence
  Synthetic
cugccgaaaucgcaguugua

SEQ ID NO: 698872 - RNA, 20 nt, Artificial Sequence
  Synthetic
ugaauguuaauagcguugua

SEQ ID NO: 698873 - RNA, 20 nt, Artificial Sequence
  Synthetic
ugcggcuaauacauguugua

SEQ ID NO: 698874 - RNA, 20 nt, Artificial Sequence
  Synthetic
acugccuuguauccuuugua

SEQ ID NO: 698875 - RNA, 20 nt, Artificial Sequence
  Synthetic
ccuaagauccuauaaaauua

SEQ ID NO: 698876 - RNA, 20 nt, Artificial Sequence
  Synthetic
uucaauaccucgugaaauua

SEQ ID NO: 698877 - RNA, 20 nt, Artificial Sequence
  Synthetic
uaauggaggacugucaauua

SEQ ID NO: 698878 - RNA, 20 nt, Artificial Sequence
  Synthetic
agugcugcuuaagugaauua

SEQ ID NO: 698879 - RNA, 20 nt, Artificial Sequence
  Synthetic
cuagaguuacaauguaauua

SEQ ID NO: 698880 - RNA, 20 nt, Artificial Sequence
  Synthetic
agacacuuaagcgcacauua

SEQ ID NO: 698881 - RNA, 20 nt, Artificial Sequence
  Synthetic
caacaagugcgaggacauua

SEQ ID NO: 698882 - RNA, 20 nt, Artificial Sequence
  Synthetic
uguggaagcacauugcauua

SEQ ID NO: 698883 - RNA, 20 nt, Artificial Sequence
  Synthetic
ucaugaccuccagaagauua

SEQ ID NO: 698884 - RNA, 20 nt, Artificial Sequence
  Synthetic
aaguugaacgucuaagauua

SEQ ID NO: 698885 - RNA, 20 nt, Artificial Sequence
  Synthetic
aaaaacgcccuacuagauua

SEQ ID NO: 698886 - RNA, 20 nt, Artificial Sequence
  Synthetic
uacccguucguucuagauua

SEQ ID NO: 698887 - RNA, 20 nt, Artificial Sequence
  Synthetic
ucugaauacagagacgauua

SEQ ID NO: 698888 - RNA, 20 nt, Artificial Sequence
  Synthetic
cuucaauccacauaggauua

SEQ ID NO: 698889 - RNA, 20 nt, Artificial Sequence
  Synthetic
ccaugaugcauguuggauua

SEQ ID NO: 698890 - RNA, 20 nt, Artificial Sequence
  Synthetic
uagucuuaguacaaugauua

SEQ ID NO: 698891 - RNA, 20 nt, Artificial Sequence
  Synthetic
aucaaacaacgggaugauua

SEQ ID NO: 698892 - RNA, 20 nt, Artificial Sequence
  Synthetic
caaccagcagucauugauua

SEQ ID NO: 698893 - RNA, 20 nt, Artificial Sequence
  Synthetic
auacuugguuaccuugauua

SEQ ID NO: 698894 - RNA, 20 nt, Artificial Sequence
  Synthetic
agugauuucaguguugauua

SEQ ID NO: 698895 - RNA, 20 nt, Artificial Sequence
  Synthetic
uaucguggggcuuaauauua

SEQ ID NO: 698896 - RNA, 20 nt, Artificial Sequence
  Synthetic
cuguuccuuccaaccuauua

SEQ ID NO: 698897 - RNA, 20 nt, Artificial Sequence
  Synthetic
cgaaugucugggcccuauua

SEQ ID NO: 698898 - RNA, 20 nt, Artificial Sequence
  Synthetic
acauugggcugugucuauua

SEQ ID NO: 698899 - RNA, 20 nt, Artificial Sequence
  Synthetic
cuuacugaugcaaaguauua

SEQ ID NO: 698900 - RNA, 20 nt, Artificial Sequence
  Synthetic
uagugcagcaauacguauua

SEQ ID NO: 698901 - RNA, 20 nt, Artificial Sequence
  Synthetic
uuauguguaguuacguauua

SEQ ID NO: 698902 - RNA, 20 nt, Artificial Sequence
  Synthetic
cacugcuaugcaagguauua

SEQ ID NO: 698903 - RNA, 20 nt, Artificial Sequence
  Synthetic
uauccuaguucaccuuauua

SEQ ID NO: 698904 - RNA, 20 nt, Artificial Sequence
  Synthetic
cucccaucuaaaaguuauua

SEQ ID NO: 698905 - RNA, 20 nt, Artificial Sequence
  Synthetic
accuacguugcuuaaacuua

SEQ ID NO: 698906 - RNA, 20 nt, Artificial Sequence
  Synthetic
aggcaagccaucacaacuua

SEQ ID NO: 698907 - RNA, 20 nt, Artificial Sequence
  Synthetic
uuuggaugucaagcaacuua

SEQ ID NO: 698908 - RNA, 20 nt, Artificial Sequence
  Synthetic
agagaacgagauuacacuua

SEQ ID NO: 698909 - RNA, 20 nt, Artificial Sequence
  Synthetic
caauguauccuagagacuua

SEQ ID NO: 698910 - RNA, 20 nt, Artificial Sequence
  Synthetic
uucaaagguacuacuacuua

SEQ ID NO: 698911 - RNA, 20 nt, Artificial Sequence
  Synthetic
uuuauucuccacuaaccuua

SEQ ID NO: 698912 - RNA, 20 nt, Artificial Sequence
  Synthetic
aaaguaggaucuauaccuua

SEQ ID NO: 698913 - RNA, 20 nt, Artificial Sequence
  Synthetic
aauccagguuuucacccuua

SEQ ID NO: 698914 - RNA, 20 nt, Artificial Sequence
  Synthetic
aaccagaauuggcauccuua

SEQ ID NO: 698915 - RNA, 20 nt, Artificial Sequence
  Synthetic
agaaaccucaacgguccuua

SEQ ID NO: 698916 - RNA, 20 nt, Artificial Sequence
  Synthetic
ugggcuggaauuauagcuua

SEQ ID NO: 698917 - RNA, 20 nt, Artificial Sequence
  Synthetic
caguccauacacguagcuua

SEQ ID NO: 698918 - RNA, 20 nt, Artificial Sequence
  Synthetic
accuacuugcuuaaugcuua

SEQ ID NO: 698919 - RNA, 20 nt, Artificial Sequence
  Synthetic
ucuaucagguuucaugcuua

SEQ ID NO: 698920 - RNA, 20 nt, Artificial Sequence
  Synthetic
aaguggaaaccagcugcuua

SEQ ID NO: 698921 - RNA, 20 nt, Artificial Sequence
  Synthetic
ccagaguucgggauugcuua

SEQ ID NO: 698922 - RNA, 20 nt, Artificial Sequence
  Synthetic
ccugagacccuaaaaucuua

SEQ ID NO: 698923 - RNA, 20 nt, Artificial Sequence
  Synthetic
ccauaguccaacccaucuua

SEQ ID NO: 698924 - RNA, 20 nt, Artificial Sequence
  Synthetic
uacacaauaaugccaucuua

SEQ ID NO: 698925 - RNA, 20 nt, Artificial Sequence
  Synthetic
uuaucgaugaagguaucuua

SEQ ID NO: 698926 - RNA, 20 nt, Artificial Sequence
  Synthetic
augcacugcaucuucucuua

SEQ ID NO: 698927 - RNA, 20 nt, Artificial Sequence
  Synthetic
cucaugaguucaacgucuua

SEQ ID NO: 698928 - RNA, 20 nt, Artificial Sequence
  Synthetic
cuguagggaaccaugucuua

SEQ ID NO: 698929 - RNA, 20 nt, Artificial Sequence
  Synthetic
cccuuuuuacacucuucuua

SEQ ID NO: 698930 - RNA, 20 nt, Artificial Sequence
  Synthetic
ucaucauugagccguucuua

SEQ ID NO: 698931 - RNA, 20 nt, Artificial Sequence
  Synthetic
uauaggcccugcaaaaguua

SEQ ID NO: 698932 - RNA, 20 nt, Artificial Sequence
  Synthetic
ccucuucuugguaaaaguua

SEQ ID NO: 698933 - RNA, 20 nt, Artificial Sequence
  Synthetic
ccacacuaugaaucaaguua

SEQ ID NO: 698934 - RNA, 20 nt, Artificial Sequence
  Synthetic
acaaaccccccaaacaguua

SEQ ID NO: 698935 - RNA, 20 nt, Artificial Sequence
  Synthetic
ucuuggcgcaaaugcaguua

SEQ ID NO: 698936 - RNA, 20 nt, Artificial Sequence
  Synthetic
uaauaggugggugggaguua

SEQ ID NO: 698937 - RNA, 20 nt, Artificial Sequence
  Synthetic
cccaguggccuugugaguua

SEQ ID NO: 698938 - RNA, 20 nt, Artificial Sequence
  Synthetic
ugagggauauccauuaguua

SEQ ID NO: 698939 - RNA, 20 nt, Artificial Sequence
  Synthetic
uacuaaaucccaguuaguua

SEQ ID NO: 698940 - RNA, 20 nt, Artificial Sequence
  Synthetic
cuguaugagagcaggcguua

SEQ ID NO: 698941 - RNA, 20 nt, Artificial Sequence
  Synthetic
uggagauaucaaugagguua

SEQ ID NO: 698942 - RNA, 20 nt, Artificial Sequence
  Synthetic
uuguaugaugaugacgguua

SEQ ID NO: 698943 - RNA, 20 nt, Artificial Sequence
  Synthetic
augcaugcagagcgggguua

SEQ ID NO: 698944 - RNA, 20 nt, Artificial Sequence
  Synthetic
cucaucugccuuucugguua

SEQ ID NO: 698945 - RNA, 20 nt, Artificial Sequence
  Synthetic
ugaacuauucccagugguua

SEQ ID NO: 698946 - RNA, 20 nt, Artificial Sequence
  Synthetic
ugaaguugcucguaauguua

SEQ ID NO: 698947 - RNA, 20 nt, Artificial Sequence
  Synthetic
uacaugucaggaacauguua

SEQ ID NO: 698948 - RNA, 20 nt, Artificial Sequence
  Synthetic
aaucuaggguuugcauguua

SEQ ID NO: 698949 - RNA, 20 nt, Artificial Sequence
  Synthetic
ugcucuaguuaagacuguua

SEQ ID NO: 698950 - RNA, 20 nt, Artificial Sequence
  Synthetic
ucacuccuccguaucuguua

SEQ ID NO: 698951 - RNA, 20 nt, Artificial Sequence
  Synthetic
aauggagcgagacaaauuua

SEQ ID NO: 698952 - RNA, 20 nt, Artificial Sequence
  Synthetic
aacguagauuucgaaauuua

SEQ ID NO: 698953 - RNA, 20 nt, Artificial Sequence
  Synthetic
uagccauuagcguaaauuua

SEQ ID NO: 698954 - RNA, 20 nt, Artificial Sequence
  Synthetic
cuaguucccguggccauuua

SEQ ID NO: 698955 - RNA, 20 nt, Artificial Sequence
  Synthetic
aaacccaagcauugcauuua

SEQ ID NO: 698956 - RNA, 20 nt, Artificial Sequence
  Synthetic
cagguuguggagaucauuua

SEQ ID NO: 698957 - RNA, 20 nt, Artificial Sequence
  Synthetic
agcacuccccaauagauuua

SEQ ID NO: 698958 - RNA, 20 nt, Artificial Sequence
  Synthetic
ucaccugcuauuaaacuuua

SEQ ID NO: 698959 - RNA, 20 nt, Artificial Sequence
  Synthetic
cuaauacuguagcaacuuua

SEQ ID NO: 698960 - RNA, 20 nt, Artificial Sequence
  Synthetic
accagagaccugauacuuua

SEQ ID NO: 698961 - RNA, 20 nt, Artificial Sequence
  Synthetic
aacgccauacaaagccuuua

SEQ ID NO: 698962 - RNA, 20 nt, Artificial Sequence
  Synthetic
augaugugaggggcaguuua

SEQ ID NO: 698963 - RNA, 20 nt, Artificial Sequence
  Synthetic
auacuacaacaugcaguuua

SEQ ID NO: 698964 - RNA, 20 nt, Artificial Sequence
  Synthetic
uugauuccgauacuaguuua

SEQ ID NO: 698965 - RNA, 20 nt, Artificial Sequence
  Synthetic
uaagcggcauuucuaguuua

SEQ ID NO: 698966 - RNA, 20 nt, Artificial Sequence
  Synthetic
ucuagaagcagacacguuua

SEQ ID NO: 698967 - RNA, 20 nt, Artificial Sequence
  Synthetic
aacuucugagguuccguuua

SEQ ID NO: 698968 - RNA, 20 nt, Artificial Sequence
  Synthetic
aaagcagauaucagcguuua

SEQ ID NO: 698969 - RNA, 20 nt, Artificial Sequence
  Synthetic
agugguucugaagucguuua

SEQ ID NO: 698970 - RNA, 20 nt, Artificial Sequence
  Synthetic
auaauacaaagcuagguuua

SEQ ID NO: 698971 - RNA, 20 nt, Artificial Sequence
  Synthetic
uuuaggacguguccuguuua

SEQ ID NO: 698972 - RNA, 20 nt, Artificial Sequence
  Synthetic
uugaguuaacccgcauuuua

SEQ ID NO: 698973 - RNA, 20 nt, Artificial Sequence
  Synthetic
acguaucuagcaugauuuua

SEQ ID NO: 698974 - RNA, 20 nt, Artificial Sequence
  Synthetic
cuuaccacgugccuauuuua

SEQ ID NO: 698975 - RNA, 20 nt, Artificial Sequence
  Synthetic
ucuggacaggaugcguuuua

SEQ ID NO: 698976 - RNA, 20 nt, Artificial Sequence
  Synthetic
ccgcuucuaucaacaaaaac

SEQ ID NO: 698977 - RNA, 20 nt, Artificial Sequence
  Synthetic
uaaaggccaacacacaaaac

SEQ ID NO: 698978 - RNA, 20 nt, Artificial Sequence
  Synthetic
auaguauagggguccaaaac

SEQ ID NO: 698979 - RNA, 20 nt, Artificial Sequence
  Synthetic
aguugauuuagaugcaaaac

SEQ ID NO: 698980 - RNA, 20 nt, Artificial Sequence
  Synthetic
ccacggaacuauugcaaaac

SEQ ID NO: 698981 - RNA, 20 nt, Artificial Sequence
  Synthetic
uugucaaagacggagaaaac

SEQ ID NO: 698982 - RNA, 20 nt, Artificial Sequence
  Synthetic
ugugaccaagagcauaaaac

SEQ ID NO: 698983 - RNA, 20 nt, Artificial Sequence
  Synthetic
caacagugcuacuauaaaac

SEQ ID NO: 698984 - RNA, 20 nt, Artificial Sequence
  Synthetic
uagaugaugccaacuaaaac

SEQ ID NO: 698985 - RNA, 20 nt, Artificial Sequence
  Synthetic
cuccuaccguucaguaaaac

SEQ ID NO: 698986 - RNA, 20 nt, Artificial Sequence
  Synthetic
cgaguacuuauugaacaaac

SEQ ID NO: 698987 - RNA, 20 nt, Artificial Sequence
  Synthetic
ugacaauugaaucuacaaac

SEQ ID NO: 698988 - RNA, 20 nt, Artificial Sequence
  Synthetic
cacugguuuuccuuacaaac

SEQ ID NO: 698989 - RNA, 20 nt, Artificial Sequence
  Synthetic
cuagaggaagcuuagcaaac

SEQ ID NO: 698990 - RNA, 20 nt, Artificial Sequence
  Synthetic
caucugucgguaaugcaaac

SEQ ID NO: 698991 - RNA, 20 nt, Artificial Sequence
  Synthetic
cuuauucucaugcaagaaac

SEQ ID NO: 698992 - RNA, 20 nt, Artificial Sequence
  Synthetic
cgggcucugccuucagaaac

SEQ ID NO: 698993 - RNA, 20 nt, Artificial Sequence
  Synthetic
auuuucaaugugggcgaaac

SEQ ID NO: 698994 - RNA, 20 nt, Artificial Sequence
  Synthetic
aaauaaguguguuucgaaac

SEQ ID NO: 698995 - RNA, 20 nt, Artificial Sequence
  Synthetic
uagagcuuauuuggugaaac

SEQ ID NO: 698996 - RNA, 20 nt, Artificial Sequence
  Synthetic
ugauggugauagugugaaac

SEQ ID NO: 698997 - RNA, 20 nt, Artificial Sequence
  Synthetic
agguuuagguguuuauaaac

SEQ ID NO: 698998 - RNA, 20 nt, Artificial Sequence
  Synthetic
cuuuuggauauucccuaaac

SEQ ID NO: 698999 - RNA, 20 nt, Artificial Sequence
  Synthetic
uuuuuccaauccagcuaaac

SEQ ID NO: 699000 - RNA, 20 nt, Artificial Sequence
  Synthetic
acaaagcuuaagaucuaaac

SEQ ID NO: 699001 - RNA, 20 nt, Artificial Sequence
  Synthetic
uggagagucaaggucuaaac

SEQ ID NO: 699002 - RNA, 20 nt, Artificial Sequence
  Synthetic
acucugaaaggauuguaaac

SEQ ID NO: 699003 - RNA, 20 nt, Artificial Sequence
  Synthetic
uguuggauugcucauuaaac

SEQ ID NO: 699004 - RNA, 20 nt, Artificial Sequence
  Synthetic
uacugacacauguauuaaac

SEQ ID NO: 699005 - RNA, 20 nt, Artificial Sequence
  Synthetic
agauuuugcagcacuuaaac

SEQ ID NO: 699006 - RNA, 20 nt, Artificial Sequence
  Synthetic
caggcuugaagcuguuaaac

SEQ ID NO: 699007 - RNA, 20 nt, Artificial Sequence
  Synthetic
acuuccauacacaaaacaac

SEQ ID NO: 699008 - RNA, 20 nt, Artificial Sequence
  Synthetic
acuuggcacguggaaacaac

SEQ ID NO: 699009 - RNA, 20 nt, Artificial Sequence
  Synthetic
accuccuaggguagaacaac

SEQ ID NO: 699010 - RNA, 20 nt, Artificial Sequence
  Synthetic
ugcuccuuagggaugacaac

SEQ ID NO: 699011 - RNA, 20 nt, Artificial Sequence
  Synthetic
ucucaguaugcuaauacaac

SEQ ID NO: 699012 - RNA, 20 nt, Artificial Sequence
  Synthetic
agcacaguaacuuuuacaac

SEQ ID NO: 699013 - RNA, 20 nt, Artificial Sequence
  Synthetic
aaccuaguuucuaaaccaac

SEQ ID NO: 699014 - RNA, 20 nt, Artificial Sequence
  Synthetic
cuuuacguagggcaaccaac

SEQ ID NO: 699015 - RNA, 20 nt, Artificial Sequence
  Synthetic
agugguaagucgugaccaac

SEQ ID NO: 699016 - RNA, 20 nt, Artificial Sequence
  Synthetic
agcucaaucguugccccaac

SEQ ID NO: 699017 - RNA, 20 nt, Artificial Sequence
  Synthetic
caccauagguacuggccaac

SEQ ID NO: 699018 - RNA, 20 nt, Artificial Sequence
  Synthetic
cuuaaucauugaaugccaac

SEQ ID NO: 699019 - RNA, 20 nt, Artificial Sequence
  Synthetic
uacagcugaucuaaagcaac

SEQ ID NO: 699020 - RNA, 20 nt, Artificial Sequence
  Synthetic
cauaacuuuguggaggcaac

SEQ ID NO: 699021 - RNA, 20 nt, Artificial Sequence
  Synthetic
auaauuaaucaucaugcaac

SEQ ID NO: 699022 - RNA, 20 nt, Artificial Sequence
  Synthetic
ucucaggauugcuaugcaac

SEQ ID NO: 699023 - RNA, 20 nt, Artificial Sequence
  Synthetic
auucucauucaccgugcaac

SEQ ID NO: 699024 - RNA, 20 nt, Artificial Sequence
  Synthetic
uaaugugggagaagaucaac

SEQ ID NO: 699025 - RNA, 20 nt, Artificial Sequence
  Synthetic
agagaugaugugggaucaac

SEQ ID NO: 699026 - RNA, 20 nt, Artificial Sequence
  Synthetic
acaugauuuagcugcucaac

SEQ ID NO: 699027 - RNA, 20 nt, Artificial Sequence
  Synthetic
agaguggaaccuaagucaac

SEQ ID NO: 699028 - RNA, 20 nt, Artificial Sequence
  Synthetic
ucaaguuagaccaugucaac

SEQ ID NO: 699029 - RNA, 20 nt, Artificial Sequence
  Synthetic
ccagguggugccgauucaac

SEQ ID NO: 699030 - RNA, 20 nt, Artificial Sequence
  Synthetic
aagccaccaguguguucaac

SEQ ID NO: 699031 - RNA, 20 nt, Artificial Sequence
  Synthetic
uacagugcccauaaaagaac

SEQ ID NO: 699032 - RNA, 20 nt, Artificial Sequence
  Synthetic
aucuauacuuugcgaagaac

SEQ ID NO: 699033 - RNA, 20 nt, Artificial Sequence
  Synthetic
aguuacgguaggauaagaac

SEQ ID NO: 699034 - RNA, 20 nt, Artificial Sequence
  Synthetic
acgcuuccacuggucagaac

SEQ ID NO: 699035 - RNA, 20 nt, Artificial Sequence
  Synthetic
uuguacgauugcaagagaac

SEQ ID NO: 699036 - RNA, 20 nt, Artificial Sequence
  Synthetic
auuacgcuuuagaugagaac

SEQ ID NO: 699037 - RNA, 20 nt, Artificial Sequence
  Synthetic
uugauuaucauugcuagaac

SEQ ID NO: 699038 - RNA, 20 nt, Artificial Sequence
  Synthetic
caugaggguaaauggcgaac

SEQ ID NO: 699039 - RNA, 20 nt, Artificial Sequence
  Synthetic
uaaugggcaaacagaggaac

SEQ ID NO: 699040 - RNA, 20 nt, Artificial Sequence
  Synthetic
ugacauauguaacgaggaac

SEQ ID NO: 699041 - RNA, 20 nt, Artificial Sequence
  Synthetic
ucacuggggcucgugggaac

SEQ ID NO: 699042 - RNA, 20 nt, Artificial Sequence
  Synthetic
cuucaagcaagguguggaac

SEQ ID NO: 699043 - RNA, 20 nt, Artificial Sequence
  Synthetic
uuaggaccucuccaaugaac

SEQ ID NO: 699044 - RNA, 20 nt, Artificial Sequence
  Synthetic
accauguagcuaguaugaac

SEQ ID NO: 699045 - RNA, 20 nt, Artificial Sequence
  Synthetic
ugcgaagggaaaaacugaac

SEQ ID NO: 699046 - RNA, 20 nt, Artificial Sequence
  Synthetic
caugcaacgcugaucugaac

SEQ ID NO: 699047 - RNA, 20 nt, Artificial Sequence
  Synthetic
caguuaucuagcaagugaac

SEQ ID NO: 699048 - RNA, 20 nt, Artificial Sequence
  Synthetic
caugcuacguucaauugaac

SEQ ID NO: 699049 - RNA, 20 nt, Artificial Sequence
  Synthetic
ugauuauacugggcuugaac

SEQ ID NO: 699050 - RNA, 20 nt, Artificial Sequence
  Synthetic
cauggugaagcauuuugaac

SEQ ID NO: 699051 - RNA, 20 nt, Artificial Sequence
  Synthetic
uggcaguuaccgaacauaac

SEQ ID NO: 699052 - RNA, 20 nt, Artificial Sequence
  Synthetic
ugacuuauuuaucagauaac

SEQ ID NO: 699053 - RNA, 20 nt, Artificial Sequence
  Synthetic
caucuucuuuuagggauaac

SEQ ID NO: 699054 - RNA, 20 nt, Artificial Sequence
  Synthetic
caggcauguugacauauaac

SEQ ID NO: 699055 - RNA, 20 nt, Artificial Sequence
  Synthetic
agugucauaccauaacuaac

SEQ ID NO: 699056 - RNA, 20 nt, Artificial Sequence
  Synthetic
uggaaugaacccaaccuaac

SEQ ID NO: 699057 - RNA, 20 nt, Artificial Sequence
  Synthetic
uugcgaaucgggucccuaac

SEQ ID NO: 699058 - RNA, 20 nt, Artificial Sequence
  Synthetic
aaugcuauccugauccuaac

SEQ ID NO: 699059 - RNA, 20 nt, Artificial Sequence
  Synthetic
caaaagugguacaagcuaac

SEQ ID NO: 699060 - RNA, 20 nt, Artificial Sequence
  Synthetic
uaacacugaagagggcuaac

SEQ ID NO: 699061 - RNA, 20 nt, Artificial Sequence
  Synthetic
uacuaugugaagauucuaac

SEQ ID NO: 699062 - RNA, 20 nt, Artificial Sequence
  Synthetic
agugcuuuguguaagguaac

SEQ ID NO: 699063 - RNA, 20 nt, Artificial Sequence
  Synthetic
cagaugaaucuggggguaac

SEQ ID NO: 699064 - RNA, 20 nt, Artificial Sequence
  Synthetic
cuugauaaugucucuguaac

SEQ ID NO: 699065 - RNA, 20 nt, Artificial Sequence
  Synthetic
aagguggagcuagaauuaac

SEQ ID NO: 699066 - RNA, 20 nt, Artificial Sequence
  Synthetic
acguuuuugcucugauuaac

SEQ ID NO: 699067 - RNA, 20 nt, Artificial Sequence
  Synthetic
uugagaacguacauauuaac

SEQ ID NO: 699068 - RNA, 20 nt, Artificial Sequence
  Synthetic
cuccaccagaacguauuaac

SEQ ID NO: 699069 - RNA, 20 nt, Artificial Sequence
  Synthetic
caaagugacaggguauuaac

SEQ ID NO: 699070 - RNA, 20 nt, Artificial Sequence
  Synthetic
ucauuagaaccaaccuuaac

SEQ ID NO: 699071 - RNA, 20 nt, Artificial Sequence
  Synthetic
auauugaguaaaccguuaac

SEQ ID NO: 699072 - RNA, 20 nt, Artificial Sequence
  Synthetic
caccgaagaugccauuuaac

SEQ ID NO: 699073 - RNA, 20 nt, Artificial Sequence
  Synthetic
uauuaaggcucugauuuaac

SEQ ID NO: 699074 - RNA, 20 nt, Artificial Sequence
  Synthetic
caaugaugaaugccuuuaac

SEQ ID NO: 699075 - RNA, 20 nt, Artificial Sequence
  Synthetic
uauuucagagccgcuuuaac

SEQ ID NO: 699076 - RNA, 20 nt, Artificial Sequence
  Synthetic
uuugcguacaaguguuuaac

SEQ ID NO: 699077 - RNA, 20 nt, Artificial Sequence
  Synthetic
cguguuaaagauguuuuaac

SEQ ID NO: 699078 - RNA, 20 nt, Artificial Sequence
  Synthetic
uccagugggauaaaaaacac

SEQ ID NO: 699079 - RNA, 20 nt, Artificial Sequence
  Synthetic
agagauucaacugcaaacac

SEQ ID NO: 699080 - RNA, 20 nt, Artificial Sequence
  Synthetic
uagauucacagaauaaacac

SEQ ID NO: 699081 - RNA, 20 nt, Artificial Sequence
  Synthetic
uugguggucgcaguaaacac

SEQ ID NO: 699082 - RNA, 20 nt, Artificial Sequence
  Synthetic
agcucccccgcaaagaacac

SEQ ID NO: 699083 - RNA, 20 nt, Artificial Sequence
  Synthetic
ugggauauuuaggagaacac

SEQ ID NO: 699084 - RNA, 20 nt, Artificial Sequence
  Synthetic
ucagcugaguacgugaacac

SEQ ID NO: 699085 - RNA, 20 nt, Artificial Sequence
  Synthetic
ugcacgugugaggugaacac

SEQ ID NO: 699086 - RNA, 20 nt, Artificial Sequence
  Synthetic
acccuguaaagggugaacac

SEQ ID NO: 699087 - RNA, 20 nt, Artificial Sequence
  Synthetic
uccacauuuugcacuaacac

SEQ ID NO: 699088 - RNA, 20 nt, Artificial Sequence
  Synthetic
uguguacacaguucuaacac

SEQ ID NO: 699089 - RNA, 20 nt, Artificial Sequence
  Synthetic
uggcaugaaaucuguaacac

SEQ ID NO: 699090 - RNA, 20 nt, Artificial Sequence
  Synthetic
uaauugccgucuuaacacac

SEQ ID NO: 699091 - RNA, 20 nt, Artificial Sequence
  Synthetic
cuaggagucucaugacacac

SEQ ID NO: 699092 - RNA, 20 nt, Artificial Sequence
  Synthetic
ucccuugcgcugcuacacac

SEQ ID NO: 699093 - RNA, 20 nt, Artificial Sequence
  Synthetic
cuugugugccauacgcacac

SEQ ID NO: 699094 - RNA, 20 nt, Artificial Sequence
  Synthetic
ccuuccacuagaccgcacac

SEQ ID NO: 699095 - RNA, 20 nt, Artificial Sequence
  Synthetic
aauccguauuuugugcacac

SEQ ID NO: 699096 - RNA, 20 nt, Artificial Sequence
  Synthetic
ugcuuuugacuauugcacac

SEQ ID NO: 699097 - RNA, 20 nt, Artificial Sequence
  Synthetic
caugguuuacucacucacac

SEQ ID NO: 699098 - RNA, 20 nt, Artificial Sequence
  Synthetic
ccugauaucaaccaagacac

SEQ ID NO: 699099 - RNA, 20 nt, Artificial Sequence
  Synthetic
uuaauggauggggaagacac

SEQ ID NO: 699100 - RNA, 20 nt, Artificial Sequence
  Synthetic
cacucuaccacugcagacac

SEQ ID NO: 699101 - RNA, 20 nt, Artificial Sequence
  Synthetic
uacgccuguuucauagacac

SEQ ID NO: 699102 - RNA, 20 nt, Artificial Sequence
  Synthetic
uugauuaagaagauagacac

SEQ ID NO: 699103 - RNA, 20 nt, Artificial Sequence
  Synthetic
uacacaaagaggaacgacac

SEQ ID NO: 699104 - RNA, 20 nt, Artificial Sequence
  Synthetic
aagaguagccugaucgacac

SEQ ID NO: 699105 - RNA, 20 nt, Artificial Sequence
  Synthetic
caugucugccacaaggacac

SEQ ID NO: 699106 - RNA, 20 nt, Artificial Sequence
  Synthetic
cuuuuacugggauaggacac

SEQ ID NO: 699107 - RNA, 20 nt, Artificial Sequence
  Synthetic
agcaugcuuaagugggacac

SEQ ID NO: 699108 - RNA, 20 nt, Artificial Sequence
  Synthetic
aaguauaagggcccugacac

SEQ ID NO: 699109 - RNA, 20 nt, Artificial Sequence
  Synthetic
cccauucauagcgcugacac

SEQ ID NO: 699110 - RNA, 20 nt, Artificial Sequence
  Synthetic
ccugaaaguuuaauugacac

SEQ ID NO: 699111 - RNA, 20 nt, Artificial Sequence
  Synthetic
uuauuuccauguauugacac

SEQ ID NO: 699112 - RNA, 20 nt, Artificial Sequence
  Synthetic
ccacugcaucuuauugacac

SEQ ID NO: 699113 - RNA, 20 nt, Artificial Sequence
  Synthetic
uccagugcaugacuugacac

SEQ ID NO: 699114 - RNA, 20 nt, Artificial Sequence
  Synthetic
cuauuuuuaucaguugacac

SEQ ID NO: 699115 - RNA, 20 nt, Artificial Sequence
  Synthetic
cauacacugugauuugacac

SEQ ID NO: 699116 - RNA, 20 nt, Artificial Sequence
  Synthetic
uucagacuauguccauacac

SEQ ID NO: 699117 - RNA, 20 nt, Artificial Sequence
  Synthetic
cuugcuugcaagcuauacac

SEQ ID NO: 699118 - RNA, 20 nt, Artificial Sequence
  Synthetic
aaguuggguuauguauacac

SEQ ID NO: 699119 - RNA, 20 nt, Artificial Sequence
  Synthetic
aaugaagugaauuacuacac

SEQ ID NO: 699120 - RNA, 20 nt, Artificial Sequence
  Synthetic
ucuauaaggagguccuacac

SEQ ID NO: 699121 - RNA, 20 nt, Artificial Sequence
  Synthetic
augccaagcagaagcuacac

SEQ ID NO: 699122 - RNA, 20 nt, Artificial Sequence
  Synthetic
ugaaguauagugcucuacac

SEQ ID NO: 699123 - RNA, 20 nt, Artificial Sequence
  Synthetic
ugacacccacaauaguacac

SEQ ID NO: 699124 - RNA, 20 nt, Artificial Sequence
  Synthetic
ucaacuugguggugguacac

SEQ ID NO: 699125 - RNA, 20 nt, Artificial Sequence
  Synthetic
ucuaacaaguauaauuacac

SEQ ID NO: 699126 - RNA, 20 nt, Artificial Sequence
  Synthetic
uugcacuagguccauuacac

SEQ ID NO: 699127 - RNA, 20 nt, Artificial Sequence
  Synthetic
aggacacugaaggcuuacac

SEQ ID NO: 699128 - RNA, 20 nt, Artificial Sequence
  Synthetic
acuagaaucagacuuuacac

SEQ ID NO: 699129 - RNA, 20 nt, Artificial Sequence
  Synthetic
ucggcaggaccugcaaccac

SEQ ID NO: 699130 - RNA, 20 nt, Artificial Sequence
  Synthetic
caaacaguggugugaaccac

SEQ ID NO: 699131 - RNA, 20 nt, Artificial Sequence
  Synthetic
agaauaaacccccuaaccac

SEQ ID NO: 699132 - RNA, 20 nt, Artificial Sequence
  Synthetic
uacguaauaaaucacaccac

SEQ ID NO: 699133 - RNA, 20 nt, Artificial Sequence
  Synthetic
uuugucaccccagacaccac

SEQ ID NO: 699134 - RNA, 20 nt, Artificial Sequence
  Synthetic
uugacaaugguguacaccac

SEQ ID NO: 699135 - RNA, 20 nt, Artificial Sequence
  Synthetic
uauuucauucaauccaccac

SEQ ID NO: 699136 - RNA, 20 nt, Artificial Sequence
  Synthetic
acacaagaguucagcaccac

SEQ ID NO: 699137 - RNA, 20 nt, Artificial Sequence
  Synthetic
uucagcagucucuucaccac

SEQ ID NO: 699138 - RNA, 20 nt, Artificial Sequence
  Synthetic
aaacgacuaacuuagaccac

SEQ ID NO: 699139 - RNA, 20 nt, Artificial Sequence
  Synthetic
aacuucuauauuuagaccac

SEQ ID NO: 699140 - RNA, 20 nt, Artificial Sequence
  Synthetic
cuuaaucacuggaugaccac

SEQ ID NO: 699141 - RNA, 20 nt, Artificial Sequence
  Synthetic
cacauaaaggcacugaccac

SEQ ID NO: 699142 - RNA, 20 nt, Artificial Sequence
  Synthetic
aauuauuaaguccauaccac

SEQ ID NO: 699143 - RNA, 20 nt, Artificial Sequence
  Synthetic
uggaaugaagugccuaccac

SEQ ID NO: 699144 - RNA, 20 nt, Artificial Sequence
  Synthetic
acuuaucagggaaugcccac

SEQ ID NO: 699145 - RNA, 20 nt, Artificial Sequence
  Synthetic
uuucgauguuaaugucccac

SEQ ID NO: 699146 - RNA, 20 nt, Artificial Sequence
  Synthetic
agacauaaaucauuucccac

SEQ ID NO: 699147 - RNA, 20 nt, Artificial Sequence
  Synthetic
aaccaccgauacagagccac

SEQ ID NO: 699148 - RNA, 20 nt, Artificial Sequence
  Synthetic
auucuugauuggcuagccac

SEQ ID NO: 699149 - RNA, 20 nt, Artificial Sequence
  Synthetic
aggcagcagaauuuagccac

SEQ ID NO: 699150 - RNA, 20 nt, Artificial Sequence
  Synthetic
accauaacucacaaggccac

SEQ ID NO: 699151 - RNA, 20 nt, Artificial Sequence
  Synthetic
uaagaucauuaaucggccac

SEQ ID NO: 699152 - RNA, 20 nt, Artificial Sequence
  Synthetic
uagcuuuacgaaugggccac

SEQ ID NO: 699153 - RNA, 20 nt, Artificial Sequence
  Synthetic
cugcuguuacauguggccac

SEQ ID NO: 699154 - RNA, 20 nt, Artificial Sequence
  Synthetic
uauuccgagagcuaugccac

SEQ ID NO: 699155 - RNA, 20 nt, Artificial Sequence
  Synthetic
ccuuacguuguaauugccac

SEQ ID NO: 699156 - RNA, 20 nt, Artificial Sequence
  Synthetic
auuauauaccuaucauccac

SEQ ID NO: 699157 - RNA, 20 nt, Artificial Sequence
  Synthetic
aaugucuaaccuuuauccac

SEQ ID NO: 699158 - RNA, 20 nt, Artificial Sequence
  Synthetic
aauuagguauucgccuccac

SEQ ID NO: 699159 - RNA, 20 nt, Artificial Sequence
  Synthetic
uaucaacauuaguucuccac

SEQ ID NO: 699160 - RNA, 20 nt, Artificial Sequence
  Synthetic
cuauggauuuaggaguccac

SEQ ID NO: 699161 - RNA, 20 nt, Artificial Sequence
  Synthetic
auaaaucgauuauuuuccac

SEQ ID NO: 699162 - RNA, 20 nt, Artificial Sequence
  Synthetic
auguaucuuggcugaagcac

SEQ ID NO: 699163 - RNA, 20 nt, Artificial Sequence
  Synthetic
ugguaccugcugauaagcac

SEQ ID NO: 699164 - RNA, 20 nt, Artificial Sequence
  Synthetic
auaccuagauaauagagcac

SEQ ID NO: 699165 - RNA, 20 nt, Artificial Sequence
  Synthetic
uuagagauaaucaauagcac

SEQ ID NO: 699166 - RNA, 20 nt, Artificial Sequence
  Synthetic
cauucuuugaaggauagcac

SEQ ID NO: 699167 - RNA, 20 nt, Artificial Sequence
  Synthetic
aaccauccuuuaaguagcac

SEQ ID NO: 699168 - RNA, 20 nt, Artificial Sequence
  Synthetic
ccugagugaauccuuagcac

SEQ ID NO: 699169 - RNA, 20 nt, Artificial Sequence
  Synthetic
ugcuaacguauauuuagcac

SEQ ID NO: 699170 - RNA, 20 nt, Artificial Sequence
  Synthetic
uaucauuaaaggacccgcac

SEQ ID NO: 699171 - RNA, 20 nt, Artificial Sequence
  Synthetic
acgugcaauuuugggcgcac

SEQ ID NO: 699172 - RNA, 20 nt, Artificial Sequence
  Synthetic
cuucuggcgugaaaaggcac

SEQ ID NO: 699173 - RNA, 20 nt, Artificial Sequence
  Synthetic
uacacaaacucacaaggcac

SEQ ID NO: 699174 - RNA, 20 nt, Artificial Sequence
  Synthetic
ucacuuauugcggaaggcac

SEQ ID NO: 699175 - RNA, 20 nt, Artificial Sequence
  Synthetic
aagcgccuauuuacaggcac

SEQ ID NO: 699176 - RNA, 20 nt, Artificial Sequence
  Synthetic
aguuacuaauagccaggcac

SEQ ID NO: 699177 - RNA, 20 nt, Artificial Sequence
  Synthetic
ucaaagcuccauauaggcac

SEQ ID NO: 699178 - RNA, 20 nt, Artificial Sequence
  Synthetic
ucauuuguucaucuaggcac

SEQ ID NO: 699179 - RNA, 20 nt, Artificial Sequence
  Synthetic
uaugccaccaccagcggcac

SEQ ID NO: 699180 - RNA, 20 nt, Artificial Sequence
  Synthetic
uuacaaucagaaaggggcac

SEQ ID NO: 699181 - RNA, 20 nt, Artificial Sequence
  Synthetic
ccugcaacaaaaccuggcac

SEQ ID NO: 699182 - RNA, 20 nt, Artificial Sequence
  Synthetic
ccccgugucaagucaugcac

SEQ ID NO: 699183 - RNA, 20 nt, Artificial Sequence
  Synthetic
uaagccuuugacggaugcac

SEQ ID NO: 699184 - RNA, 20 nt, Artificial Sequence
  Synthetic
aguuacguuugcaccugcac

SEQ ID NO: 699185 - RNA, 20 nt, Artificial Sequence
  Synthetic
cucuaaugcuaaaugugcac

SEQ ID NO: 699186 - RNA, 20 nt, Artificial Sequence
  Synthetic
ccuguuacuguagauugcac

SEQ ID NO: 699187 - RNA, 20 nt, Artificial Sequence
  Synthetic
auagaaguuauuuauugcac

SEQ ID NO: 699188 - RNA, 20 nt, Artificial Sequence
  Synthetic
acucuauauucacuaaucac

SEQ ID NO: 699189 - RNA, 20 nt, Artificial Sequence
  Synthetic
uauagaagcacaguaaucac

SEQ ID NO: 699190 - RNA, 20 nt, Artificial Sequence
  Synthetic
ucaaccaauagaguaaucac

SEQ ID NO: 699191 - RNA, 20 nt, Artificial Sequence
  Synthetic
uuccacuaccaagacaucac

SEQ ID NO: 699192 - RNA, 20 nt, Artificial Sequence
  Synthetic
uuuccaugcuaguacaucac

SEQ ID NO: 699193 - RNA, 20 nt, Artificial Sequence
  Synthetic
aggcacuguuaaaagaucac

SEQ ID NO: 699194 - RNA, 20 nt, Artificial Sequence
  Synthetic
uacaucauauagcggaucac

SEQ ID NO: 699195 - RNA, 20 nt, Artificial Sequence
  Synthetic
caaggcugacuagugaucac

SEQ ID NO: 699196 - RNA, 20 nt, Artificial Sequence
  Synthetic
acaagggcauauauacucac

SEQ ID NO: 699197 - RNA, 20 nt, Artificial Sequence
  Synthetic
aguuucagaacgcuacucac

SEQ ID NO: 699198 - RNA, 20 nt, Artificial Sequence
  Synthetic
uaacuucuguugaagcucac

SEQ ID NO: 699199 - RNA, 20 nt, Artificial Sequence
  Synthetic
ugaugcaaguucacgcucac

SEQ ID NO: 699200 - RNA, 20 nt, Artificial Sequence
  Synthetic
cauuuuguacguaggcucac

SEQ ID NO: 699201 - RNA, 20 nt, Artificial Sequence
  Synthetic
aagacgcuagcgggucucac

SEQ ID NO: 699202 - RNA, 20 nt, Artificial Sequence
  Synthetic
uauuaugacuaguuucucac

SEQ ID NO: 699203 - RNA, 20 nt, Artificial Sequence
  Synthetic
acuuuaguaggggaagucac

SEQ ID NO: 699204 - RNA, 20 nt, Artificial Sequence
  Synthetic
aagcaucagucaucagucac

SEQ ID NO: 699205 - RNA, 20 nt, Artificial Sequence
  Synthetic
uugucacgucaacaggucac

SEQ ID NO: 699206 - RNA, 20 nt, Artificial Sequence
  Synthetic
ccaacccagguauaggucac

SEQ ID NO: 699207 - RNA, 20 nt, Artificial Sequence
  Synthetic
uuuacuaucaccagggucac

SEQ ID NO: 699208 - RNA, 20 nt, Artificial Sequence
  Synthetic
auugugaggcaccgugucac

SEQ ID NO: 699209 - RNA, 20 nt, Artificial Sequence
  Synthetic
cucaguaacccuaaauucac

SEQ ID NO: 699210 - RNA, 20 nt, Artificial Sequence
  Synthetic
augguuuuccuguaauucac

SEQ ID NO: 699211 - RNA, 20 nt, Artificial Sequence
  Synthetic
acaucugcccuguuauucac

SEQ ID NO: 699212 - RNA, 20 nt, Artificial Sequence
  Synthetic
cguggggcacucaacuucac

SEQ ID NO: 699213 - RNA, 20 nt, Artificial Sequence
  Synthetic
uuaauuauaacuaccuucac

SEQ ID NO: 699214 - RNA, 20 nt, Artificial Sequence
  Synthetic
aggggcgccaugcucuucac

SEQ ID NO: 699215 - RNA, 20 nt, Artificial Sequence
  Synthetic
auauucuuagaaucguucac

SEQ ID NO: 699216 - RNA, 20 nt, Artificial Sequence
  Synthetic
ccccagucagauucguucac

SEQ ID NO: 699217 - RNA, 20 nt, Artificial Sequence
  Synthetic
agaagaucuuuuguguucac

SEQ ID NO: 699218 - RNA, 20 nt, Artificial Sequence
  Synthetic
aacuccgguaacuuguucac

SEQ ID NO: 699219 - RNA, 20 nt, Artificial Sequence
  Synthetic
uaaccuuucgugaauuucac

SEQ ID NO: 699220 - RNA, 20 nt, Artificial Sequence
  Synthetic
cagugcuuacuauguuucac

SEQ ID NO: 699221 - RNA, 20 nt, Artificial Sequence
  Synthetic
agaaaacgagucuuaaagac

SEQ ID NO: 699222 - RNA, 20 nt, Artificial Sequence
  Synthetic
aauuauacuuagcacaagac

SEQ ID NO: 699223 - RNA, 20 nt, Artificial Sequence
  Synthetic
ugaguuuauuggcacaagac

SEQ ID NO: 699224 - RNA, 20 nt, Artificial Sequence
  Synthetic
aacuggacuauuagcaagac

SEQ ID NO: 699225 - RNA, 20 nt, Artificial Sequence
  Synthetic
ugaagauuuuuaugcaagac

SEQ ID NO: 699226 - RNA, 20 nt, Artificial Sequence
  Synthetic
cucagcuuaagccagaagac

SEQ ID NO: 699227 - RNA, 20 nt, Artificial Sequence
  Synthetic
uugugguuacucaugaagac

SEQ ID NO: 699228 - RNA, 20 nt, Artificial Sequence
  Synthetic
ugauaaccugaauauaagac

SEQ ID NO: 699229 - RNA, 20 nt, Artificial Sequence
  Synthetic
ccgaucaagaccgguaagac

SEQ ID NO: 699230 - RNA, 20 nt, Artificial Sequence
  Synthetic
caaguaacugacuggcagac

SEQ ID NO: 699231 - RNA, 20 nt, Artificial Sequence
  Synthetic
cccaacccauaaaaagagac

SEQ ID NO: 699232 - RNA, 20 nt, Artificial Sequence
  Synthetic
uggguauuacauaaagagac

SEQ ID NO: 699233 - RNA, 20 nt, Artificial Sequence
  Synthetic
accauagagaguugagagac

SEQ ID NO: 699234 - RNA, 20 nt, Artificial Sequence
  Synthetic
auguagggcuccugcgagac

SEQ ID NO: 699235 - RNA, 20 nt, Artificial Sequence
  Synthetic
uagaacccaccccaggagac

SEQ ID NO: 699236 - RNA, 20 nt, Artificial Sequence
  Synthetic
accuauuuugacuaugagac

SEQ ID NO: 699237 - RNA, 20 nt, Artificial Sequence
  Synthetic
caacaugaugcaggugagac

SEQ ID NO: 699238 - RNA, 20 nt, Artificial Sequence
  Synthetic
aucacaagguguacauagac

SEQ ID NO: 699239 - RNA, 20 nt, Artificial Sequence
  Synthetic
uaaaauaaggguugauagac

SEQ ID NO: 699240 - RNA, 20 nt, Artificial Sequence
  Synthetic
acagcuacaagcugcuagac

SEQ ID NO: 699241 - RNA, 20 nt, Artificial Sequence
  Synthetic
uugggcuuaaaucucuagac

SEQ ID NO: 699242 - RNA, 20 nt, Artificial Sequence
  Synthetic
ucacaaucauuuagguagac

SEQ ID NO: 699243 - RNA, 20 nt, Artificial Sequence
  Synthetic
cagaaaaccccggauuagac

SEQ ID NO: 699244 - RNA, 20 nt, Artificial Sequence
  Synthetic
aaaacccaucuaacuuagac

SEQ ID NO: 699245 - RNA, 20 nt, Artificial Sequence
  Synthetic
augcucuaagagaugacgac

SEQ ID NO: 699246 - RNA, 20 nt, Artificial Sequence
  Synthetic
cccauaggaaguacuacgac

SEQ ID NO: 699247 - RNA, 20 nt, Artificial Sequence
  Synthetic
accauagaggcaacagcgac

SEQ ID NO: 699248 - RNA, 20 nt, Artificial Sequence
  Synthetic
aagaggacauuugaaucgac

SEQ ID NO: 699249 - RNA, 20 nt, Artificial Sequence
  Synthetic
uuuuuuucaaggcccucgac

SEQ ID NO: 699250 - RNA, 20 nt, Artificial Sequence
  Synthetic
uguacguaucauaaaaggac

SEQ ID NO: 699251 - RNA, 20 nt, Artificial Sequence
  Synthetic
aguguguuucgaaacaggac

SEQ ID NO: 699252 - RNA, 20 nt, Artificial Sequence
  Synthetic
cagguccugccgaacaggac

SEQ ID NO: 699253 - RNA, 20 nt, Artificial Sequence
  Synthetic
cuauauuuagaccacaggac

SEQ ID NO: 699254 - RNA, 20 nt, Artificial Sequence
  Synthetic
agugaagaagcugccaggac

SEQ ID NO: 699255 - RNA, 20 nt, Artificial Sequence
  Synthetic
uuagguucugaugucaggac

SEQ ID NO: 699256 - RNA, 20 nt, Artificial Sequence
  Synthetic
augugucuuuuuccuaggac

SEQ ID NO: 699257 - RNA, 20 nt, Artificial Sequence
  Synthetic
cggugaaagugacuuaggac

SEQ ID NO: 699258 - RNA, 20 nt, Artificial Sequence
  Synthetic
ugaguacagagcaagcggac

SEQ ID NO: 699259 - RNA, 20 nt, Artificial Sequence
  Synthetic
uuagaaugaauucgagggac

SEQ ID NO: 699260 - RNA, 20 nt, Artificial Sequence
  Synthetic
uauuccuuccauauagggac

SEQ ID NO: 699261 - RNA, 20 nt, Artificial Sequence
  Synthetic
caauagaaacugauauggac

SEQ ID NO: 699262 - RNA, 20 nt, Artificial Sequence
  Synthetic
cuuauacuucauauauggac

SEQ ID NO: 699263 - RNA, 20 nt, Artificial Sequence
  Synthetic
cauaagcuacguguauggac

SEQ ID NO: 699264 - RNA, 20 nt, Artificial Sequence
  Synthetic
aggcaggaagucuaguggac

SEQ ID NO: 699265 - RNA, 20 nt, Artificial Sequence
  Synthetic
uguuagugcaaaauguggac

SEQ ID NO: 699266 - RNA, 20 nt, Artificial Sequence
  Synthetic
auguaucuuugccauuggac

SEQ ID NO: 699267 - RNA, 20 nt, Artificial Sequence
  Synthetic
uuguacaacguaauaaugac

SEQ ID NO: 699268 - RNA, 20 nt, Artificial Sequence
  Synthetic
cggacuacucaauuaaugac

SEQ ID NO: 699269 - RNA, 20 nt, Artificial Sequence
  Synthetic
uuguaauugucaagcaugac

SEQ ID NO: 699270 - RNA, 20 nt, Artificial Sequence
  Synthetic
cuugaugauuauagcaugac

SEQ ID NO: 699271 - RNA, 20 nt, Artificial Sequence
  Synthetic
cguacagcuuuccagaugac

SEQ ID NO: 699272 - RNA, 20 nt, Artificial Sequence
  Synthetic
aaauguguucgaucgaugac

SEQ ID NO: 699273 - RNA, 20 nt, Artificial Sequence
  Synthetic
ucucuagggcugucgaugac

SEQ ID NO: 699274 - RNA, 20 nt, Artificial Sequence
  Synthetic
ccuggaauucuccugaugac

SEQ ID NO: 699275 - RNA, 20 nt, Artificial Sequence
  Synthetic
aacaaacgaguagugaugac

SEQ ID NO: 699276 - RNA, 20 nt, Artificial Sequence
  Synthetic
caucuaccuagaaauaugac

SEQ ID NO: 699277 - RNA, 20 nt, Artificial Sequence
  Synthetic
aaguagauguccaguaugac

SEQ ID NO: 699278 - RNA, 20 nt, Artificial Sequence
  Synthetic
uagacacaguuuguuaugac

SEQ ID NO: 699279 - RNA, 20 nt, Artificial Sequence
  Synthetic
uguggcauaaacacacugac

SEQ ID NO: 699280 - RNA, 20 nt, Artificial Sequence
  Synthetic
aaauuccuuuagguacugac

SEQ ID NO: 699281 - RNA, 20 nt, Artificial Sequence
  Synthetic
uacagucgcuggaggcugac

SEQ ID NO: 699282 - RNA, 20 nt, Artificial Sequence
  Synthetic
agguuaccacugaugcugac

SEQ ID NO: 699283 - RNA, 20 nt, Artificial Sequence
  Synthetic
acccagugaacgaaucugac

SEQ ID NO: 699284 - RNA, 20 nt, Artificial Sequence
  Synthetic
cgaagggcacauagucugac

SEQ ID NO: 699285 - RNA, 20 nt, Artificial Sequence
  Synthetic
ccuuuaucuaacugucugac

SEQ ID NO: 699286 - RNA, 20 nt, Artificial Sequence
  Synthetic
ugcaccuacacuuuucugac

SEQ ID NO: 699287 - RNA, 20 nt, Artificial Sequence
  Synthetic
aaccauagagguuuucugac

SEQ ID NO: 699288 - RNA, 20 nt, Artificial Sequence
  Synthetic
cgguacaaaaaaacagugac

SEQ ID NO: 699289 - RNA, 20 nt, Artificial Sequence
  Synthetic
uuacaucugcuuagggugac

SEQ ID NO: 699290 - RNA, 20 nt, Artificial Sequence
  Synthetic
ucagcucaucauauggugac

SEQ ID NO: 699291 - RNA, 20 nt, Artificial Sequence
  Synthetic
uuacguucagguauggugac

SEQ ID NO: 699292 - RNA, 20 nt, Artificial Sequence
  Synthetic
uagguuuauacuuuggugac

SEQ ID NO: 699293 - RNA, 20 nt, Artificial Sequence
  Synthetic
aguccacacuuccuugugac

SEQ ID NO: 699294 - RNA, 20 nt, Artificial Sequence
  Synthetic
uauuggggcugggaauugac

SEQ ID NO: 699295 - RNA, 20 nt, Artificial Sequence
  Synthetic
auacaggagacguaauugac

SEQ ID NO: 699296 - RNA, 20 nt, Artificial Sequence
  Synthetic
caaagauaacuucucuugac

SEQ ID NO: 699297 - RNA, 20 nt, Artificial Sequence
  Synthetic
uaagugaaugagacuuugac

SEQ ID NO: 699298 - RNA, 20 nt, Artificial Sequence
  Synthetic
uguugguuuauccguuugac

SEQ ID NO: 699299 - RNA, 20 nt, Artificial Sequence
  Synthetic
aggcguuugaaccaaaauac

SEQ ID NO: 699300 - RNA, 20 nt, Artificial Sequence
  Synthetic
augcacguaaugcaaaauac

SEQ ID NO: 699301 - RNA, 20 nt, Artificial Sequence
  Synthetic
ugcauauaucacgcaaauac

SEQ ID NO: 699302 - RNA, 20 nt, Artificial Sequence
  Synthetic
aacauauggcuacgaaauac

SEQ ID NO: 699303 - RNA, 20 nt, Artificial Sequence
  Synthetic
acauaucagguaugaaauac

SEQ ID NO: 699304 - RNA, 20 nt, Artificial Sequence
  Synthetic
agggguaaggcuaagaauac

SEQ ID NO: 699305 - RNA, 20 nt, Artificial Sequence
  Synthetic
auggaagcaauagugaauac

SEQ ID NO: 699306 - RNA, 20 nt, Artificial Sequence
  Synthetic
auaggccuauguaauaauac

SEQ ID NO: 699307 - RNA, 20 nt, Artificial Sequence
  Synthetic
ccuuuuuaggcuucacauac

SEQ ID NO: 699308 - RNA, 20 nt, Artificial Sequence
  Synthetic
auauccccgaggcaccauac

SEQ ID NO: 699309 - RNA, 20 nt, Artificial Sequence
  Synthetic
uaguuagcauuguuccauac

SEQ ID NO: 699310 - RNA, 20 nt, Artificial Sequence
  Synthetic
ccauguguugagcaucauac

SEQ ID NO: 699311 - RNA, 20 nt, Artificial Sequence
  Synthetic
ugcugacgcccacuggauac

SEQ ID NO: 699312 - RNA, 20 nt, Artificial Sequence
  Synthetic
aguacagucaacaaugauac

SEQ ID NO: 699313 - RNA, 20 nt, Artificial Sequence
  Synthetic
accuacggcuguauauauac

SEQ ID NO: 699314 - RNA, 20 nt, Artificial Sequence
  Synthetic
acaugucgaacuaacuauac

SEQ ID NO: 699315 - RNA, 20 nt, Artificial Sequence
  Synthetic
uugauguggccagacuauac

SEQ ID NO: 699316 - RNA, 20 nt, Artificial Sequence
  Synthetic
cagaggugcccuuacuauac

SEQ ID NO: 699317 - RNA, 20 nt, Artificial Sequence
  Synthetic
cagaagguaacacucuauac

SEQ ID NO: 699318 - RNA, 20 nt, Artificial Sequence
  Synthetic
auuggagccuguaaguauac

SEQ ID NO: 699319 - RNA, 20 nt, Artificial Sequence
  Synthetic
aagggggccagagaguauac

SEQ ID NO: 699320 - RNA, 20 nt, Artificial Sequence
  Synthetic
agacggggucagggguauac

SEQ ID NO: 699321 - RNA, 20 nt, Artificial Sequence
  Synthetic
auccacaacuaggauuauac

SEQ ID NO: 699322 - RNA, 20 nt, Artificial Sequence
  Synthetic
auuuuugcagacacuuauac

SEQ ID NO: 699323 - RNA, 20 nt, Artificial Sequence
  Synthetic
acaacauacccuacuuauac

SEQ ID NO: 699324 - RNA, 20 nt, Artificial Sequence
  Synthetic
ucccucuugccaaguuauac

SEQ ID NO: 699325 - RNA, 20 nt, Artificial Sequence
  Synthetic
aggggauauaggaccacuac

SEQ ID NO: 699326 - RNA, 20 nt, Artificial Sequence
  Synthetic
aauuggaaguaugucacuac

SEQ ID NO: 699327 - RNA, 20 nt, Artificial Sequence
  Synthetic
aaaucuuguauccagacuac

SEQ ID NO: 699328 - RNA, 20 nt, Artificial Sequence
  Synthetic
auuaaacaaguaacuacuac

SEQ ID NO: 699329 - RNA, 20 nt, Artificial Sequence
  Synthetic
cguuccuaauucacuacuac

SEQ ID NO: 699330 - RNA, 20 nt, Artificial Sequence
  Synthetic
aaauagaggggaucuacuac

SEQ ID NO: 699331 - RNA, 20 nt, Artificial Sequence
  Synthetic
caggggcgagguguuacuac

SEQ ID NO: 699332 - RNA, 20 nt, Artificial Sequence
  Synthetic
aaguaggguuaguuuacuac

SEQ ID NO: 699333 - RNA, 20 nt, Artificial Sequence
  Synthetic
accaaccucggacuaccuac

SEQ ID NO: 699334 - RNA, 20 nt, Artificial Sequence
  Synthetic
aauaauaaagcaaccccuac

SEQ ID NO: 699335 - RNA, 20 nt, Artificial Sequence
  Synthetic
uuccgcucuuuccccccuac

SEQ ID NO: 699336 - RNA, 20 nt, Artificial Sequence
  Synthetic
cauaagacaugguucccuac

SEQ ID NO: 699337 - RNA, 20 nt, Artificial Sequence
  Synthetic
augauaucagguuucccuac

SEQ ID NO: 699338 - RNA, 20 nt, Artificial Sequence
  Synthetic
caacagacguggaagccuac

SEQ ID NO: 699339 - RNA, 20 nt, Artificial Sequence
  Synthetic
ugaagccuaaucuagccuac

SEQ ID NO: 699340 - RNA, 20 nt, Artificial Sequence
  Synthetic
acaaucacuacccauccuac

SEQ ID NO: 699341 - RNA, 20 nt, Artificial Sequence
  Synthetic
ugaaucacuggguauccuac

SEQ ID NO: 699342 - RNA, 20 nt, Artificial Sequence
  Synthetic
agugggagagcuacuccuac

SEQ ID NO: 699343 - RNA, 20 nt, Artificial Sequence
  Synthetic
aguggaguacuuuuuccuac

SEQ ID NO: 699344 - RNA, 20 nt, Artificial Sequence
  Synthetic
aggagucauaagucagcuac

SEQ ID NO: 699345 - RNA, 20 nt, Artificial Sequence
  Synthetic
aauaauaugcuggaggcuac

SEQ ID NO: 699346 - RNA, 20 nt, Artificial Sequence
  Synthetic
agccucaaugaaguugcuac

SEQ ID NO: 699347 - RNA, 20 nt, Artificial Sequence
  Synthetic
ucacuucacuucccaucuac

SEQ ID NO: 699348 - RNA, 20 nt, Artificial Sequence
  Synthetic
auguaauuagugccaucuac

SEQ ID NO: 699349 - RNA, 20 nt, Artificial Sequence
  Synthetic
auuaccaaugugcacucuac

SEQ ID NO: 699350 - RNA, 20 nt, Artificial Sequence
  Synthetic
aauggcuugucaaccucuac

SEQ ID NO: 699351 - RNA, 20 nt, Artificial Sequence
  Synthetic
ucuaucaacugcugcucuac

SEQ ID NO: 699352 - RNA, 20 nt, Artificial Sequence
  Synthetic
caaaaacaucacaggucuac

SEQ ID NO: 699353 - RNA, 20 nt, Artificial Sequence
  Synthetic
ucagcauauacguuuucuac

SEQ ID NO: 699354 - RNA, 20 nt, Artificial Sequence
  Synthetic
augguugaucucccaaguac

SEQ ID NO: 699355 - RNA, 20 nt, Artificial Sequence
  Synthetic
auaaaacuagcuccaaguac

SEQ ID NO: 699356 - RNA, 20 nt, Artificial Sequence
  Synthetic
cccauuagcuacugaaguac

SEQ ID NO: 699357 - RNA, 20 nt, Artificial Sequence
  Synthetic
uaaccagacuaagagaguac

SEQ ID NO: 699358 - RNA, 20 nt, Artificial Sequence
  Synthetic
cauaggcaaggccggaguac

SEQ ID NO: 699359 - RNA, 20 nt, Artificial Sequence
  Synthetic
uagguagccacagggaguac

SEQ ID NO: 699360 - RNA, 20 nt, Artificial Sequence
  Synthetic
accccacccuucccuaguac

SEQ ID NO: 699361 - RNA, 20 nt, Artificial Sequence
  Synthetic
ccaguacaugaaauuaguac

SEQ ID NO: 699362 - RNA, 20 nt, Artificial Sequence
  Synthetic
acuuaaaacaccauagguac

SEQ ID NO: 699363 - RNA, 20 nt, Artificial Sequence
  Synthetic
ccauuaucaugcuuagguac

SEQ ID NO: 699364 - RNA, 20 nt, Artificial Sequence
  Synthetic
ugaauuccucuguuagguac

SEQ ID NO: 699365 - RNA, 20 nt, Artificial Sequence
  Synthetic
uauugccagugcugggguac

SEQ ID NO: 699366 - RNA, 20 nt, Artificial Sequence
  Synthetic
auugcaauuuaaguggguac

SEQ ID NO: 699367 - RNA, 20 nt, Artificial Sequence
  Synthetic
uucaacuguacguuggguac

SEQ ID NO: 699368 - RNA, 20 nt, Artificial Sequence
  Synthetic
augucccucuuaccugguac

SEQ ID NO: 699369 - RNA, 20 nt, Artificial Sequence
  Synthetic
aagaccuguguaagugguac

SEQ ID NO: 699370 - RNA, 20 nt, Artificial Sequence
  Synthetic
auuuaucugacaggcuguac

SEQ ID NO: 699371 - RNA, 20 nt, Artificial Sequence
  Synthetic
uuguaauucugcugcuguac

SEQ ID NO: 699372 - RNA, 20 nt, Artificial Sequence
  Synthetic
acaacaucucuccucuguac

SEQ ID NO: 699373 - RNA, 20 nt, Artificial Sequence
  Synthetic
aguuaagucaaauaguguac

SEQ ID NO: 699374 - RNA, 20 nt, Artificial Sequence
  Synthetic
cgaaaaucuuugagguguac

SEQ ID NO: 699375 - RNA, 20 nt, Artificial Sequence
  Synthetic
ccuuuauccuacauguguac

SEQ ID NO: 699376 - RNA, 20 nt, Artificial Sequence
  Synthetic
auuguugucauagauuguac

SEQ ID NO: 699377 - RNA, 20 nt, Artificial Sequence
  Synthetic
uuggacaaggacgauuguac

SEQ ID NO: 699378 - RNA, 20 nt, Artificial Sequence
  Synthetic
uggucuuccucauauuguac

SEQ ID NO: 699379 - RNA, 20 nt, Artificial Sequence
  Synthetic
auccaacugcaaaguuguac

SEQ ID NO: 699380 - RNA, 20 nt, Artificial Sequence
  Synthetic
aguacaaaccagguuuguac

SEQ ID NO: 699381 - RNA, 20 nt, Artificial Sequence
  Synthetic
aauuccuuagaguuuuguac

SEQ ID NO: 699382 - RNA, 20 nt, Artificial Sequence
  Synthetic
cuagccugaugaauaauuac

SEQ ID NO: 699383 - RNA, 20 nt, Artificial Sequence
  Synthetic
uuauugauauagcuaauuac

SEQ ID NO: 699384 - RNA, 20 nt, Artificial Sequence
  Synthetic
uagcauagagcaaacauuac

SEQ ID NO: 699385 - RNA, 20 nt, Artificial Sequence
  Synthetic
cuacauugacucagcauuac

SEQ ID NO: 699386 - RNA, 20 nt, Artificial Sequence
  Synthetic
uuguuucaugcaggcauuac

SEQ ID NO: 699387 - RNA, 20 nt, Artificial Sequence
  Synthetic
auagccauccuacagauuac

SEQ ID NO: 699388 - RNA, 20 nt, Artificial Sequence
  Synthetic
uuuggagagcaucagauuac

SEQ ID NO: 699389 - RNA, 20 nt, Artificial Sequence
  Synthetic
cuucgcaaaguauagauuac

SEQ ID NO: 699390 - RNA, 20 nt, Artificial Sequence
  Synthetic
uauagggaugccuugauuac

SEQ ID NO: 699391 - RNA, 20 nt, Artificial Sequence
  Synthetic
ugaacaacccagaauauuac

SEQ ID NO: 699392 - RNA, 20 nt, Artificial Sequence
  Synthetic
aagucaaguagugauauuac

SEQ ID NO: 699393 - RNA, 20 nt, Artificial Sequence
  Synthetic
augauaggccuauauauuac

SEQ ID NO: 699394 - RNA, 20 nt, Artificial Sequence
  Synthetic
uugucauaacagacuauuac

SEQ ID NO: 699395 - RNA, 20 nt, Artificial Sequence
  Synthetic
augggauccaguauacuuac

SEQ ID NO: 699396 - RNA, 20 nt, Artificial Sequence
  Synthetic
cacuugcuaguuaugcuuac

SEQ ID NO: 699397 - RNA, 20 nt, Artificial Sequence
  Synthetic
uaucgaugaagguaucuuac

SEQ ID NO: 699398 - RNA, 20 nt, Artificial Sequence
  Synthetic
agaaucuacuugacucuuac

SEQ ID NO: 699399 - RNA, 20 nt, Artificial Sequence
  Synthetic
ccccacuuuguggcucuuac

SEQ ID NO: 699400 - RNA, 20 nt, Artificial Sequence
  Synthetic
auugccgguuuuauaguuac

SEQ ID NO: 699401 - RNA, 20 nt, Artificial Sequence
  Synthetic
ucaguuguguuacucguuac

SEQ ID NO: 699402 - RNA, 20 nt, Artificial Sequence
  Synthetic
ugaauugguuaguugguuac

SEQ ID NO: 699403 - RNA, 20 nt, Artificial Sequence
  Synthetic
acucucucuccuccuguuac

SEQ ID NO: 699404 - RNA, 20 nt, Artificial Sequence
  Synthetic
aacccacccaaaucuguuac

SEQ ID NO: 699405 - RNA, 20 nt, Artificial Sequence
  Synthetic
uguuauacagcuguuguuac

SEQ ID NO: 699406 - RNA, 20 nt, Artificial Sequence
  Synthetic
caaggcuacacguaauuuac

SEQ ID NO: 699407 - RNA, 20 nt, Artificial Sequence
  Synthetic
cacaaguaagcaucauuuac

SEQ ID NO: 699408 - RNA, 20 nt, Artificial Sequence
  Synthetic
ucccucagagguagauuuac

SEQ ID NO: 699409 - RNA, 20 nt, Artificial Sequence
  Synthetic
uccgccaagcgccuauuuac

SEQ ID NO: 699410 - RNA, 20 nt, Artificial Sequence
  Synthetic
aauuuccuagcccacuuuac

SEQ ID NO: 699411 - RNA, 20 nt, Artificial Sequence
  Synthetic
ugcacucuuugugacuuuac

SEQ ID NO: 699412 - RNA, 20 nt, Artificial Sequence
  Synthetic
uaccuguguucacccuuuac

SEQ ID NO: 699413 - RNA, 20 nt, Artificial Sequence
  Synthetic
uguacaguaaagggcuuuac

SEQ ID NO: 699414 - RNA, 20 nt, Artificial Sequence
  Synthetic
cugacuagaaagacuuuuac

SEQ ID NO: 699415 - RNA, 20 nt, Artificial Sequence
  Synthetic
cgugaaugugcuaguuuuac

SEQ ID NO: 699416 - RNA, 20 nt, Artificial Sequence
  Synthetic
aguuaccgaaaggguuuuac

SEQ ID NO: 699417 - RNA, 20 nt, Artificial Sequence
  Synthetic
cacuuucagcuuaaaaaacc

SEQ ID NO: 699418 - RNA, 20 nt, Artificial Sequence
  Synthetic
auauccuuccaguacaaacc

SEQ ID NO: 699419 - RNA, 20 nt, Artificial Sequence
  Synthetic
acucauuuaguauccaaacc

SEQ ID NO: 699420 - RNA, 20 nt, Artificial Sequence
  Synthetic
aaucuucaagccacgaaacc

SEQ ID NO: 699421 - RNA, 20 nt, Artificial Sequence
  Synthetic
ugagacuuuaugacacaacc

SEQ ID NO: 699422 - RNA, 20 nt, Artificial Sequence
  Synthetic
aggacuugaggcuaccaacc

SEQ ID NO: 699423 - RNA, 20 nt, Artificial Sequence
  Synthetic
accauagguacuggccaacc

SEQ ID NO: 699424 - RNA, 20 nt, Artificial Sequence
  Synthetic
cgaaauuuaaacguccaacc

SEQ ID NO: 699425 - RNA, 20 nt, Artificial Sequence
  Synthetic
caauaacgauggaaucaacc

SEQ ID NO: 699426 - RNA, 20 nt, Artificial Sequence
  Synthetic
ccucauagagugaaggaacc

SEQ ID NO: 699427 - RNA, 20 nt, Artificial Sequence
  Synthetic
uucacugggauggaggaacc

SEQ ID NO: 699428 - RNA, 20 nt, Artificial Sequence
  Synthetic
aucacacagauagcggaacc

SEQ ID NO: 699429 - RNA, 20 nt, Artificial Sequence
  Synthetic
aacuguaauccgggggaacc

SEQ ID NO: 699430 - RNA, 20 nt, Artificial Sequence
  Synthetic
acagguuccacgguggaacc

SEQ ID NO: 699431 - RNA, 20 nt, Artificial Sequence
  Synthetic
aucuuacgugaaacugaacc

SEQ ID NO: 699432 - RNA, 20 nt, Artificial Sequence
  Synthetic
aguugcuuauaaauugaacc

SEQ ID NO: 699433 - RNA, 20 nt, Artificial Sequence
  Synthetic
acaugauugcuaccauaacc

SEQ ID NO: 699434 - RNA, 20 nt, Artificial Sequence
  Synthetic
ucuaccucugagggauaacc

SEQ ID NO: 699435 - RNA, 20 nt, Artificial Sequence
  Synthetic
aagucacauguucuauaacc

SEQ ID NO: 699436 - RNA, 20 nt, Artificial Sequence
  Synthetic
aggggacacuuuaccuaacc

SEQ ID NO: 699437 - RNA, 20 nt, Artificial Sequence
  Synthetic
ucaugguuacaaauuuaacc

SEQ ID NO: 699438 - RNA, 20 nt, Artificial Sequence
  Synthetic
cugugauggggucuuuaacc

SEQ ID NO: 699439 - RNA, 20 nt, Artificial Sequence
  Synthetic
cauagacugagcccaacacc

SEQ ID NO: 699440 - RNA, 20 nt, Artificial Sequence
  Synthetic
cuguccauuuauauaacacc

SEQ ID NO: 699441 - RNA, 20 nt, Artificial Sequence
  Synthetic
ucgguauggaacaucacacc

SEQ ID NO: 699442 - RNA, 20 nt, Artificial Sequence
  Synthetic
cggagggaugugaucacacc

SEQ ID NO: 699443 - RNA, 20 nt, Artificial Sequence
  Synthetic
aauagcuuaauccucacacc

SEQ ID NO: 699444 - RNA, 20 nt, Artificial Sequence
  Synthetic
auagccucuccuuugacacc

SEQ ID NO: 699445 - RNA, 20 nt, Artificial Sequence
  Synthetic
uauuuugcaaaccauacacc

SEQ ID NO: 699446 - RNA, 20 nt, Artificial Sequence
  Synthetic
agcuagugugacuguacacc

SEQ ID NO: 699447 - RNA, 20 nt, Artificial Sequence
  Synthetic
aaguggaugaauggaccacc

SEQ ID NO: 699448 - RNA, 20 nt, Artificial Sequence
  Synthetic
cuacaagggaaacuaccacc

SEQ ID NO: 699449 - RNA, 20 nt, Artificial Sequence
  Synthetic
auaaugaacuggaccccacc

SEQ ID NO: 699450 - RNA, 20 nt, Artificial Sequence
  Synthetic
auucaacgauaauccccacc

SEQ ID NO: 699451 - RNA, 20 nt, Artificial Sequence
  Synthetic
aagggaaauguugcuccacc

SEQ ID NO: 699452 - RNA, 20 nt, Artificial Sequence
  Synthetic
augugaagucuaauuccacc

SEQ ID NO: 699453 - RNA, 20 nt, Artificial Sequence
  Synthetic
uauccaguuauucuagcacc

SEQ ID NO: 699454 - RNA, 20 nt, Artificial Sequence
  Synthetic
uuaucggauaaaguagcacc

SEQ ID NO: 699455 - RNA, 20 nt, Artificial Sequence
  Synthetic
cagaguauuuucguagcacc

SEQ ID NO: 699456 - RNA, 20 nt, Artificial Sequence
  Synthetic
acuagccaagagcaggcacc

SEQ ID NO: 699457 - RNA, 20 nt, Artificial Sequence
  Synthetic
uuauugguaauuaaaucacc

SEQ ID NO: 699458 - RNA, 20 nt, Artificial Sequence
  Synthetic
uuucucaauuagagcucacc

SEQ ID NO: 699459 - RNA, 20 nt, Artificial Sequence
  Synthetic
ccauuauuaaaucugucacc

SEQ ID NO: 699460 - RNA, 20 nt, Artificial Sequence
  Synthetic
auucuacagacuccuucacc

SEQ ID NO: 699461 - RNA, 20 nt, Artificial Sequence
  Synthetic
cuaugagguucuuaaagacc

SEQ ID NO: 699462 - RNA, 20 nt, Artificial Sequence
  Synthetic
cguguuuauacaacaagacc

SEQ ID NO: 699463 - RNA, 20 nt, Artificial Sequence
  Synthetic
uugguaucaucuacaagacc

SEQ ID NO: 699464 - RNA, 20 nt, Artificial Sequence
  Synthetic
auauugggugugucaagacc

SEQ ID NO: 699465 - RNA, 20 nt, Artificial Sequence
  Synthetic
uaacgagaauugagaagacc

SEQ ID NO: 699466 - RNA, 20 nt, Artificial Sequence
  Synthetic
agaugauucauacacagacc

SEQ ID NO: 699467 - RNA, 20 nt, Artificial Sequence
  Synthetic
uaguccgagucaaucagacc

SEQ ID NO: 699468 - RNA, 20 nt, Artificial Sequence
  Synthetic
aucuuaaauuccucgagacc

SEQ ID NO: 699469 - RNA, 20 nt, Artificial Sequence
  Synthetic
accccaaauagaaugagacc

SEQ ID NO: 699470 - RNA, 20 nt, Artificial Sequence
  Synthetic
acaagaccugguaugagacc

SEQ ID NO: 699471 - RNA, 20 nt, Artificial Sequence
  Synthetic
cgacaugugcuaaauagacc

SEQ ID NO: 699472 - RNA, 20 nt, Artificial Sequence
  Synthetic
ucaaguuauguagauagacc

SEQ ID NO: 699473 - RNA, 20 nt, Artificial Sequence
  Synthetic
uuguuguguuuagguagacc

SEQ ID NO: 699474 - RNA, 20 nt, Artificial Sequence
  Synthetic
ucaagaggacuugaacgacc

SEQ ID NO: 699475 - RNA, 20 nt, Artificial Sequence
  Synthetic
ugcagucaauauaugcgacc

SEQ ID NO: 699476 - RNA, 20 nt, Artificial Sequence
  Synthetic
aagcuaagugagguucgacc

SEQ ID NO: 699477 - RNA, 20 nt, Artificial Sequence
  Synthetic
aacuauuaagcuaaaggacc

SEQ ID NO: 699478 - RNA, 20 nt, Artificial Sequence
  Synthetic
cuauuccugguggacggacc

SEQ ID NO: 699479 - RNA, 20 nt, Artificial Sequence
  Synthetic
uucuguuaacuugccugacc

SEQ ID NO: 699480 - RNA, 20 nt, Artificial Sequence
  Synthetic
aaaaaguacaugcucugacc

SEQ ID NO: 699481 - RNA, 20 nt, Artificial Sequence
  Synthetic
auagaugaguaagggugacc

SEQ ID NO: 699482 - RNA, 20 nt, Artificial Sequence
  Synthetic
aauuuguggagggggugacc

SEQ ID NO: 699483 - RNA, 20 nt, Artificial Sequence
  Synthetic
uagcaguuaauccacauacc

SEQ ID NO: 699484 - RNA, 20 nt, Artificial Sequence
  Synthetic
ugugacaggcuagacauacc

SEQ ID NO: 699485 - RNA, 20 nt, Artificial Sequence
  Synthetic
caccaaccaggucucauacc

SEQ ID NO: 699486 - RNA, 20 nt, Artificial Sequence
  Synthetic
uuggcacauauaccuauacc

SEQ ID NO: 699487 - RNA, 20 nt, Artificial Sequence
  Synthetic
uggcagugucagggacuacc

SEQ ID NO: 699488 - RNA, 20 nt, Artificial Sequence
  Synthetic
uggccuucaaguauacuacc

SEQ ID NO: 699489 - RNA, 20 nt, Artificial Sequence
  Synthetic
aaaccuguacguauacuacc

SEQ ID NO: 699490 - RNA, 20 nt, Artificial Sequence
  Synthetic
ccuaguaacguguugcuacc

SEQ ID NO: 699491 - RNA, 20 nt, Artificial Sequence
  Synthetic
aggacuagagaaacucuacc

SEQ ID NO: 699492 - RNA, 20 nt, Artificial Sequence
  Synthetic
aaagucaacuaacggguacc

SEQ ID NO: 699493 - RNA, 20 nt, Artificial Sequence
  Synthetic
aacagucacauugggguacc

SEQ ID NO: 699494 - RNA, 20 nt, Artificial Sequence
  Synthetic
uggagccucuaaaugguacc

SEQ ID NO: 699495 - RNA, 20 nt, Artificial Sequence
  Synthetic
ugauaacucauucugguacc

SEQ ID NO: 699496 - RNA, 20 nt, Artificial Sequence
  Synthetic
accugacuucuauauguacc

SEQ ID NO: 699497 - RNA, 20 nt, Artificial Sequence
  Synthetic
aauuaggaggaguauguacc

SEQ ID NO: 699498 - RNA, 20 nt, Artificial Sequence
  Synthetic
ccaaugcaagauuguguacc

SEQ ID NO: 699499 - RNA, 20 nt, Artificial Sequence
  Synthetic
cugcuugaugaguuuguacc

SEQ ID NO: 699500 - RNA, 20 nt, Artificial Sequence
  Synthetic
cucaguuauggacaauuacc

SEQ ID NO: 699501 - RNA, 20 nt, Artificial Sequence
  Synthetic
aaacucuagcauuaauuacc

SEQ ID NO: 699502 - RNA, 20 nt, Artificial Sequence
  Synthetic
cucuucucgaaagcauuacc

SEQ ID NO: 699503 - RNA, 20 nt, Artificial Sequence
  Synthetic
aggguuuaagacagauuacc

SEQ ID NO: 699504 - RNA, 20 nt, Artificial Sequence
  Synthetic
acuuuaaucugaaccuuacc

SEQ ID NO: 699505 - RNA, 20 nt, Artificial Sequence
  Synthetic
uuauucgaaauccccuuacc

SEQ ID NO: 699506 - RNA, 20 nt, Artificial Sequence
  Synthetic
ccaucaaugucccucuuacc

SEQ ID NO: 699507 - RNA, 20 nt, Artificial Sequence
  Synthetic
uaauuugugaaguuguuacc

SEQ ID NO: 699508 - RNA, 20 nt, Artificial Sequence
  Synthetic
ugcguacaaucucauuuacc

SEQ ID NO: 699509 - RNA, 20 nt, Artificial Sequence
  Synthetic
uaauuagacauccccaaccc

SEQ ID NO: 699510 - RNA, 20 nt, Artificial Sequence
  Synthetic
ucgagaugcugggucaaccc

SEQ ID NO: 699511 - RNA, 20 nt, Artificial Sequence
  Synthetic
ccuuagguaucaaguaaccc

SEQ ID NO: 699512 - RNA, 20 nt, Artificial Sequence
  Synthetic
cuucucauguagaguaaccc

SEQ ID NO: 699513 - RNA, 20 nt, Artificial Sequence
  Synthetic
agaacgcgaauagaacaccc

SEQ ID NO: 699514 - RNA, 20 nt, Artificial Sequence
  Synthetic
uuuccaauaacauuacaccc

SEQ ID NO: 699515 - RNA, 20 nt, Artificial Sequence
  Synthetic
uaaacaaguucugagcaccc

SEQ ID NO: 699516 - RNA, 20 nt, Artificial Sequence
  Synthetic
acaccacuguuugugcaccc

SEQ ID NO: 699517 - RNA, 20 nt, Artificial Sequence
  Synthetic
uagaacguggcuuugcaccc

SEQ ID NO: 699518 - RNA, 20 nt, Artificial Sequence
  Synthetic
uuuuucacaaguuugcaccc

SEQ ID NO: 699519 - RNA, 20 nt, Artificial Sequence
  Synthetic
acacuugcgacacuucaccc

SEQ ID NO: 699520 - RNA, 20 nt, Artificial Sequence
  Synthetic
caaugcugagggacagaccc

SEQ ID NO: 699521 - RNA, 20 nt, Artificial Sequence
  Synthetic
uaugagagcuauccagaccc

SEQ ID NO: 699522 - RNA, 20 nt, Artificial Sequence
  Synthetic
uuaacuacagcgagagaccc

SEQ ID NO: 699523 - RNA, 20 nt, Artificial Sequence
  Synthetic
ucauaacucagucuagaccc

SEQ ID NO: 699524 - RNA, 20 nt, Artificial Sequence
  Synthetic
auaugggucacgugggaccc

SEQ ID NO: 699525 - RNA, 20 nt, Artificial Sequence
  Synthetic
uggcuuuacuccuaugaccc

SEQ ID NO: 699526 - RNA, 20 nt, Artificial Sequence
  Synthetic
uuaaccagauguuuauaccc

SEQ ID NO: 699527 - RNA, 20 nt, Artificial Sequence
  Synthetic
cuauucuuggaaggcuaccc

SEQ ID NO: 699528 - RNA, 20 nt, Artificial Sequence
  Synthetic
ucauugcuucagugguaccc

SEQ ID NO: 699529 - RNA, 20 nt, Artificial Sequence
  Synthetic
cucacagaaugcaauuaccc

SEQ ID NO: 699530 - RNA, 20 nt, Artificial Sequence
  Synthetic
ucaaugagaaccauaacccc

SEQ ID NO: 699531 - RNA, 20 nt, Artificial Sequence
  Synthetic
caggagucacucuuuacccc

SEQ ID NO: 699532 - RNA, 20 nt, Artificial Sequence
  Synthetic
cuaagaugauaauacccccc

SEQ ID NO: 699533 - RNA, 20 nt, Artificial Sequence
  Synthetic
uugucccagucugugccccc

SEQ ID NO: 699534 - RNA, 20 nt, Artificial Sequence
  Synthetic
accuuaguuauuccuccccc

SEQ ID NO: 699535 - RNA, 20 nt, Artificial Sequence
  Synthetic
aacuucugugaguuuccccc

SEQ ID NO: 699536 - RNA, 20 nt, Artificial Sequence
  Synthetic
aucaucccgaucacagcccc

SEQ ID NO: 699537 - RNA, 20 nt, Artificial Sequence
  Synthetic
aagugaucauauuuagcccc

SEQ ID NO: 699538 - RNA, 20 nt, Artificial Sequence
  Synthetic
cugauuucucacaucgcccc

SEQ ID NO: 699539 - RNA, 20 nt, Artificial Sequence
  Synthetic
uacuccuaauaaggggcccc

SEQ ID NO: 699540 - RNA, 20 nt, Artificial Sequence
  Synthetic
uacaugauagagguugcccc

SEQ ID NO: 699541 - RNA, 20 nt, Artificial Sequence
  Synthetic
uucucauuugauacaucccc

SEQ ID NO: 699542 - RNA, 20 nt, Artificial Sequence
  Synthetic
aguucuccucuggugucccc

SEQ ID NO: 699543 - RNA, 20 nt, Artificial Sequence
  Synthetic
accuuuaaaucauuuucccc

SEQ ID NO: 699544 - RNA, 20 nt, Artificial Sequence
  Synthetic
cuauauggguucuuuucccc

SEQ ID NO: 699545 - RNA, 20 nt, Artificial Sequence
  Synthetic
acccuaaagagaauaagccc

SEQ ID NO: 699546 - RNA, 20 nt, Artificial Sequence
  Synthetic
ucuugcaugagaauaagccc

SEQ ID NO: 699547 - RNA, 20 nt, Artificial Sequence
  Synthetic
cuucaaagguccaacagccc

SEQ ID NO: 699548 - RNA, 20 nt, Artificial Sequence
  Synthetic
auaucgaucccucucagccc

SEQ ID NO: 699549 - RNA, 20 nt, Artificial Sequence
  Synthetic
uuacugggcagauagagccc

SEQ ID NO: 699550 - RNA, 20 nt, Artificial Sequence
  Synthetic
cauacuaaaagccugagccc

SEQ ID NO: 699551 - RNA, 20 nt, Artificial Sequence
  Synthetic
caacuuguguaguauagccc

SEQ ID NO: 699552 - RNA, 20 nt, Artificial Sequence
  Synthetic
uuaugggagcccccuagccc

SEQ ID NO: 699553 - RNA, 20 nt, Artificial Sequence
  Synthetic
auacuaguuuauucuagccc

SEQ ID NO: 699554 - RNA, 20 nt, Artificial Sequence
  Synthetic
aguccucuagcucuuagccc

SEQ ID NO: 699555 - RNA, 20 nt, Artificial Sequence
  Synthetic
agaguuggaauaguuagccc

SEQ ID NO: 699556 - RNA, 20 nt, Artificial Sequence
  Synthetic
uuaaauggauuucggcgccc

SEQ ID NO: 699557 - RNA, 20 nt, Artificial Sequence
  Synthetic
cauaucuuauuuggaggccc

SEQ ID NO: 699558 - RNA, 20 nt, Artificial Sequence
  Synthetic
ucgguggaaaucuuaggccc

SEQ ID NO: 699559 - RNA, 20 nt, Artificial Sequence
  Synthetic
ugagcuaaaaucucuggccc

SEQ ID NO: 699560 - RNA, 20 nt, Artificial Sequence
  Synthetic
aguugucucugaauuggccc

SEQ ID NO: 699561 - RNA, 20 nt, Artificial Sequence
  Synthetic
aagaaacggggugaaugccc

SEQ ID NO: 699562 - RNA, 20 nt, Artificial Sequence
  Synthetic
cacaaaucauguggaugccc

SEQ ID NO: 699563 - RNA, 20 nt, Artificial Sequence
  Synthetic
uggaauauaagaguaugccc

SEQ ID NO: 699564 - RNA, 20 nt, Artificial Sequence
  Synthetic
caaaagaggacggucugccc

SEQ ID NO: 699565 - RNA, 20 nt, Artificial Sequence
  Synthetic
uucacaauaugaaggugccc

SEQ ID NO: 699566 - RNA, 20 nt, Artificial Sequence
  Synthetic
uacugauucauucacauccc

SEQ ID NO: 699567 - RNA, 20 nt, Artificial Sequence
  Synthetic
cuaagcugccuaaccauccc

SEQ ID NO: 699568 - RNA, 20 nt, Artificial Sequence
  Synthetic
uaauugaaugcuaagauccc

SEQ ID NO: 699569 - RNA, 20 nt, Artificial Sequence
  Synthetic
aggauagauuggaugauccc

SEQ ID NO: 699570 - RNA, 20 nt, Artificial Sequence
  Synthetic
aaccugcauauagguauccc

SEQ ID NO: 699571 - RNA, 20 nt, Artificial Sequence
  Synthetic
aacuuguuuaugaaacuccc

SEQ ID NO: 699572 - RNA, 20 nt, Artificial Sequence
  Synthetic
ucauuuaaacugguacuccc

SEQ ID NO: 699573 - RNA, 20 nt, Artificial Sequence
  Synthetic
uugcgcuggguucugcuccc

SEQ ID NO: 699574 - RNA, 20 nt, Artificial Sequence
  Synthetic
ugugaauaugcugugcuccc

SEQ ID NO: 699575 - RNA, 20 nt, Artificial Sequence
  Synthetic
auuauacgaguacaucuccc

SEQ ID NO: 699576 - RNA, 20 nt, Artificial Sequence
  Synthetic
uuaguuuuaacucaucuccc

SEQ ID NO: 699577 - RNA, 20 nt, Artificial Sequence
  Synthetic
uaauaaucugacauucuccc

SEQ ID NO: 699578 - RNA, 20 nt, Artificial Sequence
  Synthetic
ugcagaggaccuuacguccc

SEQ ID NO: 699579 - RNA, 20 nt, Artificial Sequence
  Synthetic
augggauuaagggagguccc

SEQ ID NO: 699580 - RNA, 20 nt, Artificial Sequence
  Synthetic
ucauucaccucuuagguccc

SEQ ID NO: 699581 - RNA, 20 nt, Artificial Sequence
  Synthetic
agaaauucuaaacugguccc

SEQ ID NO: 699582 - RNA, 20 nt, Artificial Sequence
  Synthetic
auuaauccauuguauguccc

SEQ ID NO: 699583 - RNA, 20 nt, Artificial Sequence
  Synthetic
uccucuguacuccguguccc

SEQ ID NO: 699584 - RNA, 20 nt, Artificial Sequence
  Synthetic
uguaccugcugccaauuccc

SEQ ID NO: 699585 - RNA, 20 nt, Artificial Sequence
  Synthetic
agaacuagggcuuaauuccc

SEQ ID NO: 699586 - RNA, 20 nt, Artificial Sequence
  Synthetic
caaacagcuaagccauuccc

SEQ ID NO: 699587 - RNA, 20 nt, Artificial Sequence
  Synthetic
cauccaaaaaguaacuuccc

SEQ ID NO: 699588 - RNA, 20 nt, Artificial Sequence
  Synthetic
uaacgaaaggacaucuuccc

SEQ ID NO: 699589 - RNA, 20 nt, Artificial Sequence
  Synthetic
ugccucaaguccaaguuccc

SEQ ID NO: 699590 - RNA, 20 nt, Artificial Sequence
  Synthetic
uggaugguguugaaguuccc

SEQ ID NO: 699591 - RNA, 20 nt, Artificial Sequence
  Synthetic
ucaauuagaaacauguuccc

SEQ ID NO: 699592 - RNA, 20 nt, Artificial Sequence
  Synthetic
caguuccacacgacaaagcc

SEQ ID NO: 699593 - RNA, 20 nt, Artificial Sequence
  Synthetic
uuuaagcuaccauacaagcc

SEQ ID NO: 699594 - RNA, 20 nt, Artificial Sequence
  Synthetic
cuauuacccccauacaagcc

SEQ ID NO: 699595 - RNA, 20 nt, Artificial Sequence
  Synthetic
ucuucugauggcuccaagcc

SEQ ID NO: 699596 - RNA, 20 nt, Artificial Sequence
  Synthetic
ucaccucacacgugcaagcc

SEQ ID NO: 699597 - RNA, 20 nt, Artificial Sequence
  Synthetic
uagggaaguuguuagaagcc

SEQ ID NO: 699598 - RNA, 20 nt, Artificial Sequence
  Synthetic
agggaaucuaaaaggaagcc

SEQ ID NO: 699599 - RNA, 20 nt, Artificial Sequence
  Synthetic
caauuaaaugcuauacagcc

SEQ ID NO: 699600 - RNA, 20 nt, Artificial Sequence
  Synthetic
caaaggauuaacauccagcc

SEQ ID NO: 699601 - RNA, 20 nt, Artificial Sequence
  Synthetic
cuaaccucuuacauccagcc

SEQ ID NO: 699602 - RNA, 20 nt, Artificial Sequence
  Synthetic
uacaacuccagcaggcagcc

SEQ ID NO: 699603 - RNA, 20 nt, Artificial Sequence
  Synthetic
cagcuuuugauguuucagcc

SEQ ID NO: 699604 - RNA, 20 nt, Artificial Sequence
  Synthetic
ccuucuuuacaaaaggagcc

SEQ ID NO: 699605 - RNA, 20 nt, Artificial Sequence
  Synthetic
uaagacaaaggaccugagcc

SEQ ID NO: 699606 - RNA, 20 nt, Artificial Sequence
  Synthetic
cuugacacggagagauagcc

SEQ ID NO: 699607 - RNA, 20 nt, Artificial Sequence
  Synthetic
cacuguguuucuuacuagcc

SEQ ID NO: 699608 - RNA, 20 nt, Artificial Sequence
  Synthetic
cuccgcacuaaacaguagcc

SEQ ID NO: 699609 - RNA, 20 nt, Artificial Sequence
  Synthetic
uuugaucaucuuagguagcc

SEQ ID NO: 699610 - RNA, 20 nt, Artificial Sequence
  Synthetic
agggaguuucgauauuagcc

SEQ ID NO: 699611 - RNA, 20 nt, Artificial Sequence
  Synthetic
uuacuguuuuuauaaacgcc

SEQ ID NO: 699612 - RNA, 20 nt, Artificial Sequence
  Synthetic
uguaaaauaugaucaacgcc

SEQ ID NO: 699613 - RNA, 20 nt, Artificial Sequence
  Synthetic
acauauaggguggccacgcc

SEQ ID NO: 699614 - RNA, 20 nt, Artificial Sequence
  Synthetic
uuuaauccuucgggcacgcc

SEQ ID NO: 699615 - RNA, 20 nt, Artificial Sequence
  Synthetic
ugccacuaagcgaucacgcc

SEQ ID NO: 699616 - RNA, 20 nt, Artificial Sequence
  Synthetic
ugagagcuuagaaugccgcc

SEQ ID NO: 699617 - RNA, 20 nt, Artificial Sequence
  Synthetic
uacagguaaaauucagcgcc

SEQ ID NO: 699618 - RNA, 20 nt, Artificial Sequence
  Synthetic
uguucuguagauguagcgcc

SEQ ID NO: 699619 - RNA, 20 nt, Artificial Sequence
  Synthetic
agcagaaggcauucaucgcc

SEQ ID NO: 699620 - RNA, 20 nt, Artificial Sequence
  Synthetic
cacccugcuucuagaaggcc

SEQ ID NO: 699621 - RNA, 20 nt, Artificial Sequence
  Synthetic
caauccauugcuugaaggcc

SEQ ID NO: 699622 - RNA, 20 nt, Artificial Sequence
  Synthetic
aguuuugaccaacagaggcc

SEQ ID NO: 699623 - RNA, 20 nt, Artificial Sequence
  Synthetic
ucacccuccaucuggaggcc

SEQ ID NO: 699624 - RNA, 20 nt, Artificial Sequence
  Synthetic
caucucccccaucuuaggcc

SEQ ID NO: 699625 - RNA, 20 nt, Artificial Sequence
  Synthetic
aaaaacauguguuagcggcc

SEQ ID NO: 699626 - RNA, 20 nt, Artificial Sequence
  Synthetic
uauauaauaacucaucggcc

SEQ ID NO: 699627 - RNA, 20 nt, Artificial Sequence
  Synthetic
ccaagaacaguuacucggcc

SEQ ID NO: 699628 - RNA, 20 nt, Artificial Sequence
  Synthetic
ugugauaacaaucuggggcc

SEQ ID NO: 699629 - RNA, 20 nt, Artificial Sequence
  Synthetic
ccucgguguauauuggggcc

SEQ ID NO: 699630 - RNA, 20 nt, Artificial Sequence
  Synthetic
ugaaugggaaauguugggcc

SEQ ID NO: 699631 - RNA, 20 nt, Artificial Sequence
  Synthetic
cacacccuacagauauggcc

SEQ ID NO: 699632 - RNA, 20 nt, Artificial Sequence
  Synthetic
auaacacuuucacuauggcc

SEQ ID NO: 699633 - RNA, 20 nt, Artificial Sequence
  Synthetic
uauguaacgaggaacuggcc

SEQ ID NO: 699634 - RNA, 20 nt, Artificial Sequence
  Synthetic
cacuuuagugcagacuggcc

SEQ ID NO: 699635 - RNA, 20 nt, Artificial Sequence
  Synthetic
cauuguugaaggaccuggcc

SEQ ID NO: 699636 - RNA, 20 nt, Artificial Sequence
  Synthetic
augauuucccuucaguggcc

SEQ ID NO: 699637 - RNA, 20 nt, Artificial Sequence
  Synthetic
acuuggucaucauaguggcc

SEQ ID NO: 699638 - RNA, 20 nt, Artificial Sequence
  Synthetic
aucagacuauuaggguggcc

SEQ ID NO: 699639 - RNA, 20 nt, Artificial Sequence
  Synthetic
aguauaauuacaaauuggcc

SEQ ID NO: 699640 - RNA, 20 nt, Artificial Sequence
  Synthetic
uaauaaaacgcacuuuggcc

SEQ ID NO: 699641 - RNA, 20 nt, Artificial Sequence
  Synthetic
uuaaugcguaucguaaugcc

SEQ ID NO: 699642 - RNA, 20 nt, Artificial Sequence
  Synthetic
aaauacugucaguacaugcc

SEQ ID NO: 699643 - RNA, 20 nt, Artificial Sequence
  Synthetic
aggaaauagugaaggaugcc

SEQ ID NO: 699644 - RNA, 20 nt, Artificial Sequence
  Synthetic
aucuuaguuccaaauaugcc

SEQ ID NO: 699645 - RNA, 20 nt, Artificial Sequence
  Synthetic
ugcaguaucugagauaugcc

SEQ ID NO: 699646 - RNA, 20 nt, Artificial Sequence
  Synthetic
ucuaacauucugaguaugcc

SEQ ID NO: 699647 - RNA, 20 nt, Artificial Sequence
  Synthetic
ugcucugcuacucuuaugcc

SEQ ID NO: 699648 - RNA, 20 nt, Artificial Sequence
  Synthetic
augaguuuagaguaacugcc

SEQ ID NO: 699649 - RNA, 20 nt, Artificial Sequence
  Synthetic
acugggaauaguucacugcc

SEQ ID NO: 699650 - RNA, 20 nt, Artificial Sequence
  Synthetic
caugauuuggauaggcugcc

SEQ ID NO: 699651 - RNA, 20 nt, Artificial Sequence
  Synthetic
acucuugaguuugugcugcc

SEQ ID NO: 699652 - RNA, 20 nt, Artificial Sequence
  Synthetic
cgacauguuacuacucugcc

SEQ ID NO: 699653 - RNA, 20 nt, Artificial Sequence
  Synthetic
auugcagaucaauuucugcc

SEQ ID NO: 699654 - RNA, 20 nt, Artificial Sequence
  Synthetic
cacgacguucucuuucugcc

SEQ ID NO: 699655 - RNA, 20 nt, Artificial Sequence
  Synthetic
uuaccaaauggcaaagugcc

SEQ ID NO: 699656 - RNA, 20 nt, Artificial Sequence
  Synthetic
aggaucagugcuguagugcc

SEQ ID NO: 699657 - RNA, 20 nt, Artificial Sequence
  Synthetic
uaacagauuccccuggugcc

SEQ ID NO: 699658 - RNA, 20 nt, Artificial Sequence
  Synthetic
aagagacagauaguggugcc

SEQ ID NO: 699659 - RNA, 20 nt, Artificial Sequence
  Synthetic
uuuaggcacaccuaugugcc

SEQ ID NO: 699660 - RNA, 20 nt, Artificial Sequence
  Synthetic
ucaaucauguacagcuugcc

SEQ ID NO: 699661 - RNA, 20 nt, Artificial Sequence
  Synthetic
ugagucuuuuuaaucuugcc

SEQ ID NO: 699662 - RNA, 20 nt, Artificial Sequence
  Synthetic
uuacccagcauuuaguugcc

SEQ ID NO: 699663 - RNA, 20 nt, Artificial Sequence
  Synthetic
acuugugacaagcauuugcc

SEQ ID NO: 699664 - RNA, 20 nt, Artificial Sequence
  Synthetic
uaaaacgagaagggcaaucc

SEQ ID NO: 699665 - RNA, 20 nt, Artificial Sequence
  Synthetic
cucuucuuagccaucaaucc

SEQ ID NO: 699666 - RNA, 20 nt, Artificial Sequence
  Synthetic
aauacgguuccacagaaucc

SEQ ID NO: 699667 - RNA, 20 nt, Artificial Sequence
  Synthetic
cucugaggugggaugaaucc

SEQ ID NO: 699668 - RNA, 20 nt, Artificial Sequence
  Synthetic
caucaacacugaacuaaucc

SEQ ID NO: 699669 - RNA, 20 nt, Artificial Sequence
  Synthetic
cacuauuucaucgcuaaucc

SEQ ID NO: 699670 - RNA, 20 nt, Artificial Sequence
  Synthetic
ucucuuaccauucaacaucc

SEQ ID NO: 699671 - RNA, 20 nt, Artificial Sequence
  Synthetic
uucaaacccgauacacaucc

SEQ ID NO: 699672 - RNA, 20 nt, Artificial Sequence
  Synthetic
ugcacuagccauucacaucc

SEQ ID NO: 699673 - RNA, 20 nt, Artificial Sequence
  Synthetic
uucuacaaacagcuacaucc

SEQ ID NO: 699674 - RNA, 20 nt, Artificial Sequence
  Synthetic
ucucacuccucauaccaucc

SEQ ID NO: 699675 - RNA, 20 nt, Artificial Sequence
  Synthetic
aagagcguaauccuccaucc

SEQ ID NO: 699676 - RNA, 20 nt, Artificial Sequence
  Synthetic
aauuuaccaaagguccaucc

SEQ ID NO: 699677 - RNA, 20 nt, Artificial Sequence
  Synthetic
ucauuuagcauugggcaucc

SEQ ID NO: 699678 - RNA, 20 nt, Artificial Sequence
  Synthetic
caagcggacgggacagaucc

SEQ ID NO: 699679 - RNA, 20 nt, Artificial Sequence
  Synthetic
uaauauaauuccugcgaucc

SEQ ID NO: 699680 - RNA, 20 nt, Artificial Sequence
  Synthetic
ucuuguuuaaagagugaucc

SEQ ID NO: 699681 - RNA, 20 nt, Artificial Sequence
  Synthetic
auugccuauaaguuugaucc

SEQ ID NO: 699682 - RNA, 20 nt, Artificial Sequence
  Synthetic
acguaagguggauaauaucc

SEQ ID NO: 699683 - RNA, 20 nt, Artificial Sequence
  Synthetic
uaugccguugguugauaucc

SEQ ID NO: 699684 - RNA, 20 nt, Artificial Sequence
  Synthetic
aucagguagaaaaccuaucc

SEQ ID NO: 699685 - RNA, 20 nt, Artificial Sequence
  Synthetic
cuacagugcucagccuaucc

SEQ ID NO: 699686 - RNA, 20 nt, Artificial Sequence
  Synthetic
uggccuuuuauggauuaucc

SEQ ID NO: 699687 - RNA, 20 nt, Artificial Sequence
  Synthetic
caguucaucacuuauuaucc

SEQ ID NO: 699688 - RNA, 20 nt, Artificial Sequence
  Synthetic
acaguaacugccucaacucc

SEQ ID NO: 699689 - RNA, 20 nt, Artificial Sequence
  Synthetic
uuauaaaauguaggcacucc

SEQ ID NO: 699690 - RNA, 20 nt, Artificial Sequence
  Synthetic
auggaaacaaauucgacucc

SEQ ID NO: 699691 - RNA, 20 nt, Artificial Sequence
  Synthetic
aaugcgaauaauucuacucc

SEQ ID NO: 699692 - RNA, 20 nt, Artificial Sequence
  Synthetic
ccauggcgcuagagaccucc

SEQ ID NO: 699693 - RNA, 20 nt, Artificial Sequence
  Synthetic
ugagaccuuagagacccucc

SEQ ID NO: 699694 - RNA, 20 nt, Artificial Sequence
  Synthetic
cuccucacuaguugcccucc

SEQ ID NO: 699695 - RNA, 20 nt, Artificial Sequence
  Synthetic
uacauuacaauguucccucc

SEQ ID NO: 699696 - RNA, 20 nt, Artificial Sequence
  Synthetic
ccgagcugacuuuucccucc

SEQ ID NO: 699697 - RNA, 20 nt, Artificial Sequence
  Synthetic
acaucacuaugccggccucc

SEQ ID NO: 699698 - RNA, 20 nt, Artificial Sequence
  Synthetic
caaaguacuuuuggagcucc

SEQ ID NO: 699699 - RNA, 20 nt, Artificial Sequence
  Synthetic
cauccuucggcaagcgcucc

SEQ ID NO: 699700 - RNA, 20 nt, Artificial Sequence
  Synthetic
auaaaggccaaagaaucucc

SEQ ID NO: 699701 - RNA, 20 nt, Artificial Sequence
  Synthetic
aauaagaaacuaccaucucc

SEQ ID NO: 699702 - RNA, 20 nt, Artificial Sequence
  Synthetic
cugcuauaagcccucucucc

SEQ ID NO: 699703 - RNA, 20 nt, Artificial Sequence
  Synthetic
ucggauuccuaucuuucucc

SEQ ID NO: 699704 - RNA, 20 nt, Artificial Sequence
  Synthetic
ccuuugguaaauaaaagucc

SEQ ID NO: 699705 - RNA, 20 nt, Artificial Sequence
  Synthetic
cuaauaccuccagacagucc

SEQ ID NO: 699706 - RNA, 20 nt, Artificial Sequence
  Synthetic
auccucuccaaggagagucc

SEQ ID NO: 699707 - RNA, 20 nt, Artificial Sequence
  Synthetic
uagucaaauauggcuagucc

SEQ ID NO: 699708 - RNA, 20 nt, Artificial Sequence
  Synthetic
cccaacucuuuacaacgucc

SEQ ID NO: 699709 - RNA, 20 nt, Artificial Sequence
  Synthetic
augcagaggaccuuacgucc

SEQ ID NO: 699710 - RNA, 20 nt, Artificial Sequence
  Synthetic
cagauaaaccagcuccgucc

SEQ ID NO: 699711 - RNA, 20 nt, Artificial Sequence
  Synthetic
auuuuuugaggcuagcgucc

SEQ ID NO: 699712 - RNA, 20 nt, Artificial Sequence
  Synthetic
caaugauuauguaagggucc

SEQ ID NO: 699713 - RNA, 20 nt, Artificial Sequence
  Synthetic
ugcucuuuccgcuagggucc

SEQ ID NO: 699714 - RNA, 20 nt, Artificial Sequence
  Synthetic
cuaagucccauuaauggucc

SEQ ID NO: 699715 - RNA, 20 nt, Artificial Sequence
  Synthetic
uagaaauucuaaacuggucc

SEQ ID NO: 699716 - RNA, 20 nt, Artificial Sequence
  Synthetic
uacguucaagaagcuggucc

SEQ ID NO: 699717 - RNA, 20 nt, Artificial Sequence
  Synthetic
cacccuauaugugaaugucc

SEQ ID NO: 699718 - RNA, 20 nt, Artificial Sequence
  Synthetic
cuugcaucuugcacaugucc

SEQ ID NO: 699719 - RNA, 20 nt, Artificial Sequence
  Synthetic
auguuggaagcaagaugucc

SEQ ID NO: 699720 - RNA, 20 nt, Artificial Sequence
  Synthetic
acaucugccuacugaugucc

SEQ ID NO: 699721 - RNA, 20 nt, Artificial Sequence
  Synthetic
cugacuugcgauugaugucc

SEQ ID NO: 699722 - RNA, 20 nt, Artificial Sequence
  Synthetic
aucauguugaacuucugucc

SEQ ID NO: 699723 - RNA, 20 nt, Artificial Sequence
  Synthetic
aagauggacuauacuugucc

SEQ ID NO: 699724 - RNA, 20 nt, Artificial Sequence
  Synthetic
ucccgcagcauccaaauucc

SEQ ID NO: 699725 - RNA, 20 nt, Artificial Sequence
  Synthetic
acaagcauaucggccauucc

SEQ ID NO: 699726 - RNA, 20 nt, Artificial Sequence
  Synthetic
cuaguauuacuggccauucc

SEQ ID NO: 699727 - RNA, 20 nt, Artificial Sequence
  Synthetic
cugaauuugucaaucauucc

SEQ ID NO: 699728 - RNA, 20 nt, Artificial Sequence
  Synthetic
uucauucacguaaucauucc

SEQ ID NO: 699729 - RNA, 20 nt, Artificial Sequence
  Synthetic
cacuucuugccucucauucc

SEQ ID NO: 699730 - RNA, 20 nt, Artificial Sequence
  Synthetic
uuuggaauacucucgauucc

SEQ ID NO: 699731 - RNA, 20 nt, Artificial Sequence
  Synthetic
acguuaggaucgcugauucc

SEQ ID NO: 699732 - RNA, 20 nt, Artificial Sequence
  Synthetic
uaguuuugggaugugauucc

SEQ ID NO: 699733 - RNA, 20 nt, Artificial Sequence
  Synthetic
aacugucaguugcauauucc

SEQ ID NO: 699734 - RNA, 20 nt, Artificial Sequence
  Synthetic
uaacucuuagcaacuauucc

SEQ ID NO: 699735 - RNA, 20 nt, Artificial Sequence
  Synthetic
agguuucaggcagcuauucc

SEQ ID NO: 699736 - RNA, 20 nt, Artificial Sequence
  Synthetic
ugguguuuaguacuuauucc

SEQ ID NO: 699737 - RNA, 20 nt, Artificial Sequence
  Synthetic
aaccuaguuugaaaacuucc

SEQ ID NO: 699738 - RNA, 20 nt, Artificial Sequence
  Synthetic
uaacgaacguuugcacuucc

SEQ ID NO: 699739 - RNA, 20 nt, Artificial Sequence
  Synthetic
uuugucuacuggucacuucc

SEQ ID NO: 699740 - RNA, 20 nt, Artificial Sequence
  Synthetic
auuuggugacacauacuucc

SEQ ID NO: 699741 - RNA, 20 nt, Artificial Sequence
  Synthetic
acgguuugcuguauacuucc

SEQ ID NO: 699742 - RNA, 20 nt, Artificial Sequence
  Synthetic
aucauuggcuaaaugcuucc

SEQ ID NO: 699743 - RNA, 20 nt, Artificial Sequence
  Synthetic
auugucccaucaauucuucc

SEQ ID NO: 699744 - RNA, 20 nt, Artificial Sequence
  Synthetic
aucgucgagugauuucuucc

SEQ ID NO: 699745 - RNA, 20 nt, Artificial Sequence
  Synthetic
agcauuugcgcaauuguucc

SEQ ID NO: 699746 - RNA, 20 nt, Artificial Sequence
  Synthetic
aauuaacacacaccauuucc

SEQ ID NO: 699747 - RNA, 20 nt, Artificial Sequence
  Synthetic
agaaguccacaugcauuucc

SEQ ID NO: 699748 - RNA, 20 nt, Artificial Sequence
  Synthetic
uuacagucuaccagauuucc

SEQ ID NO: 699749 - RNA, 20 nt, Artificial Sequence
  Synthetic
acccacuaggucguauuucc

SEQ ID NO: 699750 - RNA, 20 nt, Artificial Sequence
  Synthetic
accguucuaggugaguuucc

SEQ ID NO: 699751 - RNA, 20 nt, Artificial Sequence
  Synthetic
uuggccaccuaaagguuucc

SEQ ID NO: 699752 - RNA, 20 nt, Artificial Sequence
  Synthetic
augggguccgagacuuuucc

SEQ ID NO: 699753 - RNA, 20 nt, Artificial Sequence
  Synthetic
agagggagcugcuuuuuucc

SEQ ID NO: 699754 - RNA, 20 nt, Artificial Sequence
  Synthetic
ccuaucgaagggagaaaagc

SEQ ID NO: 699755 - RNA, 20 nt, Artificial Sequence
  Synthetic
acaggugucaauggaaaagc

SEQ ID NO: 699756 - RNA, 20 nt, Artificial Sequence
  Synthetic
acaugcgcucagugaaaagc

SEQ ID NO: 699757 - RNA, 20 nt, Artificial Sequence
  Synthetic
ucgagaccacaagggaaagc

SEQ ID NO: 699758 - RNA, 20 nt, Artificial Sequence
  Synthetic
uacagcuuagaaacuaaagc

SEQ ID NO: 699759 - RNA, 20 nt, Artificial Sequence
  Synthetic
uccugccugauagcuaaagc

SEQ ID NO: 699760 - RNA, 20 nt, Artificial Sequence
  Synthetic
uuccuguguagcuguaaagc

SEQ ID NO: 699761 - RNA, 20 nt, Artificial Sequence
  Synthetic
auaugcucaggugaacaagc

SEQ ID NO: 699762 - RNA, 20 nt, Artificial Sequence
  Synthetic
uuugacacuucaggacaagc

SEQ ID NO: 699763 - RNA, 20 nt, Artificial Sequence
  Synthetic
acuauuaugcuugaccaagc

SEQ ID NO: 699764 - RNA, 20 nt, Artificial Sequence
  Synthetic
auauugcuuacaugccaagc

SEQ ID NO: 699765 - RNA, 20 nt, Artificial Sequence
  Synthetic
ccuuggcuguugguccaagc

SEQ ID NO: 699766 - RNA, 20 nt, Artificial Sequence
  Synthetic
uccaauguuucugaucaagc

SEQ ID NO: 699767 - RNA, 20 nt, Artificial Sequence
  Synthetic
uaagugucucuauuucaagc

SEQ ID NO: 699768 - RNA, 20 nt, Artificial Sequence
  Synthetic
uaucuuggguuacaagaagc

SEQ ID NO: 699769 - RNA, 20 nt, Artificial Sequence
  Synthetic
uagcugguuucugcagaagc

SEQ ID NO: 699770 - RNA, 20 nt, Artificial Sequence
  Synthetic
ccacacgcgaacugagaagc

SEQ ID NO: 699771 - RNA, 20 nt, Artificial Sequence
  Synthetic
aagacagcuggucuagaagc

SEQ ID NO: 699772 - RNA, 20 nt, Artificial Sequence
  Synthetic
uaccuacuuaguaacgaagc

SEQ ID NO: 699773 - RNA, 20 nt, Artificial Sequence
  Synthetic
caaucggauggcuaggaagc

SEQ ID NO: 699774 - RNA, 20 nt, Artificial Sequence
  Synthetic
aguaagggugacccggaagc

SEQ ID NO: 699775 - RNA, 20 nt, Artificial Sequence
  Synthetic
agaugauauugcccggaagc

SEQ ID NO: 699776 - RNA, 20 nt, Artificial Sequence
  Synthetic
auguuuguaugaacugaagc

SEQ ID NO: 699777 - RNA, 20 nt, Artificial Sequence
  Synthetic
uaccaccuucuccgugaagc

SEQ ID NO: 699778 - RNA, 20 nt, Artificial Sequence
  Synthetic
uucagaaugguuucauaagc

SEQ ID NO: 699779 - RNA, 20 nt, Artificial Sequence
  Synthetic
ugccugaaaacuagauaagc

SEQ ID NO: 699780 - RNA, 20 nt, Artificial Sequence
  Synthetic
uggauaggaauacgauaagc

SEQ ID NO: 699781 - RNA, 20 nt, Artificial Sequence
  Synthetic
ucuaugcaacuucucuaagc

SEQ ID NO: 699782 - RNA, 20 nt, Artificial Sequence
  Synthetic
cgcuuauuaagagucuaagc

SEQ ID NO: 699783 - RNA, 20 nt, Artificial Sequence
  Synthetic
aaaauguaucccacguaagc

SEQ ID NO: 699784 - RNA, 20 nt, Artificial Sequence
  Synthetic
cguucagggaguucuuaagc

SEQ ID NO: 699785 - RNA, 20 nt, Artificial Sequence
  Synthetic
uaguuaaagcuacuuuaagc

SEQ ID NO: 699786 - RNA, 20 nt, Artificial Sequence
  Synthetic
uacguaaggguuuuuuaagc

SEQ ID NO: 699787 - RNA, 20 nt, Artificial Sequence
  Synthetic
uaacuuccagcuaacacagc

SEQ ID NO: 699788 - RNA, 20 nt, Artificial Sequence
  Synthetic
caauguaaggucugcacagc

SEQ ID NO: 699789 - RNA, 20 nt, Artificial Sequence
  Synthetic
cucaucugagagaucacagc

SEQ ID NO: 699790 - RNA, 20 nt, Artificial Sequence
  Synthetic
aguuuugagcagcagacagc

SEQ ID NO: 699791 - RNA, 20 nt, Artificial Sequence
  Synthetic
caaacauagugaaggacagc

SEQ ID NO: 699792 - RNA, 20 nt, Artificial Sequence
  Synthetic
ucuauuuauucacugacagc

SEQ ID NO: 699793 - RNA, 20 nt, Artificial Sequence
  Synthetic
ucauuggcuugggguacagc

SEQ ID NO: 699794 - RNA, 20 nt, Artificial Sequence
  Synthetic
uacgcagaagagugaccagc

SEQ ID NO: 699795 - RNA, 20 nt, Artificial Sequence
  Synthetic
caguuguuaugcugcccagc

SEQ ID NO: 699796 - RNA, 20 nt, Artificial Sequence
  Synthetic
cgucaaacucagcagccagc

SEQ ID NO: 699797 - RNA, 20 nt, Artificial Sequence
  Synthetic
cgguagugggucaggccagc

SEQ ID NO: 699798 - RNA, 20 nt, Artificial Sequence
  Synthetic
ucucccaacaaaucuccagc

SEQ ID NO: 699799 - RNA, 20 nt, Artificial Sequence
  Synthetic
uuagauuaucugucagcagc

SEQ ID NO: 699800 - RNA, 20 nt, Artificial Sequence
  Synthetic
uugagccugcauaacgcagc

SEQ ID NO: 699801 - RNA, 20 nt, Artificial Sequence
  Synthetic
auuacccgggaauuggcagc

SEQ ID NO: 699802 - RNA, 20 nt, Artificial Sequence
  Synthetic
acuagcauaagggaaucagc

SEQ ID NO: 699803 - RNA, 20 nt, Artificial Sequence
  Synthetic
uacaucacuaaugcaucagc

SEQ ID NO: 699804 - RNA, 20 nt, Artificial Sequence
  Synthetic
auaacaguucaaguaucagc

SEQ ID NO: 699805 - RNA, 20 nt, Artificial Sequence
  Synthetic
cccuaccugugcuuaucagc

SEQ ID NO: 699806 - RNA, 20 nt, Artificial Sequence
  Synthetic
aaauaucugaacuacucagc

SEQ ID NO: 699807 - RNA, 20 nt, Artificial Sequence
  Synthetic
aagggauaugcucucucagc

SEQ ID NO: 699808 - RNA, 20 nt, Artificial Sequence
  Synthetic
aaguuccagagucggucagc

SEQ ID NO: 699809 - RNA, 20 nt, Artificial Sequence
  Synthetic
uucaugcacucguggucagc

SEQ ID NO: 699810 - RNA, 20 nt, Artificial Sequence
  Synthetic
cuacgugguagcuugucagc

SEQ ID NO: 699811 - RNA, 20 nt, Artificial Sequence
  Synthetic
ucuuugcacuagccaagagc

SEQ ID NO: 699812 - RNA, 20 nt, Artificial Sequence
  Synthetic
cuguauauucacauaagagc

SEQ ID NO: 699813 - RNA, 20 nt, Artificial Sequence
  Synthetic
aaagauuaaccaaucagagc

SEQ ID NO: 699814 - RNA, 20 nt, Artificial Sequence
  Synthetic
uuuuaaccucuguagagagc

SEQ ID NO: 699815 - RNA, 20 nt, Artificial Sequence
  Synthetic
cauaauaaucugaggagagc

SEQ ID NO: 699816 - RNA, 20 nt, Artificial Sequence
  Synthetic
acguaccuucaucugagagc

SEQ ID NO: 699817 - RNA, 20 nt, Artificial Sequence
  Synthetic
ugucuuugaagcacuagagc

SEQ ID NO: 699818 - RNA, 20 nt, Artificial Sequence
  Synthetic
auauauacuacauuuagagc

SEQ ID NO: 699819 - RNA, 20 nt, Artificial Sequence
  Synthetic
cagaaaaggaucaagcgagc

SEQ ID NO: 699820 - RNA, 20 nt, Artificial Sequence
  Synthetic
ugggaggugagcguaggagc

SEQ ID NO: 699821 - RNA, 20 nt, Artificial Sequence
  Synthetic
cagcuuaaaaaaccgggagc

SEQ ID NO: 699822 - RNA, 20 nt, Artificial Sequence
  Synthetic
aaaaggcaugauaugggagc

SEQ ID NO: 699823 - RNA, 20 nt, Artificial Sequence
  Synthetic
uuaaugucucgauauggagc

SEQ ID NO: 699824 - RNA, 20 nt, Artificial Sequence
  Synthetic
uguugguccucaacuggagc

SEQ ID NO: 699825 - RNA, 20 nt, Artificial Sequence
  Synthetic
ucccauacggaaagaugagc

SEQ ID NO: 699826 - RNA, 20 nt, Artificial Sequence
  Synthetic
ucuaauuaacuacccugagc

SEQ ID NO: 699827 - RNA, 20 nt, Artificial Sequence
  Synthetic
ugagccugggacaauugagc

SEQ ID NO: 699828 - RNA, 20 nt, Artificial Sequence
  Synthetic
uguuggggcaacgauugagc

SEQ ID NO: 699829 - RNA, 20 nt, Artificial Sequence
  Synthetic
uacuaccuaccuaguugagc

SEQ ID NO: 699830 - RNA, 20 nt, Artificial Sequence
  Synthetic
aauuccguaaucccaauagc

SEQ ID NO: 699831 - RNA, 20 nt, Artificial Sequence
  Synthetic
cgucaauguguggcaauagc

SEQ ID NO: 699832 - RNA, 20 nt, Artificial Sequence
  Synthetic
cacugcucuagcggaauagc

SEQ ID NO: 699833 - RNA, 20 nt, Artificial Sequence
  Synthetic
uucuaauucacaauaauagc

SEQ ID NO: 699834 - RNA, 20 nt, Artificial Sequence
  Synthetic
uguugaugcuauuuaauagc

SEQ ID NO: 699835 - RNA, 20 nt, Artificial Sequence
  Synthetic
auacccuaaaguuuaauagc

SEQ ID NO: 699836 - RNA, 20 nt, Artificial Sequence
  Synthetic
ucacuuauaggggacauagc

SEQ ID NO: 699837 - RNA, 20 nt, Artificial Sequence
  Synthetic
cuuuuucaacuuaucauagc

SEQ ID NO: 699838 - RNA, 20 nt, Artificial Sequence
  Synthetic
agcuagaggggauauauagc

SEQ ID NO: 699839 - RNA, 20 nt, Artificial Sequence
  Synthetic
auuucucaggcuauuauagc

SEQ ID NO: 699840 - RNA, 20 nt, Artificial Sequence
  Synthetic
ucugauugacucggacuagc

SEQ ID NO: 699841 - RNA, 20 nt, Artificial Sequence
  Synthetic
uauuucaaauagggacuagc

SEQ ID NO: 699842 - RNA, 20 nt, Artificial Sequence
  Synthetic
uggcuaugaucuguacuagc

SEQ ID NO: 699843 - RNA, 20 nt, Artificial Sequence
  Synthetic
auauccacuuuaugccuagc

SEQ ID NO: 699844 - RNA, 20 nt, Artificial Sequence
  Synthetic
ugcucagggaagacgcuagc

SEQ ID NO: 699845 - RNA, 20 nt, Artificial Sequence
  Synthetic
cucauaucuucucugcuagc

SEQ ID NO: 699846 - RNA, 20 nt, Artificial Sequence
  Synthetic
uagaugcguuuauugcuagc

SEQ ID NO: 699847 - RNA, 20 nt, Artificial Sequence
  Synthetic
ugcuauauauccccucuagc

SEQ ID NO: 699848 - RNA, 20 nt, Artificial Sequence
  Synthetic
acuacacaauguucucuagc

SEQ ID NO: 699849 - RNA, 20 nt, Artificial Sequence
  Synthetic
uaggaaaucauuucucuagc

SEQ ID NO: 699850 - RNA, 20 nt, Artificial Sequence
  Synthetic
uuaggagcucccagaguagc

SEQ ID NO: 699851 - RNA, 20 nt, Artificial Sequence
  Synthetic
aguaggaaccauauaguagc

SEQ ID NO: 699852 - RNA, 20 nt, Artificial Sequence
  Synthetic
ugcugugcccacuuaguagc

SEQ ID NO: 699853 - RNA, 20 nt, Artificial Sequence
  Synthetic
cuuacggguagagagguagc

SEQ ID NO: 699854 - RNA, 20 nt, Artificial Sequence
  Synthetic
aguggcauuaugucgguagc

SEQ ID NO: 699855 - RNA, 20 nt, Artificial Sequence
  Synthetic
uuaauguagugccugguagc

SEQ ID NO: 699856 - RNA, 20 nt, Artificial Sequence
  Synthetic
auuacaaguugagaauuagc

SEQ ID NO: 699857 - RNA, 20 nt, Artificial Sequence
  Synthetic
aguaucaacaauuaauuagc

SEQ ID NO: 699858 - RNA, 20 nt, Artificial Sequence
  Synthetic
auuuguccgauuauauuagc

SEQ ID NO: 699859 - RNA, 20 nt, Artificial Sequence
  Synthetic
ccaaguauagaagccuuagc

SEQ ID NO: 699860 - RNA, 20 nt, Artificial Sequence
  Synthetic
uaggacgucuaugaguuagc

SEQ ID NO: 699861 - RNA, 20 nt, Artificial Sequence
  Synthetic
uuuugcuccuccccuuuagc

SEQ ID NO: 699862 - RNA, 20 nt, Artificial Sequence
  Synthetic
aagaucuagggaaguuuagc

SEQ ID NO: 699863 - RNA, 20 nt, Artificial Sequence
  Synthetic
uacauuuugggcaguaacgc

SEQ ID NO: 699864 - RNA, 20 nt, Artificial Sequence
  Synthetic
caaaaaggcaacaaacacgc

SEQ ID NO: 699865 - RNA, 20 nt, Artificial Sequence
  Synthetic
cucauuauuucugcccacgc

SEQ ID NO: 699866 - RNA, 20 nt, Artificial Sequence
  Synthetic
caauaccuaagaauucacgc

SEQ ID NO: 699867 - RNA, 20 nt, Artificial Sequence
  Synthetic
uuuaguuccucacuagacgc

SEQ ID NO: 699868 - RNA, 20 nt, Artificial Sequence
  Synthetic
cugucaacuauugaggacgc

SEQ ID NO: 699869 - RNA, 20 nt, Artificial Sequence
  Synthetic
agauaguuccuuugugacgc

SEQ ID NO: 699870 - RNA, 20 nt, Artificial Sequence
  Synthetic
uugacuaggaaaacauacgc

SEQ ID NO: 699871 - RNA, 20 nt, Artificial Sequence
  Synthetic
cacauccacuaggaugccgc

SEQ ID NO: 699872 - RNA, 20 nt, Artificial Sequence
  Synthetic
uccgggggcuuugcugccgc

SEQ ID NO: 699873 - RNA, 20 nt, Artificial Sequence
  Synthetic
auugcaguugccggugccgc

SEQ ID NO: 699874 - RNA, 20 nt, Artificial Sequence
  Synthetic
ucacccacaccguaauccgc

SEQ ID NO: 699875 - RNA, 20 nt, Artificial Sequence
  Synthetic
agggcaguguuaguaagcgc

SEQ ID NO: 699876 - RNA, 20 nt, Artificial Sequence
  Synthetic
cgaagccaaaucuccagcgc

SEQ ID NO: 699877 - RNA, 20 nt, Artificial Sequence
  Synthetic
ccuuugaaauaauauagcgc

SEQ ID NO: 699878 - RNA, 20 nt, Artificial Sequence
  Synthetic
aauaauacguggaccugcgc

SEQ ID NO: 699879 - RNA, 20 nt, Artificial Sequence
  Synthetic
aagggaggucccaggaucgc

SEQ ID NO: 699880 - RNA, 20 nt, Artificial Sequence
  Synthetic
cagggaugccauucuaucgc

SEQ ID NO: 699881 - RNA, 20 nt, Artificial Sequence
  Synthetic
uaagcaccaccuacagucgc

SEQ ID NO: 699882 - RNA, 20 nt, Artificial Sequence
  Synthetic
acccagggauuggcagucgc

SEQ ID NO: 699883 - RNA, 20 nt, Artificial Sequence
  Synthetic
aucaugugcaucagauucgc

SEQ ID NO: 699884 - RNA, 20 nt, Artificial Sequence
  Synthetic
cauauguacuacuacuucgc

SEQ ID NO: 699885 - RNA, 20 nt, Artificial Sequence
  Synthetic
ucucuaaaucacucuuucgc

SEQ ID NO: 699886 - RNA, 20 nt, Artificial Sequence
  Synthetic
aacaauaaaccauguuucgc

SEQ ID NO: 699887 - RNA, 20 nt, Artificial Sequence
  Synthetic
aggacaugccaucaaaaggc

SEQ ID NO: 699888 - RNA, 20 nt, Artificial Sequence
  Synthetic
uuaugcuggugaccaaaggc

SEQ ID NO: 699889 - RNA, 20 nt, Artificial Sequence
  Synthetic
aguuagaacacuagcaaggc

SEQ ID NO: 699890 - RNA, 20 nt, Artificial Sequence
  Synthetic
cuaugugcccuucgcaaggc

SEQ ID NO: 699891 - RNA, 20 nt, Artificial Sequence
  Synthetic
aggucacauguggagaaggc

SEQ ID NO: 699892 - RNA, 20 nt, Artificial Sequence
  Synthetic
ugggauuuaguauugaaggc

SEQ ID NO: 699893 - RNA, 20 nt, Artificial Sequence
  Synthetic
uugauccacccuucuaaggc

SEQ ID NO: 699894 - RNA, 20 nt, Artificial Sequence
  Synthetic
cuauuugggcuucaacaggc

SEQ ID NO: 699895 - RNA, 20 nt, Artificial Sequence
  Synthetic
uuugguaguagagcccaggc

SEQ ID NO: 699896 - RNA, 20 nt, Artificial Sequence
  Synthetic
acguauagaguacuccaggc

SEQ ID NO: 699897 - RNA, 20 nt, Artificial Sequence
  Synthetic
uggacccuccacuagcaggc

SEQ ID NO: 699898 - RNA, 20 nt, Artificial Sequence
  Synthetic
acauagccugcgaugcaggc

SEQ ID NO: 699899 - RNA, 20 nt, Artificial Sequence
  Synthetic
uccagcuuuagcuaucaggc

SEQ ID NO: 699900 - RNA, 20 nt, Artificial Sequence
  Synthetic
acauugcauuagagagaggc

SEQ ID NO: 699901 - RNA, 20 nt, Artificial Sequence
  Synthetic
ucucuuaaccagaaugaggc

SEQ ID NO: 699902 - RNA, 20 nt, Artificial Sequence
  Synthetic
accggggucauuccauaggc

SEQ ID NO: 699903 - RNA, 20 nt, Artificial Sequence
  Synthetic
augagaccaaucuacuaggc

SEQ ID NO: 699904 - RNA, 20 nt, Artificial Sequence
  Synthetic
cuaugcguuaagcccuaggc

SEQ ID NO: 699905 - RNA, 20 nt, Artificial Sequence
  Synthetic
acagaggagcacguuuaggc

SEQ ID NO: 699906 - RNA, 20 nt, Artificial Sequence
  Synthetic
aagagugggcgcguuuaggc

SEQ ID NO: 699907 - RNA, 20 nt, Artificial Sequence
  Synthetic
acaacugcccucuauacggc

SEQ ID NO: 699908 - RNA, 20 nt, Artificial Sequence
  Synthetic
acuagaugcuugucuacggc

SEQ ID NO: 699909 - RNA, 20 nt, Artificial Sequence
  Synthetic
acucucguacugauagcggc

SEQ ID NO: 699910 - RNA, 20 nt, Artificial Sequence
  Synthetic
aacagguguuacuuggcggc

SEQ ID NO: 699911 - RNA, 20 nt, Artificial Sequence
  Synthetic
uaagauucaagcuaugcggc

SEQ ID NO: 699912 - RNA, 20 nt, Artificial Sequence
  Synthetic
uccaagaacaguuacucggc

SEQ ID NO: 699913 - RNA, 20 nt, Artificial Sequence
  Synthetic
agauaaaauguucucucggc

SEQ ID NO: 699914 - RNA, 20 nt, Artificial Sequence
  Synthetic
uggggccuguccuguucggc

SEQ ID NO: 699915 - RNA, 20 nt, Artificial Sequence
  Synthetic
cucugaacugacucaagggc

SEQ ID NO: 699916 - RNA, 20 nt, Artificial Sequence
  Synthetic
cugaucacuaacuguagggc

SEQ ID NO: 699917 - RNA, 20 nt, Artificial Sequence
  Synthetic
ucaagaccgguaagacgggc

SEQ ID NO: 699918 - RNA, 20 nt, Artificial Sequence
  Synthetic
ccuaagaaauuguaccgggc

SEQ ID NO: 699919 - RNA, 20 nt, Artificial Sequence
  Synthetic
caaaaaggacuugcucgggc

SEQ ID NO: 699920 - RNA, 20 nt, Artificial Sequence
  Synthetic
agauuuuaaggauaaggggc

SEQ ID NO: 699921 - RNA, 20 nt, Artificial Sequence
  Synthetic
cauauauucccgagaggggc

SEQ ID NO: 699922 - RNA, 20 nt, Artificial Sequence
  Synthetic
uagauuauguugggaggggc

SEQ ID NO: 699923 - RNA, 20 nt, Artificial Sequence
  Synthetic
cuccugauacauuugggggc

SEQ ID NO: 699924 - RNA, 20 nt, Artificial Sequence
  Synthetic
uaagccuccaguucuggggc

SEQ ID NO: 699925 - RNA, 20 nt, Artificial Sequence
  Synthetic
uaacuagaugccaguggggc

SEQ ID NO: 699926 - RNA, 20 nt, Artificial Sequence
  Synthetic
ucguagaaaugaauaugggc

SEQ ID NO: 699927 - RNA, 20 nt, Artificial Sequence
  Synthetic
ucuuuaguugucaucugggc

SEQ ID NO: 699928 - RNA, 20 nt, Artificial Sequence
  Synthetic
ccaccuggcaguaagugggc

SEQ ID NO: 699929 - RNA, 20 nt, Artificial Sequence
  Synthetic
uaugccguaguagggugggc

SEQ ID NO: 699930 - RNA, 20 nt, Artificial Sequence
  Synthetic
cuacauacucaggauugggc

SEQ ID NO: 699931 - RNA, 20 nt, Artificial Sequence
  Synthetic
uccagaguucuuuauugggc

SEQ ID NO: 699932 - RNA, 20 nt, Artificial Sequence
  Synthetic
cgguuucuuacuauuugggc

SEQ ID NO: 699933 - RNA, 20 nt, Artificial Sequence
  Synthetic
uagcucauuccccuuugggc

SEQ ID NO: 699934 - RNA, 20 nt, Artificial Sequence
  Synthetic
uguuagugugaugaaauggc

SEQ ID NO: 699935 - RNA, 20 nt, Artificial Sequence
  Synthetic
cuaacaccacgacacauggc

SEQ ID NO: 699936 - RNA, 20 nt, Artificial Sequence
  Synthetic
caauccaggauguacauggc

SEQ ID NO: 699937 - RNA, 20 nt, Artificial Sequence
  Synthetic
uaagucugcuuuacacuggc

SEQ ID NO: 699938 - RNA, 20 nt, Artificial Sequence
  Synthetic
ucaacccuuauuuuacuggc

SEQ ID NO: 699939 - RNA, 20 nt, Artificial Sequence
  Synthetic
caagggauaucugaccuggc

SEQ ID NO: 699940 - RNA, 20 nt, Artificial Sequence
  Synthetic
aaauaugaucaacgccuggc

SEQ ID NO: 699941 - RNA, 20 nt, Artificial Sequence
  Synthetic
cccuacucucaauagcuggc

SEQ ID NO: 699942 - RNA, 20 nt, Artificial Sequence
  Synthetic
acauagcuaauuauaguggc

SEQ ID NO: 699943 - RNA, 20 nt, Artificial Sequence
  Synthetic
ugcaguagauacuuaguggc

SEQ ID NO: 699944 - RNA, 20 nt, Artificial Sequence
  Synthetic
aucaucguccaucagguggc

SEQ ID NO: 699945 - RNA, 20 nt, Artificial Sequence
  Synthetic
acaguaacuuauacuguggc

SEQ ID NO: 699946 - RNA, 20 nt, Artificial Sequence
  Synthetic
uuugagagaguagguguggc

SEQ ID NO: 699947 - RNA, 20 nt, Artificial Sequence
  Synthetic
aagaggguucgucaauuggc

SEQ ID NO: 699948 - RNA, 20 nt, Artificial Sequence
  Synthetic
acuuaagcaugcuucuuggc

SEQ ID NO: 699949 - RNA, 20 nt, Artificial Sequence
  Synthetic
uuuguacgaacuccuuuggc

SEQ ID NO: 699950 - RNA, 20 nt, Artificial Sequence
  Synthetic
cuugcugccaaucuaaaugc

SEQ ID NO: 699951 - RNA, 20 nt, Artificial Sequence
  Synthetic
cuuauguuaauagccaaugc

SEQ ID NO: 699952 - RNA, 20 nt, Artificial Sequence
  Synthetic
ucaaucaaguuaagcaaugc

SEQ ID NO: 699953 - RNA, 20 nt, Artificial Sequence
  Synthetic
agagacugcugaaucaaugc

SEQ ID NO: 699954 - RNA, 20 nt, Artificial Sequence
  Synthetic
ccugauaguauacucaaugc

SEQ ID NO: 699955 - RNA, 20 nt, Artificial Sequence
  Synthetic
auguugguagcaucuaaugc

SEQ ID NO: 699956 - RNA, 20 nt, Artificial Sequence
  Synthetic
aaucagaggacaguuaaugc

SEQ ID NO: 699957 - RNA, 20 nt, Artificial Sequence
  Synthetic
ucucauggcaauguuaaugc

SEQ ID NO: 699958 - RNA, 20 nt, Artificial Sequence
  Synthetic
acaaugucgauguuuaaugc

SEQ ID NO: 699959 - RNA, 20 nt, Artificial Sequence
  Synthetic
uaauugauuauguaacaugc

SEQ ID NO: 699960 - RNA, 20 nt, Artificial Sequence
  Synthetic
ucguaaaucaggacacaugc

SEQ ID NO: 699961 - RNA, 20 nt, Artificial Sequence
  Synthetic
auuugggaucuugaccaugc

SEQ ID NO: 699962 - RNA, 20 nt, Artificial Sequence
  Synthetic
uacgccaugcaaagccaugc

SEQ ID NO: 699963 - RNA, 20 nt, Artificial Sequence
  Synthetic
auuacacuagugcugcaugc

SEQ ID NO: 699964 - RNA, 20 nt, Artificial Sequence
  Synthetic
auaccagaauuuuugcaugc

SEQ ID NO: 699965 - RNA, 20 nt, Artificial Sequence
  Synthetic
cagcaggaccuaaaucaugc

SEQ ID NO: 699966 - RNA, 20 nt, Artificial Sequence
  Synthetic
ccugcuaguuuguuucaugc

SEQ ID NO: 699967 - RNA, 20 nt, Artificial Sequence
  Synthetic
aguaagccagaguaagaugc

SEQ ID NO: 699968 - RNA, 20 nt, Artificial Sequence
  Synthetic
uuaguuaaugacugagaugc

SEQ ID NO: 699969 - RNA, 20 nt, Artificial Sequence
  Synthetic
acagacauagccugcgaugc

SEQ ID NO: 699970 - RNA, 20 nt, Artificial Sequence
  Synthetic
cucucgaaaacguaugaugc

SEQ ID NO: 699971 - RNA, 20 nt, Artificial Sequence
  Synthetic
ucuugacacacccaauaugc

SEQ ID NO: 699972 - RNA, 20 nt, Artificial Sequence
  Synthetic
acauagcauauguaauaugc

SEQ ID NO: 699973 - RNA, 20 nt, Artificial Sequence
  Synthetic
uugaccccugagagauaugc

SEQ ID NO: 699974 - RNA, 20 nt, Artificial Sequence
  Synthetic
ugccaugucugaauauaugc

SEQ ID NO: 699975 - RNA, 20 nt, Artificial Sequence
  Synthetic
aaccugggauaccuauaugc

SEQ ID NO: 699976 - RNA, 20 nt, Artificial Sequence
  Synthetic
acgauccuuuuauuauaugc

SEQ ID NO: 699977 - RNA, 20 nt, Artificial Sequence
  Synthetic
uuucacuuguaacacuaugc

SEQ ID NO: 699978 - RNA, 20 nt, Artificial Sequence
  Synthetic
agauuccucaagcuguaugc

SEQ ID NO: 699979 - RNA, 20 nt, Artificial Sequence
  Synthetic
cugcugucuuaagcuuaugc

SEQ ID NO: 699980 - RNA, 20 nt, Artificial Sequence
  Synthetic
agguauuuaagaucaacugc

SEQ ID NO: 699981 - RNA, 20 nt, Artificial Sequence
  Synthetic
uagggauauaugauaacugc

SEQ ID NO: 699982 - RNA, 20 nt, Artificial Sequence
  Synthetic
aaucaugcugguguaacugc

SEQ ID NO: 699983 - RNA, 20 nt, Artificial Sequence
  Synthetic
augaggccgcaacgcacugc

SEQ ID NO: 699984 - RNA, 20 nt, Artificial Sequence
  Synthetic
uucuggauauaaggcacugc

SEQ ID NO: 699985 - RNA, 20 nt, Artificial Sequence
  Synthetic
aaauuggagauguagacugc

SEQ ID NO: 699986 - RNA, 20 nt, Artificial Sequence
  Synthetic
uuauaguuuacacuuacugc

SEQ ID NO: 699987 - RNA, 20 nt, Artificial Sequence
  Synthetic
ugugaagcuaucuuuacugc

SEQ ID NO: 699988 - RNA, 20 nt, Artificial Sequence
  Synthetic
uucuccagguaugaaccugc

SEQ ID NO: 699989 - RNA, 20 nt, Artificial Sequence
  Synthetic
auagaauaggaaaugccugc

SEQ ID NO: 699990 - RNA, 20 nt, Artificial Sequence
  Synthetic
cucagagacuauuauccugc

SEQ ID NO: 699991 - RNA, 20 nt, Artificial Sequence
  Synthetic
ccaaacgcaguucuagcugc

SEQ ID NO: 699992 - RNA, 20 nt, Artificial Sequence
  Synthetic
cucaauuccuuuguagcugc

SEQ ID NO: 699993 - RNA, 20 nt, Artificial Sequence
  Synthetic
uaauauagcauucccgcugc

SEQ ID NO: 699994 - RNA, 20 nt, Artificial Sequence
  Synthetic
aacacguccaucuaggcugc

SEQ ID NO: 699995 - RNA, 20 nt, Artificial Sequence
  Synthetic
acaaguagucguaaugcugc

SEQ ID NO: 699996 - RNA, 20 nt, Artificial Sequence
  Synthetic
cuucuuguuauguaugcugc

SEQ ID NO: 699997 - RNA, 20 nt, Artificial Sequence
  Synthetic
ccuaguugcuagguugcugc

SEQ ID NO: 699998 - RNA, 20 nt, Artificial Sequence
  Synthetic
auugcuagcugaucaucugc

SEQ ID NO: 699999 - RNA, 20 nt, Artificial Sequence
  Synthetic
uggagauuccacagaucugc

SEQ ID NO: 700000 - RNA, 20 nt, Artificial Sequence
  Synthetic
aaccacucacucacgucugc

SEQ ID NO: 700001 - RNA, 20 nt, Artificial Sequence
  Synthetic
caaguaaucggugggucugc

SEQ ID NO: 700002 - RNA, 20 nt, Artificial Sequence
  Synthetic
uuacauugucaguugucugc

SEQ ID NO: 700003 - RNA, 20 nt, Artificial Sequence
  Synthetic
ugucugcgacaacguucugc

SEQ ID NO: 700004 - RNA, 20 nt, Artificial Sequence
  Synthetic
cacuuggaucaguaaagugc

SEQ ID NO: 700005 - RNA, 20 nt, Artificial Sequence
  Synthetic
cugaugagugugagaagugc

SEQ ID NO: 700006 - RNA, 20 nt, Artificial Sequence
  Synthetic
agcacuguugauuuaagugc

SEQ ID NO: 700007 - RNA, 20 nt, Artificial Sequence
  Synthetic
cugcacugcacguccagugc

SEQ ID NO: 700008 - RNA, 20 nt, Artificial Sequence
  Synthetic
cccaucauguucuagagugc

SEQ ID NO: 700009 - RNA, 20 nt, Artificial Sequence
  Synthetic
cuucuuuuauuagggagugc

SEQ ID NO: 700010 - RNA, 20 nt, Artificial Sequence
  Synthetic
uccugauauggauauagugc

SEQ ID NO: 700011 - RNA, 20 nt, Artificial Sequence
  Synthetic
uugugauguauauauagugc

SEQ ID NO: 700012 - RNA, 20 nt, Artificial Sequence
  Synthetic
cuccuuggaccgucuagugc

SEQ ID NO: 700013 - RNA, 20 nt, Artificial Sequence
  Synthetic
cgaagaauccuuuguagugc

SEQ ID NO: 700014 - RNA, 20 nt, Artificial Sequence
  Synthetic
caauggcaaaguauaggugc

SEQ ID NO: 700015 - RNA, 20 nt, Artificial Sequence
  Synthetic
aggcagaagacuuacggugc

SEQ ID NO: 700016 - RNA, 20 nt, Artificial Sequence
  Synthetic
ccuucauuuuacaagggugc

SEQ ID NO: 700017 - RNA, 20 nt, Artificial Sequence
  Synthetic
uuugacuugcagcagggugc

SEQ ID NO: 700018 - RNA, 20 nt, Artificial Sequence
  Synthetic
aacuuaaaucacaggggugc

SEQ ID NO: 700019 - RNA, 20 nt, Artificial Sequence
  Synthetic
uuagacgguggguggggugc

SEQ ID NO: 700020 - RNA, 20 nt, Artificial Sequence
  Synthetic
uuuccucuauuugaaugugc

SEQ ID NO: 700021 - RNA, 20 nt, Artificial Sequence
  Synthetic
ccacugugccuuuaaugugc

SEQ ID NO: 700022 - RNA, 20 nt, Artificial Sequence
  Synthetic
cgcagagccuuuagaugugc

SEQ ID NO: 700023 - RNA, 20 nt, Artificial Sequence
  Synthetic
uuuaacuugagucgaugugc

SEQ ID NO: 700024 - RNA, 20 nt, Artificial Sequence
  Synthetic
uugaggacacgaauaugugc

SEQ ID NO: 700025 - RNA, 20 nt, Artificial Sequence
  Synthetic
uuuuagcucauuugcugugc

SEQ ID NO: 700026 - RNA, 20 nt, Artificial Sequence
  Synthetic
uucgagagugagcagugugc

SEQ ID NO: 700027 - RNA, 20 nt, Artificial Sequence
  Synthetic
cuuccuuguacguagugugc

SEQ ID NO: 700028 - RNA, 20 nt, Artificial Sequence
  Synthetic
acugcgaccaccaaaauugc

SEQ ID NO: 700029 - RNA, 20 nt, Artificial Sequence
  Synthetic
aggugaaaggcuuaaauugc

SEQ ID NO: 700030 - RNA, 20 nt, Artificial Sequence
  Synthetic
auaauaugaccaugaauugc

SEQ ID NO: 700031 - RNA, 20 nt, Artificial Sequence
  Synthetic
agacuauacggggagauugc

SEQ ID NO: 700032 - RNA, 20 nt, Artificial Sequence
  Synthetic
aaguggcuggucucgauugc

SEQ ID NO: 700033 - RNA, 20 nt, Artificial Sequence
  Synthetic
uucccgacuuccugacuugc

SEQ ID NO: 700034 - RNA, 20 nt, Artificial Sequence
  Synthetic
auaugaguauguacccuugc

SEQ ID NO: 700035 - RNA, 20 nt, Artificial Sequence
  Synthetic
uuccaauccaaacuccuugc

SEQ ID NO: 700036 - RNA, 20 nt, Artificial Sequence
  Synthetic
ucaagcuuaggggagcuugc

SEQ ID NO: 700037 - RNA, 20 nt, Artificial Sequence
  Synthetic
aagaucacacgggaucuugc

SEQ ID NO: 700038 - RNA, 20 nt, Artificial Sequence
  Synthetic
ucagccuuacguagcguugc

SEQ ID NO: 700039 - RNA, 20 nt, Artificial Sequence
  Synthetic
ucaauacaguaugauguugc

SEQ ID NO: 700040 - RNA, 20 nt, Artificial Sequence
  Synthetic
uacuugcagugaaguguugc

SEQ ID NO: 700041 - RNA, 20 nt, Artificial Sequence
  Synthetic
uugguuuccggcccauuugc

SEQ ID NO: 700042 - RNA, 20 nt, Artificial Sequence
  Synthetic
aagccuuaagggccauuugc

SEQ ID NO: 700043 - RNA, 20 nt, Artificial Sequence
  Synthetic
aaaggcaguucaagauuugc

SEQ ID NO: 700044 - RNA, 20 nt, Artificial Sequence
  Synthetic
agaugaauauugcuauuugc

SEQ ID NO: 700045 - RNA, 20 nt, Artificial Sequence
  Synthetic
uuccggauccuaggcuuugc

SEQ ID NO: 700046 - RNA, 20 nt, Artificial Sequence
  Synthetic
auaccacccguguucuuugc

SEQ ID NO: 700047 - RNA, 20 nt, Artificial Sequence
  Synthetic
uacacuaacucugcguuugc

SEQ ID NO: 700048 - RNA, 20 nt, Artificial Sequence
  Synthetic
acuaccuugacaaauuuugc

SEQ ID NO: 700049 - RNA, 20 nt, Artificial Sequence
  Synthetic
ugaacuugauucgauuuugc

SEQ ID NO: 700050 - RNA, 20 nt, Artificial Sequence
  Synthetic
aacugccccauaacuuuugc

SEQ ID NO: 700051 - RNA, 20 nt, Artificial Sequence
  Synthetic
uauacaguacaggcuuuugc

SEQ ID NO: 700052 - RNA, 20 nt, Artificial Sequence
  Synthetic
cauucuuuaggagguuuugc

SEQ ID NO: 700053 - RNA, 20 nt, Artificial Sequence
  Synthetic
cauaaguacucccuuuuugc

SEQ ID NO: 700054 - RNA, 20 nt, Artificial Sequence
  Synthetic
aaggauugcccaguuuuugc

SEQ ID NO: 700055 - RNA, 20 nt, Artificial Sequence
  Synthetic
ugaucuucgucuauaaaauc

SEQ ID NO: 700056 - RNA, 20 nt, Artificial Sequence
  Synthetic
uuuguauagaaucgcaaauc

SEQ ID NO: 700057 - RNA, 20 nt, Artificial Sequence
  Synthetic
uuagaggacacaggcaaauc

SEQ ID NO: 700058 - RNA, 20 nt, Artificial Sequence
  Synthetic
caaucuggacugcagaaauc

SEQ ID NO: 700059 - RNA, 20 nt, Artificial Sequence
  Synthetic
cugaccagguuagggaaauc

SEQ ID NO: 700060 - RNA, 20 nt, Artificial Sequence
  Synthetic
cagacauccugcucuaaauc

SEQ ID NO: 700061 - RNA, 20 nt, Artificial Sequence
  Synthetic
cuucuggagguucguaaauc

SEQ ID NO: 700062 - RNA, 20 nt, Artificial Sequence
  Synthetic
cacuucacaguaguuaaauc

SEQ ID NO: 700063 - RNA, 20 nt, Artificial Sequence
  Synthetic
aacauuaguuagguuaaauc

SEQ ID NO: 700064 - RNA, 20 nt, Artificial Sequence
  Synthetic
aaagacugggcuagacaauc

SEQ ID NO: 700065 - RNA, 20 nt, Artificial Sequence
  Synthetic
uaggauuuuugcccucaauc

SEQ ID NO: 700066 - RNA, 20 nt, Artificial Sequence
  Synthetic
caucccucguaaguucaauc

SEQ ID NO: 700067 - RNA, 20 nt, Artificial Sequence
  Synthetic
aacugaauaagaggagaauc

SEQ ID NO: 700068 - RNA, 20 nt, Artificial Sequence
  Synthetic
ucccauauagggauagaauc

SEQ ID NO: 700069 - RNA, 20 nt, Artificial Sequence
  Synthetic
ugacguauauauuuagaauc

SEQ ID NO: 700070 - RNA, 20 nt, Artificial Sequence
  Synthetic
aaauuggcucauuacgaauc

SEQ ID NO: 700071 - RNA, 20 nt, Artificial Sequence
  Synthetic
caccuacugcuuugcgaauc

SEQ ID NO: 700072 - RNA, 20 nt, Artificial Sequence
  Synthetic
acggugacaagauucgaauc

SEQ ID NO: 700073 - RNA, 20 nt, Artificial Sequence
  Synthetic
agcuugggagccuaggaauc

SEQ ID NO: 700074 - RNA, 20 nt, Artificial Sequence
  Synthetic
acugggcucccuugggaauc

SEQ ID NO: 700075 - RNA, 20 nt, Artificial Sequence
  Synthetic
uauugaguagauuacuaauc

SEQ ID NO: 700076 - RNA, 20 nt, Artificial Sequence
  Synthetic
cuaauggucuauaucuaauc

SEQ ID NO: 700077 - RNA, 20 nt, Artificial Sequence
  Synthetic
ugaaugugggaccucuaauc

SEQ ID NO: 700078 - RNA, 20 nt, Artificial Sequence
  Synthetic
agaacaugauggguguaauc

SEQ ID NO: 700079 - RNA, 20 nt, Artificial Sequence
  Synthetic
uccagucuuuuuguguaauc

SEQ ID NO: 700080 - RNA, 20 nt, Artificial Sequence
  Synthetic
cacgcgcgcaaaaauuaauc

SEQ ID NO: 700081 - RNA, 20 nt, Artificial Sequence
  Synthetic
cuauauaugugcgauuaauc

SEQ ID NO: 700082 - RNA, 20 nt, Artificial Sequence
  Synthetic
aagagagauacggguuaauc

SEQ ID NO: 700083 - RNA, 20 nt, Artificial Sequence
  Synthetic
agggccauaagcaaaacauc

SEQ ID NO: 700084 - RNA, 20 nt, Artificial Sequence
  Synthetic
uaguuaugagaacaaacauc

SEQ ID NO: 700085 - RNA, 20 nt, Artificial Sequence
  Synthetic
acauguccuagagaaacauc

SEQ ID NO: 700086 - RNA, 20 nt, Artificial Sequence
  Synthetic
cuuugaaucacuuaaacauc

SEQ ID NO: 700087 - RNA, 20 nt, Artificial Sequence
  Synthetic
aauagguaagucugaacauc

SEQ ID NO: 700088 - RNA, 20 nt, Artificial Sequence
  Synthetic
uauuagucgcuccuaacauc

SEQ ID NO: 700089 - RNA, 20 nt, Artificial Sequence
  Synthetic
aaguaccagguucuaacauc

SEQ ID NO: 700090 - RNA, 20 nt, Artificial Sequence
  Synthetic
uucaugcuuaacaccacauc

SEQ ID NO: 700091 - RNA, 20 nt, Artificial Sequence
  Synthetic
aggaaccggggccccacauc

SEQ ID NO: 700092 - RNA, 20 nt, Artificial Sequence
  Synthetic
uaaaccauagaugcuacauc

SEQ ID NO: 700093 - RNA, 20 nt, Artificial Sequence
  Synthetic
cauguagauuacaguacauc

SEQ ID NO: 700094 - RNA, 20 nt, Artificial Sequence
  Synthetic
aguacguagaaacguacauc

SEQ ID NO: 700095 - RNA, 20 nt, Artificial Sequence
  Synthetic
aacagacuucgugaaccauc

SEQ ID NO: 700096 - RNA, 20 nt, Artificial Sequence
  Synthetic
uacccuugaagaagaccauc

SEQ ID NO: 700097 - RNA, 20 nt, Artificial Sequence
  Synthetic
ucuauccauauauacccauc

SEQ ID NO: 700098 - RNA, 20 nt, Artificial Sequence
  Synthetic
acaaguuaaaucaucccauc

SEQ ID NO: 700099 - RNA, 20 nt, Artificial Sequence
  Synthetic
ugaaaggacuuaaguccauc

SEQ ID NO: 700100 - RNA, 20 nt, Artificial Sequence
  Synthetic
cauguccaucaucguccauc

SEQ ID NO: 700101 - RNA, 20 nt, Artificial Sequence
  Synthetic
uuugaugcuuacuguccauc

SEQ ID NO: 700102 - RNA, 20 nt, Artificial Sequence
  Synthetic
auaacgggcauugaagcauc

SEQ ID NO: 700103 - RNA, 20 nt, Artificial Sequence
  Synthetic
uuugggugauccuuagcauc

SEQ ID NO: 700104 - RNA, 20 nt, Artificial Sequence
  Synthetic
uuauaacacuucaccgcauc

SEQ ID NO: 700105 - RNA, 20 nt, Artificial Sequence
  Synthetic
uuguaacaaucaagcgcauc

SEQ ID NO: 700106 - RNA, 20 nt, Artificial Sequence
  Synthetic
ccaccacugugugcggcauc

SEQ ID NO: 700107 - RNA, 20 nt, Artificial Sequence
  Synthetic
caccagaagaacuaugcauc

SEQ ID NO: 700108 - RNA, 20 nt, Artificial Sequence
  Synthetic
cagguaguccauuuugcauc

SEQ ID NO: 700109 - RNA, 20 nt, Artificial Sequence
  Synthetic
ugguauuccaugaaaucauc

SEQ ID NO: 700110 - RNA, 20 nt, Artificial Sequence
  Synthetic
uaauaacccuacguaucauc

SEQ ID NO: 700111 - RNA, 20 nt, Artificial Sequence
  Synthetic
uuagaucauccuuacucauc

SEQ ID NO: 700112 - RNA, 20 nt, Artificial Sequence
  Synthetic
uuagucuagaaccagucauc

SEQ ID NO: 700113 - RNA, 20 nt, Artificial Sequence
  Synthetic
auagccucuggucagucauc

SEQ ID NO: 700114 - RNA, 20 nt, Artificial Sequence
  Synthetic
uuucuucagagcccgucauc

SEQ ID NO: 700115 - RNA, 20 nt, Artificial Sequence
  Synthetic
cauguaacauuucauucauc

SEQ ID NO: 700116 - RNA, 20 nt, Artificial Sequence
  Synthetic
acguggcauauccaaagauc

SEQ ID NO: 700117 - RNA, 20 nt, Artificial Sequence
  Synthetic
uccccucuauuuacaagauc

SEQ ID NO: 700118 - RNA, 20 nt, Artificial Sequence
  Synthetic
agcacucuaauauuaagauc

SEQ ID NO: 700119 - RNA, 20 nt, Artificial Sequence
  Synthetic
uaugaguguugcuccagauc

SEQ ID NO: 700120 - RNA, 20 nt, Artificial Sequence
  Synthetic
caauaaucuauguucagauc

SEQ ID NO: 700121 - RNA, 20 nt, Artificial Sequence
  Synthetic
uugacccuuucaaggagauc

SEQ ID NO: 700122 - RNA, 20 nt, Artificial Sequence
  Synthetic
cauugaaggugcaggagauc

SEQ ID NO: 700123 - RNA, 20 nt, Artificial Sequence
  Synthetic
uagcuuagcugagggagauc

SEQ ID NO: 700124 - RNA, 20 nt, Artificial Sequence
  Synthetic
uaauguagagcccuuagauc

SEQ ID NO: 700125 - RNA, 20 nt, Artificial Sequence
  Synthetic
auaccaauacuuaaucgauc

SEQ ID NO: 700126 - RNA, 20 nt, Artificial Sequence
  Synthetic
aucuuuauuagucaaggauc

SEQ ID NO: 700127 - RNA, 20 nt, Artificial Sequence
  Synthetic
uaccugcaaagccuaggauc

SEQ ID NO: 700128 - RNA, 20 nt, Artificial Sequence
  Synthetic
acagccagccaguuaggauc

SEQ ID NO: 700129 - RNA, 20 nt, Artificial Sequence
  Synthetic
cuaaacuauuuguugggauc

SEQ ID NO: 700130 - RNA, 20 nt, Artificial Sequence
  Synthetic
uacaccccucaauaaugauc

SEQ ID NO: 700131 - RNA, 20 nt, Artificial Sequence
  Synthetic
cugaaguggugagacugauc

SEQ ID NO: 700132 - RNA, 20 nt, Artificial Sequence
  Synthetic
cugccucacuaucccugauc

SEQ ID NO: 700133 - RNA, 20 nt, Artificial Sequence
  Synthetic
uccaacugcauuuucugauc

SEQ ID NO: 700134 - RNA, 20 nt, Artificial Sequence
  Synthetic
caauuggucuagaugugauc

SEQ ID NO: 700135 - RNA, 20 nt, Artificial Sequence
  Synthetic
uguacuugcaaauugugauc

SEQ ID NO: 700136 - RNA, 20 nt, Artificial Sequence
  Synthetic
cuguagguagaagauugauc

SEQ ID NO: 700137 - RNA, 20 nt, Artificial Sequence
  Synthetic
cucugggagucuacuugauc

SEQ ID NO: 700138 - RNA, 20 nt, Artificial Sequence
  Synthetic
cggacuagcgggucaauauc

SEQ ID NO: 700139 - RNA, 20 nt, Artificial Sequence
  Synthetic
aauuagagccagguaauauc

SEQ ID NO: 700140 - RNA, 20 nt, Artificial Sequence
  Synthetic
uucuagcauuaguccauauc

SEQ ID NO: 700141 - RNA, 20 nt, Artificial Sequence
  Synthetic
cuaggagcuuuaugcauauc

SEQ ID NO: 700142 - RNA, 20 nt, Artificial Sequence
  Synthetic
cauaauggcaaguagauauc

SEQ ID NO: 700143 - RNA, 20 nt, Artificial Sequence
  Synthetic
cuagugcucccuuauauauc

SEQ ID NO: 700144 - RNA, 20 nt, Artificial Sequence
  Synthetic
acuaagucacuuuauauauc

SEQ ID NO: 700145 - RNA, 20 nt, Artificial Sequence
  Synthetic
cuauuuuaggagaaacuauc

SEQ ID NO: 700146 - RNA, 20 nt, Artificial Sequence
  Synthetic
aagggugacaaggcacuauc

SEQ ID NO: 700147 - RNA, 20 nt, Artificial Sequence
  Synthetic
acccucacauaacagcuauc

SEQ ID NO: 700148 - RNA, 20 nt, Artificial Sequence
  Synthetic
uacagguagaacucucuauc

SEQ ID NO: 700149 - RNA, 20 nt, Artificial Sequence
  Synthetic
aagcacuauagcacgguauc

SEQ ID NO: 700150 - RNA, 20 nt, Artificial Sequence
  Synthetic
uggccaucuuuaucuguauc

SEQ ID NO: 700151 - RNA, 20 nt, Artificial Sequence
  Synthetic
caacucuagccucuuguauc

SEQ ID NO: 700152 - RNA, 20 nt, Artificial Sequence
  Synthetic
ugucagucuguaaaauuauc

SEQ ID NO: 700153 - RNA, 20 nt, Artificial Sequence
  Synthetic
cuaucggcugacaacuuauc

SEQ ID NO: 700154 - RNA, 20 nt, Artificial Sequence
  Synthetic
agggauccuccuugcuuauc

SEQ ID NO: 700155 - RNA, 20 nt, Artificial Sequence
  Synthetic
uauaacugcacagucuuauc

SEQ ID NO: 700156 - RNA, 20 nt, Artificial Sequence
  Synthetic
aaguggacacacaaguuauc

SEQ ID NO: 700157 - RNA, 20 nt, Artificial Sequence
  Synthetic
auucguauccuagaaaacuc

SEQ ID NO: 700158 - RNA, 20 nt, Artificial Sequence
  Synthetic
cugguauaaaggcacaacuc

SEQ ID NO: 700159 - RNA, 20 nt, Artificial Sequence
  Synthetic
agucuugucuuacucaacuc

SEQ ID NO: 700160 - RNA, 20 nt, Artificial Sequence
  Synthetic
ucggcauucccauugaacuc

SEQ ID NO: 700161 - RNA, 20 nt, Artificial Sequence
  Synthetic
ucaugguuuccaauuaacuc

SEQ ID NO: 700162 - RNA, 20 nt, Artificial Sequence
  Synthetic
uaaguuacccucacacacuc

SEQ ID NO: 700163 - RNA, 20 nt, Artificial Sequence
  Synthetic
agaauagccagaucacacuc

SEQ ID NO: 700164 - RNA, 20 nt, Artificial Sequence
  Synthetic
uugcugucagcuuaccacuc

SEQ ID NO: 700165 - RNA, 20 nt, Artificial Sequence
  Synthetic
ucauaguugaagucccacuc

SEQ ID NO: 700166 - RNA, 20 nt, Artificial Sequence
  Synthetic
aacugauuguaagagcacuc

SEQ ID NO: 700167 - RNA, 20 nt, Artificial Sequence
  Synthetic
ucguguacguaaaaucacuc

SEQ ID NO: 700168 - RNA, 20 nt, Artificial Sequence
  Synthetic
ucaaccaacaaggaucacuc

SEQ ID NO: 700169 - RNA, 20 nt, Artificial Sequence
  Synthetic
ucuacuuagcuuagucacuc

SEQ ID NO: 700170 - RNA, 20 nt, Artificial Sequence
  Synthetic
ccagugcuaaggauucacuc

SEQ ID NO: 700171 - RNA, 20 nt, Artificial Sequence
  Synthetic
uuuuugucguuagaagacuc

SEQ ID NO: 700172 - RNA, 20 nt, Artificial Sequence
  Synthetic
aauaaccaaugcuaagacuc

SEQ ID NO: 700173 - RNA, 20 nt, Artificial Sequence
  Synthetic
uaagauuggaaacgagacuc

SEQ ID NO: 700174 - RNA, 20 nt, Artificial Sequence
  Synthetic
uauuucuacacccuagacuc

SEQ ID NO: 700175 - RNA, 20 nt, Artificial Sequence
  Synthetic
caccaaccuauauuugacuc

SEQ ID NO: 700176 - RNA, 20 nt, Artificial Sequence
  Synthetic
uuugccucgaaaugauacuc

SEQ ID NO: 700177 - RNA, 20 nt, Artificial Sequence
  Synthetic
aggcuucuucguuuauacuc

SEQ ID NO: 700178 - RNA, 20 nt, Artificial Sequence
  Synthetic
uucagucaccuuaucuacuc

SEQ ID NO: 700179 - RNA, 20 nt, Artificial Sequence
  Synthetic
auuaugaucauaaaguacuc

SEQ ID NO: 700180 - RNA, 20 nt, Artificial Sequence
  Synthetic
uuaaguaauccgagguacuc

SEQ ID NO: 700181 - RNA, 20 nt, Artificial Sequence
  Synthetic
uagggaguaauucgguacuc

SEQ ID NO: 700182 - RNA, 20 nt, Artificial Sequence
  Synthetic
augcgugaaacaccuuacuc

SEQ ID NO: 700183 - RNA, 20 nt, Artificial Sequence
  Synthetic
acuuaacgcaguccuuacuc

SEQ ID NO: 700184 - RNA, 20 nt, Artificial Sequence
  Synthetic
auucagcccgcaucuuacuc

SEQ ID NO: 700185 - RNA, 20 nt, Artificial Sequence
  Synthetic
aauacacauccucuuuacuc

SEQ ID NO: 700186 - RNA, 20 nt, Artificial Sequence
  Synthetic
ugguauuagguaagaaccuc

SEQ ID NO: 700187 - RNA, 20 nt, Artificial Sequence
  Synthetic
auuuacuauccgugaaccuc

SEQ ID NO: 700188 - RNA, 20 nt, Artificial Sequence
  Synthetic
acaguccuccauuacaccuc

SEQ ID NO: 700189 - RNA, 20 nt, Artificial Sequence
  Synthetic
aggauguaugucuucaccuc

SEQ ID NO: 700190 - RNA, 20 nt, Artificial Sequence
  Synthetic
ucguauaugaaguagaccuc

SEQ ID NO: 700191 - RNA, 20 nt, Artificial Sequence
  Synthetic
uuccccuaccauaauaccuc

SEQ ID NO: 700192 - RNA, 20 nt, Artificial Sequence
  Synthetic
aggaauaaagcauauaccuc

SEQ ID NO: 700193 - RNA, 20 nt, Artificial Sequence
  Synthetic
auucagcaguacuauaccuc

SEQ ID NO: 700194 - RNA, 20 nt, Artificial Sequence
  Synthetic
aagaauuagaacauuaccuc

SEQ ID NO: 700195 - RNA, 20 nt, Artificial Sequence
  Synthetic
acccuaccacugaaacccuc

SEQ ID NO: 700196 - RNA, 20 nt, Artificial Sequence
  Synthetic
cuugauauauuaucccccuc

SEQ ID NO: 700197 - RNA, 20 nt, Artificial Sequence
  Synthetic
auaauacucugaaagcccuc

SEQ ID NO: 700198 - RNA, 20 nt, Artificial Sequence
  Synthetic
ucugagcaaugugggcccuc

SEQ ID NO: 700199 - RNA, 20 nt, Artificial Sequence
  Synthetic
uaaguaaagaugaugcccuc

SEQ ID NO: 700200 - RNA, 20 nt, Artificial Sequence
  Synthetic
accccuaaauccacagccuc

SEQ ID NO: 700201 - RNA, 20 nt, Artificial Sequence
  Synthetic
cgugucuucuauauagccuc

SEQ ID NO: 700202 - RNA, 20 nt, Artificial Sequence
  Synthetic
ucccauccgcuaguagccuc

SEQ ID NO: 700203 - RNA, 20 nt, Artificial Sequence
  Synthetic
uguuacaaggcauuggccuc

SEQ ID NO: 700204 - RNA, 20 nt, Artificial Sequence
  Synthetic
cucugcauuguuuuggccuc

SEQ ID NO: 700205 - RNA, 20 nt, Artificial Sequence
  Synthetic
acuugcucugaccaugccuc

SEQ ID NO: 700206 - RNA, 20 nt, Artificial Sequence
  Synthetic
uccugaguuuagguugccuc

SEQ ID NO: 700207 - RNA, 20 nt, Artificial Sequence
  Synthetic
ccgcugagguuauaauccuc

SEQ ID NO: 700208 - RNA, 20 nt, Artificial Sequence
  Synthetic
uacauauggcccacauccuc

SEQ ID NO: 700209 - RNA, 20 nt, Artificial Sequence
  Synthetic
aaaaggaauacacuauccuc

SEQ ID NO: 700210 - RNA, 20 nt, Artificial Sequence
  Synthetic
caauuguucugacuauccuc

SEQ ID NO: 700211 - RNA, 20 nt, Artificial Sequence
  Synthetic
acacaccuaguaaccuccuc

SEQ ID NO: 700212 - RNA, 20 nt, Artificial Sequence
  Synthetic
aaauagcuuaucaucuccuc

SEQ ID NO: 700213 - RNA, 20 nt, Artificial Sequence
  Synthetic
cggugguaagaacucuccuc

SEQ ID NO: 700214 - RNA, 20 nt, Artificial Sequence
  Synthetic
uagcccuagauuuaguccuc

SEQ ID NO: 700215 - RNA, 20 nt, Artificial Sequence
  Synthetic
aucugcaaauugugguccuc

SEQ ID NO: 700216 - RNA, 20 nt, Artificial Sequence
  Synthetic
cuccacucaccuuauuccuc

SEQ ID NO: 700217 - RNA, 20 nt, Artificial Sequence
  Synthetic
cuuuuguggcauacuuccuc

SEQ ID NO: 700218 - RNA, 20 nt, Artificial Sequence
  Synthetic
uuaacuaagggccaaagcuc

SEQ ID NO: 700219 - RNA, 20 nt, Artificial Sequence
  Synthetic
uuucuccuugaccgaagcuc

SEQ ID NO: 700220 - RNA, 20 nt, Artificial Sequence
  Synthetic
ugugucauacaauacagcuc

SEQ ID NO: 700221 - RNA, 20 nt, Artificial Sequence
  Synthetic
aggagggagcgcuacagcuc

SEQ ID NO: 700222 - RNA, 20 nt, Artificial Sequence
  Synthetic
uuuaauaaucacaucagcuc

SEQ ID NO: 700223 - RNA, 20 nt, Artificial Sequence
  Synthetic
aaacagcggaaggggagcuc

SEQ ID NO: 700224 - RNA, 20 nt, Artificial Sequence
  Synthetic
caggcguaauuacauagcuc

SEQ ID NO: 700225 - RNA, 20 nt, Artificial Sequence
  Synthetic
ccaccaaaacuuuauagcuc

SEQ ID NO: 700226 - RNA, 20 nt, Artificial Sequence
  Synthetic
ucacuuuuaaagggccgcuc

SEQ ID NO: 700227 - RNA, 20 nt, Artificial Sequence
  Synthetic
acguaacccuaguuucgcuc

SEQ ID NO: 700228 - RNA, 20 nt, Artificial Sequence
  Synthetic
uacacagaccaaauaggcuc

SEQ ID NO: 700229 - RNA, 20 nt, Artificial Sequence
  Synthetic
auauauuuggucauaggcuc

SEQ ID NO: 700230 - RNA, 20 nt, Artificial Sequence
  Synthetic
uauaaggggacagugggcuc

SEQ ID NO: 700231 - RNA, 20 nt, Artificial Sequence
  Synthetic
ugaauuagucuaaguggcuc

SEQ ID NO: 700232 - RNA, 20 nt, Artificial Sequence
  Synthetic
uuauuacaacauuaaugcuc

SEQ ID NO: 700233 - RNA, 20 nt, Artificial Sequence
  Synthetic
accuuaagacaaacaugcuc

SEQ ID NO: 700234 - RNA, 20 nt, Artificial Sequence
  Synthetic
ugcauaugagucuuaugcuc

SEQ ID NO: 700235 - RNA, 20 nt, Artificial Sequence
  Synthetic
uucgccggugcaugcugcuc

SEQ ID NO: 700236 - RNA, 20 nt, Artificial Sequence
  Synthetic
caacguguuaguaauugcuc

SEQ ID NO: 700237 - RNA, 20 nt, Artificial Sequence
  Synthetic
uagggauggucagauugcuc

SEQ ID NO: 700238 - RNA, 20 nt, Artificial Sequence
  Synthetic
aguggcaugguauauugcuc

SEQ ID NO: 700239 - RNA, 20 nt, Artificial Sequence
  Synthetic
cuuugcucagcugguugcuc

SEQ ID NO: 700240 - RNA, 20 nt, Artificial Sequence
  Synthetic
augaaugggaacguuugcuc

SEQ ID NO: 700241 - RNA, 20 nt, Artificial Sequence
  Synthetic
agaacgauucccuuuugcuc

SEQ ID NO: 700242 - RNA, 20 nt, Artificial Sequence
  Synthetic
agguugaccuuuccaaucuc

SEQ ID NO: 700243 - RNA, 20 nt, Artificial Sequence
  Synthetic
ucaagagcuaaaggaaucuc

SEQ ID NO: 700244 - RNA, 20 nt, Artificial Sequence
  Synthetic
ccacucucucaugacaucuc

SEQ ID NO: 700245 - RNA, 20 nt, Artificial Sequence
  Synthetic
uggacuagccuacucaucuc

SEQ ID NO: 700246 - RNA, 20 nt, Artificial Sequence
  Synthetic
augggcauuguguucaucuc

SEQ ID NO: 700247 - RNA, 20 nt, Artificial Sequence
  Synthetic
ccauauauaacuaggaucuc

SEQ ID NO: 700248 - RNA, 20 nt, Artificial Sequence
  Synthetic
uuguuagggaacgugaucuc

SEQ ID NO: 700249 - RNA, 20 nt, Artificial Sequence
  Synthetic
auguuauacaaggauaucuc

SEQ ID NO: 700250 - RNA, 20 nt, Artificial Sequence
  Synthetic
uaaauaaucgcaaguaucuc

SEQ ID NO: 700251 - RNA, 20 nt, Artificial Sequence
  Synthetic
caucucugacaccguaucuc

SEQ ID NO: 700252 - RNA, 20 nt, Artificial Sequence
  Synthetic
cauuccgaguuucuuaucuc

SEQ ID NO: 700253 - RNA, 20 nt, Artificial Sequence
  Synthetic
aucuauuugagacaacucuc

SEQ ID NO: 700254 - RNA, 20 nt, Artificial Sequence
  Synthetic
ucugauacaaaaaggcucuc

SEQ ID NO: 700255 - RNA, 20 nt, Artificial Sequence
  Synthetic
cguauugcagguaggcucuc

SEQ ID NO: 700256 - RNA, 20 nt, Artificial Sequence
  Synthetic
ucaguauaugcugugcucuc

SEQ ID NO: 700257 - RNA, 20 nt, Artificial Sequence
  Synthetic
agucuaucuuaacaucucuc

SEQ ID NO: 700258 - RNA, 20 nt, Artificial Sequence
  Synthetic
ucgagggcuugcucucucuc

SEQ ID NO: 700259 - RNA, 20 nt, Artificial Sequence
  Synthetic
uuaucaucuaaaacagucuc

SEQ ID NO: 700260 - RNA, 20 nt, Artificial Sequence
  Synthetic
ugagacgauaagggagucuc

SEQ ID NO: 700261 - RNA, 20 nt, Artificial Sequence
  Synthetic
caauacgugcagcccgucuc

SEQ ID NO: 700262 - RNA, 20 nt, Artificial Sequence
  Synthetic
augauucagaaucaggucuc

SEQ ID NO: 700263 - RNA, 20 nt, Artificial Sequence
  Synthetic
uccuuaaaguaucaggucuc

SEQ ID NO: 700264 - RNA, 20 nt, Artificial Sequence
  Synthetic
uuacuaugcuacagggucuc

SEQ ID NO: 700265 - RNA, 20 nt, Artificial Sequence
  Synthetic
cauucuacaacuagggucuc

SEQ ID NO: 700266 - RNA, 20 nt, Artificial Sequence
  Synthetic
ccuuaagauuuuagggucuc

SEQ ID NO: 700267 - RNA, 20 nt, Artificial Sequence
  Synthetic
cuggcuguaaaaguggucuc

SEQ ID NO: 700268 - RNA, 20 nt, Artificial Sequence
  Synthetic
ugugaucugggucaugucuc

SEQ ID NO: 700269 - RNA, 20 nt, Artificial Sequence
  Synthetic
ucuaaacaucugagugucuc

SEQ ID NO: 700270 - RNA, 20 nt, Artificial Sequence
  Synthetic
cuuuaagauugacgugucuc

SEQ ID NO: 700271 - RNA, 20 nt, Artificial Sequence
  Synthetic
ccccuagcuagcuuugucuc

SEQ ID NO: 700272 - RNA, 20 nt, Artificial Sequence
  Synthetic
ccaaggggaaaugacuucuc

SEQ ID NO: 700273 - RNA, 20 nt, Artificial Sequence
  Synthetic
uucaauacacgcaccuucuc

SEQ ID NO: 700274 - RNA, 20 nt, Artificial Sequence
  Synthetic
aacguaccuauagucuucuc

SEQ ID NO: 700275 - RNA, 20 nt, Artificial Sequence
  Synthetic
uaguaaggcucacuguucuc

SEQ ID NO: 700276 - RNA, 20 nt, Artificial Sequence
  Synthetic
auguguuucaccgauuucuc

SEQ ID NO: 700277 - RNA, 20 nt, Artificial Sequence
  Synthetic
ucacuacccauugcaaaguc

SEQ ID NO: 700278 - RNA, 20 nt, Artificial Sequence
  Synthetic
uugaaugaguaucuaaaguc

SEQ ID NO: 700279 - RNA, 20 nt, Artificial Sequence
  Synthetic
uacacgguagccaccaaguc

SEQ ID NO: 700280 - RNA, 20 nt, Artificial Sequence
  Synthetic
ugcgaugagaaaggcaaguc

SEQ ID NO: 700281 - RNA, 20 nt, Artificial Sequence
  Synthetic
uuagacugguucggcaaguc

SEQ ID NO: 700282 - RNA, 20 nt, Artificial Sequence
  Synthetic
cuaacagagguuuggaaguc

SEQ ID NO: 700283 - RNA, 20 nt, Artificial Sequence
  Synthetic
accgauuaaggggugaaguc

SEQ ID NO: 700284 - RNA, 20 nt, Artificial Sequence
  Synthetic
aauaggacccccaauaaguc

SEQ ID NO: 700285 - RNA, 20 nt, Artificial Sequence
  Synthetic
uucauggucagaaguaaguc

SEQ ID NO: 700286 - RNA, 20 nt, Artificial Sequence
  Synthetic
agcaaacaggguuguaaguc

SEQ ID NO: 700287 - RNA, 20 nt, Artificial Sequence
  Synthetic
ccaugugcucugccacaguc

SEQ ID NO: 700288 - RNA, 20 nt, Artificial Sequence
  Synthetic
cuucacaauaacucccaguc

SEQ ID NO: 700289 - RNA, 20 nt, Artificial Sequence
  Synthetic
ucuguuauggugacucaguc

SEQ ID NO: 700290 - RNA, 20 nt, Artificial Sequence
  Synthetic
ugggcuguugcaggucaguc

SEQ ID NO: 700291 - RNA, 20 nt, Artificial Sequence
  Synthetic
cugcaacacagccaagaguc

SEQ ID NO: 700292 - RNA, 20 nt, Artificial Sequence
  Synthetic
agugcguaacaugcagaguc

SEQ ID NO: 700293 - RNA, 20 nt, Artificial Sequence
  Synthetic
auguaugacgcucccgaguc

SEQ ID NO: 700294 - RNA, 20 nt, Artificial Sequence
  Synthetic
cgcugcuaaaaugccgaguc

SEQ ID NO: 700295 - RNA, 20 nt, Artificial Sequence
  Synthetic
uuuugcacaauuaaggaguc

SEQ ID NO: 700296 - RNA, 20 nt, Artificial Sequence
  Synthetic
aguacaaggcaugcugaguc

SEQ ID NO: 700297 - RNA, 20 nt, Artificial Sequence
  Synthetic
cuaaaagcaaugcgugaguc

SEQ ID NO: 700298 - RNA, 20 nt, Artificial Sequence
  Synthetic
agcaaucuccccguauaguc

SEQ ID NO: 700299 - RNA, 20 nt, Artificial Sequence
  Synthetic
uuuggcuguagcaacuaguc

SEQ ID NO: 700300 - RNA, 20 nt, Artificial Sequence
  Synthetic
uauaguaguaaaugcuaguc

SEQ ID NO: 700301 - RNA, 20 nt, Artificial Sequence
  Synthetic
aauguggcaugaaaguaguc

SEQ ID NO: 700302 - RNA, 20 nt, Artificial Sequence
  Synthetic
uacuaguauaucacguaguc

SEQ ID NO: 700303 - RNA, 20 nt, Artificial Sequence
  Synthetic
cuaguaaauuuggauuaguc

SEQ ID NO: 700304 - RNA, 20 nt, Artificial Sequence
  Synthetic
ugcauggaaggcuguuaguc

SEQ ID NO: 700305 - RNA, 20 nt, Artificial Sequence
  Synthetic
cauuacauagcaaauacguc

SEQ ID NO: 700306 - RNA, 20 nt, Artificial Sequence
  Synthetic
uccucaaagucuaauacguc

SEQ ID NO: 700307 - RNA, 20 nt, Artificial Sequence
  Synthetic
uacaaugcagcaguuacguc

SEQ ID NO: 700308 - RNA, 20 nt, Artificial Sequence
  Synthetic
aucucaucuauagacccguc

SEQ ID NO: 700309 - RNA, 20 nt, Artificial Sequence
  Synthetic
acuucaucugucaggccguc

SEQ ID NO: 700310 - RNA, 20 nt, Artificial Sequence
  Synthetic
cagaugguagcauaagcguc

SEQ ID NO: 700311 - RNA, 20 nt, Artificial Sequence
  Synthetic
uuuaggcaagccauagcguc

SEQ ID NO: 700312 - RNA, 20 nt, Artificial Sequence
  Synthetic
aauaaauuccuagaaucguc

SEQ ID NO: 700313 - RNA, 20 nt, Artificial Sequence
  Synthetic
uaaaaauggcacuaaucguc

SEQ ID NO: 700314 - RNA, 20 nt, Artificial Sequence
  Synthetic
cuagaauaugugccaagguc

SEQ ID NO: 700315 - RNA, 20 nt, Artificial Sequence
  Synthetic
auguccuauggagacagguc

SEQ ID NO: 700316 - RNA, 20 nt, Artificial Sequence
  Synthetic
aaguacuuaucugacagguc

SEQ ID NO: 700317 - RNA, 20 nt, Artificial Sequence
  Synthetic
uacuacauuuagagcagguc

SEQ ID NO: 700318 - RNA, 20 nt, Artificial Sequence
  Synthetic
auccccucucucuugagguc

SEQ ID NO: 700319 - RNA, 20 nt, Artificial Sequence
  Synthetic
aguugagauaaacauagguc

SEQ ID NO: 700320 - RNA, 20 nt, Artificial Sequence
  Synthetic
caggcuuuucauaguagguc

SEQ ID NO: 700321 - RNA, 20 nt, Artificial Sequence
  Synthetic
uccgcuagccugauuagguc

SEQ ID NO: 700322 - RNA, 20 nt, Artificial Sequence
  Synthetic
augugucgugguguuagguc

SEQ ID NO: 700323 - RNA, 20 nt, Artificial Sequence
  Synthetic
uauagccaaagcaaacgguc

SEQ ID NO: 700324 - RNA, 20 nt, Artificial Sequence
  Synthetic
uguugcuuuauacuucgguc

SEQ ID NO: 700325 - RNA, 20 nt, Artificial Sequence
  Synthetic
cacaguucuaacacaggguc

SEQ ID NO: 700326 - RNA, 20 nt, Artificial Sequence
  Synthetic
cuuaacauggaugccggguc

SEQ ID NO: 700327 - RNA, 20 nt, Artificial Sequence
  Synthetic
cuaagacaguagcagggguc

SEQ ID NO: 700328 - RNA, 20 nt, Artificial Sequence
  Synthetic
aauuuuagguaagagggguc

SEQ ID NO: 700329 - RNA, 20 nt, Artificial Sequence
  Synthetic
ucccaagaggucuggggguc

SEQ ID NO: 700330 - RNA, 20 nt, Artificial Sequence
  Synthetic
cagugaguuuccaugggguc

SEQ ID NO: 700331 - RNA, 20 nt, Artificial Sequence
  Synthetic
uucugcaaaagggcuggguc

SEQ ID NO: 700332 - RNA, 20 nt, Artificial Sequence
  Synthetic
cuauuuuggacccuuggguc

SEQ ID NO: 700333 - RNA, 20 nt, Artificial Sequence
  Synthetic
agcuaaguggagaaaugguc

SEQ ID NO: 700334 - RNA, 20 nt, Artificial Sequence
  Synthetic
ccagauauucacagaugguc

SEQ ID NO: 700335 - RNA, 20 nt, Artificial Sequence
  Synthetic
uuuuucccacaaguaugguc

SEQ ID NO: 700336 - RNA, 20 nt, Artificial Sequence
  Synthetic
cguuguaauugccacugguc

SEQ ID NO: 700337 - RNA, 20 nt, Artificial Sequence
  Synthetic
auuguauggccugucugguc

SEQ ID NO: 700338 - RNA, 20 nt, Artificial Sequence
  Synthetic
uuauugucuauagugugguc

SEQ ID NO: 700339 - RNA, 20 nt, Artificial Sequence
  Synthetic
uccugggugcuucauugguc

SEQ ID NO: 700340 - RNA, 20 nt, Artificial Sequence
  Synthetic
accuaagagauggguugguc

SEQ ID NO: 700341 - RNA, 20 nt, Artificial Sequence
  Synthetic
acagugaccaaauaaauguc

SEQ ID NO: 700342 - RNA, 20 nt, Artificial Sequence
  Synthetic
uugccuaaaacauagauguc

SEQ ID NO: 700343 - RNA, 20 nt, Artificial Sequence
  Synthetic
uaggucuccauuuagauguc

SEQ ID NO: 700344 - RNA, 20 nt, Artificial Sequence
  Synthetic
uugacauucucaaugauguc

SEQ ID NO: 700345 - RNA, 20 nt, Artificial Sequence
  Synthetic
caaauaacuugauugauguc

SEQ ID NO: 700346 - RNA, 20 nt, Artificial Sequence
  Synthetic
uaugccuacgaguugauguc

SEQ ID NO: 700347 - RNA, 20 nt, Artificial Sequence
  Synthetic
cuuauaacuuguguuauguc

SEQ ID NO: 700348 - RNA, 20 nt, Artificial Sequence
  Synthetic
cuuaaugguuacagacuguc

SEQ ID NO: 700349 - RNA, 20 nt, Artificial Sequence
  Synthetic
uauggauuguauggccuguc

SEQ ID NO: 700350 - RNA, 20 nt, Artificial Sequence
  Synthetic
aaucuguagaagaugcuguc

SEQ ID NO: 700351 - RNA, 20 nt, Artificial Sequence
  Synthetic
agggcucuaggcucucuguc

SEQ ID NO: 700352 - RNA, 20 nt, Artificial Sequence
  Synthetic
acuuugguugagcuucuguc

SEQ ID NO: 700353 - RNA, 20 nt, Artificial Sequence
  Synthetic
uuaacauaggcgcaaguguc

SEQ ID NO: 700354 - RNA, 20 nt, Artificial Sequence
  Synthetic
ccuaauuucaaucaaguguc

SEQ ID NO: 700355 - RNA, 20 nt, Artificial Sequence
  Synthetic
aaucaaagcucaugaguguc

SEQ ID NO: 700356 - RNA, 20 nt, Artificial Sequence
  Synthetic
aaagggccgcucaggguguc

SEQ ID NO: 700357 - RNA, 20 nt, Artificial Sequence
  Synthetic
aacgaauuccuugggguguc

SEQ ID NO: 700358 - RNA, 20 nt, Artificial Sequence
  Synthetic
aagauccucuaccauguguc

SEQ ID NO: 700359 - RNA, 20 nt, Artificial Sequence
  Synthetic
aaagacaccuuuuauguguc

SEQ ID NO: 700360 - RNA, 20 nt, Artificial Sequence
  Synthetic
uauucgcuaguaguauuguc

SEQ ID NO: 700361 - RNA, 20 nt, Artificial Sequence
  Synthetic
uacccaagcuaauccuuguc

SEQ ID NO: 700362 - RNA, 20 nt, Artificial Sequence
  Synthetic
aaggcacuaucuggcuuguc

SEQ ID NO: 700363 - RNA, 20 nt, Artificial Sequence
  Synthetic
cagagcuaacaguuguuguc

SEQ ID NO: 700364 - RNA, 20 nt, Artificial Sequence
  Synthetic
cacguacuauuccguuuguc

SEQ ID NO: 700365 - RNA, 20 nt, Artificial Sequence
  Synthetic
augcuuccccuaagaaauuc

SEQ ID NO: 700366 - RNA, 20 nt, Artificial Sequence
  Synthetic
aucuccaagauccacaauuc

SEQ ID NO: 700367 - RNA, 20 nt, Artificial Sequence
  Synthetic
uagcaauuauaauacaauuc

SEQ ID NO: 700368 - RNA, 20 nt, Artificial Sequence
  Synthetic
agcaauacaauguacaauuc

SEQ ID NO: 700369 - RNA, 20 nt, Artificial Sequence
  Synthetic
aguacguggaaaaccaauuc

SEQ ID NO: 700370 - RNA, 20 nt, Artificial Sequence
  Synthetic
uucgucagugccaagaauuc

SEQ ID NO: 700371 - RNA, 20 nt, Artificial Sequence
  Synthetic
cuauugggauuacggaauuc

SEQ ID NO: 700372 - RNA, 20 nt, Artificial Sequence
  Synthetic
acaccuacugucuggaauuc

SEQ ID NO: 700373 - RNA, 20 nt, Artificial Sequence
  Synthetic
uggaggcgaauaccuaauuc

SEQ ID NO: 700374 - RNA, 20 nt, Artificial Sequence
  Synthetic
uaaugguaaagacaacauuc

SEQ ID NO: 700375 - RNA, 20 nt, Artificial Sequence
  Synthetic
cccaguaaaagggugcauuc

SEQ ID NO: 700376 - RNA, 20 nt, Artificial Sequence
  Synthetic
aaaacugcgcaccaucauuc

SEQ ID NO: 700377 - RNA, 20 nt, Artificial Sequence
  Synthetic
caauuauugauaacucauuc

SEQ ID NO: 700378 - RNA, 20 nt, Artificial Sequence
  Synthetic
agaaccccucaugcucauuc

SEQ ID NO: 700379 - RNA, 20 nt, Artificial Sequence
  Synthetic
uauauccccuuaacagauuc

SEQ ID NO: 700380 - RNA, 20 nt, Artificial Sequence
  Synthetic
ugcauccugccucuagauuc

SEQ ID NO: 700381 - RNA, 20 nt, Artificial Sequence
  Synthetic
agacgguaugacuuagauuc

SEQ ID NO: 700382 - RNA, 20 nt, Artificial Sequence
  Synthetic
auuuguaaagaugacgauuc

SEQ ID NO: 700383 - RNA, 20 nt, Artificial Sequence
  Synthetic
ucguucuagauuauggauuc

SEQ ID NO: 700384 - RNA, 20 nt, Artificial Sequence
  Synthetic
aacguuaggaucgcugauuc

SEQ ID NO: 700385 - RNA, 20 nt, Artificial Sequence
  Synthetic
ccaugcuuaaggauugauuc

SEQ ID NO: 700386 - RNA, 20 nt, Artificial Sequence
  Synthetic
agauagacgaggcuugauuc

SEQ ID NO: 700387 - RNA, 20 nt, Artificial Sequence
  Synthetic
ccuuuaacccgguaauauuc

SEQ ID NO: 700388 - RNA, 20 nt, Artificial Sequence
  Synthetic
aaucagcuucaaacauauuc

SEQ ID NO: 700389 - RNA, 20 nt, Artificial Sequence
  Synthetic
augacuaggguuccauauuc

SEQ ID NO: 700390 - RNA, 20 nt, Artificial Sequence
  Synthetic
cauacaacucaccuauauuc

SEQ ID NO: 700391 - RNA, 20 nt, Artificial Sequence
  Synthetic
cgagacccagucuuauauuc

SEQ ID NO: 700392 - RNA, 20 nt, Artificial Sequence
  Synthetic
ucagggacaugugacuauuc

SEQ ID NO: 700393 - RNA, 20 nt, Artificial Sequence
  Synthetic
agucacacaaguuccuauuc

SEQ ID NO: 700394 - RNA, 20 nt, Artificial Sequence
  Synthetic
uggucagacgugagcuauuc

SEQ ID NO: 700395 - RNA, 20 nt, Artificial Sequence
  Synthetic
acaaucaccuugcucuauuc

SEQ ID NO: 700396 - RNA, 20 nt, Artificial Sequence
  Synthetic
uggaaacaacguugguauuc

SEQ ID NO: 700397 - RNA, 20 nt, Artificial Sequence
  Synthetic
ccgugguaucuguuguauuc

SEQ ID NO: 700398 - RNA, 20 nt, Artificial Sequence
  Synthetic
uguuauaagcgaaauuauuc

SEQ ID NO: 700399 - RNA, 20 nt, Artificial Sequence
  Synthetic
cugguguuuaguacuuauuc

SEQ ID NO: 700400 - RNA, 20 nt, Artificial Sequence
  Synthetic
aggcuaguuguuacuuauuc

SEQ ID NO: 700401 - RNA, 20 nt, Artificial Sequence
  Synthetic
ucaauuaguggguguuauuc

SEQ ID NO: 700402 - RNA, 20 nt, Artificial Sequence
  Synthetic
acaaccauugccuccacuuc

SEQ ID NO: 700403 - RNA, 20 nt, Artificial Sequence
  Synthetic
cuaacgaacguuugcacuuc

SEQ ID NO: 700404 - RNA, 20 nt, Artificial Sequence
  Synthetic
agugcugcuuguuucacuuc

SEQ ID NO: 700405 - RNA, 20 nt, Artificial Sequence
  Synthetic
auucaucgggggaagacuuc

SEQ ID NO: 700406 - RNA, 20 nt, Artificial Sequence
  Synthetic
aaccucgucagucagacuuc

SEQ ID NO: 700407 - RNA, 20 nt, Artificial Sequence
  Synthetic
caugacuucugucagacuuc

SEQ ID NO: 700408 - RNA, 20 nt, Artificial Sequence
  Synthetic
caauuuugcaugacgacuuc

SEQ ID NO: 700409 - RNA, 20 nt, Artificial Sequence
  Synthetic
aaucuacuggaauugacuuc

SEQ ID NO: 700410 - RNA, 20 nt, Artificial Sequence
  Synthetic
ugaagcuaacucuauacuuc

SEQ ID NO: 700411 - RNA, 20 nt, Artificial Sequence
  Synthetic
cuacuuucaauuccuacuuc

SEQ ID NO: 700412 - RNA, 20 nt, Artificial Sequence
  Synthetic
uaccgucguccuuguacuuc

SEQ ID NO: 700413 - RNA, 20 nt, Artificial Sequence
  Synthetic
cacaagcucuaauuuacuuc

SEQ ID NO: 700414 - RNA, 20 nt, Artificial Sequence
  Synthetic
uauucgcauugcuaaccuuc

SEQ ID NO: 700415 - RNA, 20 nt, Artificial Sequence
  Synthetic
acuccguuauauugaccuuc

SEQ ID NO: 700416 - RNA, 20 nt, Artificial Sequence
  Synthetic
ccuauuuugauguacccuuc

SEQ ID NO: 700417 - RNA, 20 nt, Artificial Sequence
  Synthetic
accacgugacaaagcccuuc

SEQ ID NO: 700418 - RNA, 20 nt, Artificial Sequence
  Synthetic
aguauuaauugccucccuuc

SEQ ID NO: 700419 - RNA, 20 nt, Artificial Sequence
  Synthetic
agugaauaggaauuuccuuc

SEQ ID NO: 700420 - RNA, 20 nt, Artificial Sequence
  Synthetic
cucuccccaacaacggcuuc

SEQ ID NO: 700421 - RNA, 20 nt, Artificial Sequence
  Synthetic
accgucuacuucuuugcuuc

SEQ ID NO: 700422 - RNA, 20 nt, Artificial Sequence
  Synthetic
cacuucuuggaaacaucuuc

SEQ ID NO: 700423 - RNA, 20 nt, Artificial Sequence
  Synthetic
accuuuaccaaaccaucuuc

SEQ ID NO: 700424 - RNA, 20 nt, Artificial Sequence
  Synthetic
auagaguucaucaccucuuc

SEQ ID NO: 700425 - RNA, 20 nt, Artificial Sequence
  Synthetic
aaugugucuuucggcucuuc

SEQ ID NO: 700426 - RNA, 20 nt, Artificial Sequence
  Synthetic
cuuuauuacaauacgucuuc

SEQ ID NO: 700427 - RNA, 20 nt, Artificial Sequence
  Synthetic
uaaucuaucauuuggucuuc

SEQ ID NO: 700428 - RNA, 20 nt, Artificial Sequence
  Synthetic
acauacugacauacuucuuc

SEQ ID NO: 700429 - RNA, 20 nt, Artificial Sequence
  Synthetic
cuccagaugcauaguucuuc

SEQ ID NO: 700430 - RNA, 20 nt, Artificial Sequence
  Synthetic
augcuguuggggcuuucuuc

SEQ ID NO: 700431 - RNA, 20 nt, Artificial Sequence
  Synthetic
uccaaaaggcggacaaguuc

SEQ ID NO: 700432 - RNA, 20 nt, Artificial Sequence
  Synthetic
augcauugugagagaaguuc

SEQ ID NO: 700433 - RNA, 20 nt, Artificial Sequence
  Synthetic
cagcaaaccccucagaguuc

SEQ ID NO: 700434 - RNA, 20 nt, Artificial Sequence
  Synthetic
ugaagcucagugacacguuc

SEQ ID NO: 700435 - RNA, 20 nt, Artificial Sequence
  Synthetic
cgcgcccagccaaagcguuc

SEQ ID NO: 700436 - RNA, 20 nt, Artificial Sequence
  Synthetic
ugcaaguaguaucuucguuc

SEQ ID NO: 700437 - RNA, 20 nt, Artificial Sequence
  Synthetic
ugaaagguaguguaggguuc

SEQ ID NO: 700438 - RNA, 20 nt, Artificial Sequence
  Synthetic
acauaccagucgagggguuc

SEQ ID NO: 700439 - RNA, 20 nt, Artificial Sequence
  Synthetic
ccuauuauaucacgugguuc

SEQ ID NO: 700440 - RNA, 20 nt, Artificial Sequence
  Synthetic
ccguaccugguuuuugguuc

SEQ ID NO: 700441 - RNA, 20 nt, Artificial Sequence
  Synthetic
agauccgguuugggauguuc

SEQ ID NO: 700442 - RNA, 20 nt, Artificial Sequence
  Synthetic
uauugcucuaagguauguuc

SEQ ID NO: 700443 - RNA, 20 nt, Artificial Sequence
  Synthetic
cuaggccgucgguucuguuc

SEQ ID NO: 700444 - RNA, 20 nt, Artificial Sequence
  Synthetic
cgugagcuguuguguuguuc

SEQ ID NO: 700445 - RNA, 20 nt, Artificial Sequence
  Synthetic
agggauaaauuggcaauuuc

SEQ ID NO: 700446 - RNA, 20 nt, Artificial Sequence
  Synthetic
cgaggacauuauaacauuuc

SEQ ID NO: 700447 - RNA, 20 nt, Artificial Sequence
  Synthetic
uggugaguauugaccauuuc

SEQ ID NO: 700448 - RNA, 20 nt, Artificial Sequence
  Synthetic
aggcuaccacguagcauuuc

SEQ ID NO: 700449 - RNA, 20 nt, Artificial Sequence
  Synthetic
ucaacuuacugcuagauuuc

SEQ ID NO: 700450 - RNA, 20 nt, Artificial Sequence
  Synthetic
uucuuuaccgccccuauuuc

SEQ ID NO: 700451 - RNA, 20 nt, Artificial Sequence
  Synthetic
acccgucaggccaguauuuc

SEQ ID NO: 700452 - RNA, 20 nt, Artificial Sequence
  Synthetic
ccugugucaauuaaacuuuc

SEQ ID NO: 700453 - RNA, 20 nt, Artificial Sequence
  Synthetic
uucuguaagccguuccuuuc

SEQ ID NO: 700454 - RNA, 20 nt, Artificial Sequence
  Synthetic
aaucgcaaaucagggcuuuc

SEQ ID NO: 700455 - RNA, 20 nt, Artificial Sequence
  Synthetic
agagcggggcuuuugcuuuc

SEQ ID NO: 700456 - RNA, 20 nt, Artificial Sequence
  Synthetic
ucagugaaccuucgucuuuc

SEQ ID NO: 700457 - RNA, 20 nt, Artificial Sequence
  Synthetic
cccacaucgaauucaguuuc

SEQ ID NO: 700458 - RNA, 20 nt, Artificial Sequence
  Synthetic
auucuaaacaagcagguuuc

SEQ ID NO: 700459 - RNA, 20 nt, Artificial Sequence
  Synthetic
ucaauuuggaaggagguuuc

SEQ ID NO: 700460 - RNA, 20 nt, Artificial Sequence
  Synthetic
auugaauaacauaugguuuc

SEQ ID NO: 700461 - RNA, 20 nt, Artificial Sequence
  Synthetic
cacccgaugguucugguuuc

SEQ ID NO: 700462 - RNA, 20 nt, Artificial Sequence
  Synthetic
cccuuuaccccuaauguuuc

SEQ ID NO: 700463 - RNA, 20 nt, Artificial Sequence
  Synthetic
ucaugcagacguuuuguuuc

SEQ ID NO: 700464 - RNA, 20 nt, Artificial Sequence
  Synthetic
caaagcuucccgagauuuuc

SEQ ID NO: 700465 - RNA, 20 nt, Artificial Sequence
  Synthetic
uggguaggcaagcuauuuuc

SEQ ID NO: 700466 - RNA, 20 nt, Artificial Sequence
  Synthetic
uguaagaucacgguauuuuc

SEQ ID NO: 700467 - RNA, 20 nt, Artificial Sequence
  Synthetic
aaucaccuucgacauuuuuc

SEQ ID NO: 700468 - RNA, 20 nt, Artificial Sequence
  Synthetic
aggaucacccaaacuuuuuc

SEQ ID NO: 700469 - RNA, 20 nt, Artificial Sequence
  Synthetic
caugggauaguuacaaaaag

SEQ ID NO: 700470 - RNA, 20 nt, Artificial Sequence
  Synthetic
cacucaacggaaaauaaaag

SEQ ID NO: 700471 - RNA, 20 nt, Artificial Sequence
  Synthetic
cugggugugaccuauaaaag

SEQ ID NO: 700472 - RNA, 20 nt, Artificial Sequence
  Synthetic
cauucaaucugacguaaaag

SEQ ID NO: 700473 - RNA, 20 nt, Artificial Sequence
  Synthetic
aagaccaggcauuguaaaag

SEQ ID NO: 700474 - RNA, 20 nt, Artificial Sequence
  Synthetic
uacccguaagagccacaaag

SEQ ID NO: 700475 - RNA, 20 nt, Artificial Sequence
  Synthetic
cuagauauucugaaccaaag

SEQ ID NO: 700476 - RNA, 20 nt, Artificial Sequence
  Synthetic
uaggucaguuguuaccaaag

SEQ ID NO: 700477 - RNA, 20 nt, Artificial Sequence
  Synthetic
caccaacaagaaggccaaag

SEQ ID NO: 700478 - RNA, 20 nt, Artificial Sequence
  Synthetic
aucugguagacuauccaaag

SEQ ID NO: 700479 - RNA, 20 nt, Artificial Sequence
  Synthetic
cgugggaggaagaugcaaag

SEQ ID NO: 700480 - RNA, 20 nt, Artificial Sequence
  Synthetic
ugccacaucgcauaucaaag

SEQ ID NO: 700481 - RNA, 20 nt, Artificial Sequence
  Synthetic
ccucuuaaggauuaucaaag

SEQ ID NO: 700482 - RNA, 20 nt, Artificial Sequence
  Synthetic
aaugacgaagguuaucaaag

SEQ ID NO: 700483 - RNA, 20 nt, Artificial Sequence
  Synthetic
cgguaauagaauuaagaaag

SEQ ID NO: 700484 - RNA, 20 nt, Artificial Sequence
  Synthetic
aguuugcaccucggggaaag

SEQ ID NO: 700485 - RNA, 20 nt, Artificial Sequence
  Synthetic
ugugauugaauccuggaaag

SEQ ID NO: 700486 - RNA, 20 nt, Artificial Sequence
  Synthetic
uuguaccaucaauuggaaag

SEQ ID NO: 700487 - RNA, 20 nt, Artificial Sequence
  Synthetic
ucaucagcuacuaacuaaag

SEQ ID NO: 700488 - RNA, 20 nt, Artificial Sequence
  Synthetic
cucucuuaggggaccuaaag

SEQ ID NO: 700489 - RNA, 20 nt, Artificial Sequence
  Synthetic
ucacuggaauuacccuaaag

SEQ ID NO: 700490 - RNA, 20 nt, Artificial Sequence
  Synthetic
ucucucgauagaagcuaaag

SEQ ID NO: 700491 - RNA, 20 nt, Artificial Sequence
  Synthetic
agaucaccgcauagcuaaag

SEQ ID NO: 700492 - RNA, 20 nt, Artificial Sequence
  Synthetic
caaugagaagaccgguaaag

SEQ ID NO: 700493 - RNA, 20 nt, Artificial Sequence
  Synthetic
caccaacucacccguuaaag

SEQ ID NO: 700494 - RNA, 20 nt, Artificial Sequence
  Synthetic
uguuugaagcugauuuaaag

SEQ ID NO: 700495 - RNA, 20 nt, Artificial Sequence
  Synthetic
uuuacagggaguguuuaaag

SEQ ID NO: 700496 - RNA, 20 nt, Artificial Sequence
  Synthetic
ucaaaguugucaaccacaag

SEQ ID NO: 700497 - RNA, 20 nt, Artificial Sequence
  Synthetic
cuugcgucacucuucacaag

SEQ ID NO: 700498 - RNA, 20 nt, Artificial Sequence
  Synthetic
cuauaaacaaaugugacaag

SEQ ID NO: 700499 - RNA, 20 nt, Artificial Sequence
  Synthetic
ugauuuggucgaggcccaag

SEQ ID NO: 700500 - RNA, 20 nt, Artificial Sequence
  Synthetic
cuucagucaaucaugccaag

SEQ ID NO: 700501 - RNA, 20 nt, Artificial Sequence
  Synthetic
aguguugugcuuaugccaag

SEQ ID NO: 700502 - RNA, 20 nt, Artificial Sequence
  Synthetic
uugagaguauguucuccaag

SEQ ID NO: 700503 - RNA, 20 nt, Artificial Sequence
  Synthetic
aaguuugaguacagagcaag

SEQ ID NO: 700504 - RNA, 20 nt, Artificial Sequence
  Synthetic
aagcguccaugaauagcaag

SEQ ID NO: 700505 - RNA, 20 nt, Artificial Sequence
  Synthetic
ccuuagggucacuuagcaag

SEQ ID NO: 700506 - RNA, 20 nt, Artificial Sequence
  Synthetic
ugacggaggaauuuagcaag

SEQ ID NO: 700507 - RNA, 20 nt, Artificial Sequence
  Synthetic
cuugugaagagugacgcaag

SEQ ID NO: 700508 - RNA, 20 nt, Artificial Sequence
  Synthetic
cucugcucggguuucgcaag

SEQ ID NO: 700509 - RNA, 20 nt, Artificial Sequence
  Synthetic
cuauuccuuccgggggcaag

SEQ ID NO: 700510 - RNA, 20 nt, Artificial Sequence
  Synthetic
acuacgugcaaaauggcaag

SEQ ID NO: 700511 - RNA, 20 nt, Artificial Sequence
  Synthetic
ugccuguauaacuuggcaag

SEQ ID NO: 700512 - RNA, 20 nt, Artificial Sequence
  Synthetic
ccuuuuagauucccugcaag

SEQ ID NO: 700513 - RNA, 20 nt, Artificial Sequence
  Synthetic
auguuagaggauggugcaag

SEQ ID NO: 700514 - RNA, 20 nt, Artificial Sequence
  Synthetic
ucacuccacacuggugcaag

SEQ ID NO: 700515 - RNA, 20 nt, Artificial Sequence
  Synthetic
acgaagauacuacuugcaag

SEQ ID NO: 700516 - RNA, 20 nt, Artificial Sequence
  Synthetic
uaacccauucauuuugcaag

SEQ ID NO: 700517 - RNA, 20 nt, Artificial Sequence
  Synthetic
accacuaauuccuuaucaag

SEQ ID NO: 700518 - RNA, 20 nt, Artificial Sequence
  Synthetic
ccucuugacugacccucaag

SEQ ID NO: 700519 - RNA, 20 nt, Artificial Sequence
  Synthetic
uuucguaagcugaucucaag

SEQ ID NO: 700520 - RNA, 20 nt, Artificial Sequence
  Synthetic
ccucuugagggucagucaag

SEQ ID NO: 700521 - RNA, 20 nt, Artificial Sequence
  Synthetic
aaucuauaagacgagucaag

SEQ ID NO: 700522 - RNA, 20 nt, Artificial Sequence
  Synthetic
aaacaacacguauagucaag

SEQ ID NO: 700523 - RNA, 20 nt, Artificial Sequence
  Synthetic
uagagaucaugccauucaag

SEQ ID NO: 700524 - RNA, 20 nt, Artificial Sequence
  Synthetic
ccauaacuuuuaccaagaag

SEQ ID NO: 700525 - RNA, 20 nt, Artificial Sequence
  Synthetic
cgaggaaacgaauacagaag

SEQ ID NO: 700526 - RNA, 20 nt, Artificial Sequence
  Synthetic
caaaguuuggccaucagaag

SEQ ID NO: 700527 - RNA, 20 nt, Artificial Sequence
  Synthetic
ccgaaacagaucuucagaag

SEQ ID NO: 700528 - RNA, 20 nt, Artificial Sequence
  Synthetic
ccaguuuuuguugauagaag

SEQ ID NO: 700529 - RNA, 20 nt, Artificial Sequence
  Synthetic
aaugugccucaaucuagaag

SEQ ID NO: 700530 - RNA, 20 nt, Artificial Sequence
  Synthetic
uacccuuuugacggccgaag

SEQ ID NO: 700531 - RNA, 20 nt, Artificial Sequence
  Synthetic
augcuuguagguuuccgaag

SEQ ID NO: 700532 - RNA, 20 nt, Artificial Sequence
  Synthetic
acuggcguaauauugcgaag

SEQ ID NO: 700533 - RNA, 20 nt, Artificial Sequence
  Synthetic
uacuuaaugucagcucgaag

SEQ ID NO: 700534 - RNA, 20 nt, Artificial Sequence
  Synthetic
uacauccgauugggaggaag

SEQ ID NO: 700535 - RNA, 20 nt, Artificial Sequence
  Synthetic
acacuguugagccuaggaag

SEQ ID NO: 700536 - RNA, 20 nt, Artificial Sequence
  Synthetic
cuacauggaaacagcggaag

SEQ ID NO: 700537 - RNA, 20 nt, Artificial Sequence
  Synthetic
ccuugcaaauuuuggggaag

SEQ ID NO: 700538 - RNA, 20 nt, Artificial Sequence
  Synthetic
auccaugugugguaaugaag

SEQ ID NO: 700539 - RNA, 20 nt, Artificial Sequence
  Synthetic
auuucagcggaauagugaag

SEQ ID NO: 700540 - RNA, 20 nt, Artificial Sequence
  Synthetic
caagguacauuucgcauaag

SEQ ID NO: 700541 - RNA, 20 nt, Artificial Sequence
  Synthetic
agagaauucgucuugauaag

SEQ ID NO: 700542 - RNA, 20 nt, Artificial Sequence
  Synthetic
ccuuuggacguacauauaag

SEQ ID NO: 700543 - RNA, 20 nt, Artificial Sequence
  Synthetic
ugcccauuugagaguauaag

SEQ ID NO: 700544 - RNA, 20 nt, Artificial Sequence
  Synthetic
aaucaacaguguuguauaag

SEQ ID NO: 700545 - RNA, 20 nt, Artificial Sequence
  Synthetic
aucacauaugguccacuaag

SEQ ID NO: 700546 - RNA, 20 nt, Artificial Sequence
  Synthetic
caccacaagcaaacccuaag

SEQ ID NO: 700547 - RNA, 20 nt, Artificial Sequence
  Synthetic
ucuaccaccccaaagcuaag

SEQ ID NO: 700548 - RNA, 20 nt, Artificial Sequence
  Synthetic
uuuguuacuggauagcuaag

SEQ ID NO: 700549 - RNA, 20 nt, Artificial Sequence
  Synthetic
uacaauauguacuagcuaag

SEQ ID NO: 700550 - RNA, 20 nt, Artificial Sequence
  Synthetic
cgggcuacucuuacgcuaag

SEQ ID NO: 700551 - RNA, 20 nt, Artificial Sequence
  Synthetic
cuuaugcgcugucuucuaag

SEQ ID NO: 700552 - RNA, 20 nt, Artificial Sequence
  Synthetic
aacuugccauaucacguaag

SEQ ID NO: 700553 - RNA, 20 nt, Artificial Sequence
  Synthetic
uagcuguauguauacguaag

SEQ ID NO: 700554 - RNA, 20 nt, Artificial Sequence
  Synthetic
auucuaauagcagugguaag

SEQ ID NO: 700555 - RNA, 20 nt, Artificial Sequence
  Synthetic
cgauagaaaaugcaauuaag

SEQ ID NO: 700556 - RNA, 20 nt, Artificial Sequence
  Synthetic
augcugagguccggauuaag

SEQ ID NO: 700557 - RNA, 20 nt, Artificial Sequence
  Synthetic
ccaaauuugguaggcuuaag

SEQ ID NO: 700558 - RNA, 20 nt, Artificial Sequence
  Synthetic
aggagugaacauugcuuaag

SEQ ID NO: 700559 - RNA, 20 nt, Artificial Sequence
  Synthetic
aguuuagaaaggggguuaag

SEQ ID NO: 700560 - RNA, 20 nt, Artificial Sequence
  Synthetic
ucuaagacgaggguguuaag

SEQ ID NO: 700561 - RNA, 20 nt, Artificial Sequence
  Synthetic
cucugcagcuguacuuuaag

SEQ ID NO: 700562 - RNA, 20 nt, Artificial Sequence
  Synthetic
uucggaacuucugcuuuaag

SEQ ID NO: 700563 - RNA, 20 nt, Artificial Sequence
  Synthetic
cggaaccauauggguuuaag

SEQ ID NO: 700564 - RNA, 20 nt, Artificial Sequence
  Synthetic
ugucaugggcugacaaacag

SEQ ID NO: 700565 - RNA, 20 nt, Artificial Sequence
  Synthetic
acaguauacgaaggaaacag

SEQ ID NO: 700566 - RNA, 20 nt, Artificial Sequence
  Synthetic
cuuacaguuuugaccaacag

SEQ ID NO: 700567 - RNA, 20 nt, Artificial Sequence
  Synthetic
cucaaucguugccccaacag

SEQ ID NO: 700568 - RNA, 20 nt, Artificial Sequence
  Synthetic
uauaacaaagcaucgaacag

SEQ ID NO: 700569 - RNA, 20 nt, Artificial Sequence
  Synthetic
uaacaauaugaugguaacag

SEQ ID NO: 700570 - RNA, 20 nt, Artificial Sequence
  Synthetic
aacuacuacucuauuaacag

SEQ ID NO: 700571 - RNA, 20 nt, Artificial Sequence
  Synthetic
cuuuguaacuugguuaacag

SEQ ID NO: 700572 - RNA, 20 nt, Artificial Sequence
  Synthetic
aucgcuuugauuuuuaacag

SEQ ID NO: 700573 - RNA, 20 nt, Artificial Sequence
  Synthetic
uacugauaauccacucacag

SEQ ID NO: 700574 - RNA, 20 nt, Artificial Sequence
  Synthetic
ccuucacacuuccgagacag

SEQ ID NO: 700575 - RNA, 20 nt, Artificial Sequence
  Synthetic
uucaagaaaggccacgacag

SEQ ID NO: 700576 - RNA, 20 nt, Artificial Sequence
  Synthetic
auuuacuacuaaggggacag

SEQ ID NO: 700577 - RNA, 20 nt, Artificial Sequence
  Synthetic
ugaucuguauugggggacag

SEQ ID NO: 700578 - RNA, 20 nt, Artificial Sequence
  Synthetic
aggaaccugaauagugacag

SEQ ID NO: 700579 - RNA, 20 nt, Artificial Sequence
  Synthetic
acauugccgauaauugacag

SEQ ID NO: 700580 - RNA, 20 nt, Artificial Sequence
  Synthetic
uagcuaaaccuuaaauacag

SEQ ID NO: 700581 - RNA, 20 nt, Artificial Sequence
  Synthetic
caguaguucccuuaguacag

SEQ ID NO: 700582 - RNA, 20 nt, Artificial Sequence
  Synthetic
ccaucguauauuuaguacag

SEQ ID NO: 700583 - RNA, 20 nt, Artificial Sequence
  Synthetic
cuauaucuaaucagguacag

SEQ ID NO: 700584 - RNA, 20 nt, Artificial Sequence
  Synthetic
auuucagggaugacuuacag

SEQ ID NO: 700585 - RNA, 20 nt, Artificial Sequence
  Synthetic
aucuauuauccuccaaccag

SEQ ID NO: 700586 - RNA, 20 nt, Artificial Sequence
  Synthetic
uucuguauagauuuaaccag

SEQ ID NO: 700587 - RNA, 20 nt, Artificial Sequence
  Synthetic
auuucuaacucggacaccag

SEQ ID NO: 700588 - RNA, 20 nt, Artificial Sequence
  Synthetic
uuuagguaugccaccaccag

SEQ ID NO: 700589 - RNA, 20 nt, Artificial Sequence
  Synthetic
ucacaagccucauccaccag

SEQ ID NO: 700590 - RNA, 20 nt, Artificial Sequence
  Synthetic
auuaaacuccacuagaccag

SEQ ID NO: 700591 - RNA, 20 nt, Artificial Sequence
  Synthetic
uguaaugcccuauggaccag

SEQ ID NO: 700592 - RNA, 20 nt, Artificial Sequence
  Synthetic
uuagucuaaaugcauaccag

SEQ ID NO: 700593 - RNA, 20 nt, Artificial Sequence
  Synthetic
ccuaaauugggcuaacccag

SEQ ID NO: 700594 - RNA, 20 nt, Artificial Sequence
  Synthetic
ucugauauauuaaggcccag

SEQ ID NO: 700595 - RNA, 20 nt, Artificial Sequence
  Synthetic
uuacuaacuauaaugcccag

SEQ ID NO: 700596 - RNA, 20 nt, Artificial Sequence
  Synthetic
ugacugccgaguaaucccag

SEQ ID NO: 700597 - RNA, 20 nt, Artificial Sequence
  Synthetic
aauagaugcuuagaucccag

SEQ ID NO: 700598 - RNA, 20 nt, Artificial Sequence
  Synthetic
agguuacgacgugaucccag

SEQ ID NO: 700599 - RNA, 20 nt, Artificial Sequence
  Synthetic
cgguagcuaccuacagccag

SEQ ID NO: 700600 - RNA, 20 nt, Artificial Sequence
  Synthetic
uggccaaagaccuccgccag

SEQ ID NO: 700601 - RNA, 20 nt, Artificial Sequence
  Synthetic
aucaaguaggcccucgccag

SEQ ID NO: 700602 - RNA, 20 nt, Artificial Sequence
  Synthetic
aauguaaucccaguauccag

SEQ ID NO: 700603 - RNA, 20 nt, Artificial Sequence
  Synthetic
auaugaauugcccccuccag

SEQ ID NO: 700604 - RNA, 20 nt, Artificial Sequence
  Synthetic
accauaccuuuugccuccag

SEQ ID NO: 700605 - RNA, 20 nt, Artificial Sequence
  Synthetic
caauaccauuugcgcuccag

SEQ ID NO: 700606 - RNA, 20 nt, Artificial Sequence
  Synthetic
uaggacuaagauauguccag

SEQ ID NO: 700607 - RNA, 20 nt, Artificial Sequence
  Synthetic
auuuauucguuuuuguccag

SEQ ID NO: 700608 - RNA, 20 nt, Artificial Sequence
  Synthetic
uuccucacaagacauuccag

SEQ ID NO: 700609 - RNA, 20 nt, Artificial Sequence
  Synthetic
uaccauguauguuauuccag

SEQ ID NO: 700610 - RNA, 20 nt, Artificial Sequence
  Synthetic
acuagaaguaacacaagcag

SEQ ID NO: 700611 - RNA, 20 nt, Artificial Sequence
  Synthetic
uagggggcucccauaagcag

SEQ ID NO: 700612 - RNA, 20 nt, Artificial Sequence
  Synthetic
uucagacauggcauaagcag

SEQ ID NO: 700613 - RNA, 20 nt, Artificial Sequence
  Synthetic
aaagguucuguguuaagcag

SEQ ID NO: 700614 - RNA, 20 nt, Artificial Sequence
  Synthetic
caacaguuccguuuaagcag

SEQ ID NO: 700615 - RNA, 20 nt, Artificial Sequence
  Synthetic
aguguugugugacucagcag

SEQ ID NO: 700616 - RNA, 20 nt, Artificial Sequence
  Synthetic
cuacucucuuuuaggagcag

SEQ ID NO: 700617 - RNA, 20 nt, Artificial Sequence
  Synthetic
cguuuuugcccauugagcag

SEQ ID NO: 700618 - RNA, 20 nt, Artificial Sequence
  Synthetic
aaggaaggggaauaucgcag

SEQ ID NO: 700619 - RNA, 20 nt, Artificial Sequence
  Synthetic
uugauuggacugucucgcag

SEQ ID NO: 700620 - RNA, 20 nt, Artificial Sequence
  Synthetic
cauuaagucguguguggcag

SEQ ID NO: 700621 - RNA, 20 nt, Artificial Sequence
  Synthetic
uaagaugcaacgcaaugcag

SEQ ID NO: 700622 - RNA, 20 nt, Artificial Sequence
  Synthetic
aucauuauucagacaugcag

SEQ ID NO: 700623 - RNA, 20 nt, Artificial Sequence
  Synthetic
uacacuagugcugcaugcag

SEQ ID NO: 700624 - RNA, 20 nt, Artificial Sequence
  Synthetic
cgugcgcuaggggggugcag

SEQ ID NO: 700625 - RNA, 20 nt, Artificial Sequence
  Synthetic
ccuguaauacuccauugcag

SEQ ID NO: 700626 - RNA, 20 nt, Artificial Sequence
  Synthetic
uauagaagacacgauugcag

SEQ ID NO: 700627 - RNA, 20 nt, Artificial Sequence
  Synthetic
ucacaaaauuagcuuugcag

SEQ ID NO: 700628 - RNA, 20 nt, Artificial Sequence
  Synthetic
accagcuauuccaaaaucag

SEQ ID NO: 700629 - RNA, 20 nt, Artificial Sequence
  Synthetic
ugcaagugaaguucaaucag

SEQ ID NO: 700630 - RNA, 20 nt, Artificial Sequence
  Synthetic
cagcccgugcugauaaucag

SEQ ID NO: 700631 - RNA, 20 nt, Artificial Sequence
  Synthetic
uuaauagugcuaguaaucag

SEQ ID NO: 700632 - RNA, 20 nt, Artificial Sequence
  Synthetic
aaguuaaaucaucccaucag

SEQ ID NO: 700633 - RNA, 20 nt, Artificial Sequence
  Synthetic
cacuaguagaucacgaucag

SEQ ID NO: 700634 - RNA, 20 nt, Artificial Sequence
  Synthetic
uaauagcuguucacgaucag

SEQ ID NO: 700635 - RNA, 20 nt, Artificial Sequence
  Synthetic
uucucugaccuggauaucag

SEQ ID NO: 700636 - RNA, 20 nt, Artificial Sequence
  Synthetic
aaagugcuuuuaccuaucag

SEQ ID NO: 700637 - RNA, 20 nt, Artificial Sequence
  Synthetic
accagcucaaaacguaucag

SEQ ID NO: 700638 - RNA, 20 nt, Artificial Sequence
  Synthetic
agugcuaaggauucacucag

SEQ ID NO: 700639 - RNA, 20 nt, Artificial Sequence
  Synthetic
uaaaaaggacgcccccucag

SEQ ID NO: 700640 - RNA, 20 nt, Artificial Sequence
  Synthetic
acaaccagguuaucccucag

SEQ ID NO: 700641 - RNA, 20 nt, Artificial Sequence
  Synthetic
uuuggcccgcguggucucag

SEQ ID NO: 700642 - RNA, 20 nt, Artificial Sequence
  Synthetic
ccacguauuauuugucucag

SEQ ID NO: 700643 - RNA, 20 nt, Artificial Sequence
  Synthetic
agaaauacuuagcgagucag

SEQ ID NO: 700644 - RNA, 20 nt, Artificial Sequence
  Synthetic
ccuuugagcaauagugucag

SEQ ID NO: 700645 - RNA, 20 nt, Artificial Sequence
  Synthetic
uggcgaaguauuuaauucag

SEQ ID NO: 700646 - RNA, 20 nt, Artificial Sequence
  Synthetic
auggguggugccugauucag

SEQ ID NO: 700647 - RNA, 20 nt, Artificial Sequence
  Synthetic
auuagcugaagcauauucag

SEQ ID NO: 700648 - RNA, 20 nt, Artificial Sequence
  Synthetic
aagagguugcacgacuucag

SEQ ID NO: 700649 - RNA, 20 nt, Artificial Sequence
  Synthetic
acgauauaucucaaguucag

SEQ ID NO: 700650 - RNA, 20 nt, Artificial Sequence
  Synthetic
cuuccgagaccccauuucag

SEQ ID NO: 700651 - RNA, 20 nt, Artificial Sequence
  Synthetic
cggccucaucagauuuucag

SEQ ID NO: 700652 - RNA, 20 nt, Artificial Sequence
  Synthetic
ucaaugaaaaucgacaagag

SEQ ID NO: 700653 - RNA, 20 nt, Artificial Sequence
  Synthetic
caauguagaauggccaagag

SEQ ID NO: 700654 - RNA, 20 nt, Artificial Sequence
  Synthetic
aguaacuccggagggaagag

SEQ ID NO: 700655 - RNA, 20 nt, Artificial Sequence
  Synthetic
ccaaguaaugaaccuaagag

SEQ ID NO: 700656 - RNA, 20 nt, Artificial Sequence
  Synthetic
uuucccuauccacaccagag

SEQ ID NO: 700657 - RNA, 20 nt, Artificial Sequence
  Synthetic
uagagaagguccccgcagag

SEQ ID NO: 700658 - RNA, 20 nt, Artificial Sequence
  Synthetic
auuacauagauauggcagag

SEQ ID NO: 700659 - RNA, 20 nt, Artificial Sequence
  Synthetic
cuucaugcaugcaugcagag

SEQ ID NO: 700660 - RNA, 20 nt, Artificial Sequence
  Synthetic
acuggacgugcagugcagag

SEQ ID NO: 700661 - RNA, 20 nt, Artificial Sequence
  Synthetic
aauuucaacagcgaagagag

SEQ ID NO: 700662 - RNA, 20 nt, Artificial Sequence
  Synthetic
aggccauauauucccgagag

SEQ ID NO: 700663 - RNA, 20 nt, Artificial Sequence
  Synthetic
cauauaucacucaaggagag

SEQ ID NO: 700664 - RNA, 20 nt, Artificial Sequence
  Synthetic
uguauguguugaccauagag

SEQ ID NO: 700665 - RNA, 20 nt, Artificial Sequence
  Synthetic
uuacugugagguagauagag

SEQ ID NO: 700666 - RNA, 20 nt, Artificial Sequence
  Synthetic
ucaccuaaggccagcuagag

SEQ ID NO: 700667 - RNA, 20 nt, Artificial Sequence
  Synthetic
ccuucauccaaagguuagag

SEQ ID NO: 700668 - RNA, 20 nt, Artificial Sequence
  Synthetic
auacauucacugccaacgag

SEQ ID NO: 700669 - RNA, 20 nt, Artificial Sequence
  Synthetic
cuaauggauuguugaacgag

SEQ ID NO: 700670 - RNA, 20 nt, Artificial Sequence
  Synthetic
uuagugaucguggauacgag

SEQ ID NO: 700671 - RNA, 20 nt, Artificial Sequence
  Synthetic
cuaaacagaacuuauacgag

SEQ ID NO: 700672 - RNA, 20 nt, Artificial Sequence
  Synthetic
cuuaucagaacuccuacgag

SEQ ID NO: 700673 - RNA, 20 nt, Artificial Sequence
  Synthetic
aaaaacuggagcuaaccgag

SEQ ID NO: 700674 - RNA, 20 nt, Artificial Sequence
  Synthetic
aaucaauuuugggaaucgag

SEQ ID NO: 700675 - RNA, 20 nt, Artificial Sequence
  Synthetic
agcuuuccccuaccaucgag

SEQ ID NO: 700676 - RNA, 20 nt, Artificial Sequence
  Synthetic
caucuauguugcuauucgag

SEQ ID NO: 700677 - RNA, 20 nt, Artificial Sequence
  Synthetic
uggggauuaacaucuucgag

SEQ ID NO: 700678 - RNA, 20 nt, Artificial Sequence
  Synthetic
ucuuuaacucucccaaggag

SEQ ID NO: 700679 - RNA, 20 nt, Artificial Sequence
  Synthetic
aguaacccauaucccaggag

SEQ ID NO: 700680 - RNA, 20 nt, Artificial Sequence
  Synthetic
uucauauggcuaaaacggag

SEQ ID NO: 700681 - RNA, 20 nt, Artificial Sequence
  Synthetic
aauauucucagguuucggag

SEQ ID NO: 700682 - RNA, 20 nt, Artificial Sequence
  Synthetic
ucacuugcggcccuagggag

SEQ ID NO: 700683 - RNA, 20 nt, Artificial Sequence
  Synthetic
cuuauccuagaaucugggag

SEQ ID NO: 700684 - RNA, 20 nt, Artificial Sequence
  Synthetic
auacguauagucacauggag

SEQ ID NO: 700685 - RNA, 20 nt, Artificial Sequence
  Synthetic
uauaauagcauucuguggag

SEQ ID NO: 700686 - RNA, 20 nt, Artificial Sequence
  Synthetic
uacacaaucuugcauuggag

SEQ ID NO: 700687 - RNA, 20 nt, Artificial Sequence
  Synthetic
agguauccuguucauuggag

SEQ ID NO: 700688 - RNA, 20 nt, Artificial Sequence
  Synthetic
uuuggccacucuauuuggag

SEQ ID NO: 700689 - RNA, 20 nt, Artificial Sequence
  Synthetic
agcacucuuaucucaaugag

SEQ ID NO: 700690 - RNA, 20 nt, Artificial Sequence
  Synthetic
uagguuggaaguaagaugag

SEQ ID NO: 700691 - RNA, 20 nt, Artificial Sequence
  Synthetic
uguaaucauuuaguuaugag

SEQ ID NO: 700692 - RNA, 20 nt, Artificial Sequence
  Synthetic
ucuaauagacaauaccugag

SEQ ID NO: 700693 - RNA, 20 nt, Artificial Sequence
  Synthetic
uguuuacuccccacggugag

SEQ ID NO: 700694 - RNA, 20 nt, Artificial Sequence
  Synthetic
uagauaugggauugggugag

SEQ ID NO: 700695 - RNA, 20 nt, Artificial Sequence
  Synthetic
aaaugcuacaaugaugugag

SEQ ID NO: 700696 - RNA, 20 nt, Artificial Sequence
  Synthetic
uuaaagacgaucucugugag

SEQ ID NO: 700697 - RNA, 20 nt, Artificial Sequence
  Synthetic
uaagcccgaucauuauugag

SEQ ID NO: 700698 - RNA, 20 nt, Artificial Sequence
  Synthetic
cgacaaguaaaucaguugag

SEQ ID NO: 700699 - RNA, 20 nt, Artificial Sequence
  Synthetic
ucaugcauugcuugguugag

SEQ ID NO: 700700 - RNA, 20 nt, Artificial Sequence
  Synthetic
aacgaguuacugaaaaauag

SEQ ID NO: 700701 - RNA, 20 nt, Artificial Sequence
  Synthetic
cuggauuagcgaugaaauag

SEQ ID NO: 700702 - RNA, 20 nt, Artificial Sequence
  Synthetic
auaccagaucuuguaaauag

SEQ ID NO: 700703 - RNA, 20 nt, Artificial Sequence
  Synthetic
uccccacuuaaauccaauag

SEQ ID NO: 700704 - RNA, 20 nt, Artificial Sequence
  Synthetic
aagcccuuccuauucaauag

SEQ ID NO: 700705 - RNA, 20 nt, Artificial Sequence
  Synthetic
ccuagcaucaccuucaauag

SEQ ID NO: 700706 - RNA, 20 nt, Artificial Sequence
  Synthetic
ugcggggccacugcgaauag

SEQ ID NO: 700707 - RNA, 20 nt, Artificial Sequence
  Synthetic
uggguggcucgaaggaauag

SEQ ID NO: 700708 - RNA, 20 nt, Artificial Sequence
  Synthetic
uaagcuuagugagugaauag

SEQ ID NO: 700709 - RNA, 20 nt, Artificial Sequence
  Synthetic
uccuucguugaagauaauag

SEQ ID NO: 700710 - RNA, 20 nt, Artificial Sequence
  Synthetic
caagggagggaguuuaauag

SEQ ID NO: 700711 - RNA, 20 nt, Artificial Sequence
  Synthetic
aucugcguuuagacacauag

SEQ ID NO: 700712 - RNA, 20 nt, Artificial Sequence
  Synthetic
agcccgucucggggacauag

SEQ ID NO: 700713 - RNA, 20 nt, Artificial Sequence
  Synthetic
acaucagauguauaccauag

SEQ ID NO: 700714 - RNA, 20 nt, Artificial Sequence
  Synthetic
aagguggagagcuuccauag

SEQ ID NO: 700715 - RNA, 20 nt, Artificial Sequence
  Synthetic
aggcuagcauaguuccauag

SEQ ID NO: 700716 - RNA, 20 nt, Artificial Sequence
  Synthetic
aagcaacuuggucaucauag

SEQ ID NO: 700717 - RNA, 20 nt, Artificial Sequence
  Synthetic
acauucuuucaugaucauag

SEQ ID NO: 700718 - RNA, 20 nt, Artificial Sequence
  Synthetic
cuucuuguaacccaagauag

SEQ ID NO: 700719 - RNA, 20 nt, Artificial Sequence
  Synthetic
uuuaggugccuguuagauag

SEQ ID NO: 700720 - RNA, 20 nt, Artificial Sequence
  Synthetic
acucgugguuuccucgauag

SEQ ID NO: 700721 - RNA, 20 nt, Artificial Sequence
  Synthetic
acagacugugcacaugauag

SEQ ID NO: 700722 - RNA, 20 nt, Artificial Sequence
  Synthetic
ugaugccaaacauccuauag

SEQ ID NO: 700723 - RNA, 20 nt, Artificial Sequence
  Synthetic
caugaguguuauuccuauag

SEQ ID NO: 700724 - RNA, 20 nt, Artificial Sequence
  Synthetic
ccuggauggccuuccuauag

SEQ ID NO: 700725 - RNA, 20 nt, Artificial Sequence
  Synthetic
auugaagacaaccucuauag

SEQ ID NO: 700726 - RNA, 20 nt, Artificial Sequence
  Synthetic
aguauuaagauacuaacuag

SEQ ID NO: 700727 - RNA, 20 nt, Artificial Sequence
  Synthetic
ucuaugguuugaagcacuag

SEQ ID NO: 700728 - RNA, 20 nt, Artificial Sequence
  Synthetic
uggccaaccccuaagacuag

SEQ ID NO: 700729 - RNA, 20 nt, Artificial Sequence
  Synthetic
aucucuugcagcaaaccuag

SEQ ID NO: 700730 - RNA, 20 nt, Artificial Sequence
  Synthetic
cgguagccugaaacaccuag

SEQ ID NO: 700731 - RNA, 20 nt, Artificial Sequence
  Synthetic
aaccuggaaauacgaccuag

SEQ ID NO: 700732 - RNA, 20 nt, Artificial Sequence
  Synthetic
aguuugcucuagauaccuag

SEQ ID NO: 700733 - RNA, 20 nt, Artificial Sequence
  Synthetic
ugggcacaagaacuaccuag

SEQ ID NO: 700734 - RNA, 20 nt, Artificial Sequence
  Synthetic
acuaccgauuauguaccuag

SEQ ID NO: 700735 - RNA, 20 nt, Artificial Sequence
  Synthetic
aauaguagccccuacccuag

SEQ ID NO: 700736 - RNA, 20 nt, Artificial Sequence
  Synthetic
cguucaucauguugcccuag

SEQ ID NO: 700737 - RNA, 20 nt, Artificial Sequence
  Synthetic
uaaauguugcuauucccuag

SEQ ID NO: 700738 - RNA, 20 nt, Artificial Sequence
  Synthetic
cgggucaaugcaaaagcuag

SEQ ID NO: 700739 - RNA, 20 nt, Artificial Sequence
  Synthetic
cauuuaggauuuggagcuag

SEQ ID NO: 700740 - RNA, 20 nt, Artificial Sequence
  Synthetic
ucagcuaaugggugggcuag

SEQ ID NO: 700741 - RNA, 20 nt, Artificial Sequence
  Synthetic
uguucacgaucaguggcuag

SEQ ID NO: 700742 - RNA, 20 nt, Artificial Sequence
  Synthetic
ccuuggaggacgguggcuag

SEQ ID NO: 700743 - RNA, 20 nt, Artificial Sequence
  Synthetic
acuagcucccuugaugcuag

SEQ ID NO: 700744 - RNA, 20 nt, Artificial Sequence
  Synthetic
uauaguacugcugaaucuag

SEQ ID NO: 700745 - RNA, 20 nt, Artificial Sequence
  Synthetic
cagcaguuagaggcaucuag

SEQ ID NO: 700746 - RNA, 20 nt, Artificial Sequence
  Synthetic
ucuaacaauaugggcucuag

SEQ ID NO: 700747 - RNA, 20 nt, Artificial Sequence
  Synthetic
cucaaaagccaauagucuag

SEQ ID NO: 700748 - RNA, 20 nt, Artificial Sequence
  Synthetic
caucccagugugcggucuag

SEQ ID NO: 700749 - RNA, 20 nt, Artificial Sequence
  Synthetic
ugugucauaguacauucuag

SEQ ID NO: 700750 - RNA, 20 nt, Artificial Sequence
  Synthetic
uuguuaagaucucaaaguag

SEQ ID NO: 700751 - RNA, 20 nt, Artificial Sequence
  Synthetic
cccucggauucuauaaguag

SEQ ID NO: 700752 - RNA, 20 nt, Artificial Sequence
  Synthetic
augaagggccauguaaguag

SEQ ID NO: 700753 - RNA, 20 nt, Artificial Sequence
  Synthetic
ucaguuuaaugguuaaguag

SEQ ID NO: 700754 - RNA, 20 nt, Artificial Sequence
  Synthetic
ucccacuuaugcaagaguag

SEQ ID NO: 700755 - RNA, 20 nt, Artificial Sequence
  Synthetic
agaguuuauagauagaguag

SEQ ID NO: 700756 - RNA, 20 nt, Artificial Sequence
  Synthetic
ucauguggacuauauaguag

SEQ ID NO: 700757 - RNA, 20 nt, Artificial Sequence
  Synthetic
ucgccaaguagacaacguag

SEQ ID NO: 700758 - RNA, 20 nt, Artificial Sequence
  Synthetic
aguacggagcuaucacguag

SEQ ID NO: 700759 - RNA, 20 nt, Artificial Sequence
  Synthetic
caugcaauauauacccguag

SEQ ID NO: 700760 - RNA, 20 nt, Artificial Sequence
  Synthetic
aaaagccauuuggcggguag

SEQ ID NO: 700761 - RNA, 20 nt, Artificial Sequence
  Synthetic
uccuuuacuaccugggguag

SEQ ID NO: 700762 - RNA, 20 nt, Artificial Sequence
  Synthetic
agaaccccgcucgaugguag

SEQ ID NO: 700763 - RNA, 20 nt, Artificial Sequence
  Synthetic
uagcuggagaucagugguag

SEQ ID NO: 700764 - RNA, 20 nt, Artificial Sequence
  Synthetic
cccucaugagaaguugguag

SEQ ID NO: 700765 - RNA, 20 nt, Artificial Sequence
  Synthetic
uuaucgaaaacggaauguag

SEQ ID NO: 700766 - RNA, 20 nt, Artificial Sequence
  Synthetic
cauggaggcaggcuauguag

SEQ ID NO: 700767 - RNA, 20 nt, Artificial Sequence
  Synthetic
uaccacccucagaacuguag

SEQ ID NO: 700768 - RNA, 20 nt, Artificial Sequence
  Synthetic
accuacgucuaccccuguag

SEQ ID NO: 700769 - RNA, 20 nt, Artificial Sequence
  Synthetic
uucuuggggucaacguguag

SEQ ID NO: 700770 - RNA, 20 nt, Artificial Sequence
  Synthetic
cagccauggagucuguguag

SEQ ID NO: 700771 - RNA, 20 nt, Artificial Sequence
  Synthetic
aucuggagaugcaauuguag

SEQ ID NO: 700772 - RNA, 20 nt, Artificial Sequence
  Synthetic
cugccuuguauccuuuguag

SEQ ID NO: 700773 - RNA, 20 nt, Artificial Sequence
  Synthetic
cauguccaaacuguuuguag

SEQ ID NO: 700774 - RNA, 20 nt, Artificial Sequence
  Synthetic
aauggaggacugucaauuag

SEQ ID NO: 700775 - RNA, 20 nt, Artificial Sequence
  Synthetic
aagcguagugugcagauuag

SEQ ID NO: 700776 - RNA, 20 nt, Artificial Sequence
  Synthetic
auccuggcuugguagauuag

SEQ ID NO: 700777 - RNA, 20 nt, Artificial Sequence
  Synthetic
aucacaugauggacgauuag

SEQ ID NO: 700778 - RNA, 20 nt, Artificial Sequence
  Synthetic
caaauuggcgucucuauuag

SEQ ID NO: 700779 - RNA, 20 nt, Artificial Sequence
  Synthetic
ccauacugcauuccacuuag

SEQ ID NO: 700780 - RNA, 20 nt, Artificial Sequence
  Synthetic
aauguauccuagagacuuag

SEQ ID NO: 700781 - RNA, 20 nt, Artificial Sequence
  Synthetic
cuaauaggcucuuuacuuag

SEQ ID NO: 700782 - RNA, 20 nt, Artificial Sequence
  Synthetic
aaugguggucaaccccuuag

SEQ ID NO: 700783 - RNA, 20 nt, Artificial Sequence
  Synthetic
auccuggcgugaucgcuuag

SEQ ID NO: 700784 - RNA, 20 nt, Artificial Sequence
  Synthetic
agcacucuauuuuggcuuag

SEQ ID NO: 700785 - RNA, 20 nt, Artificial Sequence
  Synthetic
aagcuguauaacgugcuuag

SEQ ID NO: 700786 - RNA, 20 nt, Artificial Sequence
  Synthetic
agucaaccauuagaucuuag

SEQ ID NO: 700787 - RNA, 20 nt, Artificial Sequence
  Synthetic
uucccaaccccuagucuuag

SEQ ID NO: 700788 - RNA, 20 nt, Artificial Sequence
  Synthetic
auauacuuguggcuaguuag

SEQ ID NO: 700789 - RNA, 20 nt, Artificial Sequence
  Synthetic
ucccaaacugugcacguuag

SEQ ID NO: 700790 - RNA, 20 nt, Artificial Sequence
  Synthetic
uguaugagagcaggcguuag

SEQ ID NO: 700791 - RNA, 20 nt, Artificial Sequence
  Synthetic
auuuaucaacaacugguuag

SEQ ID NO: 700792 - RNA, 20 nt, Artificial Sequence
  Synthetic
uguauucaacuucguguuag

SEQ ID NO: 700793 - RNA, 20 nt, Artificial Sequence
  Synthetic
uguugacucuaagaauuuag

SEQ ID NO: 700794 - RNA, 20 nt, Artificial Sequence
  Synthetic
cuuguuacauugucauuuag

SEQ ID NO: 700795 - RNA, 20 nt, Artificial Sequence
  Synthetic
uaaucacauagaagcuuuag

SEQ ID NO: 700796 - RNA, 20 nt, Artificial Sequence
  Synthetic
agcaccuaguacaucuuuag

SEQ ID NO: 700797 - RNA, 20 nt, Artificial Sequence
  Synthetic
ccauggaggaacucguuuag

SEQ ID NO: 700798 - RNA, 20 nt, Artificial Sequence
  Synthetic
uaauacaaagcuagguuuag

SEQ ID NO: 700799 - RNA, 20 nt, Artificial Sequence
  Synthetic
uagggggcuauucuguuuag

SEQ ID NO: 700800 - RNA, 20 nt, Artificial Sequence
  Synthetic
ugcuaugauaagguguuuag

SEQ ID NO: 700801 - RNA, 20 nt, Artificial Sequence
  Synthetic
aagagaucccacaauuuuag

SEQ ID NO: 700802 - RNA, 20 nt, Artificial Sequence
  Synthetic
uggaacccuagucauuuuag

SEQ ID NO: 700803 - RNA, 20 nt, Artificial Sequence
  Synthetic
uuuugcuucgcuauaaaacg

SEQ ID NO: 700804 - RNA, 20 nt, Artificial Sequence
  Synthetic
agggagugugcaagcaaacg

SEQ ID NO: 700805 - RNA, 20 nt, Artificial Sequence
  Synthetic
agauaggggcauaagaaacg

SEQ ID NO: 700806 - RNA, 20 nt, Artificial Sequence
  Synthetic
ucaauaaaggucaaccaacg

SEQ ID NO: 700807 - RNA, 20 nt, Artificial Sequence
  Synthetic
cgugugguuaauucccaacg

SEQ ID NO: 700808 - RNA, 20 nt, Artificial Sequence
  Synthetic
ucuuuguuucguucucaacg

SEQ ID NO: 700809 - RNA, 20 nt, Artificial Sequence
  Synthetic
ccugagcugaagcuagaacg

SEQ ID NO: 700810 - RNA, 20 nt, Artificial Sequence
  Synthetic
cucccacauacugaggaacg

SEQ ID NO: 700811 - RNA, 20 nt, Artificial Sequence
  Synthetic
uagagauugugacuugaacg

SEQ ID NO: 700812 - RNA, 20 nt, Artificial Sequence
  Synthetic
uaauguauaacuguauaacg

SEQ ID NO: 700813 - RNA, 20 nt, Artificial Sequence
  Synthetic
cuacaagaucuuuuauaacg

SEQ ID NO: 700814 - RNA, 20 nt, Artificial Sequence
  Synthetic
ucugauguggacuaguaacg

SEQ ID NO: 700815 - RNA, 20 nt, Artificial Sequence
  Synthetic
aguaaaugacauauguaacg

SEQ ID NO: 700816 - RNA, 20 nt, Artificial Sequence
  Synthetic
caccaacauaugaauuaacg

SEQ ID NO: 700817 - RNA, 20 nt, Artificial Sequence
  Synthetic
aaucuagcuauggcuuaacg

SEQ ID NO: 700818 - RNA, 20 nt, Artificial Sequence
  Synthetic
caacucgaugggcaaacacg

SEQ ID NO: 700819 - RNA, 20 nt, Artificial Sequence
  Synthetic
cccuugcgcugcuacacacg

SEQ ID NO: 700820 - RNA, 20 nt, Artificial Sequence
  Synthetic
augggacuuaguaggacacg

SEQ ID NO: 700821 - RNA, 20 nt, Artificial Sequence
  Synthetic
ccagugcaugacuugacacg

SEQ ID NO: 700822 - RNA, 20 nt, Artificial Sequence
  Synthetic
uuaguagcauacuuuacacg

SEQ ID NO: 700823 - RNA, 20 nt, Artificial Sequence
  Synthetic
uggaaagaauuacuaccacg

SEQ ID NO: 700824 - RNA, 20 nt, Artificial Sequence
  Synthetic
ucagaacaaaucaauccacg

SEQ ID NO: 700825 - RNA, 20 nt, Artificial Sequence
  Synthetic
cugcucuacgugauggcacg

SEQ ID NO: 700826 - RNA, 20 nt, Artificial Sequence
  Synthetic
aaaacacacaguggugcacg

SEQ ID NO: 700827 - RNA, 20 nt, Artificial Sequence
  Synthetic
caagaaaauaguaacucacg

SEQ ID NO: 700828 - RNA, 20 nt, Artificial Sequence
  Synthetic
uuuaacgaauaugggucacg

SEQ ID NO: 700829 - RNA, 20 nt, Artificial Sequence
  Synthetic
uucugaccucauacuucacg

SEQ ID NO: 700830 - RNA, 20 nt, Artificial Sequence
  Synthetic
agcucuccccuaauuucacg

SEQ ID NO: 700831 - RNA, 20 nt, Artificial Sequence
  Synthetic
uuauuccuaggguaaagacg

SEQ ID NO: 700832 - RNA, 20 nt, Artificial Sequence
  Synthetic
aaacaguugaaagauagacg

SEQ ID NO: 700833 - RNA, 20 nt, Artificial Sequence
  Synthetic
uccuauucugaucacggacg

SEQ ID NO: 700834 - RNA, 20 nt, Artificial Sequence
  Synthetic
auaugccacaggaagggacg

SEQ ID NO: 700835 - RNA, 20 nt, Artificial Sequence
  Synthetic
ucccugaagucugacugacg

SEQ ID NO: 700836 - RNA, 20 nt, Artificial Sequence
  Synthetic
agcaauacugcuaucugacg

SEQ ID NO: 700837 - RNA, 20 nt, Artificial Sequence
  Synthetic
uacaggagacguaauugacg

SEQ ID NO: 700838 - RNA, 20 nt, Artificial Sequence
  Synthetic
ccacugagacaaauaauacg

SEQ ID NO: 700839 - RNA, 20 nt, Artificial Sequence
  Synthetic
cugugaccaagauacauacg

SEQ ID NO: 700840 - RNA, 20 nt, Artificial Sequence
  Synthetic
ccuuucauccccuccauacg

SEQ ID NO: 700841 - RNA, 20 nt, Artificial Sequence
  Synthetic
ugauguggccagacuauacg

SEQ ID NO: 700842 - RNA, 20 nt, Artificial Sequence
  Synthetic
aucggaaggaagccuauacg

SEQ ID NO: 700843 - RNA, 20 nt, Artificial Sequence
  Synthetic
ugauaucagguuucccuacg

SEQ ID NO: 700844 - RNA, 20 nt, Artificial Sequence
  Synthetic
cacaauucuagguuccuacg

SEQ ID NO: 700845 - RNA, 20 nt, Artificial Sequence
  Synthetic
aaaaaccccacugggcuacg

SEQ ID NO: 700846 - RNA, 20 nt, Artificial Sequence
  Synthetic
aaagguccugaaaugcuacg

SEQ ID NO: 700847 - RNA, 20 nt, Artificial Sequence
  Synthetic
auguaguggaugcauguacg

SEQ ID NO: 700848 - RNA, 20 nt, Artificial Sequence
  Synthetic
uacuaucauacuuuauuacg

SEQ ID NO: 700849 - RNA, 20 nt, Artificial Sequence
  Synthetic
aaugcuaaaugcaacuuacg

SEQ ID NO: 700850 - RNA, 20 nt, Artificial Sequence
  Synthetic
ucagugcuggccugcuuacg

SEQ ID NO: 700851 - RNA, 20 nt, Artificial Sequence
  Synthetic
aucgaugaagguaucuuacg

SEQ ID NO: 700852 - RNA, 20 nt, Artificial Sequence
  Synthetic
uguuuuuaggauacuuuacg

SEQ ID NO: 700853 - RNA, 20 nt, Artificial Sequence
  Synthetic
caagcuaauauccuaaaccg

SEQ ID NO: 700854 - RNA, 20 nt, Artificial Sequence
  Synthetic
ugguaauuuaaauuuaaccg

SEQ ID NO: 700855 - RNA, 20 nt, Artificial Sequence
  Synthetic
ccaggccccaauauacaccg

SEQ ID NO: 700856 - RNA, 20 nt, Artificial Sequence
  Synthetic
uuacuuuccagguuccaccg

SEQ ID NO: 700857 - RNA, 20 nt, Artificial Sequence
  Synthetic
caucuaauucaacagcaccg

SEQ ID NO: 700858 - RNA, 20 nt, Artificial Sequence
  Synthetic
uugauaaaccgaguagaccg

SEQ ID NO: 700859 - RNA, 20 nt, Artificial Sequence
  Synthetic
uuaggcuuggcauaggaccg

SEQ ID NO: 700860 - RNA, 20 nt, Artificial Sequence
  Synthetic
uagugcuuucaaauggaccg

SEQ ID NO: 700861 - RNA, 20 nt, Artificial Sequence
  Synthetic
aggugugauguuccauaccg

SEQ ID NO: 700862 - RNA, 20 nt, Artificial Sequence
  Synthetic
aucaauuuuucuacguaccg

SEQ ID NO: 700863 - RNA, 20 nt, Artificial Sequence
  Synthetic
agagaucccucagauuaccg

SEQ ID NO: 700864 - RNA, 20 nt, Artificial Sequence
  Synthetic
acuauaugaaacuauuaccg

SEQ ID NO: 700865 - RNA, 20 nt, Artificial Sequence
  Synthetic
cauaacuuucaguguacccg

SEQ ID NO: 700866 - RNA, 20 nt, Artificial Sequence
  Synthetic
augagagagaaucucccccg

SEQ ID NO: 700867 - RNA, 20 nt, Artificial Sequence
  Synthetic
ugaguuaagcuguucccccg

SEQ ID NO: 700868 - RNA, 20 nt, Artificial Sequence
  Synthetic
cauuugcuuacauauccccg

SEQ ID NO: 700869 - RNA, 20 nt, Artificial Sequence
  Synthetic
uacugggcagauagagcccg

SEQ ID NO: 700870 - RNA, 20 nt, Artificial Sequence
  Synthetic
aucauguuuaguuaugcccg

SEQ ID NO: 700871 - RNA, 20 nt, Artificial Sequence
  Synthetic
acaguuuagaauguaucccg

SEQ ID NO: 700872 - RNA, 20 nt, Artificial Sequence
  Synthetic
ugcaugugcaucgcgucccg

SEQ ID NO: 700873 - RNA, 20 nt, Artificial Sequence
  Synthetic
uuaauccauuguaugucccg

SEQ ID NO: 700874 - RNA, 20 nt, Artificial Sequence
  Synthetic
aggauggaccuuucuucccg

SEQ ID NO: 700875 - RNA, 20 nt, Artificial Sequence
  Synthetic
aaaacucaaucuaguucccg

SEQ ID NO: 700876 - RNA, 20 nt, Artificial Sequence
  Synthetic
ucugcaauagccaauugccg

SEQ ID NO: 700877 - RNA, 20 nt, Artificial Sequence
  Synthetic
accgcuacuuauagaauccg

SEQ ID NO: 700878 - RNA, 20 nt, Artificial Sequence
  Synthetic
cacugucccagucuaauccg

SEQ ID NO: 700879 - RNA, 20 nt, Artificial Sequence
  Synthetic
acagugguuuaaguaauccg

SEQ ID NO: 700880 - RNA, 20 nt, Artificial Sequence
  Synthetic
auuuguggauuugcuauccg

SEQ ID NO: 700881 - RNA, 20 nt, Artificial Sequence
  Synthetic
aaugaucuucaucaacuccg

SEQ ID NO: 700882 - RNA, 20 nt, Artificial Sequence
  Synthetic
cuacuaaauccagaacuccg

SEQ ID NO: 700883 - RNA, 20 nt, Artificial Sequence
  Synthetic
ugugcuuuguggauacuccg

SEQ ID NO: 700884 - RNA, 20 nt, Artificial Sequence
  Synthetic
cugugacauaccuaccuccg

SEQ ID NO: 700885 - RNA, 20 nt, Artificial Sequence
  Synthetic
cgguuugacaguuuccuccg

SEQ ID NO: 700886 - RNA, 20 nt, Artificial Sequence
  Synthetic
auaagaaacuaccaucuccg

SEQ ID NO: 700887 - RNA, 20 nt, Artificial Sequence
  Synthetic
uagcaguagacuguucuccg

SEQ ID NO: 700888 - RNA, 20 nt, Artificial Sequence
  Synthetic
ccauucuuuucguuucuccg

SEQ ID NO: 700889 - RNA, 20 nt, Artificial Sequence
  Synthetic
aucugccaguagguaguccg

SEQ ID NO: 700890 - RNA, 20 nt, Artificial Sequence
  Synthetic
augaauaaacagcucuuccg

SEQ ID NO: 700891 - RNA, 20 nt, Artificial Sequence
  Synthetic
ccaguuuugcaauaguuccg

SEQ ID NO: 700892 - RNA, 20 nt, Artificial Sequence
  Synthetic
uuaggagauucucuaaagcg

SEQ ID NO: 700893 - RNA, 20 nt, Artificial Sequence
  Synthetic
aacgccaacuguuagaagcg

SEQ ID NO: 700894 - RNA, 20 nt, Artificial Sequence
  Synthetic
cacucuaguuugggacagcg

SEQ ID NO: 700895 - RNA, 20 nt, Artificial Sequence
  Synthetic
cuuuccccuaccaucgagcg

SEQ ID NO: 700896 - RNA, 20 nt, Artificial Sequence
  Synthetic
aaugccagaucaugggagcg

SEQ ID NO: 700897 - RNA, 20 nt, Artificial Sequence
  Synthetic
accacccuucaucaauagcg

SEQ ID NO: 700898 - RNA, 20 nt, Artificial Sequence
  Synthetic
acaauuaacauuuauccgcg

SEQ ID NO: 700899 - RNA, 20 nt, Artificial Sequence
  Synthetic
uguuaugaaacuguaaggcg

SEQ ID NO: 700900 - RNA, 20 nt, Artificial Sequence
  Synthetic
accauggauguaaccaggcg

SEQ ID NO: 700901 - RNA, 20 nt, Artificial Sequence
  Synthetic
ucuccaaagggauuuaggcg

SEQ ID NO: 700902 - RNA, 20 nt, Artificial Sequence
  Synthetic
uaaaugaucuagcaagggcg

SEQ ID NO: 700903 - RNA, 20 nt, Artificial Sequence
  Synthetic
caggaauccaucuguuggcg

SEQ ID NO: 700904 - RNA, 20 nt, Artificial Sequence
  Synthetic
acccccucacuucaaaugcg

SEQ ID NO: 700905 - RNA, 20 nt, Artificial Sequence
  Synthetic
aguucuaacaguuuaaugcg

SEQ ID NO: 700906 - RNA, 20 nt, Artificial Sequence
  Synthetic
aaugaguggauagaccugcg

SEQ ID NO: 700907 - RNA, 20 nt, Artificial Sequence
  Synthetic
uuaagcauuucuggagugcg

SEQ ID NO: 700908 - RNA, 20 nt, Artificial Sequence
  Synthetic
aagggcuuucaaauagugcg

SEQ ID NO: 700909 - RNA, 20 nt, Artificial Sequence
  Synthetic
uguuugcacccuuuugugcg

SEQ ID NO: 700910 - RNA, 20 nt, Artificial Sequence
  Synthetic
uucaaugaaauuaucuugcg

SEQ ID NO: 700911 - RNA, 20 nt, Artificial Sequence
  Synthetic
uaccacccguguucuuugcg

SEQ ID NO: 700912 - RNA, 20 nt, Artificial Sequence
  Synthetic
ucuucccaugaacgaaaucg

SEQ ID NO: 700913 - RNA, 20 nt, Artificial Sequence
  Synthetic
aacuucuauaggauaaaucg

SEQ ID NO: 700914 - RNA, 20 nt, Artificial Sequence
  Synthetic
ugcugcaggaaaguuaaucg

SEQ ID NO: 700915 - RNA, 20 nt, Artificial Sequence
  Synthetic
aaggagcacaaaaaccaucg

SEQ ID NO: 700916 - RNA, 20 nt, Artificial Sequence
  Synthetic
caacgaguauacaaagaucg

SEQ ID NO: 700917 - RNA, 20 nt, Artificial Sequence
  Synthetic
cgccagucuguuccagaucg

SEQ ID NO: 700918 - RNA, 20 nt, Artificial Sequence
  Synthetic
uuuggguuucuuagugaucg

SEQ ID NO: 700919 - RNA, 20 nt, Artificial Sequence
  Synthetic
aauugaacugguaucuaucg

SEQ ID NO: 700920 - RNA, 20 nt, Artificial Sequence
  Synthetic
aacguguuagcuggguaucg

SEQ ID NO: 700921 - RNA, 20 nt, Artificial Sequence
  Synthetic
uacuuuaccucucaaacucg

SEQ ID NO: 700922 - RNA, 20 nt, Artificial Sequence
  Synthetic
cuuuaugacacuguaacucg

SEQ ID NO: 700923 - RNA, 20 nt, Artificial Sequence
  Synthetic
aacagcacugagcgcacucg

SEQ ID NO: 700924 - RNA, 20 nt, Artificial Sequence
  Synthetic
ugugcucauucaugcacucg

SEQ ID NO: 700925 - RNA, 20 nt, Artificial Sequence
  Synthetic
cuacuuagcuuagucacucg

SEQ ID NO: 700926 - RNA, 20 nt, Artificial Sequence
  Synthetic
cuuaacauauguuguacucg

SEQ ID NO: 700927 - RNA, 20 nt, Artificial Sequence
  Synthetic
auagcuugcccacaaccucg

SEQ ID NO: 700928 - RNA, 20 nt, Artificial Sequence
  Synthetic
acggagcaguuugcaccucg

SEQ ID NO: 700929 - RNA, 20 nt, Artificial Sequence
  Synthetic
auguccuguauggugccucg

SEQ ID NO: 700930 - RNA, 20 nt, Artificial Sequence
  Synthetic
ucuaagcuauaacauccucg

SEQ ID NO: 700931 - RNA, 20 nt, Artificial Sequence
  Synthetic
uauuccggggcucuuccucg

SEQ ID NO: 700932 - RNA, 20 nt, Artificial Sequence
  Synthetic
aaauuuuucacuggggcucg

SEQ ID NO: 700933 - RNA, 20 nt, Artificial Sequence
  Synthetic
cacagcgagguuucugcucg

SEQ ID NO: 700934 - RNA, 20 nt, Artificial Sequence
  Synthetic
agacaaccaaauggcucucg

SEQ ID NO: 700935 - RNA, 20 nt, Artificial Sequence
  Synthetic
uaauucuuucuggucucucg

SEQ ID NO: 700936 - RNA, 20 nt, Artificial Sequence
  Synthetic
aauacgugcagcccgucucg

SEQ ID NO: 700937 - RNA, 20 nt, Artificial Sequence
  Synthetic
cauacacagaccuggucucg

SEQ ID NO: 700938 - RNA, 20 nt, Artificial Sequence
  Synthetic
cauaaaggauauucuucucg

SEQ ID NO: 700939 - RNA, 20 nt, Artificial Sequence
  Synthetic
acugggagucccauuucucg

SEQ ID NO: 700940 - RNA, 20 nt, Artificial Sequence
  Synthetic
acgguaccuugacuuucucg

SEQ ID NO: 700941 - RNA, 20 nt, Artificial Sequence
  Synthetic
aggagaagacauaccagucg

SEQ ID NO: 700942 - RNA, 20 nt, Artificial Sequence
  Synthetic
caaaccaucguagucagucg

SEQ ID NO: 700943 - RNA, 20 nt, Artificial Sequence
  Synthetic
cccaauugacagaagagucg

SEQ ID NO: 700944 - RNA, 20 nt, Artificial Sequence
  Synthetic
auagcgguguuaaguagucg

SEQ ID NO: 700945 - RNA, 20 nt, Artificial Sequence
  Synthetic
accuagaugacacagcgucg

SEQ ID NO: 700946 - RNA, 20 nt, Artificial Sequence
  Synthetic
aaaacagaccaggagggucg

SEQ ID NO: 700947 - RNA, 20 nt, Artificial Sequence
  Synthetic
ccugggugcuucauuggucg

SEQ ID NO: 700948 - RNA, 20 nt, Artificial Sequence
  Synthetic
ucacguacuugauuuggucg

SEQ ID NO: 700949 - RNA, 20 nt, Artificial Sequence
  Synthetic
caaguguacaucaaaauucg

SEQ ID NO: 700950 - RNA, 20 nt, Artificial Sequence
  Synthetic
agguaggggucauauauucg

SEQ ID NO: 700951 - RNA, 20 nt, Artificial Sequence
  Synthetic
uauugcacacaggcacuucg

SEQ ID NO: 700952 - RNA, 20 nt, Artificial Sequence
  Synthetic
uaaucagcuugagcccuucg

SEQ ID NO: 700953 - RNA, 20 nt, Artificial Sequence
  Synthetic
uauccauauucuuugcuucg

SEQ ID NO: 700954 - RNA, 20 nt, Artificial Sequence
  Synthetic
aacauugaaaaguuucuucg

SEQ ID NO: 700955 - RNA, 20 nt, Artificial Sequence
  Synthetic
acuuuccaaugucuaguucg

SEQ ID NO: 700956 - RNA, 20 nt, Artificial Sequence
  Synthetic
uucccaugcacuaggguucg

SEQ ID NO: 700957 - RNA, 20 nt, Artificial Sequence
  Synthetic
uuuauccaccuuaugguucg

SEQ ID NO: 700958 - RNA, 20 nt, Artificial Sequence
  Synthetic
caauaaugguaauguguucg

SEQ ID NO: 700959 - RNA, 20 nt, Artificial Sequence
  Synthetic
accaugcuuccacgcuuucg

SEQ ID NO: 700960 - RNA, 20 nt, Artificial Sequence
  Synthetic
uguaucaaaaccaguuuucg

SEQ ID NO: 700961 - RNA, 20 nt, Artificial Sequence
  Synthetic
aggcauuagugacuuuuucg

SEQ ID NO: 700962 - RNA, 20 nt, Artificial Sequence
  Synthetic
caaguuccauugccaaaagg

SEQ ID NO: 700963 - RNA, 20 nt, Artificial Sequence
  Synthetic
uucguuaccuugguaaaagg

SEQ ID NO: 700964 - RNA, 20 nt, Artificial Sequence
  Synthetic
cuauauaccuaaaucaaagg

SEQ ID NO: 700965 - RNA, 20 nt, Artificial Sequence
  Synthetic
cugacacuauugcucaaagg

SEQ ID NO: 700966 - RNA, 20 nt, Artificial Sequence
  Synthetic
aggagaaagcacguacaagg

SEQ ID NO: 700967 - RNA, 20 nt, Artificial Sequence
  Synthetic
uguacugaauccugccaagg

SEQ ID NO: 700968 - RNA, 20 nt, Artificial Sequence
  Synthetic
aguuagaagugguuccaagg

SEQ ID NO: 700969 - RNA, 20 nt, Artificial Sequence
  Synthetic
cuauggauccaccugcaagg

SEQ ID NO: 700970 - RNA, 20 nt, Artificial Sequence
  Synthetic
accuaaaucugaagagaagg

SEQ ID NO: 700971 - RNA, 20 nt, Artificial Sequence
  Synthetic
ugaaauggggucucggaagg

SEQ ID NO: 700972 - RNA, 20 nt, Artificial Sequence
  Synthetic
ucguuugaaucaauggaagg

SEQ ID NO: 700973 - RNA, 20 nt, Artificial Sequence
  Synthetic
ccacgggaauuuccauaagg

SEQ ID NO: 700974 - RNA, 20 nt, Artificial Sequence
  Synthetic
ccuuguacuucaggauaagg

SEQ ID NO: 700975 - RNA, 20 nt, Artificial Sequence
  Synthetic
agcaaagcuaaagcguaagg

SEQ ID NO: 700976 - RNA, 20 nt, Artificial Sequence
  Synthetic
ccacucuaguagcuguaagg

SEQ ID NO: 700977 - RNA, 20 nt, Artificial Sequence
  Synthetic
acacuuucgggccauuaagg

SEQ ID NO: 700978 - RNA, 20 nt, Artificial Sequence
  Synthetic
uugaaacccccacuuuaagg

SEQ ID NO: 700979 - RNA, 20 nt, Artificial Sequence
  Synthetic
uggucaacccacuuuuaagg

SEQ ID NO: 700980 - RNA, 20 nt, Artificial Sequence
  Synthetic
caguauucuauuuuuacagg

SEQ ID NO: 700981 - RNA, 20 nt, Artificial Sequence
  Synthetic
ugaaccuuuguugugccagg

SEQ ID NO: 700982 - RNA, 20 nt, Artificial Sequence
  Synthetic
cauuacguuaagcaaucagg

SEQ ID NO: 700983 - RNA, 20 nt, Artificial Sequence
  Synthetic
agagcaccugauguaucagg

SEQ ID NO: 700984 - RNA, 20 nt, Artificial Sequence
  Synthetic
ucuagaucuccgaccucagg

SEQ ID NO: 700985 - RNA, 20 nt, Artificial Sequence
  Synthetic
agaggucauaagcucucagg

SEQ ID NO: 700986 - RNA, 20 nt, Artificial Sequence
  Synthetic
aucaugcaucaagucucagg

SEQ ID NO: 700987 - RNA, 20 nt, Artificial Sequence
  Synthetic
ugguagacauaagugucagg

SEQ ID NO: 700988 - RNA, 20 nt, Artificial Sequence
  Synthetic
auguauuugaguucaagagg

SEQ ID NO: 700989 - RNA, 20 nt, Artificial Sequence
  Synthetic
cuuguagguuuccgaagagg

SEQ ID NO: 700990 - RNA, 20 nt, Artificial Sequence
  Synthetic
auucucagguuucggagagg

SEQ ID NO: 700991 - RNA, 20 nt, Artificial Sequence
  Synthetic
uaaccaaagccacauagagg

SEQ ID NO: 700992 - RNA, 20 nt, Artificial Sequence
  Synthetic
uugaguccuuauacuagagg

SEQ ID NO: 700993 - RNA, 20 nt, Artificial Sequence
  Synthetic
ucuauaaguagcgguagagg

SEQ ID NO: 700994 - RNA, 20 nt, Artificial Sequence
  Synthetic
ugcaugcuacaccaaggagg

SEQ ID NO: 700995 - RNA, 20 nt, Artificial Sequence
  Synthetic
acauugucauuuaguggagg

SEQ ID NO: 700996 - RNA, 20 nt, Artificial Sequence
  Synthetic
ugguggaacguuaaaugagg

SEQ ID NO: 700997 - RNA, 20 nt, Artificial Sequence
  Synthetic
uccacgcauuugaagugagg

SEQ ID NO: 700998 - RNA, 20 nt, Artificial Sequence
  Synthetic
cuaguuuaucccuggugagg

SEQ ID NO: 700999 - RNA, 20 nt, Artificial Sequence
  Synthetic
uaaagacgaucucugugagg

SEQ ID NO: 701000 - RNA, 20 nt, Artificial Sequence
  Synthetic
caaccagcuccuaguugagg

SEQ ID NO: 701001 - RNA, 20 nt, Artificial Sequence
  Synthetic
cuucccuguuuacuuugagg

SEQ ID NO: 701002 - RNA, 20 nt, Artificial Sequence
  Synthetic
uagucuaggucuugcauagg

SEQ ID NO: 701003 - RNA, 20 nt, Artificial Sequence
  Synthetic
cacauguccuggaguauagg

SEQ ID NO: 701004 - RNA, 20 nt, Artificial Sequence
  Synthetic
caacacuuuuagcuacuagg

SEQ ID NO: 701005 - RNA, 20 nt, Artificial Sequence
  Synthetic
cuuacauugcauaagcuagg

SEQ ID NO: 701006 - RNA, 20 nt, Artificial Sequence
  Synthetic
uuuuugguuguacaucuagg

SEQ ID NO: 701007 - RNA, 20 nt, Artificial Sequence
  Synthetic
acaugauacguauuucuagg

SEQ ID NO: 701008 - RNA, 20 nt, Artificial Sequence
  Synthetic
cgccaaguagacaacguagg

SEQ ID NO: 701009 - RNA, 20 nt, Artificial Sequence
  Synthetic
acuauagcuuuuuagguagg

SEQ ID NO: 701010 - RNA, 20 nt, Artificial Sequence
  Synthetic
uuuacgcaguuguauguagg

SEQ ID NO: 701011 - RNA, 20 nt, Artificial Sequence
  Synthetic
cagccuccagcgacuguagg

SEQ ID NO: 701012 - RNA, 20 nt, Artificial Sequence
  Synthetic
aacaugcauguggguguagg

SEQ ID NO: 701013 - RNA, 20 nt, Artificial Sequence
  Synthetic
accagcaucuugaaauuagg

SEQ ID NO: 701014 - RNA, 20 nt, Artificial Sequence
  Synthetic
auggaggacugucaauuagg

SEQ ID NO: 701015 - RNA, 20 nt, Artificial Sequence
  Synthetic
cucccacaauuaaccuuagg

SEQ ID NO: 701016 - RNA, 20 nt, Artificial Sequence
  Synthetic
cuugugacucuguguuuagg

SEQ ID NO: 701017 - RNA, 20 nt, Artificial Sequence
  Synthetic
ucucgguaccaauaaaacgg

SEQ ID NO: 701018 - RNA, 20 nt, Artificial Sequence
  Synthetic
uuuaggacugcuuccaacgg

SEQ ID NO: 701019 - RNA, 20 nt, Artificial Sequence
  Synthetic
aggaaacucaccuagaacgg

SEQ ID NO: 701020 - RNA, 20 nt, Artificial Sequence
  Synthetic
ccuugcgcugcuacacacgg

SEQ ID NO: 701021 - RNA, 20 nt, Artificial Sequence
  Synthetic
uaaacuuuagcuuuagacgg

SEQ ID NO: 701022 - RNA, 20 nt, Artificial Sequence
  Synthetic
ugcacaaccuuggaggacgg

SEQ ID NO: 701023 - RNA, 20 nt, Artificial Sequence
  Synthetic
uagaagcaguaaauggacgg

SEQ ID NO: 701024 - RNA, 20 nt, Artificial Sequence
  Synthetic
auagguuacugaggugacgg

SEQ ID NO: 701025 - RNA, 20 nt, Artificial Sequence
  Synthetic
acaggagacguaauugacgg

SEQ ID NO: 701026 - RNA, 20 nt, Artificial Sequence
  Synthetic
acacucaggcauuacuacgg

SEQ ID NO: 701027 - RNA, 20 nt, Artificial Sequence
  Synthetic
uugaaauacugagaguacgg

SEQ ID NO: 701028 - RNA, 20 nt, Artificial Sequence
  Synthetic
ugugacuaucggugaaccgg

SEQ ID NO: 701029 - RNA, 20 nt, Artificial Sequence
  Synthetic
cuaggguggauuacccccgg

SEQ ID NO: 701030 - RNA, 20 nt, Artificial Sequence
  Synthetic
cagaggaccuuacgucccgg

SEQ ID NO: 701031 - RNA, 20 nt, Artificial Sequence
  Synthetic
uaauccauuguaugucccgg

SEQ ID NO: 701032 - RNA, 20 nt, Artificial Sequence
  Synthetic
uuauuuuauucauuucccgg

SEQ ID NO: 701033 - RNA, 20 nt, Artificial Sequence
  Synthetic
aucugguuaggaaccuccgg

SEQ ID NO: 701034 - RNA, 20 nt, Artificial Sequence
  Synthetic
uuaaccacuauuccuuccgg

SEQ ID NO: 701035 - RNA, 20 nt, Artificial Sequence
  Synthetic
ugaauaaacagcucuuccgg

SEQ ID NO: 701036 - RNA, 20 nt, Artificial Sequence
  Synthetic
uugcaccucggggaaagcgg

SEQ ID NO: 701037 - RNA, 20 nt, Artificial Sequence
  Synthetic
auuagaauguuuguaagcgg

SEQ ID NO: 701038 - RNA, 20 nt, Artificial Sequence
  Synthetic
cuagcauaguuccauagcgg

SEQ ID NO: 701039 - RNA, 20 nt, Artificial Sequence
  Synthetic
caaacuccaaugaggcgcgg

SEQ ID NO: 701040 - RNA, 20 nt, Artificial Sequence
  Synthetic
ccuuagaggucaagaggcgg

SEQ ID NO: 701041 - RNA, 20 nt, Artificial Sequence
  Synthetic
cauuugucugccacuggcgg

SEQ ID NO: 701042 - RNA, 20 nt, Artificial Sequence
  Synthetic
uuaauucauuggaccugcgg

SEQ ID NO: 701043 - RNA, 20 nt, Artificial Sequence
  Synthetic
aauggcaaagcuuugugcgg

SEQ ID NO: 701044 - RNA, 20 nt, Artificial Sequence
  Synthetic
accacccguguucuuugcgg

SEQ ID NO: 701045 - RNA, 20 nt, Artificial Sequence
  Synthetic
auuucaacaagacaccucgg

SEQ ID NO: 701046 - RNA, 20 nt, Artificial Sequence
  Synthetic
aguuguuccaaauuccucgg

SEQ ID NO: 701047 - RNA, 20 nt, Artificial Sequence
  Synthetic
uccaauuuggcagaucucgg

SEQ ID NO: 701048 - RNA, 20 nt, Artificial Sequence
  Synthetic
aucuaagaaagugccuucgg

SEQ ID NO: 701049 - RNA, 20 nt, Artificial Sequence
  Synthetic
uuuccagcauuuugcuucgg

SEQ ID NO: 701050 - RNA, 20 nt, Artificial Sequence
  Synthetic
uuuguuagacuggaguucgg

SEQ ID NO: 701051 - RNA, 20 nt, Artificial Sequence
  Synthetic
cuauacuacgaggcaaaggg

SEQ ID NO: 701052 - RNA, 20 nt, Artificial Sequence
  Synthetic
acagucaaugccaccaaggg

SEQ ID NO: 701053 - RNA, 20 nt, Artificial Sequence
  Synthetic
accacgcuauugaugaaggg

SEQ ID NO: 701054 - RNA, 20 nt, Artificial Sequence
  Synthetic
cucuguuuggaccugaaggg

SEQ ID NO: 701055 - RNA, 20 nt, Artificial Sequence
  Synthetic
uauggcauaaaagcccaggg

SEQ ID NO: 701056 - RNA, 20 nt, Artificial Sequence
  Synthetic
cuccaaaugguggaucaggg

SEQ ID NO: 701057 - RNA, 20 nt, Artificial Sequence
  Synthetic
caauccaauguaaaggaggg

SEQ ID NO: 701058 - RNA, 20 nt, Artificial Sequence
  Synthetic
aguacuagauaucaggaggg

SEQ ID NO: 701059 - RNA, 20 nt, Artificial Sequence
  Synthetic
ucaggcauuacuacggaggg

SEQ ID NO: 701060 - RNA, 20 nt, Artificial Sequence
  Synthetic
caggacauucacauauaggg

SEQ ID NO: 701061 - RNA, 20 nt, Artificial Sequence
  Synthetic
aaacuguaucucagcuaggg

SEQ ID NO: 701062 - RNA, 20 nt, Artificial Sequence
  Synthetic
ugcgcgcgcgugcgcuaggg

SEQ ID NO: 701063 - RNA, 20 nt, Artificial Sequence
  Synthetic
uaccuuaugccguaguaggg

SEQ ID NO: 701064 - RNA, 20 nt, Artificial Sequence
  Synthetic
uaugaugaugacgguuaggg

SEQ ID NO: 701065 - RNA, 20 nt, Artificial Sequence
  Synthetic
ucccccgcaaagaacacggg

SEQ ID NO: 701066 - RNA, 20 nt, Artificial Sequence
  Synthetic
acaccuuuuuauaauacggg

SEQ ID NO: 701067 - RNA, 20 nt, Artificial Sequence
  Synthetic
ugaaauacugagaguacggg

SEQ ID NO: 701068 - RNA, 20 nt, Artificial Sequence
  Synthetic
aaucucugagggaaaccggg

SEQ ID NO: 701069 - RNA, 20 nt, Artificial Sequence
  Synthetic
uacaaauuuuagccggcggg

SEQ ID NO: 701070 - RNA, 20 nt, Artificial Sequence
  Synthetic
ugguguugaccuuugucggg

SEQ ID NO: 701071 - RNA, 20 nt, Artificial Sequence
  Synthetic
uacugacauacuucuucggg

SEQ ID NO: 701072 - RNA, 20 nt, Artificial Sequence
  Synthetic
auguuggccugcuaaagggg

SEQ ID NO: 701073 - RNA, 20 nt, Artificial Sequence
  Synthetic
aacuuuaaaccuuaaagggg

SEQ ID NO: 701074 - RNA, 20 nt, Artificial Sequence
  Synthetic
cugaucucauggacaagggg

SEQ ID NO: 701075 - RNA, 20 nt, Artificial Sequence
  Synthetic
caaacgugaaggucaagggg

SEQ ID NO: 701076 - RNA, 20 nt, Artificial Sequence
  Synthetic
auccgauugggaggaagggg

SEQ ID NO: 701077 - RNA, 20 nt, Artificial Sequence
  Synthetic
cguauagucacauggagggg

SEQ ID NO: 701078 - RNA, 20 nt, Artificial Sequence
  Synthetic
cagcaucuugaaauuagggg

SEQ ID NO: 701079 - RNA, 20 nt, Artificial Sequence
  Synthetic
uacaaagcuagguuuagggg

SEQ ID NO: 701080 - RNA, 20 nt, Artificial Sequence
  Synthetic
uaaauccaucaugaacgggg

SEQ ID NO: 701081 - RNA, 20 nt, Artificial Sequence
  Synthetic
aguaucaaggacagacgggg

SEQ ID NO: 701082 - RNA, 20 nt, Artificial Sequence
  Synthetic
ccucagcaguuugagcgggg

SEQ ID NO: 701083 - RNA, 20 nt, Artificial Sequence
  Synthetic
aagcuauaacauccucgggg

SEQ ID NO: 701084 - RNA, 20 nt, Artificial Sequence
  Synthetic
uccauuguaugucccggggg

SEQ ID NO: 701085 - RNA, 20 nt, Artificial Sequence
  Synthetic
caauuaacguagaugggggg

SEQ ID NO: 701086 - RNA, 20 nt, Artificial Sequence
  Synthetic
cuguugacuuaauugggggg

SEQ ID NO: 701087 - RNA, 20 nt, Artificial Sequence
  Synthetic
accacaagcugacuuggggg

SEQ ID NO: 701088 - RNA, 20 nt, Artificial Sequence
  Synthetic
uuucaaacacggccaugggg

SEQ ID NO: 701089 - RNA, 20 nt, Artificial Sequence
  Synthetic
uaagaacucucuggaugggg

SEQ ID NO: 701090 - RNA, 20 nt, Artificial Sequence
  Synthetic
ugauuagagaaucagugggg

SEQ ID NO: 701091 - RNA, 20 nt, Artificial Sequence
  Synthetic
uuuacaaggagauugugggg

SEQ ID NO: 701092 - RNA, 20 nt, Artificial Sequence
  Synthetic
ccuuaagcuucuaauugggg

SEQ ID NO: 701093 - RNA, 20 nt, Artificial Sequence
  Synthetic
auguuagucuagcauugggg

SEQ ID NO: 701094 - RNA, 20 nt, Artificial Sequence
  Synthetic
auguccucuuagcuuugggg

SEQ ID NO: 701095 - RNA, 20 nt, Artificial Sequence
  Synthetic
uuaagaggccagcccauggg

SEQ ID NO: 701096 - RNA, 20 nt, Artificial Sequence
  Synthetic
ugccaauuaacguagauggg

SEQ ID NO: 701097 - RNA, 20 nt, Artificial Sequence
  Synthetic
auaagaacucucuggauggg

SEQ ID NO: 701098 - RNA, 20 nt, Artificial Sequence
  Synthetic
uaggcuuuaaagccuauggg

SEQ ID NO: 701099 - RNA, 20 nt, Artificial Sequence
  Synthetic
caaggaagggauaguauggg

SEQ ID NO: 701100 - RNA, 20 nt, Artificial Sequence
  Synthetic
uaucuacuugccauuauggg

SEQ ID NO: 701101 - RNA, 20 nt, Artificial Sequence
  Synthetic
acuugcuuaaugcuuauggg

SEQ ID NO: 701102 - RNA, 20 nt, Artificial Sequence
  Synthetic
cuaaaugaauagccacuggg

SEQ ID NO: 701103 - RNA, 20 nt, Artificial Sequence
  Synthetic
ucgauagaagcuaaaguggg

SEQ ID NO: 701104 - RNA, 20 nt, Artificial Sequence
  Synthetic
accaggauauuaugaguggg

SEQ ID NO: 701105 - RNA, 20 nt, Artificial Sequence
  Synthetic
cuuuagcuuuagacgguggg

SEQ ID NO: 701106 - RNA, 20 nt, Artificial Sequence
  Synthetic
ccaguaguugaguguguggg

SEQ ID NO: 701107 - RNA, 20 nt, Artificial Sequence
  Synthetic
cagcuaaacuggagcuuggg

SEQ ID NO: 701108 - RNA, 20 nt, Artificial Sequence
  Synthetic
uggcaucugcaaaucuuggg

SEQ ID NO: 701109 - RNA, 20 nt, Artificial Sequence
  Synthetic
uaacuucuaaggaucuuggg

SEQ ID NO: 701110 - RNA, 20 nt, Artificial Sequence
  Synthetic
cccggaagcugguaguuggg

SEQ ID NO: 701111 - RNA, 20 nt, Artificial Sequence
  Synthetic
uaacuaucucauggguuggg

SEQ ID NO: 701112 - RNA, 20 nt, Artificial Sequence
  Synthetic
ccuccaguaacagauuuggg

SEQ ID NO: 701113 - RNA, 20 nt, Artificial Sequence
  Synthetic
uuacacuaaccuaguuuggg

SEQ ID NO: 701114 - RNA, 20 nt, Artificial Sequence
  Synthetic
aaauaccuuaacuguuuggg

SEQ ID NO: 701115 - RNA, 20 nt, Artificial Sequence
  Synthetic
agcaagcggcugucaaaugg

SEQ ID NO: 701116 - RNA, 20 nt, Artificial Sequence
  Synthetic
aguuuggguucccuaaaugg

SEQ ID NO: 701117 - RNA, 20 nt, Artificial Sequence
  Synthetic
ucuuccccuauugacaaugg

SEQ ID NO: 701118 - RNA, 20 nt, Artificial Sequence
  Synthetic
uuaaggauuuuacggaaugg

SEQ ID NO: 701119 - RNA, 20 nt, Artificial Sequence
  Synthetic
acacucaaguagucccaugg

SEQ ID NO: 701120 - RNA, 20 nt, Artificial Sequence
  Synthetic
ucuuuagaacucagccaugg

SEQ ID NO: 701121 - RNA, 20 nt, Artificial Sequence
  Synthetic
uccuaugugaaaugccaugg

SEQ ID NO: 701122 - RNA, 20 nt, Artificial Sequence
  Synthetic
acgauaaugcuuauccaugg

SEQ ID NO: 701123 - RNA, 20 nt, Artificial Sequence
  Synthetic
uguacauuauuucagcaugg

SEQ ID NO: 701124 - RNA, 20 nt, Artificial Sequence
  Synthetic
uaucagaaagguucucaugg

SEQ ID NO: 701125 - RNA, 20 nt, Artificial Sequence
  Synthetic
ccuucugugaagugucaugg

SEQ ID NO: 701126 - RNA, 20 nt, Artificial Sequence
  Synthetic
cuagcaaguauagcagaugg

SEQ ID NO: 701127 - RNA, 20 nt, Artificial Sequence
  Synthetic
ucuuaagaaguuaccgaugg

SEQ ID NO: 701128 - RNA, 20 nt, Artificial Sequence
  Synthetic
uccugcagcauguucgaugg

SEQ ID NO: 701129 - RNA, 20 nt, Artificial Sequence
  Synthetic
uacugguaggauagggaugg

SEQ ID NO: 701130 - RNA, 20 nt, Artificial Sequence
  Synthetic
caccuuuugaacuaugaugg

SEQ ID NO: 701131 - RNA, 20 nt, Artificial Sequence
  Synthetic
cccuauccauugugugaugg

SEQ ID NO: 701132 - RNA, 20 nt, Artificial Sequence
  Synthetic
auagaggcuacgcuugaugg

SEQ ID NO: 701133 - RNA, 20 nt, Artificial Sequence
  Synthetic
ugcagaaggaaucaauaugg

SEQ ID NO: 701134 - RNA, 20 nt, Artificial Sequence
  Synthetic
cguagaacuuaggcauaugg

SEQ ID NO: 701135 - RNA, 20 nt, Artificial Sequence
  Synthetic
uaugcuacgguaucauaugg

SEQ ID NO: 701136 - RNA, 20 nt, Artificial Sequence
  Synthetic
cauagauuaacuugauaugg

SEQ ID NO: 701137 - RNA, 20 nt, Artificial Sequence
  Synthetic
cgugccuuacucgaguaugg

SEQ ID NO: 701138 - RNA, 20 nt, Artificial Sequence
  Synthetic
uagcucagaaccacguaugg

SEQ ID NO: 701139 - RNA, 20 nt, Artificial Sequence
  Synthetic
ucuacaugagaaguguaugg

SEQ ID NO: 701140 - RNA, 20 nt, Artificial Sequence
  Synthetic
cguuuacaucuaguguaugg

SEQ ID NO: 701141 - RNA, 20 nt, Artificial Sequence
  Synthetic
cauucauacugucuuuaugg

SEQ ID NO: 701142 - RNA, 20 nt, Artificial Sequence
  Synthetic
ucaccacaagauuuuuaugg

SEQ ID NO: 701143 - RNA, 20 nt, Artificial Sequence
  Synthetic
uaccguacauauuuuuaugg

SEQ ID NO: 701144 - RNA, 20 nt, Artificial Sequence
  Synthetic
cuguaaacucuauaaacugg

SEQ ID NO: 701145 - RNA, 20 nt, Artificial Sequence
  Synthetic
aacaguugccuaagaacugg

SEQ ID NO: 701146 - RNA, 20 nt, Artificial Sequence
  Synthetic
agcccaguugaacacacugg

SEQ ID NO: 701147 - RNA, 20 nt, Artificial Sequence
  Synthetic
ccuaaaugaauagccacugg

SEQ ID NO: 701148 - RNA, 20 nt, Artificial Sequence
  Synthetic
cuacauuugucugccacugg

SEQ ID NO: 701149 - RNA, 20 nt, Artificial Sequence
  Synthetic
uuacagcagguagagacugg

SEQ ID NO: 701150 - RNA, 20 nt, Artificial Sequence
  Synthetic
acucugauauaauugacugg

SEQ ID NO: 701151 - RNA, 20 nt, Artificial Sequence
  Synthetic
augcucccugccacuacugg

SEQ ID NO: 701152 - RNA, 20 nt, Artificial Sequence
  Synthetic
uaggguuaguuuacuacugg

SEQ ID NO: 701153 - RNA, 20 nt, Artificial Sequence
  Synthetic
cuuuaugaaccauuuacugg

SEQ ID NO: 701154 - RNA, 20 nt, Artificial Sequence
  Synthetic
uguaauccgggggaaccugg

SEQ ID NO: 701155 - RNA, 20 nt, Artificial Sequence
  Synthetic
ugaacauauuugcuaccugg

SEQ ID NO: 701156 - RNA, 20 nt, Artificial Sequence
  Synthetic
agcaaacaagguaacccugg

SEQ ID NO: 701157 - RNA, 20 nt, Artificial Sequence
  Synthetic
uuuaugcaagcaggcccugg

SEQ ID NO: 701158 - RNA, 20 nt, Artificial Sequence
  Synthetic
auaccagugugugucccugg

SEQ ID NO: 701159 - RNA, 20 nt, Artificial Sequence
  Synthetic
uugcgugauaugcagccugg

SEQ ID NO: 701160 - RNA, 20 nt, Artificial Sequence
  Synthetic
agcauaucggccauuccugg

SEQ ID NO: 701161 - RNA, 20 nt, Artificial Sequence
  Synthetic
cuaaggaugauccuuccugg

SEQ ID NO: 701162 - RNA, 20 nt, Artificial Sequence
  Synthetic
cgggcugguuagccugcugg

SEQ ID NO: 701163 - RNA, 20 nt, Artificial Sequence
  Synthetic
uagucaucauucucugcugg

SEQ ID NO: 701164 - RNA, 20 nt, Artificial Sequence
  Synthetic
cuagaaguagucucaucugg

SEQ ID NO: 701165 - RNA, 20 nt, Artificial Sequence
  Synthetic
cugagguuauaauccucugg

SEQ ID NO: 701166 - RNA, 20 nt, Artificial Sequence
  Synthetic
uagcuuaucaucuccucugg

SEQ ID NO: 701167 - RNA, 20 nt, Artificial Sequence
  Synthetic
augguagcauaagcgucugg

SEQ ID NO: 701168 - RNA, 20 nt, Artificial Sequence
  Synthetic
aacagcccuuaaucuucugg

SEQ ID NO: 701169 - RNA, 20 nt, Artificial Sequence
  Synthetic
ugccuguuaauacguucugg

SEQ ID NO: 701170 - RNA, 20 nt, Artificial Sequence
  Synthetic
ugaguauugaccauuucugg

SEQ ID NO: 701171 - RNA, 20 nt, Artificial Sequence
  Synthetic
cucgauagaagcuaaagugg

SEQ ID NO: 701172 - RNA, 20 nt, Artificial Sequence
  Synthetic
agcucuccaccuuaaagugg

SEQ ID NO: 701173 - RNA, 20 nt, Artificial Sequence
  Synthetic
uggaguauugguauaagugg

SEQ ID NO: 701174 - RNA, 20 nt, Artificial Sequence
  Synthetic
ccugaugccgcacacagugg

SEQ ID NO: 701175 - RNA, 20 nt, Artificial Sequence
  Synthetic
aauguacaucuccacagugg

SEQ ID NO: 701176 - RNA, 20 nt, Artificial Sequence
  Synthetic
cagacccugccugcuagugg

SEQ ID NO: 701177 - RNA, 20 nt, Artificial Sequence
  Synthetic
uucaaucaaccauguagugg

SEQ ID NO: 701178 - RNA, 20 nt, Artificial Sequence
  Synthetic
cugcugcauuagguccgugg

SEQ ID NO: 701179 - RNA, 20 nt, Artificial Sequence
  Synthetic
acaucuaagcagaagcgugg

SEQ ID NO: 701180 - RNA, 20 nt, Artificial Sequence
  Synthetic
ugaauccagaugcugcgugg

SEQ ID NO: 701181 - RNA, 20 nt, Artificial Sequence
  Synthetic
caaaacuaccgugaaggugg

SEQ ID NO: 701182 - RNA, 20 nt, Artificial Sequence
  Synthetic
cggacugugcuaaagggugg

SEQ ID NO: 701183 - RNA, 20 nt, Artificial Sequence
  Synthetic
uaguggcugacauauggugg

SEQ ID NO: 701184 - RNA, 20 nt, Artificial Sequence
  Synthetic
ucaagguuccaguauggugg

SEQ ID NO: 701185 - RNA, 20 nt, Artificial Sequence
  Synthetic
aaagggcauacacuaugugg

SEQ ID NO: 701186 - RNA, 20 nt, Artificial Sequence
  Synthetic
aaugaacugugcagcugugg

SEQ ID NO: 701187 - RNA, 20 nt, Artificial Sequence
  Synthetic
auaccugccaccgucugugg

SEQ ID NO: 701188 - RNA, 20 nt, Artificial Sequence
  Synthetic
acaaaugaauugccgugugg

SEQ ID NO: 701189 - RNA, 20 nt, Artificial Sequence
  Synthetic
cacaauagacaugggugugg

SEQ ID NO: 701190 - RNA, 20 nt, Artificial Sequence
  Synthetic
cccaaugggaaaauuugugg

SEQ ID NO: 701191 - RNA, 20 nt, Artificial Sequence
  Synthetic
agcugaacagggguuugugg

SEQ ID NO: 701192 - RNA, 20 nt, Artificial Sequence
  Synthetic
uaucgcuagaacauaauugg

SEQ ID NO: 701193 - RNA, 20 nt, Artificial Sequence
  Synthetic
ugggccauauguauaauugg

SEQ ID NO: 701194 - RNA, 20 nt, Artificial Sequence
  Synthetic
cugaauauauccuucauugg

SEQ ID NO: 701195 - RNA, 20 nt, Artificial Sequence
  Synthetic
uaacucuagcggcagauugg

SEQ ID NO: 701196 - RNA, 20 nt, Artificial Sequence
  Synthetic
cagcugacaauacugauugg

SEQ ID NO: 701197 - RNA, 20 nt, Artificial Sequence
  Synthetic
uauguagggcuuauacuugg

SEQ ID NO: 701198 - RNA, 20 nt, Artificial Sequence
  Synthetic
caacucucgaaaguacuugg

SEQ ID NO: 701199 - RNA, 20 nt, Artificial Sequence
  Synthetic
uugcaaguuaccucccuugg

SEQ ID NO: 701200 - RNA, 20 nt, Artificial Sequence
  Synthetic
uagggguggguugcgcuugg

SEQ ID NO: 701201 - RNA, 20 nt, Artificial Sequence
  Synthetic
ugaucaguauaagggcuugg

SEQ ID NO: 701202 - RNA, 20 nt, Artificial Sequence
  Synthetic
aagagcaaacgaccucuugg

SEQ ID NO: 701203 - RNA, 20 nt, Artificial Sequence
  Synthetic
acugagggauuccgucuugg

SEQ ID NO: 701204 - RNA, 20 nt, Artificial Sequence
  Synthetic
auuguuaguugaugucuugg

SEQ ID NO: 701205 - RNA, 20 nt, Artificial Sequence
  Synthetic
aaaaguguuaaacaaguugg

SEQ ID NO: 701206 - RNA, 20 nt, Artificial Sequence
  Synthetic
cuuagcuuaggcacaguugg

SEQ ID NO: 701207 - RNA, 20 nt, Artificial Sequence
  Synthetic
uacaggaauccaucuguugg

SEQ ID NO: 701208 - RNA, 20 nt, Artificial Sequence
  Synthetic
cucccuaaucgcucuguugg

SEQ ID NO: 701209 - RNA, 20 nt, Artificial Sequence
  Synthetic
ccucauguugcuaaauuugg

SEQ ID NO: 701210 - RNA, 20 nt, Artificial Sequence
  Synthetic
cccccugauccaccauuugg

SEQ ID NO: 701211 - RNA, 20 nt, Artificial Sequence
  Synthetic
cgucccugcugucuauuugg

SEQ ID NO: 701212 - RNA, 20 nt, Artificial Sequence
  Synthetic
acuuuuggcaugggcuuugg

SEQ ID NO: 701213 - RNA, 20 nt, Artificial Sequence
  Synthetic
ucuugcaggccauaguuugg

SEQ ID NO: 701214 - RNA, 20 nt, Artificial Sequence
  Synthetic
aauaaguaguacugguuugg

SEQ ID NO: 701215 - RNA, 20 nt, Artificial Sequence
  Synthetic
uaacucaacacgcauuuugg

SEQ ID NO: 701216 - RNA, 20 nt, Artificial Sequence
  Synthetic
ccggagcuauaaaguuuugg

SEQ ID NO: 701217 - RNA, 20 nt, Artificial Sequence
  Synthetic
uucucuuaucuagacaaaug

SEQ ID NO: 701218 - RNA, 20 nt, Artificial Sequence
  Synthetic
cguuagcacuugaauaaaug

SEQ ID NO: 701219 - RNA, 20 nt, Artificial Sequence
  Synthetic
uuauuaaugagaucccaaug

SEQ ID NO: 701220 - RNA, 20 nt, Artificial Sequence
  Synthetic
uaauacuaccaucugcaaug

SEQ ID NO: 701221 - RNA, 20 nt, Artificial Sequence
  Synthetic
ccuaacagaggaauucaaug

SEQ ID NO: 701222 - RNA, 20 nt, Artificial Sequence
  Synthetic
aacuuaagauagauagaaug

SEQ ID NO: 701223 - RNA, 20 nt, Artificial Sequence
  Synthetic
uccuaguuaugacuggaaug

SEQ ID NO: 701224 - RNA, 20 nt, Artificial Sequence
  Synthetic
ccuccugaaaaagcugaaug

SEQ ID NO: 701225 - RNA, 20 nt, Artificial Sequence
  Synthetic
cugcgugggcagaaauaaug

SEQ ID NO: 701226 - RNA, 20 nt, Artificial Sequence
  Synthetic
uaguggaacucucaauaaug

SEQ ID NO: 701227 - RNA, 20 nt, Artificial Sequence
  Synthetic
aauaugaaggguguauaaug

SEQ ID NO: 701228 - RNA, 20 nt, Artificial Sequence
  Synthetic
ccguccauccccuuauaaug

SEQ ID NO: 701229 - RNA, 20 nt, Artificial Sequence
  Synthetic
caugaaagaaguaccuaaug

SEQ ID NO: 701230 - RNA, 20 nt, Artificial Sequence
  Synthetic
auagcuugaugaggcuaaug

SEQ ID NO: 701231 - RNA, 20 nt, Artificial Sequence
  Synthetic
cuaacuuaagcuaucuaaug

SEQ ID NO: 701232 - RNA, 20 nt, Artificial Sequence
  Synthetic
agcacuguuucuaguuaaug

SEQ ID NO: 701233 - RNA, 20 nt, Artificial Sequence
  Synthetic
cccaggcuacaacuuuaaug

SEQ ID NO: 701234 - RNA, 20 nt, Artificial Sequence
  Synthetic
ccauacgaauguagaacaug

SEQ ID NO: 701235 - RNA, 20 nt, Artificial Sequence
  Synthetic
cacggguaaagauuaacaug

SEQ ID NO: 701236 - RNA, 20 nt, Artificial Sequence
  Synthetic
acaauggugguuaacacaug

SEQ ID NO: 701237 - RNA, 20 nt, Artificial Sequence
  Synthetic
auaugauguucuaccacaug

SEQ ID NO: 701238 - RNA, 20 nt, Artificial Sequence
  Synthetic
agugaagcaucucccacaug

SEQ ID NO: 701239 - RNA, 20 nt, Artificial Sequence
  Synthetic
aaacagugacaauccacaug

SEQ ID NO: 701240 - RNA, 20 nt, Artificial Sequence
  Synthetic
ugcuugccuuuacauacaug

SEQ ID NO: 701241 - RNA, 20 nt, Artificial Sequence
  Synthetic
aaagguaaggacuguacaug

SEQ ID NO: 701242 - RNA, 20 nt, Artificial Sequence
  Synthetic
agccccucugcuguuacaug

SEQ ID NO: 701243 - RNA, 20 nt, Artificial Sequence
  Synthetic
aagacacgugcuaacccaug

SEQ ID NO: 701244 - RNA, 20 nt, Artificial Sequence
  Synthetic
cucuguggaaaccacccaug

SEQ ID NO: 701245 - RNA, 20 nt, Artificial Sequence
  Synthetic
acauguacugacuacccaug

SEQ ID NO: 701246 - RNA, 20 nt, Artificial Sequence
  Synthetic
uuacguauguuaaucccaug

SEQ ID NO: 701247 - RNA, 20 nt, Artificial Sequence
  Synthetic
agaucuuaucuggucccaug

SEQ ID NO: 701248 - RNA, 20 nt, Artificial Sequence
  Synthetic
aucuacaaguuugggccaug

SEQ ID NO: 701249 - RNA, 20 nt, Artificial Sequence
  Synthetic
uuaucguauuccuauccaug

SEQ ID NO: 701250 - RNA, 20 nt, Artificial Sequence
  Synthetic
cacgauaaugcuuauccaug

SEQ ID NO: 701251 - RNA, 20 nt, Artificial Sequence
  Synthetic
aucuaggcaguuaaagcaug

SEQ ID NO: 701252 - RNA, 20 nt, Artificial Sequence
  Synthetic
aacucggugagucuagcaug

SEQ ID NO: 701253 - RNA, 20 nt, Artificial Sequence
  Synthetic
ugaguauacuaucaggcaug

SEQ ID NO: 701254 - RNA, 20 nt, Artificial Sequence
  Synthetic
uuccaaccagcuagggcaug

SEQ ID NO: 701255 - RNA, 20 nt, Artificial Sequence
  Synthetic
uagggaccuccuagugcaug

SEQ ID NO: 701256 - RNA, 20 nt, Artificial Sequence
  Synthetic
uaugagcauugaguaucaug

SEQ ID NO: 701257 - RNA, 20 nt, Artificial Sequence
  Synthetic
uaaaaacuuuuaccgucaug

SEQ ID NO: 701258 - RNA, 20 nt, Artificial Sequence
  Synthetic
ucaauuucccacaggucaug

SEQ ID NO: 701259 - RNA, 20 nt, Artificial Sequence
  Synthetic
uuaguccacaguaggucaug

SEQ ID NO: 701260 - RNA, 20 nt, Artificial Sequence
  Synthetic
cccauauaguuggugucaug

SEQ ID NO: 701261 - RNA, 20 nt, Artificial Sequence
  Synthetic
acggaacauaucagcagaug

SEQ ID NO: 701262 - RNA, 20 nt, Artificial Sequence
  Synthetic
aauagcucugaucucagaug

SEQ ID NO: 701263 - RNA, 20 nt, Artificial Sequence
  Synthetic
accaagcuaaagaggagaug

SEQ ID NO: 701264 - RNA, 20 nt, Artificial Sequence
  Synthetic
uuggcuagccacuggagaug

SEQ ID NO: 701265 - RNA, 20 nt, Artificial Sequence
  Synthetic
caacuacuaaaugcuagaug

SEQ ID NO: 701266 - RNA, 20 nt, Artificial Sequence
  Synthetic
uagcaacuuuugaguagaug

SEQ ID NO: 701267 - RNA, 20 nt, Artificial Sequence
  Synthetic
ugauuuggccaaauacgaug

SEQ ID NO: 701268 - RNA, 20 nt, Artificial Sequence
  Synthetic
uaccccuuugauaugcgaug

SEQ ID NO: 701269 - RNA, 20 nt, Artificial Sequence
  Synthetic
aacugacagcuccugcgaug

SEQ ID NO: 701270 - RNA, 20 nt, Artificial Sequence
  Synthetic
cuacacauaaaagcucgaug

SEQ ID NO: 701271 - RNA, 20 nt, Artificial Sequence
  Synthetic
agcucugucugucuucgaug

SEQ ID NO: 701272 - RNA, 20 nt, Artificial Sequence
  Synthetic
cgauccacucucucaggaug

SEQ ID NO: 701273 - RNA, 20 nt, Artificial Sequence
  Synthetic
auaauccuggacugaggaug

SEQ ID NO: 701274 - RNA, 20 nt, Artificial Sequence
  Synthetic
ucaagcuaaacaaccggaug

SEQ ID NO: 701275 - RNA, 20 nt, Artificial Sequence
  Synthetic
uuggaaaagaucgauggaug

SEQ ID NO: 701276 - RNA, 20 nt, Artificial Sequence
  Synthetic
acauaagaacucucuggaug

SEQ ID NO: 701277 - RNA, 20 nt, Artificial Sequence
  Synthetic
ugaugauguaacauuggaug

SEQ ID NO: 701278 - RNA, 20 nt, Artificial Sequence
  Synthetic
agucugaaccaccucugaug

SEQ ID NO: 701279 - RNA, 20 nt, Artificial Sequence
  Synthetic
uaagcuaaauugcuuugaug

SEQ ID NO: 701280 - RNA, 20 nt, Artificial Sequence
  Synthetic
cagccugucagauaaauaug

SEQ ID NO: 701281 - RNA, 20 nt, Artificial Sequence
  Synthetic
cuauagacuugcgcaauaug

SEQ ID NO: 701282 - RNA, 20 nt, Artificial Sequence
  Synthetic
uaaacuucuaccagaauaug

SEQ ID NO: 701283 - RNA, 20 nt, Artificial Sequence
  Synthetic
acauacucuugaugaauaug

SEQ ID NO: 701284 - RNA, 20 nt, Artificial Sequence
  Synthetic
ugcuuaguaguacuaauaug

SEQ ID NO: 701285 - RNA, 20 nt, Artificial Sequence
  Synthetic
auuguaauguagcccauaug

SEQ ID NO: 701286 - RNA, 20 nt, Artificial Sequence
  Synthetic
acacucgaguauuucauaug

SEQ ID NO: 701287 - RNA, 20 nt, Artificial Sequence
  Synthetic
cugcuagcagagaagauaug

SEQ ID NO: 701288 - RNA, 20 nt, Artificial Sequence
  Synthetic
uugcaugacaacgggauaug

SEQ ID NO: 701289 - RNA, 20 nt, Artificial Sequence
  Synthetic
aaguuaguucaugcuauaug

SEQ ID NO: 701290 - RNA, 20 nt, Artificial Sequence
  Synthetic
ccuuaaucauauuguauaug

SEQ ID NO: 701291 - RNA, 20 nt, Artificial Sequence
  Synthetic
uaaaggaggcaccaacuaug

SEQ ID NO: 701292 - RNA, 20 nt, Artificial Sequence
  Synthetic
uucaaugaaucuacacuaug

SEQ ID NO: 701293 - RNA, 20 nt, Artificial Sequence
  Synthetic
uccacuaguuugaaccuaug

SEQ ID NO: 701294 - RNA, 20 nt, Artificial Sequence
  Synthetic
caaacaagucuguaccuaug

SEQ ID NO: 701295 - RNA, 20 nt, Artificial Sequence
  Synthetic
uuacacagagaggaucuaug

SEQ ID NO: 701296 - RNA, 20 nt, Artificial Sequence
  Synthetic
ccaacuuguuagacaguaug

SEQ ID NO: 701297 - RNA, 20 nt, Artificial Sequence
  Synthetic
acugagugggcacggguaug

SEQ ID NO: 701298 - RNA, 20 nt, Artificial Sequence
  Synthetic
uuugaaugugcagggguaug

SEQ ID NO: 701299 - RNA, 20 nt, Artificial Sequence
  Synthetic
acuguuuaagauuggguaug

SEQ ID NO: 701300 - RNA, 20 nt, Artificial Sequence
  Synthetic
ccacuggacaugcauguaug

SEQ ID NO: 701301 - RNA, 20 nt, Artificial Sequence
  Synthetic
cucuacaugagaaguguaug

SEQ ID NO: 701302 - RNA, 20 nt, Artificial Sequence
  Synthetic
acguuuacaucuaguguaug

SEQ ID NO: 701303 - RNA, 20 nt, Artificial Sequence
  Synthetic
ucaacuggggcuaaauuaug

SEQ ID NO: 701304 - RNA, 20 nt, Artificial Sequence
  Synthetic
ucuguaagagaucuauuaug

SEQ ID NO: 701305 - RNA, 20 nt, Artificial Sequence
  Synthetic
auuccuaugcuuaccuuaug

SEQ ID NO: 701306 - RNA, 20 nt, Artificial Sequence
  Synthetic
uaccuaggcuggacuuuaug

SEQ ID NO: 701307 - RNA, 20 nt, Artificial Sequence
  Synthetic
ugauaugggugaucuuuaug

SEQ ID NO: 701308 - RNA, 20 nt, Artificial Sequence
  Synthetic
cugcggauacaaagaaacug

SEQ ID NO: 701309 - RNA, 20 nt, Artificial Sequence
  Synthetic
cggcagccaucaauaaacug

SEQ ID NO: 701310 - RNA, 20 nt, Artificial Sequence
  Synthetic
caagcacggacuguaaacug

SEQ ID NO: 701311 - RNA, 20 nt, Artificial Sequence
  Synthetic
uaugccaacuccuuaaacug

SEQ ID NO: 701312 - RNA, 20 nt, Artificial Sequence
  Synthetic
auucgggacuguuuaaacug

SEQ ID NO: 701313 - RNA, 20 nt, Artificial Sequence
  Synthetic
agugggauggacaacaacug

SEQ ID NO: 701314 - RNA, 20 nt, Artificial Sequence
  Synthetic
uuagcugugagguacaacug

SEQ ID NO: 701315 - RNA, 20 nt, Artificial Sequence
  Synthetic
ccuaaugaccuguggaacug

SEQ ID NO: 701316 - RNA, 20 nt, Artificial Sequence
  Synthetic
cccaaggcagacaugaacug

SEQ ID NO: 701317 - RNA, 20 nt, Artificial Sequence
  Synthetic
uuacucaaaagguauaacug

SEQ ID NO: 701318 - RNA, 20 nt, Artificial Sequence
  Synthetic
cccuagccuguauguaacug

SEQ ID NO: 701319 - RNA, 20 nt, Artificial Sequence
  Synthetic
ucgccagaauaaauuaacug

SEQ ID NO: 701320 - RNA, 20 nt, Artificial Sequence
  Synthetic
uccgugcuuggucuuaacug

SEQ ID NO: 701321 - RNA, 20 nt, Artificial Sequence
  Synthetic
aagacauguuguaaccacug

SEQ ID NO: 701322 - RNA, 20 nt, Artificial Sequence
  Synthetic
uccuaaaugaauagccacug

SEQ ID NO: 701323 - RNA, 20 nt, Artificial Sequence
  Synthetic
uuaccuuacacaaagcacug

SEQ ID NO: 701324 - RNA, 20 nt, Artificial Sequence
  Synthetic
ucacccaauuaugagcacug

SEQ ID NO: 701325 - RNA, 20 nt, Artificial Sequence
  Synthetic
aguugaggacaggcgcacug

SEQ ID NO: 701326 - RNA, 20 nt, Artificial Sequence
  Synthetic
uuaaccuugcuuaugcacug

SEQ ID NO: 701327 - RNA, 20 nt, Artificial Sequence
  Synthetic
cagcuuguuuuaaaucacug

SEQ ID NO: 701328 - RNA, 20 nt, Artificial Sequence
  Synthetic
cuucuggauaguccucacug

SEQ ID NO: 701329 - RNA, 20 nt, Artificial Sequence
  Synthetic
agauguguguauacagacug

SEQ ID NO: 701330 - RNA, 20 nt, Artificial Sequence
  Synthetic
aaguagaacugaccggacug

SEQ ID NO: 701331 - RNA, 20 nt, Artificial Sequence
  Synthetic
uuuaguauaauccuggacug

SEQ ID NO: 701332 - RNA, 20 nt, Artificial Sequence
  Synthetic
ucucauguuggagaugacug

SEQ ID NO: 701333 - RNA, 20 nt, Artificial Sequence
  Synthetic
ccagugaacgaaucugacug

SEQ ID NO: 701334 - RNA, 20 nt, Artificial Sequence
  Synthetic
cuaucgugcgcucuugacug

SEQ ID NO: 701335 - RNA, 20 nt, Artificial Sequence
  Synthetic
cuuuacacucccacauacug

SEQ ID NO: 701336 - RNA, 20 nt, Artificial Sequence
  Synthetic
uugcacuugggaauauacug

SEQ ID NO: 701337 - RNA, 20 nt, Artificial Sequence
  Synthetic
auuuuguucagaguauacug

SEQ ID NO: 701338 - RNA, 20 nt, Artificial Sequence
  Synthetic
ugugacaguaacuuauacug

SEQ ID NO: 701339 - RNA, 20 nt, Artificial Sequence
  Synthetic
aguuaagaccagugguacug

SEQ ID NO: 701340 - RNA, 20 nt, Artificial Sequence
  Synthetic
cucuaagacauagguuacug

SEQ ID NO: 701341 - RNA, 20 nt, Artificial Sequence
  Synthetic
ugucgaaggcaggccaccug

SEQ ID NO: 701342 - RNA, 20 nt, Artificial Sequence
  Synthetic
uaaccuugugggagcaccug

SEQ ID NO: 701343 - RNA, 20 nt, Artificial Sequence
  Synthetic
cugcagguaucuaagaccug

SEQ ID NO: 701344 - RNA, 20 nt, Artificial Sequence
  Synthetic
aauguuacaauucuuaccug

SEQ ID NO: 701345 - RNA, 20 nt, Artificial Sequence
  Synthetic
cacauacuguuuaaacccug

SEQ ID NO: 701346 - RNA, 20 nt, Artificial Sequence
  Synthetic
aauuuaagcuggucacccug

SEQ ID NO: 701347 - RNA, 20 nt, Artificial Sequence
  Synthetic
uaucaagguaugcuccccug

SEQ ID NO: 701348 - RNA, 20 nt, Artificial Sequence
  Synthetic
auuaccuacccaaagcccug

SEQ ID NO: 701349 - RNA, 20 nt, Artificial Sequence
  Synthetic
aguaauugagcuuggcccug

SEQ ID NO: 701350 - RNA, 20 nt, Artificial Sequence
  Synthetic
cuggcuagaacucugcccug

SEQ ID NO: 701351 - RNA, 20 nt, Artificial Sequence
  Synthetic
uccauuccgagaacagccug

SEQ ID NO: 701352 - RNA, 20 nt, Artificial Sequence
  Synthetic
ugggaugaguuguuagccug

SEQ ID NO: 701353 - RNA, 20 nt, Artificial Sequence
  Synthetic
auaugauguguauuggccug

SEQ ID NO: 701354 - RNA, 20 nt, Artificial Sequence
  Synthetic
cgacguucucuuucugccug

SEQ ID NO: 701355 - RNA, 20 nt, Artificial Sequence
  Synthetic
ucuguguaucacacauccug

SEQ ID NO: 701356 - RNA, 20 nt, Artificial Sequence
  Synthetic
ucacacuauacaagauccug

SEQ ID NO: 701357 - RNA, 20 nt, Artificial Sequence
  Synthetic
agcggacgggacagauccug

SEQ ID NO: 701358 - RNA, 20 nt, Artificial Sequence
  Synthetic
cuugacgcauccuccuccug

SEQ ID NO: 701359 - RNA, 20 nt, Artificial Sequence
  Synthetic
cucauagguugcuuguccug

SEQ ID NO: 701360 - RNA, 20 nt, Artificial Sequence
  Synthetic
cauuugcgcaauuguuccug

SEQ ID NO: 701361 - RNA, 20 nt, Artificial Sequence
  Synthetic
aaagacguaaugcuuuccug

SEQ ID NO: 701362 - RNA, 20 nt, Artificial Sequence
  Synthetic
caccaacugagcgaaagcug

SEQ ID NO: 701363 - RNA, 20 nt, Artificial Sequence
  Synthetic
uauuauuuagcaccaagcug

SEQ ID NO: 701364 - RNA, 20 nt, Artificial Sequence
  Synthetic
agauuguaaaagucaagcug

SEQ ID NO: 701365 - RNA, 20 nt, Artificial Sequence
  Synthetic
caagggaguuuagucagcug

SEQ ID NO: 701366 - RNA, 20 nt, Artificial Sequence
  Synthetic
agcucaugguugaggagcug

SEQ ID NO: 701367 - RNA, 20 nt, Artificial Sequence
  Synthetic
ugucuagcagcuuguagcug

SEQ ID NO: 701368 - RNA, 20 nt, Artificial Sequence
  Synthetic
caaacuaugcauaugcgcug

SEQ ID NO: 701369 - RNA, 20 nt, Artificial Sequence
  Synthetic
cucgagcagaaaccucgcug

SEQ ID NO: 701370 - RNA, 20 nt, Artificial Sequence
  Synthetic
cccccgaggauugggggcug

SEQ ID NO: 701371 - RNA, 20 nt, Artificial Sequence
  Synthetic
ucucuguaauauacaugcug

SEQ ID NO: 701372 - RNA, 20 nt, Artificial Sequence
  Synthetic
uugggaucuugaccaugcug

SEQ ID NO: 701373 - RNA, 20 nt, Artificial Sequence
  Synthetic
cuguuaugaauaagaugcug

SEQ ID NO: 701374 - RNA, 20 nt, Artificial Sequence
  Synthetic
agguuaauaucucuaugcug

SEQ ID NO: 701375 - RNA, 20 nt, Artificial Sequence
  Synthetic
uuaaccauuaagcacugcug

SEQ ID NO: 701376 - RNA, 20 nt, Artificial Sequence
  Synthetic
agaugaaacgcaaauugcug

SEQ ID NO: 701377 - RNA, 20 nt, Artificial Sequence
  Synthetic
cucacgcacaacuuuugcug

SEQ ID NO: 701378 - RNA, 20 nt, Artificial Sequence
  Synthetic
acaggcuucgggaaaaucug

SEQ ID NO: 701379 - RNA, 20 nt, Artificial Sequence
  Synthetic
acuugccuagaugaaaucug

SEQ ID NO: 701380 - RNA, 20 nt, Artificial Sequence
  Synthetic
uuccagcacauaauaaucug

SEQ ID NO: 701381 - RNA, 20 nt, Artificial Sequence
  Synthetic
uauggugugaguuccaucug

SEQ ID NO: 701382 - RNA, 20 nt, Artificial Sequence
  Synthetic
cagagcccauauggcaucug

SEQ ID NO: 701383 - RNA, 20 nt, Artificial Sequence
  Synthetic
uauugcuagcugaucaucug

SEQ ID NO: 701384 - RNA, 20 nt, Artificial Sequence
  Synthetic
aagcaguaccagaauaucug

SEQ ID NO: 701385 - RNA, 20 nt, Artificial Sequence
  Synthetic
aguucuagauugaaacucug

SEQ ID NO: 701386 - RNA, 20 nt, Artificial Sequence
  Synthetic
cguggucaugccuaacucug

SEQ ID NO: 701387 - RNA, 20 nt, Artificial Sequence
  Synthetic
aaaccacuuccguaacucug

SEQ ID NO: 701388 - RNA, 20 nt, Artificial Sequence
  Synthetic
cgcaccucaauuuaacucug

SEQ ID NO: 701389 - RNA, 20 nt, Artificial Sequence
  Synthetic
uggaacucuggcguacucug

SEQ ID NO: 701390 - RNA, 20 nt, Artificial Sequence
  Synthetic
acuucuuugggauuacucug

SEQ ID NO: 701391 - RNA, 20 nt, Artificial Sequence
  Synthetic
auauuugucgacuagcucug

SEQ ID NO: 701392 - RNA, 20 nt, Artificial Sequence
  Synthetic
auugugucagaagcucucug

SEQ ID NO: 701393 - RNA, 20 nt, Artificial Sequence
  Synthetic
ugguacccggcagcucucug

SEQ ID NO: 701394 - RNA, 20 nt, Artificial Sequence
  Synthetic
ucaugccacuaaagucucug

SEQ ID NO: 701395 - RNA, 20 nt, Artificial Sequence
  Synthetic
agacgauaagggagucucug

SEQ ID NO: 701396 - RNA, 20 nt, Artificial Sequence
  Synthetic
cugcaggauaauagucucug

SEQ ID NO: 701397 - RNA, 20 nt, Artificial Sequence
  Synthetic
aagaauacccuuagucucug

SEQ ID NO: 701398 - RNA, 20 nt, Artificial Sequence
  Synthetic
ccucggaaacaaagggucug

SEQ ID NO: 701399 - RNA, 20 nt, Artificial Sequence
  Synthetic
uauccugguuauuuggucug

SEQ ID NO: 701400 - RNA, 20 nt, Artificial Sequence
  Synthetic
cagucauaucuacuugucug

SEQ ID NO: 701401 - RNA, 20 nt, Artificial Sequence
  Synthetic
cgcaaaucucuaugauucug

SEQ ID NO: 701402 - RNA, 20 nt, Artificial Sequence
  Synthetic
cuuuucgcauuaaccuucug

SEQ ID NO: 701403 - RNA, 20 nt, Artificial Sequence
  Synthetic
acuauuugaaagcccuucug

SEQ ID NO: 701404 - RNA, 20 nt, Artificial Sequence
  Synthetic
uacuggcuacaucaguucug

SEQ ID NO: 701405 - RNA, 20 nt, Artificial Sequence
  Synthetic
auaccagucgagggguucug

SEQ ID NO: 701406 - RNA, 20 nt, Artificial Sequence
  Synthetic
caacuuggacaaguuuucug

SEQ ID NO: 701407 - RNA, 20 nt, Artificial Sequence
  Synthetic
cagcccaaaucauuuuucug

SEQ ID NO: 701408 - RNA, 20 nt, Artificial Sequence
  Synthetic
cccguaagagccacaaagug

SEQ ID NO: 701409 - RNA, 20 nt, Artificial Sequence
  Synthetic
ucucgauagaagcuaaagug

SEQ ID NO: 701410 - RNA, 20 nt, Artificial Sequence
  Synthetic
aaacccgucacaaggaagug

SEQ ID NO: 701411 - RNA, 20 nt, Artificial Sequence
  Synthetic
augaauacgcuaaggaagug

SEQ ID NO: 701412 - RNA, 20 nt, Artificial Sequence
  Synthetic
agacuucuuucgcugaagug

SEQ ID NO: 701413 - RNA, 20 nt, Artificial Sequence
  Synthetic
auuuccacgcauuugaagug

SEQ ID NO: 701414 - RNA, 20 nt, Artificial Sequence
  Synthetic
cuggaguauugguauaagug

SEQ ID NO: 701415 - RNA, 20 nt, Artificial Sequence
  Synthetic
auugaaaggcaguaacagug

SEQ ID NO: 701416 - RNA, 20 nt, Artificial Sequence
  Synthetic
augguaguugacggacagug

SEQ ID NO: 701417 - RNA, 20 nt, Artificial Sequence
  Synthetic
ccacuccucguagcccagug

SEQ ID NO: 701418 - RNA, 20 nt, Artificial Sequence
  Synthetic
uucggucguugaaagcagug

SEQ ID NO: 701419 - RNA, 20 nt, Artificial Sequence
  Synthetic
acggagccgagaaggcagug

SEQ ID NO: 701420 - RNA, 20 nt, Artificial Sequence
  Synthetic
ugucaauuggguaugcagug

SEQ ID NO: 701421 - RNA, 20 nt, Artificial Sequence
  Synthetic
auuaagguuaaugugcagug

SEQ ID NO: 701422 - RNA, 20 nt, Artificial Sequence
  Synthetic
aaccugggcaguauucagug

SEQ ID NO: 701423 - RNA, 20 nt, Artificial Sequence
  Synthetic
caagcaaauacccuucagug

SEQ ID NO: 701424 - RNA, 20 nt, Artificial Sequence
  Synthetic
cauacucauaugggagagug

SEQ ID NO: 701425 - RNA, 20 nt, Artificial Sequence
  Synthetic
uaugacaacaccugagagug

SEQ ID NO: 701426 - RNA, 20 nt, Artificial Sequence
  Synthetic
acccaacaacacuuagagug

SEQ ID NO: 701427 - RNA, 20 nt, Artificial Sequence
  Synthetic
cguggaagccuacuggagug

SEQ ID NO: 701428 - RNA, 20 nt, Artificial Sequence
  Synthetic
acauaauaaccuacugagug

SEQ ID NO: 701429 - RNA, 20 nt, Artificial Sequence
  Synthetic
ccacagacauacagugagug

SEQ ID NO: 701430 - RNA, 20 nt, Artificial Sequence
  Synthetic
ccuuuuaugaacguugagug

SEQ ID NO: 701431 - RNA, 20 nt, Artificial Sequence
  Synthetic
aaccuggagggcaacuagug

SEQ ID NO: 701432 - RNA, 20 nt, Artificial Sequence
  Synthetic
caaaccucaaacuacuagug

SEQ ID NO: 701433 - RNA, 20 nt, Artificial Sequence
  Synthetic
aguauugggaagaccuagug

SEQ ID NO: 701434 - RNA, 20 nt, Artificial Sequence
  Synthetic
aaauccacaacauccuagug

SEQ ID NO: 701435 - RNA, 20 nt, Artificial Sequence
  Synthetic
cauaacaucagugaguagug

SEQ ID NO: 701436 - RNA, 20 nt, Artificial Sequence
  Synthetic
auuuagcacaugucguagug

SEQ ID NO: 701437 - RNA, 20 nt, Artificial Sequence
  Synthetic
ccaucacacuuuugguagug

SEQ ID NO: 701438 - RNA, 20 nt, Artificial Sequence
  Synthetic
uuggagcugaauguuuagug

SEQ ID NO: 701439 - RNA, 20 nt, Artificial Sequence
  Synthetic
aauucuauagugauaacgug

SEQ ID NO: 701440 - RNA, 20 nt, Artificial Sequence
  Synthetic
aauucuuuugcuacuacgug

SEQ ID NO: 701441 - RNA, 20 nt, Artificial Sequence
  Synthetic
uuauuacauuguguuacgug

SEQ ID NO: 701442 - RNA, 20 nt, Artificial Sequence
  Synthetic
acuacaaaugaauugccgug

SEQ ID NO: 701443 - RNA, 20 nt, Artificial Sequence
  Synthetic
aaugguuauccuaauccgug

SEQ ID NO: 701444 - RNA, 20 nt, Artificial Sequence
  Synthetic
uaguagguuaacacuccgug

SEQ ID NO: 701445 - RNA, 20 nt, Artificial Sequence
  Synthetic
ucaauccuuuaaguuccgug

SEQ ID NO: 701446 - RNA, 20 nt, Artificial Sequence
  Synthetic
uauucaagugcuaacgcgug

SEQ ID NO: 701447 - RNA, 20 nt, Artificial Sequence
  Synthetic
uuacuagacuuaccaucgug

SEQ ID NO: 701448 - RNA, 20 nt, Artificial Sequence
  Synthetic
cgagugcuaaaaggaucgug

SEQ ID NO: 701449 - RNA, 20 nt, Artificial Sequence
  Synthetic
aacucauaguuugucucgug

SEQ ID NO: 701450 - RNA, 20 nt, Artificial Sequence
  Synthetic
uugggccuggcuuugucgug

SEQ ID NO: 701451 - RNA, 20 nt, Artificial Sequence
  Synthetic
aagcucuagucauauucgug

SEQ ID NO: 701452 - RNA, 20 nt, Artificial Sequence
  Synthetic
ucuagcaagcaacaaaggug

SEQ ID NO: 701453 - RNA, 20 nt, Artificial Sequence
  Synthetic
acacucauacuuuucaggug

SEQ ID NO: 701454 - RNA, 20 nt, Artificial Sequence
  Synthetic
cuucagugggaccugaggug

SEQ ID NO: 701455 - RNA, 20 nt, Artificial Sequence
  Synthetic
acuuagagccaugcuaggug

SEQ ID NO: 701456 - RNA, 20 nt, Artificial Sequence
  Synthetic
augccauaaaaaucuaggug

SEQ ID NO: 701457 - RNA, 20 nt, Artificial Sequence
  Synthetic
uggucugauacauguaggug

SEQ ID NO: 701458 - RNA, 20 nt, Artificial Sequence
  Synthetic
accuaaaagaccuaacggug

SEQ ID NO: 701459 - RNA, 20 nt, Artificial Sequence
  Synthetic
uaaaccagcggauuacggug

SEQ ID NO: 701460 - RNA, 20 nt, Artificial Sequence
  Synthetic
uagacaugugccuuccggug

SEQ ID NO: 701461 - RNA, 20 nt, Artificial Sequence
  Synthetic
uccauugccaaaaggcggug

SEQ ID NO: 701462 - RNA, 20 nt, Artificial Sequence
  Synthetic
uacuaaguuaaacaagggug

SEQ ID NO: 701463 - RNA, 20 nt, Artificial Sequence
  Synthetic
ccagaggcaaaagacgggug

SEQ ID NO: 701464 - RNA, 20 nt, Artificial Sequence
  Synthetic
agaguuauaacaagggggug

SEQ ID NO: 701465 - RNA, 20 nt, Artificial Sequence
  Synthetic
uuagcuuuagacggugggug

SEQ ID NO: 701466 - RNA, 20 nt, Artificial Sequence
  Synthetic
cagaucuaaucuccauggug

SEQ ID NO: 701467 - RNA, 20 nt, Artificial Sequence
  Synthetic
aacaagaaucaucuauggug

SEQ ID NO: 701468 - RNA, 20 nt, Artificial Sequence
  Synthetic
uucuccgguauacacuggug

SEQ ID NO: 701469 - RNA, 20 nt, Artificial Sequence
  Synthetic
ccgaaaggguuuuacuggug

SEQ ID NO: 701470 - RNA, 20 nt, Artificial Sequence
  Synthetic
ccacuaguuuaucccuggug

SEQ ID NO: 701471 - RNA, 20 nt, Artificial Sequence
  Synthetic
cauaucggccauuccuggug

SEQ ID NO: 701472 - RNA, 20 nt, Artificial Sequence
  Synthetic
cucaucauaccacucuggug

SEQ ID NO: 701473 - RNA, 20 nt, Artificial Sequence
  Synthetic
ugaugccgcacacaguggug

SEQ ID NO: 701474 - RNA, 20 nt, Artificial Sequence
  Synthetic
aagaggaauuaauaguggug

SEQ ID NO: 701475 - RNA, 20 nt, Artificial Sequence
  Synthetic
aaguaaucacuagcguggug

SEQ ID NO: 701476 - RNA, 20 nt, Artificial Sequence
  Synthetic
aagggccguaaagguuggug

SEQ ID NO: 701477 - RNA, 20 nt, Artificial Sequence
  Synthetic
uagcuuguaaagacaaugug

SEQ ID NO: 701478 - RNA, 20 nt, Artificial Sequence
  Synthetic
ccagguaacagugcaaugug

SEQ ID NO: 701479 - RNA, 20 nt, Artificial Sequence
  Synthetic
ucauagcguuguaacaugug

SEQ ID NO: 701480 - RNA, 20 nt, Artificial Sequence
  Synthetic
aucuuaucuggucccaugug

SEQ ID NO: 701481 - RNA, 20 nt, Artificial Sequence
  Synthetic
uuauacaucuaggagaugug

SEQ ID NO: 701482 - RNA, 20 nt, Artificial Sequence
  Synthetic
ccaaaugcuacaaugaugug

SEQ ID NO: 701483 - RNA, 20 nt, Artificial Sequence
  Synthetic
cgguuaaugcuaaauaugug

SEQ ID NO: 701484 - RNA, 20 nt, Artificial Sequence
  Synthetic
auccugauagcuguuaugug

SEQ ID NO: 701485 - RNA, 20 nt, Artificial Sequence
  Synthetic
cagaugccugccuuuaugug

SEQ ID NO: 701486 - RNA, 20 nt, Artificial Sequence
  Synthetic
augaauguaaccaaacugug

SEQ ID NO: 701487 - RNA, 20 nt, Artificial Sequence
  Synthetic
uagauaucuaaugugcugug

SEQ ID NO: 701488 - RNA, 20 nt, Artificial Sequence
  Synthetic
auggaggcgauugugcugug

SEQ ID NO: 701489 - RNA, 20 nt, Artificial Sequence
  Synthetic
auuuaaagacgaucucugug

SEQ ID NO: 701490 - RNA, 20 nt, Artificial Sequence
  Synthetic
auaauugcacacagucugug

SEQ ID NO: 701491 - RNA, 20 nt, Artificial Sequence
  Synthetic
acuaggaggucccuagugug

SEQ ID NO: 701492 - RNA, 20 nt, Artificial Sequence
  Synthetic
aaaccuggcuugcacgugug

SEQ ID NO: 701493 - RNA, 20 nt, Artificial Sequence
  Synthetic
cucaagcuugacagugugug

SEQ ID NO: 701494 - RNA, 20 nt, Artificial Sequence
  Synthetic
cugccgagcguacgugugug

SEQ ID NO: 701495 - RNA, 20 nt, Artificial Sequence
  Synthetic
agaccccuuaaaaaauugug

SEQ ID NO: 701496 - RNA, 20 nt, Artificial Sequence
  Synthetic
aagaggcgugauuaauugug

SEQ ID NO: 701497 - RNA, 20 nt, Artificial Sequence
  Synthetic
aaguuuguugcugcauugug

SEQ ID NO: 701498 - RNA, 20 nt, Artificial Sequence
  Synthetic
ccaaugccuaaccuauugug

SEQ ID NO: 701499 - RNA, 20 nt, Artificial Sequence
  Synthetic
cagcauuacgacuacuugug

SEQ ID NO: 701500 - RNA, 20 nt, Artificial Sequence
  Synthetic
acuggcacucucuuguugug

SEQ ID NO: 701501 - RNA, 20 nt, Artificial Sequence
  Synthetic
agcaauggcaaagcuuugug

SEQ ID NO: 701502 - RNA, 20 nt, Artificial Sequence
  Synthetic
aauaggcauugcaguuugug

SEQ ID NO: 701503 - RNA, 20 nt, Artificial Sequence
  Synthetic
uaagcaccauucuuuuugug

SEQ ID NO: 701504 - RNA, 20 nt, Artificial Sequence
  Synthetic
aacaauccaacggaaaauug

SEQ ID NO: 701505 - RNA, 20 nt, Artificial Sequence
  Synthetic
uaccuaaaccuuacaaauug

SEQ ID NO: 701506 - RNA, 20 nt, Artificial Sequence
  Synthetic
uagaggguaucugcaaauug

SEQ ID NO: 701507 - RNA, 20 nt, Artificial Sequence
  Synthetic
uauuacgaggaguuaaauug

SEQ ID NO: 701508 - RNA, 20 nt, Artificial Sequence
  Synthetic
acgagacucaggggcaauug

SEQ ID NO: 701509 - RNA, 20 nt, Artificial Sequence
  Synthetic
aggguaaagacgaggaauug

SEQ ID NO: 701510 - RNA, 20 nt, Artificial Sequence
  Synthetic
uucauagaccaggugaauug

SEQ ID NO: 701511 - RNA, 20 nt, Artificial Sequence
  Synthetic
acugucuacugaaguaauug

SEQ ID NO: 701512 - RNA, 20 nt, Artificial Sequence
  Synthetic
uuuuuggcaccgaguaauug

SEQ ID NO: 701513 - RNA, 20 nt, Artificial Sequence
  Synthetic
ccaagaggcgugauuaauug

SEQ ID NO: 701514 - RNA, 20 nt, Artificial Sequence
  Synthetic
uuaccuccuaagguuaauug

SEQ ID NO: 701515 - RNA, 20 nt, Artificial Sequence
  Synthetic
caggcuaauauacaacauug

SEQ ID NO: 701516 - RNA, 20 nt, Artificial Sequence
  Synthetic
acugaccuugacugacauug

SEQ ID NO: 701517 - RNA, 20 nt, Artificial Sequence
  Synthetic
aguguggcacauuuccauug

SEQ ID NO: 701518 - RNA, 20 nt, Artificial Sequence
  Synthetic
uguauguuagucuagcauug

SEQ ID NO: 701519 - RNA, 20 nt, Artificial Sequence
  Synthetic
aaagaguaaaaucggcauug

SEQ ID NO: 701520 - RNA, 20 nt, Artificial Sequence
  Synthetic
uuauacgaaaggcugcauug

SEQ ID NO: 701521 - RNA, 20 nt, Artificial Sequence
  Synthetic
acgauucguguuuugcauug

SEQ ID NO: 701522 - RNA, 20 nt, Artificial Sequence
  Synthetic
acacagcuaauagaucauug

SEQ ID NO: 701523 - RNA, 20 nt, Artificial Sequence
  Synthetic
aguauaacuuguggucauug

SEQ ID NO: 701524 - RNA, 20 nt, Artificial Sequence
  Synthetic
aguugugaguguccagauug

SEQ ID NO: 701525 - RNA, 20 nt, Artificial Sequence
  Synthetic
cccaugccucuucuagauug

SEQ ID NO: 701526 - RNA, 20 nt, Artificial Sequence
  Synthetic
agaaucucccccgaggauug

SEQ ID NO: 701527 - RNA, 20 nt, Artificial Sequence
  Synthetic
cauagccacuucauggauug

SEQ ID NO: 701528 - RNA, 20 nt, Artificial Sequence
  Synthetic
agacgaagguucacugauug

SEQ ID NO: 701529 - RNA, 20 nt, Artificial Sequence
  Synthetic
uaccgacaauuuggugauug

SEQ ID NO: 701530 - RNA, 20 nt, Artificial Sequence
  Synthetic
ucuagcacggguaaauauug

SEQ ID NO: 701531 - RNA, 20 nt, Artificial Sequence
  Synthetic
uuagaucugcccguauauug

SEQ ID NO: 701532 - RNA, 20 nt, Artificial Sequence
  Synthetic
acagcccucgguguauauug

SEQ ID NO: 701533 - RNA, 20 nt, Artificial Sequence
  Synthetic
aagauucacuuaagcuauug

SEQ ID NO: 701534 - RNA, 20 nt, Artificial Sequence
  Synthetic
ugcuaaauggggugcuauug

SEQ ID NO: 701535 - RNA, 20 nt, Artificial Sequence
  Synthetic
uagaagccauaaaucuauug

SEQ ID NO: 701536 - RNA, 20 nt, Artificial Sequence
  Synthetic
aguaagcccgaucauuauug

SEQ ID NO: 701537 - RNA, 20 nt, Artificial Sequence
  Synthetic
cacuugggaucgauuuauug

SEQ ID NO: 701538 - RNA, 20 nt, Artificial Sequence
  Synthetic
acagcccaaacccuuuauug

SEQ ID NO: 701539 - RNA, 20 nt, Artificial Sequence
  Synthetic
aaucccaaugcauaaacuug

SEQ ID NO: 701540 - RNA, 20 nt, Artificial Sequence
  Synthetic
cuggcuuacacuccaacuug

SEQ ID NO: 701541 - RNA, 20 nt, Artificial Sequence
  Synthetic
auaagccuuacgugaacuug

SEQ ID NO: 701542 - RNA, 20 nt, Artificial Sequence
  Synthetic
cgugcuuaucaacucacuug

SEQ ID NO: 701543 - RNA, 20 nt, Artificial Sequence
  Synthetic
acccauucucggccgacuug

SEQ ID NO: 701544 - RNA, 20 nt, Artificial Sequence
  Synthetic
aauugcccagaccauacuug

SEQ ID NO: 701545 - RNA, 20 nt, Artificial Sequence
  Synthetic
acuacuacuacucauacuug

SEQ ID NO: 701546 - RNA, 20 nt, Artificial Sequence
  Synthetic
ugguauggagaugauacuug

SEQ ID NO: 701547 - RNA, 20 nt, Artificial Sequence
  Synthetic
uagucaacuuagccuacuug

SEQ ID NO: 701548 - RNA, 20 nt, Artificial Sequence
  Synthetic
agggauucuaacucuacuug

SEQ ID NO: 701549 - RNA, 20 nt, Artificial Sequence
  Synthetic
ucaacucucgaaaguacuug

SEQ ID NO: 701550 - RNA, 20 nt, Artificial Sequence
  Synthetic
uacuuaauuguucaaccuug

SEQ ID NO: 701551 - RNA, 20 nt, Artificial Sequence
  Synthetic
uccaccauacuggaaccuug

SEQ ID NO: 701552 - RNA, 20 nt, Artificial Sequence
  Synthetic
uagggaagucccuuaccuug

SEQ ID NO: 701553 - RNA, 20 nt, Artificial Sequence
  Synthetic
cuuacuuuguccaccccuug

SEQ ID NO: 701554 - RNA, 20 nt, Artificial Sequence
  Synthetic
ugucgguuccccagcccuug

SEQ ID NO: 701555 - RNA, 20 nt, Artificial Sequence
  Synthetic
cuuguaaacuugcucccuug

SEQ ID NO: 701556 - RNA, 20 nt, Artificial Sequence
  Synthetic
auuccaauccaaacuccuug

SEQ ID NO: 701557 - RNA, 20 nt, Artificial Sequence
  Synthetic
uugaacucgagguaagcuug

SEQ ID NO: 701558 - RNA, 20 nt, Artificial Sequence
  Synthetic
acaagaugucuuccagcuug

SEQ ID NO: 701559 - RNA, 20 nt, Artificial Sequence
  Synthetic
ugguaugaaacuagagcuug

SEQ ID NO: 701560 - RNA, 20 nt, Artificial Sequence
  Synthetic
aaugggcuaguuacggcuug

SEQ ID NO: 701561 - RNA, 20 nt, Artificial Sequence
  Synthetic
cugaucaguauaagggcuug

SEQ ID NO: 701562 - RNA, 20 nt, Artificial Sequence
  Synthetic
aaacgaugcuuaguggcuug

SEQ ID NO: 701563 - RNA, 20 nt, Artificial Sequence
  Synthetic
acuacaugcugauuggcuug

SEQ ID NO: 701564 - RNA, 20 nt, Artificial Sequence
  Synthetic
ucuagucaugugcaaucuug

SEQ ID NO: 701565 - RNA, 20 nt, Artificial Sequence
  Synthetic
cagccaaagguggcaucuug

SEQ ID NO: 701566 - RNA, 20 nt, Artificial Sequence
  Synthetic
uuuccgcuuuagcacucuug

SEQ ID NO: 701567 - RNA, 20 nt, Artificial Sequence
  Synthetic
uuuauuacccgagacucuug

SEQ ID NO: 701568 - RNA, 20 nt, Artificial Sequence
  Synthetic
uguaagcaucacaucucuug

SEQ ID NO: 701569 - RNA, 20 nt, Artificial Sequence
  Synthetic
acagaaaauccguagucuug

SEQ ID NO: 701570 - RNA, 20 nt, Artificial Sequence
  Synthetic
auaugcgugcuaaacaguug

SEQ ID NO: 701571 - RNA, 20 nt, Artificial Sequence
  Synthetic
uauggacuaagcagcaguug

SEQ ID NO: 701572 - RNA, 20 nt, Artificial Sequence
  Synthetic
ucuagguguucaaggaguug

SEQ ID NO: 701573 - RNA, 20 nt, Artificial Sequence
  Synthetic
aucccguauaauccuaguug

SEQ ID NO: 701574 - RNA, 20 nt, Artificial Sequence
  Synthetic
uggaacagcuuucguaguug

SEQ ID NO: 701575 - RNA, 20 nt, Artificial Sequence
  Synthetic
uagagccuagaguguaguug

SEQ ID NO: 701576 - RNA, 20 nt, Artificial Sequence
  Synthetic
cucccggugcugccacguug

SEQ ID NO: 701577 - RNA, 20 nt, Artificial Sequence
  Synthetic
ccauccccuaaggaccguug

SEQ ID NO: 701578 - RNA, 20 nt, Artificial Sequence
  Synthetic
uguugugacagcggccguug

SEQ ID NO: 701579 - RNA, 20 nt, Artificial Sequence
  Synthetic
acaaaggauucuucggguug

SEQ ID NO: 701580 - RNA, 20 nt, Artificial Sequence
  Synthetic
ugugaccuauaccuggguug

SEQ ID NO: 701581 - RNA, 20 nt, Artificial Sequence
  Synthetic
auauaccuauaccuggguug

SEQ ID NO: 701582 - RNA, 20 nt, Artificial Sequence
  Synthetic
uaaauuuaacuaucugguug

SEQ ID NO: 701583 - RNA, 20 nt, Artificial Sequence
  Synthetic
agucuuagcugaagugguug

SEQ ID NO: 701584 - RNA, 20 nt, Artificial Sequence
  Synthetic
uaguuaagacgcaaauguug

SEQ ID NO: 701585 - RNA, 20 nt, Artificial Sequence
  Synthetic
aaggcagauguccccuguug

SEQ ID NO: 701586 - RNA, 20 nt, Artificial Sequence
  Synthetic
auaucauacauaggcuguug

SEQ ID NO: 701587 - RNA, 20 nt, Artificial Sequence
  Synthetic
auacugaacccuggcuguug

SEQ ID NO: 701588 - RNA, 20 nt, Artificial Sequence
  Synthetic
acaacuccggcucgguguug

SEQ ID NO: 701589 - RNA, 20 nt, Artificial Sequence
  Synthetic
uagaccugaagccguuguug

SEQ ID NO: 701590 - RNA, 20 nt, Artificial Sequence
  Synthetic
uacguuuaaaagucaauuug

SEQ ID NO: 701591 - RNA, 20 nt, Artificial Sequence
  Synthetic
cgauugcagaguugaauuug

SEQ ID NO: 701592 - RNA, 20 nt, Artificial Sequence
  Synthetic
cacguaaaggagcucauuug

SEQ ID NO: 701593 - RNA, 20 nt, Artificial Sequence
  Synthetic
aucuuggaagacacgauuug

SEQ ID NO: 701594 - RNA, 20 nt, Artificial Sequence
  Synthetic
ccuugugguugacaacuuug

SEQ ID NO: 701595 - RNA, 20 nt, Artificial Sequence
  Synthetic
uccugacguauuagacuuug

SEQ ID NO: 701596 - RNA, 20 nt, Artificial Sequence
  Synthetic
acaagugagagaguccuuug

SEQ ID NO: 701597 - RNA, 20 nt, Artificial Sequence
  Synthetic
uccauguccucuuagcuuug

SEQ ID NO: 701598 - RNA, 20 nt, Artificial Sequence
  Synthetic
cugacuaucuguucgcuuug

SEQ ID NO: 701599 - RNA, 20 nt, Artificial Sequence
  Synthetic
uauaccacccguguucuuug

SEQ ID NO: 701600 - RNA, 20 nt, Artificial Sequence
  Synthetic
uuacaaugcuagcgaguuug

SEQ ID NO: 701601 - RNA, 20 nt, Artificial Sequence
  Synthetic
ugacccacacuaguaguuug

SEQ ID NO: 701602 - RNA, 20 nt, Artificial Sequence
  Synthetic
cuaggauaccuuuuaguuug

SEQ ID NO: 701603 - RNA, 20 nt, Artificial Sequence
  Synthetic
auucuaagauuucacguuug

SEQ ID NO: 701604 - RNA, 20 nt, Artificial Sequence
  Synthetic
cagguuuaauggugcguuug

SEQ ID NO: 701605 - RNA, 20 nt, Artificial Sequence
  Synthetic
aaacaguugauccagguuug

SEQ ID NO: 701606 - RNA, 20 nt, Artificial Sequence
  Synthetic
uugaggcggccaaggguuug

SEQ ID NO: 701607 - RNA, 20 nt, Artificial Sequence
  Synthetic
aucgguuuaucugcuguuug

SEQ ID NO: 701608 - RNA, 20 nt, Artificial Sequence
  Synthetic
aggagcgaugauguuguuug

SEQ ID NO: 701609 - RNA, 20 nt, Artificial Sequence
  Synthetic
agauuccauggcuuuguuug

SEQ ID NO: 701610 - RNA, 20 nt, Artificial Sequence
  Synthetic
uuccacugagaccacuuuug

SEQ ID NO: 701611 - RNA, 20 nt, Artificial Sequence
  Synthetic
ugugaguauucuagcuuuug

SEQ ID NO: 701612 - RNA, 20 nt, Artificial Sequence
  Synthetic
ugagagcuuuucgucuuuug

SEQ ID NO: 701613 - RNA, 20 nt, Artificial Sequence
  Synthetic
aaaaugccauucccguuuug

SEQ ID NO: 701614 - RNA, 20 nt, Artificial Sequence
  Synthetic
ugauccuguauacuguuuug

SEQ ID NO: 701615 - RNA, 20 nt, Artificial Sequence
  Synthetic
cguaacagcaagguguuuug

SEQ ID NO: 701616 - RNA, 20 nt, Artificial Sequence
  Synthetic
uaccgucucccuccuuuuug

SEQ ID NO: 701617 - RNA, 20 nt, Artificial Sequence
  Synthetic
ucuugaggucaacacaaaau

SEQ ID NO: 701618 - RNA, 20 nt, Artificial Sequence
  Synthetic
ccaacaagggaguccaaaau

SEQ ID NO: 701619 - RNA, 20 nt, Artificial Sequence
  Synthetic
ccugaaggguacaucaaaau

SEQ ID NO: 701620 - RNA, 20 nt, Artificial Sequence
  Synthetic
ucaguaccauguaucaaaau

SEQ ID NO: 701621 - RNA, 20 nt, Artificial Sequence
  Synthetic
ccggagcaaaagcucaaaau

SEQ ID NO: 701622 - RNA, 20 nt, Artificial Sequence
  Synthetic
cgcaauauggggaagaaaau

SEQ ID NO: 701623 - RNA, 20 nt, Artificial Sequence
  Synthetic
agcgcugagaaaccgaaaau

SEQ ID NO: 701624 - RNA, 20 nt, Artificial Sequence
  Synthetic
uguggcgaacgacauaaaau

SEQ ID NO: 701625 - RNA, 20 nt, Artificial Sequence
  Synthetic
auucugucacauccuaaaau

SEQ ID NO: 701626 - RNA, 20 nt, Artificial Sequence
  Synthetic
ugaagcaauuacuaacaaau

SEQ ID NO: 701627 - RNA, 20 nt, Artificial Sequence
  Synthetic
ccugggcucuacuaccaaau

SEQ ID NO: 701628 - RNA, 20 nt, Artificial Sequence
  Synthetic
cccaccgagaucugccaaau

SEQ ID NO: 701629 - RNA, 20 nt, Artificial Sequence
  Synthetic
cccauagggcucugccaaau

SEQ ID NO: 701630 - RNA, 20 nt, Artificial Sequence
  Synthetic
uaacgaaagcgaaggcaaau

SEQ ID NO: 701631 - RNA, 20 nt, Artificial Sequence
  Synthetic
uacacuccuauucuucaaau

SEQ ID NO: 701632 - RNA, 20 nt, Artificial Sequence
  Synthetic
cuaaccguacacccagaaau

SEQ ID NO: 701633 - RNA, 20 nt, Artificial Sequence
  Synthetic
ugccaaucuaugguugaaau

SEQ ID NO: 701634 - RNA, 20 nt, Artificial Sequence
  Synthetic
uugacuugacucauauaaau

SEQ ID NO: 701635 - RNA, 20 nt, Artificial Sequence
  Synthetic
accuaauuggaacacuaaau

SEQ ID NO: 701636 - RNA, 20 nt, Artificial Sequence
  Synthetic
aagaccgaaaagcacuaaau

SEQ ID NO: 701637 - RNA, 20 nt, Artificial Sequence
  Synthetic
uauguguagauggccuaaau

SEQ ID NO: 701638 - RNA, 20 nt, Artificial Sequence
  Synthetic
agcagucucauguccuaaau

SEQ ID NO: 701639 - RNA, 20 nt, Artificial Sequence
  Synthetic
acacaccugugccuguaaau

SEQ ID NO: 701640 - RNA, 20 nt, Artificial Sequence
  Synthetic
uacuugggcauaguguaaau

SEQ ID NO: 701641 - RNA, 20 nt, Artificial Sequence
  Synthetic
uaaggcgacugcuuuuaaau

SEQ ID NO: 701642 - RNA, 20 nt, Artificial Sequence
  Synthetic
agaaucgcucaccaaacaau

SEQ ID NO: 701643 - RNA, 20 nt, Artificial Sequence
  Synthetic
caaguguugagaaucacaau

SEQ ID NO: 701644 - RNA, 20 nt, Artificial Sequence
  Synthetic
uguagggcuuacuucacaau

SEQ ID NO: 701645 - RNA, 20 nt, Artificial Sequence
  Synthetic
cguagaaacuugaagacaau

SEQ ID NO: 701646 - RNA, 20 nt, Artificial Sequence
  Synthetic
aaucuuccccuauugacaau

SEQ ID NO: 701647 - RNA, 20 nt, Artificial Sequence
  Synthetic
acgaaucucaaugcuacaau

SEQ ID NO: 701648 - RNA, 20 nt, Artificial Sequence
  Synthetic
cuugccucuaaguguacaau

SEQ ID NO: 701649 - RNA, 20 nt, Artificial Sequence
  Synthetic
uagaucauuuaaguuacaau

SEQ ID NO: 701650 - RNA, 20 nt, Artificial Sequence
  Synthetic
aauggcuaggacuugccaau

SEQ ID NO: 701651 - RNA, 20 nt, Artificial Sequence
  Synthetic
uacucguuuaauuaugcaau

SEQ ID NO: 701652 - RNA, 20 nt, Artificial Sequence
  Synthetic
aucuuugucuuaacugcaau

SEQ ID NO: 701653 - RNA, 20 nt, Artificial Sequence
  Synthetic
augucugaggacacugcaau

SEQ ID NO: 701654 - RNA, 20 nt, Artificial Sequence
  Synthetic
ugccucaaucagguugcaau

SEQ ID NO: 701655 - RNA, 20 nt, Artificial Sequence
  Synthetic
aaugagagacguuuaucaau

SEQ ID NO: 701656 - RNA, 20 nt, Artificial Sequence
  Synthetic
uucaaagaggguucgucaau

SEQ ID NO: 701657 - RNA, 20 nt, Artificial Sequence
  Synthetic
cacaggcccccauugucaau

SEQ ID NO: 701658 - RNA, 20 nt, Artificial Sequence
  Synthetic
aaccuagcaucaccuucaau

SEQ ID NO: 701659 - RNA, 20 nt, Artificial Sequence
  Synthetic
aagugucuggcaucuucaau

SEQ ID NO: 701660 - RNA, 20 nt, Artificial Sequence
  Synthetic
cuggguagccuuccaagaau

SEQ ID NO: 701661 - RNA, 20 nt, Artificial Sequence
  Synthetic
uacuuacuguaguacagaau

SEQ ID NO: 701662 - RNA, 20 nt, Artificial Sequence
  Synthetic
auaagagggacacgcagaau

SEQ ID NO: 701663 - RNA, 20 nt, Artificial Sequence
  Synthetic
accacguccgugaucagaau

SEQ ID NO: 701664 - RNA, 20 nt, Artificial Sequence
  Synthetic
ccgugaaaugaggauagaau

SEQ ID NO: 701665 - RNA, 20 nt, Artificial Sequence
  Synthetic
auauuuauagcuuuacgaau

SEQ ID NO: 701666 - RNA, 20 nt, Artificial Sequence
  Synthetic
cugaaaauaguaaaccgaau

SEQ ID NO: 701667 - RNA, 20 nt, Artificial Sequence
  Synthetic
acauuaaugacauaucgaau

SEQ ID NO: 701668 - RNA, 20 nt, Artificial Sequence
  Synthetic
cuaggguaaagacgaggaau

SEQ ID NO: 701669 - RNA, 20 nt, Artificial Sequence
  Synthetic
cagucccuauagauaggaau

SEQ ID NO: 701670 - RNA, 20 nt, Artificial Sequence
  Synthetic
uguuucacugggguaggaau

SEQ ID NO: 701671 - RNA, 20 nt, Artificial Sequence
  Synthetic
uaaugacuaauuguaggaau

SEQ ID NO: 701672 - RNA, 20 nt, Artificial Sequence
  Synthetic
agaguguaggugggcggaau

SEQ ID NO: 701673 - RNA, 20 nt, Artificial Sequence
  Synthetic
uaaaucuccguggguggaau

SEQ ID NO: 701674 - RNA, 20 nt, Artificial Sequence
  Synthetic
uucaacuuagccccaugaau

SEQ ID NO: 701675 - RNA, 20 nt, Artificial Sequence
  Synthetic
acacuaacuuuaagaugaau

SEQ ID NO: 701676 - RNA, 20 nt, Artificial Sequence
  Synthetic
cucccuggacuagccugaau

SEQ ID NO: 701677 - RNA, 20 nt, Artificial Sequence
  Synthetic
accuuggauuauaugugaau

SEQ ID NO: 701678 - RNA, 20 nt, Artificial Sequence
  Synthetic
acacaacuacugcuuugaau

SEQ ID NO: 701679 - RNA, 20 nt, Artificial Sequence
  Synthetic
aagagccaguaccgaauaau

SEQ ID NO: 701680 - RNA, 20 nt, Artificial Sequence
  Synthetic
uuacgugccucuugaauaau

SEQ ID NO: 701681 - RNA, 20 nt, Artificial Sequence
  Synthetic
cuacuguuggcuguaauaau

SEQ ID NO: 701682 - RNA, 20 nt, Artificial Sequence
  Synthetic
caaccaauuaagaacauaau

SEQ ID NO: 701683 - RNA, 20 nt, Artificial Sequence
  Synthetic
uaauaucgcuagaacauaau

SEQ ID NO: 701684 - RNA, 20 nt, Artificial Sequence
  Synthetic
ccuuguaagcacaccauaau

SEQ ID NO: 701685 - RNA, 20 nt, Artificial Sequence
  Synthetic
uagguugaggccuccauaau

SEQ ID NO: 701686 - RNA, 20 nt, Artificial Sequence
  Synthetic
uagugcaguagcagcauaau

SEQ ID NO: 701687 - RNA, 20 nt, Artificial Sequence
  Synthetic
ucaggaaccuucaucauaau

SEQ ID NO: 701688 - RNA, 20 nt, Artificial Sequence
  Synthetic
acagccucagugcucauaau

SEQ ID NO: 701689 - RNA, 20 nt, Artificial Sequence
  Synthetic
aucuucuccuucaggauaau

SEQ ID NO: 701690 - RNA, 20 nt, Artificial Sequence
  Synthetic
uuguacaauguacugauaau

SEQ ID NO: 701691 - RNA, 20 nt, Artificial Sequence
  Synthetic
aacuaucuagaugugauaau

SEQ ID NO: 701692 - RNA, 20 nt, Artificial Sequence
  Synthetic
uuaucggguuagcauauaau

SEQ ID NO: 701693 - RNA, 20 nt, Artificial Sequence
  Synthetic
ccugaaccacgugauauaau

SEQ ID NO: 701694 - RNA, 20 nt, Artificial Sequence
  Synthetic
caaacuaaaggcucacuaau

SEQ ID NO: 701695 - RNA, 20 nt, Artificial Sequence
  Synthetic
uucuggcacucaagacuaau

SEQ ID NO: 701696 - RNA, 20 nt, Artificial Sequence
  Synthetic
agacaugccuagggacuaau

SEQ ID NO: 701697 - RNA, 20 nt, Artificial Sequence
  Synthetic
ucggucagcauuaaccuaau

SEQ ID NO: 701698 - RNA, 20 nt, Artificial Sequence
  Synthetic
aauugaaggcagcaccuaau

SEQ ID NO: 701699 - RNA, 20 nt, Artificial Sequence
  Synthetic
ccaaucuuauguagccuaau

SEQ ID NO: 701700 - RNA, 20 nt, Artificial Sequence
  Synthetic
cagggcgucaucauccuaau

SEQ ID NO: 701701 - RNA, 20 nt, Artificial Sequence
  Synthetic
ccuguacuucaguagcuaau

SEQ ID NO: 701702 - RNA, 20 nt, Artificial Sequence
  Synthetic
aauagcguuguauggcuaau

SEQ ID NO: 701703 - RNA, 20 nt, Artificial Sequence
  Synthetic
cgguaaguugucagucuaau

SEQ ID NO: 701704 - RNA, 20 nt, Artificial Sequence
  Synthetic
cauuugugggagugucuaau

SEQ ID NO: 701705 - RNA, 20 nt, Artificial Sequence
  Synthetic
uuuacccuuaagcuucuaau

SEQ ID NO: 701706 - RNA, 20 nt, Artificial Sequence
  Synthetic
accaugacacguacaguaau

SEQ ID NO: 701707 - RNA, 20 nt, Artificial Sequence
  Synthetic
ugcuagguaggcccaguaau

SEQ ID NO: 701708 - RNA, 20 nt, Artificial Sequence
  Synthetic
cucaggaguuacugaguaau

SEQ ID NO: 701709 - RNA, 20 nt, Artificial Sequence
  Synthetic
caaaaugaggcagccguaau

SEQ ID NO: 701710 - RNA, 20 nt, Artificial Sequence
  Synthetic
ugauagaaggacacgguaau

SEQ ID NO: 701711 - RNA, 20 nt, Artificial Sequence
  Synthetic
uagagggcugcccugguaau

SEQ ID NO: 701712 - RNA, 20 nt, Artificial Sequence
  Synthetic
auuacuguggucacuguaau

SEQ ID NO: 701713 - RNA, 20 nt, Artificial Sequence
  Synthetic
aaaauugcacguccuguaau

SEQ ID NO: 701714 - RNA, 20 nt, Artificial Sequence
  Synthetic
aacaacaaugccucuguaau

SEQ ID NO: 701715 - RNA, 20 nt, Artificial Sequence
  Synthetic
ucucgucaaugucuuguaau

SEQ ID NO: 701716 - RNA, 20 nt, Artificial Sequence
  Synthetic
acacgcgcgcaaaaauuaau

SEQ ID NO: 701717 - RNA, 20 nt, Artificial Sequence
  Synthetic
ucgggccaguauaacuuaau

SEQ ID NO: 701718 - RNA, 20 nt, Artificial Sequence
  Synthetic
accugguuuaacuacuuaau

SEQ ID NO: 701719 - RNA, 20 nt, Artificial Sequence
  Synthetic
aaguggguuugaaccuuaau

SEQ ID NO: 701720 - RNA, 20 nt, Artificial Sequence
  Synthetic
ucacccuaacaaggguuaau

SEQ ID NO: 701721 - RNA, 20 nt, Artificial Sequence
  Synthetic
uauugcgguacuauguuaau

SEQ ID NO: 701722 - RNA, 20 nt, Artificial Sequence
  Synthetic
cuagaccagcugucuuuaau

SEQ ID NO: 701723 - RNA, 20 nt, Artificial Sequence
  Synthetic
ccaacagaguaccuuuuaau

SEQ ID NO: 701724 - RNA, 20 nt, Artificial Sequence
  Synthetic
ccauuauuucaggcaaacau

SEQ ID NO: 701725 - RNA, 20 nt, Artificial Sequence
  Synthetic
acucuggcacguuuaaacau

SEQ ID NO: 701726 - RNA, 20 nt, Artificial Sequence
  Synthetic
cucugugauccuuccaacau

SEQ ID NO: 701727 - RNA, 20 nt, Artificial Sequence
  Synthetic
agcagcaaaggggucaacau

SEQ ID NO: 701728 - RNA, 20 nt, Artificial Sequence
  Synthetic
aauggcauguacgauaacau

SEQ ID NO: 701729 - RNA, 20 nt, Artificial Sequence
  Synthetic
aguggcagaacuucuaacau

SEQ ID NO: 701730 - RNA, 20 nt, Artificial Sequence
  Synthetic
cucaaccaaaguaguaacau

SEQ ID NO: 701731 - RNA, 20 nt, Artificial Sequence
  Synthetic
ucugcuuucugaguuaacau

SEQ ID NO: 701732 - RNA, 20 nt, Artificial Sequence
  Synthetic
uggucaucccaaccccacau

SEQ ID NO: 701733 - RNA, 20 nt, Artificial Sequence
  Synthetic
uacccuucuucaauccacau

SEQ ID NO: 701734 - RNA, 20 nt, Artificial Sequence
  Synthetic
cccacaaagcacaagcacau

SEQ ID NO: 701735 - RNA, 20 nt, Artificial Sequence
  Synthetic
acuaaugagaguuagcacau

SEQ ID NO: 701736 - RNA, 20 nt, Artificial Sequence
  Synthetic
cgucuccucgaacuagacau

SEQ ID NO: 701737 - RNA, 20 nt, Artificial Sequence
  Synthetic
caaacugcgguagcugacau

SEQ ID NO: 701738 - RNA, 20 nt, Artificial Sequence
  Synthetic
ccuaagucucuaggauacau

SEQ ID NO: 701739 - RNA, 20 nt, Artificial Sequence
  Synthetic
cacgccagaagauuauacau

SEQ ID NO: 701740 - RNA, 20 nt, Artificial Sequence
  Synthetic
aaaguauuuaccuacuacau

SEQ ID NO: 701741 - RNA, 20 nt, Artificial Sequence
  Synthetic
cacgccuggaaaaccuacau

SEQ ID NO: 701742 - RNA, 20 nt, Artificial Sequence
  Synthetic
uaaaugcuuguacucuacau

SEQ ID NO: 701743 - RNA, 20 nt, Artificial Sequence
  Synthetic
cauugaaugcuagucuacau

SEQ ID NO: 701744 - RNA, 20 nt, Artificial Sequence
  Synthetic
cuaaccaaaggugaguacau

SEQ ID NO: 701745 - RNA, 20 nt, Artificial Sequence
  Synthetic
cucuucuggccuccguacau

SEQ ID NO: 701746 - RNA, 20 nt, Artificial Sequence
  Synthetic
aauggccaagagggguacau

SEQ ID NO: 701747 - RNA, 20 nt, Artificial Sequence
  Synthetic
agaagcagaacgauguacau

SEQ ID NO: 701748 - RNA, 20 nt, Artificial Sequence
  Synthetic
uacguauucuguauguacau

SEQ ID NO: 701749 - RNA, 20 nt, Artificial Sequence
  Synthetic
uuuaguggauauaguuacau

SEQ ID NO: 701750 - RNA, 20 nt, Artificial Sequence
  Synthetic
cgaaaaugucccuuuuacau

SEQ ID NO: 701751 - RNA, 20 nt, Artificial Sequence
  Synthetic
ucggaacgcuaguacaccau

SEQ ID NO: 701752 - RNA, 20 nt, Artificial Sequence
  Synthetic
agguaaugcuuauggaccau

SEQ ID NO: 701753 - RNA, 20 nt, Artificial Sequence
  Synthetic
uuugcuacauauuggaccau

SEQ ID NO: 701754 - RNA, 20 nt, Artificial Sequence
  Synthetic
ucaaaaccuguucuuaccau

SEQ ID NO: 701755 - RNA, 20 nt, Artificial Sequence
  Synthetic
cugguggccucuauacccau

SEQ ID NO: 701756 - RNA, 20 nt, Artificial Sequence
  Synthetic
aacaauuuuguccagcccau

SEQ ID NO: 701757 - RNA, 20 nt, Artificial Sequence
  Synthetic
uucgauugucuauggcccau

SEQ ID NO: 701758 - RNA, 20 nt, Artificial Sequence
  Synthetic
ugaauauacugaucucccau

SEQ ID NO: 701759 - RNA, 20 nt, Artificial Sequence
  Synthetic
acucuuaacucaauucccau

SEQ ID NO: 701760 - RNA, 20 nt, Artificial Sequence
  Synthetic
cgaacagacuucuuucccau

SEQ ID NO: 701761 - RNA, 20 nt, Artificial Sequence
  Synthetic
ugcacgaccaaaagagccau

SEQ ID NO: 701762 - RNA, 20 nt, Artificial Sequence
  Synthetic
aaagguguaaaaggagccau

SEQ ID NO: 701763 - RNA, 20 nt, Artificial Sequence
  Synthetic
auaagagugcuauuagccau

SEQ ID NO: 701764 - RNA, 20 nt, Artificial Sequence
  Synthetic
cuuguuucaaacacggccau

SEQ ID NO: 701765 - RNA, 20 nt, Artificial Sequence
  Synthetic
uaucuacaaguuugggccau

SEQ ID NO: 701766 - RNA, 20 nt, Artificial Sequence
  Synthetic
auacuucacaauauggccau

SEQ ID NO: 701767 - RNA, 20 nt, Artificial Sequence
  Synthetic
ucaacaacuucuaaauccau

SEQ ID NO: 701768 - RNA, 20 nt, Artificial Sequence
  Synthetic
ccccaccuccaaauauccau

SEQ ID NO: 701769 - RNA, 20 nt, Artificial Sequence
  Synthetic
ucacgauaaugcuuauccau

SEQ ID NO: 701770 - RNA, 20 nt, Artificial Sequence
  Synthetic
cucuaaacgaguuccuccau

SEQ ID NO: 701771 - RNA, 20 nt, Artificial Sequence
  Synthetic
acuagacuaagcagcuccau

SEQ ID NO: 701772 - RNA, 20 nt, Artificial Sequence
  Synthetic
cagcauacgugcaucuccau

SEQ ID NO: 701773 - RNA, 20 nt, Artificial Sequence
  Synthetic
aaaacaagacaucucuccau

SEQ ID NO: 701774 - RNA, 20 nt, Artificial Sequence
  Synthetic
agccuagaacauuucuccau

SEQ ID NO: 701775 - RNA, 20 nt, Artificial Sequence
  Synthetic
ccaaauauguauugguccau

SEQ ID NO: 701776 - RNA, 20 nt, Artificial Sequence
  Synthetic
acuuacgcuuucauguccau

SEQ ID NO: 701777 - RNA, 20 nt, Artificial Sequence
  Synthetic
ugaaaccggggucauuccau

SEQ ID NO: 701778 - RNA, 20 nt, Artificial Sequence
  Synthetic
aaucuugucacuucuuccau

SEQ ID NO: 701779 - RNA, 20 nt, Artificial Sequence
  Synthetic
agcuauguuuggguuuccau

SEQ ID NO: 701780 - RNA, 20 nt, Artificial Sequence
  Synthetic
ucucaagagguaucaagcau

SEQ ID NO: 701781 - RNA, 20 nt, Artificial Sequence
  Synthetic
ugauauucgaaaggaagcau

SEQ ID NO: 701782 - RNA, 20 nt, Artificial Sequence
  Synthetic
cacuacguacaaggaagcau

SEQ ID NO: 701783 - RNA, 20 nt, Artificial Sequence
  Synthetic
acaguguugcauguaagcau

SEQ ID NO: 701784 - RNA, 20 nt, Artificial Sequence
  Synthetic
ucggucuggaaacucagcau

SEQ ID NO: 701785 - RNA, 20 nt, Artificial Sequence
  Synthetic
auuagaaggcgauucagcau

SEQ ID NO: 701786 - RNA, 20 nt, Artificial Sequence
  Synthetic
aauggcgaacaggagagcau

SEQ ID NO: 701787 - RNA, 20 nt, Artificial Sequence
  Synthetic
uuagacuccuuugagagcau

SEQ ID NO: 701788 - RNA, 20 nt, Artificial Sequence
  Synthetic
uaauucuuaugguagagcau

SEQ ID NO: 701789 - RNA, 20 nt, Artificial Sequence
  Synthetic
uauauccauauuuagagcau

SEQ ID NO: 701790 - RNA, 20 nt, Artificial Sequence
  Synthetic
cuuuuucacucaucgagcau

SEQ ID NO: 701791 - RNA, 20 nt, Artificial Sequence
  Synthetic
uugucaucccuaaggagcau

SEQ ID NO: 701792 - RNA, 20 nt, Artificial Sequence
  Synthetic
caaauggaggacaugagcau

SEQ ID NO: 701793 - RNA, 20 nt, Artificial Sequence
  Synthetic
uugugagugacuucuagcau

SEQ ID NO: 701794 - RNA, 20 nt, Artificial Sequence
  Synthetic
acuugcuuaugaugccgcau

SEQ ID NO: 701795 - RNA, 20 nt, Artificial Sequence
  Synthetic
uccuaacauucuugucgcau

SEQ ID NO: 701796 - RNA, 20 nt, Artificial Sequence
  Synthetic
cuacuuuuaugacgaggcau

SEQ ID NO: 701797 - RNA, 20 nt, Artificial Sequence
  Synthetic
ccucacaauagguuaggcau

SEQ ID NO: 701798 - RNA, 20 nt, Artificial Sequence
  Synthetic
cacuuuuacaguuuaggcau

SEQ ID NO: 701799 - RNA, 20 nt, Artificial Sequence
  Synthetic
ugcggagagcagaagggcau

SEQ ID NO: 701800 - RNA, 20 nt, Artificial Sequence
  Synthetic
ucaaauaccaugaggggcau

SEQ ID NO: 701801 - RNA, 20 nt, Artificial Sequence
  Synthetic
ccaguugauuuugauggcau

SEQ ID NO: 701802 - RNA, 20 nt, Artificial Sequence
  Synthetic
acaucgggaagaguuggcau

SEQ ID NO: 701803 - RNA, 20 nt, Artificial Sequence
  Synthetic
uuuuaguguggaacaugcau

SEQ ID NO: 701804 - RNA, 20 nt, Artificial Sequence
  Synthetic
cugcgugugcgagcaugcau

SEQ ID NO: 701805 - RNA, 20 nt, Artificial Sequence
  Synthetic
cagcuguaagagcuaugcau

SEQ ID NO: 701806 - RNA, 20 nt, Artificial Sequence
  Synthetic
cucuccucaaguuuaugcau

SEQ ID NO: 701807 - RNA, 20 nt, Artificial Sequence
  Synthetic
uugggaacuuagaccugcau

SEQ ID NO: 701808 - RNA, 20 nt, Artificial Sequence
  Synthetic
caaaggacaauccucugcau

SEQ ID NO: 701809 - RNA, 20 nt, Artificial Sequence
  Synthetic
uuccccgaacccuagugcau

SEQ ID NO: 701810 - RNA, 20 nt, Artificial Sequence
  Synthetic
agugcugaauagaugugcau

SEQ ID NO: 701811 - RNA, 20 nt, Artificial Sequence
  Synthetic
ugauucaauggcucuugcau

SEQ ID NO: 701812 - RNA, 20 nt, Artificial Sequence
  Synthetic
agguagacaggacuuugcau

SEQ ID NO: 701813 - RNA, 20 nt, Artificial Sequence
  Synthetic
auucaccuuuaagcaaucau

SEQ ID NO: 701814 - RNA, 20 nt, Artificial Sequence
  Synthetic
uacuaaagauggaucaucau

SEQ ID NO: 701815 - RNA, 20 nt, Artificial Sequence
  Synthetic
ccacaaaagucugauaucau

SEQ ID NO: 701816 - RNA, 20 nt, Artificial Sequence
  Synthetic
cacuuuaggucccuuaucau

SEQ ID NO: 701817 - RNA, 20 nt, Artificial Sequence
  Synthetic
cuuucaauuauccuuaucau

SEQ ID NO: 701818 - RNA, 20 nt, Artificial Sequence
  Synthetic
cuaaagucuuggacccucau

SEQ ID NO: 701819 - RNA, 20 nt, Artificial Sequence
  Synthetic
ugguuuucuuauagccucau

SEQ ID NO: 701820 - RNA, 20 nt, Artificial Sequence
  Synthetic
aggaauggauauuagcucau

SEQ ID NO: 701821 - RNA, 20 nt, Artificial Sequence
  Synthetic
uucuagcagcaaaggcucau

SEQ ID NO: 701822 - RNA, 20 nt, Artificial Sequence
  Synthetic
uauucaauagucuugcucau

SEQ ID NO: 701823 - RNA, 20 nt, Artificial Sequence
  Synthetic
uucacagcacuggaucucau

SEQ ID NO: 701824 - RNA, 20 nt, Artificial Sequence
  Synthetic
accuuacacauguaucucau

SEQ ID NO: 701825 - RNA, 20 nt, Artificial Sequence
  Synthetic
aaaccuugccaagcucucau

SEQ ID NO: 701826 - RNA, 20 nt, Artificial Sequence
  Synthetic
cggcuguaaggggaagucau

SEQ ID NO: 701827 - RNA, 20 nt, Artificial Sequence
  Synthetic
uaacguuaucuaucagucau

SEQ ID NO: 701828 - RNA, 20 nt, Artificial Sequence
  Synthetic
auuaccggguuaaaggucau

SEQ ID NO: 701829 - RNA, 20 nt, Artificial Sequence
  Synthetic
cgggcaauuuaggaggucau

SEQ ID NO: 701830 - RNA, 20 nt, Artificial Sequence
  Synthetic
uaagucuaacccugggucau

SEQ ID NO: 701831 - RNA, 20 nt, Artificial Sequence
  Synthetic
acagcuacucuucuggucau

SEQ ID NO: 701832 - RNA, 20 nt, Artificial Sequence
  Synthetic
cacuuuagcuuguaugucau

SEQ ID NO: 701833 - RNA, 20 nt, Artificial Sequence
  Synthetic
cacguagcuuauggugucau

SEQ ID NO: 701834 - RNA, 20 nt, Artificial Sequence
  Synthetic
cacaugauuuguggugucau

SEQ ID NO: 701835 - RNA, 20 nt, Artificial Sequence
  Synthetic
uagugaaguggucaauucau

SEQ ID NO: 701836 - RNA, 20 nt, Artificial Sequence
  Synthetic
cagucgucauucccauucau

SEQ ID NO: 701837 - RNA, 20 nt, Artificial Sequence
  Synthetic
uaaagccauggccgauucau

SEQ ID NO: 701838 - RNA, 20 nt, Artificial Sequence
  Synthetic
cacguaaucuccuuauucau

SEQ ID NO: 701839 - RNA, 20 nt, Artificial Sequence
  Synthetic
ucacucaacugauaguucau

SEQ ID NO: 701840 - RNA, 20 nt, Artificial Sequence
  Synthetic
uaggaguuauuuagguucau

SEQ ID NO: 701841 - RNA, 20 nt, Artificial Sequence
  Synthetic
aagggagguauccuguucau

SEQ ID NO: 701842 - RNA, 20 nt, Artificial Sequence
  Synthetic
aaggugagguuggauuucau

SEQ ID NO: 701843 - RNA, 20 nt, Artificial Sequence
  Synthetic
uaccauuuggaugguuucau

SEQ ID NO: 701844 - RNA, 20 nt, Artificial Sequence
  Synthetic
uccaccagggucuuuuucau

SEQ ID NO: 701845 - RNA, 20 nt, Artificial Sequence
  Synthetic
ugucuggggugacaaaagau

SEQ ID NO: 701846 - RNA, 20 nt, Artificial Sequence
  Synthetic
ucauuauaguaucccaagau

SEQ ID NO: 701847 - RNA, 20 nt, Artificial Sequence
  Synthetic
agaauccuugguaucaagau

SEQ ID NO: 701848 - RNA, 20 nt, Artificial Sequence
  Synthetic
ccuaacagauuacucaagau

SEQ ID NO: 701849 - RNA, 20 nt, Artificial Sequence
  Synthetic
uguguguaucaucucaagau

SEQ ID NO: 701850 - RNA, 20 nt, Artificial Sequence
  Synthetic
auagaagcuuaggggaagau

SEQ ID NO: 701851 - RNA, 20 nt, Artificial Sequence
  Synthetic
ccaauuaggcuacauaagau

SEQ ID NO: 701852 - RNA, 20 nt, Artificial Sequence
  Synthetic
ugcuagcaccacgcuaagau

SEQ ID NO: 701853 - RNA, 20 nt, Artificial Sequence
  Synthetic
uuaggauucagccuacagau

SEQ ID NO: 701854 - RNA, 20 nt, Artificial Sequence
  Synthetic
caacauguacaaaaccagau

SEQ ID NO: 701855 - RNA, 20 nt, Artificial Sequence
  Synthetic
uuaucugagaaagaccagau

SEQ ID NO: 701856 - RNA, 20 nt, Artificial Sequence
  Synthetic
aaauuauccuuuguccagau

SEQ ID NO: 701857 - RNA, 20 nt, Artificial Sequence
  Synthetic
acuauguuaacacugcagau

SEQ ID NO: 701858 - RNA, 20 nt, Artificial Sequence
  Synthetic
ugcacagcgucuagucagau

SEQ ID NO: 701859 - RNA, 20 nt, Artificial Sequence
  Synthetic
cuuaggaacaaccgucagau

SEQ ID NO: 701860 - RNA, 20 nt, Artificial Sequence
  Synthetic
cuccuacauuacugagagau

SEQ ID NO: 701861 - RNA, 20 nt, Artificial Sequence
  Synthetic
acacggaguacagaggagau

SEQ ID NO: 701862 - RNA, 20 nt, Artificial Sequence
  Synthetic
uaaagcuauucuggggagau

SEQ ID NO: 701863 - RNA, 20 nt, Artificial Sequence
  Synthetic
uacgguguccaaauugagau

SEQ ID NO: 701864 - RNA, 20 nt, Artificial Sequence
  Synthetic
cggcuaguacuaauugagau

SEQ ID NO: 701865 - RNA, 20 nt, Artificial Sequence
  Synthetic
aggaggaucccagaauagau

SEQ ID NO: 701866 - RNA, 20 nt, Artificial Sequence
  Synthetic
agugccaacggcagauagau

SEQ ID NO: 701867 - RNA, 20 nt, Artificial Sequence
  Synthetic
cucaaucagucccuauagau

SEQ ID NO: 701868 - RNA, 20 nt, Artificial Sequence
  Synthetic
ucucagcuggaauuauagau

SEQ ID NO: 701869 - RNA, 20 nt, Artificial Sequence
  Synthetic
aauuuagucguuaaguagau

SEQ ID NO: 701870 - RNA, 20 nt, Artificial Sequence
  Synthetic
cgcugauacuaccuguagau

SEQ ID NO: 701871 - RNA, 20 nt, Artificial Sequence
  Synthetic
auuagguuguuaucuuagau

SEQ ID NO: 701872 - RNA, 20 nt, Artificial Sequence
  Synthetic
aguuggagacuguguuagau

SEQ ID NO: 701873 - RNA, 20 nt, Artificial Sequence
  Synthetic
uguuccucagcugucccgau

SEQ ID NO: 701874 - RNA, 20 nt, Artificial Sequence
  Synthetic
cugcuuccuagccauccgau

SEQ ID NO: 701875 - RNA, 20 nt, Artificial Sequence
  Synthetic
uuaagccugcaauauccgau

SEQ ID NO: 701876 - RNA, 20 nt, Artificial Sequence
  Synthetic
uuuacuuguuccaguccgau

SEQ ID NO: 701877 - RNA, 20 nt, Artificial Sequence
  Synthetic
uuggguaagaauuuuucgau

SEQ ID NO: 701878 - RNA, 20 nt, Artificial Sequence
  Synthetic
auuucccaucacagaaggau

SEQ ID NO: 701879 - RNA, 20 nt, Artificial Sequence
  Synthetic
aucuucucugcuagcaggau

SEQ ID NO: 701880 - RNA, 20 nt, Artificial Sequence
  Synthetic
agagaaucucccccgaggau

SEQ ID NO: 701881 - RNA, 20 nt, Artificial Sequence
  Synthetic
uauaauccuggacugaggau

SEQ ID NO: 701882 - RNA, 20 nt, Artificial Sequence
  Synthetic
acaucauagauugcuaggau

SEQ ID NO: 701883 - RNA, 20 nt, Artificial Sequence
  Synthetic
uauaaaagaucuuguaggau

SEQ ID NO: 701884 - RNA, 20 nt, Artificial Sequence
  Synthetic
uccagaggcuacuagcggau

SEQ ID NO: 701885 - RNA, 20 nt, Artificial Sequence
  Synthetic
uauguaauguacucagggau

SEQ ID NO: 701886 - RNA, 20 nt, Artificial Sequence
  Synthetic
ucguauauccuuucagggau

SEQ ID NO: 701887 - RNA, 20 nt, Artificial Sequence
  Synthetic
agaaguuucaaaggcgggau

SEQ ID NO: 701888 - RNA, 20 nt, Artificial Sequence
  Synthetic
ucagauguuauauucgggau

SEQ ID NO: 701889 - RNA, 20 nt, Artificial Sequence
  Synthetic
uggaaaucuagauaugggau

SEQ ID NO: 701890 - RNA, 20 nt, Artificial Sequence
  Synthetic
caagcaagcugcacugggau

SEQ ID NO: 701891 - RNA, 20 nt, Artificial Sequence
  Synthetic
augcacccuuuuacugggau

SEQ ID NO: 701892 - RNA, 20 nt, Artificial Sequence
  Synthetic
cuacaaugcaccagugggau

SEQ ID NO: 701893 - RNA, 20 nt, Artificial Sequence
  Synthetic
aacugaauucgaugugggau

SEQ ID NO: 701894 - RNA, 20 nt, Artificial Sequence
  Synthetic
cccuggcagcaagaauggau

SEQ ID NO: 701895 - RNA, 20 nt, Artificial Sequence
  Synthetic
cugcuggaggaugaauggau

SEQ ID NO: 701896 - RNA, 20 nt, Artificial Sequence
  Synthetic
uccuuuugacccgcauggau

SEQ ID NO: 701897 - RNA, 20 nt, Artificial Sequence
  Synthetic
aacucugcuggaucauggau

SEQ ID NO: 701898 - RNA, 20 nt, Artificial Sequence
  Synthetic
uuaucuaucuaucgauggau

SEQ ID NO: 701899 - RNA, 20 nt, Artificial Sequence
  Synthetic
aagauugugaagaacuggau

SEQ ID NO: 701900 - RNA, 20 nt, Artificial Sequence
  Synthetic
aagcuccaguuuagcuggau

SEQ ID NO: 701901 - RNA, 20 nt, Artificial Sequence
  Synthetic
cucccgcaaggaguuuggau

SEQ ID NO: 701902 - RNA, 20 nt, Artificial Sequence
  Synthetic
uuacaccccucaauaaugau

SEQ ID NO: 701903 - RNA, 20 nt, Artificial Sequence
  Synthetic
ccagcacucuagaacaugau

SEQ ID NO: 701904 - RNA, 20 nt, Artificial Sequence
  Synthetic
uaucauaguaagaagaugau

SEQ ID NO: 701905 - RNA, 20 nt, Artificial Sequence
  Synthetic
uuccccuuacagccgaugau

SEQ ID NO: 701906 - RNA, 20 nt, Artificial Sequence
  Synthetic
ccaccuauuauguggaugau

SEQ ID NO: 701907 - RNA, 20 nt, Artificial Sequence
  Synthetic
aacuuugguggggguaugau

SEQ ID NO: 701908 - RNA, 20 nt, Artificial Sequence
  Synthetic
ugcacgugguuaaaacugau

SEQ ID NO: 701909 - RNA, 20 nt, Artificial Sequence
  Synthetic
aaagacgaagguucacugau

SEQ ID NO: 701910 - RNA, 20 nt, Artificial Sequence
  Synthetic
aguucaccucagggacugau

SEQ ID NO: 701911 - RNA, 20 nt, Artificial Sequence
  Synthetic
cuucuagugggcugacugau

SEQ ID NO: 701912 - RNA, 20 nt, Artificial Sequence
  Synthetic
uugugacaggcuuuacugau

SEQ ID NO: 701913 - RNA, 20 nt, Artificial Sequence
  Synthetic
aaugaauugcacaaccugau

SEQ ID NO: 701914 - RNA, 20 nt, Artificial Sequence
  Synthetic
cacugggaaaucaggcugau

SEQ ID NO: 701915 - RNA, 20 nt, Artificial Sequence
  Synthetic
uaucuuagcccugaucugau

SEQ ID NO: 701916 - RNA, 20 nt, Artificial Sequence
  Synthetic
ucaacaguuacuacucugau

SEQ ID NO: 701917 - RNA, 20 nt, Artificial Sequence
  Synthetic
uugacuaagguucuucugau

SEQ ID NO: 701918 - RNA, 20 nt, Artificial Sequence
  Synthetic
aaaaguauaguucaagugau

SEQ ID NO: 701919 - RNA, 20 nt, Artificial Sequence
  Synthetic
aacaggaaccuaugagugau

SEQ ID NO: 701920 - RNA, 20 nt, Artificial Sequence
  Synthetic
ccuuaccgaauacuagugau

SEQ ID NO: 701921 - RNA, 20 nt, Artificial Sequence
  Synthetic
uuagccugucacuuagugau

SEQ ID NO: 701922 - RNA, 20 nt, Artificial Sequence
  Synthetic
auuaaucgucaucuugugau

SEQ ID NO: 701923 - RNA, 20 nt, Artificial Sequence
  Synthetic
aaauuacguguagccuugau

SEQ ID NO: 701924 - RNA, 20 nt, Artificial Sequence
  Synthetic
ccuaaaguugcagucuugau

SEQ ID NO: 701925 - RNA, 20 nt, Artificial Sequence
  Synthetic
cccgucuuaccggucuugau

SEQ ID NO: 701926 - RNA, 20 nt, Artificial Sequence
  Synthetic
cuagggcucaguuaguugau

SEQ ID NO: 701927 - RNA, 20 nt, Artificial Sequence
  Synthetic
agcacugguuaaucguugau

SEQ ID NO: 701928 - RNA, 20 nt, Artificial Sequence
  Synthetic
ucuucauguugcagguugau

SEQ ID NO: 701929 - RNA, 20 nt, Artificial Sequence
  Synthetic
agugauccuuguugguugau

SEQ ID NO: 701930 - RNA, 20 nt, Artificial Sequence
  Synthetic
aacgauucgguuuauuugau

SEQ ID NO: 701931 - RNA, 20 nt, Artificial Sequence
  Synthetic
uccaaucacgacauuuugau

SEQ ID NO: 701932 - RNA, 20 nt, Artificial Sequence
  Synthetic
cagagaucgucuuuaaauau

SEQ ID NO: 701933 - RNA, 20 nt, Artificial Sequence
  Synthetic
ucguaugcacuuggcaauau

SEQ ID NO: 701934 - RNA, 20 nt, Artificial Sequence
  Synthetic
uguaacucuuuaacgaauau

SEQ ID NO: 701935 - RNA, 20 nt, Artificial Sequence
  Synthetic
ucaaauggaccguggaauau

SEQ ID NO: 701936 - RNA, 20 nt, Artificial Sequence
  Synthetic
auccgugaagaugcuaauau

SEQ ID NO: 701937 - RNA, 20 nt, Artificial Sequence
  Synthetic
ucccaauugaccaaacauau

SEQ ID NO: 701938 - RNA, 20 nt, Artificial Sequence
  Synthetic
aagagacggccauaacauau

SEQ ID NO: 701939 - RNA, 20 nt, Artificial Sequence
  Synthetic
cauaucacacauccacauau

SEQ ID NO: 701940 - RNA, 20 nt, Artificial Sequence
  Synthetic
uaacuaguaaucuuacauau

SEQ ID NO: 701941 - RNA, 20 nt, Artificial Sequence
  Synthetic
uaaauuuuccggaaccauau

SEQ ID NO: 701942 - RNA, 20 nt, Artificial Sequence
  Synthetic
caaccuuucucaauccauau

SEQ ID NO: 701943 - RNA, 20 nt, Artificial Sequence
  Synthetic
ucuaaugagucuaagcauau

SEQ ID NO: 701944 - RNA, 20 nt, Artificial Sequence
  Synthetic
caugugugaguuaggcauau

SEQ ID NO: 701945 - RNA, 20 nt, Artificial Sequence
  Synthetic
cugccugguugucugcauau

SEQ ID NO: 701946 - RNA, 20 nt, Artificial Sequence
  Synthetic
ccuucacuauguuugcauau

SEQ ID NO: 701947 - RNA, 20 nt, Artificial Sequence
  Synthetic
aagucguuuagggaucauau

SEQ ID NO: 701948 - RNA, 20 nt, Artificial Sequence
  Synthetic
aguuuaaacgugcuucauau

SEQ ID NO: 701949 - RNA, 20 nt, Artificial Sequence
  Synthetic
agaaucuguuaaggggauau

SEQ ID NO: 701950 - RNA, 20 nt, Artificial Sequence
  Synthetic
agcgcuguacuuggugauau

SEQ ID NO: 701951 - RNA, 20 nt, Artificial Sequence
  Synthetic
cggauuaaucgcacauauau

SEQ ID NO: 701952 - RNA, 20 nt, Artificial Sequence
  Synthetic
cggagauccuaguuauauau

SEQ ID NO: 701953 - RNA, 20 nt, Artificial Sequence
  Synthetic
ccucaugacaccaacuauau

SEQ ID NO: 701954 - RNA, 20 nt, Artificial Sequence
  Synthetic
caucgcauaguuuaguauau

SEQ ID NO: 701955 - RNA, 20 nt, Artificial Sequence
  Synthetic
uucuacguaccgagguauau

SEQ ID NO: 701956 - RNA, 20 nt, Artificial Sequence
  Synthetic
ugauaauagagaaucacuau

SEQ ID NO: 701957 - RNA, 20 nt, Artificial Sequence
  Synthetic
ucuggcuauugugugacuau

SEQ ID NO: 701958 - RNA, 20 nt, Artificial Sequence
  Synthetic
uacauuagcacuaauacuau

SEQ ID NO: 701959 - RNA, 20 nt, Artificial Sequence
  Synthetic
ccauuaagaaggcaaccuau

SEQ ID NO: 701960 - RNA, 20 nt, Artificial Sequence
  Synthetic
uauuuguucaacgaaccuau

SEQ ID NO: 701961 - RNA, 20 nt, Artificial Sequence
  Synthetic
uagucguggcagagaccuau

SEQ ID NO: 701962 - RNA, 20 nt, Artificial Sequence
  Synthetic
cauauacuuacuuccccuau

SEQ ID NO: 701963 - RNA, 20 nt, Artificial Sequence
  Synthetic
ucagaagaauaggugccuau

SEQ ID NO: 701964 - RNA, 20 nt, Artificial Sequence
  Synthetic
aggcacaggugugugccuau

SEQ ID NO: 701965 - RNA, 20 nt, Artificial Sequence
  Synthetic
cuaaguuauaguuauccuau

SEQ ID NO: 701966 - RNA, 20 nt, Artificial Sequence
  Synthetic
aagggucugauuacuccuau

SEQ ID NO: 701967 - RNA, 20 nt, Artificial Sequence
  Synthetic
aucuucaagauugcuccuau

SEQ ID NO: 701968 - RNA, 20 nt, Artificial Sequence
  Synthetic
ccugucguaguacuuccuau

SEQ ID NO: 701969 - RNA, 20 nt, Artificial Sequence
  Synthetic
agcagucugacaauagcuau

SEQ ID NO: 701970 - RNA, 20 nt, Artificial Sequence
  Synthetic
aggaaugcaaaggacgcuau

SEQ ID NO: 701971 - RNA, 20 nt, Artificial Sequence
  Synthetic
agaggcgacuuuucugcuau

SEQ ID NO: 701972 - RNA, 20 nt, Artificial Sequence
  Synthetic
uaauuggaggggcuugcuau

SEQ ID NO: 701973 - RNA, 20 nt, Artificial Sequence
  Synthetic
acgguuaaguucuuugcuau

SEQ ID NO: 701974 - RNA, 20 nt, Artificial Sequence
  Synthetic
uucugaguuuggaaaucuau

SEQ ID NO: 701975 - RNA, 20 nt, Artificial Sequence
  Synthetic
caucguuuuuaucaaucuau

SEQ ID NO: 701976 - RNA, 20 nt, Artificial Sequence
  Synthetic
uucggauacuaugaaucuau

SEQ ID NO: 701977 - RNA, 20 nt, Artificial Sequence
  Synthetic
uaauaguccacuagcucuau

SEQ ID NO: 701978 - RNA, 20 nt, Artificial Sequence
  Synthetic
aacugacuuaaugcgucuau

SEQ ID NO: 701979 - RNA, 20 nt, Artificial Sequence
  Synthetic
aaaugaacgugacauucuau

SEQ ID NO: 701980 - RNA, 20 nt, Artificial Sequence
  Synthetic
cauaugcagaaugauucuau

SEQ ID NO: 701981 - RNA, 20 nt, Artificial Sequence
  Synthetic
uaaagaccccaaacuucuau

SEQ ID NO: 701982 - RNA, 20 nt, Artificial Sequence
  Synthetic
accaacuauaagcaaaguau

SEQ ID NO: 701983 - RNA, 20 nt, Artificial Sequence
  Synthetic
uacaaaacuggccgaaguau

SEQ ID NO: 701984 - RNA, 20 nt, Artificial Sequence
  Synthetic
uuucccgaucgauuaaguau

SEQ ID NO: 701985 - RNA, 20 nt, Artificial Sequence
  Synthetic
aguuguaggguuuucaguau

SEQ ID NO: 701986 - RNA, 20 nt, Artificial Sequence
  Synthetic
uccuuacuggugaagaguau

SEQ ID NO: 701987 - RNA, 20 nt, Artificial Sequence
  Synthetic
caguuucccaaucggaguau

SEQ ID NO: 701988 - RNA, 20 nt, Artificial Sequence
  Synthetic
uugcacauguccuggaguau

SEQ ID NO: 701989 - RNA, 20 nt, Artificial Sequence
  Synthetic
acaggcugauugacuaguau

SEQ ID NO: 701990 - RNA, 20 nt, Artificial Sequence
  Synthetic
caaaauucuguguuuaguau

SEQ ID NO: 701991 - RNA, 20 nt, Artificial Sequence
  Synthetic
ccgagacgggcugcacguau

SEQ ID NO: 701992 - RNA, 20 nt, Artificial Sequence
  Synthetic
aaucaacacuuuuuacguau

SEQ ID NO: 701993 - RNA, 20 nt, Artificial Sequence
  Synthetic
cuuauuagcaugccucguau

SEQ ID NO: 701994 - RNA, 20 nt, Artificial Sequence
  Synthetic
cucauguucuacauucguau

SEQ ID NO: 701995 - RNA, 20 nt, Artificial Sequence
  Synthetic
ucauuccacaacccagguau

SEQ ID NO: 701996 - RNA, 20 nt, Artificial Sequence
  Synthetic
cuaacaucuacagcagguau

SEQ ID NO: 701997 - RNA, 20 nt, Artificial Sequence
  Synthetic
acuguuucagcgggagguau

SEQ ID NO: 701998 - RNA, 20 nt, Artificial Sequence
  Synthetic
cacugagugggcacggguau

SEQ ID NO: 701999 - RNA, 20 nt, Artificial Sequence
  Synthetic
ucaacucucaaaaccuguau

SEQ ID NO: 702000 - RNA, 20 nt, Artificial Sequence
  Synthetic
aacugcccugggcccuguau

SEQ ID NO: 702001 - RNA, 20 nt, Artificial Sequence
  Synthetic
aacguuuacaucuaguguau

SEQ ID NO: 702002 - RNA, 20 nt, Artificial Sequence
  Synthetic
caacguaggaauaauuguau

SEQ ID NO: 702003 - RNA, 20 nt, Artificial Sequence
  Synthetic
ucaagaaucuaccauuguau

SEQ ID NO: 702004 - RNA, 20 nt, Artificial Sequence
  Synthetic
acgauacuguuaaguuguau

SEQ ID NO: 702005 - RNA, 20 nt, Artificial Sequence
  Synthetic
ugacuagguuauaguuguau

SEQ ID NO: 702006 - RNA, 20 nt, Artificial Sequence
  Synthetic
uaguuuccacugucaauuau

SEQ ID NO: 702007 - RNA, 20 nt, Artificial Sequence
  Synthetic
uaguguggauuugacauuau

SEQ ID NO: 702008 - RNA, 20 nt, Artificial Sequence
  Synthetic
aaccgagcuguuuacauuau

SEQ ID NO: 702009 - RNA, 20 nt, Artificial Sequence
  Synthetic
agauaucuacuugccauuau

SEQ ID NO: 702010 - RNA, 20 nt, Artificial Sequence
  Synthetic
uaaacuaucgguaggauuau

SEQ ID NO: 702011 - RNA, 20 nt, Artificial Sequence
  Synthetic
cuaguccaaauagauauuau

SEQ ID NO: 702012 - RNA, 20 nt, Artificial Sequence
  Synthetic
ugaauugacacguauauuau

SEQ ID NO: 702013 - RNA, 20 nt, Artificial Sequence
  Synthetic
auaugcaggccuucuauuau

SEQ ID NO: 702014 - RNA, 20 nt, Artificial Sequence
  Synthetic
cagggucuucuuuaacuuau

SEQ ID NO: 702015 - RNA, 20 nt, Artificial Sequence
  Synthetic
acguaaacaauuauacuuau

SEQ ID NO: 702016 - RNA, 20 nt, Artificial Sequence
  Synthetic
ucugggggcaauagccuuau

SEQ ID NO: 702017 - RNA, 20 nt, Artificial Sequence
  Synthetic
cgacuguagguggugcuuau

SEQ ID NO: 702018 - RNA, 20 nt, Artificial Sequence
  Synthetic
agagauuagcaaucaguuau

SEQ ID NO: 702019 - RNA, 20 nt, Artificial Sequence
  Synthetic
cuaacuaagucacagguuau

SEQ ID NO: 702020 - RNA, 20 nt, Artificial Sequence
  Synthetic
acaugcccugauuggguuau

SEQ ID NO: 702021 - RNA, 20 nt, Artificial Sequence
  Synthetic
ucaucacuaucaaugguuau

SEQ ID NO: 702022 - RNA, 20 nt, Artificial Sequence
  Synthetic
uuccaguggauaacuguuau

SEQ ID NO: 702023 - RNA, 20 nt, Artificial Sequence
  Synthetic
ccaacuuauucugguguuau

SEQ ID NO: 702024 - RNA, 20 nt, Artificial Sequence
  Synthetic
aaggguguucaccuauuuau

SEQ ID NO: 702025 - RNA, 20 nt, Artificial Sequence
  Synthetic
aaugcaaugcuuggguuuau

SEQ ID NO: 702026 - RNA, 20 nt, Artificial Sequence
  Synthetic
uuagacgcuucaugguuuau

SEQ ID NO: 702027 - RNA, 20 nt, Artificial Sequence
  Synthetic
acuagcguggugugguuuau

SEQ ID NO: 702028 - RNA, 20 nt, Artificial Sequence
  Synthetic
auagucaaguuuauguuuau

SEQ ID NO: 702029 - RNA, 20 nt, Artificial Sequence
  Synthetic
uugcuccccaagcauuuuau

SEQ ID NO: 702030 - RNA, 20 nt, Artificial Sequence
  Synthetic
cagauaucgacaacuuuuau

SEQ ID NO: 702031 - RNA, 20 nt, Artificial Sequence
  Synthetic
uaggcauccaguucuuuuau

SEQ ID NO: 702032 - RNA, 20 nt, Artificial Sequence
  Synthetic
acaugcguaucucguuuuau

SEQ ID NO: 702033 - RNA, 20 nt, Artificial Sequence
  Synthetic
cauacccuccucauuuuuau

SEQ ID NO: 702034 - RNA, 20 nt, Artificial Sequence
  Synthetic
cgcuucuaucaacaaaaacu

SEQ ID NO: 702035 - RNA, 20 nt, Artificial Sequence
  Synthetic
agaggcuggaucuuaaaacu

SEQ ID NO: 702036 - RNA, 20 nt, Artificial Sequence
  Synthetic
cugccugcuaaaucuaaacu

SEQ ID NO: 702037 - RNA, 20 nt, Artificial Sequence
  Synthetic
aggacacccuuuauuaaacu

SEQ ID NO: 702038 - RNA, 20 nt, Artificial Sequence
  Synthetic
aauucgggacuguuuaaacu

SEQ ID NO: 702039 - RNA, 20 nt, Artificial Sequence
  Synthetic
uuuacguagggcaaccaacu

SEQ ID NO: 702040 - RNA, 20 nt, Artificial Sequence
  Synthetic
cagguggugccgauucaacu

SEQ ID NO: 702041 - RNA, 20 nt, Artificial Sequence
  Synthetic
cauuacacugcaugagaacu

SEQ ID NO: 702042 - RNA, 20 nt, Artificial Sequence
  Synthetic
uucaugaacacuugggaacu

SEQ ID NO: 702043 - RNA, 20 nt, Artificial Sequence
  Synthetic
ugcuucaaaggccaugaacu

SEQ ID NO: 702044 - RNA, 20 nt, Artificial Sequence
  Synthetic
ugaaguugauguucauaacu

SEQ ID NO: 702045 - RNA, 20 nt, Artificial Sequence
  Synthetic
uacaaagaaaggggauaacu

SEQ ID NO: 702046 - RNA, 20 nt, Artificial Sequence
  Synthetic
cacaaugcccauauauaacu

SEQ ID NO: 702047 - RNA, 20 nt, Artificial Sequence
  Synthetic
uccacuuuuguugacuaacu

SEQ ID NO: 702048 - RNA, 20 nt, Artificial Sequence
  Synthetic
auauaauugcccuccuaacu

SEQ ID NO: 702049 - RNA, 20 nt, Artificial Sequence
  Synthetic
agagguacccaagucuaacu

SEQ ID NO: 702050 - RNA, 20 nt, Artificial Sequence
  Synthetic
cacacucuaguguucuaacu

SEQ ID NO: 702051 - RNA, 20 nt, Artificial Sequence
  Synthetic
ugcguuuguuagcaguaacu

SEQ ID NO: 702052 - RNA, 20 nt, Artificial Sequence
  Synthetic
cucgccagaauaaauuaacu

SEQ ID NO: 702053 - RNA, 20 nt, Artificial Sequence
  Synthetic
uuccagguaccuuauuaacu

SEQ ID NO: 702054 - RNA, 20 nt, Artificial Sequence
  Synthetic
acuugacuacuuaguuaacu

SEQ ID NO: 702055 - RNA, 20 nt, Artificial Sequence
  Synthetic
ucuuccgcauuuaaaacacu

SEQ ID NO: 702056 - RNA, 20 nt, Artificial Sequence
  Synthetic
agcuauuuauuggaaacacu

SEQ ID NO: 702057 - RNA, 20 nt, Artificial Sequence
  Synthetic
ugguggucgcaguaaacacu

SEQ ID NO: 702058 - RNA, 20 nt, Artificial Sequence
  Synthetic
auacgugcuucaugaacacu

SEQ ID NO: 702059 - RNA, 20 nt, Artificial Sequence
  Synthetic
agcuaaaaccaccccacacu

SEQ ID NO: 702060 - RNA, 20 nt, Artificial Sequence
  Synthetic
cuuccacuagaccgcacacu

SEQ ID NO: 702061 - RNA, 20 nt, Artificial Sequence
  Synthetic
ccauucauagcgcugacacu

SEQ ID NO: 702062 - RNA, 20 nt, Artificial Sequence
  Synthetic
uguaugcuaacuucuacacu

SEQ ID NO: 702063 - RNA, 20 nt, Artificial Sequence
  Synthetic
uugguauuugagguaccacu

SEQ ID NO: 702064 - RNA, 20 nt, Artificial Sequence
  Synthetic
aucagugccugcuuaccacu

SEQ ID NO: 702065 - RNA, 20 nt, Artificial Sequence
  Synthetic
aagcaagguaaacacccacu

SEQ ID NO: 702066 - RNA, 20 nt, Artificial Sequence
  Synthetic
uacaauuuguugaucccacu

SEQ ID NO: 702067 - RNA, 20 nt, Artificial Sequence
  Synthetic
accaccgauacagagccacu

SEQ ID NO: 702068 - RNA, 20 nt, Artificial Sequence
  Synthetic
auccuaaaugaauagccacu

SEQ ID NO: 702069 - RNA, 20 nt, Artificial Sequence
  Synthetic
ccauaacucacaaggccacu

SEQ ID NO: 702070 - RNA, 20 nt, Artificial Sequence
  Synthetic
cacucaacuacugggccacu

SEQ ID NO: 702071 - RNA, 20 nt, Artificial Sequence
  Synthetic
auuccgagagcuaugccacu

SEQ ID NO: 702072 - RNA, 20 nt, Artificial Sequence
  Synthetic
cacaguucagcuuuuccacu

SEQ ID NO: 702073 - RNA, 20 nt, Artificial Sequence
  Synthetic
auuuagacaagggaagcacu

SEQ ID NO: 702074 - RNA, 20 nt, Artificial Sequence
  Synthetic
agugcuguuagugaagcacu

SEQ ID NO: 702075 - RNA, 20 nt, Artificial Sequence
  Synthetic
cgugcaauuuugggcgcacu

SEQ ID NO: 702076 - RNA, 20 nt, Artificial Sequence
  Synthetic
cauuuguucaucuaggcacu

SEQ ID NO: 702077 - RNA, 20 nt, Artificial Sequence
  Synthetic
aaccaaauuucguaugcacu

SEQ ID NO: 702078 - RNA, 20 nt, Artificial Sequence
  Synthetic
cuaauaaacaagauugcacu

SEQ ID NO: 702079 - RNA, 20 nt, Artificial Sequence
  Synthetic
uauuagucauuaugaucacu

SEQ ID NO: 702080 - RNA, 20 nt, Artificial Sequence
  Synthetic
ucuucuggauaguccucacu

SEQ ID NO: 702081 - RNA, 20 nt, Artificial Sequence
  Synthetic
auuuuguacguaggcucacu

SEQ ID NO: 702082 - RNA, 20 nt, Artificial Sequence
  Synthetic
agacgcuagcgggucucacu

SEQ ID NO: 702083 - RNA, 20 nt, Artificial Sequence
  Synthetic
uagaaacgguaaaagucacu

SEQ ID NO: 702084 - RNA, 20 nt, Artificial Sequence
  Synthetic
acagcuaccccaacuucacu

SEQ ID NO: 702085 - RNA, 20 nt, Artificial Sequence
  Synthetic
cccagucagauucguucacu

SEQ ID NO: 702086 - RNA, 20 nt, Artificial Sequence
  Synthetic
cauggccaaccccuaagacu

SEQ ID NO: 702087 - RNA, 20 nt, Artificial Sequence
  Synthetic
caagugaagccuuuaagacu

SEQ ID NO: 702088 - RNA, 20 nt, Artificial Sequence
  Synthetic
cuguugcaauacuccagacu

SEQ ID NO: 702089 - RNA, 20 nt, Artificial Sequence
  Synthetic
agaguacugaguaagagacu

SEQ ID NO: 702090 - RNA, 20 nt, Artificial Sequence
  Synthetic
aguguaaguucuacgagacu

SEQ ID NO: 702091 - RNA, 20 nt, Artificial Sequence
  Synthetic
ugacuaccccaaguuagacu

SEQ ID NO: 702092 - RNA, 20 nt, Artificial Sequence
  Synthetic
aaacccauucucggccgacu

SEQ ID NO: 702093 - RNA, 20 nt, Artificial Sequence
  Synthetic
uaaauuacaaguuugcgacu

SEQ ID NO: 702094 - RNA, 20 nt, Artificial Sequence
  Synthetic
aguuaagagcuggaaggacu

SEQ ID NO: 702095 - RNA, 20 nt, Artificial Sequence
  Synthetic
uugguaucagguggaggacu

SEQ ID NO: 702096 - RNA, 20 nt, Artificial Sequence
  Synthetic
aaauauacguucuuaggacu

SEQ ID NO: 702097 - RNA, 20 nt, Artificial Sequence
  Synthetic
cuaaucuugguuuuaggacu

SEQ ID NO: 702098 - RNA, 20 nt, Artificial Sequence
  Synthetic
uucaggucccuauagggacu

SEQ ID NO: 702099 - RNA, 20 nt, Artificial Sequence
  Synthetic
cccagugaacgaaucugacu

SEQ ID NO: 702100 - RNA, 20 nt, Artificial Sequence
  Synthetic
agagaugcugaaccuugacu

SEQ ID NO: 702101 - RNA, 20 nt, Artificial Sequence
  Synthetic
cuugcagaauacaacauacu

SEQ ID NO: 702102 - RNA, 20 nt, Artificial Sequence
  Synthetic
uuugaagugaaagccauacu

SEQ ID NO: 702103 - RNA, 20 nt, Artificial Sequence
  Synthetic
uaauggcuaaaugccauacu

SEQ ID NO: 702104 - RNA, 20 nt, Artificial Sequence
  Synthetic
uuuaauugaucucucauacu

SEQ ID NO: 702105 - RNA, 20 nt, Artificial Sequence
  Synthetic
cugguucacacggauauacu

SEQ ID NO: 702106 - RNA, 20 nt, Artificial Sequence
  Synthetic
aaucaaggcaucccuauacu

SEQ ID NO: 702107 - RNA, 20 nt, Artificial Sequence
  Synthetic
ccagcuaaggcuucuauacu

SEQ ID NO: 702108 - RNA, 20 nt, Artificial Sequence
  Synthetic
uaguaacaauaacguauacu

SEQ ID NO: 702109 - RNA, 20 nt, Artificial Sequence
  Synthetic
uuaugcucccugccacuacu

SEQ ID NO: 702110 - RNA, 20 nt, Artificial Sequence
  Synthetic
cgugaauguaugauacuacu

SEQ ID NO: 702111 - RNA, 20 nt, Artificial Sequence
  Synthetic
aguaggguuaguuuacuacu

SEQ ID NO: 702112 - RNA, 20 nt, Artificial Sequence
  Synthetic
aaguaccccuaucaucuacu

SEQ ID NO: 702113 - RNA, 20 nt, Artificial Sequence
  Synthetic
acagggauucuaacucuacu

SEQ ID NO: 702114 - RNA, 20 nt, Artificial Sequence
  Synthetic
uuaauaaagcccacucuacu

SEQ ID NO: 702115 - RNA, 20 nt, Artificial Sequence
  Synthetic
uuaccaaugugcacucuacu

SEQ ID NO: 702116 - RNA, 20 nt, Artificial Sequence
  Synthetic
aucccccuacguugucuacu

SEQ ID NO: 702117 - RNA, 20 nt, Artificial Sequence
  Synthetic
agucaacucucgaaaguacu

SEQ ID NO: 702118 - RNA, 20 nt, Artificial Sequence
  Synthetic
caguaguaaaucagaguacu

SEQ ID NO: 702119 - RNA, 20 nt, Artificial Sequence
  Synthetic
caguacuaauuucauguacu

SEQ ID NO: 702120 - RNA, 20 nt, Artificial Sequence
  Synthetic
auagccgcuaaagauguacu

SEQ ID NO: 702121 - RNA, 20 nt, Artificial Sequence
  Synthetic
aguguugacgaaccuguacu

SEQ ID NO: 702122 - RNA, 20 nt, Artificial Sequence
  Synthetic
aagaaugggggcccuguacu

SEQ ID NO: 702123 - RNA, 20 nt, Artificial Sequence
  Synthetic
acuucggccaguuuuguacu

SEQ ID NO: 702124 - RNA, 20 nt, Artificial Sequence
  Synthetic
uucgcaaaguauagauuacu

SEQ ID NO: 702125 - RNA, 20 nt, Artificial Sequence
  Synthetic
agucaaguagugauauuacu

SEQ ID NO: 702126 - RNA, 20 nt, Artificial Sequence
  Synthetic
auuuuccacgcuuucuuacu

SEQ ID NO: 702127 - RNA, 20 nt, Artificial Sequence
  Synthetic
uauggccugaggagguuacu

SEQ ID NO: 702128 - RNA, 20 nt, Artificial Sequence
  Synthetic
uuuagcgauucuggguuacu

SEQ ID NO: 702129 - RNA, 20 nt, Artificial Sequence
  Synthetic
cccgaaugcacccuuuuacu

SEQ ID NO: 702130 - RNA, 20 nt, Artificial Sequence
  Synthetic
uauacauccgauguuuuacu

SEQ ID NO: 702131 - RNA, 20 nt, Artificial Sequence
  Synthetic
agucaagcaguggguaaccu

SEQ ID NO: 702132 - RNA, 20 nt, Artificial Sequence
  Synthetic
cucaauucaaaaaggcaccu

SEQ ID NO: 702133 - RNA, 20 nt, Artificial Sequence
  Synthetic
caucauggcauuaggcaccu

SEQ ID NO: 702134 - RNA, 20 nt, Artificial Sequence
  Synthetic
augucaguuuuuagucaccu

SEQ ID NO: 702135 - RNA, 20 nt, Artificial Sequence
  Synthetic
auuuagaccaaaguucaccu

SEQ ID NO: 702136 - RNA, 20 nt, Artificial Sequence
  Synthetic
auaaaccaggaguuucaccu

SEQ ID NO: 702137 - RNA, 20 nt, Artificial Sequence
  Synthetic
ucuauuaggacuuuggaccu

SEQ ID NO: 702138 - RNA, 20 nt, Artificial Sequence
  Synthetic
cuccgucuucauaaugaccu

SEQ ID NO: 702139 - RNA, 20 nt, Artificial Sequence
  Synthetic
uagggucucccacaugaccu

SEQ ID NO: 702140 - RNA, 20 nt, Artificial Sequence
  Synthetic
cugucuuggcaguaugaccu

SEQ ID NO: 702141 - RNA, 20 nt, Artificial Sequence
  Synthetic
auccuuaucaugaaauaccu

SEQ ID NO: 702142 - RNA, 20 nt, Artificial Sequence
  Synthetic
uagguucagcucacauaccu

SEQ ID NO: 702143 - RNA, 20 nt, Artificial Sequence
  Synthetic
augucugaguuaucauaccu

SEQ ID NO: 702144 - RNA, 20 nt, Artificial Sequence
  Synthetic
ucuuauaaugcuuuauaccu

SEQ ID NO: 702145 - RNA, 20 nt, Artificial Sequence
  Synthetic
auuacaaauaucaucuaccu

SEQ ID NO: 702146 - RNA, 20 nt, Artificial Sequence
  Synthetic
uuugcaagaauacucuaccu

SEQ ID NO: 702147 - RNA, 20 nt, Artificial Sequence
  Synthetic
ugagcugccacuaaguaccu

SEQ ID NO: 702148 - RNA, 20 nt, Artificial Sequence
  Synthetic
acugaauggcaagcguaccu

SEQ ID NO: 702149 - RNA, 20 nt, Artificial Sequence
  Synthetic
aaggauaaguagguguaccu

SEQ ID NO: 702150 - RNA, 20 nt, Artificial Sequence
  Synthetic
uauucgaaauccccuuaccu

SEQ ID NO: 702151 - RNA, 20 nt, Artificial Sequence
  Synthetic
cugaacaaguuucguuaccu

SEQ ID NO: 702152 - RNA, 20 nt, Artificial Sequence
  Synthetic
aauccgggcaaggguuaccu

SEQ ID NO: 702153 - RNA, 20 nt, Artificial Sequence
  Synthetic
aacuaggguuacguuuaccu

SEQ ID NO: 702154 - RNA, 20 nt, Artificial Sequence
  Synthetic
agagcgaaaccagaaacccu

SEQ ID NO: 702155 - RNA, 20 nt, Artificial Sequence
  Synthetic
uuaucuuaucagacaacccu

SEQ ID NO: 702156 - RNA, 20 nt, Artificial Sequence
  Synthetic
cauggcacguguuuaacccu

SEQ ID NO: 702157 - RNA, 20 nt, Artificial Sequence
  Synthetic
cuccggggguaauccacccu

SEQ ID NO: 702158 - RNA, 20 nt, Artificial Sequence
  Synthetic
uacucagaauguuagacccu

SEQ ID NO: 702159 - RNA, 20 nt, Artificial Sequence
  Synthetic
cuaaccuguuguucuacccu

SEQ ID NO: 702160 - RNA, 20 nt, Artificial Sequence
  Synthetic
caauuccucgucuuuacccu

SEQ ID NO: 702161 - RNA, 20 nt, Artificial Sequence
  Synthetic
agcauuggaaauugaccccu

SEQ ID NO: 702162 - RNA, 20 nt, Artificial Sequence
  Synthetic
cagcaacaauaguauccccu

SEQ ID NO: 702163 - RNA, 20 nt, Artificial Sequence
  Synthetic
uugcacuugcugaguccccu

SEQ ID NO: 702164 - RNA, 20 nt, Artificial Sequence
  Synthetic
cauuguuaacuacaagcccu

SEQ ID NO: 702165 - RNA, 20 nt, Artificial Sequence
  Synthetic
caaucaacuaacugagcccu

SEQ ID NO: 702166 - RNA, 20 nt, Artificial Sequence
  Synthetic
aucaacucacuugcggcccu

SEQ ID NO: 702167 - RNA, 20 nt, Artificial Sequence
  Synthetic
uacucauagacagaugcccu

SEQ ID NO: 702168 - RNA, 20 nt, Artificial Sequence
  Synthetic
ccacaaaagcgaagugcccu

SEQ ID NO: 702169 - RNA, 20 nt, Artificial Sequence
  Synthetic
cauauguuagguugugcccu

SEQ ID NO: 702170 - RNA, 20 nt, Artificial Sequence
  Synthetic
uccugcgacugccaaucccu

SEQ ID NO: 702171 - RNA, 20 nt, Artificial Sequence
  Synthetic
uuccuugagugugcaucccu

SEQ ID NO: 702172 - RNA, 20 nt, Artificial Sequence
  Synthetic
caagauacuucuggaucccu

SEQ ID NO: 702173 - RNA, 20 nt, Artificial Sequence
  Synthetic
auauuccugugccacucccu

SEQ ID NO: 702174 - RNA, 20 nt, Artificial Sequence
  Synthetic
uaagggcaccacgacucccu

SEQ ID NO: 702175 - RNA, 20 nt, Artificial Sequence
  Synthetic
aacuugcaaguuaccucccu

SEQ ID NO: 702176 - RNA, 20 nt, Artificial Sequence
  Synthetic
auugaucccuaauccucccu

SEQ ID NO: 702177 - RNA, 20 nt, Artificial Sequence
  Synthetic
cagaguaguccucucucccu

SEQ ID NO: 702178 - RNA, 20 nt, Artificial Sequence
  Synthetic
aaguaauccaauuagucccu

SEQ ID NO: 702179 - RNA, 20 nt, Artificial Sequence
  Synthetic
uaucuacaaauaccgucccu

SEQ ID NO: 702180 - RNA, 20 nt, Artificial Sequence
  Synthetic
uaaauguaaacguauucccu

SEQ ID NO: 702181 - RNA, 20 nt, Artificial Sequence
  Synthetic
uggaggugccauuguucccu

SEQ ID NO: 702182 - RNA, 20 nt, Artificial Sequence
  Synthetic
uugaaucgaauauuuucccu

SEQ ID NO: 702183 - RNA, 20 nt, Artificial Sequence
  Synthetic
uggaccaaucuuaaaagccu

SEQ ID NO: 702184 - RNA, 20 nt, Artificial Sequence
  Synthetic
accuacacguuucaaagccu

SEQ ID NO: 702185 - RNA, 20 nt, Artificial Sequence
  Synthetic
uacagaucuguuauaagccu

SEQ ID NO: 702186 - RNA, 20 nt, Artificial Sequence
  Synthetic
cugugaucacuagucagccu

SEQ ID NO: 702187 - RNA, 20 nt, Artificial Sequence
  Synthetic
uaguguacacuguugagccu

SEQ ID NO: 702188 - RNA, 20 nt, Artificial Sequence
  Synthetic
caugaacagaagcuuagccu

SEQ ID NO: 702189 - RNA, 20 nt, Artificial Sequence
  Synthetic
ucuauaacuuugguuagccu

SEQ ID NO: 702190 - RNA, 20 nt, Artificial Sequence
  Synthetic
uccguguaucccuuuagccu

SEQ ID NO: 702191 - RNA, 20 nt, Artificial Sequence
  Synthetic
uaaugcuugaaaauaggccu

SEQ ID NO: 702192 - RNA, 20 nt, Artificial Sequence
  Synthetic
uuagcuguucaauuaggccu

SEQ ID NO: 702193 - RNA, 20 nt, Artificial Sequence
  Synthetic
uggauuguuggauuaggccu

SEQ ID NO: 702194 - RNA, 20 nt, Artificial Sequence
  Synthetic
aguagaagaaacaccggccu

SEQ ID NO: 702195 - RNA, 20 nt, Artificial Sequence
  Synthetic
cguagaugagaagagggccu

SEQ ID NO: 702196 - RNA, 20 nt, Artificial Sequence
  Synthetic
cucgguguauauuggggccu

SEQ ID NO: 702197 - RNA, 20 nt, Artificial Sequence
  Synthetic
acacaagaaaugaugggccu

SEQ ID NO: 702198 - RNA, 20 nt, Artificial Sequence
  Synthetic
uccgugucauauaauggccu

SEQ ID NO: 702199 - RNA, 20 nt, Artificial Sequence
  Synthetic
auuguugaaggaccuggccu

SEQ ID NO: 702200 - RNA, 20 nt, Artificial Sequence
  Synthetic
aacaauauauaggacugccu

SEQ ID NO: 702201 - RNA, 20 nt, Artificial Sequence
  Synthetic
cggggccaacauaucugccu

SEQ ID NO: 702202 - RNA, 20 nt, Artificial Sequence
  Synthetic
acgacguucucuuucugccu

SEQ ID NO: 702203 - RNA, 20 nt, Artificial Sequence
  Synthetic
uuggagaaacaagagugccu

SEQ ID NO: 702204 - RNA, 20 nt, Artificial Sequence
  Synthetic
acuuaucaauggcauugccu

SEQ ID NO: 702205 - RNA, 20 nt, Artificial Sequence
  Synthetic
agguggguggaauauugccu

SEQ ID NO: 702206 - RNA, 20 nt, Artificial Sequence
  Synthetic
uacaucuuauauuguugccu

SEQ ID NO: 702207 - RNA, 20 nt, Artificial Sequence
  Synthetic
ccuuuugugcguggaauccu

SEQ ID NO: 702208 - RNA, 20 nt, Artificial Sequence
  Synthetic
acacuagccucuguaauccu

SEQ ID NO: 702209 - RNA, 20 nt, Artificial Sequence
  Synthetic
agcugccagugcaacauccu

SEQ ID NO: 702210 - RNA, 20 nt, Artificial Sequence
  Synthetic
aauauaauuccugcgauccu

SEQ ID NO: 702211 - RNA, 20 nt, Artificial Sequence
  Synthetic
uucucuguuuuccggauccu

SEQ ID NO: 702212 - RNA, 20 nt, Artificial Sequence
  Synthetic
ucagguagaaaaccuauccu

SEQ ID NO: 702213 - RNA, 20 nt, Artificial Sequence
  Synthetic
cuaaucauagcaguuauccu

SEQ ID NO: 702214 - RNA, 20 nt, Artificial Sequence
  Synthetic
uaaaguaguuuuacacuccu

SEQ ID NO: 702215 - RNA, 20 nt, Artificial Sequence
  Synthetic
aacuaucugugccuacuccu

SEQ ID NO: 702216 - RNA, 20 nt, Artificial Sequence
  Synthetic
ucuuaaaacgcgguccuccu

SEQ ID NO: 702217 - RNA, 20 nt, Artificial Sequence
  Synthetic
cugauaugcauaaagcuccu

SEQ ID NO: 702218 - RNA, 20 nt, Artificial Sequence
  Synthetic
auccuucggcaagcgcuccu

SEQ ID NO: 702219 - RNA, 20 nt, Artificial Sequence
  Synthetic
caguuaaauucugcgcuccu

SEQ ID NO: 702220 - RNA, 20 nt, Artificial Sequence
  Synthetic
ugguuugcuaguccucuccu

SEQ ID NO: 702221 - RNA, 20 nt, Artificial Sequence
  Synthetic
cugugguggaucuaaguccu

SEQ ID NO: 702222 - RNA, 20 nt, Artificial Sequence
  Synthetic
auaaauagguuggcaguccu

SEQ ID NO: 702223 - RNA, 20 nt, Artificial Sequence
  Synthetic
acucauagguugcuuguccu

SEQ ID NO: 702224 - RNA, 20 nt, Artificial Sequence
  Synthetic
uacccaauacgaaaauuccu

SEQ ID NO: 702225 - RNA, 20 nt, Artificial Sequence
  Synthetic
augauucuuguacaauuccu

SEQ ID NO: 702226 - RNA, 20 nt, Artificial Sequence
  Synthetic
agacauaaguuacccuuccu

SEQ ID NO: 702227 - RNA, 20 nt, Artificial Sequence
  Synthetic
auauacauagcugccuuccu

SEQ ID NO: 702228 - RNA, 20 nt, Artificial Sequence
  Synthetic
uaaccaacuauuagcuuccu

SEQ ID NO: 702229 - RNA, 20 nt, Artificial Sequence
  Synthetic
aaaaagggcuaagucuuccu

SEQ ID NO: 702230 - RNA, 20 nt, Artificial Sequence
  Synthetic
ugagguauaauggucuuccu

SEQ ID NO: 702231 - RNA, 20 nt, Artificial Sequence
  Synthetic
auaggaggucagaauuuccu

SEQ ID NO: 702232 - RNA, 20 nt, Artificial Sequence
  Synthetic
acccgauacuuuuauuuccu

SEQ ID NO: 702233 - RNA, 20 nt, Artificial Sequence
  Synthetic
caacuucuaggcuuuuuccu

SEQ ID NO: 702234 - RNA, 20 nt, Artificial Sequence
  Synthetic
aguacauuaucaucaaagcu

SEQ ID NO: 702235 - RNA, 20 nt, Artificial Sequence
  Synthetic
cuauuaugcuugaccaagcu

SEQ ID NO: 702236 - RNA, 20 nt, Artificial Sequence
  Synthetic
aggauuacuacgaagaagcu

SEQ ID NO: 702237 - RNA, 20 nt, Artificial Sequence
  Synthetic
uaugcuuagacuuagaagcu

SEQ ID NO: 702238 - RNA, 20 nt, Artificial Sequence
  Synthetic
accaccuucuccgugaagcu

SEQ ID NO: 702239 - RNA, 20 nt, Artificial Sequence
  Synthetic
aggagcagcaccgguaagcu

SEQ ID NO: 702240 - RNA, 20 nt, Artificial Sequence
  Synthetic
ucccuauaauguaaacagcu

SEQ ID NO: 702241 - RNA, 20 nt, Artificial Sequence
  Synthetic
uugaguguguugugacagcu

SEQ ID NO: 702242 - RNA, 20 nt, Artificial Sequence
  Synthetic
agacaagaugucuuccagcu

SEQ ID NO: 702243 - RNA, 20 nt, Artificial Sequence
  Synthetic
ccuaccuuugcaaagcagcu

SEQ ID NO: 702244 - RNA, 20 nt, Artificial Sequence
  Synthetic
uaucuagcauaagcgcagcu

SEQ ID NO: 702245 - RNA, 20 nt, Artificial Sequence
  Synthetic
uguacuggaaugaggcagcu

SEQ ID NO: 702246 - RNA, 20 nt, Artificial Sequence
  Synthetic
aguauuuaguuggaagagcu

SEQ ID NO: 702247 - RNA, 20 nt, Artificial Sequence
  Synthetic
auuauaguauacccagagcu

SEQ ID NO: 702248 - RNA, 20 nt, Artificial Sequence
  Synthetic
aagaccucuugacaggagcu

SEQ ID NO: 702249 - RNA, 20 nt, Artificial Sequence
  Synthetic
cccauacggaaagaugagcu

SEQ ID NO: 702250 - RNA, 20 nt, Artificial Sequence
  Synthetic
uuccgugugguauaauagcu

SEQ ID NO: 702251 - RNA, 20 nt, Artificial Sequence
  Synthetic
ucuagcaacacaguauagcu

SEQ ID NO: 702252 - RNA, 20 nt, Artificial Sequence
  Synthetic
aacaacaacucuaccuagcu

SEQ ID NO: 702253 - RNA, 20 nt, Artificial Sequence
  Synthetic
cacguuucccuucaguagcu

SEQ ID NO: 702254 - RNA, 20 nt, Artificial Sequence
  Synthetic
uuucauccaggguguuagcu

SEQ ID NO: 702255 - RNA, 20 nt, Artificial Sequence
  Synthetic
ugaguagaugagcaaacgcu

SEQ ID NO: 702256 - RNA, 20 nt, Artificial Sequence
  Synthetic
aauaccuaagaauucacgcu

SEQ ID NO: 702257 - RNA, 20 nt, Artificial Sequence
  Synthetic
acuuguggauugaagacgcu

SEQ ID NO: 702258 - RNA, 20 nt, Artificial Sequence
  Synthetic
uuaguuccucacuagacgcu

SEQ ID NO: 702259 - RNA, 20 nt, Artificial Sequence
  Synthetic
ugugccuguaaauaggcgcu

SEQ ID NO: 702260 - RNA, 20 nt, Artificial Sequence
  Synthetic
ugcuuaguuucccuugcgcu

SEQ ID NO: 702261 - RNA, 20 nt, Artificial Sequence
  Synthetic
uauaauuacugauaaucgcu

SEQ ID NO: 702262 - RNA, 20 nt, Artificial Sequence
  Synthetic
agugaggaaagauggucgcu

SEQ ID NO: 702263 - RNA, 20 nt, Artificial Sequence
  Synthetic
uguuagcuguuuccaaggcu

SEQ ID NO: 702264 - RNA, 20 nt, Artificial Sequence
  Synthetic
uggaccgucuagugcaggcu

SEQ ID NO: 702265 - RNA, 20 nt, Artificial Sequence
  Synthetic
cuggaacuaguuaucaggcu

SEQ ID NO: 702266 - RNA, 20 nt, Artificial Sequence
  Synthetic
acuaccaaauugguuaggcu

SEQ ID NO: 702267 - RNA, 20 nt, Artificial Sequence
  Synthetic
ccuuuguuuagaguacggcu

SEQ ID NO: 702268 - RNA, 20 nt, Artificial Sequence
  Synthetic
uuagaacugaauucccggcu

SEQ ID NO: 702269 - RNA, 20 nt, Artificial Sequence
  Synthetic
uaggugagcagcagcgggcu

SEQ ID NO: 702270 - RNA, 20 nt, Artificial Sequence
  Synthetic
auccaucuguuggcggggcu

SEQ ID NO: 702271 - RNA, 20 nt, Artificial Sequence
  Synthetic
ucccccgaggauugggggcu

SEQ ID NO: 702272 - RNA, 20 nt, Artificial Sequence
  Synthetic
ucuugauucugcuuggggcu

SEQ ID NO: 702273 - RNA, 20 nt, Artificial Sequence
  Synthetic
ugacucuauuguacauggcu

SEQ ID NO: 702274 - RNA, 20 nt, Artificial Sequence
  Synthetic
uucaggccaaucggauggcu

SEQ ID NO: 702275 - RNA, 20 nt, Artificial Sequence
  Synthetic
aauaugaucaacgccuggcu

SEQ ID NO: 702276 - RNA, 20 nt, Artificial Sequence
  Synthetic
uccuuggcaaaccaguggcu

SEQ ID NO: 702277 - RNA, 20 nt, Artificial Sequence
  Synthetic
caacuggggacgaguuggcu

SEQ ID NO: 702278 - RNA, 20 nt, Artificial Sequence
  Synthetic
ccuuagcgguuucaaaugcu

SEQ ID NO: 702279 - RNA, 20 nt, Artificial Sequence
  Synthetic
uugcugccaaucuaaaugcu

SEQ ID NO: 702280 - RNA, 20 nt, Artificial Sequence
  Synthetic
ccagcucuaaggucaaugcu

SEQ ID NO: 702281 - RNA, 20 nt, Artificial Sequence
  Synthetic
auuuaagagccaugaaugcu

SEQ ID NO: 702282 - RNA, 20 nt, Artificial Sequence
  Synthetic
ucaguuauccuuugaaugcu

SEQ ID NO: 702283 - RNA, 20 nt, Artificial Sequence
  Synthetic
ugaagcaucgauagcaugcu

SEQ ID NO: 702284 - RNA, 20 nt, Artificial Sequence
  Synthetic
cccuuauuacagugcaugcu

SEQ ID NO: 702285 - RNA, 20 nt, Artificial Sequence
  Synthetic
uacucacaggccaucaugcu

SEQ ID NO: 702286 - RNA, 20 nt, Artificial Sequence
  Synthetic
acacuagcucccuugaugcu

SEQ ID NO: 702287 - RNA, 20 nt, Artificial Sequence
  Synthetic
aggcuuugugauaauaugcu

SEQ ID NO: 702288 - RNA, 20 nt, Artificial Sequence
  Synthetic
cuuggguguugggcuaugcu

SEQ ID NO: 702289 - RNA, 20 nt, Artificial Sequence
  Synthetic
aucaugcugguguaacugcu

SEQ ID NO: 702290 - RNA, 20 nt, Artificial Sequence
  Synthetic
aaagacauagccuugcugcu

SEQ ID NO: 702291 - RNA, 20 nt, Artificial Sequence
  Synthetic
accacucacucacgucugcu

SEQ ID NO: 702292 - RNA, 20 nt, Artificial Sequence
  Synthetic
uaaauugagggaauucugcu

SEQ ID NO: 702293 - RNA, 20 nt, Artificial Sequence
  Synthetic
ucaugauucuugauucugcu

SEQ ID NO: 702294 - RNA, 20 nt, Artificial Sequence
  Synthetic
accaccaugaggguucugcu

SEQ ID NO: 702295 - RNA, 20 nt, Artificial Sequence
  Synthetic
cucaguuuacaguccgugcu

SEQ ID NO: 702296 - RNA, 20 nt, Artificial Sequence
  Synthetic
agcacuccaauaagugugcu

SEQ ID NO: 702297 - RNA, 20 nt, Artificial Sequence
  Synthetic
cccuugaguuuauaauugcu

SEQ ID NO: 702298 - RNA, 20 nt, Artificial Sequence
  Synthetic
cgucagauagcaguauugcu

SEQ ID NO: 702299 - RNA, 20 nt, Artificial Sequence
  Synthetic
ccuuuucuaccuaucuugcu

SEQ ID NO: 702300 - RNA, 20 nt, Artificial Sequence
  Synthetic
cugucuccaucauucuugcu

SEQ ID NO: 702301 - RNA, 20 nt, Artificial Sequence
  Synthetic
uagcggcaugaacuguugcu

SEQ ID NO: 702302 - RNA, 20 nt, Artificial Sequence
  Synthetic
cucugugcguaaaguuugcu

SEQ ID NO: 702303 - RNA, 20 nt, Artificial Sequence
  Synthetic
acacuaacucugcguuugcu

SEQ ID NO: 702304 - RNA, 20 nt, Artificial Sequence
  Synthetic
auaguauacgucuaaaaucu

SEQ ID NO: 702305 - RNA, 20 nt, Artificial Sequence
  Synthetic
acaucuaugaugugaaaucu

SEQ ID NO: 702306 - RNA, 20 nt, Artificial Sequence
  Synthetic
agaacgcuaguuauaaaucu

SEQ ID NO: 702307 - RNA, 20 nt, Artificial Sequence
  Synthetic
uguagcagaccauuaaaucu

SEQ ID NO: 702308 - RNA, 20 nt, Artificial Sequence
  Synthetic
aagaguucgagauccaaucu

SEQ ID NO: 702309 - RNA, 20 nt, Artificial Sequence
  Synthetic
agauauguugcuuguaaucu

SEQ ID NO: 702310 - RNA, 20 nt, Artificial Sequence
  Synthetic
accugagguagaagacaucu

SEQ ID NO: 702311 - RNA, 20 nt, Artificial Sequence
  Synthetic
ugacgaauuuugagccaucu

SEQ ID NO: 702312 - RNA, 20 nt, Artificial Sequence
  Synthetic
uuuagcugggccauccaucu

SEQ ID NO: 702313 - RNA, 20 nt, Artificial Sequence
  Synthetic
uucugagaacacguccaucu

SEQ ID NO: 702314 - RNA, 20 nt, Artificial Sequence
  Synthetic
cugcaucuuuggaaggaucu

SEQ ID NO: 702315 - RNA, 20 nt, Artificial Sequence
  Synthetic
uuccuaacuucuaaggaucu

SEQ ID NO: 702316 - RNA, 20 nt, Artificial Sequence
  Synthetic
accaacacauguaaugaucu

SEQ ID NO: 702317 - RNA, 20 nt, Artificial Sequence
  Synthetic
ugacuuucucgaggugaucu

SEQ ID NO: 702318 - RNA, 20 nt, Artificial Sequence
  Synthetic
uguuuugacuugcuugaucu

SEQ ID NO: 702319 - RNA, 20 nt, Artificial Sequence
  Synthetic
uugcauaauaguguugaucu

SEQ ID NO: 702320 - RNA, 20 nt, Artificial Sequence
  Synthetic
ucuuugacgcaaucauaucu

SEQ ID NO: 702321 - RNA, 20 nt, Artificial Sequence
  Synthetic
caaggucguaacauauaucu

SEQ ID NO: 702322 - RNA, 20 nt, Artificial Sequence
  Synthetic
augucuaccaugaacuaucu

SEQ ID NO: 702323 - RNA, 20 nt, Artificial Sequence
  Synthetic
cguuucuuaugccccuaucu

SEQ ID NO: 702324 - RNA, 20 nt, Artificial Sequence
  Synthetic
cuuauaggggaacucuaucu

SEQ ID NO: 702325 - RNA, 20 nt, Artificial Sequence
  Synthetic
cgagggauccagaaguaucu

SEQ ID NO: 702326 - RNA, 20 nt, Artificial Sequence
  Synthetic
caaagaucauagagguaucu

SEQ ID NO: 702327 - RNA, 20 nt, Artificial Sequence
  Synthetic
uagauuggaucucgaacucu

SEQ ID NO: 702328 - RNA, 20 nt, Artificial Sequence
  Synthetic
caaccaucagucuccacucu

SEQ ID NO: 702329 - RNA, 20 nt, Artificial Sequence
  Synthetic
cguguacguaaaaucacucu

SEQ ID NO: 702330 - RNA, 20 nt, Artificial Sequence
  Synthetic
aguacuacgacagguacucu

SEQ ID NO: 702331 - RNA, 20 nt, Artificial Sequence
  Synthetic
agggaguaauucgguacucu

SEQ ID NO: 702332 - RNA, 20 nt, Artificial Sequence
  Synthetic
aucagaucggugauuacucu

SEQ ID NO: 702333 - RNA, 20 nt, Artificial Sequence
  Synthetic
acgaagcaaagugaaccucu

SEQ ID NO: 702334 - RNA, 20 nt, Artificial Sequence
  Synthetic
ucgagagacuguguaccucu

SEQ ID NO: 702335 - RNA, 20 nt, Artificial Sequence
  Synthetic
auuaagcuaugcuuaccucu

SEQ ID NO: 702336 - RNA, 20 nt, Artificial Sequence
  Synthetic
cacguuuuucaucacccucu

SEQ ID NO: 702337 - RNA, 20 nt, Artificial Sequence
  Synthetic
cuauaaccguuugacccucu

SEQ ID NO: 702338 - RNA, 20 nt, Artificial Sequence
  Synthetic
ccuuuauuuccagccccucu

SEQ ID NO: 702339 - RNA, 20 nt, Artificial Sequence
  Synthetic
agauacuaaaaaaucccucu

SEQ ID NO: 702340 - RNA, 20 nt, Artificial Sequence
  Synthetic
uguuaggacuuagagccucu

SEQ ID NO: 702341 - RNA, 20 nt, Artificial Sequence
  Synthetic
ccacaauuaaucacgccucu

SEQ ID NO: 702342 - RNA, 20 nt, Artificial Sequence
  Synthetic
agauuaucucagcguccucu

SEQ ID NO: 702343 - RNA, 20 nt, Artificial Sequence
  Synthetic
cuaaugugcagcgaagcucu

SEQ ID NO: 702344 - RNA, 20 nt, Artificial Sequence
  Synthetic
ucgaugagggccugagcucu

SEQ ID NO: 702345 - RNA, 20 nt, Artificial Sequence
  Synthetic
caugcuuauugauacgcucu

SEQ ID NO: 702346 - RNA, 20 nt, Artificial Sequence
  Synthetic
aaguagguagggcuggcucu

SEQ ID NO: 702347 - RNA, 20 nt, Artificial Sequence
  Synthetic
agagcccaguuuuaugcucu

SEQ ID NO: 702348 - RNA, 20 nt, Artificial Sequence
  Synthetic
agcgcaaaugguauugcucu

SEQ ID NO: 702349 - RNA, 20 nt, Artificial Sequence
  Synthetic
uguuagggaacgugaucucu

SEQ ID NO: 702350 - RNA, 20 nt, Artificial Sequence
  Synthetic
uugacugccccuaagucucu

SEQ ID NO: 702351 - RNA, 20 nt, Artificial Sequence
  Synthetic
accaucugguuuaugucucu

SEQ ID NO: 702352 - RNA, 20 nt, Artificial Sequence
  Synthetic
uuuaagauugacgugucucu

SEQ ID NO: 702353 - RNA, 20 nt, Artificial Sequence
  Synthetic
cacuacccauugcaaagucu

SEQ ID NO: 702354 - RNA, 20 nt, Artificial Sequence
  Synthetic
ccaugucaguuucaaagucu

SEQ ID NO: 702355 - RNA, 20 nt, Artificial Sequence
  Synthetic
uuggauugaaagggaagucu

SEQ ID NO: 702356 - RNA, 20 nt, Artificial Sequence
  Synthetic
caauucuuuagaauaagucu

SEQ ID NO: 702357 - RNA, 20 nt, Artificial Sequence
  Synthetic
uacguuagcucuccgagucu

SEQ ID NO: 702358 - RNA, 20 nt, Artificial Sequence
  Synthetic
uuaaggggucuuaggagucu

SEQ ID NO: 702359 - RNA, 20 nt, Artificial Sequence
  Synthetic
ugcaugggguacacuagucu

SEQ ID NO: 702360 - RNA, 20 nt, Artificial Sequence
  Synthetic
uggcaauuaacaucuagucu

SEQ ID NO: 702361 - RNA, 20 nt, Artificial Sequence
  Synthetic
ccauucauuguugaccgucu

SEQ ID NO: 702362 - RNA, 20 nt, Artificial Sequence
  Synthetic
ccaauacgugcagcccgucu

SEQ ID NO: 702363 - RNA, 20 nt, Artificial Sequence
  Synthetic
cuucaucugucaggccgucu

SEQ ID NO: 702364 - RNA, 20 nt, Artificial Sequence
  Synthetic
uagacugagggauuccgucu

SEQ ID NO: 702365 - RNA, 20 nt, Artificial Sequence
  Synthetic
agaugguagcauaagcgucu

SEQ ID NO: 702366 - RNA, 20 nt, Artificial Sequence
  Synthetic
auuuucguagcaccaggucu

SEQ ID NO: 702367 - RNA, 20 nt, Artificial Sequence
  Synthetic
uuaacuuaaaagcgaggucu

SEQ ID NO: 702368 - RNA, 20 nt, Artificial Sequence
  Synthetic
uuuggguaacacugcggucu

SEQ ID NO: 702369 - RNA, 20 nt, Artificial Sequence
  Synthetic
uuuacuagacucuagggucu

SEQ ID NO: 702370 - RNA, 20 nt, Artificial Sequence
  Synthetic
ugaugagagguuuagggucu

SEQ ID NO: 702371 - RNA, 20 nt, Artificial Sequence
  Synthetic
ucuaacgccaaaacaugucu

SEQ ID NO: 702372 - RNA, 20 nt, Artificial Sequence
  Synthetic
cugugauagacucuaugucu

SEQ ID NO: 702373 - RNA, 20 nt, Artificial Sequence
  Synthetic
uaacuugggagaaacugucu

SEQ ID NO: 702374 - RNA, 20 nt, Artificial Sequence
  Synthetic
aguacuuuucuauccugucu

SEQ ID NO: 702375 - RNA, 20 nt, Artificial Sequence
  Synthetic
ccuauaauugagagcugucu

SEQ ID NO: 702376 - RNA, 20 nt, Artificial Sequence
  Synthetic
uucuaucaguacacaauucu

SEQ ID NO: 702377 - RNA, 20 nt, Artificial Sequence
  Synthetic
uagaagccgagugacauucu

SEQ ID NO: 702378 - RNA, 20 nt, Artificial Sequence
  Synthetic
uauuucauuuggcggauucu

SEQ ID NO: 702379 - RNA, 20 nt, Artificial Sequence
  Synthetic
agcuugaugucauggauucu

SEQ ID NO: 702380 - RNA, 20 nt, Artificial Sequence
  Synthetic
cuuuaacccgguaauauucu

SEQ ID NO: 702381 - RNA, 20 nt, Artificial Sequence
  Synthetic
cccuggaccaauuauauucu

SEQ ID NO: 702382 - RNA, 20 nt, Artificial Sequence
  Synthetic
uuuggaaacgcacaacuucu

SEQ ID NO: 702383 - RNA, 20 nt, Artificial Sequence
  Synthetic
uugguaguugucgcacuucu

SEQ ID NO: 702384 - RNA, 20 nt, Artificial Sequence
  Synthetic
uucaucgggggaagacuucu

SEQ ID NO: 702385 - RNA, 20 nt, Artificial Sequence
  Synthetic
caccagaugagacuacuucu

SEQ ID NO: 702386 - RNA, 20 nt, Artificial Sequence
  Synthetic
uugaauaggacaguacuucu

SEQ ID NO: 702387 - RNA, 20 nt, Artificial Sequence
  Synthetic
ccaacauagacuaaccuucu

SEQ ID NO: 702388 - RNA, 20 nt, Artificial Sequence
  Synthetic
aggcuaggguauugccuucu

SEQ ID NO: 702389 - RNA, 20 nt, Artificial Sequence
  Synthetic
ucucugaugauaauccuucu

SEQ ID NO: 702390 - RNA, 20 nt, Artificial Sequence
  Synthetic
uggccuucuuacauccuucu

SEQ ID NO: 702391 - RNA, 20 nt, Artificial Sequence
  Synthetic
uaacgucaaaugguccuucu

SEQ ID NO: 702392 - RNA, 20 nt, Artificial Sequence
  Synthetic
aagggcugaagcaggcuucu

SEQ ID NO: 702393 - RNA, 20 nt, Artificial Sequence
  Synthetic
acgcgaucauuuaaucuucu

SEQ ID NO: 702394 - RNA, 20 nt, Artificial Sequence
  Synthetic
cgugcaccaacauaucuucu

SEQ ID NO: 702395 - RNA, 20 nt, Artificial Sequence
  Synthetic
aucucaagauaggcucuucu

SEQ ID NO: 702396 - RNA, 20 nt, Artificial Sequence
  Synthetic
aaucucacugucucaguucu

SEQ ID NO: 702397 - RNA, 20 nt, Artificial Sequence
  Synthetic
agguuaaaauccaccguucu

SEQ ID NO: 702398 - RNA, 20 nt, Artificial Sequence
  Synthetic
cccggccgaguaacuguucu

SEQ ID NO: 702399 - RNA, 20 nt, Artificial Sequence
  Synthetic
uguuaggauguccaauuucu

SEQ ID NO: 702400 - RNA, 20 nt, Artificial Sequence
  Synthetic
uagcaauccgauggauuucu

SEQ ID NO: 702401 - RNA, 20 nt, Artificial Sequence
  Synthetic
uaggugugaacacuauuucu

SEQ ID NO: 702402 - RNA, 20 nt, Artificial Sequence
  Synthetic
aauuggaguaucguauuucu

SEQ ID NO: 702403 - RNA, 20 nt, Artificial Sequence
  Synthetic
acuggaguggguaucuuucu

SEQ ID NO: 702404 - RNA, 20 nt, Artificial Sequence
  Synthetic
ccacaucgaauucaguuucu

SEQ ID NO: 702405 - RNA, 20 nt, Artificial Sequence
  Synthetic
uaaggaccguugagguuucu

SEQ ID NO: 702406 - RNA, 20 nt, Artificial Sequence
  Synthetic
acccgaugguucugguuucu

SEQ ID NO: 702407 - RNA, 20 nt, Artificial Sequence
  Synthetic
ugucaccgcuuaaauuuucu

SEQ ID NO: 702408 - RNA, 20 nt, Artificial Sequence
  Synthetic
cuugagugcaaccauuuucu

SEQ ID NO: 702409 - RNA, 20 nt, Artificial Sequence
  Synthetic
aagcgcggcauaauuuuucu

SEQ ID NO: 702410 - RNA, 20 nt, Artificial Sequence
  Synthetic
accauucgaguaggaaaagu

SEQ ID NO: 702411 - RNA, 20 nt, Artificial Sequence
  Synthetic
cuuuaugugccugggaaagu

SEQ ID NO: 702412 - RNA, 20 nt, Artificial Sequence
  Synthetic
caagagggcagccugaaagu

SEQ ID NO: 702413 - RNA, 20 nt, Artificial Sequence
  Synthetic
agaggaauaaacccuaaagu

SEQ ID NO: 702414 - RNA, 20 nt, Artificial Sequence
  Synthetic
cucucgauagaagcuaaagu

SEQ ID NO: 702415 - RNA, 20 nt, Artificial Sequence
  Synthetic
ccaaaaaguuuucaacaagu

SEQ ID NO: 702416 - RNA, 20 nt, Artificial Sequence
  Synthetic
ccacauacugucuaacaagu

SEQ ID NO: 702417 - RNA, 20 nt, Artificial Sequence
  Synthetic
aaauuuagaccuuaacaagu

SEQ ID NO: 702418 - RNA, 20 nt, Artificial Sequence
  Synthetic
aauacgcuuuggggacaagu

SEQ ID NO: 702419 - RNA, 20 nt, Artificial Sequence
  Synthetic
agcaagcacacuaaccaagu

SEQ ID NO: 702420 - RNA, 20 nt, Artificial Sequence
  Synthetic
uuacgguuacuucuagaagu

SEQ ID NO: 702421 - RNA, 20 nt, Artificial Sequence
  Synthetic
ucgcaauaccucuacgaagu

SEQ ID NO: 702422 - RNA, 20 nt, Artificial Sequence
  Synthetic
cuagaaaccuucaccgaagu

SEQ ID NO: 702423 - RNA, 20 nt, Artificial Sequence
  Synthetic
aaccaaaggccuccggaagu

SEQ ID NO: 702424 - RNA, 20 nt, Artificial Sequence
  Synthetic
caccaaagaaugggggaagu

SEQ ID NO: 702425 - RNA, 20 nt, Artificial Sequence
  Synthetic
auucguugaggaugggaagu

SEQ ID NO: 702426 - RNA, 20 nt, Artificial Sequence
  Synthetic
ccagcuaucaagcuggaagu

SEQ ID NO: 702427 - RNA, 20 nt, Artificial Sequence
  Synthetic
uggcuggguacuccauaagu

SEQ ID NO: 702428 - RNA, 20 nt, Artificial Sequence
  Synthetic
acuggaguauugguauaagu

SEQ ID NO: 702429 - RNA, 20 nt, Artificial Sequence
  Synthetic
auccugcuucguuacuaagu

SEQ ID NO: 702430 - RNA, 20 nt, Artificial Sequence
  Synthetic
accacaagcaaacccuaagu

SEQ ID NO: 702431 - RNA, 20 nt, Artificial Sequence
  Synthetic
accugaggguccuccuaagu

SEQ ID NO: 702432 - RNA, 20 nt, Artificial Sequence
  Synthetic
caaguuagaccuuaguaagu

SEQ ID NO: 702433 - RNA, 20 nt, Artificial Sequence
  Synthetic
aacuucuaacauagguaagu

SEQ ID NO: 702434 - RNA, 20 nt, Artificial Sequence
  Synthetic
uacgauggugucacuuaagu

SEQ ID NO: 702435 - RNA, 20 nt, Artificial Sequence
  Synthetic
cguuaugaucuccuuuaagu

SEQ ID NO: 702436 - RNA, 20 nt, Artificial Sequence
  Synthetic
uaggacugcaggcuuuaagu

SEQ ID NO: 702437 - RNA, 20 nt, Artificial Sequence
  Synthetic
uaauaugcgugcuaaacagu

SEQ ID NO: 702438 - RNA, 20 nt, Artificial Sequence
  Synthetic
ucgacagggaaaagaacagu

SEQ ID NO: 702439 - RNA, 20 nt, Artificial Sequence
  Synthetic
aacauugugcccugaacagu

SEQ ID NO: 702440 - RNA, 20 nt, Artificial Sequence
  Synthetic
uacacaugguacauaacagu

SEQ ID NO: 702441 - RNA, 20 nt, Artificial Sequence
  Synthetic
uaugcauaacacaucacagu

SEQ ID NO: 702442 - RNA, 20 nt, Artificial Sequence
  Synthetic
uaauaagcagacaucacagu

SEQ ID NO: 702443 - RNA, 20 nt, Artificial Sequence
  Synthetic
ccucaaagaccacugacagu

SEQ ID NO: 702444 - RNA, 20 nt, Artificial Sequence
  Synthetic
cgcugcuacuugaauacagu

SEQ ID NO: 702445 - RNA, 20 nt, Artificial Sequence
  Synthetic
cgagccaacucguccccagu

SEQ ID NO: 702446 - RNA, 20 nt, Artificial Sequence
  Synthetic
uccacuccucguagcccagu

SEQ ID NO: 702447 - RNA, 20 nt, Artificial Sequence
  Synthetic
uguagaaggaaucugccagu

SEQ ID NO: 702448 - RNA, 20 nt, Artificial Sequence
  Synthetic
cuuguguuccacccuccagu

SEQ ID NO: 702449 - RNA, 20 nt, Artificial Sequence
  Synthetic
uccaccacaaacauuccagu

SEQ ID NO: 702450 - RNA, 20 nt, Artificial Sequence
  Synthetic
uccucacaagacauuccagu

SEQ ID NO: 702451 - RNA, 20 nt, Artificial Sequence
  Synthetic
cuacuuaccauccuuccagu

SEQ ID NO: 702452 - RNA, 20 nt, Artificial Sequence
  Synthetic
cacacacuugacguagcagu

SEQ ID NO: 702453 - RNA, 20 nt, Artificial Sequence
  Synthetic
ugaugaacuuucaaugcagu

SEQ ID NO: 702454 - RNA, 20 nt, Artificial Sequence
  Synthetic
ugcggaagcacggaugcagu

SEQ ID NO: 702455 - RNA, 20 nt, Artificial Sequence
  Synthetic
caaaugcgugcugcugcagu

SEQ ID NO: 702456 - RNA, 20 nt, Artificial Sequence
  Synthetic
auugagaagguuaaaucagu

SEQ ID NO: 702457 - RNA, 20 nt, Artificial Sequence
  Synthetic
uuuagucauuagcaaucagu

SEQ ID NO: 702458 - RNA, 20 nt, Artificial Sequence
  Synthetic
acacguauuuguucaucagu

SEQ ID NO: 702459 - RNA, 20 nt, Artificial Sequence
  Synthetic
cuguuucaguugauaucagu

SEQ ID NO: 702460 - RNA, 20 nt, Artificial Sequence
  Synthetic
cauugagacccacacucagu

SEQ ID NO: 702461 - RNA, 20 nt, Artificial Sequence
  Synthetic
ugccacagcuuucgcucagu

SEQ ID NO: 702462 - RNA, 20 nt, Artificial Sequence
  Synthetic
uuggcccgcguggucucagu

SEQ ID NO: 702463 - RNA, 20 nt, Artificial Sequence
  Synthetic
cuuugagcaauagugucagu

SEQ ID NO: 702464 - RNA, 20 nt, Artificial Sequence
  Synthetic
ugucaagguaguuugucagu

SEQ ID NO: 702465 - RNA, 20 nt, Artificial Sequence
  Synthetic
aaauuaauucaucguucagu

SEQ ID NO: 702466 - RNA, 20 nt, Artificial Sequence
  Synthetic
uucaaggccagugaaagagu

SEQ ID NO: 702467 - RNA, 20 nt, Artificial Sequence
  Synthetic
uccgggacguuguaaagagu

SEQ ID NO: 702468 - RNA, 20 nt, Artificial Sequence
  Synthetic
aacuuagguauggacagagu

SEQ ID NO: 702469 - RNA, 20 nt, Artificial Sequence
  Synthetic
accagaaaaguccucagagu

SEQ ID NO: 702470 - RNA, 20 nt, Artificial Sequence
  Synthetic
acauacucaucaucuagagu

SEQ ID NO: 702471 - RNA, 20 nt, Artificial Sequence
  Synthetic
aaauuaucaugcugucgagu

SEQ ID NO: 702472 - RNA, 20 nt, Artificial Sequence
  Synthetic
uccauuuuugagcaaggagu

SEQ ID NO: 702473 - RNA, 20 nt, Artificial Sequence
  Synthetic
uuacauacaggcuagggagu

SEQ ID NO: 702474 - RNA, 20 nt, Artificial Sequence
  Synthetic
ugcuugaccaagcugggagu

SEQ ID NO: 702475 - RNA, 20 nt, Artificial Sequence
  Synthetic
acguggaagccuacuggagu

SEQ ID NO: 702476 - RNA, 20 nt, Artificial Sequence
  Synthetic
aaaauccuuuugucuggagu

SEQ ID NO: 702477 - RNA, 20 nt, Artificial Sequence
  Synthetic
aggcuuauuagcccaugagu

SEQ ID NO: 702478 - RNA, 20 nt, Artificial Sequence
  Synthetic
aaggcuuaauguuuaugagu

SEQ ID NO: 702479 - RNA, 20 nt, Artificial Sequence
  Synthetic
aaucuuugcaugaggugagu

SEQ ID NO: 702480 - RNA, 20 nt, Artificial Sequence
  Synthetic
agccgcuuuaacgggugagu

SEQ ID NO: 702481 - RNA, 20 nt, Artificial Sequence
  Synthetic
uuguggcagccaaguugagu

SEQ ID NO: 702482 - RNA, 20 nt, Artificial Sequence
  Synthetic
accuuuuaugaacguugagu

SEQ ID NO: 702483 - RNA, 20 nt, Artificial Sequence
  Synthetic
agccaauaguuugguugagu

SEQ ID NO: 702484 - RNA, 20 nt, Artificial Sequence
  Synthetic
auggcuagacagauuugagu

SEQ ID NO: 702485 - RNA, 20 nt, Artificial Sequence
  Synthetic
acuaacaguguggcaauagu

SEQ ID NO: 702486 - RNA, 20 nt, Artificial Sequence
  Synthetic
uuuggaugcugcgggauagu

SEQ ID NO: 702487 - RNA, 20 nt, Artificial Sequence
  Synthetic
caucacccaugugugauagu

SEQ ID NO: 702488 - RNA, 20 nt, Artificial Sequence
  Synthetic
aaagauuaaccccauauagu

SEQ ID NO: 702489 - RNA, 20 nt, Artificial Sequence
  Synthetic
aguacauacuggaaacuagu

SEQ ID NO: 702490 - RNA, 20 nt, Artificial Sequence
  Synthetic
aauacccuagauagacuagu

SEQ ID NO: 702491 - RNA, 20 nt, Artificial Sequence
  Synthetic
ugaguuuguaccuggcuagu

SEQ ID NO: 702492 - RNA, 20 nt, Artificial Sequence
  Synthetic
auuuuagcugaaaugcuagu

SEQ ID NO: 702493 - RNA, 20 nt, Artificial Sequence
  Synthetic
uaaguucacggguugcuagu

SEQ ID NO: 702494 - RNA, 20 nt, Artificial Sequence
  Synthetic
agcaguuagaggcaucuagu

SEQ ID NO: 702495 - RNA, 20 nt, Artificial Sequence
  Synthetic
ucgaaguuaagauaucuagu

SEQ ID NO: 702496 - RNA, 20 nt, Artificial Sequence
  Synthetic
uaucauuuuuaagcaguagu

SEQ ID NO: 702497 - RNA, 20 nt, Artificial Sequence
  Synthetic
ugggggcaaagaucaguagu

SEQ ID NO: 702498 - RNA, 20 nt, Artificial Sequence
  Synthetic
auccacaacaguagaguagu

SEQ ID NO: 702499 - RNA, 20 nt, Artificial Sequence
  Synthetic
acuguaccuuaugccguagu

SEQ ID NO: 702500 - RNA, 20 nt, Artificial Sequence
  Synthetic
cuguauaccuuaucgguagu

SEQ ID NO: 702501 - RNA, 20 nt, Artificial Sequence
  Synthetic
ccuuuacuaccugggguagu

SEQ ID NO: 702502 - RNA, 20 nt, Artificial Sequence
  Synthetic
ucuagagccuagaguguagu

SEQ ID NO: 702503 - RNA, 20 nt, Artificial Sequence
  Synthetic
agugauaccuaacaauuagu

SEQ ID NO: 702504 - RNA, 20 nt, Artificial Sequence
  Synthetic
aggcaaaggccccaauuagu

SEQ ID NO: 702505 - RNA, 20 nt, Artificial Sequence
  Synthetic
ugcgcugugcucagauuagu

SEQ ID NO: 702506 - RNA, 20 nt, Artificial Sequence
  Synthetic
accauuguaugggacuuagu

SEQ ID NO: 702507 - RNA, 20 nt, Artificial Sequence
  Synthetic
auauauguggggagcuuagu

SEQ ID NO: 702508 - RNA, 20 nt, Artificial Sequence
  Synthetic
augauuuccugaauguuagu

SEQ ID NO: 702509 - RNA, 20 nt, Artificial Sequence
  Synthetic
uuauauugacaaccuuuagu

SEQ ID NO: 702510 - RNA, 20 nt, Artificial Sequence
  Synthetic
caguagcaccuugcuuuagu

SEQ ID NO: 702511 - RNA, 20 nt, Artificial Sequence
  Synthetic
aucggguaucucucuuuagu

SEQ ID NO: 702512 - RNA, 20 nt, Artificial Sequence
  Synthetic
uuagaguguggaaacaacgu

SEQ ID NO: 702513 - RNA, 20 nt, Artificial Sequence
  Synthetic
auucgccaaguagacaacgu

SEQ ID NO: 702514 - RNA, 20 nt, Artificial Sequence
  Synthetic
acucuagcuucggacaacgu

SEQ ID NO: 702515 - RNA, 20 nt, Artificial Sequence
  Synthetic
acauagguguccgucaacgu

SEQ ID NO: 702516 - RNA, 20 nt, Artificial Sequence
  Synthetic
ucaaauguaaucaagaacgu

SEQ ID NO: 702517 - RNA, 20 nt, Artificial Sequence
  Synthetic
aauguauaacuguauaacgu

SEQ ID NO: 702518 - RNA, 20 nt, Artificial Sequence
  Synthetic
aaugccuucaggggacacgu

SEQ ID NO: 702519 - RNA, 20 nt, Artificial Sequence
  Synthetic
uagaauauuugaggccacgu

SEQ ID NO: 702520 - RNA, 20 nt, Artificial Sequence
  Synthetic
aucucccggugcugccacgu

SEQ ID NO: 702521 - RNA, 20 nt, Artificial Sequence
  Synthetic
cuagugcucaucugccacgu

SEQ ID NO: 702522 - RNA, 20 nt, Artificial Sequence
  Synthetic
caaugaaagaacauccacgu

SEQ ID NO: 702523 - RNA, 20 nt, Artificial Sequence
  Synthetic
aaacacacgcagaagcacgu

SEQ ID NO: 702524 - RNA, 20 nt, Artificial Sequence
  Synthetic
aggaauauauaggcucacgu

SEQ ID NO: 702525 - RNA, 20 nt, Artificial Sequence
  Synthetic
uuaacgaauaugggucacgu

SEQ ID NO: 702526 - RNA, 20 nt, Artificial Sequence
  Synthetic
auuagcucaauucuucacgu

SEQ ID NO: 702527 - RNA, 20 nt, Artificial Sequence
  Synthetic
cagagcauuugucaagacgu

SEQ ID NO: 702528 - RNA, 20 nt, Artificial Sequence
  Synthetic
ugugaccaagauacauacgu

SEQ ID NO: 702529 - RNA, 20 nt, Artificial Sequence
  Synthetic
aaucgggucauuuuguacgu

SEQ ID NO: 702530 - RNA, 20 nt, Artificial Sequence
  Synthetic
cagggacguuguuagaccgu

SEQ ID NO: 702531 - RNA, 20 nt, Artificial Sequence
  Synthetic
agauggugacaaaaucccgu

SEQ ID NO: 702532 - RNA, 20 nt, Artificial Sequence
  Synthetic
agugcauaucuaacucccgu

SEQ ID NO: 702533 - RNA, 20 nt, Artificial Sequence
  Synthetic
uuauuuacuuguacagccgu

SEQ ID NO: 702534 - RNA, 20 nt, Artificial Sequence
  Synthetic
uaugcuuaucucuaggccgu

SEQ ID NO: 702535 - RNA, 20 nt, Artificial Sequence
  Synthetic
acuguugugacagcggccgu

SEQ ID NO: 702536 - RNA, 20 nt, Artificial Sequence
  Synthetic
agggcccaucuaucugccgu

SEQ ID NO: 702537 - RNA, 20 nt, Artificial Sequence
  Synthetic
aaguuguaaagauuugccgu

SEQ ID NO: 702538 - RNA, 20 nt, Artificial Sequence
  Synthetic
ucugaacuaaaagcauccgu

SEQ ID NO: 702539 - RNA, 20 nt, Artificial Sequence
  Synthetic
uuuguggauuugcuauccgu

SEQ ID NO: 702540 - RNA, 20 nt, Artificial Sequence
  Synthetic
aucuuaguccuauuauccgu

SEQ ID NO: 702541 - RNA, 20 nt, Artificial Sequence
  Synthetic
augagcauaaauuacuccgu

SEQ ID NO: 702542 - RNA, 20 nt, Artificial Sequence
  Synthetic
ccucaggccauacccuccgu

SEQ ID NO: 702543 - RNA, 20 nt, Artificial Sequence
  Synthetic
uaaccuaaaugcagcuccgu

SEQ ID NO: 702544 - RNA, 20 nt, Artificial Sequence
  Synthetic
auagaggaaauuaauuccgu

SEQ ID NO: 702545 - RNA, 20 nt, Artificial Sequence
  Synthetic
acgccaacuguuagaagcgu

SEQ ID NO: 702546 - RNA, 20 nt, Artificial Sequence
  Synthetic
ugaaccagugaguagagcgu

SEQ ID NO: 702547 - RNA, 20 nt, Artificial Sequence
  Synthetic
aggugucuuuuuagccgcgu

SEQ ID NO: 702548 - RNA, 20 nt, Artificial Sequence
  Synthetic
cuccaaagggauuuaggcgu

SEQ ID NO: 702549 - RNA, 20 nt, Artificial Sequence
  Synthetic
ugauacaucguguugugcgu

SEQ ID NO: 702550 - RNA, 20 nt, Artificial Sequence
  Synthetic
uggacagaagguuacaucgu

SEQ ID NO: 702551 - RNA, 20 nt, Artificial Sequence
  Synthetic
uauuucuauccauccaucgu

SEQ ID NO: 702552 - RNA, 20 nt, Artificial Sequence
  Synthetic
aaugccaaauacaugaucgu

SEQ ID NO: 702553 - RNA, 20 nt, Artificial Sequence
  Synthetic
aaggauugguaauuuaucgu

SEQ ID NO: 702554 - RNA, 20 nt, Artificial Sequence
  Synthetic
cauucguaagugccucucgu

SEQ ID NO: 702555 - RNA, 20 nt, Artificial Sequence
  Synthetic
aguagggcuagacacgucgu

SEQ ID NO: 702556 - RNA, 20 nt, Artificial Sequence
  Synthetic
ugacgugacaaagaggucgu

SEQ ID NO: 702557 - RNA, 20 nt, Artificial Sequence
  Synthetic
aaaaugucccuuggauucgu

SEQ ID NO: 702558 - RNA, 20 nt, Artificial Sequence
  Synthetic
aguaccugcugugccuucgu

SEQ ID NO: 702559 - RNA, 20 nt, Artificial Sequence
  Synthetic
uuuaucauugguugcuucgu

SEQ ID NO: 702560 - RNA, 20 nt, Artificial Sequence
  Synthetic
ccaugcuuccacgcuuucgu

SEQ ID NO: 702561 - RNA, 20 nt, Artificial Sequence
  Synthetic
uaguguuacaagugaaaggu

SEQ ID NO: 702562 - RNA, 20 nt, Artificial Sequence
  Synthetic
uauggauccaccugcaaggu

SEQ ID NO: 702563 - RNA, 20 nt, Artificial Sequence
  Synthetic
ugcagcauaauagucaaggu

SEQ ID NO: 702564 - RNA, 20 nt, Artificial Sequence
  Synthetic
cacucuaguagcuguaaggu

SEQ ID NO: 702565 - RNA, 20 nt, Artificial Sequence
  Synthetic
aguuggcucgggauuaaggu

SEQ ID NO: 702566 - RNA, 20 nt, Artificial Sequence
  Synthetic
uuugcacaccuuauuaaggu

SEQ ID NO: 702567 - RNA, 20 nt, Artificial Sequence
  Synthetic
uuccaucaggggacgcaggu

SEQ ID NO: 702568 - RNA, 20 nt, Artificial Sequence
  Synthetic
agauaaacuugggcucaggu

SEQ ID NO: 702569 - RNA, 20 nt, Artificial Sequence
  Synthetic
cuugucucuaacauucaggu

SEQ ID NO: 702570 - RNA, 20 nt, Artificial Sequence
  Synthetic
uucaaagcauucauucaggu

SEQ ID NO: 702571 - RNA, 20 nt, Artificial Sequence
  Synthetic
uaaugucagcucgaagaggu

SEQ ID NO: 702572 - RNA, 20 nt, Artificial Sequence
  Synthetic
caauggucucuaagagaggu

SEQ ID NO: 702573 - RNA, 20 nt, Artificial Sequence
  Synthetic
auucgacagugcauagaggu

SEQ ID NO: 702574 - RNA, 20 nt, Artificial Sequence
  Synthetic
ucaaauggauuucacgaggu

SEQ ID NO: 702575 - RNA, 20 nt, Artificial Sequence
  Synthetic
cuguuugccuaagucgaggu

SEQ ID NO: 702576 - RNA, 20 nt, Artificial Sequence
  Synthetic
cccuguucauaaugugaggu

SEQ ID NO: 702577 - RNA, 20 nt, Artificial Sequence
  Synthetic
cuuauaugggcaaguuaggu

SEQ ID NO: 702578 - RNA, 20 nt, Artificial Sequence
  Synthetic
uuccuguuuuacugaacggu

SEQ ID NO: 702579 - RNA, 20 nt, Artificial Sequence
  Synthetic
aaucauagugaacucacggu

SEQ ID NO: 702580 - RNA, 20 nt, Artificial Sequence
  Synthetic
agcaucuaguaauugacggu

SEQ ID NO: 702581 - RNA, 20 nt, Artificial Sequence
  Synthetic
ucaacaaucagucacccggu

SEQ ID NO: 702582 - RNA, 20 nt, Artificial Sequence
  Synthetic
aacucuguaucuugagcggu

SEQ ID NO: 702583 - RNA, 20 nt, Artificial Sequence
  Synthetic
ucacugugcaaguaaucggu

SEQ ID NO: 702584 - RNA, 20 nt, Artificial Sequence
  Synthetic
aauuacuguaaacuaucggu

SEQ ID NO: 702585 - RNA, 20 nt, Artificial Sequence
  Synthetic
ccaauuuggcagaucucggu

SEQ ID NO: 702586 - RNA, 20 nt, Artificial Sequence
  Synthetic
cuaaccuuuggaugaagggu

SEQ ID NO: 702587 - RNA, 20 nt, Artificial Sequence
  Synthetic
uauaggggacauagcagggu

SEQ ID NO: 702588 - RNA, 20 nt, Artificial Sequence
  Synthetic
auauuguaaguuggcagggu

SEQ ID NO: 702589 - RNA, 20 nt, Artificial Sequence
  Synthetic
caaucuguuggaaucagggu

SEQ ID NO: 702590 - RNA, 20 nt, Artificial Sequence
  Synthetic
accuauauuugacucagggu

SEQ ID NO: 702591 - RNA, 20 nt, Artificial Sequence
  Synthetic
aaacgguuauagcucagggu

SEQ ID NO: 702592 - RNA, 20 nt, Artificial Sequence
  Synthetic
acucccucuagucucagggu

SEQ ID NO: 702593 - RNA, 20 nt, Artificial Sequence
  Synthetic
aacaguuugaagcugagggu

SEQ ID NO: 702594 - RNA, 20 nt, Artificial Sequence
  Synthetic
aggaauaccgcaaauagggu

SEQ ID NO: 702595 - RNA, 20 nt, Artificial Sequence
  Synthetic
cacgaaauauucucuagggu

SEQ ID NO: 702596 - RNA, 20 nt, Artificial Sequence
  Synthetic
accuuaugccguaguagggu

SEQ ID NO: 702597 - RNA, 20 nt, Artificial Sequence
  Synthetic
uuguuaccuaacuuuagggu

SEQ ID NO: 702598 - RNA, 20 nt, Artificial Sequence
  Synthetic
uccauggaucaggggcgggu

SEQ ID NO: 702599 - RNA, 20 nt, Artificial Sequence
  Synthetic
cucagcaguuugagcggggu

SEQ ID NO: 702600 - RNA, 20 nt, Artificial Sequence
  Synthetic
agcuauaacauccucggggu

SEQ ID NO: 702601 - RNA, 20 nt, Artificial Sequence
  Synthetic
cugguuauuuggucuggggu

SEQ ID NO: 702602 - RNA, 20 nt, Artificial Sequence
  Synthetic
uaucuggucccauguggggu

SEQ ID NO: 702603 - RNA, 20 nt, Artificial Sequence
  Synthetic
cugaagcacugaguuggggu

SEQ ID NO: 702604 - RNA, 20 nt, Artificial Sequence
  Synthetic
cauacauaggcuguuggggu

SEQ ID NO: 702605 - RNA, 20 nt, Artificial Sequence
  Synthetic
uuacauaaaacagcaugggu

SEQ ID NO: 702606 - RNA, 20 nt, Artificial Sequence
  Synthetic
cgagggaauuaggcaugggu

SEQ ID NO: 702607 - RNA, 20 nt, Artificial Sequence
  Synthetic
uuuacaguuuaggcaugggu

SEQ ID NO: 702608 - RNA, 20 nt, Artificial Sequence
  Synthetic
uggacaauagauucaugggu

SEQ ID NO: 702609 - RNA, 20 nt, Artificial Sequence
  Synthetic
aacgauuuaaaacagugggu

SEQ ID NO: 702610 - RNA, 20 nt, Artificial Sequence
  Synthetic
ccaggauauuaugagugggu

SEQ ID NO: 702611 - RNA, 20 nt, Artificial Sequence
  Synthetic
uuuuuaacuaauaggugggu

SEQ ID NO: 702612 - RNA, 20 nt, Artificial Sequence
  Synthetic
uuuagcuuuagacggugggu

SEQ ID NO: 702613 - RNA, 20 nt, Artificial Sequence
  Synthetic
aauacugauugguggugggu

SEQ ID NO: 702614 - RNA, 20 nt, Artificial Sequence
  Synthetic
uauaguucaagugauugggu

SEQ ID NO: 702615 - RNA, 20 nt, Artificial Sequence
  Synthetic
ucuggccuaggacaaauggu

SEQ ID NO: 702616 - RNA, 20 nt, Artificial Sequence
  Synthetic
auagucucagccuaaauggu

SEQ ID NO: 702617 - RNA, 20 nt, Artificial Sequence
  Synthetic
auacggaguguaauaauggu

SEQ ID NO: 702618 - RNA, 20 nt, Artificial Sequence
  Synthetic
agcccuuaauugauaauggu

SEQ ID NO: 702619 - RNA, 20 nt, Artificial Sequence
  Synthetic
uggcaauaucacuuaauggu

SEQ ID NO: 702620 - RNA, 20 nt, Artificial Sequence
  Synthetic
acugcuuuccaaaacauggu

SEQ ID NO: 702621 - RNA, 20 nt, Artificial Sequence
  Synthetic
uaguccaucuuuggcauggu

SEQ ID NO: 702622 - RNA, 20 nt, Artificial Sequence
  Synthetic
uagcaaguauagcagauggu

SEQ ID NO: 702623 - RNA, 20 nt, Artificial Sequence
  Synthetic
acuaccaaaagugugauggu

SEQ ID NO: 702624 - RNA, 20 nt, Artificial Sequence
  Synthetic
caaggugcuccuaauauggu

SEQ ID NO: 702625 - RNA, 20 nt, Artificial Sequence
  Synthetic
acaaccugagguauuauggu

SEQ ID NO: 702626 - RNA, 20 nt, Artificial Sequence
  Synthetic
uaaauccuaagucuuauggu

SEQ ID NO: 702627 - RNA, 20 nt, Artificial Sequence
  Synthetic
agggaaccaugucuuauggu

SEQ ID NO: 702628 - RNA, 20 nt, Artificial Sequence
  Synthetic
aucauugaaugccaacuggu

SEQ ID NO: 702629 - RNA, 20 nt, Artificial Sequence
  Synthetic
acaaguauaauuacacuggu

SEQ ID NO: 702630 - RNA, 20 nt, Artificial Sequence
  Synthetic
auuggguuuuuaccacuggu

SEQ ID NO: 702631 - RNA, 20 nt, Artificial Sequence
  Synthetic
acaucugugaugauacuggu

SEQ ID NO: 702632 - RNA, 20 nt, Artificial Sequence
  Synthetic
aaaggaugcuaaaagcuggu

SEQ ID NO: 702633 - RNA, 20 nt, Artificial Sequence
  Synthetic
auaauaguacuuaugcuggu

SEQ ID NO: 702634 - RNA, 20 nt, Artificial Sequence
  Synthetic
uugggagaguaacaucuggu

SEQ ID NO: 702635 - RNA, 20 nt, Artificial Sequence
  Synthetic
aucuggaacuuagaucuggu

SEQ ID NO: 702636 - RNA, 20 nt, Artificial Sequence
  Synthetic
uguaggcagaacagucuggu

SEQ ID NO: 702637 - RNA, 20 nt, Artificial Sequence
  Synthetic
agguaguguaggguucuggu

SEQ ID NO: 702638 - RNA, 20 nt, Artificial Sequence
  Synthetic
uaggagaagacaagaguggu

SEQ ID NO: 702639 - RNA, 20 nt, Artificial Sequence
  Synthetic
acuccuuacuuuguaguggu

SEQ ID NO: 702640 - RNA, 20 nt, Artificial Sequence
  Synthetic
cugcacuucauauuaguggu

SEQ ID NO: 702641 - RNA, 20 nt, Artificial Sequence
  Synthetic
aauuuaaauuuaaccguggu

SEQ ID NO: 702642 - RNA, 20 nt, Artificial Sequence
  Synthetic
auagucccuaucuuuguggu

SEQ ID NO: 702643 - RNA, 20 nt, Artificial Sequence
  Synthetic
auguagggcuuauacuuggu

SEQ ID NO: 702644 - RNA, 20 nt, Artificial Sequence
  Synthetic
uguguacaugacaucuuggu

SEQ ID NO: 702645 - RNA, 20 nt, Artificial Sequence
  Synthetic
uuuuaugcggaauucuuggu

SEQ ID NO: 702646 - RNA, 20 nt, Artificial Sequence
  Synthetic
uauaagcuccccuaguuggu

SEQ ID NO: 702647 - RNA, 20 nt, Artificial Sequence
  Synthetic
aguauuuuguaacuguuggu

SEQ ID NO: 702648 - RNA, 20 nt, Artificial Sequence
  Synthetic
augguccuucuugguuuggu

SEQ ID NO: 702649 - RNA, 20 nt, Artificial Sequence
  Synthetic
cggagcuauaaaguuuuggu

SEQ ID NO: 702650 - RNA, 20 nt, Artificial Sequence
  Synthetic
uuaaacgugcaaggaaaugu

SEQ ID NO: 702651 - RNA, 20 nt, Artificial Sequence
  Synthetic
ugggucucugcuaucaaugu

SEQ ID NO: 702652 - RNA, 20 nt, Artificial Sequence
  Synthetic
uguguauaguccuucaaugu

SEQ ID NO: 702653 - RNA, 20 nt, Artificial Sequence
  Synthetic
ccccuaucucucaguaaugu

SEQ ID NO: 702654 - RNA, 20 nt, Artificial Sequence
  Synthetic
aaguauuggcuaggccaugu

SEQ ID NO: 702655 - RNA, 20 nt, Artificial Sequence
  Synthetic
cgagagcaacaacagcaugu

SEQ ID NO: 702656 - RNA, 20 nt, Artificial Sequence
  Synthetic
acucggugagucuagcaugu

SEQ ID NO: 702657 - RNA, 20 nt, Artificial Sequence
  Synthetic
cuagguuccaugaugcaugu

SEQ ID NO: 702658 - RNA, 20 nt, Artificial Sequence
  Synthetic
uuccaucugacucuucaugu

SEQ ID NO: 702659 - RNA, 20 nt, Artificial Sequence
  Synthetic
uaggaucgcccuguucaugu

SEQ ID NO: 702660 - RNA, 20 nt, Artificial Sequence
  Synthetic
aguuaaaagaccuuucaugu

SEQ ID NO: 702661 - RNA, 20 nt, Artificial Sequence
  Synthetic
uaccgcggacuaguagaugu

SEQ ID NO: 702662 - RNA, 20 nt, Artificial Sequence
  Synthetic
aaaugggugaucuaggaugu

SEQ ID NO: 702663 - RNA, 20 nt, Artificial Sequence
  Synthetic
aaaucgacaagaggggaugu

SEQ ID NO: 702664 - RNA, 20 nt, Artificial Sequence
  Synthetic
acaaauaacuugauugaugu

SEQ ID NO: 702665 - RNA, 20 nt, Artificial Sequence
  Synthetic
ccauuugaagcuacauaugu

SEQ ID NO: 702666 - RNA, 20 nt, Artificial Sequence
  Synthetic
ugcagccaaggcagauaugu

SEQ ID NO: 702667 - RNA, 20 nt, Artificial Sequence
  Synthetic
cccauuaaacuuugauaugu

SEQ ID NO: 702668 - RNA, 20 nt, Artificial Sequence
  Synthetic
uaugggcuaucuaacuaugu

SEQ ID NO: 702669 - RNA, 20 nt, Artificial Sequence
  Synthetic
aacuuacggauuaucuaugu

SEQ ID NO: 702670 - RNA, 20 nt, Artificial Sequence
  Synthetic
ccaagaagguuagucuaugu

SEQ ID NO: 702671 - RNA, 20 nt, Artificial Sequence
  Synthetic
uaccacguuccucaguaugu

SEQ ID NO: 702672 - RNA, 20 nt, Artificial Sequence
  Synthetic
uauggcauugcgugguaugu

SEQ ID NO: 702673 - RNA, 20 nt, Artificial Sequence
  Synthetic
cauacucaguggcauuaugu

SEQ ID NO: 702674 - RNA, 20 nt, Artificial Sequence
  Synthetic
ucugcgugucccucuuaugu

SEQ ID NO: 702675 - RNA, 20 nt, Artificial Sequence
  Synthetic
cuaugacuuugcgcaacugu

SEQ ID NO: 702676 - RNA, 20 nt, Artificial Sequence
  Synthetic
aaaagcgucgaucgaacugu

SEQ ID NO: 702677 - RNA, 20 nt, Artificial Sequence
  Synthetic
ucccuauugaaaugaacugu

SEQ ID NO: 702678 - RNA, 20 nt, Artificial Sequence
  Synthetic
ucagaaggggcucacacugu

SEQ ID NO: 702679 - RNA, 20 nt, Artificial Sequence
  Synthetic
uguacuauaacuuguacugu

SEQ ID NO: 702680 - RNA, 20 nt, Artificial Sequence
  Synthetic
aggucuuucaagauuacugu

SEQ ID NO: 702681 - RNA, 20 nt, Artificial Sequence
  Synthetic
aaagcguuacucguuacugu

SEQ ID NO: 702682 - RNA, 20 nt, Artificial Sequence
  Synthetic
aggcacaugucuaaaccugu

SEQ ID NO: 702683 - RNA, 20 nt, Artificial Sequence
  Synthetic
caggcuuauagaucaccugu

SEQ ID NO: 702684 - RNA, 20 nt, Artificial Sequence
  Synthetic
cucuuugccacaugaccugu

SEQ ID NO: 702685 - RNA, 20 nt, Artificial Sequence
  Synthetic
aaacuggaacacagcccugu

SEQ ID NO: 702686 - RNA, 20 nt, Artificial Sequence
  Synthetic
cacacuauacaagauccugu

SEQ ID NO: 702687 - RNA, 20 nt, Artificial Sequence
  Synthetic
uccaagcaaccuucuccugu

SEQ ID NO: 702688 - RNA, 20 nt, Artificial Sequence
  Synthetic
uugugauucuuuacagcugu

SEQ ID NO: 702689 - RNA, 20 nt, Artificial Sequence
  Synthetic
ucuugacacugcauagcugu

SEQ ID NO: 702690 - RNA, 20 nt, Artificial Sequence
  Synthetic
ucuguuuaccaucuagcugu

SEQ ID NO: 702691 - RNA, 20 nt, Artificial Sequence
  Synthetic
uguaguaauugcuacgcugu

SEQ ID NO: 702692 - RNA, 20 nt, Artificial Sequence
  Synthetic
ccuuagcacuaucaggcugu

SEQ ID NO: 702693 - RNA, 20 nt, Artificial Sequence
  Synthetic
uuauaucauacauaggcugu

SEQ ID NO: 702694 - RNA, 20 nt, Artificial Sequence
  Synthetic
ugguaccaacuugcugcugu

SEQ ID NO: 702695 - RNA, 20 nt, Artificial Sequence
  Synthetic
uaauacaggaauccaucugu

SEQ ID NO: 702696 - RNA, 20 nt, Artificial Sequence
  Synthetic
cccauuaaaagguacucugu

SEQ ID NO: 702697 - RNA, 20 nt, Artificial Sequence
  Synthetic
agcugggucuuacgcucugu

SEQ ID NO: 702698 - RNA, 20 nt, Artificial Sequence
  Synthetic
agcucugauuaggagucugu

SEQ ID NO: 702699 - RNA, 20 nt, Artificial Sequence
  Synthetic
auagccuguauaacuucugu

SEQ ID NO: 702700 - RNA, 20 nt, Artificial Sequence
  Synthetic
aucaugaagauugcuucugu

SEQ ID NO: 702701 - RNA, 20 nt, Artificial Sequence
  Synthetic
ccaaucugcuagucuucugu

SEQ ID NO: 702702 - RNA, 20 nt, Artificial Sequence
  Synthetic
ugaugaaccugguuuucugu

SEQ ID NO: 702703 - RNA, 20 nt, Artificial Sequence
  Synthetic
ucaagucggcccuaaagugu

SEQ ID NO: 702704 - RNA, 20 nt, Artificial Sequence
  Synthetic
agcauuggagacugaagugu

SEQ ID NO: 702705 - RNA, 20 nt, Artificial Sequence
  Synthetic
cuugauuguaacaacagugu

SEQ ID NO: 702706 - RNA, 20 nt, Artificial Sequence
  Synthetic
uacuauccugaaagcagugu

SEQ ID NO: 702707 - RNA, 20 nt, Artificial Sequence
  Synthetic
cguaaaacacuucagagugu

SEQ ID NO: 702708 - RNA, 20 nt, Artificial Sequence
  Synthetic
cuuggcccuuuugagagugu

SEQ ID NO: 702709 - RNA, 20 nt, Artificial Sequence
  Synthetic
cuacugaaggggcggagugu

SEQ ID NO: 702710 - RNA, 20 nt, Artificial Sequence
  Synthetic
cauaauaaccuacugagugu

SEQ ID NO: 702711 - RNA, 20 nt, Artificial Sequence
  Synthetic
cucccaucggaucauagugu

SEQ ID NO: 702712 - RNA, 20 nt, Artificial Sequence
  Synthetic
cacuaggaggucccuagugu

SEQ ID NO: 702713 - RNA, 20 nt, Artificial Sequence
  Synthetic
uguucuuggggucaacgugu

SEQ ID NO: 702714 - RNA, 20 nt, Artificial Sequence
  Synthetic
ucggagugccuaauucgugu

SEQ ID NO: 702715 - RNA, 20 nt, Artificial Sequence
  Synthetic
aaaccagcggauuacggugu

SEQ ID NO: 702716 - RNA, 20 nt, Artificial Sequence
  Synthetic
agacaugugccuuccggugu

SEQ ID NO: 702717 - RNA, 20 nt, Artificial Sequence
  Synthetic
accacaacaggaaagggugu

SEQ ID NO: 702718 - RNA, 20 nt, Artificial Sequence
  Synthetic
uaaagacaaugugggggugu

SEQ ID NO: 702719 - RNA, 20 nt, Artificial Sequence
  Synthetic
auaucuccuuuguugggugu

SEQ ID NO: 702720 - RNA, 20 nt, Artificial Sequence
  Synthetic
cgguccuuaggggauggugu

SEQ ID NO: 702721 - RNA, 20 nt, Artificial Sequence
  Synthetic
uaggcuuccuuccgaugugu

SEQ ID NO: 702722 - RNA, 20 nt, Artificial Sequence
  Synthetic
cggaagacucccuccugugu

SEQ ID NO: 702723 - RNA, 20 nt, Artificial Sequence
  Synthetic
aaguagaaacucuucugugu

SEQ ID NO: 702724 - RNA, 20 nt, Artificial Sequence
  Synthetic
ccgauuguucucccuugugu

SEQ ID NO: 702725 - RNA, 20 nt, Artificial Sequence
  Synthetic
aagcaccauucuuuuugugu

SEQ ID NO: 702726 - RNA, 20 nt, Artificial Sequence
  Synthetic
caagaggcgugauuaauugu

SEQ ID NO: 702727 - RNA, 20 nt, Artificial Sequence
  Synthetic
cuauauccuucucucauugu

SEQ ID NO: 702728 - RNA, 20 nt, Artificial Sequence
  Synthetic
cguuaacuacauuucauugu

SEQ ID NO: 702729 - RNA, 20 nt, Artificial Sequence
  Synthetic
aauguccuguguacuauugu

SEQ ID NO: 702730 - RNA, 20 nt, Artificial Sequence
  Synthetic
cggauuagcaucauuauugu

SEQ ID NO: 702731 - RNA, 20 nt, Artificial Sequence
  Synthetic
cuggugguaguuucccuugu

SEQ ID NO: 702732 - RNA, 20 nt, Artificial Sequence
  Synthetic
uggcccagagugauccuugu

SEQ ID NO: 702733 - RNA, 20 nt, Artificial Sequence
  Synthetic
ucuaaauauggccuccuugu

SEQ ID NO: 702734 - RNA, 20 nt, Artificial Sequence
  Synthetic
acggauuaaauuuagcuugu

SEQ ID NO: 702735 - RNA, 20 nt, Artificial Sequence
  Synthetic
cacguuauaaaagaucuugu

SEQ ID NO: 702736 - RNA, 20 nt, Artificial Sequence
  Synthetic
ucauacgagguuuaucuugu

SEQ ID NO: 702737 - RNA, 20 nt, Artificial Sequence
  Synthetic
ucauacugcagaacucuugu

SEQ ID NO: 702738 - RNA, 20 nt, Artificial Sequence
  Synthetic
aaguaacuguacuuucuugu

SEQ ID NO: 702739 - RNA, 20 nt, Artificial Sequence
  Synthetic
acagauauaacucccguugu

SEQ ID NO: 702740 - RNA, 20 nt, Artificial Sequence
  Synthetic
ccuagaccugaagccguugu

SEQ ID NO: 702741 - RNA, 20 nt, Artificial Sequence
  Synthetic
uuugaaacauagaucguugu

SEQ ID NO: 702742 - RNA, 20 nt, Artificial Sequence
  Synthetic
cugaucacggacgugguugu

SEQ ID NO: 702743 - RNA, 20 nt, Artificial Sequence
  Synthetic
uuccacacucuaaguguugu

SEQ ID NO: 702744 - RNA, 20 nt, Artificial Sequence
  Synthetic
cagcuagguagaguuguugu

SEQ ID NO: 702745 - RNA, 20 nt, Artificial Sequence
  Synthetic
agaguaugauugacauuugu

SEQ ID NO: 702746 - RNA, 20 nt, Artificial Sequence
  Synthetic
ccuaggcuguacagauuugu

SEQ ID NO: 702747 - RNA, 20 nt, Artificial Sequence
  Synthetic
cacugccuuguauccuuugu

SEQ ID NO: 702748 - RNA, 20 nt, Artificial Sequence
  Synthetic
auauacaauagcagcuuugu

SEQ ID NO: 702749 - RNA, 20 nt, Artificial Sequence
  Synthetic
ccuaugugcuugugcuuugu

SEQ ID NO: 702750 - RNA, 20 nt, Artificial Sequence
  Synthetic
uaaguugcaaaggaguuugu

SEQ ID NO: 702751 - RNA, 20 nt, Artificial Sequence
  Synthetic
acaagugucaauagguuugu

SEQ ID NO: 702752 - RNA, 20 nt, Artificial Sequence
  Synthetic
uugugcgaaggucauuuugu

SEQ ID NO: 702753 - RNA, 20 nt, Artificial Sequence
  Synthetic
cauacagucacgccuuuugu

SEQ ID NO: 702754 - RNA, 20 nt, Artificial Sequence
  Synthetic
cauggccucccguuuuuugu

SEQ ID NO: 702755 - RNA, 20 nt, Artificial Sequence
  Synthetic
uacaggcccuggagaaaauu

SEQ ID NO: 702756 - RNA, 20 nt, Artificial Sequence
  Synthetic
caguagcucaugcugaaauu

SEQ ID NO: 702757 - RNA, 20 nt, Artificial Sequence
  Synthetic
auucaauaccucgugaaauu

SEQ ID NO: 702758 - RNA, 20 nt, Artificial Sequence
  Synthetic
aaguaaucuugugugaaauu

SEQ ID NO: 702759 - RNA, 20 nt, Artificial Sequence
  Synthetic
aaugggggaugauguaaauu

SEQ ID NO: 702760 - RNA, 20 nt, Artificial Sequence
  Synthetic
ccauugcugauuccacaauu

SEQ ID NO: 702761 - RNA, 20 nt, Artificial Sequence
  Synthetic
uucacugugggggcacaauu

SEQ ID NO: 702762 - RNA, 20 nt, Artificial Sequence
  Synthetic
cuagauaaaguacuacaauu

SEQ ID NO: 702763 - RNA, 20 nt, Artificial Sequence
  Synthetic
uauggugauuuauuacaauu

SEQ ID NO: 702764 - RNA, 20 nt, Artificial Sequence
  Synthetic
cuaauggauaccuaucaauu

SEQ ID NO: 702765 - RNA, 20 nt, Artificial Sequence
  Synthetic
cucuagagguauuaucaauu

SEQ ID NO: 702766 - RNA, 20 nt, Artificial Sequence
  Synthetic
uaccuucuaagagcucaauu

SEQ ID NO: 702767 - RNA, 20 nt, Artificial Sequence
  Synthetic
uuacacuuacugggucaauu

SEQ ID NO: 702768 - RNA, 20 nt, Artificial Sequence
  Synthetic
aggagacuucugggucaauu

SEQ ID NO: 702769 - RNA, 20 nt, Artificial Sequence
  Synthetic
aggaauggucauaaagaauu

SEQ ID NO: 702770 - RNA, 20 nt, Artificial Sequence
  Synthetic
aguaacuagccagaagaauu

SEQ ID NO: 702771 - RNA, 20 nt, Artificial Sequence
  Synthetic
acuuuguagcacucagaauu

SEQ ID NO: 702772 - RNA, 20 nt, Artificial Sequence
  Synthetic
ccacacagucccucagaauu

SEQ ID NO: 702773 - RNA, 20 nt, Artificial Sequence
  Synthetic
cgugaaaugaggauagaauu

SEQ ID NO: 702774 - RNA, 20 nt, Artificial Sequence
  Synthetic
aauaugugugcucaggaauu

SEQ ID NO: 702775 - RNA, 20 nt, Artificial Sequence
  Synthetic
uaggguaaagacgaggaauu

SEQ ID NO: 702776 - RNA, 20 nt, Artificial Sequence
  Synthetic
auaccuaccuccgaggaauu

SEQ ID NO: 702777 - RNA, 20 nt, Artificial Sequence
  Synthetic
ccguggccauuuagggaauu

SEQ ID NO: 702778 - RNA, 20 nt, Artificial Sequence
  Synthetic
cagaugauuccaggggaauu

SEQ ID NO: 702779 - RNA, 20 nt, Artificial Sequence
  Synthetic
acaagcgaugaaugugaauu

SEQ ID NO: 702780 - RNA, 20 nt, Artificial Sequence
  Synthetic
auuagcacugucguugaauu

SEQ ID NO: 702781 - RNA, 20 nt, Artificial Sequence
  Synthetic
agcguaacauuucaauaauu

SEQ ID NO: 702782 - RNA, 20 nt, Artificial Sequence
  Synthetic
agauuguccaggauauaauu

SEQ ID NO: 702783 - RNA, 20 nt, Artificial Sequence
  Synthetic
ugugggccauauguauaauu

SEQ ID NO: 702784 - RNA, 20 nt, Artificial Sequence
  Synthetic
caacguggaggcagcuaauu

SEQ ID NO: 702785 - RNA, 20 nt, Artificial Sequence
  Synthetic
cuuacccaagucauguaauu

SEQ ID NO: 702786 - RNA, 20 nt, Artificial Sequence
  Synthetic
cugcuuagucuaucaacauu

SEQ ID NO: 702787 - RNA, 20 nt, Artificial Sequence
  Synthetic
cguucugaaacuugaacauu

SEQ ID NO: 702788 - RNA, 20 nt, Artificial Sequence
  Synthetic
auggcauguacgauaacauu

SEQ ID NO: 702789 - RNA, 20 nt, Artificial Sequence
  Synthetic
aaugucguuccuguaacauu

SEQ ID NO: 702790 - RNA, 20 nt, Artificial Sequence
  Synthetic
cucucacaaguauacacauu

SEQ ID NO: 702791 - RNA, 20 nt, Artificial Sequence
  Synthetic
cuaagucucuaggauacauu

SEQ ID NO: 702792 - RNA, 20 nt, Artificial Sequence
  Synthetic
cuccacaaccugccuacauu

SEQ ID NO: 702793 - RNA, 20 nt, Artificial Sequence
  Synthetic
ugcugaaaggaggcuacauu

SEQ ID NO: 702794 - RNA, 20 nt, Artificial Sequence
  Synthetic
ugggaguaaugaauuacauu

SEQ ID NO: 702795 - RNA, 20 nt, Artificial Sequence
  Synthetic
uggacugagggguaaccauu

SEQ ID NO: 702796 - RNA, 20 nt, Artificial Sequence
  Synthetic
aaggagugccuucuaccauu

SEQ ID NO: 702797 - RNA, 20 nt, Artificial Sequence
  Synthetic
auccuguccagacacccauu

SEQ ID NO: 702798 - RNA, 20 nt, Artificial Sequence
  Synthetic
ucaaacugcagggacccauu

SEQ ID NO: 702799 - RNA, 20 nt, Artificial Sequence
  Synthetic
ccuccacaaauuuucccauu

SEQ ID NO: 702800 - RNA, 20 nt, Artificial Sequence
  Synthetic
cagccucaguguaauccauu

SEQ ID NO: 702801 - RNA, 20 nt, Artificial Sequence
  Synthetic
ccuugggauuguucuccauu

SEQ ID NO: 702802 - RNA, 20 nt, Artificial Sequence
  Synthetic
uaacuauuauuaaguccauu

SEQ ID NO: 702803 - RNA, 20 nt, Artificial Sequence
  Synthetic
caaucggauauuaaagcauu

SEQ ID NO: 702804 - RNA, 20 nt, Artificial Sequence
  Synthetic
uacacaaccaacccagcauu

SEQ ID NO: 702805 - RNA, 20 nt, Artificial Sequence
  Synthetic
cuugucccgaagugagcauu

SEQ ID NO: 702806 - RNA, 20 nt, Artificial Sequence
  Synthetic
uuguauguuagucuagcauu

SEQ ID NO: 702807 - RNA, 20 nt, Artificial Sequence
  Synthetic
cuugcuuaugaugccgcauu

SEQ ID NO: 702808 - RNA, 20 nt, Artificial Sequence
  Synthetic
cucacaauagguuaggcauu

SEQ ID NO: 702809 - RNA, 20 nt, Artificial Sequence
  Synthetic
auagagcucaucauggcauu

SEQ ID NO: 702810 - RNA, 20 nt, Artificial Sequence
  Synthetic
cuggacauugugcuggcauu

SEQ ID NO: 702811 - RNA, 20 nt, Artificial Sequence
  Synthetic
ucuccucaaguuuaugcauu

SEQ ID NO: 702812 - RNA, 20 nt, Artificial Sequence
  Synthetic
agauuugcgaauuuaucauu

SEQ ID NO: 702813 - RNA, 20 nt, Artificial Sequence
  Synthetic
aaaguccuauacagcucauu

SEQ ID NO: 702814 - RNA, 20 nt, Artificial Sequence
  Synthetic
acauggguuugagucucauu

SEQ ID NO: 702815 - RNA, 20 nt, Artificial Sequence
  Synthetic
caaaagcacuuacagucauu

SEQ ID NO: 702816 - RNA, 20 nt, Artificial Sequence
  Synthetic
caguucacuagggcgucauu

SEQ ID NO: 702817 - RNA, 20 nt, Artificial Sequence
  Synthetic
uagucuaaaggcuuuucauu

SEQ ID NO: 702818 - RNA, 20 nt, Artificial Sequence
  Synthetic
cuaguccuaaaaccaagauu

SEQ ID NO: 702819 - RNA, 20 nt, Artificial Sequence
  Synthetic
ccagauaguuauuucagauu

SEQ ID NO: 702820 - RNA, 20 nt, Artificial Sequence
  Synthetic
ugcugcaauugagagagauu

SEQ ID NO: 702821 - RNA, 20 nt, Artificial Sequence
  Synthetic
caugaaggauuucauagauu

SEQ ID NO: 702822 - RNA, 20 nt, Artificial Sequence
  Synthetic
aucauccuguaggcuagauu

SEQ ID NO: 702823 - RNA, 20 nt, Artificial Sequence
  Synthetic
auucugagagggaguagauu

SEQ ID NO: 702824 - RNA, 20 nt, Artificial Sequence
  Synthetic
aauaagggucucuguagauu

SEQ ID NO: 702825 - RNA, 20 nt, Artificial Sequence
  Synthetic
aagguggacuuguuuagauu

SEQ ID NO: 702826 - RNA, 20 nt, Artificial Sequence
  Synthetic
uguggaagcuauauacgauu

SEQ ID NO: 702827 - RNA, 20 nt, Artificial Sequence
  Synthetic
acguacaaaaugacccgauu

SEQ ID NO: 702828 - RNA, 20 nt, Artificial Sequence
  Synthetic
cacccuccaacagagcgauu

SEQ ID NO: 702829 - RNA, 20 nt, Artificial Sequence
  Synthetic
cacugaacuaauccaggauu

SEQ ID NO: 702830 - RNA, 20 nt, Artificial Sequence
  Synthetic
uugaacaaugggcuaggauu

SEQ ID NO: 702831 - RNA, 20 nt, Artificial Sequence
  Synthetic
ucaggugaaccuuuaggauu

SEQ ID NO: 702832 - RNA, 20 nt, Artificial Sequence
  Synthetic
aguaauaucccacugggauu

SEQ ID NO: 702833 - RNA, 20 nt, Artificial Sequence
  Synthetic
aagcaagcugcacugggauu

SEQ ID NO: 702834 - RNA, 20 nt, Artificial Sequence
  Synthetic
auuguaccaggaaguggauu

SEQ ID NO: 702835 - RNA, 20 nt, Artificial Sequence
  Synthetic
aucuaaucuccauuuggauu

SEQ ID NO: 702836 - RNA, 20 nt, Artificial Sequence
  Synthetic
cuucuccucacccaaugauu

SEQ ID NO: 702837 - RNA, 20 nt, Artificial Sequence
  Synthetic
aaaacgucugcaugaugauu

SEQ ID NO: 702838 - RNA, 20 nt, Artificial Sequence
  Synthetic
aaaugcucagguaacugauu

SEQ ID NO: 702839 - RNA, 20 nt, Artificial Sequence
  Synthetic
ucaaaggcaaagcucugauu

SEQ ID NO: 702840 - RNA, 20 nt, Artificial Sequence
  Synthetic
ccaaaccaauaagucugauu

SEQ ID NO: 702841 - RNA, 20 nt, Artificial Sequence
  Synthetic
auccuggggguggggugauu

SEQ ID NO: 702842 - RNA, 20 nt, Artificial Sequence
  Synthetic
acguccagugcugggugauu

SEQ ID NO: 702843 - RNA, 20 nt, Artificial Sequence
  Synthetic
cagauauuucaacugugauu

SEQ ID NO: 702844 - RNA, 20 nt, Artificial Sequence
  Synthetic
cagugaggcaaaaguugauu

SEQ ID NO: 702845 - RNA, 20 nt, Artificial Sequence
  Synthetic
auuagcaguccaaguugauu

SEQ ID NO: 702846 - RNA, 20 nt, Artificial Sequence
  Synthetic
aaugacuacaguuuuugauu

SEQ ID NO: 702847 - RNA, 20 nt, Artificial Sequence
  Synthetic
ugcacguaguaugaaauauu

SEQ ID NO: 702848 - RNA, 20 nt, Artificial Sequence
  Synthetic
uauggccuaagucuaauauu

SEQ ID NO: 702849 - RNA, 20 nt, Artificial Sequence
  Synthetic
cccauggaccaauacauauu

SEQ ID NO: 702850 - RNA, 20 nt, Artificial Sequence
  Synthetic
ccccaaccccccagcauauu

SEQ ID NO: 702851 - RNA, 20 nt, Artificial Sequence
  Synthetic
acuagugacaugagcauauu

SEQ ID NO: 702852 - RNA, 20 nt, Artificial Sequence
  Synthetic
uuauucauacuccgcauauu

SEQ ID NO: 702853 - RNA, 20 nt, Artificial Sequence
  Synthetic
uuagaggcuccaggcauauu

SEQ ID NO: 702854 - RNA, 20 nt, Artificial Sequence
  Synthetic
cucaagguacugcagauauu

SEQ ID NO: 702855 - RNA, 20 nt, Artificial Sequence
  Synthetic
ugugucacccacuagauauu

SEQ ID NO: 702856 - RNA, 20 nt, Artificial Sequence
  Synthetic
uguuacaguagucuuauauu

SEQ ID NO: 702857 - RNA, 20 nt, Artificial Sequence
  Synthetic
ucuagaucagauguuauauu

SEQ ID NO: 702858 - RNA, 20 nt, Artificial Sequence
  Synthetic
auaguggcuggggaccuauu

SEQ ID NO: 702859 - RNA, 20 nt, Artificial Sequence
  Synthetic
uugugaaccuaaagccuauu

SEQ ID NO: 702860 - RNA, 20 nt, Artificial Sequence
  Synthetic
cagaagaauaggugccuauu

SEQ ID NO: 702861 - RNA, 20 nt, Artificial Sequence
  Synthetic
caaucgauuggcuugcuauu

SEQ ID NO: 702862 - RNA, 20 nt, Artificial Sequence
  Synthetic
ugccgucccugcugucuauu

SEQ ID NO: 702863 - RNA, 20 nt, Artificial Sequence
  Synthetic
uugcggcagauggaaguauu

SEQ ID NO: 702864 - RNA, 20 nt, Artificial Sequence
  Synthetic
uuggcacuuuucacaguauu

SEQ ID NO: 702865 - RNA, 20 nt, Artificial Sequence
  Synthetic
uagaacaucucgucaguauu

SEQ ID NO: 702866 - RNA, 20 nt, Artificial Sequence
  Synthetic
ucuaaacacagcuacguauu

SEQ ID NO: 702867 - RNA, 20 nt, Artificial Sequence
  Synthetic
ccgauguuuuacuagguauu

SEQ ID NO: 702868 - RNA, 20 nt, Artificial Sequence
  Synthetic
cauuauauugcaaugguauu

SEQ ID NO: 702869 - RNA, 20 nt, Artificial Sequence
  Synthetic
aaccugugcugcuguguauu

SEQ ID NO: 702870 - RNA, 20 nt, Artificial Sequence
  Synthetic
ucagugagauucccauuauu

SEQ ID NO: 702871 - RNA, 20 nt, Artificial Sequence
  Synthetic
uguuuagcacgcauauuauu

SEQ ID NO: 702872 - RNA, 20 nt, Artificial Sequence
  Synthetic
ccagugaagauucuauuauu

SEQ ID NO: 702873 - RNA, 20 nt, Artificial Sequence
  Synthetic
uaugccaggggccccuuauu

SEQ ID NO: 702874 - RNA, 20 nt, Artificial Sequence
  Synthetic
ucuugguuagcacuguuauu

SEQ ID NO: 702875 - RNA, 20 nt, Artificial Sequence
  Synthetic
uugaacucaguggguuuauu

SEQ ID NO: 702876 - RNA, 20 nt, Artificial Sequence
  Synthetic
aggcgugcaaucauuuuauu

SEQ ID NO: 702877 - RNA, 20 nt, Artificial Sequence
  Synthetic
caugcguaucucguuuuauu

SEQ ID NO: 702878 - RNA, 20 nt, Artificial Sequence
  Synthetic
ugacuugccuuccuaaacuu

SEQ ID NO: 702879 - RNA, 20 nt, Artificial Sequence
  Synthetic
aaaacguuaagaacgaacuu

SEQ ID NO: 702880 - RNA, 20 nt, Artificial Sequence
  Synthetic
auggcacuacagcugaacuu

SEQ ID NO: 702881 - RNA, 20 nt, Artificial Sequence
  Synthetic
ucucgauccuucuauaacuu

SEQ ID NO: 702882 - RNA, 20 nt, Artificial Sequence
  Synthetic
ucaauucgguugauuaacuu

SEQ ID NO: 702883 - RNA, 20 nt, Artificial Sequence
  Synthetic
caugcguuuuagcuuaacuu

SEQ ID NO: 702884 - RNA, 20 nt, Artificial Sequence
  Synthetic
uaaacacgucagcaccacuu

SEQ ID NO: 702885 - RNA, 20 nt, Artificial Sequence
  Synthetic
uauucucaugguggccacuu

SEQ ID NO: 702886 - RNA, 20 nt, Artificial Sequence
  Synthetic
ucccaagucugacagcacuu

SEQ ID NO: 702887 - RNA, 20 nt, Artificial Sequence
  Synthetic
agcagacugacauagcacuu

SEQ ID NO: 702888 - RNA, 20 nt, Artificial Sequence
  Synthetic
aaaucuacgauagggcacuu

SEQ ID NO: 702889 - RNA, 20 nt, Artificial Sequence
  Synthetic
ccuugggauguagggcacuu

SEQ ID NO: 702890 - RNA, 20 nt, Artificial Sequence
  Synthetic
agggacaaauucccucacuu

SEQ ID NO: 702891 - RNA, 20 nt, Artificial Sequence
  Synthetic
uugggccaaauauuagacuu

SEQ ID NO: 702892 - RNA, 20 nt, Artificial Sequence
  Synthetic
aacccauucucggccgacuu

SEQ ID NO: 702893 - RNA, 20 nt, Artificial Sequence
  Synthetic
aaaagccccuaccucgacuu

SEQ ID NO: 702894 - RNA, 20 nt, Artificial Sequence
  Synthetic
uauucacuuaaugucgacuu

SEQ ID NO: 702895 - RNA, 20 nt, Artificial Sequence
  Synthetic
ugucuucuguaacaggacuu

SEQ ID NO: 702896 - RNA, 20 nt, Artificial Sequence
  Synthetic
ucccucggugaaagugacuu

SEQ ID NO: 702897 - RNA, 20 nt, Artificial Sequence
  Synthetic
cacaguuuagggauugacuu

SEQ ID NO: 702898 - RNA, 20 nt, Artificial Sequence
  Synthetic
ugacuaauauugauugacuu

SEQ ID NO: 702899 - RNA, 20 nt, Artificial Sequence
  Synthetic
agaacuaaucagcaauacuu

SEQ ID NO: 702900 - RNA, 20 nt, Artificial Sequence
  Synthetic
ccugaucaccagauauacuu

SEQ ID NO: 702901 - RNA, 20 nt, Artificial Sequence
  Synthetic
cuccuauuacgaaacuacuu

SEQ ID NO: 702902 - RNA, 20 nt, Artificial Sequence
  Synthetic
uaaguccaauguuacuacuu

SEQ ID NO: 702903 - RNA, 20 nt, Artificial Sequence
  Synthetic
cagggauucuaacucuacuu

SEQ ID NO: 702904 - RNA, 20 nt, Artificial Sequence
  Synthetic
caguccggucaguucuacuu

SEQ ID NO: 702905 - RNA, 20 nt, Artificial Sequence
  Synthetic
caagcacccacuuaguacuu

SEQ ID NO: 702906 - RNA, 20 nt, Artificial Sequence
  Synthetic
aaauaggcaaucguguacuu

SEQ ID NO: 702907 - RNA, 20 nt, Artificial Sequence
  Synthetic
aucagacccacaccuuacuu

SEQ ID NO: 702908 - RNA, 20 nt, Artificial Sequence
  Synthetic
ugucccgugacaauuuacuu

SEQ ID NO: 702909 - RNA, 20 nt, Artificial Sequence
  Synthetic
auaucacccacucuaaccuu

SEQ ID NO: 702910 - RNA, 20 nt, Artificial Sequence
  Synthetic
ugugaauuuaaugacaccuu

SEQ ID NO: 702911 - RNA, 20 nt, Artificial Sequence
  Synthetic
aauccucacacacucaccuu

SEQ ID NO: 702912 - RNA, 20 nt, Artificial Sequence
  Synthetic
uggaucuguugggcgaccuu

SEQ ID NO: 702913 - RNA, 20 nt, Artificial Sequence
  Synthetic
cgauauuauuaaaauaccuu

SEQ ID NO: 702914 - RNA, 20 nt, Artificial Sequence
  Synthetic
aauaccucuucggcuaccuu

SEQ ID NO: 702915 - RNA, 20 nt, Artificial Sequence
  Synthetic
acacgcacauaauguaccuu

SEQ ID NO: 702916 - RNA, 20 nt, Artificial Sequence
  Synthetic
uucugcuaucggauuaccuu

SEQ ID NO: 702917 - RNA, 20 nt, Artificial Sequence
  Synthetic
ucaauaguguaccuuaccuu

SEQ ID NO: 702918 - RNA, 20 nt, Artificial Sequence
  Synthetic
uugugguuuuagggacccuu

SEQ ID NO: 702919 - RNA, 20 nt, Artificial Sequence
  Synthetic
agcaguuucacaugacccuu

SEQ ID NO: 702920 - RNA, 20 nt, Artificial Sequence
  Synthetic
aggguaacucuacuacccuu

SEQ ID NO: 702921 - RNA, 20 nt, Artificial Sequence
  Synthetic
ucaauauaguuucuacccuu

SEQ ID NO: 702922 - RNA, 20 nt, Artificial Sequence
  Synthetic
aggguaguagaguuacccuu

SEQ ID NO: 702923 - RNA, 20 nt, Artificial Sequence
  Synthetic
auucggccuaagauccccuu

SEQ ID NO: 702924 - RNA, 20 nt, Artificial Sequence
  Synthetic
aauaaucagcuugagcccuu

SEQ ID NO: 702925 - RNA, 20 nt, Artificial Sequence
  Synthetic
cgaagacaggguuagcccuu

SEQ ID NO: 702926 - RNA, 20 nt, Artificial Sequence
  Synthetic
caaguaggguccuugcccuu

SEQ ID NO: 702927 - RNA, 20 nt, Artificial Sequence
  Synthetic
ucuaagaaugggaaucccuu

SEQ ID NO: 702928 - RNA, 20 nt, Artificial Sequence
  Synthetic
ucacuggagcuuuaucccuu

SEQ ID NO: 702929 - RNA, 20 nt, Artificial Sequence
  Synthetic
uaccacacugacuaagccuu

SEQ ID NO: 702930 - RNA, 20 nt, Artificial Sequence
  Synthetic
cguugauacccuacagccuu

SEQ ID NO: 702931 - RNA, 20 nt, Artificial Sequence
  Synthetic
cgcuucuacauaauagccuu

SEQ ID NO: 702932 - RNA, 20 nt, Artificial Sequence
  Synthetic
uagggauauaagaaggccuu

SEQ ID NO: 702933 - RNA, 20 nt, Artificial Sequence
  Synthetic
uucccacuuccggaggccuu

SEQ ID NO: 702934 - RNA, 20 nt, Artificial Sequence
  Synthetic
auugaguauucacaugccuu

SEQ ID NO: 702935 - RNA, 20 nt, Artificial Sequence
  Synthetic
caagguuaacuaccugccuu

SEQ ID NO: 702936 - RNA, 20 nt, Artificial Sequence
  Synthetic
cucacagaucugccauccuu

SEQ ID NO: 702937 - RNA, 20 nt, Artificial Sequence
  Synthetic
auggacaagacagcauccuu

SEQ ID NO: 702938 - RNA, 20 nt, Artificial Sequence
  Synthetic
aagagggauaggugauccuu

SEQ ID NO: 702939 - RNA, 20 nt, Artificial Sequence
  Synthetic
aagauuuguacgaacuccuu

SEQ ID NO: 702940 - RNA, 20 nt, Artificial Sequence
  Synthetic
caggaagaagcgaacuccuu

SEQ ID NO: 702941 - RNA, 20 nt, Artificial Sequence
  Synthetic
ucuuucauaaugcccuccuu

SEQ ID NO: 702942 - RNA, 20 nt, Artificial Sequence
  Synthetic
ccgugcaguauagucuccuu

SEQ ID NO: 702943 - RNA, 20 nt, Artificial Sequence
  Synthetic
cuaugcagaggauuguccuu

SEQ ID NO: 702944 - RNA, 20 nt, Artificial Sequence
  Synthetic
uagagggggagaaguuccuu

SEQ ID NO: 702945 - RNA, 20 nt, Artificial Sequence
  Synthetic
auggccacguuuaguuccuu

SEQ ID NO: 702946 - RNA, 20 nt, Artificial Sequence
  Synthetic
ugacaacuagucauuuccuu

SEQ ID NO: 702947 - RNA, 20 nt, Artificial Sequence
  Synthetic
uugaaguuauacuaaagcuu

SEQ ID NO: 702948 - RNA, 20 nt, Artificial Sequence
  Synthetic
ucuaagucaagaguaagcuu

SEQ ID NO: 702949 - RNA, 20 nt, Artificial Sequence
  Synthetic
auuaaaccagaccagagcuu

SEQ ID NO: 702950 - RNA, 20 nt, Artificial Sequence
  Synthetic
ucgauuguuucguggagcuu

SEQ ID NO: 702951 - RNA, 20 nt, Artificial Sequence
  Synthetic
ucuugauagcagaauagcuu

SEQ ID NO: 702952 - RNA, 20 nt, Artificial Sequence
  Synthetic
aagguugggauggaacgcuu

SEQ ID NO: 702953 - RNA, 20 nt, Artificial Sequence
  Synthetic
ugagguguugggugacgcuu

SEQ ID NO: 702954 - RNA, 20 nt, Artificial Sequence
  Synthetic
auaauuacugauaaucgcuu

SEQ ID NO: 702955 - RNA, 20 nt, Artificial Sequence
  Synthetic
ugcauggggaauugucgcuu

SEQ ID NO: 702956 - RNA, 20 nt, Artificial Sequence
  Synthetic
uagggagcauuguuucgcuu

SEQ ID NO: 702957 - RNA, 20 nt, Artificial Sequence
  Synthetic
uaugguccacuaagaggcuu

SEQ ID NO: 702958 - RNA, 20 nt, Artificial Sequence
  Synthetic
cucaauggucagcgaggcuu

SEQ ID NO: 702959 - RNA, 20 nt, Artificial Sequence
  Synthetic
ucuauauagccucagggcuu

SEQ ID NO: 702960 - RNA, 20 nt, Artificial Sequence
  Synthetic
ccccucagaguucagggcuu

SEQ ID NO: 702961 - RNA, 20 nt, Artificial Sequence
  Synthetic
uucgagaagagguagggcuu

SEQ ID NO: 702962 - RNA, 20 nt, Artificial Sequence
  Synthetic
uccaucuguuggcggggcuu

SEQ ID NO: 702963 - RNA, 20 nt, Artificial Sequence
  Synthetic
uguugggcacugaauggcuu

SEQ ID NO: 702964 - RNA, 20 nt, Artificial Sequence
  Synthetic
cacaguuaagagcuuggcuu

SEQ ID NO: 702965 - RNA, 20 nt, Artificial Sequence
  Synthetic
aaaaacgggaggccaugcuu

SEQ ID NO: 702966 - RNA, 20 nt, Artificial Sequence
  Synthetic
ucaaggcuuggucuaugcuu

SEQ ID NO: 702967 - RNA, 20 nt, Artificial Sequence
  Synthetic
uacaccaaguuaaccugcuu

SEQ ID NO: 702968 - RNA, 20 nt, Artificial Sequence
  Synthetic
uaaguggaaaccagcugcuu

SEQ ID NO: 702969 - RNA, 20 nt, Artificial Sequence
  Synthetic
aauuaaugacuacugugcuu

SEQ ID NO: 702970 - RNA, 20 nt, Artificial Sequence
  Synthetic
uuccaguuaggguugugcuu

SEQ ID NO: 702971 - RNA, 20 nt, Artificial Sequence
  Synthetic
uauggaacuaguuauugcuu

SEQ ID NO: 702972 - RNA, 20 nt, Artificial Sequence
  Synthetic
ugcauacagucugcuugcuu

SEQ ID NO: 702973 - RNA, 20 nt, Artificial Sequence
  Synthetic
uuuaaccugaccguuugcuu

SEQ ID NO: 702974 - RNA, 20 nt, Artificial Sequence
  Synthetic
cuauccaguaacaaaaucuu

SEQ ID NO: 702975 - RNA, 20 nt, Artificial Sequence
  Synthetic
ugauggcaucugcaaaucuu

SEQ ID NO: 702976 - RNA, 20 nt, Artificial Sequence
  Synthetic
auguacagauauucaaucuu

SEQ ID NO: 702977 - RNA, 20 nt, Artificial Sequence
  Synthetic
caucagacaacuagaaucuu

SEQ ID NO: 702978 - RNA, 20 nt, Artificial Sequence
  Synthetic
cuccuguuaaauggcaucuu

SEQ ID NO: 702979 - RNA, 20 nt, Artificial Sequence
  Synthetic
ucgcaaaaccaucucaucuu

SEQ ID NO: 702980 - RNA, 20 nt, Artificial Sequence
  Synthetic
aaacuuuaccauaagaucuu

SEQ ID NO: 702981 - RNA, 20 nt, Artificial Sequence
  Synthetic
ccaaggccuugcaguaucuu

SEQ ID NO: 702982 - RNA, 20 nt, Artificial Sequence
  Synthetic
auguuuuguaaggguaucuu

SEQ ID NO: 702983 - RNA, 20 nt, Artificial Sequence
  Synthetic
agcuaaaucaagaaccucuu

SEQ ID NO: 702984 - RNA, 20 nt, Artificial Sequence
  Synthetic
cgaagcaaagugaaccucuu

SEQ ID NO: 702985 - RNA, 20 nt, Artificial Sequence
  Synthetic
ccauuaaacuuguaccucuu

SEQ ID NO: 702986 - RNA, 20 nt, Artificial Sequence
  Synthetic
acaagcacaaugccgcucuu

SEQ ID NO: 702987 - RNA, 20 nt, Artificial Sequence
  Synthetic
uugaagccucaacaucucuu

SEQ ID NO: 702988 - RNA, 20 nt, Artificial Sequence
  Synthetic
cauuagaagauucaucucuu

SEQ ID NO: 702989 - RNA, 20 nt, Artificial Sequence
  Synthetic
aacuaagaguaggaagucuu

SEQ ID NO: 702990 - RNA, 20 nt, Artificial Sequence
  Synthetic
uugcccuagggguaagucuu

SEQ ID NO: 702991 - RNA, 20 nt, Artificial Sequence
  Synthetic
uguucuacccucuuagucuu

SEQ ID NO: 702992 - RNA, 20 nt, Artificial Sequence
  Synthetic
uuugacuagcaguuagucuu

SEQ ID NO: 702993 - RNA, 20 nt, Artificial Sequence
  Synthetic
auggugauuuuggaggucuu

SEQ ID NO: 702994 - RNA, 20 nt, Artificial Sequence
  Synthetic
ucgaagacaagggaugucuu

SEQ ID NO: 702995 - RNA, 20 nt, Artificial Sequence
  Synthetic
cuuacuucaauagcugucuu

SEQ ID NO: 702996 - RNA, 20 nt, Artificial Sequence
  Synthetic
cuaaauuccucuggugucuu

SEQ ID NO: 702997 - RNA, 20 nt, Artificial Sequence
  Synthetic
ccuuuauccuggagauucuu

SEQ ID NO: 702998 - RNA, 20 nt, Artificial Sequence
  Synthetic
uguaugcccucuggauucuu

SEQ ID NO: 702999 - RNA, 20 nt, Artificial Sequence
  Synthetic
acccuuauuccauacuucuu

SEQ ID NO: 703000 - RNA, 20 nt, Artificial Sequence
  Synthetic
ucuaauagguguaaguucuu

SEQ ID NO: 703001 - RNA, 20 nt, Artificial Sequence
  Synthetic
accauuucccaccaguucuu

SEQ ID NO: 703002 - RNA, 20 nt, Artificial Sequence
  Synthetic
ccagcccgguacaauuucuu

SEQ ID NO: 703003 - RNA, 20 nt, Artificial Sequence
  Synthetic
aaccuauuagguacaaaguu

SEQ ID NO: 703004 - RNA, 20 nt, Artificial Sequence
  Synthetic
uuguauucacagcgaaaguu

SEQ ID NO: 703005 - RNA, 20 nt, Artificial Sequence
  Synthetic
auauguaacuggggaaaguu

SEQ ID NO: 703006 - RNA, 20 nt, Artificial Sequence
  Synthetic
ucuaaaccuacccuaaaguu

SEQ ID NO: 703007 - RNA, 20 nt, Artificial Sequence
  Synthetic
ugaacaccugggaacaaguu

SEQ ID NO: 703008 - RNA, 20 nt, Artificial Sequence
  Synthetic
ucagugguuaucaucaaguu

SEQ ID NO: 703009 - RNA, 20 nt, Artificial Sequence
  Synthetic
aguaauuacccauagaaguu

SEQ ID NO: 703010 - RNA, 20 nt, Artificial Sequence
  Synthetic
cagccuuggaggcauaaguu

SEQ ID NO: 703011 - RNA, 20 nt, Artificial Sequence
  Synthetic
aauaugcgugcuaaacaguu

SEQ ID NO: 703012 - RNA, 20 nt, Artificial Sequence
  Synthetic
ucuuggaauacaccacaguu

SEQ ID NO: 703013 - RNA, 20 nt, Artificial Sequence
  Synthetic
cuuucaaucugaauacaguu

SEQ ID NO: 703014 - RNA, 20 nt, Artificial Sequence
  Synthetic
auuuauucgcacauacaguu

SEQ ID NO: 703015 - RNA, 20 nt, Artificial Sequence
  Synthetic
augcaacuaauuaaccaguu

SEQ ID NO: 703016 - RNA, 20 nt, Artificial Sequence
  Synthetic
cauuacugucccucgcaguu

SEQ ID NO: 703017 - RNA, 20 nt, Artificial Sequence
  Synthetic
ucccuaauucccucgcaguu

SEQ ID NO: 703018 - RNA, 20 nt, Artificial Sequence
  Synthetic
ccuuaaaagggagaucaguu

SEQ ID NO: 703019 - RNA, 20 nt, Artificial Sequence
  Synthetic
uucuaaccuacucgucaguu

SEQ ID NO: 703020 - RNA, 20 nt, Artificial Sequence
  Synthetic
agaaguguuguuugucaguu

SEQ ID NO: 703021 - RNA, 20 nt, Artificial Sequence
  Synthetic
ccgggacguuguaaagaguu

SEQ ID NO: 703022 - RNA, 20 nt, Artificial Sequence
  Synthetic
cuuuacaaugcuagcgaguu

SEQ ID NO: 703023 - RNA, 20 nt, Artificial Sequence
  Synthetic
aauuaucaugcugucgaguu

SEQ ID NO: 703024 - RNA, 20 nt, Artificial Sequence
  Synthetic
cuccaacaaagcuaugaguu

SEQ ID NO: 703025 - RNA, 20 nt, Artificial Sequence
  Synthetic
uuaccaacaacaggugaguu

SEQ ID NO: 703026 - RNA, 20 nt, Artificial Sequence
  Synthetic
cgaauucacucuguugaguu

SEQ ID NO: 703027 - RNA, 20 nt, Artificial Sequence
  Synthetic
acaguuaugaacucauaguu

SEQ ID NO: 703028 - RNA, 20 nt, Artificial Sequence
  Synthetic
uuggaugcugcgggauaguu

SEQ ID NO: 703029 - RNA, 20 nt, Artificial Sequence
  Synthetic
ucaucaggauuauuauaguu

SEQ ID NO: 703030 - RNA, 20 nt, Artificial Sequence
  Synthetic
ccauuuacacuaaccuaguu

SEQ ID NO: 703031 - RNA, 20 nt, Artificial Sequence
  Synthetic
uaagcagccacaagguaguu

SEQ ID NO: 703032 - RNA, 20 nt, Artificial Sequence
  Synthetic
uugcccggaagcugguaguu

SEQ ID NO: 703033 - RNA, 20 nt, Artificial Sequence
  Synthetic
cuagagccuagaguguaguu

SEQ ID NO: 703034 - RNA, 20 nt, Artificial Sequence
  Synthetic
caugguauuacaacuuaguu

SEQ ID NO: 703035 - RNA, 20 nt, Artificial Sequence
  Synthetic
caucggucagcaccuuaguu

SEQ ID NO: 703036 - RNA, 20 nt, Artificial Sequence
  Synthetic
uugguagaaaauaacacguu

SEQ ID NO: 703037 - RNA, 20 nt, Artificial Sequence
  Synthetic
cacacaugggugaugacguu

SEQ ID NO: 703038 - RNA, 20 nt, Artificial Sequence
  Synthetic
uaugucucuuaaaguacguu

SEQ ID NO: 703039 - RNA, 20 nt, Artificial Sequence
  Synthetic
acaauuuucaacuguacguu

SEQ ID NO: 703040 - RNA, 20 nt, Artificial Sequence
  Synthetic
cuguugugacagcggccguu

SEQ ID NO: 703041 - RNA, 20 nt, Artificial Sequence
  Synthetic
aaccuaaaugcagcuccguu

SEQ ID NO: 703042 - RNA, 20 nt, Artificial Sequence
  Synthetic
auagagauuuaguaggcguu

SEQ ID NO: 703043 - RNA, 20 nt, Artificial Sequence
  Synthetic
aacaacugcccuagggcguu

SEQ ID NO: 703044 - RNA, 20 nt, Artificial Sequence
  Synthetic
cuaucugaaacagaugcguu

SEQ ID NO: 703045 - RNA, 20 nt, Artificial Sequence
  Synthetic
ccagcagcuagaacugcguu

SEQ ID NO: 703046 - RNA, 20 nt, Artificial Sequence
  Synthetic
cuuagcucauuaugaagguu

SEQ ID NO: 703047 - RNA, 20 nt, Artificial Sequence
  Synthetic
auuacugcacgucuaagguu

SEQ ID NO: 703048 - RNA, 20 nt, Artificial Sequence
  Synthetic
aauuuaauaugguacagguu

SEQ ID NO: 703049 - RNA, 20 nt, Artificial Sequence
  Synthetic
caaauggauuucacgagguu

SEQ ID NO: 703050 - RNA, 20 nt, Artificial Sequence
  Synthetic
cacacuaguaguuugagguu

SEQ ID NO: 703051 - RNA, 20 nt, Artificial Sequence
  Synthetic
augaaaccucacaauagguu

SEQ ID NO: 703052 - RNA, 20 nt, Artificial Sequence
  Synthetic
cuaauauccaucaauagguu

SEQ ID NO: 703053 - RNA, 20 nt, Artificial Sequence
  Synthetic
uaggacauccacucuagguu

SEQ ID NO: 703054 - RNA, 20 nt, Artificial Sequence
  Synthetic
augggccagacagguagguu

SEQ ID NO: 703055 - RNA, 20 nt, Artificial Sequence
  Synthetic
caguaacuggaacuuagguu

SEQ ID NO: 703056 - RNA, 20 nt, Artificial Sequence
  Synthetic
uuuguaugaugaugacgguu

SEQ ID NO: 703057 - RNA, 20 nt, Artificial Sequence
  Synthetic
aaugaaagaguauuccgguu

SEQ ID NO: 703058 - RNA, 20 nt, Artificial Sequence
  Synthetic
acucuguaucuugagcgguu

SEQ ID NO: 703059 - RNA, 20 nt, Artificial Sequence
  Synthetic
auaauguaaacagcucgguu

SEQ ID NO: 703060 - RNA, 20 nt, Artificial Sequence
  Synthetic
agcuaugcauuuaaaggguu

SEQ ID NO: 703061 - RNA, 20 nt, Artificial Sequence
  Synthetic
cuaagauugucuacaggguu

SEQ ID NO: 703062 - RNA, 20 nt, Artificial Sequence
  Synthetic
aaucuguuggaaucaggguu

SEQ ID NO: 703063 - RNA, 20 nt, Artificial Sequence
  Synthetic
aacuugauugaugucggguu

SEQ ID NO: 703064 - RNA, 20 nt, Artificial Sequence
  Synthetic
cauacuucuucggguggguu

SEQ ID NO: 703065 - RNA, 20 nt, Artificial Sequence
  Synthetic
auugucuacaggguuggguu

SEQ ID NO: 703066 - RNA, 20 nt, Artificial Sequence
  Synthetic
aaggugcuccuaauaugguu

SEQ ID NO: 703067 - RNA, 20 nt, Artificial Sequence
  Synthetic
ucacuuaguacgauaugguu

SEQ ID NO: 703068 - RNA, 20 nt, Artificial Sequence
  Synthetic
aucucuuguuggcuaugguu

SEQ ID NO: 703069 - RNA, 20 nt, Artificial Sequence
  Synthetic
cauuuauccaccuuaugguu

SEQ ID NO: 703070 - RNA, 20 nt, Artificial Sequence
  Synthetic
ucauugaaugccaacugguu

SEQ ID NO: 703071 - RNA, 20 nt, Artificial Sequence
  Synthetic
uuaacuacugugaagugguu

SEQ ID NO: 703072 - RNA, 20 nt, Artificial Sequence
  Synthetic
aaauagaugugacauugguu

SEQ ID NO: 703073 - RNA, 20 nt, Artificial Sequence
  Synthetic
ugguaaauuacaccuugguu

SEQ ID NO: 703074 - RNA, 20 nt, Artificial Sequence
  Synthetic
uuguucguaaaacuuugguu

SEQ ID NO: 703075 - RNA, 20 nt, Artificial Sequence
  Synthetic
cggucaguucuacuuugguu

SEQ ID NO: 703076 - RNA, 20 nt, Artificial Sequence
  Synthetic
auacugaaguaguuuugguu

SEQ ID NO: 703077 - RNA, 20 nt, Artificial Sequence
  Synthetic
uccuuuuggcccaaaauguu

SEQ ID NO: 703078 - RNA, 20 nt, Artificial Sequence
  Synthetic
uccaaugcgacaagaauguu

SEQ ID NO: 703079 - RNA, 20 nt, Artificial Sequence
  Synthetic
auauaacgaugacuaauguu

SEQ ID NO: 703080 - RNA, 20 nt, Artificial Sequence
  Synthetic
cugaaguugcucguaauguu

SEQ ID NO: 703081 - RNA, 20 nt, Artificial Sequence
  Synthetic
cccuguuguacuaacauguu

SEQ ID NO: 703082 - RNA, 20 nt, Artificial Sequence
  Synthetic
acacauagaucagacauguu

SEQ ID NO: 703083 - RNA, 20 nt, Artificial Sequence
  Synthetic
aggcaguagauugccauguu

SEQ ID NO: 703084 - RNA, 20 nt, Artificial Sequence
  Synthetic
auugaggacgcuggcauguu

SEQ ID NO: 703085 - RNA, 20 nt, Artificial Sequence
  Synthetic
ugacuaguugucaauauguu

SEQ ID NO: 703086 - RNA, 20 nt, Artificial Sequence
  Synthetic
cuggauuugcauacacuguu

SEQ ID NO: 703087 - RNA, 20 nt, Artificial Sequence
  Synthetic
agggagauuaguggacuguu

SEQ ID NO: 703088 - RNA, 20 nt, Artificial Sequence
  Synthetic
uauccuugagucuuacuguu

SEQ ID NO: 703089 - RNA, 20 nt, Artificial Sequence
  Synthetic
uccuauauguauggccuguu

SEQ ID NO: 703090 - RNA, 20 nt, Artificial Sequence
  Synthetic
aggguccuucggguccuguu

SEQ ID NO: 703091 - RNA, 20 nt, Artificial Sequence
  Synthetic
aauaaucccuuacagcuguu

SEQ ID NO: 703092 - RNA, 20 nt, Artificial Sequence
  Synthetic
ugauuaacuggaaugcuguu

SEQ ID NO: 703093 - RNA, 20 nt, Artificial Sequence
  Synthetic
ccaucgguuuaucugcuguu

SEQ ID NO: 703094 - RNA, 20 nt, Artificial Sequence
  Synthetic
cuuccagguguggaucuguu

SEQ ID NO: 703095 - RNA, 20 nt, Artificial Sequence
  Synthetic
acgcuguauagauaucuguu

SEQ ID NO: 703096 - RNA, 20 nt, Artificial Sequence
  Synthetic
ccacauugaauuccucuguu

SEQ ID NO: 703097 - RNA, 20 nt, Artificial Sequence
  Synthetic
agugcaaaagucuaaguguu

SEQ ID NO: 703098 - RNA, 20 nt, Artificial Sequence
  Synthetic
uagcacgugucuuaaguguu

SEQ ID NO: 703099 - RNA, 20 nt, Artificial Sequence
  Synthetic
uuugccuuucgaauaguguu

SEQ ID NO: 703100 - RNA, 20 nt, Artificial Sequence
  Synthetic
uaccacuaaugcauaguguu

SEQ ID NO: 703101 - RNA, 20 nt, Artificial Sequence
  Synthetic
ugcauacauaugcacguguu

SEQ ID NO: 703102 - RNA, 20 nt, Artificial Sequence
  Synthetic
ugugcuacugaagagguguu

SEQ ID NO: 703103 - RNA, 20 nt, Artificial Sequence
  Synthetic
agguuagggcgaaguguguu

SEQ ID NO: 703104 - RNA, 20 nt, Artificial Sequence
  Synthetic
ucguuacuugauucauuguu

SEQ ID NO: 703105 - RNA, 20 nt, Artificial Sequence
  Synthetic
uaacgggcacauugauuguu

SEQ ID NO: 703106 - RNA, 20 nt, Artificial Sequence
  Synthetic
cuaaauauggccuccuuguu

SEQ ID NO: 703107 - RNA, 20 nt, Artificial Sequence
  Synthetic
ugaaacguauuuugcuuguu

SEQ ID NO: 703108 - RNA, 20 nt, Artificial Sequence
  Synthetic
caaagcuccaaauaguuguu

SEQ ID NO: 703109 - RNA, 20 nt, Artificial Sequence
  Synthetic
cgauuagggagcuaguuguu

SEQ ID NO: 703110 - RNA, 20 nt, Artificial Sequence
  Synthetic
cuagaccugaagccguuguu

SEQ ID NO: 703111 - RNA, 20 nt, Artificial Sequence
  Synthetic
agaaaagcugcaggguuguu

SEQ ID NO: 703112 - RNA, 20 nt, Artificial Sequence
  Synthetic
uccacacucuaaguguuguu

SEQ ID NO: 703113 - RNA, 20 nt, Artificial Sequence
  Synthetic
agcuagguagaguuguuguu

SEQ ID NO: 703114 - RNA, 20 nt, Artificial Sequence
  Synthetic
acuguuuuaaaucguuuguu

SEQ ID NO: 703115 - RNA, 20 nt, Artificial Sequence
  Synthetic
uaauccgugcgccaaaauuu

SEQ ID NO: 703116 - RNA, 20 nt, Artificial Sequence
  Synthetic
caaaggugugguucaaauuu

SEQ ID NO: 703117 - RNA, 20 nt, Artificial Sequence
  Synthetic
uucagcaucccacuaaauuu

SEQ ID NO: 703118 - RNA, 20 nt, Artificial Sequence
  Synthetic
cagguuggacguuuaaauuu

SEQ ID NO: 703119 - RNA, 20 nt, Artificial Sequence
  Synthetic
uaaugacacugguacaauuu

SEQ ID NO: 703120 - RNA, 20 nt, Artificial Sequence
  Synthetic
uauuacaggacgugcaauuu

SEQ ID NO: 703121 - RNA, 20 nt, Artificial Sequence
  Synthetic
auauuaagaaacgucaauuu

SEQ ID NO: 703122 - RNA, 20 nt, Artificial Sequence
  Synthetic
aauguccuccuugucaauuu

SEQ ID NO: 703123 - RNA, 20 nt, Artificial Sequence
  Synthetic
acagccguuuucuucaauuu

SEQ ID NO: 703124 - RNA, 20 nt, Artificial Sequence
  Synthetic
ugacuguggcucacacauuu

SEQ ID NO: 703125 - RNA, 20 nt, Artificial Sequence
  Synthetic
uuacaugcguauggacauuu

SEQ ID NO: 703126 - RNA, 20 nt, Artificial Sequence
  Synthetic
cuuaggacagccuaccauuu

SEQ ID NO: 703127 - RNA, 20 nt, Artificial Sequence
  Synthetic
ucuaguucccguggccauuu

SEQ ID NO: 703128 - RNA, 20 nt, Artificial Sequence
  Synthetic
aacccaacggagcugcauuu

SEQ ID NO: 703129 - RNA, 20 nt, Artificial Sequence
  Synthetic
ccauaggacuagccucauuu

SEQ ID NO: 703130 - RNA, 20 nt, Artificial Sequence
  Synthetic
uggcuuagaaucgaagauuu

SEQ ID NO: 703131 - RNA, 20 nt, Artificial Sequence
  Synthetic
ugcacagaauaacuagauuu

SEQ ID NO: 703132 - RNA, 20 nt, Artificial Sequence
  Synthetic
aggucccgggaacacgauuu

SEQ ID NO: 703133 - RNA, 20 nt, Artificial Sequence
  Synthetic
cguacaaaaugacccgauuu

SEQ ID NO: 703134 - RNA, 20 nt, Artificial Sequence
  Synthetic
auuuugggaaacagcgauuu

SEQ ID NO: 703135 - RNA, 20 nt, Artificial Sequence
  Synthetic
uaacccuacaacugcgauuu

SEQ ID NO: 703136 - RNA, 20 nt, Artificial Sequence
  Synthetic
aaacgagcagcuauggauuu

SEQ ID NO: 703137 - RNA, 20 nt, Artificial Sequence
  Synthetic
cauguucauaugcaugauuu

SEQ ID NO: 703138 - RNA, 20 nt, Artificial Sequence
  Synthetic
uuccucuugcccacugauuu

SEQ ID NO: 703139 - RNA, 20 nt, Artificial Sequence
  Synthetic
cagcuugugauaccugauuu

SEQ ID NO: 703140 - RNA, 20 nt, Artificial Sequence
  Synthetic
uaaagccugcaguccuauuu

SEQ ID NO: 703141 - RNA, 20 nt, Artificial Sequence
  Synthetic
uuacuaggugauacguauuu

SEQ ID NO: 703142 - RNA, 20 nt, Artificial Sequence
  Synthetic
caguuagagagcugguauuu

SEQ ID NO: 703143 - RNA, 20 nt, Artificial Sequence
  Synthetic
uauagcauagcuguguauuu

SEQ ID NO: 703144 - RNA, 20 nt, Artificial Sequence
  Synthetic
ucauagagggcugcuuauuu

SEQ ID NO: 703145 - RNA, 20 nt, Artificial Sequence
  Synthetic
uccgacaagacacaaacuuu

SEQ ID NO: 703146 - RNA, 20 nt, Artificial Sequence
  Synthetic
aaucacucuaucgcaacuuu

SEQ ID NO: 703147 - RNA, 20 nt, Artificial Sequence
  Synthetic
uccgaaaccaauuuaacuuu

SEQ ID NO: 703148 - RNA, 20 nt, Artificial Sequence
  Synthetic
cauacuuuacaagacacuuu

SEQ ID NO: 703149 - RNA, 20 nt, Artificial Sequence
  Synthetic
caagaaggacauaccacuuu

SEQ ID NO: 703150 - RNA, 20 nt, Artificial Sequence
  Synthetic
ugagugguuucccucacuuu

SEQ ID NO: 703151 - RNA, 20 nt, Artificial Sequence
  Synthetic
ugggggcaaagguucacuuu

SEQ ID NO: 703152 - RNA, 20 nt, Artificial Sequence
  Synthetic
uagaagcggaaacggacuuu

SEQ ID NO: 703153 - RNA, 20 nt, Artificial Sequence
  Synthetic
ucguauucucaccauacuuu

SEQ ID NO: 703154 - RNA, 20 nt, Artificial Sequence
  Synthetic
uuugacacaauguguacuuu

SEQ ID NO: 703155 - RNA, 20 nt, Artificial Sequence
  Synthetic
ugcaggagugauguuacuuu

SEQ ID NO: 703156 - RNA, 20 nt, Artificial Sequence
  Synthetic
ucugcuucaggugaaccuuu

SEQ ID NO: 703157 - RNA, 20 nt, Artificial Sequence
  Synthetic
caguagggguuuuaaccuuu

SEQ ID NO: 703158 - RNA, 20 nt, Artificial Sequence
  Synthetic
aaaaugggauagucaccuuu

SEQ ID NO: 703159 - RNA, 20 nt, Artificial Sequence
  Synthetic
uuuguucaaagcccgccuuu

SEQ ID NO: 703160 - RNA, 20 nt, Artificial Sequence
  Synthetic
acaguauaccagcauccuuu

SEQ ID NO: 703161 - RNA, 20 nt, Artificial Sequence
  Synthetic
ugugugaguauucuagcuuu

SEQ ID NO: 703162 - RNA, 20 nt, Artificial Sequence
  Synthetic
cuaaucuaugacgcugcuuu

SEQ ID NO: 703163 - RNA, 20 nt, Artificial Sequence
  Synthetic
uccaguuaggguugugcuuu

SEQ ID NO: 703164 - RNA, 20 nt, Artificial Sequence
  Synthetic
cuuaaugacuaccccucuuu

SEQ ID NO: 703165 - RNA, 20 nt, Artificial Sequence
  Synthetic
uguaauaaugguaggucuuu

SEQ ID NO: 703166 - RNA, 20 nt, Artificial Sequence
  Synthetic
ccucaauucaaauggucuuu

SEQ ID NO: 703167 - RNA, 20 nt, Artificial Sequence
  Synthetic
cucauagaggauaauucuuu

SEQ ID NO: 703168 - RNA, 20 nt, Artificial Sequence
  Synthetic
cuacauaggcccauaaguuu

SEQ ID NO: 703169 - RNA, 20 nt, Artificial Sequence
  Synthetic
auuucgaggccaacgaguuu

SEQ ID NO: 703170 - RNA, 20 nt, Artificial Sequence
  Synthetic
uuuacaaugcuagcgaguuu

SEQ ID NO: 703171 - RNA, 20 nt, Artificial Sequence
  Synthetic
acacugccccuaaggaguuu

SEQ ID NO: 703172 - RNA, 20 nt, Artificial Sequence
  Synthetic
ugcaugguacauaggaguuu

SEQ ID NO: 703173 - RNA, 20 nt, Artificial Sequence
  Synthetic
cauacgcuucauacacguuu

SEQ ID NO: 703174 - RNA, 20 nt, Artificial Sequence
  Synthetic
ccuucuaaaccauuacguuu

SEQ ID NO: 703175 - RNA, 20 nt, Artificial Sequence
  Synthetic
uuuuaaguguuguaccguuu

SEQ ID NO: 703176 - RNA, 20 nt, Artificial Sequence
  Synthetic
ucuagaguuccaacccguuu

SEQ ID NO: 703177 - RNA, 20 nt, Artificial Sequence
  Synthetic
agauaagagugggcgcguuu

SEQ ID NO: 703178 - RNA, 20 nt, Artificial Sequence
  Synthetic
auacacagcagcacagguuu

SEQ ID NO: 703179 - RNA, 20 nt, Artificial Sequence
  Synthetic
ugcuauguguaaugagguuu

SEQ ID NO: 703180 - RNA, 20 nt, Artificial Sequence
  Synthetic
uauagaucaccuguagguuu

SEQ ID NO: 703181 - RNA, 20 nt, Artificial Sequence
  Synthetic
aaaguugggacauacgguuu

SEQ ID NO: 703182 - RNA, 20 nt, Artificial Sequence
  Synthetic
auugaggcggccaaggguuu

SEQ ID NO: 703183 - RNA, 20 nt, Artificial Sequence
  Synthetic
cacauccgauauuuugguuu

SEQ ID NO: 703184 - RNA, 20 nt, Artificial Sequence
  Synthetic
auacuaggaacagcauguuu

SEQ ID NO: 703185 - RNA, 20 nt, Artificial Sequence
  Synthetic
aacucccuaaaaaccuguuu

SEQ ID NO: 703186 - RNA, 20 nt, Artificial Sequence
  Synthetic
auugaagaaaacggcuguuu

SEQ ID NO: 703187 - RNA, 20 nt, Artificial Sequence
  Synthetic
caucgguuuaucugcuguuu

SEQ ID NO: 703188 - RNA, 20 nt, Artificial Sequence
  Synthetic
agcacgugucuuaaguguuu

SEQ ID NO: 703189 - RNA, 20 nt, Artificial Sequence
  Synthetic
auuacaggacgugcaauuuu

SEQ ID NO: 703190 - RNA, 20 nt, Artificial Sequence
  Synthetic
aaagugggggucagaauuuu

SEQ ID NO: 703191 - RNA, 20 nt, Artificial Sequence
  Synthetic
cgaugauguggcaacauuuu

SEQ ID NO: 703192 - RNA, 20 nt, Artificial Sequence
  Synthetic
caagcaagggcucacauuuu

SEQ ID NO: 703193 - RNA, 20 nt, Artificial Sequence
  Synthetic
ucugacaggccucccauuuu

SEQ ID NO: 703194 - RNA, 20 nt, Artificial Sequence
  Synthetic
cacguaucuagcaugauuuu

SEQ ID NO: 703195 - RNA, 20 nt, Artificial Sequence
  Synthetic
agaacugggacccauauuuu

SEQ ID NO: 703196 - RNA, 20 nt, Artificial Sequence
  Synthetic
cacuauugucgucauauuuu

SEQ ID NO: 703197 - RNA, 20 nt, Artificial Sequence
  Synthetic
cuggguaggcaagcuauuuu

SEQ ID NO: 703198 - RNA, 20 nt, Artificial Sequence
  Synthetic
auaccgcauuguucuauuuu

SEQ ID NO: 703199 - RNA, 20 nt, Artificial Sequence
  Synthetic
ucagggcguaguacacuuuu

SEQ ID NO: 703200 - RNA, 20 nt, Artificial Sequence
  Synthetic
uaccacacugauccacuuuu

SEQ ID NO: 703201 - RNA, 20 nt, Artificial Sequence
  Synthetic
cguauucucaccauacuuuu

SEQ ID NO: 703202 - RNA, 20 nt, Artificial Sequence
  Synthetic
uugccggguagcuaccuuuu

SEQ ID NO: 703203 - RNA, 20 nt, Artificial Sequence
  Synthetic
agcuaauauaagccccuuuu

SEQ ID NO: 703204 - RNA, 20 nt, Artificial Sequence
  Synthetic
uuguucaaagcccgccuuuu

SEQ ID NO: 703205 - RNA, 20 nt, Artificial Sequence
  Synthetic
uggggguuucaaagucuuuu

SEQ ID NO: 703206 - RNA, 20 nt, Artificial Sequence
  Synthetic
uaggagcgacuaauaguuuu

SEQ ID NO: 703207 - RNA, 20 nt, Artificial Sequence
  Synthetic
ugucguucacagauaguuuu

SEQ ID NO: 703208 - RNA, 20 nt, Artificial Sequence
  Synthetic
augauuccguaccugguuuu

SEQ ID NO: 703209 - RNA, 20 nt, Artificial Sequence
  Synthetic
uuagggagugcuuauguuuu

SEQ ID NO: 703210 - RNA, 20 nt, Artificial Sequence
  Synthetic
agcuugugagacccauuuuu

SEQ ID NO: 703211 - RNA, 20 nt, Artificial Sequence
  Synthetic
auuaagacaagcggauuuuu

SEQ ID NO: 703212 - RNA, 20 nt, Artificial Sequence
  Synthetic
aggauaguguauuccuuuuu

SEQ ID NO: 703213 - RNA, 20 nt, Artificial Sequence
  Synthetic
ccacuggacggaacuuuuuu

SEQ ID NO: 703214 - RNA, 20 nt, Artificial Sequence
  Synthetic
acucagcuuccccuuuuuuu

SEQ ID NO: 703215 - RNA, 17 nt, Artificial Sequence
  Synthetic
aaaaaaaaaaaaaaaaa

SEQ ID NO: 703216 - RNA, 17 nt, Artificial Sequence
  Synthetic
gaaaaaaaaaaaaaaaa

SEQ ID NO: 703217 - RNA, 17 nt, Artificial Sequence
  Synthetic
ggaaaaaaaaaaaaaaa

SEQ ID NO: 703218 - RNA, 17 nt, Artificial Sequence
  Synthetic
gauuagaaaaaaaaaaa

SEQ ID NO: 703219 - RNA, 17 nt, Artificial Sequence
  Synthetic
gaaggagaaaaaaaaaa

SEQ ID NO: 703220 - RNA, 17 nt, Artificial Sequence
  Synthetic
gaggaaugaaaaaaaaa

SEQ ID NO: 703221 - RNA, 17 nt, Artificial Sequence
  Synthetic
guucaauuaaaaaaaaa

SEQ ID NO: 703222 - RNA, 17 nt, Artificial Sequence
  Synthetic
ggaggaaugaaaaaaaa

SEQ ID NO: 703223 - RNA, 17 nt, Artificial Sequence
  Synthetic
gaguuccuugaaaaaaa

SEQ ID NO: 703224 - RNA, 17 nt, Artificial Sequence
  Synthetic
gcuauguaaccaaaaaa

SEQ ID NO: 703225 - RNA, 17 nt, Artificial Sequence
  Synthetic
guccaaaguccaaaaaa

SEQ ID NO: 703226 - RNA, 17 nt, Artificial Sequence
  Synthetic
gacuccaucucaaaaaa

SEQ ID NO: 703227 - RNA, 17 nt, Artificial Sequence
  Synthetic
gacuaaugaagaaaaaa

SEQ ID NO: 703228 - RNA, 17 nt, Artificial Sequence
  Synthetic
guacuaugaagaaaaaa

SEQ ID NO: 703229 - RNA, 17 nt, Artificial Sequence
  Synthetic
gaaaacuugugaaaaaa

SEQ ID NO: 703230 - RNA, 17 nt, Artificial Sequence
  Synthetic
ggggaggauugaaaaaa

SEQ ID NO: 703231 - RNA, 17 nt, Artificial Sequence
  Synthetic
gcuucauauugaaaaaa

SEQ ID NO: 703232 - RNA, 17 nt, Artificial Sequence
  Synthetic
gagcucacuugaaaaaa

SEQ ID NO: 703233 - RNA, 17 nt, Artificial Sequence
  Synthetic
gaauucauuugaaaaaa

SEQ ID NO: 703234 - RNA, 17 nt, Artificial Sequence
  Synthetic
gucuccuguauaaaaaa

SEQ ID NO: 703235 - RNA, 17 nt, Artificial Sequence
  Synthetic
ggaaacaggaacaaaaa

SEQ ID NO: 703236 - RNA, 17 nt, Artificial Sequence
  Synthetic
gaaccauggcacaaaaa

SEQ ID NO: 703237 - RNA, 17 nt, Artificial Sequence
  Synthetic
gcugucugcuacaaaaa

SEQ ID NO: 703238 - RNA, 17 nt, Artificial Sequence
  Synthetic
gaggagauuuacaaaaa

SEQ ID NO: 703239 - RNA, 17 nt, Artificial Sequence
  Synthetic
gaaaaacacuccaaaaa

SEQ ID NO: 703240 - RNA, 17 nt, Artificial Sequence
  Synthetic
guuucauuuuccaaaaa

SEQ ID NO: 703241 - RNA, 17 nt, Artificial Sequence
  Synthetic
ggucuaggaggcaaaaa

SEQ ID NO: 703242 - RNA, 17 nt, Artificial Sequence
  Synthetic
gugguauacggcaaaaa

SEQ ID NO: 703243 - RNA, 17 nt, Artificial Sequence
  Synthetic
gaguuaugcugcaaaaa

SEQ ID NO: 703244 - RNA, 17 nt, Artificial Sequence
  Synthetic
gucauauauugcaaaaa

SEQ ID NO: 703245 - RNA, 17 nt, Artificial Sequence
  Synthetic
gacuccuugcucaaaaa

SEQ ID NO: 703246 - RNA, 17 nt, Artificial Sequence
  Synthetic
ggcuuugaagucaaaaa

SEQ ID NO: 703247 - RNA, 17 nt, Artificial Sequence
  Synthetic
gacaaaacaaagaaaaa

SEQ ID NO: 703248 - RNA, 17 nt, Artificial Sequence
  Synthetic
gagaauggaaagaaaaa

SEQ ID NO: 703249 - RNA, 17 nt, Artificial Sequence
  Synthetic
gacaacaauaagaaaaa

SEQ ID NO: 703250 - RNA, 17 nt, Artificial Sequence
  Synthetic
gucuuuuuuaagaaaaa

SEQ ID NO: 703251 - RNA, 17 nt, Artificial Sequence
  Synthetic
gugaggcagcagaaaaa

SEQ ID NO: 703252 - RNA, 17 nt, Artificial Sequence
  Synthetic
ggggcaugggagaaaaa

SEQ ID NO: 703253 - RNA, 17 nt, Artificial Sequence
  Synthetic
gucaaaauggagaaaaa

SEQ ID NO: 703254 - RNA, 17 nt, Artificial Sequence
  Synthetic
gauagaaaguagaaaaa

SEQ ID NO: 703255 - RNA, 17 nt, Artificial Sequence
  Synthetic
gaagguagguagaaaaa

SEQ ID NO: 703256 - RNA, 17 nt, Artificial Sequence
  Synthetic
guuucaguuuagaaaaa

SEQ ID NO: 703257 - RNA, 17 nt, Artificial Sequence
  Synthetic
guuaaauuuuagaaaaa

SEQ ID NO: 703258 - RNA, 17 nt, Artificial Sequence
  Synthetic
ggaaaacacaggaaaaa

SEQ ID NO: 703259 - RNA, 17 nt, Artificial Sequence
  Synthetic
guugggaucaggaaaaa

SEQ ID NO: 703260 - RNA, 17 nt, Artificial Sequence
  Synthetic
ggacuaaguaggaaaaa

SEQ ID NO: 703261 - RNA, 17 nt, Artificial Sequence
  Synthetic
gggggcucagggaaaaa

SEQ ID NO: 703262 - RNA, 17 nt, Artificial Sequence
  Synthetic
guuuuuguagggaaaaa

SEQ ID NO: 703263 - RNA, 17 nt, Artificial Sequence
  Synthetic
ggcauauuugggaaaaa

SEQ ID NO: 703264 - RNA, 17 nt, Artificial Sequence
  Synthetic
ggugacuggaugaaaaa

SEQ ID NO: 703265 - RNA, 17 nt, Artificial Sequence
  Synthetic
gggaagguacugaaaaa

SEQ ID NO: 703266 - RNA, 17 nt, Artificial Sequence
  Synthetic
ggagcucacuugaaaaa

SEQ ID NO: 703267 - RNA, 17 nt, Artificial Sequence
  Synthetic
guaaaugauuugaaaaa

SEQ ID NO: 703268 - RNA, 17 nt, Artificial Sequence
  Synthetic
gagcagauuuugaaaaa

SEQ ID NO: 703269 - RNA, 17 nt, Artificial Sequence
  Synthetic
gauuuuuaaaauaaaaa

SEQ ID NO: 703270 - RNA, 17 nt, Artificial Sequence
  Synthetic
ggugccccaaauaaaaa

SEQ ID NO: 703271 - RNA, 17 nt, Artificial Sequence
  Synthetic
gguuaaaauaauaaaaa

SEQ ID NO: 703272 - RNA, 17 nt, Artificial Sequence
  Synthetic
gaaacacauaauaaaaa

SEQ ID NO: 703273 - RNA, 17 nt, Artificial Sequence
  Synthetic
ggaguuauuaauaaaaa

SEQ ID NO: 703274 - RNA, 17 nt, Artificial Sequence
  Synthetic
guacauaaacauaaaaa

SEQ ID NO: 703275 - RNA, 17 nt, Artificial Sequence
  Synthetic
gaguuuuaauauaaaaa

SEQ ID NO: 703276 - RNA, 17 nt, Artificial Sequence
  Synthetic
gguauaucauauaaaaa

SEQ ID NO: 703277 - RNA, 17 nt, Artificial Sequence
  Synthetic
guuauaggagguaaaaa

SEQ ID NO: 703278 - RNA, 17 nt, Artificial Sequence
  Synthetic
gugaaaguuuguaaaaa

SEQ ID NO: 703279 - RNA, 17 nt, Artificial Sequence
  Synthetic
ggaacaaaaauuaaaaa

SEQ ID NO: 703280 - RNA, 17 nt, Artificial Sequence
  Synthetic
gaaugauuucuuaaaaa

SEQ ID NO: 703281 - RNA, 17 nt, Artificial Sequence
  Synthetic
gaaggucagguuaaaaa

SEQ ID NO: 703282 - RNA, 17 nt, Artificial Sequence
  Synthetic
gaaucuuuuuuuaaaaa

SEQ ID NO: 703283 - RNA, 17 nt, Artificial Sequence
  Synthetic
gaacuuggaaaacaaaa

SEQ ID NO: 703284 - RNA, 17 nt, Artificial Sequence
  Synthetic
gacuaaguaaaacaaaa

SEQ ID NO: 703285 - RNA, 17 nt, Artificial Sequence
  Synthetic
gcuuucuuuaaacaaaa

SEQ ID NO: 703286 - RNA, 17 nt, Artificial Sequence
  Synthetic
gaaaagcgacaacaaaa

SEQ ID NO: 703287 - RNA, 17 nt, Artificial Sequence
  Synthetic
guuucccuugaacaaaa

SEQ ID NO: 703288 - RNA, 17 nt, Artificial Sequence
  Synthetic
gaagugcugacacaaaa

SEQ ID NO: 703289 - RNA, 17 nt, Artificial Sequence
  Synthetic
ggauuccacgcacaaaa

SEQ ID NO: 703290 - RNA, 17 nt, Artificial Sequence
  Synthetic
ggaacuucaucacaaaa

SEQ ID NO: 703291 - RNA, 17 nt, Artificial Sequence
  Synthetic
gauccagaaggacaaaa

SEQ ID NO: 703292 - RNA, 17 nt, Artificial Sequence
  Synthetic
gaaacgagaauacaaaa

SEQ ID NO: 703293 - RNA, 17 nt, Artificial Sequence
  Synthetic
gaaagaauacuacaaaa

SEQ ID NO: 703294 - RNA, 17 nt, Artificial Sequence
  Synthetic
gaaacguuucaccaaaa

SEQ ID NO: 703295 - RNA, 17 nt, Artificial Sequence
  Synthetic
gaauguuucccccaaaa

SEQ ID NO: 703296 - RNA, 17 nt, Artificial Sequence
  Synthetic
ggacaguuuucccaaaa

SEQ ID NO: 703297 - RNA, 17 nt, Artificial Sequence
  Synthetic
gaggauuuuucccaaaa

SEQ ID NO: 703298 - RNA, 17 nt, Artificial Sequence
  Synthetic
ggcaacaaaagccaaaa

SEQ ID NO: 703299 - RNA, 17 nt, Artificial Sequence
  Synthetic
guuuugaaauuccaaaa

SEQ ID NO: 703300 - RNA, 17 nt, Artificial Sequence
  Synthetic
guucauagcaagcaaaa

SEQ ID NO: 703301 - RNA, 17 nt, Artificial Sequence
  Synthetic
gacaaaaugaagcaaaa

SEQ ID NO: 703302 - RNA, 17 nt, Artificial Sequence
  Synthetic
ggccuaggaaggcaaaa

SEQ ID NO: 703303 - RNA, 17 nt, Artificial Sequence
  Synthetic
guuagaaaauggcaaaa

SEQ ID NO: 703304 - RNA, 17 nt, Artificial Sequence
  Synthetic
gaaaacuacgugcaaaa

SEQ ID NO: 703305 - RNA, 17 nt, Artificial Sequence
  Synthetic
ggcaagaaagaucaaaa

SEQ ID NO: 703306 - RNA, 17 nt, Artificial Sequence
  Synthetic
ggagauguugaucaaaa

SEQ ID NO: 703307 - RNA, 17 nt, Artificial Sequence
  Synthetic
ggagcaaaagcucaaaa

SEQ ID NO: 703308 - RNA, 17 nt, Artificial Sequence
  Synthetic
gcaucuaguucucaaaa

SEQ ID NO: 703309 - RNA, 17 nt, Artificial Sequence
  Synthetic
gaugacaagggucaaaa

SEQ ID NO: 703310 - RNA, 17 nt, Artificial Sequence
  Synthetic
gaaauuuaucuucaaaa

SEQ ID NO: 703311 - RNA, 17 nt, Artificial Sequence
  Synthetic
gugcuuuaaaaagaaaa

SEQ ID NO: 703312 - RNA, 17 nt, Artificial Sequence
  Synthetic
ggcaauauaaaagaaaa

SEQ ID NO: 703313 - RNA, 17 nt, Artificial Sequence
  Synthetic
gaauagaagaaagaaaa

SEQ ID NO: 703314 - RNA, 17 nt, Artificial Sequence
  Synthetic
guaugaauacaagaaaa

SEQ ID NO: 703315 - RNA, 17 nt, Artificial Sequence
  Synthetic
gcaauacgccaagaaaa

SEQ ID NO: 703316 - RNA, 17 nt, Artificial Sequence
  Synthetic
gucuuugaggaagaaaa

SEQ ID NO: 703317 - RNA, 17 nt, Artificial Sequence
  Synthetic
gcaaaguaauaagaaaa

SEQ ID NO: 703318 - RNA, 17 nt, Artificial Sequence
  Synthetic
gcuauuauauaagaaaa

SEQ ID NO: 703319 - RNA, 17 nt, Artificial Sequence
  Synthetic
gaucuucccuaagaaaa

SEQ ID NO: 703320 - RNA, 17 nt, Artificial Sequence
  Synthetic
gagugcucuuaagaaaa

SEQ ID NO: 703321 - RNA, 17 nt, Artificial Sequence
  Synthetic
gacagaaccccagaaaa

SEQ ID NO: 703322 - RNA, 17 nt, Artificial Sequence
  Synthetic
ggagagaugccagaaaa

SEQ ID NO: 703323 - RNA, 17 nt, Artificial Sequence
  Synthetic
gauaacuuaagagaaaa

SEQ ID NO: 703324 - RNA, 17 nt, Artificial Sequence
  Synthetic
gaauuuuuaagagaaaa

SEQ ID NO: 703325 - RNA, 17 nt, Artificial Sequence
  Synthetic
gagagagagagagaaaa

SEQ ID NO: 703326 - RNA, 17 nt, Artificial Sequence
  Synthetic
gaggagacgagagaaaa

SEQ ID NO: 703327 - RNA, 17 nt, Artificial Sequence
  Synthetic
gagagugugggagaaaa

SEQ ID NO: 703328 - RNA, 17 nt, Artificial Sequence
  Synthetic
gguaaccauggagaaaa

SEQ ID NO: 703329 - RNA, 17 nt, Artificial Sequence
  Synthetic
gacacaggaugagaaaa

SEQ ID NO: 703330 - RNA, 17 nt, Artificial Sequence
  Synthetic
gaauagaauugagaaaa

SEQ ID NO: 703331 - RNA, 17 nt, Artificial Sequence
  Synthetic
gaaauguauuuagaaaa

SEQ ID NO: 703332 - RNA, 17 nt, Artificial Sequence
  Synthetic
gaggcauguggcgaaaa

SEQ ID NO: 703333 - RNA, 17 nt, Artificial Sequence
  Synthetic
gcagguucaaaggaaaa

SEQ ID NO: 703334 - RNA, 17 nt, Artificial Sequence
  Synthetic
gagcaaaauaaggaaaa

SEQ ID NO: 703335 - RNA, 17 nt, Artificial Sequence
  Synthetic
gcacuaacacaggaaaa

SEQ ID NO: 703336 - RNA, 17 nt, Artificial Sequence
  Synthetic
gagugaacccaggaaaa

SEQ ID NO: 703337 - RNA, 17 nt, Artificial Sequence
  Synthetic
gaaggaaagcaggaaaa

SEQ ID NO: 703338 - RNA, 17 nt, Artificial Sequence
  Synthetic
gguaucauuuaggaaaa

SEQ ID NO: 703339 - RNA, 17 nt, Artificial Sequence
  Synthetic
ggaaaaagaagggaaaa

SEQ ID NO: 703340 - RNA, 17 nt, Artificial Sequence
  Synthetic
guauuauuaagggaaaa

SEQ ID NO: 703341 - RNA, 17 nt, Artificial Sequence
  Synthetic
gguggaaugagggaaaa

SEQ ID NO: 703342 - RNA, 17 nt, Artificial Sequence
  Synthetic
guauugauuggggaaaa

SEQ ID NO: 703343 - RNA, 17 nt, Artificial Sequence
  Synthetic
gagaaaagaugggaaaa

SEQ ID NO: 703344 - RNA, 17 nt, Artificial Sequence
  Synthetic
gccaaaagcauggaaaa

SEQ ID NO: 703345 - RNA, 17 nt, Artificial Sequence
  Synthetic
gcaaguaucauggaaaa

SEQ ID NO: 703346 - RNA, 17 nt, Artificial Sequence
  Synthetic
gcaaaaaaccuggaaaa

SEQ ID NO: 703347 - RNA, 17 nt, Artificial Sequence
  Synthetic
gauuuagggguggaaaa

SEQ ID NO: 703348 - RNA, 17 nt, Artificial Sequence
  Synthetic
guccaggagaaugaaaa

SEQ ID NO: 703349 - RNA, 17 nt, Artificial Sequence
  Synthetic
gagucugcuaaugaaaa

SEQ ID NO: 703350 - RNA, 17 nt, Artificial Sequence
  Synthetic
ggguaacuaacugaaaa

SEQ ID NO: 703351 - RNA, 17 nt, Artificial Sequence
  Synthetic
ggaaggggagcugaaaa

SEQ ID NO: 703352 - RNA, 17 nt, Artificial Sequence
  Synthetic
gaggugcugucugaaaa

SEQ ID NO: 703353 - RNA, 17 nt, Artificial Sequence
  Synthetic
guucauauaagugaaaa

SEQ ID NO: 703354 - RNA, 17 nt, Artificial Sequence
  Synthetic
guuuugaagagugaaaa

SEQ ID NO: 703355 - RNA, 17 nt, Artificial Sequence
  Synthetic
gcaugcguaugugaaaa

SEQ ID NO: 703356 - RNA, 17 nt, Artificial Sequence
  Synthetic
ggggccuuuugugaaaa

SEQ ID NO: 703357 - RNA, 17 nt, Artificial Sequence
  Synthetic
gcagagacauuugaaaa

SEQ ID NO: 703358 - RNA, 17 nt, Artificial Sequence
  Synthetic
gguauuauuuuugaaaa

SEQ ID NO: 703359 - RNA, 17 nt, Artificial Sequence
  Synthetic
gggugccccaaauaaaa

SEQ ID NO: 703360 - RNA, 17 nt, Artificial Sequence
  Synthetic
guagggagcaaauaaaa

SEQ ID NO: 703361 - RNA, 17 nt, Artificial Sequence
  Synthetic
guuucauggcaauaaaa

SEQ ID NO: 703362 - RNA, 17 nt, Artificial Sequence
  Synthetic
gaacauaaucaauaaaa

SEQ ID NO: 703363 - RNA, 17 nt, Artificial Sequence
  Synthetic
gugaagguggaauaaaa

SEQ ID NO: 703364 - RNA, 17 nt, Artificial Sequence
  Synthetic
gaaaugacauaauaaaa

SEQ ID NO: 703365 - RNA, 17 nt, Artificial Sequence
  Synthetic
gaaagaaaaacauaaaa

SEQ ID NO: 703366 - RNA, 17 nt, Artificial Sequence
  Synthetic
gcuuucaugucauaaaa

SEQ ID NO: 703367 - RNA, 17 nt, Artificial Sequence
  Synthetic
gaaagcagaagauaaaa

SEQ ID NO: 703368 - RNA, 17 nt, Artificial Sequence
  Synthetic
gccuuucccugauaaaa

SEQ ID NO: 703369 - RNA, 17 nt, Artificial Sequence
  Synthetic
gcaugaucucuauaaaa

SEQ ID NO: 703370 - RNA, 17 nt, Artificial Sequence
  Synthetic
gcccagacaguauaaaa

SEQ ID NO: 703371 - RNA, 17 nt, Artificial Sequence
  Synthetic
gaaggccaccacuaaaa

SEQ ID NO: 703372 - RNA, 17 nt, Artificial Sequence
  Synthetic
gcagaaaaugacuaaaa

SEQ ID NO: 703373 - RNA, 17 nt, Artificial Sequence
  Synthetic
gaugaaaaagccuaaaa

SEQ ID NO: 703374 - RNA, 17 nt, Artificial Sequence
  Synthetic
guaugugaagccuaaaa

SEQ ID NO: 703375 - RNA, 17 nt, Artificial Sequence
  Synthetic
ggaugguaagccuaaaa

SEQ ID NO: 703376 - RNA, 17 nt, Artificial Sequence
  Synthetic
gaaagaagaggcuaaaa

SEQ ID NO: 703377 - RNA, 17 nt, Artificial Sequence
  Synthetic
gccaaugcuggcuaaaa

SEQ ID NO: 703378 - RNA, 17 nt, Artificial Sequence
  Synthetic
gugggaagacucuaaaa

SEQ ID NO: 703379 - RNA, 17 nt, Artificial Sequence
  Synthetic
guuuucugucucuaaaa

SEQ ID NO: 703380 - RNA, 17 nt, Artificial Sequence
  Synthetic
ggcguucaaaaguaaaa

SEQ ID NO: 703381 - RNA, 17 nt, Artificial Sequence
  Synthetic
gaaagggagaaguaaaa

SEQ ID NO: 703382 - RNA, 17 nt, Artificial Sequence
  Synthetic
guccuaucccaguaaaa

SEQ ID NO: 703383 - RNA, 17 nt, Artificial Sequence
  Synthetic
gcaacuucagaguaaaa

SEQ ID NO: 703384 - RNA, 17 nt, Artificial Sequence
  Synthetic
gaguaauuaucguaaaa

SEQ ID NO: 703385 - RNA, 17 nt, Artificial Sequence
  Synthetic
gguggguauagguaaaa

SEQ ID NO: 703386 - RNA, 17 nt, Artificial Sequence
  Synthetic
gaagcuuaaggguaaaa

SEQ ID NO: 703387 - RNA, 17 nt, Artificial Sequence
  Synthetic
ggaguuaaaugguaaaa

SEQ ID NO: 703388 - RNA, 17 nt, Artificial Sequence
  Synthetic
gagaugucaugguaaaa

SEQ ID NO: 703389 - RNA, 17 nt, Artificial Sequence
  Synthetic
gaaauaaggauguaaaa

SEQ ID NO: 703390 - RNA, 17 nt, Artificial Sequence
  Synthetic
ggaaagccauuguaaaa

SEQ ID NO: 703391 - RNA, 17 nt, Artificial Sequence
  Synthetic
guagauaacuuguaaaa

SEQ ID NO: 703392 - RNA, 17 nt, Artificial Sequence
  Synthetic
gggaacaaaaauuaaaa

SEQ ID NO: 703393 - RNA, 17 nt, Artificial Sequence
  Synthetic
gaaagucacaauuaaaa

SEQ ID NO: 703394 - RNA, 17 nt, Artificial Sequence
  Synthetic
gaaccacagaauuaaaa

SEQ ID NO: 703395 - RNA, 17 nt, Artificial Sequence
  Synthetic
ggggacaaacauuaaaa

SEQ ID NO: 703396 - RNA, 17 nt, Artificial Sequence
  Synthetic
guagccauacauuaaaa

SEQ ID NO: 703397 - RNA, 17 nt, Artificial Sequence
  Synthetic
gaugcuggggauuaaaa

SEQ ID NO: 703398 - RNA, 17 nt, Artificial Sequence
  Synthetic
guagaucuaucuuaaaa

SEQ ID NO: 703399 - RNA, 17 nt, Artificial Sequence
  Synthetic
gccucauccucuuaaaa

SEQ ID NO: 703400 - RNA, 17 nt, Artificial Sequence
  Synthetic
guguuucauucuuaaaa

SEQ ID NO: 703401 - RNA, 17 nt, Artificial Sequence
  Synthetic
ggaaugauuucuuaaaa

SEQ ID NO: 703402 - RNA, 17 nt, Artificial Sequence
  Synthetic
guuuugugccguuaaaa

SEQ ID NO: 703403 - RNA, 17 nt, Artificial Sequence
  Synthetic
gugcagggacuuuaaaa

SEQ ID NO: 703404 - RNA, 17 nt, Artificial Sequence
  Synthetic
gggguucuccuuuaaaa

SEQ ID NO: 703405 - RNA, 17 nt, Artificial Sequence
  Synthetic
ggacucaaaguuuaaaa

SEQ ID NO: 703406 - RNA, 17 nt, Artificial Sequence
  Synthetic
ggaaauuauguuuaaaa

SEQ ID NO: 703407 - RNA, 17 nt, Artificial Sequence
  Synthetic
guuccguaauuuuaaaa

SEQ ID NO: 703408 - RNA, 17 nt, Artificial Sequence
  Synthetic
gaaaauacauuuuaaaa

SEQ ID NO: 703409 - RNA, 17 nt, Artificial Sequence
  Synthetic
gagaggacccaaacaaa

SEQ ID NO: 703410 - RNA, 17 nt, Artificial Sequence
  Synthetic
gaaaggacgcaaacaaa

SEQ ID NO: 703411 - RNA, 17 nt, Artificial Sequence
  Synthetic
gacaauauucaaacaaa

SEQ ID NO: 703412 - RNA, 17 nt, Artificial Sequence
  Synthetic
gcugccucggaaacaaa

SEQ ID NO: 703413 - RNA, 17 nt, Artificial Sequence
  Synthetic
gaaaagaaauaaacaaa

SEQ ID NO: 703414 - RNA, 17 nt, Artificial Sequence
  Synthetic
gaaugccuuuaaacaaa

SEQ ID NO: 703415 - RNA, 17 nt, Artificial Sequence
  Synthetic
guaaauuccacaacaaa

SEQ ID NO: 703416 - RNA, 17 nt, Artificial Sequence
  Synthetic
guugaaaugacaacaaa

SEQ ID NO: 703417 - RNA, 17 nt, Artificial Sequence
  Synthetic
gcaaggugaucaacaaa

SEQ ID NO: 703418 - RNA, 17 nt, Artificial Sequence
  Synthetic
gagagaguuucaacaaa

SEQ ID NO: 703419 - RNA, 17 nt, Artificial Sequence
  Synthetic
gaagaaaacagaacaaa

SEQ ID NO: 703420 - RNA, 17 nt, Artificial Sequence
  Synthetic
gaauggaguagaacaaa

SEQ ID NO: 703421 - RNA, 17 nt, Artificial Sequence
  Synthetic
gagcacaccugaacaaa

SEQ ID NO: 703422 - RNA, 17 nt, Artificial Sequence
  Synthetic
gacuagguuguaacaaa

SEQ ID NO: 703423 - RNA, 17 nt, Artificial Sequence
  Synthetic
ggauggaacuuaacaaa

SEQ ID NO: 703424 - RNA, 17 nt, Artificial Sequence
  Synthetic
ggcaaaauguuaacaaa

SEQ ID NO: 703425 - RNA, 17 nt, Artificial Sequence
  Synthetic
gcuggguuacccacaaa

SEQ ID NO: 703426 - RNA, 17 nt, Artificial Sequence
  Synthetic
gcaguauuucccacaaa

SEQ ID NO: 703427 - RNA, 17 nt, Artificial Sequence
  Synthetic
guugcgaguuccacaaa

SEQ ID NO: 703428 - RNA, 17 nt, Artificial Sequence
  Synthetic
gccaugcagugcacaaa

SEQ ID NO: 703429 - RNA, 17 nt, Artificial Sequence
  Synthetic
gaggauaacaagacaaa

SEQ ID NO: 703430 - RNA, 17 nt, Artificial Sequence
  Synthetic
guaguuggggagacaaa

SEQ ID NO: 703431 - RNA, 17 nt, Artificial Sequence
  Synthetic
gguuguaaaaugacaaa

SEQ ID NO: 703432 - RNA, 17 nt, Artificial Sequence
  Synthetic
guguguugaaugacaaa

SEQ ID NO: 703433 - RNA, 17 nt, Artificial Sequence
  Synthetic
gcagauucccugacaaa

SEQ ID NO: 703434 - RNA, 17 nt, Artificial Sequence
  Synthetic
guuauaaugaauacaaa

SEQ ID NO: 703435 - RNA, 17 nt, Artificial Sequence
  Synthetic
gcuugaaucuauacaaa

SEQ ID NO: 703436 - RNA, 17 nt, Artificial Sequence
  Synthetic
guuccuuucuguacaaa

SEQ ID NO: 703437 - RNA, 17 nt, Artificial Sequence
  Synthetic
gauaaugugauuacaaa

SEQ ID NO: 703438 - RNA, 17 nt, Artificial Sequence
  Synthetic
ggaacaaaacuuacaaa

SEQ ID NO: 703439 - RNA, 17 nt, Artificial Sequence
  Synthetic
gaugggggaguuacaaa

SEQ ID NO: 703440 - RNA, 17 nt, Artificial Sequence
  Synthetic
gacuaaauuuuuacaaa

SEQ ID NO: 703441 - RNA, 17 nt, Artificial Sequence
  Synthetic
gcagcaagacaaccaaa

SEQ ID NO: 703442 - RNA, 17 nt, Artificial Sequence
  Synthetic
gguagaagaugaccaaa

SEQ ID NO: 703443 - RNA, 17 nt, Artificial Sequence
  Synthetic
gcaauaaaacuaccaaa

SEQ ID NO: 703444 - RNA, 17 nt, Artificial Sequence
  Synthetic
gucauaauuuuaccaaa

SEQ ID NO: 703445 - RNA, 17 nt, Artificial Sequence
  Synthetic
ggauuauauaccccaaa

SEQ ID NO: 703446 - RNA, 17 nt, Artificial Sequence
  Synthetic
guaauagaaagcccaaa

SEQ ID NO: 703447 - RNA, 17 nt, Artificial Sequence
  Synthetic
gggaccaagcucccaaa

SEQ ID NO: 703448 - RNA, 17 nt, Artificial Sequence
  Synthetic
gugcuagguuucccaaa

SEQ ID NO: 703449 - RNA, 17 nt, Artificial Sequence
  Synthetic
gggacaguuuucccaaa

SEQ ID NO: 703450 - RNA, 17 nt, Artificial Sequence
  Synthetic
gggaaaggaaagccaaa

SEQ ID NO: 703451 - RNA, 17 nt, Artificial Sequence
  Synthetic
gggugacagaagccaaa

SEQ ID NO: 703452 - RNA, 17 nt, Artificial Sequence
  Synthetic
guuugacuaaggccaaa

SEQ ID NO: 703453 - RNA, 17 nt, Artificial Sequence
  Synthetic
gugccucagaggccaaa

SEQ ID NO: 703454 - RNA, 17 nt, Artificial Sequence
  Synthetic
gaagguuagaggccaaa

SEQ ID NO: 703455 - RNA, 17 nt, Artificial Sequence
  Synthetic
gauacuugaaauccaaa

SEQ ID NO: 703456 - RNA, 17 nt, Artificial Sequence
  Synthetic
guucuucuuccuccaaa

SEQ ID NO: 703457 - RNA, 17 nt, Artificial Sequence
  Synthetic
gcuuaaacucuuccaaa

SEQ ID NO: 703458 - RNA, 17 nt, Artificial Sequence
  Synthetic
gaaagcacuuaagcaaa

SEQ ID NO: 703459 - RNA, 17 nt, Artificial Sequence
  Synthetic
gaucaaucuacagcaaa

SEQ ID NO: 703460 - RNA, 17 nt, Artificial Sequence
  Synthetic
gugaaagcagcagcaaa

SEQ ID NO: 703461 - RNA, 17 nt, Artificial Sequence
  Synthetic
gagaagugcugagcaaa

SEQ ID NO: 703462 - RNA, 17 nt, Artificial Sequence
  Synthetic
gaauauaaaauagcaaa

SEQ ID NO: 703463 - RNA, 17 nt, Artificial Sequence
  Synthetic
gugguauaauuagcaaa

SEQ ID NO: 703464 - RNA, 17 nt, Artificial Sequence
  Synthetic
guaauuugguuagcaaa

SEQ ID NO: 703465 - RNA, 17 nt, Artificial Sequence
  Synthetic
gaauguucuuuagcaaa

SEQ ID NO: 703466 - RNA, 17 nt, Artificial Sequence
  Synthetic
gauacugguuuagcaaa

SEQ ID NO: 703467 - RNA, 17 nt, Artificial Sequence
  Synthetic
gugaauagugccgcaaa

SEQ ID NO: 703468 - RNA, 17 nt, Artificial Sequence
  Synthetic
gagauaaaagaggcaaa

SEQ ID NO: 703469 - RNA, 17 nt, Artificial Sequence
  Synthetic
gacaguuuuuaugcaaa

SEQ ID NO: 703470 - RNA, 17 nt, Artificial Sequence
  Synthetic
gaggcagugacugcaaa

SEQ ID NO: 703471 - RNA, 17 nt, Artificial Sequence
  Synthetic
gccuaagguccugcaaa

SEQ ID NO: 703472 - RNA, 17 nt, Artificial Sequence
  Synthetic
gccacucuuucugcaaa

SEQ ID NO: 703473 - RNA, 17 nt, Artificial Sequence
  Synthetic
ggacucucauuugcaaa

SEQ ID NO: 703474 - RNA, 17 nt, Artificial Sequence
  Synthetic
guugaaauguaaucaaa

SEQ ID NO: 703475 - RNA, 17 nt, Artificial Sequence
  Synthetic
gugagcucuuaaucaaa

SEQ ID NO: 703476 - RNA, 17 nt, Artificial Sequence
  Synthetic
guacagauuuaaucaaa

SEQ ID NO: 703477 - RNA, 17 nt, Artificial Sequence
  Synthetic
ggacaguaagcaucaaa

SEQ ID NO: 703478 - RNA, 17 nt, Artificial Sequence
  Synthetic
gggcaagaaagaucaaa

SEQ ID NO: 703479 - RNA, 17 nt, Artificial Sequence
  Synthetic
gggauugcuggaucaaa

SEQ ID NO: 703480 - RNA, 17 nt, Artificial Sequence
  Synthetic
gauuaacacugaucaaa

SEQ ID NO: 703481 - RNA, 17 nt, Artificial Sequence
  Synthetic
gggagauguugaucaaa

SEQ ID NO: 703482 - RNA, 17 nt, Artificial Sequence
  Synthetic
gauuagccaaacucaaa

SEQ ID NO: 703483 - RNA, 17 nt, Artificial Sequence
  Synthetic
gugaugaguaacucaaa

SEQ ID NO: 703484 - RNA, 17 nt, Artificial Sequence
  Synthetic
guaaugauaaccucaaa

SEQ ID NO: 703485 - RNA, 17 nt, Artificial Sequence
  Synthetic
gauuaucuuuccucaaa

SEQ ID NO: 703486 - RNA, 17 nt, Artificial Sequence
  Synthetic
gagaacauacucucaaa

SEQ ID NO: 703487 - RNA, 17 nt, Artificial Sequence
  Synthetic
ggagaaagcuucucaaa

SEQ ID NO: 703488 - RNA, 17 nt, Artificial Sequence
  Synthetic
gaguaguaguucucaaa

SEQ ID NO: 703489 - RNA, 17 nt, Artificial Sequence
  Synthetic
gaaggauuagagucaaa

SEQ ID NO: 703490 - RNA, 17 nt, Artificial Sequence
  Synthetic
gauccaagagggucaaa

SEQ ID NO: 703491 - RNA, 17 nt, Artificial Sequence
  Synthetic
gggauggccgggucaaa

SEQ ID NO: 703492 - RNA, 17 nt, Artificial Sequence
  Synthetic
gggauagcugggucaaa

SEQ ID NO: 703493 - RNA, 17 nt, Artificial Sequence
  Synthetic
gggauggcugggucaaa

SEQ ID NO: 703494 - RNA, 17 nt, Artificial Sequence
  Synthetic
gggauugcugggucaaa

SEQ ID NO: 703495 - RNA, 17 nt, Artificial Sequence
  Synthetic
gaggucaaaaauucaaa

SEQ ID NO: 703496 - RNA, 17 nt, Artificial Sequence
  Synthetic
gucucacuacauucaaa

SEQ ID NO: 703497 - RNA, 17 nt, Artificial Sequence
  Synthetic
gucuuccaagauucaaa

SEQ ID NO: 703498 - RNA, 17 nt, Artificial Sequence
  Synthetic
ggaaguucagguucaaa

SEQ ID NO: 703499 - RNA, 17 nt, Artificial Sequence
  Synthetic
guuguccaacuuucaaa

SEQ ID NO: 703500 - RNA, 17 nt, Artificial Sequence
  Synthetic
gcaaguugauuuucaaa

SEQ ID NO: 703501 - RNA, 17 nt, Artificial Sequence
  Synthetic
gaaaaguccuuuucaaa

SEQ ID NO: 703502 - RNA, 17 nt, Artificial Sequence
  Synthetic
gugcuccuaaaaagaaa

SEQ ID NO: 703503 - RNA, 17 nt, Artificial Sequence
  Synthetic
ggugcuuuaaaaagaaa

SEQ ID NO: 703504 - RNA, 17 nt, Artificial Sequence
  Synthetic
gagggaaagaaaagaaa

SEQ ID NO: 703505 - RNA, 17 nt, Artificial Sequence
  Synthetic
gcaaaacggaaaagaaa

SEQ ID NO: 703506 - RNA, 17 nt, Artificial Sequence
  Synthetic
guucagaauaaaagaaa

SEQ ID NO: 703507 - RNA, 17 nt, Artificial Sequence
  Synthetic
gguaauuuacaaagaaa

SEQ ID NO: 703508 - RNA, 17 nt, Artificial Sequence
  Synthetic
gcauuuauccaaagaaa

SEQ ID NO: 703509 - RNA, 17 nt, Artificial Sequence
  Synthetic
gcgcuggaagaaagaaa

SEQ ID NO: 703510 - RNA, 17 nt, Artificial Sequence
  Synthetic
gagagaagagaaagaaa

SEQ ID NO: 703511 - RNA, 17 nt, Artificial Sequence
  Synthetic
gcuaagaaggaaagaaa

SEQ ID NO: 703512 - RNA, 17 nt, Artificial Sequence
  Synthetic
ggaugcauggaaagaaa

SEQ ID NO: 703513 - RNA, 17 nt, Artificial Sequence
  Synthetic
gcagaauuggaaagaaa

SEQ ID NO: 703514 - RNA, 17 nt, Artificial Sequence
  Synthetic
ggaaguauguaaagaaa

SEQ ID NO: 703515 - RNA, 17 nt, Artificial Sequence
  Synthetic
gcaauauuguaaagaaa

SEQ ID NO: 703516 - RNA, 17 nt, Artificial Sequence
  Synthetic
ggaauaauaacaagaaa

SEQ ID NO: 703517 - RNA, 17 nt, Artificial Sequence
  Synthetic
ggaagauagccaagaaa

SEQ ID NO: 703518 - RNA, 17 nt, Artificial Sequence
  Synthetic
ggcaauacgccaagaaa

SEQ ID NO: 703519 - RNA, 17 nt, Artificial Sequence
  Synthetic
ggcccuggaucaagaaa

SEQ ID NO: 703520 - RNA, 17 nt, Artificial Sequence
  Synthetic
gagcucaacucaagaaa

SEQ ID NO: 703521 - RNA, 17 nt, Artificial Sequence
  Synthetic
gaauacuccagaagaaa

SEQ ID NO: 703522 - RNA, 17 nt, Artificial Sequence
  Synthetic
gcuaggaaacgaagaaa

SEQ ID NO: 703523 - RNA, 17 nt, Artificial Sequence
  Synthetic
gaaaauacaugaagaaa

SEQ ID NO: 703524 - RNA, 17 nt, Artificial Sequence
  Synthetic
ggucucaacugaagaaa

SEQ ID NO: 703525 - RNA, 17 nt, Artificial Sequence
  Synthetic
gaaucagacugaagaaa

SEQ ID NO: 703526 - RNA, 17 nt, Artificial Sequence
  Synthetic
gagagagugugaagaaa

SEQ ID NO: 703527 - RNA, 17 nt, Artificial Sequence
  Synthetic
gugagguugugaagaaa

SEQ ID NO: 703528 - RNA, 17 nt, Artificial Sequence
  Synthetic
gauaggggcauaagaaa

SEQ ID NO: 703529 - RNA, 17 nt, Artificial Sequence
  Synthetic
guaaaugcucuaagaaa

SEQ ID NO: 703530 - RNA, 17 nt, Artificial Sequence
  Synthetic
guaaauguucuaagaaa

SEQ ID NO: 703531 - RNA, 17 nt, Artificial Sequence
  Synthetic
guauaagguguaagaaa

SEQ ID NO: 703532 - RNA, 17 nt, Artificial Sequence
  Synthetic
gguugaggaaacagaaa

SEQ ID NO: 703533 - RNA, 17 nt, Artificial Sequence
  Synthetic
gagacaaccaacagaaa

SEQ ID NO: 703534 - RNA, 17 nt, Artificial Sequence
  Synthetic
gcaguggucaacagaaa

SEQ ID NO: 703535 - RNA, 17 nt, Artificial Sequence
  Synthetic
guuuuucugaacagaaa

SEQ ID NO: 703536 - RNA, 17 nt, Artificial Sequence
  Synthetic
ggacauccuaacagaaa

SEQ ID NO: 703537 - RNA, 17 nt, Artificial Sequence
  Synthetic
guaagaaguaacagaaa

SEQ ID NO: 703538 - RNA, 17 nt, Artificial Sequence
  Synthetic
gguaaacgagacagaaa

SEQ ID NO: 703539 - RNA, 17 nt, Artificial Sequence
  Synthetic
gauucagaauccagaaa

SEQ ID NO: 703540 - RNA, 17 nt, Artificial Sequence
  Synthetic
gagaucaguagcagaaa

SEQ ID NO: 703541 - RNA, 17 nt, Artificial Sequence
  Synthetic
gaagcucuaggcagaaa

SEQ ID NO: 703542 - RNA, 17 nt, Artificial Sequence
  Synthetic
gaucaguuaggcagaaa

SEQ ID NO: 703543 - RNA, 17 nt, Artificial Sequence
  Synthetic
ggagucaguggcagaaa

SEQ ID NO: 703544 - RNA, 17 nt, Artificial Sequence
  Synthetic
guacuuacaaucagaaa

SEQ ID NO: 703545 - RNA, 17 nt, Artificial Sequence
  Synthetic
guaauaaagcucagaaa

SEQ ID NO: 703546 - RNA, 17 nt, Artificial Sequence
  Synthetic
guauugauucucagaaa

SEQ ID NO: 703547 - RNA, 17 nt, Artificial Sequence
  Synthetic
ggccuccaugucagaaa

SEQ ID NO: 703548 - RNA, 17 nt, Artificial Sequence
  Synthetic
gagaaagcauucagaaa

SEQ ID NO: 703549 - RNA, 17 nt, Artificial Sequence
  Synthetic
gggcgaaaaaagagaaa

SEQ ID NO: 703550 - RNA, 17 nt, Artificial Sequence
  Synthetic
gaauucagaaagagaaa

SEQ ID NO: 703551 - RNA, 17 nt, Artificial Sequence
  Synthetic
gagcucauaaagagaaa

SEQ ID NO: 703552 - RNA, 17 nt, Artificial Sequence
  Synthetic
ggagcuuugaagagaaa

SEQ ID NO: 703553 - RNA, 17 nt, Artificial Sequence
  Synthetic
ggaauucuuaagagaaa

SEQ ID NO: 703554 - RNA, 17 nt, Artificial Sequence
  Synthetic
guguugguuaagagaaa

SEQ ID NO: 703555 - RNA, 17 nt, Artificial Sequence
  Synthetic
gugaggcugcagagaaa

SEQ ID NO: 703556 - RNA, 17 nt, Artificial Sequence
  Synthetic
gugaggcuucagagaaa

SEQ ID NO: 703557 - RNA, 17 nt, Artificial Sequence
  Synthetic
gcugagauagagagaaa

SEQ ID NO: 703558 - RNA, 17 nt, Artificial Sequence
  Synthetic
guagacaaggagagaaa

SEQ ID NO: 703559 - RNA, 17 nt, Artificial Sequence
  Synthetic
gcauaaggcuagagaaa

SEQ ID NO: 703560 - RNA, 17 nt, Artificial Sequence
  Synthetic
gcucaguguuagagaaa

SEQ ID NO: 703561 - RNA, 17 nt, Artificial Sequence
  Synthetic
ggcugcuccccgagaaa

SEQ ID NO: 703562 - RNA, 17 nt, Artificial Sequence
  Synthetic
gcugucacauggagaaa

SEQ ID NO: 703563 - RNA, 17 nt, Artificial Sequence
  Synthetic
ggguaaccauggagaaa

SEQ ID NO: 703564 - RNA, 17 nt, Artificial Sequence
  Synthetic
gcaagaauauggagaaa

SEQ ID NO: 703565 - RNA, 17 nt, Artificial Sequence
  Synthetic
gagagaauguggagaaa

SEQ ID NO: 703566 - RNA, 17 nt, Artificial Sequence
  Synthetic
gauggcaacaauagaaa

SEQ ID NO: 703567 - RNA, 17 nt, Artificial Sequence
  Synthetic
gcuucaaaccauagaaa

SEQ ID NO: 703568 - RNA, 17 nt, Artificial Sequence
  Synthetic
gguaacuaugauagaaa

SEQ ID NO: 703569 - RNA, 17 nt, Artificial Sequence
  Synthetic
gauuuaagugauagaaa

SEQ ID NO: 703570 - RNA, 17 nt, Artificial Sequence
  Synthetic
ggagcugagccuagaaa

SEQ ID NO: 703571 - RNA, 17 nt, Artificial Sequence
  Synthetic
gacaguugcaguagaaa

SEQ ID NO: 703572 - RNA, 17 nt, Artificial Sequence
  Synthetic
gaagggcauaguagaaa

SEQ ID NO: 703573 - RNA, 17 nt, Artificial Sequence
  Synthetic
gacuugggggguagaaa

SEQ ID NO: 703574 - RNA, 17 nt, Artificial Sequence
  Synthetic
gugucacacuguagaaa

SEQ ID NO: 703575 - RNA, 17 nt, Artificial Sequence
  Synthetic
gaauuuuuuuguagaaa

SEQ ID NO: 703576 - RNA, 17 nt, Artificial Sequence
  Synthetic
gaauaaaauauuagaaa

SEQ ID NO: 703577 - RNA, 17 nt, Artificial Sequence
  Synthetic
guaaagaugguuagaaa

SEQ ID NO: 703578 - RNA, 17 nt, Artificial Sequence
  Synthetic
ggagaagugguuagaaa

SEQ ID NO: 703579 - RNA, 17 nt, Artificial Sequence
  Synthetic
guuacggaagcacgaaa

SEQ ID NO: 703580 - RNA, 17 nt, Artificial Sequence
  Synthetic
gcugauacaauacgaaa

SEQ ID NO: 703581 - RNA, 17 nt, Artificial Sequence
  Synthetic
gaaagauaaaaaggaaa

SEQ ID NO: 703582 - RNA, 17 nt, Artificial Sequence
  Synthetic
gaagaaagaaaaggaaa

SEQ ID NO: 703583 - RNA, 17 nt, Artificial Sequence
  Synthetic
ggaaaaggaaaaggaaa

SEQ ID NO: 703584 - RNA, 17 nt, Artificial Sequence
  Synthetic
ggggcaagcaaaggaaa

SEQ ID NO: 703585 - RNA, 17 nt, Artificial Sequence
  Synthetic
gagcggaggaaaggaaa

SEQ ID NO: 703586 - RNA, 17 nt, Artificial Sequence
  Synthetic
guaauuuauaaaggaaa

SEQ ID NO: 703587 - RNA, 17 nt, Artificial Sequence
  Synthetic
gaaaauaaggaaggaaa

SEQ ID NO: 703588 - RNA, 17 nt, Artificial Sequence
  Synthetic
guuaaugaaacaggaaa

SEQ ID NO: 703589 - RNA, 17 nt, Artificial Sequence
  Synthetic
gaagucuagucaggaaa

SEQ ID NO: 703590 - RNA, 17 nt, Artificial Sequence
  Synthetic
gaaaaaaaaagaggaaa

SEQ ID NO: 703591 - RNA, 17 nt, Artificial Sequence
  Synthetic
gggaagggaagaggaaa

SEQ ID NO: 703592 - RNA, 17 nt, Artificial Sequence
  Synthetic
gaaaggaggagaggaaa

SEQ ID NO: 703593 - RNA, 17 nt, Artificial Sequence
  Synthetic
gugaggaaaggaggaaa

SEQ ID NO: 703594 - RNA, 17 nt, Artificial Sequence
  Synthetic
ggcacaguuggaggaaa

SEQ ID NO: 703595 - RNA, 17 nt, Artificial Sequence
  Synthetic
guuaauguaugaggaaa

SEQ ID NO: 703596 - RNA, 17 nt, Artificial Sequence
  Synthetic
gagaaguacugaggaaa

SEQ ID NO: 703597 - RNA, 17 nt, Artificial Sequence
  Synthetic
ggguaguugugaggaaa

SEQ ID NO: 703598 - RNA, 17 nt, Artificial Sequence
  Synthetic
gaagacuacauaggaaa

SEQ ID NO: 703599 - RNA, 17 nt, Artificial Sequence
  Synthetic
ggguggagggacggaaa

SEQ ID NO: 703600 - RNA, 17 nt, Artificial Sequence
  Synthetic
guugauagaagcggaaa

SEQ ID NO: 703601 - RNA, 17 nt, Artificial Sequence
  Synthetic
gggaaggaaaagggaaa

SEQ ID NO: 703602 - RNA, 17 nt, Artificial Sequence
  Synthetic
ggagagggaaagggaaa

SEQ ID NO: 703603 - RNA, 17 nt, Artificial Sequence
  Synthetic
gcaauauuucagggaaa

SEQ ID NO: 703604 - RNA, 17 nt, Artificial Sequence
  Synthetic
ggagagggagagggaaa

SEQ ID NO: 703605 - RNA, 17 nt, Artificial Sequence
  Synthetic
ggguggaaugagggaaa

SEQ ID NO: 703606 - RNA, 17 nt, Artificial Sequence
  Synthetic
ggacagaaguagggaaa

SEQ ID NO: 703607 - RNA, 17 nt, Artificial Sequence
  Synthetic
gcuugcuuuuagggaaa

SEQ ID NO: 703608 - RNA, 17 nt, Artificial Sequence
  Synthetic
guagugguagggggaaa

SEQ ID NO: 703609 - RNA, 17 nt, Artificial Sequence
  Synthetic
gugaaaggauggggaaa

SEQ ID NO: 703610 - RNA, 17 nt, Artificial Sequence
  Synthetic
ggcugacugaugggaaa

SEQ ID NO: 703611 - RNA, 17 nt, Artificial Sequence
  Synthetic
guguuagaacugggaaa

SEQ ID NO: 703612 - RNA, 17 nt, Artificial Sequence
  Synthetic
gaauugggguugggaaa

SEQ ID NO: 703613 - RNA, 17 nt, Artificial Sequence
  Synthetic
gccaacugguugggaaa

SEQ ID NO: 703614 - RNA, 17 nt, Artificial Sequence
  Synthetic
ggcacaucaaauggaaa

SEQ ID NO: 703615 - RNA, 17 nt, Artificial Sequence
  Synthetic
ggaugaugaaauggaaa

SEQ ID NO: 703616 - RNA, 17 nt, Artificial Sequence
  Synthetic
gaagaacucaauggaaa

SEQ ID NO: 703617 - RNA, 17 nt, Artificial Sequence
  Synthetic
guggucagacauggaaa

SEQ ID NO: 703618 - RNA, 17 nt, Artificial Sequence
  Synthetic
gagaaaaacacuggaaa

SEQ ID NO: 703619 - RNA, 17 nt, Artificial Sequence
  Synthetic
guucaucagacuggaaa

SEQ ID NO: 703620 - RNA, 17 nt, Artificial Sequence
  Synthetic
gcucuaaaagcuggaaa

SEQ ID NO: 703621 - RNA, 17 nt, Artificial Sequence
  Synthetic
gcaucuaaugcuggaaa

SEQ ID NO: 703622 - RNA, 17 nt, Artificial Sequence
  Synthetic
gggagguucucuggaaa

SEQ ID NO: 703623 - RNA, 17 nt, Artificial Sequence
  Synthetic
gaaaagaggucuggaaa

SEQ ID NO: 703624 - RNA, 17 nt, Artificial Sequence
  Synthetic
guaccaucaauuggaaa

SEQ ID NO: 703625 - RNA, 17 nt, Artificial Sequence
  Synthetic
ggguaaagacuuggaaa

SEQ ID NO: 703626 - RNA, 17 nt, Artificial Sequence
  Synthetic
gucacuuaaguuggaaa

SEQ ID NO: 703627 - RNA, 17 nt, Artificial Sequence
  Synthetic
gcuguugacaaaugaaa

SEQ ID NO: 703628 - RNA, 17 nt, Artificial Sequence
  Synthetic
ggacaaggcaaaugaaa

SEQ ID NO: 703629 - RNA, 17 nt, Artificial Sequence
  Synthetic
guuucagucaaaugaaa

SEQ ID NO: 703630 - RNA, 17 nt, Artificial Sequence
  Synthetic
gagcccauaacaugaaa

SEQ ID NO: 703631 - RNA, 17 nt, Artificial Sequence
  Synthetic
guguuuuuaacaugaaa

SEQ ID NO: 703632 - RNA, 17 nt, Artificial Sequence
  Synthetic
gaccuuucuacaugaaa

SEQ ID NO: 703633 - RNA, 17 nt, Artificial Sequence
  Synthetic
guuucuuuagcaugaaa

SEQ ID NO: 703634 - RNA, 17 nt, Artificial Sequence
  Synthetic
gagcgaugaucaugaaa

SEQ ID NO: 703635 - RNA, 17 nt, Artificial Sequence
  Synthetic
gauaugaugucaugaaa

SEQ ID NO: 703636 - RNA, 17 nt, Artificial Sequence
  Synthetic
guauaaggaugaugaaa

SEQ ID NO: 703637 - RNA, 17 nt, Artificial Sequence
  Synthetic
guaagaaggauaugaaa

SEQ ID NO: 703638 - RNA, 17 nt, Artificial Sequence
  Synthetic
gagagaauuauaugaaa

SEQ ID NO: 703639 - RNA, 17 nt, Artificial Sequence
  Synthetic
gugaagguaaacugaaa

SEQ ID NO: 703640 - RNA, 17 nt, Artificial Sequence
  Synthetic
gcacggagagacugaaa

SEQ ID NO: 703641 - RNA, 17 nt, Artificial Sequence
  Synthetic
gaaaagauggacugaaa

SEQ ID NO: 703642 - RNA, 17 nt, Artificial Sequence
  Synthetic
guaagucaucccugaaa

SEQ ID NO: 703643 - RNA, 17 nt, Artificial Sequence
  Synthetic
guauuucaguccugaaa

SEQ ID NO: 703644 - RNA, 17 nt, Artificial Sequence
  Synthetic
gggaaggggagcugaaa

SEQ ID NO: 703645 - RNA, 17 nt, Artificial Sequence
  Synthetic
gcucauggggucugaaa

SEQ ID NO: 703646 - RNA, 17 nt, Artificial Sequence
  Synthetic
guauccaguuucugaaa

SEQ ID NO: 703647 - RNA, 17 nt, Artificial Sequence
  Synthetic
guaggagaaaagugaaa

SEQ ID NO: 703648 - RNA, 17 nt, Artificial Sequence
  Synthetic
ggaugaucucagugaaa

SEQ ID NO: 703649 - RNA, 17 nt, Artificial Sequence
  Synthetic
guuuuuaaaacgugaaa

SEQ ID NO: 703650 - RNA, 17 nt, Artificial Sequence
  Synthetic
gcuuugauagggugaaa

SEQ ID NO: 703651 - RNA, 17 nt, Artificial Sequence
  Synthetic
gguuuugaaaugugaaa

SEQ ID NO: 703652 - RNA, 17 nt, Artificial Sequence
  Synthetic
gcugaacaacugugaaa

SEQ ID NO: 703653 - RNA, 17 nt, Artificial Sequence
  Synthetic
gucagauagcugugaaa

SEQ ID NO: 703654 - RNA, 17 nt, Artificial Sequence
  Synthetic
gaauagauuccuugaaa

SEQ ID NO: 703655 - RNA, 17 nt, Artificial Sequence
  Synthetic
guacuguagaguugaaa

SEQ ID NO: 703656 - RNA, 17 nt, Artificial Sequence
  Synthetic
ggaaaugacauuugaaa

SEQ ID NO: 703657 - RNA, 17 nt, Artificial Sequence
  Synthetic
gagugguaacuuugaaa

SEQ ID NO: 703658 - RNA, 17 nt, Artificial Sequence
  Synthetic
gagcagaaauuuugaaa

SEQ ID NO: 703659 - RNA, 17 nt, Artificial Sequence
  Synthetic
gaucauauauuuugaaa

SEQ ID NO: 703660 - RNA, 17 nt, Artificial Sequence
  Synthetic
gaaaugucguuuugaaa

SEQ ID NO: 703661 - RNA, 17 nt, Artificial Sequence
  Synthetic
ggcagaagaaaaauaaa

SEQ ID NO: 703662 - RNA, 17 nt, Artificial Sequence
  Synthetic
gauuuucacaaaauaaa

SEQ ID NO: 703663 - RNA, 17 nt, Artificial Sequence
  Synthetic
ggauaacugaaaauaaa

SEQ ID NO: 703664 - RNA, 17 nt, Artificial Sequence
  Synthetic
gaacuugauaaaauaaa

SEQ ID NO: 703665 - RNA, 17 nt, Artificial Sequence
  Synthetic
gaggggcuggaaauaaa

SEQ ID NO: 703666 - RNA, 17 nt, Artificial Sequence
  Synthetic
guuaguccugaaauaaa

SEQ ID NO: 703667 - RNA, 17 nt, Artificial Sequence
  Synthetic
gacaauaccuaaauaaa

SEQ ID NO: 703668 - RNA, 17 nt, Artificial Sequence
  Synthetic
ggaagauagccaauaaa

SEQ ID NO: 703669 - RNA, 17 nt, Artificial Sequence
  Synthetic
guguuuuauucaauaaa

SEQ ID NO: 703670 - RNA, 17 nt, Artificial Sequence
  Synthetic
guaacaacaauaauaaa

SEQ ID NO: 703671 - RNA, 17 nt, Artificial Sequence
  Synthetic
ggaccauauauaauaaa

SEQ ID NO: 703672 - RNA, 17 nt, Artificial Sequence
  Synthetic
ggcugugcaguaauaaa

SEQ ID NO: 703673 - RNA, 17 nt, Artificial Sequence
  Synthetic
guuuuauaauacauaaa

SEQ ID NO: 703674 - RNA, 17 nt, Artificial Sequence
  Synthetic
ggggaauauuacauaaa

SEQ ID NO: 703675 - RNA, 17 nt, Artificial Sequence
  Synthetic
gcugcuuaguccauaaa

SEQ ID NO: 703676 - RNA, 17 nt, Artificial Sequence
  Synthetic
gcaaccuuaggcauaaa

SEQ ID NO: 703677 - RNA, 17 nt, Artificial Sequence
  Synthetic
gcaacauguugcauaaa

SEQ ID NO: 703678 - RNA, 17 nt, Artificial Sequence
  Synthetic
ggagaagcauucauaaa

SEQ ID NO: 703679 - RNA, 17 nt, Artificial Sequence
  Synthetic
gucuuuaacaggauaaa

SEQ ID NO: 703680 - RNA, 17 nt, Artificial Sequence
  Synthetic
gaaaaaugugggauaaa

SEQ ID NO: 703681 - RNA, 17 nt, Artificial Sequence
  Synthetic
guuaagucauugauaaa

SEQ ID NO: 703682 - RNA, 17 nt, Artificial Sequence
  Synthetic
guccauugauugauaaa

SEQ ID NO: 703683 - RNA, 17 nt, Artificial Sequence
  Synthetic
gccuuccuacauauaaa

SEQ ID NO: 703684 - RNA, 17 nt, Artificial Sequence
  Synthetic
gacuugacucauauaaa

SEQ ID NO: 703685 - RNA, 17 nt, Artificial Sequence
  Synthetic
gcacaaauauauauaaa

SEQ ID NO: 703686 - RNA, 17 nt, Artificial Sequence
  Synthetic
gaaaggaagacuauaaa

SEQ ID NO: 703687 - RNA, 17 nt, Artificial Sequence
  Synthetic
ggcaugaucucuauaaa

SEQ ID NO: 703688 - RNA, 17 nt, Artificial Sequence
  Synthetic
ggauaagcaauuauaaa

SEQ ID NO: 703689 - RNA, 17 nt, Artificial Sequence
  Synthetic
gaucacaguauuauaaa

SEQ ID NO: 703690 - RNA, 17 nt, Artificial Sequence
  Synthetic
guguucucacuuauaaa

SEQ ID NO: 703691 - RNA, 17 nt, Artificial Sequence
  Synthetic
gugauggauacccuaaa

SEQ ID NO: 703692 - RNA, 17 nt, Artificial Sequence
  Synthetic
gaaauggaaagccuaaa

SEQ ID NO: 703693 - RNA, 17 nt, Artificial Sequence
  Synthetic
ggaggaacaauccuaaa

SEQ ID NO: 703694 - RNA, 17 nt, Artificial Sequence
  Synthetic
gcaaaacaacagcuaaa

SEQ ID NO: 703695 - RNA, 17 nt, Artificial Sequence
  Synthetic
gcugaagagcagcuaaa

SEQ ID NO: 703696 - RNA, 17 nt, Artificial Sequence
  Synthetic
gauuuaagggagcuaaa

SEQ ID NO: 703697 - RNA, 17 nt, Artificial Sequence
  Synthetic
gauuuaauuuagcuaaa

SEQ ID NO: 703698 - RNA, 17 nt, Artificial Sequence
  Synthetic
gugcugugaaugcuaaa

SEQ ID NO: 703699 - RNA, 17 nt, Artificial Sequence
  Synthetic
gcuuuuaaacugcuaaa

SEQ ID NO: 703700 - RNA, 17 nt, Artificial Sequence
  Synthetic
gaauacuuaucucuaaa

SEQ ID NO: 703701 - RNA, 17 nt, Artificial Sequence
  Synthetic
guuaauucucuucuaaa

SEQ ID NO: 703702 - RNA, 17 nt, Artificial Sequence
  Synthetic
gaauuggaaaaaguaaa

SEQ ID NO: 703703 - RNA, 17 nt, Artificial Sequence
  Synthetic
guagacagaaaaguaaa

SEQ ID NO: 703704 - RNA, 17 nt, Artificial Sequence
  Synthetic
gaauuugugaaaguaaa

SEQ ID NO: 703705 - RNA, 17 nt, Artificial Sequence
  Synthetic
gacacguguacaguaaa

SEQ ID NO: 703706 - RNA, 17 nt, Artificial Sequence
  Synthetic
guacagaauccaguaaa

SEQ ID NO: 703707 - RNA, 17 nt, Artificial Sequence
  Synthetic
ggcaaaugaagaguaaa

SEQ ID NO: 703708 - RNA, 17 nt, Artificial Sequence
  Synthetic
gauaauauuagaguaaa

SEQ ID NO: 703709 - RNA, 17 nt, Artificial Sequence
  Synthetic
guuguugucugaguaaa

SEQ ID NO: 703710 - RNA, 17 nt, Artificial Sequence
  Synthetic
ggguggguauagguaaa

SEQ ID NO: 703711 - RNA, 17 nt, Artificial Sequence
  Synthetic
gaaacauuagggguaaa

SEQ ID NO: 703712 - RNA, 17 nt, Artificial Sequence
  Synthetic
gggagaagcuggguaaa

SEQ ID NO: 703713 - RNA, 17 nt, Artificial Sequence
  Synthetic
gcagaccucaauguaaa

SEQ ID NO: 703714 - RNA, 17 nt, Artificial Sequence
  Synthetic
gaccuucacccuguaaa

SEQ ID NO: 703715 - RNA, 17 nt, Artificial Sequence
  Synthetic
gaggaaaacaguguaaa

SEQ ID NO: 703716 - RNA, 17 nt, Artificial Sequence
  Synthetic
ggauuuuuaaaauuaaa

SEQ ID NO: 703717 - RNA, 17 nt, Artificial Sequence
  Synthetic
guauuuuguuaauuaaa

SEQ ID NO: 703718 - RNA, 17 nt, Artificial Sequence
  Synthetic
gcuucugaaucauuaaa

SEQ ID NO: 703719 - RNA, 17 nt, Artificial Sequence
  Synthetic
gcauaaaauagauuaaa

SEQ ID NO: 703720 - RNA, 17 nt, Artificial Sequence
  Synthetic
gggauuuacauauuaaa

SEQ ID NO: 703721 - RNA, 17 nt, Artificial Sequence
  Synthetic
ggaggcuuuauauuaaa

SEQ ID NO: 703722 - RNA, 17 nt, Artificial Sequence
  Synthetic
gggcagaguguauuaaa

SEQ ID NO: 703723 - RNA, 17 nt, Artificial Sequence
  Synthetic
gaacuuuaaaccuuaaa

SEQ ID NO: 703724 - RNA, 17 nt, Artificial Sequence
  Synthetic
guugaaggaaccuuaaa

SEQ ID NO: 703725 - RNA, 17 nt, Artificial Sequence
  Synthetic
gaaucugcuaccuuaaa

SEQ ID NO: 703726 - RNA, 17 nt, Artificial Sequence
  Synthetic
guuuugaaucccuuaaa

SEQ ID NO: 703727 - RNA, 17 nt, Artificial Sequence
  Synthetic
gaucuagaaaucuuaaa

SEQ ID NO: 703728 - RNA, 17 nt, Artificial Sequence
  Synthetic
guaguaacugucuuaaa

SEQ ID NO: 703729 - RNA, 17 nt, Artificial Sequence
  Synthetic
gugaggaugcaguuaaa

SEQ ID NO: 703730 - RNA, 17 nt, Artificial Sequence
  Synthetic
gggauggcugaguuaaa

SEQ ID NO: 703731 - RNA, 17 nt, Artificial Sequence
  Synthetic
guaaguuacacguuaaa

SEQ ID NO: 703732 - RNA, 17 nt, Artificial Sequence
  Synthetic
gcagggaaaauguuaaa

SEQ ID NO: 703733 - RNA, 17 nt, Artificial Sequence
  Synthetic
ggcccacuccuguuaaa

SEQ ID NO: 703734 - RNA, 17 nt, Artificial Sequence
  Synthetic
gcauuagaaguguuaaa

SEQ ID NO: 703735 - RNA, 17 nt, Artificial Sequence
  Synthetic
gcacuugccuuguuaaa

SEQ ID NO: 703736 - RNA, 17 nt, Artificial Sequence
  Synthetic
guucggggaaauuuaaa

SEQ ID NO: 703737 - RNA, 17 nt, Artificial Sequence
  Synthetic
gaucuuguucauuuaaa

SEQ ID NO: 703738 - RNA, 17 nt, Artificial Sequence
  Synthetic
gaaauaguggauuuaaa

SEQ ID NO: 703739 - RNA, 17 nt, Artificial Sequence
  Synthetic
gaacugauugauuuaaa

SEQ ID NO: 703740 - RNA, 17 nt, Artificial Sequence
  Synthetic
gcaugcauuacuuuaaa

SEQ ID NO: 703741 - RNA, 17 nt, Artificial Sequence
  Synthetic
gagguagggccuuuaaa

SEQ ID NO: 703742 - RNA, 17 nt, Artificial Sequence
  Synthetic
gaguguccagguuuaaa

SEQ ID NO: 703743 - RNA, 17 nt, Artificial Sequence
  Synthetic
guuugggucauuuuaaa

SEQ ID NO: 703744 - RNA, 17 nt, Artificial Sequence
  Synthetic
gacuaaucuauuuuaaa

SEQ ID NO: 703745 - RNA, 17 nt, Artificial Sequence
  Synthetic
guuaucuuaguuuuaaa

SEQ ID NO: 703746 - RNA, 17 nt, Artificial Sequence
  Synthetic
guuuuauauguuuuaaa

SEQ ID NO: 703747 - RNA, 17 nt, Artificial Sequence
  Synthetic
gugcacguauuuuuaaa

SEQ ID NO: 703748 - RNA, 17 nt, Artificial Sequence
  Synthetic
gaaaacaacuuuuuaaa

SEQ ID NO: 703749 - RNA, 17 nt, Artificial Sequence
  Synthetic
ggaugggggcaaaacaa

SEQ ID NO: 703750 - RNA, 17 nt, Artificial Sequence
  Synthetic
gugaaagucuaaaacaa

SEQ ID NO: 703751 - RNA, 17 nt, Artificial Sequence
  Synthetic
gaaauuggcccaaacaa

SEQ ID NO: 703752 - RNA, 17 nt, Artificial Sequence
  Synthetic
gggagggagggaaacaa

SEQ ID NO: 703753 - RNA, 17 nt, Artificial Sequence
  Synthetic
gcuggccugugaaacaa

SEQ ID NO: 703754 - RNA, 17 nt, Artificial Sequence
  Synthetic
gauuauaugcuaaacaa

SEQ ID NO: 703755 - RNA, 17 nt, Artificial Sequence
  Synthetic
guucugguauuaaacaa

SEQ ID NO: 703756 - RNA, 17 nt, Artificial Sequence
  Synthetic
gcaccccuuaccaacaa

SEQ ID NO: 703757 - RNA, 17 nt, Artificial Sequence
  Synthetic
gaaguauaaagcaacaa

SEQ ID NO: 703758 - RNA, 17 nt, Artificial Sequence
  Synthetic
gcaagacaggucaacaa

SEQ ID NO: 703759 - RNA, 17 nt, Artificial Sequence
  Synthetic
ggagagaguuucaacaa

SEQ ID NO: 703760 - RNA, 17 nt, Artificial Sequence
  Synthetic
guuggcagugggaacaa

SEQ ID NO: 703761 - RNA, 17 nt, Artificial Sequence
  Synthetic
guucagaacuugaacaa

SEQ ID NO: 703762 - RNA, 17 nt, Artificial Sequence
  Synthetic
gcuugagaguugaacaa

SEQ ID NO: 703763 - RNA, 17 nt, Artificial Sequence
  Synthetic
gcaucguuuuugaacaa

SEQ ID NO: 703764 - RNA, 17 nt, Artificial Sequence
  Synthetic
gcuacaggaaauaacaa

SEQ ID NO: 703765 - RNA, 17 nt, Artificial Sequence
  Synthetic
gcauguaguaauaacaa

SEQ ID NO: 703766 - RNA, 17 nt, Artificial Sequence
  Synthetic
guggagaguuauaacaa

SEQ ID NO: 703767 - RNA, 17 nt, Artificial Sequence
  Synthetic
gccugggcaucuaacaa

SEQ ID NO: 703768 - RNA, 17 nt, Artificial Sequence
  Synthetic
gagacaagaaguaacaa

SEQ ID NO: 703769 - RNA, 17 nt, Artificial Sequence
  Synthetic
gaauugucuauuaacaa

SEQ ID NO: 703770 - RNA, 17 nt, Artificial Sequence
  Synthetic
gaaugaaaaguuaacaa

SEQ ID NO: 703771 - RNA, 17 nt, Artificial Sequence
  Synthetic
gcgguauauaaacacaa

SEQ ID NO: 703772 - RNA, 17 nt, Artificial Sequence
  Synthetic
gucuccauacaacacaa

SEQ ID NO: 703773 - RNA, 17 nt, Artificial Sequence
  Synthetic
gauuguuuguaacacaa

SEQ ID NO: 703774 - RNA, 17 nt, Artificial Sequence
  Synthetic
gcagggauugcacacaa

SEQ ID NO: 703775 - RNA, 17 nt, Artificial Sequence
  Synthetic
gagccuccaucacacaa

SEQ ID NO: 703776 - RNA, 17 nt, Artificial Sequence
  Synthetic
gcuaaugggagacacaa

SEQ ID NO: 703777 - RNA, 17 nt, Artificial Sequence
  Synthetic
gugguacauauacacaa

SEQ ID NO: 703778 - RNA, 17 nt, Artificial Sequence
  Synthetic
gugguauauauacacaa

SEQ ID NO: 703779 - RNA, 17 nt, Artificial Sequence
  Synthetic
gagaagggacuacacaa

SEQ ID NO: 703780 - RNA, 17 nt, Artificial Sequence
  Synthetic
guaaaaaggaaccacaa

SEQ ID NO: 703781 - RNA, 17 nt, Artificial Sequence
  Synthetic
ggaaguauugaccacaa

SEQ ID NO: 703782 - RNA, 17 nt, Artificial Sequence
  Synthetic
ggcuggguuacccacaa

SEQ ID NO: 703783 - RNA, 17 nt, Artificial Sequence
  Synthetic
gguguuuauauccacaa

SEQ ID NO: 703784 - RNA, 17 nt, Artificial Sequence
  Synthetic
gauaauguucuccacaa

SEQ ID NO: 703785 - RNA, 17 nt, Artificial Sequence
  Synthetic
ggaagagaagagcacaa

SEQ ID NO: 703786 - RNA, 17 nt, Artificial Sequence
  Synthetic
gugguaccuaugcacaa

SEQ ID NO: 703787 - RNA, 17 nt, Artificial Sequence
  Synthetic
gaaaaguuauugcacaa

SEQ ID NO: 703788 - RNA, 17 nt, Artificial Sequence
  Synthetic
gucauacaugaucacaa

SEQ ID NO: 703789 - RNA, 17 nt, Artificial Sequence
  Synthetic
gccaaaccauaucacaa

SEQ ID NO: 703790 - RNA, 17 nt, Artificial Sequence
  Synthetic
guuuacuuaauucacaa

SEQ ID NO: 703791 - RNA, 17 nt, Artificial Sequence
  Synthetic
gcacacacuguucacaa

SEQ ID NO: 703792 - RNA, 17 nt, Artificial Sequence
  Synthetic
gccuaguuuuuucacaa

SEQ ID NO: 703793 - RNA, 17 nt, Artificial Sequence
  Synthetic
gagcucuuuaaagacaa

SEQ ID NO: 703794 - RNA, 17 nt, Artificial Sequence
  Synthetic
guuaagcgccaagacaa

SEQ ID NO: 703795 - RNA, 17 nt, Artificial Sequence
  Synthetic
guuaauaggcaagacaa

SEQ ID NO: 703796 - RNA, 17 nt, Artificial Sequence
  Synthetic
guagaaugagaagacaa

SEQ ID NO: 703797 - RNA, 17 nt, Artificial Sequence
  Synthetic
ggcccagacuaagacaa

SEQ ID NO: 703798 - RNA, 17 nt, Artificial Sequence
  Synthetic
guguggagcuaagacaa

SEQ ID NO: 703799 - RNA, 17 nt, Artificial Sequence
  Synthetic
gcaucauccacagacaa

SEQ ID NO: 703800 - RNA, 17 nt, Artificial Sequence
  Synthetic
gcuauaauuacagacaa

SEQ ID NO: 703801 - RNA, 17 nt, Artificial Sequence
  Synthetic
gaauauguuccagacaa

SEQ ID NO: 703802 - RNA, 17 nt, Artificial Sequence
  Synthetic
gaauuguuggcagacaa

SEQ ID NO: 703803 - RNA, 17 nt, Artificial Sequence
  Synthetic
gugggaaacggagacaa

SEQ ID NO: 703804 - RNA, 17 nt, Artificial Sequence
  Synthetic
gaaggaaacugagacaa

SEQ ID NO: 703805 - RNA, 17 nt, Artificial Sequence
  Synthetic
ggcccauucagggacaa

SEQ ID NO: 703806 - RNA, 17 nt, Artificial Sequence
  Synthetic
guagggagaggggacaa

SEQ ID NO: 703807 - RNA, 17 nt, Artificial Sequence
  Synthetic
guagccaaucuggacaa

SEQ ID NO: 703808 - RNA, 17 nt, Artificial Sequence
  Synthetic
guuaaaauauuugacaa

SEQ ID NO: 703809 - RNA, 17 nt, Artificial Sequence
  Synthetic
ggacaugucaaauacaa

SEQ ID NO: 703810 - RNA, 17 nt, Artificial Sequence
  Synthetic
gacaugaauaaauacaa

SEQ ID NO: 703811 - RNA, 17 nt, Artificial Sequence
  Synthetic
gcaaauggucaauacaa

SEQ ID NO: 703812 - RNA, 17 nt, Artificial Sequence
  Synthetic
gcaagggcugaauacaa

SEQ ID NO: 703813 - RNA, 17 nt, Artificial Sequence
  Synthetic
gaaugcauugcauacaa

SEQ ID NO: 703814 - RNA, 17 nt, Artificial Sequence
  Synthetic
gcauaagaaugauacaa

SEQ ID NO: 703815 - RNA, 17 nt, Artificial Sequence
  Synthetic
gaaugugguugauacaa

SEQ ID NO: 703816 - RNA, 17 nt, Artificial Sequence
  Synthetic
gauccacgugacuacaa

SEQ ID NO: 703817 - RNA, 17 nt, Artificial Sequence
  Synthetic
gccuaucccuccuacaa

SEQ ID NO: 703818 - RNA, 17 nt, Artificial Sequence
  Synthetic
guuaccagaggcuacaa

SEQ ID NO: 703819 - RNA, 17 nt, Artificial Sequence
  Synthetic
gagaucgauuucuacaa

SEQ ID NO: 703820 - RNA, 17 nt, Artificial Sequence
  Synthetic
gaaguaaaaaaguacaa

SEQ ID NO: 703821 - RNA, 17 nt, Artificial Sequence
  Synthetic
gaaaaaugaaaguacaa

SEQ ID NO: 703822 - RNA, 17 nt, Artificial Sequence
  Synthetic
gcugagaaaauguacaa

SEQ ID NO: 703823 - RNA, 17 nt, Artificial Sequence
  Synthetic
gcaaacuugcuguacaa

SEQ ID NO: 703824 - RNA, 17 nt, Artificial Sequence
  Synthetic
gauuuuugucauuacaa

SEQ ID NO: 703825 - RNA, 17 nt, Artificial Sequence
  Synthetic
gaaaauauugcuuacaa

SEQ ID NO: 703826 - RNA, 17 nt, Artificial Sequence
  Synthetic
gaucauuuaaguuacaa

SEQ ID NO: 703827 - RNA, 17 nt, Artificial Sequence
  Synthetic
gaggcaaugaguuacaa

SEQ ID NO: 703828 - RNA, 17 nt, Artificial Sequence
  Synthetic
guguugguuuguuacaa

SEQ ID NO: 703829 - RNA, 17 nt, Artificial Sequence
  Synthetic
gaaugcucaauuuacaa

SEQ ID NO: 703830 - RNA, 17 nt, Artificial Sequence
  Synthetic
gaaaugcaccaaaccaa

SEQ ID NO: 703831 - RNA, 17 nt, Artificial Sequence
  Synthetic
gagacccaggaaaccaa

SEQ ID NO: 703832 - RNA, 17 nt, Artificial Sequence
  Synthetic
gcuuucuuaucaaccaa

SEQ ID NO: 703833 - RNA, 17 nt, Artificial Sequence
  Synthetic
gagcaaccuucaaccaa

SEQ ID NO: 703834 - RNA, 17 nt, Artificial Sequence
  Synthetic
ggauuuacuguaaccaa

SEQ ID NO: 703835 - RNA, 17 nt, Artificial Sequence
  Synthetic
gaggucaguguaaccaa

SEQ ID NO: 703836 - RNA, 17 nt, Artificial Sequence
  Synthetic
gaauagcacuuaaccaa

SEQ ID NO: 703837 - RNA, 17 nt, Artificial Sequence
  Synthetic
guaugaaacaccaccaa

SEQ ID NO: 703838 - RNA, 17 nt, Artificial Sequence
  Synthetic
ggcaggauggagaccaa

SEQ ID NO: 703839 - RNA, 17 nt, Artificial Sequence
  Synthetic
gcagacauauagaccaa

SEQ ID NO: 703840 - RNA, 17 nt, Artificial Sequence
  Synthetic
gugggguguaggaccaa

SEQ ID NO: 703841 - RNA, 17 nt, Artificial Sequence
  Synthetic
gcaauaagccauaccaa

SEQ ID NO: 703842 - RNA, 17 nt, Artificial Sequence
  Synthetic
gaaacaaggaguaccaa

SEQ ID NO: 703843 - RNA, 17 nt, Artificial Sequence
  Synthetic
ggagucagacuuaccaa

SEQ ID NO: 703844 - RNA, 17 nt, Artificial Sequence
  Synthetic
ggacuuuuauuuaccaa

SEQ ID NO: 703845 - RNA, 17 nt, Artificial Sequence
  Synthetic
ggagguguccuacccaa

SEQ ID NO: 703846 - RNA, 17 nt, Artificial Sequence
  Synthetic
gaaucugauaaccccaa

SEQ ID NO: 703847 - RNA, 17 nt, Artificial Sequence
  Synthetic
gcccagugucaccccaa

SEQ ID NO: 703848 - RNA, 17 nt, Artificial Sequence
  Synthetic
gaagugcuaacccccaa

SEQ ID NO: 703849 - RNA, 17 nt, Artificial Sequence
  Synthetic
guggaucccacccccaa

SEQ ID NO: 703850 - RNA, 17 nt, Artificial Sequence
  Synthetic
gauuuauuuucccccaa

SEQ ID NO: 703851 - RNA, 17 nt, Artificial Sequence
  Synthetic
guagauaaaauccccaa

SEQ ID NO: 703852 - RNA, 17 nt, Artificial Sequence
  Synthetic
guucacuuaaagcccaa

SEQ ID NO: 703853 - RNA, 17 nt, Artificial Sequence
  Synthetic
gaaagcauggggcccaa

SEQ ID NO: 703854 - RNA, 17 nt, Artificial Sequence
  Synthetic
ggugacacugggcccaa

SEQ ID NO: 703855 - RNA, 17 nt, Artificial Sequence
  Synthetic
guuacuuuauuucccaa

SEQ ID NO: 703856 - RNA, 17 nt, Artificial Sequence
  Synthetic
guuccagaguuucccaa

SEQ ID NO: 703857 - RNA, 17 nt, Artificial Sequence
  Synthetic
ggccuggauuuucccaa

SEQ ID NO: 703858 - RNA, 17 nt, Artificial Sequence
  Synthetic
ggcuaucugcaagccaa

SEQ ID NO: 703859 - RNA, 17 nt, Artificial Sequence
  Synthetic
guaauaaaguaagccaa

SEQ ID NO: 703860 - RNA, 17 nt, Artificial Sequence
  Synthetic
ggaaauuuaacagccaa

SEQ ID NO: 703861 - RNA, 17 nt, Artificial Sequence
  Synthetic
gacccaaccccagccaa

SEQ ID NO: 703862 - RNA, 17 nt, Artificial Sequence
  Synthetic
gcaugucagucagccaa

SEQ ID NO: 703863 - RNA, 17 nt, Artificial Sequence
  Synthetic
gacugaguucgagccaa

SEQ ID NO: 703864 - RNA, 17 nt, Artificial Sequence
  Synthetic
guacccugcaacgccaa

SEQ ID NO: 703865 - RNA, 17 nt, Artificial Sequence
  Synthetic
ggugccucagaggccaa

SEQ ID NO: 703866 - RNA, 17 nt, Artificial Sequence
  Synthetic
gcuaagucaccugccaa

SEQ ID NO: 703867 - RNA, 17 nt, Artificial Sequence
  Synthetic
gagggaacuucugccaa

SEQ ID NO: 703868 - RNA, 17 nt, Artificial Sequence
  Synthetic
gcaguuuuaggugccaa

SEQ ID NO: 703869 - RNA, 17 nt, Artificial Sequence
  Synthetic
ggauacuugaaauccaa

SEQ ID NO: 703870 - RNA, 17 nt, Artificial Sequence
  Synthetic
gaaaguaaacaauccaa

SEQ ID NO: 703871 - RNA, 17 nt, Artificial Sequence
  Synthetic
gaugucacagaauccaa

SEQ ID NO: 703872 - RNA, 17 nt, Artificial Sequence
  Synthetic
guucucaugagauccaa

SEQ ID NO: 703873 - RNA, 17 nt, Artificial Sequence
  Synthetic
ggaaacaccauauccaa

SEQ ID NO: 703874 - RNA, 17 nt, Artificial Sequence
  Synthetic
gacaugcccauauccaa

SEQ ID NO: 703875 - RNA, 17 nt, Artificial Sequence
  Synthetic
gaagaauuccacuccaa

SEQ ID NO: 703876 - RNA, 17 nt, Artificial Sequence
  Synthetic
gcaauugaucacuccaa

SEQ ID NO: 703877 - RNA, 17 nt, Artificial Sequence
  Synthetic
gaauuaggaaucuccaa

SEQ ID NO: 703878 - RNA, 17 nt, Artificial Sequence
  Synthetic
gccucuguuuucuccaa

SEQ ID NO: 703879 - RNA, 17 nt, Artificial Sequence
  Synthetic
gaaguaacuaauuccaa

SEQ ID NO: 703880 - RNA, 17 nt, Artificial Sequence
  Synthetic
gaaagcauagauuccaa

SEQ ID NO: 703881 - RNA, 17 nt, Artificial Sequence
  Synthetic
gauccuagacuuuccaa

SEQ ID NO: 703882 - RNA, 17 nt, Artificial Sequence
  Synthetic
gaaaacaccaaaagcaa

SEQ ID NO: 703883 - RNA, 17 nt, Artificial Sequence
  Synthetic
gaaagcaaggaaagcaa

SEQ ID NO: 703884 - RNA, 17 nt, Artificial Sequence
  Synthetic
gagagaaaauaaagcaa

SEQ ID NO: 703885 - RNA, 17 nt, Artificial Sequence
  Synthetic
ggauggggcuaaagcaa

SEQ ID NO: 703886 - RNA, 17 nt, Artificial Sequence
  Synthetic
gccaggccuucaagcaa

SEQ ID NO: 703887 - RNA, 17 nt, Artificial Sequence
  Synthetic
guaaaucagagaagcaa

SEQ ID NO: 703888 - RNA, 17 nt, Artificial Sequence
  Synthetic
gugagauucugaagcaa

SEQ ID NO: 703889 - RNA, 17 nt, Artificial Sequence
  Synthetic
gagaggggaauaagcaa

SEQ ID NO: 703890 - RNA, 17 nt, Artificial Sequence
  Synthetic
gagugagauguaagcaa

SEQ ID NO: 703891 - RNA, 17 nt, Artificial Sequence
  Synthetic
ggcagguagaacagcaa

SEQ ID NO: 703892 - RNA, 17 nt, Artificial Sequence
  Synthetic
guacuccagggcagcaa

SEQ ID NO: 703893 - RNA, 17 nt, Artificial Sequence
  Synthetic
guccugaguugcagcaa

SEQ ID NO: 703894 - RNA, 17 nt, Artificial Sequence
  Synthetic
gauggggaaaagagcaa

SEQ ID NO: 703895 - RNA, 17 nt, Artificial Sequence
  Synthetic
ggaggcacagagagcaa

SEQ ID NO: 703896 - RNA, 17 nt, Artificial Sequence
  Synthetic
gcuggaacugagagcaa

SEQ ID NO: 703897 - RNA, 17 nt, Artificial Sequence
  Synthetic
ggagaagugccgagcaa

SEQ ID NO: 703898 - RNA, 17 nt, Artificial Sequence
  Synthetic
ggagaagugcugagcaa

SEQ ID NO: 703899 - RNA, 17 nt, Artificial Sequence
  Synthetic
gcguccaugaauagcaa

SEQ ID NO: 703900 - RNA, 17 nt, Artificial Sequence
  Synthetic
ggaaaauuaaguagcaa

SEQ ID NO: 703901 - RNA, 17 nt, Artificial Sequence
  Synthetic
gaggaaaacuuuagcaa

SEQ ID NO: 703902 - RNA, 17 nt, Artificial Sequence
  Synthetic
ggaaaccauuuuagcaa

SEQ ID NO: 703903 - RNA, 17 nt, Artificial Sequence
  Synthetic
gcuugggccaagcgcaa

SEQ ID NO: 703904 - RNA, 17 nt, Artificial Sequence
  Synthetic
guuaaucaccaaggcaa

SEQ ID NO: 703905 - RNA, 17 nt, Artificial Sequence
  Synthetic
gggucccuaacaggcaa

SEQ ID NO: 703906 - RNA, 17 nt, Artificial Sequence
  Synthetic
gcuauacuacgaggcaa

SEQ ID NO: 703907 - RNA, 17 nt, Artificial Sequence
  Synthetic
gugccaugaugaggcaa

SEQ ID NO: 703908 - RNA, 17 nt, Artificial Sequence
  Synthetic
gcuuguugaauaggcaa

SEQ ID NO: 703909 - RNA, 17 nt, Artificial Sequence
  Synthetic
ggugcaaguauaggcaa

SEQ ID NO: 703910 - RNA, 17 nt, Artificial Sequence
  Synthetic
guuggagaaguaggcaa

SEQ ID NO: 703911 - RNA, 17 nt, Artificial Sequence
  Synthetic
gggaaucaaaagggcaa

SEQ ID NO: 703912 - RNA, 17 nt, Artificial Sequence
  Synthetic
gucuaagaacagggcaa

SEQ ID NO: 703913 - RNA, 17 nt, Artificial Sequence
  Synthetic
gauuugacucagggcaa

SEQ ID NO: 703914 - RNA, 17 nt, Artificial Sequence
  Synthetic
ggucuucaagggggcaa

SEQ ID NO: 703915 - RNA, 17 nt, Artificial Sequence
  Synthetic
gguaagucuuugggcaa

SEQ ID NO: 703916 - RNA, 17 nt, Artificial Sequence
  Synthetic
gaaauaccauauggcaa

SEQ ID NO: 703917 - RNA, 17 nt, Artificial Sequence
  Synthetic
guugaccauaaaugcaa

SEQ ID NO: 703918 - RNA, 17 nt, Artificial Sequence
  Synthetic
gguagcacacaaugcaa

SEQ ID NO: 703919 - RNA, 17 nt, Artificial Sequence
  Synthetic
gauauagaggaaugcaa

SEQ ID NO: 703920 - RNA, 17 nt, Artificial Sequence
  Synthetic
ggagcagagccaugcaa

SEQ ID NO: 703921 - RNA, 17 nt, Artificial Sequence
  Synthetic
gugaacuacucaugcaa

SEQ ID NO: 703922 - RNA, 17 nt, Artificial Sequence
  Synthetic
ggacaguuuuuaugcaa

SEQ ID NO: 703923 - RNA, 17 nt, Artificial Sequence
  Synthetic
gucugaggacacugcaa

SEQ ID NO: 703924 - RNA, 17 nt, Artificial Sequence
  Synthetic
ggaggcagugacugcaa

SEQ ID NO: 703925 - RNA, 17 nt, Artificial Sequence
  Synthetic
gcucacucacccugcaa

SEQ ID NO: 703926 - RNA, 17 nt, Artificial Sequence
  Synthetic
ggauuuuaaaucugcaa

SEQ ID NO: 703927 - RNA, 17 nt, Artificial Sequence
  Synthetic
gcugagaggcucugcaa

SEQ ID NO: 703928 - RNA, 17 nt, Artificial Sequence
  Synthetic
ggauaauuccagugcaa

SEQ ID NO: 703929 - RNA, 17 nt, Artificial Sequence
  Synthetic
gcuggagugcagugcaa

SEQ ID NO: 703930 - RNA, 17 nt, Artificial Sequence
  Synthetic
ggucuuuugcagugcaa

SEQ ID NO: 703931 - RNA, 17 nt, Artificial Sequence
  Synthetic
gucaagucuuagugcaa

SEQ ID NO: 703932 - RNA, 17 nt, Artificial Sequence
  Synthetic
guuagaggauggugcaa

SEQ ID NO: 703933 - RNA, 17 nt, Artificial Sequence
  Synthetic
gagaccaauaugugcaa

SEQ ID NO: 703934 - RNA, 17 nt, Artificial Sequence
  Synthetic
ggugagaugcugugcaa

SEQ ID NO: 703935 - RNA, 17 nt, Artificial Sequence
  Synthetic
gucaugaccuugugcaa

SEQ ID NO: 703936 - RNA, 17 nt, Artificial Sequence
  Synthetic
gcuccuuccaauugcaa

SEQ ID NO: 703937 - RNA, 17 nt, Artificial Sequence
  Synthetic
gauaaaggauauugcaa

SEQ ID NO: 703938 - RNA, 17 nt, Artificial Sequence
  Synthetic
gaguugguaacuugcaa

SEQ ID NO: 703939 - RNA, 17 nt, Artificial Sequence
  Synthetic
gagaacagcauuugcaa

SEQ ID NO: 703940 - RNA, 17 nt, Artificial Sequence
  Synthetic
gaauaauauauuugcaa

SEQ ID NO: 703941 - RNA, 17 nt, Artificial Sequence
  Synthetic
gcacagaaaaaaaucaa

SEQ ID NO: 703942 - RNA, 17 nt, Artificial Sequence
  Synthetic
guuucacuaaaaaucaa

SEQ ID NO: 703943 - RNA, 17 nt, Artificial Sequence
  Synthetic
gccuuuuuuaaaaucaa

SEQ ID NO: 703944 - RNA, 17 nt, Artificial Sequence
  Synthetic
gguaaccugggaaucaa

SEQ ID NO: 703945 - RNA, 17 nt, Artificial Sequence
  Synthetic
gaacacacaguaaucaa

SEQ ID NO: 703946 - RNA, 17 nt, Artificial Sequence
  Synthetic
gcaugagaaaacaucaa

SEQ ID NO: 703947 - RNA, 17 nt, Artificial Sequence
  Synthetic
gacagaaauaacaucaa

SEQ ID NO: 703948 - RNA, 17 nt, Artificial Sequence
  Synthetic
gcagaaucaaccaucaa

SEQ ID NO: 703949 - RNA, 17 nt, Artificial Sequence
  Synthetic
gaaaacaaaaagaucaa

SEQ ID NO: 703950 - RNA, 17 nt, Artificial Sequence
  Synthetic
gcgaaguccaagaucaa

SEQ ID NO: 703951 - RNA, 17 nt, Artificial Sequence
  Synthetic
gaggagagagagaucaa

SEQ ID NO: 703952 - RNA, 17 nt, Artificial Sequence
  Synthetic
guauucucugagaucaa

SEQ ID NO: 703953 - RNA, 17 nt, Artificial Sequence
  Synthetic
gaaaagcaaaauaucaa

SEQ ID NO: 703954 - RNA, 17 nt, Artificial Sequence
  Synthetic
guacauaggaauaucaa

SEQ ID NO: 703955 - RNA, 17 nt, Artificial Sequence
  Synthetic
gauacuaucucuaucaa

SEQ ID NO: 703956 - RNA, 17 nt, Artificial Sequence
  Synthetic
gaaaauaugucuaucaa

SEQ ID NO: 703957 - RNA, 17 nt, Artificial Sequence
  Synthetic
gauuuaugacuuaucaa

SEQ ID NO: 703958 - RNA, 17 nt, Artificial Sequence
  Synthetic
gcauauuguuuuaucaa

SEQ ID NO: 703959 - RNA, 17 nt, Artificial Sequence
  Synthetic
ggaacagugccacucaa

SEQ ID NO: 703960 - RNA, 17 nt, Artificial Sequence
  Synthetic
gaguaucugggacucaa

SEQ ID NO: 703961 - RNA, 17 nt, Artificial Sequence
  Synthetic
gagugcauaugacucaa

SEQ ID NO: 703962 - RNA, 17 nt, Artificial Sequence
  Synthetic
gcucugaacugacucaa

SEQ ID NO: 703963 - RNA, 17 nt, Artificial Sequence
  Synthetic
gugcucucuuuacucaa

SEQ ID NO: 703964 - RNA, 17 nt, Artificial Sequence
  Synthetic
gccuguggcaaccucaa

SEQ ID NO: 703965 - RNA, 17 nt, Artificial Sequence
  Synthetic
gugcuucuggaccucaa

SEQ ID NO: 703966 - RNA, 17 nt, Artificial Sequence
  Synthetic
ggucgaguuacccucaa

SEQ ID NO: 703967 - RNA, 17 nt, Artificial Sequence
  Synthetic
gcuacuuuuacccucaa

SEQ ID NO: 703968 - RNA, 17 nt, Artificial Sequence
  Synthetic
ggauguguuccccucaa

SEQ ID NO: 703969 - RNA, 17 nt, Artificial Sequence
  Synthetic
gugugaucucagcucaa

SEQ ID NO: 703970 - RNA, 17 nt, Artificial Sequence
  Synthetic
ggucucagugggcucaa

SEQ ID NO: 703971 - RNA, 17 nt, Artificial Sequence
  Synthetic
ggcgaguuguugcucaa

SEQ ID NO: 703972 - RNA, 17 nt, Artificial Sequence
  Synthetic
gcaggaauaaaucucaa

SEQ ID NO: 703973 - RNA, 17 nt, Artificial Sequence
  Synthetic
ggaaguugcaaucucaa

SEQ ID NO: 703974 - RNA, 17 nt, Artificial Sequence
  Synthetic
gagagcacugaucucaa

SEQ ID NO: 703975 - RNA, 17 nt, Artificial Sequence
  Synthetic
gucuugaccacucucaa

SEQ ID NO: 703976 - RNA, 17 nt, Artificial Sequence
  Synthetic
gaaugugaaccucucaa

SEQ ID NO: 703977 - RNA, 17 nt, Artificial Sequence
  Synthetic
guagucucugcucucaa

SEQ ID NO: 703978 - RNA, 17 nt, Artificial Sequence
  Synthetic
gaaaguuuccuucucaa

SEQ ID NO: 703979 - RNA, 17 nt, Artificial Sequence
  Synthetic
guuugaagauuucucaa

SEQ ID NO: 703980 - RNA, 17 nt, Artificial Sequence
  Synthetic
gaaagcagaaaagucaa

SEQ ID NO: 703981 - RNA, 17 nt, Artificial Sequence
  Synthetic
gccaagcccaaagucaa

SEQ ID NO: 703982 - RNA, 17 nt, Artificial Sequence
  Synthetic
gucaagcccaaagucaa

SEQ ID NO: 703983 - RNA, 17 nt, Artificial Sequence
  Synthetic
gaaaguuuucaagucaa

SEQ ID NO: 703984 - RNA, 17 nt, Artificial Sequence
  Synthetic
gcaaccaaggaagucaa

SEQ ID NO: 703985 - RNA, 17 nt, Artificial Sequence
  Synthetic
gugagacacagagucaa

SEQ ID NO: 703986 - RNA, 17 nt, Artificial Sequence
  Synthetic
gugagaaauggagucaa

SEQ ID NO: 703987 - RNA, 17 nt, Artificial Sequence
  Synthetic
guagaagguugagucaa

SEQ ID NO: 703988 - RNA, 17 nt, Artificial Sequence
  Synthetic
ggauggagaauagucaa

SEQ ID NO: 703989 - RNA, 17 nt, Artificial Sequence
  Synthetic
gugagacauguagucaa

SEQ ID NO: 703990 - RNA, 17 nt, Artificial Sequence
  Synthetic
guacaguugaaggucaa

SEQ ID NO: 703991 - RNA, 17 nt, Artificial Sequence
  Synthetic
gaaaauucugaggucaa

SEQ ID NO: 703992 - RNA, 17 nt, Artificial Sequence
  Synthetic
gccagaagaagggucaa

SEQ ID NO: 703993 - RNA, 17 nt, Artificial Sequence
  Synthetic
gauuucuuaaaugucaa

SEQ ID NO: 703994 - RNA, 17 nt, Artificial Sequence
  Synthetic
guauuuauucaugucaa

SEQ ID NO: 703995 - RNA, 17 nt, Artificial Sequence
  Synthetic
guagguguauaugucaa

SEQ ID NO: 703996 - RNA, 17 nt, Artificial Sequence
  Synthetic
gcaggaagcuaugucaa

SEQ ID NO: 703997 - RNA, 17 nt, Artificial Sequence
  Synthetic
ggaaggagaccugucaa

SEQ ID NO: 703998 - RNA, 17 nt, Artificial Sequence
  Synthetic
guguacaccauugucaa

SEQ ID NO: 703999 - RNA, 17 nt, Artificial Sequence
  Synthetic
ggggagaggauugucaa

SEQ ID NO: 704000 - RNA, 17 nt, Artificial Sequence
  Synthetic
gucaggucacuugucaa

SEQ ID NO: 704001 - RNA, 17 nt, Artificial Sequence
  Synthetic
gaaacugaagaauucaa

SEQ ID NO: 704002 - RNA, 17 nt, Artificial Sequence
  Synthetic
guaccaagagaauucaa

SEQ ID NO: 704003 - RNA, 17 nt, Artificial Sequence
  Synthetic
gccucuccuacauucaa

SEQ ID NO: 704004 - RNA, 17 nt, Artificial Sequence
  Synthetic
ggagaccauagauucaa

SEQ ID NO: 704005 - RNA, 17 nt, Artificial Sequence
  Synthetic
ggauuugauauauucaa

SEQ ID NO: 704006 - RNA, 17 nt, Artificial Sequence
  Synthetic
guauuucuucuauucaa

SEQ ID NO: 704007 - RNA, 17 nt, Artificial Sequence
  Synthetic
gagacagaguuauucaa

SEQ ID NO: 704008 - RNA, 17 nt, Artificial Sequence
  Synthetic
guguggcaggucuucaa

SEQ ID NO: 704009 - RNA, 17 nt, Artificial Sequence
  Synthetic
ggaucucucaaguucaa

SEQ ID NO: 704010 - RNA, 17 nt, Artificial Sequence
  Synthetic
gccauuccugaguucaa

SEQ ID NO: 704011 - RNA, 17 nt, Artificial Sequence
  Synthetic
guuugcucaagguucaa

SEQ ID NO: 704012 - RNA, 17 nt, Artificial Sequence
  Synthetic
ggccucuaaauguucaa

SEQ ID NO: 704013 - RNA, 17 nt, Artificial Sequence
  Synthetic
gguuugaaaaauuucaa

SEQ ID NO: 704014 - RNA, 17 nt, Artificial Sequence
  Synthetic
guauaguaaaauuucaa

SEQ ID NO: 704015 - RNA, 17 nt, Artificial Sequence
  Synthetic
gggcaauauaauuucaa

SEQ ID NO: 704016 - RNA, 17 nt, Artificial Sequence
  Synthetic
gggccccaugcuuucaa

SEQ ID NO: 704017 - RNA, 17 nt, Artificial Sequence
  Synthetic
guuaguuauucuuucaa

SEQ ID NO: 704018 - RNA, 17 nt, Artificial Sequence
  Synthetic
gagcucugguguuucaa

SEQ ID NO: 704019 - RNA, 17 nt, Artificial Sequence
  Synthetic
gcucaugauuguuucaa

SEQ ID NO: 704020 - RNA, 17 nt, Artificial Sequence
  Synthetic
gaaauguuaauuuucaa

SEQ ID NO: 704021 - RNA, 17 nt, Artificial Sequence
  Synthetic
gguccagaaguuuucaa

SEQ ID NO: 704022 - RNA, 17 nt, Artificial Sequence
  Synthetic
guuccuaaguuuuucaa

SEQ ID NO: 704023 - RNA, 17 nt, Artificial Sequence
  Synthetic
gauacacuaaaaaagaa

SEQ ID NO: 704024 - RNA, 17 nt, Artificial Sequence
  Synthetic
ggaaaagacaaaaagaa

SEQ ID NO: 704025 - RNA, 17 nt, Artificial Sequence
  Synthetic
guuucauacaaaaagaa

SEQ ID NO: 704026 - RNA, 17 nt, Artificial Sequence
  Synthetic
gggacuggcaaaaagaa

SEQ ID NO: 704027 - RNA, 17 nt, Artificial Sequence
  Synthetic
ggaagguggaaaaagaa

SEQ ID NO: 704028 - RNA, 17 nt, Artificial Sequence
  Synthetic
guuaauaauaaaaagaa

SEQ ID NO: 704029 - RNA, 17 nt, Artificial Sequence
  Synthetic
gagaaaagacaaaagaa

SEQ ID NO: 704030 - RNA, 17 nt, Artificial Sequence
  Synthetic
gagaggaagacaaagaa

SEQ ID NO: 704031 - RNA, 17 nt, Artificial Sequence
  Synthetic
gguauauacccaaagaa

SEQ ID NO: 704032 - RNA, 17 nt, Artificial Sequence
  Synthetic
gagagaaggucaaagaa

SEQ ID NO: 704033 - RNA, 17 nt, Artificial Sequence
  Synthetic
guuacuguuucaaagaa

SEQ ID NO: 704034 - RNA, 17 nt, Artificial Sequence
  Synthetic
gucuccuggagaaagaa

SEQ ID NO: 704035 - RNA, 17 nt, Artificial Sequence
  Synthetic
gagagagguagaaagaa

SEQ ID NO: 704036 - RNA, 17 nt, Artificial Sequence
  Synthetic
gcuuuuuuuagaaagaa

SEQ ID NO: 704037 - RNA, 17 nt, Artificial Sequence
  Synthetic
gaggagccuggaaagaa

SEQ ID NO: 704038 - RNA, 17 nt, Artificial Sequence
  Synthetic
gggcaucucugaaagaa

SEQ ID NO: 704039 - RNA, 17 nt, Artificial Sequence
  Synthetic
gggcaauuuauaaagaa

SEQ ID NO: 704040 - RNA, 17 nt, Artificial Sequence
  Synthetic
gggaauaauaacaagaa

SEQ ID NO: 704041 - RNA, 17 nt, Artificial Sequence
  Synthetic
gaagucucacacaagaa

SEQ ID NO: 704042 - RNA, 17 nt, Artificial Sequence
  Synthetic
gaucugaaugacaagaa

SEQ ID NO: 704043 - RNA, 17 nt, Artificial Sequence
  Synthetic
gaaauugaguacaagaa

SEQ ID NO: 704044 - RNA, 17 nt, Artificial Sequence
  Synthetic
gacccuggcagcaagaa

SEQ ID NO: 704045 - RNA, 17 nt, Artificial Sequence
  Synthetic
guugugaggcucaagaa

SEQ ID NO: 704046 - RNA, 17 nt, Artificial Sequence
  Synthetic
gugaaaaaaaagaagaa

SEQ ID NO: 704047 - RNA, 17 nt, Artificial Sequence
  Synthetic
gaguggaagaagaagaa

SEQ ID NO: 704048 - RNA, 17 nt, Artificial Sequence
  Synthetic
guauagaaugagaagaa

SEQ ID NO: 704049 - RNA, 17 nt, Artificial Sequence
  Synthetic
gaaaagagugagaagaa

SEQ ID NO: 704050 - RNA, 17 nt, Artificial Sequence
  Synthetic
gcgaucaacuggaagaa

SEQ ID NO: 704051 - RNA, 17 nt, Artificial Sequence
  Synthetic
gcaugaagguggaagaa

SEQ ID NO: 704052 - RNA, 17 nt, Artificial Sequence
  Synthetic
gauccugaaaugaagaa

SEQ ID NO: 704053 - RNA, 17 nt, Artificial Sequence
  Synthetic
gggucucaacugaagaa

SEQ ID NO: 704054 - RNA, 17 nt, Artificial Sequence
  Synthetic
ggugagguugugaagaa

SEQ ID NO: 704055 - RNA, 17 nt, Artificial Sequence
  Synthetic
ggucaucaacauaagaa

SEQ ID NO: 704056 - RNA, 17 nt, Artificial Sequence
  Synthetic
guuuucuugcauaagaa

SEQ ID NO: 704057 - RNA, 17 nt, Artificial Sequence
  Synthetic
gggacagcuccuaagaa

SEQ ID NO: 704058 - RNA, 17 nt, Artificial Sequence
  Synthetic
guaggcuguccuaagaa

SEQ ID NO: 704059 - RNA, 17 nt, Artificial Sequence
  Synthetic
ggcacacaagcuaagaa

SEQ ID NO: 704060 - RNA, 17 nt, Artificial Sequence
  Synthetic
gauuuuuaaaguaagaa

SEQ ID NO: 704061 - RNA, 17 nt, Artificial Sequence
  Synthetic
gagaaaugaauuaagaa

SEQ ID NO: 704062 - RNA, 17 nt, Artificial Sequence
  Synthetic
gggaaugucuuuaagaa

SEQ ID NO: 704063 - RNA, 17 nt, Artificial Sequence
  Synthetic
gcugacugccaacagaa

SEQ ID NO: 704064 - RNA, 17 nt, Artificial Sequence
  Synthetic
gacagaauagaacagaa

SEQ ID NO: 704065 - RNA, 17 nt, Artificial Sequence
  Synthetic
gaugacuagacacagaa

SEQ ID NO: 704066 - RNA, 17 nt, Artificial Sequence
  Synthetic
guagaaagauuacagaa

SEQ ID NO: 704067 - RNA, 17 nt, Artificial Sequence
  Synthetic
gguacaugguaccagaa

SEQ ID NO: 704068 - RNA, 17 nt, Artificial Sequence
  Synthetic
gucuuaguaacccagaa

SEQ ID NO: 704069 - RNA, 17 nt, Artificial Sequence
  Synthetic
gagaaagagacccagaa

SEQ ID NO: 704070 - RNA, 17 nt, Artificial Sequence
  Synthetic
gcaauaaagagccagaa

SEQ ID NO: 704071 - RNA, 17 nt, Artificial Sequence
  Synthetic
gggacugcuugccagaa

SEQ ID NO: 704072 - RNA, 17 nt, Artificial Sequence
  Synthetic
gaacugugguuccagaa

SEQ ID NO: 704073 - RNA, 17 nt, Artificial Sequence
  Synthetic
gauuuuaaaaagcagaa

SEQ ID NO: 704074 - RNA, 17 nt, Artificial Sequence
  Synthetic
gcacauagauagcagaa

SEQ ID NO: 704075 - RNA, 17 nt, Artificial Sequence
  Synthetic
gacaaaaccaggcagaa

SEQ ID NO: 704076 - RNA, 17 nt, Artificial Sequence
  Synthetic
guccaaggacugcagaa

SEQ ID NO: 704077 - RNA, 17 nt, Artificial Sequence
  Synthetic
gggacacacgugcagaa

SEQ ID NO: 704078 - RNA, 17 nt, Artificial Sequence
  Synthetic
gauuugcauaaucagaa

SEQ ID NO: 704079 - RNA, 17 nt, Artificial Sequence
  Synthetic
guugggagucaucagaa

SEQ ID NO: 704080 - RNA, 17 nt, Artificial Sequence
  Synthetic
gaacacuguucucagaa

SEQ ID NO: 704081 - RNA, 17 nt, Artificial Sequence
  Synthetic
guaaaugaccuucagaa

SEQ ID NO: 704082 - RNA, 17 nt, Artificial Sequence
  Synthetic
ggagugcugcuucagaa

SEQ ID NO: 704083 - RNA, 17 nt, Artificial Sequence
  Synthetic
gcuagagccaaagagaa

SEQ ID NO: 704084 - RNA, 17 nt, Artificial Sequence
  Synthetic
gucugauugaaagagaa

SEQ ID NO: 704085 - RNA, 17 nt, Artificial Sequence
  Synthetic
ggcuggagguaagagaa

SEQ ID NO: 704086 - RNA, 17 nt, Artificial Sequence
  Synthetic
gggaauucuuaagagaa

SEQ ID NO: 704087 - RNA, 17 nt, Artificial Sequence
  Synthetic
gaacggaaagcagagaa

SEQ ID NO: 704088 - RNA, 17 nt, Artificial Sequence
  Synthetic
gacaugaccgcagagaa

SEQ ID NO: 704089 - RNA, 17 nt, Artificial Sequence
  Synthetic
gacucaaaaagagagaa

SEQ ID NO: 704090 - RNA, 17 nt, Artificial Sequence
  Synthetic
gaauagacaagagagaa

SEQ ID NO: 704091 - RNA, 17 nt, Artificial Sequence
  Synthetic
gcgaugggaagagagaa

SEQ ID NO: 704092 - RNA, 17 nt, Artificial Sequence
  Synthetic
ggggcagccagagagaa

SEQ ID NO: 704093 - RNA, 17 nt, Artificial Sequence
  Synthetic
gaaauguccagagagaa

SEQ ID NO: 704094 - RNA, 17 nt, Artificial Sequence
  Synthetic
gaugggaagagagagaa

SEQ ID NO: 704095 - RNA, 17 nt, Artificial Sequence
  Synthetic
gguagacaaggagagaa

SEQ ID NO: 704096 - RNA, 17 nt, Artificial Sequence
  Synthetic
gaauugggaugagagaa

SEQ ID NO: 704097 - RNA, 17 nt, Artificial Sequence
  Synthetic
gcuuugaagauagagaa

SEQ ID NO: 704098 - RNA, 17 nt, Artificial Sequence
  Synthetic
gacucaacuuucgagaa

SEQ ID NO: 704099 - RNA, 17 nt, Artificial Sequence
  Synthetic
guauuucauaaggagaa

SEQ ID NO: 704100 - RNA, 17 nt, Artificial Sequence
  Synthetic
gaaggacagagggagaa

SEQ ID NO: 704101 - RNA, 17 nt, Artificial Sequence
  Synthetic
ggagacaggagggagaa

SEQ ID NO: 704102 - RNA, 17 nt, Artificial Sequence
  Synthetic
gaaagugauggggagaa

SEQ ID NO: 704103 - RNA, 17 nt, Artificial Sequence
  Synthetic
gaaauaugacuggagaa

SEQ ID NO: 704104 - RNA, 17 nt, Artificial Sequence
  Synthetic
gcuuccuggcuggagaa

SEQ ID NO: 704105 - RNA, 17 nt, Artificial Sequence
  Synthetic
gaaagugauguggagaa

SEQ ID NO: 704106 - RNA, 17 nt, Artificial Sequence
  Synthetic
ggauuauuaaaugagaa

SEQ ID NO: 704107 - RNA, 17 nt, Artificial Sequence
  Synthetic
gcuuuuccccaugagaa

SEQ ID NO: 704108 - RNA, 17 nt, Artificial Sequence
  Synthetic
guauauuuaccugagaa

SEQ ID NO: 704109 - RNA, 17 nt, Artificial Sequence
  Synthetic
gaaucuagaauugagaa

SEQ ID NO: 704110 - RNA, 17 nt, Artificial Sequence
  Synthetic
guugugggacuugagaa

SEQ ID NO: 704111 - RNA, 17 nt, Artificial Sequence
  Synthetic
guaucuuuaaaauagaa

SEQ ID NO: 704112 - RNA, 17 nt, Artificial Sequence
  Synthetic
gagaauagacaauagaa

SEQ ID NO: 704113 - RNA, 17 nt, Artificial Sequence
  Synthetic
gaacagucaagcuagaa

SEQ ID NO: 704114 - RNA, 17 nt, Artificial Sequence
  Synthetic
gccuuguggaaguagaa

SEQ ID NO: 704115 - RNA, 17 nt, Artificial Sequence
  Synthetic
ggacauagagaguagaa

SEQ ID NO: 704116 - RNA, 17 nt, Artificial Sequence
  Synthetic
gaagaagaugaguagaa

SEQ ID NO: 704117 - RNA, 17 nt, Artificial Sequence
  Synthetic
gaaagaaaauaguagaa

SEQ ID NO: 704118 - RNA, 17 nt, Artificial Sequence
  Synthetic
gaaaagaagauguagaa

SEQ ID NO: 704119 - RNA, 17 nt, Artificial Sequence
  Synthetic
guucuguucuuguagaa

SEQ ID NO: 704120 - RNA, 17 nt, Artificial Sequence
  Synthetic
guuaaacacaauuagaa

SEQ ID NO: 704121 - RNA, 17 nt, Artificial Sequence
  Synthetic
gcaaaugcugcuuagaa

SEQ ID NO: 704122 - RNA, 17 nt, Artificial Sequence
  Synthetic
guacauaauaguuagaa

SEQ ID NO: 704123 - RNA, 17 nt, Artificial Sequence
  Synthetic
gcaagcagauguuagaa

SEQ ID NO: 704124 - RNA, 17 nt, Artificial Sequence
  Synthetic
guucaagaaaauacgaa

SEQ ID NO: 704125 - RNA, 17 nt, Artificial Sequence
  Synthetic
gaauuaggcacuccgaa

SEQ ID NO: 704126 - RNA, 17 nt, Artificial Sequence
  Synthetic
gugagcauaaagucgaa

SEQ ID NO: 704127 - RNA, 17 nt, Artificial Sequence
  Synthetic
ggaagaaagaaaaggaa

SEQ ID NO: 704128 - RNA, 17 nt, Artificial Sequence
  Synthetic
gucuuugggcaaaggaa

SEQ ID NO: 704129 - RNA, 17 nt, Artificial Sequence
  Synthetic
gaaacaaaagaaaggaa

SEQ ID NO: 704130 - RNA, 17 nt, Artificial Sequence
  Synthetic
ggcuagugagaaaggaa

SEQ ID NO: 704131 - RNA, 17 nt, Artificial Sequence
  Synthetic
gaacagaaggaaaggaa

SEQ ID NO: 704132 - RNA, 17 nt, Artificial Sequence
  Synthetic
gguaauuuauaaaggaa

SEQ ID NO: 704133 - RNA, 17 nt, Artificial Sequence
  Synthetic
gacagcuuuuaaaggaa

SEQ ID NO: 704134 - RNA, 17 nt, Artificial Sequence
  Synthetic
gcaaggugggcaaggaa

SEQ ID NO: 704135 - RNA, 17 nt, Artificial Sequence
  Synthetic
ggaaagaaaggaaggaa

SEQ ID NO: 704136 - RNA, 17 nt, Artificial Sequence
  Synthetic
gaagugaacugaaggaa

SEQ ID NO: 704137 - RNA, 17 nt, Artificial Sequence
  Synthetic
gagguggaaauaaggaa

SEQ ID NO: 704138 - RNA, 17 nt, Artificial Sequence
  Synthetic
ggggaagagauaaggaa

SEQ ID NO: 704139 - RNA, 17 nt, Artificial Sequence
  Synthetic
guauaugguauaaggaa

SEQ ID NO: 704140 - RNA, 17 nt, Artificial Sequence
  Synthetic
guauaagggguaaggaa

SEQ ID NO: 704141 - RNA, 17 nt, Artificial Sequence
  Synthetic
guauaagguguaaggaa

SEQ ID NO: 704142 - RNA, 17 nt, Artificial Sequence
  Synthetic
gguuaaugaaacaggaa

SEQ ID NO: 704143 - RNA, 17 nt, Artificial Sequence
  Synthetic
gguagaaagaacaggaa

SEQ ID NO: 704144 - RNA, 17 nt, Artificial Sequence
  Synthetic
gcuauauaacacaggaa

SEQ ID NO: 704145 - RNA, 17 nt, Artificial Sequence
  Synthetic
gcaaacuaacacaggaa

SEQ ID NO: 704146 - RNA, 17 nt, Artificial Sequence
  Synthetic
acacauggacacaggaa

SEQ ID NO: 704147 - RNA, 17 nt, Artificial Sequence
  Synthetic
ggcaucuugcacaggaa

SEQ ID NO: 704148 - RNA, 17 nt, Artificial Sequence
  Synthetic
guggagaucaccaggaa

SEQ ID NO: 704149 - RNA, 17 nt, Artificial Sequence
  Synthetic
gugaaagcagccaggaa

SEQ ID NO: 704150 - RNA, 17 nt, Artificial Sequence
  Synthetic
gcauugaauaucaggaa

SEQ ID NO: 704151 - RNA, 17 nt, Artificial Sequence
  Synthetic
guaaaguaacucaggaa

SEQ ID NO: 704152 - RNA, 17 nt, Artificial Sequence
  Synthetic
gugaaguaacucaggaa

SEQ ID NO: 704153 - RNA, 17 nt, Artificial Sequence
  Synthetic
gucagauugcucaggaa

SEQ ID NO: 704154 - RNA, 17 nt, Artificial Sequence
  Synthetic
gugaaguaauucaggaa

SEQ ID NO: 704155 - RNA, 17 nt, Artificial Sequence
  Synthetic
ggacauaguuucaggaa

SEQ ID NO: 704156 - RNA, 17 nt, Artificial Sequence
  Synthetic
ggguauaguuucaggaa

SEQ ID NO: 704157 - RNA, 17 nt, Artificial Sequence
  Synthetic
ggaaaacuaaagaggaa

SEQ ID NO: 704158 - RNA, 17 nt, Artificial Sequence
  Synthetic
gcacauacacagaggaa

SEQ ID NO: 704159 - RNA, 17 nt, Artificial Sequence
  Synthetic
gaguagggagagaggaa

SEQ ID NO: 704160 - RNA, 17 nt, Artificial Sequence
  Synthetic
gacacuggcuagaggaa

SEQ ID NO: 704161 - RNA, 17 nt, Artificial Sequence
  Synthetic
ggaaugauaaggaggaa

SEQ ID NO: 704162 - RNA, 17 nt, Artificial Sequence
  Synthetic
gaaggaaggaggaggaa

SEQ ID NO: 704163 - RNA, 17 nt, Artificial Sequence
  Synthetic
gaggaaggagggaggaa

SEQ ID NO: 704164 - RNA, 17 nt, Artificial Sequence
  Synthetic
gugcuuuguaugaggaa

SEQ ID NO: 704165 - RNA, 17 nt, Artificial Sequence
  Synthetic
ggagaaguacugaggaa

SEQ ID NO: 704166 - RNA, 17 nt, Artificial Sequence
  Synthetic
gacugugcccugaggaa

SEQ ID NO: 704167 - RNA, 17 nt, Artificial Sequence
  Synthetic
gguggcaucuugaggaa

SEQ ID NO: 704168 - RNA, 17 nt, Artificial Sequence
  Synthetic
gcagagaaggauaggaa

SEQ ID NO: 704169 - RNA, 17 nt, Artificial Sequence
  Synthetic
gcaaugcagacuaggaa

SEQ ID NO: 704170 - RNA, 17 nt, Artificial Sequence
  Synthetic
guugguuuugcuaggaa

SEQ ID NO: 704171 - RNA, 17 nt, Artificial Sequence
  Synthetic
gaaacucacauuaggaa

SEQ ID NO: 704172 - RNA, 17 nt, Artificial Sequence
  Synthetic
gccuugugccuuaggaa

SEQ ID NO: 704173 - RNA, 17 nt, Artificial Sequence
  Synthetic
ggauaauucuuuaggaa

SEQ ID NO: 704174 - RNA, 17 nt, Artificial Sequence
  Synthetic
gggguggagggacggaa

SEQ ID NO: 704175 - RNA, 17 nt, Artificial Sequence
  Synthetic
gucugugccccccggaa

SEQ ID NO: 704176 - RNA, 17 nt, Artificial Sequence
  Synthetic
gcaggcuguucucggaa

SEQ ID NO: 704177 - RNA, 17 nt, Artificial Sequence
  Synthetic
gguugguagaaagggaa

SEQ ID NO: 704178 - RNA, 17 nt, Artificial Sequence
  Synthetic
gggagagggaaagggaa

SEQ ID NO: 704179 - RNA, 17 nt, Artificial Sequence
  Synthetic
guugccuuccaagggaa

SEQ ID NO: 704180 - RNA, 17 nt, Artificial Sequence
  Synthetic
gcaacccagcaagggaa

SEQ ID NO: 704181 - RNA, 17 nt, Artificial Sequence
  Synthetic
gagggaagggaagggaa

SEQ ID NO: 704182 - RNA, 17 nt, Artificial Sequence
  Synthetic
gaggggagggaagggaa

SEQ ID NO: 704183 - RNA, 17 nt, Artificial Sequence
  Synthetic
gagauguuggaagggaa

SEQ ID NO: 704184 - RNA, 17 nt, Artificial Sequence
  Synthetic
ggauauauagcagggaa

SEQ ID NO: 704185 - RNA, 17 nt, Artificial Sequence
  Synthetic
gccuuuuuaucagggaa

SEQ ID NO: 704186 - RNA, 17 nt, Artificial Sequence
  Synthetic
guucuagaaagagggaa

SEQ ID NO: 704187 - RNA, 17 nt, Artificial Sequence
  Synthetic
gagcugcucagagggaa

SEQ ID NO: 704188 - RNA, 17 nt, Artificial Sequence
  Synthetic
gggagagggagagggaa

SEQ ID NO: 704189 - RNA, 17 nt, Artificial Sequence
  Synthetic
ggaagcuggagagggaa

SEQ ID NO: 704190 - RNA, 17 nt, Artificial Sequence
  Synthetic
gaagagagaugagggaa

SEQ ID NO: 704191 - RNA, 17 nt, Artificial Sequence
  Synthetic
ggcccuguacuagggaa

SEQ ID NO: 704192 - RNA, 17 nt, Artificial Sequence
  Synthetic
gaaaguauucuagggaa

SEQ ID NO: 704193 - RNA, 17 nt, Artificial Sequence
  Synthetic
gucucaaaauuagggaa

SEQ ID NO: 704194 - RNA, 17 nt, Artificial Sequence
  Synthetic
gucauuuccuuagggaa

SEQ ID NO: 704195 - RNA, 17 nt, Artificial Sequence
  Synthetic
ggagaaagugacgggaa

SEQ ID NO: 704196 - RNA, 17 nt, Artificial Sequence
  Synthetic
gacuggacaaaggggaa

SEQ ID NO: 704197 - RNA, 17 nt, Artificial Sequence
  Synthetic
gacuaauagaaggggaa

SEQ ID NO: 704198 - RNA, 17 nt, Artificial Sequence
  Synthetic
guggagaggaaggggaa

SEQ ID NO: 704199 - RNA, 17 nt, Artificial Sequence
  Synthetic
ggauucacucaggggaa

SEQ ID NO: 704200 - RNA, 17 nt, Artificial Sequence
  Synthetic
gguagugguagggggaa

SEQ ID NO: 704201 - RNA, 17 nt, Artificial Sequence
  Synthetic
guuguggggugggggaa

SEQ ID NO: 704202 - RNA, 17 nt, Artificial Sequence
  Synthetic
gcugaggguugggggaa

SEQ ID NO: 704203 - RNA, 17 nt, Artificial Sequence
  Synthetic
gucaucagaauggggaa

SEQ ID NO: 704204 - RNA, 17 nt, Artificial Sequence
  Synthetic
gagggcugccuggggaa

SEQ ID NO: 704205 - RNA, 17 nt, Artificial Sequence
  Synthetic
ggccucccuaaugggaa

SEQ ID NO: 704206 - RNA, 17 nt, Artificial Sequence
  Synthetic
gggcugacugaugggaa

SEQ ID NO: 704207 - RNA, 17 nt, Artificial Sequence
  Synthetic
gaugucaucuaugggaa

SEQ ID NO: 704208 - RNA, 17 nt, Artificial Sequence
  Synthetic
gaauacacaacugggaa

SEQ ID NO: 704209 - RNA, 17 nt, Artificial Sequence
  Synthetic
gccuccggaagugggaa

SEQ ID NO: 704210 - RNA, 17 nt, Artificial Sequence
  Synthetic
guggcucucagugggaa

SEQ ID NO: 704211 - RNA, 17 nt, Artificial Sequence
  Synthetic
ggaugugugugugggaa

SEQ ID NO: 704212 - RNA, 17 nt, Artificial Sequence
  Synthetic
gggcaaagccuugggaa

SEQ ID NO: 704213 - RNA, 17 nt, Artificial Sequence
  Synthetic
gucaauacuuaauggaa

SEQ ID NO: 704214 - RNA, 17 nt, Artificial Sequence
  Synthetic
gcuaagaggacauggaa

SEQ ID NO: 704215 - RNA, 17 nt, Artificial Sequence
  Synthetic
gauacuucuccauggaa

SEQ ID NO: 704216 - RNA, 17 nt, Artificial Sequence
  Synthetic
gucauaugggcauggaa

SEQ ID NO: 704217 - RNA, 17 nt, Artificial Sequence
  Synthetic
gcucugauuaacuggaa

SEQ ID NO: 704218 - RNA, 17 nt, Artificial Sequence
  Synthetic
gagagaagacacuggaa

SEQ ID NO: 704219 - RNA, 17 nt, Artificial Sequence
  Synthetic
guucugagauacuggaa

SEQ ID NO: 704220 - RNA, 17 nt, Artificial Sequence
  Synthetic
gauaaagugaccuggaa

SEQ ID NO: 704221 - RNA, 17 nt, Artificial Sequence
  Synthetic
ggaacuagggccuggaa

SEQ ID NO: 704222 - RNA, 17 nt, Artificial Sequence
  Synthetic
gaacugagaagcuggaa

SEQ ID NO: 704223 - RNA, 17 nt, Artificial Sequence
  Synthetic
gcuuucucauucuggaa

SEQ ID NO: 704224 - RNA, 17 nt, Artificial Sequence
  Synthetic
ggaauaagaaaguggaa

SEQ ID NO: 704225 - RNA, 17 nt, Artificial Sequence
  Synthetic
gcuuccacaacguggaa

SEQ ID NO: 704226 - RNA, 17 nt, Artificial Sequence
  Synthetic
guuguauguagguggaa

SEQ ID NO: 704227 - RNA, 17 nt, Artificial Sequence
  Synthetic
guuaugugaggguggaa

SEQ ID NO: 704228 - RNA, 17 nt, Artificial Sequence
  Synthetic
gugaaaaaaauguggaa

SEQ ID NO: 704229 - RNA, 17 nt, Artificial Sequence
  Synthetic
gcuaggacaguguggaa

SEQ ID NO: 704230 - RNA, 17 nt, Artificial Sequence
  Synthetic
gaacccacauuguggaa

SEQ ID NO: 704231 - RNA, 17 nt, Artificial Sequence
  Synthetic
gcacaaccugauuggaa

SEQ ID NO: 704232 - RNA, 17 nt, Artificial Sequence
  Synthetic
gcagaauuauauuggaa

SEQ ID NO: 704233 - RNA, 17 nt, Artificial Sequence
  Synthetic
gaagaguaaacuuggaa

SEQ ID NO: 704234 - RNA, 17 nt, Artificial Sequence
  Synthetic
guugaucccacuuggaa

SEQ ID NO: 704235 - RNA, 17 nt, Artificial Sequence
  Synthetic
gguauaauagcuuggaa

SEQ ID NO: 704236 - RNA, 17 nt, Artificial Sequence
  Synthetic
gucuggcugucuuggaa

SEQ ID NO: 704237 - RNA, 17 nt, Artificial Sequence
  Synthetic
gauaugagauguuggaa

SEQ ID NO: 704238 - RNA, 17 nt, Artificial Sequence
  Synthetic
gaauuuugguuuuggaa

SEQ ID NO: 704239 - RNA, 17 nt, Artificial Sequence
  Synthetic
guccaucaacaaaugaa

SEQ ID NO: 704240 - RNA, 17 nt, Artificial Sequence
  Synthetic
gugcaguaugaaaugaa

SEQ ID NO: 704241 - RNA, 17 nt, Artificial Sequence
  Synthetic
guccaucaauaaaugaa

SEQ ID NO: 704242 - RNA, 17 nt, Artificial Sequence
  Synthetic
ggaaaaaaguaaaugaa

SEQ ID NO: 704243 - RNA, 17 nt, Artificial Sequence
  Synthetic
guccaucgaccaaugaa

SEQ ID NO: 704244 - RNA, 17 nt, Artificial Sequence
  Synthetic
gacuccagcugaaugaa

SEQ ID NO: 704245 - RNA, 17 nt, Artificial Sequence
  Synthetic
ggagccccuugaaugaa

SEQ ID NO: 704246 - RNA, 17 nt, Artificial Sequence
  Synthetic
gaaaaagugauaaugaa

SEQ ID NO: 704247 - RNA, 17 nt, Artificial Sequence
  Synthetic
gagcuaaauauaaugaa

SEQ ID NO: 704248 - RNA, 17 nt, Artificial Sequence
  Synthetic
gacaaauauauaaugaa

SEQ ID NO: 704249 - RNA, 17 nt, Artificial Sequence
  Synthetic
gcacugauuguaaugaa

SEQ ID NO: 704250 - RNA, 17 nt, Artificial Sequence
  Synthetic
guuggcucaaacaugaa

SEQ ID NO: 704251 - RNA, 17 nt, Artificial Sequence
  Synthetic
gauugccuaaacaugaa

SEQ ID NO: 704252 - RNA, 17 nt, Artificial Sequence
  Synthetic
ggagaugaagacaugaa

SEQ ID NO: 704253 - RNA, 17 nt, Artificial Sequence
  Synthetic
gucacaucuuacaugaa

SEQ ID NO: 704254 - RNA, 17 nt, Artificial Sequence
  Synthetic
gguaccaaauccaugaa

SEQ ID NO: 704255 - RNA, 17 nt, Artificial Sequence
  Synthetic
gaaaauagaugcaugaa

SEQ ID NO: 704256 - RNA, 17 nt, Artificial Sequence
  Synthetic
gcaucuuugugcaugaa

SEQ ID NO: 704257 - RNA, 17 nt, Artificial Sequence
  Synthetic
ggcucugccuucaugaa

SEQ ID NO: 704258 - RNA, 17 nt, Artificial Sequence
  Synthetic
guccaucaagagaugaa

SEQ ID NO: 704259 - RNA, 17 nt, Artificial Sequence
  Synthetic
guauccucagagaugaa

SEQ ID NO: 704260 - RNA, 17 nt, Artificial Sequence
  Synthetic
guccaucaguagaugaa

SEQ ID NO: 704261 - RNA, 17 nt, Artificial Sequence
  Synthetic
guuuucagaacgaugaa

SEQ ID NO: 704262 - RNA, 17 nt, Artificial Sequence
  Synthetic
gauuucagauugaugaa

SEQ ID NO: 704263 - RNA, 17 nt, Artificial Sequence
  Synthetic
gcuauuuaaaauaugaa

SEQ ID NO: 704264 - RNA, 17 nt, Artificial Sequence
  Synthetic
gacaguccauauaugaa

SEQ ID NO: 704265 - RNA, 17 nt, Artificial Sequence
  Synthetic
gugacuuuuauuaugaa

SEQ ID NO: 704266 - RNA, 17 nt, Artificial Sequence
  Synthetic
ggcucugcccuuaugaa

SEQ ID NO: 704267 - RNA, 17 nt, Artificial Sequence
  Synthetic
ggugaagguaaacugaa

SEQ ID NO: 704268 - RNA, 17 nt, Artificial Sequence
  Synthetic
gaaaagugguaacugaa

SEQ ID NO: 704269 - RNA, 17 nt, Artificial Sequence
  Synthetic
guuguauaaauacugaa

SEQ ID NO: 704270 - RNA, 17 nt, Artificial Sequence
  Synthetic
gccaauaucauacugaa

SEQ ID NO: 704271 - RNA, 17 nt, Artificial Sequence
  Synthetic
gccaguaucauacugaa

SEQ ID NO: 704272 - RNA, 17 nt, Artificial Sequence
  Synthetic
gccauuaucauacugaa

SEQ ID NO: 704273 - RNA, 17 nt, Artificial Sequence
  Synthetic
gaaauccaaaaccugaa

SEQ ID NO: 704274 - RNA, 17 nt, Artificial Sequence
  Synthetic
gaugaugacgcccugaa

SEQ ID NO: 704275 - RNA, 17 nt, Artificial Sequence
  Synthetic
gguuacaauucccugaa

SEQ ID NO: 704276 - RNA, 17 nt, Artificial Sequence
  Synthetic
guuaauuccauccugaa

SEQ ID NO: 704277 - RNA, 17 nt, Artificial Sequence
  Synthetic
gacaggugaaagcugaa

SEQ ID NO: 704278 - RNA, 17 nt, Artificial Sequence
  Synthetic
ggagaauggcagcugaa

SEQ ID NO: 704279 - RNA, 17 nt, Artificial Sequence
  Synthetic
gcugcugggaugcugaa

SEQ ID NO: 704280 - RNA, 17 nt, Artificial Sequence
  Synthetic
gcccagaugaugcugaa

SEQ ID NO: 704281 - RNA, 17 nt, Artificial Sequence
  Synthetic
guagaaagagaucugaa

SEQ ID NO: 704282 - RNA, 17 nt, Artificial Sequence
  Synthetic
gaguuauuagaucugaa

SEQ ID NO: 704283 - RNA, 17 nt, Artificial Sequence
  Synthetic
gauuuugaaacucugaa

SEQ ID NO: 704284 - RNA, 17 nt, Artificial Sequence
  Synthetic
gcaguggcaacucugaa

SEQ ID NO: 704285 - RNA, 17 nt, Artificial Sequence
  Synthetic
gaauuuuaauuucugaa

SEQ ID NO: 704286 - RNA, 17 nt, Artificial Sequence
  Synthetic
gagggagauuuucugaa

SEQ ID NO: 704287 - RNA, 17 nt, Artificial Sequence
  Synthetic
gauaaauacaaagugaa

SEQ ID NO: 704288 - RNA, 17 nt, Artificial Sequence
  Synthetic
guugcaaagaaagugaa

SEQ ID NO: 704289 - RNA, 17 nt, Artificial Sequence
  Synthetic
gggaacauuaaagugaa

SEQ ID NO: 704290 - RNA, 17 nt, Artificial Sequence
  Synthetic
guuacuucccaagugaa

SEQ ID NO: 704291 - RNA, 17 nt, Artificial Sequence
  Synthetic
guuagggucccagugaa

SEQ ID NO: 704292 - RNA, 17 nt, Artificial Sequence
  Synthetic
guggugaaagcagugaa

SEQ ID NO: 704293 - RNA, 17 nt, Artificial Sequence
  Synthetic
gcggagguugcagugaa

SEQ ID NO: 704294 - RNA, 17 nt, Artificial Sequence
  Synthetic
gagagagaaagagugaa

SEQ ID NO: 704295 - RNA, 17 nt, Artificial Sequence
  Synthetic
gaggaggauauagugaa

SEQ ID NO: 704296 - RNA, 17 nt, Artificial Sequence
  Synthetic
gaaggaaaauacgugaa

SEQ ID NO: 704297 - RNA, 17 nt, Artificial Sequence
  Synthetic
gaaaaugccaaggugaa

SEQ ID NO: 704298 - RNA, 17 nt, Artificial Sequence
  Synthetic
gucaagcagaaggugaa

SEQ ID NO: 704299 - RNA, 17 nt, Artificial Sequence
  Synthetic
ggcuuugauagggugaa

SEQ ID NO: 704300 - RNA, 17 nt, Artificial Sequence
  Synthetic
gcacacagaggggugaa

SEQ ID NO: 704301 - RNA, 17 nt, Artificial Sequence
  Synthetic
gaacacuugcuggugaa

SEQ ID NO: 704302 - RNA, 17 nt, Artificial Sequence
  Synthetic
gguauaauauuggugaa

SEQ ID NO: 704303 - RNA, 17 nt, Artificial Sequence
  Synthetic
gcuaauuaaaaugugaa

SEQ ID NO: 704304 - RNA, 17 nt, Artificial Sequence
  Synthetic
gccuuugcuauugugaa

SEQ ID NO: 704305 - RNA, 17 nt, Artificial Sequence
  Synthetic
guaaaaguggaauugaa

SEQ ID NO: 704306 - RNA, 17 nt, Artificial Sequence
  Synthetic
guaugcauuccauugaa

SEQ ID NO: 704307 - RNA, 17 nt, Artificial Sequence
  Synthetic
gucuuuguuucauugaa

SEQ ID NO: 704308 - RNA, 17 nt, Artificial Sequence
  Synthetic
gagguucugcacuugaa

SEQ ID NO: 704309 - RNA, 17 nt, Artificial Sequence
  Synthetic
gcuugaauaaccuugaa

SEQ ID NO: 704310 - RNA, 17 nt, Artificial Sequence
  Synthetic
ggaauagauuccuugaa

SEQ ID NO: 704311 - RNA, 17 nt, Artificial Sequence
  Synthetic
guacuuuaaugcuugaa

SEQ ID NO: 704312 - RNA, 17 nt, Artificial Sequence
  Synthetic
gacuguacacucuugaa

SEQ ID NO: 704313 - RNA, 17 nt, Artificial Sequence
  Synthetic
gugaauacauucuugaa

SEQ ID NO: 704314 - RNA, 17 nt, Artificial Sequence
  Synthetic
gguggauccuucuugaa

SEQ ID NO: 704315 - RNA, 17 nt, Artificial Sequence
  Synthetic
gugagcauaaaguugaa

SEQ ID NO: 704316 - RNA, 17 nt, Artificial Sequence
  Synthetic
ggacaggcuaaguugaa

SEQ ID NO: 704317 - RNA, 17 nt, Artificial Sequence
  Synthetic
ggcauugcuggguugaa

SEQ ID NO: 704318 - RNA, 17 nt, Artificial Sequence
  Synthetic
gagauugcuggguugaa

SEQ ID NO: 704319 - RNA, 17 nt, Artificial Sequence
  Synthetic
gaguaguaacuguugaa

SEQ ID NO: 704320 - RNA, 17 nt, Artificial Sequence
  Synthetic
gagcugcauguguugaa

SEQ ID NO: 704321 - RNA, 17 nt, Artificial Sequence
  Synthetic
gaaagaucuuuguugaa

SEQ ID NO: 704322 - RNA, 17 nt, Artificial Sequence
  Synthetic
guagggauaucuuugaa

SEQ ID NO: 704323 - RNA, 17 nt, Artificial Sequence
  Synthetic
guugauaaaaguuugaa

SEQ ID NO: 704324 - RNA, 17 nt, Artificial Sequence
  Synthetic
gucccaaggaguuugaa

SEQ ID NO: 704325 - RNA, 17 nt, Artificial Sequence
  Synthetic
ggaaaugucguuuugaa

SEQ ID NO: 704326 - RNA, 17 nt, Artificial Sequence
  Synthetic
guuuuucuuguuuugaa

SEQ ID NO: 704327 - RNA, 17 nt, Artificial Sequence
  Synthetic
guuuguagauuuuugaa

SEQ ID NO: 704328 - RNA, 17 nt, Artificial Sequence
  Synthetic
ggagcugguuuuuugaa

SEQ ID NO: 704329 - RNA, 17 nt, Artificial Sequence
  Synthetic
guaguuaauaaaaauaa

SEQ ID NO: 704330 - RNA, 17 nt, Artificial Sequence
  Synthetic
gugcauuaacaaaauaa

SEQ ID NO: 704331 - RNA, 17 nt, Artificial Sequence
  Synthetic
gaaauuggccaaaauaa

SEQ ID NO: 704332 - RNA, 17 nt, Artificial Sequence
  Synthetic
gauggaagagaaaauaa

SEQ ID NO: 704333 - RNA, 17 nt, Artificial Sequence
  Synthetic
gagcgauaugaaaauaa

SEQ ID NO: 704334 - RNA, 17 nt, Artificial Sequence
  Synthetic
gaauucuuuacaaauaa

SEQ ID NO: 704335 - RNA, 17 nt, Artificial Sequence
  Synthetic
gaggauagagcaaauaa

SEQ ID NO: 704336 - RNA, 17 nt, Artificial Sequence
  Synthetic
gguccucuggcaaauaa

SEQ ID NO: 704337 - RNA, 17 nt, Artificial Sequence
  Synthetic
gcaggaaaaagaaauaa

SEQ ID NO: 704338 - RNA, 17 nt, Artificial Sequence
  Synthetic
gcaagggaaagaaauaa

SEQ ID NO: 704339 - RNA, 17 nt, Artificial Sequence
  Synthetic
gacauuauaagaaauaa

SEQ ID NO: 704340 - RNA, 17 nt, Artificial Sequence
  Synthetic
gaaguuaugagaaauaa

SEQ ID NO: 704341 - RNA, 17 nt, Artificial Sequence
  Synthetic
gcaggagaaggaaauaa

SEQ ID NO: 704342 - RNA, 17 nt, Artificial Sequence
  Synthetic
guauuguagggaaauaa

SEQ ID NO: 704343 - RNA, 17 nt, Artificial Sequence
  Synthetic
guucuaaguggaaauaa

SEQ ID NO: 704344 - RNA, 17 nt, Artificial Sequence
  Synthetic
gcgcuccuuggaaauaa

SEQ ID NO: 704345 - RNA, 17 nt, Artificial Sequence
  Synthetic
gacacaucaauaaauaa

SEQ ID NO: 704346 - RNA, 17 nt, Artificial Sequence
  Synthetic
gcauguccuuuaaauaa

SEQ ID NO: 704347 - RNA, 17 nt, Artificial Sequence
  Synthetic
gaagcuuguuuaaauaa

SEQ ID NO: 704348 - RNA, 17 nt, Artificial Sequence
  Synthetic
gaaccuaugaacaauaa

SEQ ID NO: 704349 - RNA, 17 nt, Artificial Sequence
  Synthetic
gucauauguaacaauaa

SEQ ID NO: 704350 - RNA, 17 nt, Artificial Sequence
  Synthetic
guacaagguuacaauaa

SEQ ID NO: 704351 - RNA, 17 nt, Artificial Sequence
  Synthetic
ggguauauaaccaauaa

SEQ ID NO: 704352 - RNA, 17 nt, Artificial Sequence
  Synthetic
gucccaaugcccaauaa

SEQ ID NO: 704353 - RNA, 17 nt, Artificial Sequence
  Synthetic
ggguauaugcccaauaa

SEQ ID NO: 704354 - RNA, 17 nt, Artificial Sequence
  Synthetic
gggaagauagccaauaa

SEQ ID NO: 704355 - RNA, 17 nt, Artificial Sequence
  Synthetic
gcuuaguauuccaauaa

SEQ ID NO: 704356 - RNA, 17 nt, Artificial Sequence
  Synthetic
gaagagaaaagcaauaa

SEQ ID NO: 704357 - RNA, 17 nt, Artificial Sequence
  Synthetic
guuguuauuggcaauaa

SEQ ID NO: 704358 - RNA, 17 nt, Artificial Sequence
  Synthetic
ggcaggaaaaucaauaa

SEQ ID NO: 704359 - RNA, 17 nt, Artificial Sequence
  Synthetic
guaauaucugucaauaa

SEQ ID NO: 704360 - RNA, 17 nt, Artificial Sequence
  Synthetic
gcuuucacagagaauaa

SEQ ID NO: 704361 - RNA, 17 nt, Artificial Sequence
  Synthetic
gguguaauucugaauaa

SEQ ID NO: 704362 - RNA, 17 nt, Artificial Sequence
  Synthetic
ggaaagaucuugaauaa

SEQ ID NO: 704363 - RNA, 17 nt, Artificial Sequence
  Synthetic
ggggacauuuugaauaa

SEQ ID NO: 704364 - RNA, 17 nt, Artificial Sequence
  Synthetic
ggaaaauguaguaauaa

SEQ ID NO: 704365 - RNA, 17 nt, Artificial Sequence
  Synthetic
gauuaauucgguaauaa

SEQ ID NO: 704366 - RNA, 17 nt, Artificial Sequence
  Synthetic
ggugacagauuuaauaa

SEQ ID NO: 704367 - RNA, 17 nt, Artificial Sequence
  Synthetic
ggauauccagaacauaa

SEQ ID NO: 704368 - RNA, 17 nt, Artificial Sequence
  Synthetic
gaugaaugcauacauaa

SEQ ID NO: 704369 - RNA, 17 nt, Artificial Sequence
  Synthetic
ggcauccuuauacauaa

SEQ ID NO: 704370 - RNA, 17 nt, Artificial Sequence
  Synthetic
gaacuguaucuacauaa

SEQ ID NO: 704371 - RNA, 17 nt, Artificial Sequence
  Synthetic
gguauuacauuacauaa

SEQ ID NO: 704372 - RNA, 17 nt, Artificial Sequence
  Synthetic
gcugcagugagccauaa

SEQ ID NO: 704373 - RNA, 17 nt, Artificial Sequence
  Synthetic
gugcaguagcagcauaa

SEQ ID NO: 704374 - RNA, 17 nt, Artificial Sequence
  Synthetic
gacauacacuagcauaa

SEQ ID NO: 704375 - RNA, 17 nt, Artificial Sequence
  Synthetic
gggcuaauguagcauaa

SEQ ID NO: 704376 - RNA, 17 nt, Artificial Sequence
  Synthetic
guuaccacuuaucauaa

SEQ ID NO: 704377 - RNA, 17 nt, Artificial Sequence
  Synthetic
ggaaaaaaaugucauaa

SEQ ID NO: 704378 - RNA, 17 nt, Artificial Sequence
  Synthetic
gaugaauccauucauaa

SEQ ID NO: 704379 - RNA, 17 nt, Artificial Sequence
  Synthetic
gcugcaaauauucauaa

SEQ ID NO: 704380 - RNA, 17 nt, Artificial Sequence
  Synthetic
guccaggcccaagauaa

SEQ ID NO: 704381 - RNA, 17 nt, Artificial Sequence
  Synthetic
gaaaacauucaagauaa

SEQ ID NO: 704382 - RNA, 17 nt, Artificial Sequence
  Synthetic
gucugauuuuaagauaa

SEQ ID NO: 704383 - RNA, 17 nt, Artificial Sequence
  Synthetic
guauccccuacagauaa

SEQ ID NO: 704384 - RNA, 17 nt, Artificial Sequence
  Synthetic
gagagugucagagauaa

SEQ ID NO: 704385 - RNA, 17 nt, Artificial Sequence
  Synthetic
gucagacaguuagauaa

SEQ ID NO: 704386 - RNA, 17 nt, Artificial Sequence
  Synthetic
gcauauguguuagauaa

SEQ ID NO: 704387 - RNA, 17 nt, Artificial Sequence
  Synthetic
guacacauguaggauaa

SEQ ID NO: 704388 - RNA, 17 nt, Artificial Sequence
  Synthetic
gcgaagagaggggauaa

SEQ ID NO: 704389 - RNA, 17 nt, Artificial Sequence
  Synthetic
gugaaagaaauggauaa

SEQ ID NO: 704390 - RNA, 17 nt, Artificial Sequence
  Synthetic
guuuguuaaauggauaa

SEQ ID NO: 704391 - RNA, 17 nt, Artificial Sequence
  Synthetic
gcaauaaaaaaugauaa

SEQ ID NO: 704392 - RNA, 17 nt, Artificial Sequence
  Synthetic
guaccuaagcaugauaa

SEQ ID NO: 704393 - RNA, 17 nt, Artificial Sequence
  Synthetic
guacaauguacugauaa

SEQ ID NO: 704394 - RNA, 17 nt, Artificial Sequence
  Synthetic
gcaugaguaagugauaa

SEQ ID NO: 704395 - RNA, 17 nt, Artificial Sequence
  Synthetic
gaaaacccacaauauaa

SEQ ID NO: 704396 - RNA, 17 nt, Artificial Sequence
  Synthetic
gauuuuuuucaauauaa

SEQ ID NO: 704397 - RNA, 17 nt, Artificial Sequence
  Synthetic
guuuuggauacauauaa

SEQ ID NO: 704398 - RNA, 17 nt, Artificial Sequence
  Synthetic
gcuaguguuccauauaa

SEQ ID NO: 704399 - RNA, 17 nt, Artificial Sequence
  Synthetic
gauugagucugauauaa

SEQ ID NO: 704400 - RNA, 17 nt, Artificial Sequence
  Synthetic
guaaguggaauauauaa

SEQ ID NO: 704401 - RNA, 17 nt, Artificial Sequence
  Synthetic
gauaguacaguauauaa

SEQ ID NO: 704402 - RNA, 17 nt, Artificial Sequence
  Synthetic
guuuucacuuuauauaa

SEQ ID NO: 704403 - RNA, 17 nt, Artificial Sequence
  Synthetic
ggaaaggaagacuauaa

SEQ ID NO: 704404 - RNA, 17 nt, Artificial Sequence
  Synthetic
guauaaucauacuauaa

SEQ ID NO: 704405 - RNA, 17 nt, Artificial Sequence
  Synthetic
gaaaucauuggcuauaa

SEQ ID NO: 704406 - RNA, 17 nt, Artificial Sequence
  Synthetic
guuuagaauuucuauaa

SEQ ID NO: 704407 - RNA, 17 nt, Artificial Sequence
  Synthetic
guuuguuaccuguauaa

SEQ ID NO: 704408 - RNA, 17 nt, Artificial Sequence
  Synthetic
gaguuauaaguguauaa

SEQ ID NO: 704409 - RNA, 17 nt, Artificial Sequence
  Synthetic
gguaauuacuauuauaa

SEQ ID NO: 704410 - RNA, 17 nt, Artificial Sequence
  Synthetic
gguugaagaaguuauaa

SEQ ID NO: 704411 - RNA, 17 nt, Artificial Sequence
  Synthetic
gacugaauaauuuauaa

SEQ ID NO: 704412 - RNA, 17 nt, Artificial Sequence
  Synthetic
gacuggguaauuuauaa

SEQ ID NO: 704413 - RNA, 17 nt, Artificial Sequence
  Synthetic
gauuggguaauuuauaa

SEQ ID NO: 704414 - RNA, 17 nt, Artificial Sequence
  Synthetic
guguaaaggauuuauaa

SEQ ID NO: 704415 - RNA, 17 nt, Artificial Sequence
  Synthetic
gacugggugauuuauaa

SEQ ID NO: 704416 - RNA, 17 nt, Artificial Sequence
  Synthetic
guauuaauauuuuauaa

SEQ ID NO: 704417 - RNA, 17 nt, Artificial Sequence
  Synthetic
gcuucauuauuuuauaa

SEQ ID NO: 704418 - RNA, 17 nt, Artificial Sequence
  Synthetic
gucugaugguuuuauaa

SEQ ID NO: 704419 - RNA, 17 nt, Artificial Sequence
  Synthetic
gaagacaauuuuuauaa

SEQ ID NO: 704420 - RNA, 17 nt, Artificial Sequence
  Synthetic
guguacuggaaaacuaa

SEQ ID NO: 704421 - RNA, 17 nt, Artificial Sequence
  Synthetic
gaaaaagaugaaacuaa

SEQ ID NO: 704422 - RNA, 17 nt, Artificial Sequence
  Synthetic
gaaacugcaucaacuaa

SEQ ID NO: 704423 - RNA, 17 nt, Artificial Sequence
  Synthetic
gggguugagcagacuaa

SEQ ID NO: 704424 - RNA, 17 nt, Artificial Sequence
  Synthetic
guguguauuuggacuaa

SEQ ID NO: 704425 - RNA, 17 nt, Artificial Sequence
  Synthetic
gaaauauuuacuacuaa

SEQ ID NO: 704426 - RNA, 17 nt, Artificial Sequence
  Synthetic
gagaaccacuguacuaa

SEQ ID NO: 704427 - RNA, 17 nt, Artificial Sequence
  Synthetic
guaagaaaaguuacuaa

SEQ ID NO: 704428 - RNA, 17 nt, Artificial Sequence
  Synthetic
gucacaacaguuacuaa

SEQ ID NO: 704429 - RNA, 17 nt, Artificial Sequence
  Synthetic
ggaccuaaaagaccuaa

SEQ ID NO: 704430 - RNA, 17 nt, Artificial Sequence
  Synthetic
guaaauugaagaccuaa

SEQ ID NO: 704431 - RNA, 17 nt, Artificial Sequence
  Synthetic
gaacuauaaauaccuaa

SEQ ID NO: 704432 - RNA, 17 nt, Artificial Sequence
  Synthetic
gauuucuucauaccuaa

SEQ ID NO: 704433 - RNA, 17 nt, Artificial Sequence
  Synthetic
gcugagcugguaccuaa

SEQ ID NO: 704434 - RNA, 17 nt, Artificial Sequence
  Synthetic
gaaacuuucaccccuaa

SEQ ID NO: 704435 - RNA, 17 nt, Artificial Sequence
  Synthetic
ggaacccuuaauccuaa

SEQ ID NO: 704436 - RNA, 17 nt, Artificial Sequence
  Synthetic
gcauguggcuuuccuaa

SEQ ID NO: 704437 - RNA, 17 nt, Artificial Sequence
  Synthetic
gaaaaaugaucagcuaa

SEQ ID NO: 704438 - RNA, 17 nt, Artificial Sequence
  Synthetic
gggaugcugucagcuaa

SEQ ID NO: 704439 - RNA, 17 nt, Artificial Sequence
  Synthetic
ggauuuaagggagcuaa

SEQ ID NO: 704440 - RNA, 17 nt, Artificial Sequence
  Synthetic
gcuaaaugaugagcuaa

SEQ ID NO: 704441 - RNA, 17 nt, Artificial Sequence
  Synthetic
gaacaaagcugagcuaa

SEQ ID NO: 704442 - RNA, 17 nt, Artificial Sequence
  Synthetic
gugaagaauugagcuaa

SEQ ID NO: 704443 - RNA, 17 nt, Artificial Sequence
  Synthetic
gauguacaaauagcuaa

SEQ ID NO: 704444 - RNA, 17 nt, Artificial Sequence
  Synthetic
guaagguaacaggcuaa

SEQ ID NO: 704445 - RNA, 17 nt, Artificial Sequence
  Synthetic
gccagugcccaggcuaa

SEQ ID NO: 704446 - RNA, 17 nt, Artificial Sequence
  Synthetic
gcuuuguuugaggcuaa

SEQ ID NO: 704447 - RNA, 17 nt, Artificial Sequence
  Synthetic
gccauauauuaggcuaa

SEQ ID NO: 704448 - RNA, 17 nt, Artificial Sequence
  Synthetic
gauuuuuagggggcuaa

SEQ ID NO: 704449 - RNA, 17 nt, Artificial Sequence
  Synthetic
gaugaggagcuggcuaa

SEQ ID NO: 704450 - RNA, 17 nt, Artificial Sequence
  Synthetic
gaagaaggcaaugcuaa

SEQ ID NO: 704451 - RNA, 17 nt, Artificial Sequence
  Synthetic
ggaaggcugagugcuaa

SEQ ID NO: 704452 - RNA, 17 nt, Artificial Sequence
  Synthetic
guuucucagcuugcuaa

SEQ ID NO: 704453 - RNA, 17 nt, Artificial Sequence
  Synthetic
guuaaaugauuugcuaa

SEQ ID NO: 704454 - RNA, 17 nt, Artificial Sequence
  Synthetic
guacuauuggcaucuaa

SEQ ID NO: 704455 - RNA, 17 nt, Artificial Sequence
  Synthetic
guguccguuucaucuaa

SEQ ID NO: 704456 - RNA, 17 nt, Artificial Sequence
  Synthetic
gcuugcauucccucuaa

SEQ ID NO: 704457 - RNA, 17 nt, Artificial Sequence
  Synthetic
ggccucaaauauucuaa

SEQ ID NO: 704458 - RNA, 17 nt, Artificial Sequence
  Synthetic
gugugcuuuacuucuaa

SEQ ID NO: 704459 - RNA, 17 nt, Artificial Sequence
  Synthetic
gucaugcuaauuucuaa

SEQ ID NO: 704460 - RNA, 17 nt, Artificial Sequence
  Synthetic
gacuggguaauuucuaa

SEQ ID NO: 704461 - RNA, 17 nt, Artificial Sequence
  Synthetic
gcaggagauuuuucuaa

SEQ ID NO: 704462 - RNA, 17 nt, Artificial Sequence
  Synthetic
gagauaaauaaaaguaa

SEQ ID NO: 704463 - RNA, 17 nt, Artificial Sequence
  Synthetic
gcacaauagcaaaguaa

SEQ ID NO: 704464 - RNA, 17 nt, Artificial Sequence
  Synthetic
guuuauuaagaaaguaa

SEQ ID NO: 704465 - RNA, 17 nt, Artificial Sequence
  Synthetic
gcauagacugaaaguaa

SEQ ID NO: 704466 - RNA, 17 nt, Artificial Sequence
  Synthetic
guagaauuaggaaguaa

SEQ ID NO: 704467 - RNA, 17 nt, Artificial Sequence
  Synthetic
gauagauagauaaguaa

SEQ ID NO: 704468 - RNA, 17 nt, Artificial Sequence
  Synthetic
gaaguuaaucuaaguaa

SEQ ID NO: 704469 - RNA, 17 nt, Artificial Sequence
  Synthetic
gaacuuugcuuaaguaa

SEQ ID NO: 704470 - RNA, 17 nt, Artificial Sequence
  Synthetic
ggguauauaaccaguaa

SEQ ID NO: 704471 - RNA, 17 nt, Artificial Sequence
  Synthetic
ggguauauacccaguaa

SEQ ID NO: 704472 - RNA, 17 nt, Artificial Sequence
  Synthetic
ggcuauaugcccaguaa

SEQ ID NO: 704473 - RNA, 17 nt, Artificial Sequence
  Synthetic
ggguauauauccaguaa

SEQ ID NO: 704474 - RNA, 17 nt, Artificial Sequence
  Synthetic
ggguauauaugcaguaa

SEQ ID NO: 704475 - RNA, 17 nt, Artificial Sequence
  Synthetic
ggauauauacucaguaa

SEQ ID NO: 704476 - RNA, 17 nt, Artificial Sequence
  Synthetic
ggauaucuacucaguaa

SEQ ID NO: 704477 - RNA, 17 nt, Artificial Sequence
  Synthetic
gagucaauguagaguaa

SEQ ID NO: 704478 - RNA, 17 nt, Artificial Sequence
  Synthetic
gcaugggaauggaguaa

SEQ ID NO: 704479 - RNA, 17 nt, Artificial Sequence
  Synthetic
gauauuacugugaguaa

SEQ ID NO: 704480 - RNA, 17 nt, Artificial Sequence
  Synthetic
gcuggggcugugaguaa

SEQ ID NO: 704481 - RNA, 17 nt, Artificial Sequence
  Synthetic
guuacuaguaauaguaa

SEQ ID NO: 704482 - RNA, 17 nt, Artificial Sequence
  Synthetic
guauugugaauuaguaa

SEQ ID NO: 704483 - RNA, 17 nt, Artificial Sequence
  Synthetic
ggauggaagggccguaa

SEQ ID NO: 704484 - RNA, 17 nt, Artificial Sequence
  Synthetic
gaaucauuucuccguaa

SEQ ID NO: 704485 - RNA, 17 nt, Artificial Sequence
  Synthetic
gcaaagcuaaagcguaa

SEQ ID NO: 704486 - RNA, 17 nt, Artificial Sequence
  Synthetic
gacauucucccagguaa

SEQ ID NO: 704487 - RNA, 17 nt, Artificial Sequence
  Synthetic
gucugcacagcagguaa

SEQ ID NO: 704488 - RNA, 17 nt, Artificial Sequence
  Synthetic
gaaaaaucuagagguaa

SEQ ID NO: 704489 - RNA, 17 nt, Artificial Sequence
  Synthetic
gcuugggagugagguaa

SEQ ID NO: 704490 - RNA, 17 nt, Artificial Sequence
  Synthetic
guuguguaacuagguaa

SEQ ID NO: 704491 - RNA, 17 nt, Artificial Sequence
  Synthetic
gacuaaaacuaggguaa

SEQ ID NO: 704492 - RNA, 17 nt, Artificial Sequence
  Synthetic
gaagaacuuagggguaa

SEQ ID NO: 704493 - RNA, 17 nt, Artificial Sequence
  Synthetic
gauguguuacaugguaa

SEQ ID NO: 704494 - RNA, 17 nt, Artificial Sequence
  Synthetic
gggcuggaaucugguaa

SEQ ID NO: 704495 - RNA, 17 nt, Artificial Sequence
  Synthetic
gcaaagccaagugguaa

SEQ ID NO: 704496 - RNA, 17 nt, Artificial Sequence
  Synthetic
gaucaauaaaaauguaa

SEQ ID NO: 704497 - RNA, 17 nt, Artificial Sequence
  Synthetic
gguagggugaaauguaa

SEQ ID NO: 704498 - RNA, 17 nt, Artificial Sequence
  Synthetic
gacaacugacaauguaa

SEQ ID NO: 704499 - RNA, 17 nt, Artificial Sequence
  Synthetic
gaagacauaccauguaa

SEQ ID NO: 704500 - RNA, 17 nt, Artificial Sequence
  Synthetic
guauguugagcauguaa

SEQ ID NO: 704501 - RNA, 17 nt, Artificial Sequence
  Synthetic
gaaacaucaggauguaa

SEQ ID NO: 704502 - RNA, 17 nt, Artificial Sequence
  Synthetic
gggcuacagauauguaa

SEQ ID NO: 704503 - RNA, 17 nt, Artificial Sequence
  Synthetic
ggcacagauuuauguaa

SEQ ID NO: 704504 - RNA, 17 nt, Artificial Sequence
  Synthetic
gcuucccucagcuguaa

SEQ ID NO: 704505 - RNA, 17 nt, Artificial Sequence
  Synthetic
gauauuuuuuucuguaa

SEQ ID NO: 704506 - RNA, 17 nt, Artificial Sequence
  Synthetic
guuggaaauaaguguaa

SEQ ID NO: 704507 - RNA, 17 nt, Artificial Sequence
  Synthetic
gacagaaaacaguguaa

SEQ ID NO: 704508 - RNA, 17 nt, Artificial Sequence
  Synthetic
gcaucaaaaugguguaa

SEQ ID NO: 704509 - RNA, 17 nt, Artificial Sequence
  Synthetic
guugccauacauuguaa

SEQ ID NO: 704510 - RNA, 17 nt, Artificial Sequence
  Synthetic
guagucuucguuuguaa

SEQ ID NO: 704511 - RNA, 17 nt, Artificial Sequence
  Synthetic
gcuuagaaaaaaauuaa

SEQ ID NO: 704512 - RNA, 17 nt, Artificial Sequence
  Synthetic
guuuuagaaaaaauuaa

SEQ ID NO: 704513 - RNA, 17 nt, Artificial Sequence
  Synthetic
guucccaaugaaauuaa

SEQ ID NO: 704514 - RNA, 17 nt, Artificial Sequence
  Synthetic
gcaaaggaaacaauuaa

SEQ ID NO: 704515 - RNA, 17 nt, Artificial Sequence
  Synthetic
gagaaaaagggaauuaa

SEQ ID NO: 704516 - RNA, 17 nt, Artificial Sequence
  Synthetic
guaaaauaaugaauuaa

SEQ ID NO: 704517 - RNA, 17 nt, Artificial Sequence
  Synthetic
gugacuauggacauuaa

SEQ ID NO: 704518 - RNA, 17 nt, Artificial Sequence
  Synthetic
gaaaaauucuacauuaa

SEQ ID NO: 704519 - RNA, 17 nt, Artificial Sequence
  Synthetic
gugaaagacagcauuaa

SEQ ID NO: 704520 - RNA, 17 nt, Artificial Sequence
  Synthetic
guaauauugugcauuaa

SEQ ID NO: 704521 - RNA, 17 nt, Artificial Sequence
  Synthetic
guaaaauguaucauuaa

SEQ ID NO: 704522 - RNA, 17 nt, Artificial Sequence
  Synthetic
gcuauaaaguucauuaa

SEQ ID NO: 704523 - RNA, 17 nt, Artificial Sequence
  Synthetic
gaccuccagaagauuaa

SEQ ID NO: 704524 - RNA, 17 nt, Artificial Sequence
  Synthetic
gauuguuuuaggauuaa

SEQ ID NO: 704525 - RNA, 17 nt, Artificial Sequence
  Synthetic
gaugaaacugggauuaa

SEQ ID NO: 704526 - RNA, 17 nt, Artificial Sequence
  Synthetic
guaaaacuaaugauuaa

SEQ ID NO: 704527 - RNA, 17 nt, Artificial Sequence
  Synthetic
gguaaccuacugauuaa

SEQ ID NO: 704528 - RNA, 17 nt, Artificial Sequence
  Synthetic
guaaaauuggauauuaa

SEQ ID NO: 704529 - RNA, 17 nt, Artificial Sequence
  Synthetic
gggcacauuuauauuaa

SEQ ID NO: 704530 - RNA, 17 nt, Artificial Sequence
  Synthetic
gcagcaauacguauuaa

SEQ ID NO: 704531 - RNA, 17 nt, Artificial Sequence
  Synthetic
ggggaggaaauuauuaa

SEQ ID NO: 704532 - RNA, 17 nt, Artificial Sequence
  Synthetic
ggugaucauauuauuaa

SEQ ID NO: 704533 - RNA, 17 nt, Artificial Sequence
  Synthetic
gauaggucaguuauuaa

SEQ ID NO: 704534 - RNA, 17 nt, Artificial Sequence
  Synthetic
ggaauuauuuuuauuaa

SEQ ID NO: 704535 - RNA, 17 nt, Artificial Sequence
  Synthetic
gaccuauauaaacuuaa

SEQ ID NO: 704536 - RNA, 17 nt, Artificial Sequence
  Synthetic
ggagaagcugaacuuaa

SEQ ID NO: 704537 - RNA, 17 nt, Artificial Sequence
  Synthetic
gcuauaaaaacacuuaa

SEQ ID NO: 704538 - RNA, 17 nt, Artificial Sequence
  Synthetic
ggcagauagagacuuaa

SEQ ID NO: 704539 - RNA, 17 nt, Artificial Sequence
  Synthetic
ggaaaaaaaaaccuuaa

SEQ ID NO: 704540 - RNA, 17 nt, Artificial Sequence
  Synthetic
gaaugugggaaccuuaa

SEQ ID NO: 704541 - RNA, 17 nt, Artificial Sequence
  Synthetic
ggcucauuucaccuuaa

SEQ ID NO: 704542 - RNA, 17 nt, Artificial Sequence
  Synthetic
ggaaucugcuaccuuaa

SEQ ID NO: 704543 - RNA, 17 nt, Artificial Sequence
  Synthetic
ggauuuuuaaagcuuaa

SEQ ID NO: 704544 - RNA, 17 nt, Artificial Sequence
  Synthetic
ggauauugcaggcuuaa

SEQ ID NO: 704545 - RNA, 17 nt, Artificial Sequence
  Synthetic
gauaggaaauugcuuaa

SEQ ID NO: 704546 - RNA, 17 nt, Artificial Sequence
  Synthetic
ggggaacuauugcuuaa

SEQ ID NO: 704547 - RNA, 17 nt, Artificial Sequence
  Synthetic
gcaaacaaaaaucuuaa

SEQ ID NO: 704548 - RNA, 17 nt, Artificial Sequence
  Synthetic
guuucucagcaucuuaa

SEQ ID NO: 704549 - RNA, 17 nt, Artificial Sequence
  Synthetic
gggggacaugaucuuaa

SEQ ID NO: 704550 - RNA, 17 nt, Artificial Sequence
  Synthetic
gugggaauuuaucuuaa

SEQ ID NO: 704551 - RNA, 17 nt, Artificial Sequence
  Synthetic
gaccguccuccucuuaa

SEQ ID NO: 704552 - RNA, 17 nt, Artificial Sequence
  Synthetic
guuaagaugagucuuaa

SEQ ID NO: 704553 - RNA, 17 nt, Artificial Sequence
  Synthetic
guuuaacacauucuuaa

SEQ ID NO: 704554 - RNA, 17 nt, Artificial Sequence
  Synthetic
ggggcuugacuucuuaa

SEQ ID NO: 704555 - RNA, 17 nt, Artificial Sequence
  Synthetic
gauauuuuauuucuuaa

SEQ ID NO: 704556 - RNA, 17 nt, Artificial Sequence
  Synthetic
gugucccuucaaguuaa

SEQ ID NO: 704557 - RNA, 17 nt, Artificial Sequence
  Synthetic
gcuaaaugaccaguuaa

SEQ ID NO: 704558 - RNA, 17 nt, Artificial Sequence
  Synthetic
ggaaaguguucaguuaa

SEQ ID NO: 704559 - RNA, 17 nt, Artificial Sequence
  Synthetic
guuaaaugaagaguuaa

SEQ ID NO: 704560 - RNA, 17 nt, Artificial Sequence
  Synthetic
gcuaaaugacgaguuaa

SEQ ID NO: 704561 - RNA, 17 nt, Artificial Sequence
  Synthetic
gguaaaugacgaguuaa

SEQ ID NO: 704562 - RNA, 17 nt, Artificial Sequence
  Synthetic
guucaaugacgaguuaa

SEQ ID NO: 704563 - RNA, 17 nt, Artificial Sequence
  Synthetic
gaauggagcauaguuaa

SEQ ID NO: 704564 - RNA, 17 nt, Artificial Sequence
  Synthetic
gugucaaggaggguuaa

SEQ ID NO: 704565 - RNA, 17 nt, Artificial Sequence
  Synthetic
gaauauuaccggguuaa

SEQ ID NO: 704566 - RNA, 17 nt, Artificial Sequence
  Synthetic
ggcagcgggaugguuaa

SEQ ID NO: 704567 - RNA, 17 nt, Artificial Sequence
  Synthetic
gcuuacuaccugguuaa

SEQ ID NO: 704568 - RNA, 17 nt, Artificial Sequence
  Synthetic
ggacagacccugguuaa

SEQ ID NO: 704569 - RNA, 17 nt, Artificial Sequence
  Synthetic
gaaauaaagcugguuaa

SEQ ID NO: 704570 - RNA, 17 nt, Artificial Sequence
  Synthetic
gaaggaaaaaauguuaa

SEQ ID NO: 704571 - RNA, 17 nt, Artificial Sequence
  Synthetic
gaaacauuccauguuaa

SEQ ID NO: 704572 - RNA, 17 nt, Artificial Sequence
  Synthetic
gcaucuggaauuguuaa

SEQ ID NO: 704573 - RNA, 17 nt, Artificial Sequence
  Synthetic
ggaauauugguuguuaa

SEQ ID NO: 704574 - RNA, 17 nt, Artificial Sequence
  Synthetic
guuaaugacaaauuuaa

SEQ ID NO: 704575 - RNA, 17 nt, Artificial Sequence
  Synthetic
gagaaaagcaaauuuaa

SEQ ID NO: 704576 - RNA, 17 nt, Artificial Sequence
  Synthetic
ggacacauuaaauuuaa

SEQ ID NO: 704577 - RNA, 17 nt, Artificial Sequence
  Synthetic
gugaauaucacauuuaa

SEQ ID NO: 704578 - RNA, 17 nt, Artificial Sequence
  Synthetic
gacucauaugcauuuaa

SEQ ID NO: 704579 - RNA, 17 nt, Artificial Sequence
  Synthetic
ggucugugacuauuuaa

SEQ ID NO: 704580 - RNA, 17 nt, Artificial Sequence
  Synthetic
guuuauauucuauuuaa

SEQ ID NO: 704581 - RNA, 17 nt, Artificial Sequence
  Synthetic
gauaacuuauuauuuaa

SEQ ID NO: 704582 - RNA, 17 nt, Artificial Sequence
  Synthetic
ggcauaauuuuauuuaa

SEQ ID NO: 704583 - RNA, 17 nt, Artificial Sequence
  Synthetic
guguucagugacuuuaa

SEQ ID NO: 704584 - RNA, 17 nt, Artificial Sequence
  Synthetic
gguaacaagcccuuuaa

SEQ ID NO: 704585 - RNA, 17 nt, Artificial Sequence
  Synthetic
ggagguagggccuuuaa

SEQ ID NO: 704586 - RNA, 17 nt, Artificial Sequence
  Synthetic
gaaucuacugucuuuaa

SEQ ID NO: 704587 - RNA, 17 nt, Artificial Sequence
  Synthetic
guuauuauguucuuuaa

SEQ ID NO: 704588 - RNA, 17 nt, Artificial Sequence
  Synthetic
gucccaucuuucuuuaa

SEQ ID NO: 704589 - RNA, 17 nt, Artificial Sequence
  Synthetic
gaaguagagagguuuaa

SEQ ID NO: 704590 - RNA, 17 nt, Artificial Sequence
  Synthetic
ggaucuugaauguuuaa

SEQ ID NO: 704591 - RNA, 17 nt, Artificial Sequence
  Synthetic
gucuucuacauguuuaa

SEQ ID NO: 704592 - RNA, 17 nt, Artificial Sequence
  Synthetic
guaggccagauguuuaa

SEQ ID NO: 704593 - RNA, 17 nt, Artificial Sequence
  Synthetic
gcauauuuauuguuuaa

SEQ ID NO: 704594 - RNA, 17 nt, Artificial Sequence
  Synthetic
guuugacuuuuguuuaa

SEQ ID NO: 704595 - RNA, 17 nt, Artificial Sequence
  Synthetic
gauauaagccauuuuaa

SEQ ID NO: 704596 - RNA, 17 nt, Artificial Sequence
  Synthetic
guuuuacaagauuuuaa

SEQ ID NO: 704597 - RNA, 17 nt, Artificial Sequence
  Synthetic
gaugcccuagauuuuaa

SEQ ID NO: 704598 - RNA, 17 nt, Artificial Sequence
  Synthetic
guagcaauuuauuuuaa

SEQ ID NO: 704599 - RNA, 17 nt, Artificial Sequence
  Synthetic
guaauugccccuuuuaa

SEQ ID NO: 704600 - RNA, 17 nt, Artificial Sequence
  Synthetic
gguagaauuucuuuuaa

SEQ ID NO: 704601 - RNA, 17 nt, Artificial Sequence
  Synthetic
ggcacagauaguuuuaa

SEQ ID NO: 704602 - RNA, 17 nt, Artificial Sequence
  Synthetic
gugcaauucauuuuuaa

SEQ ID NO: 704603 - RNA, 17 nt, Artificial Sequence
  Synthetic
gauggcuauguuuuuaa

SEQ ID NO: 704604 - RNA, 17 nt, Artificial Sequence
  Synthetic
gaaagucuuguuuuuaa

SEQ ID NO: 704605 - RNA, 17 nt, Artificial Sequence
  Synthetic
guuuguuuguuuuuuaa

SEQ ID NO: 704606 - RNA, 17 nt, Artificial Sequence
  Synthetic
ggaaauuaugaaaaaca

SEQ ID NO: 704607 - RNA, 17 nt, Artificial Sequence
  Synthetic
ggcaaacacuaaaaaca

SEQ ID NO: 704608 - RNA, 17 nt, Artificial Sequence
  Synthetic
ggccuaaaaggaaaaca

SEQ ID NO: 704609 - RNA, 17 nt, Artificial Sequence
  Synthetic
gauacaagaugaaaaca

SEQ ID NO: 704610 - RNA, 17 nt, Artificial Sequence
  Synthetic
gaaugaagcugaaaaca

SEQ ID NO: 704611 - RNA, 17 nt, Artificial Sequence
  Synthetic
guuaugaggauaaaaca

SEQ ID NO: 704612 - RNA, 17 nt, Artificial Sequence
  Synthetic
gaucuucuguuaaaaca

SEQ ID NO: 704613 - RNA, 17 nt, Artificial Sequence
  Synthetic
gauuugagaaagaaaca

SEQ ID NO: 704614 - RNA, 17 nt, Artificial Sequence
  Synthetic
ggcaggaaacagaaaca

SEQ ID NO: 704615 - RNA, 17 nt, Artificial Sequence
  Synthetic
gagaagcuacagaaaca

SEQ ID NO: 704616 - RNA, 17 nt, Artificial Sequence
  Synthetic
gcuuuaccugagaaaca

SEQ ID NO: 704617 - RNA, 17 nt, Artificial Sequence
  Synthetic
ggggagggagggaaaca

SEQ ID NO: 704618 - RNA, 17 nt, Artificial Sequence
  Synthetic
gagaaaauagggaaaca

SEQ ID NO: 704619 - RNA, 17 nt, Artificial Sequence
  Synthetic
guacaauucuggaaaca

SEQ ID NO: 704620 - RNA, 17 nt, Artificial Sequence
  Synthetic
gguagggggaugaaaca

SEQ ID NO: 704621 - RNA, 17 nt, Artificial Sequence
  Synthetic
ggugauagugugaaaca

SEQ ID NO: 704622 - RNA, 17 nt, Artificial Sequence
  Synthetic
gaguuagaaaauaaaca

SEQ ID NO: 704623 - RNA, 17 nt, Artificial Sequence
  Synthetic
guaaaguagaauaaaca

SEQ ID NO: 704624 - RNA, 17 nt, Artificial Sequence
  Synthetic
ggacaaaaauauaaaca

SEQ ID NO: 704625 - RNA, 17 nt, Artificial Sequence
  Synthetic
gucuugggauauaaaca

SEQ ID NO: 704626 - RNA, 17 nt, Artificial Sequence
  Synthetic
gaaauuaacuauaaaca

SEQ ID NO: 704627 - RNA, 17 nt, Artificial Sequence
  Synthetic
gucuuguuguauaaaca

SEQ ID NO: 704628 - RNA, 17 nt, Artificial Sequence
  Synthetic
gucuuauuuuauaaaca

SEQ ID NO: 704629 - RNA, 17 nt, Artificial Sequence
  Synthetic
gaaggaaucacuaaaca

SEQ ID NO: 704630 - RNA, 17 nt, Artificial Sequence
  Synthetic
gaaggaagcgcuaaaca

SEQ ID NO: 704631 - RNA, 17 nt, Artificial Sequence
  Synthetic
gagagaucaauuaaaca

SEQ ID NO: 704632 - RNA, 17 nt, Artificial Sequence
  Synthetic
gucaaauguagacaaca

SEQ ID NO: 704633 - RNA, 17 nt, Artificial Sequence
  Synthetic
gacaagccuggacaaca

SEQ ID NO: 704634 - RNA, 17 nt, Artificial Sequence
  Synthetic
ggugcagcacaccaaca

SEQ ID NO: 704635 - RNA, 17 nt, Artificial Sequence
  Synthetic
ggugcaggacaccaaca

SEQ ID NO: 704636 - RNA, 17 nt, Artificial Sequence
  Synthetic
gaccagccugaccaaca

SEQ ID NO: 704637 - RNA, 17 nt, Artificial Sequence
  Synthetic
gaccggccugaccaaca

SEQ ID NO: 704638 - RNA, 17 nt, Artificial Sequence
  Synthetic
gcuuagucugaccaaca

SEQ ID NO: 704639 - RNA, 17 nt, Artificial Sequence
  Synthetic
gguggagcauaccaaca

SEQ ID NO: 704640 - RNA, 17 nt, Artificial Sequence
  Synthetic
guccagcccagccaaca

SEQ ID NO: 704641 - RNA, 17 nt, Artificial Sequence
  Synthetic
gaccaucccagccaaca

SEQ ID NO: 704642 - RNA, 17 nt, Artificial Sequence
  Synthetic
gggaauugaggccaaca

SEQ ID NO: 704643 - RNA, 17 nt, Artificial Sequence
  Synthetic
gaccagcccggccaaca

SEQ ID NO: 704644 - RNA, 17 nt, Artificial Sequence
  Synthetic
gaccagacuggccaaca

SEQ ID NO: 704645 - RNA, 17 nt, Artificial Sequence
  Synthetic
gaacagccuggccaaca

SEQ ID NO: 704646 - RNA, 17 nt, Artificial Sequence
  Synthetic
gaccagccuggccaaca

SEQ ID NO: 704647 - RNA, 17 nt, Artificial Sequence
  Synthetic
gacgagccuggccaaca

SEQ ID NO: 704648 - RNA, 17 nt, Artificial Sequence
  Synthetic
gacuagccuggccaaca

SEQ ID NO: 704649 - RNA, 17 nt, Artificial Sequence
  Synthetic
gaccauccuggccaaca

SEQ ID NO: 704650 - RNA, 17 nt, Artificial Sequence
  Synthetic
gaccguccuggccaaca

SEQ ID NO: 704651 - RNA, 17 nt, Artificial Sequence
  Synthetic
gacuguccuggccaaca

SEQ ID NO: 704652 - RNA, 17 nt, Artificial Sequence
  Synthetic
gccauuacacuccaaca

SEQ ID NO: 704653 - RNA, 17 nt, Artificial Sequence
  Synthetic
ggugcagcacuccaaca

SEQ ID NO: 704654 - RNA, 17 nt, Artificial Sequence
  Synthetic
ggauauucaaagcaaca

SEQ ID NO: 704655 - RNA, 17 nt, Artificial Sequence
  Synthetic
ggccauagaaagcaaca

SEQ ID NO: 704656 - RNA, 17 nt, Artificial Sequence
  Synthetic
gaccagacugagcaaca

SEQ ID NO: 704657 - RNA, 17 nt, Artificial Sequence
  Synthetic
gaccagccugggcaaca

SEQ ID NO: 704658 - RNA, 17 nt, Artificial Sequence
  Synthetic
gaucagccugggcaaca

SEQ ID NO: 704659 - RNA, 17 nt, Artificial Sequence
  Synthetic
gaucagucugggcaaca

SEQ ID NO: 704660 - RNA, 17 nt, Artificial Sequence
  Synthetic
gucuugaaacugcaaca

SEQ ID NO: 704661 - RNA, 17 nt, Artificial Sequence
  Synthetic
gcuguuggaaaucaaca

SEQ ID NO: 704662 - RNA, 17 nt, Artificial Sequence
  Synthetic
gaccagccugaucaaca

SEQ ID NO: 704663 - RNA, 17 nt, Artificial Sequence
  Synthetic
gcaacucagacucaaca

SEQ ID NO: 704664 - RNA, 17 nt, Artificial Sequence
  Synthetic
gaccaaaauccucaaca

SEQ ID NO: 704665 - RNA, 17 nt, Artificial Sequence
  Synthetic
gagacagaaagucaaca

SEQ ID NO: 704666 - RNA, 17 nt, Artificial Sequence
  Synthetic
gaccagccuggucaaca

SEQ ID NO: 704667 - RNA, 17 nt, Artificial Sequence
  Synthetic
gaaaugaccuuucaaca

SEQ ID NO: 704668 - RNA, 17 nt, Artificial Sequence
  Synthetic
gaagugagaaaagaaca

SEQ ID NO: 704669 - RNA, 17 nt, Artificial Sequence
  Synthetic
gauggaagauaagaaca

SEQ ID NO: 704670 - RNA, 17 nt, Artificial Sequence
  Synthetic
ggccgugucuaagaaca

SEQ ID NO: 704671 - RNA, 17 nt, Artificial Sequence
  Synthetic
ggauauuuaggagaaca

SEQ ID NO: 704672 - RNA, 17 nt, Artificial Sequence
  Synthetic
gaccauccuggcgaaca

SEQ ID NO: 704673 - RNA, 17 nt, Artificial Sequence
  Synthetic
gccaucccaaaggaaca

SEQ ID NO: 704674 - RNA, 17 nt, Artificial Sequence
  Synthetic
ggaguggccaaggaaca

SEQ ID NO: 704675 - RNA, 17 nt, Artificial Sequence
  Synthetic
guaauuuauaaugaaca

SEQ ID NO: 704676 - RNA, 17 nt, Artificial Sequence
  Synthetic
gacuauggauaugaaca

SEQ ID NO: 704677 - RNA, 17 nt, Artificial Sequence
  Synthetic
gggcacuggagugaaca

SEQ ID NO: 704678 - RNA, 17 nt, Artificial Sequence
  Synthetic
guacaguggagugaaca

SEQ ID NO: 704679 - RNA, 17 nt, Artificial Sequence
  Synthetic
gaccauccuggugaaca

SEQ ID NO: 704680 - RNA, 17 nt, Artificial Sequence
  Synthetic
ggaaacuucauugaaca

SEQ ID NO: 704681 - RNA, 17 nt, Artificial Sequence
  Synthetic
ggucucgaacuugaaca

SEQ ID NO: 704682 - RNA, 17 nt, Artificial Sequence
  Synthetic
guagcuugucuugaaca

SEQ ID NO: 704683 - RNA, 17 nt, Artificial Sequence
  Synthetic
guaacacaagaauaaca

SEQ ID NO: 704684 - RNA, 17 nt, Artificial Sequence
  Synthetic
gagcccagugaauaaca

SEQ ID NO: 704685 - RNA, 17 nt, Artificial Sequence
  Synthetic
gaaauuaacagauaaca

SEQ ID NO: 704686 - RNA, 17 nt, Artificial Sequence
  Synthetic
gaccagccugacuaaca

SEQ ID NO: 704687 - RNA, 17 nt, Artificial Sequence
  Synthetic
gaccaguccggcuaaca

SEQ ID NO: 704688 - RNA, 17 nt, Artificial Sequence
  Synthetic
gaacaaccuggcuaaca

SEQ ID NO: 704689 - RNA, 17 nt, Artificial Sequence
  Synthetic
gaccauccuggcuaaca

SEQ ID NO: 704690 - RNA, 17 nt, Artificial Sequence
  Synthetic
gaugggcaugaguaaca

SEQ ID NO: 704691 - RNA, 17 nt, Artificial Sequence
  Synthetic
gaaacagaaaauuaaca

SEQ ID NO: 704692 - RNA, 17 nt, Artificial Sequence
  Synthetic
gugaguugugauuaaca

SEQ ID NO: 704693 - RNA, 17 nt, Artificial Sequence
  Synthetic
ggaauugucuauuaaca

SEQ ID NO: 704694 - RNA, 17 nt, Artificial Sequence
  Synthetic
guaaauccuaguuaaca

SEQ ID NO: 704695 - RNA, 17 nt, Artificial Sequence
  Synthetic
gaagcuauacaaacaca

SEQ ID NO: 704696 - RNA, 17 nt, Artificial Sequence
  Synthetic
gauauucagcaaacaca

SEQ ID NO: 704697 - RNA, 17 nt, Artificial Sequence
  Synthetic
gaaaauccagaaacaca

SEQ ID NO: 704698 - RNA, 17 nt, Artificial Sequence
  Synthetic
ggccaaaaauaaacaca

SEQ ID NO: 704699 - RNA, 17 nt, Artificial Sequence
  Synthetic
gucccucccacaacaca

SEQ ID NO: 704700 - RNA, 17 nt, Artificial Sequence
  Synthetic
guaugaugcucaacaca

SEQ ID NO: 704701 - RNA, 17 nt, Artificial Sequence
  Synthetic
ggaacaaugagaacaca

SEQ ID NO: 704702 - RNA, 17 nt, Artificial Sequence
  Synthetic
ggaacagugagaacaca

SEQ ID NO: 704703 - RNA, 17 nt, Artificial Sequence
  Synthetic
gugcuguggggaacaca

SEQ ID NO: 704704 - RNA, 17 nt, Artificial Sequence
  Synthetic
gucccucccauaacaca

SEQ ID NO: 704705 - RNA, 17 nt, Artificial Sequence
  Synthetic
gaaaucauauuaacaca

SEQ ID NO: 704706 - RNA, 17 nt, Artificial Sequence
  Synthetic
gugugagccaccacaca

SEQ ID NO: 704707 - RNA, 17 nt, Artificial Sequence
  Synthetic
guuccuuuccccacaca

SEQ ID NO: 704708 - RNA, 17 nt, Artificial Sequence
  Synthetic
gaucccacuaucacaca

SEQ ID NO: 704709 - RNA, 17 nt, Artificial Sequence
  Synthetic
gaaguuuuaaagacaca

SEQ ID NO: 704710 - RNA, 17 nt, Artificial Sequence
  Synthetic
gagaacacauagacaca

SEQ ID NO: 704711 - RNA, 17 nt, Artificial Sequence
  Synthetic
ggaguggcugggacaca

SEQ ID NO: 704712 - RNA, 17 nt, Artificial Sequence
  Synthetic
gagaacacauggacaca

SEQ ID NO: 704713 - RNA, 17 nt, Artificial Sequence
  Synthetic
gagagcccauggacaca

SEQ ID NO: 704714 - RNA, 17 nt, Artificial Sequence
  Synthetic
gaaaacauauggacaca

SEQ ID NO: 704715 - RNA, 17 nt, Artificial Sequence
  Synthetic
gagaacacuuggacaca

SEQ ID NO: 704716 - RNA, 17 nt, Artificial Sequence
  Synthetic
gucccucacaugacaca

SEQ ID NO: 704717 - RNA, 17 nt, Artificial Sequence
  Synthetic
gucacucccaugacaca

SEQ ID NO: 704718 - RNA, 17 nt, Artificial Sequence
  Synthetic
guacaaccacugacaca

SEQ ID NO: 704719 - RNA, 17 nt, Artificial Sequence
  Synthetic
gucucucccuugacaca

SEQ ID NO: 704720 - RNA, 17 nt, Artificial Sequence
  Synthetic
guuuugaaaacuacaca

SEQ ID NO: 704721 - RNA, 17 nt, Artificial Sequence
  Synthetic
guauaaacauguacaca

SEQ ID NO: 704722 - RNA, 17 nt, Artificial Sequence
  Synthetic
guggaguaaauuacaca

SEQ ID NO: 704723 - RNA, 17 nt, Artificial Sequence
  Synthetic
gugcaguuaguuacaca

SEQ ID NO: 704724 - RNA, 17 nt, Artificial Sequence
  Synthetic
ggccuaaucuaaccaca

SEQ ID NO: 704725 - RNA, 17 nt, Artificial Sequence
  Synthetic
gccagaaauuaaccaca

SEQ ID NO: 704726 - RNA, 17 nt, Artificial Sequence
  Synthetic
gcagcuucaucaccaca

SEQ ID NO: 704727 - RNA, 17 nt, Artificial Sequence
  Synthetic
gucaucccaaccccaca

SEQ ID NO: 704728 - RNA, 17 nt, Artificial Sequence
  Synthetic
gauuucuuguccccaca

SEQ ID NO: 704729 - RNA, 17 nt, Artificial Sequence
  Synthetic
ggaucaaaaagcccaca

SEQ ID NO: 704730 - RNA, 17 nt, Artificial Sequence
  Synthetic
gccauuugcaagccaca

SEQ ID NO: 704731 - RNA, 17 nt, Artificial Sequence
  Synthetic
gugaucguaaugccaca

SEQ ID NO: 704732 - RNA, 17 nt, Artificial Sequence
  Synthetic
gccaucuuugugccaca

SEQ ID NO: 704733 - RNA, 17 nt, Artificial Sequence
  Synthetic
gaaauacauuugccaca

SEQ ID NO: 704734 - RNA, 17 nt, Artificial Sequence
  Synthetic
guugaaaguucuccaca

SEQ ID NO: 704735 - RNA, 17 nt, Artificial Sequence
  Synthetic
ggacucacaguuccaca

SEQ ID NO: 704736 - RNA, 17 nt, Artificial Sequence
  Synthetic
gccucuugguuuccaca

SEQ ID NO: 704737 - RNA, 17 nt, Artificial Sequence
  Synthetic
gacaugaaguaagcaca

SEQ ID NO: 704738 - RNA, 17 nt, Artificial Sequence
  Synthetic
gacuguggcagagcaca

SEQ ID NO: 704739 - RNA, 17 nt, Artificial Sequence
  Synthetic
gggucuacauuagcaca

SEQ ID NO: 704740 - RNA, 17 nt, Artificial Sequence
  Synthetic
ggaaauaauuuagcaca

SEQ ID NO: 704741 - RNA, 17 nt, Artificial Sequence
  Synthetic
gaggauaaugaggcaca

SEQ ID NO: 704742 - RNA, 17 nt, Artificial Sequence
  Synthetic
ggugguagaugggcaca

SEQ ID NO: 704743 - RNA, 17 nt, Artificial Sequence
  Synthetic
guucaguuaauggcaca

SEQ ID NO: 704744 - RNA, 17 nt, Artificial Sequence
  Synthetic
gaacaguuucuggcaca

SEQ ID NO: 704745 - RNA, 17 nt, Artificial Sequence
  Synthetic
gugcuagauauugcaca

SEQ ID NO: 704746 - RNA, 17 nt, Artificial Sequence
  Synthetic
gguauuuuaguugcaca

SEQ ID NO: 704747 - RNA, 17 nt, Artificial Sequence
  Synthetic
gagcugauggaaucaca

SEQ ID NO: 704748 - RNA, 17 nt, Artificial Sequence
  Synthetic
guucaaaaguaaucaca

SEQ ID NO: 704749 - RNA, 17 nt, Artificial Sequence
  Synthetic
gaaagcuuuccaucaca

SEQ ID NO: 704750 - RNA, 17 nt, Artificial Sequence
  Synthetic
gcaagggcaagaucaca

SEQ ID NO: 704751 - RNA, 17 nt, Artificial Sequence
  Synthetic
gguguguagagaucaca

SEQ ID NO: 704752 - RNA, 17 nt, Artificial Sequence
  Synthetic
gaggcgggcggaucaca

SEQ ID NO: 704753 - RNA, 17 nt, Artificial Sequence
  Synthetic
gaggcagauggaucaca

SEQ ID NO: 704754 - RNA, 17 nt, Artificial Sequence
  Synthetic
gaggcggguggaucaca

SEQ ID NO: 704755 - RNA, 17 nt, Artificial Sequence
  Synthetic
gcugacuagugaucaca

SEQ ID NO: 704756 - RNA, 17 nt, Artificial Sequence
  Synthetic
gacuugagaaacucaca

SEQ ID NO: 704757 - RNA, 17 nt, Artificial Sequence
  Synthetic
gucacaagugacucaca

SEQ ID NO: 704758 - RNA, 17 nt, Artificial Sequence
  Synthetic
gauuccauucucucaca

SEQ ID NO: 704759 - RNA, 17 nt, Artificial Sequence
  Synthetic
gaugcuguguucucaca

SEQ ID NO: 704760 - RNA, 17 nt, Artificial Sequence
  Synthetic
gaaaguguuuucucaca

SEQ ID NO: 704761 - RNA, 17 nt, Artificial Sequence
  Synthetic
ggucacaacuagucaca

SEQ ID NO: 704762 - RNA, 17 nt, Artificial Sequence
  Synthetic
ggaguaagcaugucaca

SEQ ID NO: 704763 - RNA, 17 nt, Artificial Sequence
  Synthetic
gccagaugucugucaca

SEQ ID NO: 704764 - RNA, 17 nt, Artificial Sequence
  Synthetic
ggauggaucuugucaca

SEQ ID NO: 704765 - RNA, 17 nt, Artificial Sequence
  Synthetic
guaaaugcacauucaca

SEQ ID NO: 704766 - RNA, 17 nt, Artificial Sequence
  Synthetic
gaaguguaagauucaca

SEQ ID NO: 704767 - RNA, 17 nt, Artificial Sequence
  Synthetic
guuacagaaacuucaca

SEQ ID NO: 704768 - RNA, 17 nt, Artificial Sequence
  Synthetic
gaaggcaccucuucaca

SEQ ID NO: 704769 - RNA, 17 nt, Artificial Sequence
  Synthetic
gaggcaccuucuucaca

SEQ ID NO: 704770 - RNA, 17 nt, Artificial Sequence
  Synthetic
gucaugaacauuucaca

SEQ ID NO: 704771 - RNA, 17 nt, Artificial Sequence
  Synthetic
gguguaggcauuucaca

SEQ ID NO: 704772 - RNA, 17 nt, Artificial Sequence
  Synthetic
gcauuuugacuuucaca

SEQ ID NO: 704773 - RNA, 17 nt, Artificial Sequence
  Synthetic
gaaggcaccuuuucaca

SEQ ID NO: 704774 - RNA, 17 nt, Artificial Sequence
  Synthetic
ggaaauauguuuucaca

SEQ ID NO: 704775 - RNA, 17 nt, Artificial Sequence
  Synthetic
gaugauucaaaaagaca

SEQ ID NO: 704776 - RNA, 17 nt, Artificial Sequence
  Synthetic
gguagaguagaaagaca

SEQ ID NO: 704777 - RNA, 17 nt, Artificial Sequence
  Synthetic
gaugguuuuuaaagaca

SEQ ID NO: 704778 - RNA, 17 nt, Artificial Sequence
  Synthetic
ggacuauuagcaagaca

SEQ ID NO: 704779 - RNA, 17 nt, Artificial Sequence
  Synthetic
gcccagugcagaagaca

SEQ ID NO: 704780 - RNA, 17 nt, Artificial Sequence
  Synthetic
gugaaggucagaagaca

SEQ ID NO: 704781 - RNA, 17 nt, Artificial Sequence
  Synthetic
gacucauuccgaagaca

SEQ ID NO: 704782 - RNA, 17 nt, Artificial Sequence
  Synthetic
ggaaaaggaggaagaca

SEQ ID NO: 704783 - RNA, 17 nt, Artificial Sequence
  Synthetic
ggucuacauuuaagaca

SEQ ID NO: 704784 - RNA, 17 nt, Artificial Sequence
  Synthetic
guuauguuccacagaca

SEQ ID NO: 704785 - RNA, 17 nt, Artificial Sequence
  Synthetic
gccaccauggccagaca

SEQ ID NO: 704786 - RNA, 17 nt, Artificial Sequence
  Synthetic
ggaugacagugcagaca

SEQ ID NO: 704787 - RNA, 17 nt, Artificial Sequence
  Synthetic
gagguagggcucagaca

SEQ ID NO: 704788 - RNA, 17 nt, Artificial Sequence
  Synthetic
guagcaguggucagaca

SEQ ID NO: 704789 - RNA, 17 nt, Artificial Sequence
  Synthetic
gagggacacuucagaca

SEQ ID NO: 704790 - RNA, 17 nt, Artificial Sequence
  Synthetic
gacgccacacagagaca

SEQ ID NO: 704791 - RNA, 17 nt, Artificial Sequence
  Synthetic
gaaacaagacagagaca

SEQ ID NO: 704792 - RNA, 17 nt, Artificial Sequence
  Synthetic
ggagagugacagagaca

SEQ ID NO: 704793 - RNA, 17 nt, Artificial Sequence
  Synthetic
gcaaggccgcagagaca

SEQ ID NO: 704794 - RNA, 17 nt, Artificial Sequence
  Synthetic
gagugcuuagagagaca

SEQ ID NO: 704795 - RNA, 17 nt, Artificial Sequence
  Synthetic
gccuuccuugggagaca

SEQ ID NO: 704796 - RNA, 17 nt, Artificial Sequence
  Synthetic
gugcauccaaguagaca

SEQ ID NO: 704797 - RNA, 17 nt, Artificial Sequence
  Synthetic
gcucucugauuuagaca

SEQ ID NO: 704798 - RNA, 17 nt, Artificial Sequence
  Synthetic
gaccagccuggccgaca

SEQ ID NO: 704799 - RNA, 17 nt, Artificial Sequence
  Synthetic
gaguacaaauugcgaca

SEQ ID NO: 704800 - RNA, 17 nt, Artificial Sequence
  Synthetic
gguugagucaaaggaca

SEQ ID NO: 704801 - RNA, 17 nt, Artificial Sequence
  Synthetic
gugaugauagaaggaca

SEQ ID NO: 704802 - RNA, 17 nt, Artificial Sequence
  Synthetic
gaaggaauuucaggaca

SEQ ID NO: 704803 - RNA, 17 nt, Artificial Sequence
  Synthetic
gagcugcuaugaggaca

SEQ ID NO: 704804 - RNA, 17 nt, Artificial Sequence
  Synthetic
guguguaagguaggaca

SEQ ID NO: 704805 - RNA, 17 nt, Artificial Sequence
  Synthetic
gaauggauaaagggaca

SEQ ID NO: 704806 - RNA, 17 nt, Artificial Sequence
  Synthetic
gggucauccuagggaca

SEQ ID NO: 704807 - RNA, 17 nt, Artificial Sequence
  Synthetic
gaagggcaagggggaca

SEQ ID NO: 704808 - RNA, 17 nt, Artificial Sequence
  Synthetic
gccuucaaacugggaca

SEQ ID NO: 704809 - RNA, 17 nt, Artificial Sequence
  Synthetic
gggaguagauugggaca

SEQ ID NO: 704810 - RNA, 17 nt, Artificial Sequence
  Synthetic
gcuguaccuuugggaca

SEQ ID NO: 704811 - RNA, 17 nt, Artificial Sequence
  Synthetic
gcuaugucacauggaca

SEQ ID NO: 704812 - RNA, 17 nt, Artificial Sequence
  Synthetic
gaauauguauauggaca

SEQ ID NO: 704813 - RNA, 17 nt, Artificial Sequence
  Synthetic
gacaaugcuucuggaca

SEQ ID NO: 704814 - RNA, 17 nt, Artificial Sequence
  Synthetic
guaaaucaccaaugaca

SEQ ID NO: 704815 - RNA, 17 nt, Artificial Sequence
  Synthetic
guccacacucaaugaca

SEQ ID NO: 704816 - RNA, 17 nt, Artificial Sequence
  Synthetic
gaaugacuuucaugaca

SEQ ID NO: 704817 - RNA, 17 nt, Artificial Sequence
  Synthetic
gguagaugaugaugaca

SEQ ID NO: 704818 - RNA, 17 nt, Artificial Sequence
  Synthetic
gauacaguaauaugaca

SEQ ID NO: 704819 - RNA, 17 nt, Artificial Sequence
  Synthetic
gacuuccuuuucugaca

SEQ ID NO: 704820 - RNA, 17 nt, Artificial Sequence
  Synthetic
gaauuuaguaauugaca

SEQ ID NO: 704821 - RNA, 17 nt, Artificial Sequence
  Synthetic
gagccauucccuugaca

SEQ ID NO: 704822 - RNA, 17 nt, Artificial Sequence
  Synthetic
gugcuugaugcuugaca

SEQ ID NO: 704823 - RNA, 17 nt, Artificial Sequence
  Synthetic
gcaauuucuauuugaca

SEQ ID NO: 704824 - RNA, 17 nt, Artificial Sequence
  Synthetic
gcuccuuuaaaaauaca

SEQ ID NO: 704825 - RNA, 17 nt, Artificial Sequence
  Synthetic
gcuggaucaggaauaca

SEQ ID NO: 704826 - RNA, 17 nt, Artificial Sequence
  Synthetic
gaaaauccaauaauaca

SEQ ID NO: 704827 - RNA, 17 nt, Artificial Sequence
  Synthetic
guuuuccuaaacauaca

SEQ ID NO: 704828 - RNA, 17 nt, Artificial Sequence
  Synthetic
guugucaauaacauaca

SEQ ID NO: 704829 - RNA, 17 nt, Artificial Sequence
  Synthetic
gcuagaagaaccauaca

SEQ ID NO: 704830 - RNA, 17 nt, Artificial Sequence
  Synthetic
gguauaauaaggauaca

SEQ ID NO: 704831 - RNA, 17 nt, Artificial Sequence
  Synthetic
gauguuauuaauauaca

SEQ ID NO: 704832 - RNA, 17 nt, Artificial Sequence
  Synthetic
gaauaaaccuauauaca

SEQ ID NO: 704833 - RNA, 17 nt, Artificial Sequence
  Synthetic
guacacacugguauaca

SEQ ID NO: 704834 - RNA, 17 nt, Artificial Sequence
  Synthetic
guuuuauaguguauaca

SEQ ID NO: 704835 - RNA, 17 nt, Artificial Sequence
  Synthetic
gaccugggaguuauaca

SEQ ID NO: 704836 - RNA, 17 nt, Artificial Sequence
  Synthetic
gacaagaauuaacuaca

SEQ ID NO: 704837 - RNA, 17 nt, Artificial Sequence
  Synthetic
gugauguuugcacuaca

SEQ ID NO: 704838 - RNA, 17 nt, Artificial Sequence
  Synthetic
gcgaaacauauacuaca

SEQ ID NO: 704839 - RNA, 17 nt, Artificial Sequence
  Synthetic
gugauauugacccuaca

SEQ ID NO: 704840 - RNA, 17 nt, Artificial Sequence
  Synthetic
gucuagccuggccuaca

SEQ ID NO: 704841 - RNA, 17 nt, Artificial Sequence
  Synthetic
gaggaagccugccuaca

SEQ ID NO: 704842 - RNA, 17 nt, Artificial Sequence
  Synthetic
gaguacuuuuuccuaca

SEQ ID NO: 704843 - RNA, 17 nt, Artificial Sequence
  Synthetic
gaguagcuggggcuaca

SEQ ID NO: 704844 - RNA, 17 nt, Artificial Sequence
  Synthetic
gagacuagcuggcuaca

SEQ ID NO: 704845 - RNA, 17 nt, Artificial Sequence
  Synthetic
gauauccagaaucuaca

SEQ ID NO: 704846 - RNA, 17 nt, Artificial Sequence
  Synthetic
ggcuuuaugcaucuaca

SEQ ID NO: 704847 - RNA, 17 nt, Artificial Sequence
  Synthetic
ggagaaaauuaucuaca

SEQ ID NO: 704848 - RNA, 17 nt, Artificial Sequence
  Synthetic
ggcuaagauugucuaca

SEQ ID NO: 704849 - RNA, 17 nt, Artificial Sequence
  Synthetic
ggacucaccauucuaca

SEQ ID NO: 704850 - RNA, 17 nt, Artificial Sequence
  Synthetic
gcagcaucuguucuaca

SEQ ID NO: 704851 - RNA, 17 nt, Artificial Sequence
  Synthetic
gagcucuuugaaguaca

SEQ ID NO: 704852 - RNA, 17 nt, Artificial Sequence
  Synthetic
gugggagccaagguaca

SEQ ID NO: 704853 - RNA, 17 nt, Artificial Sequence
  Synthetic
gaaaaaguuaggguaca

SEQ ID NO: 704854 - RNA, 17 nt, Artificial Sequence
  Synthetic
gccagugcugggguaca

SEQ ID NO: 704855 - RNA, 17 nt, Artificial Sequence
  Synthetic
gcaauccaggauguaca

SEQ ID NO: 704856 - RNA, 17 nt, Artificial Sequence
  Synthetic
gaugaugagauuguaca

SEQ ID NO: 704857 - RNA, 17 nt, Artificial Sequence
  Synthetic
gcuauaguauuuguaca

SEQ ID NO: 704858 - RNA, 17 nt, Artificial Sequence
  Synthetic
gcaaugcuaaaauuaca

SEQ ID NO: 704859 - RNA, 17 nt, Artificial Sequence
  Synthetic
gacaagcauaaauuaca

SEQ ID NO: 704860 - RNA, 17 nt, Artificial Sequence
  Synthetic
gagguaauugaauuaca

SEQ ID NO: 704861 - RNA, 17 nt, Artificial Sequence
  Synthetic
guacaacauuaauuaca

SEQ ID NO: 704862 - RNA, 17 nt, Artificial Sequence
  Synthetic
gauuaggcuucauuaca

SEQ ID NO: 704863 - RNA, 17 nt, Artificial Sequence
  Synthetic
guaauuaacauauuaca

SEQ ID NO: 704864 - RNA, 17 nt, Artificial Sequence
  Synthetic
guuuuaccucuauuaca

SEQ ID NO: 704865 - RNA, 17 nt, Artificial Sequence
  Synthetic
guauuauuauuauuaca

SEQ ID NO: 704866 - RNA, 17 nt, Artificial Sequence
  Synthetic
gauaacauauacuuaca

SEQ ID NO: 704867 - RNA, 17 nt, Artificial Sequence
  Synthetic
gcauuccacuacuuaca

SEQ ID NO: 704868 - RNA, 17 nt, Artificial Sequence
  Synthetic
guacucagguacuuaca

SEQ ID NO: 704869 - RNA, 17 nt, Artificial Sequence
  Synthetic
gaauauguuaccuuaca

SEQ ID NO: 704870 - RNA, 17 nt, Artificial Sequence
  Synthetic
gggucuuccugcuuaca

SEQ ID NO: 704871 - RNA, 17 nt, Artificial Sequence
  Synthetic
gagagagaucucuuaca

SEQ ID NO: 704872 - RNA, 17 nt, Artificial Sequence
  Synthetic
gaaaggcacuucuuaca

SEQ ID NO: 704873 - RNA, 17 nt, Artificial Sequence
  Synthetic
guagcacugcaguuaca

SEQ ID NO: 704874 - RNA, 17 nt, Artificial Sequence
  Synthetic
ggaaccaucacguuaca

SEQ ID NO: 704875 - RNA, 17 nt, Artificial Sequence
  Synthetic
ggugguuuuugguuaca

SEQ ID NO: 704876 - RNA, 17 nt, Artificial Sequence
  Synthetic
ggcacuugaaauuuaca

SEQ ID NO: 704877 - RNA, 17 nt, Artificial Sequence
  Synthetic
gaggcauguauuuuaca

SEQ ID NO: 704878 - RNA, 17 nt, Artificial Sequence
  Synthetic
ggauaguuucuuuuaca

SEQ ID NO: 704879 - RNA, 17 nt, Artificial Sequence
  Synthetic
ggaaggcuccaaaacca

SEQ ID NO: 704880 - RNA, 17 nt, Artificial Sequence
  Synthetic
gauggagcugaaaacca

SEQ ID NO: 704881 - RNA, 17 nt, Artificial Sequence
  Synthetic
gaaaaucacagaaacca

SEQ ID NO: 704882 - RNA, 17 nt, Artificial Sequence
  Synthetic
ggagacccaggaaacca

SEQ ID NO: 704883 - RNA, 17 nt, Artificial Sequence
  Synthetic
gcccucaagggaaacca

SEQ ID NO: 704884 - RNA, 17 nt, Artificial Sequence
  Synthetic
guaugucaaagcaacca

SEQ ID NO: 704885 - RNA, 17 nt, Artificial Sequence
  Synthetic
gaaaacuuguucaacca

SEQ ID NO: 704886 - RNA, 17 nt, Artificial Sequence
  Synthetic
guguuaugggagaacca

SEQ ID NO: 704887 - RNA, 17 nt, Artificial Sequence
  Synthetic
guaaaggcaaggaacca

SEQ ID NO: 704888 - RNA, 17 nt, Artificial Sequence
  Synthetic
gugcuuagaaugaacca

SEQ ID NO: 704889 - RNA, 17 nt, Artificial Sequence
  Synthetic
gagaaucacuugaacca

SEQ ID NO: 704890 - RNA, 17 nt, Artificial Sequence
  Synthetic
gagaaucccuugaacca

SEQ ID NO: 704891 - RNA, 17 nt, Artificial Sequence
  Synthetic
gagggguggaauaacca

SEQ ID NO: 704892 - RNA, 17 nt, Artificial Sequence
  Synthetic
guuaaguccucuaacca

SEQ ID NO: 704893 - RNA, 17 nt, Artificial Sequence
  Synthetic
guuauuuggaguaacca

SEQ ID NO: 704894 - RNA, 17 nt, Artificial Sequence
  Synthetic
gccacacacacacacca

SEQ ID NO: 704895 - RNA, 17 nt, Artificial Sequence
  Synthetic
gggaacaucacacacca

SEQ ID NO: 704896 - RNA, 17 nt, Artificial Sequence
  Synthetic
guggcacauacacacca

SEQ ID NO: 704897 - RNA, 17 nt, Artificial Sequence
  Synthetic
guggcacagauacacca

SEQ ID NO: 704898 - RNA, 17 nt, Artificial Sequence
  Synthetic
guggcacauauacacca

SEQ ID NO: 704899 - RNA, 17 nt, Artificial Sequence
  Synthetic
gugguacauauacacca

SEQ ID NO: 704900 - RNA, 17 nt, Artificial Sequence
  Synthetic
guggcgcguauacacca

SEQ ID NO: 704901 - RNA, 17 nt, Artificial Sequence
  Synthetic
gcuaaaaaucuacacca

SEQ ID NO: 704902 - RNA, 17 nt, Artificial Sequence
  Synthetic
guggcacauguacacca

SEQ ID NO: 704903 - RNA, 17 nt, Artificial Sequence
  Synthetic
gguacagcaaaccacca

SEQ ID NO: 704904 - RNA, 17 nt, Artificial Sequence
  Synthetic
ggugcagcaaaccacca

SEQ ID NO: 704905 - RNA, 17 nt, Artificial Sequence
  Synthetic
gguguggcaaaccacca

SEQ ID NO: 704906 - RNA, 17 nt, Artificial Sequence
  Synthetic
gggugccuacgccacca

SEQ ID NO: 704907 - RNA, 17 nt, Artificial Sequence
  Synthetic
ggcagcuauggccacca

SEQ ID NO: 704908 - RNA, 17 nt, Artificial Sequence
  Synthetic
guggcacauauccacca

SEQ ID NO: 704909 - RNA, 17 nt, Artificial Sequence
  Synthetic
ggucucaugcagcacca

SEQ ID NO: 704910 - RNA, 17 nt, Artificial Sequence
  Synthetic
gccaagagcaggcacca

SEQ ID NO: 704911 - RNA, 17 nt, Artificial Sequence
  Synthetic
gugguauacaugcacca

SEQ ID NO: 704912 - RNA, 17 nt, Artificial Sequence
  Synthetic
gaaaguuucuugcacca

SEQ ID NO: 704913 - RNA, 17 nt, Artificial Sequence
  Synthetic
guaucgcuuuugcacca

SEQ ID NO: 704914 - RNA, 17 nt, Artificial Sequence
  Synthetic
gaccuccaaaaucacca

SEQ ID NO: 704915 - RNA, 17 nt, Artificial Sequence
  Synthetic
guucaagguccucacca

SEQ ID NO: 704916 - RNA, 17 nt, Artificial Sequence
  Synthetic
gaagguauauaagacca

SEQ ID NO: 704917 - RNA, 17 nt, Artificial Sequence
  Synthetic
guuuuguugccagacca

SEQ ID NO: 704918 - RNA, 17 nt, Artificial Sequence
  Synthetic
gaacuggaaucagacca

SEQ ID NO: 704919 - RNA, 17 nt, Artificial Sequence
  Synthetic
gggguggcuggagacca

SEQ ID NO: 704920 - RNA, 17 nt, Artificial Sequence
  Synthetic
gaugcugacugagacca

SEQ ID NO: 704921 - RNA, 17 nt, Artificial Sequence
  Synthetic
gugcaguggugagacca

SEQ ID NO: 704922 - RNA, 17 nt, Artificial Sequence
  Synthetic
guccuggaccaggacca

SEQ ID NO: 704923 - RNA, 17 nt, Artificial Sequence
  Synthetic
guagagcaaggggacca

SEQ ID NO: 704924 - RNA, 17 nt, Artificial Sequence
  Synthetic
gaccuggccugggacca

SEQ ID NO: 704925 - RNA, 17 nt, Artificial Sequence
  Synthetic
guaaugcuuauggacca

SEQ ID NO: 704926 - RNA, 17 nt, Artificial Sequence
  Synthetic
guaggcaguagugacca

SEQ ID NO: 704927 - RNA, 17 nt, Artificial Sequence
  Synthetic
gggcucuugggugacca

SEQ ID NO: 704928 - RNA, 17 nt, Artificial Sequence
  Synthetic
gaccaacacaaauacca

SEQ ID NO: 704929 - RNA, 17 nt, Artificial Sequence
  Synthetic
ggucacagccaauacca

SEQ ID NO: 704930 - RNA, 17 nt, Artificial Sequence
  Synthetic
guuuuaaaugcauacca

SEQ ID NO: 704931 - RNA, 17 nt, Artificial Sequence
  Synthetic
gaauacaacagauacca

SEQ ID NO: 704932 - RNA, 17 nt, Artificial Sequence
  Synthetic
gacccaucuugauacca

SEQ ID NO: 704933 - RNA, 17 nt, Artificial Sequence
  Synthetic
gugguaucuauauacca

SEQ ID NO: 704934 - RNA, 17 nt, Artificial Sequence
  Synthetic
gcagagaaaagcuacca

SEQ ID NO: 704935 - RNA, 17 nt, Artificial Sequence
  Synthetic
guuuuuggucucuacca

SEQ ID NO: 704936 - RNA, 17 nt, Artificial Sequence
  Synthetic
gucaagugacuuuacca

SEQ ID NO: 704937 - RNA, 17 nt, Artificial Sequence
  Synthetic
guuauguggcuuuacca

SEQ ID NO: 704938 - RNA, 17 nt, Artificial Sequence
  Synthetic
gcauuuacuggaaccca

SEQ ID NO: 704939 - RNA, 17 nt, Artificial Sequence
  Synthetic
gaaagagaugacaccca

SEQ ID NO: 704940 - RNA, 17 nt, Artificial Sequence
  Synthetic
gcagcuuuuaccaccca

SEQ ID NO: 704941 - RNA, 17 nt, Artificial Sequence
  Synthetic
ggugugauggccaccca

SEQ ID NO: 704942 - RNA, 17 nt, Artificial Sequence
  Synthetic
gagaccaaaaagaccca

SEQ ID NO: 704943 - RNA, 17 nt, Artificial Sequence
  Synthetic
gaagaggggaagaccca

SEQ ID NO: 704944 - RNA, 17 nt, Artificial Sequence
  Synthetic
guugugggagggaccca

SEQ ID NO: 704945 - RNA, 17 nt, Artificial Sequence
  Synthetic
gugaaaauagauaccca

SEQ ID NO: 704946 - RNA, 17 nt, Artificial Sequence
  Synthetic
gcugaaaggauuaccca

SEQ ID NO: 704947 - RNA, 17 nt, Artificial Sequence
  Synthetic
gugggaugcacacccca

SEQ ID NO: 704948 - RNA, 17 nt, Artificial Sequence
  Synthetic
gaauuccagacacccca

SEQ ID NO: 704949 - RNA, 17 nt, Artificial Sequence
  Synthetic
gacacaaggccacccca

SEQ ID NO: 704950 - RNA, 17 nt, Artificial Sequence
  Synthetic
gguccugggucacccca

SEQ ID NO: 704951 - RNA, 17 nt, Artificial Sequence
  Synthetic
gauagcccccuacccca

SEQ ID NO: 704952 - RNA, 17 nt, Artificial Sequence
  Synthetic
gcaucaaucuggcccca

SEQ ID NO: 704953 - RNA, 17 nt, Artificial Sequence
  Synthetic
gaugauuuugcucccca

SEQ ID NO: 704954 - RNA, 17 nt, Artificial Sequence
  Synthetic
guggcaaauucagccca

SEQ ID NO: 704955 - RNA, 17 nt, Artificial Sequence
  Synthetic
ggccagaggggagccca

SEQ ID NO: 704956 - RNA, 17 nt, Artificial Sequence
  Synthetic
gccacagcaaaggccca

SEQ ID NO: 704957 - RNA, 17 nt, Artificial Sequence
  Synthetic
gauuuggucgaggccca

SEQ ID NO: 704958 - RNA, 17 nt, Artificial Sequence
  Synthetic
gggaauagggaggccca

SEQ ID NO: 704959 - RNA, 17 nt, Artificial Sequence
  Synthetic
ggcuccccucuggccca

SEQ ID NO: 704960 - RNA, 17 nt, Artificial Sequence
  Synthetic
gagccagcuguggccca

SEQ ID NO: 704961 - RNA, 17 nt, Artificial Sequence
  Synthetic
gauucccuuuuggccca

SEQ ID NO: 704962 - RNA, 17 nt, Artificial Sequence
  Synthetic
guuaagugacuugccca

SEQ ID NO: 704963 - RNA, 17 nt, Artificial Sequence
  Synthetic
guuaaguuacuugccca

SEQ ID NO: 704964 - RNA, 17 nt, Artificial Sequence
  Synthetic
gaagcauaauuugccca

SEQ ID NO: 704965 - RNA, 17 nt, Artificial Sequence
  Synthetic
gccaaaauaaaauccca

SEQ ID NO: 704966 - RNA, 17 nt, Artificial Sequence
  Synthetic
gcugccuaaccauccca

SEQ ID NO: 704967 - RNA, 17 nt, Artificial Sequence
  Synthetic
gagcuuagaucauccca

SEQ ID NO: 704968 - RNA, 17 nt, Artificial Sequence
  Synthetic
ggcugaauaauauccca

SEQ ID NO: 704969 - RNA, 17 nt, Artificial Sequence
  Synthetic
gagacugacaacuccca

SEQ ID NO: 704970 - RNA, 17 nt, Artificial Sequence
  Synthetic
ggucucagggacuccca

SEQ ID NO: 704971 - RNA, 17 nt, Artificial Sequence
  Synthetic
ggaaaaaaacaguccca

SEQ ID NO: 704972 - RNA, 17 nt, Artificial Sequence
  Synthetic
ggcugcauaguguccca

SEQ ID NO: 704973 - RNA, 17 nt, Artificial Sequence
  Synthetic
gggaaauguaguuccca

SEQ ID NO: 704974 - RNA, 17 nt, Artificial Sequence
  Synthetic
gguuccagaguuuccca

SEQ ID NO: 704975 - RNA, 17 nt, Artificial Sequence
  Synthetic
gaucaugagguuuccca

SEQ ID NO: 704976 - RNA, 17 nt, Artificial Sequence
  Synthetic
gucaauguauuuuccca

SEQ ID NO: 704977 - RNA, 17 nt, Artificial Sequence
  Synthetic
ggccagagcagaagcca

SEQ ID NO: 704978 - RNA, 17 nt, Artificial Sequence
  Synthetic
gaaguuguuagaagcca

SEQ ID NO: 704979 - RNA, 17 nt, Artificial Sequence
  Synthetic
gggaacaaaaacagcca

SEQ ID NO: 704980 - RNA, 17 nt, Artificial Sequence
  Synthetic
gcuuggaccaacagcca

SEQ ID NO: 704981 - RNA, 17 nt, Artificial Sequence
  Synthetic
gccaccacgcccagcca

SEQ ID NO: 704982 - RNA, 17 nt, Artificial Sequence
  Synthetic
gguauauugagcagcca

SEQ ID NO: 704983 - RNA, 17 nt, Artificial Sequence
  Synthetic
gcuaggugaugcagcca

SEQ ID NO: 704984 - RNA, 17 nt, Artificial Sequence
  Synthetic
ggagauaccaucagcca

SEQ ID NO: 704985 - RNA, 17 nt, Artificial Sequence
  Synthetic
gguaagggagucagcca

SEQ ID NO: 704986 - RNA, 17 nt, Artificial Sequence
  Synthetic
ggaacaaauaagagcca

SEQ ID NO: 704987 - RNA, 17 nt, Artificial Sequence
  Synthetic
ggaucugucuagagcca

SEQ ID NO: 704988 - RNA, 17 nt, Artificial Sequence
  Synthetic
gagaaccgcuugagcca

SEQ ID NO: 704989 - RNA, 17 nt, Artificial Sequence
  Synthetic
guaggaauuuauagcca

SEQ ID NO: 704990 - RNA, 17 nt, Artificial Sequence
  Synthetic
ggaggucucuagcgcca

SEQ ID NO: 704991 - RNA, 17 nt, Artificial Sequence
  Synthetic
gaguugccccugcgcca

SEQ ID NO: 704992 - RNA, 17 nt, Artificial Sequence
  Synthetic
gaaagccaagaaggcca

SEQ ID NO: 704993 - RNA, 17 nt, Artificial Sequence
  Synthetic
guuuuguauuaaggcca

SEQ ID NO: 704994 - RNA, 17 nt, Artificial Sequence
  Synthetic
guguguucaacaggcca

SEQ ID NO: 704995 - RNA, 17 nt, Artificial Sequence
  Synthetic
ggcauuuugggaggcca

SEQ ID NO: 704996 - RNA, 17 nt, Artificial Sequence
  Synthetic
gacuacagaaccggcca

SEQ ID NO: 704997 - RNA, 17 nt, Artificial Sequence
  Synthetic
gccacugcgcccggcca

SEQ ID NO: 704998 - RNA, 17 nt, Artificial Sequence
  Synthetic
ggggugggguggggcca

SEQ ID NO: 704999 - RNA, 17 nt, Artificial Sequence
  Synthetic
gaaaauccuaauggcca

SEQ ID NO: 705000 - RNA, 17 nt, Artificial Sequence
  Synthetic
gauuugggacauggcca

SEQ ID NO: 705001 - RNA, 17 nt, Artificial Sequence
  Synthetic
guuggaaguucuggcca

SEQ ID NO: 705002 - RNA, 17 nt, Artificial Sequence
  Synthetic
gccuggaggaguggcca

SEQ ID NO: 705003 - RNA, 17 nt, Artificial Sequence
  Synthetic
gacuauuaggguggcca

SEQ ID NO: 705004 - RNA, 17 nt, Artificial Sequence
  Synthetic
gaguuauggguuggcca

SEQ ID NO: 705005 - RNA, 17 nt, Artificial Sequence
  Synthetic
guauaacacacaugcca

SEQ ID NO: 705006 - RNA, 17 nt, Artificial Sequence
  Synthetic
gcacaggacagaugcca

SEQ ID NO: 705007 - RNA, 17 nt, Artificial Sequence
  Synthetic
guaccuauuauaugcca

SEQ ID NO: 705008 - RNA, 17 nt, Artificial Sequence
  Synthetic
gaaauaagaggcugcca

SEQ ID NO: 705009 - RNA, 17 nt, Artificial Sequence
  Synthetic
gguacacuaugcugcca

SEQ ID NO: 705010 - RNA, 17 nt, Artificial Sequence
  Synthetic
ggguuaaacacgugcca

SEQ ID NO: 705011 - RNA, 17 nt, Artificial Sequence
  Synthetic
gauaagcaguggugcca

SEQ ID NO: 705012 - RNA, 17 nt, Artificial Sequence
  Synthetic
gacagauaguggugcca

SEQ ID NO: 705013 - RNA, 17 nt, Artificial Sequence
  Synthetic
guuuucagaccuugcca

SEQ ID NO: 705014 - RNA, 17 nt, Artificial Sequence
  Synthetic
gauuaaauaauuugcca

SEQ ID NO: 705015 - RNA, 17 nt, Artificial Sequence
  Synthetic
guuuaaguaauuugcca

SEQ ID NO: 705016 - RNA, 17 nt, Artificial Sequence
  Synthetic
guacuaugacacaucca

SEQ ID NO: 705017 - RNA, 17 nt, Artificial Sequence
  Synthetic
guuagcucugccaucca

SEQ ID NO: 705018 - RNA, 17 nt, Artificial Sequence
  Synthetic
gaggauuacuucaucca

SEQ ID NO: 705019 - RNA, 17 nt, Artificial Sequence
  Synthetic
gaucucaucuucaucca

SEQ ID NO: 705020 - RNA, 17 nt, Artificial Sequence
  Synthetic
gguuaaaaauauaucca

SEQ ID NO: 705021 - RNA, 17 nt, Artificial Sequence
  Synthetic
gaauuugagacuaucca

SEQ ID NO: 705022 - RNA, 17 nt, Artificial Sequence
  Synthetic
gagagucaggaacucca

SEQ ID NO: 705023 - RNA, 17 nt, Artificial Sequence
  Synthetic
gugguccaaagacucca

SEQ ID NO: 705024 - RNA, 17 nt, Artificial Sequence
  Synthetic
guccuguaggaccucca

SEQ ID NO: 705025 - RNA, 17 nt, Artificial Sequence
  Synthetic
gcauuugccacccucca

SEQ ID NO: 705026 - RNA, 17 nt, Artificial Sequence
  Synthetic
gaauuuuggugccucca

SEQ ID NO: 705027 - RNA, 17 nt, Artificial Sequence
  Synthetic
gauuauaaacuccucca

SEQ ID NO: 705028 - RNA, 17 nt, Artificial Sequence
  Synthetic
gcugagugagagcucca

SEQ ID NO: 705029 - RNA, 17 nt, Artificial Sequence
  Synthetic
gaaaagcccuagcucca

SEQ ID NO: 705030 - RNA, 17 nt, Artificial Sequence
  Synthetic
gaaaauugcccucucca

SEQ ID NO: 705031 - RNA, 17 nt, Artificial Sequence
  Synthetic
guaaucacagcucucca

SEQ ID NO: 705032 - RNA, 17 nt, Artificial Sequence
  Synthetic
guucugcaggcucucca

SEQ ID NO: 705033 - RNA, 17 nt, Artificial Sequence
  Synthetic
gcuucuaaaucucucca

SEQ ID NO: 705034 - RNA, 17 nt, Artificial Sequence
  Synthetic
gagauaauaaaagucca

SEQ ID NO: 705035 - RNA, 17 nt, Artificial Sequence
  Synthetic
gggauaggcaaagucca

SEQ ID NO: 705036 - RNA, 17 nt, Artificial Sequence
  Synthetic
ggaggcugagaagucca

SEQ ID NO: 705037 - RNA, 17 nt, Artificial Sequence
  Synthetic
guucuccacugggucca

SEQ ID NO: 705038 - RNA, 17 nt, Artificial Sequence
  Synthetic
gaagaaauuacugucca

SEQ ID NO: 705039 - RNA, 17 nt, Artificial Sequence
  Synthetic
guuaaauaauuugucca

SEQ ID NO: 705040 - RNA, 17 nt, Artificial Sequence
  Synthetic
guuaagagauuugucca

SEQ ID NO: 705041 - RNA, 17 nt, Artificial Sequence
  Synthetic
gccuucaauacauucca

SEQ ID NO: 705042 - RNA, 17 nt, Artificial Sequence
  Synthetic
ggcugaaaaauauucca

SEQ ID NO: 705043 - RNA, 17 nt, Artificial Sequence
  Synthetic
ggcugaguaauauucca

SEQ ID NO: 705044 - RNA, 17 nt, Artificial Sequence
  Synthetic
guucauauccuauucca

SEQ ID NO: 705045 - RNA, 17 nt, Artificial Sequence
  Synthetic
ggcugcacaguauucca

SEQ ID NO: 705046 - RNA, 17 nt, Artificial Sequence
  Synthetic
ggcuucacaguauucca

SEQ ID NO: 705047 - RNA, 17 nt, Artificial Sequence
  Synthetic
ggccacauaguauucca

SEQ ID NO: 705048 - RNA, 17 nt, Artificial Sequence
  Synthetic
ggcugcauaguauucca

SEQ ID NO: 705049 - RNA, 17 nt, Artificial Sequence
  Synthetic
gguugcauaguauucca

SEQ ID NO: 705050 - RNA, 17 nt, Artificial Sequence
  Synthetic
ggauucauaguauucca

SEQ ID NO: 705051 - RNA, 17 nt, Artificial Sequence
  Synthetic
ggcuacguaguauucca

SEQ ID NO: 705052 - RNA, 17 nt, Artificial Sequence
  Synthetic
gguugcguaguauucca

SEQ ID NO: 705053 - RNA, 17 nt, Artificial Sequence
  Synthetic
gacuguguaguauucca

SEQ ID NO: 705054 - RNA, 17 nt, Artificial Sequence
  Synthetic
ggcuguguaguauucca

SEQ ID NO: 705055 - RNA, 17 nt, Artificial Sequence
  Synthetic
guuuugacaaacuucca

SEQ ID NO: 705056 - RNA, 17 nt, Artificial Sequence
  Synthetic
gugagugaugacuucca

SEQ ID NO: 705057 - RNA, 17 nt, Artificial Sequence
  Synthetic
gagaaugguuacuucca

SEQ ID NO: 705058 - RNA, 17 nt, Artificial Sequence
  Synthetic
ggaagcagguccuucca

SEQ ID NO: 705059 - RNA, 17 nt, Artificial Sequence
  Synthetic
gugauggguggcuucca

SEQ ID NO: 705060 - RNA, 17 nt, Artificial Sequence
  Synthetic
guuucugauuucuucca

SEQ ID NO: 705061 - RNA, 17 nt, Artificial Sequence
  Synthetic
guugcuacagaguucca

SEQ ID NO: 705062 - RNA, 17 nt, Artificial Sequence
  Synthetic
gaucauagaagguucca

SEQ ID NO: 705063 - RNA, 17 nt, Artificial Sequence
  Synthetic
gcaaaccugggguucca

SEQ ID NO: 705064 - RNA, 17 nt, Artificial Sequence
  Synthetic
gcugaaggcaauuucca

SEQ ID NO: 705065 - RNA, 17 nt, Artificial Sequence
  Synthetic
gucaagaaucauuucca

SEQ ID NO: 705066 - RNA, 17 nt, Artificial Sequence
  Synthetic
gaagcugcuuauuucca

SEQ ID NO: 705067 - RNA, 17 nt, Artificial Sequence
  Synthetic
gugucagugaguuucca

SEQ ID NO: 705068 - RNA, 17 nt, Artificial Sequence
  Synthetic
gauuuguagcuuuucca

SEQ ID NO: 705069 - RNA, 17 nt, Artificial Sequence
  Synthetic
ggaagacaauuuuucca

SEQ ID NO: 705070 - RNA, 17 nt, Artificial Sequence
  Synthetic
gaaagaaaaaaaaagca

SEQ ID NO: 705071 - RNA, 17 nt, Artificial Sequence
  Synthetic
ggcuguacaaaaaagca

SEQ ID NO: 705072 - RNA, 17 nt, Artificial Sequence
  Synthetic
gaagggggaaaaaagca

SEQ ID NO: 705073 - RNA, 17 nt, Artificial Sequence
  Synthetic
guuagaaauaaaaagca

SEQ ID NO: 705074 - RNA, 17 nt, Artificial Sequence
  Synthetic
gggauacagcaaaagca

SEQ ID NO: 705075 - RNA, 17 nt, Artificial Sequence
  Synthetic
gaaucuauugaaaagca

SEQ ID NO: 705076 - RNA, 17 nt, Artificial Sequence
  Synthetic
gugaagguugaaaagca

SEQ ID NO: 705077 - RNA, 17 nt, Artificial Sequence
  Synthetic
guucucuaagcaaagca

SEQ ID NO: 705078 - RNA, 17 nt, Artificial Sequence
  Synthetic
gcaaaaggaucaaagca

SEQ ID NO: 705079 - RNA, 17 nt, Artificial Sequence
  Synthetic
gaagggaccucaaagca

SEQ ID NO: 705080 - RNA, 17 nt, Artificial Sequence
  Synthetic
gggcauaguagaaagca

SEQ ID NO: 705081 - RNA, 17 nt, Artificial Sequence
  Synthetic
gccugugguagaaagca

SEQ ID NO: 705082 - RNA, 17 nt, Artificial Sequence
  Synthetic
gacacuacaauaaagca

SEQ ID NO: 705083 - RNA, 17 nt, Artificial Sequence
  Synthetic
ggagcaaaacuaaagca

SEQ ID NO: 705084 - RNA, 17 nt, Artificial Sequence
  Synthetic
gggauggggcuaaagca

SEQ ID NO: 705085 - RNA, 17 nt, Artificial Sequence
  Synthetic
guuggcauuuuaaagca

SEQ ID NO: 705086 - RNA, 17 nt, Artificial Sequence
  Synthetic
gugcuccuggccaagca

SEQ ID NO: 705087 - RNA, 17 nt, Artificial Sequence
  Synthetic
guuauguggcagaagca

SEQ ID NO: 705088 - RNA, 17 nt, Artificial Sequence
  Synthetic
ggccaucauuagaagca

SEQ ID NO: 705089 - RNA, 17 nt, Artificial Sequence
  Synthetic
gauaagaaaaugaagca

SEQ ID NO: 705090 - RNA, 17 nt, Artificial Sequence
  Synthetic
ggagaggggaauaagca

SEQ ID NO: 705091 - RNA, 17 nt, Artificial Sequence
  Synthetic
guagagucauauaagca

SEQ ID NO: 705092 - RNA, 17 nt, Artificial Sequence
  Synthetic
gcaauaagcaguaagca

SEQ ID NO: 705093 - RNA, 17 nt, Artificial Sequence
  Synthetic
gcaguaagcaguaagca

SEQ ID NO: 705094 - RNA, 17 nt, Artificial Sequence
  Synthetic
gaaucaauccuuaagca

SEQ ID NO: 705095 - RNA, 17 nt, Artificial Sequence
  Synthetic
gagugggucuuuaagca

SEQ ID NO: 705096 - RNA, 17 nt, Artificial Sequence
  Synthetic
gcuuacauaaaacagca

SEQ ID NO: 705097 - RNA, 17 nt, Artificial Sequence
  Synthetic
ggucucuugcaacagca

SEQ ID NO: 705098 - RNA, 17 nt, Artificial Sequence
  Synthetic
ggagagugagaacagca

SEQ ID NO: 705099 - RNA, 17 nt, Artificial Sequence
  Synthetic
gaagcaucguaacagca

SEQ ID NO: 705100 - RNA, 17 nt, Artificial Sequence
  Synthetic
ggaguaaaagcacagca

SEQ ID NO: 705101 - RNA, 17 nt, Artificial Sequence
  Synthetic
gaaaaucuuugacagca

SEQ ID NO: 705102 - RNA, 17 nt, Artificial Sequence
  Synthetic
ggugcagcacaccagca

SEQ ID NO: 705103 - RNA, 17 nt, Artificial Sequence
  Synthetic
gcugcccuccaccagca

SEQ ID NO: 705104 - RNA, 17 nt, Artificial Sequence
  Synthetic
ggugcagcgcaccagca

SEQ ID NO: 705105 - RNA, 17 nt, Artificial Sequence
  Synthetic
gugacgggagaccagca

SEQ ID NO: 705106 - RNA, 17 nt, Artificial Sequence
  Synthetic
gauccagcaacccagca

SEQ ID NO: 705107 - RNA, 17 nt, Artificial Sequence
  Synthetic
gaaagcuccacccagca

SEQ ID NO: 705108 - RNA, 17 nt, Artificial Sequence
  Synthetic
gacacuguaccccagca

SEQ ID NO: 705109 - RNA, 17 nt, Artificial Sequence
  Synthetic
ggagacaccucccagca

SEQ ID NO: 705110 - RNA, 17 nt, Artificial Sequence
  Synthetic
ggugcagcgcgccagca

SEQ ID NO: 705111 - RNA, 17 nt, Artificial Sequence
  Synthetic
gaccagccuggccagca

SEQ ID NO: 705112 - RNA, 17 nt, Artificial Sequence
  Synthetic
gagaaugagugccagca

SEQ ID NO: 705113 - RNA, 17 nt, Artificial Sequence
  Synthetic
ggugcagcgugccagca

SEQ ID NO: 705114 - RNA, 17 nt, Artificial Sequence
  Synthetic
guggagaucauccagca

SEQ ID NO: 705115 - RNA, 17 nt, Artificial Sequence
  Synthetic
gugguggauguccagca

SEQ ID NO: 705116 - RNA, 17 nt, Artificial Sequence
  Synthetic
gacuccacaaagcagca

SEQ ID NO: 705117 - RNA, 17 nt, Artificial Sequence
  Synthetic
gcucauuuagagcagca

SEQ ID NO: 705118 - RNA, 17 nt, Artificial Sequence
  Synthetic
gauuuugacuugcagca

SEQ ID NO: 705119 - RNA, 17 nt, Artificial Sequence
  Synthetic
gaagacgaauaucagca

SEQ ID NO: 705120 - RNA, 17 nt, Artificial Sequence
  Synthetic
gucuaaugaacucagca

SEQ ID NO: 705121 - RNA, 17 nt, Artificial Sequence
  Synthetic
gagccacaaggucagca

SEQ ID NO: 705122 - RNA, 17 nt, Artificial Sequence
  Synthetic
ggagauaucuuucagca

SEQ ID NO: 705123 - RNA, 17 nt, Artificial Sequence
  Synthetic
gccugggugacagagca

SEQ ID NO: 705124 - RNA, 17 nt, Artificial Sequence
  Synthetic
gaauugauggcagagca

SEQ ID NO: 705125 - RNA, 17 nt, Artificial Sequence
  Synthetic
ggagcaggaggagagca

SEQ ID NO: 705126 - RNA, 17 nt, Artificial Sequence
  Synthetic
gucaucccuaaggagca

SEQ ID NO: 705127 - RNA, 17 nt, Artificial Sequence
  Synthetic
gaaugucuagaggagca

SEQ ID NO: 705128 - RNA, 17 nt, Artificial Sequence
  Synthetic
gguuaaaaacaugagca

SEQ ID NO: 705129 - RNA, 17 nt, Artificial Sequence
  Synthetic
gacuaggaaccugagca

SEQ ID NO: 705130 - RNA, 17 nt, Artificial Sequence
  Synthetic
gucauuauaucugagca

SEQ ID NO: 705131 - RNA, 17 nt, Artificial Sequence
  Synthetic
guggaaucuagugagca

SEQ ID NO: 705132 - RNA, 17 nt, Artificial Sequence
  Synthetic
guauaaauuuuugagca

SEQ ID NO: 705133 - RNA, 17 nt, Artificial Sequence
  Synthetic
guguccauuuuugagca

SEQ ID NO: 705134 - RNA, 17 nt, Artificial Sequence
  Synthetic
gcgggaugggaauagca

SEQ ID NO: 705135 - RNA, 17 nt, Artificial Sequence
  Synthetic
gauggagggugauagca

SEQ ID NO: 705136 - RNA, 17 nt, Artificial Sequence
  Synthetic
gcauuauuacccuagca

SEQ ID NO: 705137 - RNA, 17 nt, Artificial Sequence
  Synthetic
guuggggagaaguagca

SEQ ID NO: 705138 - RNA, 17 nt, Artificial Sequence
  Synthetic
guccuaagacaguagca

SEQ ID NO: 705139 - RNA, 17 nt, Artificial Sequence
  Synthetic
guccuuuuaaauuagca

SEQ ID NO: 705140 - RNA, 17 nt, Artificial Sequence
  Synthetic
ggauuuaaguguuagca

SEQ ID NO: 705141 - RNA, 17 nt, Artificial Sequence
  Synthetic
gaauuuacauuuuagca

SEQ ID NO: 705142 - RNA, 17 nt, Artificial Sequence
  Synthetic
gcgcccgccaccacgca

SEQ ID NO: 705143 - RNA, 17 nt, Artificial Sequence
  Synthetic
gcaagcgccaccacgca

SEQ ID NO: 705144 - RNA, 17 nt, Artificial Sequence
  Synthetic
gaaaacauauggccgca

SEQ ID NO: 705145 - RNA, 17 nt, Artificial Sequence
  Synthetic
gagaauucccuggcgca

SEQ ID NO: 705146 - RNA, 17 nt, Artificial Sequence
  Synthetic
gaugccauucuaucgca

SEQ ID NO: 705147 - RNA, 17 nt, Artificial Sequence
  Synthetic
gaaaacaaaaaaaggca

SEQ ID NO: 705148 - RNA, 17 nt, Artificial Sequence
  Synthetic
gggaaauuuucaaggca

SEQ ID NO: 705149 - RNA, 17 nt, Artificial Sequence
  Synthetic
gaggaagggaacaggca

SEQ ID NO: 705150 - RNA, 17 nt, Artificial Sequence
  Synthetic
gaaugaucagccaggca

SEQ ID NO: 705151 - RNA, 17 nt, Artificial Sequence
  Synthetic
gaaaaauuagccaggca

SEQ ID NO: 705152 - RNA, 17 nt, Artificial Sequence
  Synthetic
gaaaauuauuccaggca

SEQ ID NO: 705153 - RNA, 17 nt, Artificial Sequence
  Synthetic
ggaaaugccugcaggca

SEQ ID NO: 705154 - RNA, 17 nt, Artificial Sequence
  Synthetic
gccaggacaaucaggca

SEQ ID NO: 705155 - RNA, 17 nt, Artificial Sequence
  Synthetic
gcagauaugcucaggca

SEQ ID NO: 705156 - RNA, 17 nt, Artificial Sequence
  Synthetic
guucuaagggucaggca

SEQ ID NO: 705157 - RNA, 17 nt, Artificial Sequence
  Synthetic
gaauggcuauucaggca

SEQ ID NO: 705158 - RNA, 17 nt, Artificial Sequence
  Synthetic
gaagcaaggaagaggca

SEQ ID NO: 705159 - RNA, 17 nt, Artificial Sequence
  Synthetic
gugaacauuaagaggca

SEQ ID NO: 705160 - RNA, 17 nt, Artificial Sequence
  Synthetic
ggaucagaguggaggca

SEQ ID NO: 705161 - RNA, 17 nt, Artificial Sequence
  Synthetic
guaagguccaugaggca

SEQ ID NO: 705162 - RNA, 17 nt, Artificial Sequence
  Synthetic
gaacuggguaauaggca

SEQ ID NO: 705163 - RNA, 17 nt, Artificial Sequence
  Synthetic
gggacaacacauaggca

SEQ ID NO: 705164 - RNA, 17 nt, Artificial Sequence
  Synthetic
guacucagggauaggca

SEQ ID NO: 705165 - RNA, 17 nt, Artificial Sequence
  Synthetic
gagugaaaauauaggca

SEQ ID NO: 705166 - RNA, 17 nt, Artificial Sequence
  Synthetic
gagaugucaauuaggca

SEQ ID NO: 705167 - RNA, 17 nt, Artificial Sequence
  Synthetic
gcuauuuaagccgggca

SEQ ID NO: 705168 - RNA, 17 nt, Artificial Sequence
  Synthetic
gaaaaauuagccgggca

SEQ ID NO: 705169 - RNA, 17 nt, Artificial Sequence
  Synthetic
gauaaauaggccgggca

SEQ ID NO: 705170 - RNA, 17 nt, Artificial Sequence
  Synthetic
gaauucugggccgggca

SEQ ID NO: 705171 - RNA, 17 nt, Artificial Sequence
  Synthetic
guauuuguggccgggca

SEQ ID NO: 705172 - RNA, 17 nt, Artificial Sequence
  Synthetic
gaauuggauaaggggca

SEQ ID NO: 705173 - RNA, 17 nt, Artificial Sequence
  Synthetic
gaggaaggagaggggca

SEQ ID NO: 705174 - RNA, 17 nt, Artificial Sequence
  Synthetic
gcaaaucuuggggggca

SEQ ID NO: 705175 - RNA, 17 nt, Artificial Sequence
  Synthetic
gaaaguuaaauggggca

SEQ ID NO: 705176 - RNA, 17 nt, Artificial Sequence
  Synthetic
gcauaaaaaaaugggca

SEQ ID NO: 705177 - RNA, 17 nt, Artificial Sequence
  Synthetic
ggacaaaggcaugggca

SEQ ID NO: 705178 - RNA, 17 nt, Artificial Sequence
  Synthetic
ggacauaggcaugggca

SEQ ID NO: 705179 - RNA, 17 nt, Artificial Sequence
  Synthetic
ggacguaggcaugggca

SEQ ID NO: 705180 - RNA, 17 nt, Artificial Sequence
  Synthetic
gauacacuugaugggca

SEQ ID NO: 705181 - RNA, 17 nt, Artificial Sequence
  Synthetic
gaaaaauuaacugggca

SEQ ID NO: 705182 - RNA, 17 nt, Artificial Sequence
  Synthetic
gggcuauugccugggca

SEQ ID NO: 705183 - RNA, 17 nt, Artificial Sequence
  Synthetic
gauguugaggcugggca

SEQ ID NO: 705184 - RNA, 17 nt, Artificial Sequence
  Synthetic
gaaauuuaggcugggca

SEQ ID NO: 705185 - RNA, 17 nt, Artificial Sequence
  Synthetic
guucucucggcugggca

SEQ ID NO: 705186 - RNA, 17 nt, Artificial Sequence
  Synthetic
gaugaauuggcugggca

SEQ ID NO: 705187 - RNA, 17 nt, Artificial Sequence
  Synthetic
ggacauaggcgugggca

SEQ ID NO: 705188 - RNA, 17 nt, Artificial Sequence
  Synthetic
gccugggcaacauggca

SEQ ID NO: 705189 - RNA, 17 nt, Artificial Sequence
  Synthetic
guggaggcaggauggca

SEQ ID NO: 705190 - RNA, 17 nt, Artificial Sequence
  Synthetic
gagagaaaaguauggca

SEQ ID NO: 705191 - RNA, 17 nt, Artificial Sequence
  Synthetic
gagcaguuugccuggca

SEQ ID NO: 705192 - RNA, 17 nt, Artificial Sequence
  Synthetic
ggagacaccagcuggca

SEQ ID NO: 705193 - RNA, 17 nt, Artificial Sequence
  Synthetic
gacacccaaugcuggca

SEQ ID NO: 705194 - RNA, 17 nt, Artificial Sequence
  Synthetic
gguucuccauaguggca

SEQ ID NO: 705195 - RNA, 17 nt, Artificial Sequence
  Synthetic
gagugaaacuaguggca

SEQ ID NO: 705196 - RNA, 17 nt, Artificial Sequence
  Synthetic
gggagagggugguggca

SEQ ID NO: 705197 - RNA, 17 nt, Artificial Sequence
  Synthetic
gauuggguggauuggca

SEQ ID NO: 705198 - RNA, 17 nt, Artificial Sequence
  Synthetic
guguuauaauauuggca

SEQ ID NO: 705199 - RNA, 17 nt, Artificial Sequence
  Synthetic
gugaaagaaacuuggca

SEQ ID NO: 705200 - RNA, 17 nt, Artificial Sequence
  Synthetic
guauuaacugcuuggca

SEQ ID NO: 705201 - RNA, 17 nt, Artificial Sequence
  Synthetic
gacagguuacaaaugca

SEQ ID NO: 705202 - RNA, 17 nt, Artificial Sequence
  Synthetic
gagugggaggaaaugca

SEQ ID NO: 705203 - RNA, 17 nt, Artificial Sequence
  Synthetic
gauguaauguaaaugca

SEQ ID NO: 705204 - RNA, 17 nt, Artificial Sequence
  Synthetic
gugcauggaagaaugca

SEQ ID NO: 705205 - RNA, 17 nt, Artificial Sequence
  Synthetic
gagacugacugaaugca

SEQ ID NO: 705206 - RNA, 17 nt, Artificial Sequence
  Synthetic
guugcugaagacaugca

SEQ ID NO: 705207 - RNA, 17 nt, Artificial Sequence
  Synthetic
gcaugcgcugccaugca

SEQ ID NO: 705208 - RNA, 17 nt, Artificial Sequence
  Synthetic
gcgugugcgagcaugca

SEQ ID NO: 705209 - RNA, 17 nt, Artificial Sequence
  Synthetic
ggaauaaaagagaugca

SEQ ID NO: 705210 - RNA, 17 nt, Artificial Sequence
  Synthetic
ggaguggcugggaugca

SEQ ID NO: 705211 - RNA, 17 nt, Artificial Sequence
  Synthetic
guuaucuuauggaugca

SEQ ID NO: 705212 - RNA, 17 nt, Artificial Sequence
  Synthetic
guacaaugucugaugca

SEQ ID NO: 705213 - RNA, 17 nt, Artificial Sequence
  Synthetic
gcuauuuuuucuaugca

SEQ ID NO: 705214 - RNA, 17 nt, Artificial Sequence
  Synthetic
gauuuauauaguaugca

SEQ ID NO: 705215 - RNA, 17 nt, Artificial Sequence
  Synthetic
gccacagcugguaugca

SEQ ID NO: 705216 - RNA, 17 nt, Artificial Sequence
  Synthetic
gaacucucaaaacugca

SEQ ID NO: 705217 - RNA, 17 nt, Artificial Sequence
  Synthetic
gauauaugauaacugca

SEQ ID NO: 705218 - RNA, 17 nt, Artificial Sequence
  Synthetic
gaaaaccaaacacugca

SEQ ID NO: 705219 - RNA, 17 nt, Artificial Sequence
  Synthetic
gaaaaugaaacacugca

SEQ ID NO: 705220 - RNA, 17 nt, Artificial Sequence
  Synthetic
gaaguauauucacugca

SEQ ID NO: 705221 - RNA, 17 nt, Artificial Sequence
  Synthetic
gggaacuuagaccugca

SEQ ID NO: 705222 - RNA, 17 nt, Artificial Sequence
  Synthetic
gcuuuguuugaccugca

SEQ ID NO: 705223 - RNA, 17 nt, Artificial Sequence
  Synthetic
gagacuauuauccugca

SEQ ID NO: 705224 - RNA, 17 nt, Artificial Sequence
  Synthetic
ggaacuuuuuuccugca

SEQ ID NO: 705225 - RNA, 17 nt, Artificial Sequence
  Synthetic
gcagcccaccagcugca

SEQ ID NO: 705226 - RNA, 17 nt, Artificial Sequence
  Synthetic
gagcccugccagcugca

SEQ ID NO: 705227 - RNA, 17 nt, Artificial Sequence
  Synthetic
gcuuuucaaaggcugca

SEQ ID NO: 705228 - RNA, 17 nt, Artificial Sequence
  Synthetic
gggaggucaaggcugca

SEQ ID NO: 705229 - RNA, 17 nt, Artificial Sequence
  Synthetic
gguuguggauggcugca

SEQ ID NO: 705230 - RNA, 17 nt, Artificial Sequence
  Synthetic
ggcagaaguuugcugca

SEQ ID NO: 705231 - RNA, 17 nt, Artificial Sequence
  Synthetic
guacuccugacucugca

SEQ ID NO: 705232 - RNA, 17 nt, Artificial Sequence
  Synthetic
gcaauucugacucugca

SEQ ID NO: 705233 - RNA, 17 nt, Artificial Sequence
  Synthetic
gagauuggcucucugca

SEQ ID NO: 705234 - RNA, 17 nt, Artificial Sequence
  Synthetic
guauguuguauucugca

SEQ ID NO: 705235 - RNA, 17 nt, Artificial Sequence
  Synthetic
gaaauauuuacagugca

SEQ ID NO: 705236 - RNA, 17 nt, Artificial Sequence
  Synthetic
guuuaucugugagugca

SEQ ID NO: 705237 - RNA, 17 nt, Artificial Sequence
  Synthetic
gcaauauuaaacgugca

SEQ ID NO: 705238 - RNA, 17 nt, Artificial Sequence
  Synthetic
gcaagagagcaugugca

SEQ ID NO: 705239 - RNA, 17 nt, Artificial Sequence
  Synthetic
ggacacgaauaugugca

SEQ ID NO: 705240 - RNA, 17 nt, Artificial Sequence
  Synthetic
gggggguguucugugca

SEQ ID NO: 705241 - RNA, 17 nt, Artificial Sequence
  Synthetic
gaaauugaccgugugca

SEQ ID NO: 705242 - RNA, 17 nt, Artificial Sequence
  Synthetic
gaguucuggaaauugca

SEQ ID NO: 705243 - RNA, 17 nt, Artificial Sequence
  Synthetic
guuaggaaacaauugca

SEQ ID NO: 705244 - RNA, 17 nt, Artificial Sequence
  Synthetic
ggcugcauaguauugca

SEQ ID NO: 705245 - RNA, 17 nt, Artificial Sequence
  Synthetic
ggcugaguaguauugca

SEQ ID NO: 705246 - RNA, 17 nt, Artificial Sequence
  Synthetic
gauuuucuguuauugca

SEQ ID NO: 705247 - RNA, 17 nt, Artificial Sequence
  Synthetic
gcagcagaauacuugca

SEQ ID NO: 705248 - RNA, 17 nt, Artificial Sequence
  Synthetic
guaauuaaaaccuugca

SEQ ID NO: 705249 - RNA, 17 nt, Artificial Sequence
  Synthetic
gggucugaaggcuugca

SEQ ID NO: 705250 - RNA, 17 nt, Artificial Sequence
  Synthetic
ggggaaaaccucuugca

SEQ ID NO: 705251 - RNA, 17 nt, Artificial Sequence
  Synthetic
gaacuuugaaauuugca

SEQ ID NO: 705252 - RNA, 17 nt, Artificial Sequence
  Synthetic
gucacauuuuauuugca

SEQ ID NO: 705253 - RNA, 17 nt, Artificial Sequence
  Synthetic
guagacaggacuuugca

SEQ ID NO: 705254 - RNA, 17 nt, Artificial Sequence
  Synthetic
gcccuuguggcuuugca

SEQ ID NO: 705255 - RNA, 17 nt, Artificial Sequence
  Synthetic
gacuugaaugguuugca

SEQ ID NO: 705256 - RNA, 17 nt, Artificial Sequence
  Synthetic
gucuuuuauauuuugca

SEQ ID NO: 705257 - RNA, 17 nt, Artificial Sequence
  Synthetic
gccccauaacuuuugca

SEQ ID NO: 705258 - RNA, 17 nt, Artificial Sequence
  Synthetic
guuuagucauuuuugca

SEQ ID NO: 705259 - RNA, 17 nt, Artificial Sequence
  Synthetic
gacacuuaucaaaauca

SEQ ID NO: 705260 - RNA, 17 nt, Artificial Sequence
  Synthetic
gggacaaaagaaaauca

SEQ ID NO: 705261 - RNA, 17 nt, Artificial Sequence
  Synthetic
gaauauggguaaaauca

SEQ ID NO: 705262 - RNA, 17 nt, Artificial Sequence
  Synthetic
gcauguauguaaaauca

SEQ ID NO: 705263 - RNA, 17 nt, Artificial Sequence
  Synthetic
gaauucauuuaaaauca

SEQ ID NO: 705264 - RNA, 17 nt, Artificial Sequence
  Synthetic
gcucaaugaucaaauca

SEQ ID NO: 705265 - RNA, 17 nt, Artificial Sequence
  Synthetic
guguaaugaucaaauca

SEQ ID NO: 705266 - RNA, 17 nt, Artificial Sequence
  Synthetic
gacaucaagucaaauca

SEQ ID NO: 705267 - RNA, 17 nt, Artificial Sequence
  Synthetic
gcuauggauaacaauca

SEQ ID NO: 705268 - RNA, 17 nt, Artificial Sequence
  Synthetic
guacaguggcacaauca

SEQ ID NO: 705269 - RNA, 17 nt, Artificial Sequence
  Synthetic
gugcaguggcacaauca

SEQ ID NO: 705270 - RNA, 17 nt, Artificial Sequence
  Synthetic
gagaggccucacaauca

SEQ ID NO: 705271 - RNA, 17 nt, Artificial Sequence
  Synthetic
gggaggccucacaauca

SEQ ID NO: 705272 - RNA, 17 nt, Artificial Sequence
  Synthetic
ggggggccucacaauca

SEQ ID NO: 705273 - RNA, 17 nt, Artificial Sequence
  Synthetic
guuuuaagagacaauca

SEQ ID NO: 705274 - RNA, 17 nt, Artificial Sequence
  Synthetic
gagaguuuuaccaauca

SEQ ID NO: 705275 - RNA, 17 nt, Artificial Sequence
  Synthetic
gaauuguacaagaauca

SEQ ID NO: 705276 - RNA, 17 nt, Artificial Sequence
  Synthetic
gggagagagaagaauca

SEQ ID NO: 705277 - RNA, 17 nt, Artificial Sequence
  Synthetic
ggccuuaugaagaauca

SEQ ID NO: 705278 - RNA, 17 nt, Artificial Sequence
  Synthetic
gggaggccucagaauca

SEQ ID NO: 705279 - RNA, 17 nt, Artificial Sequence
  Synthetic
gauguagaguagaauca

SEQ ID NO: 705280 - RNA, 17 nt, Artificial Sequence
  Synthetic
gcaaucuguuggaauca

SEQ ID NO: 705281 - RNA, 17 nt, Artificial Sequence
  Synthetic
gggagguaacugaauca

SEQ ID NO: 705282 - RNA, 17 nt, Artificial Sequence
  Synthetic
gggaaguaauugaauca

SEQ ID NO: 705283 - RNA, 17 nt, Artificial Sequence
  Synthetic
gagagguaauugaauca

SEQ ID NO: 705284 - RNA, 17 nt, Artificial Sequence
  Synthetic
gggagguaauugaauca

SEQ ID NO: 705285 - RNA, 17 nt, Artificial Sequence
  Synthetic
ggaggucauuugaauca

SEQ ID NO: 705286 - RNA, 17 nt, Artificial Sequence
  Synthetic
gcuuauucacauaauca

SEQ ID NO: 705287 - RNA, 17 nt, Artificial Sequence
  Synthetic
guaaggaaggauaauca

SEQ ID NO: 705288 - RNA, 17 nt, Artificial Sequence
  Synthetic
gggagguaauuuaauca

SEQ ID NO: 705289 - RNA, 17 nt, Artificial Sequence
  Synthetic
guuuuguuguuuaauca

SEQ ID NO: 705290 - RNA, 17 nt, Artificial Sequence
  Synthetic
gugaaacaagcacauca

SEQ ID NO: 705291 - RNA, 17 nt, Artificial Sequence
  Synthetic
gcauaauaaucacauca

SEQ ID NO: 705292 - RNA, 17 nt, Artificial Sequence
  Synthetic
ggguaauaaucacauca

SEQ ID NO: 705293 - RNA, 17 nt, Artificial Sequence
  Synthetic
gacuuuaguuuacauca

SEQ ID NO: 705294 - RNA, 17 nt, Artificial Sequence
  Synthetic
gacuucgugaaccauca

SEQ ID NO: 705295 - RNA, 17 nt, Artificial Sequence
  Synthetic
guuaaaucaucccauca

SEQ ID NO: 705296 - RNA, 17 nt, Artificial Sequence
  Synthetic
guaaaacaacgccauca

SEQ ID NO: 705297 - RNA, 17 nt, Artificial Sequence
  Synthetic
gaagcaacuguccauca

SEQ ID NO: 705298 - RNA, 17 nt, Artificial Sequence
  Synthetic
gucccagaucagcauca

SEQ ID NO: 705299 - RNA, 17 nt, Artificial Sequence
  Synthetic
ggugauccuuagcauca

SEQ ID NO: 705300 - RNA, 17 nt, Artificial Sequence
  Synthetic
gaugaaaaaaaucauca

SEQ ID NO: 705301 - RNA, 17 nt, Artificial Sequence
  Synthetic
gaauauuuucaucauca

SEQ ID NO: 705302 - RNA, 17 nt, Artificial Sequence
  Synthetic
gagaugagaauucauca

SEQ ID NO: 705303 - RNA, 17 nt, Artificial Sequence
  Synthetic
gagcuguuuauucauca

SEQ ID NO: 705304 - RNA, 17 nt, Artificial Sequence
  Synthetic
ggcauauccaaagauca

SEQ ID NO: 705305 - RNA, 17 nt, Artificial Sequence
  Synthetic
gcaacuuaauaagauca

SEQ ID NO: 705306 - RNA, 17 nt, Artificial Sequence
  Synthetic
gaaaucccaucagauca

SEQ ID NO: 705307 - RNA, 17 nt, Artificial Sequence
  Synthetic
guauagugaucagauca

SEQ ID NO: 705308 - RNA, 17 nt, Artificial Sequence
  Synthetic
guagagcccuuagauca

SEQ ID NO: 705309 - RNA, 17 nt, Artificial Sequence
  Synthetic
guaaaaggaaaggauca

SEQ ID NO: 705310 - RNA, 17 nt, Artificial Sequence
  Synthetic
ggauuggguaaggauca

SEQ ID NO: 705311 - RNA, 17 nt, Artificial Sequence
  Synthetic
gccuggcuuugggauca

SEQ ID NO: 705312 - RNA, 17 nt, Artificial Sequence
  Synthetic
gaaacucugcuggauca

SEQ ID NO: 705313 - RNA, 17 nt, Artificial Sequence
  Synthetic
gggaggugauuggauca

SEQ ID NO: 705314 - RNA, 17 nt, Artificial Sequence
  Synthetic
gggcuucacaaugauca

SEQ ID NO: 705315 - RNA, 17 nt, Artificial Sequence
  Synthetic
gugcagugacaugauca

SEQ ID NO: 705316 - RNA, 17 nt, Artificial Sequence
  Synthetic
gugcagugacgugauca

SEQ ID NO: 705317 - RNA, 17 nt, Artificial Sequence
  Synthetic
gugcagcggugugauca

SEQ ID NO: 705318 - RNA, 17 nt, Artificial Sequence
  Synthetic
gugaugauauuugauca

SEQ ID NO: 705319 - RNA, 17 nt, Artificial Sequence
  Synthetic
gcaucauaccaauauca

SEQ ID NO: 705320 - RNA, 17 nt, Artificial Sequence
  Synthetic
gaaaucacuacauauca

SEQ ID NO: 705321 - RNA, 17 nt, Artificial Sequence
  Synthetic
gcauaaaauucauauca

SEQ ID NO: 705322 - RNA, 17 nt, Artificial Sequence
  Synthetic
ggacugaaaagauauca

SEQ ID NO: 705323 - RNA, 17 nt, Artificial Sequence
  Synthetic
guggcacauauauauca

SEQ ID NO: 705324 - RNA, 17 nt, Artificial Sequence
  Synthetic
gcauaauaguucuauca

SEQ ID NO: 705325 - RNA, 17 nt, Artificial Sequence
  Synthetic
gaaaaacaagaguauca

SEQ ID NO: 705326 - RNA, 17 nt, Artificial Sequence
  Synthetic
guguauuucaauuauca

SEQ ID NO: 705327 - RNA, 17 nt, Artificial Sequence
  Synthetic
gaaucuaaacauuauca

SEQ ID NO: 705328 - RNA, 17 nt, Artificial Sequence
  Synthetic
gaugaucaauauuauca

SEQ ID NO: 705329 - RNA, 17 nt, Artificial Sequence
  Synthetic
gucgcuuaggcuuauca

SEQ ID NO: 705330 - RNA, 17 nt, Artificial Sequence
  Synthetic
ggcuuuauauguuauca

SEQ ID NO: 705331 - RNA, 17 nt, Artificial Sequence
  Synthetic
guauauauaguuuauca

SEQ ID NO: 705332 - RNA, 17 nt, Artificial Sequence
  Synthetic
ggaauuagcuuuuauca

SEQ ID NO: 705333 - RNA, 17 nt, Artificial Sequence
  Synthetic
gaaaaugucuuuuauca

SEQ ID NO: 705334 - RNA, 17 nt, Artificial Sequence
  Synthetic
guuaaauucuuuuauca

SEQ ID NO: 705335 - RNA, 17 nt, Artificial Sequence
  Synthetic
gaaccccaauaaacuca

SEQ ID NO: 705336 - RNA, 17 nt, Artificial Sequence
  Synthetic
gaacauaaugacacuca

SEQ ID NO: 705337 - RNA, 17 nt, Artificial Sequence
  Synthetic
gauuguaagagcacuca

SEQ ID NO: 705338 - RNA, 17 nt, Artificial Sequence
  Synthetic
gccacauauaucacuca

SEQ ID NO: 705339 - RNA, 17 nt, Artificial Sequence
  Synthetic
gaagugucucucacuca

SEQ ID NO: 705340 - RNA, 17 nt, Artificial Sequence
  Synthetic
gauaugggugagacuca

SEQ ID NO: 705341 - RNA, 17 nt, Artificial Sequence
  Synthetic
gauaaauaauagacuca

SEQ ID NO: 705342 - RNA, 17 nt, Artificial Sequence
  Synthetic
gagaacacauggacuca

SEQ ID NO: 705343 - RNA, 17 nt, Artificial Sequence
  Synthetic
ggcucugaacugacuca

SEQ ID NO: 705344 - RNA, 17 nt, Artificial Sequence
  Synthetic
ggguauuuauugacuca

SEQ ID NO: 705345 - RNA, 17 nt, Artificial Sequence
  Synthetic
guaguaccagcuacuca

SEQ ID NO: 705346 - RNA, 17 nt, Artificial Sequence
  Synthetic
guuugugaaauuacuca

SEQ ID NO: 705347 - RNA, 17 nt, Artificial Sequence
  Synthetic
gcagaauaacuuacuca

SEQ ID NO: 705348 - RNA, 17 nt, Artificial Sequence
  Synthetic
ggcuguaaucuuacuca

SEQ ID NO: 705349 - RNA, 17 nt, Artificial Sequence
  Synthetic
ggauaucagauaccuca

SEQ ID NO: 705350 - RNA, 17 nt, Artificial Sequence
  Synthetic
gccaagcagaacccuca

SEQ ID NO: 705351 - RNA, 17 nt, Artificial Sequence
  Synthetic
guagggaaugugccuca

SEQ ID NO: 705352 - RNA, 17 nt, Artificial Sequence
  Synthetic
ggaaaaacaaauccuca

SEQ ID NO: 705353 - RNA, 17 nt, Artificial Sequence
  Synthetic
gaagauaaacauccuca

SEQ ID NO: 705354 - RNA, 17 nt, Artificial Sequence
  Synthetic
ggaggcuuuccuccuca

SEQ ID NO: 705355 - RNA, 17 nt, Artificial Sequence
  Synthetic
gcaaauugugguccuca

SEQ ID NO: 705356 - RNA, 17 nt, Artificial Sequence
  Synthetic
gguguggcgauuccuca

SEQ ID NO: 705357 - RNA, 17 nt, Artificial Sequence
  Synthetic
gaaugcuccguuccuca

SEQ ID NO: 705358 - RNA, 17 nt, Artificial Sequence
  Synthetic
gaaccuuaagaagcuca

SEQ ID NO: 705359 - RNA, 17 nt, Artificial Sequence
  Synthetic
gcaggaaaggaagcuca

SEQ ID NO: 705360 - RNA, 17 nt, Artificial Sequence
  Synthetic
gauuauauuuaagcuca

SEQ ID NO: 705361 - RNA, 17 nt, Artificial Sequence
  Synthetic
ggaucgggaacagcuca

SEQ ID NO: 705362 - RNA, 17 nt, Artificial Sequence
  Synthetic
gggagcgcuacagcuca

SEQ ID NO: 705363 - RNA, 17 nt, Artificial Sequence
  Synthetic
gagauaagagaugcuca

SEQ ID NO: 705364 - RNA, 17 nt, Artificial Sequence
  Synthetic
gguuaacauacugcuca

SEQ ID NO: 705365 - RNA, 17 nt, Artificial Sequence
  Synthetic
guucacuuccgugcuca

SEQ ID NO: 705366 - RNA, 17 nt, Artificial Sequence
  Synthetic
ggacagaguugugcuca

SEQ ID NO: 705367 - RNA, 17 nt, Artificial Sequence
  Synthetic
guucauacacuugcuca

SEQ ID NO: 705368 - RNA, 17 nt, Artificial Sequence
  Synthetic
ggaagagagcuugcuca

SEQ ID NO: 705369 - RNA, 17 nt, Artificial Sequence
  Synthetic
gauuagucauuugcuca

SEQ ID NO: 705370 - RNA, 17 nt, Artificial Sequence
  Synthetic
gaauagcuguaaucuca

SEQ ID NO: 705371 - RNA, 17 nt, Artificial Sequence
  Synthetic
gaaaauuaaucaucuca

SEQ ID NO: 705372 - RNA, 17 nt, Artificial Sequence
  Synthetic
gagcaucucuuaucuca

SEQ ID NO: 705373 - RNA, 17 nt, Artificial Sequence
  Synthetic
gaagauauagacucuca

SEQ ID NO: 705374 - RNA, 17 nt, Artificial Sequence
  Synthetic
gcuggcuuugacucuca

SEQ ID NO: 705375 - RNA, 17 nt, Artificial Sequence
  Synthetic
gcuuucauuuccucuca

SEQ ID NO: 705376 - RNA, 17 nt, Artificial Sequence
  Synthetic
guucaggugugcucuca

SEQ ID NO: 705377 - RNA, 17 nt, Artificial Sequence
  Synthetic
gaguuuuuguucucuca

SEQ ID NO: 705378 - RNA, 17 nt, Artificial Sequence
  Synthetic
gaacaaaauaggucuca

SEQ ID NO: 705379 - RNA, 17 nt, Artificial Sequence
  Synthetic
gguugcguugggucuca

SEQ ID NO: 705380 - RNA, 17 nt, Artificial Sequence
  Synthetic
guauucauaaauucuca

SEQ ID NO: 705381 - RNA, 17 nt, Artificial Sequence
  Synthetic
gacuucuugacuucuca

SEQ ID NO: 705382 - RNA, 17 nt, Artificial Sequence
  Synthetic
gucucucaagcuucuca

SEQ ID NO: 705383 - RNA, 17 nt, Artificial Sequence
  Synthetic
gguuauugcucuucuca

SEQ ID NO: 705384 - RNA, 17 nt, Artificial Sequence
  Synthetic
guuccacucucuucuca

SEQ ID NO: 705385 - RNA, 17 nt, Artificial Sequence
  Synthetic
gaccuuuccauuucuca

SEQ ID NO: 705386 - RNA, 17 nt, Artificial Sequence
  Synthetic
guuggagauauuucuca

SEQ ID NO: 705387 - RNA, 17 nt, Artificial Sequence
  Synthetic
ggccaagcccaaaguca

SEQ ID NO: 705388 - RNA, 17 nt, Artificial Sequence
  Synthetic
gagaaauacucaaguca

SEQ ID NO: 705389 - RNA, 17 nt, Artificial Sequence
  Synthetic
gcacaagucugaaguca

SEQ ID NO: 705390 - RNA, 17 nt, Artificial Sequence
  Synthetic
ggacccccaauaaguca

SEQ ID NO: 705391 - RNA, 17 nt, Artificial Sequence
  Synthetic
gaauggggaauaaguca

SEQ ID NO: 705392 - RNA, 17 nt, Artificial Sequence
  Synthetic
gcugagaagguaaguca

SEQ ID NO: 705393 - RNA, 17 nt, Artificial Sequence
  Synthetic
ggcagcagccccaguca

SEQ ID NO: 705394 - RNA, 17 nt, Artificial Sequence
  Synthetic
gugggacaugccaguca

SEQ ID NO: 705395 - RNA, 17 nt, Artificial Sequence
  Synthetic
gggcaucagagcaguca

SEQ ID NO: 705396 - RNA, 17 nt, Artificial Sequence
  Synthetic
gaggaagcaaagaguca

SEQ ID NO: 705397 - RNA, 17 nt, Artificial Sequence
  Synthetic
ggguugugaaagaguca

SEQ ID NO: 705398 - RNA, 17 nt, Artificial Sequence
  Synthetic
ggcuggauggagaguca

SEQ ID NO: 705399 - RNA, 17 nt, Artificial Sequence
  Synthetic
gcacaauuaaggaguca

SEQ ID NO: 705400 - RNA, 17 nt, Artificial Sequence
  Synthetic
gagauucauuugaguca

SEQ ID NO: 705401 - RNA, 17 nt, Artificial Sequence
  Synthetic
gugagauguuugaguca

SEQ ID NO: 705402 - RNA, 17 nt, Artificial Sequence
  Synthetic
gaauaauuucuuaguca

SEQ ID NO: 705403 - RNA, 17 nt, Artificial Sequence
  Synthetic
gguaagaaucaagguca

SEQ ID NO: 705404 - RNA, 17 nt, Artificial Sequence
  Synthetic
guuccacaaagggguca

SEQ ID NO: 705405 - RNA, 17 nt, Artificial Sequence
  Synthetic
ggaagcacaagggguca

SEQ ID NO: 705406 - RNA, 17 nt, Artificial Sequence
  Synthetic
gcaaaagggcuggguca

SEQ ID NO: 705407 - RNA, 17 nt, Artificial Sequence
  Synthetic
gggagguuuuuggguca

SEQ ID NO: 705408 - RNA, 17 nt, Artificial Sequence
  Synthetic
gugaugacucaugguca

SEQ ID NO: 705409 - RNA, 17 nt, Artificial Sequence
  Synthetic
guaggcaaagcugguca

SEQ ID NO: 705410 - RNA, 17 nt, Artificial Sequence
  Synthetic
gcuguugaauuugguca

SEQ ID NO: 705411 - RNA, 17 nt, Artificial Sequence
  Synthetic
gucugggggcaauguca

SEQ ID NO: 705412 - RNA, 17 nt, Artificial Sequence
  Synthetic
gaccaagcucaauguca

SEQ ID NO: 705413 - RNA, 17 nt, Artificial Sequence
  Synthetic
gcacaugacacauguca

SEQ ID NO: 705414 - RNA, 17 nt, Artificial Sequence
  Synthetic
guaauccccacauguca

SEQ ID NO: 705415 - RNA, 17 nt, Artificial Sequence
  Synthetic
gacagcaucccauguca

SEQ ID NO: 705416 - RNA, 17 nt, Artificial Sequence
  Synthetic
ggguaaauugcauguca

SEQ ID NO: 705417 - RNA, 17 nt, Artificial Sequence
  Synthetic
gauagauauucauguca

SEQ ID NO: 705418 - RNA, 17 nt, Artificial Sequence
  Synthetic
gcauuuguaaccuguca

SEQ ID NO: 705419 - RNA, 17 nt, Artificial Sequence
  Synthetic
gcuugucugcucuguca

SEQ ID NO: 705420 - RNA, 17 nt, Artificial Sequence
  Synthetic
ggcacauuccaguguca

SEQ ID NO: 705421 - RNA, 17 nt, Artificial Sequence
  Synthetic
gauauuagaaauuguca

SEQ ID NO: 705422 - RNA, 17 nt, Artificial Sequence
  Synthetic
guccauuuguguuguca

SEQ ID NO: 705423 - RNA, 17 nt, Artificial Sequence
  Synthetic
gacaauuucauuuguca

SEQ ID NO: 705424 - RNA, 17 nt, Artificial Sequence
  Synthetic
guaaaagugcuuuguca

SEQ ID NO: 705425 - RNA, 17 nt, Artificial Sequence
  Synthetic
ggcauaucugaaauuca

SEQ ID NO: 705426 - RNA, 17 nt, Artificial Sequence
  Synthetic
ggaaaauacggaauuca

SEQ ID NO: 705427 - RNA, 17 nt, Artificial Sequence
  Synthetic
gggauuaccauaauuca

SEQ ID NO: 705428 - RNA, 17 nt, Artificial Sequence
  Synthetic
gaccaugcaaacauuca

SEQ ID NO: 705429 - RNA, 17 nt, Artificial Sequence
  Synthetic
gguaaagacaacauuca

SEQ ID NO: 705430 - RNA, 17 nt, Artificial Sequence
  Synthetic
gucugaagagacauuca

SEQ ID NO: 705431 - RNA, 17 nt, Artificial Sequence
  Synthetic
ggucuauagaccauuca

SEQ ID NO: 705432 - RNA, 17 nt, Artificial Sequence
  Synthetic
gggagagggcccauuca

SEQ ID NO: 705433 - RNA, 17 nt, Artificial Sequence
  Synthetic
gaguaaaauuccauuca

SEQ ID NO: 705434 - RNA, 17 nt, Artificial Sequence
  Synthetic
guguauccaagcauuca

SEQ ID NO: 705435 - RNA, 17 nt, Artificial Sequence
  Synthetic
gugcaguggugcauuca

SEQ ID NO: 705436 - RNA, 17 nt, Artificial Sequence
  Synthetic
gaugauuugaucauuca

SEQ ID NO: 705437 - RNA, 17 nt, Artificial Sequence
  Synthetic
gguaugacuuagauuca

SEQ ID NO: 705438 - RNA, 17 nt, Artificial Sequence
  Synthetic
ggacaugugacuauuca

SEQ ID NO: 705439 - RNA, 17 nt, Artificial Sequence
  Synthetic
gcgccccuugcuauuca

SEQ ID NO: 705440 - RNA, 17 nt, Artificial Sequence
  Synthetic
gguucuuaauguauuca

SEQ ID NO: 705441 - RNA, 17 nt, Artificial Sequence
  Synthetic
gugaccccauuuauuca

SEQ ID NO: 705442 - RNA, 17 nt, Artificial Sequence
  Synthetic
gccagcccaaaacuuca

SEQ ID NO: 705443 - RNA, 17 nt, Artificial Sequence
  Synthetic
guuacaaauacacuuca

SEQ ID NO: 705444 - RNA, 17 nt, Artificial Sequence
  Synthetic
guagcacauagacuuca

SEQ ID NO: 705445 - RNA, 17 nt, Artificial Sequence
  Synthetic
gucuugccuauacuuca

SEQ ID NO: 705446 - RNA, 17 nt, Artificial Sequence
  Synthetic
ggucacugguuacuuca

SEQ ID NO: 705447 - RNA, 17 nt, Artificial Sequence
  Synthetic
gagaaugaagaccuuca

SEQ ID NO: 705448 - RNA, 17 nt, Artificial Sequence
  Synthetic
guucauaaguaccuuca

SEQ ID NO: 705449 - RNA, 17 nt, Artificial Sequence
  Synthetic
guuccugauuaccuuca

SEQ ID NO: 705450 - RNA, 17 nt, Artificial Sequence
  Synthetic
gcaagguuuuaccuuca

SEQ ID NO: 705451 - RNA, 17 nt, Artificial Sequence
  Synthetic
ggacuuuauaagcuuca

SEQ ID NO: 705452 - RNA, 17 nt, Artificial Sequence
  Synthetic
gcuuuauuaaaucuuca

SEQ ID NO: 705453 - RNA, 17 nt, Artificial Sequence
  Synthetic
gaauauauuccucuuca

SEQ ID NO: 705454 - RNA, 17 nt, Artificial Sequence
  Synthetic
ggaacauaaucucuuca

SEQ ID NO: 705455 - RNA, 17 nt, Artificial Sequence
  Synthetic
ggcaaaaaucgucuuca

SEQ ID NO: 705456 - RNA, 17 nt, Artificial Sequence
  Synthetic
gguguggcaggucuuca

SEQ ID NO: 705457 - RNA, 17 nt, Artificial Sequence
  Synthetic
ggucucuggauucuuca

SEQ ID NO: 705458 - RNA, 17 nt, Artificial Sequence
  Synthetic
guaaguuaccaaguuca

SEQ ID NO: 705459 - RNA, 17 nt, Artificial Sequence
  Synthetic
guugcuuuccaaguuca

SEQ ID NO: 705460 - RNA, 17 nt, Artificial Sequence
  Synthetic
gggaucucucaaguuca

SEQ ID NO: 705461 - RNA, 17 nt, Artificial Sequence
  Synthetic
gggauuuaagaaguuca

SEQ ID NO: 705462 - RNA, 17 nt, Artificial Sequence
  Synthetic
gccuuagguuaaguuca

SEQ ID NO: 705463 - RNA, 17 nt, Artificial Sequence
  Synthetic
gaaaacuuaauaguuca

SEQ ID NO: 705464 - RNA, 17 nt, Artificial Sequence
  Synthetic
gcucagugacacguuca

SEQ ID NO: 705465 - RNA, 17 nt, Artificial Sequence
  Synthetic
ggaagggacagcguuca

SEQ ID NO: 705466 - RNA, 17 nt, Artificial Sequence
  Synthetic
gagaaaccugagguuca

SEQ ID NO: 705467 - RNA, 17 nt, Artificial Sequence
  Synthetic
ggaguuauuuagguuca

SEQ ID NO: 705468 - RNA, 17 nt, Artificial Sequence
  Synthetic
gaguauuuuaggguuca

SEQ ID NO: 705469 - RNA, 17 nt, Artificial Sequence
  Synthetic
guguacuuaaugguuca

SEQ ID NO: 705470 - RNA, 17 nt, Artificial Sequence
  Synthetic
gguugaagugugguuca

SEQ ID NO: 705471 - RNA, 17 nt, Artificial Sequence
  Synthetic
gagaaauaguugguuca

SEQ ID NO: 705472 - RNA, 17 nt, Artificial Sequence
  Synthetic
guauaguaaaauguuca

SEQ ID NO: 705473 - RNA, 17 nt, Artificial Sequence
  Synthetic
gacgggaaagauguuca

SEQ ID NO: 705474 - RNA, 17 nt, Artificial Sequence
  Synthetic
gcucuaagguauguuca

SEQ ID NO: 705475 - RNA, 17 nt, Artificial Sequence
  Synthetic
guugacaaagcuguuca

SEQ ID NO: 705476 - RNA, 17 nt, Artificial Sequence
  Synthetic
gaaagaaugucuguuca

SEQ ID NO: 705477 - RNA, 17 nt, Artificial Sequence
  Synthetic
gcuuguggcuguguuca

SEQ ID NO: 705478 - RNA, 17 nt, Artificial Sequence
  Synthetic
guuaagugacuuguuca

SEQ ID NO: 705479 - RNA, 17 nt, Artificial Sequence
  Synthetic
gguuuuuuaguuguuca

SEQ ID NO: 705480 - RNA, 17 nt, Artificial Sequence
  Synthetic
ggaguguagaaauuuca

SEQ ID NO: 705481 - RNA, 17 nt, Artificial Sequence
  Synthetic
gaauuagguaaauuuca

SEQ ID NO: 705482 - RNA, 17 nt, Artificial Sequence
  Synthetic
gacuugaaaacauuuca

SEQ ID NO: 705483 - RNA, 17 nt, Artificial Sequence
  Synthetic
ggucuauguacauuuca

SEQ ID NO: 705484 - RNA, 17 nt, Artificial Sequence
  Synthetic
gccauuuauucauuuca

SEQ ID NO: 705485 - RNA, 17 nt, Artificial Sequence
  Synthetic
gagaaggggagauuuca

SEQ ID NO: 705486 - RNA, 17 nt, Artificial Sequence
  Synthetic
guaaccugaugauuuca

SEQ ID NO: 705487 - RNA, 17 nt, Artificial Sequence
  Synthetic
gcuauugcaauauuuca

SEQ ID NO: 705488 - RNA, 17 nt, Artificial Sequence
  Synthetic
guuauugucauauuuca

SEQ ID NO: 705489 - RNA, 17 nt, Artificial Sequence
  Synthetic
ggcugaauaguauuuca

SEQ ID NO: 705490 - RNA, 17 nt, Artificial Sequence
  Synthetic
gacuauguaguauuuca

SEQ ID NO: 705491 - RNA, 17 nt, Artificial Sequence
  Synthetic
gaggaacuuaacuuuca

SEQ ID NO: 705492 - RNA, 17 nt, Artificial Sequence
  Synthetic
gucagagacugcuuuca

SEQ ID NO: 705493 - RNA, 17 nt, Artificial Sequence
  Synthetic
gcuucucuucucuuuca

SEQ ID NO: 705494 - RNA, 17 nt, Artificial Sequence
  Synthetic
gaucuaauacaguuuca

SEQ ID NO: 705495 - RNA, 17 nt, Artificial Sequence
  Synthetic
gagaauuuggcguuuca

SEQ ID NO: 705496 - RNA, 17 nt, Artificial Sequence
  Synthetic
guuugaaauggguuuca

SEQ ID NO: 705497 - RNA, 17 nt, Artificial Sequence
  Synthetic
gccccaggaauguuuca

SEQ ID NO: 705498 - RNA, 17 nt, Artificial Sequence
  Synthetic
guagauugcauguuuca

SEQ ID NO: 705499 - RNA, 17 nt, Artificial Sequence
  Synthetic
gcaguagucuuguuuca

SEQ ID NO: 705500 - RNA, 17 nt, Artificial Sequence
  Synthetic
gccucaucagauuuuca

SEQ ID NO: 705501 - RNA, 17 nt, Artificial Sequence
  Synthetic
gggaccagcuauuuuca

SEQ ID NO: 705502 - RNA, 17 nt, Artificial Sequence
  Synthetic
gaguauucuuauuuuca

SEQ ID NO: 705503 - RNA, 17 nt, Artificial Sequence
  Synthetic
gugugagacacuuuuca

SEQ ID NO: 705504 - RNA, 17 nt, Artificial Sequence
  Synthetic
ggaggacggucuuuuca

SEQ ID NO: 705505 - RNA, 17 nt, Artificial Sequence
  Synthetic
gccugguaaaguuuuca

SEQ ID NO: 705506 - RNA, 17 nt, Artificial Sequence
  Synthetic
gauuugugcuguuuuca

SEQ ID NO: 705507 - RNA, 17 nt, Artificial Sequence
  Synthetic
gaaaugauuuguuuuca

SEQ ID NO: 705508 - RNA, 17 nt, Artificial Sequence
  Synthetic
guaacuuaaauuuuuca

SEQ ID NO: 705509 - RNA, 17 nt, Artificial Sequence
  Synthetic
gugaccucaauuuuuca

SEQ ID NO: 705510 - RNA, 17 nt, Artificial Sequence
  Synthetic
gaucucauucuuuuuca

SEQ ID NO: 705511 - RNA, 17 nt, Artificial Sequence
  Synthetic
ggaaagggaaaaaaaga

SEQ ID NO: 705512 - RNA, 17 nt, Artificial Sequence
  Synthetic
guauacauagaaaaaga

SEQ ID NO: 705513 - RNA, 17 nt, Artificial Sequence
  Synthetic
gcagagcuugaaaaaga

SEQ ID NO: 705514 - RNA, 17 nt, Artificial Sequence
  Synthetic
gguuaauaauaaaaaga

SEQ ID NO: 705515 - RNA, 17 nt, Artificial Sequence
  Synthetic
gaaaacauuuaaaaaga

SEQ ID NO: 705516 - RNA, 17 nt, Artificial Sequence
  Synthetic
gcucuggacacaaaaga

SEQ ID NO: 705517 - RNA, 17 nt, Artificial Sequence
  Synthetic
gccauauagccaaaaga

SEQ ID NO: 705518 - RNA, 17 nt, Artificial Sequence
  Synthetic
ggagaaugagcaaaaga

SEQ ID NO: 705519 - RNA, 17 nt, Artificial Sequence
  Synthetic
ggaaaugaaggaaaaga

SEQ ID NO: 705520 - RNA, 17 nt, Artificial Sequence
  Synthetic
gcagggauaauaaaaga

SEQ ID NO: 705521 - RNA, 17 nt, Artificial Sequence
  Synthetic
gaagugcuaaacaaaga

SEQ ID NO: 705522 - RNA, 17 nt, Artificial Sequence
  Synthetic
gaaggagagaacaaaga

SEQ ID NO: 705523 - RNA, 17 nt, Artificial Sequence
  Synthetic
guaagaagagacaaaga

SEQ ID NO: 705524 - RNA, 17 nt, Artificial Sequence
  Synthetic
guugaaugagccaaaga

SEQ ID NO: 705525 - RNA, 17 nt, Artificial Sequence
  Synthetic
gccaaccaugccaaaga

SEQ ID NO: 705526 - RNA, 17 nt, Artificial Sequence
  Synthetic
guuucuagauccaaaga

SEQ ID NO: 705527 - RNA, 17 nt, Artificial Sequence
  Synthetic
guugcagugagcaaaga

SEQ ID NO: 705528 - RNA, 17 nt, Artificial Sequence
  Synthetic
gugccuuagcucaaaga

SEQ ID NO: 705529 - RNA, 17 nt, Artificial Sequence
  Synthetic
gguuauacauucaaaga

SEQ ID NO: 705530 - RNA, 17 nt, Artificial Sequence
  Synthetic
ggauagcugaagaaaga

SEQ ID NO: 705531 - RNA, 17 nt, Artificial Sequence
  Synthetic
gucauuuagcagaaaga

SEQ ID NO: 705532 - RNA, 17 nt, Artificial Sequence
  Synthetic
gugggcuggcagaaaga

SEQ ID NO: 705533 - RNA, 17 nt, Artificial Sequence
  Synthetic
gauagguucuagaaaga

SEQ ID NO: 705534 - RNA, 17 nt, Artificial Sequence
  Synthetic
gauuugauuuagaaaga

SEQ ID NO: 705535 - RNA, 17 nt, Artificial Sequence
  Synthetic
guuaaagugaggaaaga

SEQ ID NO: 705536 - RNA, 17 nt, Artificial Sequence
  Synthetic
gguggguaagggaaaga

SEQ ID NO: 705537 - RNA, 17 nt, Artificial Sequence
  Synthetic
ggaugcuuugggaaaga

SEQ ID NO: 705538 - RNA, 17 nt, Artificial Sequence
  Synthetic
guaguaguauggaaaga

SEQ ID NO: 705539 - RNA, 17 nt, Artificial Sequence
  Synthetic
gaaccuagagugaaaga

SEQ ID NO: 705540 - RNA, 17 nt, Artificial Sequence
  Synthetic
gugcacacaaauaaaga

SEQ ID NO: 705541 - RNA, 17 nt, Artificial Sequence
  Synthetic
gggcauggaaauaaaga

SEQ ID NO: 705542 - RNA, 17 nt, Artificial Sequence
  Synthetic
ggcucuuuaaauaaaga

SEQ ID NO: 705543 - RNA, 17 nt, Artificial Sequence
  Synthetic
gggccugaaaguaaaga

SEQ ID NO: 705544 - RNA, 17 nt, Artificial Sequence
  Synthetic
guagaguucaguaaaga

SEQ ID NO: 705545 - RNA, 17 nt, Artificial Sequence
  Synthetic
gguaccuugaguaaaga

SEQ ID NO: 705546 - RNA, 17 nt, Artificial Sequence
  Synthetic
gcuuauaaucguaaaga

SEQ ID NO: 705547 - RNA, 17 nt, Artificial Sequence
  Synthetic
gguuuuggguguaaaga

SEQ ID NO: 705548 - RNA, 17 nt, Artificial Sequence
  Synthetic
ggcuccuuuuguaaaga

SEQ ID NO: 705549 - RNA, 17 nt, Artificial Sequence
  Synthetic
guuuugaauguuaaaga

SEQ ID NO: 705550 - RNA, 17 nt, Artificial Sequence
  Synthetic
gacuagaguuuuaaaga

SEQ ID NO: 705551 - RNA, 17 nt, Artificial Sequence
  Synthetic
ggcugacagacacaaga

SEQ ID NO: 705552 - RNA, 17 nt, Artificial Sequence
  Synthetic
guuccaggcccacaaga

SEQ ID NO: 705553 - RNA, 17 nt, Artificial Sequence
  Synthetic
gauacagacucacaaga

SEQ ID NO: 705554 - RNA, 17 nt, Artificial Sequence
  Synthetic
guguuugauagacaaga

SEQ ID NO: 705555 - RNA, 17 nt, Artificial Sequence
  Synthetic
gaaagaauguaccaaga

SEQ ID NO: 705556 - RNA, 17 nt, Artificial Sequence
  Synthetic
gaucauaagacccaaga

SEQ ID NO: 705557 - RNA, 17 nt, Artificial Sequence
  Synthetic
guggcagugagccaaga

SEQ ID NO: 705558 - RNA, 17 nt, Artificial Sequence
  Synthetic
guugcagugagccaaga

SEQ ID NO: 705559 - RNA, 17 nt, Artificial Sequence
  Synthetic
gaucaaccuggccaaga

SEQ ID NO: 705560 - RNA, 17 nt, Artificial Sequence
  Synthetic
gaccagccuggccaaga

SEQ ID NO: 705561 - RNA, 17 nt, Artificial Sequence
  Synthetic
gaccagucuggccaaga

SEQ ID NO: 705562 - RNA, 17 nt, Artificial Sequence
  Synthetic
guauguagacuccaaga

SEQ ID NO: 705563 - RNA, 17 nt, Artificial Sequence
  Synthetic
ggaacugguguccaaga

SEQ ID NO: 705564 - RNA, 17 nt, Artificial Sequence
  Synthetic
gagaauguauuccaaga

SEQ ID NO: 705565 - RNA, 17 nt, Artificial Sequence
  Synthetic
guauuucaucagcaaga

SEQ ID NO: 705566 - RNA, 17 nt, Artificial Sequence
  Synthetic
guuguuuuaaggcaaga

SEQ ID NO: 705567 - RNA, 17 nt, Artificial Sequence
  Synthetic
gacauuacauggcaaga

SEQ ID NO: 705568 - RNA, 17 nt, Artificial Sequence
  Synthetic
gucacaugauggcaaga

SEQ ID NO: 705569 - RNA, 17 nt, Artificial Sequence
  Synthetic
gaccuaaucuggcaaga

SEQ ID NO: 705570 - RNA, 17 nt, Artificial Sequence
  Synthetic
gauuguuguaugcaaga

SEQ ID NO: 705571 - RNA, 17 nt, Artificial Sequence
  Synthetic
gugcauuugaaucaaga

SEQ ID NO: 705572 - RNA, 17 nt, Artificial Sequence
  Synthetic
ggaucaauucaucaaga

SEQ ID NO: 705573 - RNA, 17 nt, Artificial Sequence
  Synthetic
ggagucagagaucaaga

SEQ ID NO: 705574 - RNA, 17 nt, Artificial Sequence
  Synthetic
gaaagccuaucucaaga

SEQ ID NO: 705575 - RNA, 17 nt, Artificial Sequence
  Synthetic
guaaaggaaagucaaga

SEQ ID NO: 705576 - RNA, 17 nt, Artificial Sequence
  Synthetic
gcuaugcagugucaaga

SEQ ID NO: 705577 - RNA, 17 nt, Artificial Sequence
  Synthetic
ggaacugcaauucaaga

SEQ ID NO: 705578 - RNA, 17 nt, Artificial Sequence
  Synthetic
ggaagaagaauucaaga

SEQ ID NO: 705579 - RNA, 17 nt, Artificial Sequence
  Synthetic
gaauacaaaaaagaaga

SEQ ID NO: 705580 - RNA, 17 nt, Artificial Sequence
  Synthetic
ggaguggaagaagaaga

SEQ ID NO: 705581 - RNA, 17 nt, Artificial Sequence
  Synthetic
guaagaaggccagaaga

SEQ ID NO: 705582 - RNA, 17 nt, Artificial Sequence
  Synthetic
gugaagacagcagaaga

SEQ ID NO: 705583 - RNA, 17 nt, Artificial Sequence
  Synthetic
gccauaguagcagaaga

SEQ ID NO: 705584 - RNA, 17 nt, Artificial Sequence
  Synthetic
guuuggccaucagaaga

SEQ ID NO: 705585 - RNA, 17 nt, Artificial Sequence
  Synthetic
gaauuuggaggagaaga

SEQ ID NO: 705586 - RNA, 17 nt, Artificial Sequence
  Synthetic
guucguagaugagaaga

SEQ ID NO: 705587 - RNA, 17 nt, Artificial Sequence
  Synthetic
gcggagcuaugagaaga

SEQ ID NO: 705588 - RNA, 17 nt, Artificial Sequence
  Synthetic
guagagcugugagaaga

SEQ ID NO: 705589 - RNA, 17 nt, Artificial Sequence
  Synthetic
gaauacagaguagaaga

SEQ ID NO: 705590 - RNA, 17 nt, Artificial Sequence
  Synthetic
gaaagaauucacgaaga

SEQ ID NO: 705591 - RNA, 17 nt, Artificial Sequence
  Synthetic
gagggcuuucaggaaga

SEQ ID NO: 705592 - RNA, 17 nt, Artificial Sequence
  Synthetic
gaauuuugagaggaaga

SEQ ID NO: 705593 - RNA, 17 nt, Artificial Sequence
  Synthetic
gagagaaaaagggaaga

SEQ ID NO: 705594 - RNA, 17 nt, Artificial Sequence
  Synthetic
gaaagugucagggaaga

SEQ ID NO: 705595 - RNA, 17 nt, Artificial Sequence
  Synthetic
gaagacagcugggaaga

SEQ ID NO: 705596 - RNA, 17 nt, Artificial Sequence
  Synthetic
gaggagugaguggaaga

SEQ ID NO: 705597 - RNA, 17 nt, Artificial Sequence
  Synthetic
gagcaaagauuggaaga

SEQ ID NO: 705598 - RNA, 17 nt, Artificial Sequence
  Synthetic
gugagaucaaaugaaga

SEQ ID NO: 705599 - RNA, 17 nt, Artificial Sequence
  Synthetic
guagcaaaagaugaaga

SEQ ID NO: 705600 - RNA, 17 nt, Artificial Sequence
  Synthetic
gauauuaacacugaaga

SEQ ID NO: 705601 - RNA, 17 nt, Artificial Sequence
  Synthetic
gaggugcuaaaauaaga

SEQ ID NO: 705602 - RNA, 17 nt, Artificial Sequence
  Synthetic
gcuguacagccauaaga

SEQ ID NO: 705603 - RNA, 17 nt, Artificial Sequence
  Synthetic
guaaagaguggauaaga

SEQ ID NO: 705604 - RNA, 17 nt, Artificial Sequence
  Synthetic
guagaaacauuauaaga

SEQ ID NO: 705605 - RNA, 17 nt, Artificial Sequence
  Synthetic
gcuauuuuagacuaaga

SEQ ID NO: 705606 - RNA, 17 nt, Artificial Sequence
  Synthetic
ggugaccuggccuaaga

SEQ ID NO: 705607 - RNA, 17 nt, Artificial Sequence
  Synthetic
gauuuuuuuagcuaaga

SEQ ID NO: 705608 - RNA, 17 nt, Artificial Sequence
  Synthetic
gguuaugucaucuaaga

SEQ ID NO: 705609 - RNA, 17 nt, Artificial Sequence
  Synthetic
ggcuuguccuucuaaga

SEQ ID NO: 705610 - RNA, 17 nt, Artificial Sequence
  Synthetic
ggauuuuuaaaguaaga

SEQ ID NO: 705611 - RNA, 17 nt, Artificial Sequence
  Synthetic
guaguuaacugguaaga

SEQ ID NO: 705612 - RNA, 17 nt, Artificial Sequence
  Synthetic
gcaugucaaaauuaaga

SEQ ID NO: 705613 - RNA, 17 nt, Artificial Sequence
  Synthetic
guuauccaauauuaaga

SEQ ID NO: 705614 - RNA, 17 nt, Artificial Sequence
  Synthetic
gcuaaauucccuuaaga

SEQ ID NO: 705615 - RNA, 17 nt, Artificial Sequence
  Synthetic
gugaacauugcuuaaga

SEQ ID NO: 705616 - RNA, 17 nt, Artificial Sequence
  Synthetic
gcgccuguguguuaaga

SEQ ID NO: 705617 - RNA, 17 nt, Artificial Sequence
  Synthetic
ggggaaugucuuuaaga

SEQ ID NO: 705618 - RNA, 17 nt, Artificial Sequence
  Synthetic
gugugcuuucuuuaaga

SEQ ID NO: 705619 - RNA, 17 nt, Artificial Sequence
  Synthetic
gauaauuauguuuaaga

SEQ ID NO: 705620 - RNA, 17 nt, Artificial Sequence
  Synthetic
gccauccuaaaaacaga

SEQ ID NO: 705621 - RNA, 17 nt, Artificial Sequence
  Synthetic
ggaggugagaaaacaga

SEQ ID NO: 705622 - RNA, 17 nt, Artificial Sequence
  Synthetic
gagagaagugaaacaga

SEQ ID NO: 705623 - RNA, 17 nt, Artificial Sequence
  Synthetic
gaacaccucucaacaga

SEQ ID NO: 705624 - RNA, 17 nt, Artificial Sequence
  Synthetic
gugccaggaggaacaga

SEQ ID NO: 705625 - RNA, 17 nt, Artificial Sequence
  Synthetic
gcagauugcauaacaga

SEQ ID NO: 705626 - RNA, 17 nt, Artificial Sequence
  Synthetic
ggcuggugucuaacaga

SEQ ID NO: 705627 - RNA, 17 nt, Artificial Sequence
  Synthetic
ggugcggagcccacaga

SEQ ID NO: 705628 - RNA, 17 nt, Artificial Sequence
  Synthetic
gaaauauuugccacaga

SEQ ID NO: 705629 - RNA, 17 nt, Artificial Sequence
  Synthetic
guguggggaugcacaga

SEQ ID NO: 705630 - RNA, 17 nt, Artificial Sequence
  Synthetic
ggucaggaaaagacaga

SEQ ID NO: 705631 - RNA, 17 nt, Artificial Sequence
  Synthetic
gaccauggacagacaga

SEQ ID NO: 705632 - RNA, 17 nt, Artificial Sequence
  Synthetic
ggaagaucucugacaga

SEQ ID NO: 705633 - RNA, 17 nt, Artificial Sequence
  Synthetic
gaacccauggauacaga

SEQ ID NO: 705634 - RNA, 17 nt, Artificial Sequence
  Synthetic
gguaauggaauuacaga

SEQ ID NO: 705635 - RNA, 17 nt, Artificial Sequence
  Synthetic
gguagaaagauuacaga

SEQ ID NO: 705636 - RNA, 17 nt, Artificial Sequence
  Synthetic
gaaggaagacaaccaga

SEQ ID NO: 705637 - RNA, 17 nt, Artificial Sequence
  Synthetic
gaaagcucaagaccaga

SEQ ID NO: 705638 - RNA, 17 nt, Artificial Sequence
  Synthetic
guuucuaauuuaccaga

SEQ ID NO: 705639 - RNA, 17 nt, Artificial Sequence
  Synthetic
ggucuuaguaacccaga

SEQ ID NO: 705640 - RNA, 17 nt, Artificial Sequence
  Synthetic
guguguuucugcccaga

SEQ ID NO: 705641 - RNA, 17 nt, Artificial Sequence
  Synthetic
ggaagcuucaucccaga

SEQ ID NO: 705642 - RNA, 17 nt, Artificial Sequence
  Synthetic
gaucccaggccuccaga

SEQ ID NO: 705643 - RNA, 17 nt, Artificial Sequence
  Synthetic
ggaauuaauauuccaga

SEQ ID NO: 705644 - RNA, 17 nt, Artificial Sequence
  Synthetic
guuggaaccuuuccaga

SEQ ID NO: 705645 - RNA, 17 nt, Artificial Sequence
  Synthetic
gaugaucaucaagcaga

SEQ ID NO: 705646 - RNA, 17 nt, Artificial Sequence
  Synthetic
gaauuuguggaagcaga

SEQ ID NO: 705647 - RNA, 17 nt, Artificial Sequence
  Synthetic
guaccuauugaagcaga

SEQ ID NO: 705648 - RNA, 17 nt, Artificial Sequence
  Synthetic
gguggagucccagcaga

SEQ ID NO: 705649 - RNA, 17 nt, Artificial Sequence
  Synthetic
gucucuauuuuagcaga

SEQ ID NO: 705650 - RNA, 17 nt, Artificial Sequence
  Synthetic
gugauacuaaaggcaga

SEQ ID NO: 705651 - RNA, 17 nt, Artificial Sequence
  Synthetic
gaaucccagaaggcaga

SEQ ID NO: 705652 - RNA, 17 nt, Artificial Sequence
  Synthetic
ggucacuuccaggcaga

SEQ ID NO: 705653 - RNA, 17 nt, Artificial Sequence
  Synthetic
guugguguugaggcaga

SEQ ID NO: 705654 - RNA, 17 nt, Artificial Sequence
  Synthetic
gaugcauucuaggcaga

SEQ ID NO: 705655 - RNA, 17 nt, Artificial Sequence
  Synthetic
ggcuuggcgagggcaga

SEQ ID NO: 705656 - RNA, 17 nt, Artificial Sequence
  Synthetic
gacugaaaaggggcaga

SEQ ID NO: 705657 - RNA, 17 nt, Artificial Sequence
  Synthetic
ggggauuggggggcaga

SEQ ID NO: 705658 - RNA, 17 nt, Artificial Sequence
  Synthetic
gauucagugugggcaga

SEQ ID NO: 705659 - RNA, 17 nt, Artificial Sequence
  Synthetic
gagcaggauugggcaga

SEQ ID NO: 705660 - RNA, 17 nt, Artificial Sequence
  Synthetic
guuuuuaaaaaugcaga

SEQ ID NO: 705661 - RNA, 17 nt, Artificial Sequence
  Synthetic
gcuuggcaggaugcaga

SEQ ID NO: 705662 - RNA, 17 nt, Artificial Sequence
  Synthetic
gaagagaaauaugcaga

SEQ ID NO: 705663 - RNA, 17 nt, Artificial Sequence
  Synthetic
gcaccagcuacugcaga

SEQ ID NO: 705664 - RNA, 17 nt, Artificial Sequence
  Synthetic
gaaaagcuguuugcaga

SEQ ID NO: 705665 - RNA, 17 nt, Artificial Sequence
  Synthetic
guuaaaaagucaucaga

SEQ ID NO: 705666 - RNA, 17 nt, Artificial Sequence
  Synthetic
guuugucaaagaucaga

SEQ ID NO: 705667 - RNA, 17 nt, Artificial Sequence
  Synthetic
gccaaguaauuaucaga

SEQ ID NO: 705668 - RNA, 17 nt, Artificial Sequence
  Synthetic
gaauuagaguuaucaga

SEQ ID NO: 705669 - RNA, 17 nt, Artificial Sequence
  Synthetic
guggaggcuuuaucaga

SEQ ID NO: 705670 - RNA, 17 nt, Artificial Sequence
  Synthetic
gacuuugaagacucaga

SEQ ID NO: 705671 - RNA, 17 nt, Artificial Sequence
  Synthetic
gacacuggagacucaga

SEQ ID NO: 705672 - RNA, 17 nt, Artificial Sequence
  Synthetic
gcagaaguucccucaga

SEQ ID NO: 705673 - RNA, 17 nt, Artificial Sequence
  Synthetic
gcugugagcugcucaga

SEQ ID NO: 705674 - RNA, 17 nt, Artificial Sequence
  Synthetic
gguggagucaucucaga

SEQ ID NO: 705675 - RNA, 17 nt, Artificial Sequence
  Synthetic
guucuaaagaucucaga

SEQ ID NO: 705676 - RNA, 17 nt, Artificial Sequence
  Synthetic
gcagagguggucucaga

SEQ ID NO: 705677 - RNA, 17 nt, Artificial Sequence
  Synthetic
gcugagguggucucaga

SEQ ID NO: 705678 - RNA, 17 nt, Artificial Sequence
  Synthetic
gcagcuuuuaagucaga

SEQ ID NO: 705679 - RNA, 17 nt, Artificial Sequence
  Synthetic
gcauguguauggucaga

SEQ ID NO: 705680 - RNA, 17 nt, Artificial Sequence
  Synthetic
gaaagcauggugucaga

SEQ ID NO: 705681 - RNA, 17 nt, Artificial Sequence
  Synthetic
gcuauugaaaauucaga

SEQ ID NO: 705682 - RNA, 17 nt, Artificial Sequence
  Synthetic
guagcaaugacuucaga

SEQ ID NO: 705683 - RNA, 17 nt, Artificial Sequence
  Synthetic
gugucuucaaguucaga

SEQ ID NO: 705684 - RNA, 17 nt, Artificial Sequence
  Synthetic
gacauuaaauuuucaga

SEQ ID NO: 705685 - RNA, 17 nt, Artificial Sequence
  Synthetic
gagauuuauaaaagaga

SEQ ID NO: 705686 - RNA, 17 nt, Artificial Sequence
  Synthetic
gagaggugaacaagaga

SEQ ID NO: 705687 - RNA, 17 nt, Artificial Sequence
  Synthetic
ggcaguuuuccaagaga

SEQ ID NO: 705688 - RNA, 17 nt, Artificial Sequence
  Synthetic
gcaugagaaugaagaga

SEQ ID NO: 705689 - RNA, 17 nt, Artificial Sequence
  Synthetic
gauuccaguguaagaga

SEQ ID NO: 705690 - RNA, 17 nt, Artificial Sequence
  Synthetic
gaggagaacuacagaga

SEQ ID NO: 705691 - RNA, 17 nt, Artificial Sequence
  Synthetic
gacagagaagccagaga

SEQ ID NO: 705692 - RNA, 17 nt, Artificial Sequence
  Synthetic
gcaaaccacugcagaga

SEQ ID NO: 705693 - RNA, 17 nt, Artificial Sequence
  Synthetic
gaaguuugcugcagaga

SEQ ID NO: 705694 - RNA, 17 nt, Artificial Sequence
  Synthetic
gacgugcagugcagaga

SEQ ID NO: 705695 - RNA, 17 nt, Artificial Sequence
  Synthetic
guauuuuuuugcagaga

SEQ ID NO: 705696 - RNA, 17 nt, Artificial Sequence
  Synthetic
gaacacacaaagagaga

SEQ ID NO: 705697 - RNA, 17 nt, Artificial Sequence
  Synthetic
ggaauagacaagagaga

SEQ ID NO: 705698 - RNA, 17 nt, Artificial Sequence
  Synthetic
ggugguauuaagagaga

SEQ ID NO: 705699 - RNA, 17 nt, Artificial Sequence
  Synthetic
ggugguuuuaagagaga

SEQ ID NO: 705700 - RNA, 17 nt, Artificial Sequence
  Synthetic
guuaggacacagagaga

SEQ ID NO: 705701 - RNA, 17 nt, Artificial Sequence
  Synthetic
gagcuugcacagagaga

SEQ ID NO: 705702 - RNA, 17 nt, Artificial Sequence
  Synthetic
gccaagacagagagaga

SEQ ID NO: 705703 - RNA, 17 nt, Artificial Sequence
  Synthetic
agagagagagagagaga

SEQ ID NO: 705704 - RNA, 17 nt, Artificial Sequence
  Synthetic
ggagagagagagagaga

SEQ ID NO: 705705 - RNA, 17 nt, Artificial Sequence
  Synthetic
gaagugugaaggagaga

SEQ ID NO: 705706 - RNA, 17 nt, Artificial Sequence
  Synthetic
gaggccaaagggagaga

SEQ ID NO: 705707 - RNA, 17 nt, Artificial Sequence
  Synthetic
gaagagagagggagaga

SEQ ID NO: 705708 - RNA, 17 nt, Artificial Sequence
  Synthetic
ggguggguagggagaga

SEQ ID NO: 705709 - RNA, 17 nt, Artificial Sequence
  Synthetic
gaaccaacaaugagaga

SEQ ID NO: 705710 - RNA, 17 nt, Artificial Sequence
  Synthetic
gcaacacagaugagaga

SEQ ID NO: 705711 - RNA, 17 nt, Artificial Sequence
  Synthetic
guggaucccuugagaga

SEQ ID NO: 705712 - RNA, 17 nt, Artificial Sequence
  Synthetic
gcuuuggaguugagaga

SEQ ID NO: 705713 - RNA, 17 nt, Artificial Sequence
  Synthetic
gacucacuguugagaga

SEQ ID NO: 705714 - RNA, 17 nt, Artificial Sequence
  Synthetic
gauaaaauauauagaga

SEQ ID NO: 705715 - RNA, 17 nt, Artificial Sequence
  Synthetic
gaaugaaagacuagaga

SEQ ID NO: 705716 - RNA, 17 nt, Artificial Sequence
  Synthetic
gacaguugcucuagaga

SEQ ID NO: 705717 - RNA, 17 nt, Artificial Sequence
  Synthetic
gguauuuuuaguagaga

SEQ ID NO: 705718 - RNA, 17 nt, Artificial Sequence
  Synthetic
ggauuuuuuaguagaga

SEQ ID NO: 705719 - RNA, 17 nt, Artificial Sequence
  Synthetic
guauuuuuuaguagaga

SEQ ID NO: 705720 - RNA, 17 nt, Artificial Sequence
  Synthetic
guguuuuuuaguagaga

SEQ ID NO: 705721 - RNA, 17 nt, Artificial Sequence
  Synthetic
gaagaagaugguagaga

SEQ ID NO: 705722 - RNA, 17 nt, Artificial Sequence
  Synthetic
gcaguuaaccuuagaga

SEQ ID NO: 705723 - RNA, 17 nt, Artificial Sequence
  Synthetic
guauuuuuuuuuagaga

SEQ ID NO: 705724 - RNA, 17 nt, Artificial Sequence
  Synthetic
gccauauauucccgaga

SEQ ID NO: 705725 - RNA, 17 nt, Artificial Sequence
  Synthetic
guugcagugagccgaga

SEQ ID NO: 705726 - RNA, 17 nt, Artificial Sequence
  Synthetic
gacucagaagggcgaga

SEQ ID NO: 705727 - RNA, 17 nt, Artificial Sequence
  Synthetic
gaagaagaagaaggaga

SEQ ID NO: 705728 - RNA, 17 nt, Artificial Sequence
  Synthetic
ggagaaugggaaggaga

SEQ ID NO: 705729 - RNA, 17 nt, Artificial Sequence
  Synthetic
gaaaggagagcaggaga

SEQ ID NO: 705730 - RNA, 17 nt, Artificial Sequence
  Synthetic
gauuggagagcaggaga

SEQ ID NO: 705731 - RNA, 17 nt, Artificial Sequence
  Synthetic
ggcaaucaggcaggaga

SEQ ID NO: 705732 - RNA, 17 nt, Artificial Sequence
  Synthetic
ggagaagcggcaggaga

SEQ ID NO: 705733 - RNA, 17 nt, Artificial Sequence
  Synthetic
gagccacuaagaggaga

SEQ ID NO: 705734 - RNA, 17 nt, Artificial Sequence
  Synthetic
gaaucugggagaggaga

SEQ ID NO: 705735 - RNA, 17 nt, Artificial Sequence
  Synthetic
ggaggagcaggaggaga

SEQ ID NO: 705736 - RNA, 17 nt, Artificial Sequence
  Synthetic
gagacuuugggaggaga

SEQ ID NO: 705737 - RNA, 17 nt, Artificial Sequence
  Synthetic
gcaaugguauuaggaga

SEQ ID NO: 705738 - RNA, 17 nt, Artificial Sequence
  Synthetic
gacagaacgaagggaga

SEQ ID NO: 705739 - RNA, 17 nt, Artificial Sequence
  Synthetic
gcucugucccagggaga

SEQ ID NO: 705740 - RNA, 17 nt, Artificial Sequence
  Synthetic
gguuacuuccagggaga

SEQ ID NO: 705741 - RNA, 17 nt, Artificial Sequence
  Synthetic
gguggugcagagggaga

SEQ ID NO: 705742 - RNA, 17 nt, Artificial Sequence
  Synthetic
ggcaagaaggagggaga

SEQ ID NO: 705743 - RNA, 17 nt, Artificial Sequence
  Synthetic
gggaggagggagggaga

SEQ ID NO: 705744 - RNA, 17 nt, Artificial Sequence
  Synthetic
gauugguaauggggaga

SEQ ID NO: 705745 - RNA, 17 nt, Artificial Sequence
  Synthetic
gggaagaauuggggaga

SEQ ID NO: 705746 - RNA, 17 nt, Artificial Sequence
  Synthetic
ggcgugaaccugggaga

SEQ ID NO: 705747 - RNA, 17 nt, Artificial Sequence
  Synthetic
gugauagaauugggaga

SEQ ID NO: 705748 - RNA, 17 nt, Artificial Sequence
  Synthetic
gagccaugcaauggaga

SEQ ID NO: 705749 - RNA, 17 nt, Artificial Sequence
  Synthetic
gauucacauacuggaga

SEQ ID NO: 705750 - RNA, 17 nt, Artificial Sequence
  Synthetic
gagaagaguucuggaga

SEQ ID NO: 705751 - RNA, 17 nt, Artificial Sequence
  Synthetic
gagggagagaguggaga

SEQ ID NO: 705752 - RNA, 17 nt, Artificial Sequence
  Synthetic
gaggucacauguggaga

SEQ ID NO: 705753 - RNA, 17 nt, Artificial Sequence
  Synthetic
guauggggguguggaga

SEQ ID NO: 705754 - RNA, 17 nt, Artificial Sequence
  Synthetic
gcuuuguauguuggaga

SEQ ID NO: 705755 - RNA, 17 nt, Artificial Sequence
  Synthetic
ggacaaggcaaaugaga

SEQ ID NO: 705756 - RNA, 17 nt, Artificial Sequence
  Synthetic
gagagcucagaaugaga

SEQ ID NO: 705757 - RNA, 17 nt, Artificial Sequence
  Synthetic
gcuaugauagaaugaga

SEQ ID NO: 705758 - RNA, 17 nt, Artificial Sequence
  Synthetic
gacuucuuguaaugaga

SEQ ID NO: 705759 - RNA, 17 nt, Artificial Sequence
  Synthetic
gaaaugaugagaugaga

SEQ ID NO: 705760 - RNA, 17 nt, Artificial Sequence
  Synthetic
gaaucuaugggaugaga

SEQ ID NO: 705761 - RNA, 17 nt, Artificial Sequence
  Synthetic
guauauauaaacugaga

SEQ ID NO: 705762 - RNA, 17 nt, Artificial Sequence
  Synthetic
gucaucauuuacugaga

SEQ ID NO: 705763 - RNA, 17 nt, Artificial Sequence
  Synthetic
guguagucagucugaga

SEQ ID NO: 705764 - RNA, 17 nt, Artificial Sequence
  Synthetic
guacaaaaauucugaga

SEQ ID NO: 705765 - RNA, 17 nt, Artificial Sequence
  Synthetic
gaauaauuauucugaga

SEQ ID NO: 705766 - RNA, 17 nt, Artificial Sequence
  Synthetic
gugagggugcagugaga

SEQ ID NO: 705767 - RNA, 17 nt, Artificial Sequence
  Synthetic
gaagaugcucagugaga

SEQ ID NO: 705768 - RNA, 17 nt, Artificial Sequence
  Synthetic
gaccugcuucagugaga

SEQ ID NO: 705769 - RNA, 17 nt, Artificial Sequence
  Synthetic
gucugacgggugugaga

SEQ ID NO: 705770 - RNA, 17 nt, Artificial Sequence
  Synthetic
guaugaauggugugaga

SEQ ID NO: 705771 - RNA, 17 nt, Artificial Sequence
  Synthetic
gguauucaaaauugaga

SEQ ID NO: 705772 - RNA, 17 nt, Artificial Sequence
  Synthetic
gccuauaggaauugaga

SEQ ID NO: 705773 - RNA, 17 nt, Artificial Sequence
  Synthetic
gguauucuucauugaga

SEQ ID NO: 705774 - RNA, 17 nt, Artificial Sequence
  Synthetic
gaaaaugauacuugaga

SEQ ID NO: 705775 - RNA, 17 nt, Artificial Sequence
  Synthetic
gguaugaguucuugaga

SEQ ID NO: 705776 - RNA, 17 nt, Artificial Sequence
  Synthetic
guuuuguuuuguugaga

SEQ ID NO: 705777 - RNA, 17 nt, Artificial Sequence
  Synthetic
guuuuuauuuuuugaga

SEQ ID NO: 705778 - RNA, 17 nt, Artificial Sequence
  Synthetic
guuuuguuuuuuugaga

SEQ ID NO: 705779 - RNA, 17 nt, Artificial Sequence
  Synthetic
uuuuuuuuuuuuugaga

SEQ ID NO: 705780 - RNA, 17 nt, Artificial Sequence
  Synthetic
ggaucaagaaaaauaga

SEQ ID NO: 705781 - RNA, 17 nt, Artificial Sequence
  Synthetic
ggcauauacccaauaga

SEQ ID NO: 705782 - RNA, 17 nt, Artificial Sequence
  Synthetic
ggaaacauuucaauaga

SEQ ID NO: 705783 - RNA, 17 nt, Artificial Sequence
  Synthetic
gaggaucccagaauaga

SEQ ID NO: 705784 - RNA, 17 nt, Artificial Sequence
  Synthetic
ggcuccucuagaauaga

SEQ ID NO: 705785 - RNA, 17 nt, Artificial Sequence
  Synthetic
gggccacugcgaauaga

SEQ ID NO: 705786 - RNA, 17 nt, Artificial Sequence
  Synthetic
guuuguguaguaauaga

SEQ ID NO: 705787 - RNA, 17 nt, Artificial Sequence
  Synthetic
gaaagcuggcacauaga

SEQ ID NO: 705788 - RNA, 17 nt, Artificial Sequence
  Synthetic
guauacagggccauaga

SEQ ID NO: 705789 - RNA, 17 nt, Artificial Sequence
  Synthetic
gaauaaguguucauaga

SEQ ID NO: 705790 - RNA, 17 nt, Artificial Sequence
  Synthetic
guggagaaaaagauaga

SEQ ID NO: 705791 - RNA, 17 nt, Artificial Sequence
  Synthetic
gaacacuuggagauaga

SEQ ID NO: 705792 - RNA, 17 nt, Artificial Sequence
  Synthetic
guuaagucaaugauaga

SEQ ID NO: 705793 - RNA, 17 nt, Artificial Sequence
  Synthetic
gcuuggcacaugauaga

SEQ ID NO: 705794 - RNA, 17 nt, Artificial Sequence
  Synthetic
gcugcugagcugauaga

SEQ ID NO: 705795 - RNA, 17 nt, Artificial Sequence
  Synthetic
gaacaagagacuauaga

SEQ ID NO: 705796 - RNA, 17 nt, Artificial Sequence
  Synthetic
gauauucaaccuauaga

SEQ ID NO: 705797 - RNA, 17 nt, Artificial Sequence
  Synthetic
gauaaaauaucuauaga

SEQ ID NO: 705798 - RNA, 17 nt, Artificial Sequence
  Synthetic
gacuuaaaaaguauaga

SEQ ID NO: 705799 - RNA, 17 nt, Artificial Sequence
  Synthetic
gacaguagguguauaga

SEQ ID NO: 705800 - RNA, 17 nt, Artificial Sequence
  Synthetic
gaacagaauuuuauaga

SEQ ID NO: 705801 - RNA, 17 nt, Artificial Sequence
  Synthetic
gugagagggggacuaga

SEQ ID NO: 705802 - RNA, 17 nt, Artificial Sequence
  Synthetic
gcaucaaauuaccuaga

SEQ ID NO: 705803 - RNA, 17 nt, Artificial Sequence
  Synthetic
gagaccagcagccuaga

SEQ ID NO: 705804 - RNA, 17 nt, Artificial Sequence
  Synthetic
gcuaugaaaguccuaga

SEQ ID NO: 705805 - RNA, 17 nt, Artificial Sequence
  Synthetic
guggaagaaaagcuaga

SEQ ID NO: 705806 - RNA, 17 nt, Artificial Sequence
  Synthetic
ggaacagucaagcuaga

SEQ ID NO: 705807 - RNA, 17 nt, Artificial Sequence
  Synthetic
gcuucagcugagcuaga

SEQ ID NO: 705808 - RNA, 17 nt, Artificial Sequence
  Synthetic
ggagacaggaggcuaga

SEQ ID NO: 705809 - RNA, 17 nt, Artificial Sequence
  Synthetic
gaucauauuagucuaga

SEQ ID NO: 705810 - RNA, 17 nt, Artificial Sequence
  Synthetic
gauggagagaaaguaga

SEQ ID NO: 705811 - RNA, 17 nt, Artificial Sequence
  Synthetic
gaguucuagccaguaga

SEQ ID NO: 705812 - RNA, 17 nt, Artificial Sequence
  Synthetic
gaagcaacagcaguaga

SEQ ID NO: 705813 - RNA, 17 nt, Artificial Sequence
  Synthetic
guguaggagucaguaga

SEQ ID NO: 705814 - RNA, 17 nt, Artificial Sequence
  Synthetic
gaccaaagcauaguaga

SEQ ID NO: 705815 - RNA, 17 nt, Artificial Sequence
  Synthetic
gcuauuuucaagguaga

SEQ ID NO: 705816 - RNA, 17 nt, Artificial Sequence
  Synthetic
gaaucaaugcagguaga

SEQ ID NO: 705817 - RNA, 17 nt, Artificial Sequence
  Synthetic
guaguuuauaugguaga

SEQ ID NO: 705818 - RNA, 17 nt, Artificial Sequence
  Synthetic
gguuggaaucugguaga

SEQ ID NO: 705819 - RNA, 17 nt, Artificial Sequence
  Synthetic
ggagauuuguauguaga

SEQ ID NO: 705820 - RNA, 17 nt, Artificial Sequence
  Synthetic
gagcuuuuauguguaga

SEQ ID NO: 705821 - RNA, 17 nt, Artificial Sequence
  Synthetic
gccugauauauuguaga

SEQ ID NO: 705822 - RNA, 17 nt, Artificial Sequence
  Synthetic
ggaaaagcauuuguaga

SEQ ID NO: 705823 - RNA, 17 nt, Artificial Sequence
  Synthetic
ggacaaagucaauuaga

SEQ ID NO: 705824 - RNA, 17 nt, Artificial Sequence
  Synthetic
gugaguagagaauuaga

SEQ ID NO: 705825 - RNA, 17 nt, Artificial Sequence
  Synthetic
ggaaagacaugauuaga

SEQ ID NO: 705826 - RNA, 17 nt, Artificial Sequence
  Synthetic
guggaaaauauauuaga

SEQ ID NO: 705827 - RNA, 17 nt, Artificial Sequence
  Synthetic
gguaguuauuacuuaga

SEQ ID NO: 705828 - RNA, 17 nt, Artificial Sequence
  Synthetic
gcccagucuaaguuaga

SEQ ID NO: 705829 - RNA, 17 nt, Artificial Sequence
  Synthetic
guagguggauaguuaga

SEQ ID NO: 705830 - RNA, 17 nt, Artificial Sequence
  Synthetic
guagcagagcauuuaga

SEQ ID NO: 705831 - RNA, 17 nt, Artificial Sequence
  Synthetic
gacuguaaauauuuaga

SEQ ID NO: 705832 - RNA, 17 nt, Artificial Sequence
  Synthetic
ggagccugagguuuaga

SEQ ID NO: 705833 - RNA, 17 nt, Artificial Sequence
  Synthetic
gacaauuuguugaacga

SEQ ID NO: 705834 - RNA, 17 nt, Artificial Sequence
  Synthetic
gugaacuguccacacga

SEQ ID NO: 705835 - RNA, 17 nt, Artificial Sequence
  Synthetic
gauucaaaaccucacga

SEQ ID NO: 705836 - RNA, 17 nt, Artificial Sequence
  Synthetic
ggaagagugacagacga

SEQ ID NO: 705837 - RNA, 17 nt, Artificial Sequence
  Synthetic
gaggaaagaggcaccga

SEQ ID NO: 705838 - RNA, 17 nt, Artificial Sequence
  Synthetic
gccauguuagagaccga

SEQ ID NO: 705839 - RNA, 17 nt, Artificial Sequence
  Synthetic
guggcguaggcacccga

SEQ ID NO: 705840 - RNA, 17 nt, Artificial Sequence
  Synthetic
gugccuggcgugcccga

SEQ ID NO: 705841 - RNA, 17 nt, Artificial Sequence
  Synthetic
gcugggaugcucuccga

SEQ ID NO: 705842 - RNA, 17 nt, Artificial Sequence
  Synthetic
gggugggaugggggcga

SEQ ID NO: 705843 - RNA, 17 nt, Artificial Sequence
  Synthetic
gucgggggguggggcga

SEQ ID NO: 705844 - RNA, 17 nt, Artificial Sequence
  Synthetic
gugucagccucuggcga

SEQ ID NO: 705845 - RNA, 17 nt, Artificial Sequence
  Synthetic
gucacaccuaacugcga

SEQ ID NO: 705846 - RNA, 17 nt, Artificial Sequence
  Synthetic
guuuuuacugugugcga

SEQ ID NO: 705847 - RNA, 17 nt, Artificial Sequence
  Synthetic
gaauaaauauuaaucga

SEQ ID NO: 705848 - RNA, 17 nt, Artificial Sequence
  Synthetic
gaguuggaaaagaucga

SEQ ID NO: 705849 - RNA, 17 nt, Artificial Sequence
  Synthetic
gaacugguaucuaucga

SEQ ID NO: 705850 - RNA, 17 nt, Artificial Sequence
  Synthetic
gaacacaguaagcucga

SEQ ID NO: 705851 - RNA, 17 nt, Artificial Sequence
  Synthetic
gaagccuacagucucga

SEQ ID NO: 705852 - RNA, 17 nt, Artificial Sequence
  Synthetic
gaagacauaccagucga

SEQ ID NO: 705853 - RNA, 17 nt, Artificial Sequence
  Synthetic
gggauuaacaucuucga

SEQ ID NO: 705854 - RNA, 17 nt, Artificial Sequence
  Synthetic
gagaaaaaaaaaaagga

SEQ ID NO: 705855 - RNA, 17 nt, Artificial Sequence
  Synthetic
gaagguccaaaaaagga

SEQ ID NO: 705856 - RNA, 17 nt, Artificial Sequence
  Synthetic
guuucccccaaaaagga

SEQ ID NO: 705857 - RNA, 17 nt, Artificial Sequence
  Synthetic
gugagagagaaaaagga

SEQ ID NO: 705858 - RNA, 17 nt, Artificial Sequence
  Synthetic
gaagacacagaaaagga

SEQ ID NO: 705859 - RNA, 17 nt, Artificial Sequence
  Synthetic
ggcucaaaauaaaagga

SEQ ID NO: 705860 - RNA, 17 nt, Artificial Sequence
  Synthetic
gagacagaauaaaagga

SEQ ID NO: 705861 - RNA, 17 nt, Artificial Sequence
  Synthetic
gagauugcaacaaagga

SEQ ID NO: 705862 - RNA, 17 nt, Artificial Sequence
  Synthetic
ggaagacaaagaaagga

SEQ ID NO: 705863 - RNA, 17 nt, Artificial Sequence
  Synthetic
gagguagaaagaaagga

SEQ ID NO: 705864 - RNA, 17 nt, Artificial Sequence
  Synthetic
guauauaagagaaagga

SEQ ID NO: 705865 - RNA, 17 nt, Artificial Sequence
  Synthetic
gacccuuaaggaaagga

SEQ ID NO: 705866 - RNA, 17 nt, Artificial Sequence
  Synthetic
guauucuagggaaagga

SEQ ID NO: 705867 - RNA, 17 nt, Artificial Sequence
  Synthetic
gucugcacuuccaagga

SEQ ID NO: 705868 - RNA, 17 nt, Artificial Sequence
  Synthetic
guuagcuaaaucaagga

SEQ ID NO: 705869 - RNA, 17 nt, Artificial Sequence
  Synthetic
guucacuucaagaagga

SEQ ID NO: 705870 - RNA, 17 nt, Artificial Sequence
  Synthetic
gaagagaaccagaagga

SEQ ID NO: 705871 - RNA, 17 nt, Artificial Sequence
  Synthetic
guaggacaagagaagga

SEQ ID NO: 705872 - RNA, 17 nt, Artificial Sequence
  Synthetic
gcacucauugagaagga

SEQ ID NO: 705873 - RNA, 17 nt, Artificial Sequence
  Synthetic
gaacaaccauagaagga

SEQ ID NO: 705874 - RNA, 17 nt, Artificial Sequence
  Synthetic
gacaaagaaaggaagga

SEQ ID NO: 705875 - RNA, 17 nt, Artificial Sequence
  Synthetic
gaagaaggaaggaagga

SEQ ID NO: 705876 - RNA, 17 nt, Artificial Sequence
  Synthetic
ggacuacagaggaagga

SEQ ID NO: 705877 - RNA, 17 nt, Artificial Sequence
  Synthetic
gaaaggaggaggaagga

SEQ ID NO: 705878 - RNA, 17 nt, Artificial Sequence
  Synthetic
gagggagggaggaagga

SEQ ID NO: 705879 - RNA, 17 nt, Artificial Sequence
  Synthetic
ggaaagaaagggaagga

SEQ ID NO: 705880 - RNA, 17 nt, Artificial Sequence
  Synthetic
gucccuggagggaagga

SEQ ID NO: 705881 - RNA, 17 nt, Artificial Sequence
  Synthetic
ggcucuggggggaagga

SEQ ID NO: 705882 - RNA, 17 nt, Artificial Sequence
  Synthetic
gagaagguggggaagga

SEQ ID NO: 705883 - RNA, 17 nt, Artificial Sequence
  Synthetic
gauagaggguggaagga

SEQ ID NO: 705884 - RNA, 17 nt, Artificial Sequence
  Synthetic
gccugccuguggaagga

SEQ ID NO: 705885 - RNA, 17 nt, Artificial Sequence
  Synthetic
guaauuuauuggaagga

SEQ ID NO: 705886 - RNA, 17 nt, Artificial Sequence
  Synthetic
gcuuccuaaaugaagga

SEQ ID NO: 705887 - RNA, 17 nt, Artificial Sequence
  Synthetic
guaagcaccaugaagga

SEQ ID NO: 705888 - RNA, 17 nt, Artificial Sequence
  Synthetic
gacaaauaauguaagga

SEQ ID NO: 705889 - RNA, 17 nt, Artificial Sequence
  Synthetic
guucuaacauguaagga

SEQ ID NO: 705890 - RNA, 17 nt, Artificial Sequence
  Synthetic
gcacaguauuuuaagga

SEQ ID NO: 705891 - RNA, 17 nt, Artificial Sequence
  Synthetic
gaacaaaugaaacagga

SEQ ID NO: 705892 - RNA, 17 nt, Artificial Sequence
  Synthetic
ggguagaaagaacagga

SEQ ID NO: 705893 - RNA, 17 nt, Artificial Sequence
  Synthetic
gaaucuaacacacagga

SEQ ID NO: 705894 - RNA, 17 nt, Artificial Sequence
  Synthetic
guagagaagacacagga

SEQ ID NO: 705895 - RNA, 17 nt, Artificial Sequence
  Synthetic
guuuaauugacacagga

SEQ ID NO: 705896 - RNA, 17 nt, Artificial Sequence
  Synthetic
ggggaaccuacacagga

SEQ ID NO: 705897 - RNA, 17 nt, Artificial Sequence
  Synthetic
gauggugggagacagga

SEQ ID NO: 705898 - RNA, 17 nt, Artificial Sequence
  Synthetic
guacuuuaaguacagga

SEQ ID NO: 705899 - RNA, 17 nt, Artificial Sequence
  Synthetic
ggaagaccuuaccagga

SEQ ID NO: 705900 - RNA, 17 nt, Artificial Sequence
  Synthetic
gcuagaucugcccagga

SEQ ID NO: 705901 - RNA, 17 nt, Artificial Sequence
  Synthetic
gucagcauuucccagga

SEQ ID NO: 705902 - RNA, 17 nt, Artificial Sequence
  Synthetic
gcuuucucuagccagga

SEQ ID NO: 705903 - RNA, 17 nt, Artificial Sequence
  Synthetic
gaaagaagaugccagga

SEQ ID NO: 705904 - RNA, 17 nt, Artificial Sequence
  Synthetic
gcucugaguugccagga

SEQ ID NO: 705905 - RNA, 17 nt, Artificial Sequence
  Synthetic
gugacccggaagcagga

SEQ ID NO: 705906 - RNA, 17 nt, Artificial Sequence
  Synthetic
gugaagauacagcagga

SEQ ID NO: 705907 - RNA, 17 nt, Artificial Sequence
  Synthetic
ggaucaagcgagcagga

SEQ ID NO: 705908 - RNA, 17 nt, Artificial Sequence
  Synthetic
ggcaagacaaggcagga

SEQ ID NO: 705909 - RNA, 17 nt, Artificial Sequence
  Synthetic
gggaggcugaggcagga

SEQ ID NO: 705910 - RNA, 17 nt, Artificial Sequence
  Synthetic
ggagugcaguggcagga

SEQ ID NO: 705911 - RNA, 17 nt, Artificial Sequence
  Synthetic
gugguaagguugcagga

SEQ ID NO: 705912 - RNA, 17 nt, Artificial Sequence
  Synthetic
ggcauugaauaucagga

SEQ ID NO: 705913 - RNA, 17 nt, Artificial Sequence
  Synthetic
gucacacggccucagga

SEQ ID NO: 705914 - RNA, 17 nt, Artificial Sequence
  Synthetic
guggaaccagcucagga

SEQ ID NO: 705915 - RNA, 17 nt, Artificial Sequence
  Synthetic
gugucaccaagucagga

SEQ ID NO: 705916 - RNA, 17 nt, Artificial Sequence
  Synthetic
gcugaauaucuucagga

SEQ ID NO: 705917 - RNA, 17 nt, Artificial Sequence
  Synthetic
gagcuccuucuucagga

SEQ ID NO: 705918 - RNA, 17 nt, Artificial Sequence
  Synthetic
gcaaaggaaaaagagga

SEQ ID NO: 705919 - RNA, 17 nt, Artificial Sequence
  Synthetic
gaaaggacaaaagagga

SEQ ID NO: 705920 - RNA, 17 nt, Artificial Sequence
  Synthetic
ggauggcaccaagagga

SEQ ID NO: 705921 - RNA, 17 nt, Artificial Sequence
  Synthetic
ggacaguaccaagagga

SEQ ID NO: 705922 - RNA, 17 nt, Artificial Sequence
  Synthetic
gaaaaugaggaagagga

SEQ ID NO: 705923 - RNA, 17 nt, Artificial Sequence
  Synthetic
gaguuacuuuaagagga

SEQ ID NO: 705924 - RNA, 17 nt, Artificial Sequence
  Synthetic
gagggaggaagagagga

SEQ ID NO: 705925 - RNA, 17 nt, Artificial Sequence
  Synthetic
ggaguagggagagagga

SEQ ID NO: 705926 - RNA, 17 nt, Artificial Sequence
  Synthetic
gagguggagggagagga

SEQ ID NO: 705927 - RNA, 17 nt, Artificial Sequence
  Synthetic
guaaaccugauagagga

SEQ ID NO: 705928 - RNA, 17 nt, Artificial Sequence
  Synthetic
gcacuccgaaaggagga

SEQ ID NO: 705929 - RNA, 17 nt, Artificial Sequence
  Synthetic
ggagaagggaaggagga

SEQ ID NO: 705930 - RNA, 17 nt, Artificial Sequence
  Synthetic
ggcacccagcaggagga

SEQ ID NO: 705931 - RNA, 17 nt, Artificial Sequence
  Synthetic
gauuugggguaggagga

SEQ ID NO: 705932 - RNA, 17 nt, Artificial Sequence
  Synthetic
gagagagagagggagga

SEQ ID NO: 705933 - RNA, 17 nt, Artificial Sequence
  Synthetic
gacuacuagagggagga

SEQ ID NO: 705934 - RNA, 17 nt, Artificial Sequence
  Synthetic
gagggagggagggagga

SEQ ID NO: 705935 - RNA, 17 nt, Artificial Sequence
  Synthetic
guguagaugggggagga

SEQ ID NO: 705936 - RNA, 17 nt, Artificial Sequence
  Synthetic
gguggagggugggagga

SEQ ID NO: 705937 - RNA, 17 nt, Artificial Sequence
  Synthetic
gagggagggauggagga

SEQ ID NO: 705938 - RNA, 17 nt, Artificial Sequence
  Synthetic
guuauuuuaguggagga

SEQ ID NO: 705939 - RNA, 17 nt, Artificial Sequence
  Synthetic
gcccauaaaaaugagga

SEQ ID NO: 705940 - RNA, 17 nt, Artificial Sequence
  Synthetic
guggaagacaaugagga

SEQ ID NO: 705941 - RNA, 17 nt, Artificial Sequence
  Synthetic
gcuguguguaaugagga

SEQ ID NO: 705942 - RNA, 17 nt, Artificial Sequence
  Synthetic
gccacagggacugagga

SEQ ID NO: 705943 - RNA, 17 nt, Artificial Sequence
  Synthetic
ggaugguuaccugagga

SEQ ID NO: 705944 - RNA, 17 nt, Artificial Sequence
  Synthetic
gcucaaacugcugagga

SEQ ID NO: 705945 - RNA, 17 nt, Artificial Sequence
  Synthetic
guaaagguuggugagga

SEQ ID NO: 705946 - RNA, 17 nt, Artificial Sequence
  Synthetic
gugaauuaaugugagga

SEQ ID NO: 705947 - RNA, 17 nt, Artificial Sequence
  Synthetic
gcaagauauauugagga

SEQ ID NO: 705948 - RNA, 17 nt, Artificial Sequence
  Synthetic
gcugaagugguugagga

SEQ ID NO: 705949 - RNA, 17 nt, Artificial Sequence
  Synthetic
gacagcaccucauagga

SEQ ID NO: 705950 - RNA, 17 nt, Artificial Sequence
  Synthetic
gaaggagaacgauagga

SEQ ID NO: 705951 - RNA, 17 nt, Artificial Sequence
  Synthetic
guuucuuagcuauagga

SEQ ID NO: 705952 - RNA, 17 nt, Artificial Sequence
  Synthetic
gcaaaacaaaacuagga

SEQ ID NO: 705953 - RNA, 17 nt, Artificial Sequence
  Synthetic
gaaaauggagccuagga

SEQ ID NO: 705954 - RNA, 17 nt, Artificial Sequence
  Synthetic
ggaccagaggccuagga

SEQ ID NO: 705955 - RNA, 17 nt, Artificial Sequence
  Synthetic
gauacguauuucuagga

SEQ ID NO: 705956 - RNA, 17 nt, Artificial Sequence
  Synthetic
gcucagccacaguagga

SEQ ID NO: 705957 - RNA, 17 nt, Artificial Sequence
  Synthetic
gcaaaggaucaguagga

SEQ ID NO: 705958 - RNA, 17 nt, Artificial Sequence
  Synthetic
guuuucaaauaguagga

SEQ ID NO: 705959 - RNA, 17 nt, Artificial Sequence
  Synthetic
gagccuuauggguagga

SEQ ID NO: 705960 - RNA, 17 nt, Artificial Sequence
  Synthetic
guugccaaacuguagga

SEQ ID NO: 705961 - RNA, 17 nt, Artificial Sequence
  Synthetic
gucugcucacauuagga

SEQ ID NO: 705962 - RNA, 17 nt, Artificial Sequence
  Synthetic
gaacuaaaguauuagga

SEQ ID NO: 705963 - RNA, 17 nt, Artificial Sequence
  Synthetic
gaaggugguuauuagga

SEQ ID NO: 705964 - RNA, 17 nt, Artificial Sequence
  Synthetic
gugaaagugacuuagga

SEQ ID NO: 705965 - RNA, 17 nt, Artificial Sequence
  Synthetic
gaagaggcuauuuagga

SEQ ID NO: 705966 - RNA, 17 nt, Artificial Sequence
  Synthetic
gucuccaaaguuuagga

SEQ ID NO: 705967 - RNA, 17 nt, Artificial Sequence
  Synthetic
guguauucuuuuuagga

SEQ ID NO: 705968 - RNA, 17 nt, Artificial Sequence
  Synthetic
gaguagaaagaaacgga

SEQ ID NO: 705969 - RNA, 17 nt, Artificial Sequence
  Synthetic
gugguggggguuacgga

SEQ ID NO: 705970 - RNA, 17 nt, Artificial Sequence
  Synthetic
gcugcauuguacccgga

SEQ ID NO: 705971 - RNA, 17 nt, Artificial Sequence
  Synthetic
gguggagguugggcgga

SEQ ID NO: 705972 - RNA, 17 nt, Artificial Sequence
  Synthetic
gaagcauggaaaaggga

SEQ ID NO: 705973 - RNA, 17 nt, Artificial Sequence
  Synthetic
gagaauaugaaaaggga

SEQ ID NO: 705974 - RNA, 17 nt, Artificial Sequence
  Synthetic
ggcucaaagcaaaggga

SEQ ID NO: 705975 - RNA, 17 nt, Artificial Sequence
  Synthetic
gggaggaaagaaaggga

SEQ ID NO: 705976 - RNA, 17 nt, Artificial Sequence
  Synthetic
gacuggaaauaaaggga

SEQ ID NO: 705977 - RNA, 17 nt, Artificial Sequence
  Synthetic
gcaggguaaucaaggga

SEQ ID NO: 705978 - RNA, 17 nt, Artificial Sequence
  Synthetic
gaagggaagggaaggga

SEQ ID NO: 705979 - RNA, 17 nt, Artificial Sequence
  Synthetic
ggagggaagggaaggga

SEQ ID NO: 705980 - RNA, 17 nt, Artificial Sequence
  Synthetic
gugugugugggaaggga

SEQ ID NO: 705981 - RNA, 17 nt, Artificial Sequence
  Synthetic
ggagcugguugaaggga

SEQ ID NO: 705982 - RNA, 17 nt, Artificial Sequence
  Synthetic
guccuuuaaauaaggga

SEQ ID NO: 705983 - RNA, 17 nt, Artificial Sequence
  Synthetic
gcaucaauaauaaggga

SEQ ID NO: 705984 - RNA, 17 nt, Artificial Sequence
  Synthetic
gccaucucaaacaggga

SEQ ID NO: 705985 - RNA, 17 nt, Artificial Sequence
  Synthetic
gcuggaggacacaggga

SEQ ID NO: 705986 - RNA, 17 nt, Artificial Sequence
  Synthetic
gcccauggacacaggga

SEQ ID NO: 705987 - RNA, 17 nt, Artificial Sequence
  Synthetic
gauuggaugcacaggga

SEQ ID NO: 705988 - RNA, 17 nt, Artificial Sequence
  Synthetic
gugauaaaaagcaggga

SEQ ID NO: 705989 - RNA, 17 nt, Artificial Sequence
  Synthetic
gguggugcacucaggga

SEQ ID NO: 705990 - RNA, 17 nt, Artificial Sequence
  Synthetic
gggaccagguucaggga

SEQ ID NO: 705991 - RNA, 17 nt, Artificial Sequence
  Synthetic
gaucacagaaagaggga

SEQ ID NO: 705992 - RNA, 17 nt, Artificial Sequence
  Synthetic
guguauauacagaggga

SEQ ID NO: 705993 - RNA, 17 nt, Artificial Sequence
  Synthetic
gagaggcaggagaggga

SEQ ID NO: 705994 - RNA, 17 nt, Artificial Sequence
  Synthetic
gagagaagggagaggga

SEQ ID NO: 705995 - RNA, 17 nt, Artificial Sequence
  Synthetic
gagagaguggagaggga

SEQ ID NO: 705996 - RNA, 17 nt, Artificial Sequence
  Synthetic
gagagugagucgaggga

SEQ ID NO: 705997 - RNA, 17 nt, Artificial Sequence
  Synthetic
gagggaggaaggaggga

SEQ ID NO: 705998 - RNA, 17 nt, Artificial Sequence
  Synthetic
gaugugggaaggaggga

SEQ ID NO: 705999 - RNA, 17 nt, Artificial Sequence
  Synthetic
gaaugagugaggaggga

SEQ ID NO: 706000 - RNA, 17 nt, Artificial Sequence
  Synthetic
gaugagagagggaggga

SEQ ID NO: 706001 - RNA, 17 nt, Artificial Sequence
  Synthetic
gaguggagagggaggga

SEQ ID NO: 706002 - RNA, 17 nt, Artificial Sequence
  Synthetic
gaggaaggagggaggga

SEQ ID NO: 706003 - RNA, 17 nt, Artificial Sequence
  Synthetic
ggaaagggagggaggga

SEQ ID NO: 706004 - RNA, 17 nt, Artificial Sequence
  Synthetic
gugagagaggggaggga

SEQ ID NO: 706005 - RNA, 17 nt, Artificial Sequence
  Synthetic
gaaggagaggggaggga

SEQ ID NO: 706006 - RNA, 17 nt, Artificial Sequence
  Synthetic
gggggaggggggaggga

SEQ ID NO: 706007 - RNA, 17 nt, Artificial Sequence
  Synthetic
gugugucccuggaggga

SEQ ID NO: 706008 - RNA, 17 nt, Artificial Sequence
  Synthetic
guuugagaguggaggga

SEQ ID NO: 706009 - RNA, 17 nt, Artificial Sequence
  Synthetic
gggcccuguacuaggga

SEQ ID NO: 706010 - RNA, 17 nt, Artificial Sequence
  Synthetic
guauagaaaccuaggga

SEQ ID NO: 706011 - RNA, 17 nt, Artificial Sequence
  Synthetic
gggagggggcagcggga

SEQ ID NO: 706012 - RNA, 17 nt, Artificial Sequence
  Synthetic
guugcugaaggucggga

SEQ ID NO: 706013 - RNA, 17 nt, Artificial Sequence
  Synthetic
gggagcugaaaagggga

SEQ ID NO: 706014 - RNA, 17 nt, Artificial Sequence
  Synthetic
guggaaagcaaagggga

SEQ ID NO: 706015 - RNA, 17 nt, Artificial Sequence
  Synthetic
gguggggggcaagggga

SEQ ID NO: 706016 - RNA, 17 nt, Artificial Sequence
  Synthetic
gagggaagggaagggga

SEQ ID NO: 706017 - RNA, 17 nt, Artificial Sequence
  Synthetic
gagaagggggaagggga

SEQ ID NO: 706018 - RNA, 17 nt, Artificial Sequence
  Synthetic
gugcugcaugcagggga

SEQ ID NO: 706019 - RNA, 17 nt, Artificial Sequence
  Synthetic
gggguggggcgagggga

SEQ ID NO: 706020 - RNA, 17 nt, Artificial Sequence
  Synthetic
gaggggaggggagggga

SEQ ID NO: 706021 - RNA, 17 nt, Artificial Sequence
  Synthetic
gaguagauuggagggga

SEQ ID NO: 706022 - RNA, 17 nt, Artificial Sequence
  Synthetic
gucguggggugagggga

SEQ ID NO: 706023 - RNA, 17 nt, Artificial Sequence
  Synthetic
ggugaguggugagggga

SEQ ID NO: 706024 - RNA, 17 nt, Artificial Sequence
  Synthetic
gguggggggcuagggga

SEQ ID NO: 706025 - RNA, 17 nt, Artificial Sequence
  Synthetic
ggcuccgggguagggga

SEQ ID NO: 706026 - RNA, 17 nt, Artificial Sequence
  Synthetic
ggugggagguuagggga

SEQ ID NO: 706027 - RNA, 17 nt, Artificial Sequence
  Synthetic
gaugggggguuagggga

SEQ ID NO: 706028 - RNA, 17 nt, Artificial Sequence
  Synthetic
gaucagcaucacgggga

SEQ ID NO: 706029 - RNA, 17 nt, Artificial Sequence
  Synthetic
gguggggggaaggggga

SEQ ID NO: 706030 - RNA, 17 nt, Artificial Sequence
  Synthetic
guuuacuuugaggggga

SEQ ID NO: 706031 - RNA, 17 nt, Artificial Sequence
  Synthetic
ggugaggggacggggga

SEQ ID NO: 706032 - RNA, 17 nt, Artificial Sequence
  Synthetic
gagagagaagcggggga

SEQ ID NO: 706033 - RNA, 17 nt, Artificial Sequence
  Synthetic
gugguggggucggggga

SEQ ID NO: 706034 - RNA, 17 nt, Artificial Sequence
  Synthetic
guuguggggucggggga

SEQ ID NO: 706035 - RNA, 17 nt, Artificial Sequence
  Synthetic
ggugggggaagggggga

SEQ ID NO: 706036 - RNA, 17 nt, Artificial Sequence
  Synthetic
ggucgggggagggggga

SEQ ID NO: 706037 - RNA, 17 nt, Artificial Sequence
  Synthetic
gguggggggagggggga

SEQ ID NO: 706038 - RNA, 17 nt, Artificial Sequence
  Synthetic
guggggggaggggggga

SEQ ID NO: 706039 - RNA, 17 nt, Artificial Sequence
  Synthetic
gucguggggugggggga

SEQ ID NO: 706040 - RNA, 17 nt, Artificial Sequence
  Synthetic
gugguggggugggggga

SEQ ID NO: 706041 - RNA, 17 nt, Artificial Sequence
  Synthetic
gcuguggggugggggga

SEQ ID NO: 706042 - RNA, 17 nt, Artificial Sequence
  Synthetic
guuguggggugggggga

SEQ ID NO: 706043 - RNA, 17 nt, Artificial Sequence
  Synthetic
gccugugagguggggga

SEQ ID NO: 706044 - RNA, 17 nt, Artificial Sequence
  Synthetic
guuaagagaaaugggga

SEQ ID NO: 706045 - RNA, 17 nt, Artificial Sequence
  Synthetic
ggguggggggcugggga

SEQ ID NO: 706046 - RNA, 17 nt, Artificial Sequence
  Synthetic
gauuuggugucugggga

SEQ ID NO: 706047 - RNA, 17 nt, Artificial Sequence
  Synthetic
gcaguuucuucugggga

SEQ ID NO: 706048 - RNA, 17 nt, Artificial Sequence
  Synthetic
gacuacuagagugggga

SEQ ID NO: 706049 - RNA, 17 nt, Artificial Sequence
  Synthetic
gccuacuggagugggga

SEQ ID NO: 706050 - RNA, 17 nt, Artificial Sequence
  Synthetic
guaagagaaggugggga

SEQ ID NO: 706051 - RNA, 17 nt, Artificial Sequence
  Synthetic
ggaaucaggguugggga

SEQ ID NO: 706052 - RNA, 17 nt, Artificial Sequence
  Synthetic
gcccaaagucaauggga

SEQ ID NO: 706053 - RNA, 17 nt, Artificial Sequence
  Synthetic
ggcucuugagaauggga

SEQ ID NO: 706054 - RNA, 17 nt, Artificial Sequence
  Synthetic
gagauacggagauggga

SEQ ID NO: 706055 - RNA, 17 nt, Artificial Sequence
  Synthetic
guaauggggagauggga

SEQ ID NO: 706056 - RNA, 17 nt, Artificial Sequence
  Synthetic
guuaccugaggauggga

SEQ ID NO: 706057 - RNA, 17 nt, Artificial Sequence
  Synthetic
gaaugguggugauggga

SEQ ID NO: 706058 - RNA, 17 nt, Artificial Sequence
  Synthetic
gaggcucauaacuggga

SEQ ID NO: 706059 - RNA, 17 nt, Artificial Sequence
  Synthetic
gcuacacagaccuggga

SEQ ID NO: 706060 - RNA, 17 nt, Artificial Sequence
  Synthetic
ggacacuggagcuggga

SEQ ID NO: 706061 - RNA, 17 nt, Artificial Sequence
  Synthetic
guugccagaggcuggga

SEQ ID NO: 706062 - RNA, 17 nt, Artificial Sequence
  Synthetic
gcuuugggaggcuggga

SEQ ID NO: 706063 - RNA, 17 nt, Artificial Sequence
  Synthetic
guaccagcaugcuggga

SEQ ID NO: 706064 - RNA, 17 nt, Artificial Sequence
  Synthetic
gaacgugaucucuggga

SEQ ID NO: 706065 - RNA, 17 nt, Artificial Sequence
  Synthetic
guugagaaagaguggga

SEQ ID NO: 706066 - RNA, 17 nt, Artificial Sequence
  Synthetic
gaaggggcagaguggga

SEQ ID NO: 706067 - RNA, 17 nt, Artificial Sequence
  Synthetic
ggagugggggaguggga

SEQ ID NO: 706068 - RNA, 17 nt, Artificial Sequence
  Synthetic
ggaguuggaagguggga

SEQ ID NO: 706069 - RNA, 17 nt, Artificial Sequence
  Synthetic
guagcuguaagguggga

SEQ ID NO: 706070 - RNA, 17 nt, Artificial Sequence
  Synthetic
gggaggcugagguggga

SEQ ID NO: 706071 - RNA, 17 nt, Artificial Sequence
  Synthetic
gcaggggugagguggga

SEQ ID NO: 706072 - RNA, 17 nt, Artificial Sequence
  Synthetic
guccuuacaugguggga

SEQ ID NO: 706073 - RNA, 17 nt, Artificial Sequence
  Synthetic
gacuaguagauguggga

SEQ ID NO: 706074 - RNA, 17 nt, Artificial Sequence
  Synthetic
gugcugggugauuggga

SEQ ID NO: 706075 - RNA, 17 nt, Artificial Sequence
  Synthetic
guaauauuaaguuggga

SEQ ID NO: 706076 - RNA, 17 nt, Artificial Sequence
  Synthetic
gggagguaugguuggga

SEQ ID NO: 706077 - RNA, 17 nt, Artificial Sequence
  Synthetic
gaguugcagauuuggga

SEQ ID NO: 706078 - RNA, 17 nt, Artificial Sequence
  Synthetic
ggacaugagauuuggga

SEQ ID NO: 706079 - RNA, 17 nt, Artificial Sequence
  Synthetic
gucgucauauuuuggga

SEQ ID NO: 706080 - RNA, 17 nt, Artificial Sequence
  Synthetic
gaaaguauguuuuggga

SEQ ID NO: 706081 - RNA, 17 nt, Artificial Sequence
  Synthetic
gauuugacaaaaaugga

SEQ ID NO: 706082 - RNA, 17 nt, Artificial Sequence
  Synthetic
gaguuaguuaaaaugga

SEQ ID NO: 706083 - RNA, 17 nt, Artificial Sequence
  Synthetic
gaggguguagaaaugga

SEQ ID NO: 706084 - RNA, 17 nt, Artificial Sequence
  Synthetic
gaagaaaaauaaaugga

SEQ ID NO: 706085 - RNA, 17 nt, Artificial Sequence
  Synthetic
gcugcugggagaaugga

SEQ ID NO: 706086 - RNA, 17 nt, Artificial Sequence
  Synthetic
gcuuuguauuuaaugga

SEQ ID NO: 706087 - RNA, 17 nt, Artificial Sequence
  Synthetic
guauuuucaggcaugga

SEQ ID NO: 706088 - RNA, 17 nt, Artificial Sequence
  Synthetic
ggaacuggcugcaugga

SEQ ID NO: 706089 - RNA, 17 nt, Artificial Sequence
  Synthetic
gaaaggucugucaugga

SEQ ID NO: 706090 - RNA, 17 nt, Artificial Sequence
  Synthetic
guuaccaaguucaugga

SEQ ID NO: 706091 - RNA, 17 nt, Artificial Sequence
  Synthetic
gcaggcucagagaugga

SEQ ID NO: 706092 - RNA, 17 nt, Artificial Sequence
  Synthetic
gaagaugccaggaugga

SEQ ID NO: 706093 - RNA, 17 nt, Artificial Sequence
  Synthetic
guggauggauggaugga

SEQ ID NO: 706094 - RNA, 17 nt, Artificial Sequence
  Synthetic
guaacugaguggaugga

SEQ ID NO: 706095 - RNA, 17 nt, Artificial Sequence
  Synthetic
gggagccauuugaugga

SEQ ID NO: 706096 - RNA, 17 nt, Artificial Sequence
  Synthetic
guaagaagaaauaugga

SEQ ID NO: 706097 - RNA, 17 nt, Artificial Sequence
  Synthetic
gugaagauacauaugga

SEQ ID NO: 706098 - RNA, 17 nt, Artificial Sequence
  Synthetic
gaacuuaggcauaugga

SEQ ID NO: 706099 - RNA, 17 nt, Artificial Sequence
  Synthetic
gccugucccuauaugga

SEQ ID NO: 706100 - RNA, 17 nt, Artificial Sequence
  Synthetic
guuguuuucuuuaugga

SEQ ID NO: 706101 - RNA, 17 nt, Artificial Sequence
  Synthetic
gggguggugaaacugga

SEQ ID NO: 706102 - RNA, 17 nt, Artificial Sequence
  Synthetic
gauugugaagaacugga

SEQ ID NO: 706103 - RNA, 17 nt, Artificial Sequence
  Synthetic
gcugggaauugacugga

SEQ ID NO: 706104 - RNA, 17 nt, Artificial Sequence
  Synthetic
gaucaccugagccugga

SEQ ID NO: 706105 - RNA, 17 nt, Artificial Sequence
  Synthetic
guuugagauggccugga

SEQ ID NO: 706106 - RNA, 17 nt, Artificial Sequence
  Synthetic
gagagaguuugccugga

SEQ ID NO: 706107 - RNA, 17 nt, Artificial Sequence
  Synthetic
gauuuccgccagcugga

SEQ ID NO: 706108 - RNA, 17 nt, Artificial Sequence
  Synthetic
guaaguuaagagcugga

SEQ ID NO: 706109 - RNA, 17 nt, Artificial Sequence
  Synthetic
gcaacaaacacgcugga

SEQ ID NO: 706110 - RNA, 17 nt, Artificial Sequence
  Synthetic
guuucuucaccucugga

SEQ ID NO: 706111 - RNA, 17 nt, Artificial Sequence
  Synthetic
gguuauaauccucugga

SEQ ID NO: 706112 - RNA, 17 nt, Artificial Sequence
  Synthetic
gggggucucagucugga

SEQ ID NO: 706113 - RNA, 17 nt, Artificial Sequence
  Synthetic
gguggaacacaagugga

SEQ ID NO: 706114 - RNA, 17 nt, Artificial Sequence
  Synthetic
guagaugaauaagugga

SEQ ID NO: 706115 - RNA, 17 nt, Artificial Sequence
  Synthetic
ggugguuugagagugga

SEQ ID NO: 706116 - RNA, 17 nt, Artificial Sequence
  Synthetic
gugugcggucuagugga

SEQ ID NO: 706117 - RNA, 17 nt, Artificial Sequence
  Synthetic
gaugucuugguagugga

SEQ ID NO: 706118 - RNA, 17 nt, Artificial Sequence
  Synthetic
gucacaucuuacgugga

SEQ ID NO: 706119 - RNA, 17 nt, Artificial Sequence
  Synthetic
ggagggagaaaggugga

SEQ ID NO: 706120 - RNA, 17 nt, Artificial Sequence
  Synthetic
gggcaccagaaggugga

SEQ ID NO: 706121 - RNA, 17 nt, Artificial Sequence
  Synthetic
gguggggggagggugga

SEQ ID NO: 706122 - RNA, 17 nt, Artificial Sequence
  Synthetic
gguaugguuggggugga

SEQ ID NO: 706123 - RNA, 17 nt, Artificial Sequence
  Synthetic
gauuccgucuuggugga

SEQ ID NO: 706124 - RNA, 17 nt, Artificial Sequence
  Synthetic
ggugaaaaaaaugugga

SEQ ID NO: 706125 - RNA, 17 nt, Artificial Sequence
  Synthetic
gcugaagcaaaugugga

SEQ ID NO: 706126 - RNA, 17 nt, Artificial Sequence
  Synthetic
gauaauaaauaugugga

SEQ ID NO: 706127 - RNA, 17 nt, Artificial Sequence
  Synthetic
ggcuaggacagugugga

SEQ ID NO: 706128 - RNA, 17 nt, Artificial Sequence
  Synthetic
gacuauuagagugugga

SEQ ID NO: 706129 - RNA, 17 nt, Artificial Sequence
  Synthetic
gaucauuuuguugugga

SEQ ID NO: 706130 - RNA, 17 nt, Artificial Sequence
  Synthetic
ggcagaagauuugugga

SEQ ID NO: 706131 - RNA, 17 nt, Artificial Sequence
  Synthetic
gacaauaacaaauugga

SEQ ID NO: 706132 - RNA, 17 nt, Artificial Sequence
  Synthetic
gcuagaacauaauugga

SEQ ID NO: 706133 - RNA, 17 nt, Artificial Sequence
  Synthetic
gugggggugagauugga

SEQ ID NO: 706134 - RNA, 17 nt, Artificial Sequence
  Synthetic
gcugguaaagacuugga

SEQ ID NO: 706135 - RNA, 17 nt, Artificial Sequence
  Synthetic
guugcccuucccuugga

SEQ ID NO: 706136 - RNA, 17 nt, Artificial Sequence
  Synthetic
gcagcagugagguugga

SEQ ID NO: 706137 - RNA, 17 nt, Artificial Sequence
  Synthetic
ggauaugagauguugga

SEQ ID NO: 706138 - RNA, 17 nt, Artificial Sequence
  Synthetic
guucauauucuguugga

SEQ ID NO: 706139 - RNA, 17 nt, Artificial Sequence
  Synthetic
ggcuuuucuuuguugga

SEQ ID NO: 706140 - RNA, 17 nt, Artificial Sequence
  Synthetic
gauccuagcacuuugga

SEQ ID NO: 706141 - RNA, 17 nt, Artificial Sequence
  Synthetic
guggggaugacuuugga

SEQ ID NO: 706142 - RNA, 17 nt, Artificial Sequence
  Synthetic
gaaguggggccuuugga

SEQ ID NO: 706143 - RNA, 17 nt, Artificial Sequence
  Synthetic
gguccugcaucuuugga

SEQ ID NO: 706144 - RNA, 17 nt, Artificial Sequence
  Synthetic
gucugguacaguuugga

SEQ ID NO: 706145 - RNA, 17 nt, Artificial Sequence
  Synthetic
gugcuuguucuuuugga

SEQ ID NO: 706146 - RNA, 17 nt, Artificial Sequence
  Synthetic
gccuauugauuuuugga

SEQ ID NO: 706147 - RNA, 17 nt, Artificial Sequence
  Synthetic
gaagaaagaaaaaauga

SEQ ID NO: 706148 - RNA, 17 nt, Artificial Sequence
  Synthetic
gaucuucugaaaaauga

SEQ ID NO: 706149 - RNA, 17 nt, Artificial Sequence
  Synthetic
gaaauuagccaaaauga

SEQ ID NO: 706150 - RNA, 17 nt, Artificial Sequence
  Synthetic
gaguccugggaaaauga

SEQ ID NO: 706151 - RNA, 17 nt, Artificial Sequence
  Synthetic
gcacccuuguaaaauga

SEQ ID NO: 706152 - RNA, 17 nt, Artificial Sequence
  Synthetic
gaauuuggcagaaauga

SEQ ID NO: 706153 - RNA, 17 nt, Artificial Sequence
  Synthetic
gcccacugcagaaauga

SEQ ID NO: 706154 - RNA, 17 nt, Artificial Sequence
  Synthetic
gguacauaacgaaauga

SEQ ID NO: 706155 - RNA, 17 nt, Artificial Sequence
  Synthetic
ggacuuucaggaaauga

SEQ ID NO: 706156 - RNA, 17 nt, Artificial Sequence
  Synthetic
ggugcaguaugaaauga

SEQ ID NO: 706157 - RNA, 17 nt, Artificial Sequence
  Synthetic
gccauuuacugaaauga

SEQ ID NO: 706158 - RNA, 17 nt, Artificial Sequence
  Synthetic
guugagugaauaaauga

SEQ ID NO: 706159 - RNA, 17 nt, Artificial Sequence
  Synthetic
ggcugagggauaaauga

SEQ ID NO: 706160 - RNA, 17 nt, Artificial Sequence
  Synthetic
guuuaauugauaaauga

SEQ ID NO: 706161 - RNA, 17 nt, Artificial Sequence
  Synthetic
gaguauacacuaaauga

SEQ ID NO: 706162 - RNA, 17 nt, Artificial Sequence
  Synthetic
gcuuaaaaccuaaauga

SEQ ID NO: 706163 - RNA, 17 nt, Artificial Sequence
  Synthetic
ggaggaguuuuaaauga

SEQ ID NO: 706164 - RNA, 17 nt, Artificial Sequence
  Synthetic
ggcuucagcaacaauga

SEQ ID NO: 706165 - RNA, 17 nt, Artificial Sequence
  Synthetic
gacaugugauacaauga

SEQ ID NO: 706166 - RNA, 17 nt, Artificial Sequence
  Synthetic
gggaggagccgcaauga

SEQ ID NO: 706167 - RNA, 17 nt, Artificial Sequence
  Synthetic
guagcuucaugcaauga

SEQ ID NO: 706168 - RNA, 17 nt, Artificial Sequence
  Synthetic
gaucacuugugcaauga

SEQ ID NO: 706169 - RNA, 17 nt, Artificial Sequence
  Synthetic
gacacagucaagaauga

SEQ ID NO: 706170 - RNA, 17 nt, Artificial Sequence
  Synthetic
ggaagaaagaagaauga

SEQ ID NO: 706171 - RNA, 17 nt, Artificial Sequence
  Synthetic
gcacagaauaagaauga

SEQ ID NO: 706172 - RNA, 17 nt, Artificial Sequence
  Synthetic
gaccuauuacagaauga

SEQ ID NO: 706173 - RNA, 17 nt, Artificial Sequence
  Synthetic
ggaauucugcagaauga

SEQ ID NO: 706174 - RNA, 17 nt, Artificial Sequence
  Synthetic
gaggaagaagagaauga

SEQ ID NO: 706175 - RNA, 17 nt, Artificial Sequence
  Synthetic
uaguuugcugagaauga

SEQ ID NO: 706176 - RNA, 17 nt, Artificial Sequence
  Synthetic
gaugaugaggggaauga

SEQ ID NO: 706177 - RNA, 17 nt, Artificial Sequence
  Synthetic
guugcagcaaugaauga

SEQ ID NO: 706178 - RNA, 17 nt, Artificial Sequence
  Synthetic
gaguuuucuaugaauga

SEQ ID NO: 706179 - RNA, 17 nt, Artificial Sequence
  Synthetic
guagauucauugaauga

SEQ ID NO: 706180 - RNA, 17 nt, Artificial Sequence
  Synthetic
guauguuuaaauaauga

SEQ ID NO: 706181 - RNA, 17 nt, Artificial Sequence
  Synthetic
guaucuuuguuuaauga

SEQ ID NO: 706182 - RNA, 17 nt, Artificial Sequence
  Synthetic
gguaaagacacacauga

SEQ ID NO: 706183 - RNA, 17 nt, Artificial Sequence
  Synthetic
gagacaacugcacauga

SEQ ID NO: 706184 - RNA, 17 nt, Artificial Sequence
  Synthetic
gauaugucaucacauga

SEQ ID NO: 706185 - RNA, 17 nt, Artificial Sequence
  Synthetic
gacuggagaagacauga

SEQ ID NO: 706186 - RNA, 17 nt, Artificial Sequence
  Synthetic
guuaucuucugacauga

SEQ ID NO: 706187 - RNA, 17 nt, Artificial Sequence
  Synthetic
gggugcuugcuacauga

SEQ ID NO: 706188 - RNA, 17 nt, Artificial Sequence
  Synthetic
gaacaaugucuacauga

SEQ ID NO: 706189 - RNA, 17 nt, Artificial Sequence
  Synthetic
guuuauucauuacauga

SEQ ID NO: 706190 - RNA, 17 nt, Artificial Sequence
  Synthetic
gcuauuuuauuacauga

SEQ ID NO: 706191 - RNA, 17 nt, Artificial Sequence
  Synthetic
ggauuacauaaccauga

SEQ ID NO: 706192 - RNA, 17 nt, Artificial Sequence
  Synthetic
ggcccucaccaccauga

SEQ ID NO: 706193 - RNA, 17 nt, Artificial Sequence
  Synthetic
guacugacuacccauga

SEQ ID NO: 706194 - RNA, 17 nt, Artificial Sequence
  Synthetic
gugucaugauuccauga

SEQ ID NO: 706195 - RNA, 17 nt, Artificial Sequence
  Synthetic
gauguucuagagcauga

SEQ ID NO: 706196 - RNA, 17 nt, Artificial Sequence
  Synthetic
ggugaugccgagcauga

SEQ ID NO: 706197 - RNA, 17 nt, Artificial Sequence
  Synthetic
gaaagugauuagcauga

SEQ ID NO: 706198 - RNA, 17 nt, Artificial Sequence
  Synthetic
gagaguuuuuagcauga

SEQ ID NO: 706199 - RNA, 17 nt, Artificial Sequence
  Synthetic
gggaugaauaggcauga

SEQ ID NO: 706200 - RNA, 17 nt, Artificial Sequence
  Synthetic
guacaucauuugcauga

SEQ ID NO: 706201 - RNA, 17 nt, Artificial Sequence
  Synthetic
gcuagaaaucaucauga

SEQ ID NO: 706202 - RNA, 17 nt, Artificial Sequence
  Synthetic
gcuuuucuaggucauga

SEQ ID NO: 706203 - RNA, 17 nt, Artificial Sequence
  Synthetic
guaaacuugugucauga

SEQ ID NO: 706204 - RNA, 17 nt, Artificial Sequence
  Synthetic
gacaggugaauucauga

SEQ ID NO: 706205 - RNA, 17 nt, Artificial Sequence
  Synthetic
gauuaaaagcuucauga

SEQ ID NO: 706206 - RNA, 17 nt, Artificial Sequence
  Synthetic
gaccauaggcuucauga

SEQ ID NO: 706207 - RNA, 17 nt, Artificial Sequence
  Synthetic
gagccuaaccaagauga

SEQ ID NO: 706208 - RNA, 17 nt, Artificial Sequence
  Synthetic
gcaguaucagaagauga

SEQ ID NO: 706209 - RNA, 17 nt, Artificial Sequence
  Synthetic
gaggguagagcagauga

SEQ ID NO: 706210 - RNA, 17 nt, Artificial Sequence
  Synthetic
ggcaaguuuucagauga

SEQ ID NO: 706211 - RNA, 17 nt, Artificial Sequence
  Synthetic
gagaggaagagagauga

SEQ ID NO: 706212 - RNA, 17 nt, Artificial Sequence
  Synthetic
gagaucaauggagauga

SEQ ID NO: 706213 - RNA, 17 nt, Artificial Sequence
  Synthetic
guuucauuaugagauga

SEQ ID NO: 706214 - RNA, 17 nt, Artificial Sequence
  Synthetic
gcuuuauagauagauga

SEQ ID NO: 706215 - RNA, 17 nt, Artificial Sequence
  Synthetic
gcuuaaaaccuagauga

SEQ ID NO: 706216 - RNA, 17 nt, Artificial Sequence
  Synthetic
auaccuaauguagauga

SEQ ID NO: 706217 - RNA, 17 nt, Artificial Sequence
  Synthetic
gauguggaaaacgauga

SEQ ID NO: 706218 - RNA, 17 nt, Artificial Sequence
  Synthetic
gaaacuuccaaggauga

SEQ ID NO: 706219 - RNA, 17 nt, Artificial Sequence
  Synthetic
gcauauucagaggauga

SEQ ID NO: 706220 - RNA, 17 nt, Artificial Sequence
  Synthetic
gcagggagaugggauga

SEQ ID NO: 706221 - RNA, 17 nt, Artificial Sequence
  Synthetic
gcuagaaaaaaugauga

SEQ ID NO: 706222 - RNA, 17 nt, Artificial Sequence
  Synthetic
ggucauggagaugauga

SEQ ID NO: 706223 - RNA, 17 nt, Artificial Sequence
  Synthetic
gaagagagugaugauga

SEQ ID NO: 706224 - RNA, 17 nt, Artificial Sequence
  Synthetic
ggcucccauuaugauga

SEQ ID NO: 706225 - RNA, 17 nt, Artificial Sequence
  Synthetic
ggggucugaacugauga

SEQ ID NO: 706226 - RNA, 17 nt, Artificial Sequence
  Synthetic
ggaucugugccugauga

SEQ ID NO: 706227 - RNA, 17 nt, Artificial Sequence
  Synthetic
ggguuugauccugauga

SEQ ID NO: 706228 - RNA, 17 nt, Artificial Sequence
  Synthetic
gagaagaaaaaauauga

SEQ ID NO: 706229 - RNA, 17 nt, Artificial Sequence
  Synthetic
gagaugggagaauauga

SEQ ID NO: 706230 - RNA, 17 nt, Artificial Sequence
  Synthetic
gauaacaggucauauga

SEQ ID NO: 706231 - RNA, 17 nt, Artificial Sequence
  Synthetic
ggccucugguccuauga

SEQ ID NO: 706232 - RNA, 17 nt, Artificial Sequence
  Synthetic
guuccuucacucuauga

SEQ ID NO: 706233 - RNA, 17 nt, Artificial Sequence
  Synthetic
gaagccccacuuuauga

SEQ ID NO: 706234 - RNA, 17 nt, Artificial Sequence
  Synthetic
gaauauaagcuuuauga

SEQ ID NO: 706235 - RNA, 17 nt, Artificial Sequence
  Synthetic
gcagagaagaaaacuga

SEQ ID NO: 706236 - RNA, 17 nt, Artificial Sequence
  Synthetic
gaucagagcagaacuga

SEQ ID NO: 706237 - RNA, 17 nt, Artificial Sequence
  Synthetic
gagggacagagaacuga

SEQ ID NO: 706238 - RNA, 17 nt, Artificial Sequence
  Synthetic
gcaauuccuagaacuga

SEQ ID NO: 706239 - RNA, 17 nt, Artificial Sequence
  Synthetic
gggggugaggacacuga

SEQ ID NO: 706240 - RNA, 17 nt, Artificial Sequence
  Synthetic
ggugugcaucccacuga

SEQ ID NO: 706241 - RNA, 17 nt, Artificial Sequence
  Synthetic
gaagggaaagagacuga

SEQ ID NO: 706242 - RNA, 17 nt, Artificial Sequence
  Synthetic
gccuguccauagacuga

SEQ ID NO: 706243 - RNA, 17 nt, Artificial Sequence
  Synthetic
guucccugaaggacuga

SEQ ID NO: 706244 - RNA, 17 nt, Artificial Sequence
  Synthetic
guggucagcuggacuga

SEQ ID NO: 706245 - RNA, 17 nt, Artificial Sequence
  Synthetic
gguuggguagauacuga

SEQ ID NO: 706246 - RNA, 17 nt, Artificial Sequence
  Synthetic
guccauucaucuacuga

SEQ ID NO: 706247 - RNA, 17 nt, Artificial Sequence
  Synthetic
gccagucaugguacuga

SEQ ID NO: 706248 - RNA, 17 nt, Artificial Sequence
  Synthetic
gcucauacaauuacuga

SEQ ID NO: 706249 - RNA, 17 nt, Artificial Sequence
  Synthetic
gcugcccugcuuacuga

SEQ ID NO: 706250 - RNA, 17 nt, Artificial Sequence
  Synthetic
gaacauaaaugaccuga

SEQ ID NO: 706251 - RNA, 17 nt, Artificial Sequence
  Synthetic
ggaggggcucuaccuga

SEQ ID NO: 706252 - RNA, 17 nt, Artificial Sequence
  Synthetic
gcuucuuaucccccuga

SEQ ID NO: 706253 - RNA, 17 nt, Artificial Sequence
  Synthetic
ggaauauuacucccuga

SEQ ID NO: 706254 - RNA, 17 nt, Artificial Sequence
  Synthetic
gcucaggcagucccuga

SEQ ID NO: 706255 - RNA, 17 nt, Artificial Sequence
  Synthetic
guccaggcacagccuga

SEQ ID NO: 706256 - RNA, 17 nt, Artificial Sequence
  Synthetic
ggcugauaagggccuga

SEQ ID NO: 706257 - RNA, 17 nt, Artificial Sequence
  Synthetic
gaaugaagugcuccuga

SEQ ID NO: 706258 - RNA, 17 nt, Artificial Sequence
  Synthetic
gaaugaaagauuccuga

SEQ ID NO: 706259 - RNA, 17 nt, Artificial Sequence
  Synthetic
gucacuaacaaagcuga

SEQ ID NO: 706260 - RNA, 17 nt, Artificial Sequence
  Synthetic
gcagaaauugaagcuga

SEQ ID NO: 706261 - RNA, 17 nt, Artificial Sequence
  Synthetic
gauucggucagagcuga

SEQ ID NO: 706262 - RNA, 17 nt, Artificial Sequence
  Synthetic
ggagaaaagagagcuga

SEQ ID NO: 706263 - RNA, 17 nt, Artificial Sequence
  Synthetic
gcucucaugagagcuga

SEQ ID NO: 706264 - RNA, 17 nt, Artificial Sequence
  Synthetic
gugcuuaaaggagcuga

SEQ ID NO: 706265 - RNA, 17 nt, Artificial Sequence
  Synthetic
guguggacagaggcuga

SEQ ID NO: 706266 - RNA, 17 nt, Artificial Sequence
  Synthetic
gcuacucaguaggcuga

SEQ ID NO: 706267 - RNA, 17 nt, Artificial Sequence
  Synthetic
ggcuugacuggggcuga

SEQ ID NO: 706268 - RNA, 17 nt, Artificial Sequence
  Synthetic
ggcuuccuuuuggcuga

SEQ ID NO: 706269 - RNA, 17 nt, Artificial Sequence
  Synthetic
gcagagaaagaugcuga

SEQ ID NO: 706270 - RNA, 17 nt, Artificial Sequence
  Synthetic
ggucauuaggaugcuga

SEQ ID NO: 706271 - RNA, 17 nt, Artificial Sequence
  Synthetic
gaagaggaauaugcuga

SEQ ID NO: 706272 - RNA, 17 nt, Artificial Sequence
  Synthetic
guuuauguuucugcuga

SEQ ID NO: 706273 - RNA, 17 nt, Artificial Sequence
  Synthetic
ggagcaacaagugcuga

SEQ ID NO: 706274 - RNA, 17 nt, Artificial Sequence
  Synthetic
ggaugguucugugcuga

SEQ ID NO: 706275 - RNA, 17 nt, Artificial Sequence
  Synthetic
guagugugagaaucuga

SEQ ID NO: 706276 - RNA, 17 nt, Artificial Sequence
  Synthetic
gaaaggaaugaaucuga

SEQ ID NO: 706277 - RNA, 17 nt, Artificial Sequence
  Synthetic
gcaaguuaugcaucuga

SEQ ID NO: 706278 - RNA, 17 nt, Artificial Sequence
  Synthetic
guucucaugagaucuga

SEQ ID NO: 706279 - RNA, 17 nt, Artificial Sequence
  Synthetic
ggaguuauuagaucuga

SEQ ID NO: 706280 - RNA, 17 nt, Artificial Sequence
  Synthetic
gggaacaguguaucuga

SEQ ID NO: 706281 - RNA, 17 nt, Artificial Sequence
  Synthetic
gaaaauggagacucuga

SEQ ID NO: 706282 - RNA, 17 nt, Artificial Sequence
  Synthetic
gauuugcauuacucuga

SEQ ID NO: 706283 - RNA, 17 nt, Artificial Sequence
  Synthetic
gucaauuaucccucuga

SEQ ID NO: 706284 - RNA, 17 nt, Artificial Sequence
  Synthetic
gguagcgauuccucuga

SEQ ID NO: 706285 - RNA, 17 nt, Artificial Sequence
  Synthetic
guagagguucucucuga

SEQ ID NO: 706286 - RNA, 17 nt, Artificial Sequence
  Synthetic
gcaagaggagucucuga

SEQ ID NO: 706287 - RNA, 17 nt, Artificial Sequence
  Synthetic
gauuugcaugucucuga

SEQ ID NO: 706288 - RNA, 17 nt, Artificial Sequence
  Synthetic
gauuugcaguucucuga

SEQ ID NO: 706289 - RNA, 17 nt, Artificial Sequence
  Synthetic
gauuugcauuucucuga

SEQ ID NO: 706290 - RNA, 17 nt, Artificial Sequence
  Synthetic
gauuugcguuucucuga

SEQ ID NO: 706291 - RNA, 17 nt, Artificial Sequence
  Synthetic
ggaucucugaagucuga

SEQ ID NO: 706292 - RNA, 17 nt, Artificial Sequence
  Synthetic
guucucacgaggucuga

SEQ ID NO: 706293 - RNA, 17 nt, Artificial Sequence
  Synthetic
gucccaacucauucuga

SEQ ID NO: 706294 - RNA, 17 nt, Artificial Sequence
  Synthetic
ggguugguuccuucuga

SEQ ID NO: 706295 - RNA, 17 nt, Artificial Sequence
  Synthetic
guguccacauuuucuga

SEQ ID NO: 706296 - RNA, 17 nt, Artificial Sequence
  Synthetic
gagauccuguuuucuga

SEQ ID NO: 706297 - RNA, 17 nt, Artificial Sequence
  Synthetic
gucucugcccaaaguga

SEQ ID NO: 706298 - RNA, 17 nt, Artificial Sequence
  Synthetic
gaguguuagcaaaguga

SEQ ID NO: 706299 - RNA, 17 nt, Artificial Sequence
  Synthetic
gagcugggagaaaguga

SEQ ID NO: 706300 - RNA, 17 nt, Artificial Sequence
  Synthetic
gguguaccugaaaguga

SEQ ID NO: 706301 - RNA, 17 nt, Artificial Sequence
  Synthetic
gcuuaauucuaaaguga

SEQ ID NO: 706302 - RNA, 17 nt, Artificial Sequence
  Synthetic
gcaucauaagcaaguga

SEQ ID NO: 706303 - RNA, 17 nt, Artificial Sequence
  Synthetic
gguggugauggaaguga

SEQ ID NO: 706304 - RNA, 17 nt, Artificial Sequence
  Synthetic
gagagauucugaaguga

SEQ ID NO: 706305 - RNA, 17 nt, Artificial Sequence
  Synthetic
gaauaaugguuaaguga

SEQ ID NO: 706306 - RNA, 17 nt, Artificial Sequence
  Synthetic
guuguuuuagccaguga

SEQ ID NO: 706307 - RNA, 17 nt, Artificial Sequence
  Synthetic
gagugagugaagaguga

SEQ ID NO: 706308 - RNA, 17 nt, Artificial Sequence
  Synthetic
guugaauuagugaguga

SEQ ID NO: 706309 - RNA, 17 nt, Artificial Sequence
  Synthetic
guuucuuauuugaguga

SEQ ID NO: 706310 - RNA, 17 nt, Artificial Sequence
  Synthetic
gggugggauaguaguga

SEQ ID NO: 706311 - RNA, 17 nt, Artificial Sequence
  Synthetic
gagugggaagguaguga

SEQ ID NO: 706312 - RNA, 17 nt, Artificial Sequence
  Synthetic
gccaacagaagccguga

SEQ ID NO: 706313 - RNA, 17 nt, Artificial Sequence
  Synthetic
gcaucuuauuaagguga

SEQ ID NO: 706314 - RNA, 17 nt, Artificial Sequence
  Synthetic
guacacagaagagguga

SEQ ID NO: 706315 - RNA, 17 nt, Artificial Sequence
  Synthetic
gaauguuagugagguga

SEQ ID NO: 706316 - RNA, 17 nt, Artificial Sequence
  Synthetic
guaaauguuugagguga

SEQ ID NO: 706317 - RNA, 17 nt, Artificial Sequence
  Synthetic
gcuuaauaucuagguga

SEQ ID NO: 706318 - RNA, 17 nt, Artificial Sequence
  Synthetic
guucccuacuucgguga

SEQ ID NO: 706319 - RNA, 17 nt, Artificial Sequence
  Synthetic
ggccugucaagggguga

SEQ ID NO: 706320 - RNA, 17 nt, Artificial Sequence
  Synthetic
ggaaggguaggggguga

SEQ ID NO: 706321 - RNA, 17 nt, Artificial Sequence
  Synthetic
guaaaugauggggguga

SEQ ID NO: 706322 - RNA, 17 nt, Artificial Sequence
  Synthetic
ggccugucgugggguga

SEQ ID NO: 706323 - RNA, 17 nt, Artificial Sequence
  Synthetic
gcucacugccuggguga

SEQ ID NO: 706324 - RNA, 17 nt, Artificial Sequence
  Synthetic
guucacuaucuggguga

SEQ ID NO: 706325 - RNA, 17 nt, Artificial Sequence
  Synthetic
gauaugggauuggguga

SEQ ID NO: 706326 - RNA, 17 nt, Artificial Sequence
  Synthetic
guacauaauuuggguga

SEQ ID NO: 706327 - RNA, 17 nt, Artificial Sequence
  Synthetic
guauuaaacaaugguga

SEQ ID NO: 706328 - RNA, 17 nt, Artificial Sequence
  Synthetic
gauucauugucugguga

SEQ ID NO: 706329 - RNA, 17 nt, Artificial Sequence
  Synthetic
gagauggauagugguga

SEQ ID NO: 706330 - RNA, 17 nt, Artificial Sequence
  Synthetic
gacgguuagggugguga

SEQ ID NO: 706331 - RNA, 17 nt, Artificial Sequence
  Synthetic
ggcauaaacugugguga

SEQ ID NO: 706332 - RNA, 17 nt, Artificial Sequence
  Synthetic
gaucuguggcaauguga

SEQ ID NO: 706333 - RNA, 17 nt, Artificial Sequence
  Synthetic
gcauggauuuaauguga

SEQ ID NO: 706334 - RNA, 17 nt, Artificial Sequence
  Synthetic
gccucuuauggauguga

SEQ ID NO: 706335 - RNA, 17 nt, Artificial Sequence
  Synthetic
gugguguguguauguga

SEQ ID NO: 706336 - RNA, 17 nt, Artificial Sequence
  Synthetic
guauuuaaauuauguga

SEQ ID NO: 706337 - RNA, 17 nt, Artificial Sequence
  Synthetic
gacuguuuuuccuguga

SEQ ID NO: 706338 - RNA, 17 nt, Artificial Sequence
  Synthetic
guuaccagaggcuguga

SEQ ID NO: 706339 - RNA, 17 nt, Artificial Sequence
  Synthetic
gauuguggagucuguga

SEQ ID NO: 706340 - RNA, 17 nt, Artificial Sequence
  Synthetic
gaccucugggucuguga

SEQ ID NO: 706341 - RNA, 17 nt, Artificial Sequence
  Synthetic
guaauugcauucuguga

SEQ ID NO: 706342 - RNA, 17 nt, Artificial Sequence
  Synthetic
ggagaagagaaguguga

SEQ ID NO: 706343 - RNA, 17 nt, Artificial Sequence
  Synthetic
ggucaggggaaguguga

SEQ ID NO: 706344 - RNA, 17 nt, Artificial Sequence
  Synthetic
guuucuucauaguguga

SEQ ID NO: 706345 - RNA, 17 nt, Artificial Sequence
  Synthetic
guauacuacucguguga

SEQ ID NO: 706346 - RNA, 17 nt, Artificial Sequence
  Synthetic
gugaccacaggguguga

SEQ ID NO: 706347 - RNA, 17 nt, Artificial Sequence
  Synthetic
gaacaaguucuguguga

SEQ ID NO: 706348 - RNA, 17 nt, Artificial Sequence
  Synthetic
gauaccugaguguguga

SEQ ID NO: 706349 - RNA, 17 nt, Artificial Sequence
  Synthetic
gugucugcuuuguguga

SEQ ID NO: 706350 - RNA, 17 nt, Artificial Sequence
  Synthetic
gagggccuggauuguga

SEQ ID NO: 706351 - RNA, 17 nt, Artificial Sequence
  Synthetic
gaauaccuuacuuguga

SEQ ID NO: 706352 - RNA, 17 nt, Artificial Sequence
  Synthetic
guggaugaggcuuguga

SEQ ID NO: 706353 - RNA, 17 nt, Artificial Sequence
  Synthetic
ggccucugggcuuguga

SEQ ID NO: 706354 - RNA, 17 nt, Artificial Sequence
  Synthetic
ggcugacugucuuguga

SEQ ID NO: 706355 - RNA, 17 nt, Artificial Sequence
  Synthetic
gaguuguagauuuguga

SEQ ID NO: 706356 - RNA, 17 nt, Artificial Sequence
  Synthetic
gcaaguccuuuuuguga

SEQ ID NO: 706357 - RNA, 17 nt, Artificial Sequence
  Synthetic
gucuauuagcaaauuga

SEQ ID NO: 706358 - RNA, 17 nt, Artificial Sequence
  Synthetic
ggcauccuagaaauuga

SEQ ID NO: 706359 - RNA, 17 nt, Artificial Sequence
  Synthetic
gaagaacuauuaauuga

SEQ ID NO: 706360 - RNA, 17 nt, Artificial Sequence
  Synthetic
guaucaacguuaauuga

SEQ ID NO: 706361 - RNA, 17 nt, Artificial Sequence
  Synthetic
gaaguauccaacauuga

SEQ ID NO: 706362 - RNA, 17 nt, Artificial Sequence
  Synthetic
gguaagagggacauuga

SEQ ID NO: 706363 - RNA, 17 nt, Artificial Sequence
  Synthetic
guuuuagaaggcauuga

SEQ ID NO: 706364 - RNA, 17 nt, Artificial Sequence
  Synthetic
ggucuuuguuucauuga

SEQ ID NO: 706365 - RNA, 17 nt, Artificial Sequence
  Synthetic
gcaauguggaauauuga

SEQ ID NO: 706366 - RNA, 17 nt, Artificial Sequence
  Synthetic
gaagguguauauauuga

SEQ ID NO: 706367 - RNA, 17 nt, Artificial Sequence
  Synthetic
gauaaauuagguauuga

SEQ ID NO: 706368 - RNA, 17 nt, Artificial Sequence
  Synthetic
gacuacuuuuguauuga

SEQ ID NO: 706369 - RNA, 17 nt, Artificial Sequence
  Synthetic
gacaaguucuuuauuga

SEQ ID NO: 706370 - RNA, 17 nt, Artificial Sequence
  Synthetic
guguugaauuuuauuga

SEQ ID NO: 706371 - RNA, 17 nt, Artificial Sequence
  Synthetic
gugauugagaaacuuga

SEQ ID NO: 706372 - RNA, 17 nt, Artificial Sequence
  Synthetic
gaauuuucuaaacuuga

SEQ ID NO: 706373 - RNA, 17 nt, Artificial Sequence
  Synthetic
gacugaccaucacuuga

SEQ ID NO: 706374 - RNA, 17 nt, Artificial Sequence
  Synthetic
ggacuggcaggacuuga

SEQ ID NO: 706375 - RNA, 17 nt, Artificial Sequence
  Synthetic
gucuuugacaaccuuga

SEQ ID NO: 706376 - RNA, 17 nt, Artificial Sequence
  Synthetic
gcaucaguagcccuuga

SEQ ID NO: 706377 - RNA, 17 nt, Artificial Sequence
  Synthetic
ggagggucuugccuuga

SEQ ID NO: 706378 - RNA, 17 nt, Artificial Sequence
  Synthetic
gauggccaaguccuuga

SEQ ID NO: 706379 - RNA, 17 nt, Artificial Sequence
  Synthetic
gcuuagggauaucuuga

SEQ ID NO: 706380 - RNA, 17 nt, Artificial Sequence
  Synthetic
guccauucaucucuuga

SEQ ID NO: 706381 - RNA, 17 nt, Artificial Sequence
  Synthetic
gugggcuuuucucuuga

SEQ ID NO: 706382 - RNA, 17 nt, Artificial Sequence
  Synthetic
ggguuuaagauucuuga

SEQ ID NO: 706383 - RNA, 17 nt, Artificial Sequence
  Synthetic
gcauuuuaauuucuuga

SEQ ID NO: 706384 - RNA, 17 nt, Artificial Sequence
  Synthetic
gauguguaagaaguuga

SEQ ID NO: 706385 - RNA, 17 nt, Artificial Sequence
  Synthetic
guucuaaauacaguuga

SEQ ID NO: 706386 - RNA, 17 nt, Artificial Sequence
  Synthetic
gggaggaaaugaguuga

SEQ ID NO: 706387 - RNA, 17 nt, Artificial Sequence
  Synthetic
ggacucuuguuaguuga

SEQ ID NO: 706388 - RNA, 17 nt, Artificial Sequence
  Synthetic
gagaaguccaagguuga

SEQ ID NO: 706389 - RNA, 17 nt, Artificial Sequence
  Synthetic
gguaguggggggguuga

SEQ ID NO: 706390 - RNA, 17 nt, Artificial Sequence
  Synthetic
gugguggcuccuguuga

SEQ ID NO: 706391 - RNA, 17 nt, Artificial Sequence
  Synthetic
gccuguguguguguuga

SEQ ID NO: 706392 - RNA, 17 nt, Artificial Sequence
  Synthetic
gaaagugggguuguuga

SEQ ID NO: 706393 - RNA, 17 nt, Artificial Sequence
  Synthetic
gcaagaauuuaauuuga

SEQ ID NO: 706394 - RNA, 17 nt, Artificial Sequence
  Synthetic
gagagggagccauuuga

SEQ ID NO: 706395 - RNA, 17 nt, Artificial Sequence
  Synthetic
gcuuccacugcauuuga

SEQ ID NO: 706396 - RNA, 17 nt, Artificial Sequence
  Synthetic
guguguauaucauuuga

SEQ ID NO: 706397 - RNA, 17 nt, Artificial Sequence
  Synthetic
guucucaugagauuuga

SEQ ID NO: 706398 - RNA, 17 nt, Artificial Sequence
  Synthetic
gaaauguaacuauuuga

SEQ ID NO: 706399 - RNA, 17 nt, Artificial Sequence
  Synthetic
ggcacaacaguauuuga

SEQ ID NO: 706400 - RNA, 17 nt, Artificial Sequence
  Synthetic
gauggauggguauuuga

SEQ ID NO: 706401 - RNA, 17 nt, Artificial Sequence
  Synthetic
guucugagaaacuuuga

SEQ ID NO: 706402 - RNA, 17 nt, Artificial Sequence
  Synthetic
gcugauagaaacuuuga

SEQ ID NO: 706403 - RNA, 17 nt, Artificial Sequence
  Synthetic
guucugguaaacuuuga

SEQ ID NO: 706404 - RNA, 17 nt, Artificial Sequence
  Synthetic
gggaguuagcccuuuga

SEQ ID NO: 706405 - RNA, 17 nt, Artificial Sequence
  Synthetic
gaaagcuaagccuuuga

SEQ ID NO: 706406 - RNA, 17 nt, Artificial Sequence
  Synthetic
gaguucauguccuuuga

SEQ ID NO: 706407 - RNA, 17 nt, Artificial Sequence
  Synthetic
gaugggcuuuccuuuga

SEQ ID NO: 706408 - RNA, 17 nt, Artificial Sequence
  Synthetic
guaaauacuaaguuuga

SEQ ID NO: 706409 - RNA, 17 nt, Artificial Sequence
  Synthetic
guuuucguuuuguuuga

SEQ ID NO: 706410 - RNA, 17 nt, Artificial Sequence
  Synthetic
gucaaaaacaauuuuga

SEQ ID NO: 706411 - RNA, 17 nt, Artificial Sequence
  Synthetic
ggguagucucauuuuga

SEQ ID NO: 706412 - RNA, 17 nt, Artificial Sequence
  Synthetic
ggcugacucucuuuuga

SEQ ID NO: 706413 - RNA, 17 nt, Artificial Sequence
  Synthetic
guuuuuccuuguuuuga

SEQ ID NO: 706414 - RNA, 17 nt, Artificial Sequence
  Synthetic
gauguuuaaauuuuuga

SEQ ID NO: 706415 - RNA, 17 nt, Artificial Sequence
  Synthetic
gggaaucuuauuuuuga

SEQ ID NO: 706416 - RNA, 17 nt, Artificial Sequence
  Synthetic
gaacaguaaaaaaaaua

SEQ ID NO: 706417 - RNA, 17 nt, Artificial Sequence
  Synthetic
guaaucuuaaaaaaaua

SEQ ID NO: 706418 - RNA, 17 nt, Artificial Sequence
  Synthetic
gaaguuaaugaaaaaua

SEQ ID NO: 706419 - RNA, 17 nt, Artificial Sequence
  Synthetic
gguaguuaauaaaaaua

SEQ ID NO: 706420 - RNA, 17 nt, Artificial Sequence
  Synthetic
gcaugucagccaaaaua

SEQ ID NO: 706421 - RNA, 17 nt, Artificial Sequence
  Synthetic
gaauuuucaucaaaaua

SEQ ID NO: 706422 - RNA, 17 nt, Artificial Sequence
  Synthetic
gcaaacuagagaaaaua

SEQ ID NO: 706423 - RNA, 17 nt, Artificial Sequence
  Synthetic
gguucagaaggaaaaua

SEQ ID NO: 706424 - RNA, 17 nt, Artificial Sequence
  Synthetic
gcuccacauggaaaaua

SEQ ID NO: 706425 - RNA, 17 nt, Artificial Sequence
  Synthetic
gacagugcuggaaaaua

SEQ ID NO: 706426 - RNA, 17 nt, Artificial Sequence
  Synthetic
gaaguggagugaaaaua

SEQ ID NO: 706427 - RNA, 17 nt, Artificial Sequence
  Synthetic
gaauguccgugaaaaua

SEQ ID NO: 706428 - RNA, 17 nt, Artificial Sequence
  Synthetic
guucuugggugaaaaua

SEQ ID NO: 706429 - RNA, 17 nt, Artificial Sequence
  Synthetic
gacugugauuuaaaaua

SEQ ID NO: 706430 - RNA, 17 nt, Artificial Sequence
  Synthetic
guaaacacaaacaaaua

SEQ ID NO: 706431 - RNA, 17 nt, Artificial Sequence
  Synthetic
gcaauuuccuacaaaua

SEQ ID NO: 706432 - RNA, 17 nt, Artificial Sequence
  Synthetic
gacccuaucuccaaaua

SEQ ID NO: 706433 - RNA, 17 nt, Artificial Sequence
  Synthetic
gaccagccuggcaaaua

SEQ ID NO: 706434 - RNA, 17 nt, Artificial Sequence
  Synthetic
gcucauuauuucaaaua

SEQ ID NO: 706435 - RNA, 17 nt, Artificial Sequence
  Synthetic
gagacauuuuucaaaua

SEQ ID NO: 706436 - RNA, 17 nt, Artificial Sequence
  Synthetic
gaagagaaaaagaaaua

SEQ ID NO: 706437 - RNA, 17 nt, Artificial Sequence
  Synthetic
ggcaguaagaagaaaua

SEQ ID NO: 706438 - RNA, 17 nt, Artificial Sequence
  Synthetic
gaguuugaccagaaaua

SEQ ID NO: 706439 - RNA, 17 nt, Artificial Sequence
  Synthetic
gucccuaacuagaaaua

SEQ ID NO: 706440 - RNA, 17 nt, Artificial Sequence
  Synthetic
gguuguugggggaaaua

SEQ ID NO: 706441 - RNA, 17 nt, Artificial Sequence
  Synthetic
ggauaaauugggaaaua

SEQ ID NO: 706442 - RNA, 17 nt, Artificial Sequence
  Synthetic
gaggaaagcuggaaaua

SEQ ID NO: 706443 - RNA, 17 nt, Artificial Sequence
  Synthetic
guagggagguggaaaua

SEQ ID NO: 706444 - RNA, 17 nt, Artificial Sequence
  Synthetic
ggagguuaaaugaaaua

SEQ ID NO: 706445 - RNA, 17 nt, Artificial Sequence
  Synthetic
gaagauaaccugaaaua

SEQ ID NO: 706446 - RNA, 17 nt, Artificial Sequence
  Synthetic
gaaggaagcacuaaaua

SEQ ID NO: 706447 - RNA, 17 nt, Artificial Sequence
  Synthetic
gcauacagaaguaaaua

SEQ ID NO: 706448 - RNA, 17 nt, Artificial Sequence
  Synthetic
gagaggucagguaaaua

SEQ ID NO: 706449 - RNA, 17 nt, Artificial Sequence
  Synthetic
gggguuaagauuaaaua

SEQ ID NO: 706450 - RNA, 17 nt, Artificial Sequence
  Synthetic
gcaccauuuauuaaaua

SEQ ID NO: 706451 - RNA, 17 nt, Artificial Sequence
  Synthetic
gcaccguuuauuaaaua

SEQ ID NO: 706452 - RNA, 17 nt, Artificial Sequence
  Synthetic
gugggaaguaaacaaua

SEQ ID NO: 706453 - RNA, 17 nt, Artificial Sequence
  Synthetic
ggucauauguaacaaua

SEQ ID NO: 706454 - RNA, 17 nt, Artificial Sequence
  Synthetic
guggacaguucacaaua

SEQ ID NO: 706455 - RNA, 17 nt, Artificial Sequence
  Synthetic
gcaagacucaaccaaua

SEQ ID NO: 706456 - RNA, 17 nt, Artificial Sequence
  Synthetic
gaacagccuggccaaua

SEQ ID NO: 706457 - RNA, 17 nt, Artificial Sequence
  Synthetic
gaccagcuuugccaaua

SEQ ID NO: 706458 - RNA, 17 nt, Artificial Sequence
  Synthetic
ggcccccauugucaaua

SEQ ID NO: 706459 - RNA, 17 nt, Artificial Sequence
  Synthetic
gcccuuccuauucaaua

SEQ ID NO: 706460 - RNA, 17 nt, Artificial Sequence
  Synthetic
guaagagugaaagaaua

SEQ ID NO: 706461 - RNA, 17 nt, Artificial Sequence
  Synthetic
gagggucaggaagaaua

SEQ ID NO: 706462 - RNA, 17 nt, Artificial Sequence
  Synthetic
gcuuggaguccagaaua

SEQ ID NO: 706463 - RNA, 17 nt, Artificial Sequence
  Synthetic
gauugacaaauagaaua

SEQ ID NO: 706464 - RNA, 17 nt, Artificial Sequence
  Synthetic
gaagacaauggggaaua

SEQ ID NO: 706465 - RNA, 17 nt, Artificial Sequence
  Synthetic
gagagagcuugggaaua

SEQ ID NO: 706466 - RNA, 17 nt, Artificial Sequence
  Synthetic
guugcagaaaaugaaua

SEQ ID NO: 706467 - RNA, 17 nt, Artificial Sequence
  Synthetic
gcaugaaucuaugaaua

SEQ ID NO: 706468 - RNA, 17 nt, Artificial Sequence
  Synthetic
gcaccauuuacugaaua

SEQ ID NO: 706469 - RNA, 17 nt, Artificial Sequence
  Synthetic
gaggcuaugugugaaua

SEQ ID NO: 706470 - RNA, 17 nt, Artificial Sequence
  Synthetic
ggcaucagaaaauaaua

SEQ ID NO: 706471 - RNA, 17 nt, Artificial Sequence
  Synthetic
gcaagggagaaauaaua

SEQ ID NO: 706472 - RNA, 17 nt, Artificial Sequence
  Synthetic
gccuuugagaaauaaua

SEQ ID NO: 706473 - RNA, 17 nt, Artificial Sequence
  Synthetic
guugaaguagaauaaua

SEQ ID NO: 706474 - RNA, 17 nt, Artificial Sequence
  Synthetic
gauuaaaaauaauaaua

SEQ ID NO: 706475 - RNA, 17 nt, Artificial Sequence
  Synthetic
gaaauucugacauaaua

SEQ ID NO: 706476 - RNA, 17 nt, Artificial Sequence
  Synthetic
gaucacccaccauaaua

SEQ ID NO: 706477 - RNA, 17 nt, Artificial Sequence
  Synthetic
gacagugguccauaaua

SEQ ID NO: 706478 - RNA, 17 nt, Artificial Sequence
  Synthetic
guguuauuaggauaaua

SEQ ID NO: 706479 - RNA, 17 nt, Artificial Sequence
  Synthetic
guauuaauuagguaaua

SEQ ID NO: 706480 - RNA, 17 nt, Artificial Sequence
  Synthetic
guuuuagugugguaaua

SEQ ID NO: 706481 - RNA, 17 nt, Artificial Sequence
  Synthetic
gucacaagguuguaaua

SEQ ID NO: 706482 - RNA, 17 nt, Artificial Sequence
  Synthetic
gcaaaacaaaauuaaua

SEQ ID NO: 706483 - RNA, 17 nt, Artificial Sequence
  Synthetic
gggcuaucuaauuaaua

SEQ ID NO: 706484 - RNA, 17 nt, Artificial Sequence
  Synthetic
gaggugaguaauuaaua

SEQ ID NO: 706485 - RNA, 17 nt, Artificial Sequence
  Synthetic
guaguaccuaguuaaua

SEQ ID NO: 706486 - RNA, 17 nt, Artificial Sequence
  Synthetic
gauagacacuguuaaua

SEQ ID NO: 706487 - RNA, 17 nt, Artificial Sequence
  Synthetic
gauuuggaguuuuaaua

SEQ ID NO: 706488 - RNA, 17 nt, Artificial Sequence
  Synthetic
gacagaagauaaacaua

SEQ ID NO: 706489 - RNA, 17 nt, Artificial Sequence
  Synthetic
gauacagcaagaacaua

SEQ ID NO: 706490 - RNA, 17 nt, Artificial Sequence
  Synthetic
guggggaaaggaacaua

SEQ ID NO: 706491 - RNA, 17 nt, Artificial Sequence
  Synthetic
gggauuucuggaacaua

SEQ ID NO: 706492 - RNA, 17 nt, Artificial Sequence
  Synthetic
gaaaauugaauaacaua

SEQ ID NO: 706493 - RNA, 17 nt, Artificial Sequence
  Synthetic
gcaugcacgcgcacaua

SEQ ID NO: 706494 - RNA, 17 nt, Artificial Sequence
  Synthetic
ggcaggugggucacaua

SEQ ID NO: 706495 - RNA, 17 nt, Artificial Sequence
  Synthetic
gaggauacaaagacaua

SEQ ID NO: 706496 - RNA, 17 nt, Artificial Sequence
  Synthetic
gcuguagagcagacaua

SEQ ID NO: 706497 - RNA, 17 nt, Artificial Sequence
  Synthetic
gaaaaaguugggacaua

SEQ ID NO: 706498 - RNA, 17 nt, Artificial Sequence
  Synthetic
ggagaaugagugacaua

SEQ ID NO: 706499 - RNA, 17 nt, Artificial Sequence
  Synthetic
gaguaucaggauacaua

SEQ ID NO: 706500 - RNA, 17 nt, Artificial Sequence
  Synthetic
gaaaaaaauccuacaua

SEQ ID NO: 706501 - RNA, 17 nt, Artificial Sequence
  Synthetic
ggaugaaaagcuacaua

SEQ ID NO: 706502 - RNA, 17 nt, Artificial Sequence
  Synthetic
guuuggauuucuacaua

SEQ ID NO: 706503 - RNA, 17 nt, Artificial Sequence
  Synthetic
gacucuauuucuacaua

SEQ ID NO: 706504 - RNA, 17 nt, Artificial Sequence
  Synthetic
guuuaggggaguacaua

SEQ ID NO: 706505 - RNA, 17 nt, Artificial Sequence
  Synthetic
gcagaacgauguacaua

SEQ ID NO: 706506 - RNA, 17 nt, Artificial Sequence
  Synthetic
gcugugaggaaaccaua

SEQ ID NO: 706507 - RNA, 17 nt, Artificial Sequence
  Synthetic
gcaauugaaauaccaua

SEQ ID NO: 706508 - RNA, 17 nt, Artificial Sequence
  Synthetic
ggacaauaucuaccaua

SEQ ID NO: 706509 - RNA, 17 nt, Artificial Sequence
  Synthetic
gaagcuaauaugccaua

SEQ ID NO: 706510 - RNA, 17 nt, Artificial Sequence
  Synthetic
guuuucaaugguccaua

SEQ ID NO: 706511 - RNA, 17 nt, Artificial Sequence
  Synthetic
ggaauugugauuccaua

SEQ ID NO: 706512 - RNA, 17 nt, Artificial Sequence
  Synthetic
gcauccaauaaagcaua

SEQ ID NO: 706513 - RNA, 17 nt, Artificial Sequence
  Synthetic
ggaaaacaguaagcaua

SEQ ID NO: 706514 - RNA, 17 nt, Artificial Sequence
  Synthetic
ggccaaagccaggcaua

SEQ ID NO: 706515 - RNA, 17 nt, Artificial Sequence
  Synthetic
gagcuccccguggcaua

SEQ ID NO: 706516 - RNA, 17 nt, Artificial Sequence
  Synthetic
gaaugguuaaaugcaua

SEQ ID NO: 706517 - RNA, 17 nt, Artificial Sequence
  Synthetic
ggccucugggaugcaua

SEQ ID NO: 706518 - RNA, 17 nt, Artificial Sequence
  Synthetic
gguuuagagggugcaua

SEQ ID NO: 706519 - RNA, 17 nt, Artificial Sequence
  Synthetic
gagguaauggaaucaua

SEQ ID NO: 706520 - RNA, 17 nt, Artificial Sequence
  Synthetic
gaacuaauuccaucaua

SEQ ID NO: 706521 - RNA, 17 nt, Artificial Sequence
  Synthetic
gauaugggagcaucaua

SEQ ID NO: 706522 - RNA, 17 nt, Artificial Sequence
  Synthetic
gaggcgggcggaucaua

SEQ ID NO: 706523 - RNA, 17 nt, Artificial Sequence
  Synthetic
gggauugcuggaucaua

SEQ ID NO: 706524 - RNA, 17 nt, Artificial Sequence
  Synthetic
gagguugcuggaucaua

SEQ ID NO: 706525 - RNA, 17 nt, Artificial Sequence
  Synthetic
ggaauacacuacucaua

SEQ ID NO: 706526 - RNA, 17 nt, Artificial Sequence
  Synthetic
gaugauauuuacucaua

SEQ ID NO: 706527 - RNA, 17 nt, Artificial Sequence
  Synthetic
ggcauuagauucucaua

SEQ ID NO: 706528 - RNA, 17 nt, Artificial Sequence
  Synthetic
gaauuugcaaagucaua

SEQ ID NO: 706529 - RNA, 17 nt, Artificial Sequence
  Synthetic
gcagcgggaaggucaua

SEQ ID NO: 706530 - RNA, 17 nt, Artificial Sequence
  Synthetic
ggaaauacaaauucaua

SEQ ID NO: 706531 - RNA, 17 nt, Artificial Sequence
  Synthetic
gaaguggucaauucaua

SEQ ID NO: 706532 - RNA, 17 nt, Artificial Sequence
  Synthetic
ggaugaauccauucaua

SEQ ID NO: 706533 - RNA, 17 nt, Artificial Sequence
  Synthetic
gaggcaguuucuucaua

SEQ ID NO: 706534 - RNA, 17 nt, Artificial Sequence
  Synthetic
gguuaaaugaguucaua

SEQ ID NO: 706535 - RNA, 17 nt, Artificial Sequence
  Synthetic
gcugagcuuaguucaua

SEQ ID NO: 706536 - RNA, 17 nt, Artificial Sequence
  Synthetic
guaguaccuauuucaua

SEQ ID NO: 706537 - RNA, 17 nt, Artificial Sequence
  Synthetic
ggcaugucaguuucaua

SEQ ID NO: 706538 - RNA, 17 nt, Artificial Sequence
  Synthetic
gcaaaugagguuucaua

SEQ ID NO: 706539 - RNA, 17 nt, Artificial Sequence
  Synthetic
gagcugaugguuucaua

SEQ ID NO: 706540 - RNA, 17 nt, Artificial Sequence
  Synthetic
gaaaaacauaaaagaua

SEQ ID NO: 706541 - RNA, 17 nt, Artificial Sequence
  Synthetic
gagugauuugaaagaua

SEQ ID NO: 706542 - RNA, 17 nt, Artificial Sequence
  Synthetic
gaggccagaacaagaua

SEQ ID NO: 706543 - RNA, 17 nt, Artificial Sequence
  Synthetic
gagaaacuaacaagaua

SEQ ID NO: 706544 - RNA, 17 nt, Artificial Sequence
  Synthetic
gaauaaaagugaagaua

SEQ ID NO: 706545 - RNA, 17 nt, Artificial Sequence
  Synthetic
gaauguucuauaagaua

SEQ ID NO: 706546 - RNA, 17 nt, Artificial Sequence
  Synthetic
gauucagccuacagaua

SEQ ID NO: 706547 - RNA, 17 nt, Artificial Sequence
  Synthetic
gcuauauaccucagaua

SEQ ID NO: 706548 - RNA, 17 nt, Artificial Sequence
  Synthetic
gaaaguauuaagagaua

SEQ ID NO: 706549 - RNA, 17 nt, Artificial Sequence
  Synthetic
guauauggugagagaua

SEQ ID NO: 706550 - RNA, 17 nt, Artificial Sequence
  Synthetic
gaggguuuaaggagaua

SEQ ID NO: 706551 - RNA, 17 nt, Artificial Sequence
  Synthetic
gugagaaacuggagaua

SEQ ID NO: 706552 - RNA, 17 nt, Artificial Sequence
  Synthetic
gacccuauuuggagaua

SEQ ID NO: 706553 - RNA, 17 nt, Artificial Sequence
  Synthetic
guauaaggggugagaua

SEQ ID NO: 706554 - RNA, 17 nt, Artificial Sequence
  Synthetic
gcaauacaucauagaua

SEQ ID NO: 706555 - RNA, 17 nt, Artificial Sequence
  Synthetic
guucacauagcuagaua

SEQ ID NO: 706556 - RNA, 17 nt, Artificial Sequence
  Synthetic
gaccuccugaguagaua

SEQ ID NO: 706557 - RNA, 17 nt, Artificial Sequence
  Synthetic
guugcucuagguagaua

SEQ ID NO: 706558 - RNA, 17 nt, Artificial Sequence
  Synthetic
gcaguaccuguuagaua

SEQ ID NO: 706559 - RNA, 17 nt, Artificial Sequence
  Synthetic
ggagacuguguuagaua

SEQ ID NO: 706560 - RNA, 17 nt, Artificial Sequence
  Synthetic
gcuguccuauuuagaua

SEQ ID NO: 706561 - RNA, 17 nt, Artificial Sequence
  Synthetic
gauuaauaguuuagaua

SEQ ID NO: 706562 - RNA, 17 nt, Artificial Sequence
  Synthetic
gauuuuguugaaggaua

SEQ ID NO: 706563 - RNA, 17 nt, Artificial Sequence
  Synthetic
gcaagauuuuaaggaua

SEQ ID NO: 706564 - RNA, 17 nt, Artificial Sequence
  Synthetic
gagacaaacucaggaua

SEQ ID NO: 706565 - RNA, 17 nt, Artificial Sequence
  Synthetic
guguguuguggaggaua

SEQ ID NO: 706566 - RNA, 17 nt, Artificial Sequence
  Synthetic
gcuaaguacugaggaua

SEQ ID NO: 706567 - RNA, 17 nt, Artificial Sequence
  Synthetic
ggaaaaaaaguaggaua

SEQ ID NO: 706568 - RNA, 17 nt, Artificial Sequence
  Synthetic
gagacucugaagggaua

SEQ ID NO: 706569 - RNA, 17 nt, Artificial Sequence
  Synthetic
gcaaggaugaggggaua

SEQ ID NO: 706570 - RNA, 17 nt, Artificial Sequence
  Synthetic
gccaggggcuggggaua

SEQ ID NO: 706571 - RNA, 17 nt, Artificial Sequence
  Synthetic
gaagguaguuggggaua

SEQ ID NO: 706572 - RNA, 17 nt, Artificial Sequence
  Synthetic
gguccacuccugggaua

SEQ ID NO: 706573 - RNA, 17 nt, Artificial Sequence
  Synthetic
gaauucgaugugggaua

SEQ ID NO: 706574 - RNA, 17 nt, Artificial Sequence
  Synthetic
gcauaagcaaauggaua

SEQ ID NO: 706575 - RNA, 17 nt, Artificial Sequence
  Synthetic
gcuacacaggauggaua

SEQ ID NO: 706576 - RNA, 17 nt, Artificial Sequence
  Synthetic
gaacagaaugauggaua

SEQ ID NO: 706577 - RNA, 17 nt, Artificial Sequence
  Synthetic
gagugaccagcuggaua

SEQ ID NO: 706578 - RNA, 17 nt, Artificial Sequence
  Synthetic
ggugggucugcuggaua

SEQ ID NO: 706579 - RNA, 17 nt, Artificial Sequence
  Synthetic
ggucaaggauuuggaua

SEQ ID NO: 706580 - RNA, 17 nt, Artificial Sequence
  Synthetic
gggggaugguuuggaua

SEQ ID NO: 706581 - RNA, 17 nt, Artificial Sequence
  Synthetic
guugacauggaaugaua

SEQ ID NO: 706582 - RNA, 17 nt, Artificial Sequence
  Synthetic
gacuguuuuagaugaua

SEQ ID NO: 706583 - RNA, 17 nt, Artificial Sequence
  Synthetic
gauucuuuccuaugaua

SEQ ID NO: 706584 - RNA, 17 nt, Artificial Sequence
  Synthetic
guucaaagauacugaua

SEQ ID NO: 706585 - RNA, 17 nt, Artificial Sequence
  Synthetic
guuuagugcagcugaua

SEQ ID NO: 706586 - RNA, 17 nt, Artificial Sequence
  Synthetic
ggaacaaacaagugaua

SEQ ID NO: 706587 - RNA, 17 nt, Artificial Sequence
  Synthetic
guuuuucagaggugaua

SEQ ID NO: 706588 - RNA, 17 nt, Artificial Sequence
  Synthetic
gagguaggagggugaua

SEQ ID NO: 706589 - RNA, 17 nt, Artificial Sequence
  Synthetic
gggaaaaaggggugaua

SEQ ID NO: 706590 - RNA, 17 nt, Artificial Sequence
  Synthetic
gugaaugcaaugugaua

SEQ ID NO: 706591 - RNA, 17 nt, Artificial Sequence
  Synthetic
guauccauagaaauaua

SEQ ID NO: 706592 - RNA, 17 nt, Artificial Sequence
  Synthetic
gaguuggaugaaauaua

SEQ ID NO: 706593 - RNA, 17 nt, Artificial Sequence
  Synthetic
guaggaagguaaauaua

SEQ ID NO: 706594 - RNA, 17 nt, Artificial Sequence
  Synthetic
guaaauuauacaauaua

SEQ ID NO: 706595 - RNA, 17 nt, Artificial Sequence
  Synthetic
gcuugugauagaauaua

SEQ ID NO: 706596 - RNA, 17 nt, Artificial Sequence
  Synthetic
gcuuucugcugaauaua

SEQ ID NO: 706597 - RNA, 17 nt, Artificial Sequence
  Synthetic
gcugaguaaauaauaua

SEQ ID NO: 706598 - RNA, 17 nt, Artificial Sequence
  Synthetic
gauacagguaacauaua

SEQ ID NO: 706599 - RNA, 17 nt, Artificial Sequence
  Synthetic
ggcaagagggacauaua

SEQ ID NO: 706600 - RNA, 17 nt, Artificial Sequence
  Synthetic
gagaaaaaaagcauaua

SEQ ID NO: 706601 - RNA, 17 nt, Artificial Sequence
  Synthetic
gugagcagcugcauaua

SEQ ID NO: 706602 - RNA, 17 nt, Artificial Sequence
  Synthetic
gguagcccuuucauaua

SEQ ID NO: 706603 - RNA, 17 nt, Artificial Sequence
  Synthetic
ggagugaguuucauaua

SEQ ID NO: 706604 - RNA, 17 nt, Artificial Sequence
  Synthetic
guaucuauaaugauaua

SEQ ID NO: 706605 - RNA, 17 nt, Artificial Sequence
  Synthetic
ggcaauauuuugauaua

SEQ ID NO: 706606 - RNA, 17 nt, Artificial Sequence
  Synthetic
gauauaugaaauauaua

SEQ ID NO: 706607 - RNA, 17 nt, Artificial Sequence
  Synthetic
ggggcuuaccauauaua

SEQ ID NO: 706608 - RNA, 17 nt, Artificial Sequence
  Synthetic
gaauguccugauauaua

SEQ ID NO: 706609 - RNA, 17 nt, Artificial Sequence
  Synthetic
ggguacauauauauaua

SEQ ID NO: 706610 - RNA, 17 nt, Artificial Sequence
  Synthetic
gugcguauauauauaua

SEQ ID NO: 706611 - RNA, 17 nt, Artificial Sequence
  Synthetic
gugcuaccaacuauaua

SEQ ID NO: 706612 - RNA, 17 nt, Artificial Sequence
  Synthetic
gauuuauaaauuauaua

SEQ ID NO: 706613 - RNA, 17 nt, Artificial Sequence
  Synthetic
ggaccuuuuauuauaua

SEQ ID NO: 706614 - RNA, 17 nt, Artificial Sequence
  Synthetic
gagauccuaguuauaua

SEQ ID NO: 706615 - RNA, 17 nt, Artificial Sequence
  Synthetic
gaauauauauuuauaua

SEQ ID NO: 706616 - RNA, 17 nt, Artificial Sequence
  Synthetic
gccuauuuauuuauaua

SEQ ID NO: 706617 - RNA, 17 nt, Artificial Sequence
  Synthetic
gagaaaugagaacuaua

SEQ ID NO: 706618 - RNA, 17 nt, Artificial Sequence
  Synthetic
gauguggccagacuaua

SEQ ID NO: 706619 - RNA, 17 nt, Artificial Sequence
  Synthetic
gaagagcauauacuaua

SEQ ID NO: 706620 - RNA, 17 nt, Artificial Sequence
  Synthetic
guuagaggugaccuaua

SEQ ID NO: 706621 - RNA, 17 nt, Artificial Sequence
  Synthetic
gagauuuauaggcuaua

SEQ ID NO: 706622 - RNA, 17 nt, Artificial Sequence
  Synthetic
ggauuuucuuggcuaua

SEQ ID NO: 706623 - RNA, 17 nt, Artificial Sequence
  Synthetic
gaucuggaaaaucuaua

SEQ ID NO: 706624 - RNA, 17 nt, Artificial Sequence
  Synthetic
gaacuaagguaucuaua

SEQ ID NO: 706625 - RNA, 17 nt, Artificial Sequence
  Synthetic
gauagggaucuucuaua

SEQ ID NO: 706626 - RNA, 17 nt, Artificial Sequence
  Synthetic
gggggccagagaguaua

SEQ ID NO: 706627 - RNA, 17 nt, Artificial Sequence
  Synthetic
gcccauuugagaguaua

SEQ ID NO: 706628 - RNA, 17 nt, Artificial Sequence
  Synthetic
guuggccaagagguaua

SEQ ID NO: 706629 - RNA, 17 nt, Artificial Sequence
  Synthetic
gccacagaagggguaua

SEQ ID NO: 706630 - RNA, 17 nt, Artificial Sequence
  Synthetic
gugucauuaaugguaua

SEQ ID NO: 706631 - RNA, 17 nt, Artificial Sequence
  Synthetic
gacaaacaaaauguaua

SEQ ID NO: 706632 - RNA, 17 nt, Artificial Sequence
  Synthetic
guucaauuuaauguaua

SEQ ID NO: 706633 - RNA, 17 nt, Artificial Sequence
  Synthetic
gguaccugguauguaua

SEQ ID NO: 706634 - RNA, 17 nt, Artificial Sequence
  Synthetic
guuuauuuuuauguaua

SEQ ID NO: 706635 - RNA, 17 nt, Artificial Sequence
  Synthetic
gaauaacccauuguaua

SEQ ID NO: 706636 - RNA, 17 nt, Artificial Sequence
  Synthetic
ggaguuuugcuuguaua

SEQ ID NO: 706637 - RNA, 17 nt, Artificial Sequence
  Synthetic
gaguugauucuuguaua

SEQ ID NO: 706638 - RNA, 17 nt, Artificial Sequence
  Synthetic
gaauuaauuuuuguaua

SEQ ID NO: 706639 - RNA, 17 nt, Artificial Sequence
  Synthetic
gaguuaauuuuuguaua

SEQ ID NO: 706640 - RNA, 17 nt, Artificial Sequence
  Synthetic
gaauugauuuuuguaua

SEQ ID NO: 706641 - RNA, 17 nt, Artificial Sequence
  Synthetic
gaguugauuuuuguaua

SEQ ID NO: 706642 - RNA, 17 nt, Artificial Sequence
  Synthetic
gauuugauuuuuguaua

SEQ ID NO: 706643 - RNA, 17 nt, Artificial Sequence
  Synthetic
gacagcucucaauuaua

SEQ ID NO: 706644 - RNA, 17 nt, Artificial Sequence
  Synthetic
ggacacuaagaauuaua

SEQ ID NO: 706645 - RNA, 17 nt, Artificial Sequence
  Synthetic
guauaugaauaauuaua

SEQ ID NO: 706646 - RNA, 17 nt, Artificial Sequence
  Synthetic
gagcuguuuacauuaua

SEQ ID NO: 706647 - RNA, 17 nt, Artificial Sequence
  Synthetic
ggauuauggggauuaua

SEQ ID NO: 706648 - RNA, 17 nt, Artificial Sequence
  Synthetic
guuggcacuggauuaua

SEQ ID NO: 706649 - RNA, 17 nt, Artificial Sequence
  Synthetic
gggaaugcuauauuaua

SEQ ID NO: 706650 - RNA, 17 nt, Artificial Sequence
  Synthetic
gaauuuaacuacuuaua

SEQ ID NO: 706651 - RNA, 17 nt, Artificial Sequence
  Synthetic
gcuucauuucccuuaua

SEQ ID NO: 706652 - RNA, 17 nt, Artificial Sequence
  Synthetic
guuaaaauacgcuuaua

SEQ ID NO: 706653 - RNA, 17 nt, Artificial Sequence
  Synthetic
ggguugaagaaguuaua

SEQ ID NO: 706654 - RNA, 17 nt, Artificial Sequence
  Synthetic
gccuuguccauguuaua

SEQ ID NO: 706655 - RNA, 17 nt, Artificial Sequence
  Synthetic
gugcauucucauuuaua

SEQ ID NO: 706656 - RNA, 17 nt, Artificial Sequence
  Synthetic
gguacuaaagauuuaua

SEQ ID NO: 706657 - RNA, 17 nt, Artificial Sequence
  Synthetic
gguguaaaggauuuaua

SEQ ID NO: 706658 - RNA, 17 nt, Artificial Sequence
  Synthetic
ggcaagaaugcuuuaua

SEQ ID NO: 706659 - RNA, 17 nt, Artificial Sequence
  Synthetic
gugaagccuuguuuaua

SEQ ID NO: 706660 - RNA, 17 nt, Artificial Sequence
  Synthetic
guaugacuaauuuuaua

SEQ ID NO: 706661 - RNA, 17 nt, Artificial Sequence
  Synthetic
guauccuguauuuuaua

SEQ ID NO: 706662 - RNA, 17 nt, Artificial Sequence
  Synthetic
gaacucccacuuuuaua

SEQ ID NO: 706663 - RNA, 17 nt, Artificial Sequence
  Synthetic
gcuuuguaaguuuuaua

SEQ ID NO: 706664 - RNA, 17 nt, Artificial Sequence
  Synthetic
gauccaaugguuuuaua

SEQ ID NO: 706665 - RNA, 17 nt, Artificial Sequence
  Synthetic
gaucugaugguuuuaua

SEQ ID NO: 706666 - RNA, 17 nt, Artificial Sequence
  Synthetic
ggucugaugguuuuaua

SEQ ID NO: 706667 - RNA, 17 nt, Artificial Sequence
  Synthetic
gauuugaugguuuuaua

SEQ ID NO: 706668 - RNA, 17 nt, Artificial Sequence
  Synthetic
gaucugauuguuuuaua

SEQ ID NO: 706669 - RNA, 17 nt, Artificial Sequence
  Synthetic
gucaugugguuuuuaua

SEQ ID NO: 706670 - RNA, 17 nt, Artificial Sequence
  Synthetic
gguuuagacuaaaacua

SEQ ID NO: 706671 - RNA, 17 nt, Artificial Sequence
  Synthetic
gacuaaaauuaaaacua

SEQ ID NO: 706672 - RNA, 17 nt, Artificial Sequence
  Synthetic
gagcgagagagaaacua

SEQ ID NO: 706673 - RNA, 17 nt, Artificial Sequence
  Synthetic
ggcaacaguagaaacua

SEQ ID NO: 706674 - RNA, 17 nt, Artificial Sequence
  Synthetic
gaagauguaggaaacua

SEQ ID NO: 706675 - RNA, 17 nt, Artificial Sequence
  Synthetic
gggaucuaauuaaacua

SEQ ID NO: 706676 - RNA, 17 nt, Artificial Sequence
  Synthetic
gggagaccucacaacua

SEQ ID NO: 706677 - RNA, 17 nt, Artificial Sequence
  Synthetic
gcagaaauccugaacua

SEQ ID NO: 706678 - RNA, 17 nt, Artificial Sequence
  Synthetic
gauuuaauggugaacua

SEQ ID NO: 706679 - RNA, 17 nt, Artificial Sequence
  Synthetic
guguuacaauauaacua

SEQ ID NO: 706680 - RNA, 17 nt, Artificial Sequence
  Synthetic
guguuugcauguaacua

SEQ ID NO: 706681 - RNA, 17 nt, Artificial Sequence
  Synthetic
gauucaacuuuuaacua

SEQ ID NO: 706682 - RNA, 17 nt, Artificial Sequence
  Synthetic
gcaguuugcacacacua

SEQ ID NO: 706683 - RNA, 17 nt, Artificial Sequence
  Synthetic
gcagggcaaaaccacua

SEQ ID NO: 706684 - RNA, 17 nt, Artificial Sequence
  Synthetic
ggugcagcaaaccacua

SEQ ID NO: 706685 - RNA, 17 nt, Artificial Sequence
  Synthetic
gcacacuagaaucacua

SEQ ID NO: 706686 - RNA, 17 nt, Artificial Sequence
  Synthetic
gcacguuagaaucacua

SEQ ID NO: 706687 - RNA, 17 nt, Artificial Sequence
  Synthetic
ggucacuaugaucacua

SEQ ID NO: 706688 - RNA, 17 nt, Artificial Sequence
  Synthetic
gggucccacugucacua

SEQ ID NO: 706689 - RNA, 17 nt, Artificial Sequence
  Synthetic
gagaugggguuucacua

SEQ ID NO: 706690 - RNA, 17 nt, Artificial Sequence
  Synthetic
ggcauuccucaagacua

SEQ ID NO: 706691 - RNA, 17 nt, Artificial Sequence
  Synthetic
gauguugaauaagacua

SEQ ID NO: 706692 - RNA, 17 nt, Artificial Sequence
  Synthetic
gucagucaagaggacua

SEQ ID NO: 706693 - RNA, 17 nt, Artificial Sequence
  Synthetic
gccaugauguuggacua

SEQ ID NO: 706694 - RNA, 17 nt, Artificial Sequence
  Synthetic
gcauaucuuuuggacua

SEQ ID NO: 706695 - RNA, 17 nt, Artificial Sequence
  Synthetic
gcuuugacaauugacua

SEQ ID NO: 706696 - RNA, 17 nt, Artificial Sequence
  Synthetic
gcagcagcacuugacua

SEQ ID NO: 706697 - RNA, 17 nt, Artificial Sequence
  Synthetic
gugauucuguuugacua

SEQ ID NO: 706698 - RNA, 17 nt, Artificial Sequence
  Synthetic
guguggugggaauacua

SEQ ID NO: 706699 - RNA, 17 nt, Artificial Sequence
  Synthetic
gggguggagggauacua

SEQ ID NO: 706700 - RNA, 17 nt, Artificial Sequence
  Synthetic
gacauuuguggauacua

SEQ ID NO: 706701 - RNA, 17 nt, Artificial Sequence
  Synthetic
gaagaacccugauacua

SEQ ID NO: 706702 - RNA, 17 nt, Artificial Sequence
  Synthetic
ggacauugcugauacua

SEQ ID NO: 706703 - RNA, 17 nt, Artificial Sequence
  Synthetic
gcaggucugugauacua

SEQ ID NO: 706704 - RNA, 17 nt, Artificial Sequence
  Synthetic
gggauuaucauguacua

SEQ ID NO: 706705 - RNA, 17 nt, Artificial Sequence
  Synthetic
ggagauacuauguacua

SEQ ID NO: 706706 - RNA, 17 nt, Artificial Sequence
  Synthetic
gauuucauucuuuacua

SEQ ID NO: 706707 - RNA, 17 nt, Artificial Sequence
  Synthetic
gcaaguauuaaaaccua

SEQ ID NO: 706708 - RNA, 17 nt, Artificial Sequence
  Synthetic
ggguggcaugugaccua

SEQ ID NO: 706709 - RNA, 17 nt, Artificial Sequence
  Synthetic
guguacaaaaauaccua

SEQ ID NO: 706710 - RNA, 17 nt, Artificial Sequence
  Synthetic
ggguuacuugauaccua

SEQ ID NO: 706711 - RNA, 17 nt, Artificial Sequence
  Synthetic
ggcacaagaacuaccua

SEQ ID NO: 706712 - RNA, 17 nt, Artificial Sequence
  Synthetic
gaaguagguacuaccua

SEQ ID NO: 706713 - RNA, 17 nt, Artificial Sequence
  Synthetic
ggcugagcugguaccua

SEQ ID NO: 706714 - RNA, 17 nt, Artificial Sequence
  Synthetic
gcuuuuuuacuuaccua

SEQ ID NO: 706715 - RNA, 17 nt, Artificial Sequence
  Synthetic
gcaaaaaauaaacccua

SEQ ID NO: 706716 - RNA, 17 nt, Artificial Sequence
  Synthetic
guuacuguucuucccua

SEQ ID NO: 706717 - RNA, 17 nt, Artificial Sequence
  Synthetic
gaugcucuugaagccua

SEQ ID NO: 706718 - RNA, 17 nt, Artificial Sequence
  Synthetic
guuuaucaauuagccua

SEQ ID NO: 706719 - RNA, 17 nt, Artificial Sequence
  Synthetic
ggucagaaacuugccua

SEQ ID NO: 706720 - RNA, 17 nt, Artificial Sequence
  Synthetic
guugagaaacuugccua

SEQ ID NO: 706721 - RNA, 17 nt, Artificial Sequence
  Synthetic
guuuuugauuuugccua

SEQ ID NO: 706722 - RNA, 17 nt, Artificial Sequence
  Synthetic
gggaacccuuaauccua

SEQ ID NO: 706723 - RNA, 17 nt, Artificial Sequence
  Synthetic
gacacaaucccauccua

SEQ ID NO: 706724 - RNA, 17 nt, Artificial Sequence
  Synthetic
ggauuugauggauccua

SEQ ID NO: 706725 - RNA, 17 nt, Artificial Sequence
  Synthetic
gggauugcuggauccua

SEQ ID NO: 706726 - RNA, 17 nt, Artificial Sequence
  Synthetic
gaaauuauaugauccua

SEQ ID NO: 706727 - RNA, 17 nt, Artificial Sequence
  Synthetic
gucauuguauuauccua

SEQ ID NO: 706728 - RNA, 17 nt, Artificial Sequence
  Synthetic
gggucugauuacuccua

SEQ ID NO: 706729 - RNA, 17 nt, Artificial Sequence
  Synthetic
gaaauucugaccuccua

SEQ ID NO: 706730 - RNA, 17 nt, Artificial Sequence
  Synthetic
gaaguacuuaccuccua

SEQ ID NO: 706731 - RNA, 17 nt, Artificial Sequence
  Synthetic
gcccagcucaucuccua

SEQ ID NO: 706732 - RNA, 17 nt, Artificial Sequence
  Synthetic
guuuucccuuucuccua

SEQ ID NO: 706733 - RNA, 17 nt, Artificial Sequence
  Synthetic
ggccucccaaaguccua

SEQ ID NO: 706734 - RNA, 17 nt, Artificial Sequence
  Synthetic
gagacucaaauguccua

SEQ ID NO: 706735 - RNA, 17 nt, Artificial Sequence
  Synthetic
gagcuccuuauguccua

SEQ ID NO: 706736 - RNA, 17 nt, Artificial Sequence
  Synthetic
gguccaauuucuuccua

SEQ ID NO: 706737 - RNA, 17 nt, Artificial Sequence
  Synthetic
guaguucaggguuccua

SEQ ID NO: 706738 - RNA, 17 nt, Artificial Sequence
  Synthetic
gauacuuuuauuuccua

SEQ ID NO: 706739 - RNA, 17 nt, Artificial Sequence
  Synthetic
gcuuaagugcuuuccua

SEQ ID NO: 706740 - RNA, 17 nt, Artificial Sequence
  Synthetic
gauuucuuucuuuccua

SEQ ID NO: 706741 - RNA, 17 nt, Artificial Sequence
  Synthetic
ggucaaugcaaaagcua

SEQ ID NO: 706742 - RNA, 17 nt, Artificial Sequence
  Synthetic
gcuuguguaucaagcua

SEQ ID NO: 706743 - RNA, 17 nt, Artificial Sequence
  Synthetic
guugucuuuggaagcua

SEQ ID NO: 706744 - RNA, 17 nt, Artificial Sequence
  Synthetic
gccuaauugaacagcua

SEQ ID NO: 706745 - RNA, 17 nt, Artificial Sequence
  Synthetic
gccuguagucccagcua

SEQ ID NO: 706746 - RNA, 17 nt, Artificial Sequence
  Synthetic
ggcauuggaagcagcua

SEQ ID NO: 706747 - RNA, 17 nt, Artificial Sequence
  Synthetic
guuaaguuugggagcua

SEQ ID NO: 706748 - RNA, 17 nt, Artificial Sequence
  Synthetic
gaaaauggaaauagcua

SEQ ID NO: 706749 - RNA, 17 nt, Artificial Sequence
  Synthetic
gauauuuacaauagcua

SEQ ID NO: 706750 - RNA, 17 nt, Artificial Sequence
  Synthetic
gaacugaaaucuagcua

SEQ ID NO: 706751 - RNA, 17 nt, Artificial Sequence
  Synthetic
ggucuggacuuuagcua

SEQ ID NO: 706752 - RNA, 17 nt, Artificial Sequence
  Synthetic
ggccucccuaagcgcua

SEQ ID NO: 706753 - RNA, 17 nt, Artificial Sequence
  Synthetic
ggcugcaggaaaggcua

SEQ ID NO: 706754 - RNA, 17 nt, Artificial Sequence
  Synthetic
gagcuggagagaggcua

SEQ ID NO: 706755 - RNA, 17 nt, Artificial Sequence
  Synthetic
gguguuggccagggcua

SEQ ID NO: 706756 - RNA, 17 nt, Artificial Sequence
  Synthetic
gguuacuuccugggcua

SEQ ID NO: 706757 - RNA, 17 nt, Artificial Sequence
  Synthetic
gguugcaaguugggcua

SEQ ID NO: 706758 - RNA, 17 nt, Artificial Sequence
  Synthetic
gauuguuagcauggcua

SEQ ID NO: 706759 - RNA, 17 nt, Artificial Sequence
  Synthetic
guuacuggguauggcua

SEQ ID NO: 706760 - RNA, 17 nt, Artificial Sequence
  Synthetic
gagaauuaacuuggcua

SEQ ID NO: 706761 - RNA, 17 nt, Artificial Sequence
  Synthetic
gccuuauaaguuggcua

SEQ ID NO: 706762 - RNA, 17 nt, Artificial Sequence
  Synthetic
gucugggagcaaugcua

SEQ ID NO: 706763 - RNA, 17 nt, Artificial Sequence
  Synthetic
gggaacaacacaugcua

SEQ ID NO: 706764 - RNA, 17 nt, Artificial Sequence
  Synthetic
gucaugugaaacugcua

SEQ ID NO: 706765 - RNA, 17 nt, Artificial Sequence
  Synthetic
guugacucuugcugcua

SEQ ID NO: 706766 - RNA, 17 nt, Artificial Sequence
  Synthetic
gcacucgagcucugcua

SEQ ID NO: 706767 - RNA, 17 nt, Artificial Sequence
  Synthetic
guccuaguuuucugcua

SEQ ID NO: 706768 - RNA, 17 nt, Artificial Sequence
  Synthetic
ggaagagcccagugcua

SEQ ID NO: 706769 - RNA, 17 nt, Artificial Sequence
  Synthetic
gucccacuagauugcua

SEQ ID NO: 706770 - RNA, 17 nt, Artificial Sequence
  Synthetic
gauaauguauauugcua

SEQ ID NO: 706771 - RNA, 17 nt, Artificial Sequence
  Synthetic
gagacggagucuugcua

SEQ ID NO: 706772 - RNA, 17 nt, Artificial Sequence
  Synthetic
gucccuuguaguugcua

SEQ ID NO: 706773 - RNA, 17 nt, Artificial Sequence
  Synthetic
ggaagagucuguugcua

SEQ ID NO: 706774 - RNA, 17 nt, Artificial Sequence
  Synthetic
gguuaaguucuuugcua

SEQ ID NO: 706775 - RNA, 17 nt, Artificial Sequence
  Synthetic
gccuccuuaaaaaucua

SEQ ID NO: 706776 - RNA, 17 nt, Artificial Sequence
  Synthetic
guucgagauccaaucua

SEQ ID NO: 706777 - RNA, 17 nt, Artificial Sequence
  Synthetic
gaaaggcaauuaaucua

SEQ ID NO: 706778 - RNA, 17 nt, Artificial Sequence
  Synthetic
guccaaaguuucaucua

SEQ ID NO: 706779 - RNA, 17 nt, Artificial Sequence
  Synthetic
gccaacuuuaagaucua

SEQ ID NO: 706780 - RNA, 17 nt, Artificial Sequence
  Synthetic
ggaauacaguagaucua

SEQ ID NO: 706781 - RNA, 17 nt, Artificial Sequence
  Synthetic
gcauuuagauggaucua

SEQ ID NO: 706782 - RNA, 17 nt, Artificial Sequence
  Synthetic
guuuguaagauccucua

SEQ ID NO: 706783 - RNA, 17 nt, Artificial Sequence
  Synthetic
gguuuucagaggcucua

SEQ ID NO: 706784 - RNA, 17 nt, Artificial Sequence
  Synthetic
gucuuccuggggcucua

SEQ ID NO: 706785 - RNA, 17 nt, Artificial Sequence
  Synthetic
gccacaggccugcucua

SEQ ID NO: 706786 - RNA, 17 nt, Artificial Sequence
  Synthetic
ggccuugaagaucucua

SEQ ID NO: 706787 - RNA, 17 nt, Artificial Sequence
  Synthetic
ggaauaguuauucucua

SEQ ID NO: 706788 - RNA, 17 nt, Artificial Sequence
  Synthetic
gucugaugccuucucua

SEQ ID NO: 706789 - RNA, 17 nt, Artificial Sequence
  Synthetic
guguauuauguucucua

SEQ ID NO: 706790 - RNA, 17 nt, Artificial Sequence
  Synthetic
guuucuguuuaagucua

SEQ ID NO: 706791 - RNA, 17 nt, Artificial Sequence
  Synthetic
guuaaauaacuggucua

SEQ ID NO: 706792 - RNA, 17 nt, Artificial Sequence
  Synthetic
gcuuccucuuaugucua

SEQ ID NO: 706793 - RNA, 17 nt, Artificial Sequence
  Synthetic
gauuugagaugauucua

SEQ ID NO: 706794 - RNA, 17 nt, Artificial Sequence
  Synthetic
ggaagggacauauucua

SEQ ID NO: 706795 - RNA, 17 nt, Artificial Sequence
  Synthetic
ggaccaauuauauucua

SEQ ID NO: 706796 - RNA, 17 nt, Artificial Sequence
  Synthetic
ggcugcauaguauucua

SEQ ID NO: 706797 - RNA, 17 nt, Artificial Sequence
  Synthetic
gcagagagcuccuucua

SEQ ID NO: 706798 - RNA, 17 nt, Artificial Sequence
  Synthetic
gcugaagcaggcuucua

SEQ ID NO: 706799 - RNA, 17 nt, Artificial Sequence
  Synthetic
gccuagguuaucuucua

SEQ ID NO: 706800 - RNA, 17 nt, Artificial Sequence
  Synthetic
gaaaauugcuucuucua

SEQ ID NO: 706801 - RNA, 17 nt, Artificial Sequence
  Synthetic
gccuagguuuucuucua

SEQ ID NO: 706802 - RNA, 17 nt, Artificial Sequence
  Synthetic
gcacuaacaaaguucua

SEQ ID NO: 706803 - RNA, 17 nt, Artificial Sequence
  Synthetic
gguaugguaugguucua

SEQ ID NO: 706804 - RNA, 17 nt, Artificial Sequence
  Synthetic
gguaaguuuugguucua

SEQ ID NO: 706805 - RNA, 17 nt, Artificial Sequence
  Synthetic
gaggucacaauguucua

SEQ ID NO: 706806 - RNA, 17 nt, Artificial Sequence
  Synthetic
ggaucuacuguguucua

SEQ ID NO: 706807 - RNA, 17 nt, Artificial Sequence
  Synthetic
gauagcauccauuucua

SEQ ID NO: 706808 - RNA, 17 nt, Artificial Sequence
  Synthetic
gguggcucucauuucua

SEQ ID NO: 706809 - RNA, 17 nt, Artificial Sequence
  Synthetic
gcuuauuucucuuucua

SEQ ID NO: 706810 - RNA, 17 nt, Artificial Sequence
  Synthetic
gaucucaaucuuuucua

SEQ ID NO: 706811 - RNA, 17 nt, Artificial Sequence
  Synthetic
gagaaaacaggaaagua

SEQ ID NO: 706812 - RNA, 17 nt, Artificial Sequence
  Synthetic
gcaguuggaugaaagua

SEQ ID NO: 706813 - RNA, 17 nt, Artificial Sequence
  Synthetic
guguauuuaugaaagua

SEQ ID NO: 706814 - RNA, 17 nt, Artificial Sequence
  Synthetic
gucuaacauuuaaagua

SEQ ID NO: 706815 - RNA, 17 nt, Artificial Sequence
  Synthetic
ggaaaugcugacaagua

SEQ ID NO: 706816 - RNA, 17 nt, Artificial Sequence
  Synthetic
gaaagauucaagaagua

SEQ ID NO: 706817 - RNA, 17 nt, Artificial Sequence
  Synthetic
gguagaauuaggaagua

SEQ ID NO: 706818 - RNA, 17 nt, Artificial Sequence
  Synthetic
gacaagggguggaagua

SEQ ID NO: 706819 - RNA, 17 nt, Artificial Sequence
  Synthetic
gcuguagauuugaagua

SEQ ID NO: 706820 - RNA, 17 nt, Artificial Sequence
  Synthetic
gguaauuauuuuaagua

SEQ ID NO: 706821 - RNA, 17 nt, Artificial Sequence
  Synthetic
gacuauugucaacagua

SEQ ID NO: 706822 - RNA, 17 nt, Artificial Sequence
  Synthetic
guaccaugagaacagua

SEQ ID NO: 706823 - RNA, 17 nt, Artificial Sequence
  Synthetic
ggaagagagacacagua

SEQ ID NO: 706824 - RNA, 17 nt, Artificial Sequence
  Synthetic
gauagagaggcacagua

SEQ ID NO: 706825 - RNA, 17 nt, Artificial Sequence
  Synthetic
gcaccugauguacagua

SEQ ID NO: 706826 - RNA, 17 nt, Artificial Sequence
  Synthetic
gauaaaaauuaucagua

SEQ ID NO: 706827 - RNA, 17 nt, Artificial Sequence
  Synthetic
guaagucuucaagagua

SEQ ID NO: 706828 - RNA, 17 nt, Artificial Sequence
  Synthetic
gugaggcagacagagua

SEQ ID NO: 706829 - RNA, 17 nt, Artificial Sequence
  Synthetic
gcaugggggacagagua

SEQ ID NO: 706830 - RNA, 17 nt, Artificial Sequence
  Synthetic
gaaccacauccagagua

SEQ ID NO: 706831 - RNA, 17 nt, Artificial Sequence
  Synthetic
gggcauucaagagagua

SEQ ID NO: 706832 - RNA, 17 nt, Artificial Sequence
  Synthetic
gccagcuauugagagua

SEQ ID NO: 706833 - RNA, 17 nt, Artificial Sequence
  Synthetic
gcuugauaaaaggagua

SEQ ID NO: 706834 - RNA, 17 nt, Artificial Sequence
  Synthetic
gaucagaaauaggagua

SEQ ID NO: 706835 - RNA, 17 nt, Artificial Sequence
  Synthetic
guuucauuuagggagua

SEQ ID NO: 706836 - RNA, 17 nt, Artificial Sequence
  Synthetic
ggauacauuggggagua

SEQ ID NO: 706837 - RNA, 17 nt, Artificial Sequence
  Synthetic
gagaauuugauggagua

SEQ ID NO: 706838 - RNA, 17 nt, Artificial Sequence
  Synthetic
gcuauuggaaaugagua

SEQ ID NO: 706839 - RNA, 17 nt, Artificial Sequence
  Synthetic
gggagugggaaugagua

SEQ ID NO: 706840 - RNA, 17 nt, Artificial Sequence
  Synthetic
gaugugauagaugagua

SEQ ID NO: 706841 - RNA, 17 nt, Artificial Sequence
  Synthetic
guuucuccaucugagua

SEQ ID NO: 706842 - RNA, 17 nt, Artificial Sequence
  Synthetic
gagaggcugucugagua

SEQ ID NO: 706843 - RNA, 17 nt, Artificial Sequence
  Synthetic
gcaccguuuauugagua

SEQ ID NO: 706844 - RNA, 17 nt, Artificial Sequence
  Synthetic
gagucuucuaaauagua

SEQ ID NO: 706845 - RNA, 17 nt, Artificial Sequence
  Synthetic
gugucaucaauauagua

SEQ ID NO: 706846 - RNA, 17 nt, Artificial Sequence
  Synthetic
gcacacuuugaguagua

SEQ ID NO: 706847 - RNA, 17 nt, Artificial Sequence
  Synthetic
gcuuccucauaguagua

SEQ ID NO: 706848 - RNA, 17 nt, Artificial Sequence
  Synthetic
gucauguccagguagua

SEQ ID NO: 706849 - RNA, 17 nt, Artificial Sequence
  Synthetic
gugccuuuauuguagua

SEQ ID NO: 706850 - RNA, 17 nt, Artificial Sequence
  Synthetic
gaaggcaauucuuagua

SEQ ID NO: 706851 - RNA, 17 nt, Artificial Sequence
  Synthetic
gaaauuuuugguuagua

SEQ ID NO: 706852 - RNA, 17 nt, Artificial Sequence
  Synthetic
gguccaagacuuuagua

SEQ ID NO: 706853 - RNA, 17 nt, Artificial Sequence
  Synthetic
gccaaguagacaacgua

SEQ ID NO: 706854 - RNA, 17 nt, Artificial Sequence
  Synthetic
ggaaguauugggacgua

SEQ ID NO: 706855 - RNA, 17 nt, Artificial Sequence
  Synthetic
gaagaggaggaaccgua

SEQ ID NO: 706856 - RNA, 17 nt, Artificial Sequence
  Synthetic
gaaaaggaaacaccgua

SEQ ID NO: 706857 - RNA, 17 nt, Artificial Sequence
  Synthetic
guugcugaagacccgua

SEQ ID NO: 706858 - RNA, 17 nt, Artificial Sequence
  Synthetic
ggaauugcuguaucgua

SEQ ID NO: 706859 - RNA, 17 nt, Artificial Sequence
  Synthetic
gaaaugucuccaaggua

SEQ ID NO: 706860 - RNA, 17 nt, Artificial Sequence
  Synthetic
gcugauaagcacaggua

SEQ ID NO: 706861 - RNA, 17 nt, Artificial Sequence
  Synthetic
gacugaaugcacaggua

SEQ ID NO: 706862 - RNA, 17 nt, Artificial Sequence
  Synthetic
gaaccaaaaaccaggua

SEQ ID NO: 706863 - RNA, 17 nt, Artificial Sequence
  Synthetic
guuaugaauugcaggua

SEQ ID NO: 706864 - RNA, 17 nt, Artificial Sequence
  Synthetic
gauggguuggucaggua

SEQ ID NO: 706865 - RNA, 17 nt, Artificial Sequence
  Synthetic
gacagaaaaaagaggua

SEQ ID NO: 706866 - RNA, 17 nt, Artificial Sequence
  Synthetic
gcuuucgagaagaggua

SEQ ID NO: 706867 - RNA, 17 nt, Artificial Sequence
  Synthetic
gcuaguacuaagaggua

SEQ ID NO: 706868 - RNA, 17 nt, Artificial Sequence
  Synthetic
ggagaggaagagaggua

SEQ ID NO: 706869 - RNA, 17 nt, Artificial Sequence
  Synthetic
guagguggagagaggua

SEQ ID NO: 706870 - RNA, 17 nt, Artificial Sequence
  Synthetic
gaaugagaguggaggua

SEQ ID NO: 706871 - RNA, 17 nt, Artificial Sequence
  Synthetic
ggaggcaucuugaggua

SEQ ID NO: 706872 - RNA, 17 nt, Artificial Sequence
  Synthetic
gaugagaagccagggua

SEQ ID NO: 706873 - RNA, 17 nt, Artificial Sequence
  Synthetic
gguggggggcuagggua

SEQ ID NO: 706874 - RNA, 17 nt, Artificial Sequence
  Synthetic
gggguggggguagggua

SEQ ID NO: 706875 - RNA, 17 nt, Artificial Sequence
  Synthetic
gcaaaggaaagcgggua

SEQ ID NO: 706876 - RNA, 17 nt, Artificial Sequence
  Synthetic
gggaccagggaggggua

SEQ ID NO: 706877 - RNA, 17 nt, Artificial Sequence
  Synthetic
gaggugagaugggggua

SEQ ID NO: 706878 - RNA, 17 nt, Artificial Sequence
  Synthetic
gaugaggggugggggua

SEQ ID NO: 706879 - RNA, 17 nt, Artificial Sequence
  Synthetic
ggaacuuggcuggggua

SEQ ID NO: 706880 - RNA, 17 nt, Artificial Sequence
  Synthetic
gguucugauccugggua

SEQ ID NO: 706881 - RNA, 17 nt, Artificial Sequence
  Synthetic
gaacagucuggugggua

SEQ ID NO: 706882 - RNA, 17 nt, Artificial Sequence
  Synthetic
gaauggaguggugggua

SEQ ID NO: 706883 - RNA, 17 nt, Artificial Sequence
  Synthetic
gugaggguggaauggua

SEQ ID NO: 706884 - RNA, 17 nt, Artificial Sequence
  Synthetic
ggaaguuugguauggua

SEQ ID NO: 706885 - RNA, 17 nt, Artificial Sequence
  Synthetic
gaaacacuugacuggua

SEQ ID NO: 706886 - RNA, 17 nt, Artificial Sequence
  Synthetic
gugcuacuauacuggua

SEQ ID NO: 706887 - RNA, 17 nt, Artificial Sequence
  Synthetic
gcaugcaguugcuggua

SEQ ID NO: 706888 - RNA, 17 nt, Artificial Sequence
  Synthetic
ggggcuggaaucuggua

SEQ ID NO: 706889 - RNA, 17 nt, Artificial Sequence
  Synthetic
gcugaacaguaguggua

SEQ ID NO: 706890 - RNA, 17 nt, Artificial Sequence
  Synthetic
gcaaaguccucguggua

SEQ ID NO: 706891 - RNA, 17 nt, Artificial Sequence
  Synthetic
gagugcaguuuguggua

SEQ ID NO: 706892 - RNA, 17 nt, Artificial Sequence
  Synthetic
gggacuguuaauuggua

SEQ ID NO: 706893 - RNA, 17 nt, Artificial Sequence
  Synthetic
gaaaggcaacauuggua

SEQ ID NO: 706894 - RNA, 17 nt, Artificial Sequence
  Synthetic
gugugcaucccuuggua

SEQ ID NO: 706895 - RNA, 17 nt, Artificial Sequence
  Synthetic
ggagcugcaguuuggua

SEQ ID NO: 706896 - RNA, 17 nt, Artificial Sequence
  Synthetic
gauggcaauaaaaugua

SEQ ID NO: 706897 - RNA, 17 nt, Artificial Sequence
  Synthetic
ggacguuugacaaugua

SEQ ID NO: 706898 - RNA, 17 nt, Artificial Sequence
  Synthetic
gcuaagaaaccaaugua

SEQ ID NO: 706899 - RNA, 17 nt, Artificial Sequence
  Synthetic
guaacaguggcaaugua

SEQ ID NO: 706900 - RNA, 17 nt, Artificial Sequence
  Synthetic
gaaagguauuuaaugua

SEQ ID NO: 706901 - RNA, 17 nt, Artificial Sequence
  Synthetic
ggugguucuaacaugua

SEQ ID NO: 706902 - RNA, 17 nt, Artificial Sequence
  Synthetic
gugugagacuucaugua

SEQ ID NO: 706903 - RNA, 17 nt, Artificial Sequence
  Synthetic
ggaagagaaaagaugua

SEQ ID NO: 706904 - RNA, 17 nt, Artificial Sequence
  Synthetic
ggcaguuuuaagaugua

SEQ ID NO: 706905 - RNA, 17 nt, Artificial Sequence
  Synthetic
gaaaaauuaaugaugua

SEQ ID NO: 706906 - RNA, 17 nt, Artificial Sequence
  Synthetic
guauugccugguaugua

SEQ ID NO: 706907 - RNA, 17 nt, Artificial Sequence
  Synthetic
gcggcuuuguuuaugua

SEQ ID NO: 706908 - RNA, 17 nt, Artificial Sequence
  Synthetic
gcauuuauacaacugua

SEQ ID NO: 706909 - RNA, 17 nt, Artificial Sequence
  Synthetic
gguacauaggaacugua

SEQ ID NO: 706910 - RNA, 17 nt, Artificial Sequence
  Synthetic
gcaaauucuugccugua

SEQ ID NO: 706911 - RNA, 17 nt, Artificial Sequence
  Synthetic
gucucuuguaagcugua

SEQ ID NO: 706912 - RNA, 17 nt, Artificial Sequence
  Synthetic
gaauacagcaggcugua

SEQ ID NO: 706913 - RNA, 17 nt, Artificial Sequence
  Synthetic
gguggcacauggcugua

SEQ ID NO: 706914 - RNA, 17 nt, Artificial Sequence
  Synthetic
guaccuuacucucugua

SEQ ID NO: 706915 - RNA, 17 nt, Artificial Sequence
  Synthetic
gcccagaugauucugua

SEQ ID NO: 706916 - RNA, 17 nt, Artificial Sequence
  Synthetic
gaucacuaaaaagugua

SEQ ID NO: 706917 - RNA, 17 nt, Artificial Sequence
  Synthetic
gacucacacuaagugua

SEQ ID NO: 706918 - RNA, 17 nt, Artificial Sequence
  Synthetic
ggauggaauacagugua

SEQ ID NO: 706919 - RNA, 17 nt, Artificial Sequence
  Synthetic
guaauauggugagugua

SEQ ID NO: 706920 - RNA, 17 nt, Artificial Sequence
  Synthetic
ggauugggcagggugua

SEQ ID NO: 706921 - RNA, 17 nt, Artificial Sequence
  Synthetic
gccugcuguuuggugua

SEQ ID NO: 706922 - RNA, 17 nt, Artificial Sequence
  Synthetic
guugagacaccugugua

SEQ ID NO: 706923 - RNA, 17 nt, Artificial Sequence
  Synthetic
gagcauuggauugugua

SEQ ID NO: 706924 - RNA, 17 nt, Artificial Sequence
  Synthetic
guagagauugcauugua

SEQ ID NO: 706925 - RNA, 17 nt, Artificial Sequence
  Synthetic
gugccaagcuuauugua

SEQ ID NO: 706926 - RNA, 17 nt, Artificial Sequence
  Synthetic
guagcgccuggcuugua

SEQ ID NO: 706927 - RNA, 17 nt, Artificial Sequence
  Synthetic
gauguguguagguugua

SEQ ID NO: 706928 - RNA, 17 nt, Artificial Sequence
  Synthetic
gcaauugcuggguugua

SEQ ID NO: 706929 - RNA, 17 nt, Artificial Sequence
  Synthetic
ggcuaauacauguugua

SEQ ID NO: 706930 - RNA, 17 nt, Artificial Sequence
  Synthetic
gacaccauuguguugua

SEQ ID NO: 706931 - RNA, 17 nt, Artificial Sequence
  Synthetic
gugaaaagaaauuugua

SEQ ID NO: 706932 - RNA, 17 nt, Artificial Sequence
  Synthetic
gaacacacacauuugua

SEQ ID NO: 706933 - RNA, 17 nt, Artificial Sequence
  Synthetic
gauuaaauagauuugua

SEQ ID NO: 706934 - RNA, 17 nt, Artificial Sequence
  Synthetic
gguuauaaauauuugua

SEQ ID NO: 706935 - RNA, 17 nt, Artificial Sequence
  Synthetic
guguaagguacuuugua

SEQ ID NO: 706936 - RNA, 17 nt, Artificial Sequence
  Synthetic
ggauuucacccuuugua

SEQ ID NO: 706937 - RNA, 17 nt, Artificial Sequence
  Synthetic
gucagcuccuguuugua

SEQ ID NO: 706938 - RNA, 17 nt, Artificial Sequence
  Synthetic
guuauuuuacuuuugua

SEQ ID NO: 706939 - RNA, 17 nt, Artificial Sequence
  Synthetic
guacuacauguuuugua

SEQ ID NO: 706940 - RNA, 17 nt, Artificial Sequence
  Synthetic
gagaaaggguuuuugua

SEQ ID NO: 706941 - RNA, 17 nt, Artificial Sequence
  Synthetic
guucuuagaaaaaauua

SEQ ID NO: 706942 - RNA, 17 nt, Artificial Sequence
  Synthetic
ggagacugaaaaaauua

SEQ ID NO: 706943 - RNA, 17 nt, Artificial Sequence
  Synthetic
gaaaagcccaaaaauua

SEQ ID NO: 706944 - RNA, 17 nt, Artificial Sequence
  Synthetic
gugugacgucaaaauua

SEQ ID NO: 706945 - RNA, 17 nt, Artificial Sequence
  Synthetic
gauacacucuaaaauua

SEQ ID NO: 706946 - RNA, 17 nt, Artificial Sequence
  Synthetic
gagauauguuaaaauua

SEQ ID NO: 706947 - RNA, 17 nt, Artificial Sequence
  Synthetic
gucuaaaauagaaauua

SEQ ID NO: 706948 - RNA, 17 nt, Artificial Sequence
  Synthetic
gauaaauaaggaaauua

SEQ ID NO: 706949 - RNA, 17 nt, Artificial Sequence
  Synthetic
ggggauuaaggaaauua

SEQ ID NO: 706950 - RNA, 17 nt, Artificial Sequence
  Synthetic
gauaacuuccuaaauua

SEQ ID NO: 706951 - RNA, 17 nt, Artificial Sequence
  Synthetic
gucaccugaguaaauua

SEQ ID NO: 706952 - RNA, 17 nt, Artificial Sequence
  Synthetic
gggacgccccacaauua

SEQ ID NO: 706953 - RNA, 17 nt, Artificial Sequence
  Synthetic
ggacacuaauccaauua

SEQ ID NO: 706954 - RNA, 17 nt, Artificial Sequence
  Synthetic
gaaugauuugagaauua

SEQ ID NO: 706955 - RNA, 17 nt, Artificial Sequence
  Synthetic
gaugagauuaugaauua

SEQ ID NO: 706956 - RNA, 17 nt, Artificial Sequence
  Synthetic
gcugcuuaagugaauua

SEQ ID NO: 706957 - RNA, 17 nt, Artificial Sequence
  Synthetic
ggucauuaaaauaauua

SEQ ID NO: 706958 - RNA, 17 nt, Artificial Sequence
  Synthetic
gggaaaguguauaauua

SEQ ID NO: 706959 - RNA, 17 nt, Artificial Sequence
  Synthetic
gggaagaccaguaauua

SEQ ID NO: 706960 - RNA, 17 nt, Artificial Sequence
  Synthetic
gaguuacaauguaauua

SEQ ID NO: 706961 - RNA, 17 nt, Artificial Sequence
  Synthetic
gaucuguuuguuaauua

SEQ ID NO: 706962 - RNA, 17 nt, Artificial Sequence
  Synthetic
gaguaauaaagacauua

SEQ ID NO: 706963 - RNA, 17 nt, Artificial Sequence
  Synthetic
guguggauuugacauua

SEQ ID NO: 706964 - RNA, 17 nt, Artificial Sequence
  Synthetic
ggaucuaauguacauua

SEQ ID NO: 706965 - RNA, 17 nt, Artificial Sequence
  Synthetic
gagacccuuucccauua

SEQ ID NO: 706966 - RNA, 17 nt, Artificial Sequence
  Synthetic
gugcaguugugccauua

SEQ ID NO: 706967 - RNA, 17 nt, Artificial Sequence
  Synthetic
gaacauggauuccauua

SEQ ID NO: 706968 - RNA, 17 nt, Artificial Sequence
  Synthetic
gauugcuaugagcauua

SEQ ID NO: 706969 - RNA, 17 nt, Artificial Sequence
  Synthetic
ggauggagugugcauua

SEQ ID NO: 706970 - RNA, 17 nt, Artificial Sequence
  Synthetic
ggaagcacauugcauua

SEQ ID NO: 706971 - RNA, 17 nt, Artificial Sequence
  Synthetic
ggaagcaccuugcauua

SEQ ID NO: 706972 - RNA, 17 nt, Artificial Sequence
  Synthetic
ggcuagaacaaucauua

SEQ ID NO: 706973 - RNA, 17 nt, Artificial Sequence
  Synthetic
ggccagccugaucauua

SEQ ID NO: 706974 - RNA, 17 nt, Artificial Sequence
  Synthetic
gcuacgaagaaagauua

SEQ ID NO: 706975 - RNA, 17 nt, Artificial Sequence
  Synthetic
gacauuaaccaagauua

SEQ ID NO: 706976 - RNA, 17 nt, Artificial Sequence
  Synthetic
gaggauuugcaagauua

SEQ ID NO: 706977 - RNA, 17 nt, Artificial Sequence
  Synthetic
gaguauggauaagauua

SEQ ID NO: 706978 - RNA, 17 nt, Artificial Sequence
  Synthetic
gaaauaagagcagauua

SEQ ID NO: 706979 - RNA, 17 nt, Artificial Sequence
  Synthetic
gaauugcucucagauua

SEQ ID NO: 706980 - RNA, 17 nt, Artificial Sequence
  Synthetic
gagacauucucagauua

SEQ ID NO: 706981 - RNA, 17 nt, Artificial Sequence
  Synthetic
gagggcuaaagagauua

SEQ ID NO: 706982 - RNA, 17 nt, Artificial Sequence
  Synthetic
gagauagugauagauua

SEQ ID NO: 706983 - RNA, 17 nt, Artificial Sequence
  Synthetic
gggagauagcuagauua

SEQ ID NO: 706984 - RNA, 17 nt, Artificial Sequence
  Synthetic
gaauacagagacgauua

SEQ ID NO: 706985 - RNA, 17 nt, Artificial Sequence
  Synthetic
gaaaaaaauagggauua

SEQ ID NO: 706986 - RNA, 17 nt, Artificial Sequence
  Synthetic
guuauuggaacugauua

SEQ ID NO: 706987 - RNA, 17 nt, Artificial Sequence
  Synthetic
gcuuuaggaggugauua

SEQ ID NO: 706988 - RNA, 17 nt, Artificial Sequence
  Synthetic
gcagcaauuggugauua

SEQ ID NO: 706989 - RNA, 17 nt, Artificial Sequence
  Synthetic
gauuucaguguugauua

SEQ ID NO: 706990 - RNA, 17 nt, Artificial Sequence
  Synthetic
gauaaaagauuugauua

SEQ ID NO: 706991 - RNA, 17 nt, Artificial Sequence
  Synthetic
gacauucuuaaauauua

SEQ ID NO: 706992 - RNA, 17 nt, Artificial Sequence
  Synthetic
gacauacuuucauauua

SEQ ID NO: 706993 - RNA, 17 nt, Artificial Sequence
  Synthetic
gcaggcuuuugauauua

SEQ ID NO: 706994 - RNA, 17 nt, Artificial Sequence
  Synthetic
gguagauaaauauauua

SEQ ID NO: 706995 - RNA, 17 nt, Artificial Sequence
  Synthetic
gucucaaaugacuauua

SEQ ID NO: 706996 - RNA, 17 nt, Artificial Sequence
  Synthetic
ggcaacguaaauuauua

SEQ ID NO: 706997 - RNA, 17 nt, Artificial Sequence
  Synthetic
guauuuuucaauuauua

SEQ ID NO: 706998 - RNA, 17 nt, Artificial Sequence
  Synthetic
gaaagcacuaauuauua

SEQ ID NO: 706999 - RNA, 17 nt, Artificial Sequence
  Synthetic
gcuuguuuuaauuauua

SEQ ID NO: 707000 - RNA, 17 nt, Artificial Sequence
  Synthetic
gaccagaaaauuuauua

SEQ ID NO: 707001 - RNA, 17 nt, Artificial Sequence
  Synthetic
guccccuucuuuuauua

SEQ ID NO: 707002 - RNA, 17 nt, Artificial Sequence
  Synthetic
gaggcccaucaaacuua

SEQ ID NO: 707003 - RNA, 17 nt, Artificial Sequence
  Synthetic
ggaugucaagcaacuua

SEQ ID NO: 707004 - RNA, 17 nt, Artificial Sequence
  Synthetic
gacucagaaagaacuua

SEQ ID NO: 707005 - RNA, 17 nt, Artificial Sequence
  Synthetic
gcauguugaagaacuua

SEQ ID NO: 707006 - RNA, 17 nt, Artificial Sequence
  Synthetic
gucucuagaggaacuua

SEQ ID NO: 707007 - RNA, 17 nt, Artificial Sequence
  Synthetic
gggagaagcugaacuua

SEQ ID NO: 707008 - RNA, 17 nt, Artificial Sequence
  Synthetic
gguuugaauugaacuua

SEQ ID NO: 707009 - RNA, 17 nt, Artificial Sequence
  Synthetic
gaacgagauuacacuua

SEQ ID NO: 707010 - RNA, 17 nt, Artificial Sequence
  Synthetic
gugggaauuaucacuua

SEQ ID NO: 707011 - RNA, 17 nt, Artificial Sequence
  Synthetic
gaagcuguucucacuua

SEQ ID NO: 707012 - RNA, 17 nt, Artificial Sequence
  Synthetic
guagcuuuucucacuua

SEQ ID NO: 707013 - RNA, 17 nt, Artificial Sequence
  Synthetic
gauuagagagagacuua

SEQ ID NO: 707014 - RNA, 17 nt, Artificial Sequence
  Synthetic
gagguuuaauggacuua

SEQ ID NO: 707015 - RNA, 17 nt, Artificial Sequence
  Synthetic
gguuuucuuuugacuua

SEQ ID NO: 707016 - RNA, 17 nt, Artificial Sequence
  Synthetic
gaagacagacuuacuua

SEQ ID NO: 707017 - RNA, 17 nt, Artificial Sequence
  Synthetic
guguccucuuuaccuua

SEQ ID NO: 707018 - RNA, 17 nt, Artificial Sequence
  Synthetic
gguagagaaaggccuua

SEQ ID NO: 707019 - RNA, 17 nt, Artificial Sequence
  Synthetic
gcuaaauaauuuccuua

SEQ ID NO: 707020 - RNA, 17 nt, Artificial Sequence
  Synthetic
ggaggauuucaagcuua

SEQ ID NO: 707021 - RNA, 17 nt, Artificial Sequence
  Synthetic
gugaagacaagagcuua

SEQ ID NO: 707022 - RNA, 17 nt, Artificial Sequence
  Synthetic
gagaaacccugagcuua

SEQ ID NO: 707023 - RNA, 17 nt, Artificial Sequence
  Synthetic
gcuggaauuauagcuua

SEQ ID NO: 707024 - RNA, 17 nt, Artificial Sequence
  Synthetic
guucauggaggggcuua

SEQ ID NO: 707025 - RNA, 17 nt, Artificial Sequence
  Synthetic
gauucucauggugcuua

SEQ ID NO: 707026 - RNA, 17 nt, Artificial Sequence
  Synthetic
gaaagaaaaauugcuua

SEQ ID NO: 707027 - RNA, 17 nt, Artificial Sequence
  Synthetic
gaguucgggauugcuua

SEQ ID NO: 707028 - RNA, 17 nt, Artificial Sequence
  Synthetic
gagacccuaaaaucuua

SEQ ID NO: 707029 - RNA, 17 nt, Artificial Sequence
  Synthetic
gggaaugaguaaucuua

SEQ ID NO: 707030 - RNA, 17 nt, Artificial Sequence
  Synthetic
gggugacagucaucuua

SEQ ID NO: 707031 - RNA, 17 nt, Artificial Sequence
  Synthetic
gggauugcuagaucuua

SEQ ID NO: 707032 - RNA, 17 nt, Artificial Sequence
  Synthetic
guuuucuuguuaucuua

SEQ ID NO: 707033 - RNA, 17 nt, Artificial Sequence
  Synthetic
gcaguggcuuucucuua

SEQ ID NO: 707034 - RNA, 17 nt, Artificial Sequence
  Synthetic
gcagccaagaagucuua

SEQ ID NO: 707035 - RNA, 17 nt, Artificial Sequence
  Synthetic
gugaauuuucagucuua

SEQ ID NO: 707036 - RNA, 17 nt, Artificial Sequence
  Synthetic
gggauauaauagucuua

SEQ ID NO: 707037 - RNA, 17 nt, Artificial Sequence
  Synthetic
gacagauucuagucuua

SEQ ID NO: 707038 - RNA, 17 nt, Artificial Sequence
  Synthetic
ggagccccugggucuua

SEQ ID NO: 707039 - RNA, 17 nt, Artificial Sequence
  Synthetic
guucucuugaauucuua

SEQ ID NO: 707040 - RNA, 17 nt, Artificial Sequence
  Synthetic
gauauuuguaauucuua

SEQ ID NO: 707041 - RNA, 17 nt, Artificial Sequence
  Synthetic
ggaaaaacucauucuua

SEQ ID NO: 707042 - RNA, 17 nt, Artificial Sequence
  Synthetic
gcugaaguggauucuua

SEQ ID NO: 707043 - RNA, 17 nt, Artificial Sequence
  Synthetic
guacaaggaacuucuua

SEQ ID NO: 707044 - RNA, 17 nt, Artificial Sequence
  Synthetic
gaacucauccuuucuua

SEQ ID NO: 707045 - RNA, 17 nt, Artificial Sequence
  Synthetic
ggaggaggaaaaaguua

SEQ ID NO: 707046 - RNA, 17 nt, Artificial Sequence
  Synthetic
gugaggggaaaaaguua

SEQ ID NO: 707047 - RNA, 17 nt, Artificial Sequence
  Synthetic
gagauacagauaaguua

SEQ ID NO: 707048 - RNA, 17 nt, Artificial Sequence
  Synthetic
guuaccauuuccaguua

SEQ ID NO: 707049 - RNA, 17 nt, Artificial Sequence
  Synthetic
guaugcugcuucaguua

SEQ ID NO: 707050 - RNA, 17 nt, Artificial Sequence
  Synthetic
guguaauaacugaguua

SEQ ID NO: 707051 - RNA, 17 nt, Artificial Sequence
  Synthetic
ggacuuaauaauaguua

SEQ ID NO: 707052 - RNA, 17 nt, Artificial Sequence
  Synthetic
guuuggcuuuauaguua

SEQ ID NO: 707053 - RNA, 17 nt, Artificial Sequence
  Synthetic
gggauauccauuaguua

SEQ ID NO: 707054 - RNA, 17 nt, Artificial Sequence
  Synthetic
gaaaaaacaucacguua

SEQ ID NO: 707055 - RNA, 17 nt, Artificial Sequence
  Synthetic
gaauaucuaaaagguua

SEQ ID NO: 707056 - RNA, 17 nt, Artificial Sequence
  Synthetic
gcaggaggauaagguua

SEQ ID NO: 707057 - RNA, 17 nt, Artificial Sequence
  Synthetic
ggggauuauggagguua

SEQ ID NO: 707058 - RNA, 17 nt, Artificial Sequence
  Synthetic
gguagugguggggguua

SEQ ID NO: 707059 - RNA, 17 nt, Artificial Sequence
  Synthetic
gcccuggccugggguua

SEQ ID NO: 707060 - RNA, 17 nt, Artificial Sequence
  Synthetic
gaugguaagaaugguua

SEQ ID NO: 707061 - RNA, 17 nt, Artificial Sequence
  Synthetic
ggaaauaaagcugguua

SEQ ID NO: 707062 - RNA, 17 nt, Artificial Sequence
  Synthetic
guauaaacaucugguua

SEQ ID NO: 707063 - RNA, 17 nt, Artificial Sequence
  Synthetic
gcuagcuuuaaauguua

SEQ ID NO: 707064 - RNA, 17 nt, Artificial Sequence
  Synthetic
guuaaaaauccauguua

SEQ ID NO: 707065 - RNA, 17 nt, Artificial Sequence
  Synthetic
guuuccuuuucauguua

SEQ ID NO: 707066 - RNA, 17 nt, Artificial Sequence
  Synthetic
ggaucaggcugauguua

SEQ ID NO: 707067 - RNA, 17 nt, Artificial Sequence
  Synthetic
gaauauagaaacuguua

SEQ ID NO: 707068 - RNA, 17 nt, Artificial Sequence
  Synthetic
gagaauaagauuuguua

SEQ ID NO: 707069 - RNA, 17 nt, Artificial Sequence
  Synthetic
guuauuguuauuuguua

SEQ ID NO: 707070 - RNA, 17 nt, Artificial Sequence
  Synthetic
ggaaccgccaaaauuua

SEQ ID NO: 707071 - RNA, 17 nt, Artificial Sequence
  Synthetic
ggcacaauuaaaauuua

SEQ ID NO: 707072 - RNA, 17 nt, Artificial Sequence
  Synthetic
guagauuucgaaauuua

SEQ ID NO: 707073 - RNA, 17 nt, Artificial Sequence
  Synthetic
gggacacauuaaauuua

SEQ ID NO: 707074 - RNA, 17 nt, Artificial Sequence
  Synthetic
gaugaaagaugaauuua

SEQ ID NO: 707075 - RNA, 17 nt, Artificial Sequence
  Synthetic
gauuuauuuuuaauuua

SEQ ID NO: 707076 - RNA, 17 nt, Artificial Sequence
  Synthetic
gggaauagcaacauuua

SEQ ID NO: 707077 - RNA, 17 nt, Artificial Sequence
  Synthetic
guucccguggccauuua

SEQ ID NO: 707078 - RNA, 17 nt, Artificial Sequence
  Synthetic
guaaaccuuugcauuua

SEQ ID NO: 707079 - RNA, 17 nt, Artificial Sequence
  Synthetic
guuguggagaucauuua

SEQ ID NO: 707080 - RNA, 17 nt, Artificial Sequence
  Synthetic
guuugaaauuucauuua

SEQ ID NO: 707081 - RNA, 17 nt, Artificial Sequence
  Synthetic
gaguagauuuagauuua

SEQ ID NO: 707082 - RNA, 17 nt, Artificial Sequence
  Synthetic
gucucagucuugauuua

SEQ ID NO: 707083 - RNA, 17 nt, Artificial Sequence
  Synthetic
guuugaacuuugauuua

SEQ ID NO: 707084 - RNA, 17 nt, Artificial Sequence
  Synthetic
guaggugcauauauuua

SEQ ID NO: 707085 - RNA, 17 nt, Artificial Sequence
  Synthetic
guagguauauauauuua

SEQ ID NO: 707086 - RNA, 17 nt, Artificial Sequence
  Synthetic
guagguguauguauuua

SEQ ID NO: 707087 - RNA, 17 nt, Artificial Sequence
  Synthetic
gcuaaguaacuuauuua

SEQ ID NO: 707088 - RNA, 17 nt, Artificial Sequence
  Synthetic
ggcuuuggaguuauuua

SEQ ID NO: 707089 - RNA, 17 nt, Artificial Sequence
  Synthetic
gcagguccuaaacuuua

SEQ ID NO: 707090 - RNA, 17 nt, Artificial Sequence
  Synthetic
gugauuuuucaacuuua

SEQ ID NO: 707091 - RNA, 17 nt, Artificial Sequence
  Synthetic
gagcuuaaagcacuuua

SEQ ID NO: 707092 - RNA, 17 nt, Artificial Sequence
  Synthetic
guaauuucagcacuuua

SEQ ID NO: 707093 - RNA, 17 nt, Artificial Sequence
  Synthetic
guaacaugcauacuuua

SEQ ID NO: 707094 - RNA, 17 nt, Artificial Sequence
  Synthetic
gaaaacaauguacuuua

SEQ ID NO: 707095 - RNA, 17 nt, Artificial Sequence
  Synthetic
guuugaguaauccuuua

SEQ ID NO: 707096 - RNA, 17 nt, Artificial Sequence
  Synthetic
gagaagaauauccuuua

SEQ ID NO: 707097 - RNA, 17 nt, Artificial Sequence
  Synthetic
gucuuauguuuccuuua

SEQ ID NO: 707098 - RNA, 17 nt, Artificial Sequence
  Synthetic
gauaaaaaaaagcuuua

SEQ ID NO: 707099 - RNA, 17 nt, Artificial Sequence
  Synthetic
gauaugggugaucuuua

SEQ ID NO: 707100 - RNA, 17 nt, Artificial Sequence
  Synthetic
ggaaaagacugucuuua

SEQ ID NO: 707101 - RNA, 17 nt, Artificial Sequence
  Synthetic
gcuaauauuauucuuua

SEQ ID NO: 707102 - RNA, 17 nt, Artificial Sequence
  Synthetic
gguuuuggauuucuuua

SEQ ID NO: 707103 - RNA, 17 nt, Artificial Sequence
  Synthetic
ggacguuguuuucuuua

SEQ ID NO: 707104 - RNA, 17 nt, Artificial Sequence
  Synthetic
gaagguaaaagaguuua

SEQ ID NO: 707105 - RNA, 17 nt, Artificial Sequence
  Synthetic
gcagauaucagcguuua

SEQ ID NO: 707106 - RNA, 17 nt, Artificial Sequence
  Synthetic
gaaaacuaugagguuua

SEQ ID NO: 707107 - RNA, 17 nt, Artificial Sequence
  Synthetic
ggugaugcauagguuua

SEQ ID NO: 707108 - RNA, 17 nt, Artificial Sequence
  Synthetic
ggauuaugaaggguuua

SEQ ID NO: 707109 - RNA, 17 nt, Artificial Sequence
  Synthetic
gauauuuuaaugguuua

SEQ ID NO: 707110 - RNA, 17 nt, Artificial Sequence
  Synthetic
guugaaaccaugguuua

SEQ ID NO: 707111 - RNA, 17 nt, Artificial Sequence
  Synthetic
gcuaugagaaauguuua

SEQ ID NO: 707112 - RNA, 17 nt, Artificial Sequence
  Synthetic
ggcauauuuauuguuua

SEQ ID NO: 707113 - RNA, 17 nt, Artificial Sequence
  Synthetic
gauugguagaaauuuua

SEQ ID NO: 707114 - RNA, 17 nt, Artificial Sequence
  Synthetic
gggaacaguaaauuuua

SEQ ID NO: 707115 - RNA, 17 nt, Artificial Sequence
  Synthetic
gccauuuguuaauuuua

SEQ ID NO: 707116 - RNA, 17 nt, Artificial Sequence
  Synthetic
guuuaaacuacauuuua

SEQ ID NO: 707117 - RNA, 17 nt, Artificial Sequence
  Synthetic
gauauauaaucauuuua

SEQ ID NO: 707118 - RNA, 17 nt, Artificial Sequence
  Synthetic
gcuacagaaagauuuua

SEQ ID NO: 707119 - RNA, 17 nt, Artificial Sequence
  Synthetic
gagauggggagauuuua

SEQ ID NO: 707120 - RNA, 17 nt, Artificial Sequence
  Synthetic
gcuuaucaaauauuuua

SEQ ID NO: 707121 - RNA, 17 nt, Artificial Sequence
  Synthetic
ggcuguauaguauuuua

SEQ ID NO: 707122 - RNA, 17 nt, Artificial Sequence
  Synthetic
ggggaaaauguauuuua

SEQ ID NO: 707123 - RNA, 17 nt, Artificial Sequence
  Synthetic
guagucugcaacuuuua

SEQ ID NO: 707124 - RNA, 17 nt, Artificial Sequence
  Synthetic
ggaaugcuauacuuuua

SEQ ID NO: 707125 - RNA, 17 nt, Artificial Sequence
  Synthetic
gacguccuucccuuuua

SEQ ID NO: 707126 - RNA, 17 nt, Artificial Sequence
  Synthetic
gaguucaauggcuuuua

SEQ ID NO: 707127 - RNA, 17 nt, Artificial Sequence
  Synthetic
ggacugugacucuuuua

SEQ ID NO: 707128 - RNA, 17 nt, Artificial Sequence
  Synthetic
ggcauccaguucuuuua

SEQ ID NO: 707129 - RNA, 17 nt, Artificial Sequence
  Synthetic
gccaaauguuucuuuua

SEQ ID NO: 707130 - RNA, 17 nt, Artificial Sequence
  Synthetic
ggagcuauuuucuuuua

SEQ ID NO: 707131 - RNA, 17 nt, Artificial Sequence
  Synthetic
gauaaguugugguuuua

SEQ ID NO: 707132 - RNA, 17 nt, Artificial Sequence
  Synthetic
ggccugagugauuuuua

SEQ ID NO: 707133 - RNA, 17 nt, Artificial Sequence
  Synthetic
gggaucuaauauuuuua

SEQ ID NO: 707134 - RNA, 17 nt, Artificial Sequence
  Synthetic
guaggggucuauuuuua

SEQ ID NO: 707135 - RNA, 17 nt, Artificial Sequence
  Synthetic
gauaaauguuauuuuua

SEQ ID NO: 707136 - RNA, 17 nt, Artificial Sequence
  Synthetic
gacaaaaugacuuuuua

SEQ ID NO: 707137 - RNA, 17 nt, Artificial Sequence
  Synthetic
gaagcugugccuuuuua

SEQ ID NO: 707138 - RNA, 17 nt, Artificial Sequence
  Synthetic
gaucucauuccuuuuua

SEQ ID NO: 707139 - RNA, 17 nt, Artificial Sequence
  Synthetic
ggaucucauucuuuuua

SEQ ID NO: 707140 - RNA, 17 nt, Artificial Sequence
  Synthetic
gauuuuguuaguuuuua

SEQ ID NO: 707141 - RNA, 17 nt, Artificial Sequence
  Synthetic
guauuuugagguuuuua

SEQ ID NO: 707142 - RNA, 17 nt, Artificial Sequence
  Synthetic
gaacucaucauuuuuua

SEQ ID NO: 707143 - RNA, 17 nt, Artificial Sequence
  Synthetic
gaacgcauccuuuuuua

SEQ ID NO: 707144 - RNA, 17 nt, Artificial Sequence
  Synthetic
gaacucauccuuuuuua

SEQ ID NO: 707145 - RNA, 17 nt, Artificial Sequence
  Synthetic
gaucucauccuuuuuua

SEQ ID NO: 707146 - RNA, 17 nt, Artificial Sequence
  Synthetic
gaacucauucuuuuuua

SEQ ID NO: 707147 - RNA, 17 nt, Artificial Sequence
  Synthetic
gaacucguucuuuuuua

SEQ ID NO: 707148 - RNA, 17 nt, Artificial Sequence
  Synthetic
gauuuuguucuuuuuua

SEQ ID NO: 707149 - RNA, 17 nt, Artificial Sequence
  Synthetic
guccucuuuguuuuuua

SEQ ID NO: 707150 - RNA, 17 nt, Artificial Sequence
  Synthetic
gcaguacuuaaaaaaac

SEQ ID NO: 707151 - RNA, 17 nt, Artificial Sequence
  Synthetic
gaaaaaaaagaaaaaac

SEQ ID NO: 707152 - RNA, 17 nt, Artificial Sequence
  Synthetic
ggcaggagggaaaaaac

SEQ ID NO: 707153 - RNA, 17 nt, Artificial Sequence
  Synthetic
gaacagagauaaaaaac

SEQ ID NO: 707154 - RNA, 17 nt, Artificial Sequence
  Synthetic
gcucaaugggcaaaaac

SEQ ID NO: 707155 - RNA, 17 nt, Artificial Sequence
  Synthetic
gcauaaaauucaaaaac

SEQ ID NO: 707156 - RNA, 17 nt, Artificial Sequence
  Synthetic
guugaguggggaaaaac

SEQ ID NO: 707157 - RNA, 17 nt, Artificial Sequence
  Synthetic
gacaugaguggaaaaac

SEQ ID NO: 707158 - RNA, 17 nt, Artificial Sequence
  Synthetic
gcuagcaacauaaaaac

SEQ ID NO: 707159 - RNA, 17 nt, Artificial Sequence
  Synthetic
gcacucccuuuaaaaac

SEQ ID NO: 707160 - RNA, 17 nt, Artificial Sequence
  Synthetic
gcauucccuuuaaaaac

SEQ ID NO: 707161 - RNA, 17 nt, Artificial Sequence
  Synthetic
gaagauguccacaaaac

SEQ ID NO: 707162 - RNA, 17 nt, Artificial Sequence
  Synthetic
guauagggguccaaaac

SEQ ID NO: 707163 - RNA, 17 nt, Artificial Sequence
  Synthetic
ggccagaauuccaaaac

SEQ ID NO: 707164 - RNA, 17 nt, Artificial Sequence
  Synthetic
gucauucuugucaaaac

SEQ ID NO: 707165 - RNA, 17 nt, Artificial Sequence
  Synthetic
ggggaggacuucaaaac

SEQ ID NO: 707166 - RNA, 17 nt, Artificial Sequence
  Synthetic
guagggaaauggaaaac

SEQ ID NO: 707167 - RNA, 17 nt, Artificial Sequence
  Synthetic
gaauuaauguggaaaac

SEQ ID NO: 707168 - RNA, 17 nt, Artificial Sequence
  Synthetic
gcauucccuuugaaaac

SEQ ID NO: 707169 - RNA, 17 nt, Artificial Sequence
  Synthetic
gugacaaagaauaaaac

SEQ ID NO: 707170 - RNA, 17 nt, Artificial Sequence
  Synthetic
gaccaagagcauaaaac

SEQ ID NO: 707171 - RNA, 17 nt, Artificial Sequence
  Synthetic
gcaagagagcauaaaac

SEQ ID NO: 707172 - RNA, 17 nt, Artificial Sequence
  Synthetic
gccuguaacuauaaaac

SEQ ID NO: 707173 - RNA, 17 nt, Artificial Sequence
  Synthetic
gauaaaggcucuaaaac

SEQ ID NO: 707174 - RNA, 17 nt, Artificial Sequence
  Synthetic
guacuuauugaacaaac

SEQ ID NO: 707175 - RNA, 17 nt, Artificial Sequence
  Synthetic
gaggaagcuuagcaaac

SEQ ID NO: 707176 - RNA, 17 nt, Artificial Sequence
  Synthetic
gugauacucaggcaaac

SEQ ID NO: 707177 - RNA, 17 nt, Artificial Sequence
  Synthetic
gaauggggaaugcaaac

SEQ ID NO: 707178 - RNA, 17 nt, Artificial Sequence
  Synthetic
gacuuugaaaaucaaac

SEQ ID NO: 707179 - RNA, 17 nt, Artificial Sequence
  Synthetic
gagaaauauaaagaaac

SEQ ID NO: 707180 - RNA, 17 nt, Artificial Sequence
  Synthetic
gaauugagucaagaaac

SEQ ID NO: 707181 - RNA, 17 nt, Artificial Sequence
  Synthetic
ggagguucugcagaaac

SEQ ID NO: 707182 - RNA, 17 nt, Artificial Sequence
  Synthetic
gcucugccuucagaaac

SEQ ID NO: 707183 - RNA, 17 nt, Artificial Sequence
  Synthetic
gagccacauggagaaac

SEQ ID NO: 707184 - RNA, 17 nt, Artificial Sequence
  Synthetic
guaaaaaaaugagaaac

SEQ ID NO: 707185 - RNA, 17 nt, Artificial Sequence
  Synthetic
gggacauggugagaaac

SEQ ID NO: 707186 - RNA, 17 nt, Artificial Sequence
  Synthetic
guauuuuuaguagaaac

SEQ ID NO: 707187 - RNA, 17 nt, Artificial Sequence
  Synthetic
guauuuuugguagaaac

SEQ ID NO: 707188 - RNA, 17 nt, Artificial Sequence
  Synthetic
ggagaaucacucgaaac

SEQ ID NO: 707189 - RNA, 17 nt, Artificial Sequence
  Synthetic
gggaaaaggagggaaac

SEQ ID NO: 707190 - RNA, 17 nt, Artificial Sequence
  Synthetic
gaaucucugagggaaac

SEQ ID NO: 707191 - RNA, 17 nt, Artificial Sequence
  Synthetic
gauuuuugucuggaaac

SEQ ID NO: 707192 - RNA, 17 nt, Artificial Sequence
  Synthetic
gguaaagacuuggaaac

SEQ ID NO: 707193 - RNA, 17 nt, Artificial Sequence
  Synthetic
gauauaauaaaugaaac

SEQ ID NO: 707194 - RNA, 17 nt, Artificial Sequence
  Synthetic
ggguagggggaugaaac

SEQ ID NO: 707195 - RNA, 17 nt, Artificial Sequence
  Synthetic
gaauaaaugacugaaac

SEQ ID NO: 707196 - RNA, 17 nt, Artificial Sequence
  Synthetic
gaugaaguuacugaaac

SEQ ID NO: 707197 - RNA, 17 nt, Artificial Sequence
  Synthetic
gugguuguaccugaaac

SEQ ID NO: 707198 - RNA, 17 nt, Artificial Sequence
  Synthetic
ggagaauuacuugaaac

SEQ ID NO: 707199 - RNA, 17 nt, Artificial Sequence
  Synthetic
gaggaagaagaauaaac

SEQ ID NO: 707200 - RNA, 17 nt, Artificial Sequence
  Synthetic
ggggaaugguaauaaac

SEQ ID NO: 707201 - RNA, 17 nt, Artificial Sequence
  Synthetic
gaauaacagggauaaac

SEQ ID NO: 707202 - RNA, 17 nt, Artificial Sequence
  Synthetic
gaggggaaacuguaaac

SEQ ID NO: 707203 - RNA, 17 nt, Artificial Sequence
  Synthetic
gauuugcgucuguaaac

SEQ ID NO: 707204 - RNA, 17 nt, Artificial Sequence
  Synthetic
guaauuuaaaauuaaac

SEQ ID NO: 707205 - RNA, 17 nt, Artificial Sequence
  Synthetic
gcuugaagcuguuaaac

SEQ ID NO: 707206 - RNA, 17 nt, Artificial Sequence
  Synthetic
guguuugaccaaacaac

SEQ ID NO: 707207 - RNA, 17 nt, Artificial Sequence
  Synthetic
gacucuuagaacacaac

SEQ ID NO: 707208 - RNA, 17 nt, Artificial Sequence
  Synthetic
ggaaacauaaccacaac

SEQ ID NO: 707209 - RNA, 17 nt, Artificial Sequence
  Synthetic
guauucgauagcacaac

SEQ ID NO: 707210 - RNA, 17 nt, Artificial Sequence
  Synthetic
guagcacuguucacaac

SEQ ID NO: 707211 - RNA, 17 nt, Artificial Sequence
  Synthetic
ggucaaauguagacaac

SEQ ID NO: 707212 - RNA, 17 nt, Artificial Sequence
  Synthetic
ggauuuuaaacgacaac

SEQ ID NO: 707213 - RNA, 17 nt, Artificial Sequence
  Synthetic
gaaaauccugugacaac

SEQ ID NO: 707214 - RNA, 17 nt, Artificial Sequence
  Synthetic
gcucuuuucucuacaac

SEQ ID NO: 707215 - RNA, 17 nt, Artificial Sequence
  Synthetic
gaagaccaaaaaccaac

SEQ ID NO: 707216 - RNA, 17 nt, Artificial Sequence
  Synthetic
gaaaaauauucaccaac

SEQ ID NO: 707217 - RNA, 17 nt, Artificial Sequence
  Synthetic
gucauuaaaauaccaac

SEQ ID NO: 707218 - RNA, 17 nt, Artificial Sequence
  Synthetic
gagaaaaaacucccaac

SEQ ID NO: 707219 - RNA, 17 nt, Artificial Sequence
  Synthetic
gccccccacccgccaac

SEQ ID NO: 707220 - RNA, 17 nt, Artificial Sequence
  Synthetic
gaaaaaaaaaaagcaac

SEQ ID NO: 707221 - RNA, 17 nt, Artificial Sequence
  Synthetic
guuuacucuaaagcaac

SEQ ID NO: 707222 - RNA, 17 nt, Artificial Sequence
  Synthetic
gauuuauuugcagcaac

SEQ ID NO: 707223 - RNA, 17 nt, Artificial Sequence
  Synthetic
guauuugauagugcaac

SEQ ID NO: 707224 - RNA, 17 nt, Artificial Sequence
  Synthetic
gcaaugaagagaucaac

SEQ ID NO: 707225 - RNA, 17 nt, Artificial Sequence
  Synthetic
gagccgaugcgaucaac

SEQ ID NO: 707226 - RNA, 17 nt, Artificial Sequence
  Synthetic
gaugaugugggaucaac

SEQ ID NO: 707227 - RNA, 17 nt, Artificial Sequence
  Synthetic
gguagauguauaucaac

SEQ ID NO: 707228 - RNA, 17 nt, Artificial Sequence
  Synthetic
gcaaaagacaucucaac

SEQ ID NO: 707229 - RNA, 17 nt, Artificial Sequence
  Synthetic
gcuauuugggcuucaac

SEQ ID NO: 707230 - RNA, 17 nt, Artificial Sequence
  Synthetic
gggaggguagaaagaac

SEQ ID NO: 707231 - RNA, 17 nt, Artificial Sequence
  Synthetic
gaaagauugugaagaac

SEQ ID NO: 707232 - RNA, 17 nt, Artificial Sequence
  Synthetic
gacuaagcucuaagaac

SEQ ID NO: 707233 - RNA, 17 nt, Artificial Sequence
  Synthetic
guggcagaaggcagaac

SEQ ID NO: 707234 - RNA, 17 nt, Artificial Sequence
  Synthetic
ggacacacgugcagaac

SEQ ID NO: 707235 - RNA, 17 nt, Artificial Sequence
  Synthetic
gugaaugcugagagaac

SEQ ID NO: 707236 - RNA, 17 nt, Artificial Sequence
  Synthetic
guauauaacuagagaac

SEQ ID NO: 707237 - RNA, 17 nt, Artificial Sequence
  Synthetic
gcacauuuuuggagaac

SEQ ID NO: 707238 - RNA, 17 nt, Artificial Sequence
  Synthetic
guuuucucuuugagaac

SEQ ID NO: 707239 - RNA, 17 nt, Artificial Sequence
  Synthetic
gagacggaauuuagaac

SEQ ID NO: 707240 - RNA, 17 nt, Artificial Sequence
  Synthetic
ggaagcaacuuuagaac

SEQ ID NO: 707241 - RNA, 17 nt, Artificial Sequence
  Synthetic
gcaagguuguaaggaac

SEQ ID NO: 707242 - RNA, 17 nt, Artificial Sequence
  Synthetic
gaggugcaaagaggaac

SEQ ID NO: 707243 - RNA, 17 nt, Artificial Sequence
  Synthetic
gagguacaaggaggaac

SEQ ID NO: 707244 - RNA, 17 nt, Artificial Sequence
  Synthetic
gacacaggaauaggaac

SEQ ID NO: 707245 - RNA, 17 nt, Artificial Sequence
  Synthetic
ggcuaguguuuaggaac

SEQ ID NO: 707246 - RNA, 17 nt, Artificial Sequence
  Synthetic
ggagggaggaagggaac

SEQ ID NO: 707247 - RNA, 17 nt, Artificial Sequence
  Synthetic
gaaacacuguagggaac

SEQ ID NO: 707248 - RNA, 17 nt, Artificial Sequence
  Synthetic
gcaaacgaggugggaac

SEQ ID NO: 707249 - RNA, 17 nt, Artificial Sequence
  Synthetic
gauuacucugugggaac

SEQ ID NO: 707250 - RNA, 17 nt, Artificial Sequence
  Synthetic
ggaagcaacuuuggaac

SEQ ID NO: 707251 - RNA, 17 nt, Artificial Sequence
  Synthetic
gaucaaagacaaugaac

SEQ ID NO: 707252 - RNA, 17 nt, Artificial Sequence
  Synthetic
gguaauuuauaaugaac

SEQ ID NO: 707253 - RNA, 17 nt, Artificial Sequence
  Synthetic
gcauuuacucuaugaac

SEQ ID NO: 707254 - RNA, 17 nt, Artificial Sequence
  Synthetic
gaagggaaaaacugaac

SEQ ID NO: 707255 - RNA, 17 nt, Artificial Sequence
  Synthetic
guagaaaaauacugaac

SEQ ID NO: 707256 - RNA, 17 nt, Artificial Sequence
  Synthetic
guccuacaguccugaac

SEQ ID NO: 707257 - RNA, 17 nt, Artificial Sequence
  Synthetic
guauuaguuuucugaac

SEQ ID NO: 707258 - RNA, 17 nt, Artificial Sequence
  Synthetic
gaaggcuuuccgugaac

SEQ ID NO: 707259 - RNA, 17 nt, Artificial Sequence
  Synthetic
ggaugagguaugugaac

SEQ ID NO: 707260 - RNA, 17 nt, Artificial Sequence
  Synthetic
ggugaagcauuuugaac

SEQ ID NO: 707261 - RNA, 17 nt, Artificial Sequence
  Synthetic
gaagaauagcgaauaac

SEQ ID NO: 707262 - RNA, 17 nt, Artificial Sequence
  Synthetic
ggggagaggcucauaac

SEQ ID NO: 707263 - RNA, 17 nt, Artificial Sequence
  Synthetic
ggaaaagaauucauaac

SEQ ID NO: 707264 - RNA, 17 nt, Artificial Sequence
  Synthetic
guugauaaacagauaac

SEQ ID NO: 707265 - RNA, 17 nt, Artificial Sequence
  Synthetic
gcauguugacauauaac

SEQ ID NO: 707266 - RNA, 17 nt, Artificial Sequence
  Synthetic
gcaaaagaaauuauaac

SEQ ID NO: 707267 - RNA, 17 nt, Artificial Sequence
  Synthetic
ggcuuauucuuuauaac

SEQ ID NO: 707268 - RNA, 17 nt, Artificial Sequence
  Synthetic
gucauaccauaacuaac

SEQ ID NO: 707269 - RNA, 17 nt, Artificial Sequence
  Synthetic
gacugucauucacuaac

SEQ ID NO: 707270 - RNA, 17 nt, Artificial Sequence
  Synthetic
gggccccgguuccuaac

SEQ ID NO: 707271 - RNA, 17 nt, Artificial Sequence
  Synthetic
gugucucugaaucuaac

SEQ ID NO: 707272 - RNA, 17 nt, Artificial Sequence
  Synthetic
gaaagcccuuaucuaac

SEQ ID NO: 707273 - RNA, 17 nt, Artificial Sequence
  Synthetic
gucuuagcacaaguaac

SEQ ID NO: 707274 - RNA, 17 nt, Artificial Sequence
  Synthetic
gugcaaucuacaguaac

SEQ ID NO: 707275 - RNA, 17 nt, Artificial Sequence
  Synthetic
gauuguuuuacaguaac

SEQ ID NO: 707276 - RNA, 17 nt, Artificial Sequence
  Synthetic
gauucacugccaguaac

SEQ ID NO: 707277 - RNA, 17 nt, Artificial Sequence
  Synthetic
gaggcuaacaugguaac

SEQ ID NO: 707278 - RNA, 17 nt, Artificial Sequence
  Synthetic
gauaaugucucuguaac

SEQ ID NO: 707279 - RNA, 17 nt, Artificial Sequence
  Synthetic
gugugguagaguguaac

SEQ ID NO: 707280 - RNA, 17 nt, Artificial Sequence
  Synthetic
guggagcuagaauuaac

SEQ ID NO: 707281 - RNA, 17 nt, Artificial Sequence
  Synthetic
gagacagaauaauuaac

SEQ ID NO: 707282 - RNA, 17 nt, Artificial Sequence
  Synthetic
guccugcacccauuaac

SEQ ID NO: 707283 - RNA, 17 nt, Artificial Sequence
  Synthetic
guugaacaaauauuaac

SEQ ID NO: 707284 - RNA, 17 nt, Artificial Sequence
  Synthetic
guggcuaccauauuaac

SEQ ID NO: 707285 - RNA, 17 nt, Artificial Sequence
  Synthetic
ggaaucauauuauuaac

SEQ ID NO: 707286 - RNA, 17 nt, Artificial Sequence
  Synthetic
gguucagcgagguuaac

SEQ ID NO: 707287 - RNA, 17 nt, Artificial Sequence
  Synthetic
gcugccauucuguuaac

SEQ ID NO: 707288 - RNA, 17 nt, Artificial Sequence
  Synthetic
gcucaaaauguguuaac

SEQ ID NO: 707289 - RNA, 17 nt, Artificial Sequence
  Synthetic
gaaaauuuaaauuuaac

SEQ ID NO: 707290 - RNA, 17 nt, Artificial Sequence
  Synthetic
gaguaugugucuuuaac

SEQ ID NO: 707291 - RNA, 17 nt, Artificial Sequence
  Synthetic
guuaaagauguuuuaac

SEQ ID NO: 707292 - RNA, 17 nt, Artificial Sequence
  Synthetic
guaaaagagaaaaacac

SEQ ID NO: 707293 - RNA, 17 nt, Artificial Sequence
  Synthetic
gccacaaaacaaaacac

SEQ ID NO: 707294 - RNA, 17 nt, Artificial Sequence
  Synthetic
guccagagugaaaacac

SEQ ID NO: 707295 - RNA, 17 nt, Artificial Sequence
  Synthetic
gauucaacugcaaacac

SEQ ID NO: 707296 - RNA, 17 nt, Artificial Sequence
  Synthetic
guguuuucaagaaacac

SEQ ID NO: 707297 - RNA, 17 nt, Artificial Sequence
  Synthetic
gugagguugggaaacac

SEQ ID NO: 707298 - RNA, 17 nt, Artificial Sequence
  Synthetic
gacaggcaaauaaacac

SEQ ID NO: 707299 - RNA, 17 nt, Artificial Sequence
  Synthetic
guggucgcaguaaacac

SEQ ID NO: 707300 - RNA, 17 nt, Artificial Sequence
  Synthetic
ggccccaccuccaacac

SEQ ID NO: 707301 - RNA, 17 nt, Artificial Sequence
  Synthetic
gccauagaaagcaacac

SEQ ID NO: 707302 - RNA, 17 nt, Artificial Sequence
  Synthetic
gauauuuaggagaacac

SEQ ID NO: 707303 - RNA, 17 nt, Artificial Sequence
  Synthetic
gcucugugauagaacac

SEQ ID NO: 707304 - RNA, 17 nt, Artificial Sequence
  Synthetic
gcucuaaaaaggaacac

SEQ ID NO: 707305 - RNA, 17 nt, Artificial Sequence
  Synthetic
gguuugcuggggaacac

SEQ ID NO: 707306 - RNA, 17 nt, Artificial Sequence
  Synthetic
gcuacucuguugaacac

SEQ ID NO: 707307 - RNA, 17 nt, Artificial Sequence
  Synthetic
gcuggaaaagauaacac

SEQ ID NO: 707308 - RNA, 17 nt, Artificial Sequence
  Synthetic
gcugcucugucuaacac

SEQ ID NO: 707309 - RNA, 17 nt, Artificial Sequence
  Synthetic
guuucacauucuaacac

SEQ ID NO: 707310 - RNA, 17 nt, Artificial Sequence
  Synthetic
gucagccauauuaacac

SEQ ID NO: 707311 - RNA, 17 nt, Artificial Sequence
  Synthetic
gagucuaggaaacacac

SEQ ID NO: 707312 - RNA, 17 nt, Artificial Sequence
  Synthetic
gaaauuaaacuacacac

SEQ ID NO: 707313 - RNA, 17 nt, Artificial Sequence
  Synthetic
gcagcgcccagccacac

SEQ ID NO: 707314 - RNA, 17 nt, Artificial Sequence
  Synthetic
gcuucccugggccacac

SEQ ID NO: 707315 - RNA, 17 nt, Artificial Sequence
  Synthetic
gccuuaucacuccacac

SEQ ID NO: 707316 - RNA, 17 nt, Artificial Sequence
  Synthetic
gcuaauaauaaucacac

SEQ ID NO: 707317 - RNA, 17 nt, Artificial Sequence
  Synthetic
gguuuacucacucacac

SEQ ID NO: 707318 - RNA, 17 nt, Artificial Sequence
  Synthetic
gcucggaaaccucacac

SEQ ID NO: 707319 - RNA, 17 nt, Artificial Sequence
  Synthetic
gauaucaaccaagacac

SEQ ID NO: 707320 - RNA, 17 nt, Artificial Sequence
  Synthetic
gcugggaccacagacac

SEQ ID NO: 707321 - RNA, 17 nt, Artificial Sequence
  Synthetic
gccuguuucauagacac

SEQ ID NO: 707322 - RNA, 17 nt, Artificial Sequence
  Synthetic
gucugccacaaggacac

SEQ ID NO: 707323 - RNA, 17 nt, Artificial Sequence
  Synthetic
gacacuguacaggacac

SEQ ID NO: 707324 - RNA, 17 nt, Artificial Sequence
  Synthetic
guagggcuggaggacac

SEQ ID NO: 707325 - RNA, 17 nt, Artificial Sequence
  Synthetic
guucauuccugggacac

SEQ ID NO: 707326 - RNA, 17 nt, Artificial Sequence
  Synthetic
ggggcugcaguggacac

SEQ ID NO: 707327 - RNA, 17 nt, Artificial Sequence
  Synthetic
gaaaacaauguggacac

SEQ ID NO: 707328 - RNA, 17 nt, Artificial Sequence
  Synthetic
gcaugggaggcugacac

SEQ ID NO: 707329 - RNA, 17 nt, Artificial Sequence
  Synthetic
gaaaguuuaauugacac

SEQ ID NO: 707330 - RNA, 17 nt, Artificial Sequence
  Synthetic
gagaacuuuaaauacac

SEQ ID NO: 707331 - RNA, 17 nt, Artificial Sequence
  Synthetic
gacauccauccauacac

SEQ ID NO: 707332 - RNA, 17 nt, Artificial Sequence
  Synthetic
gagacagacacguacac

SEQ ID NO: 707333 - RNA, 17 nt, Artificial Sequence
  Synthetic
gccaugaaauauuacac

SEQ ID NO: 707334 - RNA, 17 nt, Artificial Sequence
  Synthetic
gccaguaccacuuacac

SEQ ID NO: 707335 - RNA, 17 nt, Artificial Sequence
  Synthetic
gauaguuucuuuuacac

SEQ ID NO: 707336 - RNA, 17 nt, Artificial Sequence
  Synthetic
gaaaucuuuuaaaccac

SEQ ID NO: 707337 - RNA, 17 nt, Artificial Sequence
  Synthetic
gcaggaccugcaaccac

SEQ ID NO: 707338 - RNA, 17 nt, Artificial Sequence
  Synthetic
gggccuaaucuaaccac

SEQ ID NO: 707339 - RNA, 17 nt, Artificial Sequence
  Synthetic
gauucuaaucuaaccac

SEQ ID NO: 707340 - RNA, 17 nt, Artificial Sequence
  Synthetic
gucaccccagacaccac

SEQ ID NO: 707341 - RNA, 17 nt, Artificial Sequence
  Synthetic
gaagaauaucucaccac

SEQ ID NO: 707342 - RNA, 17 nt, Artificial Sequence
  Synthetic
gaaguaaaagucaccac

SEQ ID NO: 707343 - RNA, 17 nt, Artificial Sequence
  Synthetic
ggguggcuggagaccac

SEQ ID NO: 707344 - RNA, 17 nt, Artificial Sequence
  Synthetic
gaauacauuucuaccac

SEQ ID NO: 707345 - RNA, 17 nt, Artificial Sequence
  Synthetic
gauuggguuuuuaccac

SEQ ID NO: 707346 - RNA, 17 nt, Artificial Sequence
  Synthetic
gcaagguaaacacccac

SEQ ID NO: 707347 - RNA, 17 nt, Artificial Sequence
  Synthetic
ggaaacugaguacccac

SEQ ID NO: 707348 - RNA, 17 nt, Artificial Sequence
  Synthetic
gacuucuguguacccac

SEQ ID NO: 707349 - RNA, 17 nt, Artificial Sequence
  Synthetic
gcucugcugacgcccac

SEQ ID NO: 707350 - RNA, 17 nt, Artificial Sequence
  Synthetic
gaauauuuuaggcccac

SEQ ID NO: 707351 - RNA, 17 nt, Artificial Sequence
  Synthetic
guggaguuuaaucccac

SEQ ID NO: 707352 - RNA, 17 nt, Artificial Sequence
  Synthetic
ggacuguagguagccac

SEQ ID NO: 707353 - RNA, 17 nt, Artificial Sequence
  Synthetic
ggcuugccuuaugccac

SEQ ID NO: 707354 - RNA, 17 nt, Artificial Sequence
  Synthetic
gggagacccuaauccac

SEQ ID NO: 707355 - RNA, 17 nt, Artificial Sequence
  Synthetic
ggucccaucuaauccac

SEQ ID NO: 707356 - RNA, 17 nt, Artificial Sequence
  Synthetic
gucuaaccuuuauccac

SEQ ID NO: 707357 - RNA, 17 nt, Artificial Sequence
  Synthetic
gugaacauuaucuccac

SEQ ID NO: 707358 - RNA, 17 nt, Artificial Sequence
  Synthetic
gcaguuccauucuccac

SEQ ID NO: 707359 - RNA, 17 nt, Artificial Sequence
  Synthetic
ggugcagacgcuuccac

SEQ ID NO: 707360 - RNA, 17 nt, Artificial Sequence
  Synthetic
ggaccagauaguuccac

SEQ ID NO: 707361 - RNA, 17 nt, Artificial Sequence
  Synthetic
ggguaaaaaaaaagcac

SEQ ID NO: 707362 - RNA, 17 nt, Artificial Sequence
  Synthetic
ggcugccagaaaagcac

SEQ ID NO: 707363 - RNA, 17 nt, Artificial Sequence
  Synthetic
gcacuugguccaagcac

SEQ ID NO: 707364 - RNA, 17 nt, Artificial Sequence
  Synthetic
guugcugcuuuaagcac

SEQ ID NO: 707365 - RNA, 17 nt, Artificial Sequence
  Synthetic
gguaauaugaacagcac

SEQ ID NO: 707366 - RNA, 17 nt, Artificial Sequence
  Synthetic
guucuuuugcacagcac

SEQ ID NO: 707367 - RNA, 17 nt, Artificial Sequence
  Synthetic
gggugaaggagcagcac

SEQ ID NO: 707368 - RNA, 17 nt, Artificial Sequence
  Synthetic
gaaugguaaacgagcac

SEQ ID NO: 707369 - RNA, 17 nt, Artificial Sequence
  Synthetic
gaggacuguuugagcac

SEQ ID NO: 707370 - RNA, 17 nt, Artificial Sequence
  Synthetic
gagauaaucaauagcac

SEQ ID NO: 707371 - RNA, 17 nt, Artificial Sequence
  Synthetic
gagugaauccuuagcac

SEQ ID NO: 707372 - RNA, 17 nt, Artificial Sequence
  Synthetic
gggaaauaauuuagcac

SEQ ID NO: 707373 - RNA, 17 nt, Artificial Sequence
  Synthetic
guugaggacaggcgcac

SEQ ID NO: 707374 - RNA, 17 nt, Artificial Sequence
  Synthetic
gauuacauugggcgcac

SEQ ID NO: 707375 - RNA, 17 nt, Artificial Sequence
  Synthetic
guucaagaucaaggcac

SEQ ID NO: 707376 - RNA, 17 nt, Artificial Sequence
  Synthetic
gcuguguaaauaggcac

SEQ ID NO: 707377 - RNA, 17 nt, Artificial Sequence
  Synthetic
gggguuuuuauaggcac

SEQ ID NO: 707378 - RNA, 17 nt, Artificial Sequence
  Synthetic
ggcaccauucuaggcac

SEQ ID NO: 707379 - RNA, 17 nt, Artificial Sequence
  Synthetic
gggaauguucuaggcac

SEQ ID NO: 707380 - RNA, 17 nt, Artificial Sequence
  Synthetic
gccaccaccagcggcac

SEQ ID NO: 707381 - RNA, 17 nt, Artificial Sequence
  Synthetic
ggcaucuaguggggcac

SEQ ID NO: 707382 - RNA, 17 nt, Artificial Sequence
  Synthetic
gcccuuagccugggcac

SEQ ID NO: 707383 - RNA, 17 nt, Artificial Sequence
  Synthetic
gcacuccaacauggcac

SEQ ID NO: 707384 - RNA, 17 nt, Artificial Sequence
  Synthetic
gccugagcagcaugcac

SEQ ID NO: 707385 - RNA, 17 nt, Artificial Sequence
  Synthetic
gccuuugacggaugcac

SEQ ID NO: 707386 - RNA, 17 nt, Artificial Sequence
  Synthetic
gagcuacuuugaugcac

SEQ ID NO: 707387 - RNA, 17 nt, Artificial Sequence
  Synthetic
gguguggugguaugcac

SEQ ID NO: 707388 - RNA, 17 nt, Artificial Sequence
  Synthetic
gugaaaauaaugugcac

SEQ ID NO: 707389 - RNA, 17 nt, Artificial Sequence
  Synthetic
ggugugguagauugcac

SEQ ID NO: 707390 - RNA, 17 nt, Artificial Sequence
  Synthetic
guuacuguagauugcac

SEQ ID NO: 707391 - RNA, 17 nt, Artificial Sequence
  Synthetic
gguacagcauauugcac

SEQ ID NO: 707392 - RNA, 17 nt, Artificial Sequence
  Synthetic
gaaguuauuuauugcac

SEQ ID NO: 707393 - RNA, 17 nt, Artificial Sequence
  Synthetic
gguuaggcaucuugcac

SEQ ID NO: 707394 - RNA, 17 nt, Artificial Sequence
  Synthetic
ggguauuuuaguugcac

SEQ ID NO: 707395 - RNA, 17 nt, Artificial Sequence
  Synthetic
ggacaaaagaaaaucac

SEQ ID NO: 707396 - RNA, 17 nt, Artificial Sequence
  Synthetic
gacccucuauaaaucac

SEQ ID NO: 707397 - RNA, 17 nt, Artificial Sequence
  Synthetic
ggagguaauugaaucac

SEQ ID NO: 707398 - RNA, 17 nt, Artificial Sequence
  Synthetic
gugucacuuugaaucac

SEQ ID NO: 707399 - RNA, 17 nt, Artificial Sequence
  Synthetic
gcaucaguguuaaucac

SEQ ID NO: 707400 - RNA, 17 nt, Artificial Sequence
  Synthetic
gaguaaagagacaucac

SEQ ID NO: 707401 - RNA, 17 nt, Artificial Sequence
  Synthetic
gaacucuccaucaucac

SEQ ID NO: 707402 - RNA, 17 nt, Artificial Sequence
  Synthetic
gaaaugcucaucaucac

SEQ ID NO: 707403 - RNA, 17 nt, Artificial Sequence
  Synthetic
ggaccaaaugucaucac

SEQ ID NO: 707404 - RNA, 17 nt, Artificial Sequence
  Synthetic
gagaaaaccaagaucac

SEQ ID NO: 707405 - RNA, 17 nt, Artificial Sequence
  Synthetic
gugcagucagagaucac

SEQ ID NO: 707406 - RNA, 17 nt, Artificial Sequence
  Synthetic
gagacucacuugaucac

SEQ ID NO: 707407 - RNA, 17 nt, Artificial Sequence
  Synthetic
gagccaguaaauaucac

SEQ ID NO: 707408 - RNA, 17 nt, Artificial Sequence
  Synthetic
gugccagauucuaucac

SEQ ID NO: 707409 - RNA, 17 nt, Artificial Sequence
  Synthetic
gacucaggaagacucac

SEQ ID NO: 707410 - RNA, 17 nt, Artificial Sequence
  Synthetic
gccuacgcucuacucac

SEQ ID NO: 707411 - RNA, 17 nt, Artificial Sequence
  Synthetic
ggcuaaaccaaccucac

SEQ ID NO: 707412 - RNA, 17 nt, Artificial Sequence
  Synthetic
gcuuucucuccccucac

SEQ ID NO: 707413 - RNA, 17 nt, Artificial Sequence
  Synthetic
ggcuuucuaguccucac

SEQ ID NO: 707414 - RNA, 17 nt, Artificial Sequence
  Synthetic
gcuacccggaagcucac

SEQ ID NO: 707415 - RNA, 17 nt, Artificial Sequence
  Synthetic
ggacgcauguggcucac

SEQ ID NO: 707416 - RNA, 17 nt, Artificial Sequence
  Synthetic
gaacauuuuuugcucac

SEQ ID NO: 707417 - RNA, 17 nt, Artificial Sequence
  Synthetic
gaacaugucaaagucac

SEQ ID NO: 707418 - RNA, 17 nt, Artificial Sequence
  Synthetic
gaugaaauagcugucac

SEQ ID NO: 707419 - RNA, 17 nt, Artificial Sequence
  Synthetic
gugaggcaccgugucac

SEQ ID NO: 707420 - RNA, 17 nt, Artificial Sequence
  Synthetic
ggguauccuguugucac

SEQ ID NO: 707421 - RNA, 17 nt, Artificial Sequence
  Synthetic
gcugaauggaaauucac

SEQ ID NO: 707422 - RNA, 17 nt, Artificial Sequence
  Synthetic
guuugaggucaauucac

SEQ ID NO: 707423 - RNA, 17 nt, Artificial Sequence
  Synthetic
guuuuccuguaauucac

SEQ ID NO: 707424 - RNA, 17 nt, Artificial Sequence
  Synthetic
gagcacagcauauucac

SEQ ID NO: 707425 - RNA, 17 nt, Artificial Sequence
  Synthetic
guuuuggaccuauucac

SEQ ID NO: 707426 - RNA, 17 nt, Artificial Sequence
  Synthetic
gguuacagaaacuucac

SEQ ID NO: 707427 - RNA, 17 nt, Artificial Sequence
  Synthetic
ggggcacucaacuucac

SEQ ID NO: 707428 - RNA, 17 nt, Artificial Sequence
  Synthetic
gauuuucagcacuucac

SEQ ID NO: 707429 - RNA, 17 nt, Artificial Sequence
  Synthetic
ggcucuuccugcuucac

SEQ ID NO: 707430 - RNA, 17 nt, Artificial Sequence
  Synthetic
gccaugucccucuucac

SEQ ID NO: 707431 - RNA, 17 nt, Artificial Sequence
  Synthetic
gggguuccaugguucac

SEQ ID NO: 707432 - RNA, 17 nt, Artificial Sequence
  Synthetic
ggaaaacaugguuucac

SEQ ID NO: 707433 - RNA, 17 nt, Artificial Sequence
  Synthetic
ggaaggcaccuuuucac

SEQ ID NO: 707434 - RNA, 17 nt, Artificial Sequence
  Synthetic
gccauuugucuuuucac

SEQ ID NO: 707435 - RNA, 17 nt, Artificial Sequence
  Synthetic
gcguuuucauuuuucac

SEQ ID NO: 707436 - RNA, 17 nt, Artificial Sequence
  Synthetic
gcuuauauccaaaagac

SEQ ID NO: 707437 - RNA, 17 nt, Artificial Sequence
  Synthetic
gagaggaagcaaaagac

SEQ ID NO: 707438 - RNA, 17 nt, Artificial Sequence
  Synthetic
gcucuaaauccaaagac

SEQ ID NO: 707439 - RNA, 17 nt, Artificial Sequence
  Synthetic
guaguuuuaguaaagac

SEQ ID NO: 707440 - RNA, 17 nt, Artificial Sequence
  Synthetic
gucuauuaauuaaagac

SEQ ID NO: 707441 - RNA, 17 nt, Artificial Sequence
  Synthetic
gaacuuugcuuaaagac

SEQ ID NO: 707442 - RNA, 17 nt, Artificial Sequence
  Synthetic
gaaaacuggcacaagac

SEQ ID NO: 707443 - RNA, 17 nt, Artificial Sequence
  Synthetic
guuuauuggcacaagac

SEQ ID NO: 707444 - RNA, 17 nt, Artificial Sequence
  Synthetic
gaaauuugcuacaagac

SEQ ID NO: 707445 - RNA, 17 nt, Artificial Sequence
  Synthetic
gaagaaauacccaagac

SEQ ID NO: 707446 - RNA, 17 nt, Artificial Sequence
  Synthetic
ggaccauucuccaagac

SEQ ID NO: 707447 - RNA, 17 nt, Artificial Sequence
  Synthetic
gaacugcaauucaagac

SEQ ID NO: 707448 - RNA, 17 nt, Artificial Sequence
  Synthetic
gaggcucagaagaagac

SEQ ID NO: 707449 - RNA, 17 nt, Artificial Sequence
  Synthetic
gguuacagugagaagac

SEQ ID NO: 707450 - RNA, 17 nt, Artificial Sequence
  Synthetic
gagagaagcaggaagac

SEQ ID NO: 707451 - RNA, 17 nt, Artificial Sequence
  Synthetic
gggagaaaugggaagac

SEQ ID NO: 707452 - RNA, 17 nt, Artificial Sequence
  Synthetic
ggugcauuuuguaagac

SEQ ID NO: 707453 - RNA, 17 nt, Artificial Sequence
  Synthetic
gaguaucacaaacagac

SEQ ID NO: 707454 - RNA, 17 nt, Artificial Sequence
  Synthetic
gcuaauuggaaacagac

SEQ ID NO: 707455 - RNA, 17 nt, Artificial Sequence
  Synthetic
gggcgagagcaacagac

SEQ ID NO: 707456 - RNA, 17 nt, Artificial Sequence
  Synthetic
gaguaucaaggacagac

SEQ ID NO: 707457 - RNA, 17 nt, Artificial Sequence
  Synthetic
guggaugaaggacagac

SEQ ID NO: 707458 - RNA, 17 nt, Artificial Sequence
  Synthetic
guaggagcuggacagac

SEQ ID NO: 707459 - RNA, 17 nt, Artificial Sequence
  Synthetic
guauuuuuaguacagac

SEQ ID NO: 707460 - RNA, 17 nt, Artificial Sequence
  Synthetic
guguuuuuaguacagac

SEQ ID NO: 707461 - RNA, 17 nt, Artificial Sequence
  Synthetic
gcaguucgagaccagac

SEQ ID NO: 707462 - RNA, 17 nt, Artificial Sequence
  Synthetic
gauagcaugggccagac

SEQ ID NO: 707463 - RNA, 17 nt, Artificial Sequence
  Synthetic
gccacugcacuccagac

SEQ ID NO: 707464 - RNA, 17 nt, Artificial Sequence
  Synthetic
guugcaauacuccagac

SEQ ID NO: 707465 - RNA, 17 nt, Artificial Sequence
  Synthetic
gcccaucaguggcagac

SEQ ID NO: 707466 - RNA, 17 nt, Artificial Sequence
  Synthetic
gagaauguucaucagac

SEQ ID NO: 707467 - RNA, 17 nt, Artificial Sequence
  Synthetic
gaguccagcucucagac

SEQ ID NO: 707468 - RNA, 17 nt, Artificial Sequence
  Synthetic
gugaaaucaugucagac

SEQ ID NO: 707469 - RNA, 17 nt, Artificial Sequence
  Synthetic
guauuacauaaagagac

SEQ ID NO: 707470 - RNA, 17 nt, Artificial Sequence
  Synthetic
guggacuaugaagagac

SEQ ID NO: 707471 - RNA, 17 nt, Artificial Sequence
  Synthetic
guauuuuuaacagagac

SEQ ID NO: 707472 - RNA, 17 nt, Artificial Sequence
  Synthetic
guauuuuuagcagagac

SEQ ID NO: 707473 - RNA, 17 nt, Artificial Sequence
  Synthetic
ggauaugagggagagac

SEQ ID NO: 707474 - RNA, 17 nt, Artificial Sequence
  Synthetic
guauuuuuaauagagac

SEQ ID NO: 707475 - RNA, 17 nt, Artificial Sequence
  Synthetic
guauuuuaaguagagac

SEQ ID NO: 707476 - RNA, 17 nt, Artificial Sequence
  Synthetic
guguuuucaguagagac

SEQ ID NO: 707477 - RNA, 17 nt, Artificial Sequence
  Synthetic
guaucuuuaguagagac

SEQ ID NO: 707478 - RNA, 17 nt, Artificial Sequence
  Synthetic
guaauuuuaguagagac

SEQ ID NO: 707479 - RNA, 17 nt, Artificial Sequence
  Synthetic
guacuuuuaguagagac

SEQ ID NO: 707480 - RNA, 17 nt, Artificial Sequence
  Synthetic
gcauuuuuaguagagac

SEQ ID NO: 707481 - RNA, 17 nt, Artificial Sequence
  Synthetic
guauuuuuaguagagac

SEQ ID NO: 707482 - RNA, 17 nt, Artificial Sequence
  Synthetic
guguuuuuaguagagac

SEQ ID NO: 707483 - RNA, 17 nt, Artificial Sequence
  Synthetic
guauuuuugguagagac

SEQ ID NO: 707484 - RNA, 17 nt, Artificial Sequence
  Synthetic
gaagaaauacccgagac

SEQ ID NO: 707485 - RNA, 17 nt, Artificial Sequence
  Synthetic
gaagaaauagccgagac

SEQ ID NO: 707486 - RNA, 17 nt, Artificial Sequence
  Synthetic
gauggauggaaggagac

SEQ ID NO: 707487 - RNA, 17 nt, Artificial Sequence
  Synthetic
gagggauggugggagac

SEQ ID NO: 707488 - RNA, 17 nt, Artificial Sequence
  Synthetic
guaucuuuaguggagac

SEQ ID NO: 707489 - RNA, 17 nt, Artificial Sequence
  Synthetic
guauuuuuaguggagac

SEQ ID NO: 707490 - RNA, 17 nt, Artificial Sequence
  Synthetic
gaguggaaaaaugagac

SEQ ID NO: 707491 - RNA, 17 nt, Artificial Sequence
  Synthetic
gaucaggaguuugagac

SEQ ID NO: 707492 - RNA, 17 nt, Artificial Sequence
  Synthetic
guuuuuauuuuugagac

SEQ ID NO: 707493 - RNA, 17 nt, Artificial Sequence
  Synthetic
guuuguuuuuuugagac

SEQ ID NO: 707494 - RNA, 17 nt, Artificial Sequence
  Synthetic
uuuuuuuuuuuugagac

SEQ ID NO: 707495 - RNA, 17 nt, Artificial Sequence
  Synthetic
guccaucaauaauagac

SEQ ID NO: 707496 - RNA, 17 nt, Artificial Sequence
  Synthetic
guccaacaaugauagac

SEQ ID NO: 707497 - RNA, 17 nt, Artificial Sequence
  Synthetic
guccgacaaugauagac

SEQ ID NO: 707498 - RNA, 17 nt, Artificial Sequence
  Synthetic
gcccaucaaugauagac

SEQ ID NO: 707499 - RNA, 17 nt, Artificial Sequence
  Synthetic
guccaucaaugauagac

SEQ ID NO: 707500 - RNA, 17 nt, Artificial Sequence
  Synthetic
gcucaucaaugauagac

SEQ ID NO: 707501 - RNA, 17 nt, Artificial Sequence
  Synthetic
guccaacagugauagac

SEQ ID NO: 707502 - RNA, 17 nt, Artificial Sequence
  Synthetic
gcccaccagugauagac

SEQ ID NO: 707503 - RNA, 17 nt, Artificial Sequence
  Synthetic
gcccaucagugauagac

SEQ ID NO: 707504 - RNA, 17 nt, Artificial Sequence
  Synthetic
guccaucagugauagac

SEQ ID NO: 707505 - RNA, 17 nt, Artificial Sequence
  Synthetic
gcuacaagcugcuagac

SEQ ID NO: 707506 - RNA, 17 nt, Artificial Sequence
  Synthetic
ggcuuaaaucucuagac

SEQ ID NO: 707507 - RNA, 17 nt, Artificial Sequence
  Synthetic
guauuuuuaguguagac

SEQ ID NO: 707508 - RNA, 17 nt, Artificial Sequence
  Synthetic
gccccccaccccacgac

SEQ ID NO: 707509 - RNA, 17 nt, Artificial Sequence
  Synthetic
gcgaaggagacagcgac

SEQ ID NO: 707510 - RNA, 17 nt, Artificial Sequence
  Synthetic
gccccccaccucgcgac

SEQ ID NO: 707511 - RNA, 17 nt, Artificial Sequence
  Synthetic
gugaaaccaugaaggac

SEQ ID NO: 707512 - RNA, 17 nt, Artificial Sequence
  Synthetic
gaauaggcaugaaggac

SEQ ID NO: 707513 - RNA, 17 nt, Artificial Sequence
  Synthetic
gguacugucauaaggac

SEQ ID NO: 707514 - RNA, 17 nt, Artificial Sequence
  Synthetic
gaagaagcugccaggac

SEQ ID NO: 707515 - RNA, 17 nt, Artificial Sequence
  Synthetic
gguucugaugucaggac

SEQ ID NO: 707516 - RNA, 17 nt, Artificial Sequence
  Synthetic
ggacaaauguucaggac

SEQ ID NO: 707517 - RNA, 17 nt, Artificial Sequence
  Synthetic
gguugaauagagaggac

SEQ ID NO: 707518 - RNA, 17 nt, Artificial Sequence
  Synthetic
gaaagcuuccugaggac

SEQ ID NO: 707519 - RNA, 17 nt, Artificial Sequence
  Synthetic
gaagcaucucugaggac

SEQ ID NO: 707520 - RNA, 17 nt, Artificial Sequence
  Synthetic
gaggcaaaguugaggac

SEQ ID NO: 707521 - RNA, 17 nt, Artificial Sequence
  Synthetic
gauaccugcaguaggac

SEQ ID NO: 707522 - RNA, 17 nt, Artificial Sequence
  Synthetic
guucaggacuguaggac

SEQ ID NO: 707523 - RNA, 17 nt, Artificial Sequence
  Synthetic
guggaucacuuuaggac

SEQ ID NO: 707524 - RNA, 17 nt, Artificial Sequence
  Synthetic
guacagagcaagcggac

SEQ ID NO: 707525 - RNA, 17 nt, Artificial Sequence
  Synthetic
ggaauggauaaagggac

SEQ ID NO: 707526 - RNA, 17 nt, Artificial Sequence
  Synthetic
gagagaaagagagggac

SEQ ID NO: 707527 - RNA, 17 nt, Artificial Sequence
  Synthetic
gaaugaauucgagggac

SEQ ID NO: 707528 - RNA, 17 nt, Artificial Sequence
  Synthetic
guauuuuuaguagggac

SEQ ID NO: 707529 - RNA, 17 nt, Artificial Sequence
  Synthetic
guuuauuacuaugggac

SEQ ID NO: 707530 - RNA, 17 nt, Artificial Sequence
  Synthetic
gcucaucucacugggac

SEQ ID NO: 707531 - RNA, 17 nt, Artificial Sequence
  Synthetic
gcuuagcagggugggac

SEQ ID NO: 707532 - RNA, 17 nt, Artificial Sequence
  Synthetic
gacacaaucuaauggac

SEQ ID NO: 707533 - RNA, 17 nt, Artificial Sequence
  Synthetic
gaugccagaagauggac

SEQ ID NO: 707534 - RNA, 17 nt, Artificial Sequence
  Synthetic
gcccaucagugauggac

SEQ ID NO: 707535 - RNA, 17 nt, Artificial Sequence
  Synthetic
gaaauuugaauauggac

SEQ ID NO: 707536 - RNA, 17 nt, Artificial Sequence
  Synthetic
gucaugagagaguggac

SEQ ID NO: 707537 - RNA, 17 nt, Artificial Sequence
  Synthetic
gaccaucaaugguggac

SEQ ID NO: 707538 - RNA, 17 nt, Artificial Sequence
  Synthetic
gcccauuaaugguggac

SEQ ID NO: 707539 - RNA, 17 nt, Artificial Sequence
  Synthetic
guuuuacuuguuuggac

SEQ ID NO: 707540 - RNA, 17 nt, Artificial Sequence
  Synthetic
guaccaggaaaaaugac

SEQ ID NO: 707541 - RNA, 17 nt, Artificial Sequence
  Synthetic
guguuguugcaaaugac

SEQ ID NO: 707542 - RNA, 17 nt, Artificial Sequence
  Synthetic
gugacacagacaaugac

SEQ ID NO: 707543 - RNA, 17 nt, Artificial Sequence
  Synthetic
gggaaauagacaaugac

SEQ ID NO: 707544 - RNA, 17 nt, Artificial Sequence
  Synthetic
gugcaaaaugcaaugac

SEQ ID NO: 707545 - RNA, 17 nt, Artificial Sequence
  Synthetic
guacuuagaucaaugac

SEQ ID NO: 707546 - RNA, 17 nt, Artificial Sequence
  Synthetic
gauugacaaagaaugac

SEQ ID NO: 707547 - RNA, 17 nt, Artificial Sequence
  Synthetic
gauuaaaauugaaugac

SEQ ID NO: 707548 - RNA, 17 nt, Artificial Sequence
  Synthetic
gcuaacaucauaaugac

SEQ ID NO: 707549 - RNA, 17 nt, Artificial Sequence
  Synthetic
gcuagcaucauaaugac

SEQ ID NO: 707550 - RNA, 17 nt, Artificial Sequence
  Synthetic
ggccucacucacaugac

SEQ ID NO: 707551 - RNA, 17 nt, Artificial Sequence
  Synthetic
gaugcugauuacaugac

SEQ ID NO: 707552 - RNA, 17 nt, Artificial Sequence
  Synthetic
gccaucaguaccaugac

SEQ ID NO: 707553 - RNA, 17 nt, Artificial Sequence
  Synthetic
gaugauuauagcaugac

SEQ ID NO: 707554 - RNA, 17 nt, Artificial Sequence
  Synthetic
gagggcuagaagaugac

SEQ ID NO: 707555 - RNA, 17 nt, Artificial Sequence
  Synthetic
gaaggagaacagaugac

SEQ ID NO: 707556 - RNA, 17 nt, Artificial Sequence
  Synthetic
ggaauucuccugaugac

SEQ ID NO: 707557 - RNA, 17 nt, Artificial Sequence
  Synthetic
guucuuguaaaacugac

SEQ ID NO: 707558 - RNA, 17 nt, Artificial Sequence
  Synthetic
ggcauaaacacacugac

SEQ ID NO: 707559 - RNA, 17 nt, Artificial Sequence
  Synthetic
gguccacacauacugac

SEQ ID NO: 707560 - RNA, 17 nt, Artificial Sequence
  Synthetic
gccacuguuuuacugac

SEQ ID NO: 707561 - RNA, 17 nt, Artificial Sequence
  Synthetic
gccccccacccccugac

SEQ ID NO: 707562 - RNA, 17 nt, Artificial Sequence
  Synthetic
gaaagacacaugcugac

SEQ ID NO: 707563 - RNA, 17 nt, Artificial Sequence
  Synthetic
gccuguggacugcugac

SEQ ID NO: 707564 - RNA, 17 nt, Artificial Sequence
  Synthetic
guggcugcugaucugac

SEQ ID NO: 707565 - RNA, 17 nt, Artificial Sequence
  Synthetic
gugauagccauucugac

SEQ ID NO: 707566 - RNA, 17 nt, Artificial Sequence
  Synthetic
gauagggaaaaagugac

SEQ ID NO: 707567 - RNA, 17 nt, Artificial Sequence
  Synthetic
gccuggugagaggugac

SEQ ID NO: 707568 - RNA, 17 nt, Artificial Sequence
  Synthetic
gccuggugggaggugac

SEQ ID NO: 707569 - RNA, 17 nt, Artificial Sequence
  Synthetic
gagacggugugggugac

SEQ ID NO: 707570 - RNA, 17 nt, Artificial Sequence
  Synthetic
guuuauacuuuggugac

SEQ ID NO: 707571 - RNA, 17 nt, Artificial Sequence
  Synthetic
gcauccugcaaugugac

SEQ ID NO: 707572 - RNA, 17 nt, Artificial Sequence
  Synthetic
gcuucagcccaugugac

SEQ ID NO: 707573 - RNA, 17 nt, Artificial Sequence
  Synthetic
ggcuggagugcugugac

SEQ ID NO: 707574 - RNA, 17 nt, Artificial Sequence
  Synthetic
gaagcuagcucugugac

SEQ ID NO: 707575 - RNA, 17 nt, Artificial Sequence
  Synthetic
gauuuucguucugugac

SEQ ID NO: 707576 - RNA, 17 nt, Artificial Sequence
  Synthetic
gguaauggcuuugugac

SEQ ID NO: 707577 - RNA, 17 nt, Artificial Sequence
  Synthetic
ggggcaaauaaauugac

SEQ ID NO: 707578 - RNA, 17 nt, Artificial Sequence
  Synthetic
gcaugagccaccuugac

SEQ ID NO: 707579 - RNA, 17 nt, Artificial Sequence
  Synthetic
gccccucaccccuugac

SEQ ID NO: 707580 - RNA, 17 nt, Artificial Sequence
  Synthetic
gaugagauuaucuugac

SEQ ID NO: 707581 - RNA, 17 nt, Artificial Sequence
  Synthetic
ggacaagaccucuugac

SEQ ID NO: 707582 - RNA, 17 nt, Artificial Sequence
  Synthetic
gaaaauuaaaaguugac

SEQ ID NO: 707583 - RNA, 17 nt, Artificial Sequence
  Synthetic
guuaacaaaauguugac

SEQ ID NO: 707584 - RNA, 17 nt, Artificial Sequence
  Synthetic
gugccucucuuguugac

SEQ ID NO: 707585 - RNA, 17 nt, Artificial Sequence
  Synthetic
ggcagccagcauuugac

SEQ ID NO: 707586 - RNA, 17 nt, Artificial Sequence
  Synthetic
ggcuucuaauauuugac

SEQ ID NO: 707587 - RNA, 17 nt, Artificial Sequence
  Synthetic
gugaaugagacuuugac

SEQ ID NO: 707588 - RNA, 17 nt, Artificial Sequence
  Synthetic
gucccauucucuuugac

SEQ ID NO: 707589 - RNA, 17 nt, Artificial Sequence
  Synthetic
gagagggagaaaaauac

SEQ ID NO: 707590 - RNA, 17 nt, Artificial Sequence
  Synthetic
gaauacauauaaaauac

SEQ ID NO: 707591 - RNA, 17 nt, Artificial Sequence
  Synthetic
guugccuuauaaaauac

SEQ ID NO: 707592 - RNA, 17 nt, Artificial Sequence
  Synthetic
ggccagaguucaaauac

SEQ ID NO: 707593 - RNA, 17 nt, Artificial Sequence
  Synthetic
gagaagaccagaaauac

SEQ ID NO: 707594 - RNA, 17 nt, Artificial Sequence
  Synthetic
gaagaaaagauaaauac

SEQ ID NO: 707595 - RNA, 17 nt, Artificial Sequence
  Synthetic
gacugcuguuacaauac

SEQ ID NO: 707596 - RNA, 17 nt, Artificial Sequence
  Synthetic
gggacugggggcaauac

SEQ ID NO: 707597 - RNA, 17 nt, Artificial Sequence
  Synthetic
guugagaaguucaauac

SEQ ID NO: 707598 - RNA, 17 nt, Artificial Sequence
  Synthetic
gguaaggcuaagaauac

SEQ ID NO: 707599 - RNA, 17 nt, Artificial Sequence
  Synthetic
guugugcuaucgaauac

SEQ ID NO: 707600 - RNA, 17 nt, Artificial Sequence
  Synthetic
gaagcaauagugaauac

SEQ ID NO: 707601 - RNA, 17 nt, Artificial Sequence
  Synthetic
ggccuauguaauaauac

SEQ ID NO: 707602 - RNA, 17 nt, Artificial Sequence
  Synthetic
gaaaaacaugcuaauac

SEQ ID NO: 707603 - RNA, 17 nt, Artificial Sequence
  Synthetic
ggaaaaucaucuaauac

SEQ ID NO: 707604 - RNA, 17 nt, Artificial Sequence
  Synthetic
gagagagacagacauac

SEQ ID NO: 707605 - RNA, 17 nt, Artificial Sequence
  Synthetic
gcuaaugacuaccauac

SEQ ID NO: 707606 - RNA, 17 nt, Artificial Sequence
  Synthetic
ggcagucccagccauac

SEQ ID NO: 707607 - RNA, 17 nt, Artificial Sequence
  Synthetic
gcacucuugcagcauac

SEQ ID NO: 707608 - RNA, 17 nt, Artificial Sequence
  Synthetic
gacagacacccucauac

SEQ ID NO: 707609 - RNA, 17 nt, Artificial Sequence
  Synthetic
gggaggaagagagauac

SEQ ID NO: 707610 - RNA, 17 nt, Artificial Sequence
  Synthetic
guauuuuaaguagauac

SEQ ID NO: 707611 - RNA, 17 nt, Artificial Sequence
  Synthetic
gaugguagaggggauac

SEQ ID NO: 707612 - RNA, 17 nt, Artificial Sequence
  Synthetic
gcaaagggcauggauac

SEQ ID NO: 707613 - RNA, 17 nt, Artificial Sequence
  Synthetic
gcaucuuucagugauac

SEQ ID NO: 707614 - RNA, 17 nt, Artificial Sequence
  Synthetic
guugaaauacuugauac

SEQ ID NO: 707615 - RNA, 17 nt, Artificial Sequence
  Synthetic
gcccaucaaugauauac

SEQ ID NO: 707616 - RNA, 17 nt, Artificial Sequence
  Synthetic
gcaagugugugauauac

SEQ ID NO: 707617 - RNA, 17 nt, Artificial Sequence
  Synthetic
gugcagguuugcuauac

SEQ ID NO: 707618 - RNA, 17 nt, Artificial Sequence
  Synthetic
ggggccagagaguauac

SEQ ID NO: 707619 - RNA, 17 nt, Artificial Sequence
  Synthetic
gcuuuaagaaauuauac

SEQ ID NO: 707620 - RNA, 17 nt, Artificial Sequence
  Synthetic
gacuggauaauuuauac

SEQ ID NO: 707621 - RNA, 17 nt, Artificial Sequence
  Synthetic
gacugggucauuuauac

SEQ ID NO: 707622 - RNA, 17 nt, Artificial Sequence
  Synthetic
ggaagaugcuacacuac

SEQ ID NO: 707623 - RNA, 17 nt, Artificial Sequence
  Synthetic
gccucagcugggacuac

SEQ ID NO: 707624 - RNA, 17 nt, Artificial Sequence
  Synthetic
guagcugggacuacuac

SEQ ID NO: 707625 - RNA, 17 nt, Artificial Sequence
  Synthetic
gcugugaaauuuacuac

SEQ ID NO: 707626 - RNA, 17 nt, Artificial Sequence
  Synthetic
guaggacagccaccuac

SEQ ID NO: 707627 - RNA, 17 nt, Artificial Sequence
  Synthetic
gaaaaauucuccccuac

SEQ ID NO: 707628 - RNA, 17 nt, Artificial Sequence
  Synthetic
gaggaucagaggccuac

SEQ ID NO: 707629 - RNA, 17 nt, Artificial Sequence
  Synthetic
gggagagcuacuccuac

SEQ ID NO: 707630 - RNA, 17 nt, Artificial Sequence
  Synthetic
ggaguacuuuuuccuac

SEQ ID NO: 707631 - RNA, 17 nt, Artificial Sequence
  Synthetic
gaaaucuuucaagcuac

SEQ ID NO: 707632 - RNA, 17 nt, Artificial Sequence
  Synthetic
ggcaggaucucggcuac

SEQ ID NO: 707633 - RNA, 17 nt, Artificial Sequence
  Synthetic
ggaguagcuggggcuac

SEQ ID NO: 707634 - RNA, 17 nt, Artificial Sequence
  Synthetic
ggaggagaaagugcuac

SEQ ID NO: 707635 - RNA, 17 nt, Artificial Sequence
  Synthetic
gcugcugguagugcuac

SEQ ID NO: 707636 - RNA, 17 nt, Artificial Sequence
  Synthetic
gcuuuuuaaugugcuac

SEQ ID NO: 707637 - RNA, 17 nt, Artificial Sequence
  Synthetic
gcagugccccacucuac

SEQ ID NO: 707638 - RNA, 17 nt, Artificial Sequence
  Synthetic
ggcuugucaaccucuac

SEQ ID NO: 707639 - RNA, 17 nt, Artificial Sequence
  Synthetic
gggguuauauccucuac

SEQ ID NO: 707640 - RNA, 17 nt, Artificial Sequence
  Synthetic
gcucagauuagcucuac

SEQ ID NO: 707641 - RNA, 17 nt, Artificial Sequence
  Synthetic
gauucugcaggcucuac

SEQ ID NO: 707642 - RNA, 17 nt, Artificial Sequence
  Synthetic
ggaaucucaccuucuac

SEQ ID NO: 707643 - RNA, 17 nt, Artificial Sequence
  Synthetic
guugaucucccaaguac

SEQ ID NO: 707644 - RNA, 17 nt, Artificial Sequence
  Synthetic
gagagggagagaaguac

SEQ ID NO: 707645 - RNA, 17 nt, Artificial Sequence
  Synthetic
gggccacagaccaguac

SEQ ID NO: 707646 - RNA, 17 nt, Artificial Sequence
  Synthetic
guuggugagugcaguac

SEQ ID NO: 707647 - RNA, 17 nt, Artificial Sequence
  Synthetic
gugcugccucagaguac

SEQ ID NO: 707648 - RNA, 17 nt, Artificial Sequence
  Synthetic
gaaagauugaggaguac

SEQ ID NO: 707649 - RNA, 17 nt, Artificial Sequence
  Synthetic
gggagaaucacuaguac

SEQ ID NO: 707650 - RNA, 17 nt, Artificial Sequence
  Synthetic
gugacucaugcuaguac

SEQ ID NO: 707651 - RNA, 17 nt, Artificial Sequence
  Synthetic
guacaugaaauuaguac

SEQ ID NO: 707652 - RNA, 17 nt, Artificial Sequence
  Synthetic
gaggugugauuuaguac

SEQ ID NO: 707653 - RNA, 17 nt, Artificial Sequence
  Synthetic
gauaaaugguaagguac

SEQ ID NO: 707654 - RNA, 17 nt, Artificial Sequence
  Synthetic
gauacaaugggggguac

SEQ ID NO: 707655 - RNA, 17 nt, Artificial Sequence
  Synthetic
guaaauuauugggguac

SEQ ID NO: 707656 - RNA, 17 nt, Artificial Sequence
  Synthetic
gacugaaaagaugguac

SEQ ID NO: 707657 - RNA, 17 nt, Artificial Sequence
  Synthetic
gcaaaacagacugguac

SEQ ID NO: 707658 - RNA, 17 nt, Artificial Sequence
  Synthetic
guugauguuggugguac

SEQ ID NO: 707659 - RNA, 17 nt, Artificial Sequence
  Synthetic
gaacuaauauaauguac

SEQ ID NO: 707660 - RNA, 17 nt, Artificial Sequence
  Synthetic
guacuaauuucauguac

SEQ ID NO: 707661 - RNA, 17 nt, Artificial Sequence
  Synthetic
gaaagagugaacuguac

SEQ ID NO: 707662 - RNA, 17 nt, Artificial Sequence
  Synthetic
gguucugcaggcuguac

SEQ ID NO: 707663 - RNA, 17 nt, Artificial Sequence
  Synthetic
gauucugcagguuguac

SEQ ID NO: 707664 - RNA, 17 nt, Artificial Sequence
  Synthetic
gcuuuugaauuuuguac

SEQ ID NO: 707665 - RNA, 17 nt, Artificial Sequence
  Synthetic
ggagaccugugaauuac

SEQ ID NO: 707666 - RNA, 17 nt, Artificial Sequence
  Synthetic
ggagguaauugaauuac

SEQ ID NO: 707667 - RNA, 17 nt, Artificial Sequence
  Synthetic
gccugaugaauaauuac

SEQ ID NO: 707668 - RNA, 17 nt, Artificial Sequence
  Synthetic
gcaaaaaaaaucauuac

SEQ ID NO: 707669 - RNA, 17 nt, Artificial Sequence
  Synthetic
gagugucuucagauuac

SEQ ID NO: 707670 - RNA, 17 nt, Artificial Sequence
  Synthetic
gaaagugcggggauuac

SEQ ID NO: 707671 - RNA, 17 nt, Artificial Sequence
  Synthetic
gaaagugcugggauuac

SEQ ID NO: 707672 - RNA, 17 nt, Artificial Sequence
  Synthetic
ggcugaucuuggauuac

SEQ ID NO: 707673 - RNA, 17 nt, Artificial Sequence
  Synthetic
guuuuccaaaaacuuac

SEQ ID NO: 707674 - RNA, 17 nt, Artificial Sequence
  Synthetic
ggaaauauuaaacuuac

SEQ ID NO: 707675 - RNA, 17 nt, Artificial Sequence
  Synthetic
gcaaagauuacacuuac

SEQ ID NO: 707676 - RNA, 17 nt, Artificial Sequence
  Synthetic
gaauacugaccccuuac

SEQ ID NO: 707677 - RNA, 17 nt, Artificial Sequence
  Synthetic
gggauauuuguucuuac

SEQ ID NO: 707678 - RNA, 17 nt, Artificial Sequence
  Synthetic
guuucaaagucaguuac

SEQ ID NO: 707679 - RNA, 17 nt, Artificial Sequence
  Synthetic
guuaacugacgaguuac

SEQ ID NO: 707680 - RNA, 17 nt, Artificial Sequence
  Synthetic
gcuaaucagauaguuac

SEQ ID NO: 707681 - RNA, 17 nt, Artificial Sequence
  Synthetic
gguguagguauaguuac

SEQ ID NO: 707682 - RNA, 17 nt, Artificial Sequence
  Synthetic
ggaacuguuaugguuac

SEQ ID NO: 707683 - RNA, 17 nt, Artificial Sequence
  Synthetic
gaagagagauugguuac

SEQ ID NO: 707684 - RNA, 17 nt, Artificial Sequence
  Synthetic
gugauaagagauguuac

SEQ ID NO: 707685 - RNA, 17 nt, Artificial Sequence
  Synthetic
guguguucauuuguuac

SEQ ID NO: 707686 - RNA, 17 nt, Artificial Sequence
  Synthetic
guaaauaaccaauuuac

SEQ ID NO: 707687 - RNA, 17 nt, Artificial Sequence
  Synthetic
gaaccauuggaauuuac

SEQ ID NO: 707688 - RNA, 17 nt, Artificial Sequence
  Synthetic
gacaaaagaacauuuac

SEQ ID NO: 707689 - RNA, 17 nt, Artificial Sequence
  Synthetic
gauaacauacucuuuac

SEQ ID NO: 707690 - RNA, 17 nt, Artificial Sequence
  Synthetic
ggagacuuccuguuuac

SEQ ID NO: 707691 - RNA, 17 nt, Artificial Sequence
  Synthetic
gaauuucugaauuuuac

SEQ ID NO: 707692 - RNA, 17 nt, Artificial Sequence
  Synthetic
gggguggacuauuuuac

SEQ ID NO: 707693 - RNA, 17 nt, Artificial Sequence
  Synthetic
ggaguugugccuuuuac

SEQ ID NO: 707694 - RNA, 17 nt, Artificial Sequence
  Synthetic
gacugaguuucuuuuac

SEQ ID NO: 707695 - RNA, 17 nt, Artificial Sequence
  Synthetic
gaaugugcuaguuuuac

SEQ ID NO: 707696 - RNA, 17 nt, Artificial Sequence
  Synthetic
guguggauguuuuuuac

SEQ ID NO: 707697 - RNA, 17 nt, Artificial Sequence
  Synthetic
guaccugcaacaaaacc

SEQ ID NO: 707698 - RNA, 17 nt, Artificial Sequence
  Synthetic
gucagcugaagaaaacc

SEQ ID NO: 707699 - RNA, 17 nt, Artificial Sequence
  Synthetic
gauuuauagagaaaacc

SEQ ID NO: 707700 - RNA, 17 nt, Artificial Sequence
  Synthetic
gugcauaccaccaaacc

SEQ ID NO: 707701 - RNA, 17 nt, Artificial Sequence
  Synthetic
gcgccugccaccaaacc

SEQ ID NO: 707702 - RNA, 17 nt, Artificial Sequence
  Synthetic
gguccucagggcaaacc

SEQ ID NO: 707703 - RNA, 17 nt, Artificial Sequence
  Synthetic
gaagccaucugcaaacc

SEQ ID NO: 707704 - RNA, 17 nt, Artificial Sequence
  Synthetic
guuacuguaaagaaacc

SEQ ID NO: 707705 - RNA, 17 nt, Artificial Sequence
  Synthetic
gggcugcaucagaaacc

SEQ ID NO: 707706 - RNA, 17 nt, Artificial Sequence
  Synthetic
gagguccuaaggaaacc

SEQ ID NO: 707707 - RNA, 17 nt, Artificial Sequence
  Synthetic
gacauauugaguaaacc

SEQ ID NO: 707708 - RNA, 17 nt, Artificial Sequence
  Synthetic
ggagaauggcguaaacc

SEQ ID NO: 707709 - RNA, 17 nt, Artificial Sequence
  Synthetic
ggagaucgagaacaacc

SEQ ID NO: 707710 - RNA, 17 nt, Artificial Sequence
  Synthetic
gacuuuaugacacaacc

SEQ ID NO: 707711 - RNA, 17 nt, Artificial Sequence
  Synthetic
gaauuuucaccacaacc

SEQ ID NO: 707712 - RNA, 17 nt, Artificial Sequence
  Synthetic
gaaucuguaagacaacc

SEQ ID NO: 707713 - RNA, 17 nt, Artificial Sequence
  Synthetic
gaccagccuggccaacc

SEQ ID NO: 707714 - RNA, 17 nt, Artificial Sequence
  Synthetic
gccacugcacuccaacc

SEQ ID NO: 707715 - RNA, 17 nt, Artificial Sequence
  Synthetic
gaaaccauccuccaacc

SEQ ID NO: 707716 - RNA, 17 nt, Artificial Sequence
  Synthetic
gccacugcgcuccaacc

SEQ ID NO: 707717 - RNA, 17 nt, Artificial Sequence
  Synthetic
gccacuggauuccaacc

SEQ ID NO: 707718 - RNA, 17 nt, Artificial Sequence
  Synthetic
gaaguucaagagcaacc

SEQ ID NO: 707719 - RNA, 17 nt, Artificial Sequence
  Synthetic
gagaagguuuugcaacc

SEQ ID NO: 707720 - RNA, 17 nt, Artificial Sequence
  Synthetic
ggagcuuaagaucaacc

SEQ ID NO: 707721 - RNA, 17 nt, Artificial Sequence
  Synthetic
gauuggaaaggucaacc

SEQ ID NO: 707722 - RNA, 17 nt, Artificial Sequence
  Synthetic
gucucgcucugucaacc

SEQ ID NO: 707723 - RNA, 17 nt, Artificial Sequence
  Synthetic
gugaaauauaaagaacc

SEQ ID NO: 707724 - RNA, 17 nt, Artificial Sequence
  Synthetic
gacugauaaggagaacc

SEQ ID NO: 707725 - RNA, 17 nt, Artificial Sequence
  Synthetic
gagauggggcuagaacc

SEQ ID NO: 707726 - RNA, 17 nt, Artificial Sequence
  Synthetic
ggggaaucacucgaacc

SEQ ID NO: 707727 - RNA, 17 nt, Artificial Sequence
  Synthetic
gaagaauugcucgaacc

SEQ ID NO: 707728 - RNA, 17 nt, Artificial Sequence
  Synthetic
ggagaguugcucgaacc

SEQ ID NO: 707729 - RNA, 17 nt, Artificial Sequence
  Synthetic
gguaaaggcaaggaacc

SEQ ID NO: 707730 - RNA, 17 nt, Artificial Sequence
  Synthetic
guuaugagccaggaacc

SEQ ID NO: 707731 - RNA, 17 nt, Artificial Sequence
  Synthetic
gauugcaaagaggaacc

SEQ ID NO: 707732 - RNA, 17 nt, Artificial Sequence
  Synthetic
guaaaaauugaggaacc

SEQ ID NO: 707733 - RNA, 17 nt, Artificial Sequence
  Synthetic
gugaccuguuaggaacc

SEQ ID NO: 707734 - RNA, 17 nt, Artificial Sequence
  Synthetic
gguuccacgguggaacc

SEQ ID NO: 707735 - RNA, 17 nt, Artificial Sequence
  Synthetic
gcagucaucuuggaacc

SEQ ID NO: 707736 - RNA, 17 nt, Artificial Sequence
  Synthetic
ggagaauggcaugaacc

SEQ ID NO: 707737 - RNA, 17 nt, Artificial Sequence
  Synthetic
gacagcguggaugaacc

SEQ ID NO: 707738 - RNA, 17 nt, Artificial Sequence
  Synthetic
gacaauauguaugaacc

SEQ ID NO: 707739 - RNA, 17 nt, Artificial Sequence
  Synthetic
ggcaccuucccugaacc

SEQ ID NO: 707740 - RNA, 17 nt, Artificial Sequence
  Synthetic
guuaaccucgcugaacc

SEQ ID NO: 707741 - RNA, 17 nt, Artificial Sequence
  Synthetic
ggcuucuuugcugaacc

SEQ ID NO: 707742 - RNA, 17 nt, Artificial Sequence
  Synthetic
ggagaaaggcgugaacc

SEQ ID NO: 707743 - RNA, 17 nt, Artificial Sequence
  Synthetic
ggagaauggcgugaacc

SEQ ID NO: 707744 - RNA, 17 nt, Artificial Sequence
  Synthetic
ggaaaauggugugaacc

SEQ ID NO: 707745 - RNA, 17 nt, Artificial Sequence
  Synthetic
ggagaaccacuugaacc

SEQ ID NO: 707746 - RNA, 17 nt, Artificial Sequence
  Synthetic
gaagaaucacuugaacc

SEQ ID NO: 707747 - RNA, 17 nt, Artificial Sequence
  Synthetic
ggagaaucacuugaacc

SEQ ID NO: 707748 - RNA, 17 nt, Artificial Sequence
  Synthetic
ggagaaucccuugaacc

SEQ ID NO: 707749 - RNA, 17 nt, Artificial Sequence
  Synthetic
ggaggauagcuugaacc

SEQ ID NO: 707750 - RNA, 17 nt, Artificial Sequence
  Synthetic
ggagaaucgcuugaacc

SEQ ID NO: 707751 - RNA, 17 nt, Artificial Sequence
  Synthetic
ggggaaucgcuugaacc

SEQ ID NO: 707752 - RNA, 17 nt, Artificial Sequence
  Synthetic
ggaggaucgcuugaacc

SEQ ID NO: 707753 - RNA, 17 nt, Artificial Sequence
  Synthetic
gcagaauugcuugaacc

SEQ ID NO: 707754 - RNA, 17 nt, Artificial Sequence
  Synthetic
ggagaauugcuugaacc

SEQ ID NO: 707755 - RNA, 17 nt, Artificial Sequence
  Synthetic
ggaagauugcuugaacc

SEQ ID NO: 707756 - RNA, 17 nt, Artificial Sequence
  Synthetic
ggagaaucauuugaacc

SEQ ID NO: 707757 - RNA, 17 nt, Artificial Sequence
  Synthetic
ggagaauuguuugaacc

SEQ ID NO: 707758 - RNA, 17 nt, Artificial Sequence
  Synthetic
ggagaaucuuuugaacc

SEQ ID NO: 707759 - RNA, 17 nt, Artificial Sequence
  Synthetic
gccauugcacucuaacc

SEQ ID NO: 707760 - RNA, 17 nt, Artificial Sequence
  Synthetic
guagaaugauaguaacc

SEQ ID NO: 707761 - RNA, 17 nt, Artificial Sequence
  Synthetic
gcuguuguucuuuaacc

SEQ ID NO: 707762 - RNA, 17 nt, Artificial Sequence
  Synthetic
gcgcccaccacaacacc

SEQ ID NO: 707763 - RNA, 17 nt, Artificial Sequence
  Synthetic
gcagcaucaugaacacc

SEQ ID NO: 707764 - RNA, 17 nt, Artificial Sequence
  Synthetic
gaauuauccugaacacc

SEQ ID NO: 707765 - RNA, 17 nt, Artificial Sequence
  Synthetic
ggggaacaucacacacc

SEQ ID NO: 707766 - RNA, 17 nt, Artificial Sequence
  Synthetic
gcacccaccaccacacc

SEQ ID NO: 707767 - RNA, 17 nt, Artificial Sequence
  Synthetic
gugcccaccaccacacc

SEQ ID NO: 707768 - RNA, 17 nt, Artificial Sequence
  Synthetic
gcucgcaccaccacacc

SEQ ID NO: 707769 - RNA, 17 nt, Artificial Sequence
  Synthetic
gcacucaccaccacacc

SEQ ID NO: 707770 - RNA, 17 nt, Artificial Sequence
  Synthetic
gcgagagccaccacacc

SEQ ID NO: 707771 - RNA, 17 nt, Artificial Sequence
  Synthetic
gcaugagccaccacacc

SEQ ID NO: 707772 - RNA, 17 nt, Artificial Sequence
  Synthetic
gcgugagccaccacacc

SEQ ID NO: 707773 - RNA, 17 nt, Artificial Sequence
  Synthetic
gugugagccaccacacc

SEQ ID NO: 707774 - RNA, 17 nt, Artificial Sequence
  Synthetic
gcgugugccaccacacc

SEQ ID NO: 707775 - RNA, 17 nt, Artificial Sequence
  Synthetic
gcguacuccaccacacc

SEQ ID NO: 707776 - RNA, 17 nt, Artificial Sequence
  Synthetic
gugcccacccccacacc

SEQ ID NO: 707777 - RNA, 17 nt, Artificial Sequence
  Synthetic
gcgcccaccgccacacc

SEQ ID NO: 707778 - RNA, 17 nt, Artificial Sequence
  Synthetic
gagccuaccagcacacc

SEQ ID NO: 707779 - RNA, 17 nt, Artificial Sequence
  Synthetic
guauggaacaucacacc

SEQ ID NO: 707780 - RNA, 17 nt, Artificial Sequence
  Synthetic
gcaacagugaucacacc

SEQ ID NO: 707781 - RNA, 17 nt, Artificial Sequence
  Synthetic
gucccuuccuucacacc

SEQ ID NO: 707782 - RNA, 17 nt, Artificial Sequence
  Synthetic
gagaacacauggacacc

SEQ ID NO: 707783 - RNA, 17 nt, Artificial Sequence
  Synthetic
gucccucccaugacacc

SEQ ID NO: 707784 - RNA, 17 nt, Artificial Sequence
  Synthetic
gccucuccuuugacacc

SEQ ID NO: 707785 - RNA, 17 nt, Artificial Sequence
  Synthetic
gcaugagccacuacacc

SEQ ID NO: 707786 - RNA, 17 nt, Artificial Sequence
  Synthetic
gagauuuugucaccacc

SEQ ID NO: 707787 - RNA, 17 nt, Artificial Sequence
  Synthetic
gugauuuugucaccacc

SEQ ID NO: 707788 - RNA, 17 nt, Artificial Sequence
  Synthetic
ggugcucuggcgccacc

SEQ ID NO: 707789 - RNA, 17 nt, Artificial Sequence
  Synthetic
gggagaauaaauccacc

SEQ ID NO: 707790 - RNA, 17 nt, Artificial Sequence
  Synthetic
ggaaauguugcuccacc

SEQ ID NO: 707791 - RNA, 17 nt, Artificial Sequence
  Synthetic
gcauucuucacagcacc

SEQ ID NO: 707792 - RNA, 17 nt, Artificial Sequence
  Synthetic
gaagaacugacagcacc

SEQ ID NO: 707793 - RNA, 17 nt, Artificial Sequence
  Synthetic
gagaccuuaguagcacc

SEQ ID NO: 707794 - RNA, 17 nt, Artificial Sequence
  Synthetic
gcaugagccaccgcacc

SEQ ID NO: 707795 - RNA, 17 nt, Artificial Sequence
  Synthetic
gcgugagccaccgcacc

SEQ ID NO: 707796 - RNA, 17 nt, Artificial Sequence
  Synthetic
gcaugagccagcgcacc

SEQ ID NO: 707797 - RNA, 17 nt, Artificial Sequence
  Synthetic
gugugacuccaggcacc

SEQ ID NO: 707798 - RNA, 17 nt, Artificial Sequence
  Synthetic
gcaugagccacugcacc

SEQ ID NO: 707799 - RNA, 17 nt, Artificial Sequence
  Synthetic
gcgugagccacugcacc

SEQ ID NO: 707800 - RNA, 17 nt, Artificial Sequence
  Synthetic
gugugagccacugcacc

SEQ ID NO: 707801 - RNA, 17 nt, Artificial Sequence
  Synthetic
ggcugcgccacugcacc

SEQ ID NO: 707802 - RNA, 17 nt, Artificial Sequence
  Synthetic
gugugaggcacugcacc

SEQ ID NO: 707803 - RNA, 17 nt, Artificial Sequence
  Synthetic
gcgugaaacauugcacc

SEQ ID NO: 707804 - RNA, 17 nt, Artificial Sequence
  Synthetic
ggaaaguuucuugcacc

SEQ ID NO: 707805 - RNA, 17 nt, Artificial Sequence
  Synthetic
ggaucaacagaaucacc

SEQ ID NO: 707806 - RNA, 17 nt, Artificial Sequence
  Synthetic
gcagcaucagcaucacc

SEQ ID NO: 707807 - RNA, 17 nt, Artificial Sequence
  Synthetic
gcaugagugucaucacc

SEQ ID NO: 707808 - RNA, 17 nt, Artificial Sequence
  Synthetic
gcagcaucaguaucacc

SEQ ID NO: 707809 - RNA, 17 nt, Artificial Sequence
  Synthetic
gcgugagccaccucacc

SEQ ID NO: 707810 - RNA, 17 nt, Artificial Sequence
  Synthetic
gaagaggggcccucacc

SEQ ID NO: 707811 - RNA, 17 nt, Artificial Sequence
  Synthetic
gucucaguuuucucacc

SEQ ID NO: 707812 - RNA, 17 nt, Artificial Sequence
  Synthetic
gacaugaaauagucacc

SEQ ID NO: 707813 - RNA, 17 nt, Artificial Sequence
  Synthetic
ggucuugcucugucacc

SEQ ID NO: 707814 - RNA, 17 nt, Artificial Sequence
  Synthetic
ggagcaggcacuucacc

SEQ ID NO: 707815 - RNA, 17 nt, Artificial Sequence
  Synthetic
gagguagcuucuucacc

SEQ ID NO: 707816 - RNA, 17 nt, Artificial Sequence
  Synthetic
guuucaccauguucacc

SEQ ID NO: 707817 - RNA, 17 nt, Artificial Sequence
  Synthetic
gagucugcucuuucacc

SEQ ID NO: 707818 - RNA, 17 nt, Artificial Sequence
  Synthetic
gagggagggaaaagacc

SEQ ID NO: 707819 - RNA, 17 nt, Artificial Sequence
  Synthetic
gcaacagucuaaagacc

SEQ ID NO: 707820 - RNA, 17 nt, Artificial Sequence
  Synthetic
guuuauacaacaagacc

SEQ ID NO: 707821 - RNA, 17 nt, Artificial Sequence
  Synthetic
gcucuaaaaugaagacc

SEQ ID NO: 707822 - RNA, 17 nt, Artificial Sequence
  Synthetic
gaaaggugcugaagacc

SEQ ID NO: 707823 - RNA, 17 nt, Artificial Sequence
  Synthetic
guaggaaucaacagacc

SEQ ID NO: 707824 - RNA, 17 nt, Artificial Sequence
  Synthetic
gucaagggagagagacc

SEQ ID NO: 707825 - RNA, 17 nt, Artificial Sequence
  Synthetic
gugucaagggagagacc

SEQ ID NO: 707826 - RNA, 17 nt, Artificial Sequence
  Synthetic
gcagacugcuugagacc

SEQ ID NO: 707827 - RNA, 17 nt, Artificial Sequence
  Synthetic
guacaugccuguagacc

SEQ ID NO: 707828 - RNA, 17 nt, Artificial Sequence
  Synthetic
gccagauaaugaggacc

SEQ ID NO: 707829 - RNA, 17 nt, Artificial Sequence
  Synthetic
guuaaaucaguaggacc

SEQ ID NO: 707830 - RNA, 17 nt, Artificial Sequence
  Synthetic
gcagcagaagacggacc

SEQ ID NO: 707831 - RNA, 17 nt, Artificial Sequence
  Synthetic
gccgcuggugagggacc

SEQ ID NO: 707832 - RNA, 17 nt, Artificial Sequence
  Synthetic
ggguugggggggggacc

SEQ ID NO: 707833 - RNA, 17 nt, Artificial Sequence
  Synthetic
ggauuuuauaugggacc

SEQ ID NO: 707834 - RNA, 17 nt, Artificial Sequence
  Synthetic
ggaccuggccugggacc

SEQ ID NO: 707835 - RNA, 17 nt, Artificial Sequence
  Synthetic
ggggcacugcugggacc

SEQ ID NO: 707836 - RNA, 17 nt, Artificial Sequence
  Synthetic
gcagucugaaguggacc

SEQ ID NO: 707837 - RNA, 17 nt, Artificial Sequence
  Synthetic
gaugcuuaagaaugacc

SEQ ID NO: 707838 - RNA, 17 nt, Artificial Sequence
  Synthetic
gcaauaucagcaugacc

SEQ ID NO: 707839 - RNA, 17 nt, Artificial Sequence
  Synthetic
gucugugguuccugacc

SEQ ID NO: 707840 - RNA, 17 nt, Artificial Sequence
  Synthetic
gugucaugggagugacc

SEQ ID NO: 707841 - RNA, 17 nt, Artificial Sequence
  Synthetic
gggcuacagaggugacc

SEQ ID NO: 707842 - RNA, 17 nt, Artificial Sequence
  Synthetic
gaugaguaagggugacc

SEQ ID NO: 707843 - RNA, 17 nt, Artificial Sequence
  Synthetic
gaaaaguggaugugacc

SEQ ID NO: 707844 - RNA, 17 nt, Artificial Sequence
  Synthetic
gacaaaaucaauugacc

SEQ ID NO: 707845 - RNA, 17 nt, Artificial Sequence
  Synthetic
guuucaucaaguugacc

SEQ ID NO: 707846 - RNA, 17 nt, Artificial Sequence
  Synthetic
gcuucaccauguugacc

SEQ ID NO: 707847 - RNA, 17 nt, Artificial Sequence
  Synthetic
guuucaccauguugacc

SEQ ID NO: 707848 - RNA, 17 nt, Artificial Sequence
  Synthetic
guuuggccauguugacc

SEQ ID NO: 707849 - RNA, 17 nt, Artificial Sequence
  Synthetic
ggaggcugaauuugacc

SEQ ID NO: 707850 - RNA, 17 nt, Artificial Sequence
  Synthetic
gcauguaaacuuugacc

SEQ ID NO: 707851 - RNA, 17 nt, Artificial Sequence
  Synthetic
gcacauuuucaaauacc

SEQ ID NO: 707852 - RNA, 17 nt, Artificial Sequence
  Synthetic
gacaaagggcuaauacc

SEQ ID NO: 707853 - RNA, 17 nt, Artificial Sequence
  Synthetic
guacuacgcuuaauacc

SEQ ID NO: 707854 - RNA, 17 nt, Artificial Sequence
  Synthetic
guacauccauacauacc

SEQ ID NO: 707855 - RNA, 17 nt, Artificial Sequence
  Synthetic
gaccugugaccuauacc

SEQ ID NO: 707856 - RNA, 17 nt, Artificial Sequence
  Synthetic
gcacauauaccuauacc

SEQ ID NO: 707857 - RNA, 17 nt, Artificial Sequence
  Synthetic
gcagcccucaguauacc

SEQ ID NO: 707858 - RNA, 17 nt, Artificial Sequence
  Synthetic
guacuaugcuuacuacc

SEQ ID NO: 707859 - RNA, 17 nt, Artificial Sequence
  Synthetic
gcaggaucucggcuacc

SEQ ID NO: 707860 - RNA, 17 nt, Artificial Sequence
  Synthetic
guagcaaaaucaguacc

SEQ ID NO: 707861 - RNA, 17 nt, Artificial Sequence
  Synthetic
gccaucaguauaguacc

SEQ ID NO: 707862 - RNA, 17 nt, Artificial Sequence
  Synthetic
gaacagcgcuuaguacc

SEQ ID NO: 707863 - RNA, 17 nt, Artificial Sequence
  Synthetic
guuuuguugcagguacc

SEQ ID NO: 707864 - RNA, 17 nt, Artificial Sequence
  Synthetic
gauucaguagcuguacc

SEQ ID NO: 707865 - RNA, 17 nt, Artificial Sequence
  Synthetic
ggaaaggaugcuguacc

SEQ ID NO: 707866 - RNA, 17 nt, Artificial Sequence
  Synthetic
gugcaauaugcuguacc

SEQ ID NO: 707867 - RNA, 17 nt, Artificial Sequence
  Synthetic
gaaaaagaaauuguacc

SEQ ID NO: 707868 - RNA, 17 nt, Artificial Sequence
  Synthetic
gccuaagaaauuguacc

SEQ ID NO: 707869 - RNA, 17 nt, Artificial Sequence
  Synthetic
ggccacaucaaauuacc

SEQ ID NO: 707870 - RNA, 17 nt, Artificial Sequence
  Synthetic
guauaccauaaauuacc

SEQ ID NO: 707871 - RNA, 17 nt, Artificial Sequence
  Synthetic
gaucuauauacauuacc

SEQ ID NO: 707872 - RNA, 17 nt, Artificial Sequence
  Synthetic
guuuaagacagauuacc

SEQ ID NO: 707873 - RNA, 17 nt, Artificial Sequence
  Synthetic
gcugagauuagauuacc

SEQ ID NO: 707874 - RNA, 17 nt, Artificial Sequence
  Synthetic
guacaaucucauuuacc

SEQ ID NO: 707875 - RNA, 17 nt, Artificial Sequence
  Synthetic
gaguccauugcuuuacc

SEQ ID NO: 707876 - RNA, 17 nt, Artificial Sequence
  Synthetic
gaugucagcaguuuacc

SEQ ID NO: 707877 - RNA, 17 nt, Artificial Sequence
  Synthetic
guacuaccauaaaaccc

SEQ ID NO: 707878 - RNA, 17 nt, Artificial Sequence
  Synthetic
gagaauggcguaaaccc

SEQ ID NO: 707879 - RNA, 17 nt, Artificial Sequence
  Synthetic
gagaaccgcuucaaccc

SEQ ID NO: 707880 - RNA, 17 nt, Artificial Sequence
  Synthetic
gugcuggagcagaaccc

SEQ ID NO: 707881 - RNA, 17 nt, Artificial Sequence
  Synthetic
gagaauggcgcgaaccc

SEQ ID NO: 707882 - RNA, 17 nt, Artificial Sequence
  Synthetic
gagaguugcucgaaccc

SEQ ID NO: 707883 - RNA, 17 nt, Artificial Sequence
  Synthetic
gagaaucacuggaaccc

SEQ ID NO: 707884 - RNA, 17 nt, Artificial Sequence
  Synthetic
gagaauggcaugaaccc

SEQ ID NO: 707885 - RNA, 17 nt, Artificial Sequence
  Synthetic
ggccuaggagugaaccc

SEQ ID NO: 707886 - RNA, 17 nt, Artificial Sequence
  Synthetic
gagaauggcgugaaccc

SEQ ID NO: 707887 - RNA, 17 nt, Artificial Sequence
  Synthetic
gaaaauggugugaaccc

SEQ ID NO: 707888 - RNA, 17 nt, Artificial Sequence
  Synthetic
gagaaucacuugaaccc

SEQ ID NO: 707889 - RNA, 17 nt, Artificial Sequence
  Synthetic
gagaaucccuugaaccc

SEQ ID NO: 707890 - RNA, 17 nt, Artificial Sequence
  Synthetic
gaggauuccuugaaccc

SEQ ID NO: 707891 - RNA, 17 nt, Artificial Sequence
  Synthetic
gaggauagcuugaaccc

SEQ ID NO: 707892 - RNA, 17 nt, Artificial Sequence
  Synthetic
gagaaucgcuugaaccc

SEQ ID NO: 707893 - RNA, 17 nt, Artificial Sequence
  Synthetic
gggaaucgcuugaaccc

SEQ ID NO: 707894 - RNA, 17 nt, Artificial Sequence
  Synthetic
gagaauugcuugaaccc

SEQ ID NO: 707895 - RNA, 17 nt, Artificial Sequence
  Synthetic
gagaaucauuugaaccc

SEQ ID NO: 707896 - RNA, 17 nt, Artificial Sequence
  Synthetic
gagaaucguuugaaccc

SEQ ID NO: 707897 - RNA, 17 nt, Artificial Sequence
  Synthetic
gagaaucuuuugaaccc

SEQ ID NO: 707898 - RNA, 17 nt, Artificial Sequence
  Synthetic
gucugauaagauaaccc

SEQ ID NO: 707899 - RNA, 17 nt, Artificial Sequence
  Synthetic
gucuuggguuauaaccc

SEQ ID NO: 707900 - RNA, 17 nt, Artificial Sequence
  Synthetic
gcgcacugggguaaccc

SEQ ID NO: 707901 - RNA, 17 nt, Artificial Sequence
  Synthetic
gucucacccuguaaccc

SEQ ID NO: 707902 - RNA, 17 nt, Artificial Sequence
  Synthetic
gaaugaucccaccaccc

SEQ ID NO: 707903 - RNA, 17 nt, Artificial Sequence
  Synthetic
gggugugauggccaccc

SEQ ID NO: 707904 - RNA, 17 nt, Artificial Sequence
  Synthetic
gaauggcacugccaccc

SEQ ID NO: 707905 - RNA, 17 nt, Artificial Sequence
  Synthetic
gucucacucugccaccc

SEQ ID NO: 707906 - RNA, 17 nt, Artificial Sequence
  Synthetic
gccacugcacuccaccc

SEQ ID NO: 707907 - RNA, 17 nt, Artificial Sequence
  Synthetic
gagaaucucuuccaccc

SEQ ID NO: 707908 - RNA, 17 nt, Artificial Sequence
  Synthetic
ggguuuuuuaaucaccc

SEQ ID NO: 707909 - RNA, 17 nt, Artificial Sequence
  Synthetic
gaaugaccccaucaccc

SEQ ID NO: 707910 - RNA, 17 nt, Artificial Sequence
  Synthetic
gucuugcuccaucaccc

SEQ ID NO: 707911 - RNA, 17 nt, Artificial Sequence
  Synthetic
guguggugauaucaccc

SEQ ID NO: 707912 - RNA, 17 nt, Artificial Sequence
  Synthetic
gucuugaucuaucaccc

SEQ ID NO: 707913 - RNA, 17 nt, Artificial Sequence
  Synthetic
gggaugucgccucaccc

SEQ ID NO: 707914 - RNA, 17 nt, Artificial Sequence
  Synthetic
gucucacuacgucaccc

SEQ ID NO: 707915 - RNA, 17 nt, Artificial Sequence
  Synthetic
gucuugcugggucaccc

SEQ ID NO: 707916 - RNA, 17 nt, Artificial Sequence
  Synthetic
gagucucacugucaccc

SEQ ID NO: 707917 - RNA, 17 nt, Artificial Sequence
  Synthetic
gucauacccugucaccc

SEQ ID NO: 707918 - RNA, 17 nt, Artificial Sequence
  Synthetic
gucucacucugucaccc

SEQ ID NO: 707919 - RNA, 17 nt, Artificial Sequence
  Synthetic
gucuuacucugucaccc

SEQ ID NO: 707920 - RNA, 17 nt, Artificial Sequence
  Synthetic
gucuagcucugucaccc

SEQ ID NO: 707921 - RNA, 17 nt, Artificial Sequence
  Synthetic
gucucgcucugucaccc

SEQ ID NO: 707922 - RNA, 17 nt, Artificial Sequence
  Synthetic
gccuugcucugucaccc

SEQ ID NO: 707923 - RNA, 17 nt, Artificial Sequence
  Synthetic
gucuugcucugucaccc

SEQ ID NO: 707924 - RNA, 17 nt, Artificial Sequence
  Synthetic
guuuugcucugucaccc

SEQ ID NO: 707925 - RNA, 17 nt, Artificial Sequence
  Synthetic
gucucguucugucaccc

SEQ ID NO: 707926 - RNA, 17 nt, Artificial Sequence
  Synthetic
gucucacugugucaccc

SEQ ID NO: 707927 - RNA, 17 nt, Artificial Sequence
  Synthetic
gucucacuuugucaccc

SEQ ID NO: 707928 - RNA, 17 nt, Artificial Sequence
  Synthetic
gucuauuucauucaccc

SEQ ID NO: 707929 - RNA, 17 nt, Artificial Sequence
  Synthetic
ggaaccacaaaagaccc

SEQ ID NO: 707930 - RNA, 17 nt, Artificial Sequence
  Synthetic
gagagcuauccagaccc

SEQ ID NO: 707931 - RNA, 17 nt, Artificial Sequence
  Synthetic
guugcagcaagggaccc

SEQ ID NO: 707932 - RNA, 17 nt, Artificial Sequence
  Synthetic
ggacacaaaaaauaccc

SEQ ID NO: 707933 - RNA, 17 nt, Artificial Sequence
  Synthetic
ggcagcacaccauaccc

SEQ ID NO: 707934 - RNA, 17 nt, Artificial Sequence
  Synthetic
gaaggugcaggcuaccc

SEQ ID NO: 707935 - RNA, 17 nt, Artificial Sequence
  Synthetic
gcauauuuauguuaccc

SEQ ID NO: 707936 - RNA, 17 nt, Artificial Sequence
  Synthetic
gucucacucuguuaccc

SEQ ID NO: 707937 - RNA, 17 nt, Artificial Sequence
  Synthetic
gucucgcuguguuaccc

SEQ ID NO: 707938 - RNA, 17 nt, Artificial Sequence
  Synthetic
gucuggagaauuuaccc

SEQ ID NO: 707939 - RNA, 17 nt, Artificial Sequence
  Synthetic
gacuucuguccaacccc

SEQ ID NO: 707940 - RNA, 17 nt, Artificial Sequence
  Synthetic
gugaaccauggaacccc

SEQ ID NO: 707941 - RNA, 17 nt, Artificial Sequence
  Synthetic
guugaaguccuaacccc

SEQ ID NO: 707942 - RNA, 17 nt, Artificial Sequence
  Synthetic
gagaaucacuugacccc

SEQ ID NO: 707943 - RNA, 17 nt, Artificial Sequence
  Synthetic
guggugauucauacccc

SEQ ID NO: 707944 - RNA, 17 nt, Artificial Sequence
  Synthetic
gguggcuggcuuacccc

SEQ ID NO: 707945 - RNA, 17 nt, Artificial Sequence
  Synthetic
gagucacucuuuacccc

SEQ ID NO: 707946 - RNA, 17 nt, Artificial Sequence
  Synthetic
ggagugucagaaccccc

SEQ ID NO: 707947 - RNA, 17 nt, Artificial Sequence
  Synthetic
guguggcaaccuccccc

SEQ ID NO: 707948 - RNA, 17 nt, Artificial Sequence
  Synthetic
gcccuauccccagcccc

SEQ ID NO: 707949 - RNA, 17 nt, Artificial Sequence
  Synthetic
gucuggaauggagcccc

SEQ ID NO: 707950 - RNA, 17 nt, Artificial Sequence
  Synthetic
gagauggggcaggcccc

SEQ ID NO: 707951 - RNA, 17 nt, Artificial Sequence
  Synthetic
gcaacaauaguaucccc

SEQ ID NO: 707952 - RNA, 17 nt, Artificial Sequence
  Synthetic
gcuucauuccauucccc

SEQ ID NO: 707953 - RNA, 17 nt, Artificial Sequence
  Synthetic
gaguugcucuauucccc

SEQ ID NO: 707954 - RNA, 17 nt, Artificial Sequence
  Synthetic
gcuaauguccuuucccc

SEQ ID NO: 707955 - RNA, 17 nt, Artificial Sequence
  Synthetic
gugacaacagaaagccc

SEQ ID NO: 707956 - RNA, 17 nt, Artificial Sequence
  Synthetic
gacugauuccacagccc

SEQ ID NO: 707957 - RNA, 17 nt, Artificial Sequence
  Synthetic
gcaaggguccccagccc

SEQ ID NO: 707958 - RNA, 17 nt, Artificial Sequence
  Synthetic
gcacaaauuugcagccc

SEQ ID NO: 707959 - RNA, 17 nt, Artificial Sequence
  Synthetic
gguggcaaauucagccc

SEQ ID NO: 707960 - RNA, 17 nt, Artificial Sequence
  Synthetic
guggaucacuucagccc

SEQ ID NO: 707961 - RNA, 17 nt, Artificial Sequence
  Synthetic
ggggaucacccgagccc

SEQ ID NO: 707962 - RNA, 17 nt, Artificial Sequence
  Synthetic
gaggaucaccugagccc

SEQ ID NO: 707963 - RNA, 17 nt, Artificial Sequence
  Synthetic
gaggaucaucugagccc

SEQ ID NO: 707964 - RNA, 17 nt, Artificial Sequence
  Synthetic
gauuaucgauugagccc

SEQ ID NO: 707965 - RNA, 17 nt, Artificial Sequence
  Synthetic
gaggaucacuugagccc

SEQ ID NO: 707966 - RNA, 17 nt, Artificial Sequence
  Synthetic
gagggucacuugagccc

SEQ ID NO: 707967 - RNA, 17 nt, Artificial Sequence
  Synthetic
gagaauuacuugagccc

SEQ ID NO: 707968 - RNA, 17 nt, Artificial Sequence
  Synthetic
gagaaucgcuugagccc

SEQ ID NO: 707969 - RNA, 17 nt, Artificial Sequence
  Synthetic
gaggaucgcuugagccc

SEQ ID NO: 707970 - RNA, 17 nt, Artificial Sequence
  Synthetic
gagaacugcuugagccc

SEQ ID NO: 707971 - RNA, 17 nt, Artificial Sequence
  Synthetic
gaggacugcuugagccc

SEQ ID NO: 707972 - RNA, 17 nt, Artificial Sequence
  Synthetic
guggacugcuugagccc

SEQ ID NO: 707973 - RNA, 17 nt, Artificial Sequence
  Synthetic
gaggauugcuugagccc

SEQ ID NO: 707974 - RNA, 17 nt, Artificial Sequence
  Synthetic
gaggaucucuugagccc

SEQ ID NO: 707975 - RNA, 17 nt, Artificial Sequence
  Synthetic
gagaauuucuugagccc

SEQ ID NO: 707976 - RNA, 17 nt, Artificial Sequence
  Synthetic
gugaucauauuuagccc

SEQ ID NO: 707977 - RNA, 17 nt, Artificial Sequence
  Synthetic
gucucgcuccaucgccc

SEQ ID NO: 707978 - RNA, 17 nt, Artificial Sequence
  Synthetic
gucuugcucagucgccc

SEQ ID NO: 707979 - RNA, 17 nt, Artificial Sequence
  Synthetic
gucucacucugucgccc

SEQ ID NO: 707980 - RNA, 17 nt, Artificial Sequence
  Synthetic
gucucccucugucgccc

SEQ ID NO: 707981 - RNA, 17 nt, Artificial Sequence
  Synthetic
gucucgcucugucgccc

SEQ ID NO: 707982 - RNA, 17 nt, Artificial Sequence
  Synthetic
guuucgcucugucgccc

SEQ ID NO: 707983 - RNA, 17 nt, Artificial Sequence
  Synthetic
gucuggcucugucgccc

SEQ ID NO: 707984 - RNA, 17 nt, Artificial Sequence
  Synthetic
gucuugcucugucgccc

SEQ ID NO: 707985 - RNA, 17 nt, Artificial Sequence
  Synthetic
guuuugcucugucgccc

SEQ ID NO: 707986 - RNA, 17 nt, Artificial Sequence
  Synthetic
gccucuuucugucgccc

SEQ ID NO: 707987 - RNA, 17 nt, Artificial Sequence
  Synthetic
gucucgcucuuucgccc

SEQ ID NO: 707988 - RNA, 17 nt, Artificial Sequence
  Synthetic
guuucgcucuuucgccc

SEQ ID NO: 707989 - RNA, 17 nt, Artificial Sequence
  Synthetic
guggaaacaacaggccc

SEQ ID NO: 707990 - RNA, 17 nt, Artificial Sequence
  Synthetic
gaccccacaacaggccc

SEQ ID NO: 707991 - RNA, 17 nt, Artificial Sequence
  Synthetic
guggaaaucuuaggccc

SEQ ID NO: 707992 - RNA, 17 nt, Artificial Sequence
  Synthetic
ggcucugggcccggccc

SEQ ID NO: 707993 - RNA, 17 nt, Artificial Sequence
  Synthetic
guggaucaggggggccc

SEQ ID NO: 707994 - RNA, 17 nt, Artificial Sequence
  Synthetic
ggaaugaaagauggccc

SEQ ID NO: 707995 - RNA, 17 nt, Artificial Sequence
  Synthetic
gccacgaaaccuggccc

SEQ ID NO: 707996 - RNA, 17 nt, Artificial Sequence
  Synthetic
gcuaaaaucucuggccc

SEQ ID NO: 707997 - RNA, 17 nt, Artificial Sequence
  Synthetic
guuaacuaaaaaugccc

SEQ ID NO: 707998 - RNA, 17 nt, Artificial Sequence
  Synthetic
gucucaaugauaugccc

SEQ ID NO: 707999 - RNA, 17 nt, Artificial Sequence
  Synthetic
gugaaaucaggcugccc

SEQ ID NO: 708000 - RNA, 17 nt, Artificial Sequence
  Synthetic
gucuugcucugcugccc

SEQ ID NO: 708001 - RNA, 17 nt, Artificial Sequence
  Synthetic
gcugugugccagugccc

SEQ ID NO: 708002 - RNA, 17 nt, Artificial Sequence
  Synthetic
ggguuuggcaggugccc

SEQ ID NO: 708003 - RNA, 17 nt, Artificial Sequence
  Synthetic
gcucuguaaaugugccc

SEQ ID NO: 708004 - RNA, 17 nt, Artificial Sequence
  Synthetic
gucaugcuacauugccc

SEQ ID NO: 708005 - RNA, 17 nt, Artificial Sequence
  Synthetic
guccugcuccauugccc

SEQ ID NO: 708006 - RNA, 17 nt, Artificial Sequence
  Synthetic
guuuuguuccauugccc

SEQ ID NO: 708007 - RNA, 17 nt, Artificial Sequence
  Synthetic
guuuugcuauauugccc

SEQ ID NO: 708008 - RNA, 17 nt, Artificial Sequence
  Synthetic
gucucgcucucuugccc

SEQ ID NO: 708009 - RNA, 17 nt, Artificial Sequence
  Synthetic
gucucacucgguugccc

SEQ ID NO: 708010 - RNA, 17 nt, Artificial Sequence
  Synthetic
guuucaccauguugccc

SEQ ID NO: 708011 - RNA, 17 nt, Artificial Sequence
  Synthetic
guuugaccauguugccc

SEQ ID NO: 708012 - RNA, 17 nt, Artificial Sequence
  Synthetic
gccuugccauguugccc

SEQ ID NO: 708013 - RNA, 17 nt, Artificial Sequence
  Synthetic
guuuugccauguugccc

SEQ ID NO: 708014 - RNA, 17 nt, Artificial Sequence
  Synthetic
gugucauuauguugccc

SEQ ID NO: 708015 - RNA, 17 nt, Artificial Sequence
  Synthetic
gucucgcacuguugccc

SEQ ID NO: 708016 - RNA, 17 nt, Artificial Sequence
  Synthetic
gaaucuugcuguugccc

SEQ ID NO: 708017 - RNA, 17 nt, Artificial Sequence
  Synthetic
gucucaaucuguugccc

SEQ ID NO: 708018 - RNA, 17 nt, Artificial Sequence
  Synthetic
gucucacucuguugccc

SEQ ID NO: 708019 - RNA, 17 nt, Artificial Sequence
  Synthetic
gucucgcucuguugccc

SEQ ID NO: 708020 - RNA, 17 nt, Artificial Sequence
  Synthetic
guuucgcucuguugccc

SEQ ID NO: 708021 - RNA, 17 nt, Artificial Sequence
  Synthetic
gucuggcucuguugccc

SEQ ID NO: 708022 - RNA, 17 nt, Artificial Sequence
  Synthetic
gucuugcucuguugccc

SEQ ID NO: 708023 - RNA, 17 nt, Artificial Sequence
  Synthetic
gucuuucucuguugccc

SEQ ID NO: 708024 - RNA, 17 nt, Artificial Sequence
  Synthetic
gucucacuguguugccc

SEQ ID NO: 708025 - RNA, 17 nt, Artificial Sequence
  Synthetic
gaaagguuauuuugccc

SEQ ID NO: 708026 - RNA, 17 nt, Artificial Sequence
  Synthetic
gauuggauucaaauccc

SEQ ID NO: 708027 - RNA, 17 nt, Artificial Sequence
  Synthetic
gccucaagaagaauccc

SEQ ID NO: 708028 - RNA, 17 nt, Artificial Sequence
  Synthetic
guccauauccuaauccc

SEQ ID NO: 708029 - RNA, 17 nt, Artificial Sequence
  Synthetic
gcucacgcuguaauccc

SEQ ID NO: 708030 - RNA, 17 nt, Artificial Sequence
  Synthetic
guauggaaggacauccc

SEQ ID NO: 708031 - RNA, 17 nt, Artificial Sequence
  Synthetic
gacuucucugacauccc

SEQ ID NO: 708032 - RNA, 17 nt, Artificial Sequence
  Synthetic
ggaaaaugaaucauccc

SEQ ID NO: 708033 - RNA, 17 nt, Artificial Sequence
  Synthetic
ggcaagaacaagauccc

SEQ ID NO: 708034 - RNA, 17 nt, Artificial Sequence
  Synthetic
guuuuugaagagauccc

SEQ ID NO: 708035 - RNA, 17 nt, Artificial Sequence
  Synthetic
gguuguaaugugauccc

SEQ ID NO: 708036 - RNA, 17 nt, Artificial Sequence
  Synthetic
guauuuagcaguauccc

SEQ ID NO: 708037 - RNA, 17 nt, Artificial Sequence
  Synthetic
ggggacaaaauuauccc

SEQ ID NO: 708038 - RNA, 17 nt, Artificial Sequence
  Synthetic
guagaaagguuuauccc

SEQ ID NO: 708039 - RNA, 17 nt, Artificial Sequence
  Synthetic
gcuggucucaaacuccc

SEQ ID NO: 708040 - RNA, 17 nt, Artificial Sequence
  Synthetic
ggggaugucacacuccc

SEQ ID NO: 708041 - RNA, 17 nt, Artificial Sequence
  Synthetic
guuguaauuccacuccc

SEQ ID NO: 708042 - RNA, 17 nt, Artificial Sequence
  Synthetic
gggucucagggacuccc

SEQ ID NO: 708043 - RNA, 17 nt, Artificial Sequence
  Synthetic
gcagggaacauacuccc

SEQ ID NO: 708044 - RNA, 17 nt, Artificial Sequence
  Synthetic
gcuguccacuuacuccc

SEQ ID NO: 708045 - RNA, 17 nt, Artificial Sequence
  Synthetic
ugcaaccuccaccuccc

SEQ ID NO: 708046 - RNA, 17 nt, Artificial Sequence
  Synthetic
gagagacugccccuccc

SEQ ID NO: 708047 - RNA, 17 nt, Artificial Sequence
  Synthetic
guuaaauaccagcuccc

SEQ ID NO: 708048 - RNA, 17 nt, Artificial Sequence
  Synthetic
gcucuuggauggcuccc

SEQ ID NO: 708049 - RNA, 17 nt, Artificial Sequence
  Synthetic
gaauaugcugugcuccc

SEQ ID NO: 708050 - RNA, 17 nt, Artificial Sequence
  Synthetic
gauaaagguaaucuccc

SEQ ID NO: 708051 - RNA, 17 nt, Artificial Sequence
  Synthetic
guuuuaacucaucuccc

SEQ ID NO: 708052 - RNA, 17 nt, Artificial Sequence
  Synthetic
gaggggcagucucuccc

SEQ ID NO: 708053 - RNA, 17 nt, Artificial Sequence
  Synthetic
gcuuugcagagucuccc

SEQ ID NO: 708054 - RNA, 17 nt, Artificial Sequence
  Synthetic
ggaauugaaaaaguccc

SEQ ID NO: 708055 - RNA, 17 nt, Artificial Sequence
  Synthetic
ggauuaagggagguccc

SEQ ID NO: 708056 - RNA, 17 nt, Artificial Sequence
  Synthetic
gagcuaugcuagguccc

SEQ ID NO: 708057 - RNA, 17 nt, Artificial Sequence
  Synthetic
ggggacaaaauuguccc

SEQ ID NO: 708058 - RNA, 17 nt, Artificial Sequence
  Synthetic
gaacuucaggaauuccc

SEQ ID NO: 708059 - RNA, 17 nt, Artificial Sequence
  Synthetic
gccuuugguuaauuccc

SEQ ID NO: 708060 - RNA, 17 nt, Artificial Sequence
  Synthetic
gugccuagaacauuccc

SEQ ID NO: 708061 - RNA, 17 nt, Artificial Sequence
  Synthetic
ggcugcacaguauuccc

SEQ ID NO: 708062 - RNA, 17 nt, Artificial Sequence
  Synthetic
gcaagcaguuuauuccc

SEQ ID NO: 708063 - RNA, 17 nt, Artificial Sequence
  Synthetic
gaggugccauuguuccc

SEQ ID NO: 708064 - RNA, 17 nt, Artificial Sequence
  Synthetic
ggccauaacaauuuccc

SEQ ID NO: 708065 - RNA, 17 nt, Artificial Sequence
  Synthetic
guaauggcuaauuuccc

SEQ ID NO: 708066 - RNA, 17 nt, Artificial Sequence
  Synthetic
gggagacugccuuuccc

SEQ ID NO: 708067 - RNA, 17 nt, Artificial Sequence
  Synthetic
gaaacuggcaguuuccc

SEQ ID NO: 708068 - RNA, 17 nt, Artificial Sequence
  Synthetic
gcucaggaagguuuccc

SEQ ID NO: 708069 - RNA, 17 nt, Artificial Sequence
  Synthetic
gaacauuuuuguuuccc

SEQ ID NO: 708070 - RNA, 17 nt, Artificial Sequence
  Synthetic
gauauuuugcuuuuccc

SEQ ID NO: 708071 - RNA, 17 nt, Artificial Sequence
  Synthetic
gaaauuuuuuuuuuccc

SEQ ID NO: 708072 - RNA, 17 nt, Artificial Sequence
  Synthetic
gaggaacuguaaaagcc

SEQ ID NO: 708073 - RNA, 17 nt, Artificial Sequence
  Synthetic
gucuuuccuccaaagcc

SEQ ID NO: 708074 - RNA, 17 nt, Artificial Sequence
  Synthetic
gagguaugaagaaagcc

SEQ ID NO: 708075 - RNA, 17 nt, Artificial Sequence
  Synthetic
gcuugcaggggaaagcc

SEQ ID NO: 708076 - RNA, 17 nt, Artificial Sequence
  Synthetic
gagggagauggaaagcc

SEQ ID NO: 708077 - RNA, 17 nt, Artificial Sequence
  Synthetic
ggcggggaaugaaagcc

SEQ ID NO: 708078 - RNA, 17 nt, Artificial Sequence
  Synthetic
ggaguucaagacaagcc

SEQ ID NO: 708079 - RNA, 17 nt, Artificial Sequence
  Synthetic
gcaugcaccaccaagcc

SEQ ID NO: 708080 - RNA, 17 nt, Artificial Sequence
  Synthetic
gcgugcaccaccaagcc

SEQ ID NO: 708081 - RNA, 17 nt, Artificial Sequence
  Synthetic
gcaacugccagcaagcc

SEQ ID NO: 708082 - RNA, 17 nt, Artificial Sequence
  Synthetic
gccuugggcuucaagcc

SEQ ID NO: 708083 - RNA, 17 nt, Artificial Sequence
  Synthetic
ggaaguuguuagaagcc

SEQ ID NO: 708084 - RNA, 17 nt, Artificial Sequence
  Synthetic
gaaucuaaaaggaagcc

SEQ ID NO: 708085 - RNA, 17 nt, Artificial Sequence
  Synthetic
gagaaucacuugaagcc

SEQ ID NO: 708086 - RNA, 17 nt, Artificial Sequence
  Synthetic
gagaauugcuugaagcc

SEQ ID NO: 708087 - RNA, 17 nt, Artificial Sequence
  Synthetic
gaguauugcuugaagcc

SEQ ID NO: 708088 - RNA, 17 nt, Artificial Sequence
  Synthetic
guuaaaugaaauaagcc

SEQ ID NO: 708089 - RNA, 17 nt, Artificial Sequence
  Synthetic
gaaguagauaauaagcc

SEQ ID NO: 708090 - RNA, 17 nt, Artificial Sequence
  Synthetic
ggaguauucucuaagcc

SEQ ID NO: 708091 - RNA, 17 nt, Artificial Sequence
  Synthetic
ggaguucaagaacagcc

SEQ ID NO: 708092 - RNA, 17 nt, Artificial Sequence
  Synthetic
ggagcucgagaacagcc

SEQ ID NO: 708093 - RNA, 17 nt, Artificial Sequence
  Synthetic
ggaguuugagaacagcc

SEQ ID NO: 708094 - RNA, 17 nt, Artificial Sequence
  Synthetic
guugccaaauaacagcc

SEQ ID NO: 708095 - RNA, 17 nt, Artificial Sequence
  Synthetic
gccacugcacuacagcc

SEQ ID NO: 708096 - RNA, 17 nt, Artificial Sequence
  Synthetic
ggaguucaaaaccagcc

SEQ ID NO: 708097 - RNA, 17 nt, Artificial Sequence
  Synthetic
ggaguucgaaaccagcc

SEQ ID NO: 708098 - RNA, 17 nt, Artificial Sequence
  Synthetic
ggaguucgacaccagcc

SEQ ID NO: 708099 - RNA, 17 nt, Artificial Sequence
  Synthetic
ggaguccaagaccagcc

SEQ ID NO: 708100 - RNA, 17 nt, Artificial Sequence
  Synthetic
ggaguucaagaccagcc

SEQ ID NO: 708101 - RNA, 17 nt, Artificial Sequence
  Synthetic
ggaguuuaagaccagcc

SEQ ID NO: 708102 - RNA, 17 nt, Artificial Sequence
  Synthetic
ggaguuccagaccagcc

SEQ ID NO: 708103 - RNA, 17 nt, Artificial Sequence
  Synthetic
ggaguccgagaccagcc

SEQ ID NO: 708104 - RNA, 17 nt, Artificial Sequence
  Synthetic
ggaacucgagaccagcc

SEQ ID NO: 708105 - RNA, 17 nt, Artificial Sequence
  Synthetic
gaaguucgagaccagcc

SEQ ID NO: 708106 - RNA, 17 nt, Artificial Sequence
  Synthetic
ggaguucgagaccagcc

SEQ ID NO: 708107 - RNA, 17 nt, Artificial Sequence
  Synthetic
ggauuucgagaccagcc

SEQ ID NO: 708108 - RNA, 17 nt, Artificial Sequence
  Synthetic
ggaguuggagaccagcc

SEQ ID NO: 708109 - RNA, 17 nt, Artificial Sequence
  Synthetic
gaaguuugagaccagcc

SEQ ID NO: 708110 - RNA, 17 nt, Artificial Sequence
  Synthetic
ggaguuugagaccagcc

SEQ ID NO: 708111 - RNA, 17 nt, Artificial Sequence
  Synthetic
ggaguucuagaccagcc

SEQ ID NO: 708112 - RNA, 17 nt, Artificial Sequence
  Synthetic
ggaguuugcgaccagcc

SEQ ID NO: 708113 - RNA, 17 nt, Artificial Sequence
  Synthetic
ggaguucaauaccagcc

SEQ ID NO: 708114 - RNA, 17 nt, Artificial Sequence
  Synthetic
ggaguuggauaccagcc

SEQ ID NO: 708115 - RNA, 17 nt, Artificial Sequence
  Synthetic
gccacugcaccccagcc

SEQ ID NO: 708116 - RNA, 17 nt, Artificial Sequence
  Synthetic
ggaguccauucccagcc

SEQ ID NO: 708117 - RNA, 17 nt, Artificial Sequence
  Synthetic
ggaguucgaggccagcc

SEQ ID NO: 708118 - RNA, 17 nt, Artificial Sequence
  Synthetic
guuuuggauauccagcc

SEQ ID NO: 708119 - RNA, 17 nt, Artificial Sequence
  Synthetic
gacacuccacuccagcc

SEQ ID NO: 708120 - RNA, 17 nt, Artificial Sequence
  Synthetic
gccacuccacuccagcc

SEQ ID NO: 708121 - RNA, 17 nt, Artificial Sequence
  Synthetic
gucacagcacuccagcc

SEQ ID NO: 708122 - RNA, 17 nt, Artificial Sequence
  Synthetic
gccaccgcacuccagcc

SEQ ID NO: 708123 - RNA, 17 nt, Artificial Sequence
  Synthetic
gccacugcacuccagcc

SEQ ID NO: 708124 - RNA, 17 nt, Artificial Sequence
  Synthetic
gucacugcacuccagcc

SEQ ID NO: 708125 - RNA, 17 nt, Artificial Sequence
  Synthetic
gcuacugcacuccagcc

SEQ ID NO: 708126 - RNA, 17 nt, Artificial Sequence
  Synthetic
gccgcugcacuccagcc

SEQ ID NO: 708127 - RNA, 17 nt, Artificial Sequence
  Synthetic
gccauugcacuccagcc

SEQ ID NO: 708128 - RNA, 17 nt, Artificial Sequence
  Synthetic
gcuguugcacuccagcc

SEQ ID NO: 708129 - RNA, 17 nt, Artificial Sequence
  Synthetic
gccaccucacuccagcc

SEQ ID NO: 708130 - RNA, 17 nt, Artificial Sequence
  Synthetic
gccgcuauacuccagcc

SEQ ID NO: 708131 - RNA, 17 nt, Artificial Sequence
  Synthetic
gccacuguacuccagcc

SEQ ID NO: 708132 - RNA, 17 nt, Artificial Sequence
  Synthetic
gccaguguacuccagcc

SEQ ID NO: 708133 - RNA, 17 nt, Artificial Sequence
  Synthetic
gccauuguacuccagcc

SEQ ID NO: 708134 - RNA, 17 nt, Artificial Sequence
  Synthetic
gccacugcccuccagcc

SEQ ID NO: 708135 - RNA, 17 nt, Artificial Sequence
  Synthetic
gccauugcgcuccagcc

SEQ ID NO: 708136 - RNA, 17 nt, Artificial Sequence
  Synthetic
gccacugugcuccagcc

SEQ ID NO: 708137 - RNA, 17 nt, Artificial Sequence
  Synthetic
accacugcauuccagcc

SEQ ID NO: 708138 - RNA, 17 nt, Artificial Sequence
  Synthetic
gccacugcauuccagcc

SEQ ID NO: 708139 - RNA, 17 nt, Artificial Sequence
  Synthetic
gccauugcauuccagcc

SEQ ID NO: 708140 - RNA, 17 nt, Artificial Sequence
  Synthetic
gaaucucaacugcagcc

SEQ ID NO: 708141 - RNA, 17 nt, Artificial Sequence
  Synthetic
gccacugcacugcagcc

SEQ ID NO: 708142 - RNA, 17 nt, Artificial Sequence
  Synthetic
gauucuaacgugcagcc

SEQ ID NO: 708143 - RNA, 17 nt, Artificial Sequence
  Synthetic
gucccaacugugcagcc

SEQ ID NO: 708144 - RNA, 17 nt, Artificial Sequence
  Synthetic
gauaauccuuugcagcc

SEQ ID NO: 708145 - RNA, 17 nt, Artificial Sequence
  Synthetic
ggaguuccagaucagcc

SEQ ID NO: 708146 - RNA, 17 nt, Artificial Sequence
  Synthetic
ggaguuugagaucagcc

SEQ ID NO: 708147 - RNA, 17 nt, Artificial Sequence
  Synthetic
ggcugaaacauucagcc

SEQ ID NO: 708148 - RNA, 17 nt, Artificial Sequence
  Synthetic
gccacugcacuucagcc

SEQ ID NO: 708149 - RNA, 17 nt, Artificial Sequence
  Synthetic
gauuaggaaaaagagcc

SEQ ID NO: 708150 - RNA, 17 nt, Artificial Sequence
  Synthetic
gucauugaggcagagcc

SEQ ID NO: 708151 - RNA, 17 nt, Artificial Sequence
  Synthetic
gaaggaagaucagagcc

SEQ ID NO: 708152 - RNA, 17 nt, Artificial Sequence
  Synthetic
ggcaauuguggagagcc

SEQ ID NO: 708153 - RNA, 17 nt, Artificial Sequence
  Synthetic
ggaguuacagacgagcc

SEQ ID NO: 708154 - RNA, 17 nt, Artificial Sequence
  Synthetic
ggaguucgagacgagcc

SEQ ID NO: 708155 - RNA, 17 nt, Artificial Sequence
  Synthetic
ggaggaucaccugagcc

SEQ ID NO: 708156 - RNA, 17 nt, Artificial Sequence
  Synthetic
gacaaaggaccugagcc

SEQ ID NO: 708157 - RNA, 17 nt, Artificial Sequence
  Synthetic
gaaggaucacuugagcc

SEQ ID NO: 708158 - RNA, 17 nt, Artificial Sequence
  Synthetic
gcucccucccuugagcc

SEQ ID NO: 708159 - RNA, 17 nt, Artificial Sequence
  Synthetic
ggagaaccgcuugagcc

SEQ ID NO: 708160 - RNA, 17 nt, Artificial Sequence
  Synthetic
ggaggauugcuugagcc

SEQ ID NO: 708161 - RNA, 17 nt, Artificial Sequence
  Synthetic
gaaaucuuguuugagcc

SEQ ID NO: 708162 - RNA, 17 nt, Artificial Sequence
  Synthetic
gaaguucgagacuagcc

SEQ ID NO: 708163 - RNA, 17 nt, Artificial Sequence
  Synthetic
gccacuacacucuagcc

SEQ ID NO: 708164 - RNA, 17 nt, Artificial Sequence
  Synthetic
gccacugcacucuagcc

SEQ ID NO: 708165 - RNA, 17 nt, Artificial Sequence
  Synthetic
gaaguuugagucuagcc

SEQ ID NO: 708166 - RNA, 17 nt, Artificial Sequence
  Synthetic
gaucaucuuagguagcc

SEQ ID NO: 708167 - RNA, 17 nt, Artificial Sequence
  Synthetic
aauacaaaaaauuagcc

SEQ ID NO: 708168 - RNA, 17 nt, Artificial Sequence
  Synthetic
gauacaaaaaauuagcc

SEQ ID NO: 708169 - RNA, 17 nt, Artificial Sequence
  Synthetic
aaaauacaaaauuagcc

SEQ ID NO: 708170 - RNA, 17 nt, Artificial Sequence
  Synthetic
gauuguacauauuagcc

SEQ ID NO: 708171 - RNA, 17 nt, Artificial Sequence
  Synthetic
guucaaagcccuuagcc

SEQ ID NO: 708172 - RNA, 17 nt, Artificial Sequence
  Synthetic
gugucaccauguuagcc

SEQ ID NO: 708173 - RNA, 17 nt, Artificial Sequence
  Synthetic
gcuucaccauguuagcc

SEQ ID NO: 708174 - RNA, 17 nt, Artificial Sequence
  Synthetic
guuucaccauguuagcc

SEQ ID NO: 708175 - RNA, 17 nt, Artificial Sequence
  Synthetic
guuucaccguguuagcc

SEQ ID NO: 708176 - RNA, 17 nt, Artificial Sequence
  Synthetic
guuuuaccguguuagcc

SEQ ID NO: 708177 - RNA, 17 nt, Artificial Sequence
  Synthetic
guuucuccuuguuagcc

SEQ ID NO: 708178 - RNA, 17 nt, Artificial Sequence
  Synthetic
gccacugcacuuuagcc

SEQ ID NO: 708179 - RNA, 17 nt, Artificial Sequence
  Synthetic
gcaugcgccaacacgcc

SEQ ID NO: 708180 - RNA, 17 nt, Artificial Sequence
  Synthetic
gcguggugguacacgcc

SEQ ID NO: 708181 - RNA, 17 nt, Artificial Sequence
  Synthetic
gcgcccacaaccacgcc

SEQ ID NO: 708182 - RNA, 17 nt, Artificial Sequence
  Synthetic
gcacccaccaccacgcc

SEQ ID NO: 708183 - RNA, 17 nt, Artificial Sequence
  Synthetic
gcgcccaccaccacgcc

SEQ ID NO: 708184 - RNA, 17 nt, Artificial Sequence
  Synthetic
gcaugcaccaccacgcc

SEQ ID NO: 708185 - RNA, 17 nt, Artificial Sequence
  Synthetic
gcguguaccaccacgcc

SEQ ID NO: 708186 - RNA, 17 nt, Artificial Sequence
  Synthetic
gcaugagccaccacgcc

SEQ ID NO: 708187 - RNA, 17 nt, Artificial Sequence
  Synthetic
gcgugagccaccacgcc

SEQ ID NO: 708188 - RNA, 17 nt, Artificial Sequence
  Synthetic
gcacccgccaccacgcc

SEQ ID NO: 708189 - RNA, 17 nt, Artificial Sequence
  Synthetic
gcgcccgccaccacgcc

SEQ ID NO: 708190 - RNA, 17 nt, Artificial Sequence
  Synthetic
gugcccgccaccacgcc

SEQ ID NO: 708191 - RNA, 17 nt, Artificial Sequence
  Synthetic
gcaugcgccaccacgcc

SEQ ID NO: 708192 - RNA, 17 nt, Artificial Sequence
  Synthetic
gugucugccaccacgcc

SEQ ID NO: 708193 - RNA, 17 nt, Artificial Sequence
  Synthetic
gcaugcagcaccacgcc

SEQ ID NO: 708194 - RNA, 17 nt, Artificial Sequence
  Synthetic
gcacccacuaccacgcc

SEQ ID NO: 708195 - RNA, 17 nt, Artificial Sequence
  Synthetic
gcaaguacuaccacgcc

SEQ ID NO: 708196 - RNA, 17 nt, Artificial Sequence
  Synthetic
gcaugcaccgccacgcc

SEQ ID NO: 708197 - RNA, 17 nt, Artificial Sequence
  Synthetic
gcgccugccagcacgcc

SEQ ID NO: 708198 - RNA, 17 nt, Artificial Sequence
  Synthetic
gcaaccgccaucacgcc

SEQ ID NO: 708199 - RNA, 17 nt, Artificial Sequence
  Synthetic
gcgugagccacuacgcc

SEQ ID NO: 708200 - RNA, 17 nt, Artificial Sequence
  Synthetic
gcacaugccacuacgcc

SEQ ID NO: 708201 - RNA, 17 nt, Artificial Sequence
  Synthetic
gccacugcucucccgcc

SEQ ID NO: 708202 - RNA, 17 nt, Artificial Sequence
  Synthetic
gagcuuagaaugccgcc

SEQ ID NO: 708203 - RNA, 17 nt, Artificial Sequence
  Synthetic
gcaugagccacagcgcc

SEQ ID NO: 708204 - RNA, 17 nt, Artificial Sequence
  Synthetic
guaugagccaccgcgcc

SEQ ID NO: 708205 - RNA, 17 nt, Artificial Sequence
  Synthetic
gcgugagccaccgcgcc

SEQ ID NO: 708206 - RNA, 17 nt, Artificial Sequence
  Synthetic
gugugagccaccgcgcc

SEQ ID NO: 708207 - RNA, 17 nt, Artificial Sequence
  Synthetic
gcgugaggcaccgcgcc

SEQ ID NO: 708208 - RNA, 17 nt, Artificial Sequence
  Synthetic
gcaugagccacugcgcc

SEQ ID NO: 708209 - RNA, 17 nt, Artificial Sequence
  Synthetic
gcgugagccacugcgcc

SEQ ID NO: 708210 - RNA, 17 nt, Artificial Sequence
  Synthetic
gugccugccacugcgcc

SEQ ID NO: 708211 - RNA, 17 nt, Artificial Sequence
  Synthetic
gcaugagcuacugcgcc

SEQ ID NO: 708212 - RNA, 17 nt, Artificial Sequence
  Synthetic
gugugagccauugcgcc

SEQ ID NO: 708213 - RNA, 17 nt, Artificial Sequence
  Synthetic
gggcacacuaccucgcc

SEQ ID NO: 708214 - RNA, 17 nt, Artificial Sequence
  Synthetic
gcuucugaaccuucgcc

SEQ ID NO: 708215 - RNA, 17 nt, Artificial Sequence
  Synthetic
guuucaccguguucgcc

SEQ ID NO: 708216 - RNA, 17 nt, Artificial Sequence
  Synthetic
gaggacauuuguucgcc

SEQ ID NO: 708217 - RNA, 17 nt, Artificial Sequence
  Synthetic
gcaugauaaagaaggcc

SEQ ID NO: 708218 - RNA, 17 nt, Artificial Sequence
  Synthetic
gagguccuuggaaggcc

SEQ ID NO: 708219 - RNA, 17 nt, Artificial Sequence
  Synthetic
gucccuggucccaggcc

SEQ ID NO: 708220 - RNA, 17 nt, Artificial Sequence
  Synthetic
gaagucuccugcaggcc

SEQ ID NO: 708221 - RNA, 17 nt, Artificial Sequence
  Synthetic
gauuguuuuuggaggcc

SEQ ID NO: 708222 - RNA, 17 nt, Artificial Sequence
  Synthetic
gcggaucaccugaggcc

SEQ ID NO: 708223 - RNA, 17 nt, Artificial Sequence
  Synthetic
gcagaucacuugaggcc

SEQ ID NO: 708224 - RNA, 17 nt, Artificial Sequence
  Synthetic
guggaucacuugaggcc

SEQ ID NO: 708225 - RNA, 17 nt, Artificial Sequence
  Synthetic
gaggauugcuugaggcc

SEQ ID NO: 708226 - RNA, 17 nt, Artificial Sequence
  Synthetic
gaggauuguuugaggcc

SEQ ID NO: 708227 - RNA, 17 nt, Artificial Sequence
  Synthetic
gauaauauaaauaggcc

SEQ ID NO: 708228 - RNA, 17 nt, Artificial Sequence
  Synthetic
gaggugagggauaggcc

SEQ ID NO: 708229 - RNA, 17 nt, Artificial Sequence
  Synthetic
guccaagaaccuaggcc

SEQ ID NO: 708230 - RNA, 17 nt, Artificial Sequence
  Synthetic
guaauccacccuaggcc

SEQ ID NO: 708231 - RNA, 17 nt, Artificial Sequence
  Synthetic
guuucacccuguaggcc

SEQ ID NO: 708232 - RNA, 17 nt, Artificial Sequence
  Synthetic
gauuguuggauuaggcc

SEQ ID NO: 708233 - RNA, 17 nt, Artificial Sequence
  Synthetic
gguucgccaugucggcc

SEQ ID NO: 708234 - RNA, 17 nt, Artificial Sequence
  Synthetic
gcacaggaaggagggcc

SEQ ID NO: 708235 - RNA, 17 nt, Artificial Sequence
  Synthetic
gccauuugggaggggcc

SEQ ID NO: 708236 - RNA, 17 nt, Artificial Sequence
  Synthetic
gagauuugggaggggcc

SEQ ID NO: 708237 - RNA, 17 nt, Artificial Sequence
  Synthetic
gauaacaaucuggggcc

SEQ ID NO: 708238 - RNA, 17 nt, Artificial Sequence
  Synthetic
guguuggagguggggcc

SEQ ID NO: 708239 - RNA, 17 nt, Artificial Sequence
  Synthetic
guguuggacuuggggcc

SEQ ID NO: 708240 - RNA, 17 nt, Artificial Sequence
  Synthetic
gggagucugggugggcc

SEQ ID NO: 708241 - RNA, 17 nt, Artificial Sequence
  Synthetic
gcaaugguaauauggcc

SEQ ID NO: 708242 - RNA, 17 nt, Artificial Sequence
  Synthetic
gccugauugcccuggcc

SEQ ID NO: 708243 - RNA, 17 nt, Artificial Sequence
  Synthetic
guuucgccaugcuggcc

SEQ ID NO: 708244 - RNA, 17 nt, Artificial Sequence
  Synthetic
gucuuagguaucuggcc

SEQ ID NO: 708245 - RNA, 17 nt, Artificial Sequence
  Synthetic
gaagccucagaguggcc

SEQ ID NO: 708246 - RNA, 17 nt, Artificial Sequence
  Synthetic
guuucacuaugguggcc

SEQ ID NO: 708247 - RNA, 17 nt, Artificial Sequence
  Synthetic
guauaaauauuguggcc

SEQ ID NO: 708248 - RNA, 17 nt, Artificial Sequence
  Synthetic
gguuucaccuuguggcc

SEQ ID NO: 708249 - RNA, 17 nt, Artificial Sequence
  Synthetic
gguuguuaaaauuggcc

SEQ ID NO: 708250 - RNA, 17 nt, Artificial Sequence
  Synthetic
guuucaccauauuggcc

SEQ ID NO: 708251 - RNA, 17 nt, Artificial Sequence
  Synthetic
guuucaucaccuuggcc

SEQ ID NO: 708252 - RNA, 17 nt, Artificial Sequence
  Synthetic
gaauaccaaucuuggcc

SEQ ID NO: 708253 - RNA, 17 nt, Artificial Sequence
  Synthetic
guuucaccaucuuggcc

SEQ ID NO: 708254 - RNA, 17 nt, Artificial Sequence
  Synthetic
guuaaaagaaguuggcc

SEQ ID NO: 708255 - RNA, 17 nt, Artificial Sequence
  Synthetic
guuucaccacguuggcc

SEQ ID NO: 708256 - RNA, 17 nt, Artificial Sequence
  Synthetic
guuuuaccacguuggcc

SEQ ID NO: 708257 - RNA, 17 nt, Artificial Sequence
  Synthetic
guuccauuacguuggcc

SEQ ID NO: 708258 - RNA, 17 nt, Artificial Sequence
  Synthetic
guuucaccagguuggcc

SEQ ID NO: 708259 - RNA, 17 nt, Artificial Sequence
  Synthetic
guuugacaauguuggcc

SEQ ID NO: 708260 - RNA, 17 nt, Artificial Sequence
  Synthetic
gucucaccauguuggcc

SEQ ID NO: 708261 - RNA, 17 nt, Artificial Sequence
  Synthetic
gauucaccauguuggcc

SEQ ID NO: 708262 - RNA, 17 nt, Artificial Sequence
  Synthetic
gguucaccauguuggcc

SEQ ID NO: 708263 - RNA, 17 nt, Artificial Sequence
  Synthetic
guuucaccauguuggcc

SEQ ID NO: 708264 - RNA, 17 nt, Artificial Sequence
  Synthetic
guuuuaccauguuggcc

SEQ ID NO: 708265 - RNA, 17 nt, Artificial Sequence
  Synthetic
guuucgccauguuggcc

SEQ ID NO: 708266 - RNA, 17 nt, Artificial Sequence
  Synthetic
guuuugccauguuggcc

SEQ ID NO: 708267 - RNA, 17 nt, Artificial Sequence
  Synthetic
guuucaucauguuggcc

SEQ ID NO: 708268 - RNA, 17 nt, Artificial Sequence
  Synthetic
guuucgucauguuggcc

SEQ ID NO: 708269 - RNA, 17 nt, Artificial Sequence
  Synthetic
guuucaugauguuggcc

SEQ ID NO: 708270 - RNA, 17 nt, Artificial Sequence
  Synthetic
guuucacuauguuggcc

SEQ ID NO: 708271 - RNA, 17 nt, Artificial Sequence
  Synthetic
guuucacuguguuggcc

SEQ ID NO: 708272 - RNA, 17 nt, Artificial Sequence
  Synthetic
guuucaccuuguuggcc

SEQ ID NO: 708273 - RNA, 17 nt, Artificial Sequence
  Synthetic
gguuucaccauuuggcc

SEQ ID NO: 708274 - RNA, 17 nt, Artificial Sequence
  Synthetic
guggcucaaaaaaugcc

SEQ ID NO: 708275 - RNA, 17 nt, Artificial Sequence
  Synthetic
gauaacauccaaaugcc

SEQ ID NO: 708276 - RNA, 17 nt, Artificial Sequence
  Synthetic
guguaugauauaaugcc

SEQ ID NO: 708277 - RNA, 17 nt, Artificial Sequence
  Synthetic
gcgugagccaacaugcc

SEQ ID NO: 708278 - RNA, 17 nt, Artificial Sequence
  Synthetic
gugcccaccaccaugcc

SEQ ID NO: 708279 - RNA, 17 nt, Artificial Sequence
  Synthetic
gugugcaccaccaugcc

SEQ ID NO: 708280 - RNA, 17 nt, Artificial Sequence
  Synthetic
gcguaagccaccaugcc

SEQ ID NO: 708281 - RNA, 17 nt, Artificial Sequence
  Synthetic
gcaugagccaccaugcc

SEQ ID NO: 708282 - RNA, 17 nt, Artificial Sequence
  Synthetic
gcgugagccaccaugcc

SEQ ID NO: 708283 - RNA, 17 nt, Artificial Sequence
  Synthetic
gugugagccaccaugcc

SEQ ID NO: 708284 - RNA, 17 nt, Artificial Sequence
  Synthetic
gcgcccgccaccaugcc

SEQ ID NO: 708285 - RNA, 17 nt, Artificial Sequence
  Synthetic
gugcccgccaccaugcc

SEQ ID NO: 708286 - RNA, 17 nt, Artificial Sequence
  Synthetic
gcgcgcgccaccaugcc

SEQ ID NO: 708287 - RNA, 17 nt, Artificial Sequence
  Synthetic
gcaugcgccaccaugcc

SEQ ID NO: 708288 - RNA, 17 nt, Artificial Sequence
  Synthetic
gcacaugccaccaugcc

SEQ ID NO: 708289 - RNA, 17 nt, Artificial Sequence
  Synthetic
gcaccugccaccaugcc

SEQ ID NO: 708290 - RNA, 17 nt, Artificial Sequence
  Synthetic
gugcgugccaccaugcc

SEQ ID NO: 708291 - RNA, 17 nt, Artificial Sequence
  Synthetic
gcgccuuccaccaugcc

SEQ ID NO: 708292 - RNA, 17 nt, Artificial Sequence
  Synthetic
gcgugagcuaccaugcc

SEQ ID NO: 708293 - RNA, 17 nt, Artificial Sequence
  Synthetic
gugccugcuaccaugcc

SEQ ID NO: 708294 - RNA, 17 nt, Artificial Sequence
  Synthetic
ggcucugaacccaugcc

SEQ ID NO: 708295 - RNA, 17 nt, Artificial Sequence
  Synthetic
guguuuugcagcaugcc

SEQ ID NO: 708296 - RNA, 17 nt, Artificial Sequence
  Synthetic
ggaagaaagaagaugcc

SEQ ID NO: 708297 - RNA, 17 nt, Artificial Sequence
  Synthetic
ggcacaggacagaugcc

SEQ ID NO: 708298 - RNA, 17 nt, Artificial Sequence
  Synthetic
gacuuuucucagaugcc

SEQ ID NO: 708299 - RNA, 17 nt, Artificial Sequence
  Synthetic
ggugaaugcaugaugcc

SEQ ID NO: 708300 - RNA, 17 nt, Artificial Sequence
  Synthetic
gaacuuggccauaugcc

SEQ ID NO: 708301 - RNA, 17 nt, Artificial Sequence
  Synthetic
gcaucucuggauaugcc

SEQ ID NO: 708302 - RNA, 17 nt, Artificial Sequence
  Synthetic
gguaccuauuauaugcc

SEQ ID NO: 708303 - RNA, 17 nt, Artificial Sequence
  Synthetic
gcauuugccacuaugcc

SEQ ID NO: 708304 - RNA, 17 nt, Artificial Sequence
  Synthetic
gcacugcagacuaugcc

SEQ ID NO: 708305 - RNA, 17 nt, Artificial Sequence
  Synthetic
gcuccugaaaaacugcc

SEQ ID NO: 708306 - RNA, 17 nt, Artificial Sequence
  Synthetic
gcaaagcauaaacugcc

SEQ ID NO: 708307 - RNA, 17 nt, Artificial Sequence
  Synthetic
gggaauaguucacugcc

SEQ ID NO: 708308 - RNA, 17 nt, Artificial Sequence
  Synthetic
gcagggcaaauacugcc

SEQ ID NO: 708309 - RNA, 17 nt, Artificial Sequence
  Synthetic
ggaguucgagaccugcc

SEQ ID NO: 708310 - RNA, 17 nt, Artificial Sequence
  Synthetic
gcgugagccacccugcc

SEQ ID NO: 708311 - RNA, 17 nt, Artificial Sequence
  Synthetic
gccucugauucccugcc

SEQ ID NO: 708312 - RNA, 17 nt, Artificial Sequence
  Synthetic
gccacugcacuccugcc

SEQ ID NO: 708313 - RNA, 17 nt, Artificial Sequence
  Synthetic
gaaaauuuaaggcugcc

SEQ ID NO: 708314 - RNA, 17 nt, Artificial Sequence
  Synthetic
gauuuggauaggcugcc

SEQ ID NO: 708315 - RNA, 17 nt, Artificial Sequence
  Synthetic
guaugcuguaggcugcc

SEQ ID NO: 708316 - RNA, 17 nt, Artificial Sequence
  Synthetic
gaaagcucagugcugcc

SEQ ID NO: 708317 - RNA, 17 nt, Artificial Sequence
  Synthetic
gcagaucaauuucugcc

SEQ ID NO: 708318 - RNA, 17 nt, Artificial Sequence
  Synthetic
gacguucucuuucugcc

SEQ ID NO: 708319 - RNA, 17 nt, Artificial Sequence
  Synthetic
gagagaggggaagugcc

SEQ ID NO: 708320 - RNA, 17 nt, Artificial Sequence
  Synthetic
gaucuuuuaacagugcc

SEQ ID NO: 708321 - RNA, 17 nt, Artificial Sequence
  Synthetic
gcauagucugcagugcc

SEQ ID NO: 708322 - RNA, 17 nt, Artificial Sequence
  Synthetic
gcauagcgugcagugcc

SEQ ID NO: 708323 - RNA, 17 nt, Artificial Sequence
  Synthetic
gucauuaauguagugcc

SEQ ID NO: 708324 - RNA, 17 nt, Artificial Sequence
  Synthetic
gcaugagccaccgugcc

SEQ ID NO: 708325 - RNA, 17 nt, Artificial Sequence
  Synthetic
gccugagccaccgugcc

SEQ ID NO: 708326 - RNA, 17 nt, Artificial Sequence
  Synthetic
gcgugagccaccgugcc

SEQ ID NO: 708327 - RNA, 17 nt, Artificial Sequence
  Synthetic
gcacagagcccggugcc

SEQ ID NO: 708328 - RNA, 17 nt, Artificial Sequence
  Synthetic
guacuuaacacugugcc

SEQ ID NO: 708329 - RNA, 17 nt, Artificial Sequence
  Synthetic
gugugagccacugugcc

SEQ ID NO: 708330 - RNA, 17 nt, Artificial Sequence
  Synthetic
gucaaucagccugugcc

SEQ ID NO: 708331 - RNA, 17 nt, Artificial Sequence
  Synthetic
guuugucuuucugugcc

SEQ ID NO: 708332 - RNA, 17 nt, Artificial Sequence
  Synthetic
guuauuauuuuugugcc

SEQ ID NO: 708333 - RNA, 17 nt, Artificial Sequence
  Synthetic
guaucuauuaaauugcc

SEQ ID NO: 708334 - RNA, 17 nt, Artificial Sequence
  Synthetic
gcuucugcugaauugcc

SEQ ID NO: 708335 - RNA, 17 nt, Artificial Sequence
  Synthetic
guuugagaagcauugcc

SEQ ID NO: 708336 - RNA, 17 nt, Artificial Sequence
  Synthetic
gcaauggggcuauugcc

SEQ ID NO: 708337 - RNA, 17 nt, Artificial Sequence
  Synthetic
ggacagugauccuugcc

SEQ ID NO: 708338 - RNA, 17 nt, Artificial Sequence
  Synthetic
gucuuuuuaaucuugcc

SEQ ID NO: 708339 - RNA, 17 nt, Artificial Sequence
  Synthetic
gggaggcaucaguugcc

SEQ ID NO: 708340 - RNA, 17 nt, Artificial Sequence
  Synthetic
gugcacaguauguugcc

SEQ ID NO: 708341 - RNA, 17 nt, Artificial Sequence
  Synthetic
gauacaaaaaauuugcc

SEQ ID NO: 708342 - RNA, 17 nt, Artificial Sequence
  Synthetic
guuucaccauauuugcc

SEQ ID NO: 708343 - RNA, 17 nt, Artificial Sequence
  Synthetic
gacuaagauccuuugcc

SEQ ID NO: 708344 - RNA, 17 nt, Artificial Sequence
  Synthetic
guuguauacucuuugcc

SEQ ID NO: 708345 - RNA, 17 nt, Artificial Sequence
  Synthetic
gcuccagcuucuuugcc

SEQ ID NO: 708346 - RNA, 17 nt, Artificial Sequence
  Synthetic
ggaugagagaguuugcc

SEQ ID NO: 708347 - RNA, 17 nt, Artificial Sequence
  Synthetic
gauauuuuuauuuugcc

SEQ ID NO: 708348 - RNA, 17 nt, Artificial Sequence
  Synthetic
ggcacauaaauaaaucc

SEQ ID NO: 708349 - RNA, 17 nt, Artificial Sequence
  Synthetic
ggaguuggauuaaaucc

SEQ ID NO: 708350 - RNA, 17 nt, Artificial Sequence
  Synthetic
gugagagaaggcaaucc

SEQ ID NO: 708351 - RNA, 17 nt, Artificial Sequence
  Synthetic
guauuaggaaagaaucc

SEQ ID NO: 708352 - RNA, 17 nt, Artificial Sequence
  Synthetic
gauuugccaaugaaucc

SEQ ID NO: 708353 - RNA, 17 nt, Artificial Sequence
  Synthetic
gaggauggcaugaaucc

SEQ ID NO: 708354 - RNA, 17 nt, Artificial Sequence
  Synthetic
gagaaucacuugaaucc

SEQ ID NO: 708355 - RNA, 17 nt, Artificial Sequence
  Synthetic
gugcacagcuauaaucc

SEQ ID NO: 708356 - RNA, 17 nt, Artificial Sequence
  Synthetic
gcucaugccuguaaucc

SEQ ID NO: 708357 - RNA, 17 nt, Artificial Sequence
  Synthetic
gaagauaauuuuaaucc

SEQ ID NO: 708358 - RNA, 17 nt, Artificial Sequence
  Synthetic
gauaucaucaaacaucc

SEQ ID NO: 708359 - RNA, 17 nt, Artificial Sequence
  Synthetic
guguccaugacacaucc

SEQ ID NO: 708360 - RNA, 17 nt, Artificial Sequence
  Synthetic
ggugaacugagacaucc

SEQ ID NO: 708361 - RNA, 17 nt, Artificial Sequence
  Synthetic
ggagaucgacaccaucc

SEQ ID NO: 708362 - RNA, 17 nt, Artificial Sequence
  Synthetic
ggagauugacaccaucc

SEQ ID NO: 708363 - RNA, 17 nt, Artificial Sequence
  Synthetic
ggagaucaagaccaucc

SEQ ID NO: 708364 - RNA, 17 nt, Artificial Sequence
  Synthetic
ggagauagagaccaucc

SEQ ID NO: 708365 - RNA, 17 nt, Artificial Sequence
  Synthetic
ggagaccgagaccaucc

SEQ ID NO: 708366 - RNA, 17 nt, Artificial Sequence
  Synthetic
ggaaaucgagaccaucc

SEQ ID NO: 708367 - RNA, 17 nt, Artificial Sequence
  Synthetic
ggagaucgagaccaucc

SEQ ID NO: 708368 - RNA, 17 nt, Artificial Sequence
  Synthetic
ggagcucgagaccaucc

SEQ ID NO: 708369 - RNA, 17 nt, Artificial Sequence
  Synthetic
ggaguucgagaccaucc

SEQ ID NO: 708370 - RNA, 17 nt, Artificial Sequence
  Synthetic
ggagauggagaccaucc

SEQ ID NO: 708371 - RNA, 17 nt, Artificial Sequence
  Synthetic
gaagauugagaccaucc

SEQ ID NO: 708372 - RNA, 17 nt, Artificial Sequence
  Synthetic
ggagauugagaccaucc

SEQ ID NO: 708373 - RNA, 17 nt, Artificial Sequence
  Synthetic
ggagaucgggaccaucc

SEQ ID NO: 708374 - RNA, 17 nt, Artificial Sequence
  Synthetic
gaggccagagcccaucc

SEQ ID NO: 708375 - RNA, 17 nt, Artificial Sequence
  Synthetic
gcugcccaaugccaucc

SEQ ID NO: 708376 - RNA, 17 nt, Artificial Sequence
  Synthetic
gauuauuauuagcaucc

SEQ ID NO: 708377 - RNA, 17 nt, Artificial Sequence
  Synthetic
gcagcuauucugcaucc

SEQ ID NO: 708378 - RNA, 17 nt, Artificial Sequence
  Synthetic
gagaugugcuaucaucc

SEQ ID NO: 708379 - RNA, 17 nt, Artificial Sequence
  Synthetic
gucucacucugucaucc

SEQ ID NO: 708380 - RNA, 17 nt, Artificial Sequence
  Synthetic
gucucccucugucaucc

SEQ ID NO: 708381 - RNA, 17 nt, Artificial Sequence
  Synthetic
gucucgcuuugucaucc

SEQ ID NO: 708382 - RNA, 17 nt, Artificial Sequence
  Synthetic
ggaggauuacuucaucc

SEQ ID NO: 708383 - RNA, 17 nt, Artificial Sequence
  Synthetic
gagauaagguaagaucc

SEQ ID NO: 708384 - RNA, 17 nt, Artificial Sequence
  Synthetic
gcuuagcaaccagaucc

SEQ ID NO: 708385 - RNA, 17 nt, Artificial Sequence
  Synthetic
gguaauuugugagaucc

SEQ ID NO: 708386 - RNA, 17 nt, Artificial Sequence
  Synthetic
gugcaguggcaugaucc

SEQ ID NO: 708387 - RNA, 17 nt, Artificial Sequence
  Synthetic
ggagcuaaggcugaucc

SEQ ID NO: 708388 - RNA, 17 nt, Artificial Sequence
  Synthetic
gcuaacgcugcugaucc

SEQ ID NO: 708389 - RNA, 17 nt, Artificial Sequence
  Synthetic
ggcucugguucugaucc

SEQ ID NO: 708390 - RNA, 17 nt, Artificial Sequence
  Synthetic
gggaaaacaguugaucc

SEQ ID NO: 708391 - RNA, 17 nt, Artificial Sequence
  Synthetic
gugguucauaaauaucc

SEQ ID NO: 708392 - RNA, 17 nt, Artificial Sequence
  Synthetic
gauggcacuaaauaucc

SEQ ID NO: 708393 - RNA, 17 nt, Artificial Sequence
  Synthetic
gaaaugucuagauaucc

SEQ ID NO: 708394 - RNA, 17 nt, Artificial Sequence
  Synthetic
gcaaccaaauuauaucc

SEQ ID NO: 708395 - RNA, 17 nt, Artificial Sequence
  Synthetic
gaguugagauuauaucc

SEQ ID NO: 708396 - RNA, 17 nt, Artificial Sequence
  Synthetic
gacagcuuuggcuaucc

SEQ ID NO: 708397 - RNA, 17 nt, Artificial Sequence
  Synthetic
gucuagaaaugcuaucc

SEQ ID NO: 708398 - RNA, 17 nt, Artificial Sequence
  Synthetic
gauuuucauugguaucc

SEQ ID NO: 708399 - RNA, 17 nt, Artificial Sequence
  Synthetic
guaaucuuccuuuaucc

SEQ ID NO: 708400 - RNA, 17 nt, Artificial Sequence
  Synthetic
ggcugaucucaaacucc

SEQ ID NO: 708401 - RNA, 17 nt, Artificial Sequence
  Synthetic
ggcuggucucaaacucc

SEQ ID NO: 708402 - RNA, 17 nt, Artificial Sequence
  Synthetic
ggauguauggaaacucc

SEQ ID NO: 708403 - RNA, 17 nt, Artificial Sequence
  Synthetic
ggcugguauccaacucc

SEQ ID NO: 708404 - RNA, 17 nt, Artificial Sequence
  Synthetic
ggcuggccucgaacucc

SEQ ID NO: 708405 - RNA, 17 nt, Artificial Sequence
  Synthetic
ggcucgucucgaacucc

SEQ ID NO: 708406 - RNA, 17 nt, Artificial Sequence
  Synthetic
gacuggucucgaacucc

SEQ ID NO: 708407 - RNA, 17 nt, Artificial Sequence
  Synthetic
ggcuggucucgaacucc

SEQ ID NO: 708408 - RNA, 17 nt, Artificial Sequence
  Synthetic
ggcuggucuugaacucc

SEQ ID NO: 708409 - RNA, 17 nt, Artificial Sequence
  Synthetic
ggcuguucuugaacucc

SEQ ID NO: 708410 - RNA, 17 nt, Artificial Sequence
  Synthetic
ggcugguuuugaacucc

SEQ ID NO: 708411 - RNA, 17 nt, Artificial Sequence
  Synthetic
ggcuggacucuaacucc

SEQ ID NO: 708412 - RNA, 17 nt, Artificial Sequence
  Synthetic
ggaaaaaaaaucacucc

SEQ ID NO: 708413 - RNA, 17 nt, Artificial Sequence
  Synthetic
gccaacaccuagacucc

SEQ ID NO: 708414 - RNA, 17 nt, Artificial Sequence
  Synthetic
gaaacaaauucgacucc

SEQ ID NO: 708415 - RNA, 17 nt, Artificial Sequence
  Synthetic
ggcugggaauggacucc

SEQ ID NO: 708416 - RNA, 17 nt, Artificial Sequence
  Synthetic
ggcuggucuuggacucc

SEQ ID NO: 708417 - RNA, 17 nt, Artificial Sequence
  Synthetic
gagacagaaucuacucc

SEQ ID NO: 708418 - RNA, 17 nt, Artificial Sequence
  Synthetic
gcgaauaauucuacucc

SEQ ID NO: 708419 - RNA, 17 nt, Artificial Sequence
  Synthetic
gauacaacugguacucc

SEQ ID NO: 708420 - RNA, 17 nt, Artificial Sequence
  Synthetic
gccuuaaagguuacucc

SEQ ID NO: 708421 - RNA, 17 nt, Artificial Sequence
  Synthetic
cugcaaccuccaccucc

SEQ ID NO: 708422 - RNA, 17 nt, Artificial Sequence
  Synthetic
gaccuuagagacccucc

SEQ ID NO: 708423 - RNA, 17 nt, Artificial Sequence
  Synthetic
gugugauguuccccucc

SEQ ID NO: 708424 - RNA, 17 nt, Artificial Sequence
  Synthetic
guuucuacaagcccucc

SEQ ID NO: 708425 - RNA, 17 nt, Artificial Sequence
  Synthetic
gugcaaccuccgccucc

SEQ ID NO: 708426 - RNA, 17 nt, Artificial Sequence
  Synthetic
cugcaaccucugccucc

SEQ ID NO: 708427 - RNA, 17 nt, Artificial Sequence
  Synthetic
gccauggaaaauccucc

SEQ ID NO: 708428 - RNA, 17 nt, Artificial Sequence
  Synthetic
gacuucagagauccucc

SEQ ID NO: 708429 - RNA, 17 nt, Artificial Sequence
  Synthetic
gcuccucucucuccucc

SEQ ID NO: 708430 - RNA, 17 nt, Artificial Sequence
  Synthetic
guuugacaguuuccucc

SEQ ID NO: 708431 - RNA, 17 nt, Artificial Sequence
  Synthetic
guaaauaauuuuccucc

SEQ ID NO: 708432 - RNA, 17 nt, Artificial Sequence
  Synthetic
ggaccuagcauagcucc

SEQ ID NO: 708433 - RNA, 17 nt, Artificial Sequence
  Synthetic
ggaaaagcccuagcucc

SEQ ID NO: 708434 - RNA, 17 nt, Artificial Sequence
  Synthetic
gcgugagccaccgcucc

SEQ ID NO: 708435 - RNA, 17 nt, Artificial Sequence
  Synthetic
gagauggggaaggcucc

SEQ ID NO: 708436 - RNA, 17 nt, Artificial Sequence
  Synthetic
gcgugagccacggcucc

SEQ ID NO: 708437 - RNA, 17 nt, Artificial Sequence
  Synthetic
ggcauuugcuuggcucc

SEQ ID NO: 708438 - RNA, 17 nt, Artificial Sequence
  Synthetic
gaagaaagaaaugcucc

SEQ ID NO: 708439 - RNA, 17 nt, Artificial Sequence
  Synthetic
gacaaaauaacugcucc

SEQ ID NO: 708440 - RNA, 17 nt, Artificial Sequence
  Synthetic
ggaaagcgaucugcucc

SEQ ID NO: 708441 - RNA, 17 nt, Artificial Sequence
  Synthetic
gaagaaaauagugcucc

SEQ ID NO: 708442 - RNA, 17 nt, Artificial Sequence
  Synthetic
gaaacuauaggugcucc

SEQ ID NO: 708443 - RNA, 17 nt, Artificial Sequence
  Synthetic
gcuccacuggaaucucc

SEQ ID NO: 708444 - RNA, 17 nt, Artificial Sequence
  Synthetic
gagcugaaaacaucucc

SEQ ID NO: 708445 - RNA, 17 nt, Artificial Sequence
  Synthetic
gcaaaaauccuaucucc

SEQ ID NO: 708446 - RNA, 17 nt, Artificial Sequence
  Synthetic
ggguagagccccucucc

SEQ ID NO: 708447 - RNA, 17 nt, Artificial Sequence
  Synthetic
gguagacagcccucucc

SEQ ID NO: 708448 - RNA, 17 nt, Artificial Sequence
  Synthetic
guuuuaacaagcucucc

SEQ ID NO: 708449 - RNA, 17 nt, Artificial Sequence
  Synthetic
guugugaccagcucucc

SEQ ID NO: 708450 - RNA, 17 nt, Artificial Sequence
  Synthetic
gugucucagcucucucc

SEQ ID NO: 708451 - RNA, 17 nt, Artificial Sequence
  Synthetic
gcauccauucucucucc

SEQ ID NO: 708452 - RNA, 17 nt, Artificial Sequence
  Synthetic
guuguaagauucucucc

SEQ ID NO: 708453 - RNA, 17 nt, Artificial Sequence
  Synthetic
gauuuuuucaagucucc

SEQ ID NO: 708454 - RNA, 17 nt, Artificial Sequence
  Synthetic
guaaacaggaagucucc

SEQ ID NO: 708455 - RNA, 17 nt, Artificial Sequence
  Synthetic
ggagggccucugucucc

SEQ ID NO: 708456 - RNA, 17 nt, Artificial Sequence
  Synthetic
gccuugagaaauucucc

SEQ ID NO: 708457 - RNA, 17 nt, Artificial Sequence
  Synthetic
gguuuaucuccuucucc

SEQ ID NO: 708458 - RNA, 17 nt, Artificial Sequence
  Synthetic
gcagcaagugcuucucc

SEQ ID NO: 708459 - RNA, 17 nt, Artificial Sequence
  Synthetic
gauuggggaaguucucc

SEQ ID NO: 708460 - RNA, 17 nt, Artificial Sequence
  Synthetic
gguuggggaaguucucc

SEQ ID NO: 708461 - RNA, 17 nt, Artificial Sequence
  Synthetic
gacuauuuauguucucc

SEQ ID NO: 708462 - RNA, 17 nt, Artificial Sequence
  Synthetic
gcuaucuugcuuucucc

SEQ ID NO: 708463 - RNA, 17 nt, Artificial Sequence
  Synthetic
gauuccuaucuuucucc

SEQ ID NO: 708464 - RNA, 17 nt, Artificial Sequence
  Synthetic
gucaguuguagaagucc

SEQ ID NO: 708465 - RNA, 17 nt, Artificial Sequence
  Synthetic
gaagacaaaguaagucc

SEQ ID NO: 708466 - RNA, 17 nt, Artificial Sequence
  Synthetic
gacuacuguaacagucc

SEQ ID NO: 708467 - RNA, 17 nt, Artificial Sequence
  Synthetic
gugauugcaaggagucc

SEQ ID NO: 708468 - RNA, 17 nt, Artificial Sequence
  Synthetic
gcagaucacuggagucc

SEQ ID NO: 708469 - RNA, 17 nt, Artificial Sequence
  Synthetic
gcagaucacuugagucc

SEQ ID NO: 708470 - RNA, 17 nt, Artificial Sequence
  Synthetic
gggggaaaaaguagucc

SEQ ID NO: 708471 - RNA, 17 nt, Artificial Sequence
  Synthetic
gugugugcuuguagucc

SEQ ID NO: 708472 - RNA, 17 nt, Artificial Sequence
  Synthetic
ggagaucgagaccgucc

SEQ ID NO: 708473 - RNA, 17 nt, Artificial Sequence
  Synthetic
ggagcuaugcuaggucc

SEQ ID NO: 708474 - RNA, 17 nt, Artificial Sequence
  Synthetic
gaagaaaugguaggucc

SEQ ID NO: 708475 - RNA, 17 nt, Artificial Sequence
  Synthetic
guccugaaaaggggucc

SEQ ID NO: 708476 - RNA, 17 nt, Artificial Sequence
  Synthetic
guucaagaagcuggucc

SEQ ID NO: 708477 - RNA, 17 nt, Artificial Sequence
  Synthetic
gccaauacugcuggucc

SEQ ID NO: 708478 - RNA, 17 nt, Artificial Sequence
  Synthetic
gugaauccaucuggucc

SEQ ID NO: 708479 - RNA, 17 nt, Artificial Sequence
  Synthetic
gugaauccgucuggucc

SEQ ID NO: 708480 - RNA, 17 nt, Artificial Sequence
  Synthetic
gugaugacauuuggucc

SEQ ID NO: 708481 - RNA, 17 nt, Artificial Sequence
  Synthetic
gaaauuugaaaaugucc

SEQ ID NO: 708482 - RNA, 17 nt, Artificial Sequence
  Synthetic
guaucauuagaaugucc

SEQ ID NO: 708483 - RNA, 17 nt, Artificial Sequence
  Synthetic
gcaucuugcacaugucc

SEQ ID NO: 708484 - RNA, 17 nt, Artificial Sequence
  Synthetic
gaaucugccagaugucc

SEQ ID NO: 708485 - RNA, 17 nt, Artificial Sequence
  Synthetic
guucggaggagaugucc

SEQ ID NO: 708486 - RNA, 17 nt, Artificial Sequence
  Synthetic
gaaacuccuggaugucc

SEQ ID NO: 708487 - RNA, 17 nt, Artificial Sequence
  Synthetic
guauaaacaauaugucc

SEQ ID NO: 708488 - RNA, 17 nt, Artificial Sequence
  Synthetic
guuaaauggguaugucc

SEQ ID NO: 708489 - RNA, 17 nt, Artificial Sequence
  Synthetic
gaagaaaaugagugucc

SEQ ID NO: 708490 - RNA, 17 nt, Artificial Sequence
  Synthetic
gaaaagccuaggugucc

SEQ ID NO: 708491 - RNA, 17 nt, Artificial Sequence
  Synthetic
guguuuagaaugugucc

SEQ ID NO: 708492 - RNA, 17 nt, Artificial Sequence
  Synthetic
ggaggguguaugugucc

SEQ ID NO: 708493 - RNA, 17 nt, Artificial Sequence
  Synthetic
gccuauuauaauugucc

SEQ ID NO: 708494 - RNA, 17 nt, Artificial Sequence
  Synthetic
gauagauuagauugucc

SEQ ID NO: 708495 - RNA, 17 nt, Artificial Sequence
  Synthetic
gauuaaauauauugucc

SEQ ID NO: 708496 - RNA, 17 nt, Artificial Sequence
  Synthetic
ggcuaagugaguugucc

SEQ ID NO: 708497 - RNA, 17 nt, Artificial Sequence
  Synthetic
guuucaccauguugucc

SEQ ID NO: 708498 - RNA, 17 nt, Artificial Sequence
  Synthetic
guuucacuauguugucc

SEQ ID NO: 708499 - RNA, 17 nt, Artificial Sequence
  Synthetic
guguugcuauguugucc

SEQ ID NO: 708500 - RNA, 17 nt, Artificial Sequence
  Synthetic
gucaaccuuuguugucc

SEQ ID NO: 708501 - RNA, 17 nt, Artificial Sequence
  Synthetic
gacugcuugguuugucc

SEQ ID NO: 708502 - RNA, 17 nt, Artificial Sequence
  Synthetic
gaaauaaacuuuugucc

SEQ ID NO: 708503 - RNA, 17 nt, Artificial Sequence
  Synthetic
guaauaaagccaauucc

SEQ ID NO: 708504 - RNA, 17 nt, Artificial Sequence
  Synthetic
ggaaauaaggcaauucc

SEQ ID NO: 708505 - RNA, 17 nt, Artificial Sequence
  Synthetic
gagcugaguucaauucc

SEQ ID NO: 708506 - RNA, 17 nt, Artificial Sequence
  Synthetic
gguugacauugaauucc

SEQ ID NO: 708507 - RNA, 17 nt, Artificial Sequence
  Synthetic
gucauuuuccuaauucc

SEQ ID NO: 708508 - RNA, 17 nt, Artificial Sequence
  Synthetic
ggaaauggauacauucc

SEQ ID NO: 708509 - RNA, 17 nt, Artificial Sequence
  Synthetic
guauuacuggccauucc

SEQ ID NO: 708510 - RNA, 17 nt, Artificial Sequence
  Synthetic
gaccuggccuccauucc

SEQ ID NO: 708511 - RNA, 17 nt, Artificial Sequence
  Synthetic
gaaaaacauuccauucc

SEQ ID NO: 708512 - RNA, 17 nt, Artificial Sequence
  Synthetic
gaacaaauuaagauucc

SEQ ID NO: 708513 - RNA, 17 nt, Artificial Sequence
  Synthetic
gaagauuacuugauucc

SEQ ID NO: 708514 - RNA, 17 nt, Artificial Sequence
  Synthetic
ggaaacuaguugauucc

SEQ ID NO: 708515 - RNA, 17 nt, Artificial Sequence
  Synthetic
gaacagugaaauauucc

SEQ ID NO: 708516 - RNA, 17 nt, Artificial Sequence
  Synthetic
gcauauguucauauucc

SEQ ID NO: 708517 - RNA, 17 nt, Artificial Sequence
  Synthetic
guacacaaguauauucc

SEQ ID NO: 708518 - RNA, 17 nt, Artificial Sequence
  Synthetic
gacaguugagcuauucc

SEQ ID NO: 708519 - RNA, 17 nt, Artificial Sequence
  Synthetic
gugacaaguauuauucc

SEQ ID NO: 708520 - RNA, 17 nt, Artificial Sequence
  Synthetic
ggggggauauuuauucc

SEQ ID NO: 708521 - RNA, 17 nt, Artificial Sequence
  Synthetic
guauauagguuuauucc

SEQ ID NO: 708522 - RNA, 17 nt, Artificial Sequence
  Synthetic
ggacaagcaaaacuucc

SEQ ID NO: 708523 - RNA, 17 nt, Artificial Sequence
  Synthetic
gauuauuuacaacuucc

SEQ ID NO: 708524 - RNA, 17 nt, Artificial Sequence
  Synthetic
ggaauggguuaacuucc

SEQ ID NO: 708525 - RNA, 17 nt, Artificial Sequence
  Synthetic
gucuacuggucacuucc

SEQ ID NO: 708526 - RNA, 17 nt, Artificial Sequence
  Synthetic
gguuuggauauacuucc

SEQ ID NO: 708527 - RNA, 17 nt, Artificial Sequence
  Synthetic
guuugcuguauacuucc

SEQ ID NO: 708528 - RNA, 17 nt, Artificial Sequence
  Synthetic
ggauauggguuacuucc

SEQ ID NO: 708529 - RNA, 17 nt, Artificial Sequence
  Synthetic
ggagaaugguuacuucc

SEQ ID NO: 708530 - RNA, 17 nt, Artificial Sequence
  Synthetic
ggucucuccccccuucc

SEQ ID NO: 708531 - RNA, 17 nt, Artificial Sequence
  Synthetic
ggguacagcccccuucc

SEQ ID NO: 708532 - RNA, 17 nt, Artificial Sequence
  Synthetic
gaguccagugagcuucc

SEQ ID NO: 708533 - RNA, 17 nt, Artificial Sequence
  Synthetic
ggcaauuauaaucuucc

SEQ ID NO: 708534 - RNA, 17 nt, Artificial Sequence
  Synthetic
gugagggccccucuucc

SEQ ID NO: 708535 - RNA, 17 nt, Artificial Sequence
  Synthetic
gaauaaacagcucuucc

SEQ ID NO: 708536 - RNA, 17 nt, Artificial Sequence
  Synthetic
gucccaucaauucuucc

SEQ ID NO: 708537 - RNA, 17 nt, Artificial Sequence
  Synthetic
gagauucaacuucuucc

SEQ ID NO: 708538 - RNA, 17 nt, Artificial Sequence
  Synthetic
gggauucaacuucuucc

SEQ ID NO: 708539 - RNA, 17 nt, Artificial Sequence
  Synthetic
gggauucgauuucuucc

SEQ ID NO: 708540 - RNA, 17 nt, Artificial Sequence
  Synthetic
guaagguuaaaaguucc

SEQ ID NO: 708541 - RNA, 17 nt, Artificial Sequence
  Synthetic
gggagcagggcaguucc

SEQ ID NO: 708542 - RNA, 17 nt, Artificial Sequence
  Synthetic
gagguaaaaagaguucc

SEQ ID NO: 708543 - RNA, 17 nt, Artificial Sequence
  Synthetic
gguugcuacagaguucc

SEQ ID NO: 708544 - RNA, 17 nt, Artificial Sequence
  Synthetic
gaguacgccagaguucc

SEQ ID NO: 708545 - RNA, 17 nt, Artificial Sequence
  Synthetic
guuucuauccagguucc

SEQ ID NO: 708546 - RNA, 17 nt, Artificial Sequence
  Synthetic
guacuaagcgcuguucc

SEQ ID NO: 708547 - RNA, 17 nt, Artificial Sequence
  Synthetic
gugaauccaucuguucc

SEQ ID NO: 708548 - RNA, 17 nt, Artificial Sequence
  Synthetic
gagcuguucaguguucc

SEQ ID NO: 708549 - RNA, 17 nt, Artificial Sequence
  Synthetic
guaggggagaguguucc

SEQ ID NO: 708550 - RNA, 17 nt, Artificial Sequence
  Synthetic
gguuuuaugaaauuucc

SEQ ID NO: 708551 - RNA, 17 nt, Artificial Sequence
  Synthetic
gguuggucuuaauuucc

SEQ ID NO: 708552 - RNA, 17 nt, Artificial Sequence
  Synthetic
ggcuaguaaugauuucc

SEQ ID NO: 708553 - RNA, 17 nt, Artificial Sequence
  Synthetic
gacuucuuaauauuucc

SEQ ID NO: 708554 - RNA, 17 nt, Artificial Sequence
  Synthetic
guaaguuuaauauuucc

SEQ ID NO: 708555 - RNA, 17 nt, Artificial Sequence
  Synthetic
gcuauauuuuuauuucc

SEQ ID NO: 708556 - RNA, 17 nt, Artificial Sequence
  Synthetic
gaggaaauaaacuuucc

SEQ ID NO: 708557 - RNA, 17 nt, Artificial Sequence
  Synthetic
gaguuaaguaacuuucc

SEQ ID NO: 708558 - RNA, 17 nt, Artificial Sequence
  Synthetic
gagaaacuugccuuucc

SEQ ID NO: 708559 - RNA, 17 nt, Artificial Sequence
  Synthetic
gaaacuuguugcuuucc

SEQ ID NO: 708560 - RNA, 17 nt, Artificial Sequence
  Synthetic
gcuauguuuaucuuucc

SEQ ID NO: 708561 - RNA, 17 nt, Artificial Sequence
  Synthetic
gugaaacauuucuuucc

SEQ ID NO: 708562 - RNA, 17 nt, Artificial Sequence
  Synthetic
guucuaggugaguuucc

SEQ ID NO: 708563 - RNA, 17 nt, Artificial Sequence
  Synthetic
gaggguuguguguuucc

SEQ ID NO: 708564 - RNA, 17 nt, Artificial Sequence
  Synthetic
guauguauuuuguuucc

SEQ ID NO: 708565 - RNA, 17 nt, Artificial Sequence
  Synthetic
guguacacauauuuucc

SEQ ID NO: 708566 - RNA, 17 nt, Artificial Sequence
  Synthetic
gucagcaccuauuuucc

SEQ ID NO: 708567 - RNA, 17 nt, Artificial Sequence
  Synthetic
ggguccgagacuuuucc

SEQ ID NO: 708568 - RNA, 17 nt, Artificial Sequence
  Synthetic
gugucugcagcuuuucc

SEQ ID NO: 708569 - RNA, 17 nt, Artificial Sequence
  Synthetic
gccuauguagguuuucc

SEQ ID NO: 708570 - RNA, 17 nt, Artificial Sequence
  Synthetic
gaaguguucuguuuucc

SEQ ID NO: 708571 - RNA, 17 nt, Artificial Sequence
  Synthetic
gggagcugcuuuuuucc

SEQ ID NO: 708572 - RNA, 17 nt, Artificial Sequence
  Synthetic
ggaaagaaaaaaaaagc

SEQ ID NO: 708573 - RNA, 17 nt, Artificial Sequence
  Synthetic
guuugcucucaaaaagc

SEQ ID NO: 708574 - RNA, 17 nt, Artificial Sequence
  Synthetic
gaggcagaauaaaaagc

SEQ ID NO: 708575 - RNA, 17 nt, Artificial Sequence
  Synthetic
ggaauuuucucaaaagc

SEQ ID NO: 708576 - RNA, 17 nt, Artificial Sequence
  Synthetic
ggcucucuuucaaaagc

SEQ ID NO: 708577 - RNA, 17 nt, Artificial Sequence
  Synthetic
ggugucaauggaaaagc

SEQ ID NO: 708578 - RNA, 17 nt, Artificial Sequence
  Synthetic
gguucucuaagcaaagc

SEQ ID NO: 708579 - RNA, 17 nt, Artificial Sequence
  Synthetic
gaaaguggggucaaagc

SEQ ID NO: 708580 - RNA, 17 nt, Artificial Sequence
  Synthetic
gugaagcucuucaaagc

SEQ ID NO: 708581 - RNA, 17 nt, Artificial Sequence
  Synthetic
guaacaucuaagaaagc

SEQ ID NO: 708582 - RNA, 17 nt, Artificial Sequence
  Synthetic
gcucugaaucagaaagc

SEQ ID NO: 708583 - RNA, 17 nt, Artificial Sequence
  Synthetic
gcaacugcuuagaaagc

SEQ ID NO: 708584 - RNA, 17 nt, Artificial Sequence
  Synthetic
gcuggagagaauaaagc

SEQ ID NO: 708585 - RNA, 17 nt, Artificial Sequence
  Synthetic
gaccuugcugauaaagc

SEQ ID NO: 708586 - RNA, 17 nt, Artificial Sequence
  Synthetic
gugcuuucuccuaaagc

SEQ ID NO: 708587 - RNA, 17 nt, Artificial Sequence
  Synthetic
gacaagguagcuaaagc

SEQ ID NO: 708588 - RNA, 17 nt, Artificial Sequence
  Synthetic
gaauuaauuuuuaaagc

SEQ ID NO: 708589 - RNA, 17 nt, Artificial Sequence
  Synthetic
gacacuucaggacaagc

SEQ ID NO: 708590 - RNA, 17 nt, Artificial Sequence
  Synthetic
gaguaaaauuuacaagc

SEQ ID NO: 708591 - RNA, 17 nt, Artificial Sequence
  Synthetic
ggcaagagagcccaagc

SEQ ID NO: 708592 - RNA, 17 nt, Artificial Sequence
  Synthetic
guugccauucuccaagc

SEQ ID NO: 708593 - RNA, 17 nt, Artificial Sequence
  Synthetic
gggaaccaaaagcaagc

SEQ ID NO: 708594 - RNA, 17 nt, Artificial Sequence
  Synthetic
guaucggaaucucaagc

SEQ ID NO: 708595 - RNA, 17 nt, Artificial Sequence
  Synthetic
gauuguaaaagucaagc

SEQ ID NO: 708596 - RNA, 17 nt, Artificial Sequence
  Synthetic
gugaaaauuugucaagc

SEQ ID NO: 708597 - RNA, 17 nt, Artificial Sequence
  Synthetic
gugucucuauuucaagc

SEQ ID NO: 708598 - RNA, 17 nt, Artificial Sequence
  Synthetic
gcccugcaagcagaagc

SEQ ID NO: 708599 - RNA, 17 nt, Artificial Sequence
  Synthetic
gagaagacagcagaagc

SEQ ID NO: 708600 - RNA, 17 nt, Artificial Sequence
  Synthetic
ggcgaaauagcagaagc

SEQ ID NO: 708601 - RNA, 17 nt, Artificial Sequence
  Synthetic
guggagacaucagaagc

SEQ ID NO: 708602 - RNA, 17 nt, Artificial Sequence
  Synthetic
gagaccugaagagaagc

SEQ ID NO: 708603 - RNA, 17 nt, Artificial Sequence
  Synthetic
gagagagagagagaagc

SEQ ID NO: 708604 - RNA, 17 nt, Artificial Sequence
  Synthetic
gaaaagcagaaggaagc

SEQ ID NO: 708605 - RNA, 17 nt, Artificial Sequence
  Synthetic
gcagagaguugggaagc

SEQ ID NO: 708606 - RNA, 17 nt, Artificial Sequence
  Synthetic
gcaggcuuaauggaagc

SEQ ID NO: 708607 - RNA, 17 nt, Artificial Sequence
  Synthetic
gauagguaaguggaagc

SEQ ID NO: 708608 - RNA, 17 nt, Artificial Sequence
  Synthetic
gaguucugauuggaagc

SEQ ID NO: 708609 - RNA, 17 nt, Artificial Sequence
  Synthetic
guucacccucaugaagc

SEQ ID NO: 708610 - RNA, 17 nt, Artificial Sequence
  Synthetic
gaccaucucacugaagc

SEQ ID NO: 708611 - RNA, 17 nt, Artificial Sequence
  Synthetic
gaagugcccagugaagc

SEQ ID NO: 708612 - RNA, 17 nt, Artificial Sequence
  Synthetic
gcugggaaaugugaagc

SEQ ID NO: 708613 - RNA, 17 nt, Artificial Sequence
  Synthetic
ggagaaucacuugaagc

SEQ ID NO: 708614 - RNA, 17 nt, Artificial Sequence
  Synthetic
guaaauuaauuugaagc

SEQ ID NO: 708615 - RNA, 17 nt, Artificial Sequence
  Synthetic
gguucacaggaauaagc

SEQ ID NO: 708616 - RNA, 17 nt, Artificial Sequence
  Synthetic
gacuaagggaucuaagc

SEQ ID NO: 708617 - RNA, 17 nt, Artificial Sequence
  Synthetic
gcucaguaaguguaagc

SEQ ID NO: 708618 - RNA, 17 nt, Artificial Sequence
  Synthetic
guaaggguuuuuuaagc

SEQ ID NO: 708619 - RNA, 17 nt, Artificial Sequence
  Synthetic
ggugguuugaaaacagc

SEQ ID NO: 708620 - RNA, 17 nt, Artificial Sequence
  Synthetic
gugucuuuccaaacagc

SEQ ID NO: 708621 - RNA, 17 nt, Artificial Sequence
  Synthetic
gcaggaaaaauaacagc

SEQ ID NO: 708622 - RNA, 17 nt, Artificial Sequence
  Synthetic
gucacaggugacacagc

SEQ ID NO: 708623 - RNA, 17 nt, Artificial Sequence
  Synthetic
gcgccugccaccacagc

SEQ ID NO: 708624 - RNA, 17 nt, Artificial Sequence
  Synthetic
gaaaaaaaagccacagc

SEQ ID NO: 708625 - RNA, 17 nt, Artificial Sequence
  Synthetic
gggaguaaaagcacagc

SEQ ID NO: 708626 - RNA, 17 nt, Artificial Sequence
  Synthetic
gcagauaaacagacagc

SEQ ID NO: 708627 - RNA, 17 nt, Artificial Sequence
  Synthetic
guagacaggacuacagc

SEQ ID NO: 708628 - RNA, 17 nt, Artificial Sequence
  Synthetic
gguugauguccuacagc

SEQ ID NO: 708629 - RNA, 17 nt, Artificial Sequence
  Synthetic
gcagaagcaaguacagc

SEQ ID NO: 708630 - RNA, 17 nt, Artificial Sequence
  Synthetic
gugcuccccaaaccagc

SEQ ID NO: 708631 - RNA, 17 nt, Artificial Sequence
  Synthetic
gcagaagagugaccagc

SEQ ID NO: 708632 - RNA, 17 nt, Artificial Sequence
  Synthetic
gcucuuguugccccagc

SEQ ID NO: 708633 - RNA, 17 nt, Artificial Sequence
  Synthetic
guaaagaagggcccagc

SEQ ID NO: 708634 - RNA, 17 nt, Artificial Sequence
  Synthetic
gggagacaccucccagc

SEQ ID NO: 708635 - RNA, 17 nt, Artificial Sequence
  Synthetic
gccaugauggucccagc

SEQ ID NO: 708636 - RNA, 17 nt, Artificial Sequence
  Synthetic
gauaaaaugaagccagc

SEQ ID NO: 708637 - RNA, 17 nt, Artificial Sequence
  Synthetic
ggagaaugagugccagc

SEQ ID NO: 708638 - RNA, 17 nt, Artificial Sequence
  Synthetic
guuuuuuaacauccagc

SEQ ID NO: 708639 - RNA, 17 nt, Artificial Sequence
  Synthetic
gcacuucccuauccagc

SEQ ID NO: 708640 - RNA, 17 nt, Artificial Sequence
  Synthetic
gacccagaaaguccagc

SEQ ID NO: 708641 - RNA, 17 nt, Artificial Sequence
  Synthetic
gguauauacccagcagc

SEQ ID NO: 708642 - RNA, 17 nt, Artificial Sequence
  Synthetic
guugguaaagcagcagc

SEQ ID NO: 708643 - RNA, 17 nt, Artificial Sequence
  Synthetic
gauuaucugucagcagc

SEQ ID NO: 708644 - RNA, 17 nt, Artificial Sequence
  Synthetic
guugcugccugagcagc

SEQ ID NO: 708645 - RNA, 17 nt, Artificial Sequence
  Synthetic
gcaguaccuugagcagc

SEQ ID NO: 708646 - RNA, 17 nt, Artificial Sequence
  Synthetic
gggugagaaauagcagc

SEQ ID NO: 708647 - RNA, 17 nt, Artificial Sequence
  Synthetic
gcagcacuccuagcagc

SEQ ID NO: 708648 - RNA, 17 nt, Artificial Sequence
  Synthetic
gaagaaacaguagcagc

SEQ ID NO: 708649 - RNA, 17 nt, Artificial Sequence
  Synthetic
gagggaugaguagcagc

SEQ ID NO: 708650 - RNA, 17 nt, Artificial Sequence
  Synthetic
gagggaguaaaggcagc

SEQ ID NO: 708651 - RNA, 17 nt, Artificial Sequence
  Synthetic
gcuuaagagaaggcagc

SEQ ID NO: 708652 - RNA, 17 nt, Artificial Sequence
  Synthetic
gauguggugcgggcagc

SEQ ID NO: 708653 - RNA, 17 nt, Artificial Sequence
  Synthetic
gucggggagggggcagc

SEQ ID NO: 708654 - RNA, 17 nt, Artificial Sequence
  Synthetic
ggaguucucccugcagc

SEQ ID NO: 708655 - RNA, 17 nt, Artificial Sequence
  Synthetic
gaauaaauaaaaucagc

SEQ ID NO: 708656 - RNA, 17 nt, Artificial Sequence
  Synthetic
gagggaauaugaucagc

SEQ ID NO: 708657 - RNA, 17 nt, Artificial Sequence
  Synthetic
gauccaauuauaucagc

SEQ ID NO: 708658 - RNA, 17 nt, Artificial Sequence
  Synthetic
guggccuuuaacucagc

SEQ ID NO: 708659 - RNA, 17 nt, Artificial Sequence
  Synthetic
guaaaucuuugcucagc

SEQ ID NO: 708660 - RNA, 17 nt, Artificial Sequence
  Synthetic
guauuccucaucucagc

SEQ ID NO: 708661 - RNA, 17 nt, Artificial Sequence
  Synthetic
gucaguuguaucucagc

SEQ ID NO: 708662 - RNA, 17 nt, Artificial Sequence
  Synthetic
ggauaugcucucucagc

SEQ ID NO: 708663 - RNA, 17 nt, Artificial Sequence
  Synthetic
gucagcugugucucagc

SEQ ID NO: 708664 - RNA, 17 nt, Artificial Sequence
  Synthetic
gaaccagagccuucagc

SEQ ID NO: 708665 - RNA, 17 nt, Artificial Sequence
  Synthetic
gaagguugaauuucagc

SEQ ID NO: 708666 - RNA, 17 nt, Artificial Sequence
  Synthetic
gagauuggugaaagagc

SEQ ID NO: 708667 - RNA, 17 nt, Artificial Sequence
  Synthetic
ggcuagaacagaagagc

SEQ ID NO: 708668 - RNA, 17 nt, Artificial Sequence
  Synthetic
gguacucagagaagagc

SEQ ID NO: 708669 - RNA, 17 nt, Artificial Sequence
  Synthetic
gaaacauguagaagagc

SEQ ID NO: 708670 - RNA, 17 nt, Artificial Sequence
  Synthetic
guucauuagugaagagc

SEQ ID NO: 708671 - RNA, 17 nt, Artificial Sequence
  Synthetic
gcucuguaagacagagc

SEQ ID NO: 708672 - RNA, 17 nt, Artificial Sequence
  Synthetic
gaaagaaccagcagagc

SEQ ID NO: 708673 - RNA, 17 nt, Artificial Sequence
  Synthetic
gagaacaaaaagagagc

SEQ ID NO: 708674 - RNA, 17 nt, Artificial Sequence
  Synthetic
gugagauuccagagagc

SEQ ID NO: 708675 - RNA, 17 nt, Artificial Sequence
  Synthetic
gaauuacaguagagagc

SEQ ID NO: 708676 - RNA, 17 nt, Artificial Sequence
  Synthetic
ggggucaguuagagagc

SEQ ID NO: 708677 - RNA, 17 nt, Artificial Sequence
  Synthetic
gcaggagauuggagagc

SEQ ID NO: 708678 - RNA, 17 nt, Artificial Sequence
  Synthetic
gaggcaaguguuagagc

SEQ ID NO: 708679 - RNA, 17 nt, Artificial Sequence
  Synthetic
gaccucuugacaggagc

SEQ ID NO: 708680 - RNA, 17 nt, Artificial Sequence
  Synthetic
gaacuagagucaggagc

SEQ ID NO: 708681 - RNA, 17 nt, Artificial Sequence
  Synthetic
gagauacaaagaggagc

SEQ ID NO: 708682 - RNA, 17 nt, Artificial Sequence
  Synthetic
gagguacaaagaggagc

SEQ ID NO: 708683 - RNA, 17 nt, Artificial Sequence
  Synthetic
gagcagcccagaggagc

SEQ ID NO: 708684 - RNA, 17 nt, Artificial Sequence
  Synthetic
gcaggaggaggaggagc

SEQ ID NO: 708685 - RNA, 17 nt, Artificial Sequence
  Synthetic
gaaaaauacugaggagc

SEQ ID NO: 708686 - RNA, 17 nt, Artificial Sequence
  Synthetic
gaggugagcguaggagc

SEQ ID NO: 708687 - RNA, 17 nt, Artificial Sequence
  Synthetic
guuugccuggacggagc

SEQ ID NO: 708688 - RNA, 17 nt, Artificial Sequence
  Synthetic
gaaggcagaacgggagc

SEQ ID NO: 708689 - RNA, 17 nt, Artificial Sequence
  Synthetic
gaagggcaaaggggagc

SEQ ID NO: 708690 - RNA, 17 nt, Artificial Sequence
  Synthetic
guaugucuuuugggagc

SEQ ID NO: 708691 - RNA, 17 nt, Artificial Sequence
  Synthetic
ggacaaagagauggagc

SEQ ID NO: 708692 - RNA, 17 nt, Artificial Sequence
  Synthetic
gacagggacacuggagc

SEQ ID NO: 708693 - RNA, 17 nt, Artificial Sequence
  Synthetic
gaaaagugagcuggagc

SEQ ID NO: 708694 - RNA, 17 nt, Artificial Sequence
  Synthetic
gcaaaugguaaaugagc

SEQ ID NO: 708695 - RNA, 17 nt, Artificial Sequence
  Synthetic
gaggcaggucaaugagc

SEQ ID NO: 708696 - RNA, 17 nt, Artificial Sequence
  Synthetic
gcauugccuccaugagc

SEQ ID NO: 708697 - RNA, 17 nt, Artificial Sequence
  Synthetic
gugguaggaagaugagc

SEQ ID NO: 708698 - RNA, 17 nt, Artificial Sequence
  Synthetic
gucccagugagaugagc

SEQ ID NO: 708699 - RNA, 17 nt, Artificial Sequence
  Synthetic
gcuagucagauaugagc

SEQ ID NO: 708700 - RNA, 17 nt, Artificial Sequence
  Synthetic
gaggaaagaaacugagc

SEQ ID NO: 708701 - RNA, 17 nt, Artificial Sequence
  Synthetic
guaauccuaaauugagc

SEQ ID NO: 708702 - RNA, 17 nt, Artificial Sequence
  Synthetic
gccugggacaauugagc

SEQ ID NO: 708703 - RNA, 17 nt, Artificial Sequence
  Synthetic
gaaaacucuccuugagc

SEQ ID NO: 708704 - RNA, 17 nt, Artificial Sequence
  Synthetic
gaauaugaaucuugagc

SEQ ID NO: 708705 - RNA, 17 nt, Artificial Sequence
  Synthetic
gucucaaacuuuugagc

SEQ ID NO: 708706 - RNA, 17 nt, Artificial Sequence
  Synthetic
gagcugcaaaacauagc

SEQ ID NO: 708707 - RNA, 17 nt, Artificial Sequence
  Synthetic
ggaaacccaaacauagc

SEQ ID NO: 708708 - RNA, 17 nt, Artificial Sequence
  Synthetic
guauaagaucacauagc

SEQ ID NO: 708709 - RNA, 17 nt, Artificial Sequence
  Synthetic
gaggauauccagauagc

SEQ ID NO: 708710 - RNA, 17 nt, Artificial Sequence
  Synthetic
gcuguucucaugauagc

SEQ ID NO: 708711 - RNA, 17 nt, Artificial Sequence
  Synthetic
gcaugaaacaaacuagc

SEQ ID NO: 708712 - RNA, 17 nt, Artificial Sequence
  Synthetic
gauugacucggacuagc

SEQ ID NO: 708713 - RNA, 17 nt, Artificial Sequence
  Synthetic
gucaaagagaagcuagc

SEQ ID NO: 708714 - RNA, 17 nt, Artificial Sequence
  Synthetic
gucauuaugaugcuagc

SEQ ID NO: 708715 - RNA, 17 nt, Artificial Sequence
  Synthetic
gaaaucauuucucuagc

SEQ ID NO: 708716 - RNA, 17 nt, Artificial Sequence
  Synthetic
ggaaaggcuaaaguagc

SEQ ID NO: 708717 - RNA, 17 nt, Artificial Sequence
  Synthetic
ggagcucccagaguagc

SEQ ID NO: 708718 - RNA, 17 nt, Artificial Sequence
  Synthetic
ucagccucccgaguagc

SEQ ID NO: 708719 - RNA, 17 nt, Artificial Sequence
  Synthetic
guagccucccgaguagc

SEQ ID NO: 708720 - RNA, 17 nt, Artificial Sequence
  Synthetic
gccuccucccgaguagc

SEQ ID NO: 708721 - RNA, 17 nt, Artificial Sequence
  Synthetic
ggacagcauuuaguagc

SEQ ID NO: 708722 - RNA, 17 nt, Artificial Sequence
  Synthetic
gucacaauuugcguagc

SEQ ID NO: 708723 - RNA, 17 nt, Artificial Sequence
  Synthetic
aaauacaaaaaauuagc

SEQ ID NO: 708724 - RNA, 17 nt, Artificial Sequence
  Synthetic
aaaauacaaaaauuagc

SEQ ID NO: 708725 - RNA, 17 nt, Artificial Sequence
  Synthetic
guguggcagcucuuagc

SEQ ID NO: 708726 - RNA, 17 nt, Artificial Sequence
  Synthetic
gacgucuaugaguuagc

SEQ ID NO: 708727 - RNA, 17 nt, Artificial Sequence
  Synthetic
gguuucaccauguuagc

SEQ ID NO: 708728 - RNA, 17 nt, Artificial Sequence
  Synthetic
gucauuaugauguuagc

SEQ ID NO: 708729 - RNA, 17 nt, Artificial Sequence
  Synthetic
gaaguaaaauauuuagc

SEQ ID NO: 708730 - RNA, 17 nt, Artificial Sequence
  Synthetic
ggaauuuacauuuuagc

SEQ ID NO: 708731 - RNA, 17 nt, Artificial Sequence
  Synthetic
gacaauggacuuuuagc

SEQ ID NO: 708732 - RNA, 17 nt, Artificial Sequence
  Synthetic
gugaaaaaugaaaacgc

SEQ ID NO: 708733 - RNA, 17 nt, Artificial Sequence
  Synthetic
gcccacugagaccacgc

SEQ ID NO: 708734 - RNA, 17 nt, Artificial Sequence
  Synthetic
gcucgggaggaugacgc

SEQ ID NO: 708735 - RNA, 17 nt, Artificial Sequence
  Synthetic
gguguuccaggugacgc

SEQ ID NO: 708736 - RNA, 17 nt, Artificial Sequence
  Synthetic
gcagaucgcuugagcgc

SEQ ID NO: 708737 - RNA, 17 nt, Artificial Sequence
  Synthetic
gcugguacuacaggcgc

SEQ ID NO: 708738 - RNA, 17 nt, Artificial Sequence
  Synthetic
gcuaggauuacaggcgc

SEQ ID NO: 708739 - RNA, 17 nt, Artificial Sequence
  Synthetic
ggacagcuugcuugcgc

SEQ ID NO: 708740 - RNA, 17 nt, Artificial Sequence
  Synthetic
ggaugccauucuaucgc

SEQ ID NO: 708741 - RNA, 17 nt, Artificial Sequence
  Synthetic
gaaugguucuaucucgc

SEQ ID NO: 708742 - RNA, 17 nt, Artificial Sequence
  Synthetic
gccuaagccagucucgc

SEQ ID NO: 708743 - RNA, 17 nt, Artificial Sequence
  Synthetic
ggcucuuccuacuucgc

SEQ ID NO: 708744 - RNA, 17 nt, Artificial Sequence
  Synthetic
gagggugggguuuucgc

SEQ ID NO: 708745 - RNA, 17 nt, Artificial Sequence
  Synthetic
ggaaaacaaaaaaaggc

SEQ ID NO: 708746 - RNA, 17 nt, Artificial Sequence
  Synthetic
gcauuacuuuaaaaggc

SEQ ID NO: 708747 - RNA, 17 nt, Artificial Sequence
  Synthetic
gggaauuaaccaaaggc

SEQ ID NO: 708748 - RNA, 17 nt, Artificial Sequence
  Synthetic
ggucaggacagaaaggc

SEQ ID NO: 708749 - RNA, 17 nt, Artificial Sequence
  Synthetic
guugacuuuauaaaggc

SEQ ID NO: 708750 - RNA, 17 nt, Artificial Sequence
  Synthetic
gcaaggcaagacaaggc

SEQ ID NO: 708751 - RNA, 17 nt, Artificial Sequence
  Synthetic
cuuugggaggccaaggc

SEQ ID NO: 708752 - RNA, 17 nt, Artificial Sequence
  Synthetic
gaaaacauugagaaggc

SEQ ID NO: 708753 - RNA, 17 nt, Artificial Sequence
  Synthetic
gaggaaaucaggaaggc

SEQ ID NO: 708754 - RNA, 17 nt, Artificial Sequence
  Synthetic
gagaagcgggggaaggc

SEQ ID NO: 708755 - RNA, 17 nt, Artificial Sequence
  Synthetic
gguuaaagucugaaggc

SEQ ID NO: 708756 - RNA, 17 nt, Artificial Sequence
  Synthetic
gauuuaguauugaaggc

SEQ ID NO: 708757 - RNA, 17 nt, Artificial Sequence
  Synthetic
gagcuugggaauaaggc

SEQ ID NO: 708758 - RNA, 17 nt, Artificial Sequence
  Synthetic
gaauuccuaauuaaggc

SEQ ID NO: 708759 - RNA, 17 nt, Artificial Sequence
  Synthetic
gauguuuugacacaggc

SEQ ID NO: 708760 - RNA, 17 nt, Artificial Sequence
  Synthetic
ggcucugaaauacaggc

SEQ ID NO: 708761 - RNA, 17 nt, Artificial Sequence
  Synthetic
gagccagagcuacaggc

SEQ ID NO: 708762 - RNA, 17 nt, Artificial Sequence
  Synthetic
guaaugaauaaccaggc

SEQ ID NO: 708763 - RNA, 17 nt, Artificial Sequence
  Synthetic
ggccauguugaccaggc

SEQ ID NO: 708764 - RNA, 17 nt, Artificial Sequence
  Synthetic
gcucuuguaacccaggc

SEQ ID NO: 708765 - RNA, 17 nt, Artificial Sequence
  Synthetic
cacucugucacccaggc

SEQ ID NO: 708766 - RNA, 17 nt, Artificial Sequence
  Synthetic
gcuuuugucacccaggc

SEQ ID NO: 708767 - RNA, 17 nt, Artificial Sequence
  Synthetic
gcucugucaccccaggc

SEQ ID NO: 708768 - RNA, 17 nt, Artificial Sequence
  Synthetic
gcucuugucccccaggc

SEQ ID NO: 708769 - RNA, 17 nt, Artificial Sequence
  Synthetic
gguaguagagcccaggc

SEQ ID NO: 708770 - RNA, 17 nt, Artificial Sequence
  Synthetic
cgcucugucgcccaggc

SEQ ID NO: 708771 - RNA, 17 nt, Artificial Sequence
  Synthetic
ggcucugucgcccaggc

SEQ ID NO: 708772 - RNA, 17 nt, Artificial Sequence
  Synthetic
gcucgugucgcccaggc

SEQ ID NO: 708773 - RNA, 17 nt, Artificial Sequence
  Synthetic
gcucuugucgcccaggc

SEQ ID NO: 708774 - RNA, 17 nt, Artificial Sequence
  Synthetic
gaccauguugcccaggc

SEQ ID NO: 708775 - RNA, 17 nt, Artificial Sequence
  Synthetic
gcucuuguugcccaggc

SEQ ID NO: 708776 - RNA, 17 nt, Artificial Sequence
  Synthetic
gacaauguuggccaggc

SEQ ID NO: 708777 - RNA, 17 nt, Artificial Sequence
  Synthetic
caccauguuggccaggc

SEQ ID NO: 708778 - RNA, 17 nt, Artificial Sequence
  Synthetic
ggaaaauuauuccaggc

SEQ ID NO: 708779 - RNA, 17 nt, Artificial Sequence
  Synthetic
ggccagggcaaucaggc

SEQ ID NO: 708780 - RNA, 17 nt, Artificial Sequence
  Synthetic
ggccagggcgaucaggc

SEQ ID NO: 708781 - RNA, 17 nt, Artificial Sequence
  Synthetic
ggcucugucacucaggc

SEQ ID NO: 708782 - RNA, 17 nt, Artificial Sequence
  Synthetic
gccuauuuuacucaggc

SEQ ID NO: 708783 - RNA, 17 nt, Artificial Sequence
  Synthetic
ggugugauuucucaggc

SEQ ID NO: 708784 - RNA, 17 nt, Artificial Sequence
  Synthetic
gagaauuuucaagaggc

SEQ ID NO: 708785 - RNA, 17 nt, Artificial Sequence
  Synthetic
gcauuauuuacagaggc

SEQ ID NO: 708786 - RNA, 17 nt, Artificial Sequence
  Synthetic
ggagcaagaagagaggc

SEQ ID NO: 708787 - RNA, 17 nt, Artificial Sequence
  Synthetic
gcauugauaagagaggc

SEQ ID NO: 708788 - RNA, 17 nt, Artificial Sequence
  Synthetic
gugacaaccagagaggc

SEQ ID NO: 708789 - RNA, 17 nt, Artificial Sequence
  Synthetic
guauuuuuaguagaggc

SEQ ID NO: 708790 - RNA, 17 nt, Artificial Sequence
  Synthetic
ggugcugcaaaggaggc

SEQ ID NO: 708791 - RNA, 17 nt, Artificial Sequence
  Synthetic
gauaauuuuuaggaggc

SEQ ID NO: 708792 - RNA, 17 nt, Artificial Sequence
  Synthetic
gcccacaagagggaggc

SEQ ID NO: 708793 - RNA, 17 nt, Artificial Sequence
  Synthetic
guguguguaugggaggc

SEQ ID NO: 708794 - RNA, 17 nt, Artificial Sequence
  Synthetic
gaaucauccugggaggc

SEQ ID NO: 708795 - RNA, 17 nt, Artificial Sequence
  Synthetic
gaugaggcuaaugaggc

SEQ ID NO: 708796 - RNA, 17 nt, Artificial Sequence
  Synthetic
guagucccagcugaggc

SEQ ID NO: 708797 - RNA, 17 nt, Artificial Sequence
  Synthetic
acucaggaggcugaggc

SEQ ID NO: 708798 - RNA, 17 nt, Artificial Sequence
  Synthetic
acucgggaggcugaggc

SEQ ID NO: 708799 - RNA, 17 nt, Artificial Sequence
  Synthetic
gcucgggaggcugaggc

SEQ ID NO: 708800 - RNA, 17 nt, Artificial Sequence
  Synthetic
cuuugggaggcugaggc

SEQ ID NO: 708801 - RNA, 17 nt, Artificial Sequence
  Synthetic
ggggucauuccauaggc

SEQ ID NO: 708802 - RNA, 17 nt, Artificial Sequence
  Synthetic
gaaugggagagauaggc

SEQ ID NO: 708803 - RNA, 17 nt, Artificial Sequence
  Synthetic
gugcuaggauuauaggc

SEQ ID NO: 708804 - RNA, 17 nt, Artificial Sequence
  Synthetic
ggaacaguauucuaggc

SEQ ID NO: 708805 - RNA, 17 nt, Artificial Sequence
  Synthetic
gagagagagauguaggc

SEQ ID NO: 708806 - RNA, 17 nt, Artificial Sequence
  Synthetic
ggagaugucaauuaggc

SEQ ID NO: 708807 - RNA, 17 nt, Artificial Sequence
  Synthetic
ggaaauggaauuuaggc

SEQ ID NO: 708808 - RNA, 17 nt, Artificial Sequence
  Synthetic
gaggagcacguuuaggc

SEQ ID NO: 708809 - RNA, 17 nt, Artificial Sequence
  Synthetic
gcgugagccaccacggc

SEQ ID NO: 708810 - RNA, 17 nt, Artificial Sequence
  Synthetic
gauaauugaaucacggc

SEQ ID NO: 708811 - RNA, 17 nt, Artificial Sequence
  Synthetic
gcucuugucgccccggc

SEQ ID NO: 708812 - RNA, 17 nt, Artificial Sequence
  Synthetic
gagccaccacgcccggc

SEQ ID NO: 708813 - RNA, 17 nt, Artificial Sequence
  Synthetic
gaaaagagcauugcggc

SEQ ID NO: 708814 - RNA, 17 nt, Artificial Sequence
  Synthetic
gcugccgcuggcucggc

SEQ ID NO: 708815 - RNA, 17 nt, Artificial Sequence
  Synthetic
gaugagaugagaagggc

SEQ ID NO: 708816 - RNA, 17 nt, Artificial Sequence
  Synthetic
gguuugggaugaagggc

SEQ ID NO: 708817 - RNA, 17 nt, Artificial Sequence
  Synthetic
gggggaugaaacagggc

SEQ ID NO: 708818 - RNA, 17 nt, Artificial Sequence
  Synthetic
gucuguggccccagggc

SEQ ID NO: 708819 - RNA, 17 nt, Artificial Sequence
  Synthetic
guguguuaaagcagggc

SEQ ID NO: 708820 - RNA, 17 nt, Artificial Sequence
  Synthetic
gauugggaaugcagggc

SEQ ID NO: 708821 - RNA, 17 nt, Artificial Sequence
  Synthetic
guuuuccaagagagggc

SEQ ID NO: 708822 - RNA, 17 nt, Artificial Sequence
  Synthetic
ggaucauaaaggagggc

SEQ ID NO: 708823 - RNA, 17 nt, Artificial Sequence
  Synthetic
gggaggccaaggagggc

SEQ ID NO: 708824 - RNA, 17 nt, Artificial Sequence
  Synthetic
gugaaauagaugagggc

SEQ ID NO: 708825 - RNA, 17 nt, Artificial Sequence
  Synthetic
ggggcuugcuauagggc

SEQ ID NO: 708826 - RNA, 17 nt, Artificial Sequence
  Synthetic
gaaaacagaccacgggc

SEQ ID NO: 708827 - RNA, 17 nt, Artificial Sequence
  Synthetic
ggcucuguugcccgggc

SEQ ID NO: 708828 - RNA, 17 nt, Artificial Sequence
  Synthetic
guccaagaucaaggggc

SEQ ID NO: 708829 - RNA, 17 nt, Artificial Sequence
  Synthetic
ggaaaggguacaggggc

SEQ ID NO: 708830 - RNA, 17 nt, Artificial Sequence
  Synthetic
ggaaucaagggaggggc

SEQ ID NO: 708831 - RNA, 17 nt, Artificial Sequence
  Synthetic
gcacuguuccagggggc

SEQ ID NO: 708832 - RNA, 17 nt, Artificial Sequence
  Synthetic
gucgugggguggggggc

SEQ ID NO: 708833 - RNA, 17 nt, Artificial Sequence
  Synthetic
guugucacauugggggc

SEQ ID NO: 708834 - RNA, 17 nt, Artificial Sequence
  Synthetic
gucuucagagauggggc

SEQ ID NO: 708835 - RNA, 17 nt, Artificial Sequence
  Synthetic
gagaguguugcuggggc

SEQ ID NO: 708836 - RNA, 17 nt, Artificial Sequence
  Synthetic
gucauggauucuggggc

SEQ ID NO: 708837 - RNA, 17 nt, Artificial Sequence
  Synthetic
gccuccaguucuggggc

SEQ ID NO: 708838 - RNA, 17 nt, Artificial Sequence
  Synthetic
gugguggggcuuggggc

SEQ ID NO: 708839 - RNA, 17 nt, Artificial Sequence
  Synthetic
gggcuucaagccugggc

SEQ ID NO: 708840 - RNA, 17 nt, Artificial Sequence
  Synthetic
gcuuuuggggccugggc

SEQ ID NO: 708841 - RNA, 17 nt, Artificial Sequence
  Synthetic
guuuccaaacucugggc

SEQ ID NO: 708842 - RNA, 17 nt, Artificial Sequence
  Synthetic
guuuuccuuuugugggc

SEQ ID NO: 708843 - RNA, 17 nt, Artificial Sequence
  Synthetic
gccaugaaguuuugggc

SEQ ID NO: 708844 - RNA, 17 nt, Artificial Sequence
  Synthetic
gguggccagaaaauggc

SEQ ID NO: 708845 - RNA, 17 nt, Artificial Sequence
  Synthetic
gcagggaacuaaauggc

SEQ ID NO: 708846 - RNA, 17 nt, Artificial Sequence
  Synthetic
gcuaccaagggaauggc

SEQ ID NO: 708847 - RNA, 17 nt, Artificial Sequence
  Synthetic
guucuuaucauaauggc

SEQ ID NO: 708848 - RNA, 17 nt, Artificial Sequence
  Synthetic
ggacagugaagcauggc

SEQ ID NO: 708849 - RNA, 17 nt, Artificial Sequence
  Synthetic
guuuggccaaucauggc

SEQ ID NO: 708850 - RNA, 17 nt, Artificial Sequence
  Synthetic
guuuuaaaucucauggc

SEQ ID NO: 708851 - RNA, 17 nt, Artificial Sequence
  Synthetic
ggguggaaugguauggc

SEQ ID NO: 708852 - RNA, 17 nt, Artificial Sequence
  Synthetic
gaggaagugauuauggc

SEQ ID NO: 708853 - RNA, 17 nt, Artificial Sequence
  Synthetic
gugucgggaaaacuggc

SEQ ID NO: 708854 - RNA, 17 nt, Artificial Sequence
  Synthetic
gucacaguaaaacuggc

SEQ ID NO: 708855 - RNA, 17 nt, Artificial Sequence
  Synthetic
gucugcuuuacacuggc

SEQ ID NO: 708856 - RNA, 17 nt, Artificial Sequence
  Synthetic
guggauaaaggacuggc

SEQ ID NO: 708857 - RNA, 17 nt, Artificial Sequence
  Synthetic
gagaggaagauacuggc

SEQ ID NO: 708858 - RNA, 17 nt, Artificial Sequence
  Synthetic
gggauaucugaccuggc

SEQ ID NO: 708859 - RNA, 17 nt, Artificial Sequence
  Synthetic
gauaaagaaggccuggc

SEQ ID NO: 708860 - RNA, 17 nt, Artificial Sequence
  Synthetic
gggcuagacaaucuggc

SEQ ID NO: 708861 - RNA, 17 nt, Artificial Sequence
  Synthetic
gagccaccgcaucuggc

SEQ ID NO: 708862 - RNA, 17 nt, Artificial Sequence
  Synthetic
gaaugaaucacucuggc

SEQ ID NO: 708863 - RNA, 17 nt, Artificial Sequence
  Synthetic
ggcgauucccuucuggc

SEQ ID NO: 708864 - RNA, 17 nt, Artificial Sequence
  Synthetic
guaaauaugcuucuggc

SEQ ID NO: 708865 - RNA, 17 nt, Artificial Sequence
  Synthetic
gguacuugucuucuggc

SEQ ID NO: 708866 - RNA, 17 nt, Artificial Sequence
  Synthetic
guggggcaauuucuggc

SEQ ID NO: 708867 - RNA, 17 nt, Artificial Sequence
  Synthetic
gaaucuaaaacaguggc

SEQ ID NO: 708868 - RNA, 17 nt, Artificial Sequence
  Synthetic
ggcuggagugcaguggc

SEQ ID NO: 708869 - RNA, 17 nt, Artificial Sequence
  Synthetic
ggagugaccagaguggc

SEQ ID NO: 708870 - RNA, 17 nt, Artificial Sequence
  Synthetic
gccauggcuggaguggc

SEQ ID NO: 708871 - RNA, 17 nt, Artificial Sequence
  Synthetic
ggcuggaguggaguggc

SEQ ID NO: 708872 - RNA, 17 nt, Artificial Sequence
  Synthetic
ggugaauuuauaguggc

SEQ ID NO: 708873 - RNA, 17 nt, Artificial Sequence
  Synthetic
gagcccccaguaguggc

SEQ ID NO: 708874 - RNA, 17 nt, Artificial Sequence
  Synthetic
ggcauuguguuaguggc

SEQ ID NO: 708875 - RNA, 17 nt, Artificial Sequence
  Synthetic
gagccagcugugguggc

SEQ ID NO: 708876 - RNA, 17 nt, Artificial Sequence
  Synthetic
guaacuuauacuguggc

SEQ ID NO: 708877 - RNA, 17 nt, Artificial Sequence
  Synthetic
gagagaguagguguggc

SEQ ID NO: 708878 - RNA, 17 nt, Artificial Sequence
  Synthetic
gaguucauguccuuggc

SEQ ID NO: 708879 - RNA, 17 nt, Artificial Sequence
  Synthetic
gagaugcaagucuuggc

SEQ ID NO: 708880 - RNA, 17 nt, Artificial Sequence
  Synthetic
ggaaaacaggaguuggc

SEQ ID NO: 708881 - RNA, 17 nt, Artificial Sequence
  Synthetic
gacauagcaggguuggc

SEQ ID NO: 708882 - RNA, 17 nt, Artificial Sequence
  Synthetic
gguuucaccauguuggc

SEQ ID NO: 708883 - RNA, 17 nt, Artificial Sequence
  Synthetic
ggaauccaucuguuggc

SEQ ID NO: 708884 - RNA, 17 nt, Artificial Sequence
  Synthetic
gccucauaggguuuggc

SEQ ID NO: 708885 - RNA, 17 nt, Artificial Sequence
  Synthetic
ggaaaacuauuuuuggc

SEQ ID NO: 708886 - RNA, 17 nt, Artificial Sequence
  Synthetic
gcuauuaggaaaaaugc

SEQ ID NO: 708887 - RNA, 17 nt, Artificial Sequence
  Synthetic
gucucaaugugaaaugc

SEQ ID NO: 708888 - RNA, 17 nt, Artificial Sequence
  Synthetic
guuaagugguuaaaugc

SEQ ID NO: 708889 - RNA, 17 nt, Artificial Sequence
  Synthetic
guguuugaaaacaaugc

SEQ ID NO: 708890 - RNA, 17 nt, Artificial Sequence
  Synthetic
guguauuuaaccaaugc

SEQ ID NO: 708891 - RNA, 17 nt, Artificial Sequence
  Synthetic
gacugcugaaucaaugc

SEQ ID NO: 708892 - RNA, 17 nt, Artificial Sequence
  Synthetic
gacaagauucauaaugc

SEQ ID NO: 708893 - RNA, 17 nt, Artificial Sequence
  Synthetic
ggguauauucaacaugc

SEQ ID NO: 708894 - RNA, 17 nt, Artificial Sequence
  Synthetic
gccaugcaaagccaugc

SEQ ID NO: 708895 - RNA, 17 nt, Artificial Sequence
  Synthetic
guaugcgugggccaugc

SEQ ID NO: 708896 - RNA, 17 nt, Artificial Sequence
  Synthetic
guauacaugugccaugc

SEQ ID NO: 708897 - RNA, 17 nt, Artificial Sequence
  Synthetic
guaugcaugugccaugc

SEQ ID NO: 708898 - RNA, 17 nt, Artificial Sequence
  Synthetic
gagcucugcuugcaugc

SEQ ID NO: 708899 - RNA, 17 nt, Artificial Sequence
  Synthetic
ggugaugacacucaugc

SEQ ID NO: 708900 - RNA, 17 nt, Artificial Sequence
  Synthetic
gggugauuaggucaugc

SEQ ID NO: 708901 - RNA, 17 nt, Artificial Sequence
  Synthetic
gcuaguuuguuucaugc

SEQ ID NO: 708902 - RNA, 17 nt, Artificial Sequence
  Synthetic
gauccuuccaaagaugc

SEQ ID NO: 708903 - RNA, 17 nt, Artificial Sequence
  Synthetic
gauaaauauccagaugc

SEQ ID NO: 708904 - RNA, 17 nt, Artificial Sequence
  Synthetic
gagagagagagagaugc

SEQ ID NO: 708905 - RNA, 17 nt, Artificial Sequence
  Synthetic
guuaaugacugagaugc

SEQ ID NO: 708906 - RNA, 17 nt, Artificial Sequence
  Synthetic
ggugacugaauagaugc

SEQ ID NO: 708907 - RNA, 17 nt, Artificial Sequence
  Synthetic
gacuguguucuagaugc

SEQ ID NO: 708908 - RNA, 17 nt, Artificial Sequence
  Synthetic
ggugaaacauuagaugc

SEQ ID NO: 708909 - RNA, 17 nt, Artificial Sequence
  Synthetic
gauugacuuggcgaugc

SEQ ID NO: 708910 - RNA, 17 nt, Artificial Sequence
  Synthetic
guguuccuaaaggaugc

SEQ ID NO: 708911 - RNA, 17 nt, Artificial Sequence
  Synthetic
ggagagguugaggaugc

SEQ ID NO: 708912 - RNA, 17 nt, Artificial Sequence
  Synthetic
gacauuccagaugaugc

SEQ ID NO: 708913 - RNA, 17 nt, Artificial Sequence
  Synthetic
gguagauugccugaugc

SEQ ID NO: 708914 - RNA, 17 nt, Artificial Sequence
  Synthetic
gucuucuauucugaugc

SEQ ID NO: 708915 - RNA, 17 nt, Artificial Sequence
  Synthetic
gaauccagguuugaugc

SEQ ID NO: 708916 - RNA, 17 nt, Artificial Sequence
  Synthetic
ggcacugccaaauaugc

SEQ ID NO: 708917 - RNA, 17 nt, Artificial Sequence
  Synthetic
gcauacaauaaauaugc

SEQ ID NO: 708918 - RNA, 17 nt, Artificial Sequence
  Synthetic
ggaacugugcaauaugc

SEQ ID NO: 708919 - RNA, 17 nt, Artificial Sequence
  Synthetic
guguccuuugaauaugc

SEQ ID NO: 708920 - RNA, 17 nt, Artificial Sequence
  Synthetic
gcuuugugauaauaugc

SEQ ID NO: 708921 - RNA, 17 nt, Artificial Sequence
  Synthetic
gcuauauauguauaugc

SEQ ID NO: 708922 - RNA, 17 nt, Artificial Sequence
  Synthetic
gauuuaucccuguaugc

SEQ ID NO: 708923 - RNA, 17 nt, Artificial Sequence
  Synthetic
gagauaauggcuuaugc

SEQ ID NO: 708924 - RNA, 17 nt, Artificial Sequence
  Synthetic
ggauauaugauaacugc

SEQ ID NO: 708925 - RNA, 17 nt, Artificial Sequence
  Synthetic
gaacauuuguacacugc

SEQ ID NO: 708926 - RNA, 17 nt, Artificial Sequence
  Synthetic
ggaaguauauucacugc

SEQ ID NO: 708927 - RNA, 17 nt, Artificial Sequence
  Synthetic
gcugcaagcuucacugc

SEQ ID NO: 708928 - RNA, 17 nt, Artificial Sequence
  Synthetic
gucacaacaaagacugc

SEQ ID NO: 708929 - RNA, 17 nt, Artificial Sequence
  Synthetic
gaagucuuauauacugc

SEQ ID NO: 708930 - RNA, 17 nt, Artificial Sequence
  Synthetic
ggugccuguccuacugc

SEQ ID NO: 708931 - RNA, 17 nt, Artificial Sequence
  Synthetic
gcuacccuguguacugc

SEQ ID NO: 708932 - RNA, 17 nt, Artificial Sequence
  Synthetic
gaagcccauucaccugc

SEQ ID NO: 708933 - RNA, 17 nt, Artificial Sequence
  Synthetic
gagacuacaugaccugc

SEQ ID NO: 708934 - RNA, 17 nt, Artificial Sequence
  Synthetic
gauauuuuugucccugc

SEQ ID NO: 708935 - RNA, 17 nt, Artificial Sequence
  Synthetic
gaauaggaaaugccugc

SEQ ID NO: 708936 - RNA, 17 nt, Artificial Sequence
  Synthetic
guuuagaaagugccugc

SEQ ID NO: 708937 - RNA, 17 nt, Artificial Sequence
  Synthetic
ggucuuuuaucuccugc

SEQ ID NO: 708938 - RNA, 17 nt, Artificial Sequence
  Synthetic
guucacuggucuccugc

SEQ ID NO: 708939 - RNA, 17 nt, Artificial Sequence
  Synthetic
gauuuaaaacaagcugc

SEQ ID NO: 708940 - RNA, 17 nt, Artificial Sequence
  Synthetic
gacaccgagcuagcugc

SEQ ID NO: 708941 - RNA, 17 nt, Artificial Sequence
  Synthetic
guguuccauuuggcugc

SEQ ID NO: 708942 - RNA, 17 nt, Artificial Sequence
  Synthetic
gguuaacucaaugcugc

SEQ ID NO: 708943 - RNA, 17 nt, Artificial Sequence
  Synthetic
gagugcuuuaaugcugc

SEQ ID NO: 708944 - RNA, 17 nt, Artificial Sequence
  Synthetic
gguguucaugaugcugc

SEQ ID NO: 708945 - RNA, 17 nt, Artificial Sequence
  Synthetic
ggugauacugaugcugc

SEQ ID NO: 708946 - RNA, 17 nt, Artificial Sequence
  Synthetic
ggugaugcugaugcugc

SEQ ID NO: 708947 - RNA, 17 nt, Artificial Sequence
  Synthetic
gcugcuaggagugcugc

SEQ ID NO: 708948 - RNA, 17 nt, Artificial Sequence
  Synthetic
gacguugcuggugcugc

SEQ ID NO: 708949 - RNA, 17 nt, Artificial Sequence
  Synthetic
gcuuuuucaugugcugc

SEQ ID NO: 708950 - RNA, 17 nt, Artificial Sequence
  Synthetic
gcuuuuugaugugcugc

SEQ ID NO: 708951 - RNA, 17 nt, Artificial Sequence
  Synthetic
gaaaaauauauugcugc

SEQ ID NO: 708952 - RNA, 17 nt, Artificial Sequence
  Synthetic
guuggaaaacacucugc

SEQ ID NO: 708953 - RNA, 17 nt, Artificial Sequence
  Synthetic
gggaaagcucucucugc

SEQ ID NO: 708954 - RNA, 17 nt, Artificial Sequence
  Synthetic
ggcauuaaaaugucugc

SEQ ID NO: 708955 - RNA, 17 nt, Artificial Sequence
  Synthetic
gcucaugaggauucugc

SEQ ID NO: 708956 - RNA, 17 nt, Artificial Sequence
  Synthetic
ggcuuugacuauucugc

SEQ ID NO: 708957 - RNA, 17 nt, Artificial Sequence
  Synthetic
gacaugaccuauucugc

SEQ ID NO: 708958 - RNA, 17 nt, Artificial Sequence
  Synthetic
ggauguccaauuucugc

SEQ ID NO: 708959 - RNA, 17 nt, Artificial Sequence
  Synthetic
ggcauuucuguuucugc

SEQ ID NO: 708960 - RNA, 17 nt, Artificial Sequence
  Synthetic
ggguuuuuuuuuucugc

SEQ ID NO: 708961 - RNA, 17 nt, Artificial Sequence
  Synthetic
ucagccucccaaagugc

SEQ ID NO: 708962 - RNA, 17 nt, Artificial Sequence
  Synthetic
gcgcuggccagaagugc

SEQ ID NO: 708963 - RNA, 17 nt, Artificial Sequence
  Synthetic
gcacugcuaggaagugc

SEQ ID NO: 708964 - RNA, 17 nt, Artificial Sequence
  Synthetic
guuuuuaaucuaagugc

SEQ ID NO: 708965 - RNA, 17 nt, Artificial Sequence
  Synthetic
guuacaauggacagugc

SEQ ID NO: 708966 - RNA, 17 nt, Artificial Sequence
  Synthetic
ggucauauugccagugc

SEQ ID NO: 708967 - RNA, 17 nt, Artificial Sequence
  Synthetic
gagcccugaggcagugc

SEQ ID NO: 708968 - RNA, 17 nt, Artificial Sequence
  Synthetic
ggaauugcaaagagugc

SEQ ID NO: 708969 - RNA, 17 nt, Artificial Sequence
  Synthetic
gaaagccagucuagugc

SEQ ID NO: 708970 - RNA, 17 nt, Artificial Sequence
  Synthetic
ggccugagccaccgugc

SEQ ID NO: 708971 - RNA, 17 nt, Artificial Sequence
  Synthetic
gccugagcagcaggugc

SEQ ID NO: 708972 - RNA, 17 nt, Artificial Sequence
  Synthetic
gacuugcagcagggugc

SEQ ID NO: 708973 - RNA, 17 nt, Artificial Sequence
  Synthetic
guugcuucagagggugc

SEQ ID NO: 708974 - RNA, 17 nt, Artificial Sequence
  Synthetic
gacgguggguggggugc

SEQ ID NO: 708975 - RNA, 17 nt, Artificial Sequence
  Synthetic
gaccaguuaaugggugc

SEQ ID NO: 708976 - RNA, 17 nt, Artificial Sequence
  Synthetic
gacucccaggaaugugc

SEQ ID NO: 708977 - RNA, 17 nt, Artificial Sequence
  Synthetic
gucauuauauaaugugc

SEQ ID NO: 708978 - RNA, 17 nt, Artificial Sequence
  Synthetic
ggcaagagagcaugugc

SEQ ID NO: 708979 - RNA, 17 nt, Artificial Sequence
  Synthetic
ggcguaguggcaugugc

SEQ ID NO: 708980 - RNA, 17 nt, Artificial Sequence
  Synthetic
gcauuuagaagaugugc

SEQ ID NO: 708981 - RNA, 17 nt, Artificial Sequence
  Synthetic
gagaaagauagaugugc

SEQ ID NO: 708982 - RNA, 17 nt, Artificial Sequence
  Synthetic
gagcucgagugcugugc

SEQ ID NO: 708983 - RNA, 17 nt, Artificial Sequence
  Synthetic
gagagugagcagugugc

SEQ ID NO: 708984 - RNA, 17 nt, Artificial Sequence
  Synthetic
ggaagguguaugugugc

SEQ ID NO: 708985 - RNA, 17 nt, Artificial Sequence
  Synthetic
guucucaaccugugugc

SEQ ID NO: 708986 - RNA, 17 nt, Artificial Sequence
  Synthetic
gcauccuugucuugugc

SEQ ID NO: 708987 - RNA, 17 nt, Artificial Sequence
  Synthetic
gauccuaaaauuugugc

SEQ ID NO: 708988 - RNA, 17 nt, Artificial Sequence
  Synthetic
gcgaccaccaaaauugc

SEQ ID NO: 708989 - RNA, 17 nt, Artificial Sequence
  Synthetic
gagucuauuaaaauugc

SEQ ID NO: 708990 - RNA, 17 nt, Artificial Sequence
  Synthetic
gggaauuuggcaauugc

SEQ ID NO: 708991 - RNA, 17 nt, Artificial Sequence
  Synthetic
gagcuguccugaauugc

SEQ ID NO: 708992 - RNA, 17 nt, Artificial Sequence
  Synthetic
gaaaacauagagauugc

SEQ ID NO: 708993 - RNA, 17 nt, Artificial Sequence
  Synthetic
gaauaaagagugauugc

SEQ ID NO: 708994 - RNA, 17 nt, Artificial Sequence
  Synthetic
ggccaugcaaauauugc

SEQ ID NO: 708995 - RNA, 17 nt, Artificial Sequence
  Synthetic
gaucauucacauauugc

SEQ ID NO: 708996 - RNA, 17 nt, Artificial Sequence
  Synthetic
ggaucagucuauauugc

SEQ ID NO: 708997 - RNA, 17 nt, Artificial Sequence
  Synthetic
ggguucaacuaacuugc

SEQ ID NO: 708998 - RNA, 17 nt, Artificial Sequence
  Synthetic
gcccuaccuccacuugc

SEQ ID NO: 708999 - RNA, 17 nt, Artificial Sequence
  Synthetic
guuaaaacacagcuugc

SEQ ID NO: 709000 - RNA, 17 nt, Artificial Sequence
  Synthetic
gaauguuucuagcuugc

SEQ ID NO: 709001 - RNA, 17 nt, Artificial Sequence
  Synthetic
gaagcuuuuaaucuugc

SEQ ID NO: 709002 - RNA, 17 nt, Artificial Sequence
  Synthetic
gaguuguauuuucuugc

SEQ ID NO: 709003 - RNA, 17 nt, Artificial Sequence
  Synthetic
gaaaaauggagaguugc

SEQ ID NO: 709004 - RNA, 17 nt, Artificial Sequence
  Synthetic
guuuacuuauuaguugc

SEQ ID NO: 709005 - RNA, 17 nt, Artificial Sequence
  Synthetic
guagaauuuuacguugc

SEQ ID NO: 709006 - RNA, 17 nt, Artificial Sequence
  Synthetic
ggcugugguaagguugc

SEQ ID NO: 709007 - RNA, 17 nt, Artificial Sequence
  Synthetic
gcacuucuucauguugc

SEQ ID NO: 709008 - RNA, 17 nt, Artificial Sequence
  Synthetic
gauggugcugauguugc

SEQ ID NO: 709009 - RNA, 17 nt, Artificial Sequence
  Synthetic
gauuccucauauguugc

SEQ ID NO: 709010 - RNA, 17 nt, Artificial Sequence
  Synthetic
gugccagguuuuguugc

SEQ ID NO: 709011 - RNA, 17 nt, Artificial Sequence
  Synthetic
ggucugcuggaauuugc

SEQ ID NO: 709012 - RNA, 17 nt, Artificial Sequence
  Synthetic
guuuccggcccauuugc

SEQ ID NO: 709013 - RNA, 17 nt, Artificial Sequence
  Synthetic
gaguaucugccauuugc

SEQ ID NO: 709014 - RNA, 17 nt, Artificial Sequence
  Synthetic
guauuauuuucauuugc

SEQ ID NO: 709015 - RNA, 17 nt, Artificial Sequence
  Synthetic
ggcaguucaagauuugc

SEQ ID NO: 709016 - RNA, 17 nt, Artificial Sequence
  Synthetic
gagaucauguccuuugc

SEQ ID NO: 709017 - RNA, 17 nt, Artificial Sequence
  Synthetic
gacuucauguccuuugc

SEQ ID NO: 709018 - RNA, 17 nt, Artificial Sequence
  Synthetic
gaguucguguccuuugc

SEQ ID NO: 709019 - RNA, 17 nt, Artificial Sequence
  Synthetic
gauuugaugcauuuugc

SEQ ID NO: 709020 - RNA, 17 nt, Artificial Sequence
  Synthetic
ggugaacugcauuuugc

SEQ ID NO: 709021 - RNA, 17 nt, Artificial Sequence
  Synthetic
guuauaauuucuuuugc

SEQ ID NO: 709022 - RNA, 17 nt, Artificial Sequence
  Synthetic
gauugcccaguuuuugc

SEQ ID NO: 709023 - RNA, 17 nt, Artificial Sequence
  Synthetic
gagaagcaaaaaaaauc

SEQ ID NO: 709024 - RNA, 17 nt, Artificial Sequence
  Synthetic
gaaacaauaaaaaaauc

SEQ ID NO: 709025 - RNA, 17 nt, Artificial Sequence
  Synthetic
gaaaaaggagaaaaauc

SEQ ID NO: 709026 - RNA, 17 nt, Artificial Sequence
  Synthetic
ggcgaucauuaaaaauc

SEQ ID NO: 709027 - RNA, 17 nt, Artificial Sequence
  Synthetic
gcuggaaaugcaaaauc

SEQ ID NO: 709028 - RNA, 17 nt, Artificial Sequence
  Synthetic
guaaaugaauuaaaauc

SEQ ID NO: 709029 - RNA, 17 nt, Artificial Sequence
  Synthetic
gagaucuuguuaaaauc

SEQ ID NO: 709030 - RNA, 17 nt, Artificial Sequence
  Synthetic
guuaaguauuuaaaauc

SEQ ID NO: 709031 - RNA, 17 nt, Artificial Sequence
  Synthetic
gauggcauacacaaauc

SEQ ID NO: 709032 - RNA, 17 nt, Artificial Sequence
  Synthetic
gucuccuuccccaaauc

SEQ ID NO: 709033 - RNA, 17 nt, Artificial Sequence
  Synthetic
gacccuauuuccaaauc

SEQ ID NO: 709034 - RNA, 17 nt, Artificial Sequence
  Synthetic
guauagaaucgcaaauc

SEQ ID NO: 709035 - RNA, 17 nt, Artificial Sequence
  Synthetic
gaggacacaggcaaauc

SEQ ID NO: 709036 - RNA, 17 nt, Artificial Sequence
  Synthetic
gucuggagggucaaauc

SEQ ID NO: 709037 - RNA, 17 nt, Artificial Sequence
  Synthetic
gugagguuaaagaaauc

SEQ ID NO: 709038 - RNA, 17 nt, Artificial Sequence
  Synthetic
gcuccuaagaagaaauc

SEQ ID NO: 709039 - RNA, 17 nt, Artificial Sequence
  Synthetic
gcaggccccaggaaauc

SEQ ID NO: 709040 - RNA, 17 nt, Artificial Sequence
  Synthetic
guauuuugggggaaauc

SEQ ID NO: 709041 - RNA, 17 nt, Artificial Sequence
  Synthetic
gcuggcacugggaaauc

SEQ ID NO: 709042 - RNA, 17 nt, Artificial Sequence
  Synthetic
gucauauuaaauaaauc

SEQ ID NO: 709043 - RNA, 17 nt, Artificial Sequence
  Synthetic
gugcagugagauaaauc

SEQ ID NO: 709044 - RNA, 17 nt, Artificial Sequence
  Synthetic
gggcuacauuuuaaauc

SEQ ID NO: 709045 - RNA, 17 nt, Artificial Sequence
  Synthetic
gaaaugugauaacaauc

SEQ ID NO: 709046 - RNA, 17 nt, Artificial Sequence
  Synthetic
gacugggcuagacaauc

SEQ ID NO: 709047 - RNA, 17 nt, Artificial Sequence
  Synthetic
gagucugacugacaauc

SEQ ID NO: 709048 - RNA, 17 nt, Artificial Sequence
  Synthetic
guaccuauaacccaauc

SEQ ID NO: 709049 - RNA, 17 nt, Artificial Sequence
  Synthetic
guagcucagccccaauc

SEQ ID NO: 709050 - RNA, 17 nt, Artificial Sequence
  Synthetic
ggagaccagcaucaauc

SEQ ID NO: 709051 - RNA, 17 nt, Artificial Sequence
  Synthetic
gauuuuugcccucaauc

SEQ ID NO: 709052 - RNA, 17 nt, Artificial Sequence
  Synthetic
gucauucuuugucaauc

SEQ ID NO: 709053 - RNA, 17 nt, Artificial Sequence
  Synthetic
gucagguacagagaauc

SEQ ID NO: 709054 - RNA, 17 nt, Artificial Sequence
  Synthetic
gagagagagagagaauc

SEQ ID NO: 709055 - RNA, 17 nt, Artificial Sequence
  Synthetic
gaaggaaaacuagaauc

SEQ ID NO: 709056 - RNA, 17 nt, Artificial Sequence
  Synthetic
gugacaagauucgaauc

SEQ ID NO: 709057 - RNA, 17 nt, Artificial Sequence
  Synthetic
gggcucccuugggaauc

SEQ ID NO: 709058 - RNA, 17 nt, Artificial Sequence
  Synthetic
gcuuguaugauggaauc

SEQ ID NO: 709059 - RNA, 17 nt, Artificial Sequence
  Synthetic
ggcaaucuguuggaauc

SEQ ID NO: 709060 - RNA, 17 nt, Artificial Sequence
  Synthetic
ggaggauggcaugaauc

SEQ ID NO: 709061 - RNA, 17 nt, Artificial Sequence
  Synthetic
gacuugcuuuaugaauc

SEQ ID NO: 709062 - RNA, 17 nt, Artificial Sequence
  Synthetic
ggagaaucgcuugaauc

SEQ ID NO: 709063 - RNA, 17 nt, Artificial Sequence
  Synthetic
gggacagaugcauaauc

SEQ ID NO: 709064 - RNA, 17 nt, Artificial Sequence
  Synthetic
gcaguagaaagauaauc

SEQ ID NO: 709065 - RNA, 17 nt, Artificial Sequence
  Synthetic
gagaaugugaccuaauc

SEQ ID NO: 709066 - RNA, 17 nt, Artificial Sequence
  Synthetic
guaucuaguucuuaauc

SEQ ID NO: 709067 - RNA, 17 nt, Artificial Sequence
  Synthetic
gccacauuuucuuaauc

SEQ ID NO: 709068 - RNA, 17 nt, Artificial Sequence
  Synthetic
guuuugaaauguuaauc

SEQ ID NO: 709069 - RNA, 17 nt, Artificial Sequence
  Synthetic
gccauaagcaaaacauc

SEQ ID NO: 709070 - RNA, 17 nt, Artificial Sequence
  Synthetic
guuuugaacacaacauc

SEQ ID NO: 709071 - RNA, 17 nt, Artificial Sequence
  Synthetic
gaaauauugacaacauc

SEQ ID NO: 709072 - RNA, 17 nt, Artificial Sequence
  Synthetic
gcuucuauuacaacauc

SEQ ID NO: 709073 - RNA, 17 nt, Artificial Sequence
  Synthetic
gcauuuuucuuaacauc

SEQ ID NO: 709074 - RNA, 17 nt, Artificial Sequence
  Synthetic
gguugaggggccacauc

SEQ ID NO: 709075 - RNA, 17 nt, Artificial Sequence
  Synthetic
ggaaagaagggcacauc

SEQ ID NO: 709076 - RNA, 17 nt, Artificial Sequence
  Synthetic
gccaugugacagacauc

SEQ ID NO: 709077 - RNA, 17 nt, Artificial Sequence
  Synthetic
guacauuguaauacauc

SEQ ID NO: 709078 - RNA, 17 nt, Artificial Sequence
  Synthetic
gaaccuuacuguacauc

SEQ ID NO: 709079 - RNA, 17 nt, Artificial Sequence
  Synthetic
gcaacaucagcaccauc

SEQ ID NO: 709080 - RNA, 17 nt, Artificial Sequence
  Synthetic
gaugguguuucaccauc

SEQ ID NO: 709081 - RNA, 17 nt, Artificial Sequence
  Synthetic
gaacuagagagaccauc

SEQ ID NO: 709082 - RNA, 17 nt, Artificial Sequence
  Synthetic
ggccaauuucucccauc

SEQ ID NO: 709083 - RNA, 17 nt, Artificial Sequence
  Synthetic
guccaucaucguccauc

SEQ ID NO: 709084 - RNA, 17 nt, Artificial Sequence
  Synthetic
gggacuuuucuuccauc

SEQ ID NO: 709085 - RNA, 17 nt, Artificial Sequence
  Synthetic
gacauaggguuuccauc

SEQ ID NO: 709086 - RNA, 17 nt, Artificial Sequence
  Synthetic
gugaauccuccagcauc

SEQ ID NO: 709087 - RNA, 17 nt, Artificial Sequence
  Synthetic
guugauaaauuagcauc

SEQ ID NO: 709088 - RNA, 17 nt, Artificial Sequence
  Synthetic
guucuggacuuagcauc

SEQ ID NO: 709089 - RNA, 17 nt, Artificial Sequence
  Synthetic
gcaugagccaccgcauc

SEQ ID NO: 709090 - RNA, 17 nt, Artificial Sequence
  Synthetic
gugugagccaccgcauc

SEQ ID NO: 709091 - RNA, 17 nt, Artificial Sequence
  Synthetic
gcuaaauuugaggcauc

SEQ ID NO: 709092 - RNA, 17 nt, Artificial Sequence
  Synthetic
gagcucuggcuggcauc

SEQ ID NO: 709093 - RNA, 17 nt, Artificial Sequence
  Synthetic
gaaucugagggugcauc

SEQ ID NO: 709094 - RNA, 17 nt, Artificial Sequence
  Synthetic
gcugaggaugaaucauc

SEQ ID NO: 709095 - RNA, 17 nt, Artificial Sequence
  Synthetic
gcauuuccagcaucauc

SEQ ID NO: 709096 - RNA, 17 nt, Artificial Sequence
  Synthetic
gccuagaaugcaucauc

SEQ ID NO: 709097 - RNA, 17 nt, Artificial Sequence
  Synthetic
gaggugacuggaucauc

SEQ ID NO: 709098 - RNA, 17 nt, Artificial Sequence
  Synthetic
gggauugcuggaucauc

SEQ ID NO: 709099 - RNA, 17 nt, Artificial Sequence
  Synthetic
ggauuccaaauaucauc

SEQ ID NO: 709100 - RNA, 17 nt, Artificial Sequence
  Synthetic
gaagugaucuccucauc

SEQ ID NO: 709101 - RNA, 17 nt, Artificial Sequence
  Synthetic
gauuauuaucucucauc

SEQ ID NO: 709102 - RNA, 17 nt, Artificial Sequence
  Synthetic
gucuagaaccagucauc

SEQ ID NO: 709103 - RNA, 17 nt, Artificial Sequence
  Synthetic
gccucuggucagucauc

SEQ ID NO: 709104 - RNA, 17 nt, Artificial Sequence
  Synthetic
gcugaaggcuggucauc

SEQ ID NO: 709105 - RNA, 17 nt, Artificial Sequence
  Synthetic
guucuuuaguugucauc

SEQ ID NO: 709106 - RNA, 17 nt, Artificial Sequence
  Synthetic
guuugguagaauucauc

SEQ ID NO: 709107 - RNA, 17 nt, Artificial Sequence
  Synthetic
guaacauuucauucauc

SEQ ID NO: 709108 - RNA, 17 nt, Artificial Sequence
  Synthetic
gagcuuguauuuucauc

SEQ ID NO: 709109 - RNA, 17 nt, Artificial Sequence
  Synthetic
guguguaaagaaagauc

SEQ ID NO: 709110 - RNA, 17 nt, Artificial Sequence
  Synthetic
gugaguucuccaagauc

SEQ ID NO: 709111 - RNA, 17 nt, Artificial Sequence
  Synthetic
gcugggauuccaagauc

SEQ ID NO: 709112 - RNA, 17 nt, Artificial Sequence
  Synthetic
ggcaacuuaauaagauc

SEQ ID NO: 709113 - RNA, 17 nt, Artificial Sequence
  Synthetic
ggcuuuucucuaagauc

SEQ ID NO: 709114 - RNA, 17 nt, Artificial Sequence
  Synthetic
gggaaaaggcacagauc

SEQ ID NO: 709115 - RNA, 17 nt, Artificial Sequence
  Synthetic
gucauuaggcacagauc

SEQ ID NO: 709116 - RNA, 17 nt, Artificial Sequence
  Synthetic
ggaaaucccaucagauc

SEQ ID NO: 709117 - RNA, 17 nt, Artificial Sequence
  Synthetic
gcagugacuuucagauc

SEQ ID NO: 709118 - RNA, 17 nt, Artificial Sequence
  Synthetic
guacaguucuggagauc

SEQ ID NO: 709119 - RNA, 17 nt, Artificial Sequence
  Synthetic
gaacggaucaugagauc

SEQ ID NO: 709120 - RNA, 17 nt, Artificial Sequence
  Synthetic
gugaguucucugagauc

SEQ ID NO: 709121 - RNA, 17 nt, Artificial Sequence
  Synthetic
gcggaucacuugagauc

SEQ ID NO: 709122 - RNA, 17 nt, Artificial Sequence
  Synthetic
gaacaaucccaaggauc

SEQ ID NO: 709123 - RNA, 17 nt, Artificial Sequence
  Synthetic
ggaggagcgagaggauc

SEQ ID NO: 709124 - RNA, 17 nt, Artificial Sequence
  Synthetic
ggcagauagauaggauc

SEQ ID NO: 709125 - RNA, 17 nt, Artificial Sequence
  Synthetic
gugcugaggguaggauc

SEQ ID NO: 709126 - RNA, 17 nt, Artificial Sequence
  Synthetic
gccagccaguuaggauc

SEQ ID NO: 709127 - RNA, 17 nt, Artificial Sequence
  Synthetic
gugagacagaagggauc

SEQ ID NO: 709128 - RNA, 17 nt, Artificial Sequence
  Synthetic
gccugcaggcagggauc

SEQ ID NO: 709129 - RNA, 17 nt, Artificial Sequence
  Synthetic
gaguccacugauggauc

SEQ ID NO: 709130 - RNA, 17 nt, Artificial Sequence
  Synthetic
gauuccucugauggauc

SEQ ID NO: 709131 - RNA, 17 nt, Artificial Sequence
  Synthetic
gaaaauggaucuggauc

SEQ ID NO: 709132 - RNA, 17 nt, Artificial Sequence
  Synthetic
gagguaucagaaugauc

SEQ ID NO: 709133 - RNA, 17 nt, Artificial Sequence
  Synthetic
guuucaccauaaugauc

SEQ ID NO: 709134 - RNA, 17 nt, Artificial Sequence
  Synthetic
gccccgcucccaugauc

SEQ ID NO: 709135 - RNA, 17 nt, Artificial Sequence
  Synthetic
gaauacugagggugauc

SEQ ID NO: 709136 - RNA, 17 nt, Artificial Sequence
  Synthetic
gguguuagacauugauc

SEQ ID NO: 709137 - RNA, 17 nt, Artificial Sequence
  Synthetic
gguucaccaaguugauc

SEQ ID NO: 709138 - RNA, 17 nt, Artificial Sequence
  Synthetic
guuucaccacguugauc

SEQ ID NO: 709139 - RNA, 17 nt, Artificial Sequence
  Synthetic
guugcuccauguugauc

SEQ ID NO: 709140 - RNA, 17 nt, Artificial Sequence
  Synthetic
gaaaaugaauuuugauc

SEQ ID NO: 709141 - RNA, 17 nt, Artificial Sequence
  Synthetic
guuuuaaaacaaauauc

SEQ ID NO: 709142 - RNA, 17 nt, Artificial Sequence
  Synthetic
gcagcaauuccaauauc

SEQ ID NO: 709143 - RNA, 17 nt, Artificial Sequence
  Synthetic
ggacauuuagcaauauc

SEQ ID NO: 709144 - RNA, 17 nt, Artificial Sequence
  Synthetic
ggaauuacuagaauauc

SEQ ID NO: 709145 - RNA, 17 nt, Artificial Sequence
  Synthetic
gaacucaguggaauauc

SEQ ID NO: 709146 - RNA, 17 nt, Artificial Sequence
  Synthetic
gaccaucugugaauauc

SEQ ID NO: 709147 - RNA, 17 nt, Artificial Sequence
  Synthetic
gguauuuuaauaauauc

SEQ ID NO: 709148 - RNA, 17 nt, Artificial Sequence
  Synthetic
guacuaggcuuaauauc

SEQ ID NO: 709149 - RNA, 17 nt, Artificial Sequence
  Synthetic
gcaacuaccaucauauc

SEQ ID NO: 709150 - RNA, 17 nt, Artificial Sequence
  Synthetic
guuaaugagaucauauc

SEQ ID NO: 709151 - RNA, 17 nt, Artificial Sequence
  Synthetic
guucuaagauggauauc

SEQ ID NO: 709152 - RNA, 17 nt, Artificial Sequence
  Synthetic
guguucaucaugauauc

SEQ ID NO: 709153 - RNA, 17 nt, Artificial Sequence
  Synthetic
ggagacuuacugauauc

SEQ ID NO: 709154 - RNA, 17 nt, Artificial Sequence
  Synthetic
gugucuugguugauauc

SEQ ID NO: 709155 - RNA, 17 nt, Artificial Sequence
  Synthetic
gccaucuacaauauauc

SEQ ID NO: 709156 - RNA, 17 nt, Artificial Sequence
  Synthetic
gaagaaaggaauauauc

SEQ ID NO: 709157 - RNA, 17 nt, Artificial Sequence
  Synthetic
gaccuguguuauauauc

SEQ ID NO: 709158 - RNA, 17 nt, Artificial Sequence
  Synthetic
ggaaagagagcuauauc

SEQ ID NO: 709159 - RNA, 17 nt, Artificial Sequence
  Synthetic
guuuuauuguguauauc

SEQ ID NO: 709160 - RNA, 17 nt, Artificial Sequence
  Synthetic
ggggaugaaauuauauc

SEQ ID NO: 709161 - RNA, 17 nt, Artificial Sequence
  Synthetic
gaggaugggguuauauc

SEQ ID NO: 709162 - RNA, 17 nt, Artificial Sequence
  Synthetic
gagaaaaagaaacuauc

SEQ ID NO: 709163 - RNA, 17 nt, Artificial Sequence
  Synthetic
gagacuuauucacuauc

SEQ ID NO: 709164 - RNA, 17 nt, Artificial Sequence
  Synthetic
guacuauguucacuauc

SEQ ID NO: 709165 - RNA, 17 nt, Artificial Sequence
  Synthetic
gggggugaguggguauc

SEQ ID NO: 709166 - RNA, 17 nt, Artificial Sequence
  Synthetic
guauauugaacuguauc

SEQ ID NO: 709167 - RNA, 17 nt, Artificial Sequence
  Synthetic
gaaccuggauguguauc

SEQ ID NO: 709168 - RNA, 17 nt, Artificial Sequence
  Synthetic
gaaguacaauuuguauc

SEQ ID NO: 709169 - RNA, 17 nt, Artificial Sequence
  Synthetic
guuuuucuagaauuauc

SEQ ID NO: 709170 - RNA, 17 nt, Artificial Sequence
  Synthetic
ggugaaagggaauuauc

SEQ ID NO: 709171 - RNA, 17 nt, Artificial Sequence
  Synthetic
gauuuguauccauuauc

SEQ ID NO: 709172 - RNA, 17 nt, Artificial Sequence
  Synthetic
gaaacuuacugauuauc

SEQ ID NO: 709173 - RNA, 17 nt, Artificial Sequence
  Synthetic
guaccaugcuuauuauc

SEQ ID NO: 709174 - RNA, 17 nt, Artificial Sequence
  Synthetic
gauccuccuugcuuauc

SEQ ID NO: 709175 - RNA, 17 nt, Artificial Sequence
  Synthetic
guugauuacuucuuauc

SEQ ID NO: 709176 - RNA, 17 nt, Artificial Sequence
  Synthetic
gagccuuugaauuuauc

SEQ ID NO: 709177 - RNA, 17 nt, Artificial Sequence
  Synthetic
ggaaaagggucuuuauc

SEQ ID NO: 709178 - RNA, 17 nt, Artificial Sequence
  Synthetic
gaucuguugguuuuauc

SEQ ID NO: 709179 - RNA, 17 nt, Artificial Sequence
  Synthetic
gacuuggauucaaacuc

SEQ ID NO: 709180 - RNA, 17 nt, Artificial Sequence
  Synthetic
gcaaaagucagaaacuc

SEQ ID NO: 709181 - RNA, 17 nt, Artificial Sequence
  Synthetic
gaaaguaugggaaacuc

SEQ ID NO: 709182 - RNA, 17 nt, Artificial Sequence
  Synthetic
guuagaaugugaaacuc

SEQ ID NO: 709183 - RNA, 17 nt, Artificial Sequence
  Synthetic
gcacugaaauuaaacuc

SEQ ID NO: 709184 - RNA, 17 nt, Artificial Sequence
  Synthetic
gaacaagaggagaacuc

SEQ ID NO: 709185 - RNA, 17 nt, Artificial Sequence
  Synthetic
guuaaaagaaugaacuc

SEQ ID NO: 709186 - RNA, 17 nt, Artificial Sequence
  Synthetic
gcauucccauugaacuc

SEQ ID NO: 709187 - RNA, 17 nt, Artificial Sequence
  Synthetic
gagaaucacuugaacuc

SEQ ID NO: 709188 - RNA, 17 nt, Artificial Sequence
  Synthetic
ggauagcauuugaacuc

SEQ ID NO: 709189 - RNA, 17 nt, Artificial Sequence
  Synthetic
guuaucuguuguaacuc

SEQ ID NO: 709190 - RNA, 17 nt, Artificial Sequence
  Synthetic
gaauuucagauuaacuc

SEQ ID NO: 709191 - RNA, 17 nt, Artificial Sequence
  Synthetic
ggcccacuucuuaacuc

SEQ ID NO: 709192 - RNA, 17 nt, Artificial Sequence
  Synthetic
guuacccucacacacuc

SEQ ID NO: 709193 - RNA, 17 nt, Artificial Sequence
  Synthetic
ggggguuguagacacuc

SEQ ID NO: 709194 - RNA, 17 nt, Artificial Sequence
  Synthetic
guuagaaugaaucacuc

SEQ ID NO: 709195 - RNA, 17 nt, Artificial Sequence
  Synthetic
guucaaauauaucacuc

SEQ ID NO: 709196 - RNA, 17 nt, Artificial Sequence
  Synthetic
gcuuccuaaucucacuc

SEQ ID NO: 709197 - RNA, 17 nt, Artificial Sequence
  Synthetic
guaugucagagucacuc

SEQ ID NO: 709198 - RNA, 17 nt, Artificial Sequence
  Synthetic
gaucauuguagucacuc

SEQ ID NO: 709199 - RNA, 17 nt, Artificial Sequence
  Synthetic
guucaauuaugucacuc

SEQ ID NO: 709200 - RNA, 17 nt, Artificial Sequence
  Synthetic
gucucgcucugucacuc

SEQ ID NO: 709201 - RNA, 17 nt, Artificial Sequence
  Synthetic
gaacuuuauaaagacuc

SEQ ID NO: 709202 - RNA, 17 nt, Artificial Sequence
  Synthetic
gacuacaccucagacuc

SEQ ID NO: 709203 - RNA, 17 nt, Artificial Sequence
  Synthetic
gauuggaaacgagacuc

SEQ ID NO: 709204 - RNA, 17 nt, Artificial Sequence
  Synthetic
gguaaagcaauggacuc

SEQ ID NO: 709205 - RNA, 17 nt, Artificial Sequence
  Synthetic
gugcuacgaaaauacuc

SEQ ID NO: 709206 - RNA, 17 nt, Artificial Sequence
  Synthetic
gcucaaauguuauacuc

SEQ ID NO: 709207 - RNA, 17 nt, Artificial Sequence
  Synthetic
gggagagaggacuacuc

SEQ ID NO: 709208 - RNA, 17 nt, Artificial Sequence
  Synthetic
uguaguaccagcuacuc

SEQ ID NO: 709209 - RNA, 17 nt, Artificial Sequence
  Synthetic
uguaaucccagcuacuc

SEQ ID NO: 709210 - RNA, 17 nt, Artificial Sequence
  Synthetic
gauagucccagcuacuc

SEQ ID NO: 709211 - RNA, 17 nt, Artificial Sequence
  Synthetic
gguagucccagcuacuc

SEQ ID NO: 709212 - RNA, 17 nt, Artificial Sequence
  Synthetic
uguagucccagcuacuc

SEQ ID NO: 709213 - RNA, 17 nt, Artificial Sequence
  Synthetic
uguggucccagcuacuc

SEQ ID NO: 709214 - RNA, 17 nt, Artificial Sequence
  Synthetic
uguaaucucagcuacuc

SEQ ID NO: 709215 - RNA, 17 nt, Artificial Sequence
  Synthetic
guacugaguagcuacuc

SEQ ID NO: 709216 - RNA, 17 nt, Artificial Sequence
  Synthetic
gaaaccuccugcuacuc

SEQ ID NO: 709217 - RNA, 17 nt, Artificial Sequence
  Synthetic
guuuucuucuaguacuc

SEQ ID NO: 709218 - RNA, 17 nt, Artificial Sequence
  Synthetic
gacacuccaggguacuc

SEQ ID NO: 709219 - RNA, 17 nt, Artificial Sequence
  Synthetic
guucuuuuucuguacuc

SEQ ID NO: 709220 - RNA, 17 nt, Artificial Sequence
  Synthetic
gaauaauccuuguacuc

SEQ ID NO: 709221 - RNA, 17 nt, Artificial Sequence
  Synthetic
ggggaauuuacuuacuc

SEQ ID NO: 709222 - RNA, 17 nt, Artificial Sequence
  Synthetic
gagagagucuguuacuc

SEQ ID NO: 709223 - RNA, 17 nt, Artificial Sequence
  Synthetic
gauuuccuguguuacuc

SEQ ID NO: 709224 - RNA, 17 nt, Artificial Sequence
  Synthetic
guauccuuaauuuacuc

SEQ ID NO: 709225 - RNA, 17 nt, Artificial Sequence
  Synthetic
gggaaaugcagaaccuc

SEQ ID NO: 709226 - RNA, 17 nt, Artificial Sequence
  Synthetic
guuccucuuugcaccuc

SEQ ID NO: 709227 - RNA, 17 nt, Artificial Sequence
  Synthetic
ggagcaguuugcaccuc

SEQ ID NO: 709228 - RNA, 17 nt, Artificial Sequence
  Synthetic
gccuguuucuucaccuc

SEQ ID NO: 709229 - RNA, 17 nt, Artificial Sequence
  Synthetic
gugaaaaaagugaccuc

SEQ ID NO: 709230 - RNA, 17 nt, Artificial Sequence
  Synthetic
guggaucacuugaccuc

SEQ ID NO: 709231 - RNA, 17 nt, Artificial Sequence
  Synthetic
guuccuccuuguaccuc

SEQ ID NO: 709232 - RNA, 17 nt, Artificial Sequence
  Synthetic
gcuccucuuuguaccuc

SEQ ID NO: 709233 - RNA, 17 nt, Artificial Sequence
  Synthetic
gauauauuaucccccuc

SEQ ID NO: 709234 - RNA, 17 nt, Artificial Sequence
  Synthetic
ggaaguucuucccccuc

SEQ ID NO: 709235 - RNA, 17 nt, Artificial Sequence
  Synthetic
ggccuugggcuccccuc

SEQ ID NO: 709236 - RNA, 17 nt, Artificial Sequence
  Synthetic
guaaagaugaugcccuc

SEQ ID NO: 709237 - RNA, 17 nt, Artificial Sequence
  Synthetic
gcaucucaugugcccuc

SEQ ID NO: 709238 - RNA, 17 nt, Artificial Sequence
  Synthetic
gauacaaacuugcccuc

SEQ ID NO: 709239 - RNA, 17 nt, Artificial Sequence
  Synthetic
gaccaggagauucccuc

SEQ ID NO: 709240 - RNA, 17 nt, Artificial Sequence
  Synthetic
guuuaaccaaaggccuc

SEQ ID NO: 709241 - RNA, 17 nt, Artificial Sequence
  Synthetic
gcuccuggggaggccuc

SEQ ID NO: 709242 - RNA, 17 nt, Artificial Sequence
  Synthetic
guggcuggggaggccuc

SEQ ID NO: 709243 - RNA, 17 nt, Artificial Sequence
  Synthetic
gcuucuggggaggccuc

SEQ ID NO: 709244 - RNA, 17 nt, Artificial Sequence
  Synthetic
guuucuggggaggccuc

SEQ ID NO: 709245 - RNA, 17 nt, Artificial Sequence
  Synthetic
gggggaaaucuggccuc

SEQ ID NO: 709246 - RNA, 17 nt, Artificial Sequence
  Synthetic
guccuguauggugccuc

SEQ ID NO: 709247 - RNA, 17 nt, Artificial Sequence
  Synthetic
guuuaaagcuuugccuc

SEQ ID NO: 709248 - RNA, 17 nt, Artificial Sequence
  Synthetic
guaggccucugauccuc

SEQ ID NO: 709249 - RNA, 17 nt, Artificial Sequence
  Synthetic
gaguguucaauguccuc

SEQ ID NO: 709250 - RNA, 17 nt, Artificial Sequence
  Synthetic
gacauugcccuguccuc

SEQ ID NO: 709251 - RNA, 17 nt, Artificial Sequence
  Synthetic
guccaguuucauuccuc

SEQ ID NO: 709252 - RNA, 17 nt, Artificial Sequence
  Synthetic
gguauacgaccuuccuc

SEQ ID NO: 709253 - RNA, 17 nt, Artificial Sequence
  Synthetic
ggaaugcuccguuccuc

SEQ ID NO: 709254 - RNA, 17 nt, Artificial Sequence
  Synthetic
gaagaggcauguuccuc

SEQ ID NO: 709255 - RNA, 17 nt, Artificial Sequence
  Synthetic
gcaauuuuucuuuccuc

SEQ ID NO: 709256 - RNA, 17 nt, Artificial Sequence
  Synthetic
gguuugacaguuuccuc

SEQ ID NO: 709257 - RNA, 17 nt, Artificial Sequence
  Synthetic
guuuggacauuaagcuc

SEQ ID NO: 709258 - RNA, 17 nt, Artificial Sequence
  Synthetic
gcuauguguuuaagcuc

SEQ ID NO: 709259 - RNA, 17 nt, Artificial Sequence
  Synthetic
ggaagagcugccagcuc

SEQ ID NO: 709260 - RNA, 17 nt, Artificial Sequence
  Synthetic
gcagcucucugcagcuc

SEQ ID NO: 709261 - RNA, 17 nt, Artificial Sequence
  Synthetic
ggacuuaaacucagcuc

SEQ ID NO: 709262 - RNA, 17 nt, Artificial Sequence
  Synthetic
gagggaaaagucagcuc

SEQ ID NO: 709263 - RNA, 17 nt, Artificial Sequence
  Synthetic
gaggaucaccagagcuc

SEQ ID NO: 709264 - RNA, 17 nt, Artificial Sequence
  Synthetic
gacaggagguggagcuc

SEQ ID NO: 709265 - RNA, 17 nt, Artificial Sequence
  Synthetic
guggguugcaugagcuc

SEQ ID NO: 709266 - RNA, 17 nt, Artificial Sequence
  Synthetic
gaugaggugaugagcuc

SEQ ID NO: 709267 - RNA, 17 nt, Artificial Sequence
  Synthetic
gaacaaauauugagcuc

SEQ ID NO: 709268 - RNA, 17 nt, Artificial Sequence
  Synthetic
gaggaucacuugagcuc

SEQ ID NO: 709269 - RNA, 17 nt, Artificial Sequence
  Synthetic
gcagauugcuugagcuc

SEQ ID NO: 709270 - RNA, 17 nt, Artificial Sequence
  Synthetic
gaggauugcuugagcuc

SEQ ID NO: 709271 - RNA, 17 nt, Artificial Sequence
  Synthetic
gaggaucauuugagcuc

SEQ ID NO: 709272 - RNA, 17 nt, Artificial Sequence
  Synthetic
gcguaauuacauagcuc

SEQ ID NO: 709273 - RNA, 17 nt, Artificial Sequence
  Synthetic
gcuccugccuguagcuc

SEQ ID NO: 709274 - RNA, 17 nt, Artificial Sequence
  Synthetic
ggaacagaaguuagcuc

SEQ ID NO: 709275 - RNA, 17 nt, Artificial Sequence
  Synthetic
gucucgcugugucgcuc

SEQ ID NO: 709276 - RNA, 17 nt, Artificial Sequence
  Synthetic
guccaagauaaaggcuc

SEQ ID NO: 709277 - RNA, 17 nt, Artificial Sequence
  Synthetic
gcagugcugggaggcuc

SEQ ID NO: 709278 - RNA, 17 nt, Artificial Sequence
  Synthetic
ggcaacauuuuaggcuc

SEQ ID NO: 709279 - RNA, 17 nt, Artificial Sequence
  Synthetic
gccacuacugggggcuc

SEQ ID NO: 709280 - RNA, 17 nt, Artificial Sequence
  Synthetic
gugaaaucuuggggcuc

SEQ ID NO: 709281 - RNA, 17 nt, Artificial Sequence
  Synthetic
guugccaggaugggcuc

SEQ ID NO: 709282 - RNA, 17 nt, Artificial Sequence
  Synthetic
gcccggcacgguggcuc

SEQ ID NO: 709283 - RNA, 17 nt, Artificial Sequence
  Synthetic
gcugggcgcgguggcuc

SEQ ID NO: 709284 - RNA, 17 nt, Artificial Sequence
  Synthetic
guacgggucuguggcuc

SEQ ID NO: 709285 - RNA, 17 nt, Artificial Sequence
  Synthetic
ggcucaucucuuggcuc

SEQ ID NO: 709286 - RNA, 17 nt, Artificial Sequence
  Synthetic
gucuaugauaaaugcuc

SEQ ID NO: 709287 - RNA, 17 nt, Artificial Sequence
  Synthetic
ggguuaacauacugcuc

SEQ ID NO: 709288 - RNA, 17 nt, Artificial Sequence
  Synthetic
guagcuuuucucugcuc

SEQ ID NO: 709289 - RNA, 17 nt, Artificial Sequence
  Synthetic
gguacuucucugugcuc

SEQ ID NO: 709290 - RNA, 17 nt, Artificial Sequence
  Synthetic
gauuaauaugugugcuc

SEQ ID NO: 709291 - RNA, 17 nt, Artificial Sequence
  Synthetic
ggauggucagauugcuc

SEQ ID NO: 709292 - RNA, 17 nt, Artificial Sequence
  Synthetic
ggcucauuguauugcuc

SEQ ID NO: 709293 - RNA, 17 nt, Artificial Sequence
  Synthetic
gggaagagagcuugcuc

SEQ ID NO: 709294 - RNA, 17 nt, Artificial Sequence
  Synthetic
gaacagacuucuugcuc

SEQ ID NO: 709295 - RNA, 17 nt, Artificial Sequence
  Synthetic
gacaggugagaaaucuc

SEQ ID NO: 709296 - RNA, 17 nt, Artificial Sequence
  Synthetic
gcagcauauuaaaucuc

SEQ ID NO: 709297 - RNA, 17 nt, Artificial Sequence
  Synthetic
gagugagacuccaucuc

SEQ ID NO: 709298 - RNA, 17 nt, Artificial Sequence
  Synthetic
ggcauuguguucaucuc

SEQ ID NO: 709299 - RNA, 17 nt, Artificial Sequence
  Synthetic
gugcuguuggagaucuc

SEQ ID NO: 709300 - RNA, 17 nt, Artificial Sequence
  Synthetic
ggaucugacacuaucuc

SEQ ID NO: 709301 - RNA, 17 nt, Artificial Sequence
  Synthetic
ggggugaagaguaucuc

SEQ ID NO: 709302 - RNA, 17 nt, Artificial Sequence
  Synthetic
gcuccucuuuguaucuc

SEQ ID NO: 709303 - RNA, 17 nt, Artificial Sequence
  Synthetic
ggggaggagauuaucuc

SEQ ID NO: 709304 - RNA, 17 nt, Artificial Sequence
  Synthetic
guuguccuuccacucuc

SEQ ID NO: 709305 - RNA, 17 nt, Artificial Sequence
  Synthetic
guucugcccagccucuc

SEQ ID NO: 709306 - RNA, 17 nt, Artificial Sequence
  Synthetic
gucccagacugccucuc

SEQ ID NO: 709307 - RNA, 17 nt, Artificial Sequence
  Synthetic
gccaguaucuuccucuc

SEQ ID NO: 709308 - RNA, 17 nt, Artificial Sequence
  Synthetic
gcaaaagccccgcucuc

SEQ ID NO: 709309 - RNA, 17 nt, Artificial Sequence
  Synthetic
gauacaaaaaggcucuc

SEQ ID NO: 709310 - RNA, 17 nt, Artificial Sequence
  Synthetic
guauaugcugugcucuc

SEQ ID NO: 709311 - RNA, 17 nt, Artificial Sequence
  Synthetic
gcauuucaguugcucuc

SEQ ID NO: 709312 - RNA, 17 nt, Artificial Sequence
  Synthetic
gcugaggaaaaucucuc

SEQ ID NO: 709313 - RNA, 17 nt, Artificial Sequence
  Synthetic
gucuuucuugcucucuc

SEQ ID NO: 709314 - RNA, 17 nt, Artificial Sequence
  Synthetic
ggcagugaauaagucuc

SEQ ID NO: 709315 - RNA, 17 nt, Artificial Sequence
  Synthetic
gaaaauuggacagucuc

SEQ ID NO: 709316 - RNA, 17 nt, Artificial Sequence
  Synthetic
guaaauuacccagucuc

SEQ ID NO: 709317 - RNA, 17 nt, Artificial Sequence
  Synthetic
guaaauugcccagucuc

SEQ ID NO: 709318 - RNA, 17 nt, Artificial Sequence
  Synthetic
gaucugggucaugucuc

SEQ ID NO: 709319 - RNA, 17 nt, Artificial Sequence
  Synthetic
gcauguucccaauucuc

SEQ ID NO: 709320 - RNA, 17 nt, Artificial Sequence
  Synthetic
gagcaaugugaauucuc

SEQ ID NO: 709321 - RNA, 17 nt, Artificial Sequence
  Synthetic
guuuucaaaucauucuc

SEQ ID NO: 709322 - RNA, 17 nt, Artificial Sequence
  Synthetic
gaaccacagugauucuc

SEQ ID NO: 709323 - RNA, 17 nt, Artificial Sequence
  Synthetic
gauagagauugauucuc

SEQ ID NO: 709324 - RNA, 17 nt, Artificial Sequence
  Synthetic
gagacacagcuauucuc

SEQ ID NO: 709325 - RNA, 17 nt, Artificial Sequence
  Synthetic
gcaaauauauuauucuc

SEQ ID NO: 709326 - RNA, 17 nt, Artificial Sequence
  Synthetic
gcuaagagguaguucuc

SEQ ID NO: 709327 - RNA, 17 nt, Artificial Sequence
  Synthetic
ggcugagggagguucuc

SEQ ID NO: 709328 - RNA, 17 nt, Artificial Sequence
  Synthetic
guuuuuuaaugguucuc

SEQ ID NO: 709329 - RNA, 17 nt, Artificial Sequence
  Synthetic
gucuuuucagauuucuc

SEQ ID NO: 709330 - RNA, 17 nt, Artificial Sequence
  Synthetic
gagaaggaaacuuucuc

SEQ ID NO: 709331 - RNA, 17 nt, Artificial Sequence
  Synthetic
guaacuccuccuuucuc

SEQ ID NO: 709332 - RNA, 17 nt, Artificial Sequence
  Synthetic
ggugugggaaguuucuc

SEQ ID NO: 709333 - RNA, 17 nt, Artificial Sequence
  Synthetic
gaaagcugucguuucuc

SEQ ID NO: 709334 - RNA, 17 nt, Artificial Sequence
  Synthetic
ggaggcaaugguuucuc

SEQ ID NO: 709335 - RNA, 17 nt, Artificial Sequence
  Synthetic
gcaaucauuaaaaaguc

SEQ ID NO: 709336 - RNA, 17 nt, Artificial Sequence
  Synthetic
gcgaucauuaaaaaguc

SEQ ID NO: 709337 - RNA, 17 nt, Artificial Sequence
  Synthetic
gugaucauuaaaaaguc

SEQ ID NO: 709338 - RNA, 17 nt, Artificial Sequence
  Synthetic
gcgaacauucaaaaguc

SEQ ID NO: 709339 - RNA, 17 nt, Artificial Sequence
  Synthetic
gcaaucauucaaaaguc

SEQ ID NO: 709340 - RNA, 17 nt, Artificial Sequence
  Synthetic
gcaaucauuuaaaaguc

SEQ ID NO: 709341 - RNA, 17 nt, Artificial Sequence
  Synthetic
guaacuggcacaaaguc

SEQ ID NO: 709342 - RNA, 17 nt, Artificial Sequence
  Synthetic
gggcggaucacaaaguc

SEQ ID NO: 709343 - RNA, 17 nt, Artificial Sequence
  Synthetic
gagaaaaugagaaaguc

SEQ ID NO: 709344 - RNA, 17 nt, Artificial Sequence
  Synthetic
gagcuuuguuuaaaguc

SEQ ID NO: 709345 - RNA, 17 nt, Artificial Sequence
  Synthetic
guuuaaaagaccaaguc

SEQ ID NO: 709346 - RNA, 17 nt, Artificial Sequence
  Synthetic
gaugagaaaggcaaguc

SEQ ID NO: 709347 - RNA, 17 nt, Artificial Sequence
  Synthetic
ggagaaauacucaaguc

SEQ ID NO: 709348 - RNA, 17 nt, Artificial Sequence
  Synthetic
guaggcuugaugaaguc

SEQ ID NO: 709349 - RNA, 17 nt, Artificial Sequence
  Synthetic
gaaaggggacugaaguc

SEQ ID NO: 709350 - RNA, 17 nt, Artificial Sequence
  Synthetic
guggaucaccugaaguc

SEQ ID NO: 709351 - RNA, 17 nt, Artificial Sequence
  Synthetic
gauuaaggggugaaguc

SEQ ID NO: 709352 - RNA, 17 nt, Artificial Sequence
  Synthetic
guuuuuucuuguaaguc

SEQ ID NO: 709353 - RNA, 17 nt, Artificial Sequence
  Synthetic
gacagcaaaagacaguc

SEQ ID NO: 709354 - RNA, 17 nt, Artificial Sequence
  Synthetic
ggaguucaagaccaguc

SEQ ID NO: 709355 - RNA, 17 nt, Artificial Sequence
  Synthetic
ggaguucgagaccaguc

SEQ ID NO: 709356 - RNA, 17 nt, Artificial Sequence
  Synthetic
gaaguuugagaccaguc

SEQ ID NO: 709357 - RNA, 17 nt, Artificial Sequence
  Synthetic
ggaggugucucccaguc

SEQ ID NO: 709358 - RNA, 17 nt, Artificial Sequence
  Synthetic
ggcguuugagaucaguc

SEQ ID NO: 709359 - RNA, 17 nt, Artificial Sequence
  Synthetic
guuauggugacucaguc

SEQ ID NO: 709360 - RNA, 17 nt, Artificial Sequence
  Synthetic
gugacccuaccucaguc

SEQ ID NO: 709361 - RNA, 17 nt, Artificial Sequence
  Synthetic
guuugggggucucaguc

SEQ ID NO: 709362 - RNA, 17 nt, Artificial Sequence
  Synthetic
gcuguugcaggucaguc

SEQ ID NO: 709363 - RNA, 17 nt, Artificial Sequence
  Synthetic
guaaguuuuuaagaguc

SEQ ID NO: 709364 - RNA, 17 nt, Artificial Sequence
  Synthetic
gggcagcacugagaguc

SEQ ID NO: 709365 - RNA, 17 nt, Artificial Sequence
  Synthetic
ggugauugcaaggaguc

SEQ ID NO: 709366 - RNA, 17 nt, Artificial Sequence
  Synthetic
gaugaaaacagggaguc

SEQ ID NO: 709367 - RNA, 17 nt, Artificial Sequence
  Synthetic
gaaugaacucuggaguc

SEQ ID NO: 709368 - RNA, 17 nt, Artificial Sequence
  Synthetic
guaugggcucuugaguc

SEQ ID NO: 709369 - RNA, 17 nt, Artificial Sequence
  Synthetic
gcagucauaaauuaguc

SEQ ID NO: 709370 - RNA, 17 nt, Artificial Sequence
  Synthetic
guaaauuuggauuaguc

SEQ ID NO: 709371 - RNA, 17 nt, Artificial Sequence
  Synthetic
guuucaccauguuaguc

SEQ ID NO: 709372 - RNA, 17 nt, Artificial Sequence
  Synthetic
gguuaaaaacuuuaguc

SEQ ID NO: 709373 - RNA, 17 nt, Artificial Sequence
  Synthetic
guaauuugacuaacguc

SEQ ID NO: 709374 - RNA, 17 nt, Artificial Sequence
  Synthetic
gcggccgccaccacguc

SEQ ID NO: 709375 - RNA, 17 nt, Artificial Sequence
  Synthetic
gacuacaggcccacguc

SEQ ID NO: 709376 - RNA, 17 nt, Artificial Sequence
  Synthetic
gcgcgguggcucacguc

SEQ ID NO: 709377 - RNA, 17 nt, Artificial Sequence
  Synthetic
gcaugugccacgacguc

SEQ ID NO: 709378 - RNA, 17 nt, Artificial Sequence
  Synthetic
gcaaccuuaauuccguc

SEQ ID NO: 709379 - RNA, 17 nt, Artificial Sequence
  Synthetic
ggggcaggacuugcguc

SEQ ID NO: 709380 - RNA, 17 nt, Artificial Sequence
  Synthetic
guccuauguaaaagguc

SEQ ID NO: 709381 - RNA, 17 nt, Artificial Sequence
  Synthetic
gagaauagucaaagguc

SEQ ID NO: 709382 - RNA, 17 nt, Artificial Sequence
  Synthetic
gggcagaucacaagguc

SEQ ID NO: 709383 - RNA, 17 nt, Artificial Sequence
  Synthetic
ggguggaucacaagguc

SEQ ID NO: 709384 - RNA, 17 nt, Artificial Sequence
  Synthetic
gaauaugugccaagguc

SEQ ID NO: 709385 - RNA, 17 nt, Artificial Sequence
  Synthetic
gcuuuuuuuucaagguc

SEQ ID NO: 709386 - RNA, 17 nt, Artificial Sequence
  Synthetic
ggcgguugcugaagguc

SEQ ID NO: 709387 - RNA, 17 nt, Artificial Sequence
  Synthetic
gggcggaucauaagguc

SEQ ID NO: 709388 - RNA, 17 nt, Artificial Sequence
  Synthetic
ggaaagcagaagagguc

SEQ ID NO: 709389 - RNA, 17 nt, Artificial Sequence
  Synthetic
gggcggaccacgagguc

SEQ ID NO: 709390 - RNA, 17 nt, Artificial Sequence
  Synthetic
gggcagaucacgagguc

SEQ ID NO: 709391 - RNA, 17 nt, Artificial Sequence
  Synthetic
gggcggaucacgagguc

SEQ ID NO: 709392 - RNA, 17 nt, Artificial Sequence
  Synthetic
ggguggaucacgagguc

SEQ ID NO: 709393 - RNA, 17 nt, Artificial Sequence
  Synthetic
gggcugaucacgagguc

SEQ ID NO: 709394 - RNA, 17 nt, Artificial Sequence
  Synthetic
gcggaacacucgagguc

SEQ ID NO: 709395 - RNA, 17 nt, Artificial Sequence
  Synthetic
gcuuauuucaggagguc

SEQ ID NO: 709396 - RNA, 17 nt, Artificial Sequence
  Synthetic
gcugcaacaaugagguc

SEQ ID NO: 709397 - RNA, 17 nt, Artificial Sequence
  Synthetic
gagcagaucaugagguc

SEQ ID NO: 709398 - RNA, 17 nt, Artificial Sequence
  Synthetic
gggcagaucaugagguc

SEQ ID NO: 709399 - RNA, 17 nt, Artificial Sequence
  Synthetic
ggguggaucaugagguc

SEQ ID NO: 709400 - RNA, 17 nt, Artificial Sequence
  Synthetic
gggcagauuaugagguc

SEQ ID NO: 709401 - RNA, 17 nt, Artificial Sequence
  Synthetic
guagaacaccugagguc

SEQ ID NO: 709402 - RNA, 17 nt, Artificial Sequence
  Synthetic
gcgcaucaccugagguc

SEQ ID NO: 709403 - RNA, 17 nt, Artificial Sequence
  Synthetic
gcagaucaccugagguc

SEQ ID NO: 709404 - RNA, 17 nt, Artificial Sequence
  Synthetic
gcggaucaccugagguc

SEQ ID NO: 709405 - RNA, 17 nt, Artificial Sequence
  Synthetic
guggaucaccugagguc

SEQ ID NO: 709406 - RNA, 17 nt, Artificial Sequence
  Synthetic
guguaucaccugagguc

SEQ ID NO: 709407 - RNA, 17 nt, Artificial Sequence
  Synthetic
gcagaucaucugagguc

SEQ ID NO: 709408 - RNA, 17 nt, Artificial Sequence
  Synthetic
gaggguuaugugagguc

SEQ ID NO: 709409 - RNA, 17 nt, Artificial Sequence
  Synthetic
guggaacacuugagguc

SEQ ID NO: 709410 - RNA, 17 nt, Artificial Sequence
  Synthetic
gcagaucacuugagguc

SEQ ID NO: 709411 - RNA, 17 nt, Artificial Sequence
  Synthetic
gcggaucacuugagguc

SEQ ID NO: 709412 - RNA, 17 nt, Artificial Sequence
  Synthetic
guggaucacuugagguc

SEQ ID NO: 709413 - RNA, 17 nt, Artificial Sequence
  Synthetic
gcacaucauuugagguc

SEQ ID NO: 709414 - RNA, 17 nt, Artificial Sequence
  Synthetic
gcagaucauuugagguc

SEQ ID NO: 709415 - RNA, 17 nt, Artificial Sequence
  Synthetic
guuucaaagucuagguc

SEQ ID NO: 709416 - RNA, 17 nt, Artificial Sequence
  Synthetic
gcuagccugauuagguc

SEQ ID NO: 709417 - RNA, 17 nt, Artificial Sequence
  Synthetic
guuucagcaugucgguc

SEQ ID NO: 709418 - RNA, 17 nt, Artificial Sequence
  Synthetic
gguagacacaugggguc

SEQ ID NO: 709419 - RNA, 17 nt, Artificial Sequence
  Synthetic
ggaauaaaagugggguc

SEQ ID NO: 709420 - RNA, 17 nt, Artificial Sequence
  Synthetic
gggacuguggugggguc

SEQ ID NO: 709421 - RNA, 17 nt, Artificial Sequence
  Synthetic
gggccuguugugggguc

SEQ ID NO: 709422 - RNA, 17 nt, Artificial Sequence
  Synthetic
gauuaacaagcuggguc

SEQ ID NO: 709423 - RNA, 17 nt, Artificial Sequence
  Synthetic
gucauuuguucuggguc

SEQ ID NO: 709424 - RNA, 17 nt, Artificial Sequence
  Synthetic
gacuagaggaguggguc

SEQ ID NO: 709425 - RNA, 17 nt, Artificial Sequence
  Synthetic
gaaaagacagguggguc

SEQ ID NO: 709426 - RNA, 17 nt, Artificial Sequence
  Synthetic
gugcucuucuguggguc

SEQ ID NO: 709427 - RNA, 17 nt, Artificial Sequence
  Synthetic
gaguguauuaaaugguc

SEQ ID NO: 709428 - RNA, 17 nt, Artificial Sequence
  Synthetic
gaugaguccccaugguc

SEQ ID NO: 709429 - RNA, 17 nt, Artificial Sequence
  Synthetic
gauauucacagaugguc

SEQ ID NO: 709430 - RNA, 17 nt, Artificial Sequence
  Synthetic
guugggaaacacugguc

SEQ ID NO: 709431 - RNA, 17 nt, Artificial Sequence
  Synthetic
gggccaaagcucugguc

SEQ ID NO: 709432 - RNA, 17 nt, Artificial Sequence
  Synthetic
guauggccugucugguc

SEQ ID NO: 709433 - RNA, 17 nt, Artificial Sequence
  Synthetic
gcugaaaggacgugguc

SEQ ID NO: 709434 - RNA, 17 nt, Artificial Sequence
  Synthetic
gcuccaugacauugguc

SEQ ID NO: 709435 - RNA, 17 nt, Artificial Sequence
  Synthetic
gguuucacauguugguc

SEQ ID NO: 709436 - RNA, 17 nt, Artificial Sequence
  Synthetic
guuucaccauguugguc

SEQ ID NO: 709437 - RNA, 17 nt, Artificial Sequence
  Synthetic
guuucgccauguugguc

SEQ ID NO: 709438 - RNA, 17 nt, Artificial Sequence
  Synthetic
guuucuccauguugguc

SEQ ID NO: 709439 - RNA, 17 nt, Artificial Sequence
  Synthetic
guuucaucauguugguc

SEQ ID NO: 709440 - RNA, 17 nt, Artificial Sequence
  Synthetic
gaauaaauaauuugguc

SEQ ID NO: 709441 - RNA, 17 nt, Artificial Sequence
  Synthetic
gauaaggugauuugguc

SEQ ID NO: 709442 - RNA, 17 nt, Artificial Sequence
  Synthetic
gagaaaauuaaaauguc

SEQ ID NO: 709443 - RNA, 17 nt, Artificial Sequence
  Synthetic
ggacauuuggaaauguc

SEQ ID NO: 709444 - RNA, 17 nt, Artificial Sequence
  Synthetic
gugaccaaauaaauguc

SEQ ID NO: 709445 - RNA, 17 nt, Artificial Sequence
  Synthetic
gcgccugccaccauguc

SEQ ID NO: 709446 - RNA, 17 nt, Artificial Sequence
  Synthetic
guuggaagcaagauguc

SEQ ID NO: 709447 - RNA, 17 nt, Artificial Sequence
  Synthetic
gucuccauuuagauguc

SEQ ID NO: 709448 - RNA, 17 nt, Artificial Sequence
  Synthetic
gggcggaucaugauguc

SEQ ID NO: 709449 - RNA, 17 nt, Artificial Sequence
  Synthetic
guggaucaucugauguc

SEQ ID NO: 709450 - RNA, 17 nt, Artificial Sequence
  Synthetic
guuuagguucugauguc

SEQ ID NO: 709451 - RNA, 17 nt, Artificial Sequence
  Synthetic
guggaccacuugauguc

SEQ ID NO: 709452 - RNA, 17 nt, Artificial Sequence
  Synthetic
gccuacgaguugauguc

SEQ ID NO: 709453 - RNA, 17 nt, Artificial Sequence
  Synthetic
gucagucuuauuauguc

SEQ ID NO: 709454 - RNA, 17 nt, Artificial Sequence
  Synthetic
ggaauugccuaccuguc

SEQ ID NO: 709455 - RNA, 17 nt, Artificial Sequence
  Synthetic
gguguuauuucucuguc

SEQ ID NO: 709456 - RNA, 17 nt, Artificial Sequence
  Synthetic
gcaugagccagucuguc

SEQ ID NO: 709457 - RNA, 17 nt, Artificial Sequence
  Synthetic
gagucuaguaaaguguc

SEQ ID NO: 709458 - RNA, 17 nt, Artificial Sequence
  Synthetic
gcaccuuccacaguguc

SEQ ID NO: 709459 - RNA, 17 nt, Artificial Sequence
  Synthetic
gggaaaagcauaguguc

SEQ ID NO: 709460 - RNA, 17 nt, Artificial Sequence
  Synthetic
gcuuagaaguuaguguc

SEQ ID NO: 709461 - RNA, 17 nt, Artificial Sequence
  Synthetic
gggccgcucaggguguc

SEQ ID NO: 709462 - RNA, 17 nt, Artificial Sequence
  Synthetic
gaauuccuugggguguc

SEQ ID NO: 709463 - RNA, 17 nt, Artificial Sequence
  Synthetic
gaagccaaauggguguc

SEQ ID NO: 709464 - RNA, 17 nt, Artificial Sequence
  Synthetic
ggggaaaugaauguguc

SEQ ID NO: 709465 - RNA, 17 nt, Artificial Sequence
  Synthetic
gugaggagcgauguguc

SEQ ID NO: 709466 - RNA, 17 nt, Artificial Sequence
  Synthetic
gacaccuuuuauguguc

SEQ ID NO: 709467 - RNA, 17 nt, Artificial Sequence
  Synthetic
gagugagccacuguguc

SEQ ID NO: 709468 - RNA, 17 nt, Artificial Sequence
  Synthetic
gugugagccauuguguc

SEQ ID NO: 709469 - RNA, 17 nt, Artificial Sequence
  Synthetic
gaaggguuuuuuguguc

SEQ ID NO: 709470 - RNA, 17 nt, Artificial Sequence
  Synthetic
gaaguaaaauacuuguc

SEQ ID NO: 709471 - RNA, 17 nt, Artificial Sequence
  Synthetic
gcacuaucuggcuuguc

SEQ ID NO: 709472 - RNA, 17 nt, Artificial Sequence
  Synthetic
gauaauuauuucuuguc

SEQ ID NO: 709473 - RNA, 17 nt, Artificial Sequence
  Synthetic
ggagaaauaaaguuguc

SEQ ID NO: 709474 - RNA, 17 nt, Artificial Sequence
  Synthetic
gccucucgagauuuguc

SEQ ID NO: 709475 - RNA, 17 nt, Artificial Sequence
  Synthetic
guuuuagcugauuuguc

SEQ ID NO: 709476 - RNA, 17 nt, Artificial Sequence
  Synthetic
gaaugaauaaguuuguc

SEQ ID NO: 709477 - RNA, 17 nt, Artificial Sequence
  Synthetic
gaaaaggagaaaaauuc

SEQ ID NO: 709478 - RNA, 17 nt, Artificial Sequence
  Synthetic
ggggcuuucuaaaauuc

SEQ ID NO: 709479 - RNA, 17 nt, Artificial Sequence
  Synthetic
gcuagaaaugcaaauuc

SEQ ID NO: 709480 - RNA, 17 nt, Artificial Sequence
  Synthetic
ggccaacauucaaauuc

SEQ ID NO: 709481 - RNA, 17 nt, Artificial Sequence
  Synthetic
ggcagagcuucaaauuc

SEQ ID NO: 709482 - RNA, 17 nt, Artificial Sequence
  Synthetic
gcucaagggggaaauuc

SEQ ID NO: 709483 - RNA, 17 nt, Artificial Sequence
  Synthetic
ggcuggauaugaaauuc

SEQ ID NO: 709484 - RNA, 17 nt, Artificial Sequence
  Synthetic
gugugagucugaaauuc

SEQ ID NO: 709485 - RNA, 17 nt, Artificial Sequence
  Synthetic
gucaugagaauaaauuc

SEQ ID NO: 709486 - RNA, 17 nt, Artificial Sequence
  Synthetic
gcaagaacgauaaauuc

SEQ ID NO: 709487 - RNA, 17 nt, Artificial Sequence
  Synthetic
gaacucacaaacaauuc

SEQ ID NO: 709488 - RNA, 17 nt, Artificial Sequence
  Synthetic
guacauguuggcaauuc

SEQ ID NO: 709489 - RNA, 17 nt, Artificial Sequence
  Synthetic
gucagugccaagaauuc

SEQ ID NO: 709490 - RNA, 17 nt, Artificial Sequence
  Synthetic
gcugagacacagaauuc

SEQ ID NO: 709491 - RNA, 17 nt, Artificial Sequence
  Synthetic
guuuaaauagagaauuc

SEQ ID NO: 709492 - RNA, 17 nt, Artificial Sequence
  Synthetic
guuaacuuagagaauuc

SEQ ID NO: 709493 - RNA, 17 nt, Artificial Sequence
  Synthetic
gagaucuacaggaauuc

SEQ ID NO: 709494 - RNA, 17 nt, Artificial Sequence
  Synthetic
guguacucugggaauuc

SEQ ID NO: 709495 - RNA, 17 nt, Artificial Sequence
  Synthetic
gacuuagaauggaauuc

SEQ ID NO: 709496 - RNA, 17 nt, Artificial Sequence
  Synthetic
gaggcaggguugaauuc

SEQ ID NO: 709497 - RNA, 17 nt, Artificial Sequence
  Synthetic
gaaaaaaaaaauaauuc

SEQ ID NO: 709498 - RNA, 17 nt, Artificial Sequence
  Synthetic
guguucaaaaauaauuc

SEQ ID NO: 709499 - RNA, 17 nt, Artificial Sequence
  Synthetic
gggcaagaguauaauuc

SEQ ID NO: 709500 - RNA, 17 nt, Artificial Sequence
  Synthetic
gggagccauuauaauuc

SEQ ID NO: 709501 - RNA, 17 nt, Artificial Sequence
  Synthetic
gaucaguauucuaauuc

SEQ ID NO: 709502 - RNA, 17 nt, Artificial Sequence
  Synthetic
gaaagaggauguaauuc

SEQ ID NO: 709503 - RNA, 17 nt, Artificial Sequence
  Synthetic
ggcaugccuuuuaauuc

SEQ ID NO: 709504 - RNA, 17 nt, Artificial Sequence
  Synthetic
ggcuuaaugagccauuc

SEQ ID NO: 709505 - RNA, 17 nt, Artificial Sequence
  Synthetic
guaggggcaaagcauuc

SEQ ID NO: 709506 - RNA, 17 nt, Artificial Sequence
  Synthetic
gaaaaggaagagcauuc

SEQ ID NO: 709507 - RNA, 17 nt, Artificial Sequence
  Synthetic
ggguacuauucucauuc

SEQ ID NO: 709508 - RNA, 17 nt, Artificial Sequence
  Synthetic
gacuccacuucucauuc

SEQ ID NO: 709509 - RNA, 17 nt, Artificial Sequence
  Synthetic
guacccaguagucauuc

SEQ ID NO: 709510 - RNA, 17 nt, Artificial Sequence
  Synthetic
gaguaggaaggucauuc

SEQ ID NO: 709511 - RNA, 17 nt, Artificial Sequence
  Synthetic
gucuugcucugucauuc

SEQ ID NO: 709512 - RNA, 17 nt, Artificial Sequence
  Synthetic
guccucuaccuucauuc

SEQ ID NO: 709513 - RNA, 17 nt, Artificial Sequence
  Synthetic
ggaacaaauuaagauuc

SEQ ID NO: 709514 - RNA, 17 nt, Artificial Sequence
  Synthetic
gagagaaugucagauuc

SEQ ID NO: 709515 - RNA, 17 nt, Artificial Sequence
  Synthetic
ggccaacguucagauuc

SEQ ID NO: 709516 - RNA, 17 nt, Artificial Sequence
  Synthetic
gaauuaaagggagauuc

SEQ ID NO: 709517 - RNA, 17 nt, Artificial Sequence
  Synthetic
guuuauggcauagauuc

SEQ ID NO: 709518 - RNA, 17 nt, Artificial Sequence
  Synthetic
gaguucauuguagauuc

SEQ ID NO: 709519 - RNA, 17 nt, Artificial Sequence
  Synthetic
gaguucuuuguagauuc

SEQ ID NO: 709520 - RNA, 17 nt, Artificial Sequence
  Synthetic
gagagguacauggauuc

SEQ ID NO: 709521 - RNA, 17 nt, Artificial Sequence
  Synthetic
guagagccacuggauuc

SEQ ID NO: 709522 - RNA, 17 nt, Artificial Sequence
  Synthetic
gacuugccucuggauuc

SEQ ID NO: 709523 - RNA, 17 nt, Artificial Sequence
  Synthetic
gcaaaucucuaugauuc

SEQ ID NO: 709524 - RNA, 17 nt, Artificial Sequence
  Synthetic
gaauuaaacaaauauuc

SEQ ID NO: 709525 - RNA, 17 nt, Artificial Sequence
  Synthetic
gugaugaauaaauauuc

SEQ ID NO: 709526 - RNA, 17 nt, Artificial Sequence
  Synthetic
gaaaaaaauuaauauuc

SEQ ID NO: 709527 - RNA, 17 nt, Artificial Sequence
  Synthetic
gguggauuuuaauauuc

SEQ ID NO: 709528 - RNA, 17 nt, Artificial Sequence
  Synthetic
ggcucagaugcauauuc

SEQ ID NO: 709529 - RNA, 17 nt, Artificial Sequence
  Synthetic
guauuucgaugauauuc

SEQ ID NO: 709530 - RNA, 17 nt, Artificial Sequence
  Synthetic
gacuuuucuauauauuc

SEQ ID NO: 709531 - RNA, 17 nt, Artificial Sequence
  Synthetic
gacccagucuuauauuc

SEQ ID NO: 709532 - RNA, 17 nt, Artificial Sequence
  Synthetic
gaucagauguuauauuc

SEQ ID NO: 709533 - RNA, 17 nt, Artificial Sequence
  Synthetic
gggacaugugacuauuc

SEQ ID NO: 709534 - RNA, 17 nt, Artificial Sequence
  Synthetic
ggaaugaauggcuauuc

SEQ ID NO: 709535 - RNA, 17 nt, Artificial Sequence
  Synthetic
guguuuuucuucuauuc

SEQ ID NO: 709536 - RNA, 17 nt, Artificial Sequence
  Synthetic
gaacccaguuucuauuc

SEQ ID NO: 709537 - RNA, 17 nt, Artificial Sequence
  Synthetic
gauaaggcaaauuauuc

SEQ ID NO: 709538 - RNA, 17 nt, Artificial Sequence
  Synthetic
gguaggcaguauuauuc

SEQ ID NO: 709539 - RNA, 17 nt, Artificial Sequence
  Synthetic
guguuuaguacuuauuc

SEQ ID NO: 709540 - RNA, 17 nt, Artificial Sequence
  Synthetic
guuuaaauucuuuauuc

SEQ ID NO: 709541 - RNA, 17 nt, Artificial Sequence
  Synthetic
gaagaacagaaaacuuc

SEQ ID NO: 709542 - RNA, 17 nt, Artificial Sequence
  Synthetic
gcugccaugaaaacuuc

SEQ ID NO: 709543 - RNA, 17 nt, Artificial Sequence
  Synthetic
ggaccauugaaaacuuc

SEQ ID NO: 709544 - RNA, 17 nt, Artificial Sequence
  Synthetic
guuaaauguaaaacuuc

SEQ ID NO: 709545 - RNA, 17 nt, Artificial Sequence
  Synthetic
ggcuagacucaaacuuc

SEQ ID NO: 709546 - RNA, 17 nt, Artificial Sequence
  Synthetic
gacuggucucaaacuuc

SEQ ID NO: 709547 - RNA, 17 nt, Artificial Sequence
  Synthetic
gguggcaacugaacuuc

SEQ ID NO: 709548 - RNA, 17 nt, Artificial Sequence
  Synthetic
gcccagcagugaacuuc

SEQ ID NO: 709549 - RNA, 17 nt, Artificial Sequence
  Synthetic
gguugcucuugaacuuc

SEQ ID NO: 709550 - RNA, 17 nt, Artificial Sequence
  Synthetic
gcuuuucuccuaacuuc

SEQ ID NO: 709551 - RNA, 17 nt, Artificial Sequence
  Synthetic
gcugcuuguuucacuuc

SEQ ID NO: 709552 - RNA, 17 nt, Artificial Sequence
  Synthetic
gacuucugucagacuuc

SEQ ID NO: 709553 - RNA, 17 nt, Artificial Sequence
  Synthetic
gaagcccuuucgacuuc

SEQ ID NO: 709554 - RNA, 17 nt, Artificial Sequence
  Synthetic
gaauccggcuggacuuc

SEQ ID NO: 709555 - RNA, 17 nt, Artificial Sequence
  Synthetic
gauugacauaugacuuc

SEQ ID NO: 709556 - RNA, 17 nt, Artificial Sequence
  Synthetic
gucaucuuucugacuuc

SEQ ID NO: 709557 - RNA, 17 nt, Artificial Sequence
  Synthetic
gagacaguuucuacuuc

SEQ ID NO: 709558 - RNA, 17 nt, Artificial Sequence
  Synthetic
guucuggcuaguacuuc

SEQ ID NO: 709559 - RNA, 17 nt, Artificial Sequence
  Synthetic
ggaucaaaugguacuuc

SEQ ID NO: 709560 - RNA, 17 nt, Artificial Sequence
  Synthetic
gaaaauuauggaccuuc

SEQ ID NO: 709561 - RNA, 17 nt, Artificial Sequence
  Synthetic
gugauugcuuccccuuc

SEQ ID NO: 709562 - RNA, 17 nt, Artificial Sequence
  Synthetic
gaugggcgauucccuuc

SEQ ID NO: 709563 - RNA, 17 nt, Artificial Sequence
  Synthetic
ggcaacagaaagccuuc

SEQ ID NO: 709564 - RNA, 17 nt, Artificial Sequence
  Synthetic
gaaaaucaaaugccuuc

SEQ ID NO: 709565 - RNA, 17 nt, Artificial Sequence
  Synthetic
gcuaggguauugccuuc

SEQ ID NO: 709566 - RNA, 17 nt, Artificial Sequence
  Synthetic
gccacaaguucuccuuc

SEQ ID NO: 709567 - RNA, 17 nt, Artificial Sequence
  Synthetic
ggcucugaucuuccuuc

SEQ ID NO: 709568 - RNA, 17 nt, Artificial Sequence
  Synthetic
gauucucuaguuccuuc

SEQ ID NO: 709569 - RNA, 17 nt, Artificial Sequence
  Synthetic
gaauaggaauuuccuuc

SEQ ID NO: 709570 - RNA, 17 nt, Artificial Sequence
  Synthetic
gggggauccugagcuuc

SEQ ID NO: 709571 - RNA, 17 nt, Artificial Sequence
  Synthetic
guguaagacauagcuuc

SEQ ID NO: 709572 - RNA, 17 nt, Artificial Sequence
  Synthetic
gucacagagcuagcuuc

SEQ ID NO: 709573 - RNA, 17 nt, Artificial Sequence
  Synthetic
gcuuccauagaggcuuc

SEQ ID NO: 709574 - RNA, 17 nt, Artificial Sequence
  Synthetic
gguucugaaacggcuuc

SEQ ID NO: 709575 - RNA, 17 nt, Artificial Sequence
  Synthetic
gugcuuggcugggcuuc

SEQ ID NO: 709576 - RNA, 17 nt, Artificial Sequence
  Synthetic
guuacugacaaugcuuc

SEQ ID NO: 709577 - RNA, 17 nt, Artificial Sequence
  Synthetic
gucucaugaccugcuuc

SEQ ID NO: 709578 - RNA, 17 nt, Artificial Sequence
  Synthetic
guuuuauuacuugcuuc

SEQ ID NO: 709579 - RNA, 17 nt, Artificial Sequence
  Synthetic
gucuacuucuuugcuuc

SEQ ID NO: 709580 - RNA, 17 nt, Artificial Sequence
  Synthetic
guaaacugaaaaucuuc

SEQ ID NO: 709581 - RNA, 17 nt, Artificial Sequence
  Synthetic
gaacauucgaaaucuuc

SEQ ID NO: 709582 - RNA, 17 nt, Artificial Sequence
  Synthetic
guuuacaucucaucuuc

SEQ ID NO: 709583 - RNA, 17 nt, Artificial Sequence
  Synthetic
gcuggcugaauaucuuc

SEQ ID NO: 709584 - RNA, 17 nt, Artificial Sequence
  Synthetic
guaauuaauauaucuuc

SEQ ID NO: 709585 - RNA, 17 nt, Artificial Sequence
  Synthetic
guuggaaaacacucuuc

SEQ ID NO: 709586 - RNA, 17 nt, Artificial Sequence
  Synthetic
gaguucaucaccucuuc

SEQ ID NO: 709587 - RNA, 17 nt, Artificial Sequence
  Synthetic
gugucuuucggcucuuc

SEQ ID NO: 709588 - RNA, 17 nt, Artificial Sequence
  Synthetic
guuucuguaaucucuuc

SEQ ID NO: 709589 - RNA, 17 nt, Artificial Sequence
  Synthetic
gaugaugugcagucuuc

SEQ ID NO: 709590 - RNA, 17 nt, Artificial Sequence
  Synthetic
guuucccuacugucuuc

SEQ ID NO: 709591 - RNA, 17 nt, Artificial Sequence
  Synthetic
gacucucaccugucuuc

SEQ ID NO: 709592 - RNA, 17 nt, Artificial Sequence
  Synthetic
ggaaaaagugcuucuuc

SEQ ID NO: 709593 - RNA, 17 nt, Artificial Sequence
  Synthetic
gauauauuccuuucuuc

SEQ ID NO: 709594 - RNA, 17 nt, Artificial Sequence
  Synthetic
gagcaaauucuuucuuc

SEQ ID NO: 709595 - RNA, 17 nt, Artificial Sequence
  Synthetic
ggucuuugucaaaguuc

SEQ ID NO: 709596 - RNA, 17 nt, Artificial Sequence
  Synthetic
guuuauuugagaaguuc

SEQ ID NO: 709597 - RNA, 17 nt, Artificial Sequence
  Synthetic
guauucacucacaguuc

SEQ ID NO: 709598 - RNA, 17 nt, Artificial Sequence
  Synthetic
guauuggcucacaguuc

SEQ ID NO: 709599 - RNA, 17 nt, Artificial Sequence
  Synthetic
ggcagaaaguacaguuc

SEQ ID NO: 709600 - RNA, 17 nt, Artificial Sequence
  Synthetic
gaauccauccucaguuc

SEQ ID NO: 709601 - RNA, 17 nt, Artificial Sequence
  Synthetic
gauuuucaggggaguuc

SEQ ID NO: 709602 - RNA, 17 nt, Artificial Sequence
  Synthetic
gcauuuugccugaguuc

SEQ ID NO: 709603 - RNA, 17 nt, Artificial Sequence
  Synthetic
ggauggcuccauaguuc

SEQ ID NO: 709604 - RNA, 17 nt, Artificial Sequence
  Synthetic
gcccagccaaagcguuc

SEQ ID NO: 709605 - RNA, 17 nt, Artificial Sequence
  Synthetic
gaggagaagaggcguuc

SEQ ID NO: 709606 - RNA, 17 nt, Artificial Sequence
  Synthetic
ggugagggugcucguuc

SEQ ID NO: 709607 - RNA, 17 nt, Artificial Sequence
  Synthetic
gaaaauauguuucguuc

SEQ ID NO: 709608 - RNA, 17 nt, Artificial Sequence
  Synthetic
gagaaacgguuagguuc

SEQ ID NO: 709609 - RNA, 17 nt, Artificial Sequence
  Synthetic
guuguuuuucacgguuc

SEQ ID NO: 709610 - RNA, 17 nt, Artificial Sequence
  Synthetic
ggaguauuuuaggguuc

SEQ ID NO: 709611 - RNA, 17 nt, Artificial Sequence
  Synthetic
guuuguuacauggguuc

SEQ ID NO: 709612 - RNA, 17 nt, Artificial Sequence
  Synthetic
gccugaaauaaugguuc

SEQ ID NO: 709613 - RNA, 17 nt, Artificial Sequence
  Synthetic
gaagauuccuaugguuc

SEQ ID NO: 709614 - RNA, 17 nt, Artificial Sequence
  Synthetic
ggcuauuccagugguuc

SEQ ID NO: 709615 - RNA, 17 nt, Artificial Sequence
  Synthetic
gcucuuccucgugguuc

SEQ ID NO: 709616 - RNA, 17 nt, Artificial Sequence
  Synthetic
gcaauuauaaaauguuc

SEQ ID NO: 709617 - RNA, 17 nt, Artificial Sequence
  Synthetic
gauuuggaguaauguuc

SEQ ID NO: 709618 - RNA, 17 nt, Artificial Sequence
  Synthetic
ggcuuagagacauguuc

SEQ ID NO: 709619 - RNA, 17 nt, Artificial Sequence
  Synthetic
gagcagcacggauguuc

SEQ ID NO: 709620 - RNA, 17 nt, Artificial Sequence
  Synthetic
gaagugaugggauguuc

SEQ ID NO: 709621 - RNA, 17 nt, Artificial Sequence
  Synthetic
ggcagagacauauguuc

SEQ ID NO: 709622 - RNA, 17 nt, Artificial Sequence
  Synthetic
ggcuucccauuauguuc

SEQ ID NO: 709623 - RNA, 17 nt, Artificial Sequence
  Synthetic
guauuuuccuacuguuc

SEQ ID NO: 709624 - RNA, 17 nt, Artificial Sequence
  Synthetic
ggccgucgguucuguuc

SEQ ID NO: 709625 - RNA, 17 nt, Artificial Sequence
  Synthetic
ggggaaauguucuguuc

SEQ ID NO: 709626 - RNA, 17 nt, Artificial Sequence
  Synthetic
gaugauaugaaguguuc

SEQ ID NO: 709627 - RNA, 17 nt, Artificial Sequence
  Synthetic
gguaacgaaacuuguuc

SEQ ID NO: 709628 - RNA, 17 nt, Artificial Sequence
  Synthetic
gagcuguuguguuguuc

SEQ ID NO: 709629 - RNA, 17 nt, Artificial Sequence
  Synthetic
ggguuuguaaaaauuuc

SEQ ID NO: 709630 - RNA, 17 nt, Artificial Sequence
  Synthetic
gauaaauuggcaauuuc

SEQ ID NO: 709631 - RNA, 17 nt, Artificial Sequence
  Synthetic
gagaaauacucaauuuc

SEQ ID NO: 709632 - RNA, 17 nt, Artificial Sequence
  Synthetic
gaggucaauagaauuuc

SEQ ID NO: 709633 - RNA, 17 nt, Artificial Sequence
  Synthetic
gauuuuguuauaauuuc

SEQ ID NO: 709634 - RNA, 17 nt, Artificial Sequence
  Synthetic
gcugaugguuuaauuuc

SEQ ID NO: 709635 - RNA, 17 nt, Artificial Sequence
  Synthetic
gagucuaugaacauuuc

SEQ ID NO: 709636 - RNA, 17 nt, Artificial Sequence
  Synthetic
ggacauuauaacauuuc

SEQ ID NO: 709637 - RNA, 17 nt, Artificial Sequence
  Synthetic
gucacgugacacauuuc

SEQ ID NO: 709638 - RNA, 17 nt, Artificial Sequence
  Synthetic
gcagaggcucacauuuc

SEQ ID NO: 709639 - RNA, 17 nt, Artificial Sequence
  Synthetic
ggagaaggggagauuuc

SEQ ID NO: 709640 - RNA, 17 nt, Artificial Sequence
  Synthetic
gggccaacaaggauuuc

SEQ ID NO: 709641 - RNA, 17 nt, Artificial Sequence
  Synthetic
guguguugggugauuuc

SEQ ID NO: 709642 - RNA, 17 nt, Artificial Sequence
  Synthetic
gcaaaguuuuugauuuc

SEQ ID NO: 709643 - RNA, 17 nt, Artificial Sequence
  Synthetic
ggcuauugcaauauuuc

SEQ ID NO: 709644 - RNA, 17 nt, Artificial Sequence
  Synthetic
gguuuacaacauauuuc

SEQ ID NO: 709645 - RNA, 17 nt, Artificial Sequence
  Synthetic
guaaaugaacauauuuc

SEQ ID NO: 709646 - RNA, 17 nt, Artificial Sequence
  Synthetic
gagacuguccauauuuc

SEQ ID NO: 709647 - RNA, 17 nt, Artificial Sequence
  Synthetic
gcuuuugcuccuauuuc

SEQ ID NO: 709648 - RNA, 17 nt, Artificial Sequence
  Synthetic
gggucaaaugguauuuc

SEQ ID NO: 709649 - RNA, 17 nt, Artificial Sequence
  Synthetic
gaguuaaaugguauuuc

SEQ ID NO: 709650 - RNA, 17 nt, Artificial Sequence
  Synthetic
guuaaaggugguauuuc

SEQ ID NO: 709651 - RNA, 17 nt, Artificial Sequence
  Synthetic
guuuuacaauguauuuc

SEQ ID NO: 709652 - RNA, 17 nt, Artificial Sequence
  Synthetic
ggaggagaaguuauuuc

SEQ ID NO: 709653 - RNA, 17 nt, Artificial Sequence
  Synthetic
gagaggcaauuuauuuc

SEQ ID NO: 709654 - RNA, 17 nt, Artificial Sequence
  Synthetic
gaugcuagguuuauuuc

SEQ ID NO: 709655 - RNA, 17 nt, Artificial Sequence
  Synthetic
gcucaaauuuuuauuuc

SEQ ID NO: 709656 - RNA, 17 nt, Artificial Sequence
  Synthetic
gugucaauuaaacuuuc

SEQ ID NO: 709657 - RNA, 17 nt, Artificial Sequence
  Synthetic
guuuuggcuugacuuuc

SEQ ID NO: 709658 - RNA, 17 nt, Artificial Sequence
  Synthetic
gaaugugugcaccuuuc

SEQ ID NO: 709659 - RNA, 17 nt, Artificial Sequence
  Synthetic
guuagauaagggcuuuc

SEQ ID NO: 709660 - RNA, 17 nt, Artificial Sequence
  Synthetic
gcagcgugagggcuuuc

SEQ ID NO: 709661 - RNA, 17 nt, Artificial Sequence
  Synthetic
gagaauuaauugcuuuc

SEQ ID NO: 709662 - RNA, 17 nt, Artificial Sequence
  Synthetic
ggaaacuuguugcuuuc

SEQ ID NO: 709663 - RNA, 17 nt, Artificial Sequence
  Synthetic
gugagugguuugcuuuc

SEQ ID NO: 709664 - RNA, 17 nt, Artificial Sequence
  Synthetic
gcaugcugagcucuuuc

SEQ ID NO: 709665 - RNA, 17 nt, Artificial Sequence
  Synthetic
gauuaugcugcucuuuc

SEQ ID NO: 709666 - RNA, 17 nt, Artificial Sequence
  Synthetic
gauagaaacucucuuuc

SEQ ID NO: 709667 - RNA, 17 nt, Artificial Sequence
  Synthetic
gacuagccaugucuuuc

SEQ ID NO: 709668 - RNA, 17 nt, Artificial Sequence
  Synthetic
gggguguucuuucuuuc

SEQ ID NO: 709669 - RNA, 17 nt, Artificial Sequence
  Synthetic
gaggaaguaaaaguuuc

SEQ ID NO: 709670 - RNA, 17 nt, Artificial Sequence
  Synthetic
gaaaauggcaaaguuuc

SEQ ID NO: 709671 - RNA, 17 nt, Artificial Sequence
  Synthetic
gugcauggaacaguuuc

SEQ ID NO: 709672 - RNA, 17 nt, Artificial Sequence
  Synthetic
gugacauucaagguuuc

SEQ ID NO: 709673 - RNA, 17 nt, Artificial Sequence
  Synthetic
gaggcaaguuggguuuc

SEQ ID NO: 709674 - RNA, 17 nt, Artificial Sequence
  Synthetic
gaauaacauaugguuuc

SEQ ID NO: 709675 - RNA, 17 nt, Artificial Sequence
  Synthetic
gaugaacucuauguuuc

SEQ ID NO: 709676 - RNA, 17 nt, Artificial Sequence
  Synthetic
guuuaugaggcuguuuc

SEQ ID NO: 709677 - RNA, 17 nt, Artificial Sequence
  Synthetic
gaucuaacaaguguuuc

SEQ ID NO: 709678 - RNA, 17 nt, Artificial Sequence
  Synthetic
gagccucuagguguuuc

SEQ ID NO: 709679 - RNA, 17 nt, Artificial Sequence
  Synthetic
gucacuuccacauuuuc

SEQ ID NO: 709680 - RNA, 17 nt, Artificial Sequence
  Synthetic
gucgcuuccacauuuuc

SEQ ID NO: 709681 - RNA, 17 nt, Artificial Sequence
  Synthetic
guaaauuacccauuuuc

SEQ ID NO: 709682 - RNA, 17 nt, Artificial Sequence
  Synthetic
gaaaaaacgccauuuuc

SEQ ID NO: 709683 - RNA, 17 nt, Artificial Sequence
  Synthetic
ggccucaucagauuuuc

SEQ ID NO: 709684 - RNA, 17 nt, Artificial Sequence
  Synthetic
gccuuuuucagauuuuc

SEQ ID NO: 709685 - RNA, 17 nt, Artificial Sequence
  Synthetic
guaggcaagcuauuuuc

SEQ ID NO: 709686 - RNA, 17 nt, Artificial Sequence
  Synthetic
gaguuuaucaccuuuuc

SEQ ID NO: 709687 - RNA, 17 nt, Artificial Sequence
  Synthetic
gucuuuuuucccuuuuc

SEQ ID NO: 709688 - RNA, 17 nt, Artificial Sequence
  Synthetic
gaaaaccagugcuuuuc

SEQ ID NO: 709689 - RNA, 17 nt, Artificial Sequence
  Synthetic
guuaaggaaagguuuuc

SEQ ID NO: 709690 - RNA, 17 nt, Artificial Sequence
  Synthetic
guaaagauuugguuuuc

SEQ ID NO: 709691 - RNA, 17 nt, Artificial Sequence
  Synthetic
gaaggaauaauguuuuc

SEQ ID NO: 709692 - RNA, 17 nt, Artificial Sequence
  Synthetic
guggccauucuguuuuc

SEQ ID NO: 709693 - RNA, 17 nt, Artificial Sequence
  Synthetic
gaaucauggguguuuuc

SEQ ID NO: 709694 - RNA, 17 nt, Artificial Sequence
  Synthetic
gcuuaaguguuguuuuc

SEQ ID NO: 709695 - RNA, 17 nt, Artificial Sequence
  Synthetic
guuuccucuuuguuuuc

SEQ ID NO: 709696 - RNA, 17 nt, Artificial Sequence
  Synthetic
guguggcauuauuuuuc

SEQ ID NO: 709697 - RNA, 17 nt, Artificial Sequence
  Synthetic
guugagauuuauuuuuc

SEQ ID NO: 709698 - RNA, 17 nt, Artificial Sequence
  Synthetic
ggaccucaaacuuuuuc

SEQ ID NO: 709699 - RNA, 17 nt, Artificial Sequence
  Synthetic
gcccuuaugacuuuuuc

SEQ ID NO: 709700 - RNA, 17 nt, Artificial Sequence
  Synthetic
gcauuagugacuuuuuc

SEQ ID NO: 709701 - RNA, 17 nt, Artificial Sequence
  Synthetic
gcaccaggcaguuuuuc

SEQ ID NO: 709702 - RNA, 17 nt, Artificial Sequence
  Synthetic
gucauccaguguuuuuc

SEQ ID NO: 709703 - RNA, 17 nt, Artificial Sequence
  Synthetic
gcugcuuuuuguuuuuc

SEQ ID NO: 709704 - RNA, 17 nt, Artificial Sequence
  Synthetic
gaacucaucauuuuuuc

SEQ ID NO: 709705 - RNA, 17 nt, Artificial Sequence
  Synthetic
gagauauauauuuuuuc

SEQ ID NO: 709706 - RNA, 17 nt, Artificial Sequence
  Synthetic
guuuaaggacuuuuuuc

SEQ ID NO: 709707 - RNA, 17 nt, Artificial Sequence
  Synthetic
gaggagucauuuuuuuc

SEQ ID NO: 709708 - RNA, 17 nt, Artificial Sequence
  Synthetic
guaaugacuuuuuuuuc

SEQ ID NO: 709709 - RNA, 17 nt, Artificial Sequence
  Synthetic
guuuuuuuuuuuuuuuc

SEQ ID NO: 709710 - RNA, 17 nt, Artificial Sequence
  Synthetic
aaaaaaaaaaaaaaaag

SEQ ID NO: 709711 - RNA, 17 nt, Artificial Sequence
  Synthetic
gggaaaaaaaaaaaaag

SEQ ID NO: 709712 - RNA, 17 nt, Artificial Sequence
  Synthetic
gaacuuggaaaaaaaag

SEQ ID NO: 709713 - RNA, 17 nt, Artificial Sequence
  Synthetic
gugagugggaaaaaaag

SEQ ID NO: 709714 - RNA, 17 nt, Artificial Sequence
  Synthetic
gagacuacuaaaaaaag

SEQ ID NO: 709715 - RNA, 17 nt, Artificial Sequence
  Synthetic
ggcuuucagcaaaaaag

SEQ ID NO: 709716 - RNA, 17 nt, Artificial Sequence
  Synthetic
ggcagaacucaaaaaag

SEQ ID NO: 709717 - RNA, 17 nt, Artificial Sequence
  Synthetic
gggauaguuacaaaaag

SEQ ID NO: 709718 - RNA, 17 nt, Artificial Sequence
  Synthetic
ggaaaaaaaucaaaaag

SEQ ID NO: 709719 - RNA, 17 nt, Artificial Sequence
  Synthetic
gcauauuugggaaaaag

SEQ ID NO: 709720 - RNA, 17 nt, Artificial Sequence
  Synthetic
gaaaacagccuaaaaag

SEQ ID NO: 709721 - RNA, 17 nt, Artificial Sequence
  Synthetic
ggaaaacauuuaaaaag

SEQ ID NO: 709722 - RNA, 17 nt, Artificial Sequence
  Synthetic
gaaguaugccacaaaag

SEQ ID NO: 709723 - RNA, 17 nt, Artificial Sequence
  Synthetic
gacaguuuucccaaaag

SEQ ID NO: 709724 - RNA, 17 nt, Artificial Sequence
  Synthetic
ggcauguagggcaaaag

SEQ ID NO: 709725 - RNA, 17 nt, Artificial Sequence
  Synthetic
gcaagaaagaucaaaag

SEQ ID NO: 709726 - RNA, 17 nt, Artificial Sequence
  Synthetic
gagauguugaucaaaag

SEQ ID NO: 709727 - RNA, 17 nt, Artificial Sequence
  Synthetic
gaaaccauacucaaaag

SEQ ID NO: 709728 - RNA, 17 nt, Artificial Sequence
  Synthetic
gagagugugaagaaaag

SEQ ID NO: 709729 - RNA, 17 nt, Artificial Sequence
  Synthetic
gaaaacagaaggaaaag

SEQ ID NO: 709730 - RNA, 17 nt, Artificial Sequence
  Synthetic
ggcuuaucauggaaaag

SEQ ID NO: 709731 - RNA, 17 nt, Artificial Sequence
  Synthetic
gagaauuauaugaaaag

SEQ ID NO: 709732 - RNA, 17 nt, Artificial Sequence
  Synthetic
gaaggggagcugaaaag

SEQ ID NO: 709733 - RNA, 17 nt, Artificial Sequence
  Synthetic
gcagcagcucugaaaag

SEQ ID NO: 709734 - RNA, 17 nt, Artificial Sequence
  Synthetic
gagacauauuugaaaag

SEQ ID NO: 709735 - RNA, 17 nt, Artificial Sequence
  Synthetic
gcucaaggaaauaaaag

SEQ ID NO: 709736 - RNA, 17 nt, Artificial Sequence
  Synthetic
gaaugccacaauaaaag

SEQ ID NO: 709737 - RNA, 17 nt, Artificial Sequence
  Synthetic
gguaagggagauaaaag

SEQ ID NO: 709738 - RNA, 17 nt, Artificial Sequence
  Synthetic
ggugugaccuauaaaag

SEQ ID NO: 709739 - RNA, 17 nt, Artificial Sequence
  Synthetic
gaaugugcagguaaaag

SEQ ID NO: 709740 - RNA, 17 nt, Artificial Sequence
  Synthetic
gacucuguccuuaaaag

SEQ ID NO: 709741 - RNA, 17 nt, Artificial Sequence
  Synthetic
gguuauuugguuaaaag

SEQ ID NO: 709742 - RNA, 17 nt, Artificial Sequence
  Synthetic
gaauaggaagaacaaag

SEQ ID NO: 709743 - RNA, 17 nt, Artificial Sequence
  Synthetic
gaucguugagaacaaag

SEQ ID NO: 709744 - RNA, 17 nt, Artificial Sequence
  Synthetic
guaaggcagacacaaag

SEQ ID NO: 709745 - RNA, 17 nt, Artificial Sequence
  Synthetic
guguggcagucacaaag

SEQ ID NO: 709746 - RNA, 17 nt, Artificial Sequence
  Synthetic
guggagcuaagacaaag

SEQ ID NO: 709747 - RNA, 17 nt, Artificial Sequence
  Synthetic
gccuagagaugacaaag

SEQ ID NO: 709748 - RNA, 17 nt, Artificial Sequence
  Synthetic
gauauucugaaccaaag

SEQ ID NO: 709749 - RNA, 17 nt, Artificial Sequence
  Synthetic
gucaguuguuaccaaag

SEQ ID NO: 709750 - RNA, 17 nt, Artificial Sequence
  Synthetic
gccucagccucccaaag

SEQ ID NO: 709751 - RNA, 17 nt, Artificial Sequence
  Synthetic
ggaaaggaaagccaaag

SEQ ID NO: 709752 - RNA, 17 nt, Artificial Sequence
  Synthetic
gggaacuugagccaaag

SEQ ID NO: 709753 - RNA, 17 nt, Artificial Sequence
  Synthetic
guuguuaucauccaaag

SEQ ID NO: 709754 - RNA, 17 nt, Artificial Sequence
  Synthetic
ggcuaaaccuuccaaag

SEQ ID NO: 709755 - RNA, 17 nt, Artificial Sequence
  Synthetic
guccuucauuuccaaag

SEQ ID NO: 709756 - RNA, 17 nt, Artificial Sequence
  Synthetic
gccaugaugaggcaaag

SEQ ID NO: 709757 - RNA, 17 nt, Artificial Sequence
  Synthetic
gggaggaagaugcaaag

SEQ ID NO: 709758 - RNA, 17 nt, Artificial Sequence
  Synthetic
gacuaaugauugcaaag

SEQ ID NO: 709759 - RNA, 17 nt, Artificial Sequence
  Synthetic
gguuauaggaaucaaag

SEQ ID NO: 709760 - RNA, 17 nt, Artificial Sequence
  Synthetic
gacgaagguuaucaaag

SEQ ID NO: 709761 - RNA, 17 nt, Artificial Sequence
  Synthetic
gaaaccgcagcucaaag

SEQ ID NO: 709762 - RNA, 17 nt, Artificial Sequence
  Synthetic
ggaaacgacaaagaaag

SEQ ID NO: 709763 - RNA, 17 nt, Artificial Sequence
  Synthetic
ggagaugauaaagaaag

SEQ ID NO: 709764 - RNA, 17 nt, Artificial Sequence
  Synthetic
gaauaauaacaagaaag

SEQ ID NO: 709765 - RNA, 17 nt, Artificial Sequence
  Synthetic
gucuuucaucaagaaag

SEQ ID NO: 709766 - RNA, 17 nt, Artificial Sequence
  Synthetic
gccugggcgacagaaag

SEQ ID NO: 709767 - RNA, 17 nt, Artificial Sequence
  Synthetic
guuuuaugaagagaaag

SEQ ID NO: 709768 - RNA, 17 nt, Artificial Sequence
  Synthetic
gagagagagagagaaag

SEQ ID NO: 709769 - RNA, 17 nt, Artificial Sequence
  Synthetic
gcagugccaauagaaag

SEQ ID NO: 709770 - RNA, 17 nt, Artificial Sequence
  Synthetic
gccccacagauagaaag

SEQ ID NO: 709771 - RNA, 17 nt, Artificial Sequence
  Synthetic
gauaaacaaguagaaag

SEQ ID NO: 709772 - RNA, 17 nt, Artificial Sequence
  Synthetic
gaaaacaauuuagaaag

SEQ ID NO: 709773 - RNA, 17 nt, Artificial Sequence
  Synthetic
gguggagggacggaaag

SEQ ID NO: 709774 - RNA, 17 nt, Artificial Sequence
  Synthetic
guauaagugggggaaag

SEQ ID NO: 709775 - RNA, 17 nt, Artificial Sequence
  Synthetic
gugugagguauggaaag

SEQ ID NO: 709776 - RNA, 17 nt, Artificial Sequence
  Synthetic
gauugaauccuggaaag

SEQ ID NO: 709777 - RNA, 17 nt, Artificial Sequence
  Synthetic
gugagagaucuggaaag

SEQ ID NO: 709778 - RNA, 17 nt, Artificial Sequence
  Synthetic
ggagguucucuggaaag

SEQ ID NO: 709779 - RNA, 17 nt, Artificial Sequence
  Synthetic
guaaugggaaaugaaag

SEQ ID NO: 709780 - RNA, 17 nt, Artificial Sequence
  Synthetic
gaaauacuugaugaaag

SEQ ID NO: 709781 - RNA, 17 nt, Artificial Sequence
  Synthetic
gcuuaagugucugaaag

SEQ ID NO: 709782 - RNA, 17 nt, Artificial Sequence
  Synthetic
gcccaaagcagugaaag

SEQ ID NO: 709783 - RNA, 17 nt, Artificial Sequence
  Synthetic
guuaagguuagugaaag

SEQ ID NO: 709784 - RNA, 17 nt, Artificial Sequence
  Synthetic
guagguauaauugaaag

SEQ ID NO: 709785 - RNA, 17 nt, Artificial Sequence
  Synthetic
ggaggguagaaauaaag

SEQ ID NO: 709786 - RNA, 17 nt, Artificial Sequence
  Synthetic
gaaguuaauaaauaaag

SEQ ID NO: 709787 - RNA, 17 nt, Artificial Sequence
  Synthetic
gaauaaaaauaauaaag

SEQ ID NO: 709788 - RNA, 17 nt, Artificial Sequence
  Synthetic
gccagcuaggcauaaag

SEQ ID NO: 709789 - RNA, 17 nt, Artificial Sequence
  Synthetic
ggaaggacugcauaaag

SEQ ID NO: 709790 - RNA, 17 nt, Artificial Sequence
  Synthetic
ggagagaauucauaaag

SEQ ID NO: 709791 - RNA, 17 nt, Artificial Sequence
  Synthetic
guuuuuugucuauaaag

SEQ ID NO: 709792 - RNA, 17 nt, Artificial Sequence
  Synthetic
gccagucugcacuaaag

SEQ ID NO: 709793 - RNA, 17 nt, Artificial Sequence
  Synthetic
guuucgguuugcuaaag

SEQ ID NO: 709794 - RNA, 17 nt, Artificial Sequence
  Synthetic
gagagugaaaaguaaag

SEQ ID NO: 709795 - RNA, 17 nt, Artificial Sequence
  Synthetic
ggggccugaaaguaaag

SEQ ID NO: 709796 - RNA, 17 nt, Artificial Sequence
  Synthetic
guguuuauaaaguaaag

SEQ ID NO: 709797 - RNA, 17 nt, Artificial Sequence
  Synthetic
guuuuuaggggguaaag

SEQ ID NO: 709798 - RNA, 17 nt, Artificial Sequence
  Synthetic
gaguaagugugguaaag

SEQ ID NO: 709799 - RNA, 17 nt, Artificial Sequence
  Synthetic
gcuuuuauuuuguaaag

SEQ ID NO: 709800 - RNA, 17 nt, Artificial Sequence
  Synthetic
gaauuaaacauuuaaag

SEQ ID NO: 709801 - RNA, 17 nt, Artificial Sequence
  Synthetic
guucaaaugaaaacaag

SEQ ID NO: 709802 - RNA, 17 nt, Artificial Sequence
  Synthetic
gggaucaauucaacaag

SEQ ID NO: 709803 - RNA, 17 nt, Artificial Sequence
  Synthetic
gaguacaguugaacaag

SEQ ID NO: 709804 - RNA, 17 nt, Artificial Sequence
  Synthetic
guagagaaacuaacaag

SEQ ID NO: 709805 - RNA, 17 nt, Artificial Sequence
  Synthetic
gccacaaagcuaacaag

SEQ ID NO: 709806 - RNA, 17 nt, Artificial Sequence
  Synthetic
gguaaauguuuaacaag

SEQ ID NO: 709807 - RNA, 17 nt, Artificial Sequence
  Synthetic
ggaggguggaacacaag

SEQ ID NO: 709808 - RNA, 17 nt, Artificial Sequence
  Synthetic
gaaaguuggaacacaag

SEQ ID NO: 709809 - RNA, 17 nt, Artificial Sequence
  Synthetic
gacugaaacuacacaag

SEQ ID NO: 709810 - RNA, 17 nt, Artificial Sequence
  Synthetic
guauuugauagcacaag

SEQ ID NO: 709811 - RNA, 17 nt, Artificial Sequence
  Synthetic
ggauacagacucacaag

SEQ ID NO: 709812 - RNA, 17 nt, Artificial Sequence
  Synthetic
ggauuuauucagacaag

SEQ ID NO: 709813 - RNA, 17 nt, Artificial Sequence
  Synthetic
gaaauuccagauacaag

SEQ ID NO: 709814 - RNA, 17 nt, Artificial Sequence
  Synthetic
gagaccaaauauacaag

SEQ ID NO: 709815 - RNA, 17 nt, Artificial Sequence
  Synthetic
gacuggagcuguacaag

SEQ ID NO: 709816 - RNA, 17 nt, Artificial Sequence
  Synthetic
guguuuaauuuuacaag

SEQ ID NO: 709817 - RNA, 17 nt, Artificial Sequence
  Synthetic
gagaacuacaaaccaag

SEQ ID NO: 709818 - RNA, 17 nt, Artificial Sequence
  Synthetic
gcccuguggaaaccaag

SEQ ID NO: 709819 - RNA, 17 nt, Artificial Sequence
  Synthetic
gagguguccuacccaag

SEQ ID NO: 709820 - RNA, 17 nt, Artificial Sequence
  Synthetic
gcaccuggucagccaag

SEQ ID NO: 709821 - RNA, 17 nt, Artificial Sequence
  Synthetic
gaagucagggagccaag

SEQ ID NO: 709822 - RNA, 17 nt, Artificial Sequence
  Synthetic
gaagauuucuagccaag

SEQ ID NO: 709823 - RNA, 17 nt, Artificial Sequence
  Synthetic
guugugcuuaugccaag

SEQ ID NO: 709824 - RNA, 17 nt, Artificial Sequence
  Synthetic
gaauucucaucuccaag

SEQ ID NO: 709825 - RNA, 17 nt, Artificial Sequence
  Synthetic
gaggauucacuuccaag

SEQ ID NO: 709826 - RNA, 17 nt, Artificial Sequence
  Synthetic
gaaaugaguguuccaag

SEQ ID NO: 709827 - RNA, 17 nt, Artificial Sequence
  Synthetic
gaaagagcggaagcaag

SEQ ID NO: 709828 - RNA, 17 nt, Artificial Sequence
  Synthetic
gcuuauuaaacagcaag

SEQ ID NO: 709829 - RNA, 17 nt, Artificial Sequence
  Synthetic
guauuauaagcagcaag

SEQ ID NO: 709830 - RNA, 17 nt, Artificial Sequence
  Synthetic
guaagcaaaugagcaag

SEQ ID NO: 709831 - RNA, 17 nt, Artificial Sequence
  Synthetic
ggaaucuagugagcaag

SEQ ID NO: 709832 - RNA, 17 nt, Artificial Sequence
  Synthetic
ggaaggugauuagcaag

SEQ ID NO: 709833 - RNA, 17 nt, Artificial Sequence
  Synthetic
gugaagagugacgcaag

SEQ ID NO: 709834 - RNA, 17 nt, Artificial Sequence
  Synthetic
gaauugaggaaggcaag

SEQ ID NO: 709835 - RNA, 17 nt, Artificial Sequence
  Synthetic
gauuugacuagggcaag

SEQ ID NO: 709836 - RNA, 17 nt, Artificial Sequence
  Synthetic
gcgagguggggggcaag

SEQ ID NO: 709837 - RNA, 17 nt, Artificial Sequence
  Synthetic
ggcggguggggggcaag

SEQ ID NO: 709838 - RNA, 17 nt, Artificial Sequence
  Synthetic
gaaaacagucuggcaag

SEQ ID NO: 709839 - RNA, 17 nt, Artificial Sequence
  Synthetic
gguauaaaaguggcaag

SEQ ID NO: 709840 - RNA, 17 nt, Artificial Sequence
  Synthetic
gaaaaauagguggcaag

SEQ ID NO: 709841 - RNA, 17 nt, Artificial Sequence
  Synthetic
gguaacacugaugcaag

SEQ ID NO: 709842 - RNA, 17 nt, Artificial Sequence
  Synthetic
ggucaugcugaugcaag

SEQ ID NO: 709843 - RNA, 17 nt, Artificial Sequence
  Synthetic
gggcacguaaaaucaag

SEQ ID NO: 709844 - RNA, 17 nt, Artificial Sequence
  Synthetic
gaacuccugacaucaag

SEQ ID NO: 709845 - RNA, 17 nt, Artificial Sequence
  Synthetic
ggucucagcuacucaag

SEQ ID NO: 709846 - RNA, 17 nt, Artificial Sequence
  Synthetic
gaacacagagccucaag

SEQ ID NO: 709847 - RNA, 17 nt, Artificial Sequence
  Synthetic
gucucagugggcucaag

SEQ ID NO: 709848 - RNA, 17 nt, Artificial Sequence
  Synthetic
gccacucaaaucucaag

SEQ ID NO: 709849 - RNA, 17 nt, Artificial Sequence
  Synthetic
gcugauggggucucaag

SEQ ID NO: 709850 - RNA, 17 nt, Artificial Sequence
  Synthetic
guagacaaauggucaag

SEQ ID NO: 709851 - RNA, 17 nt, Artificial Sequence
  Synthetic
gacauaaauaugucaag

SEQ ID NO: 709852 - RNA, 17 nt, Artificial Sequence
  Synthetic
guuucuuguaugucaag

SEQ ID NO: 709853 - RNA, 17 nt, Artificial Sequence
  Synthetic
gcagcaaagcauucaag

SEQ ID NO: 709854 - RNA, 17 nt, Artificial Sequence
  Synthetic
gaaaguuguucuucaag

SEQ ID NO: 709855 - RNA, 17 nt, Artificial Sequence
  Synthetic
gugggauguauuucaag

SEQ ID NO: 709856 - RNA, 17 nt, Artificial Sequence
  Synthetic
gaaaagacaaaaagaag

SEQ ID NO: 709857 - RNA, 17 nt, Artificial Sequence
  Synthetic
ggagaacagaaaagaag

SEQ ID NO: 709858 - RNA, 17 nt, Artificial Sequence
  Synthetic
gaggagaaagaaagaag

SEQ ID NO: 709859 - RNA, 17 nt, Artificial Sequence
  Synthetic
gugaguuaagaaagaag

SEQ ID NO: 709860 - RNA, 17 nt, Artificial Sequence
  Synthetic
gagagaagguaaagaag

SEQ ID NO: 709861 - RNA, 17 nt, Artificial Sequence
  Synthetic
gagaacauuccaagaag

SEQ ID NO: 709862 - RNA, 17 nt, Artificial Sequence
  Synthetic
ggaauuuccucaagaag

SEQ ID NO: 709863 - RNA, 17 nt, Artificial Sequence
  Synthetic
gcuuauuuuagaagaag

SEQ ID NO: 709864 - RNA, 17 nt, Artificial Sequence
  Synthetic
gggaaguggggaagaag

SEQ ID NO: 709865 - RNA, 17 nt, Artificial Sequence
  Synthetic
ggaaagacuggaagaag

SEQ ID NO: 709866 - RNA, 17 nt, Artificial Sequence
  Synthetic
gacccagagugaagaag

SEQ ID NO: 709867 - RNA, 17 nt, Artificial Sequence
  Synthetic
gugguagagauaagaag

SEQ ID NO: 709868 - RNA, 17 nt, Artificial Sequence
  Synthetic
gguauuuuuauaagaag

SEQ ID NO: 709869 - RNA, 17 nt, Artificial Sequence
  Synthetic
gaagagcuauuaagaag

SEQ ID NO: 709870 - RNA, 17 nt, Artificial Sequence
  Synthetic
gcaggcuagaacagaag

SEQ ID NO: 709871 - RNA, 17 nt, Artificial Sequence
  Synthetic
ggaaacgaauacagaag

SEQ ID NO: 709872 - RNA, 17 nt, Artificial Sequence
  Synthetic
ggguauauacccagaag

SEQ ID NO: 709873 - RNA, 17 nt, Artificial Sequence
  Synthetic
gaguauguacccagaag

SEQ ID NO: 709874 - RNA, 17 nt, Artificial Sequence
  Synthetic
gggacgcuuuccagaag

SEQ ID NO: 709875 - RNA, 17 nt, Artificial Sequence
  Synthetic
gcaaaggaaagcagaag

SEQ ID NO: 709876 - RNA, 17 nt, Artificial Sequence
  Synthetic
ggagugaaaaagagaag

SEQ ID NO: 709877 - RNA, 17 nt, Artificial Sequence
  Synthetic
gcaguacucaagagaag

SEQ ID NO: 709878 - RNA, 17 nt, Artificial Sequence
  Synthetic
ggagguaggaagagaag

SEQ ID NO: 709879 - RNA, 17 nt, Artificial Sequence
  Synthetic
guggggcuagagagaag

SEQ ID NO: 709880 - RNA, 17 nt, Artificial Sequence
  Synthetic
gcuggccaggggagaag

SEQ ID NO: 709881 - RNA, 17 nt, Artificial Sequence
  Synthetic
gcuauacacuggagaag

SEQ ID NO: 709882 - RNA, 17 nt, Artificial Sequence
  Synthetic
gaguggguauugagaag

SEQ ID NO: 709883 - RNA, 17 nt, Artificial Sequence
  Synthetic
gauuaucucaauagaag

SEQ ID NO: 709884 - RNA, 17 nt, Artificial Sequence
  Synthetic
gcuuugagacauagaag

SEQ ID NO: 709885 - RNA, 17 nt, Artificial Sequence
  Synthetic
guuuuuguugauagaag

SEQ ID NO: 709886 - RNA, 17 nt, Artificial Sequence
  Synthetic
gaggggaacacuagaag

SEQ ID NO: 709887 - RNA, 17 nt, Artificial Sequence
  Synthetic
gugccucaaucuagaag

SEQ ID NO: 709888 - RNA, 17 nt, Artificial Sequence
  Synthetic
ggaauacagaguagaag

SEQ ID NO: 709889 - RNA, 17 nt, Artificial Sequence
  Synthetic
guagaguguaguagaag

SEQ ID NO: 709890 - RNA, 17 nt, Artificial Sequence
  Synthetic
gaguaacucuguagaag

SEQ ID NO: 709891 - RNA, 17 nt, Artificial Sequence
  Synthetic
gggaagagauaaggaag

SEQ ID NO: 709892 - RNA, 17 nt, Artificial Sequence
  Synthetic
gaaauuguaccaggaag

SEQ ID NO: 709893 - RNA, 17 nt, Artificial Sequence
  Synthetic
guaagcagaagaggaag

SEQ ID NO: 709894 - RNA, 17 nt, Artificial Sequence
  Synthetic
guagaugggggaggaag

SEQ ID NO: 709895 - RNA, 17 nt, Artificial Sequence
  Synthetic
gaugaugcaauaggaag

SEQ ID NO: 709896 - RNA, 17 nt, Artificial Sequence
  Synthetic
gugaugacauuaggaag

SEQ ID NO: 709897 - RNA, 17 nt, Artificial Sequence
  Synthetic
ggagcauggcacggaag

SEQ ID NO: 709898 - RNA, 17 nt, Artificial Sequence
  Synthetic
gagcucaguuacggaag

SEQ ID NO: 709899 - RNA, 17 nt, Artificial Sequence
  Synthetic
ggauauauacccggaag

SEQ ID NO: 709900 - RNA, 17 nt, Artificial Sequence
  Synthetic
gcuccaggagagggaag

SEQ ID NO: 709901 - RNA, 17 nt, Artificial Sequence
  Synthetic
guaacuccggagggaag

SEQ ID NO: 709902 - RNA, 17 nt, Artificial Sequence
  Synthetic
gauuuaaaauagggaag

SEQ ID NO: 709903 - RNA, 17 nt, Artificial Sequence
  Synthetic
guauugagaaggggaag

SEQ ID NO: 709904 - RNA, 17 nt, Artificial Sequence
  Synthetic
gugaaaaccuggggaag

SEQ ID NO: 709905 - RNA, 17 nt, Artificial Sequence
  Synthetic
gaugagggcuggggaag

SEQ ID NO: 709906 - RNA, 17 nt, Artificial Sequence
  Synthetic
guaacuggagugggaag

SEQ ID NO: 709907 - RNA, 17 nt, Artificial Sequence
  Synthetic
gagacgcauuugggaag

SEQ ID NO: 709908 - RNA, 17 nt, Artificial Sequence
  Synthetic
ggugugugcucuggaag

SEQ ID NO: 709909 - RNA, 17 nt, Artificial Sequence
  Synthetic
gggacagcauguggaag

SEQ ID NO: 709910 - RNA, 17 nt, Artificial Sequence
  Synthetic
gagccccuugaaugaag

SEQ ID NO: 709911 - RNA, 17 nt, Artificial Sequence
  Synthetic
gaagcacuuuaaugaag

SEQ ID NO: 709912 - RNA, 17 nt, Artificial Sequence
  Synthetic
gaugcucucacaugaag

SEQ ID NO: 709913 - RNA, 17 nt, Artificial Sequence
  Synthetic
gcagugaucccaugaag

SEQ ID NO: 709914 - RNA, 17 nt, Artificial Sequence
  Synthetic
guuuaggggccaugaag

SEQ ID NO: 709915 - RNA, 17 nt, Artificial Sequence
  Synthetic
gaguuuuuagcaugaag

SEQ ID NO: 709916 - RNA, 17 nt, Artificial Sequence
  Synthetic
gguagcaaaagaugaag

SEQ ID NO: 709917 - RNA, 17 nt, Artificial Sequence
  Synthetic
gaggccaauauaugaag

SEQ ID NO: 709918 - RNA, 17 nt, Artificial Sequence
  Synthetic
gcaagaaucuacugaag

SEQ ID NO: 709919 - RNA, 17 nt, Artificial Sequence
  Synthetic
gugcauuguuccugaag

SEQ ID NO: 709920 - RNA, 17 nt, Artificial Sequence
  Synthetic
gacuacagaagcugaag

SEQ ID NO: 709921 - RNA, 17 nt, Artificial Sequence
  Synthetic
gcugaugggugcugaag

SEQ ID NO: 709922 - RNA, 17 nt, Artificial Sequence
  Synthetic
gaaaaagaaaagugaag

SEQ ID NO: 709923 - RNA, 17 nt, Artificial Sequence
  Synthetic
gagaccaugaagugaag

SEQ ID NO: 709924 - RNA, 17 nt, Artificial Sequence
  Synthetic
gagccaagaaggugaag

SEQ ID NO: 709925 - RNA, 17 nt, Artificial Sequence
  Synthetic
guugauacuaugugaag

SEQ ID NO: 709926 - RNA, 17 nt, Artificial Sequence
  Synthetic
gaaguuuuacugugaag

SEQ ID NO: 709927 - RNA, 17 nt, Artificial Sequence
  Synthetic
guguuucuucugugaag

SEQ ID NO: 709928 - RNA, 17 nt, Artificial Sequence
  Synthetic
gggggaggggugugaag

SEQ ID NO: 709929 - RNA, 17 nt, Artificial Sequence
  Synthetic
gggccuggauugugaag

SEQ ID NO: 709930 - RNA, 17 nt, Artificial Sequence
  Synthetic
gagaauuuaaauugaag

SEQ ID NO: 709931 - RNA, 17 nt, Artificial Sequence
  Synthetic
ggaacuucacauugaag

SEQ ID NO: 709932 - RNA, 17 nt, Artificial Sequence
  Synthetic
gaauaaucuaguugaag

SEQ ID NO: 709933 - RNA, 17 nt, Artificial Sequence
  Synthetic
gguauacucauuugaag

SEQ ID NO: 709934 - RNA, 17 nt, Artificial Sequence
  Synthetic
gugaugcauucaauaag

SEQ ID NO: 709935 - RNA, 17 nt, Artificial Sequence
  Synthetic
ggaacagcgagaauaag

SEQ ID NO: 709936 - RNA, 17 nt, Artificial Sequence
  Synthetic
gcuuuucuuauaauaag

SEQ ID NO: 709937 - RNA, 17 nt, Artificial Sequence
  Synthetic
gccauacuccuaauaag

SEQ ID NO: 709938 - RNA, 17 nt, Artificial Sequence
  Synthetic
gaucacaugguaauaag

SEQ ID NO: 709939 - RNA, 17 nt, Artificial Sequence
  Synthetic
gcccucacauccauaag

SEQ ID NO: 709940 - RNA, 17 nt, Artificial Sequence
  Synthetic
gcugaugguuucauaag

SEQ ID NO: 709941 - RNA, 17 nt, Artificial Sequence
  Synthetic
gaacuagaacagauaag

SEQ ID NO: 709942 - RNA, 17 nt, Artificial Sequence
  Synthetic
gacugcaaagggauaag

SEQ ID NO: 709943 - RNA, 17 nt, Artificial Sequence
  Synthetic
guaagaguuaugauaag

SEQ ID NO: 709944 - RNA, 17 nt, Artificial Sequence
  Synthetic
gaauucgucuugauaag

SEQ ID NO: 709945 - RNA, 17 nt, Artificial Sequence
  Synthetic
guugauucuuguauaag

SEQ ID NO: 709946 - RNA, 17 nt, Artificial Sequence
  Synthetic
guugauuuuuguauaag

SEQ ID NO: 709947 - RNA, 17 nt, Artificial Sequence
  Synthetic
gaaucaaaagcacuaag

SEQ ID NO: 709948 - RNA, 17 nt, Artificial Sequence
  Synthetic
gucccacugucacuaag

SEQ ID NO: 709949 - RNA, 17 nt, Artificial Sequence
  Synthetic
ggaaguuaauaccuaag

SEQ ID NO: 709950 - RNA, 17 nt, Artificial Sequence
  Synthetic
guuacuggauagcuaag

SEQ ID NO: 709951 - RNA, 17 nt, Artificial Sequence
  Synthetic
gcuacucuuacgcuaag

SEQ ID NO: 709952 - RNA, 17 nt, Artificial Sequence
  Synthetic
gcaaaagcaaggcuaag

SEQ ID NO: 709953 - RNA, 17 nt, Artificial Sequence
  Synthetic
gaguaugccaggcuaag

SEQ ID NO: 709954 - RNA, 17 nt, Artificial Sequence
  Synthetic
gcaaaaacagugcuaag

SEQ ID NO: 709955 - RNA, 17 nt, Artificial Sequence
  Synthetic
gcaaaagcagugcuaag

SEQ ID NO: 709956 - RNA, 17 nt, Artificial Sequence
  Synthetic
gaaggcugagugcuaag

SEQ ID NO: 709957 - RNA, 17 nt, Artificial Sequence
  Synthetic
gguuuagaaacucuaag

SEQ ID NO: 709958 - RNA, 17 nt, Artificial Sequence
  Synthetic
gcucagaaagaaguaag

SEQ ID NO: 709959 - RNA, 17 nt, Artificial Sequence
  Synthetic
gugggcaucucaguaag

SEQ ID NO: 709960 - RNA, 17 nt, Artificial Sequence
  Synthetic
gauguuguaagaguaag

SEQ ID NO: 709961 - RNA, 17 nt, Artificial Sequence
  Synthetic
gaggcagacagaguaag

SEQ ID NO: 709962 - RNA, 17 nt, Artificial Sequence
  Synthetic
ggccaaugaagcguaag

SEQ ID NO: 709963 - RNA, 17 nt, Artificial Sequence
  Synthetic
gugcuauaggagguaag

SEQ ID NO: 709964 - RNA, 17 nt, Artificial Sequence
  Synthetic
gaaacaucagggguaag

SEQ ID NO: 709965 - RNA, 17 nt, Artificial Sequence
  Synthetic
gccaggcuggauguaag

SEQ ID NO: 709966 - RNA, 17 nt, Artificial Sequence
  Synthetic
gagaaauaugguguaag

SEQ ID NO: 709967 - RNA, 17 nt, Artificial Sequence
  Synthetic
gauauauggaaauuaag

SEQ ID NO: 709968 - RNA, 17 nt, Artificial Sequence
  Synthetic
guuucacaaauauuaag

SEQ ID NO: 709969 - RNA, 17 nt, Artificial Sequence
  Synthetic
ggggcuuuuguauuaag

SEQ ID NO: 709970 - RNA, 17 nt, Artificial Sequence
  Synthetic
gauggaaaauuauuaag

SEQ ID NO: 709971 - RNA, 17 nt, Artificial Sequence
  Synthetic
gguuucaguuccuuaag

SEQ ID NO: 709972 - RNA, 17 nt, Artificial Sequence
  Synthetic
gaauucugcaucuuaag

SEQ ID NO: 709973 - RNA, 17 nt, Artificial Sequence
  Synthetic
guuguauacaaguuaag

SEQ ID NO: 709974 - RNA, 17 nt, Artificial Sequence
  Synthetic
guauaauaucauuuaag

SEQ ID NO: 709975 - RNA, 17 nt, Artificial Sequence
  Synthetic
gagauugugccuuuaag

SEQ ID NO: 709976 - RNA, 17 nt, Artificial Sequence
  Synthetic
ggaacuucugcuuuaag

SEQ ID NO: 709977 - RNA, 17 nt, Artificial Sequence
  Synthetic
gagguaggguguuuaag

SEQ ID NO: 709978 - RNA, 17 nt, Artificial Sequence
  Synthetic
gcuggcuuuauuuuaag

SEQ ID NO: 709979 - RNA, 17 nt, Artificial Sequence
  Synthetic
gaauuccaaguuuuaag

SEQ ID NO: 709980 - RNA, 17 nt, Artificial Sequence
  Synthetic
gagaaaguuaaaaacag

SEQ ID NO: 709981 - RNA, 17 nt, Artificial Sequence
  Synthetic
ggguucucagaaaacag

SEQ ID NO: 709982 - RNA, 17 nt, Artificial Sequence
  Synthetic
gagguaaaugaaaacag

SEQ ID NO: 709983 - RNA, 17 nt, Artificial Sequence
  Synthetic
guauuuaucuaaaacag

SEQ ID NO: 709984 - RNA, 17 nt, Artificial Sequence
  Synthetic
guuuaaugggcaaacag

SEQ ID NO: 709985 - RNA, 17 nt, Artificial Sequence
  Synthetic
gaaacaaauagaaacag

SEQ ID NO: 709986 - RNA, 17 nt, Artificial Sequence
  Synthetic
guauacgaaggaaacag

SEQ ID NO: 709987 - RNA, 17 nt, Artificial Sequence
  Synthetic
gauggggcaugaaacag

SEQ ID NO: 709988 - RNA, 17 nt, Artificial Sequence
  Synthetic
gugauagugugaaacag

SEQ ID NO: 709989 - RNA, 17 nt, Artificial Sequence
  Synthetic
gauagugaauuaaacag

SEQ ID NO: 709990 - RNA, 17 nt, Artificial Sequence
  Synthetic
gaaccacaaaacaacag

SEQ ID NO: 709991 - RNA, 17 nt, Artificial Sequence
  Synthetic
ggaguccgggacaacag

SEQ ID NO: 709992 - RNA, 17 nt, Artificial Sequence
  Synthetic
gcugacaaacccaacag

SEQ ID NO: 709993 - RNA, 17 nt, Artificial Sequence
  Synthetic
gaaguaggucucaacag

SEQ ID NO: 709994 - RNA, 17 nt, Artificial Sequence
  Synthetic
gcagacccugagaacag

SEQ ID NO: 709995 - RNA, 17 nt, Artificial Sequence
  Synthetic
gucccaggaaugaacag

SEQ ID NO: 709996 - RNA, 17 nt, Artificial Sequence
  Synthetic
gggcagcagcugaacag

SEQ ID NO: 709997 - RNA, 17 nt, Artificial Sequence
  Synthetic
gggacaguaacuaacag

SEQ ID NO: 709998 - RNA, 17 nt, Artificial Sequence
  Synthetic
gcccaucagacuaacag

SEQ ID NO: 709999 - RNA, 17 nt, Artificial Sequence
  Synthetic
gcuuugauuuuuaacag

SEQ ID NO: 710000 - RNA, 17 nt, Artificial Sequence
  Synthetic
gccacaaaaacacacag

SEQ ID NO: 710001 - RNA, 17 nt, Artificial Sequence
  Synthetic
gacaccuguacacacag

SEQ ID NO: 710002 - RNA, 17 nt, Artificial Sequence
  Synthetic
gaguuggccggacacag

SEQ ID NO: 710003 - RNA, 17 nt, Artificial Sequence
  Synthetic
gggaugcacauacacag

SEQ ID NO: 710004 - RNA, 17 nt, Artificial Sequence
  Synthetic
guguugucucuacacag

SEQ ID NO: 710005 - RNA, 17 nt, Artificial Sequence
  Synthetic
gacagacacguacacag

SEQ ID NO: 710006 - RNA, 17 nt, Artificial Sequence
  Synthetic
gauucugccuaccacag

SEQ ID NO: 710007 - RNA, 17 nt, Artificial Sequence
  Synthetic
gugggugcagcccacag

SEQ ID NO: 710008 - RNA, 17 nt, Artificial Sequence
  Synthetic
gcacugagagcccacag

SEQ ID NO: 710009 - RNA, 17 nt, Artificial Sequence
  Synthetic
guauauacaucccacag

SEQ ID NO: 710010 - RNA, 17 nt, Artificial Sequence
  Synthetic
gaaaguuaaauccacag

SEQ ID NO: 710011 - RNA, 17 nt, Artificial Sequence
  Synthetic
gcacauuaaaggcacag

SEQ ID NO: 710012 - RNA, 17 nt, Artificial Sequence
  Synthetic
gucuuggcugggcacag

SEQ ID NO: 710013 - RNA, 17 nt, Artificial Sequence
  Synthetic
gcuaucugcaugcacag

SEQ ID NO: 710014 - RNA, 17 nt, Artificial Sequence
  Synthetic
gacuccuuuuugcacag

SEQ ID NO: 710015 - RNA, 17 nt, Artificial Sequence
  Synthetic
gaaaaugaggaucacag

SEQ ID NO: 710016 - RNA, 17 nt, Artificial Sequence
  Synthetic
gagaaccagagucacag

SEQ ID NO: 710017 - RNA, 17 nt, Artificial Sequence
  Synthetic
gcaaaccggugucacag

SEQ ID NO: 710018 - RNA, 17 nt, Artificial Sequence
  Synthetic
guacaggcuugucacag

SEQ ID NO: 710019 - RNA, 17 nt, Artificial Sequence
  Synthetic
gaaggaugauuucacag

SEQ ID NO: 710020 - RNA, 17 nt, Artificial Sequence
  Synthetic
gcuagauaguuucacag

SEQ ID NO: 710021 - RNA, 17 nt, Artificial Sequence
  Synthetic
gaaaaggaggaagacag

SEQ ID NO: 710022 - RNA, 17 nt, Artificial Sequence
  Synthetic
ggguacagggaagacag

SEQ ID NO: 710023 - RNA, 17 nt, Artificial Sequence
  Synthetic
gucaccauaacagacag

SEQ ID NO: 710024 - RNA, 17 nt, Artificial Sequence
  Synthetic
gaauuuauuagagacag

SEQ ID NO: 710025 - RNA, 17 nt, Artificial Sequence
  Synthetic
gagaacaggaaggacag

SEQ ID NO: 710026 - RNA, 17 nt, Artificial Sequence
  Synthetic
gcauaagcagaggacag

SEQ ID NO: 710027 - RNA, 17 nt, Artificial Sequence
  Synthetic
ggcaugauauaggacag

SEQ ID NO: 710028 - RNA, 17 nt, Artificial Sequence
  Synthetic
gcuguucaguaggacag

SEQ ID NO: 710029 - RNA, 17 nt, Artificial Sequence
  Synthetic
guauacauguaggacag

SEQ ID NO: 710030 - RNA, 17 nt, Artificial Sequence
  Synthetic
gacacaggaugggacag

SEQ ID NO: 710031 - RNA, 17 nt, Artificial Sequence
  Synthetic
gagcccaaugaugacag

SEQ ID NO: 710032 - RNA, 17 nt, Artificial Sequence
  Synthetic
guuccaagaacugacag

SEQ ID NO: 710033 - RNA, 17 nt, Artificial Sequence
  Synthetic
gcuuucagcucugacag

SEQ ID NO: 710034 - RNA, 17 nt, Artificial Sequence
  Synthetic
gaggaaauucaauacag

SEQ ID NO: 710035 - RNA, 17 nt, Artificial Sequence
  Synthetic
gaagaaaaguaauacag

SEQ ID NO: 710036 - RNA, 17 nt, Artificial Sequence
  Synthetic
gugccaagaacauacag

SEQ ID NO: 710037 - RNA, 17 nt, Artificial Sequence
  Synthetic
ggaacccauggauacag

SEQ ID NO: 710038 - RNA, 17 nt, Artificial Sequence
  Synthetic
gauauguguauauacag

SEQ ID NO: 710039 - RNA, 17 nt, Artificial Sequence
  Synthetic
gacacuggggacuacag

SEQ ID NO: 710040 - RNA, 17 nt, Artificial Sequence
  Synthetic
gagaaauuugacuacag

SEQ ID NO: 710041 - RNA, 17 nt, Artificial Sequence
  Synthetic
guagacucuuccuacag

SEQ ID NO: 710042 - RNA, 17 nt, Artificial Sequence
  Synthetic
ggaagauggggcuacag

SEQ ID NO: 710043 - RNA, 17 nt, Artificial Sequence
  Synthetic
gacaguagagucuacag

SEQ ID NO: 710044 - RNA, 17 nt, Artificial Sequence
  Synthetic
gucuucaaauucuacag

SEQ ID NO: 710045 - RNA, 17 nt, Artificial Sequence
  Synthetic
gagguaaaauaguacag

SEQ ID NO: 710046 - RNA, 17 nt, Artificial Sequence
  Synthetic
ggggggaaaggguacag

SEQ ID NO: 710047 - RNA, 17 nt, Artificial Sequence
  Synthetic
gcuugcauuauuuacag

SEQ ID NO: 710048 - RNA, 17 nt, Artificial Sequence
  Synthetic
gaaccuggauuuuacag

SEQ ID NO: 710049 - RNA, 17 nt, Artificial Sequence
  Synthetic
guauucuauuuuuacag

SEQ ID NO: 710050 - RNA, 17 nt, Artificial Sequence
  Synthetic
gcauauuuuucaaccag

SEQ ID NO: 710051 - RNA, 17 nt, Artificial Sequence
  Synthetic
gugacuccaggcaccag

SEQ ID NO: 710052 - RNA, 17 nt, Artificial Sequence
  Synthetic
gccuggucccucaccag

SEQ ID NO: 710053 - RNA, 17 nt, Artificial Sequence
  Synthetic
gcaggaguuaagaccag

SEQ ID NO: 710054 - RNA, 17 nt, Artificial Sequence
  Synthetic
gcagugagaaggaccag

SEQ ID NO: 710055 - RNA, 17 nt, Artificial Sequence
  Synthetic
gucuaaaugcauaccag

SEQ ID NO: 710056 - RNA, 17 nt, Artificial Sequence
  Synthetic
ggaaguuuuacuaccag

SEQ ID NO: 710057 - RNA, 17 nt, Artificial Sequence
  Synthetic
gcuuuucucucuaccag

SEQ ID NO: 710058 - RNA, 17 nt, Artificial Sequence
  Synthetic
ggaaggaugguuaccag

SEQ ID NO: 710059 - RNA, 17 nt, Artificial Sequence
  Synthetic
gagguuccaaaacccag

SEQ ID NO: 710060 - RNA, 17 nt, Artificial Sequence
  Synthetic
gcuugagaaucacccag

SEQ ID NO: 710061 - RNA, 17 nt, Artificial Sequence
  Synthetic
gucucccuaagacccag

SEQ ID NO: 710062 - RNA, 17 nt, Artificial Sequence
  Synthetic
gaccccugaagccccag

SEQ ID NO: 710063 - RNA, 17 nt, Artificial Sequence
  Synthetic
gcuaggcagugccccag

SEQ ID NO: 710064 - RNA, 17 nt, Artificial Sequence
  Synthetic
gauauauuaaggcccag

SEQ ID NO: 710065 - RNA, 17 nt, Artificial Sequence
  Synthetic
gcuuugccuaaucccag

SEQ ID NO: 710066 - RNA, 17 nt, Artificial Sequence
  Synthetic
gucucagggacucccag

SEQ ID NO: 710067 - RNA, 17 nt, Artificial Sequence
  Synthetic
ggaaauguaguucccag

SEQ ID NO: 710068 - RNA, 17 nt, Artificial Sequence
  Synthetic
gaagcaaaacaagccag

SEQ ID NO: 710069 - RNA, 17 nt, Artificial Sequence
  Synthetic
gccagagcagaagccag

SEQ ID NO: 710070 - RNA, 17 nt, Artificial Sequence
  Synthetic
gaguggaccacagccag

SEQ ID NO: 710071 - RNA, 17 nt, Artificial Sequence
  Synthetic
guacuucacagagccag

SEQ ID NO: 710072 - RNA, 17 nt, Artificial Sequence
  Synthetic
gagggagggagagccag

SEQ ID NO: 710073 - RNA, 17 nt, Artificial Sequence
  Synthetic
gacauggauggagccag

SEQ ID NO: 710074 - RNA, 17 nt, Artificial Sequence
  Synthetic
guccugccuugggccag

SEQ ID NO: 710075 - RNA, 17 nt, Artificial Sequence
  Synthetic
guuuaaaaaauggccag

SEQ ID NO: 710076 - RNA, 17 nt, Artificial Sequence
  Synthetic
gcaauagguauggccag

SEQ ID NO: 710077 - RNA, 17 nt, Artificial Sequence
  Synthetic
gaguagcagcuggccag

SEQ ID NO: 710078 - RNA, 17 nt, Artificial Sequence
  Synthetic
ggacuggugguugccag

SEQ ID NO: 710079 - RNA, 17 nt, Artificial Sequence
  Synthetic
gacccccaagaauccag

SEQ ID NO: 710080 - RNA, 17 nt, Artificial Sequence
  Synthetic
gcuuagaaaagauccag

SEQ ID NO: 710081 - RNA, 17 nt, Artificial Sequence
  Synthetic
ggugaaucaggauccag

SEQ ID NO: 710082 - RNA, 17 nt, Artificial Sequence
  Synthetic
guaaucccaguauccag

SEQ ID NO: 710083 - RNA, 17 nt, Artificial Sequence
  Synthetic
gcacauaaaagcuccag

SEQ ID NO: 710084 - RNA, 17 nt, Artificial Sequence
  Synthetic
gguauccccaucuccag

SEQ ID NO: 710085 - RNA, 17 nt, Artificial Sequence
  Synthetic
ggcaguguuaucuccag

SEQ ID NO: 710086 - RNA, 17 nt, Artificial Sequence
  Synthetic
ggauauggaagguccag

SEQ ID NO: 710087 - RNA, 17 nt, Artificial Sequence
  Synthetic
gacuaagauauguccag

SEQ ID NO: 710088 - RNA, 17 nt, Artificial Sequence
  Synthetic
gucagcauccauuccag

SEQ ID NO: 710089 - RNA, 17 nt, Artificial Sequence
  Synthetic
gcugaaaaauauuccag

SEQ ID NO: 710090 - RNA, 17 nt, Artificial Sequence
  Synthetic
gaguggcacuguuccag

SEQ ID NO: 710091 - RNA, 17 nt, Artificial Sequence
  Synthetic
gaagcuguacuuuccag

SEQ ID NO: 710092 - RNA, 17 nt, Artificial Sequence
  Synthetic
gacuuccauuuuuccag

SEQ ID NO: 710093 - RNA, 17 nt, Artificial Sequence
  Synthetic
ggccuuaacaaaagcag

SEQ ID NO: 710094 - RNA, 17 nt, Artificial Sequence
  Synthetic
gcuugaaaauaaagcag

SEQ ID NO: 710095 - RNA, 17 nt, Artificial Sequence
  Synthetic
gguagcauguaaagcag

SEQ ID NO: 710096 - RNA, 17 nt, Artificial Sequence
  Synthetic
ggauuguaaagaagcag

SEQ ID NO: 710097 - RNA, 17 nt, Artificial Sequence
  Synthetic
guagcaacuggaagcag

SEQ ID NO: 710098 - RNA, 17 nt, Artificial Sequence
  Synthetic
gcacauuguugaagcag

SEQ ID NO: 710099 - RNA, 17 nt, Artificial Sequence
  Synthetic
gguaaaagaauaagcag

SEQ ID NO: 710100 - RNA, 17 nt, Artificial Sequence
  Synthetic
ggggcucccauaagcag

SEQ ID NO: 710101 - RNA, 17 nt, Artificial Sequence
  Synthetic
gguucuguguuaagcag

SEQ ID NO: 710102 - RNA, 17 nt, Artificial Sequence
  Synthetic
gagagugagaacagcag

SEQ ID NO: 710103 - RNA, 17 nt, Artificial Sequence
  Synthetic
gccacauguaacagcag

SEQ ID NO: 710104 - RNA, 17 nt, Artificial Sequence
  Synthetic
ggauauauacccagcag

SEQ ID NO: 710105 - RNA, 17 nt, Artificial Sequence
  Synthetic
ggguauauacccagcag

SEQ ID NO: 710106 - RNA, 17 nt, Artificial Sequence
  Synthetic
gagacaccucccagcag

SEQ ID NO: 710107 - RNA, 17 nt, Artificial Sequence
  Synthetic
gccacccaagccagcag

SEQ ID NO: 710108 - RNA, 17 nt, Artificial Sequence
  Synthetic
ggucucaguagcagcag

SEQ ID NO: 710109 - RNA, 17 nt, Artificial Sequence
  Synthetic
guugugugacucagcag

SEQ ID NO: 710110 - RNA, 17 nt, Artificial Sequence
  Synthetic
guuucuaagaagagcag

SEQ ID NO: 710111 - RNA, 17 nt, Artificial Sequence
  Synthetic
gcggaauaggagagcag

SEQ ID NO: 710112 - RNA, 17 nt, Artificial Sequence
  Synthetic
gaacuucacaggagcag

SEQ ID NO: 710113 - RNA, 17 nt, Artificial Sequence
  Synthetic
gagaccauauggagcag

SEQ ID NO: 710114 - RNA, 17 nt, Artificial Sequence
  Synthetic
gagcuugcagugagcag

SEQ ID NO: 710115 - RNA, 17 nt, Artificial Sequence
  Synthetic
gcuguucucuugagcag

SEQ ID NO: 710116 - RNA, 17 nt, Artificial Sequence
  Synthetic
gaagauaaaucuagcag

SEQ ID NO: 710117 - RNA, 17 nt, Artificial Sequence
  Synthetic
ggacauaguaguagcag

SEQ ID NO: 710118 - RNA, 17 nt, Artificial Sequence
  Synthetic
gaaggggaauaucgcag

SEQ ID NO: 710119 - RNA, 17 nt, Artificial Sequence
  Synthetic
gcccuuuuaaaaggcag

SEQ ID NO: 710120 - RNA, 17 nt, Artificial Sequence
  Synthetic
gcuugggaauaaggcag

SEQ ID NO: 710121 - RNA, 17 nt, Artificial Sequence
  Synthetic
gacugggagacaggcag

SEQ ID NO: 710122 - RNA, 17 nt, Artificial Sequence
  Synthetic
gguugguguugaggcag

SEQ ID NO: 710123 - RNA, 17 nt, Artificial Sequence
  Synthetic
gacagcagggacggcag

SEQ ID NO: 710124 - RNA, 17 nt, Artificial Sequence
  Synthetic
gaagcaauacagggcag

SEQ ID NO: 710125 - RNA, 17 nt, Artificial Sequence
  Synthetic
gcucuaggggagggcag

SEQ ID NO: 710126 - RNA, 17 nt, Artificial Sequence
  Synthetic
ggcgugaacccgggcag

SEQ ID NO: 710127 - RNA, 17 nt, Artificial Sequence
  Synthetic
gggggauuggggggcag

SEQ ID NO: 710128 - RNA, 17 nt, Artificial Sequence
  Synthetic
gaaccuggugggggcag

SEQ ID NO: 710129 - RNA, 17 nt, Artificial Sequence
  Synthetic
guggaaagcaugggcag

SEQ ID NO: 710130 - RNA, 17 nt, Artificial Sequence
  Synthetic
gacauuggucugggcag

SEQ ID NO: 710131 - RNA, 17 nt, Artificial Sequence
  Synthetic
gguagugaacguggcag

SEQ ID NO: 710132 - RNA, 17 nt, Artificial Sequence
  Synthetic
ggagagggugguggcag

SEQ ID NO: 710133 - RNA, 17 nt, Artificial Sequence
  Synthetic
gacuaugcauguggcag

SEQ ID NO: 710134 - RNA, 17 nt, Artificial Sequence
  Synthetic
gaaggcaacuguggcag

SEQ ID NO: 710135 - RNA, 17 nt, Artificial Sequence
  Synthetic
gucaggcaauuuggcag

SEQ ID NO: 710136 - RNA, 17 nt, Artificial Sequence
  Synthetic
gucugauggcaaugcag

SEQ ID NO: 710137 - RNA, 17 nt, Artificial Sequence
  Synthetic
gugucaauaagaugcag

SEQ ID NO: 710138 - RNA, 17 nt, Artificial Sequence
  Synthetic
gugauuuuguccugcag

SEQ ID NO: 710139 - RNA, 17 nt, Artificial Sequence
  Synthetic
gugaucaaaagcugcag

SEQ ID NO: 710140 - RNA, 17 nt, Artificial Sequence
  Synthetic
gauggcaugggcugcag

SEQ ID NO: 710141 - RNA, 17 nt, Artificial Sequence
  Synthetic
gcagaaguuugcugcag

SEQ ID NO: 710142 - RNA, 17 nt, Artificial Sequence
  Synthetic
gcuugcccucucugcag

SEQ ID NO: 710143 - RNA, 17 nt, Artificial Sequence
  Synthetic
gucuuccuuuucugcag

SEQ ID NO: 710144 - RNA, 17 nt, Artificial Sequence
  Synthetic
gucaggcugaagugcag

SEQ ID NO: 710145 - RNA, 17 nt, Artificial Sequence
  Synthetic
accaggcuggagugcag

SEQ ID NO: 710146 - RNA, 17 nt, Artificial Sequence
  Synthetic
cccaggcuggagugcag

SEQ ID NO: 710147 - RNA, 17 nt, Artificial Sequence
  Synthetic
gccaggcuggagugcag

SEQ ID NO: 710148 - RNA, 17 nt, Artificial Sequence
  Synthetic
gcccggcuggagugcag

SEQ ID NO: 710149 - RNA, 17 nt, Artificial Sequence
  Synthetic
ggcuggagugagugcag

SEQ ID NO: 710150 - RNA, 17 nt, Artificial Sequence
  Synthetic
ggggaaauuuagugcag

SEQ ID NO: 710151 - RNA, 17 nt, Artificial Sequence
  Synthetic
ggccaggccaggugcag

SEQ ID NO: 710152 - RNA, 17 nt, Artificial Sequence
  Synthetic
gcgcuaggggggugcag

SEQ ID NO: 710153 - RNA, 17 nt, Artificial Sequence
  Synthetic
guaauacuccauugcag

SEQ ID NO: 710154 - RNA, 17 nt, Artificial Sequence
  Synthetic
gcaaaacaggcuugcag

SEQ ID NO: 710155 - RNA, 17 nt, Artificial Sequence
  Synthetic
guuguauuuucuugcag

SEQ ID NO: 710156 - RNA, 17 nt, Artificial Sequence
  Synthetic
gggccaaaaaguugcag

SEQ ID NO: 710157 - RNA, 17 nt, Artificial Sequence
  Synthetic
ggcuaacauuaaaucag

SEQ ID NO: 710158 - RNA, 17 nt, Artificial Sequence
  Synthetic
gagggguucugaaucag

SEQ ID NO: 710159 - RNA, 17 nt, Artificial Sequence
  Synthetic
gcuguauuugacaucag

SEQ ID NO: 710160 - RNA, 17 nt, Artificial Sequence
  Synthetic
ggagaugucaccaucag

SEQ ID NO: 710161 - RNA, 17 nt, Artificial Sequence
  Synthetic
gccuaggugcccaucag

SEQ ID NO: 710162 - RNA, 17 nt, Artificial Sequence
  Synthetic
gaugguccuugcaucag

SEQ ID NO: 710163 - RNA, 17 nt, Artificial Sequence
  Synthetic
ggauaugaaaauaucag

SEQ ID NO: 710164 - RNA, 17 nt, Artificial Sequence
  Synthetic
gugcuuuuaccuaucag

SEQ ID NO: 710165 - RNA, 17 nt, Artificial Sequence
  Synthetic
gcuucuauauuuaucag

SEQ ID NO: 710166 - RNA, 17 nt, Artificial Sequence
  Synthetic
gucaucaguaaacucag

SEQ ID NO: 710167 - RNA, 17 nt, Artificial Sequence
  Synthetic
guuuggcuaucacucag

SEQ ID NO: 710168 - RNA, 17 nt, Artificial Sequence
  Synthetic
gcuaaggauucacucag

SEQ ID NO: 710169 - RNA, 17 nt, Artificial Sequence
  Synthetic
guaaaauugggacucag

SEQ ID NO: 710170 - RNA, 17 nt, Artificial Sequence
  Synthetic
gaaaucaagugacucag

SEQ ID NO: 710171 - RNA, 17 nt, Artificial Sequence
  Synthetic
guacauauuguacucag

SEQ ID NO: 710172 - RNA, 17 nt, Artificial Sequence
  Synthetic
gaccccagaaaccucag

SEQ ID NO: 710173 - RNA, 17 nt, Artificial Sequence
  Synthetic
gaggauuauaaccucag

SEQ ID NO: 710174 - RNA, 17 nt, Artificial Sequence
  Synthetic
guauuugggagccucag

SEQ ID NO: 710175 - RNA, 17 nt, Artificial Sequence
  Synthetic
guguggcgauuccucag

SEQ ID NO: 710176 - RNA, 17 nt, Artificial Sequence
  Synthetic
gaaaauucucagcucag

SEQ ID NO: 710177 - RNA, 17 nt, Artificial Sequence
  Synthetic
ggaucaccagagcucag

SEQ ID NO: 710178 - RNA, 17 nt, Artificial Sequence
  Synthetic
gacagaacaaggcucag

SEQ ID NO: 710179 - RNA, 17 nt, Artificial Sequence
  Synthetic
ggcugugagcugcucag

SEQ ID NO: 710180 - RNA, 17 nt, Artificial Sequence
  Synthetic
gaagagagcuugcucag

SEQ ID NO: 710181 - RNA, 17 nt, Artificial Sequence
  Synthetic
gauucccuuuugcucag

SEQ ID NO: 710182 - RNA, 17 nt, Artificial Sequence
  Synthetic
gcagaacagaaucucag

SEQ ID NO: 710183 - RNA, 17 nt, Artificial Sequence
  Synthetic
gacugagguggucucag

SEQ ID NO: 710184 - RNA, 17 nt, Artificial Sequence
  Synthetic
gacuuaaaauuucucag

SEQ ID NO: 710185 - RNA, 17 nt, Artificial Sequence
  Synthetic
gguuuugcgaaagucag

SEQ ID NO: 710186 - RNA, 17 nt, Artificial Sequence
  Synthetic
guauauucauaagucag

SEQ ID NO: 710187 - RNA, 17 nt, Artificial Sequence
  Synthetic
gcagcagccccagucag

SEQ ID NO: 710188 - RNA, 17 nt, Artificial Sequence
  Synthetic
gauugaggaggagucag

SEQ ID NO: 710189 - RNA, 17 nt, Artificial Sequence
  Synthetic
gagcaggagaaggucag

SEQ ID NO: 710190 - RNA, 17 nt, Artificial Sequence
  Synthetic
gaaucacuaugggucag

SEQ ID NO: 710191 - RNA, 17 nt, Artificial Sequence
  Synthetic
gggggaugacuggucag

SEQ ID NO: 710192 - RNA, 17 nt, Artificial Sequence
  Synthetic
gaggggaaauaugucag

SEQ ID NO: 710193 - RNA, 17 nt, Artificial Sequence
  Synthetic
ggaucuucaucugucag

SEQ ID NO: 710194 - RNA, 17 nt, Artificial Sequence
  Synthetic
gggaaagaaauugucag

SEQ ID NO: 710195 - RNA, 17 nt, Artificial Sequence
  Synthetic
gaaucugaauaauucag

SEQ ID NO: 710196 - RNA, 17 nt, Artificial Sequence
  Synthetic
guaugaacauaauucag

SEQ ID NO: 710197 - RNA, 17 nt, Artificial Sequence
  Synthetic
gguggugccugauucag

SEQ ID NO: 710198 - RNA, 17 nt, Artificial Sequence
  Synthetic
gacaugugacuauucag

SEQ ID NO: 710199 - RNA, 17 nt, Artificial Sequence
  Synthetic
gcacuuuauuuauucag

SEQ ID NO: 710200 - RNA, 17 nt, Artificial Sequence
  Synthetic
gcacguauggccuucag

SEQ ID NO: 710201 - RNA, 17 nt, Artificial Sequence
  Synthetic
guuccgcauggcuucag

SEQ ID NO: 710202 - RNA, 17 nt, Artificial Sequence
  Synthetic
ggcgaugcccaguucag

SEQ ID NO: 710203 - RNA, 17 nt, Artificial Sequence
  Synthetic
gcugagagcaauuucag

SEQ ID NO: 710204 - RNA, 17 nt, Artificial Sequence
  Synthetic
gaaaaauaagcuuucag

SEQ ID NO: 710205 - RNA, 17 nt, Artificial Sequence
  Synthetic
guagcccucaguuucag

SEQ ID NO: 710206 - RNA, 17 nt, Artificial Sequence
  Synthetic
gugauccucauuuucag

SEQ ID NO: 710207 - RNA, 17 nt, Artificial Sequence
  Synthetic
gacauauuugaaaagag

SEQ ID NO: 710208 - RNA, 17 nt, Artificial Sequence
  Synthetic
ggauauuuguaaaagag

SEQ ID NO: 710209 - RNA, 17 nt, Artificial Sequence
  Synthetic
ggaggaaccucaaagag

SEQ ID NO: 710210 - RNA, 17 nt, Artificial Sequence
  Synthetic
gcaaacaacagaaagag

SEQ ID NO: 710211 - RNA, 17 nt, Artificial Sequence
  Synthetic
gagugguugagaaagag

SEQ ID NO: 710212 - RNA, 17 nt, Artificial Sequence
  Synthetic
gaaaguuagggaaagag

SEQ ID NO: 710213 - RNA, 17 nt, Artificial Sequence
  Synthetic
gaaaaaaacauaaagag

SEQ ID NO: 710214 - RNA, 17 nt, Artificial Sequence
  Synthetic
ggccugaaaguaaagag

SEQ ID NO: 710215 - RNA, 17 nt, Artificial Sequence
  Synthetic
gguauauccaacaagag

SEQ ID NO: 710216 - RNA, 17 nt, Artificial Sequence
  Synthetic
ggagaggugaacaagag

SEQ ID NO: 710217 - RNA, 17 nt, Artificial Sequence
  Synthetic
ggaucaggacccaagag

SEQ ID NO: 710218 - RNA, 17 nt, Artificial Sequence
  Synthetic
gaagaacuucccaagag

SEQ ID NO: 710219 - RNA, 17 nt, Artificial Sequence
  Synthetic
gggcaguuuuccaagag

SEQ ID NO: 710220 - RNA, 17 nt, Artificial Sequence
  Synthetic
gcacuagagaucaagag

SEQ ID NO: 710221 - RNA, 17 nt, Artificial Sequence
  Synthetic
gaggugacaaagaagag

SEQ ID NO: 710222 - RNA, 17 nt, Artificial Sequence
  Synthetic
ggggagaaagagaagag

SEQ ID NO: 710223 - RNA, 17 nt, Artificial Sequence
  Synthetic
gcacacagagggaagag

SEQ ID NO: 710224 - RNA, 17 nt, Artificial Sequence
  Synthetic
gaaaguggauggaagag

SEQ ID NO: 710225 - RNA, 17 nt, Artificial Sequence
  Synthetic
gggggaaauaugaagag

SEQ ID NO: 710226 - RNA, 17 nt, Artificial Sequence
  Synthetic
gcucaaggaaauaagag

SEQ ID NO: 710227 - RNA, 17 nt, Artificial Sequence
  Synthetic
gggagcauugauaagag

SEQ ID NO: 710228 - RNA, 17 nt, Artificial Sequence
  Synthetic
gcuuguccuucuaagag

SEQ ID NO: 710229 - RNA, 17 nt, Artificial Sequence
  Synthetic
gagugccuauguaagag

SEQ ID NO: 710230 - RNA, 17 nt, Artificial Sequence
  Synthetic
ggcagccauauuaagag

SEQ ID NO: 710231 - RNA, 17 nt, Artificial Sequence
  Synthetic
gcuuaaacucuuaagag

SEQ ID NO: 710232 - RNA, 17 nt, Artificial Sequence
  Synthetic
gauuuuagaaaacagag

SEQ ID NO: 710233 - RNA, 17 nt, Artificial Sequence
  Synthetic
gagugcaucuaacagag

SEQ ID NO: 710234 - RNA, 17 nt, Artificial Sequence
  Synthetic
guagcauauacacagag

SEQ ID NO: 710235 - RNA, 17 nt, Artificial Sequence
  Synthetic
gaagcuggagcacagag

SEQ ID NO: 710236 - RNA, 17 nt, Artificial Sequence
  Synthetic
gaaagugaggcacagag

SEQ ID NO: 710237 - RNA, 17 nt, Artificial Sequence
  Synthetic
gcuagucagugacagag

SEQ ID NO: 710238 - RNA, 17 nt, Artificial Sequence
  Synthetic
gguuccaaaacccagag

SEQ ID NO: 710239 - RNA, 17 nt, Artificial Sequence
  Synthetic
gaagcuucaucccagag

SEQ ID NO: 710240 - RNA, 17 nt, Artificial Sequence
  Synthetic
gucagaauacagcagag

SEQ ID NO: 710241 - RNA, 17 nt, Artificial Sequence
  Synthetic
gcacugucccagcagag

SEQ ID NO: 710242 - RNA, 17 nt, Artificial Sequence
  Synthetic
ggacgugcagugcagag

SEQ ID NO: 710243 - RNA, 17 nt, Artificial Sequence
  Synthetic
gaaacugagaaucagag

SEQ ID NO: 710244 - RNA, 17 nt, Artificial Sequence
  Synthetic
ggugcuuuggaucagag

SEQ ID NO: 710245 - RNA, 17 nt, Artificial Sequence
  Synthetic
gcacuucucacucagag

SEQ ID NO: 710246 - RNA, 17 nt, Artificial Sequence
  Synthetic
gagcagagcuuucagag

SEQ ID NO: 710247 - RNA, 17 nt, Artificial Sequence
  Synthetic
ggaacacacaaagagag

SEQ ID NO: 710248 - RNA, 17 nt, Artificial Sequence
  Synthetic
ggugagauuccagagag

SEQ ID NO: 710249 - RNA, 17 nt, Artificial Sequence
  Synthetic
gggaaggaaagagagag

SEQ ID NO: 710250 - RNA, 17 nt, Artificial Sequence
  Synthetic
gcauaaacaagagagag

SEQ ID NO: 710251 - RNA, 17 nt, Artificial Sequence
  Synthetic
gagagagacagagagag

SEQ ID NO: 710252 - RNA, 17 nt, Artificial Sequence
  Synthetic
gagagagagagagagag

SEQ ID NO: 710253 - RNA, 17 nt, Artificial Sequence
  Synthetic
gggagagagggagagag

SEQ ID NO: 710254 - RNA, 17 nt, Artificial Sequence
  Synthetic
gagaugucaugagagag

SEQ ID NO: 710255 - RNA, 17 nt, Artificial Sequence
  Synthetic
gguagggagguagagag

SEQ ID NO: 710256 - RNA, 17 nt, Artificial Sequence
  Synthetic
gacauugcauuagagag

SEQ ID NO: 710257 - RNA, 17 nt, Artificial Sequence
  Synthetic
ggcagaaauuccgagag

SEQ ID NO: 710258 - RNA, 17 nt, Artificial Sequence
  Synthetic
gaggauagaaaggagag

SEQ ID NO: 710259 - RNA, 17 nt, Artificial Sequence
  Synthetic
gauaacccaagggagag

SEQ ID NO: 710260 - RNA, 17 nt, Artificial Sequence
  Synthetic
gagggaggaagggagag

SEQ ID NO: 710261 - RNA, 17 nt, Artificial Sequence
  Synthetic
ggguguggaagggagag

SEQ ID NO: 710262 - RNA, 17 nt, Artificial Sequence
  Synthetic
gagagagagagggagag

SEQ ID NO: 710263 - RNA, 17 nt, Artificial Sequence
  Synthetic
gagggagagagggagag

SEQ ID NO: 710264 - RNA, 17 nt, Artificial Sequence
  Synthetic
ggaggagggagggagag

SEQ ID NO: 710265 - RNA, 17 nt, Artificial Sequence
  Synthetic
gccguuguuggggagag

SEQ ID NO: 710266 - RNA, 17 nt, Artificial Sequence
  Synthetic
gaaaaguagguggagag

SEQ ID NO: 710267 - RNA, 17 nt, Artificial Sequence
  Synthetic
gaauucacuuuggagag

SEQ ID NO: 710268 - RNA, 17 nt, Artificial Sequence
  Synthetic
gcucaaggaaaugagag

SEQ ID NO: 710269 - RNA, 17 nt, Artificial Sequence
  Synthetic
gggaccacuaaugagag

SEQ ID NO: 710270 - RNA, 17 nt, Artificial Sequence
  Synthetic
gggagggaacaugagag

SEQ ID NO: 710271 - RNA, 17 nt, Artificial Sequence
  Synthetic
ggcaacacagaugagag

SEQ ID NO: 710272 - RNA, 17 nt, Artificial Sequence
  Synthetic
gucugcugggaugagag

SEQ ID NO: 710273 - RNA, 17 nt, Artificial Sequence
  Synthetic
ggucaagaaucugagag

SEQ ID NO: 710274 - RNA, 17 nt, Artificial Sequence
  Synthetic
gcuuuucugagugagag

SEQ ID NO: 710275 - RNA, 17 nt, Artificial Sequence
  Synthetic
gaagggugguuugagag

SEQ ID NO: 710276 - RNA, 17 nt, Artificial Sequence
  Synthetic
ggaaagaaagaauagag

SEQ ID NO: 710277 - RNA, 17 nt, Artificial Sequence
  Synthetic
gaugagguugaauagag

SEQ ID NO: 710278 - RNA, 17 nt, Artificial Sequence
  Synthetic
gauuacuuggacuagag

SEQ ID NO: 710279 - RNA, 17 nt, Artificial Sequence
  Synthetic
guuuuuaaaagcuagag

SEQ ID NO: 710280 - RNA, 17 nt, Artificial Sequence
  Synthetic
guaagacaauucuagag

SEQ ID NO: 710281 - RNA, 17 nt, Artificial Sequence
  Synthetic
gugaauagauauuagag

SEQ ID NO: 710282 - RNA, 17 nt, Artificial Sequence
  Synthetic
gaauaaccaguuuagag

SEQ ID NO: 710283 - RNA, 17 nt, Artificial Sequence
  Synthetic
gagccugagguuuagag

SEQ ID NO: 710284 - RNA, 17 nt, Artificial Sequence
  Synthetic
gccaguaacuuuuagag

SEQ ID NO: 710285 - RNA, 17 nt, Artificial Sequence
  Synthetic
gauaggcaguuuuagag

SEQ ID NO: 710286 - RNA, 17 nt, Artificial Sequence
  Synthetic
ggcuccacccucacgag

SEQ ID NO: 710287 - RNA, 17 nt, Artificial Sequence
  Synthetic
ggacuuucugggucgag

SEQ ID NO: 710288 - RNA, 17 nt, Artificial Sequence
  Synthetic
ggauuaacaucuucgag

SEQ ID NO: 710289 - RNA, 17 nt, Artificial Sequence
  Synthetic
guaaaaaguaaaaggag

SEQ ID NO: 710290 - RNA, 17 nt, Artificial Sequence
  Synthetic
gcauaaagaacaaggag

SEQ ID NO: 710291 - RNA, 17 nt, Artificial Sequence
  Synthetic
gaaggagggagaaggag

SEQ ID NO: 710292 - RNA, 17 nt, Artificial Sequence
  Synthetic
gaaucugguagaaggag

SEQ ID NO: 710293 - RNA, 17 nt, Artificial Sequence
  Synthetic
gaagggggaggaaggag

SEQ ID NO: 710294 - RNA, 17 nt, Artificial Sequence
  Synthetic
ggaaggcuaggaaggag

SEQ ID NO: 710295 - RNA, 17 nt, Artificial Sequence
  Synthetic
gaagggaagggaaggag

SEQ ID NO: 710296 - RNA, 17 nt, Artificial Sequence
  Synthetic
gggagaaugggaaggag

SEQ ID NO: 710297 - RNA, 17 nt, Artificial Sequence
  Synthetic
guauaugguguaaggag

SEQ ID NO: 710298 - RNA, 17 nt, Artificial Sequence
  Synthetic
gagcagggagacaggag

SEQ ID NO: 710299 - RNA, 17 nt, Artificial Sequence
  Synthetic
guaaaagcagccaggag

SEQ ID NO: 710300 - RNA, 17 nt, Artificial Sequence
  Synthetic
guaaccgggaagaggag

SEQ ID NO: 710301 - RNA, 17 nt, Artificial Sequence
  Synthetic
gaaagagaggagaggag

SEQ ID NO: 710302 - RNA, 17 nt, Artificial Sequence
  Synthetic
gaacaggaaaggaggag

SEQ ID NO: 710303 - RNA, 17 nt, Artificial Sequence
  Synthetic
ggggugugaaggaggag

SEQ ID NO: 710304 - RNA, 17 nt, Artificial Sequence
  Synthetic
gagagggacgggaggag

SEQ ID NO: 710305 - RNA, 17 nt, Artificial Sequence
  Synthetic
gaaugugccuggaggag

SEQ ID NO: 710306 - RNA, 17 nt, Artificial Sequence
  Synthetic
gugaauguggugaggag

SEQ ID NO: 710307 - RNA, 17 nt, Artificial Sequence
  Synthetic
gauugaagacauaggag

SEQ ID NO: 710308 - RNA, 17 nt, Artificial Sequence
  Synthetic
ggcuucaggucuaggag

SEQ ID NO: 710309 - RNA, 17 nt, Artificial Sequence
  Synthetic
guuuguuuauuuaggag

SEQ ID NO: 710310 - RNA, 17 nt, Artificial Sequence
  Synthetic
gcaggagggaaagggag

SEQ ID NO: 710311 - RNA, 17 nt, Artificial Sequence
  Synthetic
gagucucuuaaagggag

SEQ ID NO: 710312 - RNA, 17 nt, Artificial Sequence
  Synthetic
gguuuuaaccaagggag

SEQ ID NO: 710313 - RNA, 17 nt, Artificial Sequence
  Synthetic
gagcugguugaagggag

SEQ ID NO: 710314 - RNA, 17 nt, Artificial Sequence
  Synthetic
gugagggccacagggag

SEQ ID NO: 710315 - RNA, 17 nt, Artificial Sequence
  Synthetic
gugacagagacagggag

SEQ ID NO: 710316 - RNA, 17 nt, Artificial Sequence
  Synthetic
gcaaaugggacagggag

SEQ ID NO: 710317 - RNA, 17 nt, Artificial Sequence
  Synthetic
ggcauggauacagggag

SEQ ID NO: 710318 - RNA, 17 nt, Artificial Sequence
  Synthetic
gagacagggagagggag

SEQ ID NO: 710319 - RNA, 17 nt, Artificial Sequence
  Synthetic
guggcaaugugagggag

SEQ ID NO: 710320 - RNA, 17 nt, Artificial Sequence
  Synthetic
gaacacacaauagggag

SEQ ID NO: 710321 - RNA, 17 nt, Artificial Sequence
  Synthetic
gaaauaggaguagggag

SEQ ID NO: 710322 - RNA, 17 nt, Artificial Sequence
  Synthetic
gaaacauggcaggggag

SEQ ID NO: 710323 - RNA, 17 nt, Artificial Sequence
  Synthetic
gggugguggcaggggag

SEQ ID NO: 710324 - RNA, 17 nt, Artificial Sequence
  Synthetic
gggaggagggaggggag

SEQ ID NO: 710325 - RNA, 17 nt, Artificial Sequence
  Synthetic
gugagauuggaggggag

SEQ ID NO: 710326 - RNA, 17 nt, Artificial Sequence
  Synthetic
ggggugugaagggggag

SEQ ID NO: 710327 - RNA, 17 nt, Artificial Sequence
  Synthetic
guucaagguggggggag

SEQ ID NO: 710328 - RNA, 17 nt, Artificial Sequence
  Synthetic
gagagaaagugggggag

SEQ ID NO: 710329 - RNA, 17 nt, Artificial Sequence
  Synthetic
gcuugggagugggggag

SEQ ID NO: 710330 - RNA, 17 nt, Artificial Sequence
  Synthetic
ggugggguuguggggag

SEQ ID NO: 710331 - RNA, 17 nt, Artificial Sequence
  Synthetic
gaaauggaacaugggag

SEQ ID NO: 710332 - RNA, 17 nt, Artificial Sequence
  Synthetic
ggauauacaccugggag

SEQ ID NO: 710333 - RNA, 17 nt, Artificial Sequence
  Synthetic
gacgugccauuugggag

SEQ ID NO: 710334 - RNA, 17 nt, Artificial Sequence
  Synthetic
gacaugagauuugggag

SEQ ID NO: 710335 - RNA, 17 nt, Artificial Sequence
  Synthetic
gugcuuaucuuugggag

SEQ ID NO: 710336 - RNA, 17 nt, Artificial Sequence
  Synthetic
gaaaacucagaauggag

SEQ ID NO: 710337 - RNA, 17 nt, Artificial Sequence
  Synthetic
gagagagaggaauggag

SEQ ID NO: 710338 - RNA, 17 nt, Artificial Sequence
  Synthetic
gcuaaacaaagauggag

SEQ ID NO: 710339 - RNA, 17 nt, Artificial Sequence
  Synthetic
gaaagaugcugauggag

SEQ ID NO: 710340 - RNA, 17 nt, Artificial Sequence
  Synthetic
ggauuuuggugauggag

SEQ ID NO: 710341 - RNA, 17 nt, Artificial Sequence
  Synthetic
gauugaagaauauggag

SEQ ID NO: 710342 - RNA, 17 nt, Artificial Sequence
  Synthetic
gggaagugagacuggag

SEQ ID NO: 710343 - RNA, 17 nt, Artificial Sequence
  Synthetic
guggaagccuacuggag

SEQ ID NO: 710344 - RNA, 17 nt, Artificial Sequence
  Synthetic
gcagaaggaagcuggag

SEQ ID NO: 710345 - RNA, 17 nt, Artificial Sequence
  Synthetic
gccucugggagcuggag

SEQ ID NO: 710346 - RNA, 17 nt, Artificial Sequence
  Synthetic
guuccacauggcuggag

SEQ ID NO: 710347 - RNA, 17 nt, Artificial Sequence
  Synthetic
guuuggcuccucuggag

SEQ ID NO: 710348 - RNA, 17 nt, Artificial Sequence
  Synthetic
gcaaacagggucuggag

SEQ ID NO: 710349 - RNA, 17 nt, Artificial Sequence
  Synthetic
gaaauuuuuucguggag

SEQ ID NO: 710350 - RNA, 17 nt, Artificial Sequence
  Synthetic
gagggagaaagguggag

SEQ ID NO: 710351 - RNA, 17 nt, Artificial Sequence
  Synthetic
gguauggggguguggag

SEQ ID NO: 710352 - RNA, 17 nt, Artificial Sequence
  Synthetic
guauugaaaaauuggag

SEQ ID NO: 710353 - RNA, 17 nt, Artificial Sequence
  Synthetic
gaagaauaaaauuggag

SEQ ID NO: 710354 - RNA, 17 nt, Artificial Sequence
  Synthetic
guagaaauagauuggag

SEQ ID NO: 710355 - RNA, 17 nt, Artificial Sequence
  Synthetic
gggaauucugcuuggag

SEQ ID NO: 710356 - RNA, 17 nt, Artificial Sequence
  Synthetic
ggaucuuacauuuggag

SEQ ID NO: 710357 - RNA, 17 nt, Artificial Sequence
  Synthetic
ggccacucuauuuggag

SEQ ID NO: 710358 - RNA, 17 nt, Artificial Sequence
  Synthetic
gcuccuuuuauuuggag

SEQ ID NO: 710359 - RNA, 17 nt, Artificial Sequence
  Synthetic
gcuuugacuuuuuggag

SEQ ID NO: 710360 - RNA, 17 nt, Artificial Sequence
  Synthetic
gugggaaggaaaaugag

SEQ ID NO: 710361 - RNA, 17 nt, Artificial Sequence
  Synthetic
gcaauaaaacaaaugag

SEQ ID NO: 710362 - RNA, 17 nt, Artificial Sequence
  Synthetic
gauuuuuuuuaaaugag

SEQ ID NO: 710363 - RNA, 17 nt, Artificial Sequence
  Synthetic
ggggagaaggcaaugag

SEQ ID NO: 710364 - RNA, 17 nt, Artificial Sequence
  Synthetic
gcaagagaaucaaugag

SEQ ID NO: 710365 - RNA, 17 nt, Artificial Sequence
  Synthetic
ggauugagaugaaugag

SEQ ID NO: 710366 - RNA, 17 nt, Artificial Sequence
  Synthetic
gaaaccuagugaaugag

SEQ ID NO: 710367 - RNA, 17 nt, Artificial Sequence
  Synthetic
gccgcaguaaacaugag

SEQ ID NO: 710368 - RNA, 17 nt, Artificial Sequence
  Synthetic
gacucaaauaccaugag

SEQ ID NO: 710369 - RNA, 17 nt, Artificial Sequence
  Synthetic
gcuaccaugcccaugag

SEQ ID NO: 710370 - RNA, 17 nt, Artificial Sequence
  Synthetic
ggaaaacacaucaugag

SEQ ID NO: 710371 - RNA, 17 nt, Artificial Sequence
  Synthetic
gcuuaaaggaagaugag

SEQ ID NO: 710372 - RNA, 17 nt, Artificial Sequence
  Synthetic
guuggaaguaagaugag

SEQ ID NO: 710373 - RNA, 17 nt, Artificial Sequence
  Synthetic
gagaaugagcagaugag

SEQ ID NO: 710374 - RNA, 17 nt, Artificial Sequence
  Synthetic
gaagaaggagagaugag

SEQ ID NO: 710375 - RNA, 17 nt, Artificial Sequence
  Synthetic
gaaguggcaaggaugag

SEQ ID NO: 710376 - RNA, 17 nt, Artificial Sequence
  Synthetic
gcagaucaauggaugag

SEQ ID NO: 710377 - RNA, 17 nt, Artificial Sequence
  Synthetic
gccuacaggaugaugag

SEQ ID NO: 710378 - RNA, 17 nt, Artificial Sequence
  Synthetic
guagaugggaugaugag

SEQ ID NO: 710379 - RNA, 17 nt, Artificial Sequence
  Synthetic
guaaacgugaauaugag

SEQ ID NO: 710380 - RNA, 17 nt, Artificial Sequence
  Synthetic
gugagaauccauaugag

SEQ ID NO: 710381 - RNA, 17 nt, Artificial Sequence
  Synthetic
guucuucaguauaugag

SEQ ID NO: 710382 - RNA, 17 nt, Artificial Sequence
  Synthetic
gauggaaacauuaugag

SEQ ID NO: 710383 - RNA, 17 nt, Artificial Sequence
  Synthetic
ggcuuaauguuuaugag

SEQ ID NO: 710384 - RNA, 17 nt, Artificial Sequence
  Synthetic
guugauaacacacugag

SEQ ID NO: 710385 - RNA, 17 nt, Artificial Sequence
  Synthetic
gagauuuaucuacugag

SEQ ID NO: 710386 - RNA, 17 nt, Artificial Sequence
  Synthetic
gcaauaugcuuacugag

SEQ ID NO: 710387 - RNA, 17 nt, Artificial Sequence
  Synthetic
gggcuuaaauugcugag

SEQ ID NO: 710388 - RNA, 17 nt, Artificial Sequence
  Synthetic
guaauaguauugcugag

SEQ ID NO: 710389 - RNA, 17 nt, Artificial Sequence
  Synthetic
gaaagacaagaucugag

SEQ ID NO: 710390 - RNA, 17 nt, Artificial Sequence
  Synthetic
gaauggagcuaagugag

SEQ ID NO: 710391 - RNA, 17 nt, Artificial Sequence
  Synthetic
gggagggacccagugag

SEQ ID NO: 710392 - RNA, 17 nt, Artificial Sequence
  Synthetic
gcggagguugcagugag

SEQ ID NO: 710393 - RNA, 17 nt, Artificial Sequence
  Synthetic
gugagucggugagugag

SEQ ID NO: 710394 - RNA, 17 nt, Artificial Sequence
  Synthetic
gugguacauaaggugag

SEQ ID NO: 710395 - RNA, 17 nt, Artificial Sequence
  Synthetic
ggguuaucagaggugag

SEQ ID NO: 710396 - RNA, 17 nt, Artificial Sequence
  Synthetic
gccugucaaggggugag

SEQ ID NO: 710397 - RNA, 17 nt, Artificial Sequence
  Synthetic
gaaggguagggggugag

SEQ ID NO: 710398 - RNA, 17 nt, Artificial Sequence
  Synthetic
gccugucguggggugag

SEQ ID NO: 710399 - RNA, 17 nt, Artificial Sequence
  Synthetic
ggcaugauuuuggugag

SEQ ID NO: 710400 - RNA, 17 nt, Artificial Sequence
  Synthetic
gaccaauugaaugugag

SEQ ID NO: 710401 - RNA, 17 nt, Artificial Sequence
  Synthetic
gggccagugcaugugag

SEQ ID NO: 710402 - RNA, 17 nt, Artificial Sequence
  Synthetic
guaauagagacugugag

SEQ ID NO: 710403 - RNA, 17 nt, Artificial Sequence
  Synthetic
ggauuaacaccugugag

SEQ ID NO: 710404 - RNA, 17 nt, Artificial Sequence
  Synthetic
gcugacugucuugugag

SEQ ID NO: 710405 - RNA, 17 nt, Artificial Sequence
  Synthetic
ggguauucaaaauugag

SEQ ID NO: 710406 - RNA, 17 nt, Artificial Sequence
  Synthetic
guugaaggugcauugag

SEQ ID NO: 710407 - RNA, 17 nt, Artificial Sequence
  Synthetic
gaaaauucaugauugag

SEQ ID NO: 710408 - RNA, 17 nt, Artificial Sequence
  Synthetic
gggauggaaauauugag

SEQ ID NO: 710409 - RNA, 17 nt, Artificial Sequence
  Synthetic
gagggauaaggcuugag

SEQ ID NO: 710410 - RNA, 17 nt, Artificial Sequence
  Synthetic
gaacucuguaucuugag

SEQ ID NO: 710411 - RNA, 17 nt, Artificial Sequence
  Synthetic
guuaauuugcucuugag

SEQ ID NO: 710412 - RNA, 17 nt, Artificial Sequence
  Synthetic
ggaaagugauucuugag

SEQ ID NO: 710413 - RNA, 17 nt, Artificial Sequence
  Synthetic
guggcagccaaguugag

SEQ ID NO: 710414 - RNA, 17 nt, Artificial Sequence
  Synthetic
guuucugagcaguugag

SEQ ID NO: 710415 - RNA, 17 nt, Artificial Sequence
  Synthetic
gagaaaagucaguugag

SEQ ID NO: 710416 - RNA, 17 nt, Artificial Sequence
  Synthetic
guuuccauguaguugag

SEQ ID NO: 710417 - RNA, 17 nt, Artificial Sequence
  Synthetic
guaguggggggguugag

SEQ ID NO: 710418 - RNA, 17 nt, Artificial Sequence
  Synthetic
ggcauagagugguugag

SEQ ID NO: 710419 - RNA, 17 nt, Artificial Sequence
  Synthetic
ggaagacaucuguugag

SEQ ID NO: 710420 - RNA, 17 nt, Artificial Sequence
  Synthetic
gggcaccuucuguugag

SEQ ID NO: 710421 - RNA, 17 nt, Artificial Sequence
  Synthetic
guuuacuuuaauuugag

SEQ ID NO: 710422 - RNA, 17 nt, Artificial Sequence
  Synthetic
gcacaacaguauuugag

SEQ ID NO: 710423 - RNA, 17 nt, Artificial Sequence
  Synthetic
gauccuuaaaguuugag

SEQ ID NO: 710424 - RNA, 17 nt, Artificial Sequence
  Synthetic
gaaaccacgaguuugag

SEQ ID NO: 710425 - RNA, 17 nt, Artificial Sequence
  Synthetic
gugacagaauguuugag

SEQ ID NO: 710426 - RNA, 17 nt, Artificial Sequence
  Synthetic
gggaaagugauuuugag

SEQ ID NO: 710427 - RNA, 17 nt, Artificial Sequence
  Synthetic
gcugacucucuuuugag

SEQ ID NO: 710428 - RNA, 17 nt, Artificial Sequence
  Synthetic
gaguuacugaaaaauag

SEQ ID NO: 710429 - RNA, 17 nt, Artificial Sequence
  Synthetic
gaaaugauguaaaauag

SEQ ID NO: 710430 - RNA, 17 nt, Artificial Sequence
  Synthetic
guaguagaaacaaauag

SEQ ID NO: 710431 - RNA, 17 nt, Artificial Sequence
  Synthetic
gauugugagccaaauag

SEQ ID NO: 710432 - RNA, 17 nt, Artificial Sequence
  Synthetic
gaagagacaucaaauag

SEQ ID NO: 710433 - RNA, 17 nt, Artificial Sequence
  Synthetic
gacauaaacagaaauag

SEQ ID NO: 710434 - RNA, 17 nt, Artificial Sequence
  Synthetic
gaaauauccagaaauag

SEQ ID NO: 710435 - RNA, 17 nt, Artificial Sequence
  Synthetic
gauuagcgaugaaauag

SEQ ID NO: 710436 - RNA, 17 nt, Artificial Sequence
  Synthetic
gucugguuucuaaauag

SEQ ID NO: 710437 - RNA, 17 nt, Artificial Sequence
  Synthetic
gcuguagcuuuaaauag

SEQ ID NO: 710438 - RNA, 17 nt, Artificial Sequence
  Synthetic
gcccccauugucaauag

SEQ ID NO: 710439 - RNA, 17 nt, Artificial Sequence
  Synthetic
gucaagguagagaauag

SEQ ID NO: 710440 - RNA, 17 nt, Artificial Sequence
  Synthetic
gugagaaguuagaauag

SEQ ID NO: 710441 - RNA, 17 nt, Artificial Sequence
  Synthetic
gcccccggaaggaauag

SEQ ID NO: 710442 - RNA, 17 nt, Artificial Sequence
  Synthetic
gagaaaacugggaauag

SEQ ID NO: 710443 - RNA, 17 nt, Artificial Sequence
  Synthetic
gacauaucucugaauag

SEQ ID NO: 710444 - RNA, 17 nt, Artificial Sequence
  Synthetic
gcuuagugagugaauag

SEQ ID NO: 710445 - RNA, 17 nt, Artificial Sequence
  Synthetic
gcaucagaaaauaauag

SEQ ID NO: 710446 - RNA, 17 nt, Artificial Sequence
  Synthetic
gaaugccacuauaauag

SEQ ID NO: 710447 - RNA, 17 nt, Artificial Sequence
  Synthetic
gugauuaguuauaauag

SEQ ID NO: 710448 - RNA, 17 nt, Artificial Sequence
  Synthetic
guaguauuuuauaauag

SEQ ID NO: 710449 - RNA, 17 nt, Artificial Sequence
  Synthetic
guugggagaaguaauag

SEQ ID NO: 710450 - RNA, 17 nt, Artificial Sequence
  Synthetic
gggagggaguuuaauag

SEQ ID NO: 710451 - RNA, 17 nt, Artificial Sequence
  Synthetic
gaagauuaauaacauag

SEQ ID NO: 710452 - RNA, 17 nt, Artificial Sequence
  Synthetic
guagguauaaaccauag

SEQ ID NO: 710453 - RNA, 17 nt, Artificial Sequence
  Synthetic
guacacaugugccauag

SEQ ID NO: 710454 - RNA, 17 nt, Artificial Sequence
  Synthetic
gaaugagguguccauag

SEQ ID NO: 710455 - RNA, 17 nt, Artificial Sequence
  Synthetic
ggagcuuuuacucauag

SEQ ID NO: 710456 - RNA, 17 nt, Artificial Sequence
  Synthetic
gagaugauaucucauag

SEQ ID NO: 710457 - RNA, 17 nt, Artificial Sequence
  Synthetic
gagaaguugagucauag

SEQ ID NO: 710458 - RNA, 17 nt, Artificial Sequence
  Synthetic
guaaaugggaaagauag

SEQ ID NO: 710459 - RNA, 17 nt, Artificial Sequence
  Synthetic
gcaaaagagacagauag

SEQ ID NO: 710460 - RNA, 17 nt, Artificial Sequence
  Synthetic
gaguaacaaggagauag

SEQ ID NO: 710461 - RNA, 17 nt, Artificial Sequence
  Synthetic
gaggcugggaaggauag

SEQ ID NO: 710462 - RNA, 17 nt, Artificial Sequence
  Synthetic
gugaguauguuggauag

SEQ ID NO: 710463 - RNA, 17 nt, Artificial Sequence
  Synthetic
gacugugcacaugauag

SEQ ID NO: 710464 - RNA, 17 nt, Artificial Sequence
  Synthetic
gugugggauguugauag

SEQ ID NO: 710465 - RNA, 17 nt, Artificial Sequence
  Synthetic
gauauggccauauauag

SEQ ID NO: 710466 - RNA, 17 nt, Artificial Sequence
  Synthetic
gaaacugagguauauag

SEQ ID NO: 710467 - RNA, 17 nt, Artificial Sequence
  Synthetic
gaguguuauuccuauag

SEQ ID NO: 710468 - RNA, 17 nt, Artificial Sequence
  Synthetic
ggauggccuuccuauag

SEQ ID NO: 710469 - RNA, 17 nt, Artificial Sequence
  Synthetic
gaagacaaccucuauag

SEQ ID NO: 710470 - RNA, 17 nt, Artificial Sequence
  Synthetic
gagaacaccaaguauag

SEQ ID NO: 710471 - RNA, 17 nt, Artificial Sequence
  Synthetic
gauaaaacacaguauag

SEQ ID NO: 710472 - RNA, 17 nt, Artificial Sequence
  Synthetic
gccaggcuggaguauag

SEQ ID NO: 710473 - RNA, 17 nt, Artificial Sequence
  Synthetic
ggguaauuguaguauag

SEQ ID NO: 710474 - RNA, 17 nt, Artificial Sequence
  Synthetic
gacacuaagaauuauag

SEQ ID NO: 710475 - RNA, 17 nt, Artificial Sequence
  Synthetic
gaagcuugucauuauag

SEQ ID NO: 710476 - RNA, 17 nt, Artificial Sequence
  Synthetic
guuacacuuccuuauag

SEQ ID NO: 710477 - RNA, 17 nt, Artificial Sequence
  Synthetic
guguuaauggcuuauag

SEQ ID NO: 710478 - RNA, 17 nt, Artificial Sequence
  Synthetic
gagauuaccuguuauag

SEQ ID NO: 710479 - RNA, 17 nt, Artificial Sequence
  Synthetic
gugccugugauuuauag

SEQ ID NO: 710480 - RNA, 17 nt, Artificial Sequence
  Synthetic
gcaaguauguuuuauag

SEQ ID NO: 710481 - RNA, 17 nt, Artificial Sequence
  Synthetic
gacaaaugaggaacuag

SEQ ID NO: 710482 - RNA, 17 nt, Artificial Sequence
  Synthetic
gauauaauuggaacuag

SEQ ID NO: 710483 - RNA, 17 nt, Artificial Sequence
  Synthetic
gucaugagacacacuag

SEQ ID NO: 710484 - RNA, 17 nt, Artificial Sequence
  Synthetic
ggugggaggaucacuag

SEQ ID NO: 710485 - RNA, 17 nt, Artificial Sequence
  Synthetic
gucguggcaaagacuag

SEQ ID NO: 710486 - RNA, 17 nt, Artificial Sequence
  Synthetic
ggagauguacagacuag

SEQ ID NO: 710487 - RNA, 17 nt, Artificial Sequence
  Synthetic
gagaucagugagacuag

SEQ ID NO: 710488 - RNA, 17 nt, Artificial Sequence
  Synthetic
gacuucaaagcuacuag

SEQ ID NO: 710489 - RNA, 17 nt, Artificial Sequence
  Synthetic
gaauacguaauaccuag

SEQ ID NO: 710490 - RNA, 17 nt, Artificial Sequence
  Synthetic
gcuguuccacuaccuag

SEQ ID NO: 710491 - RNA, 17 nt, Artificial Sequence
  Synthetic
guaaucuuucuaccuag

SEQ ID NO: 710492 - RNA, 17 nt, Artificial Sequence
  Synthetic
gaauauuugcagccuag

SEQ ID NO: 710493 - RNA, 17 nt, Artificial Sequence
  Synthetic
gaugucauuguuccuag

SEQ ID NO: 710494 - RNA, 17 nt, Artificial Sequence
  Synthetic
gucaaugcaaaagcuag

SEQ ID NO: 710495 - RNA, 17 nt, Artificial Sequence
  Synthetic
guaagcuugucagcuag

SEQ ID NO: 710496 - RNA, 17 nt, Artificial Sequence
  Synthetic
gagacaaagcuagcuag

SEQ ID NO: 710497 - RNA, 17 nt, Artificial Sequence
  Synthetic
gcgcgcgcgugcgcuag

SEQ ID NO: 710498 - RNA, 17 nt, Artificial Sequence
  Synthetic
guuacuuccugggcuag

SEQ ID NO: 710499 - RNA, 17 nt, Artificial Sequence
  Synthetic
gcuaaugggugggcuag

SEQ ID NO: 710500 - RNA, 17 nt, Artificial Sequence
  Synthetic
guaauggauauugcuag

SEQ ID NO: 710501 - RNA, 17 nt, Artificial Sequence
  Synthetic
gaaugcccaauaucuag

SEQ ID NO: 710502 - RNA, 17 nt, Artificial Sequence
  Synthetic
gugggcacaguaucuag

SEQ ID NO: 710503 - RNA, 17 nt, Artificial Sequence
  Synthetic
ggagauguuaccucuag

SEQ ID NO: 710504 - RNA, 17 nt, Artificial Sequence
  Synthetic
gagaagcacugcucuag

SEQ ID NO: 710505 - RNA, 17 nt, Artificial Sequence
  Synthetic
gaaggcaggaagucuag

SEQ ID NO: 710506 - RNA, 17 nt, Artificial Sequence
  Synthetic
ggaguuuuucagucuag

SEQ ID NO: 710507 - RNA, 17 nt, Artificial Sequence
  Synthetic
guagcuucagagucuag

SEQ ID NO: 710508 - RNA, 17 nt, Artificial Sequence
  Synthetic
guggcagagaggucuag

SEQ ID NO: 710509 - RNA, 17 nt, Artificial Sequence
  Synthetic
gaaaaucacuggucuag

SEQ ID NO: 710510 - RNA, 17 nt, Artificial Sequence
  Synthetic
ggauucuaucauucuag

SEQ ID NO: 710511 - RNA, 17 nt, Artificial Sequence
  Synthetic
gaaaauacaaaaaguag

SEQ ID NO: 710512 - RNA, 17 nt, Artificial Sequence
  Synthetic
gagaaaugaggaaguag

SEQ ID NO: 710513 - RNA, 17 nt, Artificial Sequence
  Synthetic
guuuaaugguuaaguag

SEQ ID NO: 710514 - RNA, 17 nt, Artificial Sequence
  Synthetic
gguuugcugaacaguag

SEQ ID NO: 710515 - RNA, 17 nt, Artificial Sequence
  Synthetic
gacuuuuuacccaguag

SEQ ID NO: 710516 - RNA, 17 nt, Artificial Sequence
  Synthetic
gucucuguccccaguag

SEQ ID NO: 710517 - RNA, 17 nt, Artificial Sequence
  Synthetic
ggauaaaugcccaguag

SEQ ID NO: 710518 - RNA, 17 nt, Artificial Sequence
  Synthetic
ggagaauuauccaguag

SEQ ID NO: 710519 - RNA, 17 nt, Artificial Sequence
  Synthetic
gagaauagaggcaguag

SEQ ID NO: 710520 - RNA, 17 nt, Artificial Sequence
  Synthetic
ggguuuugccucaguag

SEQ ID NO: 710521 - RNA, 17 nt, Artificial Sequence
  Synthetic
guuuauagauagaguag

SEQ ID NO: 710522 - RNA, 17 nt, Artificial Sequence
  Synthetic
gaagagaacuagaguag

SEQ ID NO: 710523 - RNA, 17 nt, Artificial Sequence
  Synthetic
gacagacgaaggaguag

SEQ ID NO: 710524 - RNA, 17 nt, Artificial Sequence
  Synthetic
ggggagauggggaguag

SEQ ID NO: 710525 - RNA, 17 nt, Artificial Sequence
  Synthetic
gaagaaugagugaguag

SEQ ID NO: 710526 - RNA, 17 nt, Artificial Sequence
  Synthetic
guccaagacuuuaguag

SEQ ID NO: 710527 - RNA, 17 nt, Artificial Sequence
  Synthetic
guguguauuuuuaguag

SEQ ID NO: 710528 - RNA, 17 nt, Artificial Sequence
  Synthetic
gggugggccaggcguag

SEQ ID NO: 710529 - RNA, 17 nt, Artificial Sequence
  Synthetic
gaagaugaggggcguag

SEQ ID NO: 710530 - RNA, 17 nt, Artificial Sequence
  Synthetic
gucaaaaauaaagguag

SEQ ID NO: 710531 - RNA, 17 nt, Artificial Sequence
  Synthetic
gagaggaagagagguag

SEQ ID NO: 710532 - RNA, 17 nt, Artificial Sequence
  Synthetic
ggguaguguggagguag

SEQ ID NO: 710533 - RNA, 17 nt, Artificial Sequence
  Synthetic
guuguuccacuagguag

SEQ ID NO: 710534 - RNA, 17 nt, Artificial Sequence
  Synthetic
guaauuuaauuagguag

SEQ ID NO: 710535 - RNA, 17 nt, Artificial Sequence
  Synthetic
gauucagaaagcgguag

SEQ ID NO: 710536 - RNA, 17 nt, Artificial Sequence
  Synthetic
gagacugggaaggguag

SEQ ID NO: 710537 - RNA, 17 nt, Artificial Sequence
  Synthetic
gaugcugggaaggguag

SEQ ID NO: 710538 - RNA, 17 nt, Artificial Sequence
  Synthetic
gaggcugugaaggguag

SEQ ID NO: 710539 - RNA, 17 nt, Artificial Sequence
  Synthetic
ggguggggguaggguag

SEQ ID NO: 710540 - RNA, 17 nt, Artificial Sequence
  Synthetic
ggaccagggagggguag

SEQ ID NO: 710541 - RNA, 17 nt, Artificial Sequence
  Synthetic
gggaggcuccgggguag

SEQ ID NO: 710542 - RNA, 17 nt, Artificial Sequence
  Synthetic
ggccugacacaugguag

SEQ ID NO: 710543 - RNA, 17 nt, Artificial Sequence
  Synthetic
gggaaggguagugguag

SEQ ID NO: 710544 - RNA, 17 nt, Artificial Sequence
  Synthetic
ggaaauguauuugguag

SEQ ID NO: 710545 - RNA, 17 nt, Artificial Sequence
  Synthetic
gggcauucaaaauguag

SEQ ID NO: 710546 - RNA, 17 nt, Artificial Sequence
  Synthetic
gacaaugaugaauguag

SEQ ID NO: 710547 - RNA, 17 nt, Artificial Sequence
  Synthetic
gucaaaaacuaauguag

SEQ ID NO: 710548 - RNA, 17 nt, Artificial Sequence
  Synthetic
gcagaagauggauguag

SEQ ID NO: 710549 - RNA, 17 nt, Artificial Sequence
  Synthetic
gccauguaaugauguag

SEQ ID NO: 710550 - RNA, 17 nt, Artificial Sequence
  Synthetic
ggaggcaggcuauguag

SEQ ID NO: 710551 - RNA, 17 nt, Artificial Sequence
  Synthetic
guaugggccggguguag

SEQ ID NO: 710552 - RNA, 17 nt, Artificial Sequence
  Synthetic
ggagcacagaaaauuag

SEQ ID NO: 710553 - RNA, 17 nt, Artificial Sequence
  Synthetic
gggacaaagucaauuag

SEQ ID NO: 710554 - RNA, 17 nt, Artificial Sequence
  Synthetic
gacucguuuucaauuag

SEQ ID NO: 710555 - RNA, 17 nt, Artificial Sequence
  Synthetic
gaggucuaaagaauuag

SEQ ID NO: 710556 - RNA, 17 nt, Artificial Sequence
  Synthetic
gugaaaagguacauuag

SEQ ID NO: 710557 - RNA, 17 nt, Artificial Sequence
  Synthetic
gauggagaacagauuag

SEQ ID NO: 710558 - RNA, 17 nt, Artificial Sequence
  Synthetic
guuuuaauuuugauuag

SEQ ID NO: 710559 - RNA, 17 nt, Artificial Sequence
  Synthetic
gaagauaacaauauuag

SEQ ID NO: 710560 - RNA, 17 nt, Artificial Sequence
  Synthetic
ggagugcuugcuauuag

SEQ ID NO: 710561 - RNA, 17 nt, Artificial Sequence
  Synthetic
gagccugucucuauuag

SEQ ID NO: 710562 - RNA, 17 nt, Artificial Sequence
  Synthetic
ggacaauauuuuauuag

SEQ ID NO: 710563 - RNA, 17 nt, Artificial Sequence
  Synthetic
gaugucaagcaacuuag

SEQ ID NO: 710564 - RNA, 17 nt, Artificial Sequence
  Synthetic
guuucccagguacuuag

SEQ ID NO: 710565 - RNA, 17 nt, Artificial Sequence
  Synthetic
gagggugcaggccuuag

SEQ ID NO: 710566 - RNA, 17 nt, Artificial Sequence
  Synthetic
gcuagaaaaugccuuag

SEQ ID NO: 710567 - RNA, 17 nt, Artificial Sequence
  Synthetic
gaagagcauugccuuag

SEQ ID NO: 710568 - RNA, 17 nt, Artificial Sequence
  Synthetic
gaaaaggaaauccuuag

SEQ ID NO: 710569 - RNA, 17 nt, Artificial Sequence
  Synthetic
gacaaaaucuuccuuag

SEQ ID NO: 710570 - RNA, 17 nt, Artificial Sequence
  Synthetic
guaacauagaagcuuag

SEQ ID NO: 710571 - RNA, 17 nt, Artificial Sequence
  Synthetic
gugccuucuccucuuag

SEQ ID NO: 710572 - RNA, 17 nt, Artificial Sequence
  Synthetic
gcuagaugacaaguuag

SEQ ID NO: 710573 - RNA, 17 nt, Artificial Sequence
  Synthetic
gcuagaugacgaguuag

SEQ ID NO: 710574 - RNA, 17 nt, Artificial Sequence
  Synthetic
gcuagaugaugaguuag

SEQ ID NO: 710575 - RNA, 17 nt, Artificial Sequence
  Synthetic
gcuagaugacacguuag

SEQ ID NO: 710576 - RNA, 17 nt, Artificial Sequence
  Synthetic
gaggggugggagguuag

SEQ ID NO: 710577 - RNA, 17 nt, Artificial Sequence
  Synthetic
ggcauauggaggguuag

SEQ ID NO: 710578 - RNA, 17 nt, Artificial Sequence
  Synthetic
gcuagaugacggguuag

SEQ ID NO: 710579 - RNA, 17 nt, Artificial Sequence
  Synthetic
gauuuccugaauguuag

SEQ ID NO: 710580 - RNA, 17 nt, Artificial Sequence
  Synthetic
guuaggcauuguguuag

SEQ ID NO: 710581 - RNA, 17 nt, Artificial Sequence
  Synthetic
gaaaaaaaaaaauuuag

SEQ ID NO: 710582 - RNA, 17 nt, Artificial Sequence
  Synthetic
gagcuaaggaaauuuag

SEQ ID NO: 710583 - RNA, 17 nt, Artificial Sequence
  Synthetic
guugacaauaaauuuag

SEQ ID NO: 710584 - RNA, 17 nt, Artificial Sequence
  Synthetic
guaaagugacaauuuag

SEQ ID NO: 710585 - RNA, 17 nt, Artificial Sequence
  Synthetic
gaaagcugauaauuuag

SEQ ID NO: 710586 - RNA, 17 nt, Artificial Sequence
  Synthetic
gaaaaaguaacauuuag

SEQ ID NO: 710587 - RNA, 17 nt, Artificial Sequence
  Synthetic
guuacauugucauuuag

SEQ ID NO: 710588 - RNA, 17 nt, Artificial Sequence
  Synthetic
ggaaguaaaauauuuag

SEQ ID NO: 710589 - RNA, 17 nt, Artificial Sequence
  Synthetic
gcuaaagcaguauuuag

SEQ ID NO: 710590 - RNA, 17 nt, Artificial Sequence
  Synthetic
gcuuuggaguuauuuag

SEQ ID NO: 710591 - RNA, 17 nt, Artificial Sequence
  Synthetic
guucagcauuuauuuag

SEQ ID NO: 710592 - RNA, 17 nt, Artificial Sequence
  Synthetic
gaauuccuucaguuuag

SEQ ID NO: 710593 - RNA, 17 nt, Artificial Sequence
  Synthetic
ggcacuuuggaguuuag

SEQ ID NO: 710594 - RNA, 17 nt, Artificial Sequence
  Synthetic
ggggaaaaaagguuuag

SEQ ID NO: 710595 - RNA, 17 nt, Artificial Sequence
  Synthetic
ggacaauuauuguuuag

SEQ ID NO: 710596 - RNA, 17 nt, Artificial Sequence
  Synthetic
gcuuggaauaguuuuag

SEQ ID NO: 710597 - RNA, 17 nt, Artificial Sequence
  Synthetic
gcauauuuggguuuuag

SEQ ID NO: 710598 - RNA, 17 nt, Artificial Sequence
  Synthetic
gccugagugauuuuuag

SEQ ID NO: 710599 - RNA, 17 nt, Artificial Sequence
  Synthetic
gugagccaagaaaaacg

SEQ ID NO: 710600 - RNA, 17 nt, Artificial Sequence
  Synthetic
gagggugaugaaaaacg

SEQ ID NO: 710601 - RNA, 17 nt, Artificial Sequence
  Synthetic
gaacaugggaagaaacg

SEQ ID NO: 710602 - RNA, 17 nt, Artificial Sequence
  Synthetic
gaccagcuugaccaacg

SEQ ID NO: 710603 - RNA, 17 nt, Artificial Sequence
  Synthetic
gugguuaauucccaacg

SEQ ID NO: 710604 - RNA, 17 nt, Artificial Sequence
  Synthetic
gaccagccuggccaacg

SEQ ID NO: 710605 - RNA, 17 nt, Artificial Sequence
  Synthetic
gucuauuuccuccaacg

SEQ ID NO: 710606 - RNA, 17 nt, Artificial Sequence
  Synthetic
gacaaaaacaagcaacg

SEQ ID NO: 710607 - RNA, 17 nt, Artificial Sequence
  Synthetic
gaccagccugaucaacg

SEQ ID NO: 710608 - RNA, 17 nt, Artificial Sequence
  Synthetic
gauuggcagacagaacg

SEQ ID NO: 710609 - RNA, 17 nt, Artificial Sequence
  Synthetic
gagcugaagcuagaacg

SEQ ID NO: 710610 - RNA, 17 nt, Artificial Sequence
  Synthetic
ggagaaucacuugaacg

SEQ ID NO: 710611 - RNA, 17 nt, Artificial Sequence
  Synthetic
gaaagcuugcaaacacg

SEQ ID NO: 710612 - RNA, 17 nt, Artificial Sequence
  Synthetic
gucccucccacaacacg

SEQ ID NO: 710613 - RNA, 17 nt, Artificial Sequence
  Synthetic
guuugcuggggaacacg

SEQ ID NO: 710614 - RNA, 17 nt, Artificial Sequence
  Synthetic
gucucucccuugacacg

SEQ ID NO: 710615 - RNA, 17 nt, Artificial Sequence
  Synthetic
ggcuucccugaaccacg

SEQ ID NO: 710616 - RNA, 17 nt, Artificial Sequence
  Synthetic
gaagugggcggaccacg

SEQ ID NO: 710617 - RNA, 17 nt, Artificial Sequence
  Synthetic
gcuugccuuaugccacg

SEQ ID NO: 710618 - RNA, 17 nt, Artificial Sequence
  Synthetic
gaacaaaucaauccacg

SEQ ID NO: 710619 - RNA, 17 nt, Artificial Sequence
  Synthetic
gccauaaaauaggcacg

SEQ ID NO: 710620 - RNA, 17 nt, Artificial Sequence
  Synthetic
gagguaauugaaucacg

SEQ ID NO: 710621 - RNA, 17 nt, Artificial Sequence
  Synthetic
gaggcgggcagaucacg

SEQ ID NO: 710622 - RNA, 17 nt, Artificial Sequence
  Synthetic
gaggugggcagaucacg

SEQ ID NO: 710623 - RNA, 17 nt, Artificial Sequence
  Synthetic
gaggcagaaggaucacg

SEQ ID NO: 710624 - RNA, 17 nt, Artificial Sequence
  Synthetic
gaggcaggcggaucacg

SEQ ID NO: 710625 - RNA, 17 nt, Artificial Sequence
  Synthetic
gagacgggcggaucacg

SEQ ID NO: 710626 - RNA, 17 nt, Artificial Sequence
  Synthetic
gaggcgggcggaucacg

SEQ ID NO: 710627 - RNA, 17 nt, Artificial Sequence
  Synthetic
gaagcagguggaucacg

SEQ ID NO: 710628 - RNA, 17 nt, Artificial Sequence
  Synthetic
gaggcagguggaucacg

SEQ ID NO: 710629 - RNA, 17 nt, Artificial Sequence
  Synthetic
gaggcggguggaucacg

SEQ ID NO: 710630 - RNA, 17 nt, Artificial Sequence
  Synthetic
gagguggguggaucacg

SEQ ID NO: 710631 - RNA, 17 nt, Artificial Sequence
  Synthetic
gaggcaguuggaucacg

SEQ ID NO: 710632 - RNA, 17 nt, Artificial Sequence
  Synthetic
gaggcgggcugaucacg

SEQ ID NO: 710633 - RNA, 17 nt, Artificial Sequence
  Synthetic
gacagugaguucucacg

SEQ ID NO: 710634 - RNA, 17 nt, Artificial Sequence
  Synthetic
guuuuaaucaagucacg

SEQ ID NO: 710635 - RNA, 17 nt, Artificial Sequence
  Synthetic
gagcauuugucaagacg

SEQ ID NO: 710636 - RNA, 17 nt, Artificial Sequence
  Synthetic
guacuuuuucuaagacg

SEQ ID NO: 710637 - RNA, 17 nt, Artificial Sequence
  Synthetic
guucuaauuuuaagacg

SEQ ID NO: 710638 - RNA, 17 nt, Artificial Sequence
  Synthetic
gagaggaacaacagacg

SEQ ID NO: 710639 - RNA, 17 nt, Artificial Sequence
  Synthetic
uauuuuuaguagagacg

SEQ ID NO: 710640 - RNA, 17 nt, Artificial Sequence
  Synthetic
guuuuuuaguagagacg

SEQ ID NO: 710641 - RNA, 17 nt, Artificial Sequence
  Synthetic
guacuuuaguggagacg

SEQ ID NO: 710642 - RNA, 17 nt, Artificial Sequence
  Synthetic
gagcaaauucugagacg

SEQ ID NO: 710643 - RNA, 17 nt, Artificial Sequence
  Synthetic
gaaagugacuuaggacg

SEQ ID NO: 710644 - RNA, 17 nt, Artificial Sequence
  Synthetic
ggcacugugcugugacg

SEQ ID NO: 710645 - RNA, 17 nt, Artificial Sequence
  Synthetic
gaaauacugagaguacg

SEQ ID NO: 710646 - RNA, 17 nt, Artificial Sequence
  Synthetic
gugcuggccugcuuacg

SEQ ID NO: 710647 - RNA, 17 nt, Artificial Sequence
  Synthetic
gacagaauaauuaaccg

SEQ ID NO: 710648 - RNA, 17 nt, Artificial Sequence
  Synthetic
gggaacaucacacaccg

SEQ ID NO: 710649 - RNA, 17 nt, Artificial Sequence
  Synthetic
ggugcagcaaaccaccg

SEQ ID NO: 710650 - RNA, 17 nt, Artificial Sequence
  Synthetic
gucauuuucucucaccg

SEQ ID NO: 710651 - RNA, 17 nt, Artificial Sequence
  Synthetic
gcgaacaacagauaccg

SEQ ID NO: 710652 - RNA, 17 nt, Artificial Sequence
  Synthetic
gguggcguaggcacccg

SEQ ID NO: 710653 - RNA, 17 nt, Artificial Sequence
  Synthetic
ggaagaaaggaaucccg

SEQ ID NO: 710654 - RNA, 17 nt, Artificial Sequence
  Synthetic
gaagcugcagugagccg

SEQ ID NO: 710655 - RNA, 17 nt, Artificial Sequence
  Synthetic
gagguugcagugagccg

SEQ ID NO: 710656 - RNA, 17 nt, Artificial Sequence
  Synthetic
gcacuuuggggaggccg

SEQ ID NO: 710657 - RNA, 17 nt, Artificial Sequence
  Synthetic
agcacuuugggaggccg

SEQ ID NO: 710658 - RNA, 17 nt, Artificial Sequence
  Synthetic
ggugcuuugggaggccg

SEQ ID NO: 710659 - RNA, 17 nt, Artificial Sequence
  Synthetic
guagaaaaggggugccg

SEQ ID NO: 710660 - RNA, 17 nt, Artificial Sequence
  Synthetic
gcuacuuauagaauccg

SEQ ID NO: 710661 - RNA, 17 nt, Artificial Sequence
  Synthetic
gugguuuaaguaauccg

SEQ ID NO: 710662 - RNA, 17 nt, Artificial Sequence
  Synthetic
gcuguucuugaacuccg

SEQ ID NO: 710663 - RNA, 17 nt, Artificial Sequence
  Synthetic
gucaccgcagagguccg

SEQ ID NO: 710664 - RNA, 17 nt, Artificial Sequence
  Synthetic
guuuaguacuuauuccg

SEQ ID NO: 710665 - RNA, 17 nt, Artificial Sequence
  Synthetic
gaccccuugugcuuccg

SEQ ID NO: 710666 - RNA, 17 nt, Artificial Sequence
  Synthetic
guuuugcaauaguuccg

SEQ ID NO: 710667 - RNA, 17 nt, Artificial Sequence
  Synthetic
ggccauguguauuuccg

SEQ ID NO: 710668 - RNA, 17 nt, Artificial Sequence
  Synthetic
ggaagacaauuuuuccg

SEQ ID NO: 710669 - RNA, 17 nt, Artificial Sequence
  Synthetic
ggagauucucuaaagcg

SEQ ID NO: 710670 - RNA, 17 nt, Artificial Sequence
  Synthetic
ggcaaggcacagaagcg

SEQ ID NO: 710671 - RNA, 17 nt, Artificial Sequence
  Synthetic
gaacauugaguacagcg

SEQ ID NO: 710672 - RNA, 17 nt, Artificial Sequence
  Synthetic
gaaauccagguucagcg

SEQ ID NO: 710673 - RNA, 17 nt, Artificial Sequence
  Synthetic
gugagagagggagagcg

SEQ ID NO: 710674 - RNA, 17 nt, Artificial Sequence
  Synthetic
gaagcauuuggggagcg

SEQ ID NO: 710675 - RNA, 17 nt, Artificial Sequence
  Synthetic
gccagaucaugggagcg

SEQ ID NO: 710676 - RNA, 17 nt, Artificial Sequence
  Synthetic
gugggauguugauagcg

SEQ ID NO: 710677 - RNA, 17 nt, Artificial Sequence
  Synthetic
gcagggaaucagaggcg

SEQ ID NO: 710678 - RNA, 17 nt, Artificial Sequence
  Synthetic
guguguguguagaggcg

SEQ ID NO: 710679 - RNA, 17 nt, Artificial Sequence
  Synthetic
gucacagcucaggggcg

SEQ ID NO: 710680 - RNA, 17 nt, Artificial Sequence
  Synthetic
guaaaauuagcugggcg

SEQ ID NO: 710681 - RNA, 17 nt, Artificial Sequence
  Synthetic
guaaaaucggcugggcg

SEQ ID NO: 710682 - RNA, 17 nt, Artificial Sequence
  Synthetic
ggugucagccucuggcg

SEQ ID NO: 710683 - RNA, 17 nt, Artificial Sequence
  Synthetic
gugugagggagguggcg

SEQ ID NO: 710684 - RNA, 17 nt, Artificial Sequence
  Synthetic
ggaauaaaauauuggcg

SEQ ID NO: 710685 - RNA, 17 nt, Artificial Sequence
  Synthetic
ggucacaccuaacugcg

SEQ ID NO: 710686 - RNA, 17 nt, Artificial Sequence
  Synthetic
gaccacuguuagcugcg

SEQ ID NO: 710687 - RNA, 17 nt, Artificial Sequence
  Synthetic
gugcuuauggcauugcg

SEQ ID NO: 710688 - RNA, 17 nt, Artificial Sequence
  Synthetic
guuguuuugugguugcg

SEQ ID NO: 710689 - RNA, 17 nt, Artificial Sequence
  Synthetic
gugaacugcauuuugcg

SEQ ID NO: 710690 - RNA, 17 nt, Artificial Sequence
  Synthetic
guuugcucauugaaucg

SEQ ID NO: 710691 - RNA, 17 nt, Artificial Sequence
  Synthetic
gaccugaguuugaaucg

SEQ ID NO: 710692 - RNA, 17 nt, Artificial Sequence
  Synthetic
gagcacaaaaaccaucg

SEQ ID NO: 710693 - RNA, 17 nt, Artificial Sequence
  Synthetic
gagcuaugauugcaucg

SEQ ID NO: 710694 - RNA, 17 nt, Artificial Sequence
  Synthetic
gauggggguagugaucg

SEQ ID NO: 710695 - RNA, 17 nt, Artificial Sequence
  Synthetic
ggguuucuuagugaucg

SEQ ID NO: 710696 - RNA, 17 nt, Artificial Sequence
  Synthetic
guguuagcuggguaucg

SEQ ID NO: 710697 - RNA, 17 nt, Artificial Sequence
  Synthetic
gggacaucagcuacucg

SEQ ID NO: 710698 - RNA, 17 nt, Artificial Sequence
  Synthetic
gcuugcccacaaccucg

SEQ ID NO: 710699 - RNA, 17 nt, Artificial Sequence
  Synthetic
guauuuugaauuccucg

SEQ ID NO: 710700 - RNA, 17 nt, Artificial Sequence
  Synthetic
gaaauggaaguagcucg

SEQ ID NO: 710701 - RNA, 17 nt, Artificial Sequence
  Synthetic
ggcacaaucauggcucg

SEQ ID NO: 710702 - RNA, 17 nt, Artificial Sequence
  Synthetic
guaguaaauauuucucg

SEQ ID NO: 710703 - RNA, 17 nt, Artificial Sequence
  Synthetic
gugaacccaggaagucg

SEQ ID NO: 710704 - RNA, 17 nt, Artificial Sequence
  Synthetic
ggauguccuggcagucg

SEQ ID NO: 710705 - RNA, 17 nt, Artificial Sequence
  Synthetic
ggauaguggaggagucg

SEQ ID NO: 710706 - RNA, 17 nt, Artificial Sequence
  Synthetic
gagaggagagugagucg

SEQ ID NO: 710707 - RNA, 17 nt, Artificial Sequence
  Synthetic
gaggaugggaagggucg

SEQ ID NO: 710708 - RNA, 17 nt, Artificial Sequence
  Synthetic
ggacugugguggggucg

SEQ ID NO: 710709 - RNA, 17 nt, Artificial Sequence
  Synthetic
ggccuguuguggggucg

SEQ ID NO: 710710 - RNA, 17 nt, Artificial Sequence
  Synthetic
ggagaguguaugugucg

SEQ ID NO: 710711 - RNA, 17 nt, Artificial Sequence
  Synthetic
gguguugaccuuugucg

SEQ ID NO: 710712 - RNA, 17 nt, Artificial Sequence
  Synthetic
guguacaucaaaauucg

SEQ ID NO: 710713 - RNA, 17 nt, Artificial Sequence
  Synthetic
gaauuuauuuuacuucg

SEQ ID NO: 710714 - RNA, 17 nt, Artificial Sequence
  Synthetic
ggggauuaacaucuucg

SEQ ID NO: 710715 - RNA, 17 nt, Artificial Sequence
  Synthetic
guuuuuccucaucuucg

SEQ ID NO: 710716 - RNA, 17 nt, Artificial Sequence
  Synthetic
ggcagauuuugauuucg

SEQ ID NO: 710717 - RNA, 17 nt, Artificial Sequence
  Synthetic
gacaaaacaaucuuucg

SEQ ID NO: 710718 - RNA, 17 nt, Artificial Sequence
  Synthetic
guuaaaugccaaaaagg

SEQ ID NO: 710719 - RNA, 17 nt, Artificial Sequence
  Synthetic
gcaaguauagaaaaagg

SEQ ID NO: 710720 - RNA, 17 nt, Artificial Sequence
  Synthetic
gguuagaggccaaaagg

SEQ ID NO: 710721 - RNA, 17 nt, Artificial Sequence
  Synthetic
guuccauugccaaaagg

SEQ ID NO: 710722 - RNA, 17 nt, Artificial Sequence
  Synthetic
gacaugccaucaaaagg

SEQ ID NO: 710723 - RNA, 17 nt, Artificial Sequence
  Synthetic
gaauuuuggggaaaagg

SEQ ID NO: 710724 - RNA, 17 nt, Artificial Sequence
  Synthetic
guagagaacauaaaagg

SEQ ID NO: 710725 - RNA, 17 nt, Artificial Sequence
  Synthetic
gucaccaagcuaaaagg

SEQ ID NO: 710726 - RNA, 17 nt, Artificial Sequence
  Synthetic
guuaccuugguaaaagg

SEQ ID NO: 710727 - RNA, 17 nt, Artificial Sequence
  Synthetic
gaugguugcuacaaagg

SEQ ID NO: 710728 - RNA, 17 nt, Artificial Sequence
  Synthetic
ggagauacagccaaagg

SEQ ID NO: 710729 - RNA, 17 nt, Artificial Sequence
  Synthetic
gucuugguugccaaagg

SEQ ID NO: 710730 - RNA, 17 nt, Artificial Sequence
  Synthetic
gagucauaaagcaaagg

SEQ ID NO: 710731 - RNA, 17 nt, Artificial Sequence
  Synthetic
gaagugccgagcaaagg

SEQ ID NO: 710732 - RNA, 17 nt, Artificial Sequence
  Synthetic
gaagugcugagcaaagg

SEQ ID NO: 710733 - RNA, 17 nt, Artificial Sequence
  Synthetic
ggcuguccuaagaaagg

SEQ ID NO: 710734 - RNA, 17 nt, Artificial Sequence
  Synthetic
gacugccaacagaaagg

SEQ ID NO: 710735 - RNA, 17 nt, Artificial Sequence
  Synthetic
gaacagaagcagaaagg

SEQ ID NO: 710736 - RNA, 17 nt, Artificial Sequence
  Synthetic
gacaggagggagaaagg

SEQ ID NO: 710737 - RNA, 17 nt, Artificial Sequence
  Synthetic
gagacaauggagaaagg

SEQ ID NO: 710738 - RNA, 17 nt, Artificial Sequence
  Synthetic
gggcccauggagaaagg

SEQ ID NO: 710739 - RNA, 17 nt, Artificial Sequence
  Synthetic
gaaggggaaaggaaagg

SEQ ID NO: 710740 - RNA, 17 nt, Artificial Sequence
  Synthetic
gugaacugaaggaaagg

SEQ ID NO: 710741 - RNA, 17 nt, Artificial Sequence
  Synthetic
guagggaacaggaaagg

SEQ ID NO: 710742 - RNA, 17 nt, Artificial Sequence
  Synthetic
gaaguacugaggaaagg

SEQ ID NO: 710743 - RNA, 17 nt, Artificial Sequence
  Synthetic
gguaauuauaggaaagg

SEQ ID NO: 710744 - RNA, 17 nt, Artificial Sequence
  Synthetic
guuguuaugaugaaagg

SEQ ID NO: 710745 - RNA, 17 nt, Artificial Sequence
  Synthetic
guguuacaagugaaagg

SEQ ID NO: 710746 - RNA, 17 nt, Artificial Sequence
  Synthetic
gcaggauggaguaaagg

SEQ ID NO: 710747 - RNA, 17 nt, Artificial Sequence
  Synthetic
gcaauccaauguaaagg

SEQ ID NO: 710748 - RNA, 17 nt, Artificial Sequence
  Synthetic
gaaacuuuccuuaaagg

SEQ ID NO: 710749 - RNA, 17 nt, Artificial Sequence
  Synthetic
guuacagcucuuaaagg

SEQ ID NO: 710750 - RNA, 17 nt, Artificial Sequence
  Synthetic
gaggguaauguuaaagg

SEQ ID NO: 710751 - RNA, 17 nt, Artificial Sequence
  Synthetic
gcuuuuuuuuuuaaagg

SEQ ID NO: 710752 - RNA, 17 nt, Artificial Sequence
  Synthetic
ggagaguuauaacaagg

SEQ ID NO: 710753 - RNA, 17 nt, Artificial Sequence
  Synthetic
gauaaugaggcacaagg

SEQ ID NO: 710754 - RNA, 17 nt, Artificial Sequence
  Synthetic
gcaccuucuucacaagg

SEQ ID NO: 710755 - RNA, 17 nt, Artificial Sequence
  Synthetic
gcaccuccuuuacaagg

SEQ ID NO: 710756 - RNA, 17 nt, Artificial Sequence
  Synthetic
acuuugggaggccaagg

SEQ ID NO: 710757 - RNA, 17 nt, Artificial Sequence
  Synthetic
gauaucuuucagcaagg

SEQ ID NO: 710758 - RNA, 17 nt, Artificial Sequence
  Synthetic
gaacuuacggagcaagg

SEQ ID NO: 710759 - RNA, 17 nt, Artificial Sequence
  Synthetic
gucacgcugaugcaagg

SEQ ID NO: 710760 - RNA, 17 nt, Artificial Sequence
  Synthetic
ggacaugccagucaagg

SEQ ID NO: 710761 - RNA, 17 nt, Artificial Sequence
  Synthetic
ggugaugccaaagaagg

SEQ ID NO: 710762 - RNA, 17 nt, Artificial Sequence
  Synthetic
guaagcuauaaagaagg

SEQ ID NO: 710763 - RNA, 17 nt, Artificial Sequence
  Synthetic
guuuuaaggcaagaagg

SEQ ID NO: 710764 - RNA, 17 nt, Artificial Sequence
  Synthetic
gccaccugugaagaagg

SEQ ID NO: 710765 - RNA, 17 nt, Artificial Sequence
  Synthetic
gagaucaacacagaagg

SEQ ID NO: 710766 - RNA, 17 nt, Artificial Sequence
  Synthetic
ggaagagaaccagaagg

SEQ ID NO: 710767 - RNA, 17 nt, Artificial Sequence
  Synthetic
ggccaagcugcagaagg

SEQ ID NO: 710768 - RNA, 17 nt, Artificial Sequence
  Synthetic
gcuuauaaaggagaagg

SEQ ID NO: 710769 - RNA, 17 nt, Artificial Sequence
  Synthetic
ggucaugaaggagaagg

SEQ ID NO: 710770 - RNA, 17 nt, Artificial Sequence
  Synthetic
ggaaacacaggagaagg

SEQ ID NO: 710771 - RNA, 17 nt, Artificial Sequence
  Synthetic
gcugagcugauagaagg

SEQ ID NO: 710772 - RNA, 17 nt, Artificial Sequence
  Synthetic
gugaugguauuagaagg

SEQ ID NO: 710773 - RNA, 17 nt, Artificial Sequence
  Synthetic
gucuuuguacacgaagg

SEQ ID NO: 710774 - RNA, 17 nt, Artificial Sequence
  Synthetic
guaugaagcaaggaagg

SEQ ID NO: 710775 - RNA, 17 nt, Artificial Sequence
  Synthetic
ggagaucaccaggaagg

SEQ ID NO: 710776 - RNA, 17 nt, Artificial Sequence
  Synthetic
gaaagcagccaggaagg

SEQ ID NO: 710777 - RNA, 17 nt, Artificial Sequence
  Synthetic
gggacuacagaggaagg

SEQ ID NO: 710778 - RNA, 17 nt, Artificial Sequence
  Synthetic
ggagggagggaggaagg

SEQ ID NO: 710779 - RNA, 17 nt, Artificial Sequence
  Synthetic
guguguaaugaggaagg

SEQ ID NO: 710780 - RNA, 17 nt, Artificial Sequence
  Synthetic
gaagugguugaggaagg

SEQ ID NO: 710781 - RNA, 17 nt, Artificial Sequence
  Synthetic
gagguagugagggaagg

SEQ ID NO: 710782 - RNA, 17 nt, Artificial Sequence
  Synthetic
gugggguggggggaagg

SEQ ID NO: 710783 - RNA, 17 nt, Artificial Sequence
  Synthetic
gcaaauuuuggggaagg

SEQ ID NO: 710784 - RNA, 17 nt, Artificial Sequence
  Synthetic
gaaauuaagugggaagg

SEQ ID NO: 710785 - RNA, 17 nt, Artificial Sequence
  Synthetic
gauuccaugauggaagg

SEQ ID NO: 710786 - RNA, 17 nt, Artificial Sequence
  Synthetic
gucagcccccuggaagg

SEQ ID NO: 710787 - RNA, 17 nt, Artificial Sequence
  Synthetic
gagcucugaguggaagg

SEQ ID NO: 710788 - RNA, 17 nt, Artificial Sequence
  Synthetic
gaacuuaucuuggaagg

SEQ ID NO: 710789 - RNA, 17 nt, Artificial Sequence
  Synthetic
gaaagaaaaaaugaagg

SEQ ID NO: 710790 - RNA, 17 nt, Artificial Sequence
  Synthetic
ggggaggggugugaagg

SEQ ID NO: 710791 - RNA, 17 nt, Artificial Sequence
  Synthetic
gaaaaugauauugaagg

SEQ ID NO: 710792 - RNA, 17 nt, Artificial Sequence
  Synthetic
gagucuuucuuugaagg

SEQ ID NO: 710793 - RNA, 17 nt, Artificial Sequence
  Synthetic
gugauguguuuugaagg

SEQ ID NO: 710794 - RNA, 17 nt, Artificial Sequence
  Synthetic
guggagugaaaauaagg

SEQ ID NO: 710795 - RNA, 17 nt, Artificial Sequence
  Synthetic
gauaaaaagaaauaagg

SEQ ID NO: 710796 - RNA, 17 nt, Artificial Sequence
  Synthetic
gcagggcaugaauaagg

SEQ ID NO: 710797 - RNA, 17 nt, Artificial Sequence
  Synthetic
gagagcauauaauaagg

SEQ ID NO: 710798 - RNA, 17 nt, Artificial Sequence
  Synthetic
gaaauugagacauaagg

SEQ ID NO: 710799 - RNA, 17 nt, Artificial Sequence
  Synthetic
gacauggaaugauaagg

SEQ ID NO: 710800 - RNA, 17 nt, Artificial Sequence
  Synthetic
gaguaaauaauauaagg

SEQ ID NO: 710801 - RNA, 17 nt, Artificial Sequence
  Synthetic
gggaggaauaacuaagg

SEQ ID NO: 710802 - RNA, 17 nt, Artificial Sequence
  Synthetic
gcugcaugauucuaagg

SEQ ID NO: 710803 - RNA, 17 nt, Artificial Sequence
  Synthetic
gcaccuuucaaaacagg

SEQ ID NO: 710804 - RNA, 17 nt, Artificial Sequence
  Synthetic
gguucucagaaaacagg

SEQ ID NO: 710805 - RNA, 17 nt, Artificial Sequence
  Synthetic
gaaucacucgaaacagg

SEQ ID NO: 710806 - RNA, 17 nt, Artificial Sequence
  Synthetic
ggagagcaggaaacagg

SEQ ID NO: 710807 - RNA, 17 nt, Artificial Sequence
  Synthetic
gucagaagacgaacagg

SEQ ID NO: 710808 - RNA, 17 nt, Artificial Sequence
  Synthetic
gggcucgugggaacagg

SEQ ID NO: 710809 - RNA, 17 nt, Artificial Sequence
  Synthetic
gggcugaggauaacagg

SEQ ID NO: 710810 - RNA, 17 nt, Artificial Sequence
  Synthetic
ggaccugcaaccacagg

SEQ ID NO: 710811 - RNA, 17 nt, Artificial Sequence
  Synthetic
gacuguuugagcacagg

SEQ ID NO: 710812 - RNA, 17 nt, Artificial Sequence
  Synthetic
gccaccuucuucacagg

SEQ ID NO: 710813 - RNA, 17 nt, Artificial Sequence
  Synthetic
gccuuggcccagacagg

SEQ ID NO: 710814 - RNA, 17 nt, Artificial Sequence
  Synthetic
gaaauaagagagacagg

SEQ ID NO: 710815 - RNA, 17 nt, Artificial Sequence
  Synthetic
ggauggugggagacagg

SEQ ID NO: 710816 - RNA, 17 nt, Artificial Sequence
  Synthetic
gugugaaaauagacagg

SEQ ID NO: 710817 - RNA, 17 nt, Artificial Sequence
  Synthetic
guagauagauagacagg

SEQ ID NO: 710818 - RNA, 17 nt, Artificial Sequence
  Synthetic
gaggaagacacgacagg

SEQ ID NO: 710819 - RNA, 17 nt, Artificial Sequence
  Synthetic
gcugcugaucugacagg

SEQ ID NO: 710820 - RNA, 17 nt, Artificial Sequence
  Synthetic
guagcugggacuacagg

SEQ ID NO: 710821 - RNA, 17 nt, Artificial Sequence
  Synthetic
gauuaauaaaaaccagg

SEQ ID NO: 710822 - RNA, 17 nt, Artificial Sequence
  Synthetic
gaauugcuugaaccagg

SEQ ID NO: 710823 - RNA, 17 nt, Artificial Sequence
  Synthetic
gaucacccgagcccagg

SEQ ID NO: 710824 - RNA, 17 nt, Artificial Sequence
  Synthetic
gaucacuugagcccagg

SEQ ID NO: 710825 - RNA, 17 nt, Artificial Sequence
  Synthetic
guuuuucuuugcccagg

SEQ ID NO: 710826 - RNA, 17 nt, Artificial Sequence
  Synthetic
gaaauguaguucccagg

SEQ ID NO: 710827 - RNA, 17 nt, Artificial Sequence
  Synthetic
gccauucaagcgccagg

SEQ ID NO: 710828 - RNA, 17 nt, Artificial Sequence
  Synthetic
gcccacuuacugccagg

SEQ ID NO: 710829 - RNA, 17 nt, Artificial Sequence
  Synthetic
gugaccagcucuccagg

SEQ ID NO: 710830 - RNA, 17 nt, Artificial Sequence
  Synthetic
gaaaguuugcaagcagg

SEQ ID NO: 710831 - RNA, 17 nt, Artificial Sequence
  Synthetic
gccagagaucaagcagg

SEQ ID NO: 710832 - RNA, 17 nt, Artificial Sequence
  Synthetic
ggugacccggaagcagg

SEQ ID NO: 710833 - RNA, 17 nt, Artificial Sequence
  Synthetic
ugggaggcugaagcagg

SEQ ID NO: 710834 - RNA, 17 nt, Artificial Sequence
  Synthetic
gaacuugucccagcagg

SEQ ID NO: 710835 - RNA, 17 nt, Artificial Sequence
  Synthetic
gguugaauuucagcagg

SEQ ID NO: 710836 - RNA, 17 nt, Artificial Sequence
  Synthetic
ggaggaggaggagcagg

SEQ ID NO: 710837 - RNA, 17 nt, Artificial Sequence
  Synthetic
gcucccagaguagcagg

SEQ ID NO: 710838 - RNA, 17 nt, Artificial Sequence
  Synthetic
gccaaaugaguagcagg

SEQ ID NO: 710839 - RNA, 17 nt, Artificial Sequence
  Synthetic
gguagagagguagcagg

SEQ ID NO: 710840 - RNA, 17 nt, Artificial Sequence
  Synthetic
ugggaggcugaggcagg

SEQ ID NO: 710841 - RNA, 17 nt, Artificial Sequence
  Synthetic
gaccugugugaggcagg

SEQ ID NO: 710842 - RNA, 17 nt, Artificial Sequence
  Synthetic
gaugucaauuaggcagg

SEQ ID NO: 710843 - RNA, 17 nt, Artificial Sequence
  Synthetic
guacugauagcggcagg

SEQ ID NO: 710844 - RNA, 17 nt, Artificial Sequence
  Synthetic
guggggcuuggggcagg

SEQ ID NO: 710845 - RNA, 17 nt, Artificial Sequence
  Synthetic
gggcaauuucuggcagg

SEQ ID NO: 710846 - RNA, 17 nt, Artificial Sequence
  Synthetic
guguagaaaacugcagg

SEQ ID NO: 710847 - RNA, 17 nt, Artificial Sequence
  Synthetic
gugccaccaccugcagg

SEQ ID NO: 710848 - RNA, 17 nt, Artificial Sequence
  Synthetic
gguggguggggugcagg

SEQ ID NO: 710849 - RNA, 17 nt, Artificial Sequence
  Synthetic
ggcauacacaaaucagg

SEQ ID NO: 710850 - RNA, 17 nt, Artificial Sequence
  Synthetic
gagaugucaccaucagg

SEQ ID NO: 710851 - RNA, 17 nt, Artificial Sequence
  Synthetic
ggagucuugguaucagg

SEQ ID NO: 710852 - RNA, 17 nt, Artificial Sequence
  Synthetic
ggucccagcuacucagg

SEQ ID NO: 710853 - RNA, 17 nt, Artificial Sequence
  Synthetic
gcuuuuucaaccucagg

SEQ ID NO: 710854 - RNA, 17 nt, Artificial Sequence
  Synthetic
ggucauaagcucucagg

SEQ ID NO: 710855 - RNA, 17 nt, Artificial Sequence
  Synthetic
gugggaaguuucucagg

SEQ ID NO: 710856 - RNA, 17 nt, Artificial Sequence
  Synthetic
ggugucucccagucagg

SEQ ID NO: 710857 - RNA, 17 nt, Artificial Sequence
  Synthetic
gagaucaaggugucagg

SEQ ID NO: 710858 - RNA, 17 nt, Artificial Sequence
  Synthetic
gaaauaaaguugucagg

SEQ ID NO: 710859 - RNA, 17 nt, Artificial Sequence
  Synthetic
ggcugaauaucuucagg

SEQ ID NO: 710860 - RNA, 17 nt, Artificial Sequence
  Synthetic
gauagauguucuucagg

SEQ ID NO: 710861 - RNA, 17 nt, Artificial Sequence
  Synthetic
gauaugaaguguucagg

SEQ ID NO: 710862 - RNA, 17 nt, Artificial Sequence
  Synthetic
gaggcucuguguucagg

SEQ ID NO: 710863 - RNA, 17 nt, Artificial Sequence
  Synthetic
ggcuagaacagaagagg

SEQ ID NO: 710864 - RNA, 17 nt, Artificial Sequence
  Synthetic
gcaguggggagaagagg

SEQ ID NO: 710865 - RNA, 17 nt, Artificial Sequence
  Synthetic
gaguguaguagaagagg

SEQ ID NO: 710866 - RNA, 17 nt, Artificial Sequence
  Synthetic
guagguuuccgaagagg

SEQ ID NO: 710867 - RNA, 17 nt, Artificial Sequence
  Synthetic
guauuuccauuaagagg

SEQ ID NO: 710868 - RNA, 17 nt, Artificial Sequence
  Synthetic
gugugacucagcagagg

SEQ ID NO: 710869 - RNA, 17 nt, Artificial Sequence
  Synthetic
gcaguagucuucagagg

SEQ ID NO: 710870 - RNA, 17 nt, Artificial Sequence
  Synthetic
ggaaccucaaagagagg

SEQ ID NO: 710871 - RNA, 17 nt, Artificial Sequence
  Synthetic
guagaacuacagagagg

SEQ ID NO: 710872 - RNA, 17 nt, Artificial Sequence
  Synthetic
ggagguggagggagagg

SEQ ID NO: 710873 - RNA, 17 nt, Artificial Sequence
  Synthetic
gacuuauuugggagagg

SEQ ID NO: 710874 - RNA, 17 nt, Artificial Sequence
  Synthetic
gaauucagggugagagg

SEQ ID NO: 710875 - RNA, 17 nt, Artificial Sequence
  Synthetic
guagaaacaaauagagg

SEQ ID NO: 710876 - RNA, 17 nt, Artificial Sequence
  Synthetic
gacaaccucuauagagg

SEQ ID NO: 710877 - RNA, 17 nt, Artificial Sequence
  Synthetic
gaggaauuuuauagagg

SEQ ID NO: 710878 - RNA, 17 nt, Artificial Sequence
  Synthetic
gcagagaggucuagagg

SEQ ID NO: 710879 - RNA, 17 nt, Artificial Sequence
  Synthetic
gaaagaguauguagagg

SEQ ID NO: 710880 - RNA, 17 nt, Artificial Sequence
  Synthetic
gguacugagauuagagg

SEQ ID NO: 710881 - RNA, 17 nt, Artificial Sequence
  Synthetic
gcaaggcuuuuuagagg

SEQ ID NO: 710882 - RNA, 17 nt, Artificial Sequence
  Synthetic
gacauauuccaacgagg

SEQ ID NO: 710883 - RNA, 17 nt, Artificial Sequence
  Synthetic
guugcagugagccgagg

SEQ ID NO: 710884 - RNA, 17 nt, Artificial Sequence
  Synthetic
gcuucaggaggccgagg

SEQ ID NO: 710885 - RNA, 17 nt, Artificial Sequence
  Synthetic
acuuugggaggccgagg

SEQ ID NO: 710886 - RNA, 17 nt, Artificial Sequence
  Synthetic
ggcacuccgaaaggagg

SEQ ID NO: 710887 - RNA, 17 nt, Artificial Sequence
  Synthetic
guagugagggaaggagg

SEQ ID NO: 710888 - RNA, 17 nt, Artificial Sequence
  Synthetic
guaaagacugaaggagg

SEQ ID NO: 710889 - RNA, 17 nt, Artificial Sequence
  Synthetic
gaggggugugaaggagg

SEQ ID NO: 710890 - RNA, 17 nt, Artificial Sequence
  Synthetic
gcugaucugacaggagg

SEQ ID NO: 710891 - RNA, 17 nt, Artificial Sequence
  Synthetic
ggcgugaacccaggagg

SEQ ID NO: 710892 - RNA, 17 nt, Artificial Sequence
  Synthetic
ggaaugcuuccaggagg

SEQ ID NO: 710893 - RNA, 17 nt, Artificial Sequence
  Synthetic
gagauguaggcaggagg

SEQ ID NO: 710894 - RNA, 17 nt, Artificial Sequence
  Synthetic
gggagggagagaggagg

SEQ ID NO: 710895 - RNA, 17 nt, Artificial Sequence
  Synthetic
gaaacaaauagaggagg

SEQ ID NO: 710896 - RNA, 17 nt, Artificial Sequence
  Synthetic
ggugugaacuuaggagg

SEQ ID NO: 710897 - RNA, 17 nt, Artificial Sequence
  Synthetic
gguuagaggaagggagg

SEQ ID NO: 710898 - RNA, 17 nt, Artificial Sequence
  Synthetic
ggagagagagagggagg

SEQ ID NO: 710899 - RNA, 17 nt, Artificial Sequence
  Synthetic
ggacuacuagagggagg

SEQ ID NO: 710900 - RNA, 17 nt, Artificial Sequence
  Synthetic
guugagaaguagggagg

SEQ ID NO: 710901 - RNA, 17 nt, Artificial Sequence
  Synthetic
ggcgugaacccgggagg

SEQ ID NO: 710902 - RNA, 17 nt, Artificial Sequence
  Synthetic
ggugugaacccgggagg

SEQ ID NO: 710903 - RNA, 17 nt, Artificial Sequence
  Synthetic
ugcuugaacccgggagg

SEQ ID NO: 710904 - RNA, 17 nt, Artificial Sequence
  Synthetic
ggcaugaauccgggagg

SEQ ID NO: 710905 - RNA, 17 nt, Artificial Sequence
  Synthetic
gguggggucgggggagg

SEQ ID NO: 710906 - RNA, 17 nt, Artificial Sequence
  Synthetic
ggugggguggggggagg

SEQ ID NO: 710907 - RNA, 17 nt, Artificial Sequence
  Synthetic
gaagggucguggggagg

SEQ ID NO: 710908 - RNA, 17 nt, Artificial Sequence
  Synthetic
ggcaugaaccugggagg

SEQ ID NO: 710909 - RNA, 17 nt, Artificial Sequence
  Synthetic
ggcgugaaccugggagg

SEQ ID NO: 710910 - RNA, 17 nt, Artificial Sequence
  Synthetic
guggggagggugggagg

SEQ ID NO: 710911 - RNA, 17 nt, Artificial Sequence
  Synthetic
gaagacuucucuggagg

SEQ ID NO: 710912 - RNA, 17 nt, Artificial Sequence
  Synthetic
gcaggaaugaguggagg

SEQ ID NO: 710913 - RNA, 17 nt, Artificial Sequence
  Synthetic
ggggguggagguggagg

SEQ ID NO: 710914 - RNA, 17 nt, Artificial Sequence
  Synthetic
gagggaguauguggagg

SEQ ID NO: 710915 - RNA, 17 nt, Artificial Sequence
  Synthetic
guggugguuauuggagg

SEQ ID NO: 710916 - RNA, 17 nt, Artificial Sequence
  Synthetic
guggcaauaguuggagg

SEQ ID NO: 710917 - RNA, 17 nt, Artificial Sequence
  Synthetic
gaaggugagguuggagg

SEQ ID NO: 710918 - RNA, 17 nt, Artificial Sequence
  Synthetic
gaucuuacauuuggagg

SEQ ID NO: 710919 - RNA, 17 nt, Artificial Sequence
  Synthetic
ggcccauaaaaaugagg

SEQ ID NO: 710920 - RNA, 17 nt, Artificial Sequence
  Synthetic
gggagaaggcaaugagg

SEQ ID NO: 710921 - RNA, 17 nt, Artificial Sequence
  Synthetic
gugggucuugaaugagg

SEQ ID NO: 710922 - RNA, 17 nt, Artificial Sequence
  Synthetic
gguaugcuccccugagg

SEQ ID NO: 710923 - RNA, 17 nt, Artificial Sequence
  Synthetic
gaggguauggccugagg

SEQ ID NO: 710924 - RNA, 17 nt, Artificial Sequence
  Synthetic
gcuuugggaagcugagg

SEQ ID NO: 710925 - RNA, 17 nt, Artificial Sequence
  Synthetic
uacucaggaggcugagg

SEQ ID NO: 710926 - RNA, 17 nt, Artificial Sequence
  Synthetic
gcuuugggaggcugagg

SEQ ID NO: 710927 - RNA, 17 nt, Artificial Sequence
  Synthetic
guuuugggaggcugagg

SEQ ID NO: 710928 - RNA, 17 nt, Artificial Sequence
  Synthetic
ggaacauaaaagugagg

SEQ ID NO: 710929 - RNA, 17 nt, Artificial Sequence
  Synthetic
guuuggcuuaagugagg

SEQ ID NO: 710930 - RNA, 17 nt, Artificial Sequence
  Synthetic
gagggcaacuagugagg

SEQ ID NO: 710931 - RNA, 17 nt, Artificial Sequence
  Synthetic
guugcggccgggugagg

SEQ ID NO: 710932 - RNA, 17 nt, Artificial Sequence
  Synthetic
guccagcaggggugagg

SEQ ID NO: 710933 - RNA, 17 nt, Artificial Sequence
  Synthetic
guuuaucccuggugagg

SEQ ID NO: 710934 - RNA, 17 nt, Artificial Sequence
  Synthetic
gggaguuaucugugagg

SEQ ID NO: 710935 - RNA, 17 nt, Artificial Sequence
  Synthetic
gaccauuugaauugagg

SEQ ID NO: 710936 - RNA, 17 nt, Artificial Sequence
  Synthetic
ggucgcuuggauugagg

SEQ ID NO: 710937 - RNA, 17 nt, Artificial Sequence
  Synthetic
ggcaagauauauugagg

SEQ ID NO: 710938 - RNA, 17 nt, Artificial Sequence
  Synthetic
gggcggaucacuugagg

SEQ ID NO: 710939 - RNA, 17 nt, Artificial Sequence
  Synthetic
ggcugcacugcuugagg

SEQ ID NO: 710940 - RNA, 17 nt, Artificial Sequence
  Synthetic
gcuacugaguuuugagg

SEQ ID NO: 710941 - RNA, 17 nt, Artificial Sequence
  Synthetic
gaaaaggaacaaauagg

SEQ ID NO: 710942 - RNA, 17 nt, Artificial Sequence
  Synthetic
gcuucuuaggcaauagg

SEQ ID NO: 710943 - RNA, 17 nt, Artificial Sequence
  Synthetic
gggucaggaagaauagg

SEQ ID NO: 710944 - RNA, 17 nt, Artificial Sequence
  Synthetic
gagauugaagacauagg

SEQ ID NO: 710945 - RNA, 17 nt, Artificial Sequence
  Synthetic
gaaucucagaauauagg

SEQ ID NO: 710946 - RNA, 17 nt, Artificial Sequence
  Synthetic
gagaaggagaauauagg

SEQ ID NO: 710947 - RNA, 17 nt, Artificial Sequence
  Synthetic
guuaaaagcgauauagg

SEQ ID NO: 710948 - RNA, 17 nt, Artificial Sequence
  Synthetic
guuuuaaaguauauagg

SEQ ID NO: 710949 - RNA, 17 nt, Artificial Sequence
  Synthetic
ggaaagauuauuauagg

SEQ ID NO: 710950 - RNA, 17 nt, Artificial Sequence
  Synthetic
gucacagaaguuauagg

SEQ ID NO: 710951 - RNA, 17 nt, Artificial Sequence
  Synthetic
ggcugguauauacuagg

SEQ ID NO: 710952 - RNA, 17 nt, Artificial Sequence
  Synthetic
ggaugcuaucaccuagg

SEQ ID NO: 710953 - RNA, 17 nt, Artificial Sequence
  Synthetic
gcugugauuucccuagg

SEQ ID NO: 710954 - RNA, 17 nt, Artificial Sequence
  Synthetic
gucagaacaauccuagg

SEQ ID NO: 710955 - RNA, 17 nt, Artificial Sequence
  Synthetic
ggcauggcuucucuagg

SEQ ID NO: 710956 - RNA, 17 nt, Artificial Sequence
  Synthetic
gagguuuagggucuagg

SEQ ID NO: 710957 - RNA, 17 nt, Artificial Sequence
  Synthetic
ggaugaagucuucuagg

SEQ ID NO: 710958 - RNA, 17 nt, Artificial Sequence
  Synthetic
gagaacaagaaaguagg

SEQ ID NO: 710959 - RNA, 17 nt, Artificial Sequence
  Synthetic
gagaauuauccaguagg

SEQ ID NO: 710960 - RNA, 17 nt, Artificial Sequence
  Synthetic
gcucacaauugaguagg

SEQ ID NO: 710961 - RNA, 17 nt, Artificial Sequence
  Synthetic
gguuaaaauguaguagg

SEQ ID NO: 710962 - RNA, 17 nt, Artificial Sequence
  Synthetic
gaaggagacaagguagg

SEQ ID NO: 710963 - RNA, 17 nt, Artificial Sequence
  Synthetic
guaggguggaggguagg

SEQ ID NO: 710964 - RNA, 17 nt, Artificial Sequence
  Synthetic
gguggggguaggguagg

SEQ ID NO: 710965 - RNA, 17 nt, Artificial Sequence
  Synthetic
guguugcuggggguagg

SEQ ID NO: 710966 - RNA, 17 nt, Artificial Sequence
  Synthetic
ggaaguaacaugguagg

SEQ ID NO: 710967 - RNA, 17 nt, Artificial Sequence
  Synthetic
ggaaggguagugguagg

SEQ ID NO: 710968 - RNA, 17 nt, Artificial Sequence
  Synthetic
gcugggaagaguguagg

SEQ ID NO: 710969 - RNA, 17 nt, Artificial Sequence
  Synthetic
guaguuucccuuguagg

SEQ ID NO: 710970 - RNA, 17 nt, Artificial Sequence
  Synthetic
guuaccaugaaauuagg

SEQ ID NO: 710971 - RNA, 17 nt, Artificial Sequence
  Synthetic
gaauaccaagaauuagg

SEQ ID NO: 710972 - RNA, 17 nt, Artificial Sequence
  Synthetic
guggaaauaugauuagg

SEQ ID NO: 710973 - RNA, 17 nt, Artificial Sequence
  Synthetic
ggcaggacgcacuuagg

SEQ ID NO: 710974 - RNA, 17 nt, Artificial Sequence
  Synthetic
guugucuggcacuuagg

SEQ ID NO: 710975 - RNA, 17 nt, Artificial Sequence
  Synthetic
gaucccagcuacuuagg

SEQ ID NO: 710976 - RNA, 17 nt, Artificial Sequence
  Synthetic
gucauaagggccuuagg

SEQ ID NO: 710977 - RNA, 17 nt, Artificial Sequence
  Synthetic
gaaggaucauccuuagg

SEQ ID NO: 710978 - RNA, 17 nt, Artificial Sequence
  Synthetic
gagauaaacuccuuagg

SEQ ID NO: 710979 - RNA, 17 nt, Artificial Sequence
  Synthetic
gagaugaaacaguuagg

SEQ ID NO: 710980 - RNA, 17 nt, Artificial Sequence
  Synthetic
ggguuggaacaguuagg

SEQ ID NO: 710981 - RNA, 17 nt, Artificial Sequence
  Synthetic
gcuggccugugguuagg

SEQ ID NO: 710982 - RNA, 17 nt, Artificial Sequence
  Synthetic
gacucuaagaauuuagg

SEQ ID NO: 710983 - RNA, 17 nt, Artificial Sequence
  Synthetic
ggaaacagcgauuuagg

SEQ ID NO: 710984 - RNA, 17 nt, Artificial Sequence
  Synthetic
ggggugggagcuuuagg

SEQ ID NO: 710985 - RNA, 17 nt, Artificial Sequence
  Synthetic
gugacucuguguuuagg

SEQ ID NO: 710986 - RNA, 17 nt, Artificial Sequence
  Synthetic
gaauaagauguuuuagg

SEQ ID NO: 710987 - RNA, 17 nt, Artificial Sequence
  Synthetic
gccacauggagaaacgg

SEQ ID NO: 710988 - RNA, 17 nt, Artificial Sequence
  Synthetic
ggcaacaauagaaacgg

SEQ ID NO: 710989 - RNA, 17 nt, Artificial Sequence
  Synthetic
guauacauuugccacgg

SEQ ID NO: 710990 - RNA, 17 nt, Artificial Sequence
  Synthetic
ggagaggccaggcacgg

SEQ ID NO: 710991 - RNA, 17 nt, Artificial Sequence
  Synthetic
gcuugggccaggcacgg

SEQ ID NO: 710992 - RNA, 17 nt, Artificial Sequence
  Synthetic
guugaggcugggcacgg

SEQ ID NO: 710993 - RNA, 17 nt, Artificial Sequence
  Synthetic
gaauuggcugggcacgg

SEQ ID NO: 710994 - RNA, 17 nt, Artificial Sequence
  Synthetic
guggggugaggggacgg

SEQ ID NO: 710995 - RNA, 17 nt, Artificial Sequence
  Synthetic
gguuacugaggugacgg

SEQ ID NO: 710996 - RNA, 17 nt, Artificial Sequence
  Synthetic
gaccacgaacccaccgg

SEQ ID NO: 710997 - RNA, 17 nt, Artificial Sequence
  Synthetic
guggugguaugcaccgg

SEQ ID NO: 710998 - RNA, 17 nt, Artificial Sequence
  Synthetic
gaguugguucccgccgg

SEQ ID NO: 710999 - RNA, 17 nt, Artificial Sequence
  Synthetic
gagagagagagaagcgg

SEQ ID NO: 711000 - RNA, 17 nt, Artificial Sequence
  Synthetic
gcuggagcagggagcgg

SEQ ID NO: 711001 - RNA, 17 nt, Artificial Sequence
  Synthetic
gugaaaaggaugagcgg

SEQ ID NO: 711002 - RNA, 17 nt, Artificial Sequence
  Synthetic
gcauaguuccauagcgg

SEQ ID NO: 711003 - RNA, 17 nt, Artificial Sequence
  Synthetic
guacaggccgggcgcgg

SEQ ID NO: 711004 - RNA, 17 nt, Artificial Sequence
  Synthetic
ggugaggccgggcgcgg

SEQ ID NO: 711005 - RNA, 17 nt, Artificial Sequence
  Synthetic
gagcuggccgggcgcgg

SEQ ID NO: 711006 - RNA, 17 nt, Artificial Sequence
  Synthetic
gcuuuggcugggcgcgg

SEQ ID NO: 711007 - RNA, 17 nt, Artificial Sequence
  Synthetic
ggguggagguugggcgg

SEQ ID NO: 711008 - RNA, 17 nt, Artificial Sequence
  Synthetic
gagauggccaggugcgg

SEQ ID NO: 711009 - RNA, 17 nt, Artificial Sequence
  Synthetic
guuguagaauuacucgg

SEQ ID NO: 711010 - RNA, 17 nt, Artificial Sequence
  Synthetic
gacugugguggggucgg

SEQ ID NO: 711011 - RNA, 17 nt, Artificial Sequence
  Synthetic
gccuguuguggggucgg

SEQ ID NO: 711012 - RNA, 17 nt, Artificial Sequence
  Synthetic
gaaaacaacuaugucgg

SEQ ID NO: 711013 - RNA, 17 nt, Artificial Sequence
  Synthetic
guaaaacuuugguucgg

SEQ ID NO: 711014 - RNA, 17 nt, Artificial Sequence
  Synthetic
guguuuucuuuguucgg

SEQ ID NO: 711015 - RNA, 17 nt, Artificial Sequence
  Synthetic
gaaaagaaagcuuucgg

SEQ ID NO: 711016 - RNA, 17 nt, Artificial Sequence
  Synthetic
ggagaauaugaaaaggg

SEQ ID NO: 711017 - RNA, 17 nt, Artificial Sequence
  Synthetic
gcaaggcaauaaaaggg

SEQ ID NO: 711018 - RNA, 17 nt, Artificial Sequence
  Synthetic
guggcaaccucaaaggg

SEQ ID NO: 711019 - RNA, 17 nt, Artificial Sequence
  Synthetic
gcugaguauagaaaggg

SEQ ID NO: 711020 - RNA, 17 nt, Artificial Sequence
  Synthetic
gugguagggggaaaggg

SEQ ID NO: 711021 - RNA, 17 nt, Artificial Sequence
  Synthetic
gugugacaauuaaaggg

SEQ ID NO: 711022 - RNA, 17 nt, Artificial Sequence
  Synthetic
gucaaugccaccaaggg

SEQ ID NO: 711023 - RNA, 17 nt, Artificial Sequence
  Synthetic
gugaugacuuccaaggg

SEQ ID NO: 711024 - RNA, 17 nt, Artificial Sequence
  Synthetic
gaggaagaaaagaaggg

SEQ ID NO: 711025 - RNA, 17 nt, Artificial Sequence
  Synthetic
gagagaacaaagaaggg

SEQ ID NO: 711026 - RNA, 17 nt, Artificial Sequence
  Synthetic
ggaggaggaaggaaggg

SEQ ID NO: 711027 - RNA, 17 nt, Artificial Sequence
  Synthetic
gagaucaccaggaaggg

SEQ ID NO: 711028 - RNA, 17 nt, Artificial Sequence
  Synthetic
guggggugggggaaggg

SEQ ID NO: 711029 - RNA, 17 nt, Artificial Sequence
  Synthetic
gccuggggauggaaggg

SEQ ID NO: 711030 - RNA, 17 nt, Artificial Sequence
  Synthetic
guauguagguggaaggg

SEQ ID NO: 711031 - RNA, 17 nt, Artificial Sequence
  Synthetic
guauucugagcuaaggg

SEQ ID NO: 711032 - RNA, 17 nt, Artificial Sequence
  Synthetic
guggaugggauuaaggg

SEQ ID NO: 711033 - RNA, 17 nt, Artificial Sequence
  Synthetic
ggccaucucaaacaggg

SEQ ID NO: 711034 - RNA, 17 nt, Artificial Sequence
  Synthetic
ggaaaauucaaacaggg

SEQ ID NO: 711035 - RNA, 17 nt, Artificial Sequence
  Synthetic
ggcuggaggacacaggg

SEQ ID NO: 711036 - RNA, 17 nt, Artificial Sequence
  Synthetic
ggcaccucuucacaggg

SEQ ID NO: 711037 - RNA, 17 nt, Artificial Sequence
  Synthetic
guugccagggaccaggg

SEQ ID NO: 711038 - RNA, 17 nt, Artificial Sequence
  Synthetic
ggcauaaaagcccaggg

SEQ ID NO: 711039 - RNA, 17 nt, Artificial Sequence
  Synthetic
gaaggcaauuuccaggg

SEQ ID NO: 711040 - RNA, 17 nt, Artificial Sequence
  Synthetic
ggugauaaaaagcaggg

SEQ ID NO: 711041 - RNA, 17 nt, Artificial Sequence
  Synthetic
ggcugcacauagcaggg

SEQ ID NO: 711042 - RNA, 17 nt, Artificial Sequence
  Synthetic
ggauguacauggcaggg

SEQ ID NO: 711043 - RNA, 17 nt, Artificial Sequence
  Synthetic
ggguggugcacucaggg

SEQ ID NO: 711044 - RNA, 17 nt, Artificial Sequence
  Synthetic
ggagcgaugugucaggg

SEQ ID NO: 711045 - RNA, 17 nt, Artificial Sequence
  Synthetic
gaauauggauuucaggg

SEQ ID NO: 711046 - RNA, 17 nt, Artificial Sequence
  Synthetic
gaugagcccccagaggg

SEQ ID NO: 711047 - RNA, 17 nt, Artificial Sequence
  Synthetic
gauuggggggcagaggg

SEQ ID NO: 711048 - RNA, 17 nt, Artificial Sequence
  Synthetic
gcaacuguggcagaggg

SEQ ID NO: 711049 - RNA, 17 nt, Artificial Sequence
  Synthetic
gagagagagagagaggg

SEQ ID NO: 711050 - RNA, 17 nt, Artificial Sequence
  Synthetic
gugugaaggagagaggg

SEQ ID NO: 711051 - RNA, 17 nt, Artificial Sequence
  Synthetic
gaggaagggagagaggg

SEQ ID NO: 711052 - RNA, 17 nt, Artificial Sequence
  Synthetic
ggagagaguggagaggg

SEQ ID NO: 711053 - RNA, 17 nt, Artificial Sequence
  Synthetic
gacacagaaaaggaggg

SEQ ID NO: 711054 - RNA, 17 nt, Artificial Sequence
  Synthetic
gagaaccagaaggaggg

SEQ ID NO: 711055 - RNA, 17 nt, Artificial Sequence
  Synthetic
gagugagggaaggaggg

SEQ ID NO: 711056 - RNA, 17 nt, Artificial Sequence
  Synthetic
ggcauuacuacggaggg

SEQ ID NO: 711057 - RNA, 17 nt, Artificial Sequence
  Synthetic
ggggaagaagcggaggg

SEQ ID NO: 711058 - RNA, 17 nt, Artificial Sequence
  Synthetic
gcaauuuccagggaggg

SEQ ID NO: 711059 - RNA, 17 nt, Artificial Sequence
  Synthetic
ggaggaaggagggaggg

SEQ ID NO: 711060 - RNA, 17 nt, Artificial Sequence
  Synthetic
gggaaagggagggaggg

SEQ ID NO: 711061 - RNA, 17 nt, Artificial Sequence
  Synthetic
gaaggagggagggaggg

SEQ ID NO: 711062 - RNA, 17 nt, Artificial Sequence
  Synthetic
gagggagggagggaggg

SEQ ID NO: 711063 - RNA, 17 nt, Artificial Sequence
  Synthetic
guggggucgggggaggg

SEQ ID NO: 711064 - RNA, 17 nt, Artificial Sequence
  Synthetic
gugggguggggggaggg

SEQ ID NO: 711065 - RNA, 17 nt, Artificial Sequence
  Synthetic
gagaaagugggggaggg

SEQ ID NO: 711066 - RNA, 17 nt, Artificial Sequence
  Synthetic
gaguacggcugggaggg

SEQ ID NO: 711067 - RNA, 17 nt, Artificial Sequence
  Synthetic
guugccacccuggaggg

SEQ ID NO: 711068 - RNA, 17 nt, Artificial Sequence
  Synthetic
gguuugagaguggaggg

SEQ ID NO: 711069 - RNA, 17 nt, Artificial Sequence
  Synthetic
gugugugagguggaggg

SEQ ID NO: 711070 - RNA, 17 nt, Artificial Sequence
  Synthetic
gcuuuuuggcuugaggg

SEQ ID NO: 711071 - RNA, 17 nt, Artificial Sequence
  Synthetic
guguaagaaguugaggg

SEQ ID NO: 711072 - RNA, 17 nt, Artificial Sequence
  Synthetic
ggucaggaagaauaggg

SEQ ID NO: 711073 - RNA, 17 nt, Artificial Sequence
  Synthetic
gauuuuuuuagauaggg

SEQ ID NO: 711074 - RNA, 17 nt, Artificial Sequence
  Synthetic
gacauucacauauaggg

SEQ ID NO: 711075 - RNA, 17 nt, Artificial Sequence
  Synthetic
ggugguucagacuaggg

SEQ ID NO: 711076 - RNA, 17 nt, Artificial Sequence
  Synthetic
gagcuagaggacuaggg

SEQ ID NO: 711077 - RNA, 17 nt, Artificial Sequence
  Synthetic
gucucacaugacuaggg

SEQ ID NO: 711078 - RNA, 17 nt, Artificial Sequence
  Synthetic
guaacaaaugccuaggg

SEQ ID NO: 711079 - RNA, 17 nt, Artificial Sequence
  Synthetic
gcgcgcgugcgcuaggg

SEQ ID NO: 711080 - RNA, 17 nt, Artificial Sequence
  Synthetic
gagauugcauuguaggg

SEQ ID NO: 711081 - RNA, 17 nt, Artificial Sequence
  Synthetic
gauaaauauuuguaggg

SEQ ID NO: 711082 - RNA, 17 nt, Artificial Sequence
  Synthetic
gcaucuugaaauuaggg

SEQ ID NO: 711083 - RNA, 17 nt, Artificial Sequence
  Synthetic
gucauaaagaauuaggg

SEQ ID NO: 711084 - RNA, 17 nt, Artificial Sequence
  Synthetic
gaaagauaacauuaggg

SEQ ID NO: 711085 - RNA, 17 nt, Artificial Sequence
  Synthetic
gaauggggcgauuaggg

SEQ ID NO: 711086 - RNA, 17 nt, Artificial Sequence
  Synthetic
gauuauuauaguuaggg

SEQ ID NO: 711087 - RNA, 17 nt, Artificial Sequence
  Synthetic
guguaaguaaacccggg

SEQ ID NO: 711088 - RNA, 17 nt, Artificial Sequence
  Synthetic
gauagcuugaacccggg

SEQ ID NO: 711089 - RNA, 17 nt, Artificial Sequence
  Synthetic
gauggcaugaauccggg

SEQ ID NO: 711090 - RNA, 17 nt, Artificial Sequence
  Synthetic
ggggaggccgaggcggg

SEQ ID NO: 711091 - RNA, 17 nt, Artificial Sequence
  Synthetic
gaaagacuucacucggg

SEQ ID NO: 711092 - RNA, 17 nt, Artificial Sequence
  Synthetic
ggucccagcuacucggg

SEQ ID NO: 711093 - RNA, 17 nt, Artificial Sequence
  Synthetic
gguaccagcugcucggg

SEQ ID NO: 711094 - RNA, 17 nt, Artificial Sequence
  Synthetic
gcaguggugccaagggg

SEQ ID NO: 711095 - RNA, 17 nt, Artificial Sequence
  Synthetic
ggguggggggcaagggg

SEQ ID NO: 711096 - RNA, 17 nt, Artificial Sequence
  Synthetic
ggagggaagggaagggg

SEQ ID NO: 711097 - RNA, 17 nt, Artificial Sequence
  Synthetic
gugacaguauuaagggg

SEQ ID NO: 711098 - RNA, 17 nt, Artificial Sequence
  Synthetic
gggaguacaggcagggg

SEQ ID NO: 711099 - RNA, 17 nt, Artificial Sequence
  Synthetic
ggagagauaggcagggg

SEQ ID NO: 711100 - RNA, 17 nt, Artificial Sequence
  Synthetic
guguuauuaaagagggg

SEQ ID NO: 711101 - RNA, 17 nt, Artificial Sequence
  Synthetic
gaagggaaggagagggg

SEQ ID NO: 711102 - RNA, 17 nt, Artificial Sequence
  Synthetic
ggggguggggcgagggg

SEQ ID NO: 711103 - RNA, 17 nt, Artificial Sequence
  Synthetic
gaagggaaggggagggg

SEQ ID NO: 711104 - RNA, 17 nt, Artificial Sequence
  Synthetic
gaaggggaggggagggg

SEQ ID NO: 711105 - RNA, 17 nt, Artificial Sequence
  Synthetic
ggaggggaggggagggg

SEQ ID NO: 711106 - RNA, 17 nt, Artificial Sequence
  Synthetic
gcccaagggaugagggg

SEQ ID NO: 711107 - RNA, 17 nt, Artificial Sequence
  Synthetic
gaaauggcuuugagggg

SEQ ID NO: 711108 - RNA, 17 nt, Artificial Sequence
  Synthetic
guagccugaaauagggg

SEQ ID NO: 711109 - RNA, 17 nt, Artificial Sequence
  Synthetic
ggguggggggcuagggg

SEQ ID NO: 711110 - RNA, 17 nt, Artificial Sequence
  Synthetic
gggugggagguuagggg

SEQ ID NO: 711111 - RNA, 17 nt, Artificial Sequence
  Synthetic
ggaugggggguuagggg

SEQ ID NO: 711112 - RNA, 17 nt, Artificial Sequence
  Synthetic
ggcuguggauuuagggg

SEQ ID NO: 711113 - RNA, 17 nt, Artificial Sequence
  Synthetic
ggaauuuuauuuagggg

SEQ ID NO: 711114 - RNA, 17 nt, Artificial Sequence
  Synthetic
gcucucaguuuuagggg

SEQ ID NO: 711115 - RNA, 17 nt, Artificial Sequence
  Synthetic
guuuugggaggccgggg

SEQ ID NO: 711116 - RNA, 17 nt, Artificial Sequence
  Synthetic
ggacuacuagaaggggg

SEQ ID NO: 711117 - RNA, 17 nt, Artificial Sequence
  Synthetic
ggguggggggaaggggg

SEQ ID NO: 711118 - RNA, 17 nt, Artificial Sequence
  Synthetic
gaggggugugaaggggg

SEQ ID NO: 711119 - RNA, 17 nt, Artificial Sequence
  Synthetic
gagcagaagccaggggg

SEQ ID NO: 711120 - RNA, 17 nt, Artificial Sequence
  Synthetic
gcucuguguucaggggg

SEQ ID NO: 711121 - RNA, 17 nt, Artificial Sequence
  Synthetic
gagugagacagaggggg

SEQ ID NO: 711122 - RNA, 17 nt, Artificial Sequence
  Synthetic
gggugaggggacggggg

SEQ ID NO: 711123 - RNA, 17 nt, Artificial Sequence
  Synthetic
gguugggguggcggggg

SEQ ID NO: 711124 - RNA, 17 nt, Artificial Sequence
  Synthetic
gacaucuuuggcggggg

SEQ ID NO: 711125 - RNA, 17 nt, Artificial Sequence
  Synthetic
gggugggggaagggggg

SEQ ID NO: 711126 - RNA, 17 nt, Artificial Sequence
  Synthetic
gggucgggggagggggg

SEQ ID NO: 711127 - RNA, 17 nt, Artificial Sequence
  Synthetic
ggguggggggagggggg

SEQ ID NO: 711128 - RNA, 17 nt, Artificial Sequence
  Synthetic
gguggggggaggggggg

SEQ ID NO: 711129 - RNA, 17 nt, Artificial Sequence
  Synthetic
guguguguugggggggg

SEQ ID NO: 711130 - RNA, 17 nt, Artificial Sequence
  Synthetic
guucucaaaaugggggg

SEQ ID NO: 711131 - RNA, 17 nt, Artificial Sequence
  Synthetic
guguucaaggugggggg

SEQ ID NO: 711132 - RNA, 17 nt, Artificial Sequence
  Synthetic
ggggguugugugggggg

SEQ ID NO: 711133 - RNA, 17 nt, Artificial Sequence
  Synthetic
guggugggguugggggg

SEQ ID NO: 711134 - RNA, 17 nt, Artificial Sequence
  Synthetic
guguguguguugggggg

SEQ ID NO: 711135 - RNA, 17 nt, Artificial Sequence
  Synthetic
gccuccuuguugggggg

SEQ ID NO: 711136 - RNA, 17 nt, Artificial Sequence
  Synthetic
guugucacacauggggg

SEQ ID NO: 711137 - RNA, 17 nt, Artificial Sequence
  Synthetic
guguggggucauggggg

SEQ ID NO: 711138 - RNA, 17 nt, Artificial Sequence
  Synthetic
gacauuuuuucuggggg

SEQ ID NO: 711139 - RNA, 17 nt, Artificial Sequence
  Synthetic
gugagagaaaguggggg

SEQ ID NO: 711140 - RNA, 17 nt, Artificial Sequence
  Synthetic
ggaggccgagguggggg

SEQ ID NO: 711141 - RNA, 17 nt, Artificial Sequence
  Synthetic
guguguguguguggggg

SEQ ID NO: 711142 - RNA, 17 nt, Artificial Sequence
  Synthetic
gguugucacauuggggg

SEQ ID NO: 711143 - RNA, 17 nt, Artificial Sequence
  Synthetic
ggccuccuuguuggggg

SEQ ID NO: 711144 - RNA, 17 nt, Artificial Sequence
  Synthetic
gaagauuagagaugggg

SEQ ID NO: 711145 - RNA, 17 nt, Artificial Sequence
  Synthetic
gaacucucuggaugggg

SEQ ID NO: 711146 - RNA, 17 nt, Artificial Sequence
  Synthetic
ggacauauucuaugggg

SEQ ID NO: 711147 - RNA, 17 nt, Artificial Sequence
  Synthetic
gauaaguaaguaugggg

SEQ ID NO: 711148 - RNA, 17 nt, Artificial Sequence
  Synthetic
gacuguuuaaacugggg

SEQ ID NO: 711149 - RNA, 17 nt, Artificial Sequence
  Synthetic
gagugaaaacacugggg

SEQ ID NO: 711150 - RNA, 17 nt, Artificial Sequence
  Synthetic
gauaguccucacugggg

SEQ ID NO: 711151 - RNA, 17 nt, Artificial Sequence
  Synthetic
guuccacaugacugggg

SEQ ID NO: 711152 - RNA, 17 nt, Artificial Sequence
  Synthetic
guuccacacagcugggg

SEQ ID NO: 711153 - RNA, 17 nt, Artificial Sequence
  Synthetic
gcauuuaguagcugggg

SEQ ID NO: 711154 - RNA, 17 nt, Artificial Sequence
  Synthetic
guuuccaggggcugggg

SEQ ID NO: 711155 - RNA, 17 nt, Artificial Sequence
  Synthetic
gggguggggggcugggg

SEQ ID NO: 711156 - RNA, 17 nt, Artificial Sequence
  Synthetic
guuccacauggcugggg

SEQ ID NO: 711157 - RNA, 17 nt, Artificial Sequence
  Synthetic
guucagcauggcugggg

SEQ ID NO: 711158 - RNA, 17 nt, Artificial Sequence
  Synthetic
gguuugcauggcugggg

SEQ ID NO: 711159 - RNA, 17 nt, Artificial Sequence
  Synthetic
guucaauauggcugggg

SEQ ID NO: 711160 - RNA, 17 nt, Artificial Sequence
  Synthetic
guucuguguggcugggg

SEQ ID NO: 711161 - RNA, 17 nt, Artificial Sequence
  Synthetic
gguuauuuggucugggg

SEQ ID NO: 711162 - RNA, 17 nt, Artificial Sequence
  Synthetic
ggacuacuagagugggg

SEQ ID NO: 711163 - RNA, 17 nt, Artificial Sequence
  Synthetic
gcaguuaaguugugggg

SEQ ID NO: 711164 - RNA, 17 nt, Artificial Sequence
  Synthetic
gcuugugcuuugugggg

SEQ ID NO: 711165 - RNA, 17 nt, Artificial Sequence
  Synthetic
ggguaucaggauugggg

SEQ ID NO: 711166 - RNA, 17 nt, Artificial Sequence
  Synthetic
gugagguaugguugggg

SEQ ID NO: 711167 - RNA, 17 nt, Artificial Sequence
  Synthetic
gacauuccugguugggg

SEQ ID NO: 711168 - RNA, 17 nt, Artificial Sequence
  Synthetic
gcuacauauuuuugggg

SEQ ID NO: 711169 - RNA, 17 nt, Artificial Sequence
  Synthetic
gggcagcacaaaauggg

SEQ ID NO: 711170 - RNA, 17 nt, Artificial Sequence
  Synthetic
gugugggagaaaauggg

SEQ ID NO: 711171 - RNA, 17 nt, Artificial Sequence
  Synthetic
gcagacagagaaauggg

SEQ ID NO: 711172 - RNA, 17 nt, Artificial Sequence
  Synthetic
ggagguaagagaauggg

SEQ ID NO: 711173 - RNA, 17 nt, Artificial Sequence
  Synthetic
guaaauaagauaauggg

SEQ ID NO: 711174 - RNA, 17 nt, Artificial Sequence
  Synthetic
gauucauaaaccauggg

SEQ ID NO: 711175 - RNA, 17 nt, Artificial Sequence
  Synthetic
gguaacugaaucauggg

SEQ ID NO: 711176 - RNA, 17 nt, Artificial Sequence
  Synthetic
gauuuuuuaaagauggg

SEQ ID NO: 711177 - RNA, 17 nt, Artificial Sequence
  Synthetic
gccucucaggggauggg

SEQ ID NO: 711178 - RNA, 17 nt, Artificial Sequence
  Synthetic
guguagaaauggauggg

SEQ ID NO: 711179 - RNA, 17 nt, Artificial Sequence
  Synthetic
gcuuuaaagccuauggg

SEQ ID NO: 711180 - RNA, 17 nt, Artificial Sequence
  Synthetic
ggaagggauaguauggg

SEQ ID NO: 711181 - RNA, 17 nt, Artificial Sequence
  Synthetic
guaaucccaacacuggg

SEQ ID NO: 711182 - RNA, 17 nt, Artificial Sequence
  Synthetic
gguaaacacccacuggg

SEQ ID NO: 711183 - RNA, 17 nt, Artificial Sequence
  Synthetic
gauuccacagcccuggg

SEQ ID NO: 711184 - RNA, 17 nt, Artificial Sequence
  Synthetic
gauugcuugagccuggg

SEQ ID NO: 711185 - RNA, 17 nt, Artificial Sequence
  Synthetic
gaaacauagcugcuggg

SEQ ID NO: 711186 - RNA, 17 nt, Artificial Sequence
  Synthetic
gaaugucaaaaucuggg

SEQ ID NO: 711187 - RNA, 17 nt, Artificial Sequence
  Synthetic
gacuccaacuuucuggg

SEQ ID NO: 711188 - RNA, 17 nt, Artificial Sequence
  Synthetic
gggagggacccaguggg

SEQ ID NO: 711189 - RNA, 17 nt, Artificial Sequence
  Synthetic
gggagggauccaguggg

SEQ ID NO: 711190 - RNA, 17 nt, Artificial Sequence
  Synthetic
gccaaaggucacguggg

SEQ ID NO: 711191 - RNA, 17 nt, Artificial Sequence
  Synthetic
ggggagaggugcguggg

SEQ ID NO: 711192 - RNA, 17 nt, Artificial Sequence
  Synthetic
gggaaggaccucguggg

SEQ ID NO: 711193 - RNA, 17 nt, Artificial Sequence
  Synthetic
guaaaacccaagguggg

SEQ ID NO: 711194 - RNA, 17 nt, Artificial Sequence
  Synthetic
ugggaggccaagguggg

SEQ ID NO: 711195 - RNA, 17 nt, Artificial Sequence
  Synthetic
gcuguguucaagguggg

SEQ ID NO: 711196 - RNA, 17 nt, Artificial Sequence
  Synthetic
gcuauuugagagguggg

SEQ ID NO: 711197 - RNA, 17 nt, Artificial Sequence
  Synthetic
gccugucgcgagguggg

SEQ ID NO: 711198 - RNA, 17 nt, Artificial Sequence
  Synthetic
ggaagaguguagguggg

SEQ ID NO: 711199 - RNA, 17 nt, Artificial Sequence
  Synthetic
ggaguggggaggguggg

SEQ ID NO: 711200 - RNA, 17 nt, Artificial Sequence
  Synthetic
gccuguuggcggguggg

SEQ ID NO: 711201 - RNA, 17 nt, Artificial Sequence
  Synthetic
gccugucgagggguggg

SEQ ID NO: 711202 - RNA, 17 nt, Artificial Sequence
  Synthetic
gcaaaaaacgggguggg

SEQ ID NO: 711203 - RNA, 17 nt, Artificial Sequence
  Synthetic
gccugucaggggguggg

SEQ ID NO: 711204 - RNA, 17 nt, Artificial Sequence
  Synthetic
gggguggcggggguggg

SEQ ID NO: 711205 - RNA, 17 nt, Artificial Sequence
  Synthetic
guugugugggggguggg

SEQ ID NO: 711206 - RNA, 17 nt, Artificial Sequence
  Synthetic
gccgagguggggguggg

SEQ ID NO: 711207 - RNA, 17 nt, Artificial Sequence
  Synthetic
gccugucgugggguggg

SEQ ID NO: 711208 - RNA, 17 nt, Artificial Sequence
  Synthetic
gacuguggugggguggg

SEQ ID NO: 711209 - RNA, 17 nt, Artificial Sequence
  Synthetic
gacugcugugggguggg

SEQ ID NO: 711210 - RNA, 17 nt, Artificial Sequence
  Synthetic
gccugcugugggguggg

SEQ ID NO: 711211 - RNA, 17 nt, Artificial Sequence
  Synthetic
gacuguugugggguggg

SEQ ID NO: 711212 - RNA, 17 nt, Artificial Sequence
  Synthetic
gccuguugugggguggg

SEQ ID NO: 711213 - RNA, 17 nt, Artificial Sequence
  Synthetic
gggagugaccugguggg

SEQ ID NO: 711214 - RNA, 17 nt, Artificial Sequence
  Synthetic
gauuggggguugguggg

SEQ ID NO: 711215 - RNA, 17 nt, Artificial Sequence
  Synthetic
gaaacauaaaauguggg

SEQ ID NO: 711216 - RNA, 17 nt, Artificial Sequence
  Synthetic
gggagggaccauguggg

SEQ ID NO: 711217 - RNA, 17 nt, Artificial Sequence
  Synthetic
guuuucucaucuguggg

SEQ ID NO: 711218 - RNA, 17 nt, Artificial Sequence
  Synthetic
guaguugaguguguggg

SEQ ID NO: 711219 - RNA, 17 nt, Artificial Sequence
  Synthetic
guguguguguguguggg

SEQ ID NO: 711220 - RNA, 17 nt, Artificial Sequence
  Synthetic
guucucccuuguguggg

SEQ ID NO: 711221 - RNA, 17 nt, Artificial Sequence
  Synthetic
guuggggguuguguggg

SEQ ID NO: 711222 - RNA, 17 nt, Artificial Sequence
  Synthetic
gucccuuaccuuguggg

SEQ ID NO: 711223 - RNA, 17 nt, Artificial Sequence
  Synthetic
ggaagguuuguuguggg

SEQ ID NO: 711224 - RNA, 17 nt, Artificial Sequence
  Synthetic
gucauauguuuuguggg

SEQ ID NO: 711225 - RNA, 17 nt, Artificial Sequence
  Synthetic
gacuuguuuagauuggg

SEQ ID NO: 711226 - RNA, 17 nt, Artificial Sequence
  Synthetic
guccuggcuaacuuggg

SEQ ID NO: 711227 - RNA, 17 nt, Artificial Sequence
  Synthetic
gucugcugacacuuggg

SEQ ID NO: 711228 - RNA, 17 nt, Artificial Sequence
  Synthetic
ggcuuuggagacuuggg

SEQ ID NO: 711229 - RNA, 17 nt, Artificial Sequence
  Synthetic
gauuuuaaugccuuggg

SEQ ID NO: 711230 - RNA, 17 nt, Artificial Sequence
  Synthetic
ggugagccauccuuggg

SEQ ID NO: 711231 - RNA, 17 nt, Artificial Sequence
  Synthetic
guuaacagaggcuuggg

SEQ ID NO: 711232 - RNA, 17 nt, Artificial Sequence
  Synthetic
gccgcugcuggcuuggg

SEQ ID NO: 711233 - RNA, 17 nt, Artificial Sequence
  Synthetic
gaaguguuucaguuggg

SEQ ID NO: 711234 - RNA, 17 nt, Artificial Sequence
  Synthetic
ggaagcugguaguuggg

SEQ ID NO: 711235 - RNA, 17 nt, Artificial Sequence
  Synthetic
gggaggcugagguuggg

SEQ ID NO: 711236 - RNA, 17 nt, Artificial Sequence
  Synthetic
ggggagguaugguuggg

SEQ ID NO: 711237 - RNA, 17 nt, Artificial Sequence
  Synthetic
gggacaugagauuuggg

SEQ ID NO: 711238 - RNA, 17 nt, Artificial Sequence
  Synthetic
ucaagaugagauuuggg

SEQ ID NO: 711239 - RNA, 17 nt, Artificial Sequence
  Synthetic
gauuuuagcacuuuggg

SEQ ID NO: 711240 - RNA, 17 nt, Artificial Sequence
  Synthetic
gaagguggggguuuggg

SEQ ID NO: 711241 - RNA, 17 nt, Artificial Sequence
  Synthetic
gaguaacauauuuuggg

SEQ ID NO: 711242 - RNA, 17 nt, Artificial Sequence
  Synthetic
ggaaaguauguuuuggg

SEQ ID NO: 711243 - RNA, 17 nt, Artificial Sequence
  Synthetic
gaauccccaaaaaaugg

SEQ ID NO: 711244 - RNA, 17 nt, Artificial Sequence
  Synthetic
ggauuugacaaaaaugg

SEQ ID NO: 711245 - RNA, 17 nt, Artificial Sequence
  Synthetic
gaaacagagaaaaaugg

SEQ ID NO: 711246 - RNA, 17 nt, Artificial Sequence
  Synthetic
gaucuguugagaaaugg

SEQ ID NO: 711247 - RNA, 17 nt, Artificial Sequence
  Synthetic
gucagacauggaaaugg

SEQ ID NO: 711248 - RNA, 17 nt, Artificial Sequence
  Synthetic
ggugcuugggacaaugg

SEQ ID NO: 711249 - RNA, 17 nt, Artificial Sequence
  Synthetic
ggauugucuuacaaugg

SEQ ID NO: 711250 - RNA, 17 nt, Artificial Sequence
  Synthetic
guauuuuuaaagaaugg

SEQ ID NO: 711251 - RNA, 17 nt, Artificial Sequence
  Synthetic
gaagucacacagaaugg

SEQ ID NO: 711252 - RNA, 17 nt, Artificial Sequence
  Synthetic
gaauaugcagagaaugg

SEQ ID NO: 711253 - RNA, 17 nt, Artificial Sequence
  Synthetic
gacaggaaauagaaugg

SEQ ID NO: 711254 - RNA, 17 nt, Artificial Sequence
  Synthetic
ggaagaaggaggaaugg

SEQ ID NO: 711255 - RNA, 17 nt, Artificial Sequence
  Synthetic
gccuacacaaugaaugg

SEQ ID NO: 711256 - RNA, 17 nt, Artificial Sequence
  Synthetic
gcuauaaugaauaaugg

SEQ ID NO: 711257 - RNA, 17 nt, Artificial Sequence
  Synthetic
gugugauacuauaaugg

SEQ ID NO: 711258 - RNA, 17 nt, Artificial Sequence
  Synthetic
gacaauuuuuauaaugg

SEQ ID NO: 711259 - RNA, 17 nt, Artificial Sequence
  Synthetic
gagucaaauaguaaugg

SEQ ID NO: 711260 - RNA, 17 nt, Artificial Sequence
  Synthetic
guguuacaugguaaugg

SEQ ID NO: 711261 - RNA, 17 nt, Artificial Sequence
  Synthetic
gugauuauuuguaaugg

SEQ ID NO: 711262 - RNA, 17 nt, Artificial Sequence
  Synthetic
gcagccuggcuuaaugg

SEQ ID NO: 711263 - RNA, 17 nt, Artificial Sequence
  Synthetic
guggccaaggaacaugg

SEQ ID NO: 711264 - RNA, 17 nt, Artificial Sequence
  Synthetic
gugguugucacacaugg

SEQ ID NO: 711265 - RNA, 17 nt, Artificial Sequence
  Synthetic
gguguguccuuacaugg

SEQ ID NO: 711266 - RNA, 17 nt, Artificial Sequence
  Synthetic
gagaaaguacaccaugg

SEQ ID NO: 711267 - RNA, 17 nt, Artificial Sequence
  Synthetic
gaggggaagacccaugg

SEQ ID NO: 711268 - RNA, 17 nt, Artificial Sequence
  Synthetic
gccuugucuggccaugg

SEQ ID NO: 711269 - RNA, 17 nt, Artificial Sequence
  Synthetic
guauacacaugccaugg

SEQ ID NO: 711270 - RNA, 17 nt, Artificial Sequence
  Synthetic
guauacacgugccaugg

SEQ ID NO: 711271 - RNA, 17 nt, Artificial Sequence
  Synthetic
guaaacaugugccaugg

SEQ ID NO: 711272 - RNA, 17 nt, Artificial Sequence
  Synthetic
guauacaugugccaugg

SEQ ID NO: 711273 - RNA, 17 nt, Artificial Sequence
  Synthetic
guguacacguuccaugg

SEQ ID NO: 711274 - RNA, 17 nt, Artificial Sequence
  Synthetic
gucucgaccaggcaugg

SEQ ID NO: 711275 - RNA, 17 nt, Artificial Sequence
  Synthetic
ggguguucugugcaugg

SEQ ID NO: 711276 - RNA, 17 nt, Artificial Sequence
  Synthetic
gaaacuuacaaucaugg

SEQ ID NO: 711277 - RNA, 17 nt, Artificial Sequence
  Synthetic
ggucauuugaaucaugg

SEQ ID NO: 711278 - RNA, 17 nt, Artificial Sequence
  Synthetic
gaaacuuauaaucaugg

SEQ ID NO: 711279 - RNA, 17 nt, Artificial Sequence
  Synthetic
guauacauguaucaugg

SEQ ID NO: 711280 - RNA, 17 nt, Artificial Sequence
  Synthetic
ggagcuuuuacucaugg

SEQ ID NO: 711281 - RNA, 17 nt, Artificial Sequence
  Synthetic
gaaguguggggucaugg

SEQ ID NO: 711282 - RNA, 17 nt, Artificial Sequence
  Synthetic
guaaacucaugucaugg

SEQ ID NO: 711283 - RNA, 17 nt, Artificial Sequence
  Synthetic
guaaacuugugucaugg

SEQ ID NO: 711284 - RNA, 17 nt, Artificial Sequence
  Synthetic
guuuauagccuucaugg

SEQ ID NO: 711285 - RNA, 17 nt, Artificial Sequence
  Synthetic
guaaccaugcuucaugg

SEQ ID NO: 711286 - RNA, 17 nt, Artificial Sequence
  Synthetic
ggcuggcagaaagaugg

SEQ ID NO: 711287 - RNA, 17 nt, Artificial Sequence
  Synthetic
gaccuggccuaagaugg

SEQ ID NO: 711288 - RNA, 17 nt, Artificial Sequence
  Synthetic
gaaaaucacacagaugg

SEQ ID NO: 711289 - RNA, 17 nt, Artificial Sequence
  Synthetic
gcaaguauagcagaugg

SEQ ID NO: 711290 - RNA, 17 nt, Artificial Sequence
  Synthetic
gcuugcauggcagaugg

SEQ ID NO: 711291 - RNA, 17 nt, Artificial Sequence
  Synthetic
gagaacuacagagaugg

SEQ ID NO: 711292 - RNA, 17 nt, Artificial Sequence
  Synthetic
guuuuggagauagaugg

SEQ ID NO: 711293 - RNA, 17 nt, Artificial Sequence
  Synthetic
gaaagggaaagggaugg

SEQ ID NO: 711294 - RNA, 17 nt, Artificial Sequence
  Synthetic
gagagagggagggaugg

SEQ ID NO: 711295 - RNA, 17 nt, Artificial Sequence
  Synthetic
ggccucucaggggaugg

SEQ ID NO: 711296 - RNA, 17 nt, Artificial Sequence
  Synthetic
gucauucacugggaugg

SEQ ID NO: 711297 - RNA, 17 nt, Artificial Sequence
  Synthetic
gcgagagggugggaugg

SEQ ID NO: 711298 - RNA, 17 nt, Artificial Sequence
  Synthetic
guucuggagauggaugg

SEQ ID NO: 711299 - RNA, 17 nt, Artificial Sequence
  Synthetic
gaaugucuuuuggaugg

SEQ ID NO: 711300 - RNA, 17 nt, Artificial Sequence
  Synthetic
gguaaauguuaugaugg

SEQ ID NO: 711301 - RNA, 17 nt, Artificial Sequence
  Synthetic
gagaaagaugcugaugg

SEQ ID NO: 711302 - RNA, 17 nt, Artificial Sequence
  Synthetic
gaucauggcucugaugg

SEQ ID NO: 711303 - RNA, 17 nt, Artificial Sequence
  Synthetic
ggacaaaggcaauaugg

SEQ ID NO: 711304 - RNA, 17 nt, Artificial Sequence
  Synthetic
ggucugugauacuaugg

SEQ ID NO: 711305 - RNA, 17 nt, Artificial Sequence
  Synthetic
guucaggguuccuaugg

SEQ ID NO: 711306 - RNA, 17 nt, Artificial Sequence
  Synthetic
guauacacgugcuaugg

SEQ ID NO: 711307 - RNA, 17 nt, Artificial Sequence
  Synthetic
gggaaacagcucuaugg

SEQ ID NO: 711308 - RNA, 17 nt, Artificial Sequence
  Synthetic
guagaauaguaguaugg

SEQ ID NO: 711309 - RNA, 17 nt, Artificial Sequence
  Synthetic
gauaguaguggguaugg

SEQ ID NO: 711310 - RNA, 17 nt, Artificial Sequence
  Synthetic
ggcucaugcaauuaugg

SEQ ID NO: 711311 - RNA, 17 nt, Artificial Sequence
  Synthetic
gaguacauccauuaugg

SEQ ID NO: 711312 - RNA, 17 nt, Artificial Sequence
  Synthetic
gacucacuuuauuaugg

SEQ ID NO: 711313 - RNA, 17 nt, Artificial Sequence
  Synthetic
gccaagaagucuuaugg

SEQ ID NO: 711314 - RNA, 17 nt, Artificial Sequence
  Synthetic
ggaaccaugucuuaugg

SEQ ID NO: 711315 - RNA, 17 nt, Artificial Sequence
  Synthetic
gaagcuuagcaaacugg

SEQ ID NO: 711316 - RNA, 17 nt, Artificial Sequence
  Synthetic
gaagaagaauaaacugg

SEQ ID NO: 711317 - RNA, 17 nt, Artificial Sequence
  Synthetic
ggugagaaaggaacugg

SEQ ID NO: 711318 - RNA, 17 nt, Artificial Sequence
  Synthetic
ggggaagaaggaacugg

SEQ ID NO: 711319 - RNA, 17 nt, Artificial Sequence
  Synthetic
gauaaacagauaacugg

SEQ ID NO: 711320 - RNA, 17 nt, Artificial Sequence
  Synthetic
gagagcuaugccacugg

SEQ ID NO: 711321 - RNA, 17 nt, Artificial Sequence
  Synthetic
gaucuggaacagacugg

SEQ ID NO: 711322 - RNA, 17 nt, Artificial Sequence
  Synthetic
gagauguaagagacugg

SEQ ID NO: 711323 - RNA, 17 nt, Artificial Sequence
  Synthetic
gaagcugccaggacugg

SEQ ID NO: 711324 - RNA, 17 nt, Artificial Sequence
  Synthetic
gagaggagguggacugg

SEQ ID NO: 711325 - RNA, 17 nt, Artificial Sequence
  Synthetic
gacaguacagcuacugg

SEQ ID NO: 711326 - RNA, 17 nt, Artificial Sequence
  Synthetic
gaaaugaaacuuacugg

SEQ ID NO: 711327 - RNA, 17 nt, Artificial Sequence
  Synthetic
gaaucacucgaaccugg

SEQ ID NO: 711328 - RNA, 17 nt, Artificial Sequence
  Synthetic
gucaucuuggaaccugg

SEQ ID NO: 711329 - RNA, 17 nt, Artificial Sequence
  Synthetic
gaaucccuugaaccugg

SEQ ID NO: 711330 - RNA, 17 nt, Artificial Sequence
  Synthetic
gaaacccagggcccugg

SEQ ID NO: 711331 - RNA, 17 nt, Artificial Sequence
  Synthetic
gacgggacagauccugg

SEQ ID NO: 711332 - RNA, 17 nt, Artificial Sequence
  Synthetic
gugagaaugucuccugg

SEQ ID NO: 711333 - RNA, 17 nt, Artificial Sequence
  Synthetic
ggccagaaauaagcugg

SEQ ID NO: 711334 - RNA, 17 nt, Artificial Sequence
  Synthetic
gcuuccccuccagcugg

SEQ ID NO: 711335 - RNA, 17 nt, Artificial Sequence
  Synthetic
guucucccugcagcugg

SEQ ID NO: 711336 - RNA, 17 nt, Artificial Sequence
  Synthetic
gucugaauauaugcugg

SEQ ID NO: 711337 - RNA, 17 nt, Artificial Sequence
  Synthetic
gagauguagacugcugg

SEQ ID NO: 711338 - RNA, 17 nt, Artificial Sequence
  Synthetic
gauuuaaauacugcugg

SEQ ID NO: 711339 - RNA, 17 nt, Artificial Sequence
  Synthetic
gcugguuagccugcugg

SEQ ID NO: 711340 - RNA, 17 nt, Artificial Sequence
  Synthetic
ggucacagaauugcugg

SEQ ID NO: 711341 - RNA, 17 nt, Artificial Sequence
  Synthetic
gcuuuuaaucuugcugg

SEQ ID NO: 711342 - RNA, 17 nt, Artificial Sequence
  Synthetic
gaaguagucucaucugg

SEQ ID NO: 711343 - RNA, 17 nt, Artificial Sequence
  Synthetic
gacauagauggaucugg

SEQ ID NO: 711344 - RNA, 17 nt, Artificial Sequence
  Synthetic
guuacuuuuggcucugg

SEQ ID NO: 711345 - RNA, 17 nt, Artificial Sequence
  Synthetic
gcuugaggaaucucugg

SEQ ID NO: 711346 - RNA, 17 nt, Artificial Sequence
  Synthetic
gagagagguaagucugg

SEQ ID NO: 711347 - RNA, 17 nt, Artificial Sequence
  Synthetic
guagcauaagcgucugg

SEQ ID NO: 711348 - RNA, 17 nt, Artificial Sequence
  Synthetic
gguccaggacugucugg

SEQ ID NO: 711349 - RNA, 17 nt, Artificial Sequence
  Synthetic
gcuuguuucacuucugg

SEQ ID NO: 711350 - RNA, 17 nt, Artificial Sequence
  Synthetic
guuuuucacgguucugg

SEQ ID NO: 711351 - RNA, 17 nt, Artificial Sequence
  Synthetic
gcuauucaaauuucugg

SEQ ID NO: 711352 - RNA, 17 nt, Artificial Sequence
  Synthetic
guauugaccauuucugg

SEQ ID NO: 711353 - RNA, 17 nt, Artificial Sequence
  Synthetic
gaugacauuuuuucugg

SEQ ID NO: 711354 - RNA, 17 nt, Artificial Sequence
  Synthetic
gagaauugagaaagugg

SEQ ID NO: 711355 - RNA, 17 nt, Artificial Sequence
  Synthetic
gguauaauugaaagugg

SEQ ID NO: 711356 - RNA, 17 nt, Artificial Sequence
  Synthetic
gauagaagcuaaagugg

SEQ ID NO: 711357 - RNA, 17 nt, Artificial Sequence
  Synthetic
ggguggaacacaagugg

SEQ ID NO: 711358 - RNA, 17 nt, Artificial Sequence
  Synthetic
ggauguauuucaagugg

SEQ ID NO: 711359 - RNA, 17 nt, Artificial Sequence
  Synthetic
gcacuuuaaugaagugg

SEQ ID NO: 711360 - RNA, 17 nt, Artificial Sequence
  Synthetic
gaugccgcacacagugg

SEQ ID NO: 711361 - RNA, 17 nt, Artificial Sequence
  Synthetic
guacaucuccacagugg

SEQ ID NO: 711362 - RNA, 17 nt, Artificial Sequence
  Synthetic
guauguuauuccagugg

SEQ ID NO: 711363 - RNA, 17 nt, Artificial Sequence
  Synthetic
gaauuauccugcagugg

SEQ ID NO: 711364 - RNA, 17 nt, Artificial Sequence
  Synthetic
gacaguguuugcagugg

SEQ ID NO: 711365 - RNA, 17 nt, Artificial Sequence
  Synthetic
gagagcaauuucagugg

SEQ ID NO: 711366 - RNA, 17 nt, Artificial Sequence
  Synthetic
ggagaagacaagagugg

SEQ ID NO: 711367 - RNA, 17 nt, Artificial Sequence
  Synthetic
gcuuuggaucagagugg

SEQ ID NO: 711368 - RNA, 17 nt, Artificial Sequence
  Synthetic
gggugguuugagagugg

SEQ ID NO: 711369 - RNA, 17 nt, Artificial Sequence
  Synthetic
guggggacaaggagugg

SEQ ID NO: 711370 - RNA, 17 nt, Artificial Sequence
  Synthetic
ggagggagaaggagugg

SEQ ID NO: 711371 - RNA, 17 nt, Artificial Sequence
  Synthetic
ggaguggguaggagugg

SEQ ID NO: 711372 - RNA, 17 nt, Artificial Sequence
  Synthetic
gcugggaaggauagugg

SEQ ID NO: 711373 - RNA, 17 nt, Artificial Sequence
  Synthetic
gcugugaaggguagugg

SEQ ID NO: 711374 - RNA, 17 nt, Artificial Sequence
  Synthetic
gcacuucauauuagugg

SEQ ID NO: 711375 - RNA, 17 nt, Artificial Sequence
  Synthetic
gaucuguaguuuagugg

SEQ ID NO: 711376 - RNA, 17 nt, Artificial Sequence
  Synthetic
gguuuggggggacgugg

SEQ ID NO: 711377 - RNA, 17 nt, Artificial Sequence
  Synthetic
gucauggccggccgugg

SEQ ID NO: 711378 - RNA, 17 nt, Artificial Sequence
  Synthetic
guauacauguuccgugg

SEQ ID NO: 711379 - RNA, 17 nt, Artificial Sequence
  Synthetic
gaaauaguugggcgugg

SEQ ID NO: 711380 - RNA, 17 nt, Artificial Sequence
  Synthetic
ggcuguguucaaggugg

SEQ ID NO: 711381 - RNA, 17 nt, Artificial Sequence
  Synthetic
gagcaggaaacaggugg

SEQ ID NO: 711382 - RNA, 17 nt, Artificial Sequence
  Synthetic
ggagagagaccaggugg

SEQ ID NO: 711383 - RNA, 17 nt, Artificial Sequence
  Synthetic
gucuugguaucaggugg

SEQ ID NO: 711384 - RNA, 17 nt, Artificial Sequence
  Synthetic
ggccugucgcgaggugg

SEQ ID NO: 711385 - RNA, 17 nt, Artificial Sequence
  Synthetic
guaggcugaggaggugg

SEQ ID NO: 711386 - RNA, 17 nt, Artificial Sequence
  Synthetic
gugaacccgggaggugg

SEQ ID NO: 711387 - RNA, 17 nt, Artificial Sequence
  Synthetic
gggucguggggaggugg

SEQ ID NO: 711388 - RNA, 17 nt, Artificial Sequence
  Synthetic
guaugugugugaggugg

SEQ ID NO: 711389 - RNA, 17 nt, Artificial Sequence
  Synthetic
gagcagcaucuaggugg

SEQ ID NO: 711390 - RNA, 17 nt, Artificial Sequence
  Synthetic
ggccuaucagagggugg

SEQ ID NO: 711391 - RNA, 17 nt, Artificial Sequence
  Synthetic
ggguggggggagggugg

SEQ ID NO: 711392 - RNA, 17 nt, Artificial Sequence
  Synthetic
gaucuacucuagggugg

SEQ ID NO: 711393 - RNA, 17 nt, Artificial Sequence
  Synthetic
ggaaaaaguuagggugg

SEQ ID NO: 711394 - RNA, 17 nt, Artificial Sequence
  Synthetic
ggccuguuggcgggugg

SEQ ID NO: 711395 - RNA, 17 nt, Artificial Sequence
  Synthetic
gucacauggaggggugg

SEQ ID NO: 711396 - RNA, 17 nt, Artificial Sequence
  Synthetic
gccaugaugaggggugg

SEQ ID NO: 711397 - RNA, 17 nt, Artificial Sequence
  Synthetic
ggccugucagggggugg

SEQ ID NO: 711398 - RNA, 17 nt, Artificial Sequence
  Synthetic
guaugucccgggggugg

SEQ ID NO: 711399 - RNA, 17 nt, Artificial Sequence
  Synthetic
gugccuguugggggugg

SEQ ID NO: 711400 - RNA, 17 nt, Artificial Sequence
  Synthetic
gagaaucaguggggugg

SEQ ID NO: 711401 - RNA, 17 nt, Artificial Sequence
  Synthetic
ggccugucguggggugg

SEQ ID NO: 711402 - RNA, 17 nt, Artificial Sequence
  Synthetic
ggacugugguggggugg

SEQ ID NO: 711403 - RNA, 17 nt, Artificial Sequence
  Synthetic
ggacugcuguggggugg

SEQ ID NO: 711404 - RNA, 17 nt, Artificial Sequence
  Synthetic
ggccugcuguggggugg

SEQ ID NO: 711405 - RNA, 17 nt, Artificial Sequence
  Synthetic
gaacuguuguggggugg

SEQ ID NO: 711406 - RNA, 17 nt, Artificial Sequence
  Synthetic
ggacuguuguggggugg

SEQ ID NO: 711407 - RNA, 17 nt, Artificial Sequence
  Synthetic
ggccuguuguggggugg

SEQ ID NO: 711408 - RNA, 17 nt, Artificial Sequence
  Synthetic
gcucgcuaccugggugg

SEQ ID NO: 711409 - RNA, 17 nt, Artificial Sequence
  Synthetic
guugagugugugggugg

SEQ ID NO: 711410 - RNA, 17 nt, Artificial Sequence
  Synthetic
uuagccaggcauggugg

SEQ ID NO: 711411 - RNA, 17 nt, Artificial Sequence
  Synthetic
gccggugccgcuggugg

SEQ ID NO: 711412 - RNA, 17 nt, Artificial Sequence
  Synthetic
gaagacaagaguggugg

SEQ ID NO: 711413 - RNA, 17 nt, Artificial Sequence
  Synthetic
gggacaaggaguggugg

SEQ ID NO: 711414 - RNA, 17 nt, Artificial Sequence
  Synthetic
uuagcugggcguggugg

SEQ ID NO: 711415 - RNA, 17 nt, Artificial Sequence
  Synthetic
gagagaguugguggugg

SEQ ID NO: 711416 - RNA, 17 nt, Artificial Sequence
  Synthetic
ggcaaguggguuggugg

SEQ ID NO: 711417 - RNA, 17 nt, Artificial Sequence
  Synthetic
ggcaaaaaaaaaugugg

SEQ ID NO: 711418 - RNA, 17 nt, Artificial Sequence
  Synthetic
ggaauuaagaaaugugg

SEQ ID NO: 711419 - RNA, 17 nt, Artificial Sequence
  Synthetic
guguucuuaugaugugg

SEQ ID NO: 711420 - RNA, 17 nt, Artificial Sequence
  Synthetic
gaauauuacauaugugg

SEQ ID NO: 711421 - RNA, 17 nt, Artificial Sequence
  Synthetic
guggggacucuaugugg

SEQ ID NO: 711422 - RNA, 17 nt, Artificial Sequence
  Synthetic
gaacugugcagcugugg

SEQ ID NO: 711423 - RNA, 17 nt, Artificial Sequence
  Synthetic
gauugaaaaggcugugg

SEQ ID NO: 711424 - RNA, 17 nt, Artificial Sequence
  Synthetic
gacaggcagaucugugg

SEQ ID NO: 711425 - RNA, 17 nt, Artificial Sequence
  Synthetic
ggacuauuagagugugg

SEQ ID NO: 711426 - RNA, 17 nt, Artificial Sequence
  Synthetic
gaauaggccaggugugg

SEQ ID NO: 711427 - RNA, 17 nt, Artificial Sequence
  Synthetic
gagugggccaggugugg

SEQ ID NO: 711428 - RNA, 17 nt, Artificial Sequence
  Synthetic
guauuggccaggugugg

SEQ ID NO: 711429 - RNA, 17 nt, Artificial Sequence
  Synthetic
gagagucaucugugugg

SEQ ID NO: 711430 - RNA, 17 nt, Artificial Sequence
  Synthetic
gcauacuaagugugugg

SEQ ID NO: 711431 - RNA, 17 nt, Artificial Sequence
  Synthetic
guuuccugcuugugugg

SEQ ID NO: 711432 - RNA, 17 nt, Artificial Sequence
  Synthetic
gguuggggguugugugg

SEQ ID NO: 711433 - RNA, 17 nt, Artificial Sequence
  Synthetic
gcccacccacauugugg

SEQ ID NO: 711434 - RNA, 17 nt, Artificial Sequence
  Synthetic
gaguguccagauugugg

SEQ ID NO: 711435 - RNA, 17 nt, Artificial Sequence
  Synthetic
guguguguguguugugg

SEQ ID NO: 711436 - RNA, 17 nt, Artificial Sequence
  Synthetic
guaauuaugguuugugg

SEQ ID NO: 711437 - RNA, 17 nt, Artificial Sequence
  Synthetic
gaaagcuuuguuugugg

SEQ ID NO: 711438 - RNA, 17 nt, Artificial Sequence
  Synthetic
gucuguagaucaauugg

SEQ ID NO: 711439 - RNA, 17 nt, Artificial Sequence
  Synthetic
gccauauguauaauugg

SEQ ID NO: 711440 - RNA, 17 nt, Artificial Sequence
  Synthetic
gcuguugacuuaauugg

SEQ ID NO: 711441 - RNA, 17 nt, Artificial Sequence
  Synthetic
gggauggggagcauugg

SEQ ID NO: 711442 - RNA, 17 nt, Artificial Sequence
  Synthetic
gguauggguuucauugg

SEQ ID NO: 711443 - RNA, 17 nt, Artificial Sequence
  Synthetic
guaacuuggaagauugg

SEQ ID NO: 711444 - RNA, 17 nt, Artificial Sequence
  Synthetic
ggugggggugagauugg

SEQ ID NO: 711445 - RNA, 17 nt, Artificial Sequence
  Synthetic
gaggaugaauggauugg

SEQ ID NO: 711446 - RNA, 17 nt, Artificial Sequence
  Synthetic
gagaguaaagugauugg

SEQ ID NO: 711447 - RNA, 17 nt, Artificial Sequence
  Synthetic
ggaaagcacaguauugg

SEQ ID NO: 711448 - RNA, 17 nt, Artificial Sequence
  Synthetic
gagaugggaguuauugg

SEQ ID NO: 711449 - RNA, 17 nt, Artificial Sequence
  Synthetic
gugguggugguuauugg

SEQ ID NO: 711450 - RNA, 17 nt, Artificial Sequence
  Synthetic
gcauagaaauaacuugg

SEQ ID NO: 711451 - RNA, 17 nt, Artificial Sequence
  Synthetic
gccuugacauaacuugg

SEQ ID NO: 711452 - RNA, 17 nt, Artificial Sequence
  Synthetic
gcuaaauguccacuugg

SEQ ID NO: 711453 - RNA, 17 nt, Artificial Sequence
  Synthetic
gggcuuuggagacuugg

SEQ ID NO: 711454 - RNA, 17 nt, Artificial Sequence
  Synthetic
guacugguuauacuugg

SEQ ID NO: 711455 - RNA, 17 nt, Artificial Sequence
  Synthetic
gaacagguguuacuugg

SEQ ID NO: 711456 - RNA, 17 nt, Artificial Sequence
  Synthetic
gaguuaucuuuacuugg

SEQ ID NO: 711457 - RNA, 17 nt, Artificial Sequence
  Synthetic
gguuggugauaccuugg

SEQ ID NO: 711458 - RNA, 17 nt, Artificial Sequence
  Synthetic
gcuuccccacagcuugg

SEQ ID NO: 711459 - RNA, 17 nt, Artificial Sequence
  Synthetic
gaugucuuccagcuugg

SEQ ID NO: 711460 - RNA, 17 nt, Artificial Sequence
  Synthetic
ggguggguugcgcuugg

SEQ ID NO: 711461 - RNA, 17 nt, Artificial Sequence
  Synthetic
gagggaauucugcuugg

SEQ ID NO: 711462 - RNA, 17 nt, Artificial Sequence
  Synthetic
gcaucugcaaaucuugg

SEQ ID NO: 711463 - RNA, 17 nt, Artificial Sequence
  Synthetic
gagggauuccgucuugg

SEQ ID NO: 711464 - RNA, 17 nt, Artificial Sequence
  Synthetic
guuaguugaugucuugg

SEQ ID NO: 711465 - RNA, 17 nt, Artificial Sequence
  Synthetic
gcccucuggauucuugg

SEQ ID NO: 711466 - RNA, 17 nt, Artificial Sequence
  Synthetic
gugagggacccaguugg

SEQ ID NO: 711467 - RNA, 17 nt, Artificial Sequence
  Synthetic
guagaaggugagguugg

SEQ ID NO: 711468 - RNA, 17 nt, Artificial Sequence
  Synthetic
gagaugacugggguugg

SEQ ID NO: 711469 - RNA, 17 nt, Artificial Sequence
  Synthetic
gaaagcuauuugguugg

SEQ ID NO: 711470 - RNA, 17 nt, Artificial Sequence
  Synthetic
guaauccccaauguugg

SEQ ID NO: 711471 - RNA, 17 nt, Artificial Sequence
  Synthetic
gugauuuccaauguugg

SEQ ID NO: 711472 - RNA, 17 nt, Artificial Sequence
  Synthetic
guaugaacauauguugg

SEQ ID NO: 711473 - RNA, 17 nt, Artificial Sequence
  Synthetic
guaauucccaguguugg

SEQ ID NO: 711474 - RNA, 17 nt, Artificial Sequence
  Synthetic
ggugauggcaguguugg

SEQ ID NO: 711475 - RNA, 17 nt, Artificial Sequence
  Synthetic
ggagugaauauuguugg

SEQ ID NO: 711476 - RNA, 17 nt, Artificial Sequence
  Synthetic
guuugagcaaaauuugg

SEQ ID NO: 711477 - RNA, 17 nt, Artificial Sequence
  Synthetic
gcuccugauacauuugg

SEQ ID NO: 711478 - RNA, 17 nt, Artificial Sequence
  Synthetic
gaguugugaucauuugg

SEQ ID NO: 711479 - RNA, 17 nt, Artificial Sequence
  Synthetic
ggauuuauuucauuugg

SEQ ID NO: 711480 - RNA, 17 nt, Artificial Sequence
  Synthetic
gagacagugagauuugg

SEQ ID NO: 711481 - RNA, 17 nt, Artificial Sequence
  Synthetic
gaauccuuaggauuugg

SEQ ID NO: 711482 - RNA, 17 nt, Artificial Sequence
  Synthetic
gcaagugauuuauuugg

SEQ ID NO: 711483 - RNA, 17 nt, Artificial Sequence
  Synthetic
gauaagagcaacuuugg

SEQ ID NO: 711484 - RNA, 17 nt, Artificial Sequence
  Synthetic
guuaacauuaacuuugg

SEQ ID NO: 711485 - RNA, 17 nt, Artificial Sequence
  Synthetic
ggugcauuucacuuugg

SEQ ID NO: 711486 - RNA, 17 nt, Artificial Sequence
  Synthetic
gauugguuaaucuuugg

SEQ ID NO: 711487 - RNA, 17 nt, Artificial Sequence
  Synthetic
gauauggacaucuuugg

SEQ ID NO: 711488 - RNA, 17 nt, Artificial Sequence
  Synthetic
guucaccuuuucuuugg

SEQ ID NO: 711489 - RNA, 17 nt, Artificial Sequence
  Synthetic
gcuuuugauguguuugg

SEQ ID NO: 711490 - RNA, 17 nt, Artificial Sequence
  Synthetic
guguugauuguguuugg

SEQ ID NO: 711491 - RNA, 17 nt, Artificial Sequence
  Synthetic
guaauaaaaaauuuugg

SEQ ID NO: 711492 - RNA, 17 nt, Artificial Sequence
  Synthetic
gcacaagagcauuuugg

SEQ ID NO: 711493 - RNA, 17 nt, Artificial Sequence
  Synthetic
gacuagccucauuuugg

SEQ ID NO: 711494 - RNA, 17 nt, Artificial Sequence
  Synthetic
guuagugcaucuuuugg

SEQ ID NO: 711495 - RNA, 17 nt, Artificial Sequence
  Synthetic
gagcuauaaaguuuugg

SEQ ID NO: 711496 - RNA, 17 nt, Artificial Sequence
  Synthetic
gguuucaacaguuuugg

SEQ ID NO: 711497 - RNA, 17 nt, Artificial Sequence
  Synthetic
gggacauacgguuuugg

SEQ ID NO: 711498 - RNA, 17 nt, Artificial Sequence
  Synthetic
gagcagugauguuuugg

SEQ ID NO: 711499 - RNA, 17 nt, Artificial Sequence
  Synthetic
gauugucacuguuuugg

SEQ ID NO: 711500 - RNA, 17 nt, Artificial Sequence
  Synthetic
gagcuacauauuuuugg

SEQ ID NO: 711501 - RNA, 17 nt, Artificial Sequence
  Synthetic
gaaaugagacuuuuugg

SEQ ID NO: 711502 - RNA, 17 nt, Artificial Sequence
  Synthetic
gucucccuccuuuuugg

SEQ ID NO: 711503 - RNA, 17 nt, Artificial Sequence
  Synthetic
gaucagauuguuuuugg

SEQ ID NO: 711504 - RNA, 17 nt, Artificial Sequence
  Synthetic
guauaauuuaaaaaaug

SEQ ID NO: 711505 - RNA, 17 nt, Artificial Sequence
  Synthetic
gccacaauacaaaaaug

SEQ ID NO: 711506 - RNA, 17 nt, Artificial Sequence
  Synthetic
gaaggcccauaaaaaug

SEQ ID NO: 711507 - RNA, 17 nt, Artificial Sequence
  Synthetic
gaaaacuaagcaaaaug

SEQ ID NO: 711508 - RNA, 17 nt, Artificial Sequence
  Synthetic
gaauugaaaagaaaaug

SEQ ID NO: 711509 - RNA, 17 nt, Artificial Sequence
  Synthetic
gugcugccaugaaaaug

SEQ ID NO: 711510 - RNA, 17 nt, Artificial Sequence
  Synthetic
guuagaaacauaaaaug

SEQ ID NO: 711511 - RNA, 17 nt, Artificial Sequence
  Synthetic
gacauaggccuaaaaug

SEQ ID NO: 711512 - RNA, 17 nt, Artificial Sequence
  Synthetic
gcacaucauguaaaaug

SEQ ID NO: 711513 - RNA, 17 nt, Artificial Sequence
  Synthetic
gucucaucuguaaaaug

SEQ ID NO: 711514 - RNA, 17 nt, Artificial Sequence
  Synthetic
guuucauucuuaaaaug

SEQ ID NO: 711515 - RNA, 17 nt, Artificial Sequence
  Synthetic
gucuuuaaguuaaaaug

SEQ ID NO: 711516 - RNA, 17 nt, Artificial Sequence
  Synthetic
guuguuauuuuaaaaug

SEQ ID NO: 711517 - RNA, 17 nt, Artificial Sequence
  Synthetic
gguuaaauccacaaaug

SEQ ID NO: 711518 - RNA, 17 nt, Artificial Sequence
  Synthetic
gaauguauucacaaaug

SEQ ID NO: 711519 - RNA, 17 nt, Artificial Sequence
  Synthetic
gagauuucauacaaaug

SEQ ID NO: 711520 - RNA, 17 nt, Artificial Sequence
  Synthetic
gaguagaggcccaaaug

SEQ ID NO: 711521 - RNA, 17 nt, Artificial Sequence
  Synthetic
guagggcuaugcaaaug

SEQ ID NO: 711522 - RNA, 17 nt, Artificial Sequence
  Synthetic
gagcucacaaucaaaug

SEQ ID NO: 711523 - RNA, 17 nt, Artificial Sequence
  Synthetic
gacaaaaacaagaaaug

SEQ ID NO: 711524 - RNA, 17 nt, Artificial Sequence
  Synthetic
ggagaguggaagaaaug

SEQ ID NO: 711525 - RNA, 17 nt, Artificial Sequence
  Synthetic
ggcccacugcagaaaug

SEQ ID NO: 711526 - RNA, 17 nt, Artificial Sequence
  Synthetic
gauucuccucagaaaug

SEQ ID NO: 711527 - RNA, 17 nt, Artificial Sequence
  Synthetic
guugguuaagagaaaug

SEQ ID NO: 711528 - RNA, 17 nt, Artificial Sequence
  Synthetic
guaguugugaggaaaug

SEQ ID NO: 711529 - RNA, 17 nt, Artificial Sequence
  Synthetic
gguuuacuuuggaaaug

SEQ ID NO: 711530 - RNA, 17 nt, Artificial Sequence
  Synthetic
gucuguugacugaaaug

SEQ ID NO: 711531 - RNA, 17 nt, Artificial Sequence
  Synthetic
gaaauucuugauaaaug

SEQ ID NO: 711532 - RNA, 17 nt, Artificial Sequence
  Synthetic
gaaacugaauauaaaug

SEQ ID NO: 711533 - RNA, 17 nt, Artificial Sequence
  Synthetic
gaguacagugguaaaug

SEQ ID NO: 711534 - RNA, 17 nt, Artificial Sequence
  Synthetic
gcuuagcucuuuaaaug

SEQ ID NO: 711535 - RNA, 17 nt, Artificial Sequence
  Synthetic
guaauauaccaacaaug

SEQ ID NO: 711536 - RNA, 17 nt, Artificial Sequence
  Synthetic
gugagcuuuuaacaaug

SEQ ID NO: 711537 - RNA, 17 nt, Artificial Sequence
  Synthetic
gggaacaacacacaaug

SEQ ID NO: 711538 - RNA, 17 nt, Artificial Sequence
  Synthetic
gauuacccuccacaaug

SEQ ID NO: 711539 - RNA, 17 nt, Artificial Sequence
  Synthetic
guaaguggaagacaaug

SEQ ID NO: 711540 - RNA, 17 nt, Artificial Sequence
  Synthetic
gugucuucuuaccaaug

SEQ ID NO: 711541 - RNA, 17 nt, Artificial Sequence
  Synthetic
gcaugucaaauccaaug

SEQ ID NO: 711542 - RNA, 17 nt, Artificial Sequence
  Synthetic
gaaugcaaacuccaaug

SEQ ID NO: 711543 - RNA, 17 nt, Artificial Sequence
  Synthetic
gacaaaaacaagcaaug

SEQ ID NO: 711544 - RNA, 17 nt, Artificial Sequence
  Synthetic
gagaaaaacaagcaaug

SEQ ID NO: 711545 - RNA, 17 nt, Artificial Sequence
  Synthetic
gaggaaaacaagcaaug

SEQ ID NO: 711546 - RNA, 17 nt, Artificial Sequence
  Synthetic
gggggcaggaagcaaug

SEQ ID NO: 711547 - RNA, 17 nt, Artificial Sequence
  Synthetic
guauauguagagcaaug

SEQ ID NO: 711548 - RNA, 17 nt, Artificial Sequence
  Synthetic
gaccagcuuaggcaaug

SEQ ID NO: 711549 - RNA, 17 nt, Artificial Sequence
  Synthetic
ggauugucuuggcaaug

SEQ ID NO: 711550 - RNA, 17 nt, Artificial Sequence
  Synthetic
gaaacuccagugcaaug

SEQ ID NO: 711551 - RNA, 17 nt, Artificial Sequence
  Synthetic
ggaucacuugugcaaug

SEQ ID NO: 711552 - RNA, 17 nt, Artificial Sequence
  Synthetic
ggauacauacaucaaug

SEQ ID NO: 711553 - RNA, 17 nt, Artificial Sequence
  Synthetic
ggugaauugagucaaug

SEQ ID NO: 711554 - RNA, 17 nt, Artificial Sequence
  Synthetic
guggugaaaauucaaug

SEQ ID NO: 711555 - RNA, 17 nt, Artificial Sequence
  Synthetic
guggucaccaaagaaug

SEQ ID NO: 711556 - RNA, 17 nt, Artificial Sequence
  Synthetic
ggacaggauaaagaaug

SEQ ID NO: 711557 - RNA, 17 nt, Artificial Sequence
  Synthetic
gugugauacacagaaug

SEQ ID NO: 711558 - RNA, 17 nt, Artificial Sequence
  Synthetic
gaaaccaaaagagaaug

SEQ ID NO: 711559 - RNA, 17 nt, Artificial Sequence
  Synthetic
ggaggaagaagagaaug

SEQ ID NO: 711560 - RNA, 17 nt, Artificial Sequence
  Synthetic
ggggaaaagcgagaaug

SEQ ID NO: 711561 - RNA, 17 nt, Artificial Sequence
  Synthetic
gcacaucauggagaaug

SEQ ID NO: 711562 - RNA, 17 nt, Artificial Sequence
  Synthetic
gugacucagcuagaaug

SEQ ID NO: 711563 - RNA, 17 nt, Artificial Sequence
  Synthetic
ggacaacuucuagaaug

SEQ ID NO: 711564 - RNA, 17 nt, Artificial Sequence
  Synthetic
guuugaaauaucgaaug

SEQ ID NO: 711565 - RNA, 17 nt, Artificial Sequence
  Synthetic
guuggagaguaggaaug

SEQ ID NO: 711566 - RNA, 17 nt, Artificial Sequence
  Synthetic
gagagaagaaaugaaug

SEQ ID NO: 711567 - RNA, 17 nt, Artificial Sequence
  Synthetic
gaacaaauaaaugaaug

SEQ ID NO: 711568 - RNA, 17 nt, Artificial Sequence
  Synthetic
gcuuuguugaaugaaug

SEQ ID NO: 711569 - RNA, 17 nt, Artificial Sequence
  Synthetic
gagaaggguaaugaaug

SEQ ID NO: 711570 - RNA, 17 nt, Artificial Sequence
  Synthetic
gagauucaccaugaaug

SEQ ID NO: 711571 - RNA, 17 nt, Artificial Sequence
  Synthetic
guuuguuaucaugaaug

SEQ ID NO: 711572 - RNA, 17 nt, Artificial Sequence
  Synthetic
gccuuugcuacugaaug

SEQ ID NO: 711573 - RNA, 17 nt, Artificial Sequence
  Synthetic
gucagguuaucugaaug

SEQ ID NO: 711574 - RNA, 17 nt, Artificial Sequence
  Synthetic
guuuuguuacuugaaug

SEQ ID NO: 711575 - RNA, 17 nt, Artificial Sequence
  Synthetic
guggugggucuugaaug

SEQ ID NO: 711576 - RNA, 17 nt, Artificial Sequence
  Synthetic
gaaaaauuggaauaaug

SEQ ID NO: 711577 - RNA, 17 nt, Artificial Sequence
  Synthetic
ggggaauuauaauaaug

SEQ ID NO: 711578 - RNA, 17 nt, Artificial Sequence
  Synthetic
gcuaauguagcauaaug

SEQ ID NO: 711579 - RNA, 17 nt, Artificial Sequence
  Synthetic
gcagaggccagauaaug

SEQ ID NO: 711580 - RNA, 17 nt, Artificial Sequence
  Synthetic
gaaucagagagauaaug

SEQ ID NO: 711581 - RNA, 17 nt, Artificial Sequence
  Synthetic
gugaaaugaggauaaug

SEQ ID NO: 711582 - RNA, 17 nt, Artificial Sequence
  Synthetic
gaaagaaguaccuaaug

SEQ ID NO: 711583 - RNA, 17 nt, Artificial Sequence
  Synthetic
gugagagauugguaaug

SEQ ID NO: 711584 - RNA, 17 nt, Artificial Sequence
  Synthetic
guaggcuguguguaaug

SEQ ID NO: 711585 - RNA, 17 nt, Artificial Sequence
  Synthetic
gaaaucaucuguuaaug

SEQ ID NO: 711586 - RNA, 17 nt, Artificial Sequence
  Synthetic
gggucuaucuguuaaug

SEQ ID NO: 711587 - RNA, 17 nt, Artificial Sequence
  Synthetic
gagguacaaguuuaaug

SEQ ID NO: 711588 - RNA, 17 nt, Artificial Sequence
  Synthetic
gaguaguuuccaacaug

SEQ ID NO: 711589 - RNA, 17 nt, Artificial Sequence
  Synthetic
gaauaaauaucaacaug

SEQ ID NO: 711590 - RNA, 17 nt, Artificial Sequence
  Synthetic
ggaaaaacuugaacaug

SEQ ID NO: 711591 - RNA, 17 nt, Artificial Sequence
  Synthetic
ggguaaagauuaacaug

SEQ ID NO: 711592 - RNA, 17 nt, Artificial Sequence
  Synthetic
gaagcaucucccacaug

SEQ ID NO: 711593 - RNA, 17 nt, Artificial Sequence
  Synthetic
gauuuucauuccacaug

SEQ ID NO: 711594 - RNA, 17 nt, Artificial Sequence
  Synthetic
gugugucucugcacaug

SEQ ID NO: 711595 - RNA, 17 nt, Artificial Sequence
  Synthetic
guguugucacucacaug

SEQ ID NO: 711596 - RNA, 17 nt, Artificial Sequence
  Synthetic
gauaauugguagacaug

SEQ ID NO: 711597 - RNA, 17 nt, Artificial Sequence
  Synthetic
gcuccacccuugacaug

SEQ ID NO: 711598 - RNA, 17 nt, Artificial Sequence
  Synthetic
gugacuucaaauacaug

SEQ ID NO: 711599 - RNA, 17 nt, Artificial Sequence
  Synthetic
gaggaugagaauacaug

SEQ ID NO: 711600 - RNA, 17 nt, Artificial Sequence
  Synthetic
gacaauacaaaaccaug

SEQ ID NO: 711601 - RNA, 17 nt, Artificial Sequence
  Synthetic
gagacucaaauaccaug

SEQ ID NO: 711602 - RNA, 17 nt, Artificial Sequence
  Synthetic
gucugcucuuucccaug

SEQ ID NO: 711603 - RNA, 17 nt, Artificial Sequence
  Synthetic
gaauaacugaagccaug

SEQ ID NO: 711604 - RNA, 17 nt, Artificial Sequence
  Synthetic
gaaaucuauaagccaug

SEQ ID NO: 711605 - RNA, 17 nt, Artificial Sequence
  Synthetic
guauuggcuaggccaug

SEQ ID NO: 711606 - RNA, 17 nt, Artificial Sequence
  Synthetic
guggugauuaggccaug

SEQ ID NO: 711607 - RNA, 17 nt, Artificial Sequence
  Synthetic
gcauaguaccugccaug

SEQ ID NO: 711608 - RNA, 17 nt, Artificial Sequence
  Synthetic
gucccucaguauccaug

SEQ ID NO: 711609 - RNA, 17 nt, Artificial Sequence
  Synthetic
gauaaugcuuauccaug

SEQ ID NO: 711610 - RNA, 17 nt, Artificial Sequence
  Synthetic
gagacuauuucuccaug

SEQ ID NO: 711611 - RNA, 17 nt, Artificial Sequence
  Synthetic
gucagugaguuuccaug

SEQ ID NO: 711612 - RNA, 17 nt, Artificial Sequence
  Synthetic
gcaccugacaaagcaug

SEQ ID NO: 711613 - RNA, 17 nt, Artificial Sequence
  Synthetic
gucacaagaacagcaug

SEQ ID NO: 711614 - RNA, 17 nt, Artificial Sequence
  Synthetic
gaaaguuaaauagcaug

SEQ ID NO: 711615 - RNA, 17 nt, Artificial Sequence
  Synthetic
guauacuaucaggcaug

SEQ ID NO: 711616 - RNA, 17 nt, Artificial Sequence
  Synthetic
gaaucucagagggcaug

SEQ ID NO: 711617 - RNA, 17 nt, Artificial Sequence
  Synthetic
guaggaaugagggcaug

SEQ ID NO: 711618 - RNA, 17 nt, Artificial Sequence
  Synthetic
gagacuuuaguggcaug

SEQ ID NO: 711619 - RNA, 17 nt, Artificial Sequence
  Synthetic
gauaauuacuuggcaug

SEQ ID NO: 711620 - RNA, 17 nt, Artificial Sequence
  Synthetic
gauucagaucaugcaug

SEQ ID NO: 711621 - RNA, 17 nt, Artificial Sequence
  Synthetic
gacaggggauaugcaug

SEQ ID NO: 711622 - RNA, 17 nt, Artificial Sequence
  Synthetic
gccaguacaacugcaug

SEQ ID NO: 711623 - RNA, 17 nt, Artificial Sequence
  Synthetic
ggaccuccuagugcaug

SEQ ID NO: 711624 - RNA, 17 nt, Artificial Sequence
  Synthetic
guggugacaggugcaug

SEQ ID NO: 711625 - RNA, 17 nt, Artificial Sequence
  Synthetic
gggguguucugugcaug

SEQ ID NO: 711626 - RNA, 17 nt, Artificial Sequence
  Synthetic
gauuuaagacuugcaug

SEQ ID NO: 711627 - RNA, 17 nt, Artificial Sequence
  Synthetic
ggguaaaucuuugcaug

SEQ ID NO: 711628 - RNA, 17 nt, Artificial Sequence
  Synthetic
gagguaacugaaucaug

SEQ ID NO: 711629 - RNA, 17 nt, Artificial Sequence
  Synthetic
gagguaauugaaucaug

SEQ ID NO: 711630 - RNA, 17 nt, Artificial Sequence
  Synthetic
gagguaauuuaaucaug

SEQ ID NO: 711631 - RNA, 17 nt, Artificial Sequence
  Synthetic
gaggugauugcaucaug

SEQ ID NO: 711632 - RNA, 17 nt, Artificial Sequence
  Synthetic
gaggugagcagaucaug

SEQ ID NO: 711633 - RNA, 17 nt, Artificial Sequence
  Synthetic
gaggcaggcagaucaug

SEQ ID NO: 711634 - RNA, 17 nt, Artificial Sequence
  Synthetic
gaggcgggcagaucaug

SEQ ID NO: 711635 - RNA, 17 nt, Artificial Sequence
  Synthetic
gaggugggcagaucaug

SEQ ID NO: 711636 - RNA, 17 nt, Artificial Sequence
  Synthetic
gaggcaggcggaucaug

SEQ ID NO: 711637 - RNA, 17 nt, Artificial Sequence
  Synthetic
gaggcgggcggaucaug

SEQ ID NO: 711638 - RNA, 17 nt, Artificial Sequence
  Synthetic
gaggugauuggaucaug

SEQ ID NO: 711639 - RNA, 17 nt, Artificial Sequence
  Synthetic
ggugugauuggaucaug

SEQ ID NO: 711640 - RNA, 17 nt, Artificial Sequence
  Synthetic
ggcaauugaugaucaug

SEQ ID NO: 711641 - RNA, 17 nt, Artificial Sequence
  Synthetic
gagcauugaguaucaug

SEQ ID NO: 711642 - RNA, 17 nt, Artificial Sequence
  Synthetic
gcaugauauuuaucaug

SEQ ID NO: 711643 - RNA, 17 nt, Artificial Sequence
  Synthetic
gugcugggcugcucaug

SEQ ID NO: 711644 - RNA, 17 nt, Artificial Sequence
  Synthetic
gagccuuuuugcucaug

SEQ ID NO: 711645 - RNA, 17 nt, Artificial Sequence
  Synthetic
gaucuuuccaucucaug

SEQ ID NO: 711646 - RNA, 17 nt, Artificial Sequence
  Synthetic
gcauuuauauucucaug

SEQ ID NO: 711647 - RNA, 17 nt, Artificial Sequence
  Synthetic
gcaugggcagagucaug

SEQ ID NO: 711648 - RNA, 17 nt, Artificial Sequence
  Synthetic
guccacaguaggucaug

SEQ ID NO: 711649 - RNA, 17 nt, Artificial Sequence
  Synthetic
ggggugauuaggucaug

SEQ ID NO: 711650 - RNA, 17 nt, Artificial Sequence
  Synthetic
ggaaguguggggucaug

SEQ ID NO: 711651 - RNA, 17 nt, Artificial Sequence
  Synthetic
gagguuuuugggucaug

SEQ ID NO: 711652 - RNA, 17 nt, Artificial Sequence
  Synthetic
gguaaacucaugucaug

SEQ ID NO: 711653 - RNA, 17 nt, Artificial Sequence
  Synthetic
ggucucacucugucaug

SEQ ID NO: 711654 - RNA, 17 nt, Artificial Sequence
  Synthetic
gguaaacuugugucaug

SEQ ID NO: 711655 - RNA, 17 nt, Artificial Sequence
  Synthetic
gucaguuuuucuucaug

SEQ ID NO: 711656 - RNA, 17 nt, Artificial Sequence
  Synthetic
gauaacaaguguucaug

SEQ ID NO: 711657 - RNA, 17 nt, Artificial Sequence
  Synthetic
gcagagguuuguucaug

SEQ ID NO: 711658 - RNA, 17 nt, Artificial Sequence
  Synthetic
guaguuuucuuuucaug

SEQ ID NO: 711659 - RNA, 17 nt, Artificial Sequence
  Synthetic
gaagaauggcaaagaug

SEQ ID NO: 711660 - RNA, 17 nt, Artificial Sequence
  Synthetic
guauaacuucaaagaug

SEQ ID NO: 711661 - RNA, 17 nt, Artificial Sequence
  Synthetic
gggcuggcagaaagaug

SEQ ID NO: 711662 - RNA, 17 nt, Artificial Sequence
  Synthetic
gaaguuagagaaagaug

SEQ ID NO: 711663 - RNA, 17 nt, Artificial Sequence
  Synthetic
gcuuagagaagaagaug

SEQ ID NO: 711664 - RNA, 17 nt, Artificial Sequence
  Synthetic
ggcaguaucagaagaug

SEQ ID NO: 711665 - RNA, 17 nt, Artificial Sequence
  Synthetic
guauuaaggggaagaug

SEQ ID NO: 711666 - RNA, 17 nt, Artificial Sequence
  Synthetic
gugcuuucuuuaagaug

SEQ ID NO: 711667 - RNA, 17 nt, Artificial Sequence
  Synthetic
gaagucuagaccagaug

SEQ ID NO: 711668 - RNA, 17 nt, Artificial Sequence
  Synthetic
gguuucccggccagaug

SEQ ID NO: 711669 - RNA, 17 nt, Artificial Sequence
  Synthetic
gaacauaucagcagaug

SEQ ID NO: 711670 - RNA, 17 nt, Artificial Sequence
  Synthetic
gguaaauauggcagaug

SEQ ID NO: 711671 - RNA, 17 nt, Artificial Sequence
  Synthetic
ggagaacuacagagaug

SEQ ID NO: 711672 - RNA, 17 nt, Artificial Sequence
  Synthetic
ggagaggaagagagaug

SEQ ID NO: 711673 - RNA, 17 nt, Artificial Sequence
  Synthetic
gacaaugcugagagaug

SEQ ID NO: 711674 - RNA, 17 nt, Artificial Sequence
  Synthetic
guauagaaauagagaug

SEQ ID NO: 711675 - RNA, 17 nt, Artificial Sequence
  Synthetic
gcaacagagacgagaug

SEQ ID NO: 711676 - RNA, 17 nt, Artificial Sequence
  Synthetic
gcuauucuggggagaug

SEQ ID NO: 711677 - RNA, 17 nt, Artificial Sequence
  Synthetic
gagaacacauggagaug

SEQ ID NO: 711678 - RNA, 17 nt, Artificial Sequence
  Synthetic
gcuagccacuggagaug

SEQ ID NO: 711679 - RNA, 17 nt, Artificial Sequence
  Synthetic
guuuccuggaugagaug

SEQ ID NO: 711680 - RNA, 17 nt, Artificial Sequence
  Synthetic
ggggaagucucuagaug

SEQ ID NO: 711681 - RNA, 17 nt, Artificial Sequence
  Synthetic
gcagacaaauguagaug

SEQ ID NO: 711682 - RNA, 17 nt, Artificial Sequence
  Synthetic
gcuuagggaggccgaug

SEQ ID NO: 711683 - RNA, 17 nt, Artificial Sequence
  Synthetic
guucagaaaaggcgaug

SEQ ID NO: 711684 - RNA, 17 nt, Artificial Sequence
  Synthetic
ggauugacuuggcgaug

SEQ ID NO: 711685 - RNA, 17 nt, Artificial Sequence
  Synthetic
gggguugggugucgaug

SEQ ID NO: 711686 - RNA, 17 nt, Artificial Sequence
  Synthetic
gugcugcccaaaggaug

SEQ ID NO: 711687 - RNA, 17 nt, Artificial Sequence
  Synthetic
gggcccacuugaggaug

SEQ ID NO: 711688 - RNA, 17 nt, Artificial Sequence
  Synthetic
gaagaggcuuuaggaug

SEQ ID NO: 711689 - RNA, 17 nt, Artificial Sequence
  Synthetic
gguagggggaagggaug

SEQ ID NO: 711690 - RNA, 17 nt, Artificial Sequence
  Synthetic
ggaauauugaagggaug

SEQ ID NO: 711691 - RNA, 17 nt, Artificial Sequence
  Synthetic
gagcugaaaaggggaug

SEQ ID NO: 711692 - RNA, 17 nt, Artificial Sequence
  Synthetic
gggccucucaggggaug

SEQ ID NO: 711693 - RNA, 17 nt, Artificial Sequence
  Synthetic
guugggggggggggaug

SEQ ID NO: 711694 - RNA, 17 nt, Artificial Sequence
  Synthetic
ggcgagagggugggaug

SEQ ID NO: 711695 - RNA, 17 nt, Artificial Sequence
  Synthetic
gaaucacggaauggaug

SEQ ID NO: 711696 - RNA, 17 nt, Artificial Sequence
  Synthetic
gaaaagaucgauggaug

SEQ ID NO: 711697 - RNA, 17 nt, Artificial Sequence
  Synthetic
ggggaagucacuggaug

SEQ ID NO: 711698 - RNA, 17 nt, Artificial Sequence
  Synthetic
ggaaugucuuuuggaug

SEQ ID NO: 711699 - RNA, 17 nt, Artificial Sequence
  Synthetic
ggcucauauaaaugaug

SEQ ID NO: 711700 - RNA, 17 nt, Artificial Sequence
  Synthetic
gggcuggcaacaugaug

SEQ ID NO: 711701 - RNA, 17 nt, Artificial Sequence
  Synthetic
gaauaacacucaugaug

SEQ ID NO: 711702 - RNA, 17 nt, Artificial Sequence
  Synthetic
gauuuucuuugaugaug

SEQ ID NO: 711703 - RNA, 17 nt, Artificial Sequence
  Synthetic
guuaaggguauaugaug

SEQ ID NO: 711704 - RNA, 17 nt, Artificial Sequence
  Synthetic
gaagagggggccugaug

SEQ ID NO: 711705 - RNA, 17 nt, Artificial Sequence
  Synthetic
guggacagaggcugaug

SEQ ID NO: 711706 - RNA, 17 nt, Artificial Sequence
  Synthetic
gcagaaauggagugaug

SEQ ID NO: 711707 - RNA, 17 nt, Artificial Sequence
  Synthetic
gauuuugcuacuugaug

SEQ ID NO: 711708 - RNA, 17 nt, Artificial Sequence
  Synthetic
gcaaaucccccuugaug

SEQ ID NO: 711709 - RNA, 17 nt, Artificial Sequence
  Synthetic
gcauugguagcuugaug

SEQ ID NO: 711710 - RNA, 17 nt, Artificial Sequence
  Synthetic
gaggaaugcauuugaug

SEQ ID NO: 711711 - RNA, 17 nt, Artificial Sequence
  Synthetic
gcuaaauugcuuugaug

SEQ ID NO: 711712 - RNA, 17 nt, Artificial Sequence
  Synthetic
gcccauuuuuuuugaug

SEQ ID NO: 711713 - RNA, 17 nt, Artificial Sequence
  Synthetic
gaccuaauuuaaauaug

SEQ ID NO: 711714 - RNA, 17 nt, Artificial Sequence
  Synthetic
gaaauguucugaauaug

SEQ ID NO: 711715 - RNA, 17 nt, Artificial Sequence
  Synthetic
gaguaaacgugaauaug

SEQ ID NO: 711716 - RNA, 17 nt, Artificial Sequence
  Synthetic
guaggccugugaauaug

SEQ ID NO: 711717 - RNA, 17 nt, Artificial Sequence
  Synthetic
gcuacagaaauaauaug

SEQ ID NO: 711718 - RNA, 17 nt, Artificial Sequence
  Synthetic
gauuaaaauaacauaug

SEQ ID NO: 711719 - RNA, 17 nt, Artificial Sequence
  Synthetic
ggaccagaggucauaug

SEQ ID NO: 711720 - RNA, 17 nt, Artificial Sequence
  Synthetic
gaauuuuaauagauaug

SEQ ID NO: 711721 - RNA, 17 nt, Artificial Sequence
  Synthetic
ggguacauauauauaug

SEQ ID NO: 711722 - RNA, 17 nt, Artificial Sequence
  Synthetic
guacauauauauauaug

SEQ ID NO: 711723 - RNA, 17 nt, Artificial Sequence
  Synthetic
guuuucaaguauauaug

SEQ ID NO: 711724 - RNA, 17 nt, Artificial Sequence
  Synthetic
gugcuagguccuauaug

SEQ ID NO: 711725 - RNA, 17 nt, Artificial Sequence
  Synthetic
gauuuauaggcuauaug

SEQ ID NO: 711726 - RNA, 17 nt, Artificial Sequence
  Synthetic
guaggccaaugacuaug

SEQ ID NO: 711727 - RNA, 17 nt, Artificial Sequence
  Synthetic
gugaaauguauccuaug

SEQ ID NO: 711728 - RNA, 17 nt, Artificial Sequence
  Synthetic
gugggagcuaagcuaug

SEQ ID NO: 711729 - RNA, 17 nt, Artificial Sequence
  Synthetic
ggauugacuuggcuaug

SEQ ID NO: 711730 - RNA, 17 nt, Artificial Sequence
  Synthetic
ggaccugagcugcuaug

SEQ ID NO: 711731 - RNA, 17 nt, Artificial Sequence
  Synthetic
gcugaauaaacucuaug

SEQ ID NO: 711732 - RNA, 17 nt, Artificial Sequence
  Synthetic
gguuccuucacucuaug

SEQ ID NO: 711733 - RNA, 17 nt, Artificial Sequence
  Synthetic
ggauaucauagucuaug

SEQ ID NO: 711734 - RNA, 17 nt, Artificial Sequence
  Synthetic
gaaaauguuagucuaug

SEQ ID NO: 711735 - RNA, 17 nt, Artificial Sequence
  Synthetic
ggggggcacugucuaug

SEQ ID NO: 711736 - RNA, 17 nt, Artificial Sequence
  Synthetic
gacuguaaaauucuaug

SEQ ID NO: 711737 - RNA, 17 nt, Artificial Sequence
  Synthetic
guauuuaugaaaguaug

SEQ ID NO: 711738 - RNA, 17 nt, Artificial Sequence
  Synthetic
gauccacgugaaguaug

SEQ ID NO: 711739 - RNA, 17 nt, Artificial Sequence
  Synthetic
gaaggugcaagaguaug

SEQ ID NO: 711740 - RNA, 17 nt, Artificial Sequence
  Synthetic
gugaaaagaaagguaug

SEQ ID NO: 711741 - RNA, 17 nt, Artificial Sequence
  Synthetic
gagugggcacggguaug

SEQ ID NO: 711742 - RNA, 17 nt, Artificial Sequence
  Synthetic
gaaugugcagggguaug

SEQ ID NO: 711743 - RNA, 17 nt, Artificial Sequence
  Synthetic
guggggguguggguaug

SEQ ID NO: 711744 - RNA, 17 nt, Artificial Sequence
  Synthetic
guuuaagauuggguaug

SEQ ID NO: 711745 - RNA, 17 nt, Artificial Sequence
  Synthetic
guggccacuuggguaug

SEQ ID NO: 711746 - RNA, 17 nt, Artificial Sequence
  Synthetic
gcuaagugccugguaug

SEQ ID NO: 711747 - RNA, 17 nt, Artificial Sequence
  Synthetic
gggaggaggcugguaug

SEQ ID NO: 711748 - RNA, 17 nt, Artificial Sequence
  Synthetic
guuuugucacauguaug

SEQ ID NO: 711749 - RNA, 17 nt, Artificial Sequence
  Synthetic
gaacacacguguguaug

SEQ ID NO: 711750 - RNA, 17 nt, Artificial Sequence
  Synthetic
gaaagcccuuguguaug

SEQ ID NO: 711751 - RNA, 17 nt, Artificial Sequence
  Synthetic
guugaacuuuguguaug

SEQ ID NO: 711752 - RNA, 17 nt, Artificial Sequence
  Synthetic
guugagaauuuuguaug

SEQ ID NO: 711753 - RNA, 17 nt, Artificial Sequence
  Synthetic
gaaguucugaaauuaug

SEQ ID NO: 711754 - RNA, 17 nt, Artificial Sequence
  Synthetic
gugauggaaacauuaug

SEQ ID NO: 711755 - RNA, 17 nt, Artificial Sequence
  Synthetic
gaguuuucaucauuaug

SEQ ID NO: 711756 - RNA, 17 nt, Artificial Sequence
  Synthetic
gagacgggcagauuaug

SEQ ID NO: 711757 - RNA, 17 nt, Artificial Sequence
  Synthetic
gacaccuggggauuaug

SEQ ID NO: 711758 - RNA, 17 nt, Artificial Sequence
  Synthetic
guaagagaucuauuaug

SEQ ID NO: 711759 - RNA, 17 nt, Artificial Sequence
  Synthetic
gggcugugucuauuaug

SEQ ID NO: 711760 - RNA, 17 nt, Artificial Sequence
  Synthetic
gcaaaguuuguauuaug

SEQ ID NO: 711761 - RNA, 17 nt, Artificial Sequence
  Synthetic
gcuugguguuacuuaug

SEQ ID NO: 711762 - RNA, 17 nt, Artificial Sequence
  Synthetic
gagcucaguaucuuaug

SEQ ID NO: 711763 - RNA, 17 nt, Artificial Sequence
  Synthetic
gagaaaggauucuuaug

SEQ ID NO: 711764 - RNA, 17 nt, Artificial Sequence
  Synthetic
gcccugcaaaaguuaug

SEQ ID NO: 711765 - RNA, 17 nt, Artificial Sequence
  Synthetic
ggagagcgggaguuaug

SEQ ID NO: 711766 - RNA, 17 nt, Artificial Sequence
  Synthetic
ggauuauggagguuaug

SEQ ID NO: 711767 - RNA, 17 nt, Artificial Sequence
  Synthetic
gucacaggguuguuaug

SEQ ID NO: 711768 - RNA, 17 nt, Artificial Sequence
  Synthetic
gauuuuuaaaauuuaug

SEQ ID NO: 711769 - RNA, 17 nt, Artificial Sequence
  Synthetic
gcugcacuaaauuuaug

SEQ ID NO: 711770 - RNA, 17 nt, Artificial Sequence
  Synthetic
ggaagccccacuuuaug

SEQ ID NO: 711771 - RNA, 17 nt, Artificial Sequence
  Synthetic
gguagaauagguuuaug

SEQ ID NO: 711772 - RNA, 17 nt, Artificial Sequence
  Synthetic
gcauagcuuauuuuaug

SEQ ID NO: 711773 - RNA, 17 nt, Artificial Sequence
  Synthetic
gauaguuuuguuuuaug

SEQ ID NO: 711774 - RNA, 17 nt, Artificial Sequence
  Synthetic
gaaagaaacaaaaacug

SEQ ID NO: 711775 - RNA, 17 nt, Artificial Sequence
  Synthetic
gcaaaaagcaaaaacug

SEQ ID NO: 711776 - RNA, 17 nt, Artificial Sequence
  Synthetic
gagcaacaaauaaacug

SEQ ID NO: 711777 - RNA, 17 nt, Artificial Sequence
  Synthetic
ggaaugguaauaaacug

SEQ ID NO: 711778 - RNA, 17 nt, Artificial Sequence
  Synthetic
ggguggggcauaaacug

SEQ ID NO: 711779 - RNA, 17 nt, Artificial Sequence
  Synthetic
gcagaauggauaaacug

SEQ ID NO: 711780 - RNA, 17 nt, Artificial Sequence
  Synthetic
gccaacuccuuaaacug

SEQ ID NO: 711781 - RNA, 17 nt, Artificial Sequence
  Synthetic
gggauggacaacaacug

SEQ ID NO: 711782 - RNA, 17 nt, Artificial Sequence
  Synthetic
gcugugagguacaacug

SEQ ID NO: 711783 - RNA, 17 nt, Artificial Sequence
  Synthetic
gcucuugucuccaacug

SEQ ID NO: 711784 - RNA, 17 nt, Artificial Sequence
  Synthetic
ggaaaagaaggcaacug

SEQ ID NO: 711785 - RNA, 17 nt, Artificial Sequence
  Synthetic
guggaaaagcugaacug

SEQ ID NO: 711786 - RNA, 17 nt, Artificial Sequence
  Synthetic
guaucugaugugaacug

SEQ ID NO: 711787 - RNA, 17 nt, Artificial Sequence
  Synthetic
gagagaaaaauuaacug

SEQ ID NO: 711788 - RNA, 17 nt, Artificial Sequence
  Synthetic
gugcuuggucuuaacug

SEQ ID NO: 711789 - RNA, 17 nt, Artificial Sequence
  Synthetic
gucuaggaaacacacug

SEQ ID NO: 711790 - RNA, 17 nt, Artificial Sequence
  Synthetic
gggaacaacacacacug

SEQ ID NO: 711791 - RNA, 17 nt, Artificial Sequence
  Synthetic
gggaauaacacacacug

SEQ ID NO: 711792 - RNA, 17 nt, Artificial Sequence
  Synthetic
ggcaacaucacacacug

SEQ ID NO: 711793 - RNA, 17 nt, Artificial Sequence
  Synthetic
gggaacaucacacacug

SEQ ID NO: 711794 - RNA, 17 nt, Artificial Sequence
  Synthetic
guaaagagagcacacug

SEQ ID NO: 711795 - RNA, 17 nt, Artificial Sequence
  Synthetic
gauggaaguugacacug

SEQ ID NO: 711796 - RNA, 17 nt, Artificial Sequence
  Synthetic
gaaauaugcauacacug

SEQ ID NO: 711797 - RNA, 17 nt, Artificial Sequence
  Synthetic
gugguacauauacacug

SEQ ID NO: 711798 - RNA, 17 nt, Artificial Sequence
  Synthetic
gauauauguauacacug

SEQ ID NO: 711799 - RNA, 17 nt, Artificial Sequence
  Synthetic
ggaguuuaaucccacug

SEQ ID NO: 711800 - RNA, 17 nt, Artificial Sequence
  Synthetic
gggugugcaucccacug

SEQ ID NO: 711801 - RNA, 17 nt, Artificial Sequence
  Synthetic
guuuugcaaggccacug

SEQ ID NO: 711802 - RNA, 17 nt, Artificial Sequence
  Synthetic
gcacugaaacuccacug

SEQ ID NO: 711803 - RNA, 17 nt, Artificial Sequence
  Synthetic
guccuaaaauugcacug

SEQ ID NO: 711804 - RNA, 17 nt, Artificial Sequence
  Synthetic
ggauucccauugcacug

SEQ ID NO: 711805 - RNA, 17 nt, Artificial Sequence
  Synthetic
gcuuccaacaaucacug

SEQ ID NO: 711806 - RNA, 17 nt, Artificial Sequence
  Synthetic
gaaacuuacaaucacug

SEQ ID NO: 711807 - RNA, 17 nt, Artificial Sequence
  Synthetic
gucauuaaucuucacug

SEQ ID NO: 711808 - RNA, 17 nt, Artificial Sequence
  Synthetic
gcccuguucuuucacug

SEQ ID NO: 711809 - RNA, 17 nt, Artificial Sequence
  Synthetic
gacugugcuuuucacug

SEQ ID NO: 711810 - RNA, 17 nt, Artificial Sequence
  Synthetic
gauaaaauuuuucacug

SEQ ID NO: 711811 - RNA, 17 nt, Artificial Sequence
  Synthetic
guaugaguuccagacug

SEQ ID NO: 711812 - RNA, 17 nt, Artificial Sequence
  Synthetic
gacuguuucucagacug

SEQ ID NO: 711813 - RNA, 17 nt, Artificial Sequence
  Synthetic
ggcagaagaagagacug

SEQ ID NO: 711814 - RNA, 17 nt, Artificial Sequence
  Synthetic
guaugaauaagagacug

SEQ ID NO: 711815 - RNA, 17 nt, Artificial Sequence
  Synthetic
guucagauacgagacug

SEQ ID NO: 711816 - RNA, 17 nt, Artificial Sequence
  Synthetic
gaacuucccugagacug

SEQ ID NO: 711817 - RNA, 17 nt, Artificial Sequence
  Synthetic
gaagaaacaguagacug

SEQ ID NO: 711818 - RNA, 17 nt, Artificial Sequence
  Synthetic
gaaaguugaaaggacug

SEQ ID NO: 711819 - RNA, 17 nt, Artificial Sequence
  Synthetic
gagagagaagaggacug

SEQ ID NO: 711820 - RNA, 17 nt, Artificial Sequence
  Synthetic
gggcaaaaacgggacug

SEQ ID NO: 711821 - RNA, 17 nt, Artificial Sequence
  Synthetic
gcugggaguggggacug

SEQ ID NO: 711822 - RNA, 17 nt, Artificial Sequence
  Synthetic
guugcuucucaugacug

SEQ ID NO: 711823 - RNA, 17 nt, Artificial Sequence
  Synthetic
ggagacaaggaauacug

SEQ ID NO: 711824 - RNA, 17 nt, Artificial Sequence
  Synthetic
gaauuuggggaauacug

SEQ ID NO: 711825 - RNA, 17 nt, Artificial Sequence
  Synthetic
gacaguaacuuauacug

SEQ ID NO: 711826 - RNA, 17 nt, Artificial Sequence
  Synthetic
gcucccugccacuacug

SEQ ID NO: 711827 - RNA, 17 nt, Artificial Sequence
  Synthetic
ggguuaguuuacuacug

SEQ ID NO: 711828 - RNA, 17 nt, Artificial Sequence
  Synthetic
gaccucaugaccuacug

SEQ ID NO: 711829 - RNA, 17 nt, Artificial Sequence
  Synthetic
ggacaguacagcuacug

SEQ ID NO: 711830 - RNA, 17 nt, Artificial Sequence
  Synthetic
gauuuucaaggcuacug

SEQ ID NO: 711831 - RNA, 17 nt, Artificial Sequence
  Synthetic
guuguguacaauuacug

SEQ ID NO: 711832 - RNA, 17 nt, Artificial Sequence
  Synthetic
gcaauggggaauuacug

SEQ ID NO: 711833 - RNA, 17 nt, Artificial Sequence
  Synthetic
ggauuacuauauuacug

SEQ ID NO: 711834 - RNA, 17 nt, Artificial Sequence
  Synthetic
guaaaauuuuauuacug

SEQ ID NO: 711835 - RNA, 17 nt, Artificial Sequence
  Synthetic
gcacugcaauguuacug

SEQ ID NO: 711836 - RNA, 17 nt, Artificial Sequence
  Synthetic
gaagaggacauuuacug

SEQ ID NO: 711837 - RNA, 17 nt, Artificial Sequence
  Synthetic
ggagaugcaaaaaccug

SEQ ID NO: 711838 - RNA, 17 nt, Artificial Sequence
  Synthetic
guaacuuuaaaaaccug

SEQ ID NO: 711839 - RNA, 17 nt, Artificial Sequence
  Synthetic
ggucaggugaaaaccug

SEQ ID NO: 711840 - RNA, 17 nt, Artificial Sequence
  Synthetic
gaucuuugacaaaccug

SEQ ID NO: 711841 - RNA, 17 nt, Artificial Sequence
  Synthetic
gcaauugcaacaaccug

SEQ ID NO: 711842 - RNA, 17 nt, Artificial Sequence
  Synthetic
gagcaugauggaaccug

SEQ ID NO: 711843 - RNA, 17 nt, Artificial Sequence
  Synthetic
gacaggcagaccaccug

SEQ ID NO: 711844 - RNA, 17 nt, Artificial Sequence
  Synthetic
ggcgggcgcaucaccug

SEQ ID NO: 711845 - RNA, 17 nt, Artificial Sequence
  Synthetic
ggagggcagaucaccug

SEQ ID NO: 711846 - RNA, 17 nt, Artificial Sequence
  Synthetic
ggugggcagaucaccug

SEQ ID NO: 711847 - RNA, 17 nt, Artificial Sequence
  Synthetic
ggcaaacggaucaccug

SEQ ID NO: 711848 - RNA, 17 nt, Artificial Sequence
  Synthetic
ggugaacggaucaccug

SEQ ID NO: 711849 - RNA, 17 nt, Artificial Sequence
  Synthetic
ggcaggcggaucaccug

SEQ ID NO: 711850 - RNA, 17 nt, Artificial Sequence
  Synthetic
ggugggcggaucaccug

SEQ ID NO: 711851 - RNA, 17 nt, Artificial Sequence
  Synthetic
ggugaguggaucaccug

SEQ ID NO: 711852 - RNA, 17 nt, Artificial Sequence
  Synthetic
ggcagguggaucaccug

SEQ ID NO: 711853 - RNA, 17 nt, Artificial Sequence
  Synthetic
ggaggguggaucaccug

SEQ ID NO: 711854 - RNA, 17 nt, Artificial Sequence
  Synthetic
ggcggguggaucaccug

SEQ ID NO: 711855 - RNA, 17 nt, Artificial Sequence
  Synthetic
gauggguggaucaccug

SEQ ID NO: 711856 - RNA, 17 nt, Artificial Sequence
  Synthetic
gguggguggaucaccug

SEQ ID NO: 711857 - RNA, 17 nt, Artificial Sequence
  Synthetic
ggcagccugaucaccug

SEQ ID NO: 711858 - RNA, 17 nt, Artificial Sequence
  Synthetic
ggcggguguaucaccug

SEQ ID NO: 711859 - RNA, 17 nt, Artificial Sequence
  Synthetic
gguaggacacucaccug

SEQ ID NO: 711860 - RNA, 17 nt, Artificial Sequence
  Synthetic
guugaugaggucaccug

SEQ ID NO: 711861 - RNA, 17 nt, Artificial Sequence
  Synthetic
gggugugucaagaccug

SEQ ID NO: 711862 - RNA, 17 nt, Artificial Sequence
  Synthetic
gacuucagugggaccug

SEQ ID NO: 711863 - RNA, 17 nt, Artificial Sequence
  Synthetic
gguggguggauuaccug

SEQ ID NO: 711864 - RNA, 17 nt, Artificial Sequence
  Synthetic
guucuggagcuuaccug

SEQ ID NO: 711865 - RNA, 17 nt, Artificial Sequence
  Synthetic
guuacaauucuuaccug

SEQ ID NO: 711866 - RNA, 17 nt, Artificial Sequence
  Synthetic
guggccaucacacccug

SEQ ID NO: 711867 - RNA, 17 nt, Artificial Sequence
  Synthetic
gggaacaauagacccug

SEQ ID NO: 711868 - RNA, 17 nt, Artificial Sequence
  Synthetic
gguaagcuccaccccug

SEQ ID NO: 711869 - RNA, 17 nt, Artificial Sequence
  Synthetic
gauagagguugccccug

SEQ ID NO: 711870 - RNA, 17 nt, Artificial Sequence
  Synthetic
gucacccaagagcccug

SEQ ID NO: 711871 - RNA, 17 nt, Artificial Sequence
  Synthetic
gacacagcagagcccug

SEQ ID NO: 711872 - RNA, 17 nt, Artificial Sequence
  Synthetic
gcucaggcaaggcccug

SEQ ID NO: 711873 - RNA, 17 nt, Artificial Sequence
  Synthetic
gcuagaacucugcccug

SEQ ID NO: 711874 - RNA, 17 nt, Artificial Sequence
  Synthetic
ggugccauuguucccug

SEQ ID NO: 711875 - RNA, 17 nt, Artificial Sequence
  Synthetic
guuguaaguuuucccug

SEQ ID NO: 711876 - RNA, 17 nt, Artificial Sequence
  Synthetic
guugagaagaaagccug

SEQ ID NO: 711877 - RNA, 17 nt, Artificial Sequence
  Synthetic
gcagaaguuaaagccug

SEQ ID NO: 711878 - RNA, 17 nt, Artificial Sequence
  Synthetic
gagccucagauagccug

SEQ ID NO: 711879 - RNA, 17 nt, Artificial Sequence
  Synthetic
gaugaguuguuagccug

SEQ ID NO: 711880 - RNA, 17 nt, Artificial Sequence
  Synthetic
gugguggcgggcgccug

SEQ ID NO: 711881 - RNA, 17 nt, Artificial Sequence
  Synthetic
guuguggugggcgccug

SEQ ID NO: 711882 - RNA, 17 nt, Artificial Sequence
  Synthetic
gucugagaugaggccug

SEQ ID NO: 711883 - RNA, 17 nt, Artificial Sequence
  Synthetic
guauuagucagggccug

SEQ ID NO: 711884 - RNA, 17 nt, Artificial Sequence
  Synthetic
guucuucugcuggccug

SEQ ID NO: 711885 - RNA, 17 nt, Artificial Sequence
  Synthetic
ggguugaguguggccug

SEQ ID NO: 711886 - RNA, 17 nt, Artificial Sequence
  Synthetic
gcuguauuagcugccug

SEQ ID NO: 711887 - RNA, 17 nt, Artificial Sequence
  Synthetic
gugguggugggugccug

SEQ ID NO: 711888 - RNA, 17 nt, Artificial Sequence
  Synthetic
gcaucacuucuugccug

SEQ ID NO: 711889 - RNA, 17 nt, Artificial Sequence
  Synthetic
gugauauaaaaauccug

SEQ ID NO: 711890 - RNA, 17 nt, Artificial Sequence
  Synthetic
guguaucacacauccug

SEQ ID NO: 711891 - RNA, 17 nt, Artificial Sequence
  Synthetic
guuaaaaagucauccug

SEQ ID NO: 711892 - RNA, 17 nt, Artificial Sequence
  Synthetic
ggacgggacagauccug

SEQ ID NO: 711893 - RNA, 17 nt, Artificial Sequence
  Synthetic
gugguuauuagauccug

SEQ ID NO: 711894 - RNA, 17 nt, Artificial Sequence
  Synthetic
ggcaaagcaaacuccug

SEQ ID NO: 711895 - RNA, 17 nt, Artificial Sequence
  Synthetic
gcuaauagacacuccug

SEQ ID NO: 711896 - RNA, 17 nt, Artificial Sequence
  Synthetic
gacgcauccuccuccug

SEQ ID NO: 711897 - RNA, 17 nt, Artificial Sequence
  Synthetic
gaucgcaucggcuccug

SEQ ID NO: 711898 - RNA, 17 nt, Artificial Sequence
  Synthetic
ggaaugaagugcuccug

SEQ ID NO: 711899 - RNA, 17 nt, Artificial Sequence
  Synthetic
gaaaggccagucuccug

SEQ ID NO: 711900 - RNA, 17 nt, Artificial Sequence
  Synthetic
gccaugaaacauuccug

SEQ ID NO: 711901 - RNA, 17 nt, Artificial Sequence
  Synthetic
gagaaaguuuauuccug

SEQ ID NO: 711902 - RNA, 17 nt, Artificial Sequence
  Synthetic
gcuuaaugcccuuccug

SEQ ID NO: 711903 - RNA, 17 nt, Artificial Sequence
  Synthetic
ggcgcuucuccuuccug

SEQ ID NO: 711904 - RNA, 17 nt, Artificial Sequence
  Synthetic
gcaaccuccgcuuccug

SEQ ID NO: 711905 - RNA, 17 nt, Artificial Sequence
  Synthetic
gacuggauuuguuccug

SEQ ID NO: 711906 - RNA, 17 nt, Artificial Sequence
  Synthetic
gucuaccagauuuccug

SEQ ID NO: 711907 - RNA, 17 nt, Artificial Sequence
  Synthetic
gcuauuucaguuuccug

SEQ ID NO: 711908 - RNA, 17 nt, Artificial Sequence
  Synthetic
guuaagaccucaagcug

SEQ ID NO: 711909 - RNA, 17 nt, Artificial Sequence
  Synthetic
gugauucuaggaagcug

SEQ ID NO: 711910 - RNA, 17 nt, Artificial Sequence
  Synthetic
guugagaagggaagcug

SEQ ID NO: 711911 - RNA, 17 nt, Artificial Sequence
  Synthetic
gagcaggcuggaagcug

SEQ ID NO: 711912 - RNA, 17 nt, Artificial Sequence
  Synthetic
gacaggaauaacagcug

SEQ ID NO: 711913 - RNA, 17 nt, Artificial Sequence
  Synthetic
gaaaacaaguacagcug

SEQ ID NO: 711914 - RNA, 17 nt, Artificial Sequence
  Synthetic
ggcuugggguacagcug

SEQ ID NO: 711915 - RNA, 17 nt, Artificial Sequence
  Synthetic
gcccugcauaccagcug

SEQ ID NO: 711916 - RNA, 17 nt, Artificial Sequence
  Synthetic
gccuguagucccagcug

SEQ ID NO: 711917 - RNA, 17 nt, Artificial Sequence
  Synthetic
gauuggugaaagagcug

SEQ ID NO: 711918 - RNA, 17 nt, Artificial Sequence
  Synthetic
gcggacugccagagcug

SEQ ID NO: 711919 - RNA, 17 nt, Artificial Sequence
  Synthetic
guuaaguggcagagcug

SEQ ID NO: 711920 - RNA, 17 nt, Artificial Sequence
  Synthetic
guggcuuugccgagcug

SEQ ID NO: 711921 - RNA, 17 nt, Artificial Sequence
  Synthetic
gacugaaaagugagcug

SEQ ID NO: 711922 - RNA, 17 nt, Artificial Sequence
  Synthetic
guucccacuuugagcug

SEQ ID NO: 711923 - RNA, 17 nt, Artificial Sequence
  Synthetic
gcaacacaguauagcug

SEQ ID NO: 711924 - RNA, 17 nt, Artificial Sequence
  Synthetic
gagucucugucuagcug

SEQ ID NO: 711925 - RNA, 17 nt, Artificial Sequence
  Synthetic
gugcaugauguuagcug

SEQ ID NO: 711926 - RNA, 17 nt, Artificial Sequence
  Synthetic
gauucugcugcacgcug

SEQ ID NO: 711927 - RNA, 17 nt, Artificial Sequence
  Synthetic
gagcagaaaccucgcug

SEQ ID NO: 711928 - RNA, 17 nt, Artificial Sequence
  Synthetic
gggugggguuuucgcug

SEQ ID NO: 711929 - RNA, 17 nt, Artificial Sequence
  Synthetic
ggagcuacccaaggcug

SEQ ID NO: 711930 - RNA, 17 nt, Artificial Sequence
  Synthetic
gaagcgggggaaggcug

SEQ ID NO: 711931 - RNA, 17 nt, Artificial Sequence
  Synthetic
gcaugaaacagaggcug

SEQ ID NO: 711932 - RNA, 17 nt, Artificial Sequence
  Synthetic
gugguuaccagaggcug

SEQ ID NO: 711933 - RNA, 17 nt, Artificial Sequence
  Synthetic
gcauuagagagaggcug

SEQ ID NO: 711934 - RNA, 17 nt, Artificial Sequence
  Synthetic
gcauguugcggaggcug

SEQ ID NO: 711935 - RNA, 17 nt, Artificial Sequence
  Synthetic
guauuucccugaggcug

SEQ ID NO: 711936 - RNA, 17 nt, Artificial Sequence
  Synthetic
gaaauagaugagggcug

SEQ ID NO: 711937 - RNA, 17 nt, Artificial Sequence
  Synthetic
gugguugccaggggcug

SEQ ID NO: 711938 - RNA, 17 nt, Artificial Sequence
  Synthetic
gugguuuccaggggcug

SEQ ID NO: 711939 - RNA, 17 nt, Artificial Sequence
  Synthetic
ggucaguuuaggggcug

SEQ ID NO: 711940 - RNA, 17 nt, Artificial Sequence
  Synthetic
guucucacuuauggcug

SEQ ID NO: 711941 - RNA, 17 nt, Artificial Sequence
  Synthetic
gaagauaacucuggcug

SEQ ID NO: 711942 - RNA, 17 nt, Artificial Sequence
  Synthetic
guugagggggguggcug

SEQ ID NO: 711943 - RNA, 17 nt, Artificial Sequence
  Synthetic
gagccaacccaaugcug

SEQ ID NO: 711944 - RNA, 17 nt, Artificial Sequence
  Synthetic
ggcacaaaauaaugcug

SEQ ID NO: 711945 - RNA, 17 nt, Artificial Sequence
  Synthetic
ggaucuugaccaugcug

SEQ ID NO: 711946 - RNA, 17 nt, Artificial Sequence
  Synthetic
gcauacugggcaugcug

SEQ ID NO: 711947 - RNA, 17 nt, Artificial Sequence
  Synthetic
gauucugauguaugcug

SEQ ID NO: 711948 - RNA, 17 nt, Artificial Sequence
  Synthetic
gccaauguuuuaugcug

SEQ ID NO: 711949 - RNA, 17 nt, Artificial Sequence
  Synthetic
guccagacaagcugcug

SEQ ID NO: 711950 - RNA, 17 nt, Artificial Sequence
  Synthetic
ggccucccaaagugcug

SEQ ID NO: 711951 - RNA, 17 nt, Artificial Sequence
  Synthetic
gagugugagaagugcug

SEQ ID NO: 711952 - RNA, 17 nt, Artificial Sequence
  Synthetic
ggaaacaucaggugcug

SEQ ID NO: 711953 - RNA, 17 nt, Artificial Sequence
  Synthetic
ggaugaagagggugcug

SEQ ID NO: 711954 - RNA, 17 nt, Artificial Sequence
  Synthetic
ggaaugugcuggugcug

SEQ ID NO: 711955 - RNA, 17 nt, Artificial Sequence
  Synthetic
gggaugguucugugcug

SEQ ID NO: 711956 - RNA, 17 nt, Artificial Sequence
  Synthetic
gguccaaauaauugcug

SEQ ID NO: 711957 - RNA, 17 nt, Artificial Sequence
  Synthetic
gcagugaaguguugcug

SEQ ID NO: 711958 - RNA, 17 nt, Artificial Sequence
  Synthetic
gagugagaguguugcug

SEQ ID NO: 711959 - RNA, 17 nt, Artificial Sequence
  Synthetic
gaagauccauuuugcug

SEQ ID NO: 711960 - RNA, 17 nt, Artificial Sequence
  Synthetic
gucucacuuuuuugcug

SEQ ID NO: 711961 - RNA, 17 nt, Artificial Sequence
  Synthetic
gcacacacaaaaaucug

SEQ ID NO: 711962 - RNA, 17 nt, Artificial Sequence
  Synthetic
gugcccucaaaaaucug

SEQ ID NO: 711963 - RNA, 17 nt, Artificial Sequence
  Synthetic
gcggaagagaaaaucug

SEQ ID NO: 711964 - RNA, 17 nt, Artificial Sequence
  Synthetic
ggcuucgggaaaaucug

SEQ ID NO: 711965 - RNA, 17 nt, Artificial Sequence
  Synthetic
ggugcucaguaaaucug

SEQ ID NO: 711966 - RNA, 17 nt, Artificial Sequence
  Synthetic
gcuaaccuagcaaucug

SEQ ID NO: 711967 - RNA, 17 nt, Artificial Sequence
  Synthetic
gcuagccuagcaaucug

SEQ ID NO: 711968 - RNA, 17 nt, Artificial Sequence
  Synthetic
gagagagagagaaucug

SEQ ID NO: 711969 - RNA, 17 nt, Artificial Sequence
  Synthetic
gaaauugagugaaucug

SEQ ID NO: 711970 - RNA, 17 nt, Artificial Sequence
  Synthetic
gaaaaaaauaccaucug

SEQ ID NO: 711971 - RNA, 17 nt, Artificial Sequence
  Synthetic
ggugugaguuccaucug

SEQ ID NO: 711972 - RNA, 17 nt, Artificial Sequence
  Synthetic
gaugggcagaucaucug

SEQ ID NO: 711973 - RNA, 17 nt, Artificial Sequence
  Synthetic
gguggauggaucaucug

SEQ ID NO: 711974 - RNA, 17 nt, Artificial Sequence
  Synthetic
gcuugaucacagaucug

SEQ ID NO: 711975 - RNA, 17 nt, Artificial Sequence
  Synthetic
gcugaggguaggaucug

SEQ ID NO: 711976 - RNA, 17 nt, Artificial Sequence
  Synthetic
gacuaacccaauaucug

SEQ ID NO: 711977 - RNA, 17 nt, Artificial Sequence
  Synthetic
gaaaacuaagauaucug

SEQ ID NO: 711978 - RNA, 17 nt, Artificial Sequence
  Synthetic
gcuccccaggcuaucug

SEQ ID NO: 711979 - RNA, 17 nt, Artificial Sequence
  Synthetic
guuuauuacucuaucug

SEQ ID NO: 711980 - RNA, 17 nt, Artificial Sequence
  Synthetic
guaaaucagaaacucug

SEQ ID NO: 711981 - RNA, 17 nt, Artificial Sequence
  Synthetic
ggucaugccuaacucug

SEQ ID NO: 711982 - RNA, 17 nt, Artificial Sequence
  Synthetic
gggaacaucacacucug

SEQ ID NO: 711983 - RNA, 17 nt, Artificial Sequence
  Synthetic
gggaauaucacacucug

SEQ ID NO: 711984 - RNA, 17 nt, Artificial Sequence
  Synthetic
gacuauuagucacucug

SEQ ID NO: 711985 - RNA, 17 nt, Artificial Sequence
  Synthetic
gcuaucugacuacucug

SEQ ID NO: 711986 - RNA, 17 nt, Artificial Sequence
  Synthetic
gaagccacggaccucug

SEQ ID NO: 711987 - RNA, 17 nt, Artificial Sequence
  Synthetic
gcagaagggggccucug

SEQ ID NO: 711988 - RNA, 17 nt, Artificial Sequence
  Synthetic
gccuuguaauagcucug

SEQ ID NO: 711989 - RNA, 17 nt, Artificial Sequence
  Synthetic
guuagguucaggcucug

SEQ ID NO: 711990 - RNA, 17 nt, Artificial Sequence
  Synthetic
gacauuaugaggcucug

SEQ ID NO: 711991 - RNA, 17 nt, Artificial Sequence
  Synthetic
gguuacuuuuggcucug

SEQ ID NO: 711992 - RNA, 17 nt, Artificial Sequence
  Synthetic
gucaugcuaaugcucug

SEQ ID NO: 711993 - RNA, 17 nt, Artificial Sequence
  Synthetic
gugguacugcugcucug

SEQ ID NO: 711994 - RNA, 17 nt, Artificial Sequence
  Synthetic
gaccucucuuugcucug

SEQ ID NO: 711995 - RNA, 17 nt, Artificial Sequence
  Synthetic
gugucagaagcucucug

SEQ ID NO: 711996 - RNA, 17 nt, Artificial Sequence
  Synthetic
gcugugucaucucucug

SEQ ID NO: 711997 - RNA, 17 nt, Artificial Sequence
  Synthetic
guuguugugucucucug

SEQ ID NO: 711998 - RNA, 17 nt, Artificial Sequence
  Synthetic
gcauccccuugucucug

SEQ ID NO: 711999 - RNA, 17 nt, Artificial Sequence
  Synthetic
guuuucuuuugucucug

SEQ ID NO: 712000 - RNA, 17 nt, Artificial Sequence
  Synthetic
gaaucuuccauucucug

SEQ ID NO: 712001 - RNA, 17 nt, Artificial Sequence
  Synthetic
guuugcuccugagucug

SEQ ID NO: 712002 - RNA, 17 nt, Artificial Sequence
  Synthetic
ggcaucugaauagucug

SEQ ID NO: 712003 - RNA, 17 nt, Artificial Sequence
  Synthetic
ggauugguacgggucug

SEQ ID NO: 712004 - RNA, 17 nt, Artificial Sequence
  Synthetic
gaucuaaagcaugucug

SEQ ID NO: 712005 - RNA, 17 nt, Artificial Sequence
  Synthetic
guccccaaauaugucug

SEQ ID NO: 712006 - RNA, 17 nt, Artificial Sequence
  Synthetic
guaguagcccgugucug

SEQ ID NO: 712007 - RNA, 17 nt, Artificial Sequence
  Synthetic
ggaaauaauaaauucug

SEQ ID NO: 712008 - RNA, 17 nt, Artificial Sequence
  Synthetic
gaguuuuaauuauucug

SEQ ID NO: 712009 - RNA, 17 nt, Artificial Sequence
  Synthetic
gucaaauaucacuucug

SEQ ID NO: 712010 - RNA, 17 nt, Artificial Sequence
  Synthetic
guccaauaucccuucug

SEQ ID NO: 712011 - RNA, 17 nt, Artificial Sequence
  Synthetic
gaaucacuuuccuucug

SEQ ID NO: 712012 - RNA, 17 nt, Artificial Sequence
  Synthetic
gaaaagugaaaguucug

SEQ ID NO: 712013 - RNA, 17 nt, Artificial Sequence
  Synthetic
gagaaguugcaguucug

SEQ ID NO: 712014 - RNA, 17 nt, Artificial Sequence
  Synthetic
gcauuugccaauuucug

SEQ ID NO: 712015 - RNA, 17 nt, Artificial Sequence
  Synthetic
guguuugccaauuucug

SEQ ID NO: 712016 - RNA, 17 nt, Artificial Sequence
  Synthetic
guuuauuaauauuucug

SEQ ID NO: 712017 - RNA, 17 nt, Artificial Sequence
  Synthetic
guguggugauauuucug

SEQ ID NO: 712018 - RNA, 17 nt, Artificial Sequence
  Synthetic
gguaguuuguauuucug

SEQ ID NO: 712019 - RNA, 17 nt, Artificial Sequence
  Synthetic
guguggcauuauuucug

SEQ ID NO: 712020 - RNA, 17 nt, Artificial Sequence
  Synthetic
gugugguauuauuucug

SEQ ID NO: 712021 - RNA, 17 nt, Artificial Sequence
  Synthetic
gugacuccaacuuucug

SEQ ID NO: 712022 - RNA, 17 nt, Artificial Sequence
  Synthetic
gcuucucugccuuucug

SEQ ID NO: 712023 - RNA, 17 nt, Artificial Sequence
  Synthetic
gggagaacugcuuucug

SEQ ID NO: 712024 - RNA, 17 nt, Artificial Sequence
  Synthetic
gaacccuagucuuucug

SEQ ID NO: 712025 - RNA, 17 nt, Artificial Sequence
  Synthetic
guaaguaggucuuucug

SEQ ID NO: 712026 - RNA, 17 nt, Artificial Sequence
  Synthetic
ggccucugagguuucug

SEQ ID NO: 712027 - RNA, 17 nt, Artificial Sequence
  Synthetic
gacuguguguguuucug

SEQ ID NO: 712028 - RNA, 17 nt, Artificial Sequence
  Synthetic
gaaaaacucauuuucug

SEQ ID NO: 712029 - RNA, 17 nt, Artificial Sequence
  Synthetic
ggguauaaaaaaaagug

SEQ ID NO: 712030 - RNA, 17 nt, Artificial Sequence
  Synthetic
guaagagccacaaagug

SEQ ID NO: 712031 - RNA, 17 nt, Artificial Sequence
  Synthetic
gacaaguagagaaagug

SEQ ID NO: 712032 - RNA, 17 nt, Artificial Sequence
  Synthetic
gcccaauguugaaagug

SEQ ID NO: 712033 - RNA, 17 nt, Artificial Sequence
  Synthetic
ggcguuagccccaagug

SEQ ID NO: 712034 - RNA, 17 nt, Artificial Sequence
  Synthetic
gcaugguuggccaagug

SEQ ID NO: 712035 - RNA, 17 nt, Artificial Sequence
  Synthetic
gacugccuucucaagug

SEQ ID NO: 712036 - RNA, 17 nt, Artificial Sequence
  Synthetic
gggauguauuucaagug

SEQ ID NO: 712037 - RNA, 17 nt, Artificial Sequence
  Synthetic
ggagaacaucagaagug

SEQ ID NO: 712038 - RNA, 17 nt, Artificial Sequence
  Synthetic
gaccaaaguaggaagug

SEQ ID NO: 712039 - RNA, 17 nt, Artificial Sequence
  Synthetic
gaugacauuaggaagug

SEQ ID NO: 712040 - RNA, 17 nt, Artificial Sequence
  Synthetic
gggcuuaacgggaagug

SEQ ID NO: 712041 - RNA, 17 nt, Artificial Sequence
  Synthetic
gaacguguuuggaagug

SEQ ID NO: 712042 - RNA, 17 nt, Artificial Sequence
  Synthetic
gucuuacgguugaagug

SEQ ID NO: 712043 - RNA, 17 nt, Artificial Sequence
  Synthetic
gaguauugguauaagug

SEQ ID NO: 712044 - RNA, 17 nt, Artificial Sequence
  Synthetic
gaaaaguggccuaagug

SEQ ID NO: 712045 - RNA, 17 nt, Artificial Sequence
  Synthetic
gaaaacugauguaagug

SEQ ID NO: 712046 - RNA, 17 nt, Artificial Sequence
  Synthetic
gaaauaugguguaagug

SEQ ID NO: 712047 - RNA, 17 nt, Artificial Sequence
  Synthetic
gaacuguauaaacagug

SEQ ID NO: 712048 - RNA, 17 nt, Artificial Sequence
  Synthetic
gaaaggcaguaacagug

SEQ ID NO: 712049 - RNA, 17 nt, Artificial Sequence
  Synthetic
guguggugaccacagug

SEQ ID NO: 712050 - RNA, 17 nt, Artificial Sequence
  Synthetic
gaaaggccacgacagug

SEQ ID NO: 712051 - RNA, 17 nt, Artificial Sequence
  Synthetic
guaguugacggacagug

SEQ ID NO: 712052 - RNA, 17 nt, Artificial Sequence
  Synthetic
gggcaguugugacagug

SEQ ID NO: 712053 - RNA, 17 nt, Artificial Sequence
  Synthetic
gucuaauauugacagug

SEQ ID NO: 712054 - RNA, 17 nt, Artificial Sequence
  Synthetic
gucuaauguugacagug

SEQ ID NO: 712055 - RNA, 17 nt, Artificial Sequence
  Synthetic
gccaugaaaauacagug

SEQ ID NO: 712056 - RNA, 17 nt, Artificial Sequence
  Synthetic
gccaagaacauacagug

SEQ ID NO: 712057 - RNA, 17 nt, Artificial Sequence
  Synthetic
ggguguccuccccagug

SEQ ID NO: 712058 - RNA, 17 nt, Artificial Sequence
  Synthetic
gcacacucccuccagug

SEQ ID NO: 712059 - RNA, 17 nt, Artificial Sequence
  Synthetic
ggcugagggcagcagug

SEQ ID NO: 712060 - RNA, 17 nt, Artificial Sequence
  Synthetic
gagugcaugcagcagug

SEQ ID NO: 712061 - RNA, 17 nt, Artificial Sequence
  Synthetic
gagccgagaaggcagug

SEQ ID NO: 712062 - RNA, 17 nt, Artificial Sequence
  Synthetic
gcugguuaucugcagug

SEQ ID NO: 712063 - RNA, 17 nt, Artificial Sequence
  Synthetic
gcaaauacccuucagug

SEQ ID NO: 712064 - RNA, 17 nt, Artificial Sequence
  Synthetic
gacagugaggaagagug

SEQ ID NO: 712065 - RNA, 17 nt, Artificial Sequence
  Synthetic
gccugggugacagagug

SEQ ID NO: 712066 - RNA, 17 nt, Artificial Sequence
  Synthetic
ggggaaucaagagagug

SEQ ID NO: 712067 - RNA, 17 nt, Artificial Sequence
  Synthetic
gggauuuugggagagug

SEQ ID NO: 712068 - RNA, 17 nt, Artificial Sequence
  Synthetic
gacaacaccugagagug

SEQ ID NO: 712069 - RNA, 17 nt, Artificial Sequence
  Synthetic
ggaggacuacuagagug

SEQ ID NO: 712070 - RNA, 17 nt, Artificial Sequence
  Synthetic
gggaguggguaggagug

SEQ ID NO: 712071 - RNA, 17 nt, Artificial Sequence
  Synthetic
gauacgcucugggagug

SEQ ID NO: 712072 - RNA, 17 nt, Artificial Sequence
  Synthetic
ggaagccuacuggagug

SEQ ID NO: 712073 - RNA, 17 nt, Artificial Sequence
  Synthetic
gcuugggagguggagug

SEQ ID NO: 712074 - RNA, 17 nt, Artificial Sequence
  Synthetic
gucccugucauugagug

SEQ ID NO: 712075 - RNA, 17 nt, Artificial Sequence
  Synthetic
ggcagccaaguugagug

SEQ ID NO: 712076 - RNA, 17 nt, Artificial Sequence
  Synthetic
gcaaugcaauaauagug

SEQ ID NO: 712077 - RNA, 17 nt, Artificial Sequence
  Synthetic
gaguuuaaaaucuagug

SEQ ID NO: 712078 - RNA, 17 nt, Artificial Sequence
  Synthetic
guuagaggcaucuagug

SEQ ID NO: 712079 - RNA, 17 nt, Artificial Sequence
  Synthetic
gcaguaaaaaaguagug

SEQ ID NO: 712080 - RNA, 17 nt, Artificial Sequence
  Synthetic
guuuugccucaguagug

SEQ ID NO: 712081 - RNA, 17 nt, Artificial Sequence
  Synthetic
gugguacugagguagug

SEQ ID NO: 712082 - RNA, 17 nt, Artificial Sequence
  Synthetic
ggcuacaaaggguagug

SEQ ID NO: 712083 - RNA, 17 nt, Artificial Sequence
  Synthetic
ggcugugaaggguagug

SEQ ID NO: 712084 - RNA, 17 nt, Artificial Sequence
  Synthetic
gaauaauauugguagug

SEQ ID NO: 712085 - RNA, 17 nt, Artificial Sequence
  Synthetic
gaaaaagagccuuagug

SEQ ID NO: 712086 - RNA, 17 nt, Artificial Sequence
  Synthetic
gauacucaagcuuagug

SEQ ID NO: 712087 - RNA, 17 nt, Artificial Sequence
  Synthetic
gagcugaauguuuagug

SEQ ID NO: 712088 - RNA, 17 nt, Artificial Sequence
  Synthetic
guuuuuuaaauaacgug

SEQ ID NO: 712089 - RNA, 17 nt, Artificial Sequence
  Synthetic
guugguugugcgacgug

SEQ ID NO: 712090 - RNA, 17 nt, Artificial Sequence
  Synthetic
ggugcccucucaccgug

SEQ ID NO: 712091 - RNA, 17 nt, Artificial Sequence
  Synthetic
gcaaauaaauuuccgug

SEQ ID NO: 712092 - RNA, 17 nt, Artificial Sequence
  Synthetic
gccauggaggcagcgug

SEQ ID NO: 712093 - RNA, 17 nt, Artificial Sequence
  Synthetic
ggaugggaagggucgug

SEQ ID NO: 712094 - RNA, 17 nt, Artificial Sequence
  Synthetic
ggccuggcuuugucgug

SEQ ID NO: 712095 - RNA, 17 nt, Artificial Sequence
  Synthetic
gaauguugacuuucgug

SEQ ID NO: 712096 - RNA, 17 nt, Artificial Sequence
  Synthetic
gacacagggaaaaggug

SEQ ID NO: 712097 - RNA, 17 nt, Artificial Sequence
  Synthetic
gcauaaaguagaaggug

SEQ ID NO: 712098 - RNA, 17 nt, Artificial Sequence
  Synthetic
gaugguauuagaaggug

SEQ ID NO: 712099 - RNA, 17 nt, Artificial Sequence
  Synthetic
gggugauugggaaggug

SEQ ID NO: 712100 - RNA, 17 nt, Artificial Sequence
  Synthetic
ggguagcugaacaggug

SEQ ID NO: 712101 - RNA, 17 nt, Artificial Sequence
  Synthetic
gucaaaaguaacaggug

SEQ ID NO: 712102 - RNA, 17 nt, Artificial Sequence
  Synthetic
gaaaaaugagacaggug

SEQ ID NO: 712103 - RNA, 17 nt, Artificial Sequence
  Synthetic
gcaaucagggccaggug

SEQ ID NO: 712104 - RNA, 17 nt, Artificial Sequence
  Synthetic
gguaaauuggccaggug

SEQ ID NO: 712105 - RNA, 17 nt, Artificial Sequence
  Synthetic
gagauugcuuccaggug

SEQ ID NO: 712106 - RNA, 17 nt, Artificial Sequence
  Synthetic
gcaauuucuggcaggug

SEQ ID NO: 712107 - RNA, 17 nt, Artificial Sequence
  Synthetic
gcagcuaggaucaggug

SEQ ID NO: 712108 - RNA, 17 nt, Artificial Sequence
  Synthetic
gaaugccgagagaggug

SEQ ID NO: 712109 - RNA, 17 nt, Artificial Sequence
  Synthetic
gaaugcugagagaggug

SEQ ID NO: 712110 - RNA, 17 nt, Artificial Sequence
  Synthetic
ggugguuauuggaggug

SEQ ID NO: 712111 - RNA, 17 nt, Artificial Sequence
  Synthetic
guuaagccacugaggug

SEQ ID NO: 712112 - RNA, 17 nt, Artificial Sequence
  Synthetic
gaaggguaugugaggug

SEQ ID NO: 712113 - RNA, 17 nt, Artificial Sequence
  Synthetic
guguauggugugaggug

SEQ ID NO: 712114 - RNA, 17 nt, Artificial Sequence
  Synthetic
gauaauugcuugaggug

SEQ ID NO: 712115 - RNA, 17 nt, Artificial Sequence
  Synthetic
gaagcccaaaauaggug

SEQ ID NO: 712116 - RNA, 17 nt, Artificial Sequence
  Synthetic
gagguaggggauaggug

SEQ ID NO: 712117 - RNA, 17 nt, Artificial Sequence
  Synthetic
gaggacccagguaggug

SEQ ID NO: 712118 - RNA, 17 nt, Artificial Sequence
  Synthetic
gugugugucugucggug

SEQ ID NO: 712119 - RNA, 17 nt, Artificial Sequence
  Synthetic
ggauggaaucaagggug

SEQ ID NO: 712120 - RNA, 17 nt, Artificial Sequence
  Synthetic
gggaaaaaguuagggug

SEQ ID NO: 712121 - RNA, 17 nt, Artificial Sequence
  Synthetic
gaggcaaaagacgggug

SEQ ID NO: 712122 - RNA, 17 nt, Artificial Sequence
  Synthetic
gagaaacaggccgggug

SEQ ID NO: 712123 - RNA, 17 nt, Artificial Sequence
  Synthetic
gggccuguuggcgggug

SEQ ID NO: 712124 - RNA, 17 nt, Artificial Sequence
  Synthetic
gggccugucaaggggug

SEQ ID NO: 712125 - RNA, 17 nt, Artificial Sequence
  Synthetic
gauuguuucaaggggug

SEQ ID NO: 712126 - RNA, 17 nt, Artificial Sequence
  Synthetic
gauguccagcaggggug

SEQ ID NO: 712127 - RNA, 17 nt, Artificial Sequence
  Synthetic
guuauaacaagggggug

SEQ ID NO: 712128 - RNA, 17 nt, Artificial Sequence
  Synthetic
gggccugucagggggug

SEQ ID NO: 712129 - RNA, 17 nt, Artificial Sequence
  Synthetic
gggaaggguagggggug

SEQ ID NO: 712130 - RNA, 17 nt, Artificial Sequence
  Synthetic
ggugccuguugggggug

SEQ ID NO: 712131 - RNA, 17 nt, Artificial Sequence
  Synthetic
gggccugucguggggug

SEQ ID NO: 712132 - RNA, 17 nt, Artificial Sequence
  Synthetic
gggacugugguggggug

SEQ ID NO: 712133 - RNA, 17 nt, Artificial Sequence
  Synthetic
gggacugcuguggggug

SEQ ID NO: 712134 - RNA, 17 nt, Artificial Sequence
  Synthetic
gggccugcuguggggug

SEQ ID NO: 712135 - RNA, 17 nt, Artificial Sequence
  Synthetic
gaugagauuguggggug

SEQ ID NO: 712136 - RNA, 17 nt, Artificial Sequence
  Synthetic
ggaacuguuguggggug

SEQ ID NO: 712137 - RNA, 17 nt, Artificial Sequence
  Synthetic
gggacuguuguggggug

SEQ ID NO: 712138 - RNA, 17 nt, Artificial Sequence
  Synthetic
gggccuguuguggggug

SEQ ID NO: 712139 - RNA, 17 nt, Artificial Sequence
  Synthetic
gggguugggaaugggug

SEQ ID NO: 712140 - RNA, 17 nt, Artificial Sequence
  Synthetic
gcaugcauugaugggug

SEQ ID NO: 712141 - RNA, 17 nt, Artificial Sequence
  Synthetic
gaauucccggcugggug

SEQ ID NO: 712142 - RNA, 17 nt, Artificial Sequence
  Synthetic
gugguuaccucugggug

SEQ ID NO: 712143 - RNA, 17 nt, Artificial Sequence
  Synthetic
guuauuaaaauugggug

SEQ ID NO: 712144 - RNA, 17 nt, Artificial Sequence
  Synthetic
guccuuaggggauggug

SEQ ID NO: 712145 - RNA, 17 nt, Artificial Sequence
  Synthetic
gauggccagugauggug

SEQ ID NO: 712146 - RNA, 17 nt, Artificial Sequence
  Synthetic
gaaagcccuggcuggug

SEQ ID NO: 712147 - RNA, 17 nt, Artificial Sequence
  Synthetic
gaauugccuggcuggug

SEQ ID NO: 712148 - RNA, 17 nt, Artificial Sequence
  Synthetic
gcauuuggugucuggug

SEQ ID NO: 712149 - RNA, 17 nt, Artificial Sequence
  Synthetic
gguuauaagcaguggug

SEQ ID NO: 712150 - RNA, 17 nt, Artificial Sequence
  Synthetic
gaacccucaugguggug

SEQ ID NO: 712151 - RNA, 17 nt, Artificial Sequence
  Synthetic
gagaggugaauguggug

SEQ ID NO: 712152 - RNA, 17 nt, Artificial Sequence
  Synthetic
gcaaucagaccuuggug

SEQ ID NO: 712153 - RNA, 17 nt, Artificial Sequence
  Synthetic
gaaguaggaauuuggug

SEQ ID NO: 712154 - RNA, 17 nt, Artificial Sequence
  Synthetic
ggaaaagucaaaaugug

SEQ ID NO: 712155 - RNA, 17 nt, Artificial Sequence
  Synthetic
ggugagcagaaaaugug

SEQ ID NO: 712156 - RNA, 17 nt, Artificial Sequence
  Synthetic
gaaggauuguaaaugug

SEQ ID NO: 712157 - RNA, 17 nt, Artificial Sequence
  Synthetic
gacccucaaacaaugug

SEQ ID NO: 712158 - RNA, 17 nt, Artificial Sequence
  Synthetic
ggaucagacacaaugug

SEQ ID NO: 712159 - RNA, 17 nt, Artificial Sequence
  Synthetic
ggaucuguggcaaugug

SEQ ID NO: 712160 - RNA, 17 nt, Artificial Sequence
  Synthetic
gguaacagugcaaugug

SEQ ID NO: 712161 - RNA, 17 nt, Artificial Sequence
  Synthetic
gcuggggccagaaugug

SEQ ID NO: 712162 - RNA, 17 nt, Artificial Sequence
  Synthetic
gaugggaucagaaugug

SEQ ID NO: 712163 - RNA, 17 nt, Artificial Sequence
  Synthetic
gauugaaugggaaugug

SEQ ID NO: 712164 - RNA, 17 nt, Artificial Sequence
  Synthetic
gaaaaauggcacaugug

SEQ ID NO: 712165 - RNA, 17 nt, Artificial Sequence
  Synthetic
gcuccuuucagcaugug

SEQ ID NO: 712166 - RNA, 17 nt, Artificial Sequence
  Synthetic
gugccugagaagaugug

SEQ ID NO: 712167 - RNA, 17 nt, Artificial Sequence
  Synthetic
gcucaccuccugaugug

SEQ ID NO: 712168 - RNA, 17 nt, Artificial Sequence
  Synthetic
ggaaccaaagugaugug

SEQ ID NO: 712169 - RNA, 17 nt, Artificial Sequence
  Synthetic
guacauauauauaugug

SEQ ID NO: 712170 - RNA, 17 nt, Artificial Sequence
  Synthetic
ggguauauauauaugug

SEQ ID NO: 712171 - RNA, 17 nt, Artificial Sequence
  Synthetic
ggggcacugucuaugug

SEQ ID NO: 712172 - RNA, 17 nt, Artificial Sequence
  Synthetic
gugccugucaguaugug

SEQ ID NO: 712173 - RNA, 17 nt, Artificial Sequence
  Synthetic
guuuagaaggguaugug

SEQ ID NO: 712174 - RNA, 17 nt, Artificial Sequence
  Synthetic
gugaucucacuuaugug

SEQ ID NO: 712175 - RNA, 17 nt, Artificial Sequence
  Synthetic
gcuuuguuuacacugug

SEQ ID NO: 712176 - RNA, 17 nt, Artificial Sequence
  Synthetic
gccucccaagcccugug

SEQ ID NO: 712177 - RNA, 17 nt, Artificial Sequence
  Synthetic
ggcagccuuucccugug

SEQ ID NO: 712178 - RNA, 17 nt, Artificial Sequence
  Synthetic
ggaagaggaagccugug

SEQ ID NO: 712179 - RNA, 17 nt, Artificial Sequence
  Synthetic
gacagcaucaagcugug

SEQ ID NO: 712180 - RNA, 17 nt, Artificial Sequence
  Synthetic
gaggcgauugugcugug

SEQ ID NO: 712181 - RNA, 17 nt, Artificial Sequence
  Synthetic
gcccucaaaaaucugug

SEQ ID NO: 712182 - RNA, 17 nt, Artificial Sequence
  Synthetic
gagaguaauuaucugug

SEQ ID NO: 712183 - RNA, 17 nt, Artificial Sequence
  Synthetic
gguaauugcauucugug

SEQ ID NO: 712184 - RNA, 17 nt, Artificial Sequence
  Synthetic
guagaaacucuucugug

SEQ ID NO: 712185 - RNA, 17 nt, Artificial Sequence
  Synthetic
gauauuuuaguucugug

SEQ ID NO: 712186 - RNA, 17 nt, Artificial Sequence
  Synthetic
guuggaggcaaagugug

SEQ ID NO: 712187 - RNA, 17 nt, Artificial Sequence
  Synthetic
gagcuuuucaaagugug

SEQ ID NO: 712188 - RNA, 17 nt, Artificial Sequence
  Synthetic
ggugagaugaaagugug

SEQ ID NO: 712189 - RNA, 17 nt, Artificial Sequence
  Synthetic
gacccucaaacagugug

SEQ ID NO: 712190 - RNA, 17 nt, Artificial Sequence
  Synthetic
gcacuuagaauagugug

SEQ ID NO: 712191 - RNA, 17 nt, Artificial Sequence
  Synthetic
ggcuguuuacacgugug

SEQ ID NO: 712192 - RNA, 17 nt, Artificial Sequence
  Synthetic
gacaaaugugaggugug

SEQ ID NO: 712193 - RNA, 17 nt, Artificial Sequence
  Synthetic
gcucuugugagggugug

SEQ ID NO: 712194 - RNA, 17 nt, Artificial Sequence
  Synthetic
gaacagugucuggugug

SEQ ID NO: 712195 - RNA, 17 nt, Artificial Sequence
  Synthetic
gagaggaugcaugugug

SEQ ID NO: 712196 - RNA, 17 nt, Artificial Sequence
  Synthetic
guaaugcagacugugug

SEQ ID NO: 712197 - RNA, 17 nt, Artificial Sequence
  Synthetic
gccuccaaggcugugug

SEQ ID NO: 712198 - RNA, 17 nt, Artificial Sequence
  Synthetic
ggaaaacauucugugug

SEQ ID NO: 712199 - RNA, 17 nt, Artificial Sequence
  Synthetic
guuugcauuucugugug

SEQ ID NO: 712200 - RNA, 17 nt, Artificial Sequence
  Synthetic
ggauaccugagugugug

SEQ ID NO: 712201 - RNA, 17 nt, Artificial Sequence
  Synthetic
gguguuggaugugugug

SEQ ID NO: 712202 - RNA, 17 nt, Artificial Sequence
  Synthetic
guauaaguaugugugug

SEQ ID NO: 712203 - RNA, 17 nt, Artificial Sequence
  Synthetic
gugugugugugugugug

SEQ ID NO: 712204 - RNA, 17 nt, Artificial Sequence
  Synthetic
ggguaaagacuugugug

SEQ ID NO: 712205 - RNA, 17 nt, Artificial Sequence
  Synthetic
ggguuggggguugugug

SEQ ID NO: 712206 - RNA, 17 nt, Artificial Sequence
  Synthetic
gaaaauauggaauugug

SEQ ID NO: 712207 - RNA, 17 nt, Artificial Sequence
  Synthetic
ggaaaaccauaauugug

SEQ ID NO: 712208 - RNA, 17 nt, Artificial Sequence
  Synthetic
guuuuauauucauugug

SEQ ID NO: 712209 - RNA, 17 nt, Artificial Sequence
  Synthetic
gugaacaagagauugug

SEQ ID NO: 712210 - RNA, 17 nt, Artificial Sequence
  Synthetic
gacauguggggauugug

SEQ ID NO: 712211 - RNA, 17 nt, Artificial Sequence
  Synthetic
gcaauuuacaacuugug

SEQ ID NO: 712212 - RNA, 17 nt, Artificial Sequence
  Synthetic
gauuguucucccuugug

SEQ ID NO: 712213 - RNA, 17 nt, Artificial Sequence
  Synthetic
ggaccugcugccuugug

SEQ ID NO: 712214 - RNA, 17 nt, Artificial Sequence
  Synthetic
gguggaugaggcuugug

SEQ ID NO: 712215 - RNA, 17 nt, Artificial Sequence
  Synthetic
guauucugaggcuugug

SEQ ID NO: 712216 - RNA, 17 nt, Artificial Sequence
  Synthetic
guuguuuccugcuugug

SEQ ID NO: 712217 - RNA, 17 nt, Artificial Sequence
  Synthetic
guugcuuuggucuugug

SEQ ID NO: 712218 - RNA, 17 nt, Artificial Sequence
  Synthetic
guugcaguuaaguugug

SEQ ID NO: 712219 - RNA, 17 nt, Artificial Sequence
  Synthetic
gauggcaaacaguugug

SEQ ID NO: 712220 - RNA, 17 nt, Artificial Sequence
  Synthetic
gggucaggguaguugug

SEQ ID NO: 712221 - RNA, 17 nt, Artificial Sequence
  Synthetic
guuuccauguaguugug

SEQ ID NO: 712222 - RNA, 17 nt, Artificial Sequence
  Synthetic
gggcgggugggguugug

SEQ ID NO: 712223 - RNA, 17 nt, Artificial Sequence
  Synthetic
ggcacucucuuguugug

SEQ ID NO: 712224 - RNA, 17 nt, Artificial Sequence
  Synthetic
guacauauuuauuugug

SEQ ID NO: 712225 - RNA, 17 nt, Artificial Sequence
  Synthetic
ggguaguaagcuuugug

SEQ ID NO: 712226 - RNA, 17 nt, Artificial Sequence
  Synthetic
gauaucagacuuuugug

SEQ ID NO: 712227 - RNA, 17 nt, Artificial Sequence
  Synthetic
gguuuauagguuuugug

SEQ ID NO: 712228 - RNA, 17 nt, Artificial Sequence
  Synthetic
gacauccugguuuugug

SEQ ID NO: 712229 - RNA, 17 nt, Artificial Sequence
  Synthetic
ggcaucaacuuuuugug

SEQ ID NO: 712230 - RNA, 17 nt, Artificial Sequence
  Synthetic
gcaccauucuuuuugug

SEQ ID NO: 712231 - RNA, 17 nt, Artificial Sequence
  Synthetic
aacaggcucugaaauug

SEQ ID NO: 712232 - RNA, 17 nt, Artificial Sequence
  Synthetic
gucucugugugaaauug

SEQ ID NO: 712233 - RNA, 17 nt, Artificial Sequence
  Synthetic
gggaagguuugaaauug

SEQ ID NO: 712234 - RNA, 17 nt, Artificial Sequence
  Synthetic
gucuuaguuauaaauug

SEQ ID NO: 712235 - RNA, 17 nt, Artificial Sequence
  Synthetic
gucuuauuuauaaauug

SEQ ID NO: 712236 - RNA, 17 nt, Artificial Sequence
  Synthetic
guggaauuccuaaauug

SEQ ID NO: 712237 - RNA, 17 nt, Artificial Sequence
  Synthetic
ggugaaugaugcaauug

SEQ ID NO: 712238 - RNA, 17 nt, Artificial Sequence
  Synthetic
gaacaggaagucaauug

SEQ ID NO: 712239 - RNA, 17 nt, Artificial Sequence
  Synthetic
gauguaaaauucaauug

SEQ ID NO: 712240 - RNA, 17 nt, Artificial Sequence
  Synthetic
ggagagguaaagaauug

SEQ ID NO: 712241 - RNA, 17 nt, Artificial Sequence
  Synthetic
gagaaaucccagaauug

SEQ ID NO: 712242 - RNA, 17 nt, Artificial Sequence
  Synthetic
gagcuuggaaugaauug

SEQ ID NO: 712243 - RNA, 17 nt, Artificial Sequence
  Synthetic
gaaagguaucauaauug

SEQ ID NO: 712244 - RNA, 17 nt, Artificial Sequence
  Synthetic
ggccauauguauaauug

SEQ ID NO: 712245 - RNA, 17 nt, Artificial Sequence
  Synthetic
gucuacugaaguaauug

SEQ ID NO: 712246 - RNA, 17 nt, Artificial Sequence
  Synthetic
guuuuaaucuuuaauug

SEQ ID NO: 712247 - RNA, 17 nt, Artificial Sequence
  Synthetic
gcuaauauacaacauug

SEQ ID NO: 712248 - RNA, 17 nt, Artificial Sequence
  Synthetic
gagcugaacccacauug

SEQ ID NO: 712249 - RNA, 17 nt, Artificial Sequence
  Synthetic
guguaacagucacauug

SEQ ID NO: 712250 - RNA, 17 nt, Artificial Sequence
  Synthetic
gaaaacaauagacauug

SEQ ID NO: 712251 - RNA, 17 nt, Artificial Sequence
  Synthetic
guuagaauuugacauug

SEQ ID NO: 712252 - RNA, 17 nt, Artificial Sequence
  Synthetic
gacugaaaaauacauug

SEQ ID NO: 712253 - RNA, 17 nt, Artificial Sequence
  Synthetic
gauauacccauacauug

SEQ ID NO: 712254 - RNA, 17 nt, Artificial Sequence
  Synthetic
gauauauguuuacauug

SEQ ID NO: 712255 - RNA, 17 nt, Artificial Sequence
  Synthetic
ggcaagccucaccauug

SEQ ID NO: 712256 - RNA, 17 nt, Artificial Sequence
  Synthetic
gaaaacucuuaccauug

SEQ ID NO: 712257 - RNA, 17 nt, Artificial Sequence
  Synthetic
gaaauuaagucccauug

SEQ ID NO: 712258 - RNA, 17 nt, Artificial Sequence
  Synthetic
guggcacauuuccauug

SEQ ID NO: 712259 - RNA, 17 nt, Artificial Sequence
  Synthetic
gcacucccaaagcauug

SEQ ID NO: 712260 - RNA, 17 nt, Artificial Sequence
  Synthetic
ggggauggggagcauug

SEQ ID NO: 712261 - RNA, 17 nt, Artificial Sequence
  Synthetic
gagguaguauaucauug

SEQ ID NO: 712262 - RNA, 17 nt, Artificial Sequence
  Synthetic
gagguaauaucucauug

SEQ ID NO: 712263 - RNA, 17 nt, Artificial Sequence
  Synthetic
gagaugauaucucauug

SEQ ID NO: 712264 - RNA, 17 nt, Artificial Sequence
  Synthetic
gagaugguaucucauug

SEQ ID NO: 712265 - RNA, 17 nt, Artificial Sequence
  Synthetic
gucagagaccuucauug

SEQ ID NO: 712266 - RNA, 17 nt, Artificial Sequence
  Synthetic
gaagugucuguucauug

SEQ ID NO: 712267 - RNA, 17 nt, Artificial Sequence
  Synthetic
gaacuuucuccagauug

SEQ ID NO: 712268 - RNA, 17 nt, Artificial Sequence
  Synthetic
guagggguagcagauug

SEQ ID NO: 712269 - RNA, 17 nt, Artificial Sequence
  Synthetic
ggaaaugauagagauug

SEQ ID NO: 712270 - RNA, 17 nt, Artificial Sequence
  Synthetic
gagcacaagggagauug

SEQ ID NO: 712271 - RNA, 17 nt, Artificial Sequence
  Synthetic
gaugcugaaauagauug

SEQ ID NO: 712272 - RNA, 17 nt, Artificial Sequence
  Synthetic
guuuauggcauagauug

SEQ ID NO: 712273 - RNA, 17 nt, Artificial Sequence
  Synthetic
gccuccucuguagauug

SEQ ID NO: 712274 - RNA, 17 nt, Artificial Sequence
  Synthetic
gggaugugaaaggauug

SEQ ID NO: 712275 - RNA, 17 nt, Artificial Sequence
  Synthetic
gaggugauuaaggauug

SEQ ID NO: 712276 - RNA, 17 nt, Artificial Sequence
  Synthetic
gauggucgcuuggauug

SEQ ID NO: 712277 - RNA, 17 nt, Artificial Sequence
  Synthetic
gguagaaaaagugauug

SEQ ID NO: 712278 - RNA, 17 nt, Artificial Sequence
  Synthetic
gaauaguauaaauauug

SEQ ID NO: 712279 - RNA, 17 nt, Artificial Sequence
  Synthetic
gagauugcuaaauauug

SEQ ID NO: 712280 - RNA, 17 nt, Artificial Sequence
  Synthetic
ggaauaaacacauauug

SEQ ID NO: 712281 - RNA, 17 nt, Artificial Sequence
  Synthetic
ggcuucuuuagauauug

SEQ ID NO: 712282 - RNA, 17 nt, Artificial Sequence
  Synthetic
gaaggcaagauauauug

SEQ ID NO: 712283 - RNA, 17 nt, Artificial Sequence
  Synthetic
gcccucgguguauauug

SEQ ID NO: 712284 - RNA, 17 nt, Artificial Sequence
  Synthetic
gggagcacuuuauauug

SEQ ID NO: 712285 - RNA, 17 nt, Artificial Sequence
  Synthetic
gucacacagcauuauug

SEQ ID NO: 712286 - RNA, 17 nt, Artificial Sequence
  Synthetic
gugucacagcauuauug

SEQ ID NO: 712287 - RNA, 17 nt, Artificial Sequence
  Synthetic
gauuagcaucauuauug

SEQ ID NO: 712288 - RNA, 17 nt, Artificial Sequence
  Synthetic
guaauauacuauuauug

SEQ ID NO: 712289 - RNA, 17 nt, Artificial Sequence
  Synthetic
gccaagaagucuuauug

SEQ ID NO: 712290 - RNA, 17 nt, Artificial Sequence
  Synthetic
gcaacagccauuuauug

SEQ ID NO: 712291 - RNA, 17 nt, Artificial Sequence
  Synthetic
gcccaaacccuuuauug

SEQ ID NO: 712292 - RNA, 17 nt, Artificial Sequence
  Synthetic
gaucccagaaaaacuug

SEQ ID NO: 712293 - RNA, 17 nt, Artificial Sequence
  Synthetic
ggugucagaaaaacuug

SEQ ID NO: 712294 - RNA, 17 nt, Artificial Sequence
  Synthetic
guaaauaaauaaacuug

SEQ ID NO: 712295 - RNA, 17 nt, Artificial Sequence
  Synthetic
gcuuacacuccaacuug

SEQ ID NO: 712296 - RNA, 17 nt, Artificial Sequence
  Synthetic
gguggguggaacacuug

SEQ ID NO: 712297 - RNA, 17 nt, Artificial Sequence
  Synthetic
gauauccauaacacuug

SEQ ID NO: 712298 - RNA, 17 nt, Artificial Sequence
  Synthetic
guauagaaauacacuug

SEQ ID NO: 712299 - RNA, 17 nt, Artificial Sequence
  Synthetic
gauaauuauaccacuug

SEQ ID NO: 712300 - RNA, 17 nt, Artificial Sequence
  Synthetic
ggagggcaggccacuug

SEQ ID NO: 712301 - RNA, 17 nt, Artificial Sequence
  Synthetic
gugaaauuuuccacuug

SEQ ID NO: 712302 - RNA, 17 nt, Artificial Sequence
  Synthetic
ggagggcagaucacuug

SEQ ID NO: 712303 - RNA, 17 nt, Artificial Sequence
  Synthetic
ggugggcagaucacuug

SEQ ID NO: 712304 - RNA, 17 nt, Artificial Sequence
  Synthetic
ggcugacggaucacuug

SEQ ID NO: 712305 - RNA, 17 nt, Artificial Sequence
  Synthetic
ggcaggcggaucacuug

SEQ ID NO: 712306 - RNA, 17 nt, Artificial Sequence
  Synthetic
ggugggcggaucacuug

SEQ ID NO: 712307 - RNA, 17 nt, Artificial Sequence
  Synthetic
ggcagguggaucacuug

SEQ ID NO: 712308 - RNA, 17 nt, Artificial Sequence
  Synthetic
gauggguggaucacuug

SEQ ID NO: 712309 - RNA, 17 nt, Artificial Sequence
  Synthetic
gcuuaucaacucacuug

SEQ ID NO: 712310 - RNA, 17 nt, Artificial Sequence
  Synthetic
ggucgaguggggacuug

SEQ ID NO: 712311 - RNA, 17 nt, Artificial Sequence
  Synthetic
gccaaguguuggacuug

SEQ ID NO: 712312 - RNA, 17 nt, Artificial Sequence
  Synthetic
gucggguggaugacuug

SEQ ID NO: 712313 - RNA, 17 nt, Artificial Sequence
  Synthetic
gaccacaagcugacuug

SEQ ID NO: 712314 - RNA, 17 nt, Artificial Sequence
  Synthetic
ggcacucuaaauacuug

SEQ ID NO: 712315 - RNA, 17 nt, Artificial Sequence
  Synthetic
gauucuaacucuacuug

SEQ ID NO: 712316 - RNA, 17 nt, Artificial Sequence
  Synthetic
gauggugggugaccuug

SEQ ID NO: 712317 - RNA, 17 nt, Artificial Sequence
  Synthetic
ggaagucccuuaccuug

SEQ ID NO: 712318 - RNA, 17 nt, Artificial Sequence
  Synthetic
gaaaaaaaaaacccuug

SEQ ID NO: 712319 - RNA, 17 nt, Artificial Sequence
  Synthetic
guuucacaugacccuug

SEQ ID NO: 712320 - RNA, 17 nt, Artificial Sequence
  Synthetic
gggcagcucugcccuug

SEQ ID NO: 712321 - RNA, 17 nt, Artificial Sequence
  Synthetic
ggauggaggaucccuug

SEQ ID NO: 712322 - RNA, 17 nt, Artificial Sequence
  Synthetic
guaaacuugcucccuug

SEQ ID NO: 712323 - RNA, 17 nt, Artificial Sequence
  Synthetic
gaucucucagucccuug

SEQ ID NO: 712324 - RNA, 17 nt, Artificial Sequence
  Synthetic
ggaucuuucuucccuug

SEQ ID NO: 712325 - RNA, 17 nt, Artificial Sequence
  Synthetic
gcccaugguuucccuug

SEQ ID NO: 712326 - RNA, 17 nt, Artificial Sequence
  Synthetic
guuggaggguggccuug

SEQ ID NO: 712327 - RNA, 17 nt, Artificial Sequence
  Synthetic
gauuauugcaugccuug

SEQ ID NO: 712328 - RNA, 17 nt, Artificial Sequence
  Synthetic
gaaacaaaauauccuug

SEQ ID NO: 712329 - RNA, 17 nt, Artificial Sequence
  Synthetic
guuaaaauggcuccuug

SEQ ID NO: 712330 - RNA, 17 nt, Artificial Sequence
  Synthetic
gagaugguaucuccuug

SEQ ID NO: 712331 - RNA, 17 nt, Artificial Sequence
  Synthetic
gugaugguaucuccuug

SEQ ID NO: 712332 - RNA, 17 nt, Artificial Sequence
  Synthetic
guuaaacgaauuccuug

SEQ ID NO: 712333 - RNA, 17 nt, Artificial Sequence
  Synthetic
gccuaaauaauuccuug

SEQ ID NO: 712334 - RNA, 17 nt, Artificial Sequence
  Synthetic
gaaguaaaauuuccuug

SEQ ID NO: 712335 - RNA, 17 nt, Artificial Sequence
  Synthetic
gaaaggagcccagcuug

SEQ ID NO: 712336 - RNA, 17 nt, Artificial Sequence
  Synthetic
gcucuuccaucagcuug

SEQ ID NO: 712337 - RNA, 17 nt, Artificial Sequence
  Synthetic
gaggaauccuuagcuug

SEQ ID NO: 712338 - RNA, 17 nt, Artificial Sequence
  Synthetic
gguguaaggaucgcuug

SEQ ID NO: 712339 - RNA, 17 nt, Artificial Sequence
  Synthetic
ggcggguggaucgcuug

SEQ ID NO: 712340 - RNA, 17 nt, Artificial Sequence
  Synthetic
ggcacaaaaagggcuug

SEQ ID NO: 712341 - RNA, 17 nt, Artificial Sequence
  Synthetic
gauuuuggacuggcuug

SEQ ID NO: 712342 - RNA, 17 nt, Artificial Sequence
  Synthetic
gaagucuuacuggcuug

SEQ ID NO: 712343 - RNA, 17 nt, Artificial Sequence
  Synthetic
guauacagaguggcuug

SEQ ID NO: 712344 - RNA, 17 nt, Artificial Sequence
  Synthetic
gugggcugcacugcuug

SEQ ID NO: 712345 - RNA, 17 nt, Artificial Sequence
  Synthetic
gaugauguagcugcuug

SEQ ID NO: 712346 - RNA, 17 nt, Artificial Sequence
  Synthetic
guuugaacugcugcuug

SEQ ID NO: 712347 - RNA, 17 nt, Artificial Sequence
  Synthetic
ggaaggagaauugcuug

SEQ ID NO: 712348 - RNA, 17 nt, Artificial Sequence
  Synthetic
gaaaagauaauugcuug

SEQ ID NO: 712349 - RNA, 17 nt, Artificial Sequence
  Synthetic
ggcaagaggauugcuug

SEQ ID NO: 712350 - RNA, 17 nt, Artificial Sequence
  Synthetic
gaagcugccaaaucuug

SEQ ID NO: 712351 - RNA, 17 nt, Artificial Sequence
  Synthetic
ggcaucugcaaaucuug

SEQ ID NO: 712352 - RNA, 17 nt, Artificial Sequence
  Synthetic
gcaucuaaaacaucuug

SEQ ID NO: 712353 - RNA, 17 nt, Artificial Sequence
  Synthetic
gaugcuugaacaucuug

SEQ ID NO: 712354 - RNA, 17 nt, Artificial Sequence
  Synthetic
gauauuaagagaucuug

SEQ ID NO: 712355 - RNA, 17 nt, Artificial Sequence
  Synthetic
gaggcaauuggaucuug

SEQ ID NO: 712356 - RNA, 17 nt, Artificial Sequence
  Synthetic
gaggguagacccucuug

SEQ ID NO: 712357 - RNA, 17 nt, Artificial Sequence
  Synthetic
guaaucucagccucuug

SEQ ID NO: 712358 - RNA, 17 nt, Artificial Sequence
  Synthetic
ggcauuuuauucucuug

SEQ ID NO: 712359 - RNA, 17 nt, Artificial Sequence
  Synthetic
ggugggcuuuucucuug

SEQ ID NO: 712360 - RNA, 17 nt, Artificial Sequence
  Synthetic
gugaagagugcuucuug

SEQ ID NO: 712361 - RNA, 17 nt, Artificial Sequence
  Synthetic
gaauuacaccuuucuug

SEQ ID NO: 712362 - RNA, 17 nt, Artificial Sequence
  Synthetic
gaaaagcaccuuucuug

SEQ ID NO: 712363 - RNA, 17 nt, Artificial Sequence
  Synthetic
ggagagaggcaaaguug

SEQ ID NO: 712364 - RNA, 17 nt, Artificial Sequence
  Synthetic
gcuugaaaaauaaguug

SEQ ID NO: 712365 - RNA, 17 nt, Artificial Sequence
  Synthetic
gaacucuuuguaaguug

SEQ ID NO: 712366 - RNA, 17 nt, Artificial Sequence
  Synthetic
gccuccugcuccaguug

SEQ ID NO: 712367 - RNA, 17 nt, Artificial Sequence
  Synthetic
ggacuaagcagcaguug

SEQ ID NO: 712368 - RNA, 17 nt, Artificial Sequence
  Synthetic
gucaaaaucaucaguug

SEQ ID NO: 712369 - RNA, 17 nt, Artificial Sequence
  Synthetic
guccaaaaugucaguug

SEQ ID NO: 712370 - RNA, 17 nt, Artificial Sequence
  Synthetic
gauagcuggcagaguug

SEQ ID NO: 712371 - RNA, 17 nt, Artificial Sequence
  Synthetic
ggggagagagagaguug

SEQ ID NO: 712372 - RNA, 17 nt, Artificial Sequence
  Synthetic
gguugaugggagaguug

SEQ ID NO: 712373 - RNA, 17 nt, Artificial Sequence
  Synthetic
gcugaagcacugaguug

SEQ ID NO: 712374 - RNA, 17 nt, Artificial Sequence
  Synthetic
gaugaagaagguaguug

SEQ ID NO: 712375 - RNA, 17 nt, Artificial Sequence
  Synthetic
gaaagucuguuuaguug

SEQ ID NO: 712376 - RNA, 17 nt, Artificial Sequence
  Synthetic
gguccccuuccacguug

SEQ ID NO: 712377 - RNA, 17 nt, Artificial Sequence
  Synthetic
gagaugcuaucucguug

SEQ ID NO: 712378 - RNA, 17 nt, Artificial Sequence
  Synthetic
gagacgguaucucguug

SEQ ID NO: 712379 - RNA, 17 nt, Artificial Sequence
  Synthetic
gacacuuccccagguug

SEQ ID NO: 712380 - RNA, 17 nt, Artificial Sequence
  Synthetic
gaugaggucauagguug

SEQ ID NO: 712381 - RNA, 17 nt, Artificial Sequence
  Synthetic
gucagaugaguagguug

SEQ ID NO: 712382 - RNA, 17 nt, Artificial Sequence
  Synthetic
guaaguuggcaggguug

SEQ ID NO: 712383 - RNA, 17 nt, Artificial Sequence
  Synthetic
ggguaguggggggguug

SEQ ID NO: 712384 - RNA, 17 nt, Artificial Sequence
  Synthetic
gaaacagguggggguug

SEQ ID NO: 712385 - RNA, 17 nt, Artificial Sequence
  Synthetic
guaugugugugggguug

SEQ ID NO: 712386 - RNA, 17 nt, Artificial Sequence
  Synthetic
gaccuauaccuggguug

SEQ ID NO: 712387 - RNA, 17 nt, Artificial Sequence
  Synthetic
ggaacagcucaugguug

SEQ ID NO: 712388 - RNA, 17 nt, Artificial Sequence
  Synthetic
gaaaaaguucaugguug

SEQ ID NO: 712389 - RNA, 17 nt, Artificial Sequence
  Synthetic
gaagcugguccugguug

SEQ ID NO: 712390 - RNA, 17 nt, Artificial Sequence
  Synthetic
guauaugguggugguug

SEQ ID NO: 712391 - RNA, 17 nt, Artificial Sequence
  Synthetic
gaggugauuuuugguug

SEQ ID NO: 712392 - RNA, 17 nt, Artificial Sequence
  Synthetic
gaaaauuauaaauguug

SEQ ID NO: 712393 - RNA, 17 nt, Artificial Sequence
  Synthetic
ggcuuaggagaauguug

SEQ ID NO: 712394 - RNA, 17 nt, Artificial Sequence
  Synthetic
guggcaggcccauguug

SEQ ID NO: 712395 - RNA, 17 nt, Artificial Sequence
  Synthetic
guauuauuccuauguug

SEQ ID NO: 712396 - RNA, 17 nt, Artificial Sequence
  Synthetic
gaaauaagugacuguug

SEQ ID NO: 712397 - RNA, 17 nt, Artificial Sequence
  Synthetic
gcagauguccccuguug

SEQ ID NO: 712398 - RNA, 17 nt, Artificial Sequence
  Synthetic
ggggcucaaugcuguug

SEQ ID NO: 712399 - RNA, 17 nt, Artificial Sequence
  Synthetic
guuggcaaacaguguug

SEQ ID NO: 712400 - RNA, 17 nt, Artificial Sequence
  Synthetic
guaauucccauguguug

SEQ ID NO: 712401 - RNA, 17 nt, Artificial Sequence
  Synthetic
guggggacucuguguug

SEQ ID NO: 712402 - RNA, 17 nt, Artificial Sequence
  Synthetic
gauaagaaauguuguug

SEQ ID NO: 712403 - RNA, 17 nt, Artificial Sequence
  Synthetic
gugcauaagguuuguug

SEQ ID NO: 712404 - RNA, 17 nt, Artificial Sequence
  Synthetic
gcaagaucauuuuguug

SEQ ID NO: 712405 - RNA, 17 nt, Artificial Sequence
  Synthetic
ggcuauauguuuuguug

SEQ ID NO: 712406 - RNA, 17 nt, Artificial Sequence
  Synthetic
gguuauuuuaaaauuug

SEQ ID NO: 712407 - RNA, 17 nt, Artificial Sequence
  Synthetic
gcuauaacucaaauuug

SEQ ID NO: 712408 - RNA, 17 nt, Artificial Sequence
  Synthetic
ggaguucuaucaauuug

SEQ ID NO: 712409 - RNA, 17 nt, Artificial Sequence
  Synthetic
guuuaaaagucaauuug

SEQ ID NO: 712410 - RNA, 17 nt, Artificial Sequence
  Synthetic
ggacuuaauucaauuug

SEQ ID NO: 712411 - RNA, 17 nt, Artificial Sequence
  Synthetic
ggcccagcaugaauuug

SEQ ID NO: 712412 - RNA, 17 nt, Artificial Sequence
  Synthetic
gaccuuuauugaauuug

SEQ ID NO: 712413 - RNA, 17 nt, Artificial Sequence
  Synthetic
gucuauuguugaauuug

SEQ ID NO: 712414 - RNA, 17 nt, Artificial Sequence
  Synthetic
gaauggaugauaauuug

SEQ ID NO: 712415 - RNA, 17 nt, Artificial Sequence
  Synthetic
gaaaauaauauaauuug

SEQ ID NO: 712416 - RNA, 17 nt, Artificial Sequence
  Synthetic
gaacaguagguaauuug

SEQ ID NO: 712417 - RNA, 17 nt, Artificial Sequence
  Synthetic
guguggcagaacauuug

SEQ ID NO: 712418 - RNA, 17 nt, Artificial Sequence
  Synthetic
gagauaaggcacauuug

SEQ ID NO: 712419 - RNA, 17 nt, Artificial Sequence
  Synthetic
gaaugcacuugcauuug

SEQ ID NO: 712420 - RNA, 17 nt, Artificial Sequence
  Synthetic
ggcgggcacaucauuug

SEQ ID NO: 712421 - RNA, 17 nt, Artificial Sequence
  Synthetic
ggcaggcagaucauuug

SEQ ID NO: 712422 - RNA, 17 nt, Artificial Sequence
  Synthetic
guaaaggagcucauuug

SEQ ID NO: 712423 - RNA, 17 nt, Artificial Sequence
  Synthetic
guguuaagauucauuug

SEQ ID NO: 712424 - RNA, 17 nt, Artificial Sequence
  Synthetic
gagugugugaggauuug

SEQ ID NO: 712425 - RNA, 17 nt, Artificial Sequence
  Synthetic
ggcauccacaugauuug

SEQ ID NO: 712426 - RNA, 17 nt, Artificial Sequence
  Synthetic
gagugaagggugauuug

SEQ ID NO: 712427 - RNA, 17 nt, Artificial Sequence
  Synthetic
guuuacaucaauauuug

SEQ ID NO: 712428 - RNA, 17 nt, Artificial Sequence
  Synthetic
gagugcauggauauuug

SEQ ID NO: 712429 - RNA, 17 nt, Artificial Sequence
  Synthetic
guucagguugauauuug

SEQ ID NO: 712430 - RNA, 17 nt, Artificial Sequence
  Synthetic
guauguauauauauuug

SEQ ID NO: 712431 - RNA, 17 nt, Artificial Sequence
  Synthetic
gacagaucuuauauuug

SEQ ID NO: 712432 - RNA, 17 nt, Artificial Sequence
  Synthetic
gcaguuuauucuauuug

SEQ ID NO: 712433 - RNA, 17 nt, Artificial Sequence
  Synthetic
gggcacaacaguauuug

SEQ ID NO: 712434 - RNA, 17 nt, Artificial Sequence
  Synthetic
guagcacuggguauuug

SEQ ID NO: 712435 - RNA, 17 nt, Artificial Sequence
  Synthetic
gauuccauuuguauuug

SEQ ID NO: 712436 - RNA, 17 nt, Artificial Sequence
  Synthetic
gucucugcucuuauuug

SEQ ID NO: 712437 - RNA, 17 nt, Artificial Sequence
  Synthetic
gcuauaucauaacuuug

SEQ ID NO: 712438 - RNA, 17 nt, Artificial Sequence
  Synthetic
guucucuguuaacuuug

SEQ ID NO: 712439 - RNA, 17 nt, Artificial Sequence
  Synthetic
guaaucccaacacuuug

SEQ ID NO: 712440 - RNA, 17 nt, Artificial Sequence
  Synthetic
guaaucccagcacuuug

SEQ ID NO: 712441 - RNA, 17 nt, Artificial Sequence
  Synthetic
gccugucucucacuuug

SEQ ID NO: 712442 - RNA, 17 nt, Artificial Sequence
  Synthetic
ggcaaagguucacuuug

SEQ ID NO: 712443 - RNA, 17 nt, Artificial Sequence
  Synthetic
gaaucugagcaccuuug

SEQ ID NO: 712444 - RNA, 17 nt, Artificial Sequence
  Synthetic
guuuuagggacccuuug

SEQ ID NO: 712445 - RNA, 17 nt, Artificial Sequence
  Synthetic
guaaaaaacagccuuug

SEQ ID NO: 712446 - RNA, 17 nt, Artificial Sequence
  Synthetic
gcuaauauuguccuuug

SEQ ID NO: 712447 - RNA, 17 nt, Artificial Sequence
  Synthetic
gaaacucugaagcuuug

SEQ ID NO: 712448 - RNA, 17 nt, Artificial Sequence
  Synthetic
gccacuuguuagcuuug

SEQ ID NO: 712449 - RNA, 17 nt, Artificial Sequence
  Synthetic
gaacagaaauggcuuug

SEQ ID NO: 712450 - RNA, 17 nt, Artificial Sequence
  Synthetic
gguguuuuguggcuuug

SEQ ID NO: 712451 - RNA, 17 nt, Artificial Sequence
  Synthetic
gaguggaaacugcuuug

SEQ ID NO: 712452 - RNA, 17 nt, Artificial Sequence
  Synthetic
guuaggguugugcuuug

SEQ ID NO: 712453 - RNA, 17 nt, Artificial Sequence
  Synthetic
gugugaaaauugcuuug

SEQ ID NO: 712454 - RNA, 17 nt, Artificial Sequence
  Synthetic
gaaaucgaaaaucuuug

SEQ ID NO: 712455 - RNA, 17 nt, Artificial Sequence
  Synthetic
guaaucccagcucuuug

SEQ ID NO: 712456 - RNA, 17 nt, Artificial Sequence
  Synthetic
ggaaugagaugucuuug

SEQ ID NO: 712457 - RNA, 17 nt, Artificial Sequence
  Synthetic
guagauuaaauucuuug

SEQ ID NO: 712458 - RNA, 17 nt, Artificial Sequence
  Synthetic
ggcuaguauauucuuug

SEQ ID NO: 712459 - RNA, 17 nt, Artificial Sequence
  Synthetic
gaaauguuaaaaguuug

SEQ ID NO: 712460 - RNA, 17 nt, Artificial Sequence
  Synthetic
gucuagucugaaguuug

SEQ ID NO: 712461 - RNA, 17 nt, Artificial Sequence
  Synthetic
guguuuguuuaaguuug

SEQ ID NO: 712462 - RNA, 17 nt, Artificial Sequence
  Synthetic
guggggagugcaguuug

SEQ ID NO: 712463 - RNA, 17 nt, Artificial Sequence
  Synthetic
gaguugaugggaguuug

SEQ ID NO: 712464 - RNA, 17 nt, Artificial Sequence
  Synthetic
ggauaccuuuuaguuug

SEQ ID NO: 712465 - RNA, 17 nt, Artificial Sequence
  Synthetic
guuauuuuuaacguuug

SEQ ID NO: 712466 - RNA, 17 nt, Artificial Sequence
  Synthetic
guuuaauggugcguuug

SEQ ID NO: 712467 - RNA, 17 nt, Artificial Sequence
  Synthetic
gauuauuguaagguuug

SEQ ID NO: 712468 - RNA, 17 nt, Artificial Sequence
  Synthetic
gaaaauguuaugguuug

SEQ ID NO: 712469 - RNA, 17 nt, Artificial Sequence
  Synthetic
gcugcccagcugguuug

SEQ ID NO: 712470 - RNA, 17 nt, Artificial Sequence
  Synthetic
gaaguaguuuugguuug

SEQ ID NO: 712471 - RNA, 17 nt, Artificial Sequence
  Synthetic
gaaauuauaaauguuug

SEQ ID NO: 712472 - RNA, 17 nt, Artificial Sequence
  Synthetic
gcaaugguaaauguuug

SEQ ID NO: 712473 - RNA, 17 nt, Artificial Sequence
  Synthetic
gguuuaucugcuguuug

SEQ ID NO: 712474 - RNA, 17 nt, Artificial Sequence
  Synthetic
ggugggaggauuguuug

SEQ ID NO: 712475 - RNA, 17 nt, Artificial Sequence
  Synthetic
guucuuccauuuguuug

SEQ ID NO: 712476 - RNA, 17 nt, Artificial Sequence
  Synthetic
gaagaacaagaauuuug

SEQ ID NO: 712477 - RNA, 17 nt, Artificial Sequence
  Synthetic
guuaagaaauaauuuug

SEQ ID NO: 712478 - RNA, 17 nt, Artificial Sequence
  Synthetic
guuccauugagauuuug

SEQ ID NO: 712479 - RNA, 17 nt, Artificial Sequence
  Synthetic
gcucuugaaugauuuug

SEQ ID NO: 712480 - RNA, 17 nt, Artificial Sequence
  Synthetic
gaacguguuugauuuug

SEQ ID NO: 712481 - RNA, 17 nt, Artificial Sequence
  Synthetic
gauauauaguuauuuug

SEQ ID NO: 712482 - RNA, 17 nt, Artificial Sequence
  Synthetic
gugaggagguuauuuug

SEQ ID NO: 712483 - RNA, 17 nt, Artificial Sequence
  Synthetic
ggaagggaaagcuuuug

SEQ ID NO: 712484 - RNA, 17 nt, Artificial Sequence
  Synthetic
gaguauucuagcuuuug

SEQ ID NO: 712485 - RNA, 17 nt, Artificial Sequence
  Synthetic
ggggaaacaaucuuuug

SEQ ID NO: 712486 - RNA, 17 nt, Artificial Sequence
  Synthetic
gagcuuuucgucuuuug

SEQ ID NO: 712487 - RNA, 17 nt, Artificial Sequence
  Synthetic
gugcauauuuucuuuug

SEQ ID NO: 712488 - RNA, 17 nt, Artificial Sequence
  Synthetic
guguuuguauaguuuug

SEQ ID NO: 712489 - RNA, 17 nt, Artificial Sequence
  Synthetic
guuuugaaaggguuuug

SEQ ID NO: 712490 - RNA, 17 nt, Artificial Sequence
  Synthetic
gguaagauuuuguuuug

SEQ ID NO: 712491 - RNA, 17 nt, Artificial Sequence
  Synthetic
gccuguguuuuguuuug

SEQ ID NO: 712492 - RNA, 17 nt, Artificial Sequence
  Synthetic
gaauauguggauuuuug

SEQ ID NO: 712493 - RNA, 17 nt, Artificial Sequence
  Synthetic
guaguaugauauuuuug

SEQ ID NO: 712494 - RNA, 17 nt, Artificial Sequence
  Synthetic
guaagauuuccuuuuug

SEQ ID NO: 712495 - RNA, 17 nt, Artificial Sequence
  Synthetic
gugaucaucaguuuuug

SEQ ID NO: 712496 - RNA, 17 nt, Artificial Sequence
  Synthetic
gagaggagugguuuuug

SEQ ID NO: 712497 - RNA, 17 nt, Artificial Sequence
  Synthetic
gguuugauaauuuuuug

SEQ ID NO: 712498 - RNA, 17 nt, Artificial Sequence
  Synthetic
gguuucuccuuuuuuug

SEQ ID NO: 712499 - RNA, 17 nt, Artificial Sequence
  Synthetic
gaugccucuuuuuuuug

SEQ ID NO: 712500 - RNA, 17 nt, Artificial Sequence
  Synthetic
guuuuuuuuuuuuuuug

SEQ ID NO: 712501 - RNA, 17 nt, Artificial Sequence
  Synthetic
guguggcauaaaaaaau

SEQ ID NO: 712502 - RNA, 17 nt, Artificial Sequence
  Synthetic
gugucauucacaaaaau

SEQ ID NO: 712503 - RNA, 17 nt, Artificial Sequence
  Synthetic
gcuaaaaauacaaaaau

SEQ ID NO: 712504 - RNA, 17 nt, Artificial Sequence
  Synthetic
gaggcauguucaaaaau

SEQ ID NO: 712505 - RNA, 17 nt, Artificial Sequence
  Synthetic
gauaaaaacagaaaaau

SEQ ID NO: 712506 - RNA, 17 nt, Artificial Sequence
  Synthetic
guguggaggagaaaaau

SEQ ID NO: 712507 - RNA, 17 nt, Artificial Sequence
  Synthetic
gaaaacacaggaaaaau

SEQ ID NO: 712508 - RNA, 17 nt, Artificial Sequence
  Synthetic
gcaagauaaugaaaaau

SEQ ID NO: 712509 - RNA, 17 nt, Artificial Sequence
  Synthetic
gccacagagugaaaaau

SEQ ID NO: 712510 - RNA, 17 nt, Artificial Sequence
  Synthetic
guaaguaaaauaaaaau

SEQ ID NO: 712511 - RNA, 17 nt, Artificial Sequence
  Synthetic
guuguuauuauaaaaau

SEQ ID NO: 712512 - RNA, 17 nt, Artificial Sequence
  Synthetic
gguuucaagcacaaaau

SEQ ID NO: 712513 - RNA, 17 nt, Artificial Sequence
  Synthetic
gacaagugucacaaaau

SEQ ID NO: 712514 - RNA, 17 nt, Artificial Sequence
  Synthetic
gaaaugaagcccaaaau

SEQ ID NO: 712515 - RNA, 17 nt, Artificial Sequence
  Synthetic
gagaagaaaagcaaaau

SEQ ID NO: 712516 - RNA, 17 nt, Artificial Sequence
  Synthetic
gaaggguacaucaaaau

SEQ ID NO: 712517 - RNA, 17 nt, Artificial Sequence
  Synthetic
gauagucagaucaaaau

SEQ ID NO: 712518 - RNA, 17 nt, Artificial Sequence
  Synthetic
guaccauguaucaaaau

SEQ ID NO: 712519 - RNA, 17 nt, Artificial Sequence
  Synthetic
gagcaaaagcucaaaau

SEQ ID NO: 712520 - RNA, 17 nt, Artificial Sequence
  Synthetic
gaaaaccagcucaaaau

SEQ ID NO: 712521 - RNA, 17 nt, Artificial Sequence
  Synthetic
gcaaugguucucaaaau

SEQ ID NO: 712522 - RNA, 17 nt, Artificial Sequence
  Synthetic
gagaaugcugucaaaau

SEQ ID NO: 712523 - RNA, 17 nt, Artificial Sequence
  Synthetic
ggucuuaaaaagaaaau

SEQ ID NO: 712524 - RNA, 17 nt, Artificial Sequence
  Synthetic
gacuggauaaagaaaau

SEQ ID NO: 712525 - RNA, 17 nt, Artificial Sequence
  Synthetic
gauaacuucaagaaaau

SEQ ID NO: 712526 - RNA, 17 nt, Artificial Sequence
  Synthetic
gagagaugccagaaaau

SEQ ID NO: 712527 - RNA, 17 nt, Artificial Sequence
  Synthetic
ggaucuuaggagaaaau

SEQ ID NO: 712528 - RNA, 17 nt, Artificial Sequence
  Synthetic
gguuucauuuagaaaau

SEQ ID NO: 712529 - RNA, 17 nt, Artificial Sequence
  Synthetic
gcugagaaaccgaaaau

SEQ ID NO: 712530 - RNA, 17 nt, Artificial Sequence
  Synthetic
ggguucagaaggaaaau

SEQ ID NO: 712531 - RNA, 17 nt, Artificial Sequence
  Synthetic
ggaaauaaacugaaaau

SEQ ID NO: 712532 - RNA, 17 nt, Artificial Sequence
  Synthetic
guuagaaaccugaaaau

SEQ ID NO: 712533 - RNA, 17 nt, Artificial Sequence
  Synthetic
gucccuucagugaaaau

SEQ ID NO: 712534 - RNA, 17 nt, Artificial Sequence
  Synthetic
gguucuuggaauaaaau

SEQ ID NO: 712535 - RNA, 17 nt, Artificial Sequence
  Synthetic
gacuuaaaacauaaaau

SEQ ID NO: 712536 - RNA, 17 nt, Artificial Sequence
  Synthetic
gaggagucagauaaaau

SEQ ID NO: 712537 - RNA, 17 nt, Artificial Sequence
  Synthetic
gacagcacaccuaaaau

SEQ ID NO: 712538 - RNA, 17 nt, Artificial Sequence
  Synthetic
guauagaagaguaaaau

SEQ ID NO: 712539 - RNA, 17 nt, Artificial Sequence
  Synthetic
gcccucgccuguaaaau

SEQ ID NO: 712540 - RNA, 17 nt, Artificial Sequence
  Synthetic
gaaaaauauuguaaaau

SEQ ID NO: 712541 - RNA, 17 nt, Artificial Sequence
  Synthetic
gaucaggaaauuaaaau

SEQ ID NO: 712542 - RNA, 17 nt, Artificial Sequence
  Synthetic
gaauggcagguuaaaau

SEQ ID NO: 712543 - RNA, 17 nt, Artificial Sequence
  Synthetic
ggacugugauuuaaaau

SEQ ID NO: 712544 - RNA, 17 nt, Artificial Sequence
  Synthetic
gauacccuauuuaaaau

SEQ ID NO: 712545 - RNA, 17 nt, Artificial Sequence
  Synthetic
gauccugaaaaacaaau

SEQ ID NO: 712546 - RNA, 17 nt, Artificial Sequence
  Synthetic
gacugccagcaacaaau

SEQ ID NO: 712547 - RNA, 17 nt, Artificial Sequence
  Synthetic
guagcauucacacaaau

SEQ ID NO: 712548 - RNA, 17 nt, Artificial Sequence
  Synthetic
gguuaguaaagacaaau

SEQ ID NO: 712549 - RNA, 17 nt, Artificial Sequence
  Synthetic
gaggcacagagacaaau

SEQ ID NO: 712550 - RNA, 17 nt, Artificial Sequence
  Synthetic
ggucuccuuccccaaau

SEQ ID NO: 712551 - RNA, 17 nt, Artificial Sequence
  Synthetic
ggugacagaagccaaau

SEQ ID NO: 712552 - RNA, 17 nt, Artificial Sequence
  Synthetic
gugaggaguggccaaau

SEQ ID NO: 712553 - RNA, 17 nt, Artificial Sequence
  Synthetic
guuuucuuuuuccaaau

SEQ ID NO: 712554 - RNA, 17 nt, Artificial Sequence
  Synthetic
gagauggaccagcaaau

SEQ ID NO: 712555 - RNA, 17 nt, Artificial Sequence
  Synthetic
gcaggaguugggcaaau

SEQ ID NO: 712556 - RNA, 17 nt, Artificial Sequence
  Synthetic
gacacagacuggcaaau

SEQ ID NO: 712557 - RNA, 17 nt, Artificial Sequence
  Synthetic
gcagccaguaugcaaau

SEQ ID NO: 712558 - RNA, 17 nt, Artificial Sequence
  Synthetic
ggagguaaaaaucaaau

SEQ ID NO: 712559 - RNA, 17 nt, Artificial Sequence
  Synthetic
guaucugauucucaaau

SEQ ID NO: 712560 - RNA, 17 nt, Artificial Sequence
  Synthetic
gaacagaucauucaaau

SEQ ID NO: 712561 - RNA, 17 nt, Artificial Sequence
  Synthetic
gagggugaauuucaaau

SEQ ID NO: 712562 - RNA, 17 nt, Artificial Sequence
  Synthetic
gaauugccauuucaaau

SEQ ID NO: 712563 - RNA, 17 nt, Artificial Sequence
  Synthetic
gcuguguauuuucaaau

SEQ ID NO: 712564 - RNA, 17 nt, Artificial Sequence
  Synthetic
ggaagagaaaaagaaau

SEQ ID NO: 712565 - RNA, 17 nt, Artificial Sequence
  Synthetic
gacaaaaaacaagaaau

SEQ ID NO: 712566 - RNA, 17 nt, Artificial Sequence
  Synthetic
gcccuggaucaagaaau

SEQ ID NO: 712567 - RNA, 17 nt, Artificial Sequence
  Synthetic
gaagguggagaagaaau

SEQ ID NO: 712568 - RNA, 17 nt, Artificial Sequence
  Synthetic
guuuuauucuaagaaau

SEQ ID NO: 712569 - RNA, 17 nt, Artificial Sequence
  Synthetic
gcagcuggaagagaaau

SEQ ID NO: 712570 - RNA, 17 nt, Artificial Sequence
  Synthetic
gcugcuccccgagaaau

SEQ ID NO: 712571 - RNA, 17 nt, Artificial Sequence
  Synthetic
guggcaucuggagaaau

SEQ ID NO: 712572 - RNA, 17 nt, Artificial Sequence
  Synthetic
ggaagauguggagaaau

SEQ ID NO: 712573 - RNA, 17 nt, Artificial Sequence
  Synthetic
gaauggaaaauagaaau

SEQ ID NO: 712574 - RNA, 17 nt, Artificial Sequence
  Synthetic
gagcugagccuagaaau

SEQ ID NO: 712575 - RNA, 17 nt, Artificial Sequence
  Synthetic
gggagauagcaggaaau

SEQ ID NO: 712576 - RNA, 17 nt, Artificial Sequence
  Synthetic
gguaguugugaggaaau

SEQ ID NO: 712577 - RNA, 17 nt, Artificial Sequence
  Synthetic
gagugcuaaggggaaau

SEQ ID NO: 712578 - RNA, 17 nt, Artificial Sequence
  Synthetic
gugggaguauuggaaau

SEQ ID NO: 712579 - RNA, 17 nt, Artificial Sequence
  Synthetic
ggagggaaagaugaaau

SEQ ID NO: 712580 - RNA, 17 nt, Artificial Sequence
  Synthetic
guucaaaguuaugaaau

SEQ ID NO: 712581 - RNA, 17 nt, Artificial Sequence
  Synthetic
gaaagcaaaacugaaau

SEQ ID NO: 712582 - RNA, 17 nt, Artificial Sequence
  Synthetic
gauucauuaacugaaau

SEQ ID NO: 712583 - RNA, 17 nt, Artificial Sequence
  Synthetic
gcaugguagccugaaau

SEQ ID NO: 712584 - RNA, 17 nt, Artificial Sequence
  Synthetic
gagagaugaucugaaau

SEQ ID NO: 712585 - RNA, 17 nt, Artificial Sequence
  Synthetic
guuagcugcucugaaau

SEQ ID NO: 712586 - RNA, 17 nt, Artificial Sequence
  Synthetic
gugaaucauucugaaau

SEQ ID NO: 712587 - RNA, 17 nt, Artificial Sequence
  Synthetic
gugagaagaagugaaau

SEQ ID NO: 712588 - RNA, 17 nt, Artificial Sequence
  Synthetic
guucucauuugugaaau

SEQ ID NO: 712589 - RNA, 17 nt, Artificial Sequence
  Synthetic
ggucuuuuauuugaaau

SEQ ID NO: 712590 - RNA, 17 nt, Artificial Sequence
  Synthetic
gccauuucuuuugaaau

SEQ ID NO: 712591 - RNA, 17 nt, Artificial Sequence
  Synthetic
guaguaguuuuugaaau

SEQ ID NO: 712592 - RNA, 17 nt, Artificial Sequence
  Synthetic
gacuuauuguaauaaau

SEQ ID NO: 712593 - RNA, 17 nt, Artificial Sequence
  Synthetic
gaaaauaauuaauaaau

SEQ ID NO: 712594 - RNA, 17 nt, Artificial Sequence
  Synthetic
gaucacaauauauaaau

SEQ ID NO: 712595 - RNA, 17 nt, Artificial Sequence
  Synthetic
gaagaggcauuauaaau

SEQ ID NO: 712596 - RNA, 17 nt, Artificial Sequence
  Synthetic
ggguaugguuuauaaau

SEQ ID NO: 712597 - RNA, 17 nt, Artificial Sequence
  Synthetic
gcagggucuuccuaaau

SEQ ID NO: 712598 - RNA, 17 nt, Artificial Sequence
  Synthetic
ggacuaauacaguaaau

SEQ ID NO: 712599 - RNA, 17 nt, Artificial Sequence
  Synthetic
gaaaagcauauguaaau

SEQ ID NO: 712600 - RNA, 17 nt, Artificial Sequence
  Synthetic
gauugugguguguaaau

SEQ ID NO: 712601 - RNA, 17 nt, Artificial Sequence
  Synthetic
gaacauacuuuguaaau

SEQ ID NO: 712602 - RNA, 17 nt, Artificial Sequence
  Synthetic
guuaaauuaaauuaaau

SEQ ID NO: 712603 - RNA, 17 nt, Artificial Sequence
  Synthetic
gacaccauuuauuaaau

SEQ ID NO: 712604 - RNA, 17 nt, Artificial Sequence
  Synthetic
ggcuuuuuuucuuaaau

SEQ ID NO: 712605 - RNA, 17 nt, Artificial Sequence
  Synthetic
gagauuaacauuuaaau

SEQ ID NO: 712606 - RNA, 17 nt, Artificial Sequence
  Synthetic
ggucaacauguuuaaau

SEQ ID NO: 712607 - RNA, 17 nt, Artificial Sequence
  Synthetic
ggcgacugcuuuuaaau

SEQ ID NO: 712608 - RNA, 17 nt, Artificial Sequence
  Synthetic
ggaugaauguuuuaaau

SEQ ID NO: 712609 - RNA, 17 nt, Artificial Sequence
  Synthetic
gcugaaaauuuuuaaau

SEQ ID NO: 712610 - RNA, 17 nt, Artificial Sequence
  Synthetic
gcuaugccccaaacaau

SEQ ID NO: 712611 - RNA, 17 nt, Artificial Sequence
  Synthetic
gccauuuuuuaaacaau

SEQ ID NO: 712612 - RNA, 17 nt, Artificial Sequence
  Synthetic
gagcuagguuuaacaau

SEQ ID NO: 712613 - RNA, 17 nt, Artificial Sequence
  Synthetic
ggggaacaacacacaau

SEQ ID NO: 712614 - RNA, 17 nt, Artificial Sequence
  Synthetic
gaggagaugcacacaau

SEQ ID NO: 712615 - RNA, 17 nt, Artificial Sequence
  Synthetic
guguugagaaucacaau

SEQ ID NO: 712616 - RNA, 17 nt, Artificial Sequence
  Synthetic
gcuccucaacguacaau

SEQ ID NO: 712617 - RNA, 17 nt, Artificial Sequence
  Synthetic
gaaaauauuuaaccaau

SEQ ID NO: 712618 - RNA, 17 nt, Artificial Sequence
  Synthetic
gcuaucugcaagccaau

SEQ ID NO: 712619 - RNA, 17 nt, Artificial Sequence
  Synthetic
gccuggcuuuggccaau

SEQ ID NO: 712620 - RNA, 17 nt, Artificial Sequence
  Synthetic
gggguacagggagcaau

SEQ ID NO: 712621 - RNA, 17 nt, Artificial Sequence
  Synthetic
gaauuauucugagcaau

SEQ ID NO: 712622 - RNA, 17 nt, Artificial Sequence
  Synthetic
gaccagguggaggcaau

SEQ ID NO: 712623 - RNA, 17 nt, Artificial Sequence
  Synthetic
gucuucaagggggcaau

SEQ ID NO: 712624 - RNA, 17 nt, Artificial Sequence
  Synthetic
gugagaugcugugcaau

SEQ ID NO: 712625 - RNA, 17 nt, Artificial Sequence
  Synthetic
gacccagacuuugcaau

SEQ ID NO: 712626 - RNA, 17 nt, Artificial Sequence
  Synthetic
gagauuauugagucaau

SEQ ID NO: 712627 - RNA, 17 nt, Artificial Sequence
  Synthetic
gggagaggauugucaau

SEQ ID NO: 712628 - RNA, 17 nt, Artificial Sequence
  Synthetic
guuauaucaaauucaau

SEQ ID NO: 712629 - RNA, 17 nt, Artificial Sequence
  Synthetic
gauauaaguuauucaau

SEQ ID NO: 712630 - RNA, 17 nt, Artificial Sequence
  Synthetic
gauuguauauguucaau

SEQ ID NO: 712631 - RNA, 17 nt, Artificial Sequence
  Synthetic
gaacugcacuguucaau

SEQ ID NO: 712632 - RNA, 17 nt, Artificial Sequence
  Synthetic
gcugagaauuguucaau

SEQ ID NO: 712633 - RNA, 17 nt, Artificial Sequence
  Synthetic
gguggucaccaaagaau

SEQ ID NO: 712634 - RNA, 17 nt, Artificial Sequence
  Synthetic
gguagccuuccaagaau

SEQ ID NO: 712635 - RNA, 17 nt, Artificial Sequence
  Synthetic
gagauguagucaagaau

SEQ ID NO: 712636 - RNA, 17 nt, Artificial Sequence
  Synthetic
gacauucaaagaagaau

SEQ ID NO: 712637 - RNA, 17 nt, Artificial Sequence
  Synthetic
ggagggucaggaagaau

SEQ ID NO: 712638 - RNA, 17 nt, Artificial Sequence
  Synthetic
gcuaucuuacuaagaau

SEQ ID NO: 712639 - RNA, 17 nt, Artificial Sequence
  Synthetic
gcacacaagcuaagaau

SEQ ID NO: 712640 - RNA, 17 nt, Artificial Sequence
  Synthetic
gacuuucuucacagaau

SEQ ID NO: 712641 - RNA, 17 nt, Artificial Sequence
  Synthetic
gccuuucuucacagaau

SEQ ID NO: 712642 - RNA, 17 nt, Artificial Sequence
  Synthetic
gucauugaaugcagaau

SEQ ID NO: 712643 - RNA, 17 nt, Artificial Sequence
  Synthetic
guggcugggaucagaau

SEQ ID NO: 712644 - RNA, 17 nt, Artificial Sequence
  Synthetic
guugugggcuucagaau

SEQ ID NO: 712645 - RNA, 17 nt, Artificial Sequence
  Synthetic
gggaguuguuucagaau

SEQ ID NO: 712646 - RNA, 17 nt, Artificial Sequence
  Synthetic
ggaaaccaaaagagaau

SEQ ID NO: 712647 - RNA, 17 nt, Artificial Sequence
  Synthetic
gcuggagguaagagaau

SEQ ID NO: 712648 - RNA, 17 nt, Artificial Sequence
  Synthetic
ggccaaaagcagagaau

SEQ ID NO: 712649 - RNA, 17 nt, Artificial Sequence
  Synthetic
gagaaauaucagagaau

SEQ ID NO: 712650 - RNA, 17 nt, Artificial Sequence
  Synthetic
ggaacuuccuagagaau

SEQ ID NO: 712651 - RNA, 17 nt, Artificial Sequence
  Synthetic
guaaauaagaggagaau

SEQ ID NO: 712652 - RNA, 17 nt, Artificial Sequence
  Synthetic
gucacaucauggagaau

SEQ ID NO: 712653 - RNA, 17 nt, Artificial Sequence
  Synthetic
gacuaacaagauagaau

SEQ ID NO: 712654 - RNA, 17 nt, Artificial Sequence
  Synthetic
guucaaagugauagaau

SEQ ID NO: 712655 - RNA, 17 nt, Artificial Sequence
  Synthetic
ggcucuagggcuagaau

SEQ ID NO: 712656 - RNA, 17 nt, Artificial Sequence
  Synthetic
ggccagaugucuagaau

SEQ ID NO: 712657 - RNA, 17 nt, Artificial Sequence
  Synthetic
gauucaggaaguagaau

SEQ ID NO: 712658 - RNA, 17 nt, Artificial Sequence
  Synthetic
gcacaauaugguagaau

SEQ ID NO: 712659 - RNA, 17 nt, Artificial Sequence
  Synthetic
ggaauaaguguuagaau

SEQ ID NO: 712660 - RNA, 17 nt, Artificial Sequence
  Synthetic
gaugaaggcaaaggaau

SEQ ID NO: 712661 - RNA, 17 nt, Artificial Sequence
  Synthetic
gcaucuugcacaggaau

SEQ ID NO: 712662 - RNA, 17 nt, Artificial Sequence
  Synthetic
ggguaaagacgaggaau

SEQ ID NO: 712663 - RNA, 17 nt, Artificial Sequence
  Synthetic
guguaggugggcggaau

SEQ ID NO: 712664 - RNA, 17 nt, Artificial Sequence
  Synthetic
guugugucucagggaau

SEQ ID NO: 712665 - RNA, 17 nt, Artificial Sequence
  Synthetic
gugcacguuaggggaau

SEQ ID NO: 712666 - RNA, 17 nt, Artificial Sequence
  Synthetic
gaguugggguugggaau

SEQ ID NO: 712667 - RNA, 17 nt, Artificial Sequence
  Synthetic
gccacugaguauggaau

SEQ ID NO: 712668 - RNA, 17 nt, Artificial Sequence
  Synthetic
gaacuagggccuggaau

SEQ ID NO: 712669 - RNA, 17 nt, Artificial Sequence
  Synthetic
ggaguuuggauuggaau

SEQ ID NO: 712670 - RNA, 17 nt, Artificial Sequence
  Synthetic
guggaaagaguuggaau

SEQ ID NO: 712671 - RNA, 17 nt, Artificial Sequence
  Synthetic
guggucaauuuuggaau

SEQ ID NO: 712672 - RNA, 17 nt, Artificial Sequence
  Synthetic
gacuugagaaaaugaau

SEQ ID NO: 712673 - RNA, 17 nt, Artificial Sequence
  Synthetic
gaguaaaacaaaugaau

SEQ ID NO: 712674 - RNA, 17 nt, Artificial Sequence
  Synthetic
gcucugaugaaaugaau

SEQ ID NO: 712675 - RNA, 17 nt, Artificial Sequence
  Synthetic
gauacagauacaugaau

SEQ ID NO: 712676 - RNA, 17 nt, Artificial Sequence
  Synthetic
gccugauuuucaugaau

SEQ ID NO: 712677 - RNA, 17 nt, Artificial Sequence
  Synthetic
gagagccuacuaugaau

SEQ ID NO: 712678 - RNA, 17 nt, Artificial Sequence
  Synthetic
gaguguuuuaacugaau

SEQ ID NO: 712679 - RNA, 17 nt, Artificial Sequence
  Synthetic
gcuagggggcacugaau

SEQ ID NO: 712680 - RNA, 17 nt, Artificial Sequence
  Synthetic
gaugcguuuggcugaau

SEQ ID NO: 712681 - RNA, 17 nt, Artificial Sequence
  Synthetic
gucauacugaagugaau

SEQ ID NO: 712682 - RNA, 17 nt, Artificial Sequence
  Synthetic
gaaauuguguggugaau

SEQ ID NO: 712683 - RNA, 17 nt, Artificial Sequence
  Synthetic
gggaaaaugaugugaau

SEQ ID NO: 712684 - RNA, 17 nt, Artificial Sequence
  Synthetic
gggaagagggauugaau

SEQ ID NO: 712685 - RNA, 17 nt, Artificial Sequence
  Synthetic
gacauccccuauugaau

SEQ ID NO: 712686 - RNA, 17 nt, Artificial Sequence
  Synthetic
gacaggcuaaguugaau

SEQ ID NO: 712687 - RNA, 17 nt, Artificial Sequence
  Synthetic
gaagaaacaguuugaau

SEQ ID NO: 712688 - RNA, 17 nt, Artificial Sequence
  Synthetic
gggcaucagaaaauaau

SEQ ID NO: 712689 - RNA, 17 nt, Artificial Sequence
  Synthetic
gaaauuaaauaaauaau

SEQ ID NO: 712690 - RNA, 17 nt, Artificial Sequence
  Synthetic
gacuggggcuaaauaau

SEQ ID NO: 712691 - RNA, 17 nt, Artificial Sequence
  Synthetic
guauaauucacaauaau

SEQ ID NO: 712692 - RNA, 17 nt, Artificial Sequence
  Synthetic
gguauauaaccaauaau

SEQ ID NO: 712693 - RNA, 17 nt, Artificial Sequence
  Synthetic
gguauaugcccaauaau

SEQ ID NO: 712694 - RNA, 17 nt, Artificial Sequence
  Synthetic
gucuuuaaaauaauaau

SEQ ID NO: 712695 - RNA, 17 nt, Artificial Sequence
  Synthetic
gauauccagaacauaau

SEQ ID NO: 712696 - RNA, 17 nt, Artificial Sequence
  Synthetic
gguaaguacuucauaau

SEQ ID NO: 712697 - RNA, 17 nt, Artificial Sequence
  Synthetic
gguguaaauaagauaau

SEQ ID NO: 712698 - RNA, 17 nt, Artificial Sequence
  Synthetic
guucugugacagauaau

SEQ ID NO: 712699 - RNA, 17 nt, Artificial Sequence
  Synthetic
guaaugcauacgauaau

SEQ ID NO: 712700 - RNA, 17 nt, Artificial Sequence
  Synthetic
gaaguaccugggauaau

SEQ ID NO: 712701 - RNA, 17 nt, Artificial Sequence
  Synthetic
guguuuacgaauauaau

SEQ ID NO: 712702 - RNA, 17 nt, Artificial Sequence
  Synthetic
ggcaucuguacuauaau

SEQ ID NO: 712703 - RNA, 17 nt, Artificial Sequence
  Synthetic
gaagaguccccuauaau

SEQ ID NO: 712704 - RNA, 17 nt, Artificial Sequence
  Synthetic
gugaaugacuguauaau

SEQ ID NO: 712705 - RNA, 17 nt, Artificial Sequence
  Synthetic
gacgaauagauuauaau

SEQ ID NO: 712706 - RNA, 17 nt, Artificial Sequence
  Synthetic
gagugauuaguuauaau

SEQ ID NO: 712707 - RNA, 17 nt, Artificial Sequence
  Synthetic
gcauugguuuuuauaau

SEQ ID NO: 712708 - RNA, 17 nt, Artificial Sequence
  Synthetic
gccuucauuuaacuaau

SEQ ID NO: 712709 - RNA, 17 nt, Artificial Sequence
  Synthetic
gucagcauuaaccuaau

SEQ ID NO: 712710 - RNA, 17 nt, Artificial Sequence
  Synthetic
gcguuugauaugcuaau

SEQ ID NO: 712711 - RNA, 17 nt, Artificial Sequence
  Synthetic
gaagauguaaaucuaau

SEQ ID NO: 712712 - RNA, 17 nt, Artificial Sequence
  Synthetic
guaucuugacaucuaau

SEQ ID NO: 712713 - RNA, 17 nt, Artificial Sequence
  Synthetic
gacauguuuugucuaau

SEQ ID NO: 712714 - RNA, 17 nt, Artificial Sequence
  Synthetic
guauguuucauucuaau

SEQ ID NO: 712715 - RNA, 17 nt, Artificial Sequence
  Synthetic
gagggauuacuucuaau

SEQ ID NO: 712716 - RNA, 17 nt, Artificial Sequence
  Synthetic
gucacugugcaaguaau

SEQ ID NO: 712717 - RNA, 17 nt, Artificial Sequence
  Synthetic
guuaaacuucaaguaau

SEQ ID NO: 712718 - RNA, 17 nt, Artificial Sequence
  Synthetic
gguauauaaccaguaau

SEQ ID NO: 712719 - RNA, 17 nt, Artificial Sequence
  Synthetic
gguauauacccaguaau

SEQ ID NO: 712720 - RNA, 17 nt, Artificial Sequence
  Synthetic
gcuauaugcccaguaau

SEQ ID NO: 712721 - RNA, 17 nt, Artificial Sequence
  Synthetic
gguauauauccaguaau

SEQ ID NO: 712722 - RNA, 17 nt, Artificial Sequence
  Synthetic
gguauauaugcaguaau

SEQ ID NO: 712723 - RNA, 17 nt, Artificial Sequence
  Synthetic
gauauauacucaguaau

SEQ ID NO: 712724 - RNA, 17 nt, Artificial Sequence
  Synthetic
gauaucuacucaguaau

SEQ ID NO: 712725 - RNA, 17 nt, Artificial Sequence
  Synthetic
ggagcucauauaguaau

SEQ ID NO: 712726 - RNA, 17 nt, Artificial Sequence
  Synthetic
gagaauuagaagguaau

SEQ ID NO: 712727 - RNA, 17 nt, Artificial Sequence
  Synthetic
gcuuguauggggguaau

SEQ ID NO: 712728 - RNA, 17 nt, Artificial Sequence
  Synthetic
ggguggacaaauguaau

SEQ ID NO: 712729 - RNA, 17 nt, Artificial Sequence
  Synthetic
ggaaaaauguguguaau

SEQ ID NO: 712730 - RNA, 17 nt, Artificial Sequence
  Synthetic
gaaaaguaaguuguaau

SEQ ID NO: 712731 - RNA, 17 nt, Artificial Sequence
  Synthetic
gaaaaaggguuuguaau

SEQ ID NO: 712732 - RNA, 17 nt, Artificial Sequence
  Synthetic
gguuuaacaacauuaau

SEQ ID NO: 712733 - RNA, 17 nt, Artificial Sequence
  Synthetic
guaguagcauuauuaau

SEQ ID NO: 712734 - RNA, 17 nt, Artificial Sequence
  Synthetic
ggccaguauaacuuaau

SEQ ID NO: 712735 - RNA, 17 nt, Artificial Sequence
  Synthetic
gugagaaauuacuuaau

SEQ ID NO: 712736 - RNA, 17 nt, Artificial Sequence
  Synthetic
gaauuuuacagcuuaau

SEQ ID NO: 712737 - RNA, 17 nt, Artificial Sequence
  Synthetic
guaaaugacaaguuaau

SEQ ID NO: 712738 - RNA, 17 nt, Artificial Sequence
  Synthetic
guaaaugacgaguuaau

SEQ ID NO: 712739 - RNA, 17 nt, Artificial Sequence
  Synthetic
gcagcgggaugguuaau

SEQ ID NO: 712740 - RNA, 17 nt, Artificial Sequence
  Synthetic
gagguacacaauuuaau

SEQ ID NO: 712741 - RNA, 17 nt, Artificial Sequence
  Synthetic
guucuuaauaauuuaau

SEQ ID NO: 712742 - RNA, 17 nt, Artificial Sequence
  Synthetic
gccaguguuacuuuaau

SEQ ID NO: 712743 - RNA, 17 nt, Artificial Sequence
  Synthetic
gcuagagaaucuuuaau

SEQ ID NO: 712744 - RNA, 17 nt, Artificial Sequence
  Synthetic
gaccagcugucuuuaau

SEQ ID NO: 712745 - RNA, 17 nt, Artificial Sequence
  Synthetic
gucucucucauuuuaau

SEQ ID NO: 712746 - RNA, 17 nt, Artificial Sequence
  Synthetic
gugaacaauauuuuaau

SEQ ID NO: 712747 - RNA, 17 nt, Artificial Sequence
  Synthetic
guaaauuuuauuuuaau

SEQ ID NO: 712748 - RNA, 17 nt, Artificial Sequence
  Synthetic
gcuaaaucucuuuuaau

SEQ ID NO: 712749 - RNA, 17 nt, Artificial Sequence
  Synthetic
guuuuacaaagaaacau

SEQ ID NO: 712750 - RNA, 17 nt, Artificial Sequence
  Synthetic
gcugguggaagaaacau

SEQ ID NO: 712751 - RNA, 17 nt, Artificial Sequence
  Synthetic
gguuuugaacacaacau

SEQ ID NO: 712752 - RNA, 17 nt, Artificial Sequence
  Synthetic
ggccccaccaccaacau

SEQ ID NO: 712753 - RNA, 17 nt, Artificial Sequence
  Synthetic
ggaauugaggccaacau

SEQ ID NO: 712754 - RNA, 17 nt, Artificial Sequence
  Synthetic
ggccccaccuccaacau

SEQ ID NO: 712755 - RNA, 17 nt, Artificial Sequence
  Synthetic
ggcccugccuccaacau

SEQ ID NO: 712756 - RNA, 17 nt, Artificial Sequence
  Synthetic
gauauucaaagcaacau

SEQ ID NO: 712757 - RNA, 17 nt, Artificial Sequence
  Synthetic
guuucccagggcaacau

SEQ ID NO: 712758 - RNA, 17 nt, Artificial Sequence
  Synthetic
ggacagaaauggaacau

SEQ ID NO: 712759 - RNA, 17 nt, Artificial Sequence
  Synthetic
ggguguauuaauaacau

SEQ ID NO: 712760 - RNA, 17 nt, Artificial Sequence
  Synthetic
gagugaugauguaacau

SEQ ID NO: 712761 - RNA, 17 nt, Artificial Sequence
  Synthetic
gggcaccauauuaacau

SEQ ID NO: 712762 - RNA, 17 nt, Artificial Sequence
  Synthetic
gucuugccuauuaacau

SEQ ID NO: 712763 - RNA, 17 nt, Artificial Sequence
  Synthetic
gcuugaggucuuaacau

SEQ ID NO: 712764 - RNA, 17 nt, Artificial Sequence
  Synthetic
gcuuucugaguuaacau

SEQ ID NO: 712765 - RNA, 17 nt, Artificial Sequence
  Synthetic
gaaaaaccuagacacau

SEQ ID NO: 712766 - RNA, 17 nt, Artificial Sequence
  Synthetic
gaagaaagccuacacau

SEQ ID NO: 712767 - RNA, 17 nt, Artificial Sequence
  Synthetic
gaagcuguagaccacau

SEQ ID NO: 712768 - RNA, 17 nt, Artificial Sequence
  Synthetic
gaucauagugaccacau

SEQ ID NO: 712769 - RNA, 17 nt, Artificial Sequence
  Synthetic
ggcuguuguuaccacau

SEQ ID NO: 712770 - RNA, 17 nt, Artificial Sequence
  Synthetic
gcccaugcuuuccacau

SEQ ID NO: 712771 - RNA, 17 nt, Artificial Sequence
  Synthetic
guccuuuguaggcacau

SEQ ID NO: 712772 - RNA, 17 nt, Artificial Sequence
  Synthetic
gggaauuaaaugcacau

SEQ ID NO: 712773 - RNA, 17 nt, Artificial Sequence
  Synthetic
gccuuuaagaaagacau

SEQ ID NO: 712774 - RNA, 17 nt, Artificial Sequence
  Synthetic
guagaguagaaagacau

SEQ ID NO: 712775 - RNA, 17 nt, Artificial Sequence
  Synthetic
gugaaaacaauagacau

SEQ ID NO: 712776 - RNA, 17 nt, Artificial Sequence
  Synthetic
gaaugcacaauagacau

SEQ ID NO: 712777 - RNA, 17 nt, Artificial Sequence
  Synthetic
gggauuaaaaaggacau

SEQ ID NO: 712778 - RNA, 17 nt, Artificial Sequence
  Synthetic
guugagucaaaggacau

SEQ ID NO: 712779 - RNA, 17 nt, Artificial Sequence
  Synthetic
guuaaaaugcaggacau

SEQ ID NO: 712780 - RNA, 17 nt, Artificial Sequence
  Synthetic
ggaaaaugaagggacau

SEQ ID NO: 712781 - RNA, 17 nt, Artificial Sequence
  Synthetic
gaagagcuccaugacau

SEQ ID NO: 712782 - RNA, 17 nt, Artificial Sequence
  Synthetic
guaauguucacugacau

SEQ ID NO: 712783 - RNA, 17 nt, Artificial Sequence
  Synthetic
gaaaaauuuccugacau

SEQ ID NO: 712784 - RNA, 17 nt, Artificial Sequence
  Synthetic
gcaguaauguaauacau

SEQ ID NO: 712785 - RNA, 17 nt, Artificial Sequence
  Synthetic
guaaguguaguauacau

SEQ ID NO: 712786 - RNA, 17 nt, Artificial Sequence
  Synthetic
gccagaagauuauacau

SEQ ID NO: 712787 - RNA, 17 nt, Artificial Sequence
  Synthetic
gccuggaaaaccuacau

SEQ ID NO: 712788 - RNA, 17 nt, Artificial Sequence
  Synthetic
gccuuguaugucuacau

SEQ ID NO: 712789 - RNA, 17 nt, Artificial Sequence
  Synthetic
guuauuaggaaguacau

SEQ ID NO: 712790 - RNA, 17 nt, Artificial Sequence
  Synthetic
ggccaagagggguacau

SEQ ID NO: 712791 - RNA, 17 nt, Artificial Sequence
  Synthetic
guauucuguauguacau

SEQ ID NO: 712792 - RNA, 17 nt, Artificial Sequence
  Synthetic
gacucuugugauuacau

SEQ ID NO: 712793 - RNA, 17 nt, Artificial Sequence
  Synthetic
gugaagguuuauuacau

SEQ ID NO: 712794 - RNA, 17 nt, Artificial Sequence
  Synthetic
guauuguuuuauuacau

SEQ ID NO: 712795 - RNA, 17 nt, Artificial Sequence
  Synthetic
gcuguguaauguuacau

SEQ ID NO: 712796 - RNA, 17 nt, Artificial Sequence
  Synthetic
gugcagauuuguuacau

SEQ ID NO: 712797 - RNA, 17 nt, Artificial Sequence
  Synthetic
gugcaaguuuguuacau

SEQ ID NO: 712798 - RNA, 17 nt, Artificial Sequence
  Synthetic
guacagguuuguuacau

SEQ ID NO: 712799 - RNA, 17 nt, Artificial Sequence
  Synthetic
gugcagguuuguuacau

SEQ ID NO: 712800 - RNA, 17 nt, Artificial Sequence
  Synthetic
gcaguuauuauuuacau

SEQ ID NO: 712801 - RNA, 17 nt, Artificial Sequence
  Synthetic
gggcugaugguuuacau

SEQ ID NO: 712802 - RNA, 17 nt, Artificial Sequence
  Synthetic
guccagaccuuuuacau

SEQ ID NO: 712803 - RNA, 17 nt, Artificial Sequence
  Synthetic
gccccuuauaaaaccau

SEQ ID NO: 712804 - RNA, 17 nt, Artificial Sequence
  Synthetic
gaacgcuaguacaccau

SEQ ID NO: 712805 - RNA, 17 nt, Artificial Sequence
  Synthetic
gagcuuaccaagaccau

SEQ ID NO: 712806 - RNA, 17 nt, Artificial Sequence
  Synthetic
guaauaaauaggaccau

SEQ ID NO: 712807 - RNA, 17 nt, Artificial Sequence
  Synthetic
gcuacauauuggaccau

SEQ ID NO: 712808 - RNA, 17 nt, Artificial Sequence
  Synthetic
gaaaacagaauuaccau

SEQ ID NO: 712809 - RNA, 17 nt, Artificial Sequence
  Synthetic
gaaaccaaucuuaccau

SEQ ID NO: 712810 - RNA, 17 nt, Artificial Sequence
  Synthetic
gcaauuuucacacccau

SEQ ID NO: 712811 - RNA, 17 nt, Artificial Sequence
  Synthetic
guggccucuauacccau

SEQ ID NO: 712812 - RNA, 17 nt, Artificial Sequence
  Synthetic
guccugggucaccccau

SEQ ID NO: 712813 - RNA, 17 nt, Artificial Sequence
  Synthetic
guacccuuuccccccau

SEQ ID NO: 712814 - RNA, 17 nt, Artificial Sequence
  Synthetic
ggugaguccucccccau

SEQ ID NO: 712815 - RNA, 17 nt, Artificial Sequence
  Synthetic
ggguguaauuggcccau

SEQ ID NO: 712816 - RNA, 17 nt, Artificial Sequence
  Synthetic
gcugaacuguugcccau

SEQ ID NO: 712817 - RNA, 17 nt, Artificial Sequence
  Synthetic
ggacuuggccaucccau

SEQ ID NO: 712818 - RNA, 17 nt, Artificial Sequence
  Synthetic
guuuugcuguaucccau

SEQ ID NO: 712819 - RNA, 17 nt, Artificial Sequence
  Synthetic
guuauauuuuaucccau

SEQ ID NO: 712820 - RNA, 17 nt, Artificial Sequence
  Synthetic
gauguacuaacucccau

SEQ ID NO: 712821 - RNA, 17 nt, Artificial Sequence
  Synthetic
gaucugggaauucccau

SEQ ID NO: 712822 - RNA, 17 nt, Artificial Sequence
  Synthetic
gguguaaaaggagccau

SEQ ID NO: 712823 - RNA, 17 nt, Artificial Sequence
  Synthetic
guuuugaacauagccau

SEQ ID NO: 712824 - RNA, 17 nt, Artificial Sequence
  Synthetic
gcacccucuguagccau

SEQ ID NO: 712825 - RNA, 17 nt, Artificial Sequence
  Synthetic
gucucucuucccgccau

SEQ ID NO: 712826 - RNA, 17 nt, Artificial Sequence
  Synthetic
gagcugcccaaggccau

SEQ ID NO: 712827 - RNA, 17 nt, Artificial Sequence
  Synthetic
gggugggguggggccau

SEQ ID NO: 712828 - RNA, 17 nt, Artificial Sequence
  Synthetic
ggaauuauuuaugccau

SEQ ID NO: 712829 - RNA, 17 nt, Artificial Sequence
  Synthetic
guauuugccaaauccau

SEQ ID NO: 712830 - RNA, 17 nt, Artificial Sequence
  Synthetic
gccugcaugauauccau

SEQ ID NO: 712831 - RNA, 17 nt, Artificial Sequence
  Synthetic
guuaaaaauauauccau

SEQ ID NO: 712832 - RNA, 17 nt, Artificial Sequence
  Synthetic
gagaaugagguguccau

SEQ ID NO: 712833 - RNA, 17 nt, Artificial Sequence
  Synthetic
guucacaagaauuccau

SEQ ID NO: 712834 - RNA, 17 nt, Artificial Sequence
  Synthetic
gcugcauaauauuccau

SEQ ID NO: 712835 - RNA, 17 nt, Artificial Sequence
  Synthetic
gcucuguucuguuccau

SEQ ID NO: 712836 - RNA, 17 nt, Artificial Sequence
  Synthetic
gugagauuaggaagcau

SEQ ID NO: 712837 - RNA, 17 nt, Artificial Sequence
  Synthetic
gauuucaaauuaagcau

SEQ ID NO: 712838 - RNA, 17 nt, Artificial Sequence
  Synthetic
guuucaaaauccagcau

SEQ ID NO: 712839 - RNA, 17 nt, Artificial Sequence
  Synthetic
gaaaguaaaaucagcau

SEQ ID NO: 712840 - RNA, 17 nt, Artificial Sequence
  Synthetic
gucuggaaacucagcau

SEQ ID NO: 712841 - RNA, 17 nt, Artificial Sequence
  Synthetic
ggucugucccucagcau

SEQ ID NO: 712842 - RNA, 17 nt, Artificial Sequence
  Synthetic
gguaugucagucagcau

SEQ ID NO: 712843 - RNA, 17 nt, Artificial Sequence
  Synthetic
gauguuauccagagcau

SEQ ID NO: 712844 - RNA, 17 nt, Artificial Sequence
  Synthetic
ggcgaacaggagagcau

SEQ ID NO: 712845 - RNA, 17 nt, Artificial Sequence
  Synthetic
gaaggagaggagagcau

SEQ ID NO: 712846 - RNA, 17 nt, Artificial Sequence
  Synthetic
gaggggagggagagcau

SEQ ID NO: 712847 - RNA, 17 nt, Artificial Sequence
  Synthetic
gacuccuuugagagcau

SEQ ID NO: 712848 - RNA, 17 nt, Artificial Sequence
  Synthetic
gguaaaaagaauagcau

SEQ ID NO: 712849 - RNA, 17 nt, Artificial Sequence
  Synthetic
ggggggagggauagcau

SEQ ID NO: 712850 - RNA, 17 nt, Artificial Sequence
  Synthetic
guauguuagucuagcau

SEQ ID NO: 712851 - RNA, 17 nt, Artificial Sequence
  Synthetic
gaguaagauguuagcau

SEQ ID NO: 712852 - RNA, 17 nt, Artificial Sequence
  Synthetic
gaaguucuuuuuagcau

SEQ ID NO: 712853 - RNA, 17 nt, Artificial Sequence
  Synthetic
ggagggagggugcgcau

SEQ ID NO: 712854 - RNA, 17 nt, Artificial Sequence
  Synthetic
gaauguaggagaggcau

SEQ ID NO: 712855 - RNA, 17 nt, Artificial Sequence
  Synthetic
gcugggauuauaggcau

SEQ ID NO: 712856 - RNA, 17 nt, Artificial Sequence
  Synthetic
gcgagggaauuaggcau

SEQ ID NO: 712857 - RNA, 17 nt, Artificial Sequence
  Synthetic
ggagagcagaagggcau

SEQ ID NO: 712858 - RNA, 17 nt, Artificial Sequence
  Synthetic
gaagggguagauggcau

SEQ ID NO: 712859 - RNA, 17 nt, Artificial Sequence
  Synthetic
gaacuccaggauggcau

SEQ ID NO: 712860 - RNA, 17 nt, Artificial Sequence
  Synthetic
ggggggagggauggcau

SEQ ID NO: 712861 - RNA, 17 nt, Artificial Sequence
  Synthetic
ggacauugugcuggcau

SEQ ID NO: 712862 - RNA, 17 nt, Artificial Sequence
  Synthetic
gaaaagagggguggcau

SEQ ID NO: 712863 - RNA, 17 nt, Artificial Sequence
  Synthetic
guaaauaauaacugcau

SEQ ID NO: 712864 - RNA, 17 nt, Artificial Sequence
  Synthetic
ggaacuuagaccugcau

SEQ ID NO: 712865 - RNA, 17 nt, Artificial Sequence
  Synthetic
gggaccuccuagugcau

SEQ ID NO: 712866 - RNA, 17 nt, Artificial Sequence
  Synthetic
gguggugacaggugcau

SEQ ID NO: 712867 - RNA, 17 nt, Artificial Sequence
  Synthetic
ggguuuagagggugcau

SEQ ID NO: 712868 - RNA, 17 nt, Artificial Sequence
  Synthetic
gcugaauagaugugcau

SEQ ID NO: 712869 - RNA, 17 nt, Artificial Sequence
  Synthetic
gcuugaaauaugugcau

SEQ ID NO: 712870 - RNA, 17 nt, Artificial Sequence
  Synthetic
ggggguguucugugcau

SEQ ID NO: 712871 - RNA, 17 nt, Artificial Sequence
  Synthetic
gguacacaaucuugcau

SEQ ID NO: 712872 - RNA, 17 nt, Artificial Sequence
  Synthetic
gggcagguuuguugcau

SEQ ID NO: 712873 - RNA, 17 nt, Artificial Sequence
  Synthetic
gugcagguuuguugcau

SEQ ID NO: 712874 - RNA, 17 nt, Artificial Sequence
  Synthetic
guugggcacauuugcau

SEQ ID NO: 712875 - RNA, 17 nt, Artificial Sequence
  Synthetic
gugguaggcagaaucau

SEQ ID NO: 712876 - RNA, 17 nt, Artificial Sequence
  Synthetic
ggagguaacugaaucau

SEQ ID NO: 712877 - RNA, 17 nt, Artificial Sequence
  Synthetic
ggaaguaauugaaucau

SEQ ID NO: 712878 - RNA, 17 nt, Artificial Sequence
  Synthetic
ggagguaauugaaucau

SEQ ID NO: 712879 - RNA, 17 nt, Artificial Sequence
  Synthetic
gaggucauuugaaucau

SEQ ID NO: 712880 - RNA, 17 nt, Artificial Sequence
  Synthetic
gaacuagagauaaucau

SEQ ID NO: 712881 - RNA, 17 nt, Artificial Sequence
  Synthetic
ggagguaauuuaaucau

SEQ ID NO: 712882 - RNA, 17 nt, Artificial Sequence
  Synthetic
gacaggaacuacaucau

SEQ ID NO: 712883 - RNA, 17 nt, Artificial Sequence
  Synthetic
gcagccccucccaucau

SEQ ID NO: 712884 - RNA, 17 nt, Artificial Sequence
  Synthetic
guacuucauaggaucau

SEQ ID NO: 712885 - RNA, 17 nt, Artificial Sequence
  Synthetic
gggugcugugggaucau

SEQ ID NO: 712886 - RNA, 17 nt, Artificial Sequence
  Synthetic
guaguggaauggaucau

SEQ ID NO: 712887 - RNA, 17 nt, Artificial Sequence
  Synthetic
ggaggugauuggaucau

SEQ ID NO: 712888 - RNA, 17 nt, Artificial Sequence
  Synthetic
gauacuuauaauaucau

SEQ ID NO: 712889 - RNA, 17 nt, Artificial Sequence
  Synthetic
gcuaucacugguaucau

SEQ ID NO: 712890 - RNA, 17 nt, Artificial Sequence
  Synthetic
gguuaauggguuaucau

SEQ ID NO: 712891 - RNA, 17 nt, Artificial Sequence
  Synthetic
gacuugccccaacucau

SEQ ID NO: 712892 - RNA, 17 nt, Artificial Sequence
  Synthetic
guaacuucuuaacucau

SEQ ID NO: 712893 - RNA, 17 nt, Artificial Sequence
  Synthetic
gguauuuauugacucau

SEQ ID NO: 712894 - RNA, 17 nt, Artificial Sequence
  Synthetic
gagccaccgcgccucau

SEQ ID NO: 712895 - RNA, 17 nt, Artificial Sequence
  Synthetic
guaaaaaccugccucau

SEQ ID NO: 712896 - RNA, 17 nt, Artificial Sequence
  Synthetic
gaauuugucaagcucau

SEQ ID NO: 712897 - RNA, 17 nt, Artificial Sequence
  Synthetic
gaacauuccaugcucau

SEQ ID NO: 712898 - RNA, 17 nt, Artificial Sequence
  Synthetic
gaauauuccaugcucau

SEQ ID NO: 712899 - RNA, 17 nt, Artificial Sequence
  Synthetic
gaacauuccgugcucau

SEQ ID NO: 712900 - RNA, 17 nt, Artificial Sequence
  Synthetic
gcauucuaagcucucau

SEQ ID NO: 712901 - RNA, 17 nt, Artificial Sequence
  Synthetic
gucugagggccagucau

SEQ ID NO: 712902 - RNA, 17 nt, Artificial Sequence
  Synthetic
gacaagaaagucgucau

SEQ ID NO: 712903 - RNA, 17 nt, Artificial Sequence
  Synthetic
gcaauuuaggaggucau

SEQ ID NO: 712904 - RNA, 17 nt, Artificial Sequence
  Synthetic
ggguuagaugaggucau

SEQ ID NO: 712905 - RNA, 17 nt, Artificial Sequence
  Synthetic
gggaaguguggggucau

SEQ ID NO: 712906 - RNA, 17 nt, Artificial Sequence
  Synthetic
gucuaacccugggucau

SEQ ID NO: 712907 - RNA, 17 nt, Artificial Sequence
  Synthetic
ggagguuuuugggucau

SEQ ID NO: 712908 - RNA, 17 nt, Artificial Sequence
  Synthetic
gcuacucuucuggucau

SEQ ID NO: 712909 - RNA, 17 nt, Artificial Sequence
  Synthetic
gugguuuuuuuggucau

SEQ ID NO: 712910 - RNA, 17 nt, Artificial Sequence
  Synthetic
gaaguaucuaaugucau

SEQ ID NO: 712911 - RNA, 17 nt, Artificial Sequence
  Synthetic
gguaaauugcaugucau

SEQ ID NO: 712912 - RNA, 17 nt, Artificial Sequence
  Synthetic
guagcuuauggugucau

SEQ ID NO: 712913 - RNA, 17 nt, Artificial Sequence
  Synthetic
guaguuugaaaauucau

SEQ ID NO: 712914 - RNA, 17 nt, Artificial Sequence
  Synthetic
gucucuaauaaauucau

SEQ ID NO: 712915 - RNA, 17 nt, Artificial Sequence
  Synthetic
guuuccaagugauucau

SEQ ID NO: 712916 - RNA, 17 nt, Artificial Sequence
  Synthetic
guaaucuccuuauucau

SEQ ID NO: 712917 - RNA, 17 nt, Artificial Sequence
  Synthetic
gaaauuggugacuucau

SEQ ID NO: 712918 - RNA, 17 nt, Artificial Sequence
  Synthetic
gucacugguuacuucau

SEQ ID NO: 712919 - RNA, 17 nt, Artificial Sequence
  Synthetic
gacuuuauaagcuucau

SEQ ID NO: 712920 - RNA, 17 nt, Artificial Sequence
  Synthetic
gauagcaccugcuucau

SEQ ID NO: 712921 - RNA, 17 nt, Artificial Sequence
  Synthetic
gaugauuacaucuucau

SEQ ID NO: 712922 - RNA, 17 nt, Artificial Sequence
  Synthetic
gucucuggauucuucau

SEQ ID NO: 712923 - RNA, 17 nt, Artificial Sequence
  Synthetic
gauuuuagcuucuucau

SEQ ID NO: 712924 - RNA, 17 nt, Artificial Sequence
  Synthetic
gguauuuuuuucuucau

SEQ ID NO: 712925 - RNA, 17 nt, Artificial Sequence
  Synthetic
gccucgauuucguucau

SEQ ID NO: 712926 - RNA, 17 nt, Artificial Sequence
  Synthetic
gaguuauuuagguucau

SEQ ID NO: 712927 - RNA, 17 nt, Artificial Sequence
  Synthetic
ggagguauccuguucau

SEQ ID NO: 712928 - RNA, 17 nt, Artificial Sequence
  Synthetic
gugcucucucuguucau

SEQ ID NO: 712929 - RNA, 17 nt, Artificial Sequence
  Synthetic
guccucuaaguguucau

SEQ ID NO: 712930 - RNA, 17 nt, Artificial Sequence
  Synthetic
gcuuccuuuaauuucau

SEQ ID NO: 712931 - RNA, 17 nt, Artificial Sequence
  Synthetic
gugagguuggauuucau

SEQ ID NO: 712932 - RNA, 17 nt, Artificial Sequence
  Synthetic
gucaaaugguauuucau

SEQ ID NO: 712933 - RNA, 17 nt, Artificial Sequence
  Synthetic
gaauuugcaacuuucau

SEQ ID NO: 712934 - RNA, 17 nt, Artificial Sequence
  Synthetic
gggccugagccuuucau

SEQ ID NO: 712935 - RNA, 17 nt, Artificial Sequence
  Synthetic
gggcaugucaguuucau

SEQ ID NO: 712936 - RNA, 17 nt, Artificial Sequence
  Synthetic
gguuugugacaaaagau

SEQ ID NO: 712937 - RNA, 17 nt, Artificial Sequence
  Synthetic
gauuauaggcaaaagau

SEQ ID NO: 712938 - RNA, 17 nt, Artificial Sequence
  Synthetic
ggaaagacaacaaagau

SEQ ID NO: 712939 - RNA, 17 nt, Artificial Sequence
  Synthetic
gaccuuugagcaaagau

SEQ ID NO: 712940 - RNA, 17 nt, Artificial Sequence
  Synthetic
gaauacaauucaaagau

SEQ ID NO: 712941 - RNA, 17 nt, Artificial Sequence
  Synthetic
gcuggacucagaaagau

SEQ ID NO: 712942 - RNA, 17 nt, Artificial Sequence
  Synthetic
gauuuucuuugaaagau

SEQ ID NO: 712943 - RNA, 17 nt, Artificial Sequence
  Synthetic
gcagcuuuaauaaagau

SEQ ID NO: 712944 - RNA, 17 nt, Artificial Sequence
  Synthetic
guuuuggguguaaagau

SEQ ID NO: 712945 - RNA, 17 nt, Artificial Sequence
  Synthetic
gaacugguguccaagau

SEQ ID NO: 712946 - RNA, 17 nt, Artificial Sequence
  Synthetic
guguaucaucucaagau

SEQ ID NO: 712947 - RNA, 17 nt, Artificial Sequence
  Synthetic
gaagaagaauucaagau

SEQ ID NO: 712948 - RNA, 17 nt, Artificial Sequence
  Synthetic
ggcuuagagaagaagau

SEQ ID NO: 712949 - RNA, 17 nt, Artificial Sequence
  Synthetic
gguacagagcagaagau

SEQ ID NO: 712950 - RNA, 17 nt, Artificial Sequence
  Synthetic
gaagcuuaggggaagau

SEQ ID NO: 712951 - RNA, 17 nt, Artificial Sequence
  Synthetic
gcuguaacuuggaagau

SEQ ID NO: 712952 - RNA, 17 nt, Artificial Sequence
  Synthetic
ggauucuugcugaagau

SEQ ID NO: 712953 - RNA, 17 nt, Artificial Sequence
  Synthetic
gauaagucuuugaagau

SEQ ID NO: 712954 - RNA, 17 nt, Artificial Sequence
  Synthetic
gacuuggaagauaagau

SEQ ID NO: 712955 - RNA, 17 nt, Artificial Sequence
  Synthetic
guucaacaagguaagau

SEQ ID NO: 712956 - RNA, 17 nt, Artificial Sequence
  Synthetic
guguaagguuguaagau

SEQ ID NO: 712957 - RNA, 17 nt, Artificial Sequence
  Synthetic
ggaguggugguuaagau

SEQ ID NO: 712958 - RNA, 17 nt, Artificial Sequence
  Synthetic
gguuucuccuuuaagau

SEQ ID NO: 712959 - RNA, 17 nt, Artificial Sequence
  Synthetic
gaagcuugguuuaagau

SEQ ID NO: 712960 - RNA, 17 nt, Artificial Sequence
  Synthetic
gucaucagagaacagau

SEQ ID NO: 712961 - RNA, 17 nt, Artificial Sequence
  Synthetic
gucaggaaaagacagau

SEQ ID NO: 712962 - RNA, 17 nt, Artificial Sequence
  Synthetic
ggauucagccuacagau

SEQ ID NO: 712963 - RNA, 17 nt, Artificial Sequence
  Synthetic
gagaaaccuguacagau

SEQ ID NO: 712964 - RNA, 17 nt, Artificial Sequence
  Synthetic
guaagaccuuuccagau

SEQ ID NO: 712965 - RNA, 17 nt, Artificial Sequence
  Synthetic
guuauuaauaagcagau

SEQ ID NO: 712966 - RNA, 17 nt, Artificial Sequence
  Synthetic
gagaaagucaggcagau

SEQ ID NO: 712967 - RNA, 17 nt, Artificial Sequence
  Synthetic
ggaacagucaugcagau

SEQ ID NO: 712968 - RNA, 17 nt, Artificial Sequence
  Synthetic
gcugucacagaucagau

SEQ ID NO: 712969 - RNA, 17 nt, Artificial Sequence
  Synthetic
gaaaaacacagucagau

SEQ ID NO: 712970 - RNA, 17 nt, Artificial Sequence
  Synthetic
gaguuuagaggucagau

SEQ ID NO: 712971 - RNA, 17 nt, Artificial Sequence
  Synthetic
guuggugaccuucagau

SEQ ID NO: 712972 - RNA, 17 nt, Artificial Sequence
  Synthetic
gagguagagaaagagau

SEQ ID NO: 712973 - RNA, 17 nt, Artificial Sequence
  Synthetic
guauuuuuagaagagau

SEQ ID NO: 712974 - RNA, 17 nt, Artificial Sequence
  Synthetic
gcagcaugaccagagau

SEQ ID NO: 712975 - RNA, 17 nt, Artificial Sequence
  Synthetic
guauuuuuagcagagau

SEQ ID NO: 712976 - RNA, 17 nt, Artificial Sequence
  Synthetic
gcacuugcugcagagau

SEQ ID NO: 712977 - RNA, 17 nt, Artificial Sequence
  Synthetic
gcacggucuucagagau

SEQ ID NO: 712978 - RNA, 17 nt, Artificial Sequence
  Synthetic
gagacacagagagagau

SEQ ID NO: 712979 - RNA, 17 nt, Artificial Sequence
  Synthetic
gagagagagagagagau

SEQ ID NO: 712980 - RNA, 17 nt, Artificial Sequence
  Synthetic
guuggauagagagagau

SEQ ID NO: 712981 - RNA, 17 nt, Artificial Sequence
  Synthetic
guaggaaugggagagau

SEQ ID NO: 712982 - RNA, 17 nt, Artificial Sequence
  Synthetic
guauuuucaguagagau

SEQ ID NO: 712983 - RNA, 17 nt, Artificial Sequence
  Synthetic
guaucuuuaguagagau

SEQ ID NO: 712984 - RNA, 17 nt, Artificial Sequence
  Synthetic
gcauuuuuaguagagau

SEQ ID NO: 712985 - RNA, 17 nt, Artificial Sequence
  Synthetic
guauuuuuaguagagau

SEQ ID NO: 712986 - RNA, 17 nt, Artificial Sequence
  Synthetic
guguuuuuaguagagau

SEQ ID NO: 712987 - RNA, 17 nt, Artificial Sequence
  Synthetic
gauuuuuuaguagagau

SEQ ID NO: 712988 - RNA, 17 nt, Artificial Sequence
  Synthetic
gaaggaaugguagagau

SEQ ID NO: 712989 - RNA, 17 nt, Artificial Sequence
  Synthetic
guguauuguguagagau

SEQ ID NO: 712990 - RNA, 17 nt, Artificial Sequence
  Synthetic
gaauucuuuguagagau

SEQ ID NO: 712991 - RNA, 17 nt, Artificial Sequence
  Synthetic
gcauuuuuuguagagau

SEQ ID NO: 712992 - RNA, 17 nt, Artificial Sequence
  Synthetic
ggcaacagagacgagau

SEQ ID NO: 712993 - RNA, 17 nt, Artificial Sequence
  Synthetic
gaaaagcaauaggagau

SEQ ID NO: 712994 - RNA, 17 nt, Artificial Sequence
  Synthetic
gcuagagauacggagau

SEQ ID NO: 712995 - RNA, 17 nt, Artificial Sequence
  Synthetic
gaaguagaaugggagau

SEQ ID NO: 712996 - RNA, 17 nt, Artificial Sequence
  Synthetic
ggugagaaacuggagau

SEQ ID NO: 712997 - RNA, 17 nt, Artificial Sequence
  Synthetic
ggcuagccacuggagau

SEQ ID NO: 712998 - RNA, 17 nt, Artificial Sequence
  Synthetic
gaagggacauuggagau

SEQ ID NO: 712999 - RNA, 17 nt, Artificial Sequence
  Synthetic
ggucauuaaaaugagau

SEQ ID NO: 713000 - RNA, 17 nt, Artificial Sequence
  Synthetic
ggagugaucaaugagau

SEQ ID NO: 713001 - RNA, 17 nt, Artificial Sequence
  Synthetic
gaauuaaauuaugagau

SEQ ID NO: 713002 - RNA, 17 nt, Artificial Sequence
  Synthetic
ggaaaaugaagugagau

SEQ ID NO: 713003 - RNA, 17 nt, Artificial Sequence
  Synthetic
gucucugcacgugagau

SEQ ID NO: 713004 - RNA, 17 nt, Artificial Sequence
  Synthetic
guguuugcaugugagau

SEQ ID NO: 713005 - RNA, 17 nt, Artificial Sequence
  Synthetic
gguguccaaauugagau

SEQ ID NO: 713006 - RNA, 17 nt, Artificial Sequence
  Synthetic
gcaggugacuuugagau

SEQ ID NO: 713007 - RNA, 17 nt, Artificial Sequence
  Synthetic
gcugcaaccuuugagau

SEQ ID NO: 713008 - RNA, 17 nt, Artificial Sequence
  Synthetic
guuaccagauaauagau

SEQ ID NO: 713009 - RNA, 17 nt, Artificial Sequence
  Synthetic
ggcacuggcagauagau

SEQ ID NO: 713010 - RNA, 17 nt, Artificial Sequence
  Synthetic
ggccugccuuacuagau

SEQ ID NO: 713011 - RNA, 17 nt, Artificial Sequence
  Synthetic
gguuggcucaccuagau

SEQ ID NO: 713012 - RNA, 17 nt, Artificial Sequence
  Synthetic
gaagcauggcucuagau

SEQ ID NO: 713013 - RNA, 17 nt, Artificial Sequence
  Synthetic
gugaaacaaugguagau

SEQ ID NO: 713014 - RNA, 17 nt, Artificial Sequence
  Synthetic
gcuuuggggugguagau

SEQ ID NO: 713015 - RNA, 17 nt, Artificial Sequence
  Synthetic
gaaauuaaauuguagau

SEQ ID NO: 713016 - RNA, 17 nt, Artificial Sequence
  Synthetic
gaaagacaugauuagau

SEQ ID NO: 713017 - RNA, 17 nt, Artificial Sequence
  Synthetic
gggcccagcauuuagau

SEQ ID NO: 713018 - RNA, 17 nt, Artificial Sequence
  Synthetic
gguggacuuguuuagau

SEQ ID NO: 713019 - RNA, 17 nt, Artificial Sequence
  Synthetic
gccaugaaccuagcgau

SEQ ID NO: 713020 - RNA, 17 nt, Artificial Sequence
  Synthetic
gcuuuucucccuucgau

SEQ ID NO: 713021 - RNA, 17 nt, Artificial Sequence
  Synthetic
gaguuuuaaagaaggau

SEQ ID NO: 713022 - RNA, 17 nt, Artificial Sequence
  Synthetic
gaagaaacaagaaggau

SEQ ID NO: 713023 - RNA, 17 nt, Artificial Sequence
  Synthetic
gaaaaagauagaaggau

SEQ ID NO: 713024 - RNA, 17 nt, Artificial Sequence
  Synthetic
ggaugggggcgaaggau

SEQ ID NO: 713025 - RNA, 17 nt, Artificial Sequence
  Synthetic
gugagcaacuuaaggau

SEQ ID NO: 713026 - RNA, 17 nt, Artificial Sequence
  Synthetic
gacaauaaguacaggau

SEQ ID NO: 713027 - RNA, 17 nt, Artificial Sequence
  Synthetic
gggcuuagaagcaggau

SEQ ID NO: 713028 - RNA, 17 nt, Artificial Sequence
  Synthetic
gggaugaacagcaggau

SEQ ID NO: 713029 - RNA, 17 nt, Artificial Sequence
  Synthetic
gucuauaaaaucaggau

SEQ ID NO: 713030 - RNA, 17 nt, Artificial Sequence
  Synthetic
gagaagggaaggaggau

SEQ ID NO: 713031 - RNA, 17 nt, Artificial Sequence
  Synthetic
guauugugaaugaggau

SEQ ID NO: 713032 - RNA, 17 nt, Artificial Sequence
  Synthetic
gaugguuaccugaggau

SEQ ID NO: 713033 - RNA, 17 nt, Artificial Sequence
  Synthetic
gccuggcuggugaggau

SEQ ID NO: 713034 - RNA, 17 nt, Artificial Sequence
  Synthetic
gagaaaagcucuaggau

SEQ ID NO: 713035 - RNA, 17 nt, Artificial Sequence
  Synthetic
gaauuuuccaguaggau

SEQ ID NO: 713036 - RNA, 17 nt, Artificial Sequence
  Synthetic
gggggcacaauuaggau

SEQ ID NO: 713037 - RNA, 17 nt, Artificial Sequence
  Synthetic
gcuccucaccuuaggau

SEQ ID NO: 713038 - RNA, 17 nt, Artificial Sequence
  Synthetic
gcaaggcaguuuaggau

SEQ ID NO: 713039 - RNA, 17 nt, Artificial Sequence
  Synthetic
ggaaaaaugacagggau

SEQ ID NO: 713040 - RNA, 17 nt, Artificial Sequence
  Synthetic
gaggcccuugcagggau

SEQ ID NO: 713041 - RNA, 17 nt, Artificial Sequence
  Synthetic
guaauguacucagggau

SEQ ID NO: 713042 - RNA, 17 nt, Artificial Sequence
  Synthetic
ggagcugaaaaggggau

SEQ ID NO: 713043 - RNA, 17 nt, Artificial Sequence
  Synthetic
gacaaaaagaaggggau

SEQ ID NO: 713044 - RNA, 17 nt, Artificial Sequence
  Synthetic
ggggccucucaggggau

SEQ ID NO: 713045 - RNA, 17 nt, Artificial Sequence
  Synthetic
guguggagguaggggau

SEQ ID NO: 713046 - RNA, 17 nt, Artificial Sequence
  Synthetic
guggaaauaagggggau

SEQ ID NO: 713047 - RNA, 17 nt, Artificial Sequence
  Synthetic
gcaagcugcacugggau

SEQ ID NO: 713048 - RNA, 17 nt, Artificial Sequence
  Synthetic
guucugacugcugggau

SEQ ID NO: 713049 - RNA, 17 nt, Artificial Sequence
  Synthetic
gucaguuggucugggau

SEQ ID NO: 713050 - RNA, 17 nt, Artificial Sequence
  Synthetic
gggcgagagggugggau

SEQ ID NO: 713051 - RNA, 17 nt, Artificial Sequence
  Synthetic
gaugaaauaugugggau

SEQ ID NO: 713052 - RNA, 17 nt, Artificial Sequence
  Synthetic
gaaaaagaaaaauggau

SEQ ID NO: 713053 - RNA, 17 nt, Artificial Sequence
  Synthetic
gaagauaaucaauggau

SEQ ID NO: 713054 - RNA, 17 nt, Artificial Sequence
  Synthetic
ggaaaagaucgauggau

SEQ ID NO: 713055 - RNA, 17 nt, Artificial Sequence
  Synthetic
gugccugguagcuggau

SEQ ID NO: 713056 - RNA, 17 nt, Artificial Sequence
  Synthetic
gauuaggguaaguggau

SEQ ID NO: 713057 - RNA, 17 nt, Artificial Sequence
  Synthetic
ggcugagguggguggau

SEQ ID NO: 713058 - RNA, 17 nt, Artificial Sequence
  Synthetic
guuuagauuggguggau

SEQ ID NO: 713059 - RNA, 17 nt, Artificial Sequence
  Synthetic
gaaaaaaaaaauuggau

SEQ ID NO: 713060 - RNA, 17 nt, Artificial Sequence
  Synthetic
guccgucaacguuggau

SEQ ID NO: 713061 - RNA, 17 nt, Artificial Sequence
  Synthetic
gggucaaggauuuggau

SEQ ID NO: 713062 - RNA, 17 nt, Artificial Sequence
  Synthetic
gggaaugucuuuuggau

SEQ ID NO: 713063 - RNA, 17 nt, Artificial Sequence
  Synthetic
gcaauaggaaaaaugau

SEQ ID NO: 713064 - RNA, 17 nt, Artificial Sequence
  Synthetic
guuacacaagaaaugau

SEQ ID NO: 713065 - RNA, 17 nt, Artificial Sequence
  Synthetic
gaguucuugcuaaugau

SEQ ID NO: 713066 - RNA, 17 nt, Artificial Sequence
  Synthetic
gcacucuagaacaugau

SEQ ID NO: 713067 - RNA, 17 nt, Artificial Sequence
  Synthetic
ggaucagcuucgaugau

SEQ ID NO: 713068 - RNA, 17 nt, Artificial Sequence
  Synthetic
gccucugguccuaugau

SEQ ID NO: 713069 - RNA, 17 nt, Artificial Sequence
  Synthetic
gcgauugggauuaugau

SEQ ID NO: 713070 - RNA, 17 nt, Artificial Sequence
  Synthetic
gcuccucaucuuaugau

SEQ ID NO: 713071 - RNA, 17 nt, Artificial Sequence
  Synthetic
guaacaagucaacugau

SEQ ID NO: 713072 - RNA, 17 nt, Artificial Sequence
  Synthetic
gaauacagcacacugau

SEQ ID NO: 713073 - RNA, 17 nt, Artificial Sequence
  Synthetic
gacgaagguucacugau

SEQ ID NO: 713074 - RNA, 17 nt, Artificial Sequence
  Synthetic
gaauugcacaaccugau

SEQ ID NO: 713075 - RNA, 17 nt, Artificial Sequence
  Synthetic
gcagaagauaagcugau

SEQ ID NO: 713076 - RNA, 17 nt, Artificial Sequence
  Synthetic
gaucaaagauuucugau

SEQ ID NO: 713077 - RNA, 17 nt, Artificial Sequence
  Synthetic
guguaccugaaagugau

SEQ ID NO: 713078 - RNA, 17 nt, Artificial Sequence
  Synthetic
guagacguagaagugau

SEQ ID NO: 713079 - RNA, 17 nt, Artificial Sequence
  Synthetic
gaucaguagacagugau

SEQ ID NO: 713080 - RNA, 17 nt, Artificial Sequence
  Synthetic
gccugucacuuagugau

SEQ ID NO: 713081 - RNA, 17 nt, Artificial Sequence
  Synthetic
guccagugcugggugau

SEQ ID NO: 713082 - RNA, 17 nt, Artificial Sequence
  Synthetic
ggaggaaugguggugau

SEQ ID NO: 713083 - RNA, 17 nt, Artificial Sequence
  Synthetic
gaaaggaaaaaugugau

SEQ ID NO: 713084 - RNA, 17 nt, Artificial Sequence
  Synthetic
guacuaacaaaugugau

SEQ ID NO: 713085 - RNA, 17 nt, Artificial Sequence
  Synthetic
gcaugagccaaugugau

SEQ ID NO: 713086 - RNA, 17 nt, Artificial Sequence
  Synthetic
guaauaguagaugugau

SEQ ID NO: 713087 - RNA, 17 nt, Artificial Sequence
  Synthetic
gguucuguuuaugugau

SEQ ID NO: 713088 - RNA, 17 nt, Artificial Sequence
  Synthetic
guaaaacuuucugugau

SEQ ID NO: 713089 - RNA, 17 nt, Artificial Sequence
  Synthetic
ggccugguaggugugau

SEQ ID NO: 713090 - RNA, 17 nt, Artificial Sequence
  Synthetic
guuccuugacuugugau

SEQ ID NO: 713091 - RNA, 17 nt, Artificial Sequence
  Synthetic
gccucugggcuugugau

SEQ ID NO: 713092 - RNA, 17 nt, Artificial Sequence
  Synthetic
gaauguuuaguugugau

SEQ ID NO: 713093 - RNA, 17 nt, Artificial Sequence
  Synthetic
gcccuggaagaauugau

SEQ ID NO: 713094 - RNA, 17 nt, Artificial Sequence
  Synthetic
gcaaagcaugcauugau

SEQ ID NO: 713095 - RNA, 17 nt, Artificial Sequence
  Synthetic
guaagucaauuauugau

SEQ ID NO: 713096 - RNA, 17 nt, Artificial Sequence
  Synthetic
gacuggcaggacuugau

SEQ ID NO: 713097 - RNA, 17 nt, Artificial Sequence
  Synthetic
gucaaugguagcuugau

SEQ ID NO: 713098 - RNA, 17 nt, Artificial Sequence
  Synthetic
ggcauugguagcuugau

SEQ ID NO: 713099 - RNA, 17 nt, Artificial Sequence
  Synthetic
gucauugguagcuugau

SEQ ID NO: 713100 - RNA, 17 nt, Artificial Sequence
  Synthetic
guuuaggaaugcuugau

SEQ ID NO: 713101 - RNA, 17 nt, Artificial Sequence
  Synthetic
guauucuauuucuugau

SEQ ID NO: 713102 - RNA, 17 nt, Artificial Sequence
  Synthetic
guagaugacagguugau

SEQ ID NO: 713103 - RNA, 17 nt, Artificial Sequence
  Synthetic
guagaugaaggguugau

SEQ ID NO: 713104 - RNA, 17 nt, Artificial Sequence
  Synthetic
guagaugacggguugau

SEQ ID NO: 713105 - RNA, 17 nt, Artificial Sequence
  Synthetic
guugauuaaugguugau

SEQ ID NO: 713106 - RNA, 17 nt, Artificial Sequence
  Synthetic
guaugcaaucuguugau

SEQ ID NO: 713107 - RNA, 17 nt, Artificial Sequence
  Synthetic
guucacugacauuugau

SEQ ID NO: 713108 - RNA, 17 nt, Artificial Sequence
  Synthetic
gaaugugaauauuugau

SEQ ID NO: 713109 - RNA, 17 nt, Artificial Sequence
  Synthetic
guaaacaaggcuuugau

SEQ ID NO: 713110 - RNA, 17 nt, Artificial Sequence
  Synthetic
gacauugcuaguuugau

SEQ ID NO: 713111 - RNA, 17 nt, Artificial Sequence
  Synthetic
gaagcuuuaaaaaauau

SEQ ID NO: 713112 - RNA, 17 nt, Artificial Sequence
  Synthetic
guugacaaacaaaauau

SEQ ID NO: 713113 - RNA, 17 nt, Artificial Sequence
  Synthetic
gaaaacuggcaaaauau

SEQ ID NO: 713114 - RNA, 17 nt, Artificial Sequence
  Synthetic
gagaauuaggaaaauau

SEQ ID NO: 713115 - RNA, 17 nt, Artificial Sequence
  Synthetic
gagagaauugaaaauau

SEQ ID NO: 713116 - RNA, 17 nt, Artificial Sequence
  Synthetic
ggcuaaaaauaaaauau

SEQ ID NO: 713117 - RNA, 17 nt, Artificial Sequence
  Synthetic
gaacuggaauaaaauau

SEQ ID NO: 713118 - RNA, 17 nt, Artificial Sequence
  Synthetic
gucauagacacaaauau

SEQ ID NO: 713119 - RNA, 17 nt, Artificial Sequence
  Synthetic
guucugcuuacaaauau

SEQ ID NO: 713120 - RNA, 17 nt, Artificial Sequence
  Synthetic
ggaaucaagagaaauau

SEQ ID NO: 713121 - RNA, 17 nt, Artificial Sequence
  Synthetic
gcuucuguuugaaauau

SEQ ID NO: 713122 - RNA, 17 nt, Artificial Sequence
  Synthetic
gauuagugacuaaauau

SEQ ID NO: 713123 - RNA, 17 nt, Artificial Sequence
  Synthetic
gaaaaugaagacaauau

SEQ ID NO: 713124 - RNA, 17 nt, Artificial Sequence
  Synthetic
gcugaaucucagaauau

SEQ ID NO: 713125 - RNA, 17 nt, Artificial Sequence
  Synthetic
gggaauggaaggaauau

SEQ ID NO: 713126 - RNA, 17 nt, Artificial Sequence
  Synthetic
gcuuuacuauggaauau

SEQ ID NO: 713127 - RNA, 17 nt, Artificial Sequence
  Synthetic
gaauaugcaaauaauau

SEQ ID NO: 713128 - RNA, 17 nt, Artificial Sequence
  Synthetic
gggguauuuaauaauau

SEQ ID NO: 713129 - RNA, 17 nt, Artificial Sequence
  Synthetic
guugugaaacauaauau

SEQ ID NO: 713130 - RNA, 17 nt, Artificial Sequence
  Synthetic
gugccacauacuaauau

SEQ ID NO: 713131 - RNA, 17 nt, Artificial Sequence
  Synthetic
ggucuggauauuaauau

SEQ ID NO: 713132 - RNA, 17 nt, Artificial Sequence
  Synthetic
gaaugaaugcuuaauau

SEQ ID NO: 713133 - RNA, 17 nt, Artificial Sequence
  Synthetic
gagauaauuuuuaauau

SEQ ID NO: 713134 - RNA, 17 nt, Artificial Sequence
  Synthetic
ggaugcauaccacauau

SEQ ID NO: 713135 - RNA, 17 nt, Artificial Sequence
  Synthetic
gucauacuuccacauau

SEQ ID NO: 713136 - RNA, 17 nt, Artificial Sequence
  Synthetic
gauucuuucugacauau

SEQ ID NO: 713137 - RNA, 17 nt, Artificial Sequence
  Synthetic
gaacaggccauacauau

SEQ ID NO: 713138 - RNA, 17 nt, Artificial Sequence
  Synthetic
gcacauuugcuacauau

SEQ ID NO: 713139 - RNA, 17 nt, Artificial Sequence
  Synthetic
gaaguaaaugaccauau

SEQ ID NO: 713140 - RNA, 17 nt, Artificial Sequence
  Synthetic
guacuauaauaccauau

SEQ ID NO: 713141 - RNA, 17 nt, Artificial Sequence
  Synthetic
gucuauuucuuccauau

SEQ ID NO: 713142 - RNA, 17 nt, Artificial Sequence
  Synthetic
ggaauugaagggcauau

SEQ ID NO: 713143 - RNA, 17 nt, Artificial Sequence
  Synthetic
gguucaugaaugcauau

SEQ ID NO: 713144 - RNA, 17 nt, Artificial Sequence
  Synthetic
gaaguggaucaucauau

SEQ ID NO: 713145 - RNA, 17 nt, Artificial Sequence
  Synthetic
gucuaccucuaucauau

SEQ ID NO: 713146 - RNA, 17 nt, Artificial Sequence
  Synthetic
gagaauaaaucucauau

SEQ ID NO: 713147 - RNA, 17 nt, Artificial Sequence
  Synthetic
guuaaaugaguucauau

SEQ ID NO: 713148 - RNA, 17 nt, Artificial Sequence
  Synthetic
gagccaugauaagauau

SEQ ID NO: 713149 - RNA, 17 nt, Artificial Sequence
  Synthetic
gguagagacagagauau

SEQ ID NO: 713150 - RNA, 17 nt, Artificial Sequence
  Synthetic
guagacacacuagauau

SEQ ID NO: 713151 - RNA, 17 nt, Artificial Sequence
  Synthetic
gaaguuaaaagcgauau

SEQ ID NO: 713152 - RNA, 17 nt, Artificial Sequence
  Synthetic
ggcacuuagaaggauau

SEQ ID NO: 713153 - RNA, 17 nt, Artificial Sequence
  Synthetic
gaaagagaugaggauau

SEQ ID NO: 713154 - RNA, 17 nt, Artificial Sequence
  Synthetic
guccacuccugggauau

SEQ ID NO: 713155 - RNA, 17 nt, Artificial Sequence
  Synthetic
gagucaggaaaugauau

SEQ ID NO: 713156 - RNA, 17 nt, Artificial Sequence
  Synthetic
gcaaaagucagugauau

SEQ ID NO: 713157 - RNA, 17 nt, Artificial Sequence
  Synthetic
ggaaaaaggggugauau

SEQ ID NO: 713158 - RNA, 17 nt, Artificial Sequence
  Synthetic
gcuguacuuggugauau

SEQ ID NO: 713159 - RNA, 17 nt, Artificial Sequence
  Synthetic
ggaaacagcaaauauau

SEQ ID NO: 713160 - RNA, 17 nt, Artificial Sequence
  Synthetic
gacaugaaacaauauau

SEQ ID NO: 713161 - RNA, 17 nt, Artificial Sequence
  Synthetic
guguuuguuuaauauau

SEQ ID NO: 713162 - RNA, 17 nt, Artificial Sequence
  Synthetic
guguauuauucauauau

SEQ ID NO: 713163 - RNA, 17 nt, Artificial Sequence
  Synthetic
gggguacauauauauau

SEQ ID NO: 713164 - RNA, 17 nt, Artificial Sequence
  Synthetic
gguacauauauauauau

SEQ ID NO: 713165 - RNA, 17 nt, Artificial Sequence
  Synthetic
gcauuccuaaacuauau

SEQ ID NO: 713166 - RNA, 17 nt, Artificial Sequence
  Synthetic
guuaaucugcacuauau

SEQ ID NO: 713167 - RNA, 17 nt, Artificial Sequence
  Synthetic
gauuuucuuggcuauau

SEQ ID NO: 713168 - RNA, 17 nt, Artificial Sequence
  Synthetic
gauguuuuaaaguauau

SEQ ID NO: 713169 - RNA, 17 nt, Artificial Sequence
  Synthetic
ggcaaggccauguauau

SEQ ID NO: 713170 - RNA, 17 nt, Artificial Sequence
  Synthetic
guagaacauguguauau

SEQ ID NO: 713171 - RNA, 17 nt, Artificial Sequence
  Synthetic
guguuacuuuuguauau

SEQ ID NO: 713172 - RNA, 17 nt, Artificial Sequence
  Synthetic
guuuagcagaauuauau

SEQ ID NO: 713173 - RNA, 17 nt, Artificial Sequence
  Synthetic
gauuauaauuguuauau

SEQ ID NO: 713174 - RNA, 17 nt, Artificial Sequence
  Synthetic
gugcagguuuguuauau

SEQ ID NO: 713175 - RNA, 17 nt, Artificial Sequence
  Synthetic
ggccuauuuauuuauau

SEQ ID NO: 713176 - RNA, 17 nt, Artificial Sequence
  Synthetic
guacauauaguuuauau

SEQ ID NO: 713177 - RNA, 17 nt, Artificial Sequence
  Synthetic
gagaugggauuuuauau

SEQ ID NO: 713178 - RNA, 17 nt, Artificial Sequence
  Synthetic
gguuuuggcuuuuauau

SEQ ID NO: 713179 - RNA, 17 nt, Artificial Sequence
  Synthetic
guuucaguguuuuauau

SEQ ID NO: 713180 - RNA, 17 nt, Artificial Sequence
  Synthetic
gaaauguguccaacuau

SEQ ID NO: 713181 - RNA, 17 nt, Artificial Sequence
  Synthetic
guugaaaaacuaacuau

SEQ ID NO: 713182 - RNA, 17 nt, Artificial Sequence
  Synthetic
gaaaccuuauccacuau

SEQ ID NO: 713183 - RNA, 17 nt, Artificial Sequence
  Synthetic
gugacccucuagacuau

SEQ ID NO: 713184 - RNA, 17 nt, Artificial Sequence
  Synthetic
ggcuauugugugacuau

SEQ ID NO: 713185 - RNA, 17 nt, Artificial Sequence
  Synthetic
gaauaguuuauuacuau

SEQ ID NO: 713186 - RNA, 17 nt, Artificial Sequence
  Synthetic
guugaaaaacuaccuau

SEQ ID NO: 713187 - RNA, 17 nt, Artificial Sequence
  Synthetic
ggucugauuacuccuau

SEQ ID NO: 713188 - RNA, 17 nt, Artificial Sequence
  Synthetic
ggccacugugcuccuau

SEQ ID NO: 713189 - RNA, 17 nt, Artificial Sequence
  Synthetic
gccuugccugguccuau

SEQ ID NO: 713190 - RNA, 17 nt, Artificial Sequence
  Synthetic
gacaacagaccugcuau

SEQ ID NO: 713191 - RNA, 17 nt, Artificial Sequence
  Synthetic
ggaaggaauucugcuau

SEQ ID NO: 713192 - RNA, 17 nt, Artificial Sequence
  Synthetic
ggcgacuuuucugcuau

SEQ ID NO: 713193 - RNA, 17 nt, Artificial Sequence
  Synthetic
ggcuaauuaggugcuau

SEQ ID NO: 713194 - RNA, 17 nt, Artificial Sequence
  Synthetic
guuaaguucuuugcuau

SEQ ID NO: 713195 - RNA, 17 nt, Artificial Sequence
  Synthetic
guuuccuucgaaucuau

SEQ ID NO: 713196 - RNA, 17 nt, Artificial Sequence
  Synthetic
gaaaugagggaaucuau

SEQ ID NO: 713197 - RNA, 17 nt, Artificial Sequence
  Synthetic
ggauacuaugaaucuau

SEQ ID NO: 713198 - RNA, 17 nt, Artificial Sequence
  Synthetic
gaacuggauacaucuau

SEQ ID NO: 713199 - RNA, 17 nt, Artificial Sequence
  Synthetic
gcaaugaugucaucuau

SEQ ID NO: 713200 - RNA, 17 nt, Artificial Sequence
  Synthetic
ggacaggguggaucuau

SEQ ID NO: 713201 - RNA, 17 nt, Artificial Sequence
  Synthetic
gauugauguuuaucuau

SEQ ID NO: 713202 - RNA, 17 nt, Artificial Sequence
  Synthetic
gccucaaagaacucuau

SEQ ID NO: 713203 - RNA, 17 nt, Artificial Sequence
  Synthetic
gugaaaacuaccucuau

SEQ ID NO: 713204 - RNA, 17 nt, Artificial Sequence
  Synthetic
gacaaggcaggcucuau

SEQ ID NO: 713205 - RNA, 17 nt, Artificial Sequence
  Synthetic
guuuucagaggcucuau

SEQ ID NO: 713206 - RNA, 17 nt, Artificial Sequence
  Synthetic
gaaacacuuaagucuau

SEQ ID NO: 713207 - RNA, 17 nt, Artificial Sequence
  Synthetic
gaaauugacuugucuau

SEQ ID NO: 713208 - RNA, 17 nt, Artificial Sequence
  Synthetic
gaagggacauauucuau

SEQ ID NO: 713209 - RNA, 17 nt, Artificial Sequence
  Synthetic
gauguuguaucuucuau

SEQ ID NO: 713210 - RNA, 17 nt, Artificial Sequence
  Synthetic
guaaguuuugguucuau

SEQ ID NO: 713211 - RNA, 17 nt, Artificial Sequence
  Synthetic
gagaagacauguucuau

SEQ ID NO: 713212 - RNA, 17 nt, Artificial Sequence
  Synthetic
guggcucucauuucuau

SEQ ID NO: 713213 - RNA, 17 nt, Artificial Sequence
  Synthetic
gaaaagaaagaaaguau

SEQ ID NO: 713214 - RNA, 17 nt, Artificial Sequence
  Synthetic
ggguggaguccaaguau

SEQ ID NO: 713215 - RNA, 17 nt, Artificial Sequence
  Synthetic
gaaagaguagcaaguau

SEQ ID NO: 713216 - RNA, 17 nt, Artificial Sequence
  Synthetic
gaaggaggugcaaguau

SEQ ID NO: 713217 - RNA, 17 nt, Artificial Sequence
  Synthetic
gaaggauaaguaaguau

SEQ ID NO: 713218 - RNA, 17 nt, Artificial Sequence
  Synthetic
guaauaguuguaaguau

SEQ ID NO: 713219 - RNA, 17 nt, Artificial Sequence
  Synthetic
gguuucagcaggaguau

SEQ ID NO: 713220 - RNA, 17 nt, Artificial Sequence
  Synthetic
ggcuuaaacuggaguau

SEQ ID NO: 713221 - RNA, 17 nt, Artificial Sequence
  Synthetic
gucuucaucaugaguau

SEQ ID NO: 713222 - RNA, 17 nt, Artificial Sequence
  Synthetic
guaaauuagaauaguau

SEQ ID NO: 713223 - RNA, 17 nt, Artificial Sequence
  Synthetic
gacccauaaacuaguau

SEQ ID NO: 713224 - RNA, 17 nt, Artificial Sequence
  Synthetic
gaucaguaaguacguau

SEQ ID NO: 713225 - RNA, 17 nt, Artificial Sequence
  Synthetic
gucuauuauuggcguau

SEQ ID NO: 713226 - RNA, 17 nt, Artificial Sequence
  Synthetic
ggugaaaagaaagguau

SEQ ID NO: 713227 - RNA, 17 nt, Artificial Sequence
  Synthetic
gaggaagaggaagguau

SEQ ID NO: 713228 - RNA, 17 nt, Artificial Sequence
  Synthetic
gaagagaauucagguau

SEQ ID NO: 713229 - RNA, 17 nt, Artificial Sequence
  Synthetic
guuucagcgggagguau

SEQ ID NO: 713230 - RNA, 17 nt, Artificial Sequence
  Synthetic
gcugaugaaugggguau

SEQ ID NO: 713231 - RNA, 17 nt, Artificial Sequence
  Synthetic
ggcauagauugugguau

SEQ ID NO: 713232 - RNA, 17 nt, Artificial Sequence
  Synthetic
guucaugguugugguau

SEQ ID NO: 713233 - RNA, 17 nt, Artificial Sequence
  Synthetic
ggacuguuaauugguau

SEQ ID NO: 713234 - RNA, 17 nt, Artificial Sequence
  Synthetic
gaaauuuagauugguau

SEQ ID NO: 713235 - RNA, 17 nt, Artificial Sequence
  Synthetic
gccauuccacaauguau

SEQ ID NO: 713236 - RNA, 17 nt, Artificial Sequence
  Synthetic
gggggaaaauaauguau

SEQ ID NO: 713237 - RNA, 17 nt, Artificial Sequence
  Synthetic
gggcaagaccacuguau

SEQ ID NO: 713238 - RNA, 17 nt, Artificial Sequence
  Synthetic
gccaucuuuaucuguau

SEQ ID NO: 713239 - RNA, 17 nt, Artificial Sequence
  Synthetic
guuuacaucuaguguau

SEQ ID NO: 713240 - RNA, 17 nt, Artificial Sequence
  Synthetic
gcauuuagguaguguau

SEQ ID NO: 713241 - RNA, 17 nt, Artificial Sequence
  Synthetic
gucuauucuugguguau

SEQ ID NO: 713242 - RNA, 17 nt, Artificial Sequence
  Synthetic
ggaaccuggauguguau

SEQ ID NO: 713243 - RNA, 17 nt, Artificial Sequence
  Synthetic
guggaugucaguuguau

SEQ ID NO: 713244 - RNA, 17 nt, Artificial Sequence
  Synthetic
gccugcuggaguuguau

SEQ ID NO: 713245 - RNA, 17 nt, Artificial Sequence
  Synthetic
guuuucucuuguuguau

SEQ ID NO: 713246 - RNA, 17 nt, Artificial Sequence
  Synthetic
gugccccuccuuuguau

SEQ ID NO: 713247 - RNA, 17 nt, Artificial Sequence
  Synthetic
gauauuuuugaaauuau

SEQ ID NO: 713248 - RNA, 17 nt, Artificial Sequence
  Synthetic
gcacauuuauaaauuau

SEQ ID NO: 713249 - RNA, 17 nt, Artificial Sequence
  Synthetic
guggaagagguaauuau

SEQ ID NO: 713250 - RNA, 17 nt, Artificial Sequence
  Synthetic
gaccucuuucccauuau

SEQ ID NO: 713251 - RNA, 17 nt, Artificial Sequence
  Synthetic
gaagcacauugcauuau

SEQ ID NO: 713252 - RNA, 17 nt, Artificial Sequence
  Synthetic
gaagcaccuugcauuau

SEQ ID NO: 713253 - RNA, 17 nt, Artificial Sequence
  Synthetic
gauuuguccuucauuau

SEQ ID NO: 713254 - RNA, 17 nt, Artificial Sequence
  Synthetic
gauuuuaaaaagauuau

SEQ ID NO: 713255 - RNA, 17 nt, Artificial Sequence
  Synthetic
gugaaacaaaggauuau

SEQ ID NO: 713256 - RNA, 17 nt, Artificial Sequence
  Synthetic
gauaaggaguugauuau

SEQ ID NO: 713257 - RNA, 17 nt, Artificial Sequence
  Synthetic
guccaaauagauauuau

SEQ ID NO: 713258 - RNA, 17 nt, Artificial Sequence
  Synthetic
gucgacaacuauauuau

SEQ ID NO: 713259 - RNA, 17 nt, Artificial Sequence
  Synthetic
gaguauucugcuauuau

SEQ ID NO: 713260 - RNA, 17 nt, Artificial Sequence
  Synthetic
gaagaaaagcuuauuau

SEQ ID NO: 713261 - RNA, 17 nt, Artificial Sequence
  Synthetic
gaugaauaaaaacuuau

SEQ ID NO: 713262 - RNA, 17 nt, Artificial Sequence
  Synthetic
ggagaugaagaacuuau

SEQ ID NO: 713263 - RNA, 17 nt, Artificial Sequence
  Synthetic
ggucuucuuuaacuuau

SEQ ID NO: 713264 - RNA, 17 nt, Artificial Sequence
  Synthetic
guucaacucccacuuau

SEQ ID NO: 713265 - RNA, 17 nt, Artificial Sequence
  Synthetic
guuaaauaaucacuuau

SEQ ID NO: 713266 - RNA, 17 nt, Artificial Sequence
  Synthetic
gaggacauuagacuuau

SEQ ID NO: 713267 - RNA, 17 nt, Artificial Sequence
  Synthetic
gaagcuguauaccuuau

SEQ ID NO: 713268 - RNA, 17 nt, Artificial Sequence
  Synthetic
gggggcaauagccuuau

SEQ ID NO: 713269 - RNA, 17 nt, Artificial Sequence
  Synthetic
guucuauaaauccuuau

SEQ ID NO: 713270 - RNA, 17 nt, Artificial Sequence
  Synthetic
ggagaucaucuccuuau

SEQ ID NO: 713271 - RNA, 17 nt, Artificial Sequence
  Synthetic
gaggauuucaagcuuau

SEQ ID NO: 713272 - RNA, 17 nt, Artificial Sequence
  Synthetic
guaaaaauaaaucuuau

SEQ ID NO: 713273 - RNA, 17 nt, Artificial Sequence
  Synthetic
gauaaaauuaaucuuau

SEQ ID NO: 713274 - RNA, 17 nt, Artificial Sequence
  Synthetic
ggcccugcaaaaguuau

SEQ ID NO: 713275 - RNA, 17 nt, Artificial Sequence
  Synthetic
gaaagaaugaaaguuau

SEQ ID NO: 713276 - RNA, 17 nt, Artificial Sequence
  Synthetic
guuacuuguaaaguuau

SEQ ID NO: 713277 - RNA, 17 nt, Artificial Sequence
  Synthetic
gauuagcaaucaguuau

SEQ ID NO: 713278 - RNA, 17 nt, Artificial Sequence
  Synthetic
guaacacauucaguuau

SEQ ID NO: 713279 - RNA, 17 nt, Artificial Sequence
  Synthetic
gucaaucuaagaguuau

SEQ ID NO: 713280 - RNA, 17 nt, Artificial Sequence
  Synthetic
gacuuaauaauaguuau

SEQ ID NO: 713281 - RNA, 17 nt, Artificial Sequence
  Synthetic
gugaacaagguaguuau

SEQ ID NO: 713282 - RNA, 17 nt, Artificial Sequence
  Synthetic
gggauuauggagguuau

SEQ ID NO: 713283 - RNA, 17 nt, Artificial Sequence
  Synthetic
ggacguguggggguuau

SEQ ID NO: 713284 - RNA, 17 nt, Artificial Sequence
  Synthetic
guucucuuuuggguuau

SEQ ID NO: 713285 - RNA, 17 nt, Artificial Sequence
  Synthetic
ggcucucugucuguuau

SEQ ID NO: 713286 - RNA, 17 nt, Artificial Sequence
  Synthetic
gaauucccauguguuau

SEQ ID NO: 713287 - RNA, 17 nt, Artificial Sequence
  Synthetic
gaaaucauuguuguuau

SEQ ID NO: 713288 - RNA, 17 nt, Artificial Sequence
  Synthetic
gacaaaguauuuguuau

SEQ ID NO: 713289 - RNA, 17 nt, Artificial Sequence
  Synthetic
gaagggcauuuuguuau

SEQ ID NO: 713290 - RNA, 17 nt, Artificial Sequence
  Synthetic
gagugaagucaauuuau

SEQ ID NO: 713291 - RNA, 17 nt, Artificial Sequence
  Synthetic
ggguacuaaagauuuau

SEQ ID NO: 713292 - RNA, 17 nt, Artificial Sequence
  Synthetic
gaaccaggaagauuuau

SEQ ID NO: 713293 - RNA, 17 nt, Artificial Sequence
  Synthetic
gucauguagagauuuau

SEQ ID NO: 713294 - RNA, 17 nt, Artificial Sequence
  Synthetic
gauaaaagacuauuuau

SEQ ID NO: 713295 - RNA, 17 nt, Artificial Sequence
  Synthetic
gagaaguugcuauuuau

SEQ ID NO: 713296 - RNA, 17 nt, Artificial Sequence
  Synthetic
gaggaaaauuuauuuau

SEQ ID NO: 713297 - RNA, 17 nt, Artificial Sequence
  Synthetic
gaugaaaaauacuuuau

SEQ ID NO: 713298 - RNA, 17 nt, Artificial Sequence
  Synthetic
gauaauauacccuuuau

SEQ ID NO: 713299 - RNA, 17 nt, Artificial Sequence
  Synthetic
gauauuuucugcuuuau

SEQ ID NO: 713300 - RNA, 17 nt, Artificial Sequence
  Synthetic
ggaagaggccaguuuau

SEQ ID NO: 713301 - RNA, 17 nt, Artificial Sequence
  Synthetic
gcagaguguagguuuau

SEQ ID NO: 713302 - RNA, 17 nt, Artificial Sequence
  Synthetic
gcaaugcuuggguuuau

SEQ ID NO: 713303 - RNA, 17 nt, Artificial Sequence
  Synthetic
gucuguuauugguuuau

SEQ ID NO: 713304 - RNA, 17 nt, Artificial Sequence
  Synthetic
gcauuuuucauguuuau

SEQ ID NO: 713305 - RNA, 17 nt, Artificial Sequence
  Synthetic
gucaaguuuauguuuau

SEQ ID NO: 713306 - RNA, 17 nt, Artificial Sequence
  Synthetic
gcuuauacacuguuuau

SEQ ID NO: 713307 - RNA, 17 nt, Artificial Sequence
  Synthetic
gauuuuuucuuguuuau

SEQ ID NO: 713308 - RNA, 17 nt, Artificial Sequence
  Synthetic
gcaugaaggaauuuuau

SEQ ID NO: 713309 - RNA, 17 nt, Artificial Sequence
  Synthetic
gacaugcauaauuuuau

SEQ ID NO: 713310 - RNA, 17 nt, Artificial Sequence
  Synthetic
guacaguaugauuuuau

SEQ ID NO: 713311 - RNA, 17 nt, Artificial Sequence
  Synthetic
guuccaugugauuuuau

SEQ ID NO: 713312 - RNA, 17 nt, Artificial Sequence
  Synthetic
gaaguauauuauuuuau

SEQ ID NO: 713313 - RNA, 17 nt, Artificial Sequence
  Synthetic
ggucugauuuauuuuau

SEQ ID NO: 713314 - RNA, 17 nt, Artificial Sequence
  Synthetic
gaaacugccacuuuuau

SEQ ID NO: 713315 - RNA, 17 nt, Artificial Sequence
  Synthetic
gcauccaguucuuuuau

SEQ ID NO: 713316 - RNA, 17 nt, Artificial Sequence
  Synthetic
gaaagcaucaguuuuau

SEQ ID NO: 713317 - RNA, 17 nt, Artificial Sequence
  Synthetic
gaaauccuccguuuuau

SEQ ID NO: 713318 - RNA, 17 nt, Artificial Sequence
  Synthetic
gcaaauaaauguuuuau

SEQ ID NO: 713319 - RNA, 17 nt, Artificial Sequence
  Synthetic
ggaauucuaguuuuuau

SEQ ID NO: 713320 - RNA, 17 nt, Artificial Sequence
  Synthetic
gagucugggguuuuuau

SEQ ID NO: 713321 - RNA, 17 nt, Artificial Sequence
  Synthetic
gagaggaauaaaaaacu

SEQ ID NO: 713322 - RNA, 17 nt, Artificial Sequence
  Synthetic
guagaguuuuaaaaacu

SEQ ID NO: 713323 - RNA, 17 nt, Artificial Sequence
  Synthetic
gaaccuuuagcaaaacu

SEQ ID NO: 713324 - RNA, 17 nt, Artificial Sequence
  Synthetic
gagaguuagagaaaacu

SEQ ID NO: 713325 - RNA, 17 nt, Artificial Sequence
  Synthetic
gugaagacuugaaaacu

SEQ ID NO: 713326 - RNA, 17 nt, Artificial Sequence
  Synthetic
gcaaaaugauuaaaacu

SEQ ID NO: 713327 - RNA, 17 nt, Artificial Sequence
  Synthetic
ggcuggaucuuaaaacu

SEQ ID NO: 713328 - RNA, 17 nt, Artificial Sequence
  Synthetic
gacucccucuuaaaacu

SEQ ID NO: 713329 - RNA, 17 nt, Artificial Sequence
  Synthetic
gcaaaaaaucacaaacu

SEQ ID NO: 713330 - RNA, 17 nt, Artificial Sequence
  Synthetic
gcagcugaagacaaacu

SEQ ID NO: 713331 - RNA, 17 nt, Artificial Sequence
  Synthetic
guaugacaucagaaacu

SEQ ID NO: 713332 - RNA, 17 nt, Artificial Sequence
  Synthetic
guccaaacagagaaacu

SEQ ID NO: 713333 - RNA, 17 nt, Artificial Sequence
  Synthetic
ggcuaagguuagaaacu

SEQ ID NO: 713334 - RNA, 17 nt, Artificial Sequence
  Synthetic
gcaggaugucugaaacu

SEQ ID NO: 713335 - RNA, 17 nt, Artificial Sequence
  Synthetic
gagaauugcuugaaacu

SEQ ID NO: 713336 - RNA, 17 nt, Artificial Sequence
  Synthetic
guuaagugaaauaaacu

SEQ ID NO: 713337 - RNA, 17 nt, Artificial Sequence
  Synthetic
gaacuagcuaauaaacu

SEQ ID NO: 713338 - RNA, 17 nt, Artificial Sequence
  Synthetic
gggaaugguaauaaacu

SEQ ID NO: 713339 - RNA, 17 nt, Artificial Sequence
  Synthetic
guguuacauaaacaacu

SEQ ID NO: 713340 - RNA, 17 nt, Artificial Sequence
  Synthetic
gccaagaauacacaacu

SEQ ID NO: 713341 - RNA, 17 nt, Artificial Sequence
  Synthetic
gaccagccuagccaacu

SEQ ID NO: 713342 - RNA, 17 nt, Artificial Sequence
  Synthetic
gcagcaaccuagcaacu

SEQ ID NO: 713343 - RNA, 17 nt, Artificial Sequence
  Synthetic
gagagaaaacugcaacu

SEQ ID NO: 713344 - RNA, 17 nt, Artificial Sequence
  Synthetic
gcacauaagaaucaacu

SEQ ID NO: 713345 - RNA, 17 nt, Artificial Sequence
  Synthetic
gaccagccugaucaacu

SEQ ID NO: 713346 - RNA, 17 nt, Artificial Sequence
  Synthetic
gacuugccaccucaacu

SEQ ID NO: 713347 - RNA, 17 nt, Artificial Sequence
  Synthetic
gggauaaaccuucaacu

SEQ ID NO: 713348 - RNA, 17 nt, Artificial Sequence
  Synthetic
guuuaggccacagaacu

SEQ ID NO: 713349 - RNA, 17 nt, Artificial Sequence
  Synthetic
guaauuaacugagaacu

SEQ ID NO: 713350 - RNA, 17 nt, Artificial Sequence
  Synthetic
gaagcaacuuuagaacu

SEQ ID NO: 713351 - RNA, 17 nt, Artificial Sequence
  Synthetic
gagaaucugaaggaacu

SEQ ID NO: 713352 - RNA, 17 nt, Artificial Sequence
  Synthetic
gaaaaggaagaggaacu

SEQ ID NO: 713353 - RNA, 17 nt, Artificial Sequence
  Synthetic
guuuuuuuuguggaacu

SEQ ID NO: 713354 - RNA, 17 nt, Artificial Sequence
  Synthetic
ggaagugacuuggaacu

SEQ ID NO: 713355 - RNA, 17 nt, Artificial Sequence
  Synthetic
ggggaaaggcaugaacu

SEQ ID NO: 713356 - RNA, 17 nt, Artificial Sequence
  Synthetic
ggaggagggagugaacu

SEQ ID NO: 713357 - RNA, 17 nt, Artificial Sequence
  Synthetic
gacugugcuagugaacu

SEQ ID NO: 713358 - RNA, 17 nt, Artificial Sequence
  Synthetic
ggagaaucacuugaacu

SEQ ID NO: 713359 - RNA, 17 nt, Artificial Sequence
  Synthetic
guucuaauucuugaacu

SEQ ID NO: 713360 - RNA, 17 nt, Artificial Sequence
  Synthetic
gugauuacuuuugaacu

SEQ ID NO: 713361 - RNA, 17 nt, Artificial Sequence
  Synthetic
ggauguuaaaaauaacu

SEQ ID NO: 713362 - RNA, 17 nt, Artificial Sequence
  Synthetic
gcuaaugcugaauaacu

SEQ ID NO: 713363 - RNA, 17 nt, Artificial Sequence
  Synthetic
gaugacuauuaauaacu

SEQ ID NO: 713364 - RNA, 17 nt, Artificial Sequence
  Synthetic
gggagaggcucauaacu

SEQ ID NO: 713365 - RNA, 17 nt, Artificial Sequence
  Synthetic
gaaaagaauucauaacu

SEQ ID NO: 713366 - RNA, 17 nt, Artificial Sequence
  Synthetic
guauuaagauacuaacu

SEQ ID NO: 713367 - RNA, 17 nt, Artificial Sequence
  Synthetic
gguacccaagucuaacu

SEQ ID NO: 713368 - RNA, 17 nt, Artificial Sequence
  Synthetic
gucaagaaguucuaacu

SEQ ID NO: 713369 - RNA, 17 nt, Artificial Sequence
  Synthetic
guuuguuagcaguaacu

SEQ ID NO: 713370 - RNA, 17 nt, Artificial Sequence
  Synthetic
ggagaacugcuguaacu

SEQ ID NO: 713371 - RNA, 17 nt, Artificial Sequence
  Synthetic
gaauucaaaaauuaacu

SEQ ID NO: 713372 - RNA, 17 nt, Artificial Sequence
  Synthetic
gccagaauaaauuaacu

SEQ ID NO: 713373 - RNA, 17 nt, Artificial Sequence
  Synthetic
gaagucauccauuaacu

SEQ ID NO: 713374 - RNA, 17 nt, Artificial Sequence
  Synthetic
gaaauaacucauuaacu

SEQ ID NO: 713375 - RNA, 17 nt, Artificial Sequence
  Synthetic
guuaaauauacuuaacu

SEQ ID NO: 713376 - RNA, 17 nt, Artificial Sequence
  Synthetic
gagcuacguaaaacacu

SEQ ID NO: 713377 - RNA, 17 nt, Artificial Sequence
  Synthetic
gccccaccuccaacacu

SEQ ID NO: 713378 - RNA, 17 nt, Artificial Sequence
  Synthetic
gccccaaguccaacacu

SEQ ID NO: 713379 - RNA, 17 nt, Artificial Sequence
  Synthetic
gcuaauuucucaacacu

SEQ ID NO: 713380 - RNA, 17 nt, Artificial Sequence
  Synthetic
ggggaauaacacacacu

SEQ ID NO: 713381 - RNA, 17 nt, Artificial Sequence
  Synthetic
ggggaacaucacacacu

SEQ ID NO: 713382 - RNA, 17 nt, Artificial Sequence
  Synthetic
gggagagaauugacacu

SEQ ID NO: 713383 - RNA, 17 nt, Artificial Sequence
  Synthetic
ggauagagaaauacacu

SEQ ID NO: 713384 - RNA, 17 nt, Artificial Sequence
  Synthetic
gcucauugauuuacacu

SEQ ID NO: 713385 - RNA, 17 nt, Artificial Sequence
  Synthetic
gauguucccuaaccacu

SEQ ID NO: 713386 - RNA, 17 nt, Artificial Sequence
  Synthetic
gacauguuguaaccacu

SEQ ID NO: 713387 - RNA, 17 nt, Artificial Sequence
  Synthetic
gcuacuaaaugaccacu

SEQ ID NO: 713388 - RNA, 17 nt, Artificial Sequence
  Synthetic
guauuugagguaccacu

SEQ ID NO: 713389 - RNA, 17 nt, Artificial Sequence
  Synthetic
gggauguuuguaccacu

SEQ ID NO: 713390 - RNA, 17 nt, Artificial Sequence
  Synthetic
gaaaauccuuuaccacu

SEQ ID NO: 713391 - RNA, 17 nt, Artificial Sequence
  Synthetic
gucaaguugaacccacu

SEQ ID NO: 713392 - RNA, 17 nt, Artificial Sequence
  Synthetic
guuaauccguccccacu

SEQ ID NO: 713393 - RNA, 17 nt, Artificial Sequence
  Synthetic
ggacuuacgguuccacu

SEQ ID NO: 713394 - RNA, 17 nt, Artificial Sequence
  Synthetic
gcuguuagugaagcacu

SEQ ID NO: 713395 - RNA, 17 nt, Artificial Sequence
  Synthetic
ggaaaauaaagagcacu

SEQ ID NO: 713396 - RNA, 17 nt, Artificial Sequence
  Synthetic
gcaccauucuaggcacu

SEQ ID NO: 713397 - RNA, 17 nt, Artificial Sequence
  Synthetic
guacagauaugggcacu

SEQ ID NO: 713398 - RNA, 17 nt, Artificial Sequence
  Synthetic
gaccacaacauggcacu

SEQ ID NO: 713399 - RNA, 17 nt, Artificial Sequence
  Synthetic
ggcaagcaagcugcacu

SEQ ID NO: 713400 - RNA, 17 nt, Artificial Sequence
  Synthetic
gguccuaaaauugcacu

SEQ ID NO: 713401 - RNA, 17 nt, Artificial Sequence
  Synthetic
guguaggucauugcacu

SEQ ID NO: 713402 - RNA, 17 nt, Artificial Sequence
  Synthetic
ggcacacuagaaucacu

SEQ ID NO: 713403 - RNA, 17 nt, Artificial Sequence
  Synthetic
gcagcguuagcaucacu

SEQ ID NO: 713404 - RNA, 17 nt, Artificial Sequence
  Synthetic
gaggcaggcagaucacu

SEQ ID NO: 713405 - RNA, 17 nt, Artificial Sequence
  Synthetic
gaggcagguggaucacu

SEQ ID NO: 713406 - RNA, 17 nt, Artificial Sequence
  Synthetic
guuucauuggacucacu

SEQ ID NO: 713407 - RNA, 17 nt, Artificial Sequence
  Synthetic
gucuucaauaccucacu

SEQ ID NO: 713408 - RNA, 17 nt, Artificial Sequence
  Synthetic
guaaaauaucccucacu

SEQ ID NO: 713409 - RNA, 17 nt, Artificial Sequence
  Synthetic
gguauucccuucucacu

SEQ ID NO: 713410 - RNA, 17 nt, Artificial Sequence
  Synthetic
guuuuagucaagucacu

SEQ ID NO: 713411 - RNA, 17 nt, Artificial Sequence
  Synthetic
gagcccagaaugucacu

SEQ ID NO: 713412 - RNA, 17 nt, Artificial Sequence
  Synthetic
gaaauucacuugucacu

SEQ ID NO: 713413 - RNA, 17 nt, Artificial Sequence
  Synthetic
gaagccucucauucacu

SEQ ID NO: 713414 - RNA, 17 nt, Artificial Sequence
  Synthetic
ggauagugucauucacu

SEQ ID NO: 713415 - RNA, 17 nt, Artificial Sequence
  Synthetic
gcuaccccaacuucacu

SEQ ID NO: 713416 - RNA, 17 nt, Artificial Sequence
  Synthetic
gcugguuccacuucacu

SEQ ID NO: 713417 - RNA, 17 nt, Artificial Sequence
  Synthetic
gcucuuccugcuucacu

SEQ ID NO: 713418 - RNA, 17 nt, Artificial Sequence
  Synthetic
gcuuacuauguuucacu

SEQ ID NO: 713419 - RNA, 17 nt, Artificial Sequence
  Synthetic
gggcaauagcaaagacu

SEQ ID NO: 713420 - RNA, 17 nt, Artificial Sequence
  Synthetic
gccaucugagaaagacu

SEQ ID NO: 713421 - RNA, 17 nt, Artificial Sequence
  Synthetic
gguagcugguaaagacu

SEQ ID NO: 713422 - RNA, 17 nt, Artificial Sequence
  Synthetic
gguuacucaugaagacu

SEQ ID NO: 713423 - RNA, 17 nt, Artificial Sequence
  Synthetic
ggauaggaaauaagacu

SEQ ID NO: 713424 - RNA, 17 nt, Artificial Sequence
  Synthetic
ggccaaccccuaagacu

SEQ ID NO: 713425 - RNA, 17 nt, Artificial Sequence
  Synthetic
gugaagccuuuaagacu

SEQ ID NO: 713426 - RNA, 17 nt, Artificial Sequence
  Synthetic
gaguuugugaccagacu

SEQ ID NO: 713427 - RNA, 17 nt, Artificial Sequence
  Synthetic
gaaggugcagccagacu

SEQ ID NO: 713428 - RNA, 17 nt, Artificial Sequence
  Synthetic
guacugaguaagagacu

SEQ ID NO: 713429 - RNA, 17 nt, Artificial Sequence
  Synthetic
gcaugauuacagagacu

SEQ ID NO: 713430 - RNA, 17 nt, Artificial Sequence
  Synthetic
guaaguucuacgagacu

SEQ ID NO: 713431 - RNA, 17 nt, Artificial Sequence
  Synthetic
gacagaaaaccgagacu

SEQ ID NO: 713432 - RNA, 17 nt, Artificial Sequence
  Synthetic
gcauguucuuggagacu

SEQ ID NO: 713433 - RNA, 17 nt, Artificial Sequence
  Synthetic
gaaagaggcaugagacu

SEQ ID NO: 713434 - RNA, 17 nt, Artificial Sequence
  Synthetic
gcuaaauaccuuagacu

SEQ ID NO: 713435 - RNA, 17 nt, Artificial Sequence
  Synthetic
guagcagguuuuagacu

SEQ ID NO: 713436 - RNA, 17 nt, Artificial Sequence
  Synthetic
guuuaaauagaaggacu

SEQ ID NO: 713437 - RNA, 17 nt, Artificial Sequence
  Synthetic
gcauuuaaaagaggacu

SEQ ID NO: 713438 - RNA, 17 nt, Artificial Sequence
  Synthetic
guugaauagagaggacu

SEQ ID NO: 713439 - RNA, 17 nt, Artificial Sequence
  Synthetic
guaucagguggaggacu

SEQ ID NO: 713440 - RNA, 17 nt, Artificial Sequence
  Synthetic
gggccuggaugaggacu

SEQ ID NO: 713441 - RNA, 17 nt, Artificial Sequence
  Synthetic
gcaggcuucuagggacu

SEQ ID NO: 713442 - RNA, 17 nt, Artificial Sequence
  Synthetic
gaguacacugugggacu

SEQ ID NO: 713443 - RNA, 17 nt, Artificial Sequence
  Synthetic
gaacaaguaacuggacu

SEQ ID NO: 713444 - RNA, 17 nt, Artificial Sequence
  Synthetic
gaguuaaaauacugacu

SEQ ID NO: 713445 - RNA, 17 nt, Artificial Sequence
  Synthetic
guuuaucugcucugacu

SEQ ID NO: 713446 - RNA, 17 nt, Artificial Sequence
  Synthetic
ggauaccuagucugacu

SEQ ID NO: 713447 - RNA, 17 nt, Artificial Sequence
  Synthetic
gcaagugacuucugacu

SEQ ID NO: 713448 - RNA, 17 nt, Artificial Sequence
  Synthetic
gucucuuugaauugacu

SEQ ID NO: 713449 - RNA, 17 nt, Artificial Sequence
  Synthetic
gggaaaauacauugacu

SEQ ID NO: 713450 - RNA, 17 nt, Artificial Sequence
  Synthetic
gaugcugaaccuugacu

SEQ ID NO: 713451 - RNA, 17 nt, Artificial Sequence
  Synthetic
gauaacuucucuugacu

SEQ ID NO: 713452 - RNA, 17 nt, Artificial Sequence
  Synthetic
guguucaagauuugacu

SEQ ID NO: 713453 - RNA, 17 nt, Artificial Sequence
  Synthetic
ggaaaacacagaauacu

SEQ ID NO: 713454 - RNA, 17 nt, Artificial Sequence
  Synthetic
gcagaauacaacauacu

SEQ ID NO: 713455 - RNA, 17 nt, Artificial Sequence
  Synthetic
gaagugaaagccauacu

SEQ ID NO: 713456 - RNA, 17 nt, Artificial Sequence
  Synthetic
guguggagugagauacu

SEQ ID NO: 713457 - RNA, 17 nt, Artificial Sequence
  Synthetic
gaguugaugcauauacu

SEQ ID NO: 713458 - RNA, 17 nt, Artificial Sequence
  Synthetic
gcuaaggcuucuauacu

SEQ ID NO: 713459 - RNA, 17 nt, Artificial Sequence
  Synthetic
gcucuguauuuuauacu

SEQ ID NO: 713460 - RNA, 17 nt, Artificial Sequence
  Synthetic
guauuuaauaaacuacu

SEQ ID NO: 713461 - RNA, 17 nt, Artificial Sequence
  Synthetic
guguaauguacacuacu

SEQ ID NO: 713462 - RNA, 17 nt, Artificial Sequence
  Synthetic
gcuccugaaugacuacu

SEQ ID NO: 713463 - RNA, 17 nt, Artificial Sequence
  Synthetic
gaauguaugauacuacu

SEQ ID NO: 713464 - RNA, 17 nt, Artificial Sequence
  Synthetic
gcacagcagguacuacu

SEQ ID NO: 713465 - RNA, 17 nt, Artificial Sequence
  Synthetic
gggacaguacagcuacu

SEQ ID NO: 713466 - RNA, 17 nt, Artificial Sequence
  Synthetic
cuguaaucccagcuacu

SEQ ID NO: 713467 - RNA, 17 nt, Artificial Sequence
  Synthetic
cuguagucccagcuacu

SEQ ID NO: 713468 - RNA, 17 nt, Artificial Sequence
  Synthetic
gucauaagucagcuacu

SEQ ID NO: 713469 - RNA, 17 nt, Artificial Sequence
  Synthetic
guuacauuugagcuacu

SEQ ID NO: 713470 - RNA, 17 nt, Artificial Sequence
  Synthetic
ggaacaaaauagcuacu

SEQ ID NO: 713471 - RNA, 17 nt, Artificial Sequence
  Synthetic
gaaugaaaauggcuacu

SEQ ID NO: 713472 - RNA, 17 nt, Artificial Sequence
  Synthetic
gggauucuaacucuacu

SEQ ID NO: 713473 - RNA, 17 nt, Artificial Sequence
  Synthetic
ggguuauauccucuacu

SEQ ID NO: 713474 - RNA, 17 nt, Artificial Sequence
  Synthetic
gaagacuuuauucuacu

SEQ ID NO: 713475 - RNA, 17 nt, Artificial Sequence
  Synthetic
ggagaaucacuaguacu

SEQ ID NO: 713476 - RNA, 17 nt, Artificial Sequence
  Synthetic
gauauaugccagguacu

SEQ ID NO: 713477 - RNA, 17 nt, Artificial Sequence
  Synthetic
gcauuggguuagguacu

SEQ ID NO: 713478 - RNA, 17 nt, Artificial Sequence
  Synthetic
gcccaguaauugguacu

SEQ ID NO: 713479 - RNA, 17 nt, Artificial Sequence
  Synthetic
ggagaugcuuugguacu

SEQ ID NO: 713480 - RNA, 17 nt, Artificial Sequence
  Synthetic
gugcucagcgcuguacu

SEQ ID NO: 713481 - RNA, 17 nt, Artificial Sequence
  Synthetic
gggcaaaugcuuguacu

SEQ ID NO: 713482 - RNA, 17 nt, Artificial Sequence
  Synthetic
gccuucugauaauuacu

SEQ ID NO: 713483 - RNA, 17 nt, Artificial Sequence
  Synthetic
gcaaaguauagauuacu

SEQ ID NO: 713484 - RNA, 17 nt, Artificial Sequence
  Synthetic
gcugaucuuggauuacu

SEQ ID NO: 713485 - RNA, 17 nt, Artificial Sequence
  Synthetic
gugugcaggauauuacu

SEQ ID NO: 713486 - RNA, 17 nt, Artificial Sequence
  Synthetic
gggaaagauguauuacu

SEQ ID NO: 713487 - RNA, 17 nt, Artificial Sequence
  Synthetic
gauuuauauguauuacu

SEQ ID NO: 713488 - RNA, 17 nt, Artificial Sequence
  Synthetic
gaaauaauguuauuacu

SEQ ID NO: 713489 - RNA, 17 nt, Artificial Sequence
  Synthetic
gagaaaagacacuuacu

SEQ ID NO: 713490 - RNA, 17 nt, Artificial Sequence
  Synthetic
guccuaucucacuuacu

SEQ ID NO: 713491 - RNA, 17 nt, Artificial Sequence
  Synthetic
gucacugcugaguuacu

SEQ ID NO: 713492 - RNA, 17 nt, Artificial Sequence
  Synthetic
guguagguauaguuacu

SEQ ID NO: 713493 - RNA, 17 nt, Artificial Sequence
  Synthetic
ggccugaggagguuacu

SEQ ID NO: 713494 - RNA, 17 nt, Artificial Sequence
  Synthetic
guuaauguuacuuuacu

SEQ ID NO: 713495 - RNA, 17 nt, Artificial Sequence
  Synthetic
guaaggagaauuuuacu

SEQ ID NO: 713496 - RNA, 17 nt, Artificial Sequence
  Synthetic
gaaugcacccuuuuacu

SEQ ID NO: 713497 - RNA, 17 nt, Artificial Sequence
  Synthetic
gaagaaugagaaaaccu

SEQ ID NO: 713498 - RNA, 17 nt, Artificial Sequence
  Synthetic
gucacauggagaaaccu

SEQ ID NO: 713499 - RNA, 17 nt, Artificial Sequence
  Synthetic
gaacaguauagaaaccu

SEQ ID NO: 713500 - RNA, 17 nt, Artificial Sequence
  Synthetic
gguuucaugcacaaccu

SEQ ID NO: 713501 - RNA, 17 nt, Artificial Sequence
  Synthetic
gcacuauuaaagaaccu

SEQ ID NO: 713502 - RNA, 17 nt, Artificial Sequence
  Synthetic
gaccucauggagaaccu

SEQ ID NO: 713503 - RNA, 17 nt, Artificial Sequence
  Synthetic
gagaauggcaugaaccu

SEQ ID NO: 713504 - RNA, 17 nt, Artificial Sequence
  Synthetic
gagaaucaccugaaccu

SEQ ID NO: 713505 - RNA, 17 nt, Artificial Sequence
  Synthetic
gagaaaggcgugaaccu

SEQ ID NO: 713506 - RNA, 17 nt, Artificial Sequence
  Synthetic
gagaauggcgugaaccu

SEQ ID NO: 713507 - RNA, 17 nt, Artificial Sequence
  Synthetic
gcuuauaaauugaaccu

SEQ ID NO: 713508 - RNA, 17 nt, Artificial Sequence
  Synthetic
gagaaccacuugaaccu

SEQ ID NO: 713509 - RNA, 17 nt, Artificial Sequence
  Synthetic
gagaaucacuugaaccu

SEQ ID NO: 713510 - RNA, 17 nt, Artificial Sequence
  Synthetic
gagaagcgcuugaaccu

SEQ ID NO: 713511 - RNA, 17 nt, Artificial Sequence
  Synthetic
gagaaucgcuugaaccu

SEQ ID NO: 713512 - RNA, 17 nt, Artificial Sequence
  Synthetic
gaggaucgcuugaaccu

SEQ ID NO: 713513 - RNA, 17 nt, Artificial Sequence
  Synthetic
gagaauugcuugaaccu

SEQ ID NO: 713514 - RNA, 17 nt, Artificial Sequence
  Synthetic
gaagauugcuugaaccu

SEQ ID NO: 713515 - RNA, 17 nt, Artificial Sequence
  Synthetic
gaggauuucuugaaccu

SEQ ID NO: 713516 - RNA, 17 nt, Artificial Sequence
  Synthetic
gagaauuguuugaaccu

SEQ ID NO: 713517 - RNA, 17 nt, Artificial Sequence
  Synthetic
gacuagcucuguaaccu

SEQ ID NO: 713518 - RNA, 17 nt, Artificial Sequence
  Synthetic
gaaaucaaggaacaccu

SEQ ID NO: 713519 - RNA, 17 nt, Artificial Sequence
  Synthetic
gggaugugaucacaccu

SEQ ID NO: 713520 - RNA, 17 nt, Artificial Sequence
  Synthetic
gaugauaacaaccaccu

SEQ ID NO: 713521 - RNA, 17 nt, Artificial Sequence
  Synthetic
ggcuauauguaccaccu

SEQ ID NO: 713522 - RNA, 17 nt, Artificial Sequence
  Synthetic
gugcaguggcgccaccu

SEQ ID NO: 713523 - RNA, 17 nt, Artificial Sequence
  Synthetic
ggagaauaaauccaccu

SEQ ID NO: 713524 - RNA, 17 nt, Artificial Sequence
  Synthetic
ggagcaagacuccaccu

SEQ ID NO: 713525 - RNA, 17 nt, Artificial Sequence
  Synthetic
gccacugaugggcaccu

SEQ ID NO: 713526 - RNA, 17 nt, Artificial Sequence
  Synthetic
gaaucuguaaaucaccu

SEQ ID NO: 713527 - RNA, 17 nt, Artificial Sequence
  Synthetic
gugcaucagaaucaccu

SEQ ID NO: 713528 - RNA, 17 nt, Artificial Sequence
  Synthetic
gcguaucugaaucaccu

SEQ ID NO: 713529 - RNA, 17 nt, Artificial Sequence
  Synthetic
gagcacagacaucaccu

SEQ ID NO: 713530 - RNA, 17 nt, Artificial Sequence
  Synthetic
gaaugcuuauaucaccu

SEQ ID NO: 713531 - RNA, 17 nt, Artificial Sequence
  Synthetic
gugcacaggauucaccu

SEQ ID NO: 713532 - RNA, 17 nt, Artificial Sequence
  Synthetic
gagcuucaauuucaccu

SEQ ID NO: 713533 - RNA, 17 nt, Artificial Sequence
  Synthetic
guuuugcucuuucaccu

SEQ ID NO: 713534 - RNA, 17 nt, Artificial Sequence
  Synthetic
gccuaacaaaaagaccu

SEQ ID NO: 713535 - RNA, 17 nt, Artificial Sequence
  Synthetic
ggaaggcagcaagaccu

SEQ ID NO: 713536 - RNA, 17 nt, Artificial Sequence
  Synthetic
gagaauugagaagaccu

SEQ ID NO: 713537 - RNA, 17 nt, Artificial Sequence
  Synthetic
gcagaggaggcagaccu

SEQ ID NO: 713538 - RNA, 17 nt, Artificial Sequence
  Synthetic
gaagaugaacaggaccu

SEQ ID NO: 713539 - RNA, 17 nt, Artificial Sequence
  Synthetic
guccuuuuugaggaccu

SEQ ID NO: 713540 - RNA, 17 nt, Artificial Sequence
  Synthetic
gaaaguacauaggaccu

SEQ ID NO: 713541 - RNA, 17 nt, Artificial Sequence
  Synthetic
ggucucccacaugaccu

SEQ ID NO: 713542 - RNA, 17 nt, Artificial Sequence
  Synthetic
gcuguggaccaugaccu

SEQ ID NO: 713543 - RNA, 17 nt, Artificial Sequence
  Synthetic
gucacauauuaugaccu

SEQ ID NO: 713544 - RNA, 17 nt, Artificial Sequence
  Synthetic
guuaacuugccugaccu

SEQ ID NO: 713545 - RNA, 17 nt, Artificial Sequence
  Synthetic
gagauagaaauugaccu

SEQ ID NO: 713546 - RNA, 17 nt, Artificial Sequence
  Synthetic
gaaucucucaaauaccu

SEQ ID NO: 713547 - RNA, 17 nt, Artificial Sequence
  Synthetic
ggagagagacaauaccu

SEQ ID NO: 713548 - RNA, 17 nt, Artificial Sequence
  Synthetic
guucagcucacauaccu

SEQ ID NO: 713549 - RNA, 17 nt, Artificial Sequence
  Synthetic
gggcacaagaacuaccu

SEQ ID NO: 713550 - RNA, 17 nt, Artificial Sequence
  Synthetic
gaaauauauaacuaccu

SEQ ID NO: 713551 - RNA, 17 nt, Artificial Sequence
  Synthetic
gaaaguagacacuaccu

SEQ ID NO: 713552 - RNA, 17 nt, Artificial Sequence
  Synthetic
gaggucuuugucuaccu

SEQ ID NO: 713553 - RNA, 17 nt, Artificial Sequence
  Synthetic
guuuaauuuuucuaccu

SEQ ID NO: 713554 - RNA, 17 nt, Artificial Sequence
  Synthetic
gcugccacuaaguaccu

SEQ ID NO: 713555 - RNA, 17 nt, Artificial Sequence
  Synthetic
guauagaaacaguaccu

SEQ ID NO: 713556 - RNA, 17 nt, Artificial Sequence
  Synthetic
gaaucuguaaauuaccu

SEQ ID NO: 713557 - RNA, 17 nt, Artificial Sequence
  Synthetic
guuggugagcauuaccu

SEQ ID NO: 713558 - RNA, 17 nt, Artificial Sequence
  Synthetic
gucacuacuuauuaccu

SEQ ID NO: 713559 - RNA, 17 nt, Artificial Sequence
  Synthetic
gugcagguuuguuaccu

SEQ ID NO: 713560 - RNA, 17 nt, Artificial Sequence
  Synthetic
gccucucagguuuaccu

SEQ ID NO: 713561 - RNA, 17 nt, Artificial Sequence
  Synthetic
gaaaaugauaaaacccu

SEQ ID NO: 713562 - RNA, 17 nt, Artificial Sequence
  Synthetic
gcgaaaccagaaacccu

SEQ ID NO: 713563 - RNA, 17 nt, Artificial Sequence
  Synthetic
ggcacguguuuaacccu

SEQ ID NO: 713564 - RNA, 17 nt, Artificial Sequence
  Synthetic
ggggaacaucacacccu

SEQ ID NO: 713565 - RNA, 17 nt, Artificial Sequence
  Synthetic
gucaggaaaaccacccu

SEQ ID NO: 713566 - RNA, 17 nt, Artificial Sequence
  Synthetic
gguagaaagaagacccu

SEQ ID NO: 713567 - RNA, 17 nt, Artificial Sequence
  Synthetic
gguuccuaaaauacccu

SEQ ID NO: 713568 - RNA, 17 nt, Artificial Sequence
  Synthetic
gucccaccauauacccu

SEQ ID NO: 713569 - RNA, 17 nt, Artificial Sequence
  Synthetic
guggucuggggaccccu

SEQ ID NO: 713570 - RNA, 17 nt, Artificial Sequence
  Synthetic
gucucacucuguccccu

SEQ ID NO: 713571 - RNA, 17 nt, Artificial Sequence
  Synthetic
gggcacuuaguuccccu

SEQ ID NO: 713572 - RNA, 17 nt, Artificial Sequence
  Synthetic
gagaagucauuuccccu

SEQ ID NO: 713573 - RNA, 17 nt, Artificial Sequence
  Synthetic
gucugguaccaagcccu

SEQ ID NO: 713574 - RNA, 17 nt, Artificial Sequence
  Synthetic
gcuaugcguuaagcccu

SEQ ID NO: 713575 - RNA, 17 nt, Artificial Sequence
  Synthetic
gggaggaguacagcccu

SEQ ID NO: 713576 - RNA, 17 nt, Artificial Sequence
  Synthetic
gcugauggaagagcccu

SEQ ID NO: 713577 - RNA, 17 nt, Artificial Sequence
  Synthetic
gcaagugcaaaggcccu

SEQ ID NO: 713578 - RNA, 17 nt, Artificial Sequence
  Synthetic
guauagugccuggcccu

SEQ ID NO: 713579 - RNA, 17 nt, Artificial Sequence
  Synthetic
ggacuaaauguggcccu

SEQ ID NO: 713580 - RNA, 17 nt, Artificial Sequence
  Synthetic
gguuagcuaacugcccu

SEQ ID NO: 713581 - RNA, 17 nt, Artificial Sequence
  Synthetic
guuuccaauguugcccu

SEQ ID NO: 713582 - RNA, 17 nt, Artificial Sequence
  Synthetic
guucaucauguugcccu

SEQ ID NO: 713583 - RNA, 17 nt, Artificial Sequence
  Synthetic
gauucauucacaucccu

SEQ ID NO: 713584 - RNA, 17 nt, Artificial Sequence
  Synthetic
gcaacuucgacaucccu

SEQ ID NO: 713585 - RNA, 17 nt, Artificial Sequence
  Synthetic
gaguuuuuuccaucccu

SEQ ID NO: 713586 - RNA, 17 nt, Artificial Sequence
  Synthetic
gcaagaacaagaucccu

SEQ ID NO: 713587 - RNA, 17 nt, Artificial Sequence
  Synthetic
gauacuucuggaucccu

SEQ ID NO: 713588 - RNA, 17 nt, Artificial Sequence
  Synthetic
gaaucccucaacucccu

SEQ ID NO: 713589 - RNA, 17 nt, Artificial Sequence
  Synthetic
gggcaccacgacucccu

SEQ ID NO: 713590 - RNA, 17 nt, Artificial Sequence
  Synthetic
gcagccuugaccucccu

SEQ ID NO: 713591 - RNA, 17 nt, Artificial Sequence
  Synthetic
gaucccuaauccucccu

SEQ ID NO: 713592 - RNA, 17 nt, Artificial Sequence
  Synthetic
gcuggguucugcucccu

SEQ ID NO: 713593 - RNA, 17 nt, Artificial Sequence
  Synthetic
gcagguuuucagucccu

SEQ ID NO: 713594 - RNA, 17 nt, Artificial Sequence
  Synthetic
gaaaaccucucuucccu

SEQ ID NO: 713595 - RNA, 17 nt, Artificial Sequence
  Synthetic
gaggaucuuucuucccu

SEQ ID NO: 713596 - RNA, 17 nt, Artificial Sequence
  Synthetic
gcccaagacaguucccu

SEQ ID NO: 713597 - RNA, 17 nt, Artificial Sequence
  Synthetic
guuuucaucauuucccu

SEQ ID NO: 713598 - RNA, 17 nt, Artificial Sequence
  Synthetic
gaggcugugauuucccu

SEQ ID NO: 713599 - RNA, 17 nt, Artificial Sequence
  Synthetic
gcaucuacucuuucccu

SEQ ID NO: 713600 - RNA, 17 nt, Artificial Sequence
  Synthetic
gcucucuauguuucccu

SEQ ID NO: 713601 - RNA, 17 nt, Artificial Sequence
  Synthetic
gauguauggaaaagccu

SEQ ID NO: 713602 - RNA, 17 nt, Artificial Sequence
  Synthetic
gaacaagggcaaagccu

SEQ ID NO: 713603 - RNA, 17 nt, Artificial Sequence
  Synthetic
gacauucacaacagccu

SEQ ID NO: 713604 - RNA, 17 nt, Artificial Sequence
  Synthetic
gaguucaagaacagccu

SEQ ID NO: 713605 - RNA, 17 nt, Artificial Sequence
  Synthetic
gguaagaauaacagccu

SEQ ID NO: 713606 - RNA, 17 nt, Artificial Sequence
  Synthetic
gugggcucccacagccu

SEQ ID NO: 713607 - RNA, 17 nt, Artificial Sequence
  Synthetic
gcauuuucccacagccu

SEQ ID NO: 713608 - RNA, 17 nt, Artificial Sequence
  Synthetic
gaguucaaaaccagccu

SEQ ID NO: 713609 - RNA, 17 nt, Artificial Sequence
  Synthetic
gaguccaagaccagccu

SEQ ID NO: 713610 - RNA, 17 nt, Artificial Sequence
  Synthetic
gaguucaagaccagccu

SEQ ID NO: 713611 - RNA, 17 nt, Artificial Sequence
  Synthetic
gaguucgagaccagccu

SEQ ID NO: 713612 - RNA, 17 nt, Artificial Sequence
  Synthetic
gagauugagaccagccu

SEQ ID NO: 713613 - RNA, 17 nt, Artificial Sequence
  Synthetic
gaguuugagaccagccu

SEQ ID NO: 713614 - RNA, 17 nt, Artificial Sequence
  Synthetic
gaguuggauaccagccu

SEQ ID NO: 713615 - RNA, 17 nt, Artificial Sequence
  Synthetic
ggauuaacauccagccu

SEQ ID NO: 713616 - RNA, 17 nt, Artificial Sequence
  Synthetic
ccacugcacuccagccu

SEQ ID NO: 713617 - RNA, 17 nt, Artificial Sequence
  Synthetic
gcacugcacuccagccu

SEQ ID NO: 713618 - RNA, 17 nt, Artificial Sequence
  Synthetic
ccauugcacuccagccu

SEQ ID NO: 713619 - RNA, 17 nt, Artificial Sequence
  Synthetic
gaguuugagaucagccu

SEQ ID NO: 713620 - RNA, 17 nt, Artificial Sequence
  Synthetic
gugacaguuuucagccu

SEQ ID NO: 713621 - RNA, 17 nt, Artificial Sequence
  Synthetic
gcagaucacuugagccu

SEQ ID NO: 713622 - RNA, 17 nt, Artificial Sequence
  Synthetic
gaggauugcuugagccu

SEQ ID NO: 713623 - RNA, 17 nt, Artificial Sequence
  Synthetic
guacugguuuauagccu

SEQ ID NO: 713624 - RNA, 17 nt, Artificial Sequence
  Synthetic
gcuauaucauguagccu

SEQ ID NO: 713625 - RNA, 17 nt, Artificial Sequence
  Synthetic
guacagguuuguagccu

SEQ ID NO: 713626 - RNA, 17 nt, Artificial Sequence
  Synthetic
gaacagaagcuuagccu

SEQ ID NO: 713627 - RNA, 17 nt, Artificial Sequence
  Synthetic
guguaucccuuuagccu

SEQ ID NO: 713628 - RNA, 17 nt, Artificial Sequence
  Synthetic
ucgugaucugcccgccu

SEQ ID NO: 713629 - RNA, 17 nt, Artificial Sequence
  Synthetic
gggauauaagaaggccu

SEQ ID NO: 713630 - RNA, 17 nt, Artificial Sequence
  Synthetic
ggacuuuuaagaggccu

SEQ ID NO: 713631 - RNA, 17 nt, Artificial Sequence
  Synthetic
gagcuaggcugaggccu

SEQ ID NO: 713632 - RNA, 17 nt, Artificial Sequence
  Synthetic
gcuguucaauuaggccu

SEQ ID NO: 713633 - RNA, 17 nt, Artificial Sequence
  Synthetic
gcacugcaguccggccu

SEQ ID NO: 713634 - RNA, 17 nt, Artificial Sequence
  Synthetic
ggcaucagucagggccu

SEQ ID NO: 713635 - RNA, 17 nt, Artificial Sequence
  Synthetic
guucugaaguggggccu

SEQ ID NO: 713636 - RNA, 17 nt, Artificial Sequence
  Synthetic
guuuugaaguggggccu

SEQ ID NO: 713637 - RNA, 17 nt, Artificial Sequence
  Synthetic
gguguauauuggggccu

SEQ ID NO: 713638 - RNA, 17 nt, Artificial Sequence
  Synthetic
gugggcucccauggccu

SEQ ID NO: 713639 - RNA, 17 nt, Artificial Sequence
  Synthetic
guugaaggaccuggccu

SEQ ID NO: 713640 - RNA, 17 nt, Artificial Sequence
  Synthetic
gaacacaaaacaugccu

SEQ ID NO: 713641 - RNA, 17 nt, Artificial Sequence
  Synthetic
ggaauaguucacugccu

SEQ ID NO: 713642 - RNA, 17 nt, Artificial Sequence
  Synthetic
gguggccauagcugccu

SEQ ID NO: 713643 - RNA, 17 nt, Artificial Sequence
  Synthetic
guuggguguugcugccu

SEQ ID NO: 713644 - RNA, 17 nt, Artificial Sequence
  Synthetic
ggccaacauaucugccu

SEQ ID NO: 713645 - RNA, 17 nt, Artificial Sequence
  Synthetic
gcaagucacuucugccu

SEQ ID NO: 713646 - RNA, 17 nt, Artificial Sequence
  Synthetic
gagaaacaagagugccu

SEQ ID NO: 713647 - RNA, 17 nt, Artificial Sequence
  Synthetic
gguacugaggugugccu

SEQ ID NO: 713648 - RNA, 17 nt, Artificial Sequence
  Synthetic
guuaucaauaauugccu

SEQ ID NO: 713649 - RNA, 17 nt, Artificial Sequence
  Synthetic
ggugaaauaacuugccu

SEQ ID NO: 713650 - RNA, 17 nt, Artificial Sequence
  Synthetic
guucuucaaaguugccu

SEQ ID NO: 713651 - RNA, 17 nt, Artificial Sequence
  Synthetic
gguuucaccaguugccu

SEQ ID NO: 713652 - RNA, 17 nt, Artificial Sequence
  Synthetic
gucucacuauguugccu

SEQ ID NO: 713653 - RNA, 17 nt, Artificial Sequence
  Synthetic
gucucacucuguugccu

SEQ ID NO: 713654 - RNA, 17 nt, Artificial Sequence
  Synthetic
guuuaaugaauuugccu

SEQ ID NO: 713655 - RNA, 17 nt, Artificial Sequence
  Synthetic
gaugguggcauuugccu

SEQ ID NO: 713656 - RNA, 17 nt, Artificial Sequence
  Synthetic
guacaaaaauuuugccu

SEQ ID NO: 713657 - RNA, 17 nt, Artificial Sequence
  Synthetic
gugggguauaaaauccu

SEQ ID NO: 713658 - RNA, 17 nt, Artificial Sequence
  Synthetic
ggcucuaaagaaauccu

SEQ ID NO: 713659 - RNA, 17 nt, Artificial Sequence
  Synthetic
ggcaauuacuaaauccu

SEQ ID NO: 713660 - RNA, 17 nt, Artificial Sequence
  Synthetic
guagauucuugaauccu

SEQ ID NO: 713661 - RNA, 17 nt, Artificial Sequence
  Synthetic
ggugguuauuagauccu

SEQ ID NO: 713662 - RNA, 17 nt, Artificial Sequence
  Synthetic
gcucugguucugauccu

SEQ ID NO: 713663 - RNA, 17 nt, Artificial Sequence
  Synthetic
guauauacacauauccu

SEQ ID NO: 713664 - RNA, 17 nt, Artificial Sequence
  Synthetic
gguagaaaaccuauccu

SEQ ID NO: 713665 - RNA, 17 nt, Artificial Sequence
  Synthetic
gugucuguuccuauccu

SEQ ID NO: 713666 - RNA, 17 nt, Artificial Sequence
  Synthetic
gcuggucucaaacuccu

SEQ ID NO: 713667 - RNA, 17 nt, Artificial Sequence
  Synthetic
gcugguauccaacuccu

SEQ ID NO: 713668 - RNA, 17 nt, Artificial Sequence
  Synthetic
guauuauaagaacuccu

SEQ ID NO: 713669 - RNA, 17 nt, Artificial Sequence
  Synthetic
gcuggccucgaacuccu

SEQ ID NO: 713670 - RNA, 17 nt, Artificial Sequence
  Synthetic
gcugguuuugaacuccu

SEQ ID NO: 713671 - RNA, 17 nt, Artificial Sequence
  Synthetic
ggcugugguccacuccu

SEQ ID NO: 713672 - RNA, 17 nt, Artificial Sequence
  Synthetic
gcuggucuuggacuccu

SEQ ID NO: 713673 - RNA, 17 nt, Artificial Sequence
  Synthetic
ggcucgcugaaccuccu

SEQ ID NO: 713674 - RNA, 17 nt, Artificial Sequence
  Synthetic
gguuucgcucuccuccu

SEQ ID NO: 713675 - RNA, 17 nt, Artificial Sequence
  Synthetic
gcauuugcuuggcuccu

SEQ ID NO: 713676 - RNA, 17 nt, Artificial Sequence
  Synthetic
gcuggucucaaucuccu

SEQ ID NO: 713677 - RNA, 17 nt, Artificial Sequence
  Synthetic
guaaacaaaggucuccu

SEQ ID NO: 713678 - RNA, 17 nt, Artificial Sequence
  Synthetic
gugcauuaaucaguccu

SEQ ID NO: 713679 - RNA, 17 nt, Artificial Sequence
  Synthetic
gaauaaagaagaguccu

SEQ ID NO: 713680 - RNA, 17 nt, Artificial Sequence
  Synthetic
guucuucucugaguccu

SEQ ID NO: 713681 - RNA, 17 nt, Artificial Sequence
  Synthetic
guaaaugucaagguccu

SEQ ID NO: 713682 - RNA, 17 nt, Artificial Sequence
  Synthetic
gaacaucuugagguccu

SEQ ID NO: 713683 - RNA, 17 nt, Artificial Sequence
  Synthetic
guguugugcuggguccu

SEQ ID NO: 713684 - RNA, 17 nt, Artificial Sequence
  Synthetic
ggaugaguucauguccu

SEQ ID NO: 713685 - RNA, 17 nt, Artificial Sequence
  Synthetic
ggaagaagaauuguccu

SEQ ID NO: 713686 - RNA, 17 nt, Artificial Sequence
  Synthetic
gaaauaaggcaauuccu

SEQ ID NO: 713687 - RNA, 17 nt, Artificial Sequence
  Synthetic
ggcagccuugaauuccu

SEQ ID NO: 713688 - RNA, 17 nt, Artificial Sequence
  Synthetic
gacaaaaucacauuccu

SEQ ID NO: 713689 - RNA, 17 nt, Artificial Sequence
  Synthetic
gguuaccagacauuccu

SEQ ID NO: 713690 - RNA, 17 nt, Artificial Sequence
  Synthetic
gcuggucucagauuccu

SEQ ID NO: 713691 - RNA, 17 nt, Artificial Sequence
  Synthetic
gacaagcaaaacuuccu

SEQ ID NO: 713692 - RNA, 17 nt, Artificial Sequence
  Synthetic
gauauggguuacuuccu

SEQ ID NO: 713693 - RNA, 17 nt, Artificial Sequence
  Synthetic
ggcuuaaugcccuuccu

SEQ ID NO: 713694 - RNA, 17 nt, Artificial Sequence
  Synthetic
gaaguuguccucuuccu

SEQ ID NO: 713695 - RNA, 17 nt, Artificial Sequence
  Synthetic
gguauaauggucuuccu

SEQ ID NO: 713696 - RNA, 17 nt, Artificial Sequence
  Synthetic
ggcaguggcuucuuccu

SEQ ID NO: 713697 - RNA, 17 nt, Artificial Sequence
  Synthetic
gagggggagaaguuccu

SEQ ID NO: 713698 - RNA, 17 nt, Artificial Sequence
  Synthetic
guugacauugaguuccu

SEQ ID NO: 713699 - RNA, 17 nt, Artificial Sequence
  Synthetic
guaaaagcucuguuccu

SEQ ID NO: 713700 - RNA, 17 nt, Artificial Sequence
  Synthetic
gaaucuauaaauuuccu

SEQ ID NO: 713701 - RNA, 17 nt, Artificial Sequence
  Synthetic
ggaggucagaauuuccu

SEQ ID NO: 713702 - RNA, 17 nt, Artificial Sequence
  Synthetic
guuggucuuaauuuccu

SEQ ID NO: 713703 - RNA, 17 nt, Artificial Sequence
  Synthetic
gguacccugcuuuuccu

SEQ ID NO: 713704 - RNA, 17 nt, Artificial Sequence
  Synthetic
ggcaucuuaguuuuccu

SEQ ID NO: 713705 - RNA, 17 nt, Artificial Sequence
  Synthetic
guauucuguguuuuccu

SEQ ID NO: 713706 - RNA, 17 nt, Artificial Sequence
  Synthetic
gauuuguuauuuuuccu

SEQ ID NO: 713707 - RNA, 17 nt, Artificial Sequence
  Synthetic
guccaagauuuuuuccu

SEQ ID NO: 713708 - RNA, 17 nt, Artificial Sequence
  Synthetic
ggcagagaaaaaaagcu

SEQ ID NO: 713709 - RNA, 17 nt, Artificial Sequence
  Synthetic
gggucaaugcaaaagcu

SEQ ID NO: 713710 - RNA, 17 nt, Artificial Sequence
  Synthetic
gaaaugguaaccaagcu

SEQ ID NO: 713711 - RNA, 17 nt, Artificial Sequence
  Synthetic
gcauauaaaaucaagcu

SEQ ID NO: 713712 - RNA, 17 nt, Artificial Sequence
  Synthetic
guucucccccucaagcu

SEQ ID NO: 713713 - RNA, 17 nt, Artificial Sequence
  Synthetic
gggcagaaggagaagcu

SEQ ID NO: 713714 - RNA, 17 nt, Artificial Sequence
  Synthetic
gaagucugugagaagcu

SEQ ID NO: 713715 - RNA, 17 nt, Artificial Sequence
  Synthetic
gcuuagacuuagaagcu

SEQ ID NO: 713716 - RNA, 17 nt, Artificial Sequence
  Synthetic
gcuaagacuuggaagcu

SEQ ID NO: 713717 - RNA, 17 nt, Artificial Sequence
  Synthetic
gucaagugaaauaagcu

SEQ ID NO: 713718 - RNA, 17 nt, Artificial Sequence
  Synthetic
gcuaaauaguaacagcu

SEQ ID NO: 713719 - RNA, 17 nt, Artificial Sequence
  Synthetic
guuuuaaauacacagcu

SEQ ID NO: 713720 - RNA, 17 nt, Artificial Sequence
  Synthetic
gucuggaauucacagcu

SEQ ID NO: 713721 - RNA, 17 nt, Artificial Sequence
  Synthetic
gagagaggaagacagcu

SEQ ID NO: 713722 - RNA, 17 nt, Artificial Sequence
  Synthetic
gcauagcucuuacagcu

SEQ ID NO: 713723 - RNA, 17 nt, Artificial Sequence
  Synthetic
ggaguucaagaccagcu

SEQ ID NO: 713724 - RNA, 17 nt, Artificial Sequence
  Synthetic
gaauauaguacccagcu

SEQ ID NO: 713725 - RNA, 17 nt, Artificial Sequence
  Synthetic
gucuggaaaagccagcu

SEQ ID NO: 713726 - RNA, 17 nt, Artificial Sequence
  Synthetic
gacaugggccagcagcu

SEQ ID NO: 713727 - RNA, 17 nt, Artificial Sequence
  Synthetic
guuaauucugagcagcu

SEQ ID NO: 713728 - RNA, 17 nt, Artificial Sequence
  Synthetic
gucgucuggaggcagcu

SEQ ID NO: 713729 - RNA, 17 nt, Artificial Sequence
  Synthetic
gucagcaagcaucagcu

SEQ ID NO: 713730 - RNA, 17 nt, Artificial Sequence
  Synthetic
ggagggaaaagucagcu

SEQ ID NO: 713731 - RNA, 17 nt, Artificial Sequence
  Synthetic
ggugggaugcaagagcu

SEQ ID NO: 713732 - RNA, 17 nt, Artificial Sequence
  Synthetic
gggagaggagcggagcu

SEQ ID NO: 713733 - RNA, 17 nt, Artificial Sequence
  Synthetic
gggaagacacuggagcu

SEQ ID NO: 713734 - RNA, 17 nt, Artificial Sequence
  Synthetic
gaagagaagaaugagcu

SEQ ID NO: 713735 - RNA, 17 nt, Artificial Sequence
  Synthetic
gguggauugccugagcu

SEQ ID NO: 713736 - RNA, 17 nt, Artificial Sequence
  Synthetic
gguaaagaaggugagcu

SEQ ID NO: 713737 - RNA, 17 nt, Artificial Sequence
  Synthetic
gcccuugacauugagcu

SEQ ID NO: 713738 - RNA, 17 nt, Artificial Sequence
  Synthetic
gugucacucauugagcu

SEQ ID NO: 713739 - RNA, 17 nt, Artificial Sequence
  Synthetic
gaaggaacccuugagcu

SEQ ID NO: 713740 - RNA, 17 nt, Artificial Sequence
  Synthetic
guaugugaauuauagcu

SEQ ID NO: 713741 - RNA, 17 nt, Artificial Sequence
  Synthetic
ggguucaaauccuagcu

SEQ ID NO: 713742 - RNA, 17 nt, Artificial Sequence
  Synthetic
gcagcuggcagcuagcu

SEQ ID NO: 713743 - RNA, 17 nt, Artificial Sequence
  Synthetic
guauauuugaucuagcu

SEQ ID NO: 713744 - RNA, 17 nt, Artificial Sequence
  Synthetic
guaucuucauucuagcu

SEQ ID NO: 713745 - RNA, 17 nt, Artificial Sequence
  Synthetic
gaugcuguuuucuagcu

SEQ ID NO: 713746 - RNA, 17 nt, Artificial Sequence
  Synthetic
guuucccuucaguagcu

SEQ ID NO: 713747 - RNA, 17 nt, Artificial Sequence
  Synthetic
gugcccacuuaguagcu

SEQ ID NO: 713748 - RNA, 17 nt, Artificial Sequence
  Synthetic
gacagcauuuaguagcu

SEQ ID NO: 713749 - RNA, 17 nt, Artificial Sequence
  Synthetic
guuccucacuagacgcu

SEQ ID NO: 713750 - RNA, 17 nt, Artificial Sequence
  Synthetic
guguuccaggugacgcu

SEQ ID NO: 713751 - RNA, 17 nt, Artificial Sequence
  Synthetic
gugcgcgcgcgugcgcu

SEQ ID NO: 713752 - RNA, 17 nt, Artificial Sequence
  Synthetic
gacagcuugcuugcgcu

SEQ ID NO: 713753 - RNA, 17 nt, Artificial Sequence
  Synthetic
gaggaaagauggucgcu

SEQ ID NO: 713754 - RNA, 17 nt, Artificial Sequence
  Synthetic
gaugagaaguugucgcu

SEQ ID NO: 713755 - RNA, 17 nt, Artificial Sequence
  Synthetic
gcucuuccuacuucgcu

SEQ ID NO: 713756 - RNA, 17 nt, Artificial Sequence
  Synthetic
gucaggacagaaaggcu

SEQ ID NO: 713757 - RNA, 17 nt, Artificial Sequence
  Synthetic
gaagguaagucaaggcu

SEQ ID NO: 713758 - RNA, 17 nt, Artificial Sequence
  Synthetic
gagagggagagaaggcu

SEQ ID NO: 713759 - RNA, 17 nt, Artificial Sequence
  Synthetic
gcacuuaagggaaggcu

SEQ ID NO: 713760 - RNA, 17 nt, Artificial Sequence
  Synthetic
gcuuucuaccacaggcu

SEQ ID NO: 713761 - RNA, 17 nt, Artificial Sequence
  Synthetic
gaauugaaauacaggcu

SEQ ID NO: 713762 - RNA, 17 nt, Artificial Sequence
  Synthetic
gcucugucacccaggcu

SEQ ID NO: 713763 - RNA, 17 nt, Artificial Sequence
  Synthetic
gaacuaguuaucaggcu

SEQ ID NO: 713764 - RNA, 17 nt, Artificial Sequence
  Synthetic
gcuacauauuucaggcu

SEQ ID NO: 713765 - RNA, 17 nt, Artificial Sequence
  Synthetic
guauugagcaagaggcu

SEQ ID NO: 713766 - RNA, 17 nt, Artificial Sequence
  Synthetic
gguaguugccagaggcu

SEQ ID NO: 713767 - RNA, 17 nt, Artificial Sequence
  Synthetic
ggaaaaacugagaggcu

SEQ ID NO: 713768 - RNA, 17 nt, Artificial Sequence
  Synthetic
gaaaugggagugaggcu

SEQ ID NO: 713769 - RNA, 17 nt, Artificial Sequence
  Synthetic
guggaugacuugaggcu

SEQ ID NO: 713770 - RNA, 17 nt, Artificial Sequence
  Synthetic
gcuuuuagagcuaggcu

SEQ ID NO: 713771 - RNA, 17 nt, Artificial Sequence
  Synthetic
gggagcuccuaagggcu

SEQ ID NO: 713772 - RNA, 17 nt, Artificial Sequence
  Synthetic
gggcuggagacagggcu

SEQ ID NO: 713773 - RNA, 17 nt, Artificial Sequence
  Synthetic
gguuccuucugagggcu

SEQ ID NO: 713774 - RNA, 17 nt, Artificial Sequence
  Synthetic
gagcccaacaccgggcu

SEQ ID NO: 713775 - RNA, 17 nt, Artificial Sequence
  Synthetic
gugagcagcagcgggcu

SEQ ID NO: 713776 - RNA, 17 nt, Artificial Sequence
  Synthetic
guugaaugaaucgggcu

SEQ ID NO: 713777 - RNA, 17 nt, Artificial Sequence
  Synthetic
gauaguaaccaggggcu

SEQ ID NO: 713778 - RNA, 17 nt, Artificial Sequence
  Synthetic
ggugguugccaggggcu

SEQ ID NO: 713779 - RNA, 17 nt, Artificial Sequence
  Synthetic
ggugguuuccaggggcu

SEQ ID NO: 713780 - RNA, 17 nt, Artificial Sequence
  Synthetic
guuggggguggggggcu

SEQ ID NO: 713781 - RNA, 17 nt, Artificial Sequence
  Synthetic
gaguugaacaaugggcu

SEQ ID NO: 713782 - RNA, 17 nt, Artificial Sequence
  Synthetic
ggcuucaagccugggcu

SEQ ID NO: 713783 - RNA, 17 nt, Artificial Sequence
  Synthetic
ggguuacuuccugggcu

SEQ ID NO: 713784 - RNA, 17 nt, Artificial Sequence
  Synthetic
gaauuaaccucugggcu

SEQ ID NO: 713785 - RNA, 17 nt, Artificial Sequence
  Synthetic
gaguucuuuauugggcu

SEQ ID NO: 713786 - RNA, 17 nt, Artificial Sequence
  Synthetic
guggguaacuuugggcu

SEQ ID NO: 713787 - RNA, 17 nt, Artificial Sequence
  Synthetic
guggaaguacaauggcu

SEQ ID NO: 713788 - RNA, 17 nt, Artificial Sequence
  Synthetic
guagaaguggaauggcu

SEQ ID NO: 713789 - RNA, 17 nt, Artificial Sequence
  Synthetic
gacagugaagcauggcu

SEQ ID NO: 713790 - RNA, 17 nt, Artificial Sequence
  Synthetic
gggggcucuucauggcu

SEQ ID NO: 713791 - RNA, 17 nt, Artificial Sequence
  Synthetic
gagagagagagauggcu

SEQ ID NO: 713792 - RNA, 17 nt, Artificial Sequence
  Synthetic
gaguuuuugguauggcu

SEQ ID NO: 713793 - RNA, 17 nt, Artificial Sequence
  Synthetic
guggaucuuagcuggcu

SEQ ID NO: 713794 - RNA, 17 nt, Artificial Sequence
  Synthetic
gguugccgcugcuggcu

SEQ ID NO: 713795 - RNA, 17 nt, Artificial Sequence
  Synthetic
gccuaauugcucuggcu

SEQ ID NO: 713796 - RNA, 17 nt, Artificial Sequence
  Synthetic
gcgauucccuucuggcu

SEQ ID NO: 713797 - RNA, 17 nt, Artificial Sequence
  Synthetic
guucacgaucaguggcu

SEQ ID NO: 713798 - RNA, 17 nt, Artificial Sequence
  Synthetic
gagagaugauaguggcu

SEQ ID NO: 713799 - RNA, 17 nt, Artificial Sequence
  Synthetic
gugaauuuauaguggcu

SEQ ID NO: 713800 - RNA, 17 nt, Artificial Sequence
  Synthetic
gcauuguguuaguggcu

SEQ ID NO: 713801 - RNA, 17 nt, Artificial Sequence
  Synthetic
guauuugagggguggcu

SEQ ID NO: 713802 - RNA, 17 nt, Artificial Sequence
  Synthetic
gcaccuugccuguggcu

SEQ ID NO: 713803 - RNA, 17 nt, Artificial Sequence
  Synthetic
gucugauaucauuggcu

SEQ ID NO: 713804 - RNA, 17 nt, Artificial Sequence
  Synthetic
guuucaccauauuggcu

SEQ ID NO: 713805 - RNA, 17 nt, Artificial Sequence
  Synthetic
guuucaccaaguuggcu

SEQ ID NO: 713806 - RNA, 17 nt, Artificial Sequence
  Synthetic
guuucaccauguuggcu

SEQ ID NO: 713807 - RNA, 17 nt, Artificial Sequence
  Synthetic
guuuugccauguuggcu

SEQ ID NO: 713808 - RNA, 17 nt, Artificial Sequence
  Synthetic
gagcuguugcuuuggcu

SEQ ID NO: 713809 - RNA, 17 nt, Artificial Sequence
  Synthetic
guuuauauuuuuuggcu

SEQ ID NO: 713810 - RNA, 17 nt, Artificial Sequence
  Synthetic
gguaugccagaaaugcu

SEQ ID NO: 713811 - RNA, 17 nt, Artificial Sequence
  Synthetic
ggucaauuuccaaugcu

SEQ ID NO: 713812 - RNA, 17 nt, Artificial Sequence
  Synthetic
gcucuaaggucaaugcu

SEQ ID NO: 713813 - RNA, 17 nt, Artificial Sequence
  Synthetic
ggguggccuagaaugcu

SEQ ID NO: 713814 - RNA, 17 nt, Artificial Sequence
  Synthetic
guuauccuuugaaugcu

SEQ ID NO: 713815 - RNA, 17 nt, Artificial Sequence
  Synthetic
gaaacuuagcuaaugcu

SEQ ID NO: 713816 - RNA, 17 nt, Artificial Sequence
  Synthetic
gaucuacuauuaaugcu

SEQ ID NO: 713817 - RNA, 17 nt, Artificial Sequence
  Synthetic
ggggaacaacacaugcu

SEQ ID NO: 713818 - RNA, 17 nt, Artificial Sequence
  Synthetic
gcuugaaccaccaugcu

SEQ ID NO: 713819 - RNA, 17 nt, Artificial Sequence
  Synthetic
gggaucuugaccaugcu

SEQ ID NO: 713820 - RNA, 17 nt, Artificial Sequence
  Synthetic
gaaagacugaagaugcu

SEQ ID NO: 713821 - RNA, 17 nt, Artificial Sequence
  Synthetic
ggugguuaccugaugcu

SEQ ID NO: 713822 - RNA, 17 nt, Artificial Sequence
  Synthetic
gcacugccaaauaugcu

SEQ ID NO: 713823 - RNA, 17 nt, Artificial Sequence
  Synthetic
gugucaggcucuaugcu

SEQ ID NO: 713824 - RNA, 17 nt, Artificial Sequence
  Synthetic
gggauagauucuaugcu

SEQ ID NO: 713825 - RNA, 17 nt, Artificial Sequence
  Synthetic
guauggaauguuaugcu

SEQ ID NO: 713826 - RNA, 17 nt, Artificial Sequence
  Synthetic
gaggaagacccacugcu

SEQ ID NO: 713827 - RNA, 17 nt, Artificial Sequence
  Synthetic
gcugaaacuugacugcu

SEQ ID NO: 713828 - RNA, 17 nt, Artificial Sequence
  Synthetic
gaaauuuuauuacugcu

SEQ ID NO: 713829 - RNA, 17 nt, Artificial Sequence
  Synthetic
gucugucaaccccugcu

SEQ ID NO: 713830 - RNA, 17 nt, Artificial Sequence
  Synthetic
gaagagaaagagcugcu

SEQ ID NO: 713831 - RNA, 17 nt, Artificial Sequence
  Synthetic
ggagaaacauagcugcu

SEQ ID NO: 713832 - RNA, 17 nt, Artificial Sequence
  Synthetic
gagaaggaauggcugcu

SEQ ID NO: 713833 - RNA, 17 nt, Artificial Sequence
  Synthetic
guuaacucaaugcugcu

SEQ ID NO: 713834 - RNA, 17 nt, Artificial Sequence
  Synthetic
gacauagccuugcugcu

SEQ ID NO: 713835 - RNA, 17 nt, Artificial Sequence
  Synthetic
gguagcuuuucucugcu

SEQ ID NO: 713836 - RNA, 17 nt, Artificial Sequence
  Synthetic
ggaguucagauucugcu

SEQ ID NO: 713837 - RNA, 17 nt, Artificial Sequence
  Synthetic
ggaaaauauauucugcu

SEQ ID NO: 713838 - RNA, 17 nt, Artificial Sequence
  Synthetic
gcuuugacuauucugcu

SEQ ID NO: 713839 - RNA, 17 nt, Artificial Sequence
  Synthetic
gguuuuuuuuuucugcu

SEQ ID NO: 713840 - RNA, 17 nt, Artificial Sequence
  Synthetic
ggccuccccaaagugcu

SEQ ID NO: 713841 - RNA, 17 nt, Artificial Sequence
  Synthetic
cagccucccaaagugcu

SEQ ID NO: 713842 - RNA, 17 nt, Artificial Sequence
  Synthetic
gggccucccaaagugcu

SEQ ID NO: 713843 - RNA, 17 nt, Artificial Sequence
  Synthetic
gacccuucagaagugcu

SEQ ID NO: 713844 - RNA, 17 nt, Artificial Sequence
  Synthetic
gaacauggaacagugcu

SEQ ID NO: 713845 - RNA, 17 nt, Artificial Sequence
  Synthetic
ggggcagagccagugcu

SEQ ID NO: 713846 - RNA, 17 nt, Artificial Sequence
  Synthetic
gucauauugccagugcu

SEQ ID NO: 713847 - RNA, 17 nt, Artificial Sequence
  Synthetic
gauguauauauagugcu

SEQ ID NO: 713848 - RNA, 17 nt, Artificial Sequence
  Synthetic
ggcaaaguauaggugcu

SEQ ID NO: 713849 - RNA, 17 nt, Artificial Sequence
  Synthetic
gaugguuucugggugcu

SEQ ID NO: 713850 - RNA, 17 nt, Artificial Sequence
  Synthetic
guguuagauauggugcu

SEQ ID NO: 713851 - RNA, 17 nt, Artificial Sequence
  Synthetic
gcaccuacucaugugcu

SEQ ID NO: 713852 - RNA, 17 nt, Artificial Sequence
  Synthetic
gcuacuguguaugugcu

SEQ ID NO: 713853 - RNA, 17 nt, Artificial Sequence
  Synthetic
gugccaaacauugugcu

SEQ ID NO: 713854 - RNA, 17 nt, Artificial Sequence
  Synthetic
guuucagaauuugugcu

SEQ ID NO: 713855 - RNA, 17 nt, Artificial Sequence
  Synthetic
ggaagauaguuugugcu

SEQ ID NO: 713856 - RNA, 17 nt, Artificial Sequence
  Synthetic
gcacauaccaaauugcu

SEQ ID NO: 713857 - RNA, 17 nt, Artificial Sequence
  Synthetic
ggagauuggaaauugcu

SEQ ID NO: 713858 - RNA, 17 nt, Artificial Sequence
  Synthetic
gccugauuucaauugcu

SEQ ID NO: 713859 - RNA, 17 nt, Artificial Sequence
  Synthetic
guauugagagaauugcu

SEQ ID NO: 713860 - RNA, 17 nt, Artificial Sequence
  Synthetic
guacaucauagauugcu

SEQ ID NO: 713861 - RNA, 17 nt, Artificial Sequence
  Synthetic
gaggcgggaggauugcu

SEQ ID NO: 713862 - RNA, 17 nt, Artificial Sequence
  Synthetic
gcaguaaugggauugcu

SEQ ID NO: 713863 - RNA, 17 nt, Artificial Sequence
  Synthetic
gaaauggcauacuugcu

SEQ ID NO: 713864 - RNA, 17 nt, Artificial Sequence
  Synthetic
gggaaauauuacuugcu

SEQ ID NO: 713865 - RNA, 17 nt, Artificial Sequence
  Synthetic
gugcaguggcccuugcu

SEQ ID NO: 713866 - RNA, 17 nt, Artificial Sequence
  Synthetic
gcucacaaaugcuugcu

SEQ ID NO: 713867 - RNA, 17 nt, Artificial Sequence
  Synthetic
ggaaaaaaagucuugcu

SEQ ID NO: 713868 - RNA, 17 nt, Artificial Sequence
  Synthetic
ggagacagagucuugcu

SEQ ID NO: 713869 - RNA, 17 nt, Artificial Sequence
  Synthetic
gaucaucaauucuugcu

SEQ ID NO: 713870 - RNA, 17 nt, Artificial Sequence
  Synthetic
gacaggagaagguugcu

SEQ ID NO: 713871 - RNA, 17 nt, Artificial Sequence
  Synthetic
ggcuguuggaauuugcu

SEQ ID NO: 713872 - RNA, 17 nt, Artificial Sequence
  Synthetic
gaacuccacccuuugcu

SEQ ID NO: 713873 - RNA, 17 nt, Artificial Sequence
  Synthetic
gcuuuuccuccuuugcu

SEQ ID NO: 713874 - RNA, 17 nt, Artificial Sequence
  Synthetic
guuaaaagugguuugcu

SEQ ID NO: 713875 - RNA, 17 nt, Artificial Sequence
  Synthetic
gaaggauauguuuugcu

SEQ ID NO: 713876 - RNA, 17 nt, Artificial Sequence
  Synthetic
gaugaucuauuuuugcu

SEQ ID NO: 713877 - RNA, 17 nt, Artificial Sequence
  Synthetic
guuucuguggaaaaucu

SEQ ID NO: 713878 - RNA, 17 nt, Artificial Sequence
  Synthetic
gguaaucucccaaaucu

SEQ ID NO: 713879 - RNA, 17 nt, Artificial Sequence
  Synthetic
gggagagacagaaaucu

SEQ ID NO: 713880 - RNA, 17 nt, Artificial Sequence
  Synthetic
guuggcuucagaaaucu

SEQ ID NO: 713881 - RNA, 17 nt, Artificial Sequence
  Synthetic
guuuaggcauuaaaucu

SEQ ID NO: 713882 - RNA, 17 nt, Artificial Sequence
  Synthetic
gcgcaauggcacaaucu

SEQ ID NO: 713883 - RNA, 17 nt, Artificial Sequence
  Synthetic
gugcaauggcacaaucu

SEQ ID NO: 713884 - RNA, 17 nt, Artificial Sequence
  Synthetic
gugcaguggcacaaucu

SEQ ID NO: 713885 - RNA, 17 nt, Artificial Sequence
  Synthetic
gaaaaauugcacaaucu

SEQ ID NO: 713886 - RNA, 17 nt, Artificial Sequence
  Synthetic
gggaggccucacaaucu

SEQ ID NO: 713887 - RNA, 17 nt, Artificial Sequence
  Synthetic
gucaagaauaccaaucu

SEQ ID NO: 713888 - RNA, 17 nt, Artificial Sequence
  Synthetic
gugcaauggcgcaaucu

SEQ ID NO: 713889 - RNA, 17 nt, Artificial Sequence
  Synthetic
gugcaguggcgcaaucu

SEQ ID NO: 713890 - RNA, 17 nt, Artificial Sequence
  Synthetic
guggcgcagugcaaucu

SEQ ID NO: 713891 - RNA, 17 nt, Artificial Sequence
  Synthetic
gugcaguggugcaaucu

SEQ ID NO: 713892 - RNA, 17 nt, Artificial Sequence
  Synthetic
guguaguggcucaaucu

SEQ ID NO: 713893 - RNA, 17 nt, Artificial Sequence
  Synthetic
gagaagaauuucaaucu

SEQ ID NO: 713894 - RNA, 17 nt, Artificial Sequence
  Synthetic
gcaaauaaacagaaucu

SEQ ID NO: 713895 - RNA, 17 nt, Artificial Sequence
  Synthetic
guaacccagaugaaucu

SEQ ID NO: 713896 - RNA, 17 nt, Artificial Sequence
  Synthetic
gagaauagcuugaaucu

SEQ ID NO: 713897 - RNA, 17 nt, Artificial Sequence
  Synthetic
gagaaucgcuugaaucu

SEQ ID NO: 713898 - RNA, 17 nt, Artificial Sequence
  Synthetic
ggaugccauuugaaucu

SEQ ID NO: 713899 - RNA, 17 nt, Artificial Sequence
  Synthetic
ggacagaugcauaaucu

SEQ ID NO: 713900 - RNA, 17 nt, Artificial Sequence
  Synthetic
gaguagauuacuaaucu

SEQ ID NO: 713901 - RNA, 17 nt, Artificial Sequence
  Synthetic
gugacaccgucuaaucu

SEQ ID NO: 713902 - RNA, 17 nt, Artificial Sequence
  Synthetic
gaucacgccuguaaucu

SEQ ID NO: 713903 - RNA, 17 nt, Artificial Sequence
  Synthetic
gguuauuauuguaaucu

SEQ ID NO: 713904 - RNA, 17 nt, Artificial Sequence
  Synthetic
gaugggacagcacaucu

SEQ ID NO: 713905 - RNA, 17 nt, Artificial Sequence
  Synthetic
gagcuguuacuacaucu

SEQ ID NO: 713906 - RNA, 17 nt, Artificial Sequence
  Synthetic
gugcaguggcaccaucu

SEQ ID NO: 713907 - RNA, 17 nt, Artificial Sequence
  Synthetic
gauggaggcucccaucu

SEQ ID NO: 713908 - RNA, 17 nt, Artificial Sequence
  Synthetic
gcuagauggucccaucu

SEQ ID NO: 713909 - RNA, 17 nt, Artificial Sequence
  Synthetic
gugcaguggcgccaucu

SEQ ID NO: 713910 - RNA, 17 nt, Artificial Sequence
  Synthetic
ggaaaaagaugccaucu

SEQ ID NO: 713911 - RNA, 17 nt, Artificial Sequence
  Synthetic
ggaaaaggaugccaucu

SEQ ID NO: 713912 - RNA, 17 nt, Artificial Sequence
  Synthetic
gugcaguggugccaucu

SEQ ID NO: 713913 - RNA, 17 nt, Artificial Sequence
  Synthetic
gcuucaucuugccaucu

SEQ ID NO: 713914 - RNA, 17 nt, Artificial Sequence
  Synthetic
gcucuuguccagcaucu

SEQ ID NO: 713915 - RNA, 17 nt, Artificial Sequence
  Synthetic
gcacuggagcagcaucu

SEQ ID NO: 713916 - RNA, 17 nt, Artificial Sequence
  Synthetic
gcaagggaagagcaucu

SEQ ID NO: 713917 - RNA, 17 nt, Artificial Sequence
  Synthetic
gauucugucuugcaucu

SEQ ID NO: 713918 - RNA, 17 nt, Artificial Sequence
  Synthetic
gacuuugucuugcaucu

SEQ ID NO: 713919 - RNA, 17 nt, Artificial Sequence
  Synthetic
gacuaaguaaaucaucu

SEQ ID NO: 713920 - RNA, 17 nt, Artificial Sequence
  Synthetic
gaucauuagcaucaucu

SEQ ID NO: 713921 - RNA, 17 nt, Artificial Sequence
  Synthetic
gguagauuagcucaucu

SEQ ID NO: 713922 - RNA, 17 nt, Artificial Sequence
  Synthetic
guugcuggcagucaucu

SEQ ID NO: 713923 - RNA, 17 nt, Artificial Sequence
  Synthetic
gaagaacugagucaucu

SEQ ID NO: 713924 - RNA, 17 nt, Artificial Sequence
  Synthetic
gguuuggaaaaagaucu

SEQ ID NO: 713925 - RNA, 17 nt, Artificial Sequence
  Synthetic
gagcaguggcaagaucu

SEQ ID NO: 713926 - RNA, 17 nt, Artificial Sequence
  Synthetic
ggaaaaggcacagaucu

SEQ ID NO: 713927 - RNA, 17 nt, Artificial Sequence
  Synthetic
gugcaauggccagaucu

SEQ ID NO: 713928 - RNA, 17 nt, Artificial Sequence
  Synthetic
gauguugguagagaucu

SEQ ID NO: 713929 - RNA, 17 nt, Artificial Sequence
  Synthetic
gugcaguggugagaucu

SEQ ID NO: 713930 - RNA, 17 nt, Artificial Sequence
  Synthetic
guacaauggcacgaucu

SEQ ID NO: 713931 - RNA, 17 nt, Artificial Sequence
  Synthetic
gugcaauggcacgaucu

SEQ ID NO: 713932 - RNA, 17 nt, Artificial Sequence
  Synthetic
gugcaguggcacgaucu

SEQ ID NO: 713933 - RNA, 17 nt, Artificial Sequence
  Synthetic
gugcaacagcgcgaucu

SEQ ID NO: 713934 - RNA, 17 nt, Artificial Sequence
  Synthetic
gugcagcggcgcgaucu

SEQ ID NO: 713935 - RNA, 17 nt, Artificial Sequence
  Synthetic
gcacaguggcgcgaucu

SEQ ID NO: 713936 - RNA, 17 nt, Artificial Sequence
  Synthetic
guacaguggcgcgaucu

SEQ ID NO: 713937 - RNA, 17 nt, Artificial Sequence
  Synthetic
gugcaguggcgcgaucu

SEQ ID NO: 713938 - RNA, 17 nt, Artificial Sequence
  Synthetic
gugcgguggcgcgaucu

SEQ ID NO: 713939 - RNA, 17 nt, Artificial Sequence
  Synthetic
gcaguggugcgcgaucu

SEQ ID NO: 713940 - RNA, 17 nt, Artificial Sequence
  Synthetic
gugcagcggugcgaucu

SEQ ID NO: 713941 - RNA, 17 nt, Artificial Sequence
  Synthetic
guacaauggugcgaucu

SEQ ID NO: 713942 - RNA, 17 nt, Artificial Sequence
  Synthetic
gugcaauggugcgaucu

SEQ ID NO: 713943 - RNA, 17 nt, Artificial Sequence
  Synthetic
gugaaguggugcgaucu

SEQ ID NO: 713944 - RNA, 17 nt, Artificial Sequence
  Synthetic
gugcaguggugcgaucu

SEQ ID NO: 713945 - RNA, 17 nt, Artificial Sequence
  Synthetic
gugcagugacucgaucu

SEQ ID NO: 713946 - RNA, 17 nt, Artificial Sequence
  Synthetic
guggaguggcaggaucu

SEQ ID NO: 713947 - RNA, 17 nt, Artificial Sequence
  Synthetic
guccacacgagggaucu

SEQ ID NO: 713948 - RNA, 17 nt, Artificial Sequence
  Synthetic
gugcaguggcgggaucu

SEQ ID NO: 713949 - RNA, 17 nt, Artificial Sequence
  Synthetic
gugcagcggcaugaucu

SEQ ID NO: 713950 - RNA, 17 nt, Artificial Sequence
  Synthetic
guauagcggcaugaucu

SEQ ID NO: 713951 - RNA, 17 nt, Artificial Sequence
  Synthetic
gugcaguggcaugaucu

SEQ ID NO: 713952 - RNA, 17 nt, Artificial Sequence
  Synthetic
gugcuguggcaugaucu

SEQ ID NO: 713953 - RNA, 17 nt, Artificial Sequence
  Synthetic
gugcagugguaugaucu

SEQ ID NO: 713954 - RNA, 17 nt, Artificial Sequence
  Synthetic
gugccaaacacugaucu

SEQ ID NO: 713955 - RNA, 17 nt, Artificial Sequence
  Synthetic
guuucuaaggcugaucu

SEQ ID NO: 713956 - RNA, 17 nt, Artificial Sequence
  Synthetic
gugcaguggucugaucu

SEQ ID NO: 713957 - RNA, 17 nt, Artificial Sequence
  Synthetic
gugcaauggcgugaucu

SEQ ID NO: 713958 - RNA, 17 nt, Artificial Sequence
  Synthetic
gugcaguggcgugaucu

SEQ ID NO: 713959 - RNA, 17 nt, Artificial Sequence
  Synthetic
gugcaauggugugaucu

SEQ ID NO: 713960 - RNA, 17 nt, Artificial Sequence
  Synthetic
gugcaguggugugaucu

SEQ ID NO: 713961 - RNA, 17 nt, Artificial Sequence
  Synthetic
gggagucuacuugaucu

SEQ ID NO: 713962 - RNA, 17 nt, Artificial Sequence
  Synthetic
gugcaguggcuugaucu

SEQ ID NO: 713963 - RNA, 17 nt, Artificial Sequence
  Synthetic
gcauauaccuaauaucu

SEQ ID NO: 713964 - RNA, 17 nt, Artificial Sequence
  Synthetic
gagcacuuuacauaucu

SEQ ID NO: 713965 - RNA, 17 nt, Artificial Sequence
  Synthetic
gaggaguuagcauaucu

SEQ ID NO: 713966 - RNA, 17 nt, Artificial Sequence
  Synthetic
guacucuuuggauaucu

SEQ ID NO: 713967 - RNA, 17 nt, Artificial Sequence
  Synthetic
ggaugaaagaacuaucu

SEQ ID NO: 713968 - RNA, 17 nt, Artificial Sequence
  Synthetic
gguaauuucugcuaucu

SEQ ID NO: 713969 - RNA, 17 nt, Artificial Sequence
  Synthetic
gugcaguggugcuaucu

SEQ ID NO: 713970 - RNA, 17 nt, Artificial Sequence
  Synthetic
gggauccagaaguaucu

SEQ ID NO: 713971 - RNA, 17 nt, Artificial Sequence
  Synthetic
gacucuaauaaguaucu

SEQ ID NO: 713972 - RNA, 17 nt, Artificial Sequence
  Synthetic
gggauuuuuuaguaucu

SEQ ID NO: 713973 - RNA, 17 nt, Artificial Sequence
  Synthetic
guuuuguaaggguaucu

SEQ ID NO: 713974 - RNA, 17 nt, Artificial Sequence
  Synthetic
gagcucacccauuaucu

SEQ ID NO: 713975 - RNA, 17 nt, Artificial Sequence
  Synthetic
gucaaaggagauuaucu

SEQ ID NO: 713976 - RNA, 17 nt, Artificial Sequence
  Synthetic
gugcuuccauuuuaucu

SEQ ID NO: 713977 - RNA, 17 nt, Artificial Sequence
  Synthetic
ggcuggucucaaacucu

SEQ ID NO: 713978 - RNA, 17 nt, Artificial Sequence
  Synthetic
ggauacuccuaaacucu

SEQ ID NO: 713979 - RNA, 17 nt, Artificial Sequence
  Synthetic
gucuuagaagcaacucu

SEQ ID NO: 713980 - RNA, 17 nt, Artificial Sequence
  Synthetic
gggauucaaugaacucu

SEQ ID NO: 713981 - RNA, 17 nt, Artificial Sequence
  Synthetic
gaagaugcuguaacucu

SEQ ID NO: 713982 - RNA, 17 nt, Artificial Sequence
  Synthetic
ggaggaugaaacacucu

SEQ ID NO: 713983 - RNA, 17 nt, Artificial Sequence
  Synthetic
ggggaacaucacacucu

SEQ ID NO: 713984 - RNA, 17 nt, Artificial Sequence
  Synthetic
ggggaauaucacacucu

SEQ ID NO: 713985 - RNA, 17 nt, Artificial Sequence
  Synthetic
gauguucauuccacucu

SEQ ID NO: 713986 - RNA, 17 nt, Artificial Sequence
  Synthetic
guacguaaaaucacucu

SEQ ID NO: 713987 - RNA, 17 nt, Artificial Sequence
  Synthetic
gagaugcacucuacucu

SEQ ID NO: 713988 - RNA, 17 nt, Artificial Sequence
  Synthetic
gugcaaauaccaccucu

SEQ ID NO: 713989 - RNA, 17 nt, Artificial Sequence
  Synthetic
gaguaguuacuaccucu

SEQ ID NO: 713990 - RNA, 17 nt, Artificial Sequence
  Synthetic
ggaaaaaagcacccucu

SEQ ID NO: 713991 - RNA, 17 nt, Artificial Sequence
  Synthetic
guuuuucaucacccucu

SEQ ID NO: 713992 - RNA, 17 nt, Artificial Sequence
  Synthetic
ggauugaaagccccucu

SEQ ID NO: 713993 - RNA, 17 nt, Artificial Sequence
  Synthetic
guuuuaaugagcccucu

SEQ ID NO: 713994 - RNA, 17 nt, Artificial Sequence
  Synthetic
gaguuuagguugccucu

SEQ ID NO: 713995 - RNA, 17 nt, Artificial Sequence
  Synthetic
guuuaacaccauccucu

SEQ ID NO: 713996 - RNA, 17 nt, Artificial Sequence
  Synthetic
guuuaauaccauccucu

SEQ ID NO: 713997 - RNA, 17 nt, Artificial Sequence
  Synthetic
gagguucucuuuccucu

SEQ ID NO: 713998 - RNA, 17 nt, Artificial Sequence
  Synthetic
gauugucccaaagcucu

SEQ ID NO: 713999 - RNA, 17 nt, Artificial Sequence
  Synthetic
ggaggcagagaagcucu

SEQ ID NO: 714000 - RNA, 17 nt, Artificial Sequence
  Synthetic
gcaaagugaauagcucu

SEQ ID NO: 714001 - RNA, 17 nt, Artificial Sequence
  Synthetic
gcuuauugauacgcucu

SEQ ID NO: 714002 - RNA, 17 nt, Artificial Sequence
  Synthetic
gaaaaucuucaggcucu

SEQ ID NO: 714003 - RNA, 17 nt, Artificial Sequence
  Synthetic
guuuaacaagaggcucu

SEQ ID NO: 714004 - RNA, 17 nt, Artificial Sequence
  Synthetic
guuguaaauauggcucu

SEQ ID NO: 714005 - RNA, 17 nt, Artificial Sequence
  Synthetic
gucaaauaacuggcucu

SEQ ID NO: 714006 - RNA, 17 nt, Artificial Sequence
  Synthetic
gcccaguuuuaugcucu

SEQ ID NO: 714007 - RNA, 17 nt, Artificial Sequence
  Synthetic
gcaaaugguauugcucu

SEQ ID NO: 714008 - RNA, 17 nt, Artificial Sequence
  Synthetic
ggacucaaaguugcucu

SEQ ID NO: 714009 - RNA, 17 nt, Artificial Sequence
  Synthetic
gacagagacuuugcucu

SEQ ID NO: 714010 - RNA, 17 nt, Artificial Sequence
  Synthetic
gaagccucaacaucucu

SEQ ID NO: 714011 - RNA, 17 nt, Artificial Sequence
  Synthetic
gaguggggcucaucucu

SEQ ID NO: 714012 - RNA, 17 nt, Artificial Sequence
  Synthetic
gaggugacaugaucucu

SEQ ID NO: 714013 - RNA, 17 nt, Artificial Sequence
  Synthetic
gaucugacacuaucucu

SEQ ID NO: 714014 - RNA, 17 nt, Artificial Sequence
  Synthetic
gggugaagaguaucucu

SEQ ID NO: 714015 - RNA, 17 nt, Artificial Sequence
  Synthetic
gugugaucugccucucu

SEQ ID NO: 714016 - RNA, 17 nt, Artificial Sequence
  Synthetic
ggaugcugcugcucucu

SEQ ID NO: 714017 - RNA, 17 nt, Artificial Sequence
  Synthetic
ggauaaccauucucucu

SEQ ID NO: 714018 - RNA, 17 nt, Artificial Sequence
  Synthetic
gacauuagaaagucucu

SEQ ID NO: 714019 - RNA, 17 nt, Artificial Sequence
  Synthetic
gugcauuugaagucucu

SEQ ID NO: 714020 - RNA, 17 nt, Artificial Sequence
  Synthetic
gcaugaagauugucucu

SEQ ID NO: 714021 - RNA, 17 nt, Artificial Sequence
  Synthetic
gaccccuccaauucucu

SEQ ID NO: 714022 - RNA, 17 nt, Artificial Sequence
  Synthetic
gaauuuauugauucucu

SEQ ID NO: 714023 - RNA, 17 nt, Artificial Sequence
  Synthetic
ggggaaaugacuucucu

SEQ ID NO: 714024 - RNA, 17 nt, Artificial Sequence
  Synthetic
gaaggugccccuucucu

SEQ ID NO: 714025 - RNA, 17 nt, Artificial Sequence
  Synthetic
ggcuucaacauuucucu

SEQ ID NO: 714026 - RNA, 17 nt, Artificial Sequence
  Synthetic
gcaacuucacuuucucu

SEQ ID NO: 714027 - RNA, 17 nt, Artificial Sequence
  Synthetic
gauugaaagggaagucu

SEQ ID NO: 714028 - RNA, 17 nt, Artificial Sequence
  Synthetic
ggcaauacuuuaagucu

SEQ ID NO: 714029 - RNA, 17 nt, Artificial Sequence
  Synthetic
gugcgguggcacagucu

SEQ ID NO: 714030 - RNA, 17 nt, Artificial Sequence
  Synthetic
gaagagcuucacagucu

SEQ ID NO: 714031 - RNA, 17 nt, Artificial Sequence
  Synthetic
gaguucgagaccagucu

SEQ ID NO: 714032 - RNA, 17 nt, Artificial Sequence
  Synthetic
gcguuugagaucagucu

SEQ ID NO: 714033 - RNA, 17 nt, Artificial Sequence
  Synthetic
gccaguauggagagucu

SEQ ID NO: 714034 - RNA, 17 nt, Artificial Sequence
  Synthetic
guuagcucuccgagucu

SEQ ID NO: 714035 - RNA, 17 nt, Artificial Sequence
  Synthetic
gucuaccagcugagucu

SEQ ID NO: 714036 - RNA, 17 nt, Artificial Sequence
  Synthetic
gugagagacuugagucu

SEQ ID NO: 714037 - RNA, 17 nt, Artificial Sequence
  Synthetic
gaugcaaugucuagucu

SEQ ID NO: 714038 - RNA, 17 nt, Artificial Sequence
  Synthetic
gugcucugugcaggucu

SEQ ID NO: 714039 - RNA, 17 nt, Artificial Sequence
  Synthetic
ggugauuuuggaggucu

SEQ ID NO: 714040 - RNA, 17 nt, Artificial Sequence
  Synthetic
gcuagggcaugaggucu

SEQ ID NO: 714041 - RNA, 17 nt, Artificial Sequence
  Synthetic
gcugauucaguaggucu

SEQ ID NO: 714042 - RNA, 17 nt, Artificial Sequence
  Synthetic
ggguaacacugcggucu

SEQ ID NO: 714043 - RNA, 17 nt, Artificial Sequence
  Synthetic
guaugcaagaggggucu

SEQ ID NO: 714044 - RNA, 17 nt, Artificial Sequence
  Synthetic
gaauaaaaguggggucu

SEQ ID NO: 714045 - RNA, 17 nt, Artificial Sequence
  Synthetic
guggguucccauggucu

SEQ ID NO: 714046 - RNA, 17 nt, Artificial Sequence
  Synthetic
guuagccaggauggucu

SEQ ID NO: 714047 - RNA, 17 nt, Artificial Sequence
  Synthetic
gccaccccaccuggucu

SEQ ID NO: 714048 - RNA, 17 nt, Artificial Sequence
  Synthetic
guuacccaggcuggucu

SEQ ID NO: 714049 - RNA, 17 nt, Artificial Sequence
  Synthetic
guuggccaggcuggucu

SEQ ID NO: 714050 - RNA, 17 nt, Artificial Sequence
  Synthetic
guuuuauuucuuggucu

SEQ ID NO: 714051 - RNA, 17 nt, Artificial Sequence
  Synthetic
gacauuuggaaaugucu

SEQ ID NO: 714052 - RNA, 17 nt, Artificial Sequence
  Synthetic
ggaaucuguaaaugucu

SEQ ID NO: 714053 - RNA, 17 nt, Artificial Sequence
  Synthetic
gauaaggaacaaugucu

SEQ ID NO: 714054 - RNA, 17 nt, Artificial Sequence
  Synthetic
gcauuuagugaaugucu

SEQ ID NO: 714055 - RNA, 17 nt, Artificial Sequence
  Synthetic
guccaagggaacugucu

SEQ ID NO: 714056 - RNA, 17 nt, Artificial Sequence
  Synthetic
gugcaguggugcugucu

SEQ ID NO: 714057 - RNA, 17 nt, Artificial Sequence
  Synthetic
ggaaaagcauagugucu

SEQ ID NO: 714058 - RNA, 17 nt, Artificial Sequence
  Synthetic
gucauccuguggugucu

SEQ ID NO: 714059 - RNA, 17 nt, Artificial Sequence
  Synthetic
gccuugccaaugugucu

SEQ ID NO: 714060 - RNA, 17 nt, Artificial Sequence
  Synthetic
guagguuguaugugucu

SEQ ID NO: 714061 - RNA, 17 nt, Artificial Sequence
  Synthetic
gauuucuaaaauugucu

SEQ ID NO: 714062 - RNA, 17 nt, Artificial Sequence
  Synthetic
gguuaagcacauugucu

SEQ ID NO: 714063 - RNA, 17 nt, Artificial Sequence
  Synthetic
gagaaaacuacuugucu

SEQ ID NO: 714064 - RNA, 17 nt, Artificial Sequence
  Synthetic
guuaacuuaucuugucu

SEQ ID NO: 714065 - RNA, 17 nt, Artificial Sequence
  Synthetic
guaaaaacaaaaauucu

SEQ ID NO: 714066 - RNA, 17 nt, Artificial Sequence
  Synthetic
guaucucaagaaauucu

SEQ ID NO: 714067 - RNA, 17 nt, Artificial Sequence
  Synthetic
gcuggauaugaaauucu

SEQ ID NO: 714068 - RNA, 17 nt, Artificial Sequence
  Synthetic
ggcuuagacacaauucu

SEQ ID NO: 714069 - RNA, 17 nt, Artificial Sequence
  Synthetic
guuuuaugcggaauucu

SEQ ID NO: 714070 - RNA, 17 nt, Artificial Sequence
  Synthetic
gaauuuucccuaauucu

SEQ ID NO: 714071 - RNA, 17 nt, Artificial Sequence
  Synthetic
gcagcaaagaacauucu

SEQ ID NO: 714072 - RNA, 17 nt, Artificial Sequence
  Synthetic
gacaacuuucacauucu

SEQ ID NO: 714073 - RNA, 17 nt, Artificial Sequence
  Synthetic
gaucugggcaccauucu

SEQ ID NO: 714074 - RNA, 17 nt, Artificial Sequence
  Synthetic
guagaaacaagcauucu

SEQ ID NO: 714075 - RNA, 17 nt, Artificial Sequence
  Synthetic
gaacauuaauucauucu

SEQ ID NO: 714076 - RNA, 17 nt, Artificial Sequence
  Synthetic
guuuaaaucgugauucu

SEQ ID NO: 714077 - RNA, 17 nt, Artificial Sequence
  Synthetic
ggggcucuucauauucu

SEQ ID NO: 714078 - RNA, 17 nt, Artificial Sequence
  Synthetic
gcacuaggcacuauucu

SEQ ID NO: 714079 - RNA, 17 nt, Artificial Sequence
  Synthetic
gcauuucugacuauucu

SEQ ID NO: 714080 - RNA, 17 nt, Artificial Sequence
  Synthetic
guuuguaaagcuauucu

SEQ ID NO: 714081 - RNA, 17 nt, Artificial Sequence
  Synthetic
guuucaccuucuauucu

SEQ ID NO: 714082 - RNA, 17 nt, Artificial Sequence
  Synthetic
guaggcaguauuauucu

SEQ ID NO: 714083 - RNA, 17 nt, Artificial Sequence
  Synthetic
gcuagacucaaacuucu

SEQ ID NO: 714084 - RNA, 17 nt, Artificial Sequence
  Synthetic
ggagaugagaaacuucu

SEQ ID NO: 714085 - RNA, 17 nt, Artificial Sequence
  Synthetic
ggaaacgcacaacuucu

SEQ ID NO: 714086 - RNA, 17 nt, Artificial Sequence
  Synthetic
ggagauuaggaacuucu

SEQ ID NO: 714087 - RNA, 17 nt, Artificial Sequence
  Synthetic
guaacaauuccacuucu

SEQ ID NO: 714088 - RNA, 17 nt, Artificial Sequence
  Synthetic
gagcggaggagacuucu

SEQ ID NO: 714089 - RNA, 17 nt, Artificial Sequence
  Synthetic
gcagcaggcauacuucu

SEQ ID NO: 714090 - RNA, 17 nt, Artificial Sequence
  Synthetic
guuggagcucuacuucu

SEQ ID NO: 714091 - RNA, 17 nt, Artificial Sequence
  Synthetic
gucccucuucaccuucu

SEQ ID NO: 714092 - RNA, 17 nt, Artificial Sequence
  Synthetic
guuccuucuacccuucu

SEQ ID NO: 714093 - RNA, 17 nt, Artificial Sequence
  Synthetic
gucuaaguuugccuucu

SEQ ID NO: 714094 - RNA, 17 nt, Artificial Sequence
  Synthetic
gucuucaauuuccuucu

SEQ ID NO: 714095 - RNA, 17 nt, Artificial Sequence
  Synthetic
ggaugcuuuuuccuucu

SEQ ID NO: 714096 - RNA, 17 nt, Artificial Sequence
  Synthetic
gcaucuacucagcuucu

SEQ ID NO: 714097 - RNA, 17 nt, Artificial Sequence
  Synthetic
ggaugcauaaggcuucu

SEQ ID NO: 714098 - RNA, 17 nt, Artificial Sequence
  Synthetic
ggcugaagcaggcuucu

SEQ ID NO: 714099 - RNA, 17 nt, Artificial Sequence
  Synthetic
gaagcaggcaggcuucu

SEQ ID NO: 714100 - RNA, 17 nt, Artificial Sequence
  Synthetic
ggaucacacuggcuucu

SEQ ID NO: 714101 - RNA, 17 nt, Artificial Sequence
  Synthetic
gcaccaacauaucuucu

SEQ ID NO: 714102 - RNA, 17 nt, Artificial Sequence
  Synthetic
guacuaggcacucuucu

SEQ ID NO: 714103 - RNA, 17 nt, Artificial Sequence
  Synthetic
gcuaaaauuccaguucu

SEQ ID NO: 714104 - RNA, 17 nt, Artificial Sequence
  Synthetic
gucauuuaaucaguucu

SEQ ID NO: 714105 - RNA, 17 nt, Artificial Sequence
  Synthetic
gggaagccaucaguucu

SEQ ID NO: 714106 - RNA, 17 nt, Artificial Sequence
  Synthetic
gagaaacccucaguucu

SEQ ID NO: 714107 - RNA, 17 nt, Artificial Sequence
  Synthetic
ggauaauguauaguucu

SEQ ID NO: 714108 - RNA, 17 nt, Artificial Sequence
  Synthetic
gcauauucacagguucu

SEQ ID NO: 714109 - RNA, 17 nt, Artificial Sequence
  Synthetic
guccuggccuagguucu

SEQ ID NO: 714110 - RNA, 17 nt, Artificial Sequence
  Synthetic
gauucauauuugguucu

SEQ ID NO: 714111 - RNA, 17 nt, Artificial Sequence
  Synthetic
gcuuagagacauguucu

SEQ ID NO: 714112 - RNA, 17 nt, Artificial Sequence
  Synthetic
guaucagacacuguucu

SEQ ID NO: 714113 - RNA, 17 nt, Artificial Sequence
  Synthetic
guaccgcaggcuguucu

SEQ ID NO: 714114 - RNA, 17 nt, Artificial Sequence
  Synthetic
gugcuaggugcuguucu

SEQ ID NO: 714115 - RNA, 17 nt, Artificial Sequence
  Synthetic
gaggccaugaguguucu

SEQ ID NO: 714116 - RNA, 17 nt, Artificial Sequence
  Synthetic
gguuuguaaaaauuucu

SEQ ID NO: 714117 - RNA, 17 nt, Artificial Sequence
  Synthetic
guccucccucaauuucu

SEQ ID NO: 714118 - RNA, 17 nt, Artificial Sequence
  Synthetic
guuucacauacauuucu

SEQ ID NO: 714119 - RNA, 17 nt, Artificial Sequence
  Synthetic
ggcuugcaaucauuucu

SEQ ID NO: 714120 - RNA, 17 nt, Artificial Sequence
  Synthetic
gugugaacacuauuucu

SEQ ID NO: 714121 - RNA, 17 nt, Artificial Sequence
  Synthetic
gagccugguguauuucu

SEQ ID NO: 714122 - RNA, 17 nt, Artificial Sequence
  Synthetic
gaggagaaguuauuucu

SEQ ID NO: 714123 - RNA, 17 nt, Artificial Sequence
  Synthetic
ggccagcuggacuuucu

SEQ ID NO: 714124 - RNA, 17 nt, Artificial Sequence
  Synthetic
guaagccguuccuuucu

SEQ ID NO: 714125 - RNA, 17 nt, Artificial Sequence
  Synthetic
gaauauuuaggcuuucu

SEQ ID NO: 714126 - RNA, 17 nt, Artificial Sequence
  Synthetic
ggguuucugggcuuucu

SEQ ID NO: 714127 - RNA, 17 nt, Artificial Sequence
  Synthetic
gaaguucucugcuuucu

SEQ ID NO: 714128 - RNA, 17 nt, Artificial Sequence
  Synthetic
ggaguggguaucuuucu

SEQ ID NO: 714129 - RNA, 17 nt, Artificial Sequence
  Synthetic
guagaguaucucuuucu

SEQ ID NO: 714130 - RNA, 17 nt, Artificial Sequence
  Synthetic
gggugguucaaguuucu

SEQ ID NO: 714131 - RNA, 17 nt, Artificial Sequence
  Synthetic
gggcucuuucaguuucu

SEQ ID NO: 714132 - RNA, 17 nt, Artificial Sequence
  Synthetic
gaucaaaucagguuucu

SEQ ID NO: 714133 - RNA, 17 nt, Artificial Sequence
  Synthetic
ggaccguugagguuucu

SEQ ID NO: 714134 - RNA, 17 nt, Artificial Sequence
  Synthetic
gguaucagaugguuucu

SEQ ID NO: 714135 - RNA, 17 nt, Artificial Sequence
  Synthetic
gcacugcugugguuucu

SEQ ID NO: 714136 - RNA, 17 nt, Artificial Sequence
  Synthetic
gagugcaaccauuuucu

SEQ ID NO: 714137 - RNA, 17 nt, Artificial Sequence
  Synthetic
guaacacagcauuuucu

SEQ ID NO: 714138 - RNA, 17 nt, Artificial Sequence
  Synthetic
gucauuuucacuuuucu

SEQ ID NO: 714139 - RNA, 17 nt, Artificial Sequence
  Synthetic
gaauuccuuccuuuucu

SEQ ID NO: 714140 - RNA, 17 nt, Artificial Sequence
  Synthetic
gucaguacugcuuuucu

SEQ ID NO: 714141 - RNA, 17 nt, Artificial Sequence
  Synthetic
gaauuuugaucuuuucu

SEQ ID NO: 714142 - RNA, 17 nt, Artificial Sequence
  Synthetic
ggaacaauguguuuucu

SEQ ID NO: 714143 - RNA, 17 nt, Artificial Sequence
  Synthetic
gaccuguuacuuuuucu

SEQ ID NO: 714144 - RNA, 17 nt, Artificial Sequence
  Synthetic
gagaguagauuuuuucu

SEQ ID NO: 714145 - RNA, 17 nt, Artificial Sequence
  Synthetic
gucuuuggaaaaaaagu

SEQ ID NO: 714146 - RNA, 17 nt, Artificial Sequence
  Synthetic
gucauuaaccaaaaagu

SEQ ID NO: 714147 - RNA, 17 nt, Artificial Sequence
  Synthetic
gaugccuuccaaaaagu

SEQ ID NO: 714148 - RNA, 17 nt, Artificial Sequence
  Synthetic
ggguuggaggaaaaagu

SEQ ID NO: 714149 - RNA, 17 nt, Artificial Sequence
  Synthetic
ggauuugacuaaaaagu

SEQ ID NO: 714150 - RNA, 17 nt, Artificial Sequence
  Synthetic
gcagaauagagaaaagu

SEQ ID NO: 714151 - RNA, 17 nt, Artificial Sequence
  Synthetic
ggcuuuccuugaaaagu

SEQ ID NO: 714152 - RNA, 17 nt, Artificial Sequence
  Synthetic
gaaaaaaugauaaaagu

SEQ ID NO: 714153 - RNA, 17 nt, Artificial Sequence
  Synthetic
gguucccuuauaaaagu

SEQ ID NO: 714154 - RNA, 17 nt, Artificial Sequence
  Synthetic
gguuacuauuacaaagu

SEQ ID NO: 714155 - RNA, 17 nt, Artificial Sequence
  Synthetic
guuaauuauuacaaagu

SEQ ID NO: 714156 - RNA, 17 nt, Artificial Sequence
  Synthetic
gggaaaccacucaaagu

SEQ ID NO: 714157 - RNA, 17 nt, Artificial Sequence
  Synthetic
gaguucagcuucaaagu

SEQ ID NO: 714158 - RNA, 17 nt, Artificial Sequence
  Synthetic
ggagucaaaaagaaagu

SEQ ID NO: 714159 - RNA, 17 nt, Artificial Sequence
  Synthetic
guagagaacaagaaagu

SEQ ID NO: 714160 - RNA, 17 nt, Artificial Sequence
  Synthetic
gagggcagccugaaagu

SEQ ID NO: 714161 - RNA, 17 nt, Artificial Sequence
  Synthetic
guaaaccuuuugaaagu

SEQ ID NO: 714162 - RNA, 17 nt, Artificial Sequence
  Synthetic
gaaaugaaggauaaagu

SEQ ID NO: 714163 - RNA, 17 nt, Artificial Sequence
  Synthetic
gaaacagaauauaaagu

SEQ ID NO: 714164 - RNA, 17 nt, Artificial Sequence
  Synthetic
gcaguaauuuauaaagu

SEQ ID NO: 714165 - RNA, 17 nt, Artificial Sequence
  Synthetic
guuagaauaacuaaagu

SEQ ID NO: 714166 - RNA, 17 nt, Artificial Sequence
  Synthetic
ggaauaaacccuaaagu

SEQ ID NO: 714167 - RNA, 17 nt, Artificial Sequence
  Synthetic
guuuuuagauguaaagu

SEQ ID NO: 714168 - RNA, 17 nt, Artificial Sequence
  Synthetic
gaagaugagauuaaagu

SEQ ID NO: 714169 - RNA, 17 nt, Artificial Sequence
  Synthetic
gcucuccaccuuaaagu

SEQ ID NO: 714170 - RNA, 17 nt, Artificial Sequence
  Synthetic
ggugcagagauacaagu

SEQ ID NO: 714171 - RNA, 17 nt, Artificial Sequence
  Synthetic
ggagaauggaaccaagu

SEQ ID NO: 714172 - RNA, 17 nt, Artificial Sequence
  Synthetic
gggaagguugaccaagu

SEQ ID NO: 714173 - RNA, 17 nt, Artificial Sequence
  Synthetic
gagaaaaccaggcaagu

SEQ ID NO: 714174 - RNA, 17 nt, Artificial Sequence
  Synthetic
gacacagacuggcaagu

SEQ ID NO: 714175 - RNA, 17 nt, Artificial Sequence
  Synthetic
gcaaugaggaugcaagu

SEQ ID NO: 714176 - RNA, 17 nt, Artificial Sequence
  Synthetic
gugagaggguugcaagu

SEQ ID NO: 714177 - RNA, 17 nt, Artificial Sequence
  Synthetic
gcacuaggaaaucaagu

SEQ ID NO: 714178 - RNA, 17 nt, Artificial Sequence
  Synthetic
gugaugacauaucaagu

SEQ ID NO: 714179 - RNA, 17 nt, Artificial Sequence
  Synthetic
gaaccucauccucaagu

SEQ ID NO: 714180 - RNA, 17 nt, Artificial Sequence
  Synthetic
gaugaaaguauucaagu

SEQ ID NO: 714181 - RNA, 17 nt, Artificial Sequence
  Synthetic
guauuguuaaaagaagu

SEQ ID NO: 714182 - RNA, 17 nt, Artificial Sequence
  Synthetic
gcagagaggcaagaagu

SEQ ID NO: 714183 - RNA, 17 nt, Artificial Sequence
  Synthetic
gaacaacaguaagaagu

SEQ ID NO: 714184 - RNA, 17 nt, Artificial Sequence
  Synthetic
ggccugaguuaagaagu

SEQ ID NO: 714185 - RNA, 17 nt, Artificial Sequence
  Synthetic
gcagaagccucagaagu

SEQ ID NO: 714186 - RNA, 17 nt, Artificial Sequence
  Synthetic
ggaggauggagagaagu

SEQ ID NO: 714187 - RNA, 17 nt, Artificial Sequence
  Synthetic
gacuuauuaggagaagu

SEQ ID NO: 714188 - RNA, 17 nt, Artificial Sequence
  Synthetic
gagugaguuggagaagu

SEQ ID NO: 714189 - RNA, 17 nt, Artificial Sequence
  Synthetic
guggugaguugagaagu

SEQ ID NO: 714190 - RNA, 17 nt, Artificial Sequence
  Synthetic
ggcagcucaauagaagu

SEQ ID NO: 714191 - RNA, 17 nt, Artificial Sequence
  Synthetic
ggaaaaagccuagaagu

SEQ ID NO: 714192 - RNA, 17 nt, Artificial Sequence
  Synthetic
gaagcgcccagcgaagu

SEQ ID NO: 714193 - RNA, 17 nt, Artificial Sequence
  Synthetic
guuggggagaaggaagu

SEQ ID NO: 714194 - RNA, 17 nt, Artificial Sequence
  Synthetic
gacgaauugacggaagu

SEQ ID NO: 714195 - RNA, 17 nt, Artificial Sequence
  Synthetic
gauauauacccggaagu

SEQ ID NO: 714196 - RNA, 17 nt, Artificial Sequence
  Synthetic
gcugucuuuggggaagu

SEQ ID NO: 714197 - RNA, 17 nt, Artificial Sequence
  Synthetic
ggccugggcugggaagu

SEQ ID NO: 714198 - RNA, 17 nt, Artificial Sequence
  Synthetic
ggcagguuuauggaagu

SEQ ID NO: 714199 - RNA, 17 nt, Artificial Sequence
  Synthetic
gaagauauuuaugaagu

SEQ ID NO: 714200 - RNA, 17 nt, Artificial Sequence
  Synthetic
guucaagcuugugaagu

SEQ ID NO: 714201 - RNA, 17 nt, Artificial Sequence
  Synthetic
guggcagugguugaagu

SEQ ID NO: 714202 - RNA, 17 nt, Artificial Sequence
  Synthetic
gaacauguagaauaagu

SEQ ID NO: 714203 - RNA, 17 nt, Artificial Sequence
  Synthetic
gccuuggaggcauaagu

SEQ ID NO: 714204 - RNA, 17 nt, Artificial Sequence
  Synthetic
guucagaaaagauaagu

SEQ ID NO: 714205 - RNA, 17 nt, Artificial Sequence
  Synthetic
gaaaaaacucgauaagu

SEQ ID NO: 714206 - RNA, 17 nt, Artificial Sequence
  Synthetic
gcuuugacauacuaagu

SEQ ID NO: 714207 - RNA, 17 nt, Artificial Sequence
  Synthetic
gcuccaaaguacuaagu

SEQ ID NO: 714208 - RNA, 17 nt, Artificial Sequence
  Synthetic
gauaugcuaggcuaagu

SEQ ID NO: 714209 - RNA, 17 nt, Artificial Sequence
  Synthetic
gcauuagcccucuaagu

SEQ ID NO: 714210 - RNA, 17 nt, Artificial Sequence
  Synthetic
gaaaguuaucucuaagu

SEQ ID NO: 714211 - RNA, 17 nt, Artificial Sequence
  Synthetic
gaaaauuaaugguaagu

SEQ ID NO: 714212 - RNA, 17 nt, Artificial Sequence
  Synthetic
gcuucuauauuguaagu

SEQ ID NO: 714213 - RNA, 17 nt, Artificial Sequence
  Synthetic
gagaacucuuuguaagu

SEQ ID NO: 714214 - RNA, 17 nt, Artificial Sequence
  Synthetic
gauggugucacuuaagu

SEQ ID NO: 714215 - RNA, 17 nt, Artificial Sequence
  Synthetic
gggcaagaaaguuaagu

SEQ ID NO: 714216 - RNA, 17 nt, Artificial Sequence
  Synthetic
gguucucaaauuuaagu

SEQ ID NO: 714217 - RNA, 17 nt, Artificial Sequence
  Synthetic
gacugcaggcuuuaagu

SEQ ID NO: 714218 - RNA, 17 nt, Artificial Sequence
  Synthetic
guuagauuaaaaacagu

SEQ ID NO: 714219 - RNA, 17 nt, Artificial Sequence
  Synthetic
gcagagguugaaacagu

SEQ ID NO: 714220 - RNA, 17 nt, Artificial Sequence
  Synthetic
gagauguccuaaacagu

SEQ ID NO: 714221 - RNA, 17 nt, Artificial Sequence
  Synthetic
guagcaugaauaacagu

SEQ ID NO: 714222 - RNA, 17 nt, Artificial Sequence
  Synthetic
gagaaacaaguaacagu

SEQ ID NO: 714223 - RNA, 17 nt, Artificial Sequence
  Synthetic
gcuugcaucaccacagu

SEQ ID NO: 714224 - RNA, 17 nt, Artificial Sequence
  Synthetic
gacuuauuaggcacagu

SEQ ID NO: 714225 - RNA, 17 nt, Artificial Sequence
  Synthetic
gagaaguguggcacagu

SEQ ID NO: 714226 - RNA, 17 nt, Artificial Sequence
  Synthetic
gcauaacacaucacagu

SEQ ID NO: 714227 - RNA, 17 nt, Artificial Sequence
  Synthetic
gggacugguuagacagu

SEQ ID NO: 714228 - RNA, 17 nt, Artificial Sequence
  Synthetic
gaguauaaggggacagu

SEQ ID NO: 714229 - RNA, 17 nt, Artificial Sequence
  Synthetic
gcugagggugggacagu

SEQ ID NO: 714230 - RNA, 17 nt, Artificial Sequence
  Synthetic
gcccccuuagugacagu

SEQ ID NO: 714231 - RNA, 17 nt, Artificial Sequence
  Synthetic
guuauacuacauacagu

SEQ ID NO: 714232 - RNA, 17 nt, Artificial Sequence
  Synthetic
guuuucuugaaaccagu

SEQ ID NO: 714233 - RNA, 17 nt, Artificial Sequence
  Synthetic
guauagauuuaaccagu

SEQ ID NO: 714234 - RNA, 17 nt, Artificial Sequence
  Synthetic
gaacaucacacaccagu

SEQ ID NO: 714235 - RNA, 17 nt, Artificial Sequence
  Synthetic
gacuacaaugcaccagu

SEQ ID NO: 714236 - RNA, 17 nt, Artificial Sequence
  Synthetic
gcauaaauuuacccagu

SEQ ID NO: 714237 - RNA, 17 nt, Artificial Sequence
  Synthetic
gauagccuauucccagu

SEQ ID NO: 714238 - RNA, 17 nt, Artificial Sequence
  Synthetic
guggagaauuauccagu

SEQ ID NO: 714239 - RNA, 17 nt, Artificial Sequence
  Synthetic
guguuccacccuccagu

SEQ ID NO: 714240 - RNA, 17 nt, Artificial Sequence
  Synthetic
gggagcagccguccagu

SEQ ID NO: 714241 - RNA, 17 nt, Artificial Sequence
  Synthetic
gcccuuuggcuuccagu

SEQ ID NO: 714242 - RNA, 17 nt, Artificial Sequence
  Synthetic
gccuuaacaaaagcagu

SEQ ID NO: 714243 - RNA, 17 nt, Artificial Sequence
  Synthetic
gugaaauuugaagcagu

SEQ ID NO: 714244 - RNA, 17 nt, Artificial Sequence
  Synthetic
guugaggacacagcagu

SEQ ID NO: 714245 - RNA, 17 nt, Artificial Sequence
  Synthetic
guaaauuucacagcagu

SEQ ID NO: 714246 - RNA, 17 nt, Artificial Sequence
  Synthetic
gauauauacccagcagu

SEQ ID NO: 714247 - RNA, 17 nt, Artificial Sequence
  Synthetic
gguauauacccagcagu

SEQ ID NO: 714248 - RNA, 17 nt, Artificial Sequence
  Synthetic
gaggaguugagagcagu

SEQ ID NO: 714249 - RNA, 17 nt, Artificial Sequence
  Synthetic
gacggaagcaaggcagu

SEQ ID NO: 714250 - RNA, 17 nt, Artificial Sequence
  Synthetic
ggagccgagaaggcagu

SEQ ID NO: 714251 - RNA, 17 nt, Artificial Sequence
  Synthetic
gaauauucuugggcagu

SEQ ID NO: 714252 - RNA, 17 nt, Artificial Sequence
  Synthetic
gacuguagguuggcagu

SEQ ID NO: 714253 - RNA, 17 nt, Artificial Sequence
  Synthetic
ggaagcacggaugcagu

SEQ ID NO: 714254 - RNA, 17 nt, Artificial Sequence
  Synthetic
gaacacagguaugcagu

SEQ ID NO: 714255 - RNA, 17 nt, Artificial Sequence
  Synthetic
gagccggguacugcagu

SEQ ID NO: 714256 - RNA, 17 nt, Artificial Sequence
  Synthetic
gucacaaagagugcagu

SEQ ID NO: 714257 - RNA, 17 nt, Artificial Sequence
  Synthetic
gcuauuccaaaaucagu

SEQ ID NO: 714258 - RNA, 17 nt, Artificial Sequence
  Synthetic
gagaagguuaaaucagu

SEQ ID NO: 714259 - RNA, 17 nt, Artificial Sequence
  Synthetic
gugauuagagaaucagu

SEQ ID NO: 714260 - RNA, 17 nt, Artificial Sequence
  Synthetic
gaugugaaugaaucagu

SEQ ID NO: 714261 - RNA, 17 nt, Artificial Sequence
  Synthetic
gacagcaaaggaucagu

SEQ ID NO: 714262 - RNA, 17 nt, Artificial Sequence
  Synthetic
ggugucacuuuaucagu

SEQ ID NO: 714263 - RNA, 17 nt, Artificial Sequence
  Synthetic
ggaauuuguuuaucagu

SEQ ID NO: 714264 - RNA, 17 nt, Artificial Sequence
  Synthetic
ggcguuaacagcucagu

SEQ ID NO: 714265 - RNA, 17 nt, Artificial Sequence
  Synthetic
gcuaugcucaauucagu

SEQ ID NO: 714266 - RNA, 17 nt, Artificial Sequence
  Synthetic
gggugguagaauucagu

SEQ ID NO: 714267 - RNA, 17 nt, Artificial Sequence
  Synthetic
gcagauugugauucagu

SEQ ID NO: 714268 - RNA, 17 nt, Artificial Sequence
  Synthetic
gaggcuggcuguucagu

SEQ ID NO: 714269 - RNA, 17 nt, Artificial Sequence
  Synthetic
gagaauacaauuucagu

SEQ ID NO: 714270 - RNA, 17 nt, Artificial Sequence
  Synthetic
gauuccucuauuucagu

SEQ ID NO: 714271 - RNA, 17 nt, Artificial Sequence
  Synthetic
gauucaaauuuuucagu

SEQ ID NO: 714272 - RNA, 17 nt, Artificial Sequence
  Synthetic
gugagacauuuuucagu

SEQ ID NO: 714273 - RNA, 17 nt, Artificial Sequence
  Synthetic
guaggauuuuuuucagu

SEQ ID NO: 714274 - RNA, 17 nt, Artificial Sequence
  Synthetic
ggcuagguggaaagagu

SEQ ID NO: 714275 - RNA, 17 nt, Artificial Sequence
  Synthetic
gaggaggaguaaagagu

SEQ ID NO: 714276 - RNA, 17 nt, Artificial Sequence
  Synthetic
gggacguuguaaagagu

SEQ ID NO: 714277 - RNA, 17 nt, Artificial Sequence
  Synthetic
gauuuugaacuaagagu

SEQ ID NO: 714278 - RNA, 17 nt, Artificial Sequence
  Synthetic
ggccugccucuaagagu

SEQ ID NO: 714279 - RNA, 17 nt, Artificial Sequence
  Synthetic
gcuugaacauccagagu

SEQ ID NO: 714280 - RNA, 17 nt, Artificial Sequence
  Synthetic
gaaaaaaguuccagagu

SEQ ID NO: 714281 - RNA, 17 nt, Artificial Sequence
  Synthetic
guacauuuuagcagagu

SEQ ID NO: 714282 - RNA, 17 nt, Artificial Sequence
  Synthetic
gucugaagaaucagagu

SEQ ID NO: 714283 - RNA, 17 nt, Artificial Sequence
  Synthetic
ggaaauuguuggagagu

SEQ ID NO: 714284 - RNA, 17 nt, Artificial Sequence
  Synthetic
guggcuaaauugagagu

SEQ ID NO: 714285 - RNA, 17 nt, Artificial Sequence
  Synthetic
ggccuauuucauagagu

SEQ ID NO: 714286 - RNA, 17 nt, Artificial Sequence
  Synthetic
ggguaggacaguagagu

SEQ ID NO: 714287 - RNA, 17 nt, Artificial Sequence
  Synthetic
gaaacugaauguagagu

SEQ ID NO: 714288 - RNA, 17 nt, Artificial Sequence
  Synthetic
gcccaaggucuuagagu

SEQ ID NO: 714289 - RNA, 17 nt, Artificial Sequence
  Synthetic
gcuccacccucacgagu

SEQ ID NO: 714290 - RNA, 17 nt, Artificial Sequence
  Synthetic
gacuuucugggucgagu

SEQ ID NO: 714291 - RNA, 17 nt, Artificial Sequence
  Synthetic
ggaggaagcaaaggagu

SEQ ID NO: 714292 - RNA, 17 nt, Artificial Sequence
  Synthetic
gggagaauggaaggagu

SEQ ID NO: 714293 - RNA, 17 nt, Artificial Sequence
  Synthetic
gauaagaucgcaggagu

SEQ ID NO: 714294 - RNA, 17 nt, Artificial Sequence
  Synthetic
ggaagguccagaggagu

SEQ ID NO: 714295 - RNA, 17 nt, Artificial Sequence
  Synthetic
guaacccagaagggagu

SEQ ID NO: 714296 - RNA, 17 nt, Artificial Sequence
  Synthetic
guguguguggcgggagu

SEQ ID NO: 714297 - RNA, 17 nt, Artificial Sequence
  Synthetic
ggaggagggaggggagu

SEQ ID NO: 714298 - RNA, 17 nt, Artificial Sequence
  Synthetic
ggcauuugccugggagu

SEQ ID NO: 714299 - RNA, 17 nt, Artificial Sequence
  Synthetic
gcuucacugcugggagu

SEQ ID NO: 714300 - RNA, 17 nt, Artificial Sequence
  Synthetic
gaaauaucucugggagu

SEQ ID NO: 714301 - RNA, 17 nt, Artificial Sequence
  Synthetic
guucagggcuugggagu

SEQ ID NO: 714302 - RNA, 17 nt, Artificial Sequence
  Synthetic
gugguugguuugggagu

SEQ ID NO: 714303 - RNA, 17 nt, Artificial Sequence
  Synthetic
guuagaaagacuggagu

SEQ ID NO: 714304 - RNA, 17 nt, Artificial Sequence
  Synthetic
ggaagugagacuggagu

SEQ ID NO: 714305 - RNA, 17 nt, Artificial Sequence
  Synthetic
gcccuugauaaaugagu

SEQ ID NO: 714306 - RNA, 17 nt, Artificial Sequence
  Synthetic
ggcauuaaagaaugagu

SEQ ID NO: 714307 - RNA, 17 nt, Artificial Sequence
  Synthetic
gacccuucagaaugagu

SEQ ID NO: 714308 - RNA, 17 nt, Artificial Sequence
  Synthetic
guaaguaaguuaugagu

SEQ ID NO: 714309 - RNA, 17 nt, Artificial Sequence
  Synthetic
gcuuaauguuuaugagu

SEQ ID NO: 714310 - RNA, 17 nt, Artificial Sequence
  Synthetic
ggaaagccucacugagu

SEQ ID NO: 714311 - RNA, 17 nt, Artificial Sequence
  Synthetic
ggagaggcugucugagu

SEQ ID NO: 714312 - RNA, 17 nt, Artificial Sequence
  Synthetic
gucuuauuguggugagu

SEQ ID NO: 714313 - RNA, 17 nt, Artificial Sequence
  Synthetic
gaagcucacaauugagu

SEQ ID NO: 714314 - RNA, 17 nt, Artificial Sequence
  Synthetic
gguucucaaacuugagu

SEQ ID NO: 714315 - RNA, 17 nt, Artificial Sequence
  Synthetic
gaugaugacauuugagu

SEQ ID NO: 714316 - RNA, 17 nt, Artificial Sequence
  Synthetic
gcuagacagauuugagu

SEQ ID NO: 714317 - RNA, 17 nt, Artificial Sequence
  Synthetic
guacacuugauuugagu

SEQ ID NO: 714318 - RNA, 17 nt, Artificial Sequence
  Synthetic
gguuguuuucaaauagu

SEQ ID NO: 714319 - RNA, 17 nt, Artificial Sequence
  Synthetic
guggauguggaaauagu

SEQ ID NO: 714320 - RNA, 17 nt, Artificial Sequence
  Synthetic
gacacaugcugaauagu

SEQ ID NO: 714321 - RNA, 17 nt, Artificial Sequence
  Synthetic
gcccauacaauaauagu

SEQ ID NO: 714322 - RNA, 17 nt, Artificial Sequence
  Synthetic
ggugguguggccauagu

SEQ ID NO: 714323 - RNA, 17 nt, Artificial Sequence
  Synthetic
gcccucagaaucauagu

SEQ ID NO: 714324 - RNA, 17 nt, Artificial Sequence
  Synthetic
gcuauucucaugauagu

SEQ ID NO: 714325 - RNA, 17 nt, Artificial Sequence
  Synthetic
gauuaaccccauauagu

SEQ ID NO: 714326 - RNA, 17 nt, Artificial Sequence
  Synthetic
gcuguaaaauauauagu

SEQ ID NO: 714327 - RNA, 17 nt, Artificial Sequence
  Synthetic
gucacuuacuauauagu

SEQ ID NO: 714328 - RNA, 17 nt, Artificial Sequence
  Synthetic
gguauacugccuauagu

SEQ ID NO: 714329 - RNA, 17 nt, Artificial Sequence
  Synthetic
guuuuguuauguauagu

SEQ ID NO: 714330 - RNA, 17 nt, Artificial Sequence
  Synthetic
gcaugugucuuuauagu

SEQ ID NO: 714331 - RNA, 17 nt, Artificial Sequence
  Synthetic
guauaagcuccccuagu

SEQ ID NO: 714332 - RNA, 17 nt, Artificial Sequence
  Synthetic
guauuagccauccuagu

SEQ ID NO: 714333 - RNA, 17 nt, Artificial Sequence
  Synthetic
gagauguuaccucuagu

SEQ ID NO: 714334 - RNA, 17 nt, Artificial Sequence
  Synthetic
gaaaccuguucucuagu

SEQ ID NO: 714335 - RNA, 17 nt, Artificial Sequence
  Synthetic
guuuaaauuucucuagu

SEQ ID NO: 714336 - RNA, 17 nt, Artificial Sequence
  Synthetic
guaacuuacauucuagu

SEQ ID NO: 714337 - RNA, 17 nt, Artificial Sequence
  Synthetic
ggaguuugcauucuagu

SEQ ID NO: 714338 - RNA, 17 nt, Artificial Sequence
  Synthetic
guaaagaaagaaguagu

SEQ ID NO: 714339 - RNA, 17 nt, Artificial Sequence
  Synthetic
gauaaaugcccaguagu

SEQ ID NO: 714340 - RNA, 17 nt, Artificial Sequence
  Synthetic
gggcaaagaucaguagu

SEQ ID NO: 714341 - RNA, 17 nt, Artificial Sequence
  Synthetic
gguuuugccucaguagu

SEQ ID NO: 714342 - RNA, 17 nt, Artificial Sequence
  Synthetic
gauaacuacugaguagu

SEQ ID NO: 714343 - RNA, 17 nt, Artificial Sequence
  Synthetic
gagguaaaaauaguagu

SEQ ID NO: 714344 - RNA, 17 nt, Artificial Sequence
  Synthetic
gcccggaagcugguagu

SEQ ID NO: 714345 - RNA, 17 nt, Artificial Sequence
  Synthetic
guagguuaaaauguagu

SEQ ID NO: 714346 - RNA, 17 nt, Artificial Sequence
  Synthetic
gggaaaagucauguagu

SEQ ID NO: 714347 - RNA, 17 nt, Artificial Sequence
  Synthetic
guauuuuucacuguagu

SEQ ID NO: 714348 - RNA, 17 nt, Artificial Sequence
  Synthetic
gcaauaagcaguguagu

SEQ ID NO: 714349 - RNA, 17 nt, Artificial Sequence
  Synthetic
gauaccuaacaauuagu

SEQ ID NO: 714350 - RNA, 17 nt, Artificial Sequence
  Synthetic
gcugugcucagauuagu

SEQ ID NO: 714351 - RNA, 17 nt, Artificial Sequence
  Synthetic
gcugacucauuauuagu

SEQ ID NO: 714352 - RNA, 17 nt, Artificial Sequence
  Synthetic
gauaacuauaacuuagu

SEQ ID NO: 714353 - RNA, 17 nt, Artificial Sequence
  Synthetic
gagaacauuaucuuagu

SEQ ID NO: 714354 - RNA, 17 nt, Artificial Sequence
  Synthetic
ggugaauucauguuagu

SEQ ID NO: 714355 - RNA, 17 nt, Artificial Sequence
  Synthetic
ggguccaagacuuuagu

SEQ ID NO: 714356 - RNA, 17 nt, Artificial Sequence
  Synthetic
ggguaucucucuuuagu

SEQ ID NO: 714357 - RNA, 17 nt, Artificial Sequence
  Synthetic
ggagcugaauguuuagu

SEQ ID NO: 714358 - RNA, 17 nt, Artificial Sequence
  Synthetic
gaguguggaaacaacgu

SEQ ID NO: 714359 - RNA, 17 nt, Artificial Sequence
  Synthetic
gagaaucgcuugaacgu

SEQ ID NO: 714360 - RNA, 17 nt, Artificial Sequence
  Synthetic
gguagaaaauaacacgu

SEQ ID NO: 714361 - RNA, 17 nt, Artificial Sequence
  Synthetic
gccuucaggggacacgu

SEQ ID NO: 714362 - RNA, 17 nt, Artificial Sequence
  Synthetic
gcaucuuccucccacgu

SEQ ID NO: 714363 - RNA, 17 nt, Artificial Sequence
  Synthetic
gugcucaucugccacgu

SEQ ID NO: 714364 - RNA, 17 nt, Artificial Sequence
  Synthetic
gugcagauuugucacgu

SEQ ID NO: 714365 - RNA, 17 nt, Artificial Sequence
  Synthetic
ggauugagaggagacgu

SEQ ID NO: 714366 - RNA, 17 nt, Artificial Sequence
  Synthetic
gcaaaaauugacuacgu

SEQ ID NO: 714367 - RNA, 17 nt, Artificial Sequence
  Synthetic
guacagguuugcuacgu

SEQ ID NO: 714368 - RNA, 17 nt, Artificial Sequence
  Synthetic
gaacacuuucacaccgu

SEQ ID NO: 714369 - RNA, 17 nt, Artificial Sequence
  Synthetic
gcucccuuucaccccgu

SEQ ID NO: 714370 - RNA, 17 nt, Artificial Sequence
  Synthetic
gaaaauaauucccccgu

SEQ ID NO: 714371 - RNA, 17 nt, Artificial Sequence
  Synthetic
gcauaucuaacucccgu

SEQ ID NO: 714372 - RNA, 17 nt, Artificial Sequence
  Synthetic
gcuuaucucuaggccgu

SEQ ID NO: 714373 - RNA, 17 nt, Artificial Sequence
  Synthetic
guggauuugcuauccgu

SEQ ID NO: 714374 - RNA, 17 nt, Artificial Sequence
  Synthetic
gcauugagcaaguccgu

SEQ ID NO: 714375 - RNA, 17 nt, Artificial Sequence
  Synthetic
gaggaaauuaauuccgu

SEQ ID NO: 714376 - RNA, 17 nt, Artificial Sequence
  Synthetic
gcuugggaggugagcgu

SEQ ID NO: 714377 - RNA, 17 nt, Artificial Sequence
  Synthetic
gaauaaaauauuggcgu

SEQ ID NO: 714378 - RNA, 17 nt, Artificial Sequence
  Synthetic
guuacauagguaugcgu

SEQ ID NO: 714379 - RNA, 17 nt, Artificial Sequence
  Synthetic
gaauccagaugcugcgu

SEQ ID NO: 714380 - RNA, 17 nt, Artificial Sequence
  Synthetic
guuugugguggaaucgu

SEQ ID NO: 714381 - RNA, 17 nt, Artificial Sequence
  Synthetic
gauugguaauuuaucgu

SEQ ID NO: 714382 - RNA, 17 nt, Artificial Sequence
  Synthetic
ggugucuuuguucucgu

SEQ ID NO: 714383 - RNA, 17 nt, Artificial Sequence
  Synthetic
ggcaugcugucuuucgu

SEQ ID NO: 714384 - RNA, 17 nt, Artificial Sequence
  Synthetic
guaauuauaggaaaggu

SEQ ID NO: 714385 - RNA, 17 nt, Artificial Sequence
  Synthetic
gacacugauguaaaggu

SEQ ID NO: 714386 - RNA, 17 nt, Artificial Sequence
  Synthetic
gcuccacccagcaaggu

SEQ ID NO: 714387 - RNA, 17 nt, Artificial Sequence
  Synthetic
guugaagugagcaaggu

SEQ ID NO: 714388 - RNA, 17 nt, Artificial Sequence
  Synthetic
ggauccaccugcaaggu

SEQ ID NO: 714389 - RNA, 17 nt, Artificial Sequence
  Synthetic
gucuuuauccucaaggu

SEQ ID NO: 714390 - RNA, 17 nt, Artificial Sequence
  Synthetic
guggcuguguucaaggu

SEQ ID NO: 714391 - RNA, 17 nt, Artificial Sequence
  Synthetic
gcucuucucuugaaggu

SEQ ID NO: 714392 - RNA, 17 nt, Artificial Sequence
  Synthetic
gagagcaggaaacaggu

SEQ ID NO: 714393 - RNA, 17 nt, Artificial Sequence
  Synthetic
ggguaagaggcacaggu

SEQ ID NO: 714394 - RNA, 17 nt, Artificial Sequence
  Synthetic
gcaugggccagacaggu

SEQ ID NO: 714395 - RNA, 17 nt, Artificial Sequence
  Synthetic
gggcuagaaauacaggu

SEQ ID NO: 714396 - RNA, 17 nt, Artificial Sequence
  Synthetic
ggaguuugagaccaggu

SEQ ID NO: 714397 - RNA, 17 nt, Artificial Sequence
  Synthetic
gagcugaggacccaggu

SEQ ID NO: 714398 - RNA, 17 nt, Artificial Sequence
  Synthetic
gcagaggagggccaggu

SEQ ID NO: 714399 - RNA, 17 nt, Artificial Sequence
  Synthetic
gcaaaaaagguccaggu

SEQ ID NO: 714400 - RNA, 17 nt, Artificial Sequence
  Synthetic
gggaagcugaggcaggu

SEQ ID NO: 714401 - RNA, 17 nt, Artificial Sequence
  Synthetic
ggcaauuucuggcaggu

SEQ ID NO: 714402 - RNA, 17 nt, Artificial Sequence
  Synthetic
guuuucguauugcaggu

SEQ ID NO: 714403 - RNA, 17 nt, Artificial Sequence
  Synthetic
gcauacacaaaucaggu

SEQ ID NO: 714404 - RNA, 17 nt, Artificial Sequence
  Synthetic
ggcagcuaggaucaggu

SEQ ID NO: 714405 - RNA, 17 nt, Artificial Sequence
  Synthetic
gucucuaacauucaggu

SEQ ID NO: 714406 - RNA, 17 nt, Artificial Sequence
  Synthetic
guacuuggacuucaggu

SEQ ID NO: 714407 - RNA, 17 nt, Artificial Sequence
  Synthetic
gaauaauguuuucaggu

SEQ ID NO: 714408 - RNA, 17 nt, Artificial Sequence
  Synthetic
gaagggcaaaaagaggu

SEQ ID NO: 714409 - RNA, 17 nt, Artificial Sequence
  Synthetic
gcagcuauuugagaggu

SEQ ID NO: 714410 - RNA, 17 nt, Artificial Sequence
  Synthetic
guauuuguaguagaggu

SEQ ID NO: 714411 - RNA, 17 nt, Artificial Sequence
  Synthetic
guacugagauuagaggu

SEQ ID NO: 714412 - RNA, 17 nt, Artificial Sequence
  Synthetic
gaggccugucgcgaggu

SEQ ID NO: 714413 - RNA, 17 nt, Artificial Sequence
  Synthetic
gauggaguaaaggaggu

SEQ ID NO: 714414 - RNA, 17 nt, Artificial Sequence
  Synthetic
ggaguauuacaggaggu

SEQ ID NO: 714415 - RNA, 17 nt, Artificial Sequence
  Synthetic
gucucugcacaugaggu

SEQ ID NO: 714416 - RNA, 17 nt, Artificial Sequence
  Synthetic
gccucccugacugaggu

SEQ ID NO: 714417 - RNA, 17 nt, Artificial Sequence
  Synthetic
ggcagaccaccugaggu

SEQ ID NO: 714418 - RNA, 17 nt, Artificial Sequence
  Synthetic
ggcagaucaccugaggu

SEQ ID NO: 714419 - RNA, 17 nt, Artificial Sequence
  Synthetic
ggcggaucaccugaggu

SEQ ID NO: 714420 - RNA, 17 nt, Artificial Sequence
  Synthetic
gguggaucaccugaggu

SEQ ID NO: 714421 - RNA, 17 nt, Artificial Sequence
  Synthetic
gccugaucaccugaggu

SEQ ID NO: 714422 - RNA, 17 nt, Artificial Sequence
  Synthetic
gagggcagcagugaggu

SEQ ID NO: 714423 - RNA, 17 nt, Artificial Sequence
  Synthetic
gucaguuguggugaggu

SEQ ID NO: 714424 - RNA, 17 nt, Artificial Sequence
  Synthetic
gcugcacugcuugaggu

SEQ ID NO: 714425 - RNA, 17 nt, Artificial Sequence
  Synthetic
ggagguaggggauaggu

SEQ ID NO: 714426 - RNA, 17 nt, Artificial Sequence
  Synthetic
ggccugucuugcuaggu

SEQ ID NO: 714427 - RNA, 17 nt, Artificial Sequence
  Synthetic
gagcucuacuucuaggu

SEQ ID NO: 714428 - RNA, 17 nt, Artificial Sequence
  Synthetic
gaaaacaaucaguaggu

SEQ ID NO: 714429 - RNA, 17 nt, Artificial Sequence
  Synthetic
gcuuugcaaagguaggu

SEQ ID NO: 714430 - RNA, 17 nt, Artificial Sequence
  Synthetic
gucucucaacauuaggu

SEQ ID NO: 714431 - RNA, 17 nt, Artificial Sequence
  Synthetic
gugucuauauauuaggu

SEQ ID NO: 714432 - RNA, 17 nt, Artificial Sequence
  Synthetic
guagauaacuauuaggu

SEQ ID NO: 714433 - RNA, 17 nt, Artificial Sequence
  Synthetic
gcaggacgcacuuaggu

SEQ ID NO: 714434 - RNA, 17 nt, Artificial Sequence
  Synthetic
gggaacauuuuuuaggu

SEQ ID NO: 714435 - RNA, 17 nt, Artificial Sequence
  Synthetic
guugugcgacgugcggu

SEQ ID NO: 714436 - RNA, 17 nt, Artificial Sequence
  Synthetic
guggggaacacaagggu

SEQ ID NO: 714437 - RNA, 17 nt, Artificial Sequence
  Synthetic
gaaaaugaagcaagggu

SEQ ID NO: 714438 - RNA, 17 nt, Artificial Sequence
  Synthetic
gaugauaugagaagggu

SEQ ID NO: 714439 - RNA, 17 nt, Artificial Sequence
  Synthetic
gguuugggaugaagggu

SEQ ID NO: 714440 - RNA, 17 nt, Artificial Sequence
  Synthetic
gaguggcuuagcagggu

SEQ ID NO: 714441 - RNA, 17 nt, Artificial Sequence
  Synthetic
gguagcaggaggagggu

SEQ ID NO: 714442 - RNA, 17 nt, Artificial Sequence
  Synthetic
ggacagacggggagggu

SEQ ID NO: 714443 - RNA, 17 nt, Artificial Sequence
  Synthetic
gagggauaaaugagggu

SEQ ID NO: 714444 - RNA, 17 nt, Artificial Sequence
  Synthetic
gaagaagugcugagggu

SEQ ID NO: 714445 - RNA, 17 nt, Artificial Sequence
  Synthetic
ggguggggggcuagggu

SEQ ID NO: 714446 - RNA, 17 nt, Artificial Sequence
  Synthetic
gaaauauucucuagggu

SEQ ID NO: 714447 - RNA, 17 nt, Artificial Sequence
  Synthetic
ggggaaaaaguuagggu

SEQ ID NO: 714448 - RNA, 17 nt, Artificial Sequence
  Synthetic
ggggccuguuggcgggu

SEQ ID NO: 714449 - RNA, 17 nt, Artificial Sequence
  Synthetic
gcccaaagucaaggggu

SEQ ID NO: 714450 - RNA, 17 nt, Artificial Sequence
  Synthetic
ggguaauaggcaggggu

SEQ ID NO: 714451 - RNA, 17 nt, Artificial Sequence
  Synthetic
ggggccugucgaggggu

SEQ ID NO: 714452 - RNA, 17 nt, Artificial Sequence
  Synthetic
ggagggagaggaggggu

SEQ ID NO: 714453 - RNA, 17 nt, Artificial Sequence
  Synthetic
gagccaugaugaggggu

SEQ ID NO: 714454 - RNA, 17 nt, Artificial Sequence
  Synthetic
guaguucagcuaggggu

SEQ ID NO: 714455 - RNA, 17 nt, Artificial Sequence
  Synthetic
gauguugauagcggggu

SEQ ID NO: 714456 - RNA, 17 nt, Artificial Sequence
  Synthetic
gcaauuuggcagggggu

SEQ ID NO: 714457 - RNA, 17 nt, Artificial Sequence
  Synthetic
ggggccugucagggggu

SEQ ID NO: 714458 - RNA, 17 nt, Artificial Sequence
  Synthetic
guugggguggcgggggu

SEQ ID NO: 714459 - RNA, 17 nt, Artificial Sequence
  Synthetic
gaggccugucggggggu

SEQ ID NO: 714460 - RNA, 17 nt, Artificial Sequence
  Synthetic
gggguuguguggggggu

SEQ ID NO: 714461 - RNA, 17 nt, Artificial Sequence
  Synthetic
gaaguguugcugggggu

SEQ ID NO: 714462 - RNA, 17 nt, Artificial Sequence
  Synthetic
gaggccgaggugggggu

SEQ ID NO: 714463 - RNA, 17 nt, Artificial Sequence
  Synthetic
gaguugguggugggggu

SEQ ID NO: 714464 - RNA, 17 nt, Artificial Sequence
  Synthetic
gcugggggguugggggu

SEQ ID NO: 714465 - RNA, 17 nt, Artificial Sequence
  Synthetic
gcuauuugguugggggu

SEQ ID NO: 714466 - RNA, 17 nt, Artificial Sequence
  Synthetic
gcugauguuacuggggu

SEQ ID NO: 714467 - RNA, 17 nt, Artificial Sequence
  Synthetic
gguguugggccuggggu

SEQ ID NO: 714468 - RNA, 17 nt, Artificial Sequence
  Synthetic
ggccagucuccuggggu

SEQ ID NO: 714469 - RNA, 17 nt, Artificial Sequence
  Synthetic
guuauuuggucuggggu

SEQ ID NO: 714470 - RNA, 17 nt, Artificial Sequence
  Synthetic
ggcuucugcaguggggu

SEQ ID NO: 714471 - RNA, 17 nt, Artificial Sequence
  Synthetic
ggggccugucguggggu

SEQ ID NO: 714472 - RNA, 17 nt, Artificial Sequence
  Synthetic
gcacacagugguggggu

SEQ ID NO: 714473 - RNA, 17 nt, Artificial Sequence
  Synthetic
ggggacugugguggggu

SEQ ID NO: 714474 - RNA, 17 nt, Artificial Sequence
  Synthetic
gaaggaaaauguggggu

SEQ ID NO: 714475 - RNA, 17 nt, Artificial Sequence
  Synthetic
gaagagaaauguggggu

SEQ ID NO: 714476 - RNA, 17 nt, Artificial Sequence
  Synthetic
gaagggaaauguggggu

SEQ ID NO: 714477 - RNA, 17 nt, Artificial Sequence
  Synthetic
ggggacugcuguggggu

SEQ ID NO: 714478 - RNA, 17 nt, Artificial Sequence
  Synthetic
ggggccugcuguggggu

SEQ ID NO: 714479 - RNA, 17 nt, Artificial Sequence
  Synthetic
gggaacuguuguggggu

SEQ ID NO: 714480 - RNA, 17 nt, Artificial Sequence
  Synthetic
ggggacuguuguggggu

SEQ ID NO: 714481 - RNA, 17 nt, Artificial Sequence
  Synthetic
ggggccuguuguggggu

SEQ ID NO: 714482 - RNA, 17 nt, Artificial Sequence
  Synthetic
gggaauuaggcaugggu

SEQ ID NO: 714483 - RNA, 17 nt, Artificial Sequence
  Synthetic
gugaccuauaccugggu

SEQ ID NO: 714484 - RNA, 17 nt, Artificial Sequence
  Synthetic
guuccacauggcugggu

SEQ ID NO: 714485 - RNA, 17 nt, Artificial Sequence
  Synthetic
gauaccaaaugcugggu

SEQ ID NO: 714486 - RNA, 17 nt, Artificial Sequence
  Synthetic
gcuucuggcaagugggu

SEQ ID NO: 714487 - RNA, 17 nt, Artificial Sequence
  Synthetic
gauuuaaaacagugggu

SEQ ID NO: 714488 - RNA, 17 nt, Artificial Sequence
  Synthetic
gcgugugagcagugggu

SEQ ID NO: 714489 - RNA, 17 nt, Artificial Sequence
  Synthetic
ggauauuaugagugggu

SEQ ID NO: 714490 - RNA, 17 nt, Artificial Sequence
  Synthetic
gggaggccgaggugggu

SEQ ID NO: 714491 - RNA, 17 nt, Artificial Sequence
  Synthetic
gaaauucuucugugggu

SEQ ID NO: 714492 - RNA, 17 nt, Artificial Sequence
  Synthetic
gugaagaguuugugggu

SEQ ID NO: 714493 - RNA, 17 nt, Artificial Sequence
  Synthetic
gucccucagcauugggu

SEQ ID NO: 714494 - RNA, 17 nt, Artificial Sequence
  Synthetic
gaauuuucagcuugggu

SEQ ID NO: 714495 - RNA, 17 nt, Artificial Sequence
  Synthetic
gccucagggcuuugggu

SEQ ID NO: 714496 - RNA, 17 nt, Artificial Sequence
  Synthetic
ggugaucaacaaauggu

SEQ ID NO: 714497 - RNA, 17 nt, Artificial Sequence
  Synthetic
gucucagccuaaauggu

SEQ ID NO: 714498 - RNA, 17 nt, Artificial Sequence
  Synthetic
gcauguaaugcaauggu

SEQ ID NO: 714499 - RNA, 17 nt, Artificial Sequence
  Synthetic
gucuuacuuucaauggu

SEQ ID NO: 714500 - RNA, 17 nt, Artificial Sequence
  Synthetic
gaugagcuuggaauggu

SEQ ID NO: 714501 - RNA, 17 nt, Artificial Sequence
  Synthetic
gcuuuccaaaacauggu

SEQ ID NO: 714502 - RNA, 17 nt, Artificial Sequence
  Synthetic
guguguccuuacauggu

SEQ ID NO: 714503 - RNA, 17 nt, Artificial Sequence
  Synthetic
gguucuguugccauggu

SEQ ID NO: 714504 - RNA, 17 nt, Artificial Sequence
  Synthetic
gggguagugggcauggu

SEQ ID NO: 714505 - RNA, 17 nt, Artificial Sequence
  Synthetic
gcugggaucugcauggu

SEQ ID NO: 714506 - RNA, 17 nt, Artificial Sequence
  Synthetic
ggccucagaaucauggu

SEQ ID NO: 714507 - RNA, 17 nt, Artificial Sequence
  Synthetic
ggacaaaccaagauggu

SEQ ID NO: 714508 - RNA, 17 nt, Artificial Sequence
  Synthetic
guuuaaauaaugauggu

SEQ ID NO: 714509 - RNA, 17 nt, Artificial Sequence
  Synthetic
guaaauguuaugauggu

SEQ ID NO: 714510 - RNA, 17 nt, Artificial Sequence
  Synthetic
gaucucuuuuguauggu

SEQ ID NO: 714511 - RNA, 17 nt, Artificial Sequence
  Synthetic
gaaccaugucuuauggu

SEQ ID NO: 714512 - RNA, 17 nt, Artificial Sequence
  Synthetic
guugccuaagaacuggu

SEQ ID NO: 714513 - RNA, 17 nt, Artificial Sequence
  Synthetic
ggguuuuuaccacuggu

SEQ ID NO: 714514 - RNA, 17 nt, Artificial Sequence
  Synthetic
ggauuggagccacuggu

SEQ ID NO: 714515 - RNA, 17 nt, Artificial Sequence
  Synthetic
gcugcuuggacccuggu

SEQ ID NO: 714516 - RNA, 17 nt, Artificial Sequence
  Synthetic
gagccaccaugccuggu

SEQ ID NO: 714517 - RNA, 17 nt, Artificial Sequence
  Synthetic
ggaugcuaaaagcuggu

SEQ ID NO: 714518 - RNA, 17 nt, Artificial Sequence
  Synthetic
guaauuggagagcuggu

SEQ ID NO: 714519 - RNA, 17 nt, Artificial Sequence
  Synthetic
ggagaguaacaucuggu

SEQ ID NO: 714520 - RNA, 17 nt, Artificial Sequence
  Synthetic
gcuagugucucucuggu

SEQ ID NO: 714521 - RNA, 17 nt, Artificial Sequence
  Synthetic
guuacagacugucuggu

SEQ ID NO: 714522 - RNA, 17 nt, Artificial Sequence
  Synthetic
gagaagacaagaguggu

SEQ ID NO: 714523 - RNA, 17 nt, Artificial Sequence
  Synthetic
gacuaggguggaguggu

SEQ ID NO: 714524 - RNA, 17 nt, Artificial Sequence
  Synthetic
gaggaauuaauaguggu

SEQ ID NO: 714525 - RNA, 17 nt, Artificial Sequence
  Synthetic
guuuggggggacguggu

SEQ ID NO: 714526 - RNA, 17 nt, Artificial Sequence
  Synthetic
gggaaauaauccguggu

SEQ ID NO: 714527 - RNA, 17 nt, Artificial Sequence
  Synthetic
gagagagaguugguggu

SEQ ID NO: 714528 - RNA, 17 nt, Artificial Sequence
  Synthetic
ggauuuguuccuguggu

SEQ ID NO: 714529 - RNA, 17 nt, Artificial Sequence
  Synthetic
gguuggccaaguguggu

SEQ ID NO: 714530 - RNA, 17 nt, Artificial Sequence
  Synthetic
gggaucaagauuguggu

SEQ ID NO: 714531 - RNA, 17 nt, Artificial Sequence
  Synthetic
gagguuagcuuuguggu

SEQ ID NO: 714532 - RNA, 17 nt, Artificial Sequence
  Synthetic
guagagcucacauuggu

SEQ ID NO: 714533 - RNA, 17 nt, Artificial Sequence
  Synthetic
gguggcuuggacuuggu

SEQ ID NO: 714534 - RNA, 17 nt, Artificial Sequence
  Synthetic
gaagaucauuucuuggu

SEQ ID NO: 714535 - RNA, 17 nt, Artificial Sequence
  Synthetic
guaaggagaagguuggu

SEQ ID NO: 714536 - RNA, 17 nt, Artificial Sequence
  Synthetic
ggcuuuuuuugguuggu

SEQ ID NO: 714537 - RNA, 17 nt, Artificial Sequence
  Synthetic
gcuuuuacacuguuggu

SEQ ID NO: 714538 - RNA, 17 nt, Artificial Sequence
  Synthetic
gcuuauacccuguuggu

SEQ ID NO: 714539 - RNA, 17 nt, Artificial Sequence
  Synthetic
gcuuuaggaaauuuggu

SEQ ID NO: 714540 - RNA, 17 nt, Artificial Sequence
  Synthetic
guccuucuugguuuggu

SEQ ID NO: 714541 - RNA, 17 nt, Artificial Sequence
  Synthetic
gggaggugauuuuuggu

SEQ ID NO: 714542 - RNA, 17 nt, Artificial Sequence
  Synthetic
gcuaagaagaaaaaugu

SEQ ID NO: 714543 - RNA, 17 nt, Artificial Sequence
  Synthetic
gugcagaaggaaaaugu

SEQ ID NO: 714544 - RNA, 17 nt, Artificial Sequence
  Synthetic
guacaccaaucaaaugu

SEQ ID NO: 714545 - RNA, 17 nt, Artificial Sequence
  Synthetic
gugcagaagagaaaugu

SEQ ID NO: 714546 - RNA, 17 nt, Artificial Sequence
  Synthetic
guguggaagggaaaugu

SEQ ID NO: 714547 - RNA, 17 nt, Artificial Sequence
  Synthetic
gacaggcucugaaaugu

SEQ ID NO: 714548 - RNA, 17 nt, Artificial Sequence
  Synthetic
guggaaaacauaaaugu

SEQ ID NO: 714549 - RNA, 17 nt, Artificial Sequence
  Synthetic
gauaaguuaguaaaugu

SEQ ID NO: 714550 - RNA, 17 nt, Artificial Sequence
  Synthetic
gcuuguaaagacaaugu

SEQ ID NO: 714551 - RNA, 17 nt, Artificial Sequence
  Synthetic
gauugucuuggcaaugu

SEQ ID NO: 714552 - RNA, 17 nt, Artificial Sequence
  Synthetic
gucucugcuaucaaugu

SEQ ID NO: 714553 - RNA, 17 nt, Artificial Sequence
  Synthetic
gugaaaaacaauaaugu

SEQ ID NO: 714554 - RNA, 17 nt, Artificial Sequence
  Synthetic
ggcagcaggaauaaugu

SEQ ID NO: 714555 - RNA, 17 nt, Artificial Sequence
  Synthetic
gagaacuucuauaaugu

SEQ ID NO: 714556 - RNA, 17 nt, Artificial Sequence
  Synthetic
guuuuuuguuauaaugu

SEQ ID NO: 714557 - RNA, 17 nt, Artificial Sequence
  Synthetic
guaggcagaacuaaugu

SEQ ID NO: 714558 - RNA, 17 nt, Artificial Sequence
  Synthetic
gacuuuuggguuaaugu

SEQ ID NO: 714559 - RNA, 17 nt, Artificial Sequence
  Synthetic
gaaaaacuugaacaugu

SEQ ID NO: 714560 - RNA, 17 nt, Artificial Sequence
  Synthetic
gcuuucaucacacaugu

SEQ ID NO: 714561 - RNA, 17 nt, Artificial Sequence
  Synthetic
guuuccuguacacaugu

SEQ ID NO: 714562 - RNA, 17 nt, Artificial Sequence
  Synthetic
gacaggguuucacaugu

SEQ ID NO: 714563 - RNA, 17 nt, Artificial Sequence
  Synthetic
gauggucugauacaugu

SEQ ID NO: 714564 - RNA, 17 nt, Artificial Sequence
  Synthetic
gccucugaaguacaugu

SEQ ID NO: 714565 - RNA, 17 nt, Artificial Sequence
  Synthetic
gacgggauucaccaugu

SEQ ID NO: 714566 - RNA, 17 nt, Artificial Sequence
  Synthetic
gacacugggagccaugu

SEQ ID NO: 714567 - RNA, 17 nt, Artificial Sequence
  Synthetic
guauacaugugccaugu

SEQ ID NO: 714568 - RNA, 17 nt, Artificial Sequence
  Synthetic
guauaccugugccaugu

SEQ ID NO: 714569 - RNA, 17 nt, Artificial Sequence
  Synthetic
gcucucguuguccaugu

SEQ ID NO: 714570 - RNA, 17 nt, Artificial Sequence
  Synthetic
gagcaacaacagcaugu

SEQ ID NO: 714571 - RNA, 17 nt, Artificial Sequence
  Synthetic
gccauggcugagcaugu

SEQ ID NO: 714572 - RNA, 17 nt, Artificial Sequence
  Synthetic
gcuucuagugagcaugu

SEQ ID NO: 714573 - RNA, 17 nt, Artificial Sequence
  Synthetic
gguuccaugaugcaugu

SEQ ID NO: 714574 - RNA, 17 nt, Artificial Sequence
  Synthetic
gugugauuggaucaugu

SEQ ID NO: 714575 - RNA, 17 nt, Artificial Sequence
  Synthetic
gucucccuaggucaugu

SEQ ID NO: 714576 - RNA, 17 nt, Artificial Sequence
  Synthetic
gucucacucugucaugu

SEQ ID NO: 714577 - RNA, 17 nt, Artificial Sequence
  Synthetic
gggcaacauuuucaugu

SEQ ID NO: 714578 - RNA, 17 nt, Artificial Sequence
  Synthetic
gcucugcuucaagaugu

SEQ ID NO: 714579 - RNA, 17 nt, Artificial Sequence
  Synthetic
gagaggagggaagaugu

SEQ ID NO: 714580 - RNA, 17 nt, Artificial Sequence
  Synthetic
gacaucuuagcagaugu

SEQ ID NO: 714581 - RNA, 17 nt, Artificial Sequence
  Synthetic
gucccacauucagaugu

SEQ ID NO: 714582 - RNA, 17 nt, Artificial Sequence
  Synthetic
gugcaguaaauagaugu

SEQ ID NO: 714583 - RNA, 17 nt, Artificial Sequence
  Synthetic
ggucuuuauuuagaugu

SEQ ID NO: 714584 - RNA, 17 nt, Artificial Sequence
  Synthetic
gauugacuuggcgaugu

SEQ ID NO: 714585 - RNA, 17 nt, Artificial Sequence
  Synthetic
gaaauuuaaaaggaugu

SEQ ID NO: 714586 - RNA, 17 nt, Artificial Sequence
  Synthetic
guagaauauaaggaugu

SEQ ID NO: 714587 - RNA, 17 nt, Artificial Sequence
  Synthetic
gaauauugaagggaugu

SEQ ID NO: 714588 - RNA, 17 nt, Artificial Sequence
  Synthetic
gcuuaaaaccuggaugu

SEQ ID NO: 714589 - RNA, 17 nt, Artificial Sequence
  Synthetic
gccaggcguguggaugu

SEQ ID NO: 714590 - RNA, 17 nt, Artificial Sequence
  Synthetic
gccuuaagccaugaugu

SEQ ID NO: 714591 - RNA, 17 nt, Artificial Sequence
  Synthetic
gugaaaaccugugaugu

SEQ ID NO: 714592 - RNA, 17 nt, Artificial Sequence
  Synthetic
ggccagcucugugaugu

SEQ ID NO: 714593 - RNA, 17 nt, Artificial Sequence
  Synthetic
gaugaaagugaauaugu

SEQ ID NO: 714594 - RNA, 17 nt, Artificial Sequence
  Synthetic
gaaguaugaacauaugu

SEQ ID NO: 714595 - RNA, 17 nt, Artificial Sequence
  Synthetic
guuguugauagauaugu

SEQ ID NO: 714596 - RNA, 17 nt, Artificial Sequence
  Synthetic
ggaucaaucugauaugu

SEQ ID NO: 714597 - RNA, 17 nt, Artificial Sequence
  Synthetic
gguacauauauauaugu

SEQ ID NO: 714598 - RNA, 17 nt, Artificial Sequence
  Synthetic
gggguauauauauaugu

SEQ ID NO: 714599 - RNA, 17 nt, Artificial Sequence
  Synthetic
ggaugucuauuauaugu

SEQ ID NO: 714600 - RNA, 17 nt, Artificial Sequence
  Synthetic
gacuuccuuuuauaugu

SEQ ID NO: 714601 - RNA, 17 nt, Artificial Sequence
  Synthetic
gggcuaucuaacuaugu

SEQ ID NO: 714602 - RNA, 17 nt, Artificial Sequence
  Synthetic
gauugacuuggcuaugu

SEQ ID NO: 714603 - RNA, 17 nt, Artificial Sequence
  Synthetic
gcucagagaaucuaugu

SEQ ID NO: 714604 - RNA, 17 nt, Artificial Sequence
  Synthetic
gggggcacugucuaugu

SEQ ID NO: 714605 - RNA, 17 nt, Artificial Sequence
  Synthetic
gggagacuugaguaugu

SEQ ID NO: 714606 - RNA, 17 nt, Artificial Sequence
  Synthetic
gcuguauccucguaugu

SEQ ID NO: 714607 - RNA, 17 nt, Artificial Sequence
  Synthetic
gaacuagcuuuguaugu

SEQ ID NO: 714608 - RNA, 17 nt, Artificial Sequence
  Synthetic
gauuggaugaauuaugu

SEQ ID NO: 714609 - RNA, 17 nt, Artificial Sequence
  Synthetic
gucagaauuucuuaugu

SEQ ID NO: 714610 - RNA, 17 nt, Artificial Sequence
  Synthetic
gaagguuuuaguuaugu

SEQ ID NO: 714611 - RNA, 17 nt, Artificial Sequence
  Synthetic
guauuucggcuuuaugu

SEQ ID NO: 714612 - RNA, 17 nt, Artificial Sequence
  Synthetic
gcuuuuuguuuuuaugu

SEQ ID NO: 714613 - RNA, 17 nt, Artificial Sequence
  Synthetic
gcuucagacaaaacugu

SEQ ID NO: 714614 - RNA, 17 nt, Artificial Sequence
  Synthetic
guugagaguagaacugu

SEQ ID NO: 714615 - RNA, 17 nt, Artificial Sequence
  Synthetic
guuccuucuuuaacugu

SEQ ID NO: 714616 - RNA, 17 nt, Artificial Sequence
  Synthetic
gaaggggcucacacugu

SEQ ID NO: 714617 - RNA, 17 nt, Artificial Sequence
  Synthetic
gaacacuucuacacugu

SEQ ID NO: 714618 - RNA, 17 nt, Artificial Sequence
  Synthetic
ggacuccuguacacugu

SEQ ID NO: 714619 - RNA, 17 nt, Artificial Sequence
  Synthetic
gaacacucuuacacugu

SEQ ID NO: 714620 - RNA, 17 nt, Artificial Sequence
  Synthetic
gaacacuuuuacacugu

SEQ ID NO: 714621 - RNA, 17 nt, Artificial Sequence
  Synthetic
gaacgcuuuuacacugu

SEQ ID NO: 714622 - RNA, 17 nt, Artificial Sequence
  Synthetic
gugugcuuuuacacugu

SEQ ID NO: 714623 - RNA, 17 nt, Artificial Sequence
  Synthetic
gaacucuuuuacacugu

SEQ ID NO: 714624 - RNA, 17 nt, Artificial Sequence
  Synthetic
ggauggcucaccacugu

SEQ ID NO: 714625 - RNA, 17 nt, Artificial Sequence
  Synthetic
gacauucuaggcacugu

SEQ ID NO: 714626 - RNA, 17 nt, Artificial Sequence
  Synthetic
gaacccuuaugcacugu

SEQ ID NO: 714627 - RNA, 17 nt, Artificial Sequence
  Synthetic
gauuggucuuucacugu

SEQ ID NO: 714628 - RNA, 17 nt, Artificial Sequence
  Synthetic
gauaaggccaagacugu

SEQ ID NO: 714629 - RNA, 17 nt, Artificial Sequence
  Synthetic
gucagcagcaggacugu

SEQ ID NO: 714630 - RNA, 17 nt, Artificial Sequence
  Synthetic
gcccaguucaggacugu

SEQ ID NO: 714631 - RNA, 17 nt, Artificial Sequence
  Synthetic
guuguagcagauacugu

SEQ ID NO: 714632 - RNA, 17 nt, Artificial Sequence
  Synthetic
gaacccuuguauacugu

SEQ ID NO: 714633 - RNA, 17 nt, Artificial Sequence
  Synthetic
guguauucugcuacugu

SEQ ID NO: 714634 - RNA, 17 nt, Artificial Sequence
  Synthetic
gguagaaaucuuacugu

SEQ ID NO: 714635 - RNA, 17 nt, Artificial Sequence
  Synthetic
gucacuuuuguuacugu

SEQ ID NO: 714636 - RNA, 17 nt, Artificial Sequence
  Synthetic
gcuuaacuucaaccugu

SEQ ID NO: 714637 - RNA, 17 nt, Artificial Sequence
  Synthetic
gcuuauagaucaccugu

SEQ ID NO: 714638 - RNA, 17 nt, Artificial Sequence
  Synthetic
guggaguuucacccugu

SEQ ID NO: 714639 - RNA, 17 nt, Artificial Sequence
  Synthetic
gaaugcuuauacccugu

SEQ ID NO: 714640 - RNA, 17 nt, Artificial Sequence
  Synthetic
guaagcuccaccccugu

SEQ ID NO: 714641 - RNA, 17 nt, Artificial Sequence
  Synthetic
gauucuaagugcccugu

SEQ ID NO: 714642 - RNA, 17 nt, Artificial Sequence
  Synthetic
gguugaguguggccugu

SEQ ID NO: 714643 - RNA, 17 nt, Artificial Sequence
  Synthetic
gaguugccacugccugu

SEQ ID NO: 714644 - RNA, 17 nt, Artificial Sequence
  Synthetic
guccuuucucugccugu

SEQ ID NO: 714645 - RNA, 17 nt, Artificial Sequence
  Synthetic
gccacucaucauccugu

SEQ ID NO: 714646 - RNA, 17 nt, Artificial Sequence
  Synthetic
guuucucauucuccugu

SEQ ID NO: 714647 - RNA, 17 nt, Artificial Sequence
  Synthetic
gguccuucggguccugu

SEQ ID NO: 714648 - RNA, 17 nt, Artificial Sequence
  Synthetic
gcugcaaaacuuccugu

SEQ ID NO: 714649 - RNA, 17 nt, Artificial Sequence
  Synthetic
gagaaauuuacagcugu

SEQ ID NO: 714650 - RNA, 17 nt, Artificial Sequence
  Synthetic
ggggaaggggcagcugu

SEQ ID NO: 714651 - RNA, 17 nt, Artificial Sequence
  Synthetic
gugaacugggcagcugu

SEQ ID NO: 714652 - RNA, 17 nt, Artificial Sequence
  Synthetic
guaaacacuucagcugu

SEQ ID NO: 714653 - RNA, 17 nt, Artificial Sequence
  Synthetic
guuuaccaucuagcugu

SEQ ID NO: 714654 - RNA, 17 nt, Artificial Sequence
  Synthetic
ggaacauuauacgcugu

SEQ ID NO: 714655 - RNA, 17 nt, Artificial Sequence
  Synthetic
gagcuacccaaggcugu

SEQ ID NO: 714656 - RNA, 17 nt, Artificial Sequence
  Synthetic
gagaagaccugggcugu

SEQ ID NO: 714657 - RNA, 17 nt, Artificial Sequence
  Synthetic
ggggaagucagugcugu

SEQ ID NO: 714658 - RNA, 17 nt, Artificial Sequence
  Synthetic
gaugaagagggugcugu

SEQ ID NO: 714659 - RNA, 17 nt, Artificial Sequence
  Synthetic
gaaugugcuggugcugu

SEQ ID NO: 714660 - RNA, 17 nt, Artificial Sequence
  Synthetic
ggaggcgauugugcugu

SEQ ID NO: 714661 - RNA, 17 nt, Artificial Sequence
  Synthetic
gauauaucaaaaucugu

SEQ ID NO: 714662 - RNA, 17 nt, Artificial Sequence
  Synthetic
gguuagagagaaucugu

SEQ ID NO: 714663 - RNA, 17 nt, Artificial Sequence
  Synthetic
gguguuuucucaucugu

SEQ ID NO: 714664 - RNA, 17 nt, Artificial Sequence
  Synthetic
guccuggccauaucugu

SEQ ID NO: 714665 - RNA, 17 nt, Artificial Sequence
  Synthetic
guuuaccccuuaucugu

SEQ ID NO: 714666 - RNA, 17 nt, Artificial Sequence
  Synthetic
gggauguuguuaucugu

SEQ ID NO: 714667 - RNA, 17 nt, Artificial Sequence
  Synthetic
gcuucugcgcccucugu

SEQ ID NO: 714668 - RNA, 17 nt, Artificial Sequence
  Synthetic
gccucacuguccucugu

SEQ ID NO: 714669 - RNA, 17 nt, Artificial Sequence
  Synthetic
ggccauuuggucucugu

SEQ ID NO: 714670 - RNA, 17 nt, Artificial Sequence
  Synthetic
gaaacaacauucucugu

SEQ ID NO: 714671 - RNA, 17 nt, Artificial Sequence
  Synthetic
guuuucucucauucugu

SEQ ID NO: 714672 - RNA, 17 nt, Artificial Sequence
  Synthetic
gccuguauaacuucugu

SEQ ID NO: 714673 - RNA, 17 nt, Artificial Sequence
  Synthetic
ggaaagugcucuucugu

SEQ ID NO: 714674 - RNA, 17 nt, Artificial Sequence
  Synthetic
ggcuacaucaguucugu

SEQ ID NO: 714675 - RNA, 17 nt, Artificial Sequence
  Synthetic
gucuuucuaauuucugu

SEQ ID NO: 714676 - RNA, 17 nt, Artificial Sequence
  Synthetic
guaguuuguauuucugu

SEQ ID NO: 714677 - RNA, 17 nt, Artificial Sequence
  Synthetic
gaagacaaagaaagugu

SEQ ID NO: 714678 - RNA, 17 nt, Artificial Sequence
  Synthetic
ggaaagugggaaagugu

SEQ ID NO: 714679 - RNA, 17 nt, Artificial Sequence
  Synthetic
gguccuauggaaagugu

SEQ ID NO: 714680 - RNA, 17 nt, Artificial Sequence
  Synthetic
gauuaaaaugaaagugu

SEQ ID NO: 714681 - RNA, 17 nt, Artificial Sequence
  Synthetic
gugaucuccacaagugu

SEQ ID NO: 714682 - RNA, 17 nt, Artificial Sequence
  Synthetic
gaugacuuuucaagugu

SEQ ID NO: 714683 - RNA, 17 nt, Artificial Sequence
  Synthetic
gauuguaacaacagugu

SEQ ID NO: 714684 - RNA, 17 nt, Artificial Sequence
  Synthetic
ggcaucccugccagugu

SEQ ID NO: 714685 - RNA, 17 nt, Artificial Sequence
  Synthetic
gggggugauggcagugu

SEQ ID NO: 714686 - RNA, 17 nt, Artificial Sequence
  Synthetic
gucccugaaaagagugu

SEQ ID NO: 714687 - RNA, 17 nt, Artificial Sequence
  Synthetic
gaggcugggaagagugu

SEQ ID NO: 714688 - RNA, 17 nt, Artificial Sequence
  Synthetic
gcuaauggcuaccgugu

SEQ ID NO: 714689 - RNA, 17 nt, Artificial Sequence
  Synthetic
gagugccuaauucgugu

SEQ ID NO: 714690 - RNA, 17 nt, Artificial Sequence
  Synthetic
gaaggcagagcaggugu

SEQ ID NO: 714691 - RNA, 17 nt, Artificial Sequence
  Synthetic
ggcugcacacuaggugu

SEQ ID NO: 714692 - RNA, 17 nt, Artificial Sequence
  Synthetic
gccaggagucuaggugu

SEQ ID NO: 714693 - RNA, 17 nt, Artificial Sequence
  Synthetic
gauuugucugggggugu

SEQ ID NO: 714694 - RNA, 17 nt, Artificial Sequence
  Synthetic
ggacgcagguggggugu

SEQ ID NO: 714695 - RNA, 17 nt, Artificial Sequence
  Synthetic
ggugugggacguggugu

SEQ ID NO: 714696 - RNA, 17 nt, Artificial Sequence
  Synthetic
ggagguggggguggugu

SEQ ID NO: 714697 - RNA, 17 nt, Artificial Sequence
  Synthetic
gcuuccuuccgaugugu

SEQ ID NO: 714698 - RNA, 17 nt, Artificial Sequence
  Synthetic
gauaaaaggauaugugu

SEQ ID NO: 714699 - RNA, 17 nt, Artificial Sequence
  Synthetic
gcauugucaguaugugu

SEQ ID NO: 714700 - RNA, 17 nt, Artificial Sequence
  Synthetic
gcagccuuucccugugu

SEQ ID NO: 714701 - RNA, 17 nt, Artificial Sequence
  Synthetic
gggaaaacauucugugu

SEQ ID NO: 714702 - RNA, 17 nt, Artificial Sequence
  Synthetic
gcaaaaccuucgugugu

SEQ ID NO: 714703 - RNA, 17 nt, Artificial Sequence
  Synthetic
gccaauuacaugugugu

SEQ ID NO: 714704 - RNA, 17 nt, Artificial Sequence
  Synthetic
guguuggaugugugugu

SEQ ID NO: 714705 - RNA, 17 nt, Artificial Sequence
  Synthetic
gccuccauucauugugu

SEQ ID NO: 714706 - RNA, 17 nt, Artificial Sequence
  Synthetic
ggcauugcaguuugugu

SEQ ID NO: 714707 - RNA, 17 nt, Artificial Sequence
  Synthetic
guuuauagguuuugugu

SEQ ID NO: 714708 - RNA, 17 nt, Artificial Sequence
  Synthetic
gagagugaggaaauugu

SEQ ID NO: 714709 - RNA, 17 nt, Artificial Sequence
  Synthetic
gaggcgugauuaauugu

SEQ ID NO: 714710 - RNA, 17 nt, Artificial Sequence
  Synthetic
gaaaaacuguuaauugu

SEQ ID NO: 714711 - RNA, 17 nt, Artificial Sequence
  Synthetic
gcaagccucaccauugu

SEQ ID NO: 714712 - RNA, 17 nt, Artificial Sequence
  Synthetic
gaucgcucuaccauugu

SEQ ID NO: 714713 - RNA, 17 nt, Artificial Sequence
  Synthetic
gcuauccuaugcauugu

SEQ ID NO: 714714 - RNA, 17 nt, Artificial Sequence
  Synthetic
guuuguugcugcauugu

SEQ ID NO: 714715 - RNA, 17 nt, Artificial Sequence
  Synthetic
gcuauccucugcauugu

SEQ ID NO: 714716 - RNA, 17 nt, Artificial Sequence
  Synthetic
gcuguccugugcauugu

SEQ ID NO: 714717 - RNA, 17 nt, Artificial Sequence
  Synthetic
guuguacaagucauugu

SEQ ID NO: 714718 - RNA, 17 nt, Artificial Sequence
  Synthetic
gauauaauucauauugu

SEQ ID NO: 714719 - RNA, 17 nt, Artificial Sequence
  Synthetic
gcuucuuuagauauugu

SEQ ID NO: 714720 - RNA, 17 nt, Artificial Sequence
  Synthetic
gaaagccauuauauugu

SEQ ID NO: 714721 - RNA, 17 nt, Artificial Sequence
  Synthetic
guccuguguacuauugu

SEQ ID NO: 714722 - RNA, 17 nt, Artificial Sequence
  Synthetic
gcuuugguaaaacuugu

SEQ ID NO: 714723 - RNA, 17 nt, Artificial Sequence
  Synthetic
gcccagaccauacuugu

SEQ ID NO: 714724 - RNA, 17 nt, Artificial Sequence
  Synthetic
gaagucccuuaccuugu

SEQ ID NO: 714725 - RNA, 17 nt, Artificial Sequence
  Synthetic
guguuaccuacccuugu

SEQ ID NO: 714726 - RNA, 17 nt, Artificial Sequence
  Synthetic
gugguaguuucccuugu

SEQ ID NO: 714727 - RNA, 17 nt, Artificial Sequence
  Synthetic
gcucuucucuuccuugu

SEQ ID NO: 714728 - RNA, 17 nt, Artificial Sequence
  Synthetic
gauuaaauuuagcuugu

SEQ ID NO: 714729 - RNA, 17 nt, Artificial Sequence
  Synthetic
gaaaauuagaugcuugu

SEQ ID NO: 714730 - RNA, 17 nt, Artificial Sequence
  Synthetic
ggcacacagccucuugu

SEQ ID NO: 714731 - RNA, 17 nt, Artificial Sequence
  Synthetic
ggauaauuauuucuugu

SEQ ID NO: 714732 - RNA, 17 nt, Artificial Sequence
  Synthetic
guugaugggagaguugu

SEQ ID NO: 714733 - RNA, 17 nt, Artificial Sequence
  Synthetic
gaguucauguccguugu

SEQ ID NO: 714734 - RNA, 17 nt, Artificial Sequence
  Synthetic
gaaacauagaucguugu

SEQ ID NO: 714735 - RNA, 17 nt, Artificial Sequence
  Synthetic
ggggcgggugggguugu

SEQ ID NO: 714736 - RNA, 17 nt, Artificial Sequence
  Synthetic
gaauuccuacauguugu

SEQ ID NO: 714737 - RNA, 17 nt, Artificial Sequence
  Synthetic
ggauauuacaguguugu

SEQ ID NO: 714738 - RNA, 17 nt, Artificial Sequence
  Synthetic
ggaggaagguuuguugu

SEQ ID NO: 714739 - RNA, 17 nt, Artificial Sequence
  Synthetic
guaugauugacauuugu

SEQ ID NO: 714740 - RNA, 17 nt, Artificial Sequence
  Synthetic
gagacauguacauuugu

SEQ ID NO: 714741 - RNA, 17 nt, Artificial Sequence
  Synthetic
gaauccuugcuauuugu

SEQ ID NO: 714742 - RNA, 17 nt, Artificial Sequence
  Synthetic
gcuaaauacuuauuugu

SEQ ID NO: 714743 - RNA, 17 nt, Artificial Sequence
  Synthetic
gagauggcaaacuuugu

SEQ ID NO: 714744 - RNA, 17 nt, Artificial Sequence
  Synthetic
gugguguugaccuuugu

SEQ ID NO: 714745 - RNA, 17 nt, Artificial Sequence
  Synthetic
gaugggcuucccuuugu

SEQ ID NO: 714746 - RNA, 17 nt, Artificial Sequence
  Synthetic
gaguucacauccuuugu

SEQ ID NO: 714747 - RNA, 17 nt, Artificial Sequence
  Synthetic
gaguucaaguccuuugu

SEQ ID NO: 714748 - RNA, 17 nt, Artificial Sequence
  Synthetic
gaguucacguccuuugu

SEQ ID NO: 714749 - RNA, 17 nt, Artificial Sequence
  Synthetic
gaguucauguccuuugu

SEQ ID NO: 714750 - RNA, 17 nt, Artificial Sequence
  Synthetic
gggguaguaagcuuugu

SEQ ID NO: 714751 - RNA, 17 nt, Artificial Sequence
  Synthetic
gcuuaaagcugcuuugu

SEQ ID NO: 714752 - RNA, 17 nt, Artificial Sequence
  Synthetic
gugauuucuugcuuugu

SEQ ID NO: 714753 - RNA, 17 nt, Artificial Sequence
  Synthetic
gauaaaacuuucuuugu

SEQ ID NO: 714754 - RNA, 17 nt, Artificial Sequence
  Synthetic
guugcaaaggaguuugu

SEQ ID NO: 714755 - RNA, 17 nt, Artificial Sequence
  Synthetic
gacuuuuuuugguuugu

SEQ ID NO: 714756 - RNA, 17 nt, Artificial Sequence
  Synthetic
gucuacuacauguuugu

SEQ ID NO: 714757 - RNA, 17 nt, Artificial Sequence
  Synthetic
gacaaucccaguuuugu

SEQ ID NO: 714758 - RNA, 17 nt, Artificial Sequence
  Synthetic
gguggcgaugguuuugu

SEQ ID NO: 714759 - RNA, 17 nt, Artificial Sequence
  Synthetic
gaauuuaguuuuuuugu

SEQ ID NO: 714760 - RNA, 17 nt, Artificial Sequence
  Synthetic
gaccuggguuuuuuugu

SEQ ID NO: 714761 - RNA, 17 nt, Artificial Sequence
  Synthetic
ggaacagaaaaaaaauu

SEQ ID NO: 714762 - RNA, 17 nt, Artificial Sequence
  Synthetic
gaauuccuuaaaaaauu

SEQ ID NO: 714763 - RNA, 17 nt, Artificial Sequence
  Synthetic
ggaaaagcccaaaaauu

SEQ ID NO: 714764 - RNA, 17 nt, Artificial Sequence
  Synthetic
ggcaauugucaaaaauu

SEQ ID NO: 714765 - RNA, 17 nt, Artificial Sequence
  Synthetic
gaggucaacacaaaauu

SEQ ID NO: 714766 - RNA, 17 nt, Artificial Sequence
  Synthetic
guuucaagcacaaaauu

SEQ ID NO: 714767 - RNA, 17 nt, Artificial Sequence
  Synthetic
gaauaugaaucaaaauu

SEQ ID NO: 714768 - RNA, 17 nt, Artificial Sequence
  Synthetic
gugagcagaucaaaauu

SEQ ID NO: 714769 - RNA, 17 nt, Artificial Sequence
  Synthetic
gaaaaaauuauaaaauu

SEQ ID NO: 714770 - RNA, 17 nt, Artificial Sequence
  Synthetic
gaaagauggcuaaaauu

SEQ ID NO: 714771 - RNA, 17 nt, Artificial Sequence
  Synthetic
ggauacacucuaaaauu

SEQ ID NO: 714772 - RNA, 17 nt, Artificial Sequence
  Synthetic
gauaaacaacacaaauu

SEQ ID NO: 714773 - RNA, 17 nt, Artificial Sequence
  Synthetic
ggccugauggagaaauu

SEQ ID NO: 714774 - RNA, 17 nt, Artificial Sequence
  Synthetic
guguuuaacuagaaauu

SEQ ID NO: 714775 - RNA, 17 nt, Artificial Sequence
  Synthetic
ggaguuaccaugaaauu

SEQ ID NO: 714776 - RNA, 17 nt, Artificial Sequence
  Synthetic
gggaaggaauugaaauu

SEQ ID NO: 714777 - RNA, 17 nt, Artificial Sequence
  Synthetic
gacacuugauugaaauu

SEQ ID NO: 714778 - RNA, 17 nt, Artificial Sequence
  Synthetic
gucuuuuauuugaaauu

SEQ ID NO: 714779 - RNA, 17 nt, Artificial Sequence
  Synthetic
gccuuguaaaauaaauu

SEQ ID NO: 714780 - RNA, 17 nt, Artificial Sequence
  Synthetic
gaccuuucaaauaaauu

SEQ ID NO: 714781 - RNA, 17 nt, Artificial Sequence
  Synthetic
ggaagacaagauaaauu

SEQ ID NO: 714782 - RNA, 17 nt, Artificial Sequence
  Synthetic
ggaacauguaguaaauu

SEQ ID NO: 714783 - RNA, 17 nt, Artificial Sequence
  Synthetic
gggggaugauguaaauu

SEQ ID NO: 714784 - RNA, 17 nt, Artificial Sequence
  Synthetic
guuuggcaaauuaaauu

SEQ ID NO: 714785 - RNA, 17 nt, Artificial Sequence
  Synthetic
gcuuuuuuucuuaaauu

SEQ ID NO: 714786 - RNA, 17 nt, Artificial Sequence
  Synthetic
gcagcugcagaacaauu

SEQ ID NO: 714787 - RNA, 17 nt, Artificial Sequence
  Synthetic
guaaucuuugaacaauu

SEQ ID NO: 714788 - RNA, 17 nt, Artificial Sequence
  Synthetic
gucucucaaauacaauu

SEQ ID NO: 714789 - RNA, 17 nt, Artificial Sequence
  Synthetic
gauaaaguacuacaauu

SEQ ID NO: 714790 - RNA, 17 nt, Artificial Sequence
  Synthetic
ggugauuuauuacaauu

SEQ ID NO: 714791 - RNA, 17 nt, Artificial Sequence
  Synthetic
guuauauauuuacaauu

SEQ ID NO: 714792 - RNA, 17 nt, Artificial Sequence
  Synthetic
gccaagccuaaccaauu

SEQ ID NO: 714793 - RNA, 17 nt, Artificial Sequence
  Synthetic
gcagauauucuccaauu

SEQ ID NO: 714794 - RNA, 17 nt, Artificial Sequence
  Synthetic
gucaauauguuccaauu

SEQ ID NO: 714795 - RNA, 17 nt, Artificial Sequence
  Synthetic
gaauaugccaagcaauu

SEQ ID NO: 714796 - RNA, 17 nt, Artificial Sequence
  Synthetic
gauuuauaucagcaauu

SEQ ID NO: 714797 - RNA, 17 nt, Artificial Sequence
  Synthetic
gagucuguagaucaauu

SEQ ID NO: 714798 - RNA, 17 nt, Artificial Sequence
  Synthetic
gcccauuugccucaauu

SEQ ID NO: 714799 - RNA, 17 nt, Artificial Sequence
  Synthetic
gcacucagaugucaauu

SEQ ID NO: 714800 - RNA, 17 nt, Artificial Sequence
  Synthetic
gauauucauauucaauu

SEQ ID NO: 714801 - RNA, 17 nt, Artificial Sequence
  Synthetic
gggagagguaaagaauu

SEQ ID NO: 714802 - RNA, 17 nt, Artificial Sequence
  Synthetic
gaacugaaagaagaauu

SEQ ID NO: 714803 - RNA, 17 nt, Artificial Sequence
  Synthetic
gaagguuuuuaagaauu

SEQ ID NO: 714804 - RNA, 17 nt, Artificial Sequence
  Synthetic
guagaauucacagaauu

SEQ ID NO: 714805 - RNA, 17 nt, Artificial Sequence
  Synthetic
gaaggaacaucagaauu

SEQ ID NO: 714806 - RNA, 17 nt, Artificial Sequence
  Synthetic
gugagaaauggagaauu

SEQ ID NO: 714807 - RNA, 17 nt, Artificial Sequence
  Synthetic
gagacuuuuggagaauu

SEQ ID NO: 714808 - RNA, 17 nt, Artificial Sequence
  Synthetic
gaaaugaggauagaauu

SEQ ID NO: 714809 - RNA, 17 nt, Artificial Sequence
  Synthetic
gcaccucugguagaauu

SEQ ID NO: 714810 - RNA, 17 nt, Artificial Sequence
  Synthetic
guaccucugguagaauu

SEQ ID NO: 714811 - RNA, 17 nt, Artificial Sequence
  Synthetic
gguaaagacgaggaauu

SEQ ID NO: 714812 - RNA, 17 nt, Artificial Sequence
  Synthetic
gacuaauuguaggaauu

SEQ ID NO: 714813 - RNA, 17 nt, Artificial Sequence
  Synthetic
gguuuggagugggaauu

SEQ ID NO: 714814 - RNA, 17 nt, Artificial Sequence
  Synthetic
guggugaguugggaauu

SEQ ID NO: 714815 - RNA, 17 nt, Artificial Sequence
  Synthetic
guccugucaguggaauu

SEQ ID NO: 714816 - RNA, 17 nt, Artificial Sequence
  Synthetic
gccaaauaaaaugaauu

SEQ ID NO: 714817 - RNA, 17 nt, Artificial Sequence
  Synthetic
gaauagauagaugaauu

SEQ ID NO: 714818 - RNA, 17 nt, Artificial Sequence
  Synthetic
guugaguuaauugaauu

SEQ ID NO: 714819 - RNA, 17 nt, Artificial Sequence
  Synthetic
gauaauuuacuugaauu

SEQ ID NO: 714820 - RNA, 17 nt, Artificial Sequence
  Synthetic
guaacauuucaauaauu

SEQ ID NO: 714821 - RNA, 17 nt, Artificial Sequence
  Synthetic
guaagcacaccauaauu

SEQ ID NO: 714822 - RNA, 17 nt, Artificial Sequence
  Synthetic
gguugugagucauaauu

SEQ ID NO: 714823 - RNA, 17 nt, Artificial Sequence
  Synthetic
gggccauauguauaauu

SEQ ID NO: 714824 - RNA, 17 nt, Artificial Sequence
  Synthetic
gaugacauguuauaauu

SEQ ID NO: 714825 - RNA, 17 nt, Artificial Sequence
  Synthetic
gccuaaccugacuaauu

SEQ ID NO: 714826 - RNA, 17 nt, Artificial Sequence
  Synthetic
gcaauagccuacuaauu

SEQ ID NO: 714827 - RNA, 17 nt, Artificial Sequence
  Synthetic
ggauuugaagccuaauu

SEQ ID NO: 714828 - RNA, 17 nt, Artificial Sequence
  Synthetic
gcaauuuucagcuaauu

SEQ ID NO: 714829 - RNA, 17 nt, Artificial Sequence
  Synthetic
gagcaaauaggcuaauu

SEQ ID NO: 714830 - RNA, 17 nt, Artificial Sequence
  Synthetic
gaagacuuuggcuaauu

SEQ ID NO: 714831 - RNA, 17 nt, Artificial Sequence
  Synthetic
gucuuacaagucuaauu

SEQ ID NO: 714832 - RNA, 17 nt, Artificial Sequence
  Synthetic
ggacuaauacaguaauu

SEQ ID NO: 714833 - RNA, 17 nt, Artificial Sequence
  Synthetic
gagaggagagaguaauu

SEQ ID NO: 714834 - RNA, 17 nt, Artificial Sequence
  Synthetic
gccuuuggaagguaauu

SEQ ID NO: 714835 - RNA, 17 nt, Artificial Sequence
  Synthetic
guaucuauaagguaauu

SEQ ID NO: 714836 - RNA, 17 nt, Artificial Sequence
  Synthetic
gauccuauuggguaauu

SEQ ID NO: 714837 - RNA, 17 nt, Artificial Sequence
  Synthetic
gggauuuggcuguaauu

SEQ ID NO: 714838 - RNA, 17 nt, Artificial Sequence
  Synthetic
gaaucuguaaauuaauu

SEQ ID NO: 714839 - RNA, 17 nt, Artificial Sequence
  Synthetic
gaacuccugccuuaauu

SEQ ID NO: 714840 - RNA, 17 nt, Artificial Sequence
  Synthetic
gaaaauguaauuuaauu

SEQ ID NO: 714841 - RNA, 17 nt, Artificial Sequence
  Synthetic
gucaguuccauuuaauu

SEQ ID NO: 714842 - RNA, 17 nt, Artificial Sequence
  Synthetic
gucugugucuuuuaauu

SEQ ID NO: 714843 - RNA, 17 nt, Artificial Sequence
  Synthetic
guacuucaguuuuaauu

SEQ ID NO: 714844 - RNA, 17 nt, Artificial Sequence
  Synthetic
gauaugucguuuuaauu

SEQ ID NO: 714845 - RNA, 17 nt, Artificial Sequence
  Synthetic
gcaccuagaaaaacauu

SEQ ID NO: 714846 - RNA, 17 nt, Artificial Sequence
  Synthetic
guuagaagcuaaacauu

SEQ ID NO: 714847 - RNA, 17 nt, Artificial Sequence
  Synthetic
gccccaccaccaacauu

SEQ ID NO: 714848 - RNA, 17 nt, Artificial Sequence
  Synthetic
gccccaccuccaacauu

SEQ ID NO: 714849 - RNA, 17 nt, Artificial Sequence
  Synthetic
gaaguaaaaagaacauu

SEQ ID NO: 714850 - RNA, 17 nt, Artificial Sequence
  Synthetic
gcauguacgauaacauu

SEQ ID NO: 714851 - RNA, 17 nt, Artificial Sequence
  Synthetic
gcuuuuauuauaacauu

SEQ ID NO: 714852 - RNA, 17 nt, Artificial Sequence
  Synthetic
gaagggaauuuaacauu

SEQ ID NO: 714853 - RNA, 17 nt, Artificial Sequence
  Synthetic
ggcuugagauacacauu

SEQ ID NO: 714854 - RNA, 17 nt, Artificial Sequence
  Synthetic
guagcuauaagcacauu

SEQ ID NO: 714855 - RNA, 17 nt, Artificial Sequence
  Synthetic
gaaaaaagguucacauu

SEQ ID NO: 714856 - RNA, 17 nt, Artificial Sequence
  Synthetic
gagauggcagagacauu

SEQ ID NO: 714857 - RNA, 17 nt, Artificial Sequence
  Synthetic
gaaggaaaggagacauu

SEQ ID NO: 714858 - RNA, 17 nt, Artificial Sequence
  Synthetic
gcuccccaagggacauu

SEQ ID NO: 714859 - RNA, 17 nt, Artificial Sequence
  Synthetic
gcuaaucaauggacauu

SEQ ID NO: 714860 - RNA, 17 nt, Artificial Sequence
  Synthetic
guacaguuacauacauu

SEQ ID NO: 714861 - RNA, 17 nt, Artificial Sequence
  Synthetic
ggcauaaacacuacauu

SEQ ID NO: 714862 - RNA, 17 nt, Artificial Sequence
  Synthetic
gggugagccaguacauu

SEQ ID NO: 714863 - RNA, 17 nt, Artificial Sequence
  Synthetic
gaguaaugaauuacauu

SEQ ID NO: 714864 - RNA, 17 nt, Artificial Sequence
  Synthetic
ggcucaugcauuacauu

SEQ ID NO: 714865 - RNA, 17 nt, Artificial Sequence
  Synthetic
ggcugaugguuuacauu

SEQ ID NO: 714866 - RNA, 17 nt, Artificial Sequence
  Synthetic
ggauuuuucaaaccauu

SEQ ID NO: 714867 - RNA, 17 nt, Artificial Sequence
  Synthetic
gcaaagaggcaaccauu

SEQ ID NO: 714868 - RNA, 17 nt, Artificial Sequence
  Synthetic
gcaugaagucaaccauu

SEQ ID NO: 714869 - RNA, 17 nt, Artificial Sequence
  Synthetic
gaugggguuucaccauu

SEQ ID NO: 714870 - RNA, 17 nt, Artificial Sequence
  Synthetic
gaaguagugagaccauu

SEQ ID NO: 714871 - RNA, 17 nt, Artificial Sequence
  Synthetic
gagugccuucuaccauu

SEQ ID NO: 714872 - RNA, 17 nt, Artificial Sequence
  Synthetic
gucuuuuucuccccauu

SEQ ID NO: 714873 - RNA, 17 nt, Artificial Sequence
  Synthetic
ggccaauuucucccauu

SEQ ID NO: 714874 - RNA, 17 nt, Artificial Sequence
  Synthetic
guaugucuaaagccauu

SEQ ID NO: 714875 - RNA, 17 nt, Artificial Sequence
  Synthetic
gaacaucuuaauccauu

SEQ ID NO: 714876 - RNA, 17 nt, Artificial Sequence
  Synthetic
gaauagagaauuccauu

SEQ ID NO: 714877 - RNA, 17 nt, Artificial Sequence
  Synthetic
gccuuuuuacuuccauu

SEQ ID NO: 714878 - RNA, 17 nt, Artificial Sequence
  Synthetic
gggggagggacagcauu

SEQ ID NO: 714879 - RNA, 17 nt, Artificial Sequence
  Synthetic
gcggccuugccagcauu

SEQ ID NO: 714880 - RNA, 17 nt, Artificial Sequence
  Synthetic
gucugauuugcagcauu

SEQ ID NO: 714881 - RNA, 17 nt, Artificial Sequence
  Synthetic
gucugucccucagcauu

SEQ ID NO: 714882 - RNA, 17 nt, Artificial Sequence
  Synthetic
gucccgaagugagcauu

SEQ ID NO: 714883 - RNA, 17 nt, Artificial Sequence
  Synthetic
gggggagggauagcauu

SEQ ID NO: 714884 - RNA, 17 nt, Artificial Sequence
  Synthetic
gguggagggauagcauu

SEQ ID NO: 714885 - RNA, 17 nt, Artificial Sequence
  Synthetic
gcucaucauuuagcauu

SEQ ID NO: 714886 - RNA, 17 nt, Artificial Sequence
  Synthetic
gggaaaggagacgcauu

SEQ ID NO: 714887 - RNA, 17 nt, Artificial Sequence
  Synthetic
ggcaaaucuggggcauu

SEQ ID NO: 714888 - RNA, 17 nt, Artificial Sequence
  Synthetic
gucgauugaugggcauu

SEQ ID NO: 714889 - RNA, 17 nt, Artificial Sequence
  Synthetic
gagcucaauugggcauu

SEQ ID NO: 714890 - RNA, 17 nt, Artificial Sequence
  Synthetic
gagcucaucauggcauu

SEQ ID NO: 714891 - RNA, 17 nt, Artificial Sequence
  Synthetic
gggggagggauggcauu

SEQ ID NO: 714892 - RNA, 17 nt, Artificial Sequence
  Synthetic
gacauugugcuggcauu

SEQ ID NO: 714893 - RNA, 17 nt, Artificial Sequence
  Synthetic
guauaaauuuuggcauu

SEQ ID NO: 714894 - RNA, 17 nt, Artificial Sequence
  Synthetic
gaaucuccuacugcauu

SEQ ID NO: 714895 - RNA, 17 nt, Artificial Sequence
  Synthetic
gauaucaggauugcauu

SEQ ID NO: 714896 - RNA, 17 nt, Artificial Sequence
  Synthetic
gcuucuauucuugcauu

SEQ ID NO: 714897 - RNA, 17 nt, Artificial Sequence
  Synthetic
gaaacuucgaaaucauu

SEQ ID NO: 714898 - RNA, 17 nt, Artificial Sequence
  Synthetic
gcauuggaagaaucauu

SEQ ID NO: 714899 - RNA, 17 nt, Artificial Sequence
  Synthetic
gaggaguugugaucauu

SEQ ID NO: 714900 - RNA, 17 nt, Artificial Sequence
  Synthetic
gaguuaguuugaucauu

SEQ ID NO: 714901 - RNA, 17 nt, Artificial Sequence
  Synthetic
guaagaggaauaucauu

SEQ ID NO: 714902 - RNA, 17 nt, Artificial Sequence
  Synthetic
guccuauacagcucauu

SEQ ID NO: 714903 - RNA, 17 nt, Artificial Sequence
  Synthetic
gguacagauagcucauu

SEQ ID NO: 714904 - RNA, 17 nt, Artificial Sequence
  Synthetic
guggauuuggucucauu

SEQ ID NO: 714905 - RNA, 17 nt, Artificial Sequence
  Synthetic
gagagggacuucucauu

SEQ ID NO: 714906 - RNA, 17 nt, Artificial Sequence
  Synthetic
gaaggaugcuagucauu

SEQ ID NO: 714907 - RNA, 17 nt, Artificial Sequence
  Synthetic
gagacauuuuagucauu

SEQ ID NO: 714908 - RNA, 17 nt, Artificial Sequence
  Synthetic
guaaaacacccuucauu

SEQ ID NO: 714909 - RNA, 17 nt, Artificial Sequence
  Synthetic
ggccugagccuuucauu

SEQ ID NO: 714910 - RNA, 17 nt, Artificial Sequence
  Synthetic
ggagcauuuuuuucauu

SEQ ID NO: 714911 - RNA, 17 nt, Artificial Sequence
  Synthetic
gacauuugcaaaagauu

SEQ ID NO: 714912 - RNA, 17 nt, Artificial Sequence
  Synthetic
gcacauccacaaagauu

SEQ ID NO: 714913 - RNA, 17 nt, Artificial Sequence
  Synthetic
gcuuuguuauaaagauu

SEQ ID NO: 714914 - RNA, 17 nt, Artificial Sequence
  Synthetic
guccuaaaaccaagauu

SEQ ID NO: 714915 - RNA, 17 nt, Artificial Sequence
  Synthetic
gaagccuuaagaagauu

SEQ ID NO: 714916 - RNA, 17 nt, Artificial Sequence
  Synthetic
gccuaaacuuuaagauu

SEQ ID NO: 714917 - RNA, 17 nt, Artificial Sequence
  Synthetic
gacaacuguuuaagauu

SEQ ID NO: 714918 - RNA, 17 nt, Artificial Sequence
  Synthetic
gagauggagaacagauu

SEQ ID NO: 714919 - RNA, 17 nt, Artificial Sequence
  Synthetic
gagacaacccacagauu

SEQ ID NO: 714920 - RNA, 17 nt, Artificial Sequence
  Synthetic
gguagggguagcagauu

SEQ ID NO: 714921 - RNA, 17 nt, Artificial Sequence
  Synthetic
gauggcacauucagauu

SEQ ID NO: 714922 - RNA, 17 nt, Artificial Sequence
  Synthetic
gauaguuauuucagauu

SEQ ID NO: 714923 - RNA, 17 nt, Artificial Sequence
  Synthetic
ggauuuugguagagauu

SEQ ID NO: 714924 - RNA, 17 nt, Artificial Sequence
  Synthetic
ggucucagauggagauu

SEQ ID NO: 714925 - RNA, 17 nt, Artificial Sequence
  Synthetic
gaccugcgcuggagauu

SEQ ID NO: 714926 - RNA, 17 nt, Artificial Sequence
  Synthetic
gaauucaacaugagauu

SEQ ID NO: 714927 - RNA, 17 nt, Artificial Sequence
  Synthetic
gaaagggacaugagauu

SEQ ID NO: 714928 - RNA, 17 nt, Artificial Sequence
  Synthetic
gaauucaagaugagauu

SEQ ID NO: 714929 - RNA, 17 nt, Artificial Sequence
  Synthetic
gaaaaugaagugagauu

SEQ ID NO: 714930 - RNA, 17 nt, Artificial Sequence
  Synthetic
gaaggauuucauagauu

SEQ ID NO: 714931 - RNA, 17 nt, Artificial Sequence
  Synthetic
gccugccuuacuagauu

SEQ ID NO: 714932 - RNA, 17 nt, Artificial Sequence
  Synthetic
guggacuuguuuagauu

SEQ ID NO: 714933 - RNA, 17 nt, Artificial Sequence
  Synthetic
ggaguucacccacgauu

SEQ ID NO: 714934 - RNA, 17 nt, Artificial Sequence
  Synthetic
gauagaauggggcgauu

SEQ ID NO: 714935 - RNA, 17 nt, Artificial Sequence
  Synthetic
guuccucaugaaggauu

SEQ ID NO: 714936 - RNA, 17 nt, Artificial Sequence
  Synthetic
ggaaagggagcaggauu

SEQ ID NO: 714937 - RNA, 17 nt, Artificial Sequence
  Synthetic
ggcaacaaugcaggauu

SEQ ID NO: 714938 - RNA, 17 nt, Artificial Sequence
  Synthetic
gaguggguaucaggauu

SEQ ID NO: 714939 - RNA, 17 nt, Artificial Sequence
  Synthetic
ggggcacaauuaggauu

SEQ ID NO: 714940 - RNA, 17 nt, Artificial Sequence
  Synthetic
gcagaauccuuaggauu

SEQ ID NO: 714941 - RNA, 17 nt, Artificial Sequence
  Synthetic
gcccauauucagggauu

SEQ ID NO: 714942 - RNA, 17 nt, Artificial Sequence
  Synthetic
gagcagaagaugggauu

SEQ ID NO: 714943 - RNA, 17 nt, Artificial Sequence
  Synthetic
ggaaguguugauggauu

SEQ ID NO: 714944 - RNA, 17 nt, Artificial Sequence
  Synthetic
ggaaucuaaacuggauu

SEQ ID NO: 714945 - RNA, 17 nt, Artificial Sequence
  Synthetic
gggccuugcucuggauu

SEQ ID NO: 714946 - RNA, 17 nt, Artificial Sequence
  Synthetic
guaccaggaaguggauu

SEQ ID NO: 714947 - RNA, 17 nt, Artificial Sequence
  Synthetic
gaagauaauaguggauu

SEQ ID NO: 714948 - RNA, 17 nt, Artificial Sequence
  Synthetic
gaaugcagugguggauu

SEQ ID NO: 714949 - RNA, 17 nt, Artificial Sequence
  Synthetic
guugaucauuaaugauu

SEQ ID NO: 714950 - RNA, 17 nt, Artificial Sequence
  Synthetic
ggaauucacucaugauu

SEQ ID NO: 714951 - RNA, 17 nt, Artificial Sequence
  Synthetic
ggaguucacucaugauu

SEQ ID NO: 714952 - RNA, 17 nt, Artificial Sequence
  Synthetic
guacuaauuugcugauu

SEQ ID NO: 714953 - RNA, 17 nt, Artificial Sequence
  Synthetic
gauguguaucagugauu

SEQ ID NO: 714954 - RNA, 17 nt, Artificial Sequence
  Synthetic
gagucaauguagugauu

SEQ ID NO: 714955 - RNA, 17 nt, Artificial Sequence
  Synthetic
gguuugggggggugauu

SEQ ID NO: 714956 - RNA, 17 nt, Artificial Sequence
  Synthetic
guguuuaaguggugauu

SEQ ID NO: 714957 - RNA, 17 nt, Artificial Sequence
  Synthetic
ggcagcaauuggugauu

SEQ ID NO: 714958 - RNA, 17 nt, Artificial Sequence
  Synthetic
gagaagauacugugauu

SEQ ID NO: 714959 - RNA, 17 nt, Artificial Sequence
  Synthetic
gaauauagguauugauu

SEQ ID NO: 714960 - RNA, 17 nt, Artificial Sequence
  Synthetic
gcagcaggaacuugauu

SEQ ID NO: 714961 - RNA, 17 nt, Artificial Sequence
  Synthetic
guaagucuucuuugauu

SEQ ID NO: 714962 - RNA, 17 nt, Artificial Sequence
  Synthetic
gacuacaguuuuugauu

SEQ ID NO: 714963 - RNA, 17 nt, Artificial Sequence
  Synthetic
guaggucaacaaauauu

SEQ ID NO: 714964 - RNA, 17 nt, Artificial Sequence
  Synthetic
guagcuuuacaaauauu

SEQ ID NO: 714965 - RNA, 17 nt, Artificial Sequence
  Synthetic
gcccuaagauaaauauu

SEQ ID NO: 714966 - RNA, 17 nt, Artificial Sequence
  Synthetic
gcauacauauaaauauu

SEQ ID NO: 714967 - RNA, 17 nt, Artificial Sequence
  Synthetic
ggugccucaugaauauu

SEQ ID NO: 714968 - RNA, 17 nt, Artificial Sequence
  Synthetic
gauauaagaauaauauu

SEQ ID NO: 714969 - RNA, 17 nt, Artificial Sequence
  Synthetic
ggccuaagucuaauauu

SEQ ID NO: 714970 - RNA, 17 nt, Artificial Sequence
  Synthetic
gugaacaauuuaauauu

SEQ ID NO: 714971 - RNA, 17 nt, Artificial Sequence
  Synthetic
gugccuugaaacauauu

SEQ ID NO: 714972 - RNA, 17 nt, Artificial Sequence
  Synthetic
gaggcuccaggcauauu

SEQ ID NO: 714973 - RNA, 17 nt, Artificial Sequence
  Synthetic
gaauggcaguagauauu

SEQ ID NO: 714974 - RNA, 17 nt, Artificial Sequence
  Synthetic
ggcuaaaccaugauauu

SEQ ID NO: 714975 - RNA, 17 nt, Artificial Sequence
  Synthetic
guauucauuaauauauu

SEQ ID NO: 714976 - RNA, 17 nt, Artificial Sequence
  Synthetic
guaauuauggauauauu

SEQ ID NO: 714977 - RNA, 17 nt, Artificial Sequence
  Synthetic
gugauugcugauauauu

SEQ ID NO: 714978 - RNA, 17 nt, Artificial Sequence
  Synthetic
gaaaaucauuauauauu

SEQ ID NO: 714979 - RNA, 17 nt, Artificial Sequence
  Synthetic
guaauaaggaguauauu

SEQ ID NO: 714980 - RNA, 17 nt, Artificial Sequence
  Synthetic
ggagauucuaguauauu

SEQ ID NO: 714981 - RNA, 17 nt, Artificial Sequence
  Synthetic
gcuuacauuaguauauu

SEQ ID NO: 714982 - RNA, 17 nt, Artificial Sequence
  Synthetic
ggagaaauuuguauauu

SEQ ID NO: 714983 - RNA, 17 nt, Artificial Sequence
  Synthetic
gaauucuggaaacuauu

SEQ ID NO: 714984 - RNA, 17 nt, Artificial Sequence
  Synthetic
ggaaguagauaacuauu

SEQ ID NO: 714985 - RNA, 17 nt, Artificial Sequence
  Synthetic
gcuaauacuauacuauu

SEQ ID NO: 714986 - RNA, 17 nt, Artificial Sequence
  Synthetic
gaaggaaaaguacuauu

SEQ ID NO: 714987 - RNA, 17 nt, Artificial Sequence
  Synthetic
guuuuguuuuuacuauu

SEQ ID NO: 714988 - RNA, 17 nt, Artificial Sequence
  Synthetic
guggcuggggaccuauu

SEQ ID NO: 714989 - RNA, 17 nt, Artificial Sequence
  Synthetic
ggcugccagagccuauu

SEQ ID NO: 714990 - RNA, 17 nt, Artificial Sequence
  Synthetic
gaugcugaaaagcuauu

SEQ ID NO: 714991 - RNA, 17 nt, Artificial Sequence
  Synthetic
gaagccauaaaucuauu

SEQ ID NO: 714992 - RNA, 17 nt, Artificial Sequence
  Synthetic
gacaggguggaucuauu

SEQ ID NO: 714993 - RNA, 17 nt, Artificial Sequence
  Synthetic
ggccuauaauaucuauu

SEQ ID NO: 714994 - RNA, 17 nt, Artificial Sequence
  Synthetic
gauuuggccacucuauu

SEQ ID NO: 714995 - RNA, 17 nt, Artificial Sequence
  Synthetic
gagagccugucucuauu

SEQ ID NO: 714996 - RNA, 17 nt, Artificial Sequence
  Synthetic
guaguguuuucucuauu

SEQ ID NO: 714997 - RNA, 17 nt, Artificial Sequence
  Synthetic
gaauauguuagucuauu

SEQ ID NO: 714998 - RNA, 17 nt, Artificial Sequence
  Synthetic
guuacgucauuucuauu

SEQ ID NO: 714999 - RNA, 17 nt, Artificial Sequence
  Synthetic
gagucaauuuuucuauu

SEQ ID NO: 715000 - RNA, 17 nt, Artificial Sequence
  Synthetic
ggcaauuuugaaguauu

SEQ ID NO: 715001 - RNA, 17 nt, Artificial Sequence
  Synthetic
gcacuuuucacaguauu

SEQ ID NO: 715002 - RNA, 17 nt, Artificial Sequence
  Synthetic
gugaaggaggcaguauu

SEQ ID NO: 715003 - RNA, 17 nt, Artificial Sequence
  Synthetic
gauuuaauuguaguauu

SEQ ID NO: 715004 - RNA, 17 nt, Artificial Sequence
  Synthetic
gguagaagguuaguauu

SEQ ID NO: 715005 - RNA, 17 nt, Artificial Sequence
  Synthetic
gagaacaaagugguauu

SEQ ID NO: 715006 - RNA, 17 nt, Artificial Sequence
  Synthetic
gggguacaggugguauu

SEQ ID NO: 715007 - RNA, 17 nt, Artificial Sequence
  Synthetic
gaggaacuuucuguauu

SEQ ID NO: 715008 - RNA, 17 nt, Artificial Sequence
  Synthetic
gaguaggauaaauuauu

SEQ ID NO: 715009 - RNA, 17 nt, Artificial Sequence
  Synthetic
gcuccuaaacaauuauu

SEQ ID NO: 715010 - RNA, 17 nt, Artificial Sequence
  Synthetic
ggcuuguuuuaauuauu

SEQ ID NO: 715011 - RNA, 17 nt, Artificial Sequence
  Synthetic
gcauccucaccauuauu

SEQ ID NO: 715012 - RNA, 17 nt, Artificial Sequence
  Synthetic
gugagauucccauuauu

SEQ ID NO: 715013 - RNA, 17 nt, Artificial Sequence
  Synthetic
ggaguucucucauuauu

SEQ ID NO: 715014 - RNA, 17 nt, Artificial Sequence
  Synthetic
gugaagauucuauuauu

SEQ ID NO: 715015 - RNA, 17 nt, Artificial Sequence
  Synthetic
gcaggccuucuauuauu

SEQ ID NO: 715016 - RNA, 17 nt, Artificial Sequence
  Synthetic
ggaaggaugguauuauu

SEQ ID NO: 715017 - RNA, 17 nt, Artificial Sequence
  Synthetic
gaaggaguauuauuauu

SEQ ID NO: 715018 - RNA, 17 nt, Artificial Sequence
  Synthetic
gggcauuuuaacuuauu

SEQ ID NO: 715019 - RNA, 17 nt, Artificial Sequence
  Synthetic
gaugaaacagacuuauu

SEQ ID NO: 715020 - RNA, 17 nt, Artificial Sequence
  Synthetic
guuagcaaggacuuauu

SEQ ID NO: 715021 - RNA, 17 nt, Artificial Sequence
  Synthetic
gaaaauggaaccuuauu

SEQ ID NO: 715022 - RNA, 17 nt, Artificial Sequence
  Synthetic
gccaggggccccuuauu

SEQ ID NO: 715023 - RNA, 17 nt, Artificial Sequence
  Synthetic
gaaaagaagugcuuauu

SEQ ID NO: 715024 - RNA, 17 nt, Artificial Sequence
  Synthetic
gcugaggaaaaguuauu

SEQ ID NO: 715025 - RNA, 17 nt, Artificial Sequence
  Synthetic
guuuaaggaagguuauu

SEQ ID NO: 715026 - RNA, 17 nt, Artificial Sequence
  Synthetic
gggauggauguguuauu

SEQ ID NO: 715027 - RNA, 17 nt, Artificial Sequence
  Synthetic
guguucaccuauuuauu

SEQ ID NO: 715028 - RNA, 17 nt, Artificial Sequence
  Synthetic
gccaaugucaguuuauu

SEQ ID NO: 715029 - RNA, 17 nt, Artificial Sequence
  Synthetic
guuucagagaguuuauu

SEQ ID NO: 715030 - RNA, 17 nt, Artificial Sequence
  Synthetic
guauccaugaguuuauu

SEQ ID NO: 715031 - RNA, 17 nt, Artificial Sequence
  Synthetic
ggcuucaguauuuuauu

SEQ ID NO: 715032 - RNA, 17 nt, Artificial Sequence
  Synthetic
gucucaauuauuuuauu

SEQ ID NO: 715033 - RNA, 17 nt, Artificial Sequence
  Synthetic
guuuucguauuuuuauu

SEQ ID NO: 715034 - RNA, 17 nt, Artificial Sequence
  Synthetic
gauaaucucuuuuuauu

SEQ ID NO: 715035 - RNA, 17 nt, Artificial Sequence
  Synthetic
ggauugcuggaaaacuu

SEQ ID NO: 715036 - RNA, 17 nt, Artificial Sequence
  Synthetic
gcuaagguuagaaacuu

SEQ ID NO: 715037 - RNA, 17 nt, Artificial Sequence
  Synthetic
gccaauaguauaaacuu

SEQ ID NO: 715038 - RNA, 17 nt, Artificial Sequence
  Synthetic
gacuuuucaguaaacuu

SEQ ID NO: 715039 - RNA, 17 nt, Artificial Sequence
  Synthetic
ggcuuacacuccaacuu

SEQ ID NO: 715040 - RNA, 17 nt, Artificial Sequence
  Synthetic
ggcagagggaagaacuu

SEQ ID NO: 715041 - RNA, 17 nt, Artificial Sequence
  Synthetic
gggcugaguuagaacuu

SEQ ID NO: 715042 - RNA, 17 nt, Artificial Sequence
  Synthetic
gauggcaaaaggaacuu

SEQ ID NO: 715043 - RNA, 17 nt, Artificial Sequence
  Synthetic
gacaguaacuggaacuu

SEQ ID NO: 715044 - RNA, 17 nt, Artificial Sequence
  Synthetic
gagagaauuuggaacuu

SEQ ID NO: 715045 - RNA, 17 nt, Artificial Sequence
  Synthetic
gcacuacagcugaacuu

SEQ ID NO: 715046 - RNA, 17 nt, Artificial Sequence
  Synthetic
gagaauggugugaacuu

SEQ ID NO: 715047 - RNA, 17 nt, Artificial Sequence
  Synthetic
gagaaucacuugaacuu

SEQ ID NO: 715048 - RNA, 17 nt, Artificial Sequence
  Synthetic
gcucagagaaauaacuu

SEQ ID NO: 715049 - RNA, 17 nt, Artificial Sequence
  Synthetic
gguaacuuauauaacuu

SEQ ID NO: 715050 - RNA, 17 nt, Artificial Sequence
  Synthetic
ggauaaaauacuaacuu

SEQ ID NO: 715051 - RNA, 17 nt, Artificial Sequence
  Synthetic
guaguccuggcuaacuu

SEQ ID NO: 715052 - RNA, 17 nt, Artificial Sequence
  Synthetic
gugguuaacauuaacuu

SEQ ID NO: 715053 - RNA, 17 nt, Artificial Sequence
  Synthetic
gcguuuuagcuuaacuu

SEQ ID NO: 715054 - RNA, 17 nt, Artificial Sequence
  Synthetic
gagacauuuguuaacuu

SEQ ID NO: 715055 - RNA, 17 nt, Artificial Sequence
  Synthetic
gggaguacaaaacacuu

SEQ ID NO: 715056 - RNA, 17 nt, Artificial Sequence
  Synthetic
gugcuucaugaacacuu

SEQ ID NO: 715057 - RNA, 17 nt, Artificial Sequence
  Synthetic
ggaaaugugccacacuu

SEQ ID NO: 715058 - RNA, 17 nt, Artificial Sequence
  Synthetic
guggucugcugacacuu

SEQ ID NO: 715059 - RNA, 17 nt, Artificial Sequence
  Synthetic
gguauagaaauacacuu

SEQ ID NO: 715060 - RNA, 17 nt, Artificial Sequence
  Synthetic
gagcagcaguaccacuu

SEQ ID NO: 715061 - RNA, 17 nt, Artificial Sequence
  Synthetic
gcauguacauuccacuu

SEQ ID NO: 715062 - RNA, 17 nt, Artificial Sequence
  Synthetic
gacucuuacuuccacuu

SEQ ID NO: 715063 - RNA, 17 nt, Artificial Sequence
  Synthetic
cuguaaucccagcacuu

SEQ ID NO: 715064 - RNA, 17 nt, Artificial Sequence
  Synthetic
gcgguggcucagcacuu

SEQ ID NO: 715065 - RNA, 17 nt, Artificial Sequence
  Synthetic
gggacuccagagcacuu

SEQ ID NO: 715066 - RNA, 17 nt, Artificial Sequence
  Synthetic
gucuaguuuuagcacuu

SEQ ID NO: 715067 - RNA, 17 nt, Artificial Sequence
  Synthetic
gguggcaggacgcacuu

SEQ ID NO: 715068 - RNA, 17 nt, Artificial Sequence
  Synthetic
gcagcaaacaggcacuu

SEQ ID NO: 715069 - RNA, 17 nt, Artificial Sequence
  Synthetic
gcagccccacaucacuu

SEQ ID NO: 715070 - RNA, 17 nt, Artificial Sequence
  Synthetic
gaucacccauaucacuu

SEQ ID NO: 715071 - RNA, 17 nt, Artificial Sequence
  Synthetic
gacaaauucccucacuu

SEQ ID NO: 715072 - RNA, 17 nt, Artificial Sequence
  Synthetic
gaauuucaucuucacuu

SEQ ID NO: 715073 - RNA, 17 nt, Artificial Sequence
  Synthetic
ggggcaaagguucacuu

SEQ ID NO: 715074 - RNA, 17 nt, Artificial Sequence
  Synthetic
gcacauuauuuucacuu

SEQ ID NO: 715075 - RNA, 17 nt, Artificial Sequence
  Synthetic
ggaaugaguuaagacuu

SEQ ID NO: 715076 - RNA, 17 nt, Artificial Sequence
  Synthetic
ggccaaauauuagacuu

SEQ ID NO: 715077 - RNA, 17 nt, Artificial Sequence
  Synthetic
gucuguaccuuagacuu

SEQ ID NO: 715078 - RNA, 17 nt, Artificial Sequence
  Synthetic
ggccuggaugaggacuu

SEQ ID NO: 715079 - RNA, 17 nt, Artificial Sequence
  Synthetic
guuggggauacggacuu

SEQ ID NO: 715080 - RNA, 17 nt, Artificial Sequence
  Synthetic
gggucgaguggggacuu

SEQ ID NO: 715081 - RNA, 17 nt, Artificial Sequence
  Synthetic
gguguucugugggacuu

SEQ ID NO: 715082 - RNA, 17 nt, Artificial Sequence
  Synthetic
gacaaagaacaugacuu

SEQ ID NO: 715083 - RNA, 17 nt, Artificial Sequence
  Synthetic
ggaccacaagcugacuu

SEQ ID NO: 715084 - RNA, 17 nt, Artificial Sequence
  Synthetic
gauaccuagucugacuu

SEQ ID NO: 715085 - RNA, 17 nt, Artificial Sequence
  Synthetic
ggagaaaaaaaauacuu

SEQ ID NO: 715086 - RNA, 17 nt, Artificial Sequence
  Synthetic
ggguacaaaaaauacuu

SEQ ID NO: 715087 - RNA, 17 nt, Artificial Sequence
  Synthetic
gaaaugaauuaauacuu

SEQ ID NO: 715088 - RNA, 17 nt, Artificial Sequence
  Synthetic
gauuacagaacauacuu

SEQ ID NO: 715089 - RNA, 17 nt, Artificial Sequence
  Synthetic
gccugcagaccauacuu

SEQ ID NO: 715090 - RNA, 17 nt, Artificial Sequence
  Synthetic
gucagaggaccauacuu

SEQ ID NO: 715091 - RNA, 17 nt, Artificial Sequence
  Synthetic
gaacugaacugauacuu

SEQ ID NO: 715092 - RNA, 17 nt, Artificial Sequence
  Synthetic
guguauauaauauacuu

SEQ ID NO: 715093 - RNA, 17 nt, Artificial Sequence
  Synthetic
gaucaccagauauacuu

SEQ ID NO: 715094 - RNA, 17 nt, Artificial Sequence
  Synthetic
guugucagucuauacuu

SEQ ID NO: 715095 - RNA, 17 nt, Artificial Sequence
  Synthetic
gugggaaaguuauacuu

SEQ ID NO: 715096 - RNA, 17 nt, Artificial Sequence
  Synthetic
gguuuagguuuauacuu

SEQ ID NO: 715097 - RNA, 17 nt, Artificial Sequence
  Synthetic
guccaauguuacuacuu

SEQ ID NO: 715098 - RNA, 17 nt, Artificial Sequence
  Synthetic
gucacuacugccuacuu

SEQ ID NO: 715099 - RNA, 17 nt, Artificial Sequence
  Synthetic
gaucuauacaucuacuu

SEQ ID NO: 715100 - RNA, 17 nt, Artificial Sequence
  Synthetic
ggauucuaacucuacuu

SEQ ID NO: 715101 - RNA, 17 nt, Artificial Sequence
  Synthetic
gaaucuauaaauuacuu

SEQ ID NO: 715102 - RNA, 17 nt, Artificial Sequence
  Synthetic
guuuucuuucauuacuu

SEQ ID NO: 715103 - RNA, 17 nt, Artificial Sequence
  Synthetic
gauaucccugauuacuu

SEQ ID NO: 715104 - RNA, 17 nt, Artificial Sequence
  Synthetic
gcuugaauugaaaccuu

SEQ ID NO: 715105 - RNA, 17 nt, Artificial Sequence
  Synthetic
gccauuuuaaacaccuu

SEQ ID NO: 715106 - RNA, 17 nt, Artificial Sequence
  Synthetic
gaauuuaaugacaccuu

SEQ ID NO: 715107 - RNA, 17 nt, Artificial Sequence
  Synthetic
guuguauuugccaccuu

SEQ ID NO: 715108 - RNA, 17 nt, Artificial Sequence
  Synthetic
guuauuuuucagaccuu

SEQ ID NO: 715109 - RNA, 17 nt, Artificial Sequence
  Synthetic
gccauuugcaggaccuu

SEQ ID NO: 715110 - RNA, 17 nt, Artificial Sequence
  Synthetic
gccacccacgugaccuu

SEQ ID NO: 715111 - RNA, 17 nt, Artificial Sequence
  Synthetic
guggauuuaucuaccuu

SEQ ID NO: 715112 - RNA, 17 nt, Artificial Sequence
  Synthetic
ggauaaaaaauuaccuu

SEQ ID NO: 715113 - RNA, 17 nt, Artificial Sequence
  Synthetic
gaauaaaauauuaccuu

SEQ ID NO: 715114 - RNA, 17 nt, Artificial Sequence
  Synthetic
gguguaaugguuaccuu

SEQ ID NO: 715115 - RNA, 17 nt, Artificial Sequence
  Synthetic
gaguuucaguaacccuu

SEQ ID NO: 715116 - RNA, 17 nt, Artificial Sequence
  Synthetic
guaguagaguuacccuu

SEQ ID NO: 715117 - RNA, 17 nt, Artificial Sequence
  Synthetic
guaggguccuugcccuu

SEQ ID NO: 715118 - RNA, 17 nt, Artificial Sequence
  Synthetic
ggcauuauccaucccuu

SEQ ID NO: 715119 - RNA, 17 nt, Artificial Sequence
  Synthetic
gugcgugcagaucccuu

SEQ ID NO: 715120 - RNA, 17 nt, Artificial Sequence
  Synthetic
guaguccucucucccuu

SEQ ID NO: 715121 - RNA, 17 nt, Artificial Sequence
  Synthetic
gaucacuagucagccuu

SEQ ID NO: 715122 - RNA, 17 nt, Artificial Sequence
  Synthetic
gaacucuauucagccuu

SEQ ID NO: 715123 - RNA, 17 nt, Artificial Sequence
  Synthetic
ggauauaagaaggccuu

SEQ ID NO: 715124 - RNA, 17 nt, Artificial Sequence
  Synthetic
ggaucugaauuggccuu

SEQ ID NO: 715125 - RNA, 17 nt, Artificial Sequence
  Synthetic
gcagauuuuaaugccuu

SEQ ID NO: 715126 - RNA, 17 nt, Artificial Sequence
  Synthetic
gaaauaguucaugccuu

SEQ ID NO: 715127 - RNA, 17 nt, Artificial Sequence
  Synthetic
gguuaacuaccugccuu

SEQ ID NO: 715128 - RNA, 17 nt, Artificial Sequence
  Synthetic
gaaaggaaaauugccuu

SEQ ID NO: 715129 - RNA, 17 nt, Artificial Sequence
  Synthetic
guaaaggcagaauccuu

SEQ ID NO: 715130 - RNA, 17 nt, Artificial Sequence
  Synthetic
gaugauuuauaauccuu

SEQ ID NO: 715131 - RNA, 17 nt, Artificial Sequence
  Synthetic
gacaagacagcauccuu

SEQ ID NO: 715132 - RNA, 17 nt, Artificial Sequence
  Synthetic
guugagauaaacuccuu

SEQ ID NO: 715133 - RNA, 17 nt, Artificial Sequence
  Synthetic
gaagaagcgaacuccuu

SEQ ID NO: 715134 - RNA, 17 nt, Artificial Sequence
  Synthetic
gcagccuugaacuccuu

SEQ ID NO: 715135 - RNA, 17 nt, Artificial Sequence
  Synthetic
guaguuuuacacuccuu

SEQ ID NO: 715136 - RNA, 17 nt, Artificial Sequence
  Synthetic
ggguagcuccacuccuu

SEQ ID NO: 715137 - RNA, 17 nt, Artificial Sequence
  Synthetic
gaaaauauuaucuccuu

SEQ ID NO: 715138 - RNA, 17 nt, Artificial Sequence
  Synthetic
gauuaucuucucuccuu

SEQ ID NO: 715139 - RNA, 17 nt, Artificial Sequence
  Synthetic
guaucuauauucuccuu

SEQ ID NO: 715140 - RNA, 17 nt, Artificial Sequence
  Synthetic
gaaccuggaggguccuu

SEQ ID NO: 715141 - RNA, 17 nt, Artificial Sequence
  Synthetic
guaauagcuuuguccuu

SEQ ID NO: 715142 - RNA, 17 nt, Artificial Sequence
  Synthetic
gguuaaacgaauuccuu

SEQ ID NO: 715143 - RNA, 17 nt, Artificial Sequence
  Synthetic
gaccacgugacuuccuu

SEQ ID NO: 715144 - RNA, 17 nt, Artificial Sequence
  Synthetic
ggcagagagccuuccuu

SEQ ID NO: 715145 - RNA, 17 nt, Artificial Sequence
  Synthetic
gccacguuuaguuccuu

SEQ ID NO: 715146 - RNA, 17 nt, Artificial Sequence
  Synthetic
guucauccauguuccuu

SEQ ID NO: 715147 - RNA, 17 nt, Artificial Sequence
  Synthetic
ggcuaaauaauuuccuu

SEQ ID NO: 715148 - RNA, 17 nt, Artificial Sequence
  Synthetic
ggcaguugccaaagcuu

SEQ ID NO: 715149 - RNA, 17 nt, Artificial Sequence
  Synthetic
gagcaagucccaagcuu

SEQ ID NO: 715150 - RNA, 17 nt, Artificial Sequence
  Synthetic
gaaauauaaguaagcuu

SEQ ID NO: 715151 - RNA, 17 nt, Artificial Sequence
  Synthetic
gacagguaauuaagcuu

SEQ ID NO: 715152 - RNA, 17 nt, Artificial Sequence
  Synthetic
gaguucaagaccagcuu

SEQ ID NO: 715153 - RNA, 17 nt, Artificial Sequence
  Synthetic
gaaucugagaccagcuu

SEQ ID NO: 715154 - RNA, 17 nt, Artificial Sequence
  Synthetic
ggucacugcuccagcuu

SEQ ID NO: 715155 - RNA, 17 nt, Artificial Sequence
  Synthetic
gcagugacacucagcuu

SEQ ID NO: 715156 - RNA, 17 nt, Artificial Sequence
  Synthetic
guggauugccugagcuu

SEQ ID NO: 715157 - RNA, 17 nt, Artificial Sequence
  Synthetic
gaggauugcuugagcuu

SEQ ID NO: 715158 - RNA, 17 nt, Artificial Sequence
  Synthetic
guugggauggaacgcuu

SEQ ID NO: 715159 - RNA, 17 nt, Artificial Sequence
  Synthetic
gugaccuggaaaggcuu

SEQ ID NO: 715160 - RNA, 17 nt, Artificial Sequence
  Synthetic
guugcugaaacaggcuu

SEQ ID NO: 715161 - RNA, 17 nt, Artificial Sequence
  Synthetic
gugucucugccaggcuu

SEQ ID NO: 715162 - RNA, 17 nt, Artificial Sequence
  Synthetic
gcuuuuaaaauaggcuu

SEQ ID NO: 715163 - RNA, 17 nt, Artificial Sequence
  Synthetic
gugucucugcccggcuu

SEQ ID NO: 715164 - RNA, 17 nt, Artificial Sequence
  Synthetic
ggcaggagucccggcuu

SEQ ID NO: 715165 - RNA, 17 nt, Artificial Sequence
  Synthetic
gagaaagaaaagggcuu

SEQ ID NO: 715166 - RNA, 17 nt, Artificial Sequence
  Synthetic
gaucaguauaagggcuu

SEQ ID NO: 715167 - RNA, 17 nt, Artificial Sequence
  Synthetic
gaauuuacccagggcuu

SEQ ID NO: 715168 - RNA, 17 nt, Artificial Sequence
  Synthetic
gugcauguugagggcuu

SEQ ID NO: 715169 - RNA, 17 nt, Artificial Sequence
  Synthetic
gagaagagguagggcuu

SEQ ID NO: 715170 - RNA, 17 nt, Artificial Sequence
  Synthetic
ggccauaugccuggcuu

SEQ ID NO: 715171 - RNA, 17 nt, Artificial Sequence
  Synthetic
gugucuuugccuggcuu

SEQ ID NO: 715172 - RNA, 17 nt, Artificial Sequence
  Synthetic
guugccgcugcuggcuu

SEQ ID NO: 715173 - RNA, 17 nt, Artificial Sequence
  Synthetic
gguugaacugguggcuu

SEQ ID NO: 715174 - RNA, 17 nt, Artificial Sequence
  Synthetic
ggauuaggcuuuggcuu

SEQ ID NO: 715175 - RNA, 17 nt, Artificial Sequence
  Synthetic
gcacucuauuuuggcuu

SEQ ID NO: 715176 - RNA, 17 nt, Artificial Sequence
  Synthetic
gcucccauaaaaugcuu

SEQ ID NO: 715177 - RNA, 17 nt, Artificial Sequence
  Synthetic
gauccauuaucaugcuu

SEQ ID NO: 715178 - RNA, 17 nt, Artificial Sequence
  Synthetic
ggugggaggagaugcuu

SEQ ID NO: 715179 - RNA, 17 nt, Artificial Sequence
  Synthetic
gucuuuccuggaugcuu

SEQ ID NO: 715180 - RNA, 17 nt, Artificial Sequence
  Synthetic
gauuuucuaguaugcuu

SEQ ID NO: 715181 - RNA, 17 nt, Artificial Sequence
  Synthetic
gauuuaagcuacugcuu

SEQ ID NO: 715182 - RNA, 17 nt, Artificial Sequence
  Synthetic
gcagcggcaaccugcuu

SEQ ID NO: 715183 - RNA, 17 nt, Artificial Sequence
  Synthetic
guuagacaguccugcuu

SEQ ID NO: 715184 - RNA, 17 nt, Artificial Sequence
  Synthetic
guggaaaccagcugcuu

SEQ ID NO: 715185 - RNA, 17 nt, Artificial Sequence
  Synthetic
gguuugaacugcugcuu

SEQ ID NO: 715186 - RNA, 17 nt, Artificial Sequence
  Synthetic
gauucuugauucugcuu

SEQ ID NO: 715187 - RNA, 17 nt, Artificial Sequence
  Synthetic
ggcuuuggaaagugcuu

SEQ ID NO: 715188 - RNA, 17 nt, Artificial Sequence
  Synthetic
gagaaauuaaggugcuu

SEQ ID NO: 715189 - RNA, 17 nt, Artificial Sequence
  Synthetic
ggauuguuguauugcuu

SEQ ID NO: 715190 - RNA, 17 nt, Artificial Sequence
  Synthetic
ggcaacguaauuugcuu

SEQ ID NO: 715191 - RNA, 17 nt, Artificial Sequence
  Synthetic
ggaagcugccaaaucuu

SEQ ID NO: 715192 - RNA, 17 nt, Artificial Sequence
  Synthetic
gaaaggcagcaaaucuu

SEQ ID NO: 715193 - RNA, 17 nt, Artificial Sequence
  Synthetic
gaaauucuucaaaucuu

SEQ ID NO: 715194 - RNA, 17 nt, Artificial Sequence
  Synthetic
gguuuguuggcaaucuu

SEQ ID NO: 715195 - RNA, 17 nt, Artificial Sequence
  Synthetic
gcuggcugugcaaucuu

SEQ ID NO: 715196 - RNA, 17 nt, Artificial Sequence
  Synthetic
guuugcuuugcaaucuu

SEQ ID NO: 715197 - RNA, 17 nt, Artificial Sequence
  Synthetic
gggaguauuucaaucuu

SEQ ID NO: 715198 - RNA, 17 nt, Artificial Sequence
  Synthetic
gaauugagcguaaucuu

SEQ ID NO: 715199 - RNA, 17 nt, Artificial Sequence
  Synthetic
gucuucuaauuaaucuu

SEQ ID NO: 715200 - RNA, 17 nt, Artificial Sequence
  Synthetic
gcucucuuguuaaucuu

SEQ ID NO: 715201 - RNA, 17 nt, Artificial Sequence
  Synthetic
gcagccuguuccaucuu

SEQ ID NO: 715202 - RNA, 17 nt, Artificial Sequence
  Synthetic
gauagguccugcaucuu

SEQ ID NO: 715203 - RNA, 17 nt, Artificial Sequence
  Synthetic
gucaaaaaaaagaucuu

SEQ ID NO: 715204 - RNA, 17 nt, Artificial Sequence
  Synthetic
gaguauguuaagaucuu

SEQ ID NO: 715205 - RNA, 17 nt, Artificial Sequence
  Synthetic
gaugcucugaggaucuu

SEQ ID NO: 715206 - RNA, 17 nt, Artificial Sequence
  Synthetic
gaaagagaaaauaucuu

SEQ ID NO: 715207 - RNA, 17 nt, Artificial Sequence
  Synthetic
gguaauuaauauaucuu

SEQ ID NO: 715208 - RNA, 17 nt, Artificial Sequence
  Synthetic
gucauauauuauaucuu

SEQ ID NO: 715209 - RNA, 17 nt, Artificial Sequence
  Synthetic
gaagcauaagaacucuu

SEQ ID NO: 715210 - RNA, 17 nt, Artificial Sequence
  Synthetic
gaggaugaaacacucuu

SEQ ID NO: 715211 - RNA, 17 nt, Artificial Sequence
  Synthetic
gauuugcaaagacucuu

SEQ ID NO: 715212 - RNA, 17 nt, Artificial Sequence
  Synthetic
ggaagcagaagacucuu

SEQ ID NO: 715213 - RNA, 17 nt, Artificial Sequence
  Synthetic
guuagagaauaccucuu

SEQ ID NO: 715214 - RNA, 17 nt, Artificial Sequence
  Synthetic
gacuucuuuuaccucuu

SEQ ID NO: 715215 - RNA, 17 nt, Artificial Sequence
  Synthetic
gaguuuccuggccucuu

SEQ ID NO: 715216 - RNA, 17 nt, Artificial Sequence
  Synthetic
gcacacaauuggcucuu

SEQ ID NO: 715217 - RNA, 17 nt, Artificial Sequence
  Synthetic
guaaaauuuacucucuu

SEQ ID NO: 715218 - RNA, 17 nt, Artificial Sequence
  Synthetic
guccuaaccucucucuu

SEQ ID NO: 715219 - RNA, 17 nt, Artificial Sequence
  Synthetic
guucaucguagucucuu

SEQ ID NO: 715220 - RNA, 17 nt, Artificial Sequence
  Synthetic
gaguacaugugucucuu

SEQ ID NO: 715221 - RNA, 17 nt, Artificial Sequence
  Synthetic
gcacugcaucuucucuu

SEQ ID NO: 715222 - RNA, 17 nt, Artificial Sequence
  Synthetic
guuuuuaacuuucucuu

SEQ ID NO: 715223 - RNA, 17 nt, Artificial Sequence
  Synthetic
gccaguggcacagucuu

SEQ ID NO: 715224 - RNA, 17 nt, Artificial Sequence
  Synthetic
ggaauuucuacagucuu

SEQ ID NO: 715225 - RNA, 17 nt, Artificial Sequence
  Synthetic
gaacuugaaugagucuu

SEQ ID NO: 715226 - RNA, 17 nt, Artificial Sequence
  Synthetic
gugauuuuggaggucuu

SEQ ID NO: 715227 - RNA, 17 nt, Artificial Sequence
  Synthetic
gguaacacugcggucuu

SEQ ID NO: 715228 - RNA, 17 nt, Artificial Sequence
  Synthetic
gugaauucuguggucuu

SEQ ID NO: 715229 - RNA, 17 nt, Artificial Sequence
  Synthetic
guauccacaaaugucuu

SEQ ID NO: 715230 - RNA, 17 nt, Artificial Sequence
  Synthetic
gguugauuccaugucuu

SEQ ID NO: 715231 - RNA, 17 nt, Artificial Sequence
  Synthetic
gauagacucuaugucuu

SEQ ID NO: 715232 - RNA, 17 nt, Artificial Sequence
  Synthetic
gggagcuaccaauucuu

SEQ ID NO: 715233 - RNA, 17 nt, Artificial Sequence
  Synthetic
gguagaagguaauucuu

SEQ ID NO: 715234 - RNA, 17 nt, Artificial Sequence
  Synthetic
guugacaagccauucuu

SEQ ID NO: 715235 - RNA, 17 nt, Artificial Sequence
  Synthetic
gcucacucugcauucuu

SEQ ID NO: 715236 - RNA, 17 nt, Artificial Sequence
  Synthetic
guucagggaauauucuu

SEQ ID NO: 715237 - RNA, 17 nt, Artificial Sequence
  Synthetic
gaggcuaguauauucuu

SEQ ID NO: 715238 - RNA, 17 nt, Artificial Sequence
  Synthetic
gagauuaggaacuucuu

SEQ ID NO: 715239 - RNA, 17 nt, Artificial Sequence
  Synthetic
gagaucuuucacuucuu

SEQ ID NO: 715240 - RNA, 17 nt, Artificial Sequence
  Synthetic
guaacaaaugacuucuu

SEQ ID NO: 715241 - RNA, 17 nt, Artificial Sequence
  Synthetic
gaaaaacuucccuucuu

SEQ ID NO: 715242 - RNA, 17 nt, Artificial Sequence
  Synthetic
gcuuuguugggcuucuu

SEQ ID NO: 715243 - RNA, 17 nt, Artificial Sequence
  Synthetic
gucaaaggacaguucuu

SEQ ID NO: 715244 - RNA, 17 nt, Artificial Sequence
  Synthetic
gaccacauauauuucuu

SEQ ID NO: 715245 - RNA, 17 nt, Artificial Sequence
  Synthetic
guaauugcuuauuucuu

SEQ ID NO: 715246 - RNA, 17 nt, Artificial Sequence
  Synthetic
ggucaacuuuauuucuu

SEQ ID NO: 715247 - RNA, 17 nt, Artificial Sequence
  Synthetic
gaauuuuuuucuuucuu

SEQ ID NO: 715248 - RNA, 17 nt, Artificial Sequence
  Synthetic
gagcaauucuguuucuu

SEQ ID NO: 715249 - RNA, 17 nt, Artificial Sequence
  Synthetic
gaagaauccauuuucuu

SEQ ID NO: 715250 - RNA, 17 nt, Artificial Sequence
  Synthetic
gaauuuaagauuuucuu

SEQ ID NO: 715251 - RNA, 17 nt, Artificial Sequence
  Synthetic
gaccugauauuuuucuu

SEQ ID NO: 715252 - RNA, 17 nt, Artificial Sequence
  Synthetic
guuuuugccuuuuucuu

SEQ ID NO: 715253 - RNA, 17 nt, Artificial Sequence
  Synthetic
gguuggaggaaaaaguu

SEQ ID NO: 715254 - RNA, 17 nt, Artificial Sequence
  Synthetic
ggugaggggaaaaaguu

SEQ ID NO: 715255 - RNA, 17 nt, Artificial Sequence
  Synthetic
gaaaauguggaaaaguu

SEQ ID NO: 715256 - RNA, 17 nt, Artificial Sequence
  Synthetic
gucauaucuuaaaaguu

SEQ ID NO: 715257 - RNA, 17 nt, Artificial Sequence
  Synthetic
gcucaagauacaaaguu

SEQ ID NO: 715258 - RNA, 17 nt, Artificial Sequence
  Synthetic
gagaaggaaucaaaguu

SEQ ID NO: 715259 - RNA, 17 nt, Artificial Sequence
  Synthetic
gagucaaaaagaaaguu

SEQ ID NO: 715260 - RNA, 17 nt, Artificial Sequence
  Synthetic
guuauuuuaagaaaguu

SEQ ID NO: 715261 - RNA, 17 nt, Artificial Sequence
  Synthetic
gaagaugugggaaaguu

SEQ ID NO: 715262 - RNA, 17 nt, Artificial Sequence
  Synthetic
ggcaaaaaauuaaaguu

SEQ ID NO: 715263 - RNA, 17 nt, Artificial Sequence
  Synthetic
gcuuugagaaacaaguu

SEQ ID NO: 715264 - RNA, 17 nt, Artificial Sequence
  Synthetic
gauacuugccacaaguu

SEQ ID NO: 715265 - RNA, 17 nt, Artificial Sequence
  Synthetic
gugcagagauacaaguu

SEQ ID NO: 715266 - RNA, 17 nt, Artificial Sequence
  Synthetic
gacuuuugguacaaguu

SEQ ID NO: 715267 - RNA, 17 nt, Artificial Sequence
  Synthetic
gaauccauugccaaguu

SEQ ID NO: 715268 - RNA, 17 nt, Artificial Sequence
  Synthetic
gugguuaucaucaaguu

SEQ ID NO: 715269 - RNA, 17 nt, Artificial Sequence
  Synthetic
gcagaaaauacgaaguu

SEQ ID NO: 715270 - RNA, 17 nt, Artificial Sequence
  Synthetic
guugaggaugggaaguu

SEQ ID NO: 715271 - RNA, 17 nt, Artificial Sequence
  Synthetic
gaugaaagccugaaguu

SEQ ID NO: 715272 - RNA, 17 nt, Artificial Sequence
  Synthetic
gaauggguauugaaguu

SEQ ID NO: 715273 - RNA, 17 nt, Artificial Sequence
  Synthetic
gugacagaagcuaaguu

SEQ ID NO: 715274 - RNA, 17 nt, Artificial Sequence
  Synthetic
gacacugaggcuaaguu

SEQ ID NO: 715275 - RNA, 17 nt, Artificial Sequence
  Synthetic
ggcaagaaaguuaaguu

SEQ ID NO: 715276 - RNA, 17 nt, Artificial Sequence
  Synthetic
gucuuuauaguuaaguu

SEQ ID NO: 715277 - RNA, 17 nt, Artificial Sequence
  Synthetic
guuuaugauucacaguu

SEQ ID NO: 715278 - RNA, 17 nt, Artificial Sequence
  Synthetic
gaaaaugugggacaguu

SEQ ID NO: 715279 - RNA, 17 nt, Artificial Sequence
  Synthetic
ggggccaagguacaguu

SEQ ID NO: 715280 - RNA, 17 nt, Artificial Sequence
  Synthetic
gaugauguaauccaguu

SEQ ID NO: 715281 - RNA, 17 nt, Artificial Sequence
  Synthetic
gguuaccauuuccaguu

SEQ ID NO: 715282 - RNA, 17 nt, Artificial Sequence
  Synthetic
ggggaaaucuagcaguu

SEQ ID NO: 715283 - RNA, 17 nt, Artificial Sequence
  Synthetic
gaacuuucaaugcaguu

SEQ ID NO: 715284 - RNA, 17 nt, Artificial Sequence
  Synthetic
gcuaacaugcugcaguu

SEQ ID NO: 715285 - RNA, 17 nt, Artificial Sequence
  Synthetic
gaaugcccauugcaguu

SEQ ID NO: 715286 - RNA, 17 nt, Artificial Sequence
  Synthetic
gaauuuguuuaucaguu

SEQ ID NO: 715287 - RNA, 17 nt, Artificial Sequence
  Synthetic
guaccugaguuucaguu

SEQ ID NO: 715288 - RNA, 17 nt, Artificial Sequence
  Synthetic
gccucauaaaaagaguu

SEQ ID NO: 715289 - RNA, 17 nt, Artificial Sequence
  Synthetic
ggacguuguaaagaguu

SEQ ID NO: 715290 - RNA, 17 nt, Artificial Sequence
  Synthetic
gaaaaguccucagaguu

SEQ ID NO: 715291 - RNA, 17 nt, Artificial Sequence
  Synthetic
guauuuuuaguagaguu

SEQ ID NO: 715292 - RNA, 17 nt, Artificial Sequence
  Synthetic
ggugcagcuguagaguu

SEQ ID NO: 715293 - RNA, 17 nt, Artificial Sequence
  Synthetic
gaagucagaggggaguu

SEQ ID NO: 715294 - RNA, 17 nt, Artificial Sequence
  Synthetic
gcauuugccugggaguu

SEQ ID NO: 715295 - RNA, 17 nt, Artificial Sequence
  Synthetic
gccucauaaaaugaguu

SEQ ID NO: 715296 - RNA, 17 nt, Artificial Sequence
  Synthetic
ggcugaagcacugaguu

SEQ ID NO: 715297 - RNA, 17 nt, Artificial Sequence
  Synthetic
gcucgggaggcugaguu

SEQ ID NO: 715298 - RNA, 17 nt, Artificial Sequence
  Synthetic
gaugaaaauucugaguu

SEQ ID NO: 715299 - RNA, 17 nt, Artificial Sequence
  Synthetic
gugaaaacaagugaguu

SEQ ID NO: 715300 - RNA, 17 nt, Artificial Sequence
  Synthetic
ggccucauaagugaguu

SEQ ID NO: 715301 - RNA, 17 nt, Artificial Sequence
  Synthetic
gaucucaugugugaguu

SEQ ID NO: 715302 - RNA, 17 nt, Artificial Sequence
  Synthetic
gaagucugaauugaguu

SEQ ID NO: 715303 - RNA, 17 nt, Artificial Sequence
  Synthetic
ggauauuaaaaauaguu

SEQ ID NO: 715304 - RNA, 17 nt, Artificial Sequence
  Synthetic
gcuucuugauaauaguu

SEQ ID NO: 715305 - RNA, 17 nt, Artificial Sequence
  Synthetic
guuaugaacucauaguu

SEQ ID NO: 715306 - RNA, 17 nt, Artificial Sequence
  Synthetic
gaugcugcgggauaguu

SEQ ID NO: 715307 - RNA, 17 nt, Artificial Sequence
  Synthetic
gaguuugcauucuaguu

SEQ ID NO: 715308 - RNA, 17 nt, Artificial Sequence
  Synthetic
gaauaauauaaguaguu

SEQ ID NO: 715309 - RNA, 17 nt, Artificial Sequence
  Synthetic
guagcagcacgguaguu

SEQ ID NO: 715310 - RNA, 17 nt, Artificial Sequence
  Synthetic
gagccuagaguguaguu

SEQ ID NO: 715311 - RNA, 17 nt, Artificial Sequence
  Synthetic
gggaacguaaauuaguu

SEQ ID NO: 715312 - RNA, 17 nt, Artificial Sequence
  Synthetic
gcuuaugaaacuuaguu

SEQ ID NO: 715313 - RNA, 17 nt, Artificial Sequence
  Synthetic
gguauuacaacuuaguu

SEQ ID NO: 715314 - RNA, 17 nt, Artificial Sequence
  Synthetic
gcuuaugaagcuuaguu

SEQ ID NO: 715315 - RNA, 17 nt, Artificial Sequence
  Synthetic
gagggagggauaacguu

SEQ ID NO: 715316 - RNA, 17 nt, Artificial Sequence
  Synthetic
guagaaaauaacacguu

SEQ ID NO: 715317 - RNA, 17 nt, Artificial Sequence
  Synthetic
gcuggcugggcuccguu

SEQ ID NO: 715318 - RNA, 17 nt, Artificial Sequence
  Synthetic
gggggagggauagcguu

SEQ ID NO: 715319 - RNA, 17 nt, Artificial Sequence
  Synthetic
gcagcuagaacugcguu

SEQ ID NO: 715320 - RNA, 17 nt, Artificial Sequence
  Synthetic
gaggaauggcaaagguu

SEQ ID NO: 715321 - RNA, 17 nt, Artificial Sequence
  Synthetic
guagaugcagaaagguu

SEQ ID NO: 715322 - RNA, 17 nt, Artificial Sequence
  Synthetic
gcagaagggagaagguu

SEQ ID NO: 715323 - RNA, 17 nt, Artificial Sequence
  Synthetic
gauaaaaagggaagguu

SEQ ID NO: 715324 - RNA, 17 nt, Artificial Sequence
  Synthetic
gugggucacauaagguu

SEQ ID NO: 715325 - RNA, 17 nt, Artificial Sequence
  Synthetic
ggcuaagaauacagguu

SEQ ID NO: 715326 - RNA, 17 nt, Artificial Sequence
  Synthetic
gaaaaucugaccagguu

SEQ ID NO: 715327 - RNA, 17 nt, Artificial Sequence
  Synthetic
ggauggaugcccagguu

SEQ ID NO: 715328 - RNA, 17 nt, Artificial Sequence
  Synthetic
gcuggauguaagagguu

SEQ ID NO: 715329 - RNA, 17 nt, Artificial Sequence
  Synthetic
gggcagaucacgagguu

SEQ ID NO: 715330 - RNA, 17 nt, Artificial Sequence
  Synthetic
guauagaaagggagguu

SEQ ID NO: 715331 - RNA, 17 nt, Artificial Sequence
  Synthetic
guggaucaccugagguu

SEQ ID NO: 715332 - RNA, 17 nt, Artificial Sequence
  Synthetic
ggcgugaugcugagguu

SEQ ID NO: 715333 - RNA, 17 nt, Artificial Sequence
  Synthetic
gccugucuugcuagguu

SEQ ID NO: 715334 - RNA, 17 nt, Artificial Sequence
  Synthetic
ggccagacagguagguu

SEQ ID NO: 715335 - RNA, 17 nt, Artificial Sequence
  Synthetic
guuuaaaaaauuagguu

SEQ ID NO: 715336 - RNA, 17 nt, Artificial Sequence
  Synthetic
gauguagagaaacgguu

SEQ ID NO: 715337 - RNA, 17 nt, Artificial Sequence
  Synthetic
guaugaugaugacgguu

SEQ ID NO: 715338 - RNA, 17 nt, Artificial Sequence
  Synthetic
gcaucacugauacgguu

SEQ ID NO: 715339 - RNA, 17 nt, Artificial Sequence
  Synthetic
gugcaggagauccgguu

SEQ ID NO: 715340 - RNA, 17 nt, Artificial Sequence
  Synthetic
gaaagaguauuccgguu

SEQ ID NO: 715341 - RNA, 17 nt, Artificial Sequence
  Synthetic
gacagcagaagaggguu

SEQ ID NO: 715342 - RNA, 17 nt, Artificial Sequence
  Synthetic
guuugaagcugaggguu

SEQ ID NO: 715343 - RNA, 17 nt, Artificial Sequence
  Synthetic
gaaagcggguagggguu

SEQ ID NO: 715344 - RNA, 17 nt, Artificial Sequence
  Synthetic
gucucuuuuuauggguu

SEQ ID NO: 715345 - RNA, 17 nt, Artificial Sequence
  Synthetic
gagcucuucaguggguu

SEQ ID NO: 715346 - RNA, 17 nt, Artificial Sequence
  Synthetic
gucuacaggguuggguu

SEQ ID NO: 715347 - RNA, 17 nt, Artificial Sequence
  Synthetic
ggugagauuggaugguu

SEQ ID NO: 715348 - RNA, 17 nt, Artificial Sequence
  Synthetic
gugcuccuaauaugguu

SEQ ID NO: 715349 - RNA, 17 nt, Artificial Sequence
  Synthetic
gaugaaaugauaugguu

SEQ ID NO: 715350 - RNA, 17 nt, Artificial Sequence
  Synthetic
guaggggagguaugguu

SEQ ID NO: 715351 - RNA, 17 nt, Artificial Sequence
  Synthetic
gaaauacagaccugguu

SEQ ID NO: 715352 - RNA, 17 nt, Artificial Sequence
  Synthetic
gccugacauuccugguu

SEQ ID NO: 715353 - RNA, 17 nt, Artificial Sequence
  Synthetic
gauaucuuugucugguu

SEQ ID NO: 715354 - RNA, 17 nt, Artificial Sequence
  Synthetic
guuucugagcagugguu

SEQ ID NO: 715355 - RNA, 17 nt, Artificial Sequence
  Synthetic
guuuuagcugauugguu

SEQ ID NO: 715356 - RNA, 17 nt, Artificial Sequence
  Synthetic
gucauuuccccuugguu

SEQ ID NO: 715357 - RNA, 17 nt, Artificial Sequence
  Synthetic
gucccuucaucuugguu

SEQ ID NO: 715358 - RNA, 17 nt, Artificial Sequence
  Synthetic
guuuucucuauuugguu

SEQ ID NO: 715359 - RNA, 17 nt, Artificial Sequence
  Synthetic
ggaggugauuuuugguu

SEQ ID NO: 715360 - RNA, 17 nt, Artificial Sequence
  Synthetic
gcauaacaaaaaauguu

SEQ ID NO: 715361 - RNA, 17 nt, Artificial Sequence
  Synthetic
gcaauuuagaaaauguu

SEQ ID NO: 715362 - RNA, 17 nt, Artificial Sequence
  Synthetic
gaugaaugggaaauguu

SEQ ID NO: 715363 - RNA, 17 nt, Artificial Sequence
  Synthetic
gauguguaauaaauguu

SEQ ID NO: 715364 - RNA, 17 nt, Artificial Sequence
  Synthetic
gcuccuagcacaauguu

SEQ ID NO: 715365 - RNA, 17 nt, Artificial Sequence
  Synthetic
ggggugguuagaauguu

SEQ ID NO: 715366 - RNA, 17 nt, Artificial Sequence
  Synthetic
gaaauuucuggaauguu

SEQ ID NO: 715367 - RNA, 17 nt, Artificial Sequence
  Synthetic
gguugaaauauaauguu

SEQ ID NO: 715368 - RNA, 17 nt, Artificial Sequence
  Synthetic
gugucuagccuaauguu

SEQ ID NO: 715369 - RNA, 17 nt, Artificial Sequence
  Synthetic
gaccaagaaguaauguu

SEQ ID NO: 715370 - RNA, 17 nt, Artificial Sequence
  Synthetic
gaaaaguagguaauguu

SEQ ID NO: 715371 - RNA, 17 nt, Artificial Sequence
  Synthetic
gaggacgcuggcauguu

SEQ ID NO: 715372 - RNA, 17 nt, Artificial Sequence
  Synthetic
gaugagacccucauguu

SEQ ID NO: 715373 - RNA, 17 nt, Artificial Sequence
  Synthetic
gucuuuccucucauguu

SEQ ID NO: 715374 - RNA, 17 nt, Artificial Sequence
  Synthetic
guuauguaauagauguu

SEQ ID NO: 715375 - RNA, 17 nt, Artificial Sequence
  Synthetic
guguuacucaggauguu

SEQ ID NO: 715376 - RNA, 17 nt, Artificial Sequence
  Synthetic
guccacuauaggauguu

SEQ ID NO: 715377 - RNA, 17 nt, Artificial Sequence
  Synthetic
gggugaucuaggauguu

SEQ ID NO: 715378 - RNA, 17 nt, Artificial Sequence
  Synthetic
gggugaauagggauguu

SEQ ID NO: 715379 - RNA, 17 nt, Artificial Sequence
  Synthetic
ggaagcagugggauguu

SEQ ID NO: 715380 - RNA, 17 nt, Artificial Sequence
  Synthetic
gacuaagcaaugauguu

SEQ ID NO: 715381 - RNA, 17 nt, Artificial Sequence
  Synthetic
gggaucaggcugauguu

SEQ ID NO: 715382 - RNA, 17 nt, Artificial Sequence
  Synthetic
gauucccaaaauauguu

SEQ ID NO: 715383 - RNA, 17 nt, Artificial Sequence
  Synthetic
gaagcuucccauauguu

SEQ ID NO: 715384 - RNA, 17 nt, Artificial Sequence
  Synthetic
gagcaaaaugauauguu

SEQ ID NO: 715385 - RNA, 17 nt, Artificial Sequence
  Synthetic
gaugucuauuauauguu

SEQ ID NO: 715386 - RNA, 17 nt, Artificial Sequence
  Synthetic
gcuaguccagcuauguu

SEQ ID NO: 715387 - RNA, 17 nt, Artificial Sequence
  Synthetic
gaaaacuccuuuauguu

SEQ ID NO: 715388 - RNA, 17 nt, Artificial Sequence
  Synthetic
gggucuggguuuauguu

SEQ ID NO: 715389 - RNA, 17 nt, Artificial Sequence
  Synthetic
gaaauaccuuaacuguu

SEQ ID NO: 715390 - RNA, 17 nt, Artificial Sequence
  Synthetic
gauuugcauacacuguu

SEQ ID NO: 715391 - RNA, 17 nt, Artificial Sequence
  Synthetic
guuuacaaagcacuguu

SEQ ID NO: 715392 - RNA, 17 nt, Artificial Sequence
  Synthetic
guuucuaaaucacuguu

SEQ ID NO: 715393 - RNA, 17 nt, Artificial Sequence
  Synthetic
gccccaggaucacuguu

SEQ ID NO: 715394 - RNA, 17 nt, Artificial Sequence
  Synthetic
guacuaugcucacuguu

SEQ ID NO: 715395 - RNA, 17 nt, Artificial Sequence
  Synthetic
gaggagguuucacuguu

SEQ ID NO: 715396 - RNA, 17 nt, Artificial Sequence
  Synthetic
gagauuaguggacuguu

SEQ ID NO: 715397 - RNA, 17 nt, Artificial Sequence
  Synthetic
gacuuugagugacuguu

SEQ ID NO: 715398 - RNA, 17 nt, Artificial Sequence
  Synthetic
gacuuugggugacuguu

SEQ ID NO: 715399 - RNA, 17 nt, Artificial Sequence
  Synthetic
ggcagauguccccuguu

SEQ ID NO: 715400 - RNA, 17 nt, Artificial Sequence
  Synthetic
gaguuagaaucccuguu

SEQ ID NO: 715401 - RNA, 17 nt, Artificial Sequence
  Synthetic
gucagugguagccuguu

SEQ ID NO: 715402 - RNA, 17 nt, Artificial Sequence
  Synthetic
guggggccuguccuguu

SEQ ID NO: 715403 - RNA, 17 nt, Artificial Sequence
  Synthetic
gugugggugaugcuguu

SEQ ID NO: 715404 - RNA, 17 nt, Artificial Sequence
  Synthetic
gucuaugaccugcuguu

SEQ ID NO: 715405 - RNA, 17 nt, Artificial Sequence
  Synthetic
gcucuucccuugcuguu

SEQ ID NO: 715406 - RNA, 17 nt, Artificial Sequence
  Synthetic
gauaccaaaaaucuguu

SEQ ID NO: 715407 - RNA, 17 nt, Artificial Sequence
  Synthetic
ggauguuguuaucuguu

SEQ ID NO: 715408 - RNA, 17 nt, Artificial Sequence
  Synthetic
guuaacaauucucuguu

SEQ ID NO: 715409 - RNA, 17 nt, Artificial Sequence
  Synthetic
gcaaaagucuaaguguu

SEQ ID NO: 715410 - RNA, 17 nt, Artificial Sequence
  Synthetic
gaaccuagaucaguguu

SEQ ID NO: 715411 - RNA, 17 nt, Artificial Sequence
  Synthetic
gugcacaaacuaguguu

SEQ ID NO: 715412 - RNA, 17 nt, Artificial Sequence
  Synthetic
gcuacugaagagguguu

SEQ ID NO: 715413 - RNA, 17 nt, Artificial Sequence
  Synthetic
guucucacagugguguu

SEQ ID NO: 715414 - RNA, 17 nt, Artificial Sequence
  Synthetic
ggcuuacaugugguguu

SEQ ID NO: 715415 - RNA, 17 nt, Artificial Sequence
  Synthetic
ggaaaguugccuguguu

SEQ ID NO: 715416 - RNA, 17 nt, Artificial Sequence
  Synthetic
gcuuuuuaacuuguguu

SEQ ID NO: 715417 - RNA, 17 nt, Artificial Sequence
  Synthetic
ggcuugguccuuguguu

SEQ ID NO: 715418 - RNA, 17 nt, Artificial Sequence
  Synthetic
guuuacaaauuuguguu

SEQ ID NO: 715419 - RNA, 17 nt, Artificial Sequence
  Synthetic
ggucauuuauuuguguu

SEQ ID NO: 715420 - RNA, 17 nt, Artificial Sequence
  Synthetic
guuucuguguuuguguu

SEQ ID NO: 715421 - RNA, 17 nt, Artificial Sequence
  Synthetic
gaaugcacccaauuguu

SEQ ID NO: 715422 - RNA, 17 nt, Artificial Sequence
  Synthetic
guuagcaggcaauuguu

SEQ ID NO: 715423 - RNA, 17 nt, Artificial Sequence
  Synthetic
guacaaucugcauuguu

SEQ ID NO: 715424 - RNA, 17 nt, Artificial Sequence
  Synthetic
ggccucauaggauuguu

SEQ ID NO: 715425 - RNA, 17 nt, Artificial Sequence
  Synthetic
gggaaagguguauuguu

SEQ ID NO: 715426 - RNA, 17 nt, Artificial Sequence
  Synthetic
guccaguucaccuuguu

SEQ ID NO: 715427 - RNA, 17 nt, Artificial Sequence
  Synthetic
gccaucuguuucuuguu

SEQ ID NO: 715428 - RNA, 17 nt, Artificial Sequence
  Synthetic
gaccugaagccguuguu

SEQ ID NO: 715429 - RNA, 17 nt, Artificial Sequence
  Synthetic
gcuuauacacuguuguu

SEQ ID NO: 715430 - RNA, 17 nt, Artificial Sequence
  Synthetic
gcaaaaaaggauuuguu

SEQ ID NO: 715431 - RNA, 17 nt, Artificial Sequence
  Synthetic
guuagggagaguuuguu

SEQ ID NO: 715432 - RNA, 17 nt, Artificial Sequence
  Synthetic
guuuuaaaucguuuguu

SEQ ID NO: 715433 - RNA, 17 nt, Artificial Sequence
  Synthetic
ggucuuuuguuuuuguu

SEQ ID NO: 715434 - RNA, 17 nt, Artificial Sequence
  Synthetic
ggacagacaaaaaauuu

SEQ ID NO: 715435 - RNA, 17 nt, Artificial Sequence
  Synthetic
ggaguaauaaaaaauuu

SEQ ID NO: 715436 - RNA, 17 nt, Artificial Sequence
  Synthetic
gcaauugucaaaaauuu

SEQ ID NO: 715437 - RNA, 17 nt, Artificial Sequence
  Synthetic
guuucucaccaaaauuu

SEQ ID NO: 715438 - RNA, 17 nt, Artificial Sequence
  Synthetic
ggccugugggaaaauuu

SEQ ID NO: 715439 - RNA, 17 nt, Artificial Sequence
  Synthetic
gaucagaaacgaaauuu

SEQ ID NO: 715440 - RNA, 17 nt, Artificial Sequence
  Synthetic
guaauaaaaugaaauuu

SEQ ID NO: 715441 - RNA, 17 nt, Artificial Sequence
  Synthetic
gaacauguaguaaauuu

SEQ ID NO: 715442 - RNA, 17 nt, Artificial Sequence
  Synthetic
gauaaagugguaaauuu

SEQ ID NO: 715443 - RNA, 17 nt, Artificial Sequence
  Synthetic
guaacagauguaaauuu

SEQ ID NO: 715444 - RNA, 17 nt, Artificial Sequence
  Synthetic
gauacauuauuaaauuu

SEQ ID NO: 715445 - RNA, 17 nt, Artificial Sequence
  Synthetic
guuggacguuuaaauuu

SEQ ID NO: 715446 - RNA, 17 nt, Artificial Sequence
  Synthetic
gugauuuuuuuaaauuu

SEQ ID NO: 715447 - RNA, 17 nt, Artificial Sequence
  Synthetic
gaguaaugguacaauuu

SEQ ID NO: 715448 - RNA, 17 nt, Artificial Sequence
  Synthetic
gugauuuauuacaauuu

SEQ ID NO: 715449 - RNA, 17 nt, Artificial Sequence
  Synthetic
gcaauauacagcaauuu

SEQ ID NO: 715450 - RNA, 17 nt, Artificial Sequence
  Synthetic
guccuccuugucaauuu

SEQ ID NO: 715451 - RNA, 17 nt, Artificial Sequence
  Synthetic
gaacugauauucaauuu

SEQ ID NO: 715452 - RNA, 17 nt, Artificial Sequence
  Synthetic
gccguuuucuucaauuu

SEQ ID NO: 715453 - RNA, 17 nt, Artificial Sequence
  Synthetic
guuuucuauuucaauuu

SEQ ID NO: 715454 - RNA, 17 nt, Artificial Sequence
  Synthetic
guaaaacuuuucaauuu

SEQ ID NO: 715455 - RNA, 17 nt, Artificial Sequence
  Synthetic
gagaagaacaagaauuu

SEQ ID NO: 715456 - RNA, 17 nt, Artificial Sequence
  Synthetic
gauaacaugaagaauuu

SEQ ID NO: 715457 - RNA, 17 nt, Artificial Sequence
  Synthetic
guugacucuaagaauuu

SEQ ID NO: 715458 - RNA, 17 nt, Artificial Sequence
  Synthetic
gcuaaaggggagaauuu

SEQ ID NO: 715459 - RNA, 17 nt, Artificial Sequence
  Synthetic
gcuaaaaguuagaauuu

SEQ ID NO: 715460 - RNA, 17 nt, Artificial Sequence
  Synthetic
gauuuucuaacgaauuu

SEQ ID NO: 715461 - RNA, 17 nt, Artificial Sequence
  Synthetic
guugacagaaugaauuu

SEQ ID NO: 715462 - RNA, 17 nt, Artificial Sequence
  Synthetic
gacaucaccaugaauuu

SEQ ID NO: 715463 - RNA, 17 nt, Artificial Sequence
  Synthetic
ggaugaaagaugaauuu

SEQ ID NO: 715464 - RNA, 17 nt, Artificial Sequence
  Synthetic
gauaugauucugaauuu

SEQ ID NO: 715465 - RNA, 17 nt, Artificial Sequence
  Synthetic
gguauugaaaauaauuu

SEQ ID NO: 715466 - RNA, 17 nt, Artificial Sequence
  Synthetic
guuauuuucuauaauuu

SEQ ID NO: 715467 - RNA, 17 nt, Artificial Sequence
  Synthetic
guggaggcagcuaauuu

SEQ ID NO: 715468 - RNA, 17 nt, Artificial Sequence
  Synthetic
guuuugagccuuaauuu

SEQ ID NO: 715469 - RNA, 17 nt, Artificial Sequence
  Synthetic
gcaucauuguuuaauuu

SEQ ID NO: 715470 - RNA, 17 nt, Artificial Sequence
  Synthetic
gauauuguagaacauuu

SEQ ID NO: 715471 - RNA, 17 nt, Artificial Sequence
  Synthetic
gcuugagauacacauuu

SEQ ID NO: 715472 - RNA, 17 nt, Artificial Sequence
  Synthetic
ggacugcuuccacauuu

SEQ ID NO: 715473 - RNA, 17 nt, Artificial Sequence
  Synthetic
ggaauauaugcacauuu

SEQ ID NO: 715474 - RNA, 17 nt, Artificial Sequence
  Synthetic
guuuguuuuuuacauuu

SEQ ID NO: 715475 - RNA, 17 nt, Artificial Sequence
  Synthetic
gauuuuucaaaccauuu

SEQ ID NO: 715476 - RNA, 17 nt, Artificial Sequence
  Synthetic
gugugauuugaccauuu

SEQ ID NO: 715477 - RNA, 17 nt, Artificial Sequence
  Synthetic
gugaagacgugccauuu

SEQ ID NO: 715478 - RNA, 17 nt, Artificial Sequence
  Synthetic
gaaacagccaagcauuu

SEQ ID NO: 715479 - RNA, 17 nt, Artificial Sequence
  Synthetic
ggaaaggagacgcauuu

SEQ ID NO: 715480 - RNA, 17 nt, Artificial Sequence
  Synthetic
guaaaauuaaggcauuu

SEQ ID NO: 715481 - RNA, 17 nt, Artificial Sequence
  Synthetic
guaaacccuaggcauuu

SEQ ID NO: 715482 - RNA, 17 nt, Artificial Sequence
  Synthetic
gggaaacgugggcauuu

SEQ ID NO: 715483 - RNA, 17 nt, Artificial Sequence
  Synthetic
gaucaugcuaugcauuu

SEQ ID NO: 715484 - RNA, 17 nt, Artificial Sequence
  Synthetic
gacuuucacaaucauuu

SEQ ID NO: 715485 - RNA, 17 nt, Artificial Sequence
  Synthetic
gucaaaggagaucauuu

SEQ ID NO: 715486 - RNA, 17 nt, Artificial Sequence
  Synthetic
gcuuucauucuucauuu

SEQ ID NO: 715487 - RNA, 17 nt, Artificial Sequence
  Synthetic
gacuucuuauuucauuu

SEQ ID NO: 715488 - RNA, 17 nt, Artificial Sequence
  Synthetic
guuugcaauuuucauuu

SEQ ID NO: 715489 - RNA, 17 nt, Artificial Sequence
  Synthetic
guaagccuccaagauuu

SEQ ID NO: 715490 - RNA, 17 nt, Artificial Sequence
  Synthetic
gauuuugguagagauuu

SEQ ID NO: 715491 - RNA, 17 nt, Artificial Sequence
  Synthetic
gugaugacaugagauuu

SEQ ID NO: 715492 - RNA, 17 nt, Artificial Sequence
  Synthetic
gauuauagcugagauuu

SEQ ID NO: 715493 - RNA, 17 nt, Artificial Sequence
  Synthetic
guuugaugcugagauuu

SEQ ID NO: 715494 - RNA, 17 nt, Artificial Sequence
  Synthetic
ggaugguaaguagauuu

SEQ ID NO: 715495 - RNA, 17 nt, Artificial Sequence
  Synthetic
guucuccaaagggauuu

SEQ ID NO: 715496 - RNA, 17 nt, Artificial Sequence
  Synthetic
gaggugaacugggauuu

SEQ ID NO: 715497 - RNA, 17 nt, Artificial Sequence
  Synthetic
gcucuguagugggauuu

SEQ ID NO: 715498 - RNA, 17 nt, Artificial Sequence
  Synthetic
ggaaguguuuuggauuu

SEQ ID NO: 715499 - RNA, 17 nt, Artificial Sequence
  Synthetic
guguacugaaaugauuu

SEQ ID NO: 715500 - RNA, 17 nt, Artificial Sequence
  Synthetic
gguuauagcaaugauuu

SEQ ID NO: 715501 - RNA, 17 nt, Artificial Sequence
  Synthetic
guucauaugcaugauuu

SEQ ID NO: 715502 - RNA, 17 nt, Artificial Sequence
  Synthetic
gauaaugacuaugauuu

SEQ ID NO: 715503 - RNA, 17 nt, Artificial Sequence
  Synthetic
gcaagguacuaugauuu

SEQ ID NO: 715504 - RNA, 17 nt, Artificial Sequence
  Synthetic
gaggggaaugcugauuu

SEQ ID NO: 715505 - RNA, 17 nt, Artificial Sequence
  Synthetic
ggcuuccucucugauuu

SEQ ID NO: 715506 - RNA, 17 nt, Artificial Sequence
  Synthetic
gcagugguaugugauuu

SEQ ID NO: 715507 - RNA, 17 nt, Artificial Sequence
  Synthetic
gccaacugucuugauuu

SEQ ID NO: 715508 - RNA, 17 nt, Artificial Sequence
  Synthetic
guauauucuguugauuu

SEQ ID NO: 715509 - RNA, 17 nt, Artificial Sequence
  Synthetic
gccacaugaaaauauuu

SEQ ID NO: 715510 - RNA, 17 nt, Artificial Sequence
  Synthetic
gaugaauuaaaauauuu

SEQ ID NO: 715511 - RNA, 17 nt, Artificial Sequence
  Synthetic
gagaaagaaacauauuu

SEQ ID NO: 715512 - RNA, 17 nt, Artificial Sequence
  Synthetic
guaggcagcacauauuu

SEQ ID NO: 715513 - RNA, 17 nt, Artificial Sequence
  Synthetic
gaaaaaaauacauauuu

SEQ ID NO: 715514 - RNA, 17 nt, Artificial Sequence
  Synthetic
gucaaagugccauauuu

SEQ ID NO: 715515 - RNA, 17 nt, Artificial Sequence
  Synthetic
gugacaugagcauauuu

SEQ ID NO: 715516 - RNA, 17 nt, Artificial Sequence
  Synthetic
gaagguccaucauauuu

SEQ ID NO: 715517 - RNA, 17 nt, Artificial Sequence
  Synthetic
gauagaaaaagauauuu

SEQ ID NO: 715518 - RNA, 17 nt, Artificial Sequence
  Synthetic
gcucaauaaauauauuu

SEQ ID NO: 715519 - RNA, 17 nt, Artificial Sequence
  Synthetic
guuugcuuuauauauuu

SEQ ID NO: 715520 - RNA, 17 nt, Artificial Sequence
  Synthetic
gaguuccuuguauauuu

SEQ ID NO: 715521 - RNA, 17 nt, Artificial Sequence
  Synthetic
gaauuucuguuauauuu

SEQ ID NO: 715522 - RNA, 17 nt, Artificial Sequence
  Synthetic
gcacuugucuccuauuu

SEQ ID NO: 715523 - RNA, 17 nt, Artificial Sequence
  Synthetic
gauguuuugagcuauuu

SEQ ID NO: 715524 - RNA, 17 nt, Artificial Sequence
  Synthetic
gaacaccaucaguauuu

SEQ ID NO: 715525 - RNA, 17 nt, Artificial Sequence
  Synthetic
ggagggcaggaguauuu

SEQ ID NO: 715526 - RNA, 17 nt, Artificial Sequence
  Synthetic
gaguuguuugaguauuu

SEQ ID NO: 715527 - RNA, 17 nt, Artificial Sequence
  Synthetic
guuuauaauuaguauuu

SEQ ID NO: 715528 - RNA, 17 nt, Artificial Sequence
  Synthetic
guagaggauguguauuu

SEQ ID NO: 715529 - RNA, 17 nt, Artificial Sequence
  Synthetic
ggcaaaauauauuauuu

SEQ ID NO: 715530 - RNA, 17 nt, Artificial Sequence
  Synthetic
guagcuuucucuuauuu

SEQ ID NO: 715531 - RNA, 17 nt, Artificial Sequence
  Synthetic
gugucaaaaaguuauuu

SEQ ID NO: 715532 - RNA, 17 nt, Artificial Sequence
  Synthetic
gagcaagugauuuauuu

SEQ ID NO: 715533 - RNA, 17 nt, Artificial Sequence
  Synthetic
gccaugucccuuuauuu

SEQ ID NO: 715534 - RNA, 17 nt, Artificial Sequence
  Synthetic
gagggagucguuuauuu

SEQ ID NO: 715535 - RNA, 17 nt, Artificial Sequence
  Synthetic
gccuugggauuuuauuu

SEQ ID NO: 715536 - RNA, 17 nt, Artificial Sequence
  Synthetic
gacaagacacaaacuuu

SEQ ID NO: 715537 - RNA, 17 nt, Artificial Sequence
  Synthetic
gggcaugagcaaacuuu

SEQ ID NO: 715538 - RNA, 17 nt, Artificial Sequence
  Synthetic
ggcagguccuaaacuuu

SEQ ID NO: 715539 - RNA, 17 nt, Artificial Sequence
  Synthetic
gaggcugaaacaacuuu

SEQ ID NO: 715540 - RNA, 17 nt, Artificial Sequence
  Synthetic
guucuuaauauaacuuu

SEQ ID NO: 715541 - RNA, 17 nt, Artificial Sequence
  Synthetic
gaaaccaauuuaacuuu

SEQ ID NO: 715542 - RNA, 17 nt, Artificial Sequence
  Synthetic
gcauacuuuaacacuuu

SEQ ID NO: 715543 - RNA, 17 nt, Artificial Sequence
  Synthetic
gugcuguaauccacuuu

SEQ ID NO: 715544 - RNA, 17 nt, Artificial Sequence
  Synthetic
guaaaucccagcacuuu

SEQ ID NO: 715545 - RNA, 17 nt, Artificial Sequence
  Synthetic
uguaaucccagcacuuu

SEQ ID NO: 715546 - RNA, 17 nt, Artificial Sequence
  Synthetic
gcguuuuaaggcacuuu

SEQ ID NO: 715547 - RNA, 17 nt, Artificial Sequence
  Synthetic
gggaaucuuugcacuuu

SEQ ID NO: 715548 - RNA, 17 nt, Artificial Sequence
  Synthetic
gguagguggaucacuuu

SEQ ID NO: 715549 - RNA, 17 nt, Artificial Sequence
  Synthetic
gugguuucccucacuuu

SEQ ID NO: 715550 - RNA, 17 nt, Artificial Sequence
  Synthetic
gauaaauaagucacuuu

SEQ ID NO: 715551 - RNA, 17 nt, Artificial Sequence
  Synthetic
gggaaagaggucacuuu

SEQ ID NO: 715552 - RNA, 17 nt, Artificial Sequence
  Synthetic
guguaauaauucacuuu

SEQ ID NO: 715553 - RNA, 17 nt, Artificial Sequence
  Synthetic
gggcaaagguucacuuu

SEQ ID NO: 715554 - RNA, 17 nt, Artificial Sequence
  Synthetic
gaaugaguuaagacuuu

SEQ ID NO: 715555 - RNA, 17 nt, Artificial Sequence
  Synthetic
gagaaaacugagacuuu

SEQ ID NO: 715556 - RNA, 17 nt, Artificial Sequence
  Synthetic
gugauacaauggacuuu

SEQ ID NO: 715557 - RNA, 17 nt, Artificial Sequence
  Synthetic
guaauacauuggacuuu

SEQ ID NO: 715558 - RNA, 17 nt, Artificial Sequence
  Synthetic
guguaguaguauacuuu

SEQ ID NO: 715559 - RNA, 17 nt, Artificial Sequence
  Synthetic
gacacaauguguacuuu

SEQ ID NO: 715560 - RNA, 17 nt, Artificial Sequence
  Synthetic
gugacucuaguuacuuu

SEQ ID NO: 715561 - RNA, 17 nt, Artificial Sequence
  Synthetic
guuccucaguuuacuuu

SEQ ID NO: 715562 - RNA, 17 nt, Artificial Sequence
  Synthetic
gaguccuggaaaccuuu

SEQ ID NO: 715563 - RNA, 17 nt, Artificial Sequence
  Synthetic
gcuucaggugaaccuuu

SEQ ID NO: 715564 - RNA, 17 nt, Artificial Sequence
  Synthetic
gauaaaaaauuaccuuu

SEQ ID NO: 715565 - RNA, 17 nt, Artificial Sequence
  Synthetic
gguuuuagggacccuuu

SEQ ID NO: 715566 - RNA, 17 nt, Artificial Sequence
  Synthetic
guggucccugacccuuu

SEQ ID NO: 715567 - RNA, 17 nt, Artificial Sequence
  Synthetic
ggucaaugaaccccuuu

SEQ ID NO: 715568 - RNA, 17 nt, Artificial Sequence
  Synthetic
gcauuauccaucccuuu

SEQ ID NO: 715569 - RNA, 17 nt, Artificial Sequence
  Synthetic
gguagcagauucccuuu

SEQ ID NO: 715570 - RNA, 17 nt, Artificial Sequence
  Synthetic
gauuguggagggccuuu

SEQ ID NO: 715571 - RNA, 17 nt, Artificial Sequence
  Synthetic
gaugcauauuugccuuu

SEQ ID NO: 715572 - RNA, 17 nt, Artificial Sequence
  Synthetic
guauucccuaauccuuu

SEQ ID NO: 715573 - RNA, 17 nt, Artificial Sequence
  Synthetic
gguuugaguaauccuuu

SEQ ID NO: 715574 - RNA, 17 nt, Artificial Sequence
  Synthetic
guauaccagcauccuuu

SEQ ID NO: 715575 - RNA, 17 nt, Artificial Sequence
  Synthetic
gacucaaaauauccuuu

SEQ ID NO: 715576 - RNA, 17 nt, Artificial Sequence
  Synthetic
ggaucuuuuuauccuuu

SEQ ID NO: 715577 - RNA, 17 nt, Artificial Sequence
  Synthetic
gaauaaagucuuccuuu

SEQ ID NO: 715578 - RNA, 17 nt, Artificial Sequence
  Synthetic
guuuugaggguuccuuu

SEQ ID NO: 715579 - RNA, 17 nt, Artificial Sequence
  Synthetic
ggaaguucuuuuccuuu

SEQ ID NO: 715580 - RNA, 17 nt, Artificial Sequence
  Synthetic
gucaaagagagagcuuu

SEQ ID NO: 715581 - RNA, 17 nt, Artificial Sequence
  Synthetic
gucaagaacugagcuuu

SEQ ID NO: 715582 - RNA, 17 nt, Artificial Sequence
  Synthetic
gauagcagaauagcuuu

SEQ ID NO: 715583 - RNA, 17 nt, Artificial Sequence
  Synthetic
gugaguauucuagcuuu

SEQ ID NO: 715584 - RNA, 17 nt, Artificial Sequence
  Synthetic
guuugagcaaaggcuuu

SEQ ID NO: 715585 - RNA, 17 nt, Artificial Sequence
  Synthetic
gaaaaucugauggcuuu

SEQ ID NO: 715586 - RNA, 17 nt, Artificial Sequence
  Synthetic
guugaacugguggcuuu

SEQ ID NO: 715587 - RNA, 17 nt, Artificial Sequence
  Synthetic
gaacaaaaaaaugcuuu

SEQ ID NO: 715588 - RNA, 17 nt, Artificial Sequence
  Synthetic
gaggcauuaaaugcuuu

SEQ ID NO: 715589 - RNA, 17 nt, Artificial Sequence
  Synthetic
gagaguagaacugcuuu

SEQ ID NO: 715590 - RNA, 17 nt, Artificial Sequence
  Synthetic
gucuacucuucugcuuu

SEQ ID NO: 715591 - RNA, 17 nt, Artificial Sequence
  Synthetic
gaacuaguuauugcuuu

SEQ ID NO: 715592 - RNA, 17 nt, Artificial Sequence
  Synthetic
gauuugaagcuugcuuu

SEQ ID NO: 715593 - RNA, 17 nt, Artificial Sequence
  Synthetic
gagaaggggaaaucuuu

SEQ ID NO: 715594 - RNA, 17 nt, Artificial Sequence
  Synthetic
gcaguggcacaaucuuu

SEQ ID NO: 715595 - RNA, 17 nt, Artificial Sequence
  Synthetic
gaacuaaaaacaucuuu

SEQ ID NO: 715596 - RNA, 17 nt, Artificial Sequence
  Synthetic
guuucauuaccaucuuu

SEQ ID NO: 715597 - RNA, 17 nt, Artificial Sequence
  Synthetic
gggaaauaugcaucuuu

SEQ ID NO: 715598 - RNA, 17 nt, Artificial Sequence
  Synthetic
ggugguucuucaucuuu

SEQ ID NO: 715599 - RNA, 17 nt, Artificial Sequence
  Synthetic
gaauauuggguaucuuu

SEQ ID NO: 715600 - RNA, 17 nt, Artificial Sequence
  Synthetic
gcccuuucagacucuuu

SEQ ID NO: 715601 - RNA, 17 nt, Artificial Sequence
  Synthetic
gcugugauagacucuuu

SEQ ID NO: 715602 - RNA, 17 nt, Artificial Sequence
  Synthetic
guuuuauuaaccucuuu

SEQ ID NO: 715603 - RNA, 17 nt, Artificial Sequence
  Synthetic
gcuagaaaucucucuuu

SEQ ID NO: 715604 - RNA, 17 nt, Artificial Sequence
  Synthetic
gaagucccauucucuuu

SEQ ID NO: 715605 - RNA, 17 nt, Artificial Sequence
  Synthetic
gcuuuuaguaugucuuu

SEQ ID NO: 715606 - RNA, 17 nt, Artificial Sequence
  Synthetic
gguuauugccugucuuu

SEQ ID NO: 715607 - RNA, 17 nt, Artificial Sequence
  Synthetic
gugacaauucugucuuu

SEQ ID NO: 715608 - RNA, 17 nt, Artificial Sequence
  Synthetic
gguagauuaaauucuuu

SEQ ID NO: 715609 - RNA, 17 nt, Artificial Sequence
  Synthetic
gaugacuauuauucuuu

SEQ ID NO: 715610 - RNA, 17 nt, Artificial Sequence
  Synthetic
guuuacauuuauucuuu

SEQ ID NO: 715611 - RNA, 17 nt, Artificial Sequence
  Synthetic
gucuccugaacuucuuu

SEQ ID NO: 715612 - RNA, 17 nt, Artificial Sequence
  Synthetic
gucaacuuuauuucuuu

SEQ ID NO: 715613 - RNA, 17 nt, Artificial Sequence
  Synthetic
guucaaauaguuucuuu

SEQ ID NO: 715614 - RNA, 17 nt, Artificial Sequence
  Synthetic
gcagcagaauuuucuuu

SEQ ID NO: 715615 - RNA, 17 nt, Artificial Sequence
  Synthetic
gacacauaucaaaguuu

SEQ ID NO: 715616 - RNA, 17 nt, Artificial Sequence
  Synthetic
gagaguguagaaaguuu

SEQ ID NO: 715617 - RNA, 17 nt, Artificial Sequence
  Synthetic
gcaauaucuacaaguuu

SEQ ID NO: 715618 - RNA, 17 nt, Artificial Sequence
  Synthetic
gaaacucacagaaguuu

SEQ ID NO: 715619 - RNA, 17 nt, Artificial Sequence
  Synthetic
gauucaaaaauaaguuu

SEQ ID NO: 715620 - RNA, 17 nt, Artificial Sequence
  Synthetic
guuuuacuucuaaguuu

SEQ ID NO: 715621 - RNA, 17 nt, Artificial Sequence
  Synthetic
gacuuuaugcacaguuu

SEQ ID NO: 715622 - RNA, 17 nt, Artificial Sequence
  Synthetic
guguacaaagacaguuu

SEQ ID NO: 715623 - RNA, 17 nt, Artificial Sequence
  Synthetic
gaugugaggggcaguuu

SEQ ID NO: 715624 - RNA, 17 nt, Artificial Sequence
  Synthetic
guguuuucaugcaguuu

SEQ ID NO: 715625 - RNA, 17 nt, Artificial Sequence
  Synthetic
guguuguuugucaguuu

SEQ ID NO: 715626 - RNA, 17 nt, Artificial Sequence
  Synthetic
gauaaugaguucaguuu

SEQ ID NO: 715627 - RNA, 17 nt, Artificial Sequence
  Synthetic
guaggggauuucaguuu

SEQ ID NO: 715628 - RNA, 17 nt, Artificial Sequence
  Synthetic
ggaauguaaaugaguuu

SEQ ID NO: 715629 - RNA, 17 nt, Artificial Sequence
  Synthetic
guuuuucuccugaguuu

SEQ ID NO: 715630 - RNA, 17 nt, Artificial Sequence
  Synthetic
gaaucuuuuaauaguuu

SEQ ID NO: 715631 - RNA, 17 nt, Artificial Sequence
  Synthetic
gcuaaauuacauaguuu

SEQ ID NO: 715632 - RNA, 17 nt, Artificial Sequence
  Synthetic
gaaacaaagcauaguuu

SEQ ID NO: 715633 - RNA, 17 nt, Artificial Sequence
  Synthetic
gcacauuuauuuaguuu

SEQ ID NO: 715634 - RNA, 17 nt, Artificial Sequence
  Synthetic
gacagaggagcacguuu

SEQ ID NO: 715635 - RNA, 17 nt, Artificial Sequence
  Synthetic
gucucugugucacguuu

SEQ ID NO: 715636 - RNA, 17 nt, Artificial Sequence
  Synthetic
gagaaauauuugcguuu

SEQ ID NO: 715637 - RNA, 17 nt, Artificial Sequence
  Synthetic
gugugaugccaagguuu

SEQ ID NO: 715638 - RNA, 17 nt, Artificial Sequence
  Synthetic
gaagaaguuacagguuu

SEQ ID NO: 715639 - RNA, 17 nt, Artificial Sequence
  Synthetic
gugucucugccagguuu

SEQ ID NO: 715640 - RNA, 17 nt, Artificial Sequence
  Synthetic
gugucuuugccagguuu

SEQ ID NO: 715641 - RNA, 17 nt, Artificial Sequence
  Synthetic
gaaggacuggcagguuu

SEQ ID NO: 715642 - RNA, 17 nt, Artificial Sequence
  Synthetic
gaaauauucucagguuu

SEQ ID NO: 715643 - RNA, 17 nt, Artificial Sequence
  Synthetic
guaagugagagagguuu

SEQ ID NO: 715644 - RNA, 17 nt, Artificial Sequence
  Synthetic
gagcugaugagagguuu

SEQ ID NO: 715645 - RNA, 17 nt, Artificial Sequence
  Synthetic
guguucuugggagguuu

SEQ ID NO: 715646 - RNA, 17 nt, Artificial Sequence
  Synthetic
gcaugaugcugagguuu

SEQ ID NO: 715647 - RNA, 17 nt, Artificial Sequence
  Synthetic
gcgugaugcugagguuu

SEQ ID NO: 715648 - RNA, 17 nt, Artificial Sequence
  Synthetic
gcaccacuauuagguuu

SEQ ID NO: 715649 - RNA, 17 nt, Artificial Sequence
  Synthetic
gcauuugauuuagguuu

SEQ ID NO: 715650 - RNA, 17 nt, Artificial Sequence
  Synthetic
gaggcggccaaggguuu

SEQ ID NO: 715651 - RNA, 17 nt, Artificial Sequence
  Synthetic
guuuguuugggggguuu

SEQ ID NO: 715652 - RNA, 17 nt, Artificial Sequence
  Synthetic
gggacaagaguggguuu

SEQ ID NO: 715653 - RNA, 17 nt, Artificial Sequence
  Synthetic
gugggaggcgaugguuu

SEQ ID NO: 715654 - RNA, 17 nt, Artificial Sequence
  Synthetic
gugagauuggaugguuu

SEQ ID NO: 715655 - RNA, 17 nt, Artificial Sequence
  Synthetic
gucagucuuucugguuu

SEQ ID NO: 715656 - RNA, 17 nt, Artificial Sequence
  Synthetic
guuuccuguacauguuu

SEQ ID NO: 715657 - RNA, 17 nt, Artificial Sequence
  Synthetic
ggugaaaaugcauguuu

SEQ ID NO: 715658 - RNA, 17 nt, Artificial Sequence
  Synthetic
gacuugaacagauguuu

SEQ ID NO: 715659 - RNA, 17 nt, Artificial Sequence
  Synthetic
ggugaauagggauguuu

SEQ ID NO: 715660 - RNA, 17 nt, Artificial Sequence
  Synthetic
guuuaauaaugauguuu

SEQ ID NO: 715661 - RNA, 17 nt, Artificial Sequence
  Synthetic
gucauucucauauguuu

SEQ ID NO: 715662 - RNA, 17 nt, Artificial Sequence
  Synthetic
guuauccuuuuauguuu

SEQ ID NO: 715663 - RNA, 17 nt, Artificial Sequence
  Synthetic
guaccuagucacuguuu

SEQ ID NO: 715664 - RNA, 17 nt, Artificial Sequence
  Synthetic
guggauugucacuguuu

SEQ ID NO: 715665 - RNA, 17 nt, Artificial Sequence
  Synthetic
gcugcugcucgcuguuu

SEQ ID NO: 715666 - RNA, 17 nt, Artificial Sequence
  Synthetic
gaagaaaacggcuguuu

SEQ ID NO: 715667 - RNA, 17 nt, Artificial Sequence
  Synthetic
ggcauuucuggcuguuu

SEQ ID NO: 715668 - RNA, 17 nt, Artificial Sequence
  Synthetic
ggucuauauaucuguuu

SEQ ID NO: 715669 - RNA, 17 nt, Artificial Sequence
  Synthetic
gaucuauaucucuguuu

SEQ ID NO: 715670 - RNA, 17 nt, Artificial Sequence
  Synthetic
ggucuauaucucuguuu

SEQ ID NO: 715671 - RNA, 17 nt, Artificial Sequence
  Synthetic
gguguauaucucuguuu

SEQ ID NO: 715672 - RNA, 17 nt, Artificial Sequence
  Synthetic
gaucuauaugucuguuu

SEQ ID NO: 715673 - RNA, 17 nt, Artificial Sequence
  Synthetic
gauacugauaaguguuu

SEQ ID NO: 715674 - RNA, 17 nt, Artificial Sequence
  Synthetic
gcucaggaaagguguuu

SEQ ID NO: 715675 - RNA, 17 nt, Artificial Sequence
  Synthetic
guuugugcucuguguuu

SEQ ID NO: 715676 - RNA, 17 nt, Artificial Sequence
  Synthetic
guaauauauguguguuu

SEQ ID NO: 715677 - RNA, 17 nt, Artificial Sequence
  Synthetic
gagaaucaccauuguuu

SEQ ID NO: 715678 - RNA, 17 nt, Artificial Sequence
  Synthetic
guuaugcaguauuguuu

SEQ ID NO: 715679 - RNA, 17 nt, Artificial Sequence
  Synthetic
ggucaagucacuuguuu

SEQ ID NO: 715680 - RNA, 17 nt, Artificial Sequence
  Synthetic
gaauauucccuuuguuu

SEQ ID NO: 715681 - RNA, 17 nt, Artificial Sequence
  Synthetic
gucacuccuuuuuguuu

SEQ ID NO: 715682 - RNA, 17 nt, Artificial Sequence
  Synthetic
gacagacaaaaaauuuu

SEQ ID NO: 715683 - RNA, 17 nt, Artificial Sequence
  Synthetic
gaaguaaaacaaauuuu

SEQ ID NO: 715684 - RNA, 17 nt, Artificial Sequence
  Synthetic
ggcacugaccaaauuuu

SEQ ID NO: 715685 - RNA, 17 nt, Artificial Sequence
  Synthetic
gguuccaugcaaauuuu

SEQ ID NO: 715686 - RNA, 17 nt, Artificial Sequence
  Synthetic
gucuaggaagaaauuuu

SEQ ID NO: 715687 - RNA, 17 nt, Artificial Sequence
  Synthetic
gcaucccacuaaauuuu

SEQ ID NO: 715688 - RNA, 17 nt, Artificial Sequence
  Synthetic
gacacugguacaauuuu

SEQ ID NO: 715689 - RNA, 17 nt, Artificial Sequence
  Synthetic
gugggggucagaauuuu

SEQ ID NO: 715690 - RNA, 17 nt, Artificial Sequence
  Synthetic
ggggguuugagaauuuu

SEQ ID NO: 715691 - RNA, 17 nt, Artificial Sequence
  Synthetic
gguuucauaugaauuuu

SEQ ID NO: 715692 - RNA, 17 nt, Artificial Sequence
  Synthetic
gcacugaagugaauuuu

SEQ ID NO: 715693 - RNA, 17 nt, Artificial Sequence
  Synthetic
ggagaagagugaauuuu

SEQ ID NO: 715694 - RNA, 17 nt, Artificial Sequence
  Synthetic
gucuaacuuguaauuuu

SEQ ID NO: 715695 - RNA, 17 nt, Artificial Sequence
  Synthetic
gguuugguuuuaauuuu

SEQ ID NO: 715696 - RNA, 17 nt, Artificial Sequence
  Synthetic
gcaagggcucacauuuu

SEQ ID NO: 715697 - RNA, 17 nt, Artificial Sequence
  Synthetic
gugcuuuuugacauuuu

SEQ ID NO: 715698 - RNA, 17 nt, Artificial Sequence
  Synthetic
guuuuuugcaccauuuu

SEQ ID NO: 715699 - RNA, 17 nt, Artificial Sequence
  Synthetic
gacaggccucccauuuu

SEQ ID NO: 715700 - RNA, 17 nt, Artificial Sequence
  Synthetic
ggggcuaacgccauuuu

SEQ ID NO: 715701 - RNA, 17 nt, Artificial Sequence
  Synthetic
gaauaacacuucauuuu

SEQ ID NO: 715702 - RNA, 17 nt, Artificial Sequence
  Synthetic
gugcauuucuucauuuu

SEQ ID NO: 715703 - RNA, 17 nt, Artificial Sequence
  Synthetic
gaguauuguuucauuuu

SEQ ID NO: 715704 - RNA, 17 nt, Artificial Sequence
  Synthetic
gggauguguaagauuuu

SEQ ID NO: 715705 - RNA, 17 nt, Artificial Sequence
  Synthetic
gaauaccuuaagauuuu

SEQ ID NO: 715706 - RNA, 17 nt, Artificial Sequence
  Synthetic
guaucuagcaugauuuu

SEQ ID NO: 715707 - RNA, 17 nt, Artificial Sequence
  Synthetic
ggaauacaagugauuuu

SEQ ID NO: 715708 - RNA, 17 nt, Artificial Sequence
  Synthetic
gcacuuuuauugauuuu

SEQ ID NO: 715709 - RNA, 17 nt, Artificial Sequence
  Synthetic
guguuuuuuaauauuuu

SEQ ID NO: 715710 - RNA, 17 nt, Artificial Sequence
  Synthetic
guugucucauauauuuu

SEQ ID NO: 715711 - RNA, 17 nt, Artificial Sequence
  Synthetic
ggauucuacuauauuuu

SEQ ID NO: 715712 - RNA, 17 nt, Artificial Sequence
  Synthetic
guuaggaaaacuauuuu

SEQ ID NO: 715713 - RNA, 17 nt, Artificial Sequence
  Synthetic
guuucuaaaacuauuuu

SEQ ID NO: 715714 - RNA, 17 nt, Artificial Sequence
  Synthetic
gguaggcaagcuauuuu

SEQ ID NO: 715715 - RNA, 17 nt, Artificial Sequence
  Synthetic
guaaaaucaucuauuuu

SEQ ID NO: 715716 - RNA, 17 nt, Artificial Sequence
  Synthetic
gagggcaggaguauuuu

SEQ ID NO: 715717 - RNA, 17 nt, Artificial Sequence
  Synthetic
gaaaccaaggguauuuu

SEQ ID NO: 715718 - RNA, 17 nt, Artificial Sequence
  Synthetic
gcuaaaaaauguauuuu

SEQ ID NO: 715719 - RNA, 17 nt, Artificial Sequence
  Synthetic
gaaugucuauguauuuu

SEQ ID NO: 715720 - RNA, 17 nt, Artificial Sequence
  Synthetic
gcauagcuguguauuuu

SEQ ID NO: 715721 - RNA, 17 nt, Artificial Sequence
  Synthetic
gcuaauuuuuguauuuu

SEQ ID NO: 715722 - RNA, 17 nt, Artificial Sequence
  Synthetic
gcaaaauauauuauuuu

SEQ ID NO: 715723 - RNA, 17 nt, Artificial Sequence
  Synthetic
ggccuuguguuuauuuu

SEQ ID NO: 715724 - RNA, 17 nt, Artificial Sequence
  Synthetic
gagucacaugaacuuuu

SEQ ID NO: 715725 - RNA, 17 nt, Artificial Sequence
  Synthetic
guagaagcuuaacuuuu

SEQ ID NO: 715726 - RNA, 17 nt, Artificial Sequence
  Synthetic
gucaaaucaugacuuuu

SEQ ID NO: 715727 - RNA, 17 nt, Artificial Sequence
  Synthetic
ggguugguucuacuuuu

SEQ ID NO: 715728 - RNA, 17 nt, Artificial Sequence
  Synthetic
guaaaguuucuacuuuu

SEQ ID NO: 715729 - RNA, 17 nt, Artificial Sequence
  Synthetic
gcaauccccaaccuuuu

SEQ ID NO: 715730 - RNA, 17 nt, Artificial Sequence
  Synthetic
gugauaagguaccuuuu

SEQ ID NO: 715731 - RNA, 17 nt, Artificial Sequence
  Synthetic
ggucuuuuuucccuuuu

SEQ ID NO: 715732 - RNA, 17 nt, Artificial Sequence
  Synthetic
gucacgucaggccuuuu

SEQ ID NO: 715733 - RNA, 17 nt, Artificial Sequence
  Synthetic
gaaggcacaguccuuuu

SEQ ID NO: 715734 - RNA, 17 nt, Artificial Sequence
  Synthetic
gccaagcuaguccuuuu

SEQ ID NO: 715735 - RNA, 17 nt, Artificial Sequence
  Synthetic
gaugucuuccagcuuuu

SEQ ID NO: 715736 - RNA, 17 nt, Artificial Sequence
  Synthetic
gaugacauauagcuuuu

SEQ ID NO: 715737 - RNA, 17 nt, Artificial Sequence
  Synthetic
gcagacauagggcuuuu

SEQ ID NO: 715738 - RNA, 17 nt, Artificial Sequence
  Synthetic
guuuuucuuuggcuuuu

SEQ ID NO: 715739 - RNA, 17 nt, Artificial Sequence
  Synthetic
gagucaaaucugcuuuu

SEQ ID NO: 715740 - RNA, 17 nt, Artificial Sequence
  Synthetic
ggaucauuucugcuuuu

SEQ ID NO: 715741 - RNA, 17 nt, Artificial Sequence
  Synthetic
ggaaauaugcaucuuuu

SEQ ID NO: 715742 - RNA, 17 nt, Artificial Sequence
  Synthetic
gacucacgucaucuuuu

SEQ ID NO: 715743 - RNA, 17 nt, Artificial Sequence
  Synthetic
gugcaugcagaucuuuu

SEQ ID NO: 715744 - RNA, 17 nt, Artificial Sequence
  Synthetic
gcuuucaaauaucuuuu

SEQ ID NO: 715745 - RNA, 17 nt, Artificial Sequence
  Synthetic
gaagggauaacucuuuu

SEQ ID NO: 715746 - RNA, 17 nt, Artificial Sequence
  Synthetic
guuuuuuauucucuuuu

SEQ ID NO: 715747 - RNA, 17 nt, Artificial Sequence
  Synthetic
ggguuucaaagucuuuu

SEQ ID NO: 715748 - RNA, 17 nt, Artificial Sequence
  Synthetic
gagugcaugugucuuuu

SEQ ID NO: 715749 - RNA, 17 nt, Artificial Sequence
  Synthetic
gugcuuauuguucuuuu

SEQ ID NO: 715750 - RNA, 17 nt, Artificial Sequence
  Synthetic
ggguucuuuccaguuuu

SEQ ID NO: 715751 - RNA, 17 nt, Artificial Sequence
  Synthetic
gaauuuauaucaguuuu

SEQ ID NO: 715752 - RNA, 17 nt, Artificial Sequence
  Synthetic
gguucugucauaguuuu

SEQ ID NO: 715753 - RNA, 17 nt, Artificial Sequence
  Synthetic
gaauucuucauaguuuu

SEQ ID NO: 715754 - RNA, 17 nt, Artificial Sequence
  Synthetic
gucacacaccuaguuuu

SEQ ID NO: 715755 - RNA, 17 nt, Artificial Sequence
  Synthetic
ggccuccauguaguuuu

SEQ ID NO: 715756 - RNA, 17 nt, Artificial Sequence
  Synthetic
guguguggauucguuuu

SEQ ID NO: 715757 - RNA, 17 nt, Artificial Sequence
  Synthetic
gccuggcgggagguuuu

SEQ ID NO: 715758 - RNA, 17 nt, Artificial Sequence
  Synthetic
gucuaguacaugguuuu

SEQ ID NO: 715759 - RNA, 17 nt, Artificial Sequence
  Synthetic
gggguauaggugguuuu

SEQ ID NO: 715760 - RNA, 17 nt, Artificial Sequence
  Synthetic
gcuugccaguugguuuu

SEQ ID NO: 715761 - RNA, 17 nt, Artificial Sequence
  Synthetic
guuauauaaaauguuuu

SEQ ID NO: 715762 - RNA, 17 nt, Artificial Sequence
  Synthetic
gugagaacaaauguuuu

SEQ ID NO: 715763 - RNA, 17 nt, Artificial Sequence
  Synthetic
gggagugcuuauguuuu

SEQ ID NO: 715764 - RNA, 17 nt, Artificial Sequence
  Synthetic
gugguuuuaucuguuuu

SEQ ID NO: 715765 - RNA, 17 nt, Artificial Sequence
  Synthetic
gguccuuuggguguuuu

SEQ ID NO: 715766 - RNA, 17 nt, Artificial Sequence
  Synthetic
gcagaucagauuguuuu

SEQ ID NO: 715767 - RNA, 17 nt, Artificial Sequence
  Synthetic
gaagaauugcaauuuuu

SEQ ID NO: 715768 - RNA, 17 nt, Artificial Sequence
  Synthetic
gggguuugagaauuuuu

SEQ ID NO: 715769 - RNA, 17 nt, Artificial Sequence
  Synthetic
ggcaacauauaauuuuu

SEQ ID NO: 715770 - RNA, 17 nt, Artificial Sequence
  Synthetic
guugcuuccacauuuuu

SEQ ID NO: 715771 - RNA, 17 nt, Artificial Sequence
  Synthetic
gcugaaauaagauuuuu

SEQ ID NO: 715772 - RNA, 17 nt, Artificial Sequence
  Synthetic
ggcauuagugacuuuuu

SEQ ID NO: 715773 - RNA, 17 nt, Artificial Sequence
  Synthetic
ggcaaauccaccuuuuu

SEQ ID NO: 715774 - RNA, 17 nt, Artificial Sequence
  Synthetic
gccaggaaauccuuuuu

SEQ ID NO: 715775 - RNA, 17 nt, Artificial Sequence
  Synthetic
guggcagguggcuuuuu

SEQ ID NO: 715776 - RNA, 17 nt, Artificial Sequence
  Synthetic
gaaagccuuuucuuuuu

SEQ ID NO: 715777 - RNA, 17 nt, Artificial Sequence
  Synthetic
guccaaaacagguuuuu

SEQ ID NO: 715778 - RNA, 17 nt, Artificial Sequence
  Synthetic
gaggccacuuuguuuuu

SEQ ID NO: 715779 - RNA, 17 nt, Artificial Sequence
  Synthetic
gguuauuauuauuuuuu

SEQ ID NO: 715780 - RNA, 17 nt, Artificial Sequence
  Synthetic
gauuuucuuucuuuuuu

SEQ ID NO: 715781 - RNA, 17 nt, Artificial Sequence
  Synthetic
gguccuggacuuuuuuu

SEQ ID NO: 715782 - RNA, 17 nt, Artificial Sequence
  Synthetic
gguaauucuuuuuuuuu

SEQ ID NO: 715783 - RNA, 17 nt, Artificial Sequence
  Synthetic
guauauaguuuuuuuuu

SEQ ID NO: 715784 - RNA, 20 nt, Artificial Sequence
  Synthetic
guaaaaaaaaaaaaaaaaaa

SEQ ID NO: 715785 - RNA, 20 nt, Artificial Sequence
  Synthetic
guaaacaaaaaaaaaaaaaa

SEQ ID NO: 715786 - RNA, 20 nt, Artificial Sequence
  Synthetic
gacuuuaaaaaaaaaaaaaa

SEQ ID NO: 715787 - RNA, 20 nt, Artificial Sequence
  Synthetic
ggugauuagaaaaaaaaaaa

SEQ ID NO: 715788 - RNA, 20 nt, Artificial Sequence
  Synthetic
gcuccagaccaaaaaaaaaa

SEQ ID NO: 715789 - RNA, 20 nt, Artificial Sequence
  Synthetic
gacccugucuccaaaaaaaa

SEQ ID NO: 715790 - RNA, 20 nt, Artificial Sequence
  Synthetic
guuacugucacacaaaaaaa

SEQ ID NO: 715791 - RNA, 20 nt, Artificial Sequence
  Synthetic
gaauauucuuuagaaaaaaa

SEQ ID NO: 715792 - RNA, 20 nt, Artificial Sequence
  Synthetic
ggaacagcaacaacaaaaaa

SEQ ID NO: 715793 - RNA, 20 nt, Artificial Sequence
  Synthetic
gaagcuauguaaccaaaaaa

SEQ ID NO: 715794 - RNA, 20 nt, Artificial Sequence
  Synthetic
gggauagaauccccaaaaaa

SEQ ID NO: 715795 - RNA, 20 nt, Artificial Sequence
  Synthetic
gagguccaaaguccaaaaaa

SEQ ID NO: 715796 - RNA, 20 nt, Artificial Sequence
  Synthetic
gaaacugaaaaagcaaaaaa

SEQ ID NO: 715797 - RNA, 20 nt, Artificial Sequence
  Synthetic
guaguacuaugaagaaaaaa

SEQ ID NO: 715798 - RNA, 20 nt, Artificial Sequence
  Synthetic
gggauucaaaucagaaaaaa

SEQ ID NO: 715799 - RNA, 20 nt, Artificial Sequence
  Synthetic
gguaagcuuagaugaaaaaa

SEQ ID NO: 715800 - RNA, 20 nt, Artificial Sequence
  Synthetic
gaagucuccuguauaaaaaa

SEQ ID NO: 715801 - RNA, 20 nt, Artificial Sequence
  Synthetic
gccugccuuuaucuaaaaaa

SEQ ID NO: 715802 - RNA, 20 nt, Artificial Sequence
  Synthetic
gacuuucacuuuuuaaaaaa

SEQ ID NO: 715803 - RNA, 20 nt, Artificial Sequence
  Synthetic
guguaggaaguggacaaaaa

SEQ ID NO: 715804 - RNA, 20 nt, Artificial Sequence
  Synthetic
guagaggagauuuacaaaaa

SEQ ID NO: 715805 - RNA, 20 nt, Artificial Sequence
  Synthetic
gugaaaagaagguccaaaaa

SEQ ID NO: 715806 - RNA, 20 nt, Artificial Sequence
  Synthetic
gaaaaugugguaaucaaaaa

SEQ ID NO: 715807 - RNA, 20 nt, Artificial Sequence
  Synthetic
gaaaaaacuuaaaagaaaaa

SEQ ID NO: 715808 - RNA, 20 nt, Artificial Sequence
  Synthetic
gaguuugagagaaagaaaaa

SEQ ID NO: 715809 - RNA, 20 nt, Artificial Sequence
  Synthetic
gaucuucuaaacaagaaaaa

SEQ ID NO: 715810 - RNA, 20 nt, Artificial Sequence
  Synthetic
gccagacuaaugaagaaaaa

SEQ ID NO: 715811 - RNA, 20 nt, Artificial Sequence
  Synthetic
guaguuucaguuuagaaaaa

SEQ ID NO: 715812 - RNA, 20 nt, Artificial Sequence
  Synthetic
gagaggcauguggcgaaaaa

SEQ ID NO: 715813 - RNA, 20 nt, Artificial Sequence
  Synthetic
gacagcacaucuaggaaaaa

SEQ ID NO: 715814 - RNA, 20 nt, Artificial Sequence
  Synthetic
ggaggacuaaguaggaaaaa

SEQ ID NO: 715815 - RNA, 20 nt, Artificial Sequence
  Synthetic
guaaaggagguagggaaaaa

SEQ ID NO: 715816 - RNA, 20 nt, Artificial Sequence
  Synthetic
gauggcauauuugggaaaaa

SEQ ID NO: 715817 - RNA, 20 nt, Artificial Sequence
  Synthetic
guuauuacuguguggaaaaa

SEQ ID NO: 715818 - RNA, 20 nt, Artificial Sequence
  Synthetic
gaaugaaaaaaagugaaaaa

SEQ ID NO: 715819 - RNA, 20 nt, Artificial Sequence
  Synthetic
gauaagaaaacagugaaaaa

SEQ ID NO: 715820 - RNA, 20 nt, Artificial Sequence
  Synthetic
guaucacucucauugaaaaa

SEQ ID NO: 715821 - RNA, 20 nt, Artificial Sequence
  Synthetic
gaaaaaauagaaaauaaaaa

SEQ ID NO: 715822 - RNA, 20 nt, Artificial Sequence
  Synthetic
guugguuaaaauaauaaaaa

SEQ ID NO: 715823 - RNA, 20 nt, Artificial Sequence
  Synthetic
gugggaguuauuaauaaaaa

SEQ ID NO: 715824 - RNA, 20 nt, Artificial Sequence
  Synthetic
gcauuuugguagcauaaaaa

SEQ ID NO: 715825 - RNA, 20 nt, Artificial Sequence
  Synthetic
gggucucagcaauauaaaaa

SEQ ID NO: 715826 - RNA, 20 nt, Artificial Sequence
  Synthetic
gauauaggaaauuauaaaaa

SEQ ID NO: 715827 - RNA, 20 nt, Artificial Sequence
  Synthetic
gaaucuaugaucacuaaaaa

SEQ ID NO: 715828 - RNA, 20 nt, Artificial Sequence
  Synthetic
gauuaaacauaagcuaaaaa

SEQ ID NO: 715829 - RNA, 20 nt, Artificial Sequence
  Synthetic
gaagaaggucagguuaaaaa

SEQ ID NO: 715830 - RNA, 20 nt, Artificial Sequence
  Synthetic
guaacaguccguguuaaaaa

SEQ ID NO: 715831 - RNA, 20 nt, Artificial Sequence
  Synthetic
guauccuuugauuuuaaaaa

SEQ ID NO: 715832 - RNA, 20 nt, Artificial Sequence
  Synthetic
gaccuaggcggcaaacaaaa

SEQ ID NO: 715833 - RNA, 20 nt, Artificial Sequence
  Synthetic
gaagcuuucuuuaaacaaaa

SEQ ID NO: 715834 - RNA, 20 nt, Artificial Sequence
  Synthetic
gaaugaagauguccacaaaa

SEQ ID NO: 715835 - RNA, 20 nt, Artificial Sequence
  Synthetic
guacaaagggcagcacaaaa

SEQ ID NO: 715836 - RNA, 20 nt, Artificial Sequence
  Synthetic
gucauuauauaaugacaaaa

SEQ ID NO: 715837 - RNA, 20 nt, Artificial Sequence
  Synthetic
guaaauuaguacaaccaaaa

SEQ ID NO: 715838 - RNA, 20 nt, Artificial Sequence
  Synthetic
guuccuguaagauaccaaaa

SEQ ID NO: 715839 - RNA, 20 nt, Artificial Sequence
  Synthetic
gaauucguguucuaccaaaa

SEQ ID NO: 715840 - RNA, 20 nt, Artificial Sequence
  Synthetic
gccaacagaaauagccaaaa

SEQ ID NO: 715841 - RNA, 20 nt, Artificial Sequence
  Synthetic
ggguccagauucugccaaaa

SEQ ID NO: 715842 - RNA, 20 nt, Artificial Sequence
  Synthetic
gugagaaaucagcuccaaaa

SEQ ID NO: 715843 - RNA, 20 nt, Artificial Sequence
  Synthetic
gaaagcuggaaaguccaaaa

SEQ ID NO: 715844 - RNA, 20 nt, Artificial Sequence
  Synthetic
gaaaggccagaauuccaaaa

SEQ ID NO: 715845 - RNA, 20 nt, Artificial Sequence
  Synthetic
gugugguuguauaagcaaaa

SEQ ID NO: 715846 - RNA, 20 nt, Artificial Sequence
  Synthetic
ggaaaagauguggagcaaaa

SEQ ID NO: 715847 - RNA, 20 nt, Artificial Sequence
  Synthetic
gcuuauuuuauuuagcaaaa

SEQ ID NO: 715848 - RNA, 20 nt, Artificial Sequence
  Synthetic
gcaaauaaggagacgcaaaa

SEQ ID NO: 715849 - RNA, 20 nt, Artificial Sequence
  Synthetic
gauuuagaugucaugcaaaa

SEQ ID NO: 715850 - RNA, 20 nt, Artificial Sequence
  Synthetic
ggccauuuucuucugcaaaa

SEQ ID NO: 715851 - RNA, 20 nt, Artificial Sequence
  Synthetic
gguaauggugaagugcaaaa

SEQ ID NO: 715852 - RNA, 20 nt, Artificial Sequence
  Synthetic
gugagagaauggaaucaaaa

SEQ ID NO: 715853 - RNA, 20 nt, Artificial Sequence
  Synthetic
ggaaaccaaagucaucaaaa

SEQ ID NO: 715854 - RNA, 20 nt, Artificial Sequence
  Synthetic
gagggcaagaaagaucaaaa

SEQ ID NO: 715855 - RNA, 20 nt, Artificial Sequence
  Synthetic
gggaaaacaaaaccucaaaa

SEQ ID NO: 715856 - RNA, 20 nt, Artificial Sequence
  Synthetic
gauagaaaaccagcucaaaa

SEQ ID NO: 715857 - RNA, 20 nt, Artificial Sequence
  Synthetic
gccagaaaaugggcucaaaa

SEQ ID NO: 715858 - RNA, 20 nt, Artificial Sequence
  Synthetic
guagaaauuuaucuucaaaa

SEQ ID NO: 715859 - RNA, 20 nt, Artificial Sequence
  Synthetic
gauaucugaugaaaagaaaa

SEQ ID NO: 715860 - RNA, 20 nt, Artificial Sequence
  Synthetic
gaagaauagaagaaagaaaa

SEQ ID NO: 715861 - RNA, 20 nt, Artificial Sequence
  Synthetic
gugagagaagagaaagaaaa

SEQ ID NO: 715862 - RNA, 20 nt, Artificial Sequence
  Synthetic
gguuucugaaaucaagaaaa

SEQ ID NO: 715863 - RNA, 20 nt, Artificial Sequence
  Synthetic
gggaaauagagggaagaaaa

SEQ ID NO: 715864 - RNA, 20 nt, Artificial Sequence
  Synthetic
guaucaauaacauaagaaaa

SEQ ID NO: 715865 - RNA, 20 nt, Artificial Sequence
  Synthetic
gaucacuauuaguaagaaaa

SEQ ID NO: 715866 - RNA, 20 nt, Artificial Sequence
  Synthetic
gguuaaggaaauuaagaaaa

SEQ ID NO: 715867 - RNA, 20 nt, Artificial Sequence
  Synthetic
gcuucauucccuuaagaaaa

SEQ ID NO: 715868 - RNA, 20 nt, Artificial Sequence
  Synthetic
gggcauacuauuuaagaaaa

SEQ ID NO: 715869 - RNA, 20 nt, Artificial Sequence
  Synthetic
ggcuuuggccauacagaaaa

SEQ ID NO: 715870 - RNA, 20 nt, Artificial Sequence
  Synthetic
gaggacagaaccccagaaaa

SEQ ID NO: 715871 - RNA, 20 nt, Artificial Sequence
  Synthetic
gguuguacagcagcagaaaa

SEQ ID NO: 715872 - RNA, 20 nt, Artificial Sequence
  Synthetic
gauagugaggcagcagaaaa

SEQ ID NO: 715873 - RNA, 20 nt, Artificial Sequence
  Synthetic
gaucuccgagaggcagaaaa

SEQ ID NO: 715874 - RNA, 20 nt, Artificial Sequence
  Synthetic
gagaagcucuaggcagaaaa

SEQ ID NO: 715875 - RNA, 20 nt, Artificial Sequence
  Synthetic
ggcuggccauaugcagaaaa

SEQ ID NO: 715876 - RNA, 20 nt, Artificial Sequence
  Synthetic
ggcuagucauaugcagaaaa

SEQ ID NO: 715877 - RNA, 20 nt, Artificial Sequence
  Synthetic
guggguaaccauggagaaaa

SEQ ID NO: 715878 - RNA, 20 nt, Artificial Sequence
  Synthetic
gagcugugauuaugagaaaa

SEQ ID NO: 715879 - RNA, 20 nt, Artificial Sequence
  Synthetic
ggugaauagaauugagaaaa

SEQ ID NO: 715880 - RNA, 20 nt, Artificial Sequence
  Synthetic
gugcuucaaaccauagaaaa

SEQ ID NO: 715881 - RNA, 20 nt, Artificial Sequence
  Synthetic
gagacuugggggguagaaaa

SEQ ID NO: 715882 - RNA, 20 nt, Artificial Sequence
  Synthetic
gaguguauacaguuagaaaa

SEQ ID NO: 715883 - RNA, 20 nt, Artificial Sequence
  Synthetic
guggaaauguauuuagaaaa

SEQ ID NO: 715884 - RNA, 20 nt, Artificial Sequence
  Synthetic
gccaugggugguuuagaaaa

SEQ ID NO: 715885 - RNA, 20 nt, Artificial Sequence
  Synthetic
guguugagagucaaggaaaa

SEQ ID NO: 715886 - RNA, 20 nt, Artificial Sequence
  Synthetic
gggucauuuauacaggaaaa

SEQ ID NO: 715887 - RNA, 20 nt, Artificial Sequence
  Synthetic
gaggaaggaaagcaggaaaa

SEQ ID NO: 715888 - RNA, 20 nt, Artificial Sequence
  Synthetic
gggaggcugaggcaggaaaa

SEQ ID NO: 715889 - RNA, 20 nt, Artificial Sequence
  Synthetic
gagcagggagcggaggaaaa

SEQ ID NO: 715890 - RNA, 20 nt, Artificial Sequence
  Synthetic
ggacuguaaacugaggaaaa

SEQ ID NO: 715891 - RNA, 20 nt, Artificial Sequence
  Synthetic
gguggaaaaagaagggaaaa

SEQ ID NO: 715892 - RNA, 20 nt, Artificial Sequence
  Synthetic
gcuugggggcucagggaaaa

SEQ ID NO: 715893 - RNA, 20 nt, Artificial Sequence
  Synthetic
gaggguggaaugagggaaaa

SEQ ID NO: 715894 - RNA, 20 nt, Artificial Sequence
  Synthetic
gagugaaaggauggggaaaa

SEQ ID NO: 715895 - RNA, 20 nt, Artificial Sequence
  Synthetic
gauuaauguucaauggaaaa

SEQ ID NO: 715896 - RNA, 20 nt, Artificial Sequence
  Synthetic
guggauuuagggguggaaaa

SEQ ID NO: 715897 - RNA, 20 nt, Artificial Sequence
  Synthetic
gggacuucucauuuggaaaa

SEQ ID NO: 715898 - RNA, 20 nt, Artificial Sequence
  Synthetic
gauguccaggagaaugaaaa

SEQ ID NO: 715899 - RNA, 20 nt, Artificial Sequence
  Synthetic
guuuacucuuagaaugaaaa

SEQ ID NO: 715900 - RNA, 20 nt, Artificial Sequence
  Synthetic
ggacuggguuagaaugaaaa

SEQ ID NO: 715901 - RNA, 20 nt, Artificial Sequence
  Synthetic
gugaccuuucuacaugaaaa

SEQ ID NO: 715902 - RNA, 20 nt, Artificial Sequence
  Synthetic
ggcaauuuugaugaugaaaa

SEQ ID NO: 715903 - RNA, 20 nt, Artificial Sequence
  Synthetic
gguacugaauauuaugaaaa

SEQ ID NO: 715904 - RNA, 20 nt, Artificial Sequence
  Synthetic
gcaagacugugcacugaaaa

SEQ ID NO: 715905 - RNA, 20 nt, Artificial Sequence
  Synthetic
gugggaaggggagcugaaaa

SEQ ID NO: 715906 - RNA, 20 nt, Artificial Sequence
  Synthetic
gucuccugaaaaucugaaaa

SEQ ID NO: 715907 - RNA, 20 nt, Artificial Sequence
  Synthetic
gaucauuuuuuuugugaaaa

SEQ ID NO: 715908 - RNA, 20 nt, Artificial Sequence
  Synthetic
ggguuggauaucauugaaaa

SEQ ID NO: 715909 - RNA, 20 nt, Artificial Sequence
  Synthetic
gcagguauuauuuuugaaaa

SEQ ID NO: 715910 - RNA, 20 nt, Artificial Sequence
  Synthetic
guuuccaagcagcaauaaaa

SEQ ID NO: 715911 - RNA, 20 nt, Artificial Sequence
  Synthetic
gacaaagcaaggcaauaaaa

SEQ ID NO: 715912 - RNA, 20 nt, Artificial Sequence
  Synthetic
gaaguuucauggcaauaaaa

SEQ ID NO: 715913 - RNA, 20 nt, Artificial Sequence
  Synthetic
guugaacauaaucaauaaaa

SEQ ID NO: 715914 - RNA, 20 nt, Artificial Sequence
  Synthetic
gacauuaguaaggaauaaaa

SEQ ID NO: 715915 - RNA, 20 nt, Artificial Sequence
  Synthetic
guggugaagguggaauaaaa

SEQ ID NO: 715916 - RNA, 20 nt, Artificial Sequence
  Synthetic
gaagaaaugacauaauaaaa

SEQ ID NO: 715917 - RNA, 20 nt, Artificial Sequence
  Synthetic
guaacugauuggacauaaaa

SEQ ID NO: 715918 - RNA, 20 nt, Artificial Sequence
  Synthetic
ggccaacauaauacauaaaa

SEQ ID NO: 715919 - RNA, 20 nt, Artificial Sequence
  Synthetic
gaaagcaagagagcauaaaa

SEQ ID NO: 715920 - RNA, 20 nt, Artificial Sequence
  Synthetic
ggaagaaauuggagauaaaa

SEQ ID NO: 715921 - RNA, 20 nt, Artificial Sequence
  Synthetic
gauuuugaucacugauaaaa

SEQ ID NO: 715922 - RNA, 20 nt, Artificial Sequence
  Synthetic
guacuacaaguuauauaaaa

SEQ ID NO: 715923 - RNA, 20 nt, Artificial Sequence
  Synthetic
ggauauaggaaauuauaaaa

SEQ ID NO: 715924 - RNA, 20 nt, Artificial Sequence
  Synthetic
gaagaaggccaccacuaaaa

SEQ ID NO: 715925 - RNA, 20 nt, Artificial Sequence
  Synthetic
ggagaugaaaaagccuaaaa

SEQ ID NO: 715926 - RNA, 20 nt, Artificial Sequence
  Synthetic
gggcagccucaggccuaaaa

SEQ ID NO: 715927 - RNA, 20 nt, Artificial Sequence
  Synthetic
ggagaaagaagaggcuaaaa

SEQ ID NO: 715928 - RNA, 20 nt, Artificial Sequence
  Synthetic
guucaugugcuuugcuaaaa

SEQ ID NO: 715929 - RNA, 20 nt, Artificial Sequence
  Synthetic
guggugggaagacucuaaaa

SEQ ID NO: 715930 - RNA, 20 nt, Artificial Sequence
  Synthetic
gcuuuauuguuucucuaaaa

SEQ ID NO: 715931 - RNA, 20 nt, Artificial Sequence
  Synthetic
gauauucacagugaguaaaa

SEQ ID NO: 715932 - RNA, 20 nt, Artificial Sequence
  Synthetic
ggcaucuaacaaagguaaaa

SEQ ID NO: 715933 - RNA, 20 nt, Artificial Sequence
  Synthetic
guggguggguauagguaaaa

SEQ ID NO: 715934 - RNA, 20 nt, Artificial Sequence
  Synthetic
guuucguuaccuugguaaaa

SEQ ID NO: 715935 - RNA, 20 nt, Artificial Sequence
  Synthetic
gcccuaagaagaguguaaaa

SEQ ID NO: 715936 - RNA, 20 nt, Artificial Sequence
  Synthetic
guguucaauuuaaauuaaaa

SEQ ID NO: 715937 - RNA, 20 nt, Artificial Sequence
  Synthetic
ggcaacaggguuaauuaaaa

SEQ ID NO: 715938 - RNA, 20 nt, Artificial Sequence
  Synthetic
gagggggacaaacauuaaaa

SEQ ID NO: 715939 - RNA, 20 nt, Artificial Sequence
  Synthetic
gaaaguagugacacuuaaaa

SEQ ID NO: 715940 - RNA, 20 nt, Artificial Sequence
  Synthetic
gaacgacaaaagacuuaaaa

SEQ ID NO: 715941 - RNA, 20 nt, Artificial Sequence
  Synthetic
gucagggauaauccuuaaaa

SEQ ID NO: 715942 - RNA, 20 nt, Artificial Sequence
  Synthetic
gcuuuuaaguauccuuaaaa

SEQ ID NO: 715943 - RNA, 20 nt, Artificial Sequence
  Synthetic
ggaguagaucuaucuuaaaa

SEQ ID NO: 715944 - RNA, 20 nt, Artificial Sequence
  Synthetic
ggaagaacacacucuuaaaa

SEQ ID NO: 715945 - RNA, 20 nt, Artificial Sequence
  Synthetic
gcuguuuugugccguuaaaa

SEQ ID NO: 715946 - RNA, 20 nt, Artificial Sequence
  Synthetic
guuauuauguagauuuaaaa

SEQ ID NO: 715947 - RNA, 20 nt, Artificial Sequence
  Synthetic
guaugguucucucuuuaaaa

SEQ ID NO: 715948 - RNA, 20 nt, Artificial Sequence
  Synthetic
gauuuacugauuguuuaaaa

SEQ ID NO: 715949 - RNA, 20 nt, Artificial Sequence
  Synthetic
guaccauagaaauuuuaaaa

SEQ ID NO: 715950 - RNA, 20 nt, Artificial Sequence
  Synthetic
ggauccucugccuuuuaaaa

SEQ ID NO: 715951 - RNA, 20 nt, Artificial Sequence
  Synthetic
guucaauagaauuuuuaaaa

SEQ ID NO: 715952 - RNA, 20 nt, Artificial Sequence
  Synthetic
gauauccaaaagaaaacaaa

SEQ ID NO: 715953 - RNA, 20 nt, Artificial Sequence
  Synthetic
gauccugucucgaaaacaaa

SEQ ID NO: 715954 - RNA, 20 nt, Artificial Sequence
  Synthetic
gagaggacaccacaaacaaa

SEQ ID NO: 715955 - RNA, 20 nt, Artificial Sequence
  Synthetic
gcucuugaucaccaaacaaa

SEQ ID NO: 715956 - RNA, 20 nt, Artificial Sequence
  Synthetic
gagaaauuggcccaaacaaa

SEQ ID NO: 715957 - RNA, 20 nt, Artificial Sequence
  Synthetic
gccagaaauaaagaaacaaa

SEQ ID NO: 715958 - RNA, 20 nt, Artificial Sequence
  Synthetic
ggguuccuuagagaaacaaa

SEQ ID NO: 715959 - RNA, 20 nt, Artificial Sequence
  Synthetic
gcagaaugccuuuaaacaaa

SEQ ID NO: 715960 - RNA, 20 nt, Artificial Sequence
  Synthetic
gaggagagaguuucaacaaa

SEQ ID NO: 715961 - RNA, 20 nt, Artificial Sequence
  Synthetic
gaggaagaaaacagaacaaa

SEQ ID NO: 715962 - RNA, 20 nt, Artificial Sequence
  Synthetic
guguucagaacuugaacaaa

SEQ ID NO: 715963 - RNA, 20 nt, Artificial Sequence
  Synthetic
gaauuuuuauuuugaacaaa

SEQ ID NO: 715964 - RNA, 20 nt, Artificial Sequence
  Synthetic
guccccauaaaauuaacaaa

SEQ ID NO: 715965 - RNA, 20 nt, Artificial Sequence
  Synthetic
gaaaaaucacaaaccacaaa

SEQ ID NO: 715966 - RNA, 20 nt, Artificial Sequence
  Synthetic
guuuuccuuuuauucacaaa

SEQ ID NO: 715967 - RNA, 20 nt, Artificial Sequence
  Synthetic
gccuccugugaaaagacaaa

SEQ ID NO: 715968 - RNA, 20 nt, Artificial Sequence
  Synthetic
gaguagggagaggggacaaa

SEQ ID NO: 715969 - RNA, 20 nt, Artificial Sequence
  Synthetic
guauacuuuugaaugacaaa

SEQ ID NO: 715970 - RNA, 20 nt, Artificial Sequence
  Synthetic
ggucauuauauaaugacaaa

SEQ ID NO: 715971 - RNA, 20 nt, Artificial Sequence
  Synthetic
guuguuauaaugaauacaaa

SEQ ID NO: 715972 - RNA, 20 nt, Artificial Sequence
  Synthetic
gccacaagugugaauacaaa

SEQ ID NO: 715973 - RNA, 20 nt, Artificial Sequence
  Synthetic
ggauagaaaguugauacaaa

SEQ ID NO: 715974 - RNA, 20 nt, Artificial Sequence
  Synthetic
guaauggauuaauauacaaa

SEQ ID NO: 715975 - RNA, 20 nt, Artificial Sequence
  Synthetic
gagaaguaaaaaaguacaaa

SEQ ID NO: 715976 - RNA, 20 nt, Artificial Sequence
  Synthetic
gcauuaaauauucguacaaa

SEQ ID NO: 715977 - RNA, 20 nt, Artificial Sequence
  Synthetic
guaaauauacccauuacaaa

SEQ ID NO: 715978 - RNA, 20 nt, Artificial Sequence
  Synthetic
gagaaaauauugcuuacaaa

SEQ ID NO: 715979 - RNA, 20 nt, Artificial Sequence
  Synthetic
gacucaaccuucuuuacaaa

SEQ ID NO: 715980 - RNA, 20 nt, Artificial Sequence
  Synthetic
gagauccacauuaaaccaaa

SEQ ID NO: 715981 - RNA, 20 nt, Artificial Sequence
  Synthetic
gaggcagcaagacaaccaaa

SEQ ID NO: 715982 - RNA, 20 nt, Artificial Sequence
  Synthetic
guaaacagacaaacaccaaa

SEQ ID NO: 715983 - RNA, 20 nt, Artificial Sequence
  Synthetic
gugcaaugaccuacaccaaa

SEQ ID NO: 715984 - RNA, 20 nt, Artificial Sequence
  Synthetic
gaaauaagccagucaccaaa

SEQ ID NO: 715985 - RNA, 20 nt, Artificial Sequence
  Synthetic
gaauauauucugucaccaaa

SEQ ID NO: 715986 - RNA, 20 nt, Artificial Sequence
  Synthetic
gaaugacauuuuagaccaaa

SEQ ID NO: 715987 - RNA, 20 nt, Artificial Sequence
  Synthetic
ggagguagaagaugaccaaa

SEQ ID NO: 715988 - RNA, 20 nt, Artificial Sequence
  Synthetic
guaaguuuuaaauuaccaaa

SEQ ID NO: 715989 - RNA, 20 nt, Artificial Sequence
  Synthetic
gaugucauaauuuuaccaaa

SEQ ID NO: 715990 - RNA, 20 nt, Artificial Sequence
  Synthetic
gaugggaccaagcucccaaa

SEQ ID NO: 715991 - RNA, 20 nt, Artificial Sequence
  Synthetic
gagaaccucccucagccaaa

SEQ ID NO: 715992 - RNA, 20 nt, Artificial Sequence
  Synthetic
ggguugacaaaauagccaaa

SEQ ID NO: 715993 - RNA, 20 nt, Artificial Sequence
  Synthetic
gcccauagggcucugccaaa

SEQ ID NO: 715994 - RNA, 20 nt, Artificial Sequence
  Synthetic
gagauggaugugacuccaaa

SEQ ID NO: 715995 - RNA, 20 nt, Artificial Sequence
  Synthetic
ggucagaacuggcuuccaaa

SEQ ID NO: 715996 - RNA, 20 nt, Artificial Sequence
  Synthetic
gggaguuuucuuuuuccaaa

SEQ ID NO: 715997 - RNA, 20 nt, Artificial Sequence
  Synthetic
ggcacaacgucuaaagcaaa

SEQ ID NO: 715998 - RNA, 20 nt, Artificial Sequence
  Synthetic
guaucaaauauuaaagcaaa

SEQ ID NO: 715999 - RNA, 20 nt, Artificial Sequence
  Synthetic
gagugagauucugaagcaaa

SEQ ID NO: 716000 - RNA, 20 nt, Artificial Sequence
  Synthetic
gagauggggaaaagagcaaa

SEQ ID NO: 716001 - RNA, 20 nt, Artificial Sequence
  Synthetic
gaaugucauuggagagcaaa

SEQ ID NO: 716002 - RNA, 20 nt, Artificial Sequence
  Synthetic
gacuuuuacaaucuagcaaa

SEQ ID NO: 716003 - RNA, 20 nt, Artificial Sequence
  Synthetic
gugucuaagaacagggcaaa

SEQ ID NO: 716004 - RNA, 20 nt, Artificial Sequence
  Synthetic
gaucgcaggaguugggcaaa

SEQ ID NO: 716005 - RNA, 20 nt, Artificial Sequence
  Synthetic
guuuuugaauuuuaugcaaa

SEQ ID NO: 716006 - RNA, 20 nt, Artificial Sequence
  Synthetic
guaauuguacauucugcaaa

SEQ ID NO: 716007 - RNA, 20 nt, Artificial Sequence
  Synthetic
gauuuauauguaagugcaaa

SEQ ID NO: 716008 - RNA, 20 nt, Artificial Sequence
  Synthetic
gcucuuaaauuguuugcaaa

SEQ ID NO: 716009 - RNA, 20 nt, Artificial Sequence
  Synthetic
gacuauauaccuaaaucaaa

SEQ ID NO: 716010 - RNA, 20 nt, Artificial Sequence
  Synthetic
gauuaaacucuccaaucaaa

SEQ ID NO: 716011 - RNA, 20 nt, Artificial Sequence
  Synthetic
gggaacuguguucaaucaaa

SEQ ID NO: 716012 - RNA, 20 nt, Artificial Sequence
  Synthetic
gaacucaagaaaacaucaaa

SEQ ID NO: 716013 - RNA, 20 nt, Artificial Sequence
  Synthetic
gagacagaaauaacaucaaa

SEQ ID NO: 716014 - RNA, 20 nt, Artificial Sequence
  Synthetic
gauggacaguaagcaucaaa

SEQ ID NO: 716015 - RNA, 20 nt, Artificial Sequence
  Synthetic
gugaaaacaaaaagaucaaa

SEQ ID NO: 716016 - RNA, 20 nt, Artificial Sequence
  Synthetic
gaauguauuucaauaucaaa

SEQ ID NO: 716017 - RNA, 20 nt, Artificial Sequence
  Synthetic
gaauauuuuaaugacucaaa

SEQ ID NO: 716018 - RNA, 20 nt, Artificial Sequence
  Synthetic
gagcgagacuccaucucaaa

SEQ ID NO: 716019 - RNA, 20 nt, Artificial Sequence
  Synthetic
gcucuuuugagucucucaaa

SEQ ID NO: 716020 - RNA, 20 nt, Artificial Sequence
  Synthetic
gacuuuucuuuagauucaaa

SEQ ID NO: 716021 - RNA, 20 nt, Artificial Sequence
  Synthetic
gaauaauccaauuauucaaa

SEQ ID NO: 716022 - RNA, 20 nt, Artificial Sequence
  Synthetic
ggcuagauuucuccuucaaa

SEQ ID NO: 716023 - RNA, 20 nt, Artificial Sequence
  Synthetic
gaauugucaagucuuucaaa

SEQ ID NO: 716024 - RNA, 20 nt, Artificial Sequence
  Synthetic
gaguuaguuauucuuucaaa

SEQ ID NO: 716025 - RNA, 20 nt, Artificial Sequence
  Synthetic
gucuugugccaguuuucaaa

SEQ ID NO: 716026 - RNA, 20 nt, Artificial Sequence
  Synthetic
gagauacacuaaaaaagaaa

SEQ ID NO: 716027 - RNA, 20 nt, Artificial Sequence
  Synthetic
ggguacauacucaaaagaaa

SEQ ID NO: 716028 - RNA, 20 nt, Artificial Sequence
  Synthetic
guuggaugcauggaaagaaa

SEQ ID NO: 716029 - RNA, 20 nt, Artificial Sequence
  Synthetic
ggguauguaugugaaagaaa

SEQ ID NO: 716030 - RNA, 20 nt, Artificial Sequence
  Synthetic
ggccaucagccaacaagaaa

SEQ ID NO: 716031 - RNA, 20 nt, Artificial Sequence
  Synthetic
gaaggcaauacgccaagaaa

SEQ ID NO: 716032 - RNA, 20 nt, Artificial Sequence
  Synthetic
guuacaauccgaucaagaaa

SEQ ID NO: 716033 - RNA, 20 nt, Artificial Sequence
  Synthetic
ggaggcccuggaucaagaaa

SEQ ID NO: 716034 - RNA, 20 nt, Artificial Sequence
  Synthetic
guuauuguuucaagaagaaa

SEQ ID NO: 716035 - RNA, 20 nt, Artificial Sequence
  Synthetic
ggaaucaugaccagaagaaa

SEQ ID NO: 716036 - RNA, 20 nt, Artificial Sequence
  Synthetic
guuaagagagggagaagaaa

SEQ ID NO: 716037 - RNA, 20 nt, Artificial Sequence
  Synthetic
gggcuggaggagggaagaaa

SEQ ID NO: 716038 - RNA, 20 nt, Artificial Sequence
  Synthetic
gaaugugacaaaugaagaaa

SEQ ID NO: 716039 - RNA, 20 nt, Artificial Sequence
  Synthetic
ggauguugaagaugaagaaa

SEQ ID NO: 716040 - RNA, 20 nt, Artificial Sequence
  Synthetic
gaaaauagacacugaagaaa

SEQ ID NO: 716041 - RNA, 20 nt, Artificial Sequence
  Synthetic
gaagaaucagacugaagaaa

SEQ ID NO: 716042 - RNA, 20 nt, Artificial Sequence
  Synthetic
gaaauccuaaagguaagaaa

SEQ ID NO: 716043 - RNA, 20 nt, Artificial Sequence
  Synthetic
gguaaaaaugauuuaagaaa

SEQ ID NO: 716044 - RNA, 20 nt, Artificial Sequence
  Synthetic
gaagagacaaccaacagaaa

SEQ ID NO: 716045 - RNA, 20 nt, Artificial Sequence
  Synthetic
guauuugagaagaacagaaa

SEQ ID NO: 716046 - RNA, 20 nt, Artificial Sequence
  Synthetic
gcacucugauaggacagaaa

SEQ ID NO: 716047 - RNA, 20 nt, Artificial Sequence
  Synthetic
gauauuuuaucugacagaaa

SEQ ID NO: 716048 - RNA, 20 nt, Artificial Sequence
  Synthetic
gagaccuugaccaccagaaa

SEQ ID NO: 716049 - RNA, 20 nt, Artificial Sequence
  Synthetic
gaggauucagaauccagaaa

SEQ ID NO: 716050 - RNA, 20 nt, Artificial Sequence
  Synthetic
gaaagcaucuaauccagaaa

SEQ ID NO: 716051 - RNA, 20 nt, Artificial Sequence
  Synthetic
guuuugaacagaagcagaaa

SEQ ID NO: 716052 - RNA, 20 nt, Artificial Sequence
  Synthetic
ggagaucaguuaggcagaaa

SEQ ID NO: 716053 - RNA, 20 nt, Artificial Sequence
  Synthetic
ggaggagucaguggcagaaa

SEQ ID NO: 716054 - RNA, 20 nt, Artificial Sequence
  Synthetic
gccaaaagccacugcagaaa

SEQ ID NO: 716055 - RNA, 20 nt, Artificial Sequence
  Synthetic
ggaaugauacacaucagaaa

SEQ ID NO: 716056 - RNA, 20 nt, Artificial Sequence
  Synthetic
guaguaauaaagcucagaaa

SEQ ID NO: 716057 - RNA, 20 nt, Artificial Sequence
  Synthetic
gcaucaucuuugcucagaaa

SEQ ID NO: 716058 - RNA, 20 nt, Artificial Sequence
  Synthetic
guauuuuugugucucagaaa

SEQ ID NO: 716059 - RNA, 20 nt, Artificial Sequence
  Synthetic
gugaacaagaaguucagaaa

SEQ ID NO: 716060 - RNA, 20 nt, Artificial Sequence
  Synthetic
gguguguugguuaagagaaa

SEQ ID NO: 716061 - RNA, 20 nt, Artificial Sequence
  Synthetic
guucacaugaggcagagaaa

SEQ ID NO: 716062 - RNA, 20 nt, Artificial Sequence
  Synthetic
gagagagagagagagagaaa

SEQ ID NO: 716063 - RNA, 20 nt, Artificial Sequence
  Synthetic
gauugagagagagagagaaa

SEQ ID NO: 716064 - RNA, 20 nt, Artificial Sequence
  Synthetic
gggacucaacuuucgagaaa

SEQ ID NO: 716065 - RNA, 20 nt, Artificial Sequence
  Synthetic
gaauauuaccguaggagaaa

SEQ ID NO: 716066 - RNA, 20 nt, Artificial Sequence
  Synthetic
gaaauugcuuaauggagaaa

SEQ ID NO: 716067 - RNA, 20 nt, Artificial Sequence
  Synthetic
guaaauuacacauggagaaa

SEQ ID NO: 716068 - RNA, 20 nt, Artificial Sequence
  Synthetic
gguggguaaccauggagaaa

SEQ ID NO: 716069 - RNA, 20 nt, Artificial Sequence
  Synthetic
guacuagcuaaguggagaaa

SEQ ID NO: 716070 - RNA, 20 nt, Artificial Sequence
  Synthetic
gacauuucacauuugagaaa

SEQ ID NO: 716071 - RNA, 20 nt, Artificial Sequence
  Synthetic
gccagugaaccaaauagaaa

SEQ ID NO: 716072 - RNA, 20 nt, Artificial Sequence
  Synthetic
gaucucuugagagauagaaa

SEQ ID NO: 716073 - RNA, 20 nt, Artificial Sequence
  Synthetic
ggugaagggcauaguagaaa

SEQ ID NO: 716074 - RNA, 20 nt, Artificial Sequence
  Synthetic
ggagacuugggggguagaaa

SEQ ID NO: 716075 - RNA, 20 nt, Artificial Sequence
  Synthetic
gaugugucacacuguagaaa

SEQ ID NO: 716076 - RNA, 20 nt, Artificial Sequence
  Synthetic
ggcugccuaggguguagaaa

SEQ ID NO: 716077 - RNA, 20 nt, Artificial Sequence
  Synthetic
ggaguaaagaugguuagaaa

SEQ ID NO: 716078 - RNA, 20 nt, Artificial Sequence
  Synthetic
gcaaagguuaacuuuagaaa

SEQ ID NO: 716079 - RNA, 20 nt, Artificial Sequence
  Synthetic
gacagugugcauuuuagaaa

SEQ ID NO: 716080 - RNA, 20 nt, Artificial Sequence
  Synthetic
gaacgcaaaggaaaaggaaa

SEQ ID NO: 716081 - RNA, 20 nt, Artificial Sequence
  Synthetic
gcaaaggaacgcaaaggaaa

SEQ ID NO: 716082 - RNA, 20 nt, Artificial Sequence
  Synthetic
gugugcagguucaaaggaaa

SEQ ID NO: 716083 - RNA, 20 nt, Artificial Sequence
  Synthetic
gaggaaaauaaggaaggaaa

SEQ ID NO: 716084 - RNA, 20 nt, Artificial Sequence
  Synthetic
gucagggagauagcaggaaa

SEQ ID NO: 716085 - RNA, 20 nt, Artificial Sequence
  Synthetic
ggagugaggaaaggaggaaa

SEQ ID NO: 716086 - RNA, 20 nt, Artificial Sequence
  Synthetic
gggaaggaaggaggaggaaa

SEQ ID NO: 716087 - RNA, 20 nt, Artificial Sequence
  Synthetic
guauggaaaagaugaggaaa

SEQ ID NO: 716088 - RNA, 20 nt, Artificial Sequence
  Synthetic
gaacugagagcaaagggaaa

SEQ ID NO: 716089 - RNA, 20 nt, Artificial Sequence
  Synthetic
gagggagagggaaagggaaa

SEQ ID NO: 716090 - RNA, 20 nt, Artificial Sequence
  Synthetic
ggcugagugcuaaggggaaa

SEQ ID NO: 716091 - RNA, 20 nt, Artificial Sequence
  Synthetic
ggucagaaucugaggggaaa

SEQ ID NO: 716092 - RNA, 20 nt, Artificial Sequence
  Synthetic
gacaugauuagauggggaaa

SEQ ID NO: 716093 - RNA, 20 nt, Artificial Sequence
  Synthetic
gaacaagaauuuuggggaaa

SEQ ID NO: 716094 - RNA, 20 nt, Artificial Sequence
  Synthetic
gugggcugacugaugggaaa

SEQ ID NO: 716095 - RNA, 20 nt, Artificial Sequence
  Synthetic
gccuaagaacuggugggaaa

SEQ ID NO: 716096 - RNA, 20 nt, Artificial Sequence
  Synthetic
guuuauauccacaauggaaa

SEQ ID NO: 716097 - RNA, 20 nt, Artificial Sequence
  Synthetic
gcaguggucagacauggaaa

SEQ ID NO: 716098 - RNA, 20 nt, Artificial Sequence
  Synthetic
gggaaguaagaagauggaaa

SEQ ID NO: 716099 - RNA, 20 nt, Artificial Sequence
  Synthetic
gcgaacugagaagcuggaaa

SEQ ID NO: 716100 - RNA, 20 nt, Artificial Sequence
  Synthetic
gaagaaaagaggucuggaaa

SEQ ID NO: 716101 - RNA, 20 nt, Artificial Sequence
  Synthetic
ggugucacuuaaguuggaaa

SEQ ID NO: 716102 - RNA, 20 nt, Artificial Sequence
  Synthetic
ggcuuuagaacaguuggaaa

SEQ ID NO: 716103 - RNA, 20 nt, Artificial Sequence
  Synthetic
guauggagaggaguuggaaa

SEQ ID NO: 716104 - RNA, 20 nt, Artificial Sequence
  Synthetic
ggaucaucagccuuuggaaa

SEQ ID NO: 716105 - RNA, 20 nt, Artificial Sequence
  Synthetic
gaugcuguugacaaaugaaa

SEQ ID NO: 716106 - RNA, 20 nt, Artificial Sequence
  Synthetic
gaaauacaaaucaaaugaaa

SEQ ID NO: 716107 - RNA, 20 nt, Artificial Sequence
  Synthetic
gagguuucagucaaaugaaa

SEQ ID NO: 716108 - RNA, 20 nt, Artificial Sequence
  Synthetic
gcaagaaacaaaauaugaaa

SEQ ID NO: 716109 - RNA, 20 nt, Artificial Sequence
  Synthetic
guuccaaggagaauaugaaa

SEQ ID NO: 716110 - RNA, 20 nt, Artificial Sequence
  Synthetic
gaggagagaauuauaugaaa

SEQ ID NO: 716111 - RNA, 20 nt, Artificial Sequence
  Synthetic
gauaaacugaucuuaugaaa

SEQ ID NO: 716112 - RNA, 20 nt, Artificial Sequence
  Synthetic
gaguagagguuagacugaaa

SEQ ID NO: 716113 - RNA, 20 nt, Artificial Sequence
  Synthetic
gguaaggaauaacccugaaa

SEQ ID NO: 716114 - RNA, 20 nt, Artificial Sequence
  Synthetic
gaaguauuucaguccugaaa

SEQ ID NO: 716115 - RNA, 20 nt, Artificial Sequence
  Synthetic
gcaauugagauccucugaaa

SEQ ID NO: 716116 - RNA, 20 nt, Artificial Sequence
  Synthetic
gucauuuucacaaagugaaa

SEQ ID NO: 716117 - RNA, 20 nt, Artificial Sequence
  Synthetic
gagggaugaucucagugaaa

SEQ ID NO: 716118 - RNA, 20 nt, Artificial Sequence
  Synthetic
gauaauaaauuagcgugaaa

SEQ ID NO: 716119 - RNA, 20 nt, Artificial Sequence
  Synthetic
gaccaaaaguuauggugaaa

SEQ ID NO: 716120 - RNA, 20 nt, Artificial Sequence
  Synthetic
guuugaaacaaguggugaaa

SEQ ID NO: 716121 - RNA, 20 nt, Artificial Sequence
  Synthetic
gugcuaauuaaaaugugaaa

SEQ ID NO: 716122 - RNA, 20 nt, Artificial Sequence
  Synthetic
gaaaaauagcucaauugaaa

SEQ ID NO: 716123 - RNA, 20 nt, Artificial Sequence
  Synthetic
gucuggacuuagaauugaaa

SEQ ID NO: 716124 - RNA, 20 nt, Artificial Sequence
  Synthetic
gauuguguuugacauugaaa

SEQ ID NO: 716125 - RNA, 20 nt, Artificial Sequence
  Synthetic
ggaucuuacuuagauugaaa

SEQ ID NO: 716126 - RNA, 20 nt, Artificial Sequence
  Synthetic
gaaaaguugguuuauugaaa

SEQ ID NO: 716127 - RNA, 20 nt, Artificial Sequence
  Synthetic
gcuuucuuugaaacuugaaa

SEQ ID NO: 716128 - RNA, 20 nt, Artificial Sequence
  Synthetic
gguugagggggagguugaaa

SEQ ID NO: 716129 - RNA, 20 nt, Artificial Sequence
  Synthetic
gcccaagucuccuguugaaa

SEQ ID NO: 716130 - RNA, 20 nt, Artificial Sequence
  Synthetic
gaaaggacacagguuugaaa

SEQ ID NO: 716131 - RNA, 20 nt, Artificial Sequence
  Synthetic
gagaggcuuuacuuuugaaa

SEQ ID NO: 716132 - RNA, 20 nt, Artificial Sequence
  Synthetic
gcaacacggguguuuugaaa

SEQ ID NO: 716133 - RNA, 20 nt, Artificial Sequence
  Synthetic
gcguuuuucuuguuuugaaa

SEQ ID NO: 716134 - RNA, 20 nt, Artificial Sequence
  Synthetic
gagaaauuggccaaaauaaa

SEQ ID NO: 716135 - RNA, 20 nt, Artificial Sequence
  Synthetic
gaaggauaacugaaaauaaa

SEQ ID NO: 716136 - RNA, 20 nt, Artificial Sequence
  Synthetic
gaaaauuaagugaaaauaaa

SEQ ID NO: 716137 - RNA, 20 nt, Artificial Sequence
  Synthetic
gaaaaugagaguaaaauaaa

SEQ ID NO: 716138 - RNA, 20 nt, Artificial Sequence
  Synthetic
guucccaaaaaggaaauaaa

SEQ ID NO: 716139 - RNA, 20 nt, Artificial Sequence
  Synthetic
gccguuaguccugaaauaaa

SEQ ID NO: 716140 - RNA, 20 nt, Artificial Sequence
  Synthetic
guuuaaauccuguaaauaaa

SEQ ID NO: 716141 - RNA, 20 nt, Artificial Sequence
  Synthetic
ggaaccuugaaaugaauaaa

SEQ ID NO: 716142 - RNA, 20 nt, Artificial Sequence
  Synthetic
gauuccuuguagcuaauaaa

SEQ ID NO: 716143 - RNA, 20 nt, Artificial Sequence
  Synthetic
gaacaugguaaauuaauaaa

SEQ ID NO: 716144 - RNA, 20 nt, Artificial Sequence
  Synthetic
guaugcuguguuuuaauaaa

SEQ ID NO: 716145 - RNA, 20 nt, Artificial Sequence
  Synthetic
guaaguggacagcccauaaa

SEQ ID NO: 716146 - RNA, 20 nt, Artificial Sequence
  Synthetic
gcccguuuuagaaagauaaa

SEQ ID NO: 716147 - RNA, 20 nt, Artificial Sequence
  Synthetic
gaucagguaccaaggauaaa

SEQ ID NO: 716148 - RNA, 20 nt, Artificial Sequence
  Synthetic
gaagaaaaaugugggauaaa

SEQ ID NO: 716149 - RNA, 20 nt, Artificial Sequence
  Synthetic
gcacaauaaaaaaugauaaa

SEQ ID NO: 716150 - RNA, 20 nt, Artificial Sequence
  Synthetic
gaaauaaacagaaugauaaa

SEQ ID NO: 716151 - RNA, 20 nt, Artificial Sequence
  Synthetic
ggucauuaaauaaugauaaa

SEQ ID NO: 716152 - RNA, 20 nt, Artificial Sequence
  Synthetic
gauuuccucaaccugauaaa

SEQ ID NO: 716153 - RNA, 20 nt, Artificial Sequence
  Synthetic
guugacuugacucauauaaa

SEQ ID NO: 716154 - RNA, 20 nt, Artificial Sequence
  Synthetic
gaauaaaaacaaacuauaaa

SEQ ID NO: 716155 - RNA, 20 nt, Artificial Sequence
  Synthetic
gcuuguuuuuugucuauaaa

SEQ ID NO: 716156 - RNA, 20 nt, Artificial Sequence
  Synthetic
gcaugguuaguuuguauaaa

SEQ ID NO: 716157 - RNA, 20 nt, Artificial Sequence
  Synthetic
gcugaucacaguauuauaaa

SEQ ID NO: 716158 - RNA, 20 nt, Artificial Sequence
  Synthetic
gauaagacagggaaacuaaa

SEQ ID NO: 716159 - RNA, 20 nt, Artificial Sequence
  Synthetic
ggcaauagcagggaacuaaa

SEQ ID NO: 716160 - RNA, 20 nt, Artificial Sequence
  Synthetic
gguuaaguuaauuaacuaaa

SEQ ID NO: 716161 - RNA, 20 nt, Artificial Sequence
  Synthetic
gcuagcauucauucacuaaa

SEQ ID NO: 716162 - RNA, 20 nt, Artificial Sequence
  Synthetic
gugcauauauaauuacuaaa

SEQ ID NO: 716163 - RNA, 20 nt, Artificial Sequence
  Synthetic
ggugaaauggaaagccuaaa

SEQ ID NO: 716164 - RNA, 20 nt, Artificial Sequence
  Synthetic
gucacauauuuuguccuaaa

SEQ ID NO: 716165 - RNA, 20 nt, Artificial Sequence
  Synthetic
ggaauauuacagaagcuaaa

SEQ ID NO: 716166 - RNA, 20 nt, Artificial Sequence
  Synthetic
guagauuuaauuuagcuaaa

SEQ ID NO: 716167 - RNA, 20 nt, Artificial Sequence
  Synthetic
guguaagguaacaggcuaaa

SEQ ID NO: 716168 - RNA, 20 nt, Artificial Sequence
  Synthetic
gcugcuuuuaaacugcuaaa

SEQ ID NO: 716169 - RNA, 20 nt, Artificial Sequence
  Synthetic
ggcuccuccugacaucuaaa

SEQ ID NO: 716170 - RNA, 20 nt, Artificial Sequence
  Synthetic
gccugccuuuaccaucuaaa

SEQ ID NO: 716171 - RNA, 20 nt, Artificial Sequence
  Synthetic
gccuguacuguauaucuaaa

SEQ ID NO: 716172 - RNA, 20 nt, Artificial Sequence
  Synthetic
gcagaauuggaaaaaguaaa

SEQ ID NO: 716173 - RNA, 20 nt, Artificial Sequence
  Synthetic
ggcagcagguaaaaaguaaa

SEQ ID NO: 716174 - RNA, 20 nt, Artificial Sequence
  Synthetic
gaucucauagaagcaguaaa

SEQ ID NO: 716175 - RNA, 20 nt, Artificial Sequence
  Synthetic
gauucccucauuucaguaaa

SEQ ID NO: 716176 - RNA, 20 nt, Artificial Sequence
  Synthetic
gaaagaguaaccagaguaaa

SEQ ID NO: 716177 - RNA, 20 nt, Artificial Sequence
  Synthetic
gaaagucaggauauaguaaa

SEQ ID NO: 716178 - RNA, 20 nt, Artificial Sequence
  Synthetic
gggaauuuuaugcuaguaaa

SEQ ID NO: 716179 - RNA, 20 nt, Artificial Sequence
  Synthetic
gugucauucucuguaguaaa

SEQ ID NO: 716180 - RNA, 20 nt, Artificial Sequence
  Synthetic
gguaaugggaggaagguaaa

SEQ ID NO: 716181 - RNA, 20 nt, Artificial Sequence
  Synthetic
guaccuugcaugaggguaaa

SEQ ID NO: 716182 - RNA, 20 nt, Artificial Sequence
  Synthetic
ggccauuacauaaugguaaa

SEQ ID NO: 716183 - RNA, 20 nt, Artificial Sequence
  Synthetic
gggaacauuuguaauguaaa

SEQ ID NO: 716184 - RNA, 20 nt, Artificial Sequence
  Synthetic
gaaaaugagucccauguaaa

SEQ ID NO: 716185 - RNA, 20 nt, Artificial Sequence
  Synthetic
gggcuucccucagcuguaaa

SEQ ID NO: 716186 - RNA, 20 nt, Artificial Sequence
  Synthetic
gaccugucuagugcuguaaa

SEQ ID NO: 716187 - RNA, 20 nt, Artificial Sequence
  Synthetic
gcucaauagaaaucuguaaa

SEQ ID NO: 716188 - RNA, 20 nt, Artificial Sequence
  Synthetic
ggggaggaaaacaguguaaa

SEQ ID NO: 716189 - RNA, 20 nt, Artificial Sequence
  Synthetic
gagaaucagaaagguguaaa

SEQ ID NO: 716190 - RNA, 20 nt, Artificial Sequence
  Synthetic
ggaauucuuuuguuuguaaa

SEQ ID NO: 716191 - RNA, 20 nt, Artificial Sequence
  Synthetic
guucaaaaauaaaaauuaaa

SEQ ID NO: 716192 - RNA, 20 nt, Artificial Sequence
  Synthetic
gguggauuuuuaaaauuaaa

SEQ ID NO: 716193 - RNA, 20 nt, Artificial Sequence
  Synthetic
gugauuuccuauaaauuaaa

SEQ ID NO: 716194 - RNA, 20 nt, Artificial Sequence
  Synthetic
ggaugggugugacaauuaaa

SEQ ID NO: 716195 - RNA, 20 nt, Artificial Sequence
  Synthetic
gguuuuccuaaggaauuaaa

SEQ ID NO: 716196 - RNA, 20 nt, Artificial Sequence
  Synthetic
guauggcagcuuuaauuaaa

SEQ ID NO: 716197 - RNA, 20 nt, Artificial Sequence
  Synthetic
gaccugcaaggaacauuaaa

SEQ ID NO: 716198 - RNA, 20 nt, Artificial Sequence
  Synthetic
gaaucacucuccccauuaaa

SEQ ID NO: 716199 - RNA, 20 nt, Artificial Sequence
  Synthetic
guagcauaaaauagauuaaa

SEQ ID NO: 716200 - RNA, 20 nt, Artificial Sequence
  Synthetic
guuuaacuaaagugauuaaa

SEQ ID NO: 716201 - RNA, 20 nt, Artificial Sequence
  Synthetic
gccuaaaaauguguauuaaa

SEQ ID NO: 716202 - RNA, 20 nt, Artificial Sequence
  Synthetic
gauacagggcaaaacuuaaa

SEQ ID NO: 716203 - RNA, 20 nt, Artificial Sequence
  Synthetic
guuguuuugaaucccuuaaa

SEQ ID NO: 716204 - RNA, 20 nt, Artificial Sequence
  Synthetic
gaauauuauuuggccuuaaa

SEQ ID NO: 716205 - RNA, 20 nt, Artificial Sequence
  Synthetic
gcuuuugaccucugcuuaaa

SEQ ID NO: 716206 - RNA, 20 nt, Artificial Sequence
  Synthetic
gagaaucuaguuugcuuaaa

SEQ ID NO: 716207 - RNA, 20 nt, Artificial Sequence
  Synthetic
gagcaaacaaaaaucuuaaa

SEQ ID NO: 716208 - RNA, 20 nt, Artificial Sequence
  Synthetic
gggcaaaagaaaaucuuaaa

SEQ ID NO: 716209 - RNA, 20 nt, Artificial Sequence
  Synthetic
guuguaguaacugucuuaaa

SEQ ID NO: 716210 - RNA, 20 nt, Artificial Sequence
  Synthetic
gagauggacgauuucuuaaa

SEQ ID NO: 716211 - RNA, 20 nt, Artificial Sequence
  Synthetic
gaacacuuaagaaaguuaaa

SEQ ID NO: 716212 - RNA, 20 nt, Artificial Sequence
  Synthetic
gaaacugcuuugggguuaaa

SEQ ID NO: 716213 - RNA, 20 nt, Artificial Sequence
  Synthetic
gagggcccacuccuguuaaa

SEQ ID NO: 716214 - RNA, 20 nt, Artificial Sequence
  Synthetic
gguucuuuauauguguuaaa

SEQ ID NO: 716215 - RNA, 20 nt, Artificial Sequence
  Synthetic
gccuaggagaaacauuuaaa

SEQ ID NO: 716216 - RNA, 20 nt, Artificial Sequence
  Synthetic
gaugaaauaguggauuuaaa

SEQ ID NO: 716217 - RNA, 20 nt, Artificial Sequence
  Synthetic
ggguauaguguauauuuaaa

SEQ ID NO: 716218 - RNA, 20 nt, Artificial Sequence
  Synthetic
gccagagauaccuauuuaaa

SEQ ID NO: 716219 - RNA, 20 nt, Artificial Sequence
  Synthetic
guggagguagggccuuuaaa

SEQ ID NO: 716220 - RNA, 20 nt, Artificial Sequence
  Synthetic
ggccaacuuuuuucuuuaaa

SEQ ID NO: 716221 - RNA, 20 nt, Artificial Sequence
  Synthetic
gugacuuacacauguuuaaa

SEQ ID NO: 716222 - RNA, 20 nt, Artificial Sequence
  Synthetic
guaaauauugacauuuuaaa

SEQ ID NO: 716223 - RNA, 20 nt, Artificial Sequence
  Synthetic
guagacuaaucuauuuuaaa

SEQ ID NO: 716224 - RNA, 20 nt, Artificial Sequence
  Synthetic
gauaccucuacccuuuuaaa

SEQ ID NO: 716225 - RNA, 20 nt, Artificial Sequence
  Synthetic
gaaguuaucuuaguuuuaaa

SEQ ID NO: 716226 - RNA, 20 nt, Artificial Sequence
  Synthetic
gaucucaaucauguuuuaaa

SEQ ID NO: 716227 - RNA, 20 nt, Artificial Sequence
  Synthetic
gucaagggaagcuuuuuaaa

SEQ ID NO: 716228 - RNA, 20 nt, Artificial Sequence
  Synthetic
gucuugugccaguuuuuaaa

SEQ ID NO: 716229 - RNA, 20 nt, Artificial Sequence
  Synthetic
gucuugugccgguuuuuaaa

SEQ ID NO: 716230 - RNA, 20 nt, Artificial Sequence
  Synthetic
gccucagccucccaaaacaa

SEQ ID NO: 716231 - RNA, 20 nt, Artificial Sequence
  Synthetic
gaaucuaaaaaucaaaacaa

SEQ ID NO: 716232 - RNA, 20 nt, Artificial Sequence
  Synthetic
ggagaaauuggcccaaacaa

SEQ ID NO: 716233 - RNA, 20 nt, Artificial Sequence
  Synthetic
gagcaauauagcagaaacaa

SEQ ID NO: 716234 - RNA, 20 nt, Artificial Sequence
  Synthetic
guggggagggagggaaacaa

SEQ ID NO: 716235 - RNA, 20 nt, Artificial Sequence
  Synthetic
ggaacuugcaagauaaacaa

SEQ ID NO: 716236 - RNA, 20 nt, Artificial Sequence
  Synthetic
ggguuuucuuuuguaaacaa

SEQ ID NO: 716237 - RNA, 20 nt, Artificial Sequence
  Synthetic
guuuuauucuuuuuaaacaa

SEQ ID NO: 716238 - RNA, 20 nt, Artificial Sequence
  Synthetic
gagugagcucaaaacaacaa

SEQ ID NO: 716239 - RNA, 20 nt, Artificial Sequence
  Synthetic
gaaaccucucuccccaacaa

SEQ ID NO: 716240 - RNA, 20 nt, Artificial Sequence
  Synthetic
gaaaguugagauugcaacaa

SEQ ID NO: 716241 - RNA, 20 nt, Artificial Sequence
  Synthetic
gccuaugggcaaaagaacaa

SEQ ID NO: 716242 - RNA, 20 nt, Artificial Sequence
  Synthetic
gccaugaggguaaagaacaa

SEQ ID NO: 716243 - RNA, 20 nt, Artificial Sequence
  Synthetic
guuaaacuaaaccagaacaa

SEQ ID NO: 716244 - RNA, 20 nt, Artificial Sequence
  Synthetic
guaccuuaugaagagaacaa

SEQ ID NO: 716245 - RNA, 20 nt, Artificial Sequence
  Synthetic
guuauuucaguugagaacaa

SEQ ID NO: 716246 - RNA, 20 nt, Artificial Sequence
  Synthetic
gacauugaacacucgaacaa

SEQ ID NO: 716247 - RNA, 20 nt, Artificial Sequence
  Synthetic
gaaaugaccccagggaacaa

SEQ ID NO: 716248 - RNA, 20 nt, Artificial Sequence
  Synthetic
ggaaagacagacaugaacaa

SEQ ID NO: 716249 - RNA, 20 nt, Artificial Sequence
  Synthetic
guaaaucaacauaugaacaa

SEQ ID NO: 716250 - RNA, 20 nt, Artificial Sequence
  Synthetic
guggucucgaacuugaacaa

SEQ ID NO: 716251 - RNA, 20 nt, Artificial Sequence
  Synthetic
gaagcauguaguaauaacaa

SEQ ID NO: 716252 - RNA, 20 nt, Artificial Sequence
  Synthetic
gcuauuucucacccuaacaa

SEQ ID NO: 716253 - RNA, 20 nt, Artificial Sequence
  Synthetic
gugaacauaugugcuaacaa

SEQ ID NO: 716254 - RNA, 20 nt, Artificial Sequence
  Synthetic
gaguaaggaugaucuaacaa

SEQ ID NO: 716255 - RNA, 20 nt, Artificial Sequence
  Synthetic
gcagagacaagaaguaacaa

SEQ ID NO: 716256 - RNA, 20 nt, Artificial Sequence
  Synthetic
gcaugaagucaggaacacaa

SEQ ID NO: 716257 - RNA, 20 nt, Artificial Sequence
  Synthetic
gaucagacccacccacacaa

SEQ ID NO: 716258 - RNA, 20 nt, Artificial Sequence
  Synthetic
ggcuuuuucagaagacacaa

SEQ ID NO: 716259 - RNA, 20 nt, Artificial Sequence
  Synthetic
gaggacggguccagacacaa

SEQ ID NO: 716260 - RNA, 20 nt, Artificial Sequence
  Synthetic
gcuacgcuguagguacacaa

SEQ ID NO: 716261 - RNA, 20 nt, Artificial Sequence
  Synthetic
gucuucaugaguaaccacaa

SEQ ID NO: 716262 - RNA, 20 nt, Artificial Sequence
  Synthetic
gucaauauuucagaccacaa

SEQ ID NO: 716263 - RNA, 20 nt, Artificial Sequence
  Synthetic
guucaaguucgagaccacaa

SEQ ID NO: 716264 - RNA, 20 nt, Artificial Sequence
  Synthetic
gccuuucucaagucccacaa

SEQ ID NO: 716265 - RNA, 20 nt, Artificial Sequence
  Synthetic
gcaauccaacaaauccacaa

SEQ ID NO: 716266 - RNA, 20 nt, Artificial Sequence
  Synthetic
gauccaaucucauuccacaa

SEQ ID NO: 716267 - RNA, 20 nt, Artificial Sequence
  Synthetic
gccucaccccggaagcacaa

SEQ ID NO: 716268 - RNA, 20 nt, Artificial Sequence
  Synthetic
guuuauuacaaagagcacaa

SEQ ID NO: 716269 - RNA, 20 nt, Artificial Sequence
  Synthetic
gcaaagcauuccgggcacaa

SEQ ID NO: 716270 - RNA, 20 nt, Artificial Sequence
  Synthetic
gcaaauuacccaucucacaa

SEQ ID NO: 716271 - RNA, 20 nt, Artificial Sequence
  Synthetic
ggcagaugaggaauucacaa

SEQ ID NO: 716272 - RNA, 20 nt, Artificial Sequence
  Synthetic
gugaauuaagucauucacaa

SEQ ID NO: 716273 - RNA, 20 nt, Artificial Sequence
  Synthetic
gaugcacacacuguucacaa

SEQ ID NO: 716274 - RNA, 20 nt, Artificial Sequence
  Synthetic
guagccuaguuuuuucacaa

SEQ ID NO: 716275 - RNA, 20 nt, Artificial Sequence
  Synthetic
gagacacauggagaagacaa

SEQ ID NO: 716276 - RNA, 20 nt, Artificial Sequence
  Synthetic
gaacaucaggaggaagacaa

SEQ ID NO: 716277 - RNA, 20 nt, Artificial Sequence
  Synthetic
guugcuauaauuacagacaa

SEQ ID NO: 716278 - RNA, 20 nt, Artificial Sequence
  Synthetic
guagaauuguuggcagacaa

SEQ ID NO: 716279 - RNA, 20 nt, Artificial Sequence
  Synthetic
gaaaggaaagggggagacaa

SEQ ID NO: 716280 - RNA, 20 nt, Artificial Sequence
  Synthetic
gagauuuugggcugagacaa

SEQ ID NO: 716281 - RNA, 20 nt, Artificial Sequence
  Synthetic
gaaacuagaaaaguagacaa

SEQ ID NO: 716282 - RNA, 20 nt, Artificial Sequence
  Synthetic
ggaaacuuggacaaggacaa

SEQ ID NO: 716283 - RNA, 20 nt, Artificial Sequence
  Synthetic
ggcaauaccauucaggacaa

SEQ ID NO: 716284 - RNA, 20 nt, Artificial Sequence
  Synthetic
ggaguagggagaggggacaa

SEQ ID NO: 716285 - RNA, 20 nt, Artificial Sequence
  Synthetic
ggucaaucaauauaugacaa

SEQ ID NO: 716286 - RNA, 20 nt, Artificial Sequence
  Synthetic
gcaaucuauacaucugacaa

SEQ ID NO: 716287 - RNA, 20 nt, Artificial Sequence
  Synthetic
gcaaucuacccaucugacaa

SEQ ID NO: 716288 - RNA, 20 nt, Artificial Sequence
  Synthetic
gcaaucuauccaucugacaa

SEQ ID NO: 716289 - RNA, 20 nt, Artificial Sequence
  Synthetic
gcaaacuaugcaucugacaa

SEQ ID NO: 716290 - RNA, 20 nt, Artificial Sequence
  Synthetic
gcaaccuacucaucugacaa

SEQ ID NO: 716291 - RNA, 20 nt, Artificial Sequence
  Synthetic
gcaaucuacucaucugacaa

SEQ ID NO: 716292 - RNA, 20 nt, Artificial Sequence
  Synthetic
gccaucuauucaucugacaa

SEQ ID NO: 716293 - RNA, 20 nt, Artificial Sequence
  Synthetic
gcaaugcauagaucugacaa

SEQ ID NO: 716294 - RNA, 20 nt, Artificial Sequence
  Synthetic
guuauuugacauggugacaa

SEQ ID NO: 716295 - RNA, 20 nt, Artificial Sequence
  Synthetic
gugcaauuucuauuugacaa

SEQ ID NO: 716296 - RNA, 20 nt, Artificial Sequence
  Synthetic
gacuuuucugguuuugacaa

SEQ ID NO: 716297 - RNA, 20 nt, Artificial Sequence
  Synthetic
ggucaacugauuuuugacaa

SEQ ID NO: 716298 - RNA, 20 nt, Artificial Sequence
  Synthetic
gaucaauugauuuuugacaa

SEQ ID NO: 716299 - RNA, 20 nt, Artificial Sequence
  Synthetic
gcaggacaugucaaauacaa

SEQ ID NO: 716300 - RNA, 20 nt, Artificial Sequence
  Synthetic
gcacuuccuguguaauacaa

SEQ ID NO: 716301 - RNA, 20 nt, Artificial Sequence
  Synthetic
gauugcguauauacauacaa

SEQ ID NO: 716302 - RNA, 20 nt, Artificial Sequence
  Synthetic
gcuauguuauauacauacaa

SEQ ID NO: 716303 - RNA, 20 nt, Artificial Sequence
  Synthetic
gauauuauucagccauacaa

SEQ ID NO: 716304 - RNA, 20 nt, Artificial Sequence
  Synthetic
gcauaauggguugcauacaa

SEQ ID NO: 716305 - RNA, 20 nt, Artificial Sequence
  Synthetic
gggauagaaaguugauacaa

SEQ ID NO: 716306 - RNA, 20 nt, Artificial Sequence
  Synthetic
guucagcugcugcccuacaa

SEQ ID NO: 716307 - RNA, 20 nt, Artificial Sequence
  Synthetic
uuucauccaugucccuacaa

SEQ ID NO: 716308 - RNA, 20 nt, Artificial Sequence
  Synthetic
gagacugaugguugcuacaa

SEQ ID NO: 716309 - RNA, 20 nt, Artificial Sequence
  Synthetic
gaaauggcauacuuguacaa

SEQ ID NO: 716310 - RNA, 20 nt, Artificial Sequence
  Synthetic
gugauccuaugagauuacaa

SEQ ID NO: 716311 - RNA, 20 nt, Artificial Sequence
  Synthetic
guaaaagucaaugcuuacaa

SEQ ID NO: 716312 - RNA, 20 nt, Artificial Sequence
  Synthetic
gcagaggcaaugaguuacaa

SEQ ID NO: 716313 - RNA, 20 nt, Artificial Sequence
  Synthetic
guaauuuuuggacuuuacaa

SEQ ID NO: 716314 - RNA, 20 nt, Artificial Sequence
  Synthetic
gcaagacuaaauuuuuacaa

SEQ ID NO: 716315 - RNA, 20 nt, Artificial Sequence
  Synthetic
gugaauagaggaaaaaccaa

SEQ ID NO: 716316 - RNA, 20 nt, Artificial Sequence
  Synthetic
gucuaaaacaccaaaaccaa

SEQ ID NO: 716317 - RNA, 20 nt, Artificial Sequence
  Synthetic
gggaaagagaauucaaccaa

SEQ ID NO: 716318 - RNA, 20 nt, Artificial Sequence
  Synthetic
gaacccugggaauuaaccaa

SEQ ID NO: 716319 - RNA, 20 nt, Artificial Sequence
  Synthetic
ggcagacaugguuuaaccaa

SEQ ID NO: 716320 - RNA, 20 nt, Artificial Sequence
  Synthetic
gugauuuaguuuuuaaccaa

SEQ ID NO: 716321 - RNA, 20 nt, Artificial Sequence
  Synthetic
gauaagaggauaaucaccaa

SEQ ID NO: 716322 - RNA, 20 nt, Artificial Sequence
  Synthetic
aaaacagauauauagaccaa

SEQ ID NO: 716323 - RNA, 20 nt, Artificial Sequence
  Synthetic
gaauggaugaggaugaccaa

SEQ ID NO: 716324 - RNA, 20 nt, Artificial Sequence
  Synthetic
gagcagagaaaagcuaccaa

SEQ ID NO: 716325 - RNA, 20 nt, Artificial Sequence
  Synthetic
gccaaguugaaauuuaccaa

SEQ ID NO: 716326 - RNA, 20 nt, Artificial Sequence
  Synthetic
ggucuucugagugaacccaa

SEQ ID NO: 716327 - RNA, 20 nt, Artificial Sequence
  Synthetic
guuaaucuguacuuacccaa

SEQ ID NO: 716328 - RNA, 20 nt, Artificial Sequence
  Synthetic
gaaaggucaggcuaccccaa

SEQ ID NO: 716329 - RNA, 20 nt, Artificial Sequence
  Synthetic
gauaccacuacaacccccaa

SEQ ID NO: 716330 - RNA, 20 nt, Artificial Sequence
  Synthetic
guugaagugcuaacccccaa

SEQ ID NO: 716331 - RNA, 20 nt, Artificial Sequence
  Synthetic
gaucucuuaauaucccccaa

SEQ ID NO: 716332 - RNA, 20 nt, Artificial Sequence
  Synthetic
gggaugauuuugcuccccaa

SEQ ID NO: 716333 - RNA, 20 nt, Artificial Sequence
  Synthetic
gguguucacuuaaagcccaa

SEQ ID NO: 716334 - RNA, 20 nt, Artificial Sequence
  Synthetic
guuacuacaucuaggcccaa

SEQ ID NO: 716335 - RNA, 20 nt, Artificial Sequence
  Synthetic
gcauggaaggaauggcccaa

SEQ ID NO: 716336 - RNA, 20 nt, Artificial Sequence
  Synthetic
gcuacccuccagauucccaa

SEQ ID NO: 716337 - RNA, 20 nt, Artificial Sequence
  Synthetic
ggcauuuuuuucaaagccaa

SEQ ID NO: 716338 - RNA, 20 nt, Artificial Sequence
  Synthetic
gcuuggccauggaaagccaa

SEQ ID NO: 716339 - RNA, 20 nt, Artificial Sequence
  Synthetic
ggcggcuaucugcaagccaa

SEQ ID NO: 716340 - RNA, 20 nt, Artificial Sequence
  Synthetic
ggauaucucuuaugagccaa

SEQ ID NO: 716341 - RNA, 20 nt, Artificial Sequence
  Synthetic
gcuguacccugcaacgccaa

SEQ ID NO: 716342 - RNA, 20 nt, Artificial Sequence
  Synthetic
gaaaaaauugaggcggccaa

SEQ ID NO: 716343 - RNA, 20 nt, Artificial Sequence
  Synthetic
gauauuucauucucugccaa

SEQ ID NO: 716344 - RNA, 20 nt, Artificial Sequence
  Synthetic
gagauaagcaguggugccaa

SEQ ID NO: 716345 - RNA, 20 nt, Artificial Sequence
  Synthetic
gagauuuaaaaauuugccaa

SEQ ID NO: 716346 - RNA, 20 nt, Artificial Sequence
  Synthetic
gcauauaaaaggcaauccaa

SEQ ID NO: 716347 - RNA, 20 nt, Artificial Sequence
  Synthetic
ggaaaagacaauuccuccaa

SEQ ID NO: 716348 - RNA, 20 nt, Artificial Sequence
  Synthetic
guauuuaacauaugcuccaa

SEQ ID NO: 716349 - RNA, 20 nt, Artificial Sequence
  Synthetic
gaugaauuaggaaucuccaa

SEQ ID NO: 716350 - RNA, 20 nt, Artificial Sequence
  Synthetic
gaaauauauguggucuccaa

SEQ ID NO: 716351 - RNA, 20 nt, Artificial Sequence
  Synthetic
gucagcaaacuaugguccaa

SEQ ID NO: 716352 - RNA, 20 nt, Artificial Sequence
  Synthetic
gugccuucaauacauuccaa

SEQ ID NO: 716353 - RNA, 20 nt, Artificial Sequence
  Synthetic
guccaaaacaccaaaagcaa

SEQ ID NO: 716354 - RNA, 20 nt, Artificial Sequence
  Synthetic
gaugaaaacaccaaaagcaa

SEQ ID NO: 716355 - RNA, 20 nt, Artificial Sequence
  Synthetic
gacuaaaacaccaaaagcaa

SEQ ID NO: 716356 - RNA, 20 nt, Artificial Sequence
  Synthetic
gucuaaaacaccaaaagcaa

SEQ ID NO: 716357 - RNA, 20 nt, Artificial Sequence
  Synthetic
gaagaaagcaaggaaagcaa

SEQ ID NO: 716358 - RNA, 20 nt, Artificial Sequence
  Synthetic
gaaauauaaaggacaagcaa

SEQ ID NO: 716359 - RNA, 20 nt, Artificial Sequence
  Synthetic
gggacaguuuuuacaagcaa

SEQ ID NO: 716360 - RNA, 20 nt, Artificial Sequence
  Synthetic
gcuagaaagcaagcaagcaa

SEQ ID NO: 716361 - RNA, 20 nt, Artificial Sequence
  Synthetic
ggagccaggccuucaagcaa

SEQ ID NO: 716362 - RNA, 20 nt, Artificial Sequence
  Synthetic
gacuucaugaucagaagcaa

SEQ ID NO: 716363 - RNA, 20 nt, Artificial Sequence
  Synthetic
gggcugggggcaggaagcaa

SEQ ID NO: 716364 - RNA, 20 nt, Artificial Sequence
  Synthetic
gacacgcugaauugaagcaa

SEQ ID NO: 716365 - RNA, 20 nt, Artificial Sequence
  Synthetic
ggcuggcauccaaacagcaa

SEQ ID NO: 716366 - RNA, 20 nt, Artificial Sequence
  Synthetic
gagugguaagcugacagcaa

SEQ ID NO: 716367 - RNA, 20 nt, Artificial Sequence
  Synthetic
gaaaugucaaaauacagcaa

SEQ ID NO: 716368 - RNA, 20 nt, Artificial Sequence
  Synthetic
gcaagugugagaaccagcaa

SEQ ID NO: 716369 - RNA, 20 nt, Artificial Sequence
  Synthetic
gagagaaugagugccagcaa

SEQ ID NO: 716370 - RNA, 20 nt, Artificial Sequence
  Synthetic
ggaugagaaggauccagcaa

SEQ ID NO: 716371 - RNA, 20 nt, Artificial Sequence
  Synthetic
ggaagaaaggguaucagcaa

SEQ ID NO: 716372 - RNA, 20 nt, Artificial Sequence
  Synthetic
guucuauagaaacagagcaa

SEQ ID NO: 716373 - RNA, 20 nt, Artificial Sequence
  Synthetic
gaaggagaagugccgagcaa

SEQ ID NO: 716374 - RNA, 20 nt, Artificial Sequence
  Synthetic
gcuauucauucacugagcaa

SEQ ID NO: 716375 - RNA, 20 nt, Artificial Sequence
  Synthetic
gaguggaaucuagugagcaa

SEQ ID NO: 716376 - RNA, 20 nt, Artificial Sequence
  Synthetic
gaaaauaguuacaauagcaa

SEQ ID NO: 716377 - RNA, 20 nt, Artificial Sequence
  Synthetic
gggcauuauuacccuagcaa

SEQ ID NO: 716378 - RNA, 20 nt, Artificial Sequence
  Synthetic
ggaaggugaagggguagcaa

SEQ ID NO: 716379 - RNA, 20 nt, Artificial Sequence
  Synthetic
gccaacuuuguguguagcaa

SEQ ID NO: 716380 - RNA, 20 nt, Artificial Sequence
  Synthetic
ggaaggaaggugauuagcaa

SEQ ID NO: 716381 - RNA, 20 nt, Artificial Sequence
  Synthetic
gaggaggaaaacuuuagcaa

SEQ ID NO: 716382 - RNA, 20 nt, Artificial Sequence
  Synthetic
gaagcuugggccaagcgcaa

SEQ ID NO: 716383 - RNA, 20 nt, Artificial Sequence
  Synthetic
ggucauaaaugaaaaggcaa

SEQ ID NO: 716384 - RNA, 20 nt, Artificial Sequence
  Synthetic
gggaaagagacugaaggcaa

SEQ ID NO: 716385 - RNA, 20 nt, Artificial Sequence
  Synthetic
gaaacaaguacauaaggcaa

SEQ ID NO: 716386 - RNA, 20 nt, Artificial Sequence
  Synthetic
gggaggaagggaacaggcaa

SEQ ID NO: 716387 - RNA, 20 nt, Artificial Sequence
  Synthetic
gguaaauguggcacaggcaa

SEQ ID NO: 716388 - RNA, 20 nt, Artificial Sequence
  Synthetic
guuuugacacaggcaggcaa

SEQ ID NO: 716389 - RNA, 20 nt, Artificial Sequence
  Synthetic
ggaggugcaaguauaggcaa

SEQ ID NO: 716390 - RNA, 20 nt, Artificial Sequence
  Synthetic
ggcagaggaaacaagggcaa

SEQ ID NO: 716391 - RNA, 20 nt, Artificial Sequence
  Synthetic
gaggauuugacucagggcaa

SEQ ID NO: 716392 - RNA, 20 nt, Artificial Sequence
  Synthetic
gggaggaaggagaggggcaa

SEQ ID NO: 716393 - RNA, 20 nt, Artificial Sequence
  Synthetic
gcaggucuucaagggggcaa

SEQ ID NO: 716394 - RNA, 20 nt, Artificial Sequence
  Synthetic
gagacuuagguauggggcaa

SEQ ID NO: 716395 - RNA, 20 nt, Artificial Sequence
  Synthetic
gggaaagggaggaauggcaa

SEQ ID NO: 716396 - RNA, 20 nt, Artificial Sequence
  Synthetic
gcucagagugcuaauggcaa

SEQ ID NO: 716397 - RNA, 20 nt, Artificial Sequence
  Synthetic
gauaaauucauaacuggcaa

SEQ ID NO: 716398 - RNA, 20 nt, Artificial Sequence
  Synthetic
gaaaaacacucaauuggcaa

SEQ ID NO: 716399 - RNA, 20 nt, Artificial Sequence
  Synthetic
ggacaacacauucuuggcaa

SEQ ID NO: 716400 - RNA, 20 nt, Artificial Sequence
  Synthetic
ggguugucuaaucaaugcaa

SEQ ID NO: 716401 - RNA, 20 nt, Artificial Sequence
  Synthetic
gcuaagcuaugaggaugcaa

SEQ ID NO: 716402 - RNA, 20 nt, Artificial Sequence
  Synthetic
gggcaggagacugacugcaa

SEQ ID NO: 716403 - RNA, 20 nt, Artificial Sequence
  Synthetic
gccacugugcccggcugcaa

SEQ ID NO: 716404 - RNA, 20 nt, Artificial Sequence
  Synthetic
gguaauuguacauucugcaa

SEQ ID NO: 716405 - RNA, 20 nt, Artificial Sequence
  Synthetic
gguaaaauuuagaagugcaa

SEQ ID NO: 716406 - RNA, 20 nt, Artificial Sequence
  Synthetic
gcaagcaauguccagugcaa

SEQ ID NO: 716407 - RNA, 20 nt, Artificial Sequence
  Synthetic
gaacagagaaacacgugcaa

SEQ ID NO: 716408 - RNA, 20 nt, Artificial Sequence
  Synthetic
guuacaauauuguauugcaa

SEQ ID NO: 716409 - RNA, 20 nt, Artificial Sequence
  Synthetic
gagacaaaaucuuuuugcaa

SEQ ID NO: 716410 - RNA, 20 nt, Artificial Sequence
  Synthetic
ggcauauagaagauaaucaa

SEQ ID NO: 716411 - RNA, 20 nt, Artificial Sequence
  Synthetic
guauuugagugucuaaucaa

SEQ ID NO: 716412 - RNA, 20 nt, Artificial Sequence
  Synthetic
ggcuuucuucagaacaucaa

SEQ ID NO: 716413 - RNA, 20 nt, Artificial Sequence
  Synthetic
gagacuacugagcacaucaa

SEQ ID NO: 716414 - RNA, 20 nt, Artificial Sequence
  Synthetic
gacaaagugacaaucaucaa

SEQ ID NO: 716415 - RNA, 20 nt, Artificial Sequence
  Synthetic
gcugcgaaguccaagaucaa

SEQ ID NO: 716416 - RNA, 20 nt, Artificial Sequence
  Synthetic
gggaaacaguucaagaucaa

SEQ ID NO: 716417 - RNA, 20 nt, Artificial Sequence
  Synthetic
gggaggcaucagcagaucaa

SEQ ID NO: 716418 - RNA, 20 nt, Artificial Sequence
  Synthetic
ggggaggagagagagaucaa

SEQ ID NO: 716419 - RNA, 20 nt, Artificial Sequence
  Synthetic
gucaaaaaucaauugaucaa

SEQ ID NO: 716420 - RNA, 20 nt, Artificial Sequence
  Synthetic
gauauucacggccauaucaa

SEQ ID NO: 716421 - RNA, 20 nt, Artificial Sequence
  Synthetic
gauaaaagacaguaacucaa

SEQ ID NO: 716422 - RNA, 20 nt, Artificial Sequence
  Synthetic
gcuuacuccuacccacucaa

SEQ ID NO: 716423 - RNA, 20 nt, Artificial Sequence
  Synthetic
ggaagaaaaaaaauacucaa

SEQ ID NO: 716424 - RNA, 20 nt, Artificial Sequence
  Synthetic
ggaaacuauuaccaccucaa

SEQ ID NO: 716425 - RNA, 20 nt, Artificial Sequence
  Synthetic
gagcuccaugagggccucaa

SEQ ID NO: 716426 - RNA, 20 nt, Artificial Sequence
  Synthetic
gauaauaccaccuuccucaa

SEQ ID NO: 716427 - RNA, 20 nt, Artificial Sequence
  Synthetic
guaggugcaaaguuccucaa

SEQ ID NO: 716428 - RNA, 20 nt, Artificial Sequence
  Synthetic
gacucugauccccagcucaa

SEQ ID NO: 716429 - RNA, 20 nt, Artificial Sequence
  Synthetic
gauuuaagagacuugcucaa

SEQ ID NO: 716430 - RNA, 20 nt, Artificial Sequence
  Synthetic
gucuccuuuccuucucucaa

SEQ ID NO: 716431 - RNA, 20 nt, Artificial Sequence
  Synthetic
guuuuauagaaucuucucaa

SEQ ID NO: 716432 - RNA, 20 nt, Artificial Sequence
  Synthetic
gaaaauaucaguguucucaa

SEQ ID NO: 716433 - RNA, 20 nt, Artificial Sequence
  Synthetic
guggccaagcccaaagucaa

SEQ ID NO: 716434 - RNA, 20 nt, Artificial Sequence
  Synthetic
gaaauagaggcccaagucaa

SEQ ID NO: 716435 - RNA, 20 nt, Artificial Sequence
  Synthetic
guagaaaguuuucaagucaa

SEQ ID NO: 716436 - RNA, 20 nt, Artificial Sequence
  Synthetic
guaaaguccagagcagucaa

SEQ ID NO: 716437 - RNA, 20 nt, Artificial Sequence
  Synthetic
gaugugagacacagagucaa

SEQ ID NO: 716438 - RNA, 20 nt, Artificial Sequence
  Synthetic
gaugugagaaauggagucaa

SEQ ID NO: 716439 - RNA, 20 nt, Artificial Sequence
  Synthetic
ggaggauggagaauagucaa

SEQ ID NO: 716440 - RNA, 20 nt, Artificial Sequence
  Synthetic
ggaagaucaaaaguagucaa

SEQ ID NO: 716441 - RNA, 20 nt, Artificial Sequence
  Synthetic
gaugugagacauguagucaa

SEQ ID NO: 716442 - RNA, 20 nt, Artificial Sequence
  Synthetic
gcaucccgugcauccgucaa

SEQ ID NO: 716443 - RNA, 20 nt, Artificial Sequence
  Synthetic
gcaucuugaggaaaggucaa

SEQ ID NO: 716444 - RNA, 20 nt, Artificial Sequence
  Synthetic
gucacaaacgugaaggucaa

SEQ ID NO: 716445 - RNA, 20 nt, Artificial Sequence
  Synthetic
guccauggucuauuggucaa

SEQ ID NO: 716446 - RNA, 20 nt, Artificial Sequence
  Synthetic
gggcuguugaauuuggucaa

SEQ ID NO: 716447 - RNA, 20 nt, Artificial Sequence
  Synthetic
guaaauuaagguagugucaa

SEQ ID NO: 716448 - RNA, 20 nt, Artificial Sequence
  Synthetic
gugguguacaccauugucaa

SEQ ID NO: 716449 - RNA, 20 nt, Artificial Sequence
  Synthetic
ggguuguugaauuuugucaa

SEQ ID NO: 716450 - RNA, 20 nt, Artificial Sequence
  Synthetic
gagcaauaaccuuuugucaa

SEQ ID NO: 716451 - RNA, 20 nt, Artificial Sequence
  Synthetic
gaaaauucuuaaagauucaa

SEQ ID NO: 716452 - RNA, 20 nt, Artificial Sequence
  Synthetic
gugacagagcucugauucaa

SEQ ID NO: 716453 - RNA, 20 nt, Artificial Sequence
  Synthetic
guuuuuaaguugugauucaa

SEQ ID NO: 716454 - RNA, 20 nt, Artificial Sequence
  Synthetic
guauauauauuuauauucaa

SEQ ID NO: 716455 - RNA, 20 nt, Artificial Sequence
  Synthetic
guguuacaaauacacuucaa

SEQ ID NO: 716456 - RNA, 20 nt, Artificial Sequence
  Synthetic
guguagcacauagacuucaa

SEQ ID NO: 716457 - RNA, 20 nt, Artificial Sequence
  Synthetic
gggucaauaacucucuucaa

SEQ ID NO: 716458 - RNA, 20 nt, Artificial Sequence
  Synthetic
gccuggcuucaaaaguucaa

SEQ ID NO: 716459 - RNA, 20 nt, Artificial Sequence
  Synthetic
gccuggcuucgaaaguucaa

SEQ ID NO: 716460 - RNA, 20 nt, Artificial Sequence
  Synthetic
gagggaucucucaaguucaa

SEQ ID NO: 716461 - RNA, 20 nt, Artificial Sequence
  Synthetic
gcuugacaacugaaguucaa

SEQ ID NO: 716462 - RNA, 20 nt, Artificial Sequence
  Synthetic
guauuuauuugcccguucaa

SEQ ID NO: 716463 - RNA, 20 nt, Artificial Sequence
  Synthetic
guuaguuacaguugguucaa

SEQ ID NO: 716464 - RNA, 20 nt, Artificial Sequence
  Synthetic
gcaauuugauuaauguucaa

SEQ ID NO: 716465 - RNA, 20 nt, Artificial Sequence
  Synthetic
guuaagguuacauauuucaa

SEQ ID NO: 716466 - RNA, 20 nt, Artificial Sequence
  Synthetic
gucaugucauguuauuucaa

SEQ ID NO: 716467 - RNA, 20 nt, Artificial Sequence
  Synthetic
gcauguagucuuacuuucaa

SEQ ID NO: 716468 - RNA, 20 nt, Artificial Sequence
  Synthetic
guucuguguuugccuuucaa

SEQ ID NO: 716469 - RNA, 20 nt, Artificial Sequence
  Synthetic
gacucuugaaaagcuuucaa

SEQ ID NO: 716470 - RNA, 20 nt, Artificial Sequence
  Synthetic
gauuugagaauuucuuucaa

SEQ ID NO: 716471 - RNA, 20 nt, Artificial Sequence
  Synthetic
gguuuauuguacuuuuucaa

SEQ ID NO: 716472 - RNA, 20 nt, Artificial Sequence
  Synthetic
ggaaggaagaaacaaaagaa

SEQ ID NO: 716473 - RNA, 20 nt, Artificial Sequence
  Synthetic
ggaauggaggaagaaaagaa

SEQ ID NO: 716474 - RNA, 20 nt, Artificial Sequence
  Synthetic
guacauaugaacacaaagaa

SEQ ID NO: 716475 - RNA, 20 nt, Artificial Sequence
  Synthetic
gcaucaaaaaauacaaagaa

SEQ ID NO: 716476 - RNA, 20 nt, Artificial Sequence
  Synthetic
ggacgguggucaccaaagaa

SEQ ID NO: 716477 - RNA, 20 nt, Artificial Sequence
  Synthetic
gaaauaagcuaggcaaagaa

SEQ ID NO: 716478 - RNA, 20 nt, Artificial Sequence
  Synthetic
gauauacacauugcaaagaa

SEQ ID NO: 716479 - RNA, 20 nt, Artificial Sequence
  Synthetic
guguuauaaaguucaaagaa

SEQ ID NO: 716480 - RNA, 20 nt, Artificial Sequence
  Synthetic
gugucauuuagcagaaagaa

SEQ ID NO: 716481 - RNA, 20 nt, Artificial Sequence
  Synthetic
gaacaugauuauagaaagaa

SEQ ID NO: 716482 - RNA, 20 nt, Artificial Sequence
  Synthetic
gauuucagggggggaaagaa

SEQ ID NO: 716483 - RNA, 20 nt, Artificial Sequence
  Synthetic
guggaggagccuggaaagaa

SEQ ID NO: 716484 - RNA, 20 nt, Artificial Sequence
  Synthetic
gcagggcaucucugaaagaa

SEQ ID NO: 716485 - RNA, 20 nt, Artificial Sequence
  Synthetic
gguaauguauuuugaaagaa

SEQ ID NO: 716486 - RNA, 20 nt, Artificial Sequence
  Synthetic
gaaaguaaaggaauaaagaa

SEQ ID NO: 716487 - RNA, 20 nt, Artificial Sequence
  Synthetic
gugcagggagguauaaagaa

SEQ ID NO: 716488 - RNA, 20 nt, Artificial Sequence
  Synthetic
gcaagcaauauuguaaagaa

SEQ ID NO: 716489 - RNA, 20 nt, Artificial Sequence
  Synthetic
ggaaaggcaguuguaaagaa

SEQ ID NO: 716490 - RNA, 20 nt, Artificial Sequence
  Synthetic
gaauugaaaagguuaaagaa

SEQ ID NO: 716491 - RNA, 20 nt, Artificial Sequence
  Synthetic
gccauaguauuuuuaaagaa

SEQ ID NO: 716492 - RNA, 20 nt, Artificial Sequence
  Synthetic
guguuuaggacccacaagaa

SEQ ID NO: 716493 - RNA, 20 nt, Artificial Sequence
  Synthetic
gaaagaaaaaaagacaagaa

SEQ ID NO: 716494 - RNA, 20 nt, Artificial Sequence
  Synthetic
gcccuaacuagauccaagaa

SEQ ID NO: 716495 - RNA, 20 nt, Artificial Sequence
  Synthetic
gccugcccuaaaagcaagaa

SEQ ID NO: 716496 - RNA, 20 nt, Artificial Sequence
  Synthetic
gauuaugucaucagcaagaa

SEQ ID NO: 716497 - RNA, 20 nt, Artificial Sequence
  Synthetic
gucuauuauguucucaagaa

SEQ ID NO: 716498 - RNA, 20 nt, Artificial Sequence
  Synthetic
gguauucaagucuucaagaa

SEQ ID NO: 716499 - RNA, 20 nt, Artificial Sequence
  Synthetic
gcugugaaaaaaaagaagaa

SEQ ID NO: 716500 - RNA, 20 nt, Artificial Sequence
  Synthetic
guuuggagggcucagaagaa

SEQ ID NO: 716501 - RNA, 20 nt, Artificial Sequence
  Synthetic
gguuaagagagggagaagaa

SEQ ID NO: 716502 - RNA, 20 nt, Artificial Sequence
  Synthetic
ggugaaaagagugagaagaa

SEQ ID NO: 716503 - RNA, 20 nt, Artificial Sequence
  Synthetic
gagagaaugagcgggaagaa

SEQ ID NO: 716504 - RNA, 20 nt, Artificial Sequence
  Synthetic
gaugcgaucaacuggaagaa

SEQ ID NO: 716505 - RNA, 20 nt, Artificial Sequence
  Synthetic
gagccugaaggcaugaagaa

SEQ ID NO: 716506 - RNA, 20 nt, Artificial Sequence
  Synthetic
gugcuacaaaaccugaagaa

SEQ ID NO: 716507 - RNA, 20 nt, Artificial Sequence
  Synthetic
gcuggugagguugugaagaa

SEQ ID NO: 716508 - RNA, 20 nt, Artificial Sequence
  Synthetic
ggccacauauagaauaagaa

SEQ ID NO: 716509 - RNA, 20 nt, Artificial Sequence
  Synthetic
guuguuuucuugcauaagaa

SEQ ID NO: 716510 - RNA, 20 nt, Artificial Sequence
  Synthetic
gaguauugcaaauauaagaa

SEQ ID NO: 716511 - RNA, 20 nt, Artificial Sequence
  Synthetic
gaaaaucaguuccuuaagaa

SEQ ID NO: 716512 - RNA, 20 nt, Artificial Sequence
  Synthetic
gcaacaguuaucuuuaagaa

SEQ ID NO: 716513 - RNA, 20 nt, Artificial Sequence
  Synthetic
guggggaaugucuuuaagaa

SEQ ID NO: 716514 - RNA, 20 nt, Artificial Sequence
  Synthetic
gaaccucccugaaaacagaa

SEQ ID NO: 716515 - RNA, 20 nt, Artificial Sequence
  Synthetic
gcugcugacugccaacagaa

SEQ ID NO: 716516 - RNA, 20 nt, Artificial Sequence
  Synthetic
gccagcaguggucaacagaa

SEQ ID NO: 716517 - RNA, 20 nt, Artificial Sequence
  Synthetic
gcucacaccgguuaacagaa

SEQ ID NO: 716518 - RNA, 20 nt, Artificial Sequence
  Synthetic
guaccagcucagccacagaa

SEQ ID NO: 716519 - RNA, 20 nt, Artificial Sequence
  Synthetic
ggcagaucugugagacagaa

SEQ ID NO: 716520 - RNA, 20 nt, Artificial Sequence
  Synthetic
gcuaugacucuguuacagaa

SEQ ID NO: 716521 - RNA, 20 nt, Artificial Sequence
  Synthetic
ggggucuuaguaacccagaa

SEQ ID NO: 716522 - RNA, 20 nt, Artificial Sequence
  Synthetic
gaacuucccagccuccagaa

SEQ ID NO: 716523 - RNA, 20 nt, Artificial Sequence
  Synthetic
guuaauuacaaaguccagaa

SEQ ID NO: 716524 - RNA, 20 nt, Artificial Sequence
  Synthetic
guggaacugugguuccagaa

SEQ ID NO: 716525 - RNA, 20 nt, Artificial Sequence
  Synthetic
gguuuugaacagaagcagaa

SEQ ID NO: 716526 - RNA, 20 nt, Artificial Sequence
  Synthetic
ggucuuuuaguauagcagaa

SEQ ID NO: 716527 - RNA, 20 nt, Artificial Sequence
  Synthetic
gagacugaaaaggggcagaa

SEQ ID NO: 716528 - RNA, 20 nt, Artificial Sequence
  Synthetic
guucacugauuggggcagaa

SEQ ID NO: 716529 - RNA, 20 nt, Artificial Sequence
  Synthetic
gccuccccagccaugcagaa

SEQ ID NO: 716530 - RNA, 20 nt, Artificial Sequence
  Synthetic
gacuguacuuacaaucagaa

SEQ ID NO: 716531 - RNA, 20 nt, Artificial Sequence
  Synthetic
gaguuagaauuuaaucagaa

SEQ ID NO: 716532 - RNA, 20 nt, Artificial Sequence
  Synthetic
gacuguggcugggaucagaa

SEQ ID NO: 716533 - RNA, 20 nt, Artificial Sequence
  Synthetic
gcaauuauuaaauaucagaa

SEQ ID NO: 716534 - RNA, 20 nt, Artificial Sequence
  Synthetic
guuaauaccacauaucagaa

SEQ ID NO: 716535 - RNA, 20 nt, Artificial Sequence
  Synthetic
ggaaaagacaauccucagaa

SEQ ID NO: 716536 - RNA, 20 nt, Artificial Sequence
  Synthetic
gaguucuaaagaucucagaa

SEQ ID NO: 716537 - RNA, 20 nt, Artificial Sequence
  Synthetic
gagauaaccaagggucagaa

SEQ ID NO: 716538 - RNA, 20 nt, Artificial Sequence
  Synthetic
gacuaagacaaaauucagaa

SEQ ID NO: 716539 - RNA, 20 nt, Artificial Sequence
  Synthetic
guacuaaagaugauucagaa

SEQ ID NO: 716540 - RNA, 20 nt, Artificial Sequence
  Synthetic
gcaggagugcugcuucagaa

SEQ ID NO: 716541 - RNA, 20 nt, Artificial Sequence
  Synthetic
ggcagaaaaagaaaagagaa

SEQ ID NO: 716542 - RNA, 20 nt, Artificial Sequence
  Synthetic
ggugucugauugaaagagaa

SEQ ID NO: 716543 - RNA, 20 nt, Artificial Sequence
  Synthetic
gguccaagaauacaagagaa

SEQ ID NO: 716544 - RNA, 20 nt, Artificial Sequence
  Synthetic
ggaaagagagaucaagagaa

SEQ ID NO: 716545 - RNA, 20 nt, Artificial Sequence
  Synthetic
gaauggaauuccacagagaa

SEQ ID NO: 716546 - RNA, 20 nt, Artificial Sequence
  Synthetic
gcugcgaugggaagagagaa

SEQ ID NO: 716547 - RNA, 20 nt, Artificial Sequence
  Synthetic
gcggaugggaagagagagaa

SEQ ID NO: 716548 - RNA, 20 nt, Artificial Sequence
  Synthetic
ggcuaaagcaagggagagaa

SEQ ID NO: 716549 - RNA, 20 nt, Artificial Sequence
  Synthetic
guugcuugugaaaucgagaa

SEQ ID NO: 716550 - RNA, 20 nt, Artificial Sequence
  Synthetic
guaguauuucauaaggagaa

SEQ ID NO: 716551 - RNA, 20 nt, Artificial Sequence
  Synthetic
gauaacaguauuaaggagaa

SEQ ID NO: 716552 - RNA, 20 nt, Artificial Sequence
  Synthetic
gagauuggagagcaggagaa

SEQ ID NO: 716553 - RNA, 20 nt, Artificial Sequence
  Synthetic
gggaggaugacgcaggagaa

SEQ ID NO: 716554 - RNA, 20 nt, Artificial Sequence
  Synthetic
gggagguuaaggcaggagaa

SEQ ID NO: 716555 - RNA, 20 nt, Artificial Sequence
  Synthetic
gggaggcugaggcaggagaa

SEQ ID NO: 716556 - RNA, 20 nt, Artificial Sequence
  Synthetic
gcauuucugugugaggagaa

SEQ ID NO: 716557 - RNA, 20 nt, Artificial Sequence
  Synthetic
gagacagaacgaagggagaa

SEQ ID NO: 716558 - RNA, 20 nt, Artificial Sequence
  Synthetic
gugggagacaggagggagaa

SEQ ID NO: 716559 - RNA, 20 nt, Artificial Sequence
  Synthetic
gggaagcugaggcgggagaa

SEQ ID NO: 716560 - RNA, 20 nt, Artificial Sequence
  Synthetic
gaauaagggcccauggagaa

SEQ ID NO: 716561 - RNA, 20 nt, Artificial Sequence
  Synthetic
ggaaaagccagcuuggagaa

SEQ ID NO: 716562 - RNA, 20 nt, Artificial Sequence
  Synthetic
guaugaccugucuuggagaa

SEQ ID NO: 716563 - RNA, 20 nt, Artificial Sequence
  Synthetic
guucagaaucaaaaugagaa

SEQ ID NO: 716564 - RNA, 20 nt, Artificial Sequence
  Synthetic
gagacagaagagcaugagaa

SEQ ID NO: 716565 - RNA, 20 nt, Artificial Sequence
  Synthetic
gauaggauacaaacugagaa

SEQ ID NO: 716566 - RNA, 20 nt, Artificial Sequence
  Synthetic
gcaaacaguucuacugagaa

SEQ ID NO: 716567 - RNA, 20 nt, Artificial Sequence
  Synthetic
gccucgcugaccauugagaa

SEQ ID NO: 716568 - RNA, 20 nt, Artificial Sequence
  Synthetic
gcuagaguggguauugagaa

SEQ ID NO: 716569 - RNA, 20 nt, Artificial Sequence
  Synthetic
guuucucaggcucuugagaa

SEQ ID NO: 716570 - RNA, 20 nt, Artificial Sequence
  Synthetic
ggcugugaucaaguugagaa

SEQ ID NO: 716571 - RNA, 20 nt, Artificial Sequence
  Synthetic
gaggagaauagacaauagaa

SEQ ID NO: 716572 - RNA, 20 nt, Artificial Sequence
  Synthetic
gaaacuagggacuaauagaa

SEQ ID NO: 716573 - RNA, 20 nt, Artificial Sequence
  Synthetic
guuaacuacuuuucauagaa

SEQ ID NO: 716574 - RNA, 20 nt, Artificial Sequence
  Synthetic
ggauggauagaaagauagaa

SEQ ID NO: 716575 - RNA, 20 nt, Artificial Sequence
  Synthetic
ggcagaaugagaagauagaa

SEQ ID NO: 716576 - RNA, 20 nt, Artificial Sequence
  Synthetic
gacugugcccugcgauagaa

SEQ ID NO: 716577 - RNA, 20 nt, Artificial Sequence
  Synthetic
gcaugaugguaaggauagaa

SEQ ID NO: 716578 - RNA, 20 nt, Artificial Sequence
  Synthetic
gacauuggggacuacuagaa

SEQ ID NO: 716579 - RNA, 20 nt, Artificial Sequence
  Synthetic
guaauaaaauucuacuagaa

SEQ ID NO: 716580 - RNA, 20 nt, Artificial Sequence
  Synthetic
gccaggaaacucaccuagaa

SEQ ID NO: 716581 - RNA, 20 nt, Artificial Sequence
  Synthetic
guggaacagucaagcuagaa

SEQ ID NO: 716582 - RNA, 20 nt, Artificial Sequence
  Synthetic
gagaagaaaaaaaaguagaa

SEQ ID NO: 716583 - RNA, 20 nt, Artificial Sequence
  Synthetic
gcauacaccugggaguagaa

SEQ ID NO: 716584 - RNA, 20 nt, Artificial Sequence
  Synthetic
gaggaaaagaagauguagaa

SEQ ID NO: 716585 - RNA, 20 nt, Artificial Sequence
  Synthetic
gcaacaauguucuuguagaa

SEQ ID NO: 716586 - RNA, 20 nt, Artificial Sequence
  Synthetic
guacaaagucacgauuagaa

SEQ ID NO: 716587 - RNA, 20 nt, Artificial Sequence
  Synthetic
gauugcaguaaauauuagaa

SEQ ID NO: 716588 - RNA, 20 nt, Artificial Sequence
  Synthetic
gggaauggugaugcuuagaa

SEQ ID NO: 716589 - RNA, 20 nt, Artificial Sequence
  Synthetic
gcaucucacaccaguuagaa

SEQ ID NO: 716590 - RNA, 20 nt, Artificial Sequence
  Synthetic
gaaaaggcaagugguuagaa

SEQ ID NO: 716591 - RNA, 20 nt, Artificial Sequence
  Synthetic
gagaaauauuaauguuagaa

SEQ ID NO: 716592 - RNA, 20 nt, Artificial Sequence
  Synthetic
gguuuauauuguauuuagaa

SEQ ID NO: 716593 - RNA, 20 nt, Artificial Sequence
  Synthetic
gcucuaauagaaguuuagaa

SEQ ID NO: 716594 - RNA, 20 nt, Artificial Sequence
  Synthetic
gaaauaagaccauuuuagaa

SEQ ID NO: 716595 - RNA, 20 nt, Artificial Sequence
  Synthetic
ggacagugugcauuuuagaa

SEQ ID NO: 716596 - RNA, 20 nt, Artificial Sequence
  Synthetic
gggagaacauucuuuuagaa

SEQ ID NO: 716597 - RNA, 20 nt, Artificial Sequence
  Synthetic
gagaaaaugaaagaaacgaa

SEQ ID NO: 716598 - RNA, 20 nt, Artificial Sequence
  Synthetic
guucuaagagacagaacgaa

SEQ ID NO: 716599 - RNA, 20 nt, Artificial Sequence
  Synthetic
guuagaugaagaaagacgaa

SEQ ID NO: 716600 - RNA, 20 nt, Artificial Sequence
  Synthetic
guaguggaggcaguuacgaa

SEQ ID NO: 716601 - RNA, 20 nt, Artificial Sequence
  Synthetic
gauauuuauagcuuuacgaa

SEQ ID NO: 716602 - RNA, 20 nt, Artificial Sequence
  Synthetic
gagaaaacaaacuacccgaa

SEQ ID NO: 716603 - RNA, 20 nt, Artificial Sequence
  Synthetic
guaaauacaccuguuccgaa

SEQ ID NO: 716604 - RNA, 20 nt, Artificial Sequence
  Synthetic
guaaccaggggcugggcgaa

SEQ ID NO: 716605 - RNA, 20 nt, Artificial Sequence
  Synthetic
gucauagccauuuuaucgaa

SEQ ID NO: 716606 - RNA, 20 nt, Artificial Sequence
  Synthetic
ggcagacuauuggacucgaa

SEQ ID NO: 716607 - RNA, 20 nt, Artificial Sequence
  Synthetic
gaauccaaacacuauucgaa

SEQ ID NO: 716608 - RNA, 20 nt, Artificial Sequence
  Synthetic
gagagaaacaagauuucgaa

SEQ ID NO: 716609 - RNA, 20 nt, Artificial Sequence
  Synthetic
gcuggaagaaagaaaaggaa

SEQ ID NO: 716610 - RNA, 20 nt, Artificial Sequence
  Synthetic
gaagaaacaaaagaaaggaa

SEQ ID NO: 716611 - RNA, 20 nt, Artificial Sequence
  Synthetic
gagagguagaaagaaaggaa

SEQ ID NO: 716612 - RNA, 20 nt, Artificial Sequence
  Synthetic
gaacuggucgaggaaaggaa

SEQ ID NO: 716613 - RNA, 20 nt, Artificial Sequence
  Synthetic
gugaauaaaugaagaaggaa

SEQ ID NO: 716614 - RNA, 20 nt, Artificial Sequence
  Synthetic
gguuucagcagcagaaggaa

SEQ ID NO: 716615 - RNA, 20 nt, Artificial Sequence
  Synthetic
gggaggaagagaggaaggaa

SEQ ID NO: 716616 - RNA, 20 nt, Artificial Sequence
  Synthetic
ggauauaguagaauaaggaa

SEQ ID NO: 716617 - RNA, 20 nt, Artificial Sequence
  Synthetic
guaggggaagagauaaggaa

SEQ ID NO: 716618 - RNA, 20 nt, Artificial Sequence
  Synthetic
gaauagcaacauuuaaggaa

SEQ ID NO: 716619 - RNA, 20 nt, Artificial Sequence
  Synthetic
gaggguagaaagaacaggaa

SEQ ID NO: 716620 - RNA, 20 nt, Artificial Sequence
  Synthetic
gaacuggaccccaccaggaa

SEQ ID NO: 716621 - RNA, 20 nt, Artificial Sequence
  Synthetic
ggaccaucuagcugcaggaa

SEQ ID NO: 716622 - RNA, 20 nt, Artificial Sequence
  Synthetic
gggagugaaggcugcaggaa

SEQ ID NO: 716623 - RNA, 20 nt, Artificial Sequence
  Synthetic
gaugcacauacacagaggaa

SEQ ID NO: 716624 - RNA, 20 nt, Artificial Sequence
  Synthetic
gagagacagagagagaggaa

SEQ ID NO: 716625 - RNA, 20 nt, Artificial Sequence
  Synthetic
ggggaguagggagagaggaa

SEQ ID NO: 716626 - RNA, 20 nt, Artificial Sequence
  Synthetic
gucaaaggaagaaggaggaa

SEQ ID NO: 716627 - RNA, 20 nt, Artificial Sequence
  Synthetic
gcauuguaaaagaggaggaa

SEQ ID NO: 716628 - RNA, 20 nt, Artificial Sequence
  Synthetic
ggaaaagggaaagggaggaa

SEQ ID NO: 716629 - RNA, 20 nt, Artificial Sequence
  Synthetic
ggaagaaaagaagggaggaa

SEQ ID NO: 716630 - RNA, 20 nt, Artificial Sequence
  Synthetic
gagagagagagagggaggaa

SEQ ID NO: 716631 - RNA, 20 nt, Artificial Sequence
  Synthetic
guguguagaugggggaggaa

SEQ ID NO: 716632 - RNA, 20 nt, Artificial Sequence
  Synthetic
gagagggagggauggaggaa

SEQ ID NO: 716633 - RNA, 20 nt, Artificial Sequence
  Synthetic
gagcaaugaagaaugaggaa

SEQ ID NO: 716634 - RNA, 20 nt, Artificial Sequence
  Synthetic
gcuauucauucacugaggaa

SEQ ID NO: 716635 - RNA, 20 nt, Artificial Sequence
  Synthetic
gaaggagaaguacugaggaa

SEQ ID NO: 716636 - RNA, 20 nt, Artificial Sequence
  Synthetic
gacaaaagaggagugaggaa

SEQ ID NO: 716637 - RNA, 20 nt, Artificial Sequence
  Synthetic
ggaagagguaauuauaggaa

SEQ ID NO: 716638 - RNA, 20 nt, Artificial Sequence
  Synthetic
guuaacuguauuucuaggaa

SEQ ID NO: 716639 - RNA, 20 nt, Artificial Sequence
  Synthetic
gugagccuuauggguaggaa

SEQ ID NO: 716640 - RNA, 20 nt, Artificial Sequence
  Synthetic
gagaauaaaaaguguaggaa

SEQ ID NO: 716641 - RNA, 20 nt, Artificial Sequence
  Synthetic
guagccuugugccuuaggaa

SEQ ID NO: 716642 - RNA, 20 nt, Artificial Sequence
  Synthetic
guuuuauuuggauuuaggaa

SEQ ID NO: 716643 - RNA, 20 nt, Artificial Sequence
  Synthetic
gguauuccaggaagacggaa

SEQ ID NO: 716644 - RNA, 20 nt, Artificial Sequence
  Synthetic
guugggguggagggacggaa

SEQ ID NO: 716645 - RNA, 20 nt, Artificial Sequence
  Synthetic
gguacacaauagguacggaa

SEQ ID NO: 716646 - RNA, 20 nt, Artificial Sequence
  Synthetic
gcacaaaagucaaaucggaa

SEQ ID NO: 716647 - RNA, 20 nt, Artificial Sequence
  Synthetic
ggaaagaaaaaaaaagggaa

SEQ ID NO: 716648 - RNA, 20 nt, Artificial Sequence
  Synthetic
gaggguugguagaaagggaa

SEQ ID NO: 716649 - RNA, 20 nt, Artificial Sequence
  Synthetic
gagaaaagcuaccaagggaa

SEQ ID NO: 716650 - RNA, 20 nt, Artificial Sequence
  Synthetic
ggggagggaagggaagggaa

SEQ ID NO: 716651 - RNA, 20 nt, Artificial Sequence
  Synthetic
ggagaggggagggaagggaa

SEQ ID NO: 716652 - RNA, 20 nt, Artificial Sequence
  Synthetic
gaugccuuuuuaucagggaa

SEQ ID NO: 716653 - RNA, 20 nt, Artificial Sequence
  Synthetic
gaaggaagcuggagagggaa

SEQ ID NO: 716654 - RNA, 20 nt, Artificial Sequence
  Synthetic
gacccggaagcaggagggaa

SEQ ID NO: 716655 - RNA, 20 nt, Artificial Sequence
  Synthetic
gagaaugagugaggagggaa

SEQ ID NO: 716656 - RNA, 20 nt, Artificial Sequence
  Synthetic
gugugagagaggggagggaa

SEQ ID NO: 716657 - RNA, 20 nt, Artificial Sequence
  Synthetic
gggaaggagaggggagggaa

SEQ ID NO: 716658 - RNA, 20 nt, Artificial Sequence
  Synthetic
gaggaagagagaugagggaa

SEQ ID NO: 716659 - RNA, 20 nt, Artificial Sequence
  Synthetic
gggggcccuguacuagggaa

SEQ ID NO: 716660 - RNA, 20 nt, Artificial Sequence
  Synthetic
ggaagcaagauguccgggaa

SEQ ID NO: 716661 - RNA, 20 nt, Artificial Sequence
  Synthetic
gucacacaaaaaaaggggaa

SEQ ID NO: 716662 - RNA, 20 nt, Artificial Sequence
  Synthetic
ggagcuaucacguaggggaa

SEQ ID NO: 716663 - RNA, 20 nt, Artificial Sequence
  Synthetic
gacacaagauauuaggggaa

SEQ ID NO: 716664 - RNA, 20 nt, Artificial Sequence
  Synthetic
ggacagagcaccacggggaa

SEQ ID NO: 716665 - RNA, 20 nt, Artificial Sequence
  Synthetic
guaaaauauuuagcggggaa

SEQ ID NO: 716666 - RNA, 20 nt, Artificial Sequence
  Synthetic
gauuauuuguaaugggggaa

SEQ ID NO: 716667 - RNA, 20 nt, Artificial Sequence
  Synthetic
gaagcugaggguugggggaa

SEQ ID NO: 716668 - RNA, 20 nt, Artificial Sequence
  Synthetic
gaaaaacaagcaauggggaa

SEQ ID NO: 716669 - RNA, 20 nt, Artificial Sequence
  Synthetic
ggaaaacaagcaauggggaa

SEQ ID NO: 716670 - RNA, 20 nt, Artificial Sequence
  Synthetic
ggagucaucagaauggggaa

SEQ ID NO: 716671 - RNA, 20 nt, Artificial Sequence
  Synthetic
gaaucaggaacucuggggaa

SEQ ID NO: 716672 - RNA, 20 nt, Artificial Sequence
  Synthetic
guaugaccuuguguggggaa

SEQ ID NO: 716673 - RNA, 20 nt, Artificial Sequence
  Synthetic
gcccaacaccgggcugggaa

SEQ ID NO: 716674 - RNA, 20 nt, Artificial Sequence
  Synthetic
gauucuuauguggcugggaa

SEQ ID NO: 716675 - RNA, 20 nt, Artificial Sequence
  Synthetic
guuggaugugugugugggaa

SEQ ID NO: 716676 - RNA, 20 nt, Artificial Sequence
  Synthetic
gauuuuggaggucuugggaa

SEQ ID NO: 716677 - RNA, 20 nt, Artificial Sequence
  Synthetic
gaaagaauugggguugggaa

SEQ ID NO: 716678 - RNA, 20 nt, Artificial Sequence
  Synthetic
gaagaagcccguaaauggaa

SEQ ID NO: 716679 - RNA, 20 nt, Artificial Sequence
  Synthetic
gagugauuuagagaauggaa

SEQ ID NO: 716680 - RNA, 20 nt, Artificial Sequence
  Synthetic
guacaacagggagcauggaa

SEQ ID NO: 716681 - RNA, 20 nt, Artificial Sequence
  Synthetic
ggaaggagguaaauauggaa

SEQ ID NO: 716682 - RNA, 20 nt, Artificial Sequence
  Synthetic
gcagagagaagacacuggaa

SEQ ID NO: 716683 - RNA, 20 nt, Artificial Sequence
  Synthetic
gaaauaaaguacaucuggaa

SEQ ID NO: 716684 - RNA, 20 nt, Artificial Sequence
  Synthetic
ggaagaaaagaggucuggaa

SEQ ID NO: 716685 - RNA, 20 nt, Artificial Sequence
  Synthetic
guaacucuguagaaguggaa

SEQ ID NO: 716686 - RNA, 20 nt, Artificial Sequence
  Synthetic
gcucaguuacggaaguggaa

SEQ ID NO: 716687 - RNA, 20 nt, Artificial Sequence
  Synthetic
gagaauccauaugaguggaa

SEQ ID NO: 716688 - RNA, 20 nt, Artificial Sequence
  Synthetic
guaauuguaguauaguggaa

SEQ ID NO: 716689 - RNA, 20 nt, Artificial Sequence
  Synthetic
gcauucaaaauguaguggaa

SEQ ID NO: 716690 - RNA, 20 nt, Artificial Sequence
  Synthetic
gcuguuaugugaggguggaa

SEQ ID NO: 716691 - RNA, 20 nt, Artificial Sequence
  Synthetic
gcugaacccacauuguggaa

SEQ ID NO: 716692 - RNA, 20 nt, Artificial Sequence
  Synthetic
ggcacagagacaaauuggaa

SEQ ID NO: 716693 - RNA, 20 nt, Artificial Sequence
  Synthetic
gcauuugaagcaaauuggaa

SEQ ID NO: 716694 - RNA, 20 nt, Artificial Sequence
  Synthetic
guauuauaaauggauuggaa

SEQ ID NO: 716695 - RNA, 20 nt, Artificial Sequence
  Synthetic
gaaaguucauguuauuggaa

SEQ ID NO: 716696 - RNA, 20 nt, Artificial Sequence
  Synthetic
guagaagaguaaacuuggaa

SEQ ID NO: 716697 - RNA, 20 nt, Artificial Sequence
  Synthetic
gggaagagaugagcuuggaa

SEQ ID NO: 716698 - RNA, 20 nt, Artificial Sequence
  Synthetic
ggaaccuguauucuuuggaa

SEQ ID NO: 716699 - RNA, 20 nt, Artificial Sequence
  Synthetic
gaaucuuugcacuuuuggaa

SEQ ID NO: 716700 - RNA, 20 nt, Artificial Sequence
  Synthetic
gggcccuaggauuuuuggaa

SEQ ID NO: 716701 - RNA, 20 nt, Artificial Sequence
  Synthetic
gagaaauuagccaaaaugaa

SEQ ID NO: 716702 - RNA, 20 nt, Artificial Sequence
  Synthetic
gacauaaucuaucaaaugaa

SEQ ID NO: 716703 - RNA, 20 nt, Artificial Sequence
  Synthetic
gaaauguuaguagaaaugaa

SEQ ID NO: 716704 - RNA, 20 nt, Artificial Sequence
  Synthetic
guaaauuggauugaaaugaa

SEQ ID NO: 716705 - RNA, 20 nt, Artificial Sequence
  Synthetic
guaggaaaaaaguaaaugaa

SEQ ID NO: 716706 - RNA, 20 nt, Artificial Sequence
  Synthetic
guuuaaaggaagucaaugaa

SEQ ID NO: 716707 - RNA, 20 nt, Artificial Sequence
  Synthetic
ggcuauuuuguuucaaugaa

SEQ ID NO: 716708 - RNA, 20 nt, Artificial Sequence
  Synthetic
gggaugaugaggggaaugaa

SEQ ID NO: 716709 - RNA, 20 nt, Artificial Sequence
  Synthetic
gucuagucaacuggaaugaa

SEQ ID NO: 716710 - RNA, 20 nt, Artificial Sequence
  Synthetic
guauuuguagaaugaaugaa

SEQ ID NO: 716711 - RNA, 20 nt, Artificial Sequence
  Synthetic
guuggagccccuugaaugaa

SEQ ID NO: 716712 - RNA, 20 nt, Artificial Sequence
  Synthetic
guauuggauaaaauaaugaa

SEQ ID NO: 716713 - RNA, 20 nt, Artificial Sequence
  Synthetic
gggaaaggccagauaaugaa

SEQ ID NO: 716714 - RNA, 20 nt, Artificial Sequence
  Synthetic
guuauuuggaaccuaaugaa

SEQ ID NO: 716715 - RNA, 20 nt, Artificial Sequence
  Synthetic
gcuguuggcucaaacaugaa

SEQ ID NO: 716716 - RNA, 20 nt, Artificial Sequence
  Synthetic
guaaauuaauuuaacaugaa

SEQ ID NO: 716717 - RNA, 20 nt, Artificial Sequence
  Synthetic
guguguggauuucucaugaa

SEQ ID NO: 716718 - RNA, 20 nt, Artificial Sequence
  Synthetic
gagaaaaauggagucaugaa

SEQ ID NO: 716719 - RNA, 20 nt, Artificial Sequence
  Synthetic
gaaggcucugccuucaugaa

SEQ ID NO: 716720 - RNA, 20 nt, Artificial Sequence
  Synthetic
gcuaugggaccaaagaugaa

SEQ ID NO: 716721 - RNA, 20 nt, Artificial Sequence
  Synthetic
gguaagugccaggagaugaa

SEQ ID NO: 716722 - RNA, 20 nt, Artificial Sequence
  Synthetic
gucuuaauccuuuugaugaa

SEQ ID NO: 716723 - RNA, 20 nt, Artificial Sequence
  Synthetic
ggauuaugacuuucuaugaa

SEQ ID NO: 716724 - RNA, 20 nt, Artificial Sequence
  Synthetic
ggguaauaaagcauuaugaa

SEQ ID NO: 716725 - RNA, 20 nt, Artificial Sequence
  Synthetic
ggcaaagggaggauuaugaa

SEQ ID NO: 716726 - RNA, 20 nt, Artificial Sequence
  Synthetic
ggugugacuuuuauuaugaa

SEQ ID NO: 716727 - RNA, 20 nt, Artificial Sequence
  Synthetic
gagggcucugcccuuaugaa

SEQ ID NO: 716728 - RNA, 20 nt, Artificial Sequence
  Synthetic
gcucagcaucaaguuaugaa

SEQ ID NO: 716729 - RNA, 20 nt, Artificial Sequence
  Synthetic
guauguuuacgaaaacugaa

SEQ ID NO: 716730 - RNA, 20 nt, Artificial Sequence
  Synthetic
gaauugcccugaaaacugaa

SEQ ID NO: 716731 - RNA, 20 nt, Artificial Sequence
  Synthetic
gcauaacaacugcaacugaa

SEQ ID NO: 716732 - RNA, 20 nt, Artificial Sequence
  Synthetic
ggaaaaaguacuccacugaa

SEQ ID NO: 716733 - RNA, 20 nt, Artificial Sequence
  Synthetic
gcauuuccuguuuuacugaa

SEQ ID NO: 716734 - RNA, 20 nt, Artificial Sequence
  Synthetic
gagaaucgcuugaaccugaa

SEQ ID NO: 716735 - RNA, 20 nt, Artificial Sequence
  Synthetic
gcccaugccuauauccugaa

SEQ ID NO: 716736 - RNA, 20 nt, Artificial Sequence
  Synthetic
gcccaugccuguauccugaa

SEQ ID NO: 716737 - RNA, 20 nt, Artificial Sequence
  Synthetic
gcccaugccuacguccugaa

SEQ ID NO: 716738 - RNA, 20 nt, Artificial Sequence
  Synthetic
gcccacgccuauguccugaa

SEQ ID NO: 716739 - RNA, 20 nt, Artificial Sequence
  Synthetic
gcccaugccuauguccugaa

SEQ ID NO: 716740 - RNA, 20 nt, Artificial Sequence
  Synthetic
gcccaugccuuuguccugaa

SEQ ID NO: 716741 - RNA, 20 nt, Artificial Sequence
  Synthetic
gucaaguguuaaaggcugaa

SEQ ID NO: 716742 - RNA, 20 nt, Artificial Sequence
  Synthetic
gaaaaaaaaagauggcugaa

SEQ ID NO: 716743 - RNA, 20 nt, Artificial Sequence
  Synthetic
gcugcccagaugaugcugaa

SEQ ID NO: 716744 - RNA, 20 nt, Artificial Sequence
  Synthetic
gaaacauuuaagaaucugaa

SEQ ID NO: 716745 - RNA, 20 nt, Artificial Sequence
  Synthetic
guaguagaaagagaucugaa

SEQ ID NO: 716746 - RNA, 20 nt, Artificial Sequence
  Synthetic
guucucaggacuacucugaa

SEQ ID NO: 716747 - RNA, 20 nt, Artificial Sequence
  Synthetic
gagaauauaaaugcucugaa

SEQ ID NO: 716748 - RNA, 20 nt, Artificial Sequence
  Synthetic
gggagauccuguuuucugaa

SEQ ID NO: 716749 - RNA, 20 nt, Artificial Sequence
  Synthetic
gaaguugcaaagaaagugaa

SEQ ID NO: 716750 - RNA, 20 nt, Artificial Sequence
  Synthetic
guuaaaaaaaauuaagugaa

SEQ ID NO: 716751 - RNA, 20 nt, Artificial Sequence
  Synthetic
gugaauaaugguuaagugaa

SEQ ID NO: 716752 - RNA, 20 nt, Artificial Sequence
  Synthetic
gcguagaaaaagacagugaa

SEQ ID NO: 716753 - RNA, 20 nt, Artificial Sequence
  Synthetic
gaggcggagguugcagugaa

SEQ ID NO: 716754 - RNA, 20 nt, Artificial Sequence
  Synthetic
gccuuaucaaagugagugaa

SEQ ID NO: 716755 - RNA, 20 nt, Artificial Sequence
  Synthetic
guagaaaaugccaaggugaa

SEQ ID NO: 716756 - RNA, 20 nt, Artificial Sequence
  Synthetic
guugucaagcagaaggugaa

SEQ ID NO: 716757 - RNA, 20 nt, Artificial Sequence
  Synthetic
guaagaacugaagaggugaa

SEQ ID NO: 716758 - RNA, 20 nt, Artificial Sequence
  Synthetic
gaaucauggugggaggugaa

SEQ ID NO: 716759 - RNA, 20 nt, Artificial Sequence
  Synthetic
gagauuauaagcagggugaa

SEQ ID NO: 716760 - RNA, 20 nt, Artificial Sequence
  Synthetic
gaaaaaaugaugauggugaa

SEQ ID NO: 716761 - RNA, 20 nt, Artificial Sequence
  Synthetic
gagaaauagcagcuggugaa

SEQ ID NO: 716762 - RNA, 20 nt, Artificial Sequence
  Synthetic
ggugcuaauuaaaaugugaa

SEQ ID NO: 716763 - RNA, 20 nt, Artificial Sequence
  Synthetic
gauugguuuugaaaugugaa

SEQ ID NO: 716764 - RNA, 20 nt, Artificial Sequence
  Synthetic
gauacuacuagggaugugaa

SEQ ID NO: 716765 - RNA, 20 nt, Artificial Sequence
  Synthetic
gauaaaugucuugaugugaa

SEQ ID NO: 716766 - RNA, 20 nt, Artificial Sequence
  Synthetic
gagaaauucagaagugugaa

SEQ ID NO: 716767 - RNA, 20 nt, Artificial Sequence
  Synthetic
ggaagggggaggggugugaa

SEQ ID NO: 716768 - RNA, 20 nt, Artificial Sequence
  Synthetic
gacguaaaaguggaauugaa

SEQ ID NO: 716769 - RNA, 20 nt, Artificial Sequence
  Synthetic
gacaguagggaaacauugaa

SEQ ID NO: 716770 - RNA, 20 nt, Artificial Sequence
  Synthetic
gguaauagcaaaccauugaa

SEQ ID NO: 716771 - RNA, 20 nt, Artificial Sequence
  Synthetic
gugcaauguggaauauugaa

SEQ ID NO: 716772 - RNA, 20 nt, Artificial Sequence
  Synthetic
gaacucaacaguauauugaa

SEQ ID NO: 716773 - RNA, 20 nt, Artificial Sequence
  Synthetic
ggaaaaagaaugguauugaa

SEQ ID NO: 716774 - RNA, 20 nt, Artificial Sequence
  Synthetic
gggacaaguucuuuauugaa

SEQ ID NO: 716775 - RNA, 20 nt, Artificial Sequence
  Synthetic
gaugagguucugcacuugaa

SEQ ID NO: 716776 - RNA, 20 nt, Artificial Sequence
  Synthetic
guuauuaaaauagacuugaa

SEQ ID NO: 716777 - RNA, 20 nt, Artificial Sequence
  Synthetic
gauguacuuuaaugcuugaa

SEQ ID NO: 716778 - RNA, 20 nt, Artificial Sequence
  Synthetic
gcaagauacuauugcuugaa

SEQ ID NO: 716779 - RNA, 20 nt, Artificial Sequence
  Synthetic
gcugacuguacacucuugaa

SEQ ID NO: 716780 - RNA, 20 nt, Artificial Sequence
  Synthetic
ggggguggauccuucuugaa

SEQ ID NO: 716781 - RNA, 20 nt, Artificial Sequence
  Synthetic
gauacaaaaagaguguugaa

SEQ ID NO: 716782 - RNA, 20 nt, Artificial Sequence
  Synthetic
gucaguaaauaguuguugaa

SEQ ID NO: 716783 - RNA, 20 nt, Artificial Sequence
  Synthetic
guuaauaauacacauuugaa

SEQ ID NO: 716784 - RNA, 20 nt, Artificial Sequence
  Synthetic
gguaaucaggaaccuuugaa

SEQ ID NO: 716785 - RNA, 20 nt, Artificial Sequence
  Synthetic
gaaaggaacauuccuuugaa

SEQ ID NO: 716786 - RNA, 20 nt, Artificial Sequence
  Synthetic
gguguagggauaucuuugaa

SEQ ID NO: 716787 - RNA, 20 nt, Artificial Sequence
  Synthetic
guaccauauuaaauuuugaa

SEQ ID NO: 716788 - RNA, 20 nt, Artificial Sequence
  Synthetic
gguauucguuuucuuuugaa

SEQ ID NO: 716789 - RNA, 20 nt, Artificial Sequence
  Synthetic
gugggaaaugucguuuugaa

SEQ ID NO: 716790 - RNA, 20 nt, Artificial Sequence
  Synthetic
ggauucauugauuuuuugaa

SEQ ID NO: 716791 - RNA, 20 nt, Artificial Sequence
  Synthetic
gauucauugauuuuuuugaa

SEQ ID NO: 716792 - RNA, 20 nt, Artificial Sequence
  Synthetic
gauuuugggaaaaaaaauaa

SEQ ID NO: 716793 - RNA, 20 nt, Artificial Sequence
  Synthetic
gaaacugaugucaaaaauaa

SEQ ID NO: 716794 - RNA, 20 nt, Artificial Sequence
  Synthetic
gauuaauaaauacaaaauaa

SEQ ID NO: 716795 - RNA, 20 nt, Artificial Sequence
  Synthetic
ggagaaauuggccaaaauaa

SEQ ID NO: 716796 - RNA, 20 nt, Artificial Sequence
  Synthetic
gcacugccauuagaaaauaa

SEQ ID NO: 716797 - RNA, 20 nt, Artificial Sequence
  Synthetic
gguuuuagcauuuaaaauaa

SEQ ID NO: 716798 - RNA, 20 nt, Artificial Sequence
  Synthetic
gaggacauuauaagaaauaa

SEQ ID NO: 716799 - RNA, 20 nt, Artificial Sequence
  Synthetic
gaaauaacaaaaggaaauaa

SEQ ID NO: 716800 - RNA, 20 nt, Artificial Sequence
  Synthetic
gacguauuguagggaaauaa

SEQ ID NO: 716801 - RNA, 20 nt, Artificial Sequence
  Synthetic
gauaacauacauugaaauaa

SEQ ID NO: 716802 - RNA, 20 nt, Artificial Sequence
  Synthetic
guaacauaaaaauuaaauaa

SEQ ID NO: 716803 - RNA, 20 nt, Artificial Sequence
  Synthetic
gcuacaagaguuuuaaauaa

SEQ ID NO: 716804 - RNA, 20 nt, Artificial Sequence
  Synthetic
gggugacugaggcacaauaa

SEQ ID NO: 716805 - RNA, 20 nt, Artificial Sequence
  Synthetic
gagcaagacucaaccaauaa

SEQ ID NO: 716806 - RNA, 20 nt, Artificial Sequence
  Synthetic
gauuaaaaguaucagaauaa

SEQ ID NO: 716807 - RNA, 20 nt, Artificial Sequence
  Synthetic
gaugcuuucacagagaauaa

SEQ ID NO: 716808 - RNA, 20 nt, Artificial Sequence
  Synthetic
gaccugaggugagggaauaa

SEQ ID NO: 716809 - RNA, 20 nt, Artificial Sequence
  Synthetic
ggcacagacaaguggaauaa

SEQ ID NO: 716810 - RNA, 20 nt, Artificial Sequence
  Synthetic
gcagguguaauucugaauaa

SEQ ID NO: 716811 - RNA, 20 nt, Artificial Sequence
  Synthetic
gggaaguacuuucugaauaa

SEQ ID NO: 716812 - RNA, 20 nt, Artificial Sequence
  Synthetic
gaaaauugcuacuugaauaa

SEQ ID NO: 716813 - RNA, 20 nt, Artificial Sequence
  Synthetic
gggccuuugagaaauaauaa

SEQ ID NO: 716814 - RNA, 20 nt, Artificial Sequence
  Synthetic
gaguugaaguagaauaauaa

SEQ ID NO: 716815 - RNA, 20 nt, Artificial Sequence
  Synthetic
gacuuguguuuaucuaauaa

SEQ ID NO: 716816 - RNA, 20 nt, Artificial Sequence
  Synthetic
gaaaauaauaaaauuaauaa

SEQ ID NO: 716817 - RNA, 20 nt, Artificial Sequence
  Synthetic
gcaaaaucuuccaaacauaa

SEQ ID NO: 716818 - RNA, 20 nt, Artificial Sequence
  Synthetic
gaacagugcuuggaacauaa

SEQ ID NO: 716819 - RNA, 20 nt, Artificial Sequence
  Synthetic
ggaacacuucuguaacauaa

SEQ ID NO: 716820 - RNA, 20 nt, Artificial Sequence
  Synthetic
gauacuaaauuaacacauaa

SEQ ID NO: 716821 - RNA, 20 nt, Artificial Sequence
  Synthetic
gagagaagaaugccacauaa

SEQ ID NO: 716822 - RNA, 20 nt, Artificial Sequence
  Synthetic
gaguuacagcaugcacauaa

SEQ ID NO: 716823 - RNA, 20 nt, Artificial Sequence
  Synthetic
gaggcugcagugagccauaa

SEQ ID NO: 716824 - RNA, 20 nt, Artificial Sequence
  Synthetic
gaacaagagagggagcauaa

SEQ ID NO: 716825 - RNA, 20 nt, Artificial Sequence
  Synthetic
gaagacauacacuagcauaa

SEQ ID NO: 716826 - RNA, 20 nt, Artificial Sequence
  Synthetic
gggaacuaauuccaucauaa

SEQ ID NO: 716827 - RNA, 20 nt, Artificial Sequence
  Synthetic
gguguuaccacuuaucauaa

SEQ ID NO: 716828 - RNA, 20 nt, Artificial Sequence
  Synthetic
guuaaugcuacuauucauaa

SEQ ID NO: 716829 - RNA, 20 nt, Artificial Sequence
  Synthetic
gaccuuuaugauguucauaa

SEQ ID NO: 716830 - RNA, 20 nt, Artificial Sequence
  Synthetic
gagagcugaugguuucauaa

SEQ ID NO: 716831 - RNA, 20 nt, Artificial Sequence
  Synthetic
gaauggaauguuuuucauaa

SEQ ID NO: 716832 - RNA, 20 nt, Artificial Sequence
  Synthetic
gguauuuccgagaaagauaa

SEQ ID NO: 716833 - RNA, 20 nt, Artificial Sequence
  Synthetic
ggcugggaaguccaagauaa

SEQ ID NO: 716834 - RNA, 20 nt, Artificial Sequence
  Synthetic
guucagguuuucuaagauaa

SEQ ID NO: 716835 - RNA, 20 nt, Artificial Sequence
  Synthetic
gcauuuauucacccagauaa

SEQ ID NO: 716836 - RNA, 20 nt, Artificial Sequence
  Synthetic
gguuugaggugagacgauaa

SEQ ID NO: 716837 - RNA, 20 nt, Artificial Sequence
  Synthetic
gccauugauaagagcgauaa

SEQ ID NO: 716838 - RNA, 20 nt, Artificial Sequence
  Synthetic
gguagaaagggaaaggauaa

SEQ ID NO: 716839 - RNA, 20 nt, Artificial Sequence
  Synthetic
gacaauaugcaucaggauaa

SEQ ID NO: 716840 - RNA, 20 nt, Artificial Sequence
  Synthetic
guccuuguacuucaggauaa

SEQ ID NO: 716841 - RNA, 20 nt, Artificial Sequence
  Synthetic
guguguguuguggaggauaa

SEQ ID NO: 716842 - RNA, 20 nt, Artificial Sequence
  Synthetic
gcucacacauuuagggauaa

SEQ ID NO: 716843 - RNA, 20 nt, Artificial Sequence
  Synthetic
ggacaaaagcugggggauaa

SEQ ID NO: 716844 - RNA, 20 nt, Artificial Sequence
  Synthetic
gagucaggaguacuggauaa

SEQ ID NO: 716845 - RNA, 20 nt, Artificial Sequence
  Synthetic
gacaaaucuccaguggauaa

SEQ ID NO: 716846 - RNA, 20 nt, Artificial Sequence
  Synthetic
gucccaaguguuuuggauaa

SEQ ID NO: 716847 - RNA, 20 nt, Artificial Sequence
  Synthetic
gacacaagaaaaaaugauaa

SEQ ID NO: 716848 - RNA, 20 nt, Artificial Sequence
  Synthetic
gacacaauaaaaaaugauaa

SEQ ID NO: 716849 - RNA, 20 nt, Artificial Sequence
  Synthetic
ggcacaauaaaaaaugauaa

SEQ ID NO: 716850 - RNA, 20 nt, Artificial Sequence
  Synthetic
gaugcaauaaaaaaugauaa

SEQ ID NO: 716851 - RNA, 20 nt, Artificial Sequence
  Synthetic
gaguuugucaagaaugauaa

SEQ ID NO: 716852 - RNA, 20 nt, Artificial Sequence
  Synthetic
gagaaggcagaugaugauaa

SEQ ID NO: 716853 - RNA, 20 nt, Artificial Sequence
  Synthetic
gguaacaaaagggcugauaa

SEQ ID NO: 716854 - RNA, 20 nt, Artificial Sequence
  Synthetic
gcaaccuacucaucugauaa

SEQ ID NO: 716855 - RNA, 20 nt, Artificial Sequence
  Synthetic
gcuugacuucacagugauaa

SEQ ID NO: 716856 - RNA, 20 nt, Artificial Sequence
  Synthetic
guaccuaaaggaguugauaa

SEQ ID NO: 716857 - RNA, 20 nt, Artificial Sequence
  Synthetic
ggugauuuuuuucaauauaa

SEQ ID NO: 716858 - RNA, 20 nt, Artificial Sequence
  Synthetic
gaaaagcaugccuaauauaa

SEQ ID NO: 716859 - RNA, 20 nt, Artificial Sequence
  Synthetic
ggagauugagucugauauaa

SEQ ID NO: 716860 - RNA, 20 nt, Artificial Sequence
  Synthetic
gcauuucuaaagugauauaa

SEQ ID NO: 716861 - RNA, 20 nt, Artificial Sequence
  Synthetic
gggaauuauuacauauauaa

SEQ ID NO: 716862 - RNA, 20 nt, Artificial Sequence
  Synthetic
ggugauaguacaguauauaa

SEQ ID NO: 716863 - RNA, 20 nt, Artificial Sequence
  Synthetic
gaaccuuuguguuuauauaa

SEQ ID NO: 716864 - RNA, 20 nt, Artificial Sequence
  Synthetic
gaaauggcauuuuacuauaa

SEQ ID NO: 716865 - RNA, 20 nt, Artificial Sequence
  Synthetic
guucauguauguugcuauaa

SEQ ID NO: 716866 - RNA, 20 nt, Artificial Sequence
  Synthetic
ggucagcaaacuuucuauaa

SEQ ID NO: 716867 - RNA, 20 nt, Artificial Sequence
  Synthetic
gaauauauguuaaaguauaa

SEQ ID NO: 716868 - RNA, 20 nt, Artificial Sequence
  Synthetic
gacagguaaagcaaguauaa

SEQ ID NO: 716869 - RNA, 20 nt, Artificial Sequence
  Synthetic
gaacauacugaucaguauaa

SEQ ID NO: 716870 - RNA, 20 nt, Artificial Sequence
  Synthetic
ggaaaaguauacuuguauaa

SEQ ID NO: 716871 - RNA, 20 nt, Artificial Sequence
  Synthetic
gaaugagaagagcauuauaa

SEQ ID NO: 716872 - RNA, 20 nt, Artificial Sequence
  Synthetic
gcucaugcaccucauuauaa

SEQ ID NO: 716873 - RNA, 20 nt, Artificial Sequence
  Synthetic
gacacuuccucuuguuauaa

SEQ ID NO: 716874 - RNA, 20 nt, Artificial Sequence
  Synthetic
gcgugaagccuuguuuauaa

SEQ ID NO: 716875 - RNA, 20 nt, Artificial Sequence
  Synthetic
gagcacaacagauuuuauaa

SEQ ID NO: 716876 - RNA, 20 nt, Artificial Sequence
  Synthetic
gagcaguugugauuuuauaa

SEQ ID NO: 716877 - RNA, 20 nt, Artificial Sequence
  Synthetic
gagauccaaugguuuuauaa

SEQ ID NO: 716878 - RNA, 20 nt, Artificial Sequence
  Synthetic
gagaucagaugguuuuauaa

SEQ ID NO: 716879 - RNA, 20 nt, Artificial Sequence
  Synthetic
gagaucugaugguuuuauaa

SEQ ID NO: 716880 - RNA, 20 nt, Artificial Sequence
  Synthetic
gggaucugaugguuuuauaa

SEQ ID NO: 716881 - RNA, 20 nt, Artificial Sequence
  Synthetic
gaggucugaugguuuuauaa

SEQ ID NO: 716882 - RNA, 20 nt, Artificial Sequence
  Synthetic
gagauuugaugguuuuauaa

SEQ ID NO: 716883 - RNA, 20 nt, Artificial Sequence
  Synthetic
gcuguguacuggaaaacuaa

SEQ ID NO: 716884 - RNA, 20 nt, Artificial Sequence
  Synthetic
guuuagguaauauaaacuaa

SEQ ID NO: 716885 - RNA, 20 nt, Artificial Sequence
  Synthetic
gaagaaacugcaucaacuaa

SEQ ID NO: 716886 - RNA, 20 nt, Artificial Sequence
  Synthetic
ggaucaggaaagucaacuaa

SEQ ID NO: 716887 - RNA, 20 nt, Artificial Sequence
  Synthetic
gaaccagaaaaaauaacuaa

SEQ ID NO: 716888 - RNA, 20 nt, Artificial Sequence
  Synthetic
guacauuuaaaaauaacuaa

SEQ ID NO: 716889 - RNA, 20 nt, Artificial Sequence
  Synthetic
gagacacauguuaccacuaa

SEQ ID NO: 716890 - RNA, 20 nt, Artificial Sequence
  Synthetic
ggaaauggguagcccacuaa

SEQ ID NO: 716891 - RNA, 20 nt, Artificial Sequence
  Synthetic
gagaaugugguacauacuaa

SEQ ID NO: 716892 - RNA, 20 nt, Artificial Sequence
  Synthetic
gcuucuuaauuaacuacuaa

SEQ ID NO: 716893 - RNA, 20 nt, Artificial Sequence
  Synthetic
gcugucacaacaguuacuaa

SEQ ID NO: 716894 - RNA, 20 nt, Artificial Sequence
  Synthetic
gcucuuguuuucguuacuaa

SEQ ID NO: 716895 - RNA, 20 nt, Artificial Sequence
  Synthetic
gugagccuagaauaaccuaa

SEQ ID NO: 716896 - RNA, 20 nt, Artificial Sequence
  Synthetic
guggauuucuucauaccuaa

SEQ ID NO: 716897 - RNA, 20 nt, Artificial Sequence
  Synthetic
guggcugagcugguaccuaa

SEQ ID NO: 716898 - RNA, 20 nt, Artificial Sequence
  Synthetic
gguuccauaaacuucccuaa

SEQ ID NO: 716899 - RNA, 20 nt, Artificial Sequence
  Synthetic
gggcuuguguaucaagcuaa

SEQ ID NO: 716900 - RNA, 20 nt, Artificial Sequence
  Synthetic
gaaggauuuaagggagcuaa

SEQ ID NO: 716901 - RNA, 20 nt, Artificial Sequence
  Synthetic
gaagauguacaaauagcuaa

SEQ ID NO: 716902 - RNA, 20 nt, Artificial Sequence
  Synthetic
gccuguacuucaguagcuaa

SEQ ID NO: 716903 - RNA, 20 nt, Artificial Sequence
  Synthetic
gguuggaaacccagggcuaa

SEQ ID NO: 716904 - RNA, 20 nt, Artificial Sequence
  Synthetic
ggaaagggggggauggcuaa

SEQ ID NO: 716905 - RNA, 20 nt, Artificial Sequence
  Synthetic
guugaagaaggcaaugcuaa

SEQ ID NO: 716906 - RNA, 20 nt, Artificial Sequence
  Synthetic
ggcacugugcuggcugcuaa

SEQ ID NO: 716907 - RNA, 20 nt, Artificial Sequence
  Synthetic
gguuuaaauacuuaaucuaa

SEQ ID NO: 716908 - RNA, 20 nt, Artificial Sequence
  Synthetic
gcaauuaauaaaucaucuaa

SEQ ID NO: 716909 - RNA, 20 nt, Artificial Sequence
  Synthetic
gcuaguacacaucuaucuaa

SEQ ID NO: 716910 - RNA, 20 nt, Artificial Sequence
  Synthetic
gucuaauagagaugcucuaa

SEQ ID NO: 716911 - RNA, 20 nt, Artificial Sequence
  Synthetic
guauagauuuagaagucuaa

SEQ ID NO: 716912 - RNA, 20 nt, Artificial Sequence
  Synthetic
ggaucuuguccagguucuaa

SEQ ID NO: 716913 - RNA, 20 nt, Artificial Sequence
  Synthetic
gugauaaaauugcuuucuaa

SEQ ID NO: 716914 - RNA, 20 nt, Artificial Sequence
  Synthetic
gauaaaauauugcuuucuaa

SEQ ID NO: 716915 - RNA, 20 nt, Artificial Sequence
  Synthetic
gagagcauuaagcaaaguaa

SEQ ID NO: 716916 - RNA, 20 nt, Artificial Sequence
  Synthetic
gcaauuuucucaacaaguaa

SEQ ID NO: 716917 - RNA, 20 nt, Artificial Sequence
  Synthetic
gaaucuuacacuucaaguaa

SEQ ID NO: 716918 - RNA, 20 nt, Artificial Sequence
  Synthetic
gaugaaguuaaucuaaguaa

SEQ ID NO: 716919 - RNA, 20 nt, Artificial Sequence
  Synthetic
gcagaacuuugcuuaaguaa

SEQ ID NO: 716920 - RNA, 20 nt, Artificial Sequence
  Synthetic
gucaggaagccaggcaguaa

SEQ ID NO: 716921 - RNA, 20 nt, Artificial Sequence
  Synthetic
guucucuuucuucucaguaa

SEQ ID NO: 716922 - RNA, 20 nt, Artificial Sequence
  Synthetic
gccuacucaagcuucaguaa

SEQ ID NO: 716923 - RNA, 20 nt, Artificial Sequence
  Synthetic
ggauuucauuuaaagaguaa

SEQ ID NO: 716924 - RNA, 20 nt, Artificial Sequence
  Synthetic
gugcaugggggacagaguaa

SEQ ID NO: 716925 - RNA, 20 nt, Artificial Sequence
  Synthetic
gcugagucaauguagaguaa

SEQ ID NO: 716926 - RNA, 20 nt, Artificial Sequence
  Synthetic
ggagcuggggcugugaguaa

SEQ ID NO: 716927 - RNA, 20 nt, Artificial Sequence
  Synthetic
guacuuuuaaauacuaguaa

SEQ ID NO: 716928 - RNA, 20 nt, Artificial Sequence
  Synthetic
guaguauugugaauuaguaa

SEQ ID NO: 716929 - RNA, 20 nt, Artificial Sequence
  Synthetic
guuagagauuuaauuaguaa

SEQ ID NO: 716930 - RNA, 20 nt, Artificial Sequence
  Synthetic
gcauguuugucuuaagguaa

SEQ ID NO: 716931 - RNA, 20 nt, Artificial Sequence
  Synthetic
gugaaugagaguggagguaa

SEQ ID NO: 716932 - RNA, 20 nt, Artificial Sequence
  Synthetic
gagagaccagguggagguaa

SEQ ID NO: 716933 - RNA, 20 nt, Artificial Sequence
  Synthetic
gaaaaagcuuucugagguaa

SEQ ID NO: 716934 - RNA, 20 nt, Artificial Sequence
  Synthetic
ggagcuugggagugagguaa

SEQ ID NO: 716935 - RNA, 20 nt, Artificial Sequence
  Synthetic
gaaguuguguaacuagguaa

SEQ ID NO: 716936 - RNA, 20 nt, Artificial Sequence
  Synthetic
gcaaaccauacacccgguaa

SEQ ID NO: 716937 - RNA, 20 nt, Artificial Sequence
  Synthetic
gaaaaaaaucaucaggguaa

SEQ ID NO: 716938 - RNA, 20 nt, Artificial Sequence
  Synthetic
guuagaugguagagggguaa

SEQ ID NO: 716939 - RNA, 20 nt, Artificial Sequence
  Synthetic
guugaagaacuuagggguaa

SEQ ID NO: 716940 - RNA, 20 nt, Artificial Sequence
  Synthetic
gcucucacauaucuggguaa

SEQ ID NO: 716941 - RNA, 20 nt, Artificial Sequence
  Synthetic
gaaaaacaugaaaaugguaa

SEQ ID NO: 716942 - RNA, 20 nt, Artificial Sequence
  Synthetic
guuuaccauuuagaugguaa

SEQ ID NO: 716943 - RNA, 20 nt, Artificial Sequence
  Synthetic
gggagugcaguuugugguaa

SEQ ID NO: 716944 - RNA, 20 nt, Artificial Sequence
  Synthetic
guauagugagagauugguaa

SEQ ID NO: 716945 - RNA, 20 nt, Artificial Sequence
  Synthetic
gcagacaacugacaauguaa

SEQ ID NO: 716946 - RNA, 20 nt, Artificial Sequence
  Synthetic
gacaauuuaauggcauguaa

SEQ ID NO: 716947 - RNA, 20 nt, Artificial Sequence
  Synthetic
ggcauacuuuuuagauguaa

SEQ ID NO: 716948 - RNA, 20 nt, Artificial Sequence
  Synthetic
gcauguggacacugauguaa

SEQ ID NO: 716949 - RNA, 20 nt, Artificial Sequence
  Synthetic
guuuuaucuauguuauguaa

SEQ ID NO: 716950 - RNA, 20 nt, Artificial Sequence
  Synthetic
gggcauuuauacaacuguaa

SEQ ID NO: 716951 - RNA, 20 nt, Artificial Sequence
  Synthetic
ggcuuauaacagaucuguaa

SEQ ID NO: 716952 - RNA, 20 nt, Artificial Sequence
  Synthetic
guuugacauuuacaguguaa

SEQ ID NO: 716953 - RNA, 20 nt, Artificial Sequence
  Synthetic
guaauagagagugaguguaa

SEQ ID NO: 716954 - RNA, 20 nt, Artificial Sequence
  Synthetic
gaaucgcagccagauuguaa

SEQ ID NO: 716955 - RNA, 20 nt, Artificial Sequence
  Synthetic
gauugaagaauguguuguaa

SEQ ID NO: 716956 - RNA, 20 nt, Artificial Sequence
  Synthetic
gucaaugugauuauuuguaa

SEQ ID NO: 716957 - RNA, 20 nt, Artificial Sequence
  Synthetic
gucuugggccucuuuuguaa

SEQ ID NO: 716958 - RNA, 20 nt, Artificial Sequence
  Synthetic
gccuuugcaaugaaaauuaa

SEQ ID NO: 716959 - RNA, 20 nt, Artificial Sequence
  Synthetic
gggaaucagugauaaauuaa

SEQ ID NO: 716960 - RNA, 20 nt, Artificial Sequence
  Synthetic
gaacuucacaaaagaauuaa

SEQ ID NO: 716961 - RNA, 20 nt, Artificial Sequence
  Synthetic
gacuucauguaauuaauuaa

SEQ ID NO: 716962 - RNA, 20 nt, Artificial Sequence
  Synthetic
gauaggcucacaaacauuaa

SEQ ID NO: 716963 - RNA, 20 nt, Artificial Sequence
  Synthetic
gguauuguagcuaacauuaa

SEQ ID NO: 716964 - RNA, 20 nt, Artificial Sequence
  Synthetic
guucagaauacauacauuaa

SEQ ID NO: 716965 - RNA, 20 nt, Artificial Sequence
  Synthetic
ggcuauaagaaaaccauuaa

SEQ ID NO: 716966 - RNA, 20 nt, Artificial Sequence
  Synthetic
gaauuucuaagucccauuaa

SEQ ID NO: 716967 - RNA, 20 nt, Artificial Sequence
  Synthetic
gaagugaaagacagcauuaa

SEQ ID NO: 716968 - RNA, 20 nt, Artificial Sequence
  Synthetic
gcaagcuucugaaucauuaa

SEQ ID NO: 716969 - RNA, 20 nt, Artificial Sequence
  Synthetic
gguguaaaauguaucauuaa

SEQ ID NO: 716970 - RNA, 20 nt, Artificial Sequence
  Synthetic
gugacauuaaccaagauuaa

SEQ ID NO: 716971 - RNA, 20 nt, Artificial Sequence
  Synthetic
gcaucuguggaugggauuaa

SEQ ID NO: 716972 - RNA, 20 nt, Artificial Sequence
  Synthetic
gaccuuuaaacaaugauuaa

SEQ ID NO: 716973 - RNA, 20 nt, Artificial Sequence
  Synthetic
gaggguaaccuacugauuaa

SEQ ID NO: 716974 - RNA, 20 nt, Artificial Sequence
  Synthetic
gauaacugaaguuugauuaa

SEQ ID NO: 716975 - RNA, 20 nt, Artificial Sequence
  Synthetic
gauuguguaugaaauauuaa

SEQ ID NO: 716976 - RNA, 20 nt, Artificial Sequence
  Synthetic
gcuuaacuccuuaauauuaa

SEQ ID NO: 716977 - RNA, 20 nt, Artificial Sequence
  Synthetic
gacauauuuucagauauuaa

SEQ ID NO: 716978 - RNA, 20 nt, Artificial Sequence
  Synthetic
ggauuugaacuuuauauuaa

SEQ ID NO: 716979 - RNA, 20 nt, Artificial Sequence
  Synthetic
gaacagcaccuagcacuuaa

SEQ ID NO: 716980 - RNA, 20 nt, Artificial Sequence
  Synthetic
gccagcuuaaaaagacuuaa

SEQ ID NO: 716981 - RNA, 20 nt, Artificial Sequence
  Synthetic
gaguuagcuuuaauacuuaa

SEQ ID NO: 716982 - RNA, 20 nt, Artificial Sequence
  Synthetic
gaauauacuuguguacuuaa

SEQ ID NO: 716983 - RNA, 20 nt, Artificial Sequence
  Synthetic
gagagugagaaauuacuuaa

SEQ ID NO: 716984 - RNA, 20 nt, Artificial Sequence
  Synthetic
ggaggaaaaaaaaaccuuaa

SEQ ID NO: 716985 - RNA, 20 nt, Artificial Sequence
  Synthetic
gagggugcaugaaaccuuaa

SEQ ID NO: 716986 - RNA, 20 nt, Artificial Sequence
  Synthetic
gcaagaacuuuaaaccuuaa

SEQ ID NO: 716987 - RNA, 20 nt, Artificial Sequence
  Synthetic
gucauuagaaccaaccuuaa

SEQ ID NO: 716988 - RNA, 20 nt, Artificial Sequence
  Synthetic
ggaauuuacuaccaccuuaa

SEQ ID NO: 716989 - RNA, 20 nt, Artificial Sequence
  Synthetic
guaaaauguuugagccuuaa

SEQ ID NO: 716990 - RNA, 20 nt, Artificial Sequence
  Synthetic
gcuagguuucaguuccuuaa

SEQ ID NO: 716991 - RNA, 20 nt, Artificial Sequence
  Synthetic
gugcaagaaacuuuccuuaa

SEQ ID NO: 716992 - RNA, 20 nt, Artificial Sequence
  Synthetic
gauugguacuuggagcuuaa

SEQ ID NO: 716993 - RNA, 20 nt, Artificial Sequence
  Synthetic
gggcuggaauuauagcuuaa

SEQ ID NO: 716994 - RNA, 20 nt, Artificial Sequence
  Synthetic
gaauacagagaagugcuuaa

SEQ ID NO: 716995 - RNA, 20 nt, Artificial Sequence
  Synthetic
gacacauagagggugcuuaa

SEQ ID NO: 716996 - RNA, 20 nt, Artificial Sequence
  Synthetic
gggaaaacuuucuaucuuaa

SEQ ID NO: 716997 - RNA, 20 nt, Artificial Sequence
  Synthetic
gaggugggaauuuaucuuaa

SEQ ID NO: 716998 - RNA, 20 nt, Artificial Sequence
  Synthetic
gugacuguuacagcucuuaa

SEQ ID NO: 716999 - RNA, 20 nt, Artificial Sequence
  Synthetic
gcaguuaagaugagucuuaa

SEQ ID NO: 717000 - RNA, 20 nt, Artificial Sequence
  Synthetic
gggcaugucagaggucuuaa

SEQ ID NO: 717001 - RNA, 20 nt, Artificial Sequence
  Synthetic
gaaaaugccuuccuucuuaa

SEQ ID NO: 717002 - RNA, 20 nt, Artificial Sequence
  Synthetic
guggauauuuuauuucuuaa

SEQ ID NO: 717003 - RNA, 20 nt, Artificial Sequence
  Synthetic
gcuuuuaucuuccaaguuaa

SEQ ID NO: 717004 - RNA, 20 nt, Artificial Sequence
  Synthetic
guaaguuccagcugaguuaa

SEQ ID NO: 717005 - RNA, 20 nt, Artificial Sequence
  Synthetic
ggaaacugcuuugggguuaa

SEQ ID NO: 717006 - RNA, 20 nt, Artificial Sequence
  Synthetic
gggggcagcgggaugguuaa

SEQ ID NO: 717007 - RNA, 20 nt, Artificial Sequence
  Synthetic
gagggacagacccugguuaa

SEQ ID NO: 717008 - RNA, 20 nt, Artificial Sequence
  Synthetic
ggagaaacauuccauguuaa

SEQ ID NO: 717009 - RNA, 20 nt, Artificial Sequence
  Synthetic
gucucucugguugauguuaa

SEQ ID NO: 717010 - RNA, 20 nt, Artificial Sequence
  Synthetic
gucuuugauacuuauguuaa

SEQ ID NO: 717011 - RNA, 20 nt, Artificial Sequence
  Synthetic
gaauauguauuuccuguuaa

SEQ ID NO: 717012 - RNA, 20 nt, Artificial Sequence
  Synthetic
gccagauauuucaguguuaa

SEQ ID NO: 717013 - RNA, 20 nt, Artificial Sequence
  Synthetic
gaaucuggaaaauguguuaa

SEQ ID NO: 717014 - RNA, 20 nt, Artificial Sequence
  Synthetic
gauuauuuccaaaaauuuaa

SEQ ID NO: 717015 - RNA, 20 nt, Artificial Sequence
  Synthetic
gauuugccucacaaauuuaa

SEQ ID NO: 717016 - RNA, 20 nt, Artificial Sequence
  Synthetic
gauuuuacuuugaaauuuaa

SEQ ID NO: 717017 - RNA, 20 nt, Artificial Sequence
  Synthetic
gagggacacauuaaauuuaa

SEQ ID NO: 717018 - RNA, 20 nt, Artificial Sequence
  Synthetic
gauuaauuaugacaauuuaa

SEQ ID NO: 717019 - RNA, 20 nt, Artificial Sequence
  Synthetic
gacaaauagaaaacauuuaa

SEQ ID NO: 717020 - RNA, 20 nt, Artificial Sequence
  Synthetic
gaguuaugaaauccauuuaa

SEQ ID NO: 717021 - RNA, 20 nt, Artificial Sequence
  Synthetic
gcuuacagcuaugcauuuaa

SEQ ID NO: 717022 - RNA, 20 nt, Artificial Sequence
  Synthetic
ggauaaaaucagagauuuaa

SEQ ID NO: 717023 - RNA, 20 nt, Artificial Sequence
  Synthetic
ggcaggaaagauagauuuaa

SEQ ID NO: 717024 - RNA, 20 nt, Artificial Sequence
  Synthetic
gaauaugcugaaggauuuaa

SEQ ID NO: 717025 - RNA, 20 nt, Artificial Sequence
  Synthetic
gagaaaauaaguugauuuaa

SEQ ID NO: 717026 - RNA, 20 nt, Artificial Sequence
  Synthetic
guuaaagucaacauauuuaa

SEQ ID NO: 717027 - RNA, 20 nt, Artificial Sequence
  Synthetic
gucacuugcuuuguauuuaa

SEQ ID NO: 717028 - RNA, 20 nt, Artificial Sequence
  Synthetic
gcucuuagcuggaacuuuaa

SEQ ID NO: 717029 - RNA, 20 nt, Artificial Sequence
  Synthetic
gucagaaccauugacuuuaa

SEQ ID NO: 717030 - RNA, 20 nt, Artificial Sequence
  Synthetic
gagcuagauggccccuuuaa

SEQ ID NO: 717031 - RNA, 20 nt, Artificial Sequence
  Synthetic
gccuacauaucaaaguuuaa

SEQ ID NO: 717032 - RNA, 20 nt, Artificial Sequence
  Synthetic
gcuuuugaacuaaauuuuaa

SEQ ID NO: 717033 - RNA, 20 nt, Artificial Sequence
  Synthetic
guacuuguaagcaauuuuaa

SEQ ID NO: 717034 - RNA, 20 nt, Artificial Sequence
  Synthetic
gggaaaagaagacauuuuaa

SEQ ID NO: 717035 - RNA, 20 nt, Artificial Sequence
  Synthetic
gaugaugcccuagauuuuaa

SEQ ID NO: 717036 - RNA, 20 nt, Artificial Sequence
  Synthetic
ggauaccucuacccuuuuaa

SEQ ID NO: 717037 - RNA, 20 nt, Artificial Sequence
  Synthetic
gacaacucugcugcuuuuaa

SEQ ID NO: 717038 - RNA, 20 nt, Artificial Sequence
  Synthetic
gucuuugccauugcuuuuaa

SEQ ID NO: 717039 - RNA, 20 nt, Artificial Sequence
  Synthetic
gcuuaguuaaguucuuuuaa

SEQ ID NO: 717040 - RNA, 20 nt, Artificial Sequence
  Synthetic
guggguagaauuucuuuuaa

SEQ ID NO: 717041 - RNA, 20 nt, Artificial Sequence
  Synthetic
guaggcacagauaguuuuaa

SEQ ID NO: 717042 - RNA, 20 nt, Artificial Sequence
  Synthetic
guuaaaaaguguaguuuuaa

SEQ ID NO: 717043 - RNA, 20 nt, Artificial Sequence
  Synthetic
ggucauuuuuguauuuuuaa

SEQ ID NO: 717044 - RNA, 20 nt, Artificial Sequence
  Synthetic
gaucaaaaauuuauuuuuaa

SEQ ID NO: 717045 - RNA, 20 nt, Artificial Sequence
  Synthetic
guuauuuauuuccuuuuuaa

SEQ ID NO: 717046 - RNA, 20 nt, Artificial Sequence
  Synthetic
gccuauguuuuauuuuuuaa

SEQ ID NO: 717047 - RNA, 20 nt, Artificial Sequence
  Synthetic
gaaauauaaaucuuuuuuaa

SEQ ID NO: 717048 - RNA, 20 nt, Artificial Sequence
  Synthetic
gccuuguccuucaaaaaaca

SEQ ID NO: 717049 - RNA, 20 nt, Artificial Sequence
  Synthetic
gcacaguaggaauaaaaaca

SEQ ID NO: 717050 - RNA, 20 nt, Artificial Sequence
  Synthetic
guauacagcuucuaaaaaca

SEQ ID NO: 717051 - RNA, 20 nt, Artificial Sequence
  Synthetic
gauauaaucuuaccaaaaca

SEQ ID NO: 717052 - RNA, 20 nt, Artificial Sequence
  Synthetic
gacaagaauccuucaaaaca

SEQ ID NO: 717053 - RNA, 20 nt, Artificial Sequence
  Synthetic
ggccuacauaugagaaaaca

SEQ ID NO: 717054 - RNA, 20 nt, Artificial Sequence
  Synthetic
gaguacaagaaaggaaaaca

SEQ ID NO: 717055 - RNA, 20 nt, Artificial Sequence
  Synthetic
gaagauacaagaugaaaaca

SEQ ID NO: 717056 - RNA, 20 nt, Artificial Sequence
  Synthetic
gcuacugagaacuuaaaaca

SEQ ID NO: 717057 - RNA, 20 nt, Artificial Sequence
  Synthetic
guacauauuuaaaacaaaca

SEQ ID NO: 717058 - RNA, 20 nt, Artificial Sequence
  Synthetic
gaucagacacuuuacaaaca

SEQ ID NO: 717059 - RNA, 20 nt, Artificial Sequence
  Synthetic
gauaaucuauuauccaaaca

SEQ ID NO: 717060 - RNA, 20 nt, Artificial Sequence
  Synthetic
gguuaaccauacagcaaaca

SEQ ID NO: 717061 - RNA, 20 nt, Artificial Sequence
  Synthetic
guaaauauaugggagaaaca

SEQ ID NO: 717062 - RNA, 20 nt, Artificial Sequence
  Synthetic
guauuaugguaggggaaaca

SEQ ID NO: 717063 - RNA, 20 nt, Artificial Sequence
  Synthetic
gauggugauagugugaaaca

SEQ ID NO: 717064 - RNA, 20 nt, Artificial Sequence
  Synthetic
gauuuaucauccuugaaaca

SEQ ID NO: 717065 - RNA, 20 nt, Artificial Sequence
  Synthetic
gaauagagcugcaauaaaca

SEQ ID NO: 717066 - RNA, 20 nt, Artificial Sequence
  Synthetic
gaauagcgcugcaauaaaca

SEQ ID NO: 717067 - RNA, 20 nt, Artificial Sequence
  Synthetic
gaauaaugcugcaauaaaca

SEQ ID NO: 717068 - RNA, 20 nt, Artificial Sequence
  Synthetic
ggggaaauuaacuauaaaca

SEQ ID NO: 717069 - RNA, 20 nt, Artificial Sequence
  Synthetic
gguuuagguguuuauaaaca

SEQ ID NO: 717070 - RNA, 20 nt, Artificial Sequence
  Synthetic
gacagauuuccuacuaaaca

SEQ ID NO: 717071 - RNA, 20 nt, Artificial Sequence
  Synthetic
gaaaagugcugcaguaaaca

SEQ ID NO: 717072 - RNA, 20 nt, Artificial Sequence
  Synthetic
ggcauuauuguguaacaaca

SEQ ID NO: 717073 - RNA, 20 nt, Artificial Sequence
  Synthetic
gugugugcuuccugacaaca

SEQ ID NO: 717074 - RNA, 20 nt, Artificial Sequence
  Synthetic
guggggaauugaggccaaca

SEQ ID NO: 717075 - RNA, 20 nt, Artificial Sequence
  Synthetic
guuuggaaguggggccaaca

SEQ ID NO: 717076 - RNA, 20 nt, Artificial Sequence
  Synthetic
ggagaccagccuggccaaca

SEQ ID NO: 717077 - RNA, 20 nt, Artificial Sequence
  Synthetic
gaaaauuuaacucuccaaca

SEQ ID NO: 717078 - RNA, 20 nt, Artificial Sequence
  Synthetic
gcucugugauccuuccaaca

SEQ ID NO: 717079 - RNA, 20 nt, Artificial Sequence
  Synthetic
ggguuuacucuaaagcaaca

SEQ ID NO: 717080 - RNA, 20 nt, Artificial Sequence
  Synthetic
gaauuucuguucuggcaaca

SEQ ID NO: 717081 - RNA, 20 nt, Artificial Sequence
  Synthetic
gacuaaaauuauaugcaaca

SEQ ID NO: 717082 - RNA, 20 nt, Artificial Sequence
  Synthetic
guuaaaauguuuuugcaaca

SEQ ID NO: 717083 - RNA, 20 nt, Artificial Sequence
  Synthetic
guugcuguuggaaaucaaca

SEQ ID NO: 717084 - RNA, 20 nt, Artificial Sequence
  Synthetic
gauuccaggacacaucaaca

SEQ ID NO: 717085 - RNA, 20 nt, Artificial Sequence
  Synthetic
gaggcaacucagacucaaca

SEQ ID NO: 717086 - RNA, 20 nt, Artificial Sequence
  Synthetic
gauccagaguuuaaagaaca

SEQ ID NO: 717087 - RNA, 20 nt, Artificial Sequence
  Synthetic
gacauaaggcuagcagaaca

SEQ ID NO: 717088 - RNA, 20 nt, Artificial Sequence
  Synthetic
gaacgcagacccugagaaca

SEQ ID NO: 717089 - RNA, 20 nt, Artificial Sequence
  Synthetic
ggaggaguggccaaggaaca

SEQ ID NO: 717090 - RNA, 20 nt, Artificial Sequence
  Synthetic
gaucauagaggcaaggaaca

SEQ ID NO: 717091 - RNA, 20 nt, Artificial Sequence
  Synthetic
gauaggacagaaauggaaca

SEQ ID NO: 717092 - RNA, 20 nt, Artificial Sequence
  Synthetic
guuuaagagagacaugaaca

SEQ ID NO: 717093 - RNA, 20 nt, Artificial Sequence
  Synthetic
gcaaacuaaaugcaugaaca

SEQ ID NO: 717094 - RNA, 20 nt, Artificial Sequence
  Synthetic
ggaagauaguugcaugaaca

SEQ ID NO: 717095 - RNA, 20 nt, Artificial Sequence
  Synthetic
ggagggcacuggagugaaca

SEQ ID NO: 717096 - RNA, 20 nt, Artificial Sequence
  Synthetic
ggaguacaguggagugaaca

SEQ ID NO: 717097 - RNA, 20 nt, Artificial Sequence
  Synthetic
gcacacgaaaagcuugaaca

SEQ ID NO: 717098 - RNA, 20 nt, Artificial Sequence
  Synthetic
gcacaaauggaaaaauaaca

SEQ ID NO: 717099 - RNA, 20 nt, Artificial Sequence
  Synthetic
gcuuacaaagcaaaauaaca

SEQ ID NO: 717100 - RNA, 20 nt, Artificial Sequence
  Synthetic
guagagcccagugaauaaca

SEQ ID NO: 717101 - RNA, 20 nt, Artificial Sequence
  Synthetic
gugaaaauggcaagauaaca

SEQ ID NO: 717102 - RNA, 20 nt, Artificial Sequence
  Synthetic
gcguaaguggaaauauaaca

SEQ ID NO: 717103 - RNA, 20 nt, Artificial Sequence
  Synthetic
guuuauaagaaauccuaaca

SEQ ID NO: 717104 - RNA, 20 nt, Artificial Sequence
  Synthetic
cgagaccauccuggcuaaca

SEQ ID NO: 717105 - RNA, 20 nt, Artificial Sequence
  Synthetic
ggagaccauccuggcuaaca

SEQ ID NO: 717106 - RNA, 20 nt, Artificial Sequence
  Synthetic
guauuaaaugaaaucuaaca

SEQ ID NO: 717107 - RNA, 20 nt, Artificial Sequence
  Synthetic
ggcauuugugauuucuaaca

SEQ ID NO: 717108 - RNA, 20 nt, Artificial Sequence
  Synthetic
gugaaguugucuuucuaaca

SEQ ID NO: 717109 - RNA, 20 nt, Artificial Sequence
  Synthetic
gaagaugggcaugaguaaca

SEQ ID NO: 717110 - RNA, 20 nt, Artificial Sequence
  Synthetic
gcuuuauucaguauguaaca

SEQ ID NO: 717111 - RNA, 20 nt, Artificial Sequence
  Synthetic
gccaaugaauuacuuuaaca

SEQ ID NO: 717112 - RNA, 20 nt, Artificial Sequence
  Synthetic
gcuuauguacuauuuuaaca

SEQ ID NO: 717113 - RNA, 20 nt, Artificial Sequence
  Synthetic
guguacacaguucuaacaca

SEQ ID NO: 717114 - RNA, 20 nt, Artificial Sequence
  Synthetic
gauuacauugauuuaacaca

SEQ ID NO: 717115 - RNA, 20 nt, Artificial Sequence
  Synthetic
ggaucagacccacccacaca

SEQ ID NO: 717116 - RNA, 20 nt, Artificial Sequence
  Synthetic
gcccaacucucacccacaca

SEQ ID NO: 717117 - RNA, 20 nt, Artificial Sequence
  Synthetic
ggcaagucugaacucacaca

SEQ ID NO: 717118 - RNA, 20 nt, Artificial Sequence
  Synthetic
guuaaaaauuuucagacaca

SEQ ID NO: 717119 - RNA, 20 nt, Artificial Sequence
  Synthetic
gggaagccaaaggagacaca

SEQ ID NO: 717120 - RNA, 20 nt, Artificial Sequence
  Synthetic
guuuucaugaaggagacaca

SEQ ID NO: 717121 - RNA, 20 nt, Artificial Sequence
  Synthetic
gaugagaacacauagacaca

SEQ ID NO: 717122 - RNA, 20 nt, Artificial Sequence
  Synthetic
gaacauguugaguagacaca

SEQ ID NO: 717123 - RNA, 20 nt, Artificial Sequence
  Synthetic
ggguagggcuggaggacaca

SEQ ID NO: 717124 - RNA, 20 nt, Artificial Sequence
  Synthetic
gcuggaguggcugggacaca

SEQ ID NO: 717125 - RNA, 20 nt, Artificial Sequence
  Synthetic
gcuugugagggccugacaca

SEQ ID NO: 717126 - RNA, 20 nt, Artificial Sequence
  Synthetic
gucaguauucaaaauacaca

SEQ ID NO: 717127 - RNA, 20 nt, Artificial Sequence
  Synthetic
guauuauuuucaaauacaca

SEQ ID NO: 717128 - RNA, 20 nt, Artificial Sequence
  Synthetic
guuccuaaaauagauacaca

SEQ ID NO: 717129 - RNA, 20 nt, Artificial Sequence
  Synthetic
gauacacauauaauuacaca

SEQ ID NO: 717130 - RNA, 20 nt, Artificial Sequence
  Synthetic
gcuauauugcuccuuacaca

SEQ ID NO: 717131 - RNA, 20 nt, Artificial Sequence
  Synthetic
gaggccagaaauuaaccaca

SEQ ID NO: 717132 - RNA, 20 nt, Artificial Sequence
  Synthetic
guuuguuuucuuucaccaca

SEQ ID NO: 717133 - RNA, 20 nt, Artificial Sequence
  Synthetic
ggccaaggcgggugaccaca

SEQ ID NO: 717134 - RNA, 20 nt, Artificial Sequence
  Synthetic
guacuauaccucaggccaca

SEQ ID NO: 717135 - RNA, 20 nt, Artificial Sequence
  Synthetic
guuaaaccaugucugccaca

SEQ ID NO: 717136 - RNA, 20 nt, Artificial Sequence
  Synthetic
gcauaggauagcccuccaca

SEQ ID NO: 717137 - RNA, 20 nt, Artificial Sequence
  Synthetic
gagguugaaaguucuccaca

SEQ ID NO: 717138 - RNA, 20 nt, Artificial Sequence
  Synthetic
gaaaagguuguucuuccaca

SEQ ID NO: 717139 - RNA, 20 nt, Artificial Sequence
  Synthetic
gaaaugggaaaagaagcaca

SEQ ID NO: 717140 - RNA, 20 nt, Artificial Sequence
  Synthetic
gacuuguauuuggaagcaca

SEQ ID NO: 717141 - RNA, 20 nt, Artificial Sequence
  Synthetic
ggguaugacagaguagcaca

SEQ ID NO: 717142 - RNA, 20 nt, Artificial Sequence
  Synthetic
gguuucacgggccaggcaca

SEQ ID NO: 717143 - RNA, 20 nt, Artificial Sequence
  Synthetic
ggauaaccacaauaggcaca

SEQ ID NO: 717144 - RNA, 20 nt, Artificial Sequence
  Synthetic
ggcaaagcauuccgggcaca

SEQ ID NO: 717145 - RNA, 20 nt, Artificial Sequence
  Synthetic
gaauauuauuacauggcaca

SEQ ID NO: 717146 - RNA, 20 nt, Artificial Sequence
  Synthetic
gaacauugcaucauggcaca

SEQ ID NO: 717147 - RNA, 20 nt, Artificial Sequence
  Synthetic
gaaagagcucagcaugcaca

SEQ ID NO: 717148 - RNA, 20 nt, Artificial Sequence
  Synthetic
gaucugaaagucacugcaca

SEQ ID NO: 717149 - RNA, 20 nt, Artificial Sequence
  Synthetic
gaauagacugccaaaucaca

SEQ ID NO: 717150 - RNA, 20 nt, Artificial Sequence
  Synthetic
guuuuuuaaauugcaucaca

SEQ ID NO: 717151 - RNA, 20 nt, Artificial Sequence
  Synthetic
gcccaggcgggcagaucaca

SEQ ID NO: 717152 - RNA, 20 nt, Artificial Sequence
  Synthetic
gcugguguguagagaucaca

SEQ ID NO: 717153 - RNA, 20 nt, Artificial Sequence
  Synthetic
gcugaggcagauggaucaca

SEQ ID NO: 717154 - RNA, 20 nt, Artificial Sequence
  Synthetic
gccgaggcggguggaucaca

SEQ ID NO: 717155 - RNA, 20 nt, Artificial Sequence
  Synthetic
gcuuggcauauucuaucaca

SEQ ID NO: 717156 - RNA, 20 nt, Artificial Sequence
  Synthetic
gaaauauucauagacucaca

SEQ ID NO: 717157 - RNA, 20 nt, Artificial Sequence
  Synthetic
gagagccugugagccucaca

SEQ ID NO: 717158 - RNA, 20 nt, Artificial Sequence
  Synthetic
guaaaugcauuuaucucaca

SEQ ID NO: 717159 - RNA, 20 nt, Artificial Sequence
  Synthetic
gaugaugcuguguucucaca

SEQ ID NO: 717160 - RNA, 20 nt, Artificial Sequence
  Synthetic
gauacauacguauagucaca

SEQ ID NO: 717161 - RNA, 20 nt, Artificial Sequence
  Synthetic
gugcauucuaaaaugucaca

SEQ ID NO: 717162 - RNA, 20 nt, Artificial Sequence
  Synthetic
gcuccagugucccugucaca

SEQ ID NO: 717163 - RNA, 20 nt, Artificial Sequence
  Synthetic
gguaugucuagccugucaca

SEQ ID NO: 717164 - RNA, 20 nt, Artificial Sequence
  Synthetic
guuggauggaucuugucaca

SEQ ID NO: 717165 - RNA, 20 nt, Artificial Sequence
  Synthetic
gggaaggaagcaccuucaca

SEQ ID NO: 717166 - RNA, 20 nt, Artificial Sequence
  Synthetic
gcagaaggcaccucuucaca

SEQ ID NO: 717167 - RNA, 20 nt, Artificial Sequence
  Synthetic
gucauauuuuaauguucaca

SEQ ID NO: 717168 - RNA, 20 nt, Artificial Sequence
  Synthetic
gucaucuuuuaauguucaca

SEQ ID NO: 717169 - RNA, 20 nt, Artificial Sequence
  Synthetic
gcagguguaggcauuucaca

SEQ ID NO: 717170 - RNA, 20 nt, Artificial Sequence
  Synthetic
ggcauaauauauauuucaca

SEQ ID NO: 717171 - RNA, 20 nt, Artificial Sequence
  Synthetic
gugcaguuuugauuuucaca

SEQ ID NO: 717172 - RNA, 20 nt, Artificial Sequence
  Synthetic
gaggaaggcaccuuuucaca

SEQ ID NO: 717173 - RNA, 20 nt, Artificial Sequence
  Synthetic
gacgaugauucaaaaagaca

SEQ ID NO: 717174 - RNA, 20 nt, Artificial Sequence
  Synthetic
gugccucaagaugaaagaca

SEQ ID NO: 717175 - RNA, 20 nt, Artificial Sequence
  Synthetic
gagucuauuaauuaaagaca

SEQ ID NO: 717176 - RNA, 20 nt, Artificial Sequence
  Synthetic
gcagcccagugcagaagaca

SEQ ID NO: 717177 - RNA, 20 nt, Artificial Sequence
  Synthetic
gugagagaagcaggaagaca

SEQ ID NO: 717178 - RNA, 20 nt, Artificial Sequence
  Synthetic
gaaaagcccaccauaagaca

SEQ ID NO: 717179 - RNA, 20 nt, Artificial Sequence
  Synthetic
gaccaagaacagauaagaca

SEQ ID NO: 717180 - RNA, 20 nt, Artificial Sequence
  Synthetic
gcacgaaaaggacuaagaca

SEQ ID NO: 717181 - RNA, 20 nt, Artificial Sequence
  Synthetic
guaggucuacauuuaagaca

SEQ ID NO: 717182 - RNA, 20 nt, Artificial Sequence
  Synthetic
gcuuuaaagucaaacagaca

SEQ ID NO: 717183 - RNA, 20 nt, Artificial Sequence
  Synthetic
gcaguuauguuccacagaca

SEQ ID NO: 717184 - RNA, 20 nt, Artificial Sequence
  Synthetic
guaguagcaguggucagaca

SEQ ID NO: 717185 - RNA, 20 nt, Artificial Sequence
  Synthetic
gaguggauaagaaggagaca

SEQ ID NO: 717186 - RNA, 20 nt, Artificial Sequence
  Synthetic
ggaaaggaaagggggagaca

SEQ ID NO: 717187 - RNA, 20 nt, Artificial Sequence
  Synthetic
ggauucuggggcuggagaca

SEQ ID NO: 717188 - RNA, 20 nt, Artificial Sequence
  Synthetic
guuuacguaugaaugagaca

SEQ ID NO: 717189 - RNA, 20 nt, Artificial Sequence
  Synthetic
gagagaaugcacaauagaca

SEQ ID NO: 717190 - RNA, 20 nt, Artificial Sequence
  Synthetic
gaauuauaaaauuauagaca

SEQ ID NO: 717191 - RNA, 20 nt, Artificial Sequence
  Synthetic
gcugugcauccaaguagaca

SEQ ID NO: 717192 - RNA, 20 nt, Artificial Sequence
  Synthetic
gaagguugagucaaaggaca

SEQ ID NO: 717193 - RNA, 20 nt, Artificial Sequence
  Synthetic
ggcauugaagaugaaggaca

SEQ ID NO: 717194 - RNA, 20 nt, Artificial Sequence
  Synthetic
ggagaaggaauuucaggaca

SEQ ID NO: 717195 - RNA, 20 nt, Artificial Sequence
  Synthetic
guaaucugucauuuaggaca

SEQ ID NO: 717196 - RNA, 20 nt, Artificial Sequence
  Synthetic
gaaaauacuuuguagggaca

SEQ ID NO: 717197 - RNA, 20 nt, Artificial Sequence
  Synthetic
gauucaacugauuugggaca

SEQ ID NO: 717198 - RNA, 20 nt, Artificial Sequence
  Synthetic
guuuuuuaaaguuugggaca

SEQ ID NO: 717199 - RNA, 20 nt, Artificial Sequence
  Synthetic
gaaaccauauaacauggaca

SEQ ID NO: 717200 - RNA, 20 nt, Artificial Sequence
  Synthetic
gggccacaucacaguggaca

SEQ ID NO: 717201 - RNA, 20 nt, Artificial Sequence
  Synthetic
gggaggggcugcaguggaca

SEQ ID NO: 717202 - RNA, 20 nt, Artificial Sequence
  Synthetic
gaccuuaugacauguggaca

SEQ ID NO: 717203 - RNA, 20 nt, Artificial Sequence
  Synthetic
gaaaggcaugaacuuggaca

SEQ ID NO: 717204 - RNA, 20 nt, Artificial Sequence
  Synthetic
gaucaguucaauuuuggaca

SEQ ID NO: 717205 - RNA, 20 nt, Artificial Sequence
  Synthetic
gcauagguaaugacaugaca

SEQ ID NO: 717206 - RNA, 20 nt, Artificial Sequence
  Synthetic
gaguuuugugugccaugaca

SEQ ID NO: 717207 - RNA, 20 nt, Artificial Sequence
  Synthetic
gguuaggaagcagcaugaca

SEQ ID NO: 717208 - RNA, 20 nt, Artificial Sequence
  Synthetic
gaucuuguuuggagaugaca

SEQ ID NO: 717209 - RNA, 20 nt, Artificial Sequence
  Synthetic
gaagguagaugaugaugaca

SEQ ID NO: 717210 - RNA, 20 nt, Artificial Sequence
  Synthetic
gauaaucauaucauaugaca

SEQ ID NO: 717211 - RNA, 20 nt, Artificial Sequence
  Synthetic
gaaacagugccacacugaca

SEQ ID NO: 717212 - RNA, 20 nt, Artificial Sequence
  Synthetic
ggcuggaaucaccucugaca

SEQ ID NO: 717213 - RNA, 20 nt, Artificial Sequence
  Synthetic
gccaugucuacuuucugaca

SEQ ID NO: 717214 - RNA, 20 nt, Artificial Sequence
  Synthetic
ggaccaagcccaaagugaca

SEQ ID NO: 717215 - RNA, 20 nt, Artificial Sequence
  Synthetic
gggaaaaauggaaagugaca

SEQ ID NO: 717216 - RNA, 20 nt, Artificial Sequence
  Synthetic
gcacuccagccugggugaca

SEQ ID NO: 717217 - RNA, 20 nt, Artificial Sequence
  Synthetic
ggguugucagauaaaauaca

SEQ ID NO: 717218 - RNA, 20 nt, Artificial Sequence
  Synthetic
gcaaagugacuucaaauaca

SEQ ID NO: 717219 - RNA, 20 nt, Artificial Sequence
  Synthetic
gcauauaaacaguacauaca

SEQ ID NO: 717220 - RNA, 20 nt, Artificial Sequence
  Synthetic
gcagcuagaagaaccauaca

SEQ ID NO: 717221 - RNA, 20 nt, Artificial Sequence
  Synthetic
gaaacagggugaaagauaca

SEQ ID NO: 717222 - RNA, 20 nt, Artificial Sequence
  Synthetic
gccaaggcuaaagggauaca

SEQ ID NO: 717223 - RNA, 20 nt, Artificial Sequence
  Synthetic
gaaaaccgaugcaugauaca

SEQ ID NO: 717224 - RNA, 20 nt, Artificial Sequence
  Synthetic
guacaagcagcuaugauaca

SEQ ID NO: 717225 - RNA, 20 nt, Artificial Sequence
  Synthetic
gcuaauauccaaaauauaca

SEQ ID NO: 717226 - RNA, 20 nt, Artificial Sequence
  Synthetic
guauuauugauuuauauaca

SEQ ID NO: 717227 - RNA, 20 nt, Artificial Sequence
  Synthetic
guucaaaaaaaagguauaca

SEQ ID NO: 717228 - RNA, 20 nt, Artificial Sequence
  Synthetic
gacaacucccaagguauaca

SEQ ID NO: 717229 - RNA, 20 nt, Artificial Sequence
  Synthetic
gcauaaagaacugguauaca

SEQ ID NO: 717230 - RNA, 20 nt, Artificial Sequence
  Synthetic
guaaauuaguacaaccuaca

SEQ ID NO: 717231 - RNA, 20 nt, Artificial Sequence
  Synthetic
gaaaacaaaugacaccuaca

SEQ ID NO: 717232 - RNA, 20 nt, Artificial Sequence
  Synthetic
gucaucauaacagcccuaca

SEQ ID NO: 717233 - RNA, 20 nt, Artificial Sequence
  Synthetic
guggaguacuuuuuccuaca

SEQ ID NO: 717234 - RNA, 20 nt, Artificial Sequence
  Synthetic
ggccuguagucccagcuaca

SEQ ID NO: 717235 - RNA, 20 nt, Artificial Sequence
  Synthetic
gcagaacauucccugcuaca

SEQ ID NO: 717236 - RNA, 20 nt, Artificial Sequence
  Synthetic
gcugauauccagaaucuaca

SEQ ID NO: 717237 - RNA, 20 nt, Artificial Sequence
  Synthetic
guccauaauaccauucuaca

SEQ ID NO: 717238 - RNA, 20 nt, Artificial Sequence
  Synthetic
guuugagaucgauuucuaca

SEQ ID NO: 717239 - RNA, 20 nt, Artificial Sequence
  Synthetic
guuuugaaagaggaaguaca

SEQ ID NO: 717240 - RNA, 20 nt, Artificial Sequence
  Synthetic
gggaaugcuucuauaguaca

SEQ ID NO: 717241 - RNA, 20 nt, Artificial Sequence
  Synthetic
gcuaucaacagucuaguaca

SEQ ID NO: 717242 - RNA, 20 nt, Artificial Sequence
  Synthetic
gaaucauauucuguaguaca

SEQ ID NO: 717243 - RNA, 20 nt, Artificial Sequence
  Synthetic
gaggaaaaaguuaggguaca

SEQ ID NO: 717244 - RNA, 20 nt, Artificial Sequence
  Synthetic
gauagaguuauagcuguaca

SEQ ID NO: 717245 - RNA, 20 nt, Artificial Sequence
  Synthetic
gaauuguguucuguuguaca

SEQ ID NO: 717246 - RNA, 20 nt, Artificial Sequence
  Synthetic
ggagacaagcauaaauuaca

SEQ ID NO: 717247 - RNA, 20 nt, Artificial Sequence
  Synthetic
gacuauugaugccaauuaca

SEQ ID NO: 717248 - RNA, 20 nt, Artificial Sequence
  Synthetic
gaaaauggaauauuauuaca

SEQ ID NO: 717249 - RNA, 20 nt, Artificial Sequence
  Synthetic
gccuaggaauacaacuuaca

SEQ ID NO: 717250 - RNA, 20 nt, Artificial Sequence
  Synthetic
gccuaggaauccaacuuaca

SEQ ID NO: 717251 - RNA, 20 nt, Artificial Sequence
  Synthetic
gaacagcugauacacuuaca

SEQ ID NO: 717252 - RNA, 20 nt, Artificial Sequence
  Synthetic
guggagagagaucucuuaca

SEQ ID NO: 717253 - RNA, 20 nt, Artificial Sequence
  Synthetic
gagacaacaguugucuuaca

SEQ ID NO: 717254 - RNA, 20 nt, Artificial Sequence
  Synthetic
ggugaaaggcacuucuuaca

SEQ ID NO: 717255 - RNA, 20 nt, Artificial Sequence
  Synthetic
gaaauauuaaaacaguuaca

SEQ ID NO: 717256 - RNA, 20 nt, Artificial Sequence
  Synthetic
gcacuccagccuggguuaca

SEQ ID NO: 717257 - RNA, 20 nt, Artificial Sequence
  Synthetic
ggaaucaaacguauguuaca

SEQ ID NO: 717258 - RNA, 20 nt, Artificial Sequence
  Synthetic
gaguauucagauguguuaca

SEQ ID NO: 717259 - RNA, 20 nt, Artificial Sequence
  Synthetic
guucuaauuauguauuuaca

SEQ ID NO: 717260 - RNA, 20 nt, Artificial Sequence
  Synthetic
gcuauuauccucauuuuaca

SEQ ID NO: 717261 - RNA, 20 nt, Artificial Sequence
  Synthetic
guaggaaggcuccaaaacca

SEQ ID NO: 717262 - RNA, 20 nt, Artificial Sequence
  Synthetic
gcugauggagcugaaaacca

SEQ ID NO: 717263 - RNA, 20 nt, Artificial Sequence
  Synthetic
guuauaaauuauagaaacca

SEQ ID NO: 717264 - RNA, 20 nt, Artificial Sequence
  Synthetic
ggaacuuuucuaauaaacca

SEQ ID NO: 717265 - RNA, 20 nt, Artificial Sequence
  Synthetic
guuuuuguuuuaauaaacca

SEQ ID NO: 717266 - RNA, 20 nt, Artificial Sequence
  Synthetic
gaacauuuccccauaaacca

SEQ ID NO: 717267 - RNA, 20 nt, Artificial Sequence
  Synthetic
gccuuuuauuagcuaaacca

SEQ ID NO: 717268 - RNA, 20 nt, Artificial Sequence
  Synthetic
gggauaggcauggccaacca

SEQ ID NO: 717269 - RNA, 20 nt, Artificial Sequence
  Synthetic
gggaaccuaaauuccaacca

SEQ ID NO: 717270 - RNA, 20 nt, Artificial Sequence
  Synthetic
gggguaaaggcaaggaacca

SEQ ID NO: 717271 - RNA, 20 nt, Artificial Sequence
  Synthetic
guauuuacauucaugaacca

SEQ ID NO: 717272 - RNA, 20 nt, Artificial Sequence
  Synthetic
ggcagaaauaauaugaacca

SEQ ID NO: 717273 - RNA, 20 nt, Artificial Sequence
  Synthetic
ggccuggggccagugaacca

SEQ ID NO: 717274 - RNA, 20 nt, Artificial Sequence
  Synthetic
gaguagaaugauaguaacca

SEQ ID NO: 717275 - RNA, 20 nt, Artificial Sequence
  Synthetic
gagagguggguggguaacca

SEQ ID NO: 717276 - RNA, 20 nt, Artificial Sequence
  Synthetic
ggccuggccauaaaacacca

SEQ ID NO: 717277 - RNA, 20 nt, Artificial Sequence
  Synthetic
guggggaacaucacacacca

SEQ ID NO: 717278 - RNA, 20 nt, Artificial Sequence
  Synthetic
gagccaaauguuaaucacca

SEQ ID NO: 717279 - RNA, 20 nt, Artificial Sequence
  Synthetic
guucaggcucaucaucacca

SEQ ID NO: 717280 - RNA, 20 nt, Artificial Sequence
  Synthetic
ggucugggugauggucacca

SEQ ID NO: 717281 - RNA, 20 nt, Artificial Sequence
  Synthetic
gugucuaucauuuuucacca

SEQ ID NO: 717282 - RNA, 20 nt, Artificial Sequence
  Synthetic
gguggagcuuaccaagacca

SEQ ID NO: 717283 - RNA, 20 nt, Artificial Sequence
  Synthetic
gcuguuuuguugccagacca

SEQ ID NO: 717284 - RNA, 20 nt, Artificial Sequence
  Synthetic
gccuggcaggauggagacca

SEQ ID NO: 717285 - RNA, 20 nt, Artificial Sequence
  Synthetic
gaugaugcugacugagacca

SEQ ID NO: 717286 - RNA, 20 nt, Artificial Sequence
  Synthetic
ggagugcaguggugagacca

SEQ ID NO: 717287 - RNA, 20 nt, Artificial Sequence
  Synthetic
gaaguagagcaaggggacca

SEQ ID NO: 717288 - RNA, 20 nt, Artificial Sequence
  Synthetic
gcuuagucacucggggacca

SEQ ID NO: 717289 - RNA, 20 nt, Artificial Sequence
  Synthetic
gucagcaauaagccauacca

SEQ ID NO: 717290 - RNA, 20 nt, Artificial Sequence
  Synthetic
guuguuuuaaaugcauacca

SEQ ID NO: 717291 - RNA, 20 nt, Artificial Sequence
  Synthetic
gacagauguaagagauacca

SEQ ID NO: 717292 - RNA, 20 nt, Artificial Sequence
  Synthetic
ggucacauucugagguacca

SEQ ID NO: 717293 - RNA, 20 nt, Artificial Sequence
  Synthetic
gacuugaauaccaauuacca

SEQ ID NO: 717294 - RNA, 20 nt, Artificial Sequence
  Synthetic
guaaaugaauuauauuacca

SEQ ID NO: 717295 - RNA, 20 nt, Artificial Sequence
  Synthetic
gaauuaaacagugguuacca

SEQ ID NO: 717296 - RNA, 20 nt, Artificial Sequence
  Synthetic
gagguuauguggcuuuacca

SEQ ID NO: 717297 - RNA, 20 nt, Artificial Sequence
  Synthetic
gaaccauucauauaaaccca

SEQ ID NO: 717298 - RNA, 20 nt, Artificial Sequence
  Synthetic
gaaaagaucaaaacaaccca

SEQ ID NO: 717299 - RNA, 20 nt, Artificial Sequence
  Synthetic
guguaaagucugauaaccca

SEQ ID NO: 717300 - RNA, 20 nt, Artificial Sequence
  Synthetic
gccucuguggaaaccaccca

SEQ ID NO: 717301 - RNA, 20 nt, Artificial Sequence
  Synthetic
gccuuuuucuaaaccaccca

SEQ ID NO: 717302 - RNA, 20 nt, Artificial Sequence
  Synthetic
guagcagcuuuuaccaccca

SEQ ID NO: 717303 - RNA, 20 nt, Artificial Sequence
  Synthetic
guguuuuaaagauccaccca

SEQ ID NO: 717304 - RNA, 20 nt, Artificial Sequence
  Synthetic
gaggagaccaaaaagaccca

SEQ ID NO: 717305 - RNA, 20 nt, Artificial Sequence
  Synthetic
ggccuugagaaggggaccca

SEQ ID NO: 717306 - RNA, 20 nt, Artificial Sequence
  Synthetic
ggcuuuacuccuaugaccca

SEQ ID NO: 717307 - RNA, 20 nt, Artificial Sequence
  Synthetic
gcagacacaaggccacccca

SEQ ID NO: 717308 - RNA, 20 nt, Artificial Sequence
  Synthetic
gaaugauggaaaugacccca

SEQ ID NO: 717309 - RNA, 20 nt, Artificial Sequence
  Synthetic
gcagauagcccccuacccca

SEQ ID NO: 717310 - RNA, 20 nt, Artificial Sequence
  Synthetic
gucucuccgugcuaccccca

SEQ ID NO: 717311 - RNA, 20 nt, Artificial Sequence
  Synthetic
gaguuuauucagcaucccca

SEQ ID NO: 717312 - RNA, 20 nt, Artificial Sequence
  Synthetic
gauugguuccaggaucccca

SEQ ID NO: 717313 - RNA, 20 nt, Artificial Sequence
  Synthetic
guauucuccaccauucccca

SEQ ID NO: 717314 - RNA, 20 nt, Artificial Sequence
  Synthetic
gaaccccaacuugaagccca

SEQ ID NO: 717315 - RNA, 20 nt, Artificial Sequence
  Synthetic
gaaaaugucuguacagccca

SEQ ID NO: 717316 - RNA, 20 nt, Artificial Sequence
  Synthetic
gagccauggcgcccagccca

SEQ ID NO: 717317 - RNA, 20 nt, Artificial Sequence
  Synthetic
gggaggaucaccugagccca

SEQ ID NO: 717318 - RNA, 20 nt, Artificial Sequence
  Synthetic
gggaggaucaucugagccca

SEQ ID NO: 717319 - RNA, 20 nt, Artificial Sequence
  Synthetic
gggaggauugcuugagccca

SEQ ID NO: 717320 - RNA, 20 nt, Artificial Sequence
  Synthetic
gauaaauguucucaggccca

SEQ ID NO: 717321 - RNA, 20 nt, Artificial Sequence
  Synthetic
ggcauggaaggaauggccca

SEQ ID NO: 717322 - RNA, 20 nt, Artificial Sequence
  Synthetic
gcagauucccuuuuggccca

SEQ ID NO: 717323 - RNA, 20 nt, Artificial Sequence
  Synthetic
gauuuuuucuuuuuggccca

SEQ ID NO: 717324 - RNA, 20 nt, Artificial Sequence
  Synthetic
gaaaauggccauacugccca

SEQ ID NO: 717325 - RNA, 20 nt, Artificial Sequence
  Synthetic
guaaauggccauacugccca

SEQ ID NO: 717326 - RNA, 20 nt, Artificial Sequence
  Synthetic
gaaaauggucauacugccca

SEQ ID NO: 717327 - RNA, 20 nt, Artificial Sequence
  Synthetic
gagguuaagugacuugccca

SEQ ID NO: 717328 - RNA, 20 nt, Artificial Sequence
  Synthetic
gacuuugaaacauuugccca

SEQ ID NO: 717329 - RNA, 20 nt, Artificial Sequence
  Synthetic
ggcucaugccuguaauccca

SEQ ID NO: 717330 - RNA, 20 nt, Artificial Sequence
  Synthetic
ggcaaacagugcauauccca

SEQ ID NO: 717331 - RNA, 20 nt, Artificial Sequence
  Synthetic
gggagagacugccccuccca

SEQ ID NO: 717332 - RNA, 20 nt, Artificial Sequence
  Synthetic
gaaagccacugcuccuccca

SEQ ID NO: 717333 - RNA, 20 nt, Artificial Sequence
  Synthetic
gacuuuauagauaucuccca

SEQ ID NO: 717334 - RNA, 20 nt, Artificial Sequence
  Synthetic
gcauuucuaucaaauuccca

SEQ ID NO: 717335 - RNA, 20 nt, Artificial Sequence
  Synthetic
gccucuucagaccauuccca

SEQ ID NO: 717336 - RNA, 20 nt, Artificial Sequence
  Synthetic
guuauaaauacagauuccca

SEQ ID NO: 717337 - RNA, 20 nt, Artificial Sequence
  Synthetic
gaaagcuauuaaucuuccca

SEQ ID NO: 717338 - RNA, 20 nt, Artificial Sequence
  Synthetic
gccucaaguccaaguuccca

SEQ ID NO: 717339 - RNA, 20 nt, Artificial Sequence
  Synthetic
gaauuguaaugauguuccca

SEQ ID NO: 717340 - RNA, 20 nt, Artificial Sequence
  Synthetic
ggaugcagaaggcuuuccca

SEQ ID NO: 717341 - RNA, 20 nt, Artificial Sequence
  Synthetic
gagcugaucccagaaagcca

SEQ ID NO: 717342 - RNA, 20 nt, Artificial Sequence
  Synthetic
gaacaguuccaugaaagcca

SEQ ID NO: 717343 - RNA, 20 nt, Artificial Sequence
  Synthetic
ggccucgaaaucagaagcca

SEQ ID NO: 717344 - RNA, 20 nt, Artificial Sequence
  Synthetic
gcuuaacagaugagaagcca

SEQ ID NO: 717345 - RNA, 20 nt, Artificial Sequence
  Synthetic
gggaaucuaaaaggaagcca

SEQ ID NO: 717346 - RNA, 20 nt, Artificial Sequence
  Synthetic
gaacaaugucugggaagcca

SEQ ID NO: 717347 - RNA, 20 nt, Artificial Sequence
  Synthetic
ggaaaaacugguaccagcca

SEQ ID NO: 717348 - RNA, 20 nt, Artificial Sequence
  Synthetic
gugccacugcacuccagcca

SEQ ID NO: 717349 - RNA, 20 nt, Artificial Sequence
  Synthetic
ggugguauauugagcagcca

SEQ ID NO: 717350 - RNA, 20 nt, Artificial Sequence
  Synthetic
gugauucuaacgugcagcca

SEQ ID NO: 717351 - RNA, 20 nt, Artificial Sequence
  Synthetic
gccuauacuauuugcagcca

SEQ ID NO: 717352 - RNA, 20 nt, Artificial Sequence
  Synthetic
gauggagauaccaucagcca

SEQ ID NO: 717353 - RNA, 20 nt, Artificial Sequence
  Synthetic
gaagguaagggagucagcca

SEQ ID NO: 717354 - RNA, 20 nt, Artificial Sequence
  Synthetic
gaaaagggugcauucagcca

SEQ ID NO: 717355 - RNA, 20 nt, Artificial Sequence
  Synthetic
gaaggaacaaauaagagcca

SEQ ID NO: 717356 - RNA, 20 nt, Artificial Sequence
  Synthetic
gaaagguguaaaaggagcca

SEQ ID NO: 717357 - RNA, 20 nt, Artificial Sequence
  Synthetic
gauagaaagugguggagcca

SEQ ID NO: 717358 - RNA, 20 nt, Artificial Sequence
  Synthetic
gaacauaacucucugagcca

SEQ ID NO: 717359 - RNA, 20 nt, Artificial Sequence
  Synthetic
gggauuacaggcgugagcca

SEQ ID NO: 717360 - RNA, 20 nt, Artificial Sequence
  Synthetic
gggauuacuggugugagcca

SEQ ID NO: 717361 - RNA, 20 nt, Artificial Sequence
  Synthetic
ggacuuuucagcaauagcca

SEQ ID NO: 717362 - RNA, 20 nt, Artificial Sequence
  Synthetic
gaaguaggaauuuauagcca

SEQ ID NO: 717363 - RNA, 20 nt, Artificial Sequence
  Synthetic
gagaugaauuguucuagcca

SEQ ID NO: 717364 - RNA, 20 nt, Artificial Sequence
  Synthetic
gcuugcacccucuguagcca

SEQ ID NO: 717365 - RNA, 20 nt, Artificial Sequence
  Synthetic
gauccuugggcugggcgcca

SEQ ID NO: 717366 - RNA, 20 nt, Artificial Sequence
  Synthetic
gaagaguugccccugcgcca

SEQ ID NO: 717367 - RNA, 20 nt, Artificial Sequence
  Synthetic
ggcagagcugcccaaggcca

SEQ ID NO: 717368 - RNA, 20 nt, Artificial Sequence
  Synthetic
ggacaucauguugaaggcca

SEQ ID NO: 717369 - RNA, 20 nt, Artificial Sequence
  Synthetic
gccauggauaaaaggggcca

SEQ ID NO: 717370 - RNA, 20 nt, Artificial Sequence
  Synthetic
gugccauuugggaggggcca

SEQ ID NO: 717371 - RNA, 20 nt, Artificial Sequence
  Synthetic
gauggggugggguggggcca

SEQ ID NO: 717372 - RNA, 20 nt, Artificial Sequence
  Synthetic
guucccuccugucugggcca

SEQ ID NO: 717373 - RNA, 20 nt, Artificial Sequence
  Synthetic
guggaaaauccuaauggcca

SEQ ID NO: 717374 - RNA, 20 nt, Artificial Sequence
  Synthetic
gagcaaugguaauauggcca

SEQ ID NO: 717375 - RNA, 20 nt, Artificial Sequence
  Synthetic
gcucucauggcaacuggcca

SEQ ID NO: 717376 - RNA, 20 nt, Artificial Sequence
  Synthetic
guuccagaccagccuggcca

SEQ ID NO: 717377 - RNA, 20 nt, Artificial Sequence
  Synthetic
ggaugaguagcagcuggcca

SEQ ID NO: 717378 - RNA, 20 nt, Artificial Sequence
  Synthetic
ggcaaugguuucucuggcca

SEQ ID NO: 717379 - RNA, 20 nt, Artificial Sequence
  Synthetic
guuccagguagaaaaugcca

SEQ ID NO: 717380 - RNA, 20 nt, Artificial Sequence
  Synthetic
ggggcacaggacagaugcca

SEQ ID NO: 717381 - RNA, 20 nt, Artificial Sequence
  Synthetic
gaguauguugugugaugcca

SEQ ID NO: 717382 - RNA, 20 nt, Artificial Sequence
  Synthetic
gaaauaaugugccuaugcca

SEQ ID NO: 717383 - RNA, 20 nt, Artificial Sequence
  Synthetic
guuugauuugcauucugcca

SEQ ID NO: 717384 - RNA, 20 nt, Artificial Sequence
  Synthetic
ggagauaagcaguggugcca

SEQ ID NO: 717385 - RNA, 20 nt, Artificial Sequence
  Synthetic
gacuggacuggugguugcca

SEQ ID NO: 717386 - RNA, 20 nt, Artificial Sequence
  Synthetic
gacucuugguucuguugcca

SEQ ID NO: 717387 - RNA, 20 nt, Artificial Sequence
  Synthetic
gcucucagauuuuaaaucca

SEQ ID NO: 717388 - RNA, 20 nt, Artificial Sequence
  Synthetic
gaauguggucagucaaucca

SEQ ID NO: 717389 - RNA, 20 nt, Artificial Sequence
  Synthetic
gugugaugucacagaaucca

SEQ ID NO: 717390 - RNA, 20 nt, Artificial Sequence
  Synthetic
gucaucugggcuggcaucca

SEQ ID NO: 717391 - RNA, 20 nt, Artificial Sequence
  Synthetic
gaauguaaauacaggaucca

SEQ ID NO: 717392 - RNA, 20 nt, Artificial Sequence
  Synthetic
gaggaauuugagacuaucca

SEQ ID NO: 717393 - RNA, 20 nt, Artificial Sequence
  Synthetic
gagcaaugcacuaaacucca

SEQ ID NO: 717394 - RNA, 20 nt, Artificial Sequence
  Synthetic
gcuguccuguaggaccucca

SEQ ID NO: 717395 - RNA, 20 nt, Artificial Sequence
  Synthetic
guucccaacuuaugccucca

SEQ ID NO: 717396 - RNA, 20 nt, Artificial Sequence
  Synthetic
gcagaauuuuggugccucca

SEQ ID NO: 717397 - RNA, 20 nt, Artificial Sequence
  Synthetic
gaaugucaauuauuccucca

SEQ ID NO: 717398 - RNA, 20 nt, Artificial Sequence
  Synthetic
gagucucuccagcugcucca

SEQ ID NO: 717399 - RNA, 20 nt, Artificial Sequence
  Synthetic
gggagagacuggcaucucca

SEQ ID NO: 717400 - RNA, 20 nt, Artificial Sequence
  Synthetic
gcuguaaucacagcucucca

SEQ ID NO: 717401 - RNA, 20 nt, Artificial Sequence
  Synthetic
guccagcagaaaugucucca

SEQ ID NO: 717402 - RNA, 20 nt, Artificial Sequence
  Synthetic
gacuauuuccuccuucucca

SEQ ID NO: 717403 - RNA, 20 nt, Artificial Sequence
  Synthetic
gccuucccagacuuucucca

SEQ ID NO: 717404 - RNA, 20 nt, Artificial Sequence
  Synthetic
gaagagauaauaaaagucca

SEQ ID NO: 717405 - RNA, 20 nt, Artificial Sequence
  Synthetic
gggaaucugccagaugucca

SEQ ID NO: 717406 - RNA, 20 nt, Artificial Sequence
  Synthetic
gagugccucggagcugucca

SEQ ID NO: 717407 - RNA, 20 nt, Artificial Sequence
  Synthetic
guauaugacuauugugucca

SEQ ID NO: 717408 - RNA, 20 nt, Artificial Sequence
  Synthetic
gugaguggguggauugucca

SEQ ID NO: 717409 - RNA, 20 nt, Artificial Sequence
  Synthetic
ggaucaaaaacauuugucca

SEQ ID NO: 717410 - RNA, 20 nt, Artificial Sequence
  Synthetic
gagguuaagagauuugucca

SEQ ID NO: 717411 - RNA, 20 nt, Artificial Sequence
  Synthetic
gaguacaugaaggcauucca

SEQ ID NO: 717412 - RNA, 20 nt, Artificial Sequence
  Synthetic
gcaaugguauuuggauucca

SEQ ID NO: 717413 - RNA, 20 nt, Artificial Sequence
  Synthetic
guuguucauauccuauucca

SEQ ID NO: 717414 - RNA, 20 nt, Artificial Sequence
  Synthetic
gccuuggcugcaaacuucca

SEQ ID NO: 717415 - RNA, 20 nt, Artificial Sequence
  Synthetic
gggauuauuuacaacuucca

SEQ ID NO: 717416 - RNA, 20 nt, Artificial Sequence
  Synthetic
gaaucuugucacuucuucca

SEQ ID NO: 717417 - RNA, 20 nt, Artificial Sequence
  Synthetic
ggcccagggcaacaguucca

SEQ ID NO: 717418 - RNA, 20 nt, Artificial Sequence
  Synthetic
gucugcauuuuucaguucca

SEQ ID NO: 717419 - RNA, 20 nt, Artificial Sequence
  Synthetic
gcauagguguacacguucca

SEQ ID NO: 717420 - RNA, 20 nt, Artificial Sequence
  Synthetic
ggugaucauagaagguucca

SEQ ID NO: 717421 - RNA, 20 nt, Artificial Sequence
  Synthetic
gacaguuagaagugguucca

SEQ ID NO: 717422 - RNA, 20 nt, Artificial Sequence
  Synthetic
guaacuaaaaacauguucca

SEQ ID NO: 717423 - RNA, 20 nt, Artificial Sequence
  Synthetic
gaauugaucaguaauuucca

SEQ ID NO: 717424 - RNA, 20 nt, Artificial Sequence
  Synthetic
gagacuucuuaauauuucca

SEQ ID NO: 717425 - RNA, 20 nt, Artificial Sequence
  Synthetic
gugcaugaccauuauuucca

SEQ ID NO: 717426 - RNA, 20 nt, Artificial Sequence
  Synthetic
gcaaacaugguuuauuucca

SEQ ID NO: 717427 - RNA, 20 nt, Artificial Sequence
  Synthetic
ggcauuccuuuggcuuucca

SEQ ID NO: 717428 - RNA, 20 nt, Artificial Sequence
  Synthetic
gauugaaugggcucuuucca

SEQ ID NO: 717429 - RNA, 20 nt, Artificial Sequence
  Synthetic
guugugucagugaguuucca

SEQ ID NO: 717430 - RNA, 20 nt, Artificial Sequence
  Synthetic
gccuuguaacauaguuucca

SEQ ID NO: 717431 - RNA, 20 nt, Artificial Sequence
  Synthetic
gauauucaugaaauuuucca

SEQ ID NO: 717432 - RNA, 20 nt, Artificial Sequence
  Synthetic
gugacccaucucauuuucca

SEQ ID NO: 717433 - RNA, 20 nt, Artificial Sequence
  Synthetic
ggguucucuagucuuuucca

SEQ ID NO: 717434 - RNA, 20 nt, Artificial Sequence
  Synthetic
gcaggcuguacaaaaaagca

SEQ ID NO: 717435 - RNA, 20 nt, Artificial Sequence
  Synthetic
gccguuagaaauaaaaagca

SEQ ID NO: 717436 - RNA, 20 nt, Artificial Sequence
  Synthetic
ggaaaguaucuacaaaagca

SEQ ID NO: 717437 - RNA, 20 nt, Artificial Sequence
  Synthetic
gaaagcaagcgaagaaagca

SEQ ID NO: 717438 - RNA, 20 nt, Artificial Sequence
  Synthetic
gccuggugccugagaaagca

SEQ ID NO: 717439 - RNA, 20 nt, Artificial Sequence
  Synthetic
gagcuuugccuuugaaagca

SEQ ID NO: 717440 - RNA, 20 nt, Artificial Sequence
  Synthetic
guuauauuuguuauaaagca

SEQ ID NO: 717441 - RNA, 20 nt, Artificial Sequence
  Synthetic
gugacaagguagcuaaagca

SEQ ID NO: 717442 - RNA, 20 nt, Artificial Sequence
  Synthetic
gcagggauggggcuaaagca

SEQ ID NO: 717443 - RNA, 20 nt, Artificial Sequence
  Synthetic
gacuaaaguuuagucaagca

SEQ ID NO: 717444 - RNA, 20 nt, Artificial Sequence
  Synthetic
gauuaaaauugcuucaagca

SEQ ID NO: 717445 - RNA, 20 nt, Artificial Sequence
  Synthetic
guuguuauguggcagaagca

SEQ ID NO: 717446 - RNA, 20 nt, Artificial Sequence
  Synthetic
gucaguaaaucagagaagca

SEQ ID NO: 717447 - RNA, 20 nt, Artificial Sequence
  Synthetic
gggagagagggagggaagca

SEQ ID NO: 717448 - RNA, 20 nt, Artificial Sequence
  Synthetic
gaguauuaccguaugaagca

SEQ ID NO: 717449 - RNA, 20 nt, Artificial Sequence
  Synthetic
gagggagaggggaauaagca

SEQ ID NO: 717450 - RNA, 20 nt, Artificial Sequence
  Synthetic
gccugaaaacuagauaagca

SEQ ID NO: 717451 - RNA, 20 nt, Artificial Sequence
  Synthetic
guuuucucaccugauaagca

SEQ ID NO: 717452 - RNA, 20 nt, Artificial Sequence
  Synthetic
gauaaaagacaugaacagca

SEQ ID NO: 717453 - RNA, 20 nt, Artificial Sequence
  Synthetic
gcuacuaagugggcacagca

SEQ ID NO: 717454 - RNA, 20 nt, Artificial Sequence
  Synthetic
gguccaccaaauagacagca

SEQ ID NO: 717455 - RNA, 20 nt, Artificial Sequence
  Synthetic
ggcagaucuaauguacagca

SEQ ID NO: 717456 - RNA, 20 nt, Artificial Sequence
  Synthetic
gcagcugcccuccaccagca

SEQ ID NO: 717457 - RNA, 20 nt, Artificial Sequence
  Synthetic
gugggugcagcgcaccagca

SEQ ID NO: 717458 - RNA, 20 nt, Artificial Sequence
  Synthetic
ggauauuugugggaccagca

SEQ ID NO: 717459 - RNA, 20 nt, Artificial Sequence
  Synthetic
gugggugcagcgcgccagca

SEQ ID NO: 717460 - RNA, 20 nt, Artificial Sequence
  Synthetic
ggcacugacugaggccagca

SEQ ID NO: 717461 - RNA, 20 nt, Artificial Sequence
  Synthetic
gugggugcagcgugccagca

SEQ ID NO: 717462 - RNA, 20 nt, Artificial Sequence
  Synthetic
guacccuacaauguccagca

SEQ ID NO: 717463 - RNA, 20 nt, Artificial Sequence
  Synthetic
guguugcugccugagcagca

SEQ ID NO: 717464 - RNA, 20 nt, Artificial Sequence
  Synthetic
gcacuccagcuugggcagca

SEQ ID NO: 717465 - RNA, 20 nt, Artificial Sequence
  Synthetic
gacagagguuacagucagca

SEQ ID NO: 717466 - RNA, 20 nt, Artificial Sequence
  Synthetic
gccucccagaauaaagagca

SEQ ID NO: 717467 - RNA, 20 nt, Artificial Sequence
  Synthetic
ggagaauugauggcagagca

SEQ ID NO: 717468 - RNA, 20 nt, Artificial Sequence
  Synthetic
guugucaucccuaaggagca

SEQ ID NO: 717469 - RNA, 20 nt, Artificial Sequence
  Synthetic
ggauguuuuuuacuggagca

SEQ ID NO: 717470 - RNA, 20 nt, Artificial Sequence
  Synthetic
gaaaauguagcaucugagca

SEQ ID NO: 717471 - RNA, 20 nt, Artificial Sequence
  Synthetic
gcuuuaggguauuuugagca

SEQ ID NO: 717472 - RNA, 20 nt, Artificial Sequence
  Synthetic
gaccuagccaacaaauagca

SEQ ID NO: 717473 - RNA, 20 nt, Artificial Sequence
  Synthetic
gaacaaaggaaacaauagca

SEQ ID NO: 717474 - RNA, 20 nt, Artificial Sequence
  Synthetic
gucaauguguggcaauagca

SEQ ID NO: 717475 - RNA, 20 nt, Artificial Sequence
  Synthetic
guacuagacuguugauagca

SEQ ID NO: 717476 - RNA, 20 nt, Artificial Sequence
  Synthetic
gaucauaauaccuuauagca

SEQ ID NO: 717477 - RNA, 20 nt, Artificial Sequence
  Synthetic
ggggcauuauuacccuagca

SEQ ID NO: 717478 - RNA, 20 nt, Artificial Sequence
  Synthetic
guaacuuaaaugaucuagca

SEQ ID NO: 717479 - RNA, 20 nt, Artificial Sequence
  Synthetic
gucuucacauguuucuagca

SEQ ID NO: 717480 - RNA, 20 nt, Artificial Sequence
  Synthetic
gcccuauuuuguguguagca

SEQ ID NO: 717481 - RNA, 20 nt, Artificial Sequence
  Synthetic
gggaaggaaggugauuagca

SEQ ID NO: 717482 - RNA, 20 nt, Artificial Sequence
  Synthetic
gagaagggaaggaguuagca

SEQ ID NO: 717483 - RNA, 20 nt, Artificial Sequence
  Synthetic
ggaugcccugauuguuagca

SEQ ID NO: 717484 - RNA, 20 nt, Artificial Sequence
  Synthetic
gugagaaaaacacuuuagca

SEQ ID NO: 717485 - RNA, 20 nt, Artificial Sequence
  Synthetic
guggaauuuacauuuuagca

SEQ ID NO: 717486 - RNA, 20 nt, Artificial Sequence
  Synthetic
ggauucaaugaaaugacgca

SEQ ID NO: 717487 - RNA, 20 nt, Artificial Sequence
  Synthetic
gucaacuuggcugggccgca

SEQ ID NO: 717488 - RNA, 20 nt, Artificial Sequence
  Synthetic
gcaaaaagaguaccugcgca

SEQ ID NO: 717489 - RNA, 20 nt, Artificial Sequence
  Synthetic
gugaagggguagcaaaggca

SEQ ID NO: 717490 - RNA, 20 nt, Artificial Sequence
  Synthetic
ggucgaggaaaggaaaggca

SEQ ID NO: 717491 - RNA, 20 nt, Artificial Sequence
  Synthetic
ggagggaaauuuucaaggca

SEQ ID NO: 717492 - RNA, 20 nt, Artificial Sequence
  Synthetic
gagcuagucaugagaaggca

SEQ ID NO: 717493 - RNA, 20 nt, Artificial Sequence
  Synthetic
gggacauuaagaauaaggca

SEQ ID NO: 717494 - RNA, 20 nt, Artificial Sequence
  Synthetic
gagagcuugggaauaaggca

SEQ ID NO: 717495 - RNA, 20 nt, Artificial Sequence
  Synthetic
gagagcauaauaaacaggca

SEQ ID NO: 717496 - RNA, 20 nt, Artificial Sequence
  Synthetic
gauauacacacagccaggca

SEQ ID NO: 717497 - RNA, 20 nt, Artificial Sequence
  Synthetic
guaaaaggagaggccaggca

SEQ ID NO: 717498 - RNA, 20 nt, Artificial Sequence
  Synthetic
gaguaagcuugggccaggca

SEQ ID NO: 717499 - RNA, 20 nt, Artificial Sequence
  Synthetic
gcacaccuaugugccaggca

SEQ ID NO: 717500 - RNA, 20 nt, Artificial Sequence
  Synthetic
gaagcagauaugcucaggca

SEQ ID NO: 717501 - RNA, 20 nt, Artificial Sequence
  Synthetic
gccucaaucuagaagaggca

SEQ ID NO: 717502 - RNA, 20 nt, Artificial Sequence
  Synthetic
gcccaaaaauuagggaggca

SEQ ID NO: 717503 - RNA, 20 nt, Artificial Sequence
  Synthetic
gauuuccaauguuggaggca

SEQ ID NO: 717504 - RNA, 20 nt, Artificial Sequence
  Synthetic
gauguaagguccaugaggca

SEQ ID NO: 717505 - RNA, 20 nt, Artificial Sequence
  Synthetic
guacuucggaggcugaggca

SEQ ID NO: 717506 - RNA, 20 nt, Artificial Sequence
  Synthetic
gaagggacaacacauaggca

SEQ ID NO: 717507 - RNA, 20 nt, Artificial Sequence
  Synthetic
guggagaugucaauuaggca

SEQ ID NO: 717508 - RNA, 20 nt, Artificial Sequence
  Synthetic
gaguuacuuagcaaagggca

SEQ ID NO: 717509 - RNA, 20 nt, Artificial Sequence
  Synthetic
guuauuagaucugaagggca

SEQ ID NO: 717510 - RNA, 20 nt, Artificial Sequence
  Synthetic
gucccuucaaguuaagggca

SEQ ID NO: 717511 - RNA, 20 nt, Artificial Sequence
  Synthetic
gccacugcgaauagagggca

SEQ ID NO: 717512 - RNA, 20 nt, Artificial Sequence
  Synthetic
gaaaucuuaugggccgggca

SEQ ID NO: 717513 - RNA, 20 nt, Artificial Sequence
  Synthetic
gauguauuuguggccgggca

SEQ ID NO: 717514 - RNA, 20 nt, Artificial Sequence
  Synthetic
guuauucuuucaaaggggca

SEQ ID NO: 717515 - RNA, 20 nt, Artificial Sequence
  Synthetic
ggggaggaaggagaggggca

SEQ ID NO: 717516 - RNA, 20 nt, Artificial Sequence
  Synthetic
gauucaaaaugucuggggca

SEQ ID NO: 717517 - RNA, 20 nt, Artificial Sequence
  Synthetic
guuugcaagcagguggggca

SEQ ID NO: 717518 - RNA, 20 nt, Artificial Sequence
  Synthetic
guggcauaaaaaaaugggca

SEQ ID NO: 717519 - RNA, 20 nt, Artificial Sequence
  Synthetic
gugucauccacucaugggca

SEQ ID NO: 717520 - RNA, 20 nt, Artificial Sequence
  Synthetic
guagaaaaauuaacugggca

SEQ ID NO: 717521 - RNA, 20 nt, Artificial Sequence
  Synthetic
gauaacacacugagugggca

SEQ ID NO: 717522 - RNA, 20 nt, Artificial Sequence
  Synthetic
ggauuucuuggagcauggca

SEQ ID NO: 717523 - RNA, 20 nt, Artificial Sequence
  Synthetic
gagaucaaaugaagauggca

SEQ ID NO: 717524 - RNA, 20 nt, Artificial Sequence
  Synthetic
gcauuggauuguguauggca

SEQ ID NO: 717525 - RNA, 20 nt, Artificial Sequence
  Synthetic
gacaggagccaacacuggca

SEQ ID NO: 717526 - RNA, 20 nt, Artificial Sequence
  Synthetic
gaaaauaacaugugcuggca

SEQ ID NO: 717527 - RNA, 20 nt, Artificial Sequence
  Synthetic
gauugcuuccccuucuggca

SEQ ID NO: 717528 - RNA, 20 nt, Artificial Sequence
  Synthetic
gauuuagcaggucuguggca

SEQ ID NO: 717529 - RNA, 20 nt, Artificial Sequence
  Synthetic
guaguauuaacugcuuggca

SEQ ID NO: 717530 - RNA, 20 nt, Artificial Sequence
  Synthetic
gaauuugagaugguuuggca

SEQ ID NO: 717531 - RNA, 20 nt, Artificial Sequence
  Synthetic
gccaauggauacuuuuggca

SEQ ID NO: 717532 - RNA, 20 nt, Artificial Sequence
  Synthetic
gcguguucuaacccaaugca

SEQ ID NO: 717533 - RNA, 20 nt, Artificial Sequence
  Synthetic
gacacagagacaagaaugca

SEQ ID NO: 717534 - RNA, 20 nt, Artificial Sequence
  Synthetic
gcugugcauggaagaaugca

SEQ ID NO: 717535 - RNA, 20 nt, Artificial Sequence
  Synthetic
gaaacauucccgugaaugca

SEQ ID NO: 717536 - RNA, 20 nt, Artificial Sequence
  Synthetic
gaaaaauugacucacaugca

SEQ ID NO: 717537 - RNA, 20 nt, Artificial Sequence
  Synthetic
ggcuucaucccugggaugca

SEQ ID NO: 717538 - RNA, 20 nt, Artificial Sequence
  Synthetic
gcuggaguggcugggaugca

SEQ ID NO: 717539 - RNA, 20 nt, Artificial Sequence
  Synthetic
ggcuucauccuugggaugca

SEQ ID NO: 717540 - RNA, 20 nt, Artificial Sequence
  Synthetic
ggcuuucacuucaaacugca

SEQ ID NO: 717541 - RNA, 20 nt, Artificial Sequence
  Synthetic
gaccucacagaaccacugca

SEQ ID NO: 717542 - RNA, 20 nt, Artificial Sequence
  Synthetic
gggcccuacccaagacugca

SEQ ID NO: 717543 - RNA, 20 nt, Artificial Sequence
  Synthetic
gcauucugcuagauacugca

SEQ ID NO: 717544 - RNA, 20 nt, Artificial Sequence
  Synthetic
gagcuacccuguguacugca

SEQ ID NO: 717545 - RNA, 20 nt, Artificial Sequence
  Synthetic
gugaagcuaucuuuacugca

SEQ ID NO: 717546 - RNA, 20 nt, Artificial Sequence
  Synthetic
gcugcuuuguuugaccugca

SEQ ID NO: 717547 - RNA, 20 nt, Artificial Sequence
  Synthetic
gaguuuagaaagugccugca

SEQ ID NO: 717548 - RNA, 20 nt, Artificial Sequence
  Synthetic
gaagcagcccaccagcugca

SEQ ID NO: 717549 - RNA, 20 nt, Artificial Sequence
  Synthetic
gucaaggcugcaaggcugca

SEQ ID NO: 717550 - RNA, 20 nt, Artificial Sequence
  Synthetic
ggaaugcagggcaggcugca

SEQ ID NO: 717551 - RNA, 20 nt, Artificial Sequence
  Synthetic
gcuugggggaacuggcugca

SEQ ID NO: 717552 - RNA, 20 nt, Artificial Sequence
  Synthetic
gaaucugagaaguggcugca

SEQ ID NO: 717553 - RNA, 20 nt, Artificial Sequence
  Synthetic
gaugcaauucugacucugca

SEQ ID NO: 717554 - RNA, 20 nt, Artificial Sequence
  Synthetic
gaacacugaacagcucugca

SEQ ID NO: 717555 - RNA, 20 nt, Artificial Sequence
  Synthetic
gggcuguuuaaaucucugca

SEQ ID NO: 717556 - RNA, 20 nt, Artificial Sequence
  Synthetic
gguacugcagccuuucugca

SEQ ID NO: 717557 - RNA, 20 nt, Artificial Sequence
  Synthetic
gaaaggcaaggggaagugca

SEQ ID NO: 717558 - RNA, 20 nt, Artificial Sequence
  Synthetic
ggagaaauauuuacagugca

SEQ ID NO: 717559 - RNA, 20 nt, Artificial Sequence
  Synthetic
gauguuuaucugugagugca

SEQ ID NO: 717560 - RNA, 20 nt, Artificial Sequence
  Synthetic
gucacucuaaaaaaugugca

SEQ ID NO: 717561 - RNA, 20 nt, Artificial Sequence
  Synthetic
ggcuugauccaccgugugca

SEQ ID NO: 717562 - RNA, 20 nt, Artificial Sequence
  Synthetic
ggggaguucuggaaauugca

SEQ ID NO: 717563 - RNA, 20 nt, Artificial Sequence
  Synthetic
gagaaacuuaauagauugca

SEQ ID NO: 717564 - RNA, 20 nt, Artificial Sequence
  Synthetic
guucucagcaaacuauugca

SEQ ID NO: 717565 - RNA, 20 nt, Artificial Sequence
  Synthetic
gaagauuuucuguuauugca

SEQ ID NO: 717566 - RNA, 20 nt, Artificial Sequence
  Synthetic
gaaaaauauaggaaguugca

SEQ ID NO: 717567 - RNA, 20 nt, Artificial Sequence
  Synthetic
ggaaaaaaaauagaguugca

SEQ ID NO: 717568 - RNA, 20 nt, Artificial Sequence
  Synthetic
gugauuaucuugacguugca

SEQ ID NO: 717569 - RNA, 20 nt, Artificial Sequence
  Synthetic
gcuuuugguucccauuugca

SEQ ID NO: 717570 - RNA, 20 nt, Artificial Sequence
  Synthetic
gugagagugauguauuugca

SEQ ID NO: 717571 - RNA, 20 nt, Artificial Sequence
  Synthetic
gaauuuagguaagcuuugca

SEQ ID NO: 717572 - RNA, 20 nt, Artificial Sequence
  Synthetic
gaaagaagucuuuuaaauca

SEQ ID NO: 717573 - RNA, 20 nt, Artificial Sequence
  Synthetic
guugcuauggauaacaauca

SEQ ID NO: 717574 - RNA, 20 nt, Artificial Sequence
  Synthetic
guaguacaguggcacaauca

SEQ ID NO: 717575 - RNA, 20 nt, Artificial Sequence
  Synthetic
ggagugcaguggcacaauca

SEQ ID NO: 717576 - RNA, 20 nt, Artificial Sequence
  Synthetic
gggggggggccucacaauca

SEQ ID NO: 717577 - RNA, 20 nt, Artificial Sequence
  Synthetic
gagucuuuguuaagcaauca

SEQ ID NO: 717578 - RNA, 20 nt, Artificial Sequence
  Synthetic
gcuuuggugcagugcaauca

SEQ ID NO: 717579 - RNA, 20 nt, Artificial Sequence
  Synthetic
guuauaggagguaagaauca

SEQ ID NO: 717580 - RNA, 20 nt, Artificial Sequence
  Synthetic
ggaaaauguaguuggaauca

SEQ ID NO: 717581 - RNA, 20 nt, Artificial Sequence
  Synthetic
guggcaaucuguuggaauca

SEQ ID NO: 717582 - RNA, 20 nt, Artificial Sequence
  Synthetic
ggugggagguaauugaauca

SEQ ID NO: 717583 - RNA, 20 nt, Artificial Sequence
  Synthetic
gugggaggucauuugaauca

SEQ ID NO: 717584 - RNA, 20 nt, Artificial Sequence
  Synthetic
gcaauuacucuaaauaauca

SEQ ID NO: 717585 - RNA, 20 nt, Artificial Sequence
  Synthetic
gguuggugcaaaaguaauca

SEQ ID NO: 717586 - RNA, 20 nt, Artificial Sequence
  Synthetic
ggacaacucugaacacauca

SEQ ID NO: 717587 - RNA, 20 nt, Artificial Sequence
  Synthetic
ggacccugguagguacauca

SEQ ID NO: 717588 - RNA, 20 nt, Artificial Sequence
  Synthetic
gugaaguucuaugcccauca

SEQ ID NO: 717589 - RNA, 20 nt, Artificial Sequence
  Synthetic
gagaguggcuugggccauca

SEQ ID NO: 717590 - RNA, 20 nt, Artificial Sequence
  Synthetic
gaacauuugaaaaaucauca

SEQ ID NO: 717591 - RNA, 20 nt, Artificial Sequence
  Synthetic
gcagaauauuuucaucauca

SEQ ID NO: 717592 - RNA, 20 nt, Artificial Sequence
  Synthetic
gagaggugacuggaucauca

SEQ ID NO: 717593 - RNA, 20 nt, Artificial Sequence
  Synthetic
gggccucugagguaucauca

SEQ ID NO: 717594 - RNA, 20 nt, Artificial Sequence
  Synthetic
gaaucucaugagauucauca

SEQ ID NO: 717595 - RNA, 20 nt, Artificial Sequence
  Synthetic
gaagagcuguuuauucauca

SEQ ID NO: 717596 - RNA, 20 nt, Artificial Sequence
  Synthetic
ggaagacauacaguucauca

SEQ ID NO: 717597 - RNA, 20 nt, Artificial Sequence
  Synthetic
gccuggaauguuaaagauca

SEQ ID NO: 717598 - RNA, 20 nt, Artificial Sequence
  Synthetic
gguugagaaguacaagauca

SEQ ID NO: 717599 - RNA, 20 nt, Artificial Sequence
  Synthetic
ggcugcgaaguccaagauca

SEQ ID NO: 717600 - RNA, 20 nt, Artificial Sequence
  Synthetic
ggcugggaaguucaagauca

SEQ ID NO: 717601 - RNA, 20 nt, Artificial Sequence
  Synthetic
ggauucugaaugccagauca

SEQ ID NO: 717602 - RNA, 20 nt, Artificial Sequence
  Synthetic
ggggaaaucccaucagauca

SEQ ID NO: 717603 - RNA, 20 nt, Artificial Sequence
  Synthetic
guucuuauugccagagauca

SEQ ID NO: 717604 - RNA, 20 nt, Artificial Sequence
  Synthetic
gaaaucuaagcaggagauca

SEQ ID NO: 717605 - RNA, 20 nt, Artificial Sequence
  Synthetic
gauuguauucucugagauca

SEQ ID NO: 717606 - RNA, 20 nt, Artificial Sequence
  Synthetic
guaguaaaaggaaaggauca

SEQ ID NO: 717607 - RNA, 20 nt, Artificial Sequence
  Synthetic
gguaaaagucacuaggauca

SEQ ID NO: 717608 - RNA, 20 nt, Artificial Sequence
  Synthetic
gacaauuuuuccauggauca

SEQ ID NO: 717609 - RNA, 20 nt, Artificial Sequence
  Synthetic
gcugaaacucugcuggauca

SEQ ID NO: 717610 - RNA, 20 nt, Artificial Sequence
  Synthetic
ggugggaggugauuggauca

SEQ ID NO: 717611 - RNA, 20 nt, Artificial Sequence
  Synthetic
gauuucagguuuuuggauca

SEQ ID NO: 717612 - RNA, 20 nt, Artificial Sequence
  Synthetic
ggagugcagugacaugauca

SEQ ID NO: 717613 - RNA, 20 nt, Artificial Sequence
  Synthetic
ggugugcagugacgugauca

SEQ ID NO: 717614 - RNA, 20 nt, Artificial Sequence
  Synthetic
ggagugcagcggugugauca

SEQ ID NO: 717615 - RNA, 20 nt, Artificial Sequence
  Synthetic
guacuugcaaauugugauca

SEQ ID NO: 717616 - RNA, 20 nt, Artificial Sequence
  Synthetic
ggauggcugcugauugauca

SEQ ID NO: 717617 - RNA, 20 nt, Artificial Sequence
  Synthetic
guuauaaaagaaugauauca

SEQ ID NO: 717618 - RNA, 20 nt, Artificial Sequence
  Synthetic
gcagaaaaacaagaguauca

SEQ ID NO: 717619 - RNA, 20 nt, Artificial Sequence
  Synthetic
ggaaugguuccauauuauca

SEQ ID NO: 717620 - RNA, 20 nt, Artificial Sequence
  Synthetic
ggcagguacuaugcuuauca

SEQ ID NO: 717621 - RNA, 20 nt, Artificial Sequence
  Synthetic
gcuaaaggagaaauuuauca

SEQ ID NO: 717622 - RNA, 20 nt, Artificial Sequence
  Synthetic
gcacaauuuauaguuuauca

SEQ ID NO: 717623 - RNA, 20 nt, Artificial Sequence
  Synthetic
gagaucuguugguuuuauca

SEQ ID NO: 717624 - RNA, 20 nt, Artificial Sequence
  Synthetic
gacaagaugccuuuuuauca

SEQ ID NO: 717625 - RNA, 20 nt, Artificial Sequence
  Synthetic
gccugacagugcucaacuca

SEQ ID NO: 717626 - RNA, 20 nt, Artificial Sequence
  Synthetic
ggccggaguacuggaacuca

SEQ ID NO: 717627 - RNA, 20 nt, Artificial Sequence
  Synthetic
gucaucuaagcaauaacuca

SEQ ID NO: 717628 - RNA, 20 nt, Artificial Sequence
  Synthetic
gccuaaacauugggcacuca

SEQ ID NO: 717629 - RNA, 20 nt, Artificial Sequence
  Synthetic
gacccaaacaguaagacuca

SEQ ID NO: 717630 - RNA, 20 nt, Artificial Sequence
  Synthetic
gaggauaaauaauagacuca

SEQ ID NO: 717631 - RNA, 20 nt, Artificial Sequence
  Synthetic
guaauuccagugaugacuca

SEQ ID NO: 717632 - RNA, 20 nt, Artificial Sequence
  Synthetic
gugggcucugaacugacuca

SEQ ID NO: 717633 - RNA, 20 nt, Artificial Sequence
  Synthetic
gauuaugaggauuugacuca

SEQ ID NO: 717634 - RNA, 20 nt, Artificial Sequence
  Synthetic
ggcuucuucguuuauacuca

SEQ ID NO: 717635 - RNA, 20 nt, Artificial Sequence
  Synthetic
gaacuuggcaaaacuacuca

SEQ ID NO: 717636 - RNA, 20 nt, Artificial Sequence
  Synthetic
gggguuugugaaauuacuca

SEQ ID NO: 717637 - RNA, 20 nt, Artificial Sequence
  Synthetic
gaaggauaucagauaccuca

SEQ ID NO: 717638 - RNA, 20 nt, Artificial Sequence
  Synthetic
gaggccaagcagaacccuca

SEQ ID NO: 717639 - RNA, 20 nt, Artificial Sequence
  Synthetic
gcccuuguucuuuacccuca

SEQ ID NO: 717640 - RNA, 20 nt, Artificial Sequence
  Synthetic
guguuauuucaaagcccuca

SEQ ID NO: 717641 - RNA, 20 nt, Artificial Sequence
  Synthetic
gaauucuccuucagcccuca

SEQ ID NO: 717642 - RNA, 20 nt, Artificial Sequence
  Synthetic
guauaaacgaagaagccuca

SEQ ID NO: 717643 - RNA, 20 nt, Artificial Sequence
  Synthetic
gugucuucuauauagccuca

SEQ ID NO: 717644 - RNA, 20 nt, Artificial Sequence
  Synthetic
gaaaacuuuaccaggccuca

SEQ ID NO: 717645 - RNA, 20 nt, Artificial Sequence
  Synthetic
gacaguguggcaauuccuca

SEQ ID NO: 717646 - RNA, 20 nt, Artificial Sequence
  Synthetic
gaaauuuaccuaauuccuca

SEQ ID NO: 717647 - RNA, 20 nt, Artificial Sequence
  Synthetic
gacagugugcagauuccuca

SEQ ID NO: 717648 - RNA, 20 nt, Artificial Sequence
  Synthetic
gacaguguggcgauuccuca

SEQ ID NO: 717649 - RNA, 20 nt, Artificial Sequence
  Synthetic
ggcaguguggcgauuccuca

SEQ ID NO: 717650 - RNA, 20 nt, Artificial Sequence
  Synthetic
gucaguguggcgauuccuca

SEQ ID NO: 717651 - RNA, 20 nt, Artificial Sequence
  Synthetic
gaccguguggcgauuccuca

SEQ ID NO: 717652 - RNA, 20 nt, Artificial Sequence
  Synthetic
gucgguguggcgauuccuca

SEQ ID NO: 717653 - RNA, 20 nt, Artificial Sequence
  Synthetic
gaucaagauaugguuccuca

SEQ ID NO: 717654 - RNA, 20 nt, Artificial Sequence
  Synthetic
gaaacacugugauuuccuca

SEQ ID NO: 717655 - RNA, 20 nt, Artificial Sequence
  Synthetic
gcuuacaucuuguuuccuca

SEQ ID NO: 717656 - RNA, 20 nt, Artificial Sequence
  Synthetic
ggccauaugaagaaagcuca

SEQ ID NO: 717657 - RNA, 20 nt, Artificial Sequence
  Synthetic
gucuucuguauucaagcuca

SEQ ID NO: 717658 - RNA, 20 nt, Artificial Sequence
  Synthetic
gcugcaggaaaggaagcuca

SEQ ID NO: 717659 - RNA, 20 nt, Artificial Sequence
  Synthetic
gaaacaaaaugugaagcuca

SEQ ID NO: 717660 - RNA, 20 nt, Artificial Sequence
  Synthetic
ggaggaucgggaacagcuca

SEQ ID NO: 717661 - RNA, 20 nt, Artificial Sequence
  Synthetic
gcguggucucagugggcuca

SEQ ID NO: 717662 - RNA, 20 nt, Artificial Sequence
  Synthetic
ggaagaacauuccaugcuca

SEQ ID NO: 717663 - RNA, 20 nt, Artificial Sequence
  Synthetic
ggaagaauauuccaugcuca

SEQ ID NO: 717664 - RNA, 20 nt, Artificial Sequence
  Synthetic
gacaguagagaugaugcuca

SEQ ID NO: 717665 - RNA, 20 nt, Artificial Sequence
  Synthetic
gaacuacaaaccacugcuca

SEQ ID NO: 717666 - RNA, 20 nt, Artificial Sequence
  Synthetic
gcauuucuagcaagugcuca

SEQ ID NO: 717667 - RNA, 20 nt, Artificial Sequence
  Synthetic
ggaagaacauuccgugcuca

SEQ ID NO: 717668 - RNA, 20 nt, Artificial Sequence
  Synthetic
gaacgauucccuuuugcuca

SEQ ID NO: 717669 - RNA, 20 nt, Artificial Sequence
  Synthetic
gcaugcucaccucaaucuca

SEQ ID NO: 717670 - RNA, 20 nt, Artificial Sequence
  Synthetic
ggaaaacaucucugaucuca

SEQ ID NO: 717671 - RNA, 20 nt, Artificial Sequence
  Synthetic
gcucacuuauaacuaucuca

SEQ ID NO: 717672 - RNA, 20 nt, Artificial Sequence
  Synthetic
ggaaaaccaugucuaucuca

SEQ ID NO: 717673 - RNA, 20 nt, Artificial Sequence
  Synthetic
guacuuaucaauuuaucuca

SEQ ID NO: 717674 - RNA, 20 nt, Artificial Sequence
  Synthetic
gcaaaaaguucuuacucuca

SEQ ID NO: 717675 - RNA, 20 nt, Artificial Sequence
  Synthetic
gguuuaaucuuacccucuca

SEQ ID NO: 717676 - RNA, 20 nt, Artificial Sequence
  Synthetic
gauacggcagugagcucuca

SEQ ID NO: 717677 - RNA, 20 nt, Artificial Sequence
  Synthetic
gauuacaguuccugcucuca

SEQ ID NO: 717678 - RNA, 20 nt, Artificial Sequence
  Synthetic
gucuaucuuaacaucucuca

SEQ ID NO: 717679 - RNA, 20 nt, Artificial Sequence
  Synthetic
gacuuccugcauaucucuca

SEQ ID NO: 717680 - RNA, 20 nt, Artificial Sequence
  Synthetic
gccuaaaaagguaucucuca

SEQ ID NO: 717681 - RNA, 20 nt, Artificial Sequence
  Synthetic
ggaaacucccucuagucuca

SEQ ID NO: 717682 - RNA, 20 nt, Artificial Sequence
  Synthetic
gaaccacugcaugggucuca

SEQ ID NO: 717683 - RNA, 20 nt, Artificial Sequence
  Synthetic
guugguugcguugggucuca

SEQ ID NO: 717684 - RNA, 20 nt, Artificial Sequence
  Synthetic
gucagaaacuuugggucuca

SEQ ID NO: 717685 - RNA, 20 nt, Artificial Sequence
  Synthetic
ggaccugagcucgugucuca

SEQ ID NO: 717686 - RNA, 20 nt, Artificial Sequence
  Synthetic
guauuuaaauccuugucuca

SEQ ID NO: 717687 - RNA, 20 nt, Artificial Sequence
  Synthetic
gaaagucaucuaaauucuca

SEQ ID NO: 717688 - RNA, 20 nt, Artificial Sequence
  Synthetic
gagucaggguuucauucuca

SEQ ID NO: 717689 - RNA, 20 nt, Artificial Sequence
  Synthetic
gugaacacaauagauucuca

SEQ ID NO: 717690 - RNA, 20 nt, Artificial Sequence
  Synthetic
ggagacuucuugacuucuca

SEQ ID NO: 717691 - RNA, 20 nt, Artificial Sequence
  Synthetic
gcccauggguccccuucuca

SEQ ID NO: 717692 - RNA, 20 nt, Artificial Sequence
  Synthetic
gucuuggguugcucuucuca

SEQ ID NO: 717693 - RNA, 20 nt, Artificial Sequence
  Synthetic
gcaucucuaacaaguucuca

SEQ ID NO: 717694 - RNA, 20 nt, Artificial Sequence
  Synthetic
gugauuucaauguacaguca

SEQ ID NO: 717695 - RNA, 20 nt, Artificial Sequence
  Synthetic
ggccaucccugcgccaguca

SEQ ID NO: 717696 - RNA, 20 nt, Artificial Sequence
  Synthetic
guggugggacaugccaguca

SEQ ID NO: 717697 - RNA, 20 nt, Artificial Sequence
  Synthetic
guguaugauguggagaguca

SEQ ID NO: 717698 - RNA, 20 nt, Artificial Sequence
  Synthetic
ggugugagauguuugaguca

SEQ ID NO: 717699 - RNA, 20 nt, Artificial Sequence
  Synthetic
gccaguagacuuuugaguca

SEQ ID NO: 717700 - RNA, 20 nt, Artificial Sequence
  Synthetic
ggagcugcuuagucuaguca

SEQ ID NO: 717701 - RNA, 20 nt, Artificial Sequence
  Synthetic
gucagcagcuaucuccguca

SEQ ID NO: 717702 - RNA, 20 nt, Artificial Sequence
  Synthetic
ggcaucuugaggaaagguca

SEQ ID NO: 717703 - RNA, 20 nt, Artificial Sequence
  Synthetic
ggagguaagaaucaagguca

SEQ ID NO: 717704 - RNA, 20 nt, Artificial Sequence
  Synthetic
ggcaaagcuggucaagguca

SEQ ID NO: 717705 - RNA, 20 nt, Artificial Sequence
  Synthetic
ggucaagaaugcgaagguca

SEQ ID NO: 717706 - RNA, 20 nt, Artificial Sequence
  Synthetic
ggucacaaacgugaagguca

SEQ ID NO: 717707 - RNA, 20 nt, Artificial Sequence
  Synthetic
ggaacacaagggugggguca

SEQ ID NO: 717708 - RNA, 20 nt, Artificial Sequence
  Synthetic
gagacuagaggaguggguca

SEQ ID NO: 717709 - RNA, 20 nt, Artificial Sequence
  Synthetic
gcuucuuauucuguggguca

SEQ ID NO: 717710 - RNA, 20 nt, Artificial Sequence
  Synthetic
ggcgggagguuuuuggguca

SEQ ID NO: 717711 - RNA, 20 nt, Artificial Sequence
  Synthetic
gcaguaggcaaagcugguca

SEQ ID NO: 717712 - RNA, 20 nt, Artificial Sequence
  Synthetic
ggauaaaucccucuugguca

SEQ ID NO: 717713 - RNA, 20 nt, Artificial Sequence
  Synthetic
ggggucugggggcaauguca

SEQ ID NO: 717714 - RNA, 20 nt, Artificial Sequence
  Synthetic
gcugacagcaucccauguca

SEQ ID NO: 717715 - RNA, 20 nt, Artificial Sequence
  Synthetic
gaagauagauauucauguca

SEQ ID NO: 717716 - RNA, 20 nt, Artificial Sequence
  Synthetic
gaguuuaaguguggauguca

SEQ ID NO: 717717 - RNA, 20 nt, Artificial Sequence
  Synthetic
gaaacacuauuuauauguca

SEQ ID NO: 717718 - RNA, 20 nt, Artificial Sequence
  Synthetic
gucaauaucaauugcuguca

SEQ ID NO: 717719 - RNA, 20 nt, Artificial Sequence
  Synthetic
ggaaguggcuggcaguguca

SEQ ID NO: 717720 - RNA, 20 nt, Artificial Sequence
  Synthetic
gggugaggagcgauguguca

SEQ ID NO: 717721 - RNA, 20 nt, Artificial Sequence
  Synthetic
gccaaauauucauuguguca

SEQ ID NO: 717722 - RNA, 20 nt, Artificial Sequence
  Synthetic
gucagcuugcuauuguguca

SEQ ID NO: 717723 - RNA, 20 nt, Artificial Sequence
  Synthetic
gaaacaagcuguuuuuguca

SEQ ID NO: 717724 - RNA, 20 nt, Artificial Sequence
  Synthetic
gacccacaggcuuaaauuca

SEQ ID NO: 717725 - RNA, 20 nt, Artificial Sequence
  Synthetic
guaaaaaggaaaagaauuca

SEQ ID NO: 717726 - RNA, 20 nt, Artificial Sequence
  Synthetic
ggguuaacuuagagaauuca

SEQ ID NO: 717727 - RNA, 20 nt, Artificial Sequence
  Synthetic
guguuuuauucaugaauuca

SEQ ID NO: 717728 - RNA, 20 nt, Artificial Sequence
  Synthetic
guggggauuaccauaauuca

SEQ ID NO: 717729 - RNA, 20 nt, Artificial Sequence
  Synthetic
gaggaccaugcaaacauuca

SEQ ID NO: 717730 - RNA, 20 nt, Artificial Sequence
  Synthetic
gaugucugaagagacauuca

SEQ ID NO: 717731 - RNA, 20 nt, Artificial Sequence
  Synthetic
gcaccuguuucuuacauuca

SEQ ID NO: 717732 - RNA, 20 nt, Artificial Sequence
  Synthetic
gccgaguaaaauuccauuca

SEQ ID NO: 717733 - RNA, 20 nt, Artificial Sequence
  Synthetic
gacaucaaaaauagcauuca

SEQ ID NO: 717734 - RNA, 20 nt, Artificial Sequence
  Synthetic
guuaccauuugcuucauuca

SEQ ID NO: 717735 - RNA, 20 nt, Artificial Sequence
  Synthetic
gaaauuaacuauuucauuca

SEQ ID NO: 717736 - RNA, 20 nt, Artificial Sequence
  Synthetic
guucuugauucuaagauuca

SEQ ID NO: 717737 - RNA, 20 nt, Artificial Sequence
  Synthetic
ggaugaaaguaugggauuca

SEQ ID NO: 717738 - RNA, 20 nt, Artificial Sequence
  Synthetic
gguuuuuaaguugugauuca

SEQ ID NO: 717739 - RNA, 20 nt, Artificial Sequence
  Synthetic
gggauugcugccgauauuca

SEQ ID NO: 717740 - RNA, 20 nt, Artificial Sequence
  Synthetic
gccuguuauuggucuauuca

SEQ ID NO: 717741 - RNA, 20 nt, Artificial Sequence
  Synthetic
gcaugaacaugacuuauuca

SEQ ID NO: 717742 - RNA, 20 nt, Artificial Sequence
  Synthetic
gaguuucuauacuuuauuca

SEQ ID NO: 717743 - RNA, 20 nt, Artificial Sequence
  Synthetic
gcucacucacuaaaacuuca

SEQ ID NO: 717744 - RNA, 20 nt, Artificial Sequence
  Synthetic
gcuugauaccuuaaacuuca

SEQ ID NO: 717745 - RNA, 20 nt, Artificial Sequence
  Synthetic
guacuuuugucccuacuuca

SEQ ID NO: 717746 - RNA, 20 nt, Artificial Sequence
  Synthetic
gggacccccuacugccuuca

SEQ ID NO: 717747 - RNA, 20 nt, Artificial Sequence
  Synthetic
gugacuuacaagugccuuca

SEQ ID NO: 717748 - RNA, 20 nt, Artificial Sequence
  Synthetic
gguaauacuacucuccuuca

SEQ ID NO: 717749 - RNA, 20 nt, Artificial Sequence
  Synthetic
gaacuagaaacauuccuuca

SEQ ID NO: 717750 - RNA, 20 nt, Artificial Sequence
  Synthetic
gcuauuacauuuuuccuuca

SEQ ID NO: 717751 - RNA, 20 nt, Artificial Sequence
  Synthetic
gacaagguaaccaugcuuca

SEQ ID NO: 717752 - RNA, 20 nt, Artificial Sequence
  Synthetic
gaauccaaaggguaucuuca

SEQ ID NO: 717753 - RNA, 20 nt, Artificial Sequence
  Synthetic
ggaugugaaagaccucuuca

SEQ ID NO: 717754 - RNA, 20 nt, Artificial Sequence
  Synthetic
ggaugugaaggaccucuuca

SEQ ID NO: 717755 - RNA, 20 nt, Artificial Sequence
  Synthetic
ggaugugaagggccucuuca

SEQ ID NO: 717756 - RNA, 20 nt, Artificial Sequence
  Synthetic
ggugaauauauuccucuuca

SEQ ID NO: 717757 - RNA, 20 nt, Artificial Sequence
  Synthetic
guagguguggcaggucuuca

SEQ ID NO: 717758 - RNA, 20 nt, Artificial Sequence
  Synthetic
gcacaagaaacaauucuuca

SEQ ID NO: 717759 - RNA, 20 nt, Artificial Sequence
  Synthetic
gaaguaaguuaccaaguuca

SEQ ID NO: 717760 - RNA, 20 nt, Artificial Sequence
  Synthetic
gaagccuuagguuaaguuca

SEQ ID NO: 717761 - RNA, 20 nt, Artificial Sequence
  Synthetic
gaaccuaggaguucaguuca

SEQ ID NO: 717762 - RNA, 20 nt, Artificial Sequence
  Synthetic
gcuugagcccaaggaguuca

SEQ ID NO: 717763 - RNA, 20 nt, Artificial Sequence
  Synthetic
gugcauuuugccugaguuca

SEQ ID NO: 717764 - RNA, 20 nt, Artificial Sequence
  Synthetic
guuuccaggacucuaguuca

SEQ ID NO: 717765 - RNA, 20 nt, Artificial Sequence
  Synthetic
gaagcucagugacacguuca

SEQ ID NO: 717766 - RNA, 20 nt, Artificial Sequence
  Synthetic
gggccucagcugaccguuca

SEQ ID NO: 717767 - RNA, 20 nt, Artificial Sequence
  Synthetic
gcgcccagccaaagcguuca

SEQ ID NO: 717768 - RNA, 20 nt, Artificial Sequence
  Synthetic
guucucagggucugcguuca

SEQ ID NO: 717769 - RNA, 20 nt, Artificial Sequence
  Synthetic
gaagagaaaccugagguuca

SEQ ID NO: 717770 - RNA, 20 nt, Artificial Sequence
  Synthetic
gccuccgccuccuggguuca

SEQ ID NO: 717771 - RNA, 20 nt, Artificial Sequence
  Synthetic
gccucugccuccuggguuca

SEQ ID NO: 717772 - RNA, 20 nt, Artificial Sequence
  Synthetic
gggcucuuccucgugguuca

SEQ ID NO: 717773 - RNA, 20 nt, Artificial Sequence
  Synthetic
gggcaauuauaaaauguuca

SEQ ID NO: 717774 - RNA, 20 nt, Artificial Sequence
  Synthetic
gcucguuacugguauguuca

SEQ ID NO: 717775 - RNA, 20 nt, Artificial Sequence
  Synthetic
gaaaucauuuucauuguuca

SEQ ID NO: 717776 - RNA, 20 nt, Artificial Sequence
  Synthetic
guuuuuaaaauaaaauuuca

SEQ ID NO: 717777 - RNA, 20 nt, Artificial Sequence
  Synthetic
gaggaauuagguaaauuuca

SEQ ID NO: 717778 - RNA, 20 nt, Artificial Sequence
  Synthetic
gcacacaaagagcaauuuca

SEQ ID NO: 717779 - RNA, 20 nt, Artificial Sequence
  Synthetic
gaagccauuuauucauuuca

SEQ ID NO: 717780 - RNA, 20 nt, Artificial Sequence
  Synthetic
gaucuauucauuucauuuca

SEQ ID NO: 717781 - RNA, 20 nt, Artificial Sequence
  Synthetic
gcaaauagauacagauuuca

SEQ ID NO: 717782 - RNA, 20 nt, Artificial Sequence
  Synthetic
gauaaauaauaaauauuuca

SEQ ID NO: 717783 - RNA, 20 nt, Artificial Sequence
  Synthetic
guuauucagucauuauuuca

SEQ ID NO: 717784 - RNA, 20 nt, Artificial Sequence
  Synthetic
gaaaauuguggauuauuuca

SEQ ID NO: 717785 - RNA, 20 nt, Artificial Sequence
  Synthetic
gaugaggaacuuaacuuuca

SEQ ID NO: 717786 - RNA, 20 nt, Artificial Sequence
  Synthetic
guccucuuccuuggcuuuca

SEQ ID NO: 717787 - RNA, 20 nt, Artificial Sequence
  Synthetic
guagucagagacugcuuuca

SEQ ID NO: 717788 - RNA, 20 nt, Artificial Sequence
  Synthetic
gugacuucuccucucuuuca

SEQ ID NO: 717789 - RNA, 20 nt, Artificial Sequence
  Synthetic
gguuuuaugauaaaguuuca

SEQ ID NO: 717790 - RNA, 20 nt, Artificial Sequence
  Synthetic
gagcauuucuagaaguuuca

SEQ ID NO: 717791 - RNA, 20 nt, Artificial Sequence
  Synthetic
ggcuaaaacauucaguuuca

SEQ ID NO: 717792 - RNA, 20 nt, Artificial Sequence
  Synthetic
gcauucaaaugagaguuuca

SEQ ID NO: 717793 - RNA, 20 nt, Artificial Sequence
  Synthetic
guucucuuguaguaguuuca

SEQ ID NO: 717794 - RNA, 20 nt, Artificial Sequence
  Synthetic
guuuggaaugaaagguuuca

SEQ ID NO: 717795 - RNA, 20 nt, Artificial Sequence
  Synthetic
gaaguuugaaauggguuuca

SEQ ID NO: 717796 - RNA, 20 nt, Artificial Sequence
  Synthetic
gaagcaguagucuuguuuca

SEQ ID NO: 717797 - RNA, 20 nt, Artificial Sequence
  Synthetic
gguuaauggcauuuguuuca

SEQ ID NO: 717798 - RNA, 20 nt, Artificial Sequence
  Synthetic
gugcagacugagcauuuuca

SEQ ID NO: 717799 - RNA, 20 nt, Artificial Sequence
  Synthetic
gcggccucaucagauuuuca

SEQ ID NO: 717800 - RNA, 20 nt, Artificial Sequence
  Synthetic
guaagaucacgguauuuuca

SEQ ID NO: 717801 - RNA, 20 nt, Artificial Sequence
  Synthetic
gcuuugcagaauuauuuuca

SEQ ID NO: 717802 - RNA, 20 nt, Artificial Sequence
  Synthetic
gguuuuugugcuccuuuuca

SEQ ID NO: 717803 - RNA, 20 nt, Artificial Sequence
  Synthetic
gaucuguaguuuucuuuuca

SEQ ID NO: 717804 - RNA, 20 nt, Artificial Sequence
  Synthetic
gaggccugguaaaguuuuca

SEQ ID NO: 717805 - RNA, 20 nt, Artificial Sequence
  Synthetic
ggaaaugccagaaguuuuca

SEQ ID NO: 717806 - RNA, 20 nt, Artificial Sequence
  Synthetic
gaaacgugugaauguuuuca

SEQ ID NO: 717807 - RNA, 20 nt, Artificial Sequence
  Synthetic
gcagaaaugauuuguuuuca

SEQ ID NO: 717808 - RNA, 20 nt, Artificial Sequence
  Synthetic
gacuuuugucucauuuuuca

SEQ ID NO: 717809 - RNA, 20 nt, Artificial Sequence
  Synthetic
ggaucacccaaacuuuuuca

SEQ ID NO: 717810 - RNA, 20 nt, Artificial Sequence
  Synthetic
gauagaaaagcaaaaaaaga

SEQ ID NO: 717811 - RNA, 20 nt, Artificial Sequence
  Synthetic
ggaggaaagggaaaaaaaga

SEQ ID NO: 717812 - RNA, 20 nt, Artificial Sequence
  Synthetic
gaauuuagaauauaaaaaga

SEQ ID NO: 717813 - RNA, 20 nt, Artificial Sequence
  Synthetic
guauaauggagaacaaaaga

SEQ ID NO: 717814 - RNA, 20 nt, Artificial Sequence
  Synthetic
gugucuggggugacaaaaga

SEQ ID NO: 717815 - RNA, 20 nt, Artificial Sequence
  Synthetic
guuuaugaauugacaaaaga

SEQ ID NO: 717816 - RNA, 20 nt, Artificial Sequence
  Synthetic
ggaaugaacaucccaaaaga

SEQ ID NO: 717817 - RNA, 20 nt, Artificial Sequence
  Synthetic
guauuccaagcagcaaaaga

SEQ ID NO: 717818 - RNA, 20 nt, Artificial Sequence
  Synthetic
ggaggagaaugagcaaaaga

SEQ ID NO: 717819 - RNA, 20 nt, Artificial Sequence
  Synthetic
guuauuuaaaaaagaaaaga

SEQ ID NO: 717820 - RNA, 20 nt, Artificial Sequence
  Synthetic
gagcuggagaacagaaaaga

SEQ ID NO: 717821 - RNA, 20 nt, Artificial Sequence
  Synthetic
gagaacacagcuggaaaaga

SEQ ID NO: 717822 - RNA, 20 nt, Artificial Sequence
  Synthetic
ggaaaagaaaaaugaaaaga

SEQ ID NO: 717823 - RNA, 20 nt, Artificial Sequence
  Synthetic
gaacucucugacugaaaaga

SEQ ID NO: 717824 - RNA, 20 nt, Artificial Sequence
  Synthetic
gguaaaggugaaauaaaaga

SEQ ID NO: 717825 - RNA, 20 nt, Artificial Sequence
  Synthetic
gacauaggagggguaaaaga

SEQ ID NO: 717826 - RNA, 20 nt, Artificial Sequence
  Synthetic
gcaacagaagcauuaaaaga

SEQ ID NO: 717827 - RNA, 20 nt, Artificial Sequence
  Synthetic
gaauggaagcuagacaaaga

SEQ ID NO: 717828 - RNA, 20 nt, Artificial Sequence
  Synthetic
guuauaaagcuguccaaaga

SEQ ID NO: 717829 - RNA, 20 nt, Artificial Sequence
  Synthetic
ggaguugcagugagcaaaga

SEQ ID NO: 717830 - RNA, 20 nt, Artificial Sequence
  Synthetic
guaccagagaacaucaaaga

SEQ ID NO: 717831 - RNA, 20 nt, Artificial Sequence
  Synthetic
gccuucaagguugucaaaga

SEQ ID NO: 717832 - RNA, 20 nt, Artificial Sequence
  Synthetic
guucccuuguaaaagaaaga

SEQ ID NO: 717833 - RNA, 20 nt, Artificial Sequence
  Synthetic
gcaaaguggugccagaaaga

SEQ ID NO: 717834 - RNA, 20 nt, Artificial Sequence
  Synthetic
ggcaggcaaauucagaaaga

SEQ ID NO: 717835 - RNA, 20 nt, Artificial Sequence
  Synthetic
gagugaauuucagagaaaga

SEQ ID NO: 717836 - RNA, 20 nt, Artificial Sequence
  Synthetic
gaggauuugauuuagaaaga

SEQ ID NO: 717837 - RNA, 20 nt, Artificial Sequence
  Synthetic
gaccagaagaaaaggaaaga

SEQ ID NO: 717838 - RNA, 20 nt, Artificial Sequence
  Synthetic
guaguuaaagugaggaaaga

SEQ ID NO: 717839 - RNA, 20 nt, Artificial Sequence
  Synthetic
ggggguggguaagggaaaga

SEQ ID NO: 717840 - RNA, 20 nt, Artificial Sequence
  Synthetic
guaguaguaguauggaaaga

SEQ ID NO: 717841 - RNA, 20 nt, Artificial Sequence
  Synthetic
gugccaccuguuuggaaaga

SEQ ID NO: 717842 - RNA, 20 nt, Artificial Sequence
  Synthetic
gaacucuauacuaugaaaga

SEQ ID NO: 717843 - RNA, 20 nt, Artificial Sequence
  Synthetic
gugauguguuuuaugaaaga

SEQ ID NO: 717844 - RNA, 20 nt, Artificial Sequence
  Synthetic
gguggcucuuuaaauaaaga

SEQ ID NO: 717845 - RNA, 20 nt, Artificial Sequence
  Synthetic
gauauuugauauaauaaaga

SEQ ID NO: 717846 - RNA, 20 nt, Artificial Sequence
  Synthetic
gaccagcaaggacauaaaga

SEQ ID NO: 717847 - RNA, 20 nt, Artificial Sequence
  Synthetic
ggcacucauggacauaaaga

SEQ ID NO: 717848 - RNA, 20 nt, Artificial Sequence
  Synthetic
gccuagaaauacgauaaaga

SEQ ID NO: 717849 - RNA, 20 nt, Artificial Sequence
  Synthetic
gucaucuagaauaguaaaga

SEQ ID NO: 717850 - RNA, 20 nt, Artificial Sequence
  Synthetic
ggcuuacaggauaguaaaga

SEQ ID NO: 717851 - RNA, 20 nt, Artificial Sequence
  Synthetic
gaguaaccuacaguuaaaga

SEQ ID NO: 717852 - RNA, 20 nt, Artificial Sequence
  Synthetic
gccuguuuaguuuuuaaaga

SEQ ID NO: 717853 - RNA, 20 nt, Artificial Sequence
  Synthetic
ggaaauugauuuuuuaaaga

SEQ ID NO: 717854 - RNA, 20 nt, Artificial Sequence
  Synthetic
gcaccucagaagaaacaaga

SEQ ID NO: 717855 - RNA, 20 nt, Artificial Sequence
  Synthetic
ggaaucaugacacaacaaga

SEQ ID NO: 717856 - RNA, 20 nt, Artificial Sequence
  Synthetic
ggucuccaaagggaacaaga

SEQ ID NO: 717857 - RNA, 20 nt, Artificial Sequence
  Synthetic
ggccauuuuugucaccaaga

SEQ ID NO: 717858 - RNA, 20 nt, Artificial Sequence
  Synthetic
gaagaucauaagacccaaga

SEQ ID NO: 717859 - RNA, 20 nt, Artificial Sequence
  Synthetic
gagcacagagaaagccaaga

SEQ ID NO: 717860 - RNA, 20 nt, Artificial Sequence
  Synthetic
gagguggcagugagccaaga

SEQ ID NO: 717861 - RNA, 20 nt, Artificial Sequence
  Synthetic
gagguugcagugagccaaga

SEQ ID NO: 717862 - RNA, 20 nt, Artificial Sequence
  Synthetic
gagggaacugguguccaaga

SEQ ID NO: 717863 - RNA, 20 nt, Artificial Sequence
  Synthetic
gcaguauuucaucagcaaga

SEQ ID NO: 717864 - RNA, 20 nt, Artificial Sequence
  Synthetic
guugauuguuguaugcaaga

SEQ ID NO: 717865 - RNA, 20 nt, Artificial Sequence
  Synthetic
gaaauauuccuggcucaaga

SEQ ID NO: 717866 - RNA, 20 nt, Artificial Sequence
  Synthetic
gacaaaugaaauugucaaga

SEQ ID NO: 717867 - RNA, 20 nt, Artificial Sequence
  Synthetic
gggcauuaagccauucaaga

SEQ ID NO: 717868 - RNA, 20 nt, Artificial Sequence
  Synthetic
gcaaaugggaaguaagaaga

SEQ ID NO: 717869 - RNA, 20 nt, Artificial Sequence
  Synthetic
gauguaagaaggccagaaga

SEQ ID NO: 717870 - RNA, 20 nt, Artificial Sequence
  Synthetic
guaaauaagaugccagaaga

SEQ ID NO: 717871 - RNA, 20 nt, Artificial Sequence
  Synthetic
gcuaauacagcagcagaaga

SEQ ID NO: 717872 - RNA, 20 nt, Artificial Sequence
  Synthetic
gagagguacagagcagaaga

SEQ ID NO: 717873 - RNA, 20 nt, Artificial Sequence
  Synthetic
ggcuuggagccaucagaaga

SEQ ID NO: 717874 - RNA, 20 nt, Artificial Sequence
  Synthetic
gccuuagcuggaugagaaga

SEQ ID NO: 717875 - RNA, 20 nt, Artificial Sequence
  Synthetic
guucuauugacaauagaaga

SEQ ID NO: 717876 - RNA, 20 nt, Artificial Sequence
  Synthetic
gaaucacuucucauagaaga

SEQ ID NO: 717877 - RNA, 20 nt, Artificial Sequence
  Synthetic
gaggaauacagaguagaaga

SEQ ID NO: 717878 - RNA, 20 nt, Artificial Sequence
  Synthetic
ggguagaguguaguagaaga

SEQ ID NO: 717879 - RNA, 20 nt, Artificial Sequence
  Synthetic
gaaaaagacagaaaggaaga

SEQ ID NO: 717880 - RNA, 20 nt, Artificial Sequence
  Synthetic
gacgagagaaaaagggaaga

SEQ ID NO: 717881 - RNA, 20 nt, Artificial Sequence
  Synthetic
guauguuuugggagggaaga

SEQ ID NO: 717882 - RNA, 20 nt, Artificial Sequence
  Synthetic
ggguagggguuaggggaaga

SEQ ID NO: 717883 - RNA, 20 nt, Artificial Sequence
  Synthetic
gaggaagacagcugggaaga

SEQ ID NO: 717884 - RNA, 20 nt, Artificial Sequence
  Synthetic
ggaaaggaggaaauggaaga

SEQ ID NO: 717885 - RNA, 20 nt, Artificial Sequence
  Synthetic
ggaaacacuggucuggaaga

SEQ ID NO: 717886 - RNA, 20 nt, Artificial Sequence
  Synthetic
gcugaggagugaguggaaga

SEQ ID NO: 717887 - RNA, 20 nt, Artificial Sequence
  Synthetic
ggagugagaucaaaugaaga

SEQ ID NO: 717888 - RNA, 20 nt, Artificial Sequence
  Synthetic
gaauaccuacugcaugaaga

SEQ ID NO: 717889 - RNA, 20 nt, Artificial Sequence
  Synthetic
gacuuucuaauucaugaaga

SEQ ID NO: 717890 - RNA, 20 nt, Artificial Sequence
  Synthetic
guaaaagaugaauaugaaga

SEQ ID NO: 717891 - RNA, 20 nt, Artificial Sequence
  Synthetic
ggugauauuaacacugaaga

SEQ ID NO: 717892 - RNA, 20 nt, Artificial Sequence
  Synthetic
gauaacaucuacccugaaga

SEQ ID NO: 717893 - RNA, 20 nt, Artificial Sequence
  Synthetic
gugugcauuguuccugaaga

SEQ ID NO: 717894 - RNA, 20 nt, Artificial Sequence
  Synthetic
guguggcugugagcugaaga

SEQ ID NO: 717895 - RNA, 20 nt, Artificial Sequence
  Synthetic
gauuucagauaaggugaaga

SEQ ID NO: 717896 - RNA, 20 nt, Artificial Sequence
  Synthetic
gguacuuauagaauugaaga

SEQ ID NO: 717897 - RNA, 20 nt, Artificial Sequence
  Synthetic
gucuaaucaguucuugaaga

SEQ ID NO: 717898 - RNA, 20 nt, Artificial Sequence
  Synthetic
gagugggaaucauuugaaga

SEQ ID NO: 717899 - RNA, 20 nt, Artificial Sequence
  Synthetic
gugacuacaauaaaauaaga

SEQ ID NO: 717900 - RNA, 20 nt, Artificial Sequence
  Synthetic
guagaggugcuaaaauaaga

SEQ ID NO: 717901 - RNA, 20 nt, Artificial Sequence
  Synthetic
gugugagaggggaaauaaga

SEQ ID NO: 717902 - RNA, 20 nt, Artificial Sequence
  Synthetic
gaaaacuccuguaaauaaga

SEQ ID NO: 717903 - RNA, 20 nt, Artificial Sequence
  Synthetic
gaguguuaaauagcauaaga

SEQ ID NO: 717904 - RNA, 20 nt, Artificial Sequence
  Synthetic
gacauaauagggauauaaga

SEQ ID NO: 717905 - RNA, 20 nt, Artificial Sequence
  Synthetic
gcuucuuaaacucccuaaga

SEQ ID NO: 717906 - RNA, 20 nt, Artificial Sequence
  Synthetic
ggaggcuuguccuucuaaga

SEQ ID NO: 717907 - RNA, 20 nt, Artificial Sequence
  Synthetic
gugugggcaucucaguaaga

SEQ ID NO: 717908 - RNA, 20 nt, Artificial Sequence
  Synthetic
gaaauauuuagagaguaaga

SEQ ID NO: 717909 - RNA, 20 nt, Artificial Sequence
  Synthetic
ggucagaauuuuagguaaga

SEQ ID NO: 717910 - RNA, 20 nt, Artificial Sequence
  Synthetic
ggggcaugucaaaauuaaga

SEQ ID NO: 717911 - RNA, 20 nt, Artificial Sequence
  Synthetic
ggucuaugaagaaauuaaga

SEQ ID NO: 717912 - RNA, 20 nt, Artificial Sequence
  Synthetic
gauagaaaaugcaauuaaga

SEQ ID NO: 717913 - RNA, 20 nt, Artificial Sequence
  Synthetic
guauguuuauuagauuaaga

SEQ ID NO: 717914 - RNA, 20 nt, Artificial Sequence
  Synthetic
gcacuuaaaauuuauuaaga

SEQ ID NO: 717915 - RNA, 20 nt, Artificial Sequence
  Synthetic
gagaucuguuugacuuaaga

SEQ ID NO: 717916 - RNA, 20 nt, Artificial Sequence
  Synthetic
gaagcuaaauucccuuaaga

SEQ ID NO: 717917 - RNA, 20 nt, Artificial Sequence
  Synthetic
gcuacugaaggauuuuaaga

SEQ ID NO: 717918 - RNA, 20 nt, Artificial Sequence
  Synthetic
gucaugugcaacaaaacaga

SEQ ID NO: 717919 - RNA, 20 nt, Artificial Sequence
  Synthetic
gucuacuuuucucaaacaga

SEQ ID NO: 717920 - RNA, 20 nt, Artificial Sequence
  Synthetic
gagucccaacaagaaacaga

SEQ ID NO: 717921 - RNA, 20 nt, Artificial Sequence
  Synthetic
gcccaagccccgccaacaga

SEQ ID NO: 717922 - RNA, 20 nt, Artificial Sequence
  Synthetic
gagaaguaggucucaacaga

SEQ ID NO: 717923 - RNA, 20 nt, Artificial Sequence
  Synthetic
ggaaaaggaaaaggaacaga

SEQ ID NO: 717924 - RNA, 20 nt, Artificial Sequence
  Synthetic
guugugccaggaggaacaga

SEQ ID NO: 717925 - RNA, 20 nt, Artificial Sequence
  Synthetic
ggaagaaaggagauaacaga

SEQ ID NO: 717926 - RNA, 20 nt, Artificial Sequence
  Synthetic
gagaaaaaugaguuaacaga

SEQ ID NO: 717927 - RNA, 20 nt, Artificial Sequence
  Synthetic
guuuauuuauaaaccacaga

SEQ ID NO: 717928 - RNA, 20 nt, Artificial Sequence
  Synthetic
gauguguggggaugcacaga

SEQ ID NO: 717929 - RNA, 20 nt, Artificial Sequence
  Synthetic
gaaucagaaugauucacaga

SEQ ID NO: 717930 - RNA, 20 nt, Artificial Sequence
  Synthetic
gucaaccagauauucacaga

SEQ ID NO: 717931 - RNA, 20 nt, Artificial Sequence
  Synthetic
gagauuuguugggagacaga

SEQ ID NO: 717932 - RNA, 20 nt, Artificial Sequence
  Synthetic
gggagaacaggaaggacaga

SEQ ID NO: 717933 - RNA, 20 nt, Artificial Sequence
  Synthetic
gaucuguauugggggacaga

SEQ ID NO: 717934 - RNA, 20 nt, Artificial Sequence
  Synthetic
gcacguugcuaggugacaga

SEQ ID NO: 717935 - RNA, 20 nt, Artificial Sequence
  Synthetic
guggaacccauggauacaga

SEQ ID NO: 717936 - RNA, 20 nt, Artificial Sequence
  Synthetic
gaaauaaagaaauauacaga

SEQ ID NO: 717937 - RNA, 20 nt, Artificial Sequence
  Synthetic
gcucagcccauggcuacaga

SEQ ID NO: 717938 - RNA, 20 nt, Artificial Sequence
  Synthetic
gcagguaauggaauuacaga

SEQ ID NO: 717939 - RNA, 20 nt, Artificial Sequence
  Synthetic
ggcuaugacucuguuacaga

SEQ ID NO: 717940 - RNA, 20 nt, Artificial Sequence
  Synthetic
gccaagagacauaaaccaga

SEQ ID NO: 717941 - RNA, 20 nt, Artificial Sequence
  Synthetic
gacccaggaagagaaccaga

SEQ ID NO: 717942 - RNA, 20 nt, Artificial Sequence
  Synthetic
gggcuugagaaucacccaga

SEQ ID NO: 717943 - RNA, 20 nt, Artificial Sequence
  Synthetic
gaaagagaaagagacccaga

SEQ ID NO: 717944 - RNA, 20 nt, Artificial Sequence
  Synthetic
gggauuuggagauacccaga

SEQ ID NO: 717945 - RNA, 20 nt, Artificial Sequence
  Synthetic
gucucccaucaccccccaga

SEQ ID NO: 717946 - RNA, 20 nt, Artificial Sequence
  Synthetic
gcgaccccugaagccccaga

SEQ ID NO: 717947 - RNA, 20 nt, Artificial Sequence
  Synthetic
guaugguuucuagccccaga

SEQ ID NO: 717948 - RNA, 20 nt, Artificial Sequence
  Synthetic
gaguuuuuucucugcccaga

SEQ ID NO: 717949 - RNA, 20 nt, Artificial Sequence
  Synthetic
gccuucucguauugcccaga

SEQ ID NO: 717950 - RNA, 20 nt, Artificial Sequence
  Synthetic
gagacagguagacagccaga

SEQ ID NO: 717951 - RNA, 20 nt, Artificial Sequence
  Synthetic
guuucaccguguuggccaga

SEQ ID NO: 717952 - RNA, 20 nt, Artificial Sequence
  Synthetic
gagacccccaagaauccaga

SEQ ID NO: 717953 - RNA, 20 nt, Artificial Sequence
  Synthetic
gaauuaacuacuuauccaga

SEQ ID NO: 717954 - RNA, 20 nt, Artificial Sequence
  Synthetic
guaaacauauaaacuccaga

SEQ ID NO: 717955 - RNA, 20 nt, Artificial Sequence
  Synthetic
guuugcugaacagcuccaga

SEQ ID NO: 717956 - RNA, 20 nt, Artificial Sequence
  Synthetic
gcuuggugaacagcuccaga

SEQ ID NO: 717957 - RNA, 20 nt, Artificial Sequence
  Synthetic
guuacuuacugaauuccaga

SEQ ID NO: 717958 - RNA, 20 nt, Artificial Sequence
  Synthetic
gccuaacucaguuuuccaga

SEQ ID NO: 717959 - RNA, 20 nt, Artificial Sequence
  Synthetic
ggagguggagucccagcaga

SEQ ID NO: 717960 - RNA, 20 nt, Artificial Sequence
  Synthetic
ggauugguuucagcagcaga

SEQ ID NO: 717961 - RNA, 20 nt, Artificial Sequence
  Synthetic
gcacuguuccagagagcaga

SEQ ID NO: 717962 - RNA, 20 nt, Artificial Sequence
  Synthetic
gagauuuaucacauagcaga

SEQ ID NO: 717963 - RNA, 20 nt, Artificial Sequence
  Synthetic
ggaaggacaucccaggcaga

SEQ ID NO: 717964 - RNA, 20 nt, Artificial Sequence
  Synthetic
gcaagaaaagaggaggcaga

SEQ ID NO: 717965 - RNA, 20 nt, Artificial Sequence
  Synthetic
gaugaugcauucuaggcaga

SEQ ID NO: 717966 - RNA, 20 nt, Artificial Sequence
  Synthetic
gguucacugauuggggcaga

SEQ ID NO: 717967 - RNA, 20 nt, Artificial Sequence
  Synthetic
gcuaaauuaggaauggcaga

SEQ ID NO: 717968 - RNA, 20 nt, Artificial Sequence
  Synthetic
ggccucacaaucauggcaga

SEQ ID NO: 717969 - RNA, 20 nt, Artificial Sequence
  Synthetic
gaguuuuugcucauggcaga

SEQ ID NO: 717970 - RNA, 20 nt, Artificial Sequence
  Synthetic
ggccucacaaucuuggcaga

SEQ ID NO: 717971 - RNA, 20 nt, Artificial Sequence
  Synthetic
gauguuuuuaaaaaugcaga

SEQ ID NO: 717972 - RNA, 20 nt, Artificial Sequence
  Synthetic
gccaucagugaaaaugcaga

SEQ ID NO: 717973 - RNA, 20 nt, Artificial Sequence
  Synthetic
gugaaaaaacagaaugcaga

SEQ ID NO: 717974 - RNA, 20 nt, Artificial Sequence
  Synthetic
gacagagauuuccaugcaga

SEQ ID NO: 717975 - RNA, 20 nt, Artificial Sequence
  Synthetic
gaagcaccagcuacugcaga

SEQ ID NO: 717976 - RNA, 20 nt, Artificial Sequence
  Synthetic
gagacaaaaauaucugcaga

SEQ ID NO: 717977 - RNA, 20 nt, Artificial Sequence
  Synthetic
guuaagguugugauugcaga

SEQ ID NO: 717978 - RNA, 20 nt, Artificial Sequence
  Synthetic
guuacagaaacgaaaucaga

SEQ ID NO: 717979 - RNA, 20 nt, Artificial Sequence
  Synthetic
gagaugguccuugcaucaga

SEQ ID NO: 717980 - RNA, 20 nt, Artificial Sequence
  Synthetic
ggugaauuagaguuaucaga

SEQ ID NO: 717981 - RNA, 20 nt, Artificial Sequence
  Synthetic
gagaaaucaagugacucaga

SEQ ID NO: 717982 - RNA, 20 nt, Artificial Sequence
  Synthetic
ggauaacuccagaccucaga

SEQ ID NO: 717983 - RNA, 20 nt, Artificial Sequence
  Synthetic
gggcagaacagaaucucaga

SEQ ID NO: 717984 - RNA, 20 nt, Artificial Sequence
  Synthetic
gaaugagaaguggagucaga

SEQ ID NO: 717985 - RNA, 20 nt, Artificial Sequence
  Synthetic
gagaaucacuaugggucaga

SEQ ID NO: 717986 - RNA, 20 nt, Artificial Sequence
  Synthetic
guagaaagcauggugucaga

SEQ ID NO: 717987 - RNA, 20 nt, Artificial Sequence
  Synthetic
gauaauagcccuuugucaga

SEQ ID NO: 717988 - RNA, 20 nt, Artificial Sequence
  Synthetic
gauauuagcccuuugucaga

SEQ ID NO: 717989 - RNA, 20 nt, Artificial Sequence
  Synthetic
gcaaaguaaaaauauucaga

SEQ ID NO: 717990 - RNA, 20 nt, Artificial Sequence
  Synthetic
gauuuuauggacuauucaga

SEQ ID NO: 717991 - RNA, 20 nt, Artificial Sequence
  Synthetic
guaauuugagaaacuucaga

SEQ ID NO: 717992 - RNA, 20 nt, Artificial Sequence
  Synthetic
guucggaccauugcuucaga

SEQ ID NO: 717993 - RNA, 20 nt, Artificial Sequence
  Synthetic
gcucaggcuguugcuucaga

SEQ ID NO: 717994 - RNA, 20 nt, Artificial Sequence
  Synthetic
ggccucuggacuauuucaga

SEQ ID NO: 717995 - RNA, 20 nt, Artificial Sequence
  Synthetic
gaaaugauaaguguuucaga

SEQ ID NO: 717996 - RNA, 20 nt, Artificial Sequence
  Synthetic
gucauggauggacaaagaga

SEQ ID NO: 717997 - RNA, 20 nt, Artificial Sequence
  Synthetic
guuaguugaacccaaagaga

SEQ ID NO: 717998 - RNA, 20 nt, Artificial Sequence
  Synthetic
gaaugagaaaaaagaagaga

SEQ ID NO: 717999 - RNA, 20 nt, Artificial Sequence
  Synthetic
gagcagagggugagaagaga

SEQ ID NO: 718000 - RNA, 20 nt, Artificial Sequence
  Synthetic
gaauuucaacagcgaagaga

SEQ ID NO: 718001 - RNA, 20 nt, Artificial Sequence
  Synthetic
gggagaugcagaggaagaga

SEQ ID NO: 718002 - RNA, 20 nt, Artificial Sequence
  Synthetic
gagcuggagguaggaagaga

SEQ ID NO: 718003 - RNA, 20 nt, Artificial Sequence
  Synthetic
ggagcaugagaaugaagaga

SEQ ID NO: 718004 - RNA, 20 nt, Artificial Sequence
  Synthetic
gacaccuaaaucugaagaga

SEQ ID NO: 718005 - RNA, 20 nt, Artificial Sequence
  Synthetic
gaauugaaugaccacagaga

SEQ ID NO: 718006 - RNA, 20 nt, Artificial Sequence
  Synthetic
guaucccuauuucacagaga

SEQ ID NO: 718007 - RNA, 20 nt, Artificial Sequence
  Synthetic
gcacaaacaagcgacagaga

SEQ ID NO: 718008 - RNA, 20 nt, Artificial Sequence
  Synthetic
gugagccuauuuuacagaga

SEQ ID NO: 718009 - RNA, 20 nt, Artificial Sequence
  Synthetic
gcagaaguuugcugcagaga

SEQ ID NO: 718010 - RNA, 20 nt, Artificial Sequence
  Synthetic
gaaaacuucacaaucagaga

SEQ ID NO: 718011 - RNA, 20 nt, Artificial Sequence
  Synthetic
gagaaacugagaaucagaga

SEQ ID NO: 718012 - RNA, 20 nt, Artificial Sequence
  Synthetic
ggcagcacggucuucagaga

SEQ ID NO: 718013 - RNA, 20 nt, Artificial Sequence
  Synthetic
gugggaauagacaagagaga

SEQ ID NO: 718014 - RNA, 20 nt, Artificial Sequence
  Synthetic
guaccagaccucaagagaga

SEQ ID NO: 718015 - RNA, 20 nt, Artificial Sequence
  Synthetic
gacucugcaaggaagagaga

SEQ ID NO: 718016 - RNA, 20 nt, Artificial Sequence
  Synthetic
gcacugcaacagcagagaga

SEQ ID NO: 718017 - RNA, 20 nt, Artificial Sequence
  Synthetic
ggucuguguaaagagagaga

SEQ ID NO: 718018 - RNA, 20 nt, Artificial Sequence
  Synthetic
gagcauaaacaagagagaga

SEQ ID NO: 718019 - RNA, 20 nt, Artificial Sequence
  Synthetic
gcacaguuggcagagagaga

SEQ ID NO: 718020 - RNA, 20 nt, Artificial Sequence
  Synthetic
gacagagcaagagagagaga

SEQ ID NO: 718021 - RNA, 20 nt, Artificial Sequence
  Synthetic
gggaaagagagagagagaga

SEQ ID NO: 718022 - RNA, 20 nt, Artificial Sequence
  Synthetic
gagagagagagagagagaga

SEQ ID NO: 718023 - RNA, 20 nt, Artificial Sequence
  Synthetic
gggagagagagagagagaga

SEQ ID NO: 718024 - RNA, 20 nt, Artificial Sequence
  Synthetic
gggaggauagaaaggagaga

SEQ ID NO: 718025 - RNA, 20 nt, Artificial Sequence
  Synthetic
gagacaggaggcaggagaga

SEQ ID NO: 718026 - RNA, 20 nt, Artificial Sequence
  Synthetic
gagagggaggaagggagaga

SEQ ID NO: 718027 - RNA, 20 nt, Artificial Sequence
  Synthetic
gagagagagagagggagaga

SEQ ID NO: 718028 - RNA, 20 nt, Artificial Sequence
  Synthetic
gagagggagagagggagaga

SEQ ID NO: 718029 - RNA, 20 nt, Artificial Sequence
  Synthetic
ggcugggagggagggagaga

SEQ ID NO: 718030 - RNA, 20 nt, Artificial Sequence
  Synthetic
gguggguggguagggagaga

SEQ ID NO: 718031 - RNA, 20 nt, Artificial Sequence
  Synthetic
gaucaaaaaacuuggagaga

SEQ ID NO: 718032 - RNA, 20 nt, Artificial Sequence
  Synthetic
gaaccuuucagaaugagaga

SEQ ID NO: 718033 - RNA, 20 nt, Artificial Sequence
  Synthetic
gugcuuuucugagugagaga

SEQ ID NO: 718034 - RNA, 20 nt, Artificial Sequence
  Synthetic
guaugggguauggugagaga

SEQ ID NO: 718035 - RNA, 20 nt, Artificial Sequence
  Synthetic
ggugcuuuggaguugagaga

SEQ ID NO: 718036 - RNA, 20 nt, Artificial Sequence
  Synthetic
gaauauggaguggauagaga

SEQ ID NO: 718037 - RNA, 20 nt, Artificial Sequence
  Synthetic
gaagauaaaauauauagaga

SEQ ID NO: 718038 - RNA, 20 nt, Artificial Sequence
  Synthetic
gcacuuuuauguuauagaga

SEQ ID NO: 718039 - RNA, 20 nt, Artificial Sequence
  Synthetic
gaugaaugaaagacuagaga

SEQ ID NO: 718040 - RNA, 20 nt, Artificial Sequence
  Synthetic
uuuuguauuuuuaguagaga

SEQ ID NO: 718041 - RNA, 20 nt, Artificial Sequence
  Synthetic
guaaacaguagcauuagaga

SEQ ID NO: 718042 - RNA, 20 nt, Artificial Sequence
  Synthetic
gaugcaguuaaccuuagaga

SEQ ID NO: 718043 - RNA, 20 nt, Artificial Sequence
  Synthetic
gaaaggcaacagagacgaga

SEQ ID NO: 718044 - RNA, 20 nt, Artificial Sequence
  Synthetic
ggcaggagacggagccgaga

SEQ ID NO: 718045 - RNA, 20 nt, Artificial Sequence
  Synthetic
gagguugcagugagccgaga

SEQ ID NO: 718046 - RNA, 20 nt, Artificial Sequence
  Synthetic
gaaugaguuagaaggcgaga

SEQ ID NO: 718047 - RNA, 20 nt, Artificial Sequence
  Synthetic
ggagacucagaagggcgaga

SEQ ID NO: 718048 - RNA, 20 nt, Artificial Sequence
  Synthetic
gagcauaaagaacaaggaga

SEQ ID NO: 718049 - RNA, 20 nt, Artificial Sequence
  Synthetic
gaagaagaagaagaaggaga

SEQ ID NO: 718050 - RNA, 20 nt, Artificial Sequence
  Synthetic
gcguaguaaaaggaaggaga

SEQ ID NO: 718051 - RNA, 20 nt, Artificial Sequence
  Synthetic
gggaagggaagggaaggaga

SEQ ID NO: 718052 - RNA, 20 nt, Artificial Sequence
  Synthetic
gagggagaaugggaaggaga

SEQ ID NO: 718053 - RNA, 20 nt, Artificial Sequence
  Synthetic
ggccaucaaagguaaggaga

SEQ ID NO: 718054 - RNA, 20 nt, Artificial Sequence
  Synthetic
gaaagaaaugcuccaggaga

SEQ ID NO: 718055 - RNA, 20 nt, Artificial Sequence
  Synthetic
ggagauuggagagcaggaga

SEQ ID NO: 718056 - RNA, 20 nt, Artificial Sequence
  Synthetic
gcaagaagagaggcaggaga

SEQ ID NO: 718057 - RNA, 20 nt, Artificial Sequence
  Synthetic
gucccagcugaggcaggaga

SEQ ID NO: 718058 - RNA, 20 nt, Artificial Sequence
  Synthetic
ggaggagaagcggcaggaga

SEQ ID NO: 718059 - RNA, 20 nt, Artificial Sequence
  Synthetic
ggaggaggagcaggaggaga

SEQ ID NO: 718060 - RNA, 20 nt, Artificial Sequence
  Synthetic
gacagauuguuccuaggaga

SEQ ID NO: 718061 - RNA, 20 nt, Artificial Sequence
  Synthetic
gagugacagagacagggaga

SEQ ID NO: 718062 - RNA, 20 nt, Artificial Sequence
  Synthetic
ggugcucugucccagggaga

SEQ ID NO: 718063 - RNA, 20 nt, Artificial Sequence
  Synthetic
ggagguggugcagagggaga

SEQ ID NO: 718064 - RNA, 20 nt, Artificial Sequence
  Synthetic
guaaagcuauucuggggaga

SEQ ID NO: 718065 - RNA, 20 nt, Artificial Sequence
  Synthetic
guuaguacuuggaugggaga

SEQ ID NO: 718066 - RNA, 20 nt, Artificial Sequence
  Synthetic
gagugcuuaucuuugggaga

SEQ ID NO: 718067 - RNA, 20 nt, Artificial Sequence
  Synthetic
gcagagccaugcaauggaga

SEQ ID NO: 718068 - RNA, 20 nt, Artificial Sequence
  Synthetic
gguacagagagaacuggaga

SEQ ID NO: 718069 - RNA, 20 nt, Artificial Sequence
  Synthetic
gcuuuucuucagucuggaga

SEQ ID NO: 718070 - RNA, 20 nt, Artificial Sequence
  Synthetic
gaugagaagaguucuggaga

SEQ ID NO: 718071 - RNA, 20 nt, Artificial Sequence
  Synthetic
gcagaggucacauguggaga

SEQ ID NO: 718072 - RNA, 20 nt, Artificial Sequence
  Synthetic
gugauccuuggaaaaugaga

SEQ ID NO: 718073 - RNA, 20 nt, Artificial Sequence
  Synthetic
gacaucaaugaaacaugaga

SEQ ID NO: 718074 - RNA, 20 nt, Artificial Sequence
  Synthetic
gugccgcaguaaacaugaga

SEQ ID NO: 718075 - RNA, 20 nt, Artificial Sequence
  Synthetic
guaaucauuuaguuaugaga

SEQ ID NO: 718076 - RNA, 20 nt, Artificial Sequence
  Synthetic
guauaugauuguuacugaga

SEQ ID NO: 718077 - RNA, 20 nt, Artificial Sequence
  Synthetic
ggggucaucauuuacugaga

SEQ ID NO: 718078 - RNA, 20 nt, Artificial Sequence
  Synthetic
gucaugacuuauuucugaga

SEQ ID NO: 718079 - RNA, 20 nt, Artificial Sequence
  Synthetic
guccauaugacccagugaga

SEQ ID NO: 718080 - RNA, 20 nt, Artificial Sequence
  Synthetic
guguauaaugagcagugaga

SEQ ID NO: 718081 - RNA, 20 nt, Artificial Sequence
  Synthetic
gaagaagaugcucagugaga

SEQ ID NO: 718082 - RNA, 20 nt, Artificial Sequence
  Synthetic
gaaaucaaaggucagugaga

SEQ ID NO: 718083 - RNA, 20 nt, Artificial Sequence
  Synthetic
gugugucucugcacgugaga

SEQ ID NO: 718084 - RNA, 20 nt, Artificial Sequence
  Synthetic
gaaaagaauucagggugaga

SEQ ID NO: 718085 - RNA, 20 nt, Artificial Sequence
  Synthetic
guguguguuugcaugugaga

SEQ ID NO: 718086 - RNA, 20 nt, Artificial Sequence
  Synthetic
gcauucugacuggugugaga

SEQ ID NO: 718087 - RNA, 20 nt, Artificial Sequence
  Synthetic
guuauuaaucccuugugaga

SEQ ID NO: 718088 - RNA, 20 nt, Artificial Sequence
  Synthetic
gguuaacaaugaaauugaga

SEQ ID NO: 718089 - RNA, 20 nt, Artificial Sequence
  Synthetic
gugcacacauuccauugaga

SEQ ID NO: 718090 - RNA, 20 nt, Artificial Sequence
  Synthetic
gauugacugauucauugaga

SEQ ID NO: 718091 - RNA, 20 nt, Artificial Sequence
  Synthetic
gauuaugauuauuauugaga

SEQ ID NO: 718092 - RNA, 20 nt, Artificial Sequence
  Synthetic
ggucaggaccccacuugaga

SEQ ID NO: 718093 - RNA, 20 nt, Artificial Sequence
  Synthetic
gcauagaccaagccuugaga

SEQ ID NO: 718094 - RNA, 20 nt, Artificial Sequence
  Synthetic
gggauuaacacaucuugaga

SEQ ID NO: 718095 - RNA, 20 nt, Artificial Sequence
  Synthetic
gauauauauauauuuugaga

SEQ ID NO: 718096 - RNA, 20 nt, Artificial Sequence
  Synthetic
ggauuucacuuaaaaauaga

SEQ ID NO: 718097 - RNA, 20 nt, Artificial Sequence
  Synthetic
gauaggauuagacaaauaga

SEQ ID NO: 718098 - RNA, 20 nt, Artificial Sequence
  Synthetic
gauaaauacagggaaauaga

SEQ ID NO: 718099 - RNA, 20 nt, Artificial Sequence
  Synthetic
gaggaggaucccagaauaga

SEQ ID NO: 718100 - RNA, 20 nt, Artificial Sequence
  Synthetic
gcggggccacugcgaauaga

SEQ ID NO: 718101 - RNA, 20 nt, Artificial Sequence
  Synthetic
guccuuugcagggacauaga

SEQ ID NO: 718102 - RNA, 20 nt, Artificial Sequence
  Synthetic
gagugccaacggcagauaga

SEQ ID NO: 718103 - RNA, 20 nt, Artificial Sequence
  Synthetic
gggaugcacagagggauaga

SEQ ID NO: 718104 - RNA, 20 nt, Artificial Sequence
  Synthetic
guaugcauauuggggauaga

SEQ ID NO: 718105 - RNA, 20 nt, Artificial Sequence
  Synthetic
ggauuuaucccugggauaga

SEQ ID NO: 718106 - RNA, 20 nt, Artificial Sequence
  Synthetic
ggaguuaagucaaugauaga

SEQ ID NO: 718107 - RNA, 20 nt, Artificial Sequence
  Synthetic
gauagguuguuuaugauaga

SEQ ID NO: 718108 - RNA, 20 nt, Artificial Sequence
  Synthetic
ggugacuuaaaaaguauaga

SEQ ID NO: 718109 - RNA, 20 nt, Artificial Sequence
  Synthetic
gcaccaacccugagacuaga

SEQ ID NO: 718110 - RNA, 20 nt, Artificial Sequence
  Synthetic
gaauuauauaaauuacuaga

SEQ ID NO: 718111 - RNA, 20 nt, Artificial Sequence
  Synthetic
gaacauaacugcuaccuaga

SEQ ID NO: 718112 - RNA, 20 nt, Artificial Sequence
  Synthetic
ggacuuaauuucugccuaga

SEQ ID NO: 718113 - RNA, 20 nt, Artificial Sequence
  Synthetic
gcauuucucucaguccuaga

SEQ ID NO: 718114 - RNA, 20 nt, Artificial Sequence
  Synthetic
gcuggagacaggaggcuaga

SEQ ID NO: 718115 - RNA, 20 nt, Artificial Sequence
  Synthetic
gcuuucauuuguuggcuaga

SEQ ID NO: 718116 - RNA, 20 nt, Artificial Sequence
  Synthetic
ggagaucauauuagucuaga

SEQ ID NO: 718117 - RNA, 20 nt, Artificial Sequence
  Synthetic
guagauggagagaaaguaga

SEQ ID NO: 718118 - RNA, 20 nt, Artificial Sequence
  Synthetic
gcaguguaggagucaguaga

SEQ ID NO: 718119 - RNA, 20 nt, Artificial Sequence
  Synthetic
gccucagccuccugaguaga

SEQ ID NO: 718120 - RNA, 20 nt, Artificial Sequence
  Synthetic
gaacagguaaagcuaguaga

SEQ ID NO: 718121 - RNA, 20 nt, Artificial Sequence
  Synthetic
gagaucaagagaaagguaga

SEQ ID NO: 718122 - RNA, 20 nt, Artificial Sequence
  Synthetic
gcugaaucaaugcagguaga

SEQ ID NO: 718123 - RNA, 20 nt, Artificial Sequence
  Synthetic
gggcagccuagaaggguaga

SEQ ID NO: 718124 - RNA, 20 nt, Artificial Sequence
  Synthetic
ggaaaugggauauggguaga

SEQ ID NO: 718125 - RNA, 20 nt, Artificial Sequence
  Synthetic
ggaucaaguuagaugguaga

SEQ ID NO: 718126 - RNA, 20 nt, Artificial Sequence
  Synthetic
gccugauggugggugguaga

SEQ ID NO: 718127 - RNA, 20 nt, Artificial Sequence
  Synthetic
gacaucuauuuuuauguaga

SEQ ID NO: 718128 - RNA, 20 nt, Artificial Sequence
  Synthetic
gaauuuucaauagcuguaga

SEQ ID NO: 718129 - RNA, 20 nt, Artificial Sequence
  Synthetic
gacuucaggugacguguaga

SEQ ID NO: 718130 - RNA, 20 nt, Artificial Sequence
  Synthetic
gaacaauaaagucaauuaga

SEQ ID NO: 718131 - RNA, 20 nt, Artificial Sequence
  Synthetic
guuuucaagcccagauuaga

SEQ ID NO: 718132 - RNA, 20 nt, Artificial Sequence
  Synthetic
gagaaaugacugggauuaga

SEQ ID NO: 718133 - RNA, 20 nt, Artificial Sequence
  Synthetic
gaucucauuaacuccuuaga

SEQ ID NO: 718134 - RNA, 20 nt, Artificial Sequence
  Synthetic
gguagaaggaucaaguuaga

SEQ ID NO: 718135 - RNA, 20 nt, Artificial Sequence
  Synthetic
ggagcccagucuaaguuaga

SEQ ID NO: 718136 - RNA, 20 nt, Artificial Sequence
  Synthetic
guucucaugaaugaguuaga

SEQ ID NO: 718137 - RNA, 20 nt, Artificial Sequence
  Synthetic
gggagcuaaggaaauuuaga

SEQ ID NO: 718138 - RNA, 20 nt, Artificial Sequence
  Synthetic
guuuagauaucuaauuuaga

SEQ ID NO: 718139 - RNA, 20 nt, Artificial Sequence
  Synthetic
gcagacuguaaauauuuaga

SEQ ID NO: 718140 - RNA, 20 nt, Artificial Sequence
  Synthetic
guaaauuugacaacuuuaga

SEQ ID NO: 718141 - RNA, 20 nt, Artificial Sequence
  Synthetic
gagaaugagcuuucuuuaga

SEQ ID NO: 718142 - RNA, 20 nt, Artificial Sequence
  Synthetic
ggcuucuacuggcuuuuaga

SEQ ID NO: 718143 - RNA, 20 nt, Artificial Sequence
  Synthetic
gagcauauuuggguuuuaga

SEQ ID NO: 718144 - RNA, 20 nt, Artificial Sequence
  Synthetic
gagugagccaagaaaaacga

SEQ ID NO: 718145 - RNA, 20 nt, Artificial Sequence
  Synthetic
gggaauagcaugguaaacga

SEQ ID NO: 718146 - RNA, 20 nt, Artificial Sequence
  Synthetic
gggcuucaauaacuuaacga

SEQ ID NO: 718147 - RNA, 20 nt, Artificial Sequence
  Synthetic
gggagacaaccuacacacga

SEQ ID NO: 718148 - RNA, 20 nt, Artificial Sequence
  Synthetic
ggcaugaaggacaggcacga

SEQ ID NO: 718149 - RNA, 20 nt, Artificial Sequence
  Synthetic
gagauuuugggcugagacga

SEQ ID NO: 718150 - RNA, 20 nt, Artificial Sequence
  Synthetic
gaguuuuugggcugagacga

SEQ ID NO: 718151 - RNA, 20 nt, Artificial Sequence
  Synthetic
gacacccauauuauagacga

SEQ ID NO: 718152 - RNA, 20 nt, Artificial Sequence
  Synthetic
guuggaaaaauugugcccga

SEQ ID NO: 718153 - RNA, 20 nt, Artificial Sequence
  Synthetic
gacaaguuuucugaggccga

SEQ ID NO: 718154 - RNA, 20 nt, Artificial Sequence
  Synthetic
gguuuugaccaaaaugccga

SEQ ID NO: 718155 - RNA, 20 nt, Artificial Sequence
  Synthetic
ggguagaaaaggggugccga

SEQ ID NO: 718156 - RNA, 20 nt, Artificial Sequence
  Synthetic
ggauggcaguagcaauccga

SEQ ID NO: 718157 - RNA, 20 nt, Artificial Sequence
  Synthetic
guaaucuuggcaagaagcga

SEQ ID NO: 718158 - RNA, 20 nt, Artificial Sequence
  Synthetic
gcaaagaugagcccaggcga

SEQ ID NO: 718159 - RNA, 20 nt, Artificial Sequence
  Synthetic
gagaggugcgugggaggcga

SEQ ID NO: 718160 - RNA, 20 nt, Artificial Sequence
  Synthetic
ggauugcugcuauagggcga

SEQ ID NO: 718161 - RNA, 20 nt, Artificial Sequence
  Synthetic
gucauuauuccaaacugcga

SEQ ID NO: 718162 - RNA, 20 nt, Artificial Sequence
  Synthetic
gggaccacuguuagcugcga

SEQ ID NO: 718163 - RNA, 20 nt, Artificial Sequence
  Synthetic
gcugaguuggaaaagaucga

SEQ ID NO: 718164 - RNA, 20 nt, Artificial Sequence
  Synthetic
guuaucuguggaaggaucga

SEQ ID NO: 718165 - RNA, 20 nt, Artificial Sequence
  Synthetic
gaagaacacaguaagcucga

SEQ ID NO: 718166 - RNA, 20 nt, Artificial Sequence
  Synthetic
gguagaaaaaccaaaaagga

SEQ ID NO: 718167 - RNA, 20 nt, Artificial Sequence
  Synthetic
gaaaaugggcucaaaaagga

SEQ ID NO: 718168 - RNA, 20 nt, Artificial Sequence
  Synthetic
gauagguugcccuaaaagga

SEQ ID NO: 718169 - RNA, 20 nt, Artificial Sequence
  Synthetic
guaaggaccucaccaaagga

SEQ ID NO: 718170 - RNA, 20 nt, Artificial Sequence
  Synthetic
gugucuugguugccaaagga

SEQ ID NO: 718171 - RNA, 20 nt, Artificial Sequence
  Synthetic
guaagucuuugggcaaagga

SEQ ID NO: 718172 - RNA, 20 nt, Artificial Sequence
  Synthetic
guuguauauaagagaaagga

SEQ ID NO: 718173 - RNA, 20 nt, Artificial Sequence
  Synthetic
gaaagaaaggaaggaaagga

SEQ ID NO: 718174 - RNA, 20 nt, Artificial Sequence
  Synthetic
gacacugguuagauaaagga

SEQ ID NO: 718175 - RNA, 20 nt, Artificial Sequence
  Synthetic
ggacacugaaguuuaaagga

SEQ ID NO: 718176 - RNA, 20 nt, Artificial Sequence
  Synthetic
guaugacagcuuuuaaagga

SEQ ID NO: 718177 - RNA, 20 nt, Artificial Sequence
  Synthetic
gcacuuugggaggccaagga

SEQ ID NO: 718178 - RNA, 20 nt, Artificial Sequence
  Synthetic
gugcuuugggaggccaagga

SEQ ID NO: 718179 - RNA, 20 nt, Artificial Sequence
  Synthetic
guacugaauccugccaagga

SEQ ID NO: 718180 - RNA, 20 nt, Artificial Sequence
  Synthetic
gcaauuugauauuccaagga

SEQ ID NO: 718181 - RNA, 20 nt, Artificial Sequence
  Synthetic
ggaaagaaagaaaagaagga

SEQ ID NO: 718182 - RNA, 20 nt, Artificial Sequence
  Synthetic
ggaaaggaaaggaagaagga

SEQ ID NO: 718183 - RNA, 20 nt, Artificial Sequence
  Synthetic
ggacauagagaguagaagga

SEQ ID NO: 718184 - RNA, 20 nt, Artificial Sequence
  Synthetic
gaagacaaagaaaggaagga

SEQ ID NO: 718185 - RNA, 20 nt, Artificial Sequence
  Synthetic
gaaaggaaggaaaggaagga

SEQ ID NO: 718186 - RNA, 20 nt, Artificial Sequence
  Synthetic
gagaccuagccaaggaagga

SEQ ID NO: 718187 - RNA, 20 nt, Artificial Sequence
  Synthetic
ggaaggaaaggaaggaagga

SEQ ID NO: 718188 - RNA, 20 nt, Artificial Sequence
  Synthetic
ggaaaggaaggaaggaagga

SEQ ID NO: 718189 - RNA, 20 nt, Artificial Sequence
  Synthetic
ggaggaaagaaagggaagga

SEQ ID NO: 718190 - RNA, 20 nt, Artificial Sequence
  Synthetic
gccaggcaguaagggaagga

SEQ ID NO: 718191 - RNA, 20 nt, Artificial Sequence
  Synthetic
gaaagagagugagggaagga

SEQ ID NO: 718192 - RNA, 20 nt, Artificial Sequence
  Synthetic
ggagauagaggguggaagga

SEQ ID NO: 718193 - RNA, 20 nt, Artificial Sequence
  Synthetic
ggggccugccuguggaagga

SEQ ID NO: 718194 - RNA, 20 nt, Artificial Sequence
  Synthetic
gauguaagcaccaugaagga

SEQ ID NO: 718195 - RNA, 20 nt, Artificial Sequence
  Synthetic
gcauaagaggaaaauaagga

SEQ ID NO: 718196 - RNA, 20 nt, Artificial Sequence
  Synthetic
gagauaaaaagaaauaagga

SEQ ID NO: 718197 - RNA, 20 nt, Artificial Sequence
  Synthetic
gcucgaaggaagcauaagga

SEQ ID NO: 718198 - RNA, 20 nt, Artificial Sequence
  Synthetic
gugguucuaacauguaagga

SEQ ID NO: 718199 - RNA, 20 nt, Artificial Sequence
  Synthetic
gagacugaaaaaauuaagga

SEQ ID NO: 718200 - RNA, 20 nt, Artificial Sequence
  Synthetic
gaaaauucagacuuuaagga

SEQ ID NO: 718201 - RNA, 20 nt, Artificial Sequence
  Synthetic
guugcacaguauuuuaagga

SEQ ID NO: 718202 - RNA, 20 nt, Artificial Sequence
  Synthetic
ggaggguagaaagaacagga

SEQ ID NO: 718203 - RNA, 20 nt, Artificial Sequence
  Synthetic
gaacagaguuacacacagga

SEQ ID NO: 718204 - RNA, 20 nt, Artificial Sequence
  Synthetic
gagaacacauggacacagga

SEQ ID NO: 718205 - RNA, 20 nt, Artificial Sequence
  Synthetic
gagaucacauggacacagga

SEQ ID NO: 718206 - RNA, 20 nt, Artificial Sequence
  Synthetic
guuggggaaccuacacagga

SEQ ID NO: 718207 - RNA, 20 nt, Artificial Sequence
  Synthetic
ggguuuuuauaggcacagga

SEQ ID NO: 718208 - RNA, 20 nt, Artificial Sequence
  Synthetic
gacaucucaggugcacagga

SEQ ID NO: 718209 - RNA, 20 nt, Artificial Sequence
  Synthetic
gagaacacauggucacagga

SEQ ID NO: 718210 - RNA, 20 nt, Artificial Sequence
  Synthetic
guaaacagaagccaccagga

SEQ ID NO: 718211 - RNA, 20 nt, Artificial Sequence
  Synthetic
gucccaaaaacagaccagga

SEQ ID NO: 718212 - RNA, 20 nt, Artificial Sequence
  Synthetic
gagccacaugcgucccagga

SEQ ID NO: 718213 - RNA, 20 nt, Artificial Sequence
  Synthetic
gccugugaaagcagccagga

SEQ ID NO: 718214 - RNA, 20 nt, Artificial Sequence
  Synthetic
guuucaccuuguggccagga

SEQ ID NO: 718215 - RNA, 20 nt, Artificial Sequence
  Synthetic
gaagaaagaagaugccagga

SEQ ID NO: 718216 - RNA, 20 nt, Artificial Sequence
  Synthetic
ggugcucugaguugccagga

SEQ ID NO: 718217 - RNA, 20 nt, Artificial Sequence
  Synthetic
ggaugugggcuacuccagga

SEQ ID NO: 718218 - RNA, 20 nt, Artificial Sequence
  Synthetic
gcuaagugaguuguccagga

SEQ ID NO: 718219 - RNA, 20 nt, Artificial Sequence
  Synthetic
gagaacaccuggacgcagga

SEQ ID NO: 718220 - RNA, 20 nt, Artificial Sequence
  Synthetic
gacaaggcaggaaggcagga

SEQ ID NO: 718221 - RNA, 20 nt, Artificial Sequence
  Synthetic
gcuggagugcaguggcagga

SEQ ID NO: 718222 - RNA, 20 nt, Artificial Sequence
  Synthetic
gaguuccucacagugcagga

SEQ ID NO: 718223 - RNA, 20 nt, Artificial Sequence
  Synthetic
gaauccuuuguagugcagga

SEQ ID NO: 718224 - RNA, 20 nt, Artificial Sequence
  Synthetic
gcugugguaagguugcagga

SEQ ID NO: 718225 - RNA, 20 nt, Artificial Sequence
  Synthetic
gagaagagaggaaaucagga

SEQ ID NO: 718226 - RNA, 20 nt, Artificial Sequence
  Synthetic
gaaaguacuagauaucagga

SEQ ID NO: 718227 - RNA, 20 nt, Artificial Sequence
  Synthetic
gaaguggaaccagcucagga

SEQ ID NO: 718228 - RNA, 20 nt, Artificial Sequence
  Synthetic
gugaagaaacagauucagga

SEQ ID NO: 718229 - RNA, 20 nt, Artificial Sequence
  Synthetic
gggcacuugguuuuucagga

SEQ ID NO: 718230 - RNA, 20 nt, Artificial Sequence
  Synthetic
gcagcaaaggaaaaagagga

SEQ ID NO: 718231 - RNA, 20 nt, Artificial Sequence
  Synthetic
ggcaaguuuaaagaagagga

SEQ ID NO: 718232 - RNA, 20 nt, Artificial Sequence
  Synthetic
gggaugaagcuuccagagga

SEQ ID NO: 718233 - RNA, 20 nt, Artificial Sequence
  Synthetic
gcggagggaggaagagagga

SEQ ID NO: 718234 - RNA, 20 nt, Artificial Sequence
  Synthetic
gaggagguggagggagagga

SEQ ID NO: 718235 - RNA, 20 nt, Artificial Sequence
  Synthetic
guaaaaucaaguggagagga

SEQ ID NO: 718236 - RNA, 20 nt, Artificial Sequence
  Synthetic
gaaguaaaccugauagagga

SEQ ID NO: 718237 - RNA, 20 nt, Artificial Sequence
  Synthetic
gcacuuugggaggccgagga

SEQ ID NO: 718238 - RNA, 20 nt, Artificial Sequence
  Synthetic
gagacuucccacaaggagga

SEQ ID NO: 718239 - RNA, 20 nt, Artificial Sequence
  Synthetic
gggaggggugugaaggagga

SEQ ID NO: 718240 - RNA, 20 nt, Artificial Sequence
  Synthetic
gaaggcacccagcaggagga

SEQ ID NO: 718241 - RNA, 20 nt, Artificial Sequence
  Synthetic
ggggacuacuagagggagga

SEQ ID NO: 718242 - RNA, 20 nt, Artificial Sequence
  Synthetic
gacuacuagaagggggagga

SEQ ID NO: 718243 - RNA, 20 nt, Artificial Sequence
  Synthetic
gaguggggagggugggagga

SEQ ID NO: 718244 - RNA, 20 nt, Artificial Sequence
  Synthetic
gguaaugauuauugggagga

SEQ ID NO: 718245 - RNA, 20 nt, Artificial Sequence
  Synthetic
gguugcuaagggcuggagga

SEQ ID NO: 718246 - RNA, 20 nt, Artificial Sequence
  Synthetic
gggcaggaaugaguggagga

SEQ ID NO: 718247 - RNA, 20 nt, Artificial Sequence
  Synthetic
guauaauccuggacugagga

SEQ ID NO: 718248 - RNA, 20 nt, Artificial Sequence
  Synthetic
gaaggaugguuaccugagga

SEQ ID NO: 718249 - RNA, 20 nt, Artificial Sequence
  Synthetic
gugcuuugggaagcugagga

SEQ ID NO: 718250 - RNA, 20 nt, Artificial Sequence
  Synthetic
guacuuugggaggcugagga

SEQ ID NO: 718251 - RNA, 20 nt, Artificial Sequence
  Synthetic
ggcucuugccucagugagga

SEQ ID NO: 718252 - RNA, 20 nt, Artificial Sequence
  Synthetic
gucuuggaguguagugagga

SEQ ID NO: 718253 - RNA, 20 nt, Artificial Sequence
  Synthetic
gaccuuuggucuugugagga

SEQ ID NO: 718254 - RNA, 20 nt, Artificial Sequence
  Synthetic
gcgaugauguuguuugagga

SEQ ID NO: 718255 - RNA, 20 nt, Artificial Sequence
  Synthetic
gguuagucagaaaaauagga

SEQ ID NO: 718256 - RNA, 20 nt, Artificial Sequence
  Synthetic
gaaauuagcuucagauagga

SEQ ID NO: 718257 - RNA, 20 nt, Artificial Sequence
  Synthetic
ggagaaggagaacgauagga

SEQ ID NO: 718258 - RNA, 20 nt, Artificial Sequence
  Synthetic
gaguaacagaagugauagga

SEQ ID NO: 718259 - RNA, 20 nt, Artificial Sequence
  Synthetic
guauagaaaagcaacuagga

SEQ ID NO: 718260 - RNA, 20 nt, Artificial Sequence
  Synthetic
guacuuuuuacccacuagga

SEQ ID NO: 718261 - RNA, 20 nt, Artificial Sequence
  Synthetic
guuguuuucaaauaguagga

SEQ ID NO: 718262 - RNA, 20 nt, Artificial Sequence
  Synthetic
ggaauuaggcauggguagga

SEQ ID NO: 718263 - RNA, 20 nt, Artificial Sequence
  Synthetic
gaguuaccaugaaauuagga

SEQ ID NO: 718264 - RNA, 20 nt, Artificial Sequence
  Synthetic
gaagucugcucacauuagga

SEQ ID NO: 718265 - RNA, 20 nt, Artificial Sequence
  Synthetic
gcucuagaaguccauuagga

SEQ ID NO: 718266 - RNA, 20 nt, Artificial Sequence
  Synthetic
gugccacucacaacuuagga

SEQ ID NO: 718267 - RNA, 20 nt, Artificial Sequence
  Synthetic
ggugaguagaaagaaacgga

SEQ ID NO: 718268 - RNA, 20 nt, Artificial Sequence
  Synthetic
guagugguggggguuacgga

SEQ ID NO: 718269 - RNA, 20 nt, Artificial Sequence
  Synthetic
gaauuccccuugcccccgga

SEQ ID NO: 718270 - RNA, 20 nt, Artificial Sequence
  Synthetic
ggaaguggggaagaagcgga

SEQ ID NO: 718271 - RNA, 20 nt, Artificial Sequence
  Synthetic
guccagaggcuacuagcgga

SEQ ID NO: 718272 - RNA, 20 nt, Artificial Sequence
  Synthetic
ggcuaggaaggagaggcgga

SEQ ID NO: 718273 - RNA, 20 nt, Artificial Sequence
  Synthetic
gaggguggagguugggcgga

SEQ ID NO: 718274 - RNA, 20 nt, Artificial Sequence
  Synthetic
guuccuucugagggcucgga

SEQ ID NO: 718275 - RNA, 20 nt, Artificial Sequence
  Synthetic
gaagggaggaaagaaaggga

SEQ ID NO: 718276 - RNA, 20 nt, Artificial Sequence
  Synthetic
gagagggaaagggaaaggga

SEQ ID NO: 718277 - RNA, 20 nt, Artificial Sequence
  Synthetic
ggaagcaggagggaaaggga

SEQ ID NO: 718278 - RNA, 20 nt, Artificial Sequence
  Synthetic
guacacugcugggaaaggga

SEQ ID NO: 718279 - RNA, 20 nt, Artificial Sequence
  Synthetic
gaaacaaguggugaaaggga

SEQ ID NO: 718280 - RNA, 20 nt, Artificial Sequence
  Synthetic
guaaccugggaaucaaggga

SEQ ID NO: 718281 - RNA, 20 nt, Artificial Sequence
  Synthetic
guacuuccuggcucaaggga

SEQ ID NO: 718282 - RNA, 20 nt, Artificial Sequence
  Synthetic
gaaaaagaaaagagaaggga

SEQ ID NO: 718283 - RNA, 20 nt, Artificial Sequence
  Synthetic
gagagaggggagggaaggga

SEQ ID NO: 718284 - RNA, 20 nt, Artificial Sequence
  Synthetic
gaugugugugugggaaggga

SEQ ID NO: 718285 - RNA, 20 nt, Artificial Sequence
  Synthetic
ggaagccaggcaguaaggga

SEQ ID NO: 718286 - RNA, 20 nt, Artificial Sequence
  Synthetic
gagcaaaacuaaagcaggga

SEQ ID NO: 718287 - RNA, 20 nt, Artificial Sequence
  Synthetic
gcccaugacuggcgcaggga

SEQ ID NO: 718288 - RNA, 20 nt, Artificial Sequence
  Synthetic
gaggguggugcacucaggga

SEQ ID NO: 718289 - RNA, 20 nt, Artificial Sequence
  Synthetic
guuccaaggauacucaggga

SEQ ID NO: 718290 - RNA, 20 nt, Artificial Sequence
  Synthetic
ggaaagaagaaagucaggga

SEQ ID NO: 718291 - RNA, 20 nt, Artificial Sequence
  Synthetic
guuuugggagggaagaggga

SEQ ID NO: 718292 - RNA, 20 nt, Artificial Sequence
  Synthetic
gcccaaaguuagcagaggga

SEQ ID NO: 718293 - RNA, 20 nt, Artificial Sequence
  Synthetic
gggauuggggggcagaggga

SEQ ID NO: 718294 - RNA, 20 nt, Artificial Sequence
  Synthetic
gagagagagagagagaggga

SEQ ID NO: 718295 - RNA, 20 nt, Artificial Sequence
  Synthetic
gggaggaagggagagaggga

SEQ ID NO: 718296 - RNA, 20 nt, Artificial Sequence
  Synthetic
gaagagaggcaggagaggga

SEQ ID NO: 718297 - RNA, 20 nt, Artificial Sequence
  Synthetic
guugagagaagggagaggga

SEQ ID NO: 718298 - RNA, 20 nt, Artificial Sequence
  Synthetic
gaggagagugagucgaggga

SEQ ID NO: 718299 - RNA, 20 nt, Artificial Sequence
  Synthetic
gagagugagggaaggaggga

SEQ ID NO: 718300 - RNA, 20 nt, Artificial Sequence
  Synthetic
guagaugugggaaggaggga

SEQ ID NO: 718301 - RNA, 20 nt, Artificial Sequence
  Synthetic
gaauggaaagggaggaggga

SEQ ID NO: 718302 - RNA, 20 nt, Artificial Sequence
  Synthetic
ggagaaugagugaggaggga

SEQ ID NO: 718303 - RNA, 20 nt, Artificial Sequence
  Synthetic
gaaaggaaggaagggaggga

SEQ ID NO: 718304 - RNA, 20 nt, Artificial Sequence
  Synthetic
ggaaggaagggagggaggga

SEQ ID NO: 718305 - RNA, 20 nt, Artificial Sequence
  Synthetic
gaaagucagggagggaggga

SEQ ID NO: 718306 - RNA, 20 nt, Artificial Sequence
  Synthetic
ggaagggagggagggaggga

SEQ ID NO: 718307 - RNA, 20 nt, Artificial Sequence
  Synthetic
guggggggaggggggaggga

SEQ ID NO: 718308 - RNA, 20 nt, Artificial Sequence
  Synthetic
gacuuuuauguauggaggga

SEQ ID NO: 718309 - RNA, 20 nt, Artificial Sequence
  Synthetic
gugguuugagaguggaggga

SEQ ID NO: 718310 - RNA, 20 nt, Artificial Sequence
  Synthetic
guaugguugggguggaggga

SEQ ID NO: 718311 - RNA, 20 nt, Artificial Sequence
  Synthetic
guucccuuucuuaugaggga

SEQ ID NO: 718312 - RNA, 20 nt, Artificial Sequence
  Synthetic
ggaagaaagagagugaggga

SEQ ID NO: 718313 - RNA, 20 nt, Artificial Sequence
  Synthetic
gaaugaaagcaggauaggga

SEQ ID NO: 718314 - RNA, 20 nt, Artificial Sequence
  Synthetic
gagcagcagcgggcuaggga

SEQ ID NO: 718315 - RNA, 20 nt, Artificial Sequence
  Synthetic
guauuguauuuauuuaggga

SEQ ID NO: 718316 - RNA, 20 nt, Artificial Sequence
  Synthetic
gaggaucaacagauacggga

SEQ ID NO: 718317 - RNA, 20 nt, Artificial Sequence
  Synthetic
gcgguugcugaaggucggga

SEQ ID NO: 718318 - RNA, 20 nt, Artificial Sequence
  Synthetic
ggaaagcaggaaaaagggga

SEQ ID NO: 718319 - RNA, 20 nt, Artificial Sequence
  Synthetic
gcggguggggggcaagggga

SEQ ID NO: 718320 - RNA, 20 nt, Artificial Sequence
  Synthetic
ggggagggaagggaagggga

SEQ ID NO: 718321 - RNA, 20 nt, Artificial Sequence
  Synthetic
ggggagaagggggaagggga

SEQ ID NO: 718322 - RNA, 20 nt, Artificial Sequence
  Synthetic
ggccugaaaggcuaagggga

SEQ ID NO: 718323 - RNA, 20 nt, Artificial Sequence
  Synthetic
ggccaggcauuaacagggga

SEQ ID NO: 718324 - RNA, 20 nt, Artificial Sequence
  Synthetic
gaaaggaauauaucagggga

SEQ ID NO: 718325 - RNA, 20 nt, Artificial Sequence
  Synthetic
gaaauacucaagucagggga

SEQ ID NO: 718326 - RNA, 20 nt, Artificial Sequence
  Synthetic
gaguguuauuaaagagggga

SEQ ID NO: 718327 - RNA, 20 nt, Artificial Sequence
  Synthetic
gggaagggaaggagagggga

SEQ ID NO: 718328 - RNA, 20 nt, Artificial Sequence
  Synthetic
gggaagggaaggggagggga

SEQ ID NO: 718329 - RNA, 20 nt, Artificial Sequence
  Synthetic
gggaaggggaggggagggga

SEQ ID NO: 718330 - RNA, 20 nt, Artificial Sequence
  Synthetic
ggggaggggaggggagggga

SEQ ID NO: 718331 - RNA, 20 nt, Artificial Sequence
  Synthetic
ggagaguagauuggagggga

SEQ ID NO: 718332 - RNA, 20 nt, Artificial Sequence
  Synthetic
gauauagcuaugugagggga

SEQ ID NO: 718333 - RNA, 20 nt, Artificial Sequence
  Synthetic
ggggguggggggcuagggga

SEQ ID NO: 718334 - RNA, 20 nt, Artificial Sequence
  Synthetic
ggcuucuguuggcuagggga

SEQ ID NO: 718335 - RNA, 20 nt, Artificial Sequence
  Synthetic
ggaggcuccgggguagggga

SEQ ID NO: 718336 - RNA, 20 nt, Artificial Sequence
  Synthetic
ggggaugggggguuagggga

SEQ ID NO: 718337 - RNA, 20 nt, Artificial Sequence
  Synthetic
gggacagagcaccacgggga

SEQ ID NO: 718338 - RNA, 20 nt, Artificial Sequence
  Synthetic
gauaguggaggagucgggga

SEQ ID NO: 718339 - RNA, 20 nt, Artificial Sequence
  Synthetic
gcuucaggggagaaggggga

SEQ ID NO: 718340 - RNA, 20 nt, Artificial Sequence
  Synthetic
gggaggggugugaaggggga

SEQ ID NO: 718341 - RNA, 20 nt, Artificial Sequence
  Synthetic
ggguuggucagguaggggga

SEQ ID NO: 718342 - RNA, 20 nt, Artificial Sequence
  Synthetic
gguagggggaaaggggggga

SEQ ID NO: 718343 - RNA, 20 nt, Artificial Sequence
  Synthetic
gggguggggggaggggggga

SEQ ID NO: 718344 - RNA, 20 nt, Artificial Sequence
  Synthetic
gaacacauggagauggggga

SEQ ID NO: 718345 - RNA, 20 nt, Artificial Sequence
  Synthetic
gacuguugugggguggggga

SEQ ID NO: 718346 - RNA, 20 nt, Artificial Sequence
  Synthetic
gcaaaaaaaaauguggggga

SEQ ID NO: 718347 - RNA, 20 nt, Artificial Sequence
  Synthetic
gguuaccuugauuaugggga

SEQ ID NO: 718348 - RNA, 20 nt, Artificial Sequence
  Synthetic
gugggguggggggcugggga

SEQ ID NO: 718349 - RNA, 20 nt, Artificial Sequence
  Synthetic
gcagauuuggugucugggga

SEQ ID NO: 718350 - RNA, 20 nt, Artificial Sequence
  Synthetic
gcacacuaaccaagugggga

SEQ ID NO: 718351 - RNA, 20 nt, Artificial Sequence
  Synthetic
gaggacuacuagagugggga

SEQ ID NO: 718352 - RNA, 20 nt, Artificial Sequence
  Synthetic
gaagccuacuggagugggga

SEQ ID NO: 718353 - RNA, 20 nt, Artificial Sequence
  Synthetic
guuggaaucaggguugggga

SEQ ID NO: 718354 - RNA, 20 nt, Artificial Sequence
  Synthetic
guauauacccaguaauggga

SEQ ID NO: 718355 - RNA, 20 nt, Artificial Sequence
  Synthetic
gacagaaauggaacauggga

SEQ ID NO: 718356 - RNA, 20 nt, Artificial Sequence
  Synthetic
gaggaaugguggugauggga

SEQ ID NO: 718357 - RNA, 20 nt, Artificial Sequence
  Synthetic
gaaucaagagaaauauggga

SEQ ID NO: 718358 - RNA, 20 nt, Artificial Sequence
  Synthetic
ggagaggcucauaacuggga

SEQ ID NO: 718359 - RNA, 20 nt, Artificial Sequence
  Synthetic
gauagugucauucacuggga

SEQ ID NO: 718360 - RNA, 20 nt, Artificial Sequence
  Synthetic
guuaaaaauuaauacuggga

SEQ ID NO: 718361 - RNA, 20 nt, Artificial Sequence
  Synthetic
gaucccucucagcccuggga

SEQ ID NO: 718362 - RNA, 20 nt, Artificial Sequence
  Synthetic
ggaauuagcuagcccuggga

SEQ ID NO: 718363 - RNA, 20 nt, Artificial Sequence
  Synthetic
guaguugccagaggcuggga

SEQ ID NO: 718364 - RNA, 20 nt, Artificial Sequence
  Synthetic
gugguuaccugaugcuggga

SEQ ID NO: 718365 - RNA, 20 nt, Artificial Sequence
  Synthetic
gucuguaaaauuaucuggga

SEQ ID NO: 718366 - RNA, 20 nt, Artificial Sequence
  Synthetic
gauagaaaagaaaaguggga

SEQ ID NO: 718367 - RNA, 20 nt, Artificial Sequence
  Synthetic
gaaaguggcucucaguggga

SEQ ID NO: 718368 - RNA, 20 nt, Artificial Sequence
  Synthetic
gugguugagaaagaguggga

SEQ ID NO: 718369 - RNA, 20 nt, Artificial Sequence
  Synthetic
ggaacuucuuagggguggga

SEQ ID NO: 718370 - RNA, 20 nt, Artificial Sequence
  Synthetic
gcggacuaguagauguggga

SEQ ID NO: 718371 - RNA, 20 nt, Artificial Sequence
  Synthetic
ggauucuucggguuguggga

SEQ ID NO: 718372 - RNA, 20 nt, Artificial Sequence
  Synthetic
uuccugguuuagucuuggga

SEQ ID NO: 718373 - RNA, 20 nt, Artificial Sequence
  Synthetic
gcagaagaaaaauaaaugga

SEQ ID NO: 718374 - RNA, 20 nt, Artificial Sequence
  Synthetic
ggcaauuuauaaagaaugga

SEQ ID NO: 718375 - RNA, 20 nt, Artificial Sequence
  Synthetic
gucauuugcaacaacaugga

SEQ ID NO: 718376 - RNA, 20 nt, Artificial Sequence
  Synthetic
gucauuugucccaacaugga

SEQ ID NO: 718377 - RNA, 20 nt, Artificial Sequence
  Synthetic
guucuuugcagcaacaugga

SEQ ID NO: 718378 - RNA, 20 nt, Artificial Sequence
  Synthetic
gucuuuugcagcaacaugga

SEQ ID NO: 718379 - RNA, 20 nt, Artificial Sequence
  Synthetic
guccuuugcagcgacaugga

SEQ ID NO: 718380 - RNA, 20 nt, Artificial Sequence
  Synthetic
gcaucugagcagggcaugga

SEQ ID NO: 718381 - RNA, 20 nt, Artificial Sequence
  Synthetic
gggggaacuggcugcaugga

SEQ ID NO: 718382 - RNA, 20 nt, Artificial Sequence
  Synthetic
gauucuucagagaucaugga

SEQ ID NO: 718383 - RNA, 20 nt, Artificial Sequence
  Synthetic
guauuuggucauuucaugga

SEQ ID NO: 718384 - RNA, 20 nt, Artificial Sequence
  Synthetic
guauuuuuaguagagaugga

SEQ ID NO: 718385 - RNA, 20 nt, Artificial Sequence
  Synthetic
gaaguaacugaguggaugga

SEQ ID NO: 718386 - RNA, 20 nt, Artificial Sequence
  Synthetic
gacaaaugaaggcugaugga

SEQ ID NO: 718387 - RNA, 20 nt, Artificial Sequence
  Synthetic
gcaguaagaagaaauaugga

SEQ ID NO: 718388 - RNA, 20 nt, Artificial Sequence
  Synthetic
gcaauaugaaacaauaugga

SEQ ID NO: 718389 - RNA, 20 nt, Artificial Sequence
  Synthetic
gggauacagaggcauaugga

SEQ ID NO: 718390 - RNA, 20 nt, Artificial Sequence
  Synthetic
guagaacuuaggcauaugga

SEQ ID NO: 718391 - RNA, 20 nt, Artificial Sequence
  Synthetic
gugugacuauaggauaugga

SEQ ID NO: 718392 - RNA, 20 nt, Artificial Sequence
  Synthetic
gaaucugggguuucuaugga

SEQ ID NO: 718393 - RNA, 20 nt, Artificial Sequence
  Synthetic
gacguuguuuucuuuaugga

SEQ ID NO: 718394 - RNA, 20 nt, Artificial Sequence
  Synthetic
ggaugcuacuauuuuaugga

SEQ ID NO: 718395 - RNA, 20 nt, Artificial Sequence
  Synthetic
gagaauuacuugaaacugga

SEQ ID NO: 718396 - RNA, 20 nt, Artificial Sequence
  Synthetic
gcucucaacuccucacugga

SEQ ID NO: 718397 - RNA, 20 nt, Artificial Sequence
  Synthetic
ggggcugggaauugacugga

SEQ ID NO: 718398 - RNA, 20 nt, Artificial Sequence
  Synthetic
ggugcccuuacuauacugga

SEQ ID NO: 718399 - RNA, 20 nt, Artificial Sequence
  Synthetic
gugaaaugaaacuuacugga

SEQ ID NO: 718400 - RNA, 20 nt, Artificial Sequence
  Synthetic
gaacauauuugcuaccugga

SEQ ID NO: 718401 - RNA, 20 nt, Artificial Sequence
  Synthetic
gccaccgcaccugcccugga

SEQ ID NO: 718402 - RNA, 20 nt, Artificial Sequence
  Synthetic
gaggaucaccugagccugga

SEQ ID NO: 718403 - RNA, 20 nt, Artificial Sequence
  Synthetic
ggcugccucugggagcugga

SEQ ID NO: 718404 - RNA, 20 nt, Artificial Sequence
  Synthetic
gcucuguugcccaggcugga

SEQ ID NO: 718405 - RNA, 20 nt, Artificial Sequence
  Synthetic
gcucugucauucuggcugga

SEQ ID NO: 718406 - RNA, 20 nt, Artificial Sequence
  Synthetic
gggcugguuagccugcugga

SEQ ID NO: 718407 - RNA, 20 nt, Artificial Sequence
  Synthetic
ggcucccuugggaaucugga

SEQ ID NO: 718408 - RNA, 20 nt, Artificial Sequence
  Synthetic
ggaaauaaaguacaucugga

SEQ ID NO: 718409 - RNA, 20 nt, Artificial Sequence
  Synthetic
gguacuauucucauucugga

SEQ ID NO: 718410 - RNA, 20 nt, Artificial Sequence
  Synthetic
gaggguggaacacaagugga

SEQ ID NO: 718411 - RNA, 20 nt, Artificial Sequence
  Synthetic
ggaacaaugguguaagugga

SEQ ID NO: 718412 - RNA, 20 nt, Artificial Sequence
  Synthetic
ggcugcugccugagagugga

SEQ ID NO: 718413 - RNA, 20 nt, Artificial Sequence
  Synthetic
gagagaaguaacugagugga

SEQ ID NO: 718414 - RNA, 20 nt, Artificial Sequence
  Synthetic
gagaaucacuugaacgugga

SEQ ID NO: 718415 - RNA, 20 nt, Artificial Sequence
  Synthetic
gcacuuugggaggccgugga

SEQ ID NO: 718416 - RNA, 20 nt, Artificial Sequence
  Synthetic
gggaggcugaggugggugga

SEQ ID NO: 718417 - RNA, 20 nt, Artificial Sequence
  Synthetic
ggccucacaaucauggugga

SEQ ID NO: 718418 - RNA, 20 nt, Artificial Sequence
  Synthetic
gagcuuuuacucauggugga

SEQ ID NO: 718419 - RNA, 20 nt, Artificial Sequence
  Synthetic
gauuuagggcaucuggugga

SEQ ID NO: 718420 - RNA, 20 nt, Artificial Sequence
  Synthetic
ggcugacuggcaaaugugga

SEQ ID NO: 718421 - RNA, 20 nt, Artificial Sequence
  Synthetic
gcaucucauugucaugugga

SEQ ID NO: 718422 - RNA, 20 nt, Artificial Sequence
  Synthetic
gcugauaauaaauaugugga

SEQ ID NO: 718423 - RNA, 20 nt, Artificial Sequence
  Synthetic
gaaacagaaaauacugugga

SEQ ID NO: 718424 - RNA, 20 nt, Artificial Sequence
  Synthetic
gccaggggccugccugugga

SEQ ID NO: 718425 - RNA, 20 nt, Artificial Sequence
  Synthetic
gugaguguccagauugugga

SEQ ID NO: 718426 - RNA, 20 nt, Artificial Sequence
  Synthetic
gaguaauucuugguugugga

SEQ ID NO: 718427 - RNA, 20 nt, Artificial Sequence
  Synthetic
gcuaguaaggaauuugugga

SEQ ID NO: 718428 - RNA, 20 nt, Artificial Sequence
  Synthetic
gaacuuccuagagaauugga

SEQ ID NO: 718429 - RNA, 20 nt, Artificial Sequence
  Synthetic
gagagcagaagggcauugga

SEQ ID NO: 718430 - RNA, 20 nt, Artificial Sequence
  Synthetic
gaacaugucuucucauugga

SEQ ID NO: 718431 - RNA, 20 nt, Artificial Sequence
  Synthetic
gugagguaggugagauugga

SEQ ID NO: 718432 - RNA, 20 nt, Artificial Sequence
  Synthetic
ggggugggggugagauugga

SEQ ID NO: 718433 - RNA, 20 nt, Artificial Sequence
  Synthetic
guagcugguaaagacuugga

SEQ ID NO: 718434 - RNA, 20 nt, Artificial Sequence
  Synthetic
ggaagacacuggagcuugga

SEQ ID NO: 718435 - RNA, 20 nt, Artificial Sequence
  Synthetic
gucauuugcaacaucuugga

SEQ ID NO: 718436 - RNA, 20 nt, Artificial Sequence
  Synthetic
gacuuucuuuagcaguugga

SEQ ID NO: 718437 - RNA, 20 nt, Artificial Sequence
  Synthetic
gagauucugauuuaguugga

SEQ ID NO: 718438 - RNA, 20 nt, Artificial Sequence
  Synthetic
gccuaucuucccauguugga

SEQ ID NO: 718439 - RNA, 20 nt, Artificial Sequence
  Synthetic
gaaucuaaguuguauuugga

SEQ ID NO: 718440 - RNA, 20 nt, Artificial Sequence
  Synthetic
gguaccucugaaauuuugga

SEQ ID NO: 718441 - RNA, 20 nt, Artificial Sequence
  Synthetic
guccuucgcccacuuuugga

SEQ ID NO: 718442 - RNA, 20 nt, Artificial Sequence
  Synthetic
ggaaucuuugcacuuuugga

SEQ ID NO: 718443 - RNA, 20 nt, Artificial Sequence
  Synthetic
ggugccuauugauuuuugga

SEQ ID NO: 718444 - RNA, 20 nt, Artificial Sequence
  Synthetic
ggauucuggguauuuuugga

SEQ ID NO: 718445 - RNA, 20 nt, Artificial Sequence
  Synthetic
gaagaagaaagaaaaaauga

SEQ ID NO: 718446 - RNA, 20 nt, Artificial Sequence
  Synthetic
guugaucuucugaaaaauga

SEQ ID NO: 718447 - RNA, 20 nt, Artificial Sequence
  Synthetic
ggagaaauuagccaaaauga

SEQ ID NO: 718448 - RNA, 20 nt, Artificial Sequence
  Synthetic
gguugugggaaggaaaauga

SEQ ID NO: 718449 - RNA, 20 nt, Artificial Sequence
  Synthetic
gaagaguccugggaaaauga

SEQ ID NO: 718450 - RNA, 20 nt, Artificial Sequence
  Synthetic
ggcaugccaugugaaaauga

SEQ ID NO: 718451 - RNA, 20 nt, Artificial Sequence
  Synthetic
gaaaaaaucaaauaaaauga

SEQ ID NO: 718452 - RNA, 20 nt, Artificial Sequence
  Synthetic
guaaaugcagaaacaaauga

SEQ ID NO: 718453 - RNA, 20 nt, Artificial Sequence
  Synthetic
gcaacuauaaauucaaauga

SEQ ID NO: 718454 - RNA, 20 nt, Artificial Sequence
  Synthetic
ggaaguuacacaagaaauga

SEQ ID NO: 718455 - RNA, 20 nt, Artificial Sequence
  Synthetic
gguaaauuggauugaaauga

SEQ ID NO: 718456 - RNA, 20 nt, Artificial Sequence
  Synthetic
gauucaccaaguugaaauga

SEQ ID NO: 718457 - RNA, 20 nt, Artificial Sequence
  Synthetic
guuguugagugaauaaauga

SEQ ID NO: 718458 - RNA, 20 nt, Artificial Sequence
  Synthetic
gaauauauauuuauaaauga

SEQ ID NO: 718459 - RNA, 20 nt, Artificial Sequence
  Synthetic
ggggcuuaaaaccuaaauga

SEQ ID NO: 718460 - RNA, 20 nt, Artificial Sequence
  Synthetic
gaggacaugugauacaauga

SEQ ID NO: 718461 - RNA, 20 nt, Artificial Sequence
  Synthetic
gaugggaggagccgcaauga

SEQ ID NO: 718462 - RNA, 20 nt, Artificial Sequence
  Synthetic
gaacagaugacuggcaauga

SEQ ID NO: 718463 - RNA, 20 nt, Artificial Sequence
  Synthetic
gaauuacuuaaaugcaauga

SEQ ID NO: 718464 - RNA, 20 nt, Artificial Sequence
  Synthetic
gaaugccuuuauaagaauga

SEQ ID NO: 718465 - RNA, 20 nt, Artificial Sequence
  Synthetic
gagcaauuugaacagaauga

SEQ ID NO: 718466 - RNA, 20 nt, Artificial Sequence
  Synthetic
gcaggaauucugcagaauga

SEQ ID NO: 718467 - RNA, 20 nt, Artificial Sequence
  Synthetic
cgauaguuuacugagaauga

SEQ ID NO: 718468 - RNA, 20 nt, Artificial Sequence
  Synthetic
gcuaaggauucccugaauga

SEQ ID NO: 718469 - RNA, 20 nt, Artificial Sequence
  Synthetic
ggcugaggcaccuauaauga

SEQ ID NO: 718470 - RNA, 20 nt, Artificial Sequence
  Synthetic
gauaauaaugaguuuaauga

SEQ ID NO: 718471 - RNA, 20 nt, Artificial Sequence
  Synthetic
ggguaagcagaaacacauga

SEQ ID NO: 718472 - RNA, 20 nt, Artificial Sequence
  Synthetic
ggaagagaaguaggacauga

SEQ ID NO: 718473 - RNA, 20 nt, Artificial Sequence
  Synthetic
ggaaaagcugaacaccauga

SEQ ID NO: 718474 - RNA, 20 nt, Artificial Sequence
  Synthetic
gaaacugaaacaugccauga

SEQ ID NO: 718475 - RNA, 20 nt, Artificial Sequence
  Synthetic
guugugucaugauuccauga

SEQ ID NO: 718476 - RNA, 20 nt, Artificial Sequence
  Synthetic
gcugauguucuagagcauga

SEQ ID NO: 718477 - RNA, 20 nt, Artificial Sequence
  Synthetic
ggcuugaaacaugagcauga

SEQ ID NO: 718478 - RNA, 20 nt, Artificial Sequence
  Synthetic
guaauuuguaccuugcauga

SEQ ID NO: 718479 - RNA, 20 nt, Artificial Sequence
  Synthetic
guaagagaaaagaaucauga

SEQ ID NO: 718480 - RNA, 20 nt, Artificial Sequence
  Synthetic
gcaugaaaaaauuaucauga

SEQ ID NO: 718481 - RNA, 20 nt, Artificial Sequence
  Synthetic
gaacuguaauuuuaucauga

SEQ ID NO: 718482 - RNA, 20 nt, Artificial Sequence
  Synthetic
ggcauauuauucucucauga

SEQ ID NO: 718483 - RNA, 20 nt, Artificial Sequence
  Synthetic
guucuccuggaaauucauga

SEQ ID NO: 718484 - RNA, 20 nt, Artificial Sequence
  Synthetic
gagccugauacauuucauga

SEQ ID NO: 718485 - RNA, 20 nt, Artificial Sequence
  Synthetic
gaggcaguaucagaagauga

SEQ ID NO: 718486 - RNA, 20 nt, Artificial Sequence
  Synthetic
gauaagagucuugaagauga

SEQ ID NO: 718487 - RNA, 20 nt, Artificial Sequence
  Synthetic
gccagccagcucucagauga

SEQ ID NO: 718488 - RNA, 20 nt, Artificial Sequence
  Synthetic
gaaguuucauuaugagauga

SEQ ID NO: 718489 - RNA, 20 nt, Artificial Sequence
  Synthetic
guaacacaucucauagauga

SEQ ID NO: 718490 - RNA, 20 nt, Artificial Sequence
  Synthetic
ggggcuuaaaaccuagauga

SEQ ID NO: 718491 - RNA, 20 nt, Artificial Sequence
  Synthetic
gaaauaccuaauguagauga

SEQ ID NO: 718492 - RNA, 20 nt, Artificial Sequence
  Synthetic
gcucugucugucuucgauga

SEQ ID NO: 718493 - RNA, 20 nt, Artificial Sequence
  Synthetic
gaagcauauucagaggauga

SEQ ID NO: 718494 - RNA, 20 nt, Artificial Sequence
  Synthetic
guggcuagaaaaaaugauga

SEQ ID NO: 718495 - RNA, 20 nt, Artificial Sequence
  Synthetic
gcuaauaucuaagaugauga

SEQ ID NO: 718496 - RNA, 20 nt, Artificial Sequence
  Synthetic
gaggaagagagugaugauga

SEQ ID NO: 718497 - RNA, 20 nt, Artificial Sequence
  Synthetic
guaaaucaucuuggugauga

SEQ ID NO: 718498 - RNA, 20 nt, Artificial Sequence
  Synthetic
gagcaagugucuugugauga

SEQ ID NO: 718499 - RNA, 20 nt, Artificial Sequence
  Synthetic
gcauaacauaauauugauga

SEQ ID NO: 718500 - RNA, 20 nt, Artificial Sequence
  Synthetic
gagauuuuaggaaaauauga

SEQ ID NO: 718501 - RNA, 20 nt, Artificial Sequence
  Synthetic
gcuuauuggaggugauauga

SEQ ID NO: 718502 - RNA, 20 nt, Artificial Sequence
  Synthetic
guguuucuucuacucuauga

SEQ ID NO: 718503 - RNA, 20 nt, Artificial Sequence
  Synthetic
guaaggccaguugucuauga

SEQ ID NO: 718504 - RNA, 20 nt, Artificial Sequence
  Synthetic
gccagagcucuccuguauga

SEQ ID NO: 718505 - RNA, 20 nt, Artificial Sequence
  Synthetic
gucugcuuguagcuguauga

SEQ ID NO: 718506 - RNA, 20 nt, Artificial Sequence
  Synthetic
gauaaaucuauuuauuauga

SEQ ID NO: 718507 - RNA, 20 nt, Artificial Sequence
  Synthetic
gcaugagguaaauguuauga

SEQ ID NO: 718508 - RNA, 20 nt, Artificial Sequence
  Synthetic
ggcaguaagaagauuuauga

SEQ ID NO: 718509 - RNA, 20 nt, Artificial Sequence
  Synthetic
guuuuucucgaaguuuauga

SEQ ID NO: 718510 - RNA, 20 nt, Artificial Sequence
  Synthetic
gagaacauacacacaacuga

SEQ ID NO: 718511 - RNA, 20 nt, Artificial Sequence
  Synthetic
ggucaggauccuagaacuga

SEQ ID NO: 718512 - RNA, 20 nt, Artificial Sequence
  Synthetic
gcauaccucugagacacuga

SEQ ID NO: 718513 - RNA, 20 nt, Artificial Sequence
  Synthetic
ggcagcuaaagcaucacuga

SEQ ID NO: 718514 - RNA, 20 nt, Artificial Sequence
  Synthetic
gaaguggucagcuggacuga

SEQ ID NO: 718515 - RNA, 20 nt, Artificial Sequence
  Synthetic
gcauuucuuauauugacuga

SEQ ID NO: 718516 - RNA, 20 nt, Artificial Sequence
  Synthetic
ggaaugguggagaauacuga

SEQ ID NO: 718517 - RNA, 20 nt, Artificial Sequence
  Synthetic
gccgcucauacaauuacuga

SEQ ID NO: 718518 - RNA, 20 nt, Artificial Sequence
  Synthetic
gaacaaauaagaauuacuga

SEQ ID NO: 718519 - RNA, 20 nt, Artificial Sequence
  Synthetic
guuucucuguuuggaccuga

SEQ ID NO: 718520 - RNA, 20 nt, Artificial Sequence
  Synthetic
gaggaacauaaaugaccuga

SEQ ID NO: 718521 - RNA, 20 nt, Artificial Sequence
  Synthetic
gcuuauauucauauaccuga

SEQ ID NO: 718522 - RNA, 20 nt, Artificial Sequence
  Synthetic
gauggaggggcucuaccuga

SEQ ID NO: 718523 - RNA, 20 nt, Artificial Sequence
  Synthetic
gugucccacguguccccuga

SEQ ID NO: 718524 - RNA, 20 nt, Artificial Sequence
  Synthetic
gacacauuuuaaggcccuga

SEQ ID NO: 718525 - RNA, 20 nt, Artificial Sequence
  Synthetic
gaauuguauaauaucccuga

SEQ ID NO: 718526 - RNA, 20 nt, Artificial Sequence
  Synthetic
gcagcucaggcagucccuga

SEQ ID NO: 718527 - RNA, 20 nt, Artificial Sequence
  Synthetic
ggaguccaggcacagccuga

SEQ ID NO: 718528 - RNA, 20 nt, Artificial Sequence
  Synthetic
gauagaauagcugagccuga

SEQ ID NO: 718529 - RNA, 20 nt, Artificial Sequence
  Synthetic
gaccagaaauacuggccuga

SEQ ID NO: 718530 - RNA, 20 nt, Artificial Sequence
  Synthetic
gcaugcaugggcuggccuga

SEQ ID NO: 718531 - RNA, 20 nt, Artificial Sequence
  Synthetic
gccagcauuucauugccuga

SEQ ID NO: 718532 - RNA, 20 nt, Artificial Sequence
  Synthetic
gcuuggcauauauauccuga

SEQ ID NO: 718533 - RNA, 20 nt, Artificial Sequence
  Synthetic
gccaacuccuguuuuccuga

SEQ ID NO: 718534 - RNA, 20 nt, Artificial Sequence
  Synthetic
gaagugcuuaaaggagcuga

SEQ ID NO: 718535 - RNA, 20 nt, Artificial Sequence
  Synthetic
gugauucugcugcacgcuga

SEQ ID NO: 718536 - RNA, 20 nt, Artificial Sequence
  Synthetic
gcacugggaaaucaggcuga

SEQ ID NO: 718537 - RNA, 20 nt, Artificial Sequence
  Synthetic
gucaauuuguggagggcuga

SEQ ID NO: 718538 - RNA, 20 nt, Artificial Sequence
  Synthetic
ggcugguccuugagggcuga

SEQ ID NO: 718539 - RNA, 20 nt, Artificial Sequence
  Synthetic
gauggcuugacuggggcuga

SEQ ID NO: 718540 - RNA, 20 nt, Artificial Sequence
  Synthetic
gguggcuuccuuuuggcuga

SEQ ID NO: 718541 - RNA, 20 nt, Artificial Sequence
  Synthetic
gugagccaacccaaugcuga

SEQ ID NO: 718542 - RNA, 20 nt, Artificial Sequence
  Synthetic
ggugcagagaaagaugcuga

SEQ ID NO: 718543 - RNA, 20 nt, Artificial Sequence
  Synthetic
gucuuucaaauugaugcuga

SEQ ID NO: 718544 - RNA, 20 nt, Artificial Sequence
  Synthetic
ggauaacuuuuauaugcuga

SEQ ID NO: 718545 - RNA, 20 nt, Artificial Sequence
  Synthetic
ggcagagcaacaagugcuga

SEQ ID NO: 718546 - RNA, 20 nt, Artificial Sequence
  Synthetic
gguggagcaacaagugcuga

SEQ ID NO: 718547 - RNA, 20 nt, Artificial Sequence
  Synthetic
ggaaagugaagaagugcuga

SEQ ID NO: 718548 - RNA, 20 nt, Artificial Sequence
  Synthetic
gaaauacaaaguugugcuga

SEQ ID NO: 718549 - RNA, 20 nt, Artificial Sequence
  Synthetic
ggucuaagaaagaaaucuga

SEQ ID NO: 718550 - RNA, 20 nt, Artificial Sequence
  Synthetic
gugguagugugagaaucuga

SEQ ID NO: 718551 - RNA, 20 nt, Artificial Sequence
  Synthetic
gcuucaguuucuucaucuga

SEQ ID NO: 718552 - RNA, 20 nt, Artificial Sequence
  Synthetic
guauuuaaauaaagaucuga

SEQ ID NO: 718553 - RNA, 20 nt, Artificial Sequence
  Synthetic
guuuuuaaguaaagaucuga

SEQ ID NO: 718554 - RNA, 20 nt, Artificial Sequence
  Synthetic
gcaaacauuaagggaucuga

SEQ ID NO: 718555 - RNA, 20 nt, Artificial Sequence
  Synthetic
gacagaaaugauggaucuga

SEQ ID NO: 718556 - RNA, 20 nt, Artificial Sequence
  Synthetic
ggaaccauaucuugaucuga

SEQ ID NO: 718557 - RNA, 20 nt, Artificial Sequence
  Synthetic
ggaaaaagagacaacucuga

SEQ ID NO: 718558 - RNA, 20 nt, Artificial Sequence
  Synthetic
guggucaugccuaacucuga

SEQ ID NO: 718559 - RNA, 20 nt, Artificial Sequence
  Synthetic
gaaaucuuguuucucucuga

SEQ ID NO: 718560 - RNA, 20 nt, Artificial Sequence
  Synthetic
guguuuauaguauucucuga

SEQ ID NO: 718561 - RNA, 20 nt, Artificial Sequence
  Synthetic
guguuuguaguauucucuga

SEQ ID NO: 718562 - RNA, 20 nt, Artificial Sequence
  Synthetic
ggaggaucucugaagucuga

SEQ ID NO: 718563 - RNA, 20 nt, Artificial Sequence
  Synthetic
gugauccacuguuagucuga

SEQ ID NO: 718564 - RNA, 20 nt, Artificial Sequence
  Synthetic
gagauccgcuguuagucuga

SEQ ID NO: 718565 - RNA, 20 nt, Artificial Sequence
  Synthetic
gccaagaaaauucugucuga

SEQ ID NO: 718566 - RNA, 20 nt, Artificial Sequence
  Synthetic
gauauuagaucuuugucuga

SEQ ID NO: 718567 - RNA, 20 nt, Artificial Sequence
  Synthetic
gcaacucaggacaauucuga

SEQ ID NO: 718568 - RNA, 20 nt, Artificial Sequence
  Synthetic
gauauuuacaugaauucuga

SEQ ID NO: 718569 - RNA, 20 nt, Artificial Sequence
  Synthetic
gagucuguagaauauucuga

SEQ ID NO: 718570 - RNA, 20 nt, Artificial Sequence
  Synthetic
ggaggguugguuccuucuga

SEQ ID NO: 718571 - RNA, 20 nt, Artificial Sequence
  Synthetic
gaaaacucuauuuguucuga

SEQ ID NO: 718572 - RNA, 20 nt, Artificial Sequence
  Synthetic
guauguggcguuauuucuga

SEQ ID NO: 718573 - RNA, 20 nt, Artificial Sequence
  Synthetic
ggcacugauccuguuucuga

SEQ ID NO: 718574 - RNA, 20 nt, Artificial Sequence
  Synthetic
ggggagauccuguuuucuga

SEQ ID NO: 718575 - RNA, 20 nt, Artificial Sequence
  Synthetic
guuagagaugauuuuucuga

SEQ ID NO: 718576 - RNA, 20 nt, Artificial Sequence
  Synthetic
gagaaaaaguugaaaaguga

SEQ ID NO: 718577 - RNA, 20 nt, Artificial Sequence
  Synthetic
guuacagaagcccaaaguga

SEQ ID NO: 718578 - RNA, 20 nt, Artificial Sequence
  Synthetic
guggagcugggagaaaguga

SEQ ID NO: 718579 - RNA, 20 nt, Artificial Sequence
  Synthetic
guaaaguaaaagacaaguga

SEQ ID NO: 718580 - RNA, 20 nt, Artificial Sequence
  Synthetic
gucaggcaaccaucaaguga

SEQ ID NO: 718581 - RNA, 20 nt, Artificial Sequence
  Synthetic
guauggagucagagaaguga

SEQ ID NO: 718582 - RNA, 20 nt, Artificial Sequence
  Synthetic
ggugaauaaugguuaaguga

SEQ ID NO: 718583 - RNA, 20 nt, Artificial Sequence
  Synthetic
gucaauuggguaugcaguga

SEQ ID NO: 718584 - RNA, 20 nt, Artificial Sequence
  Synthetic
gaagagugacucaucaguga

SEQ ID NO: 718585 - RNA, 20 nt, Artificial Sequence
  Synthetic
gcuuugaauaaguucaguga

SEQ ID NO: 718586 - RNA, 20 nt, Artificial Sequence
  Synthetic
guaaggaagaaagagaguga

SEQ ID NO: 718587 - RNA, 20 nt, Artificial Sequence
  Synthetic
gacagauaauaggagaguga

SEQ ID NO: 718588 - RNA, 20 nt, Artificial Sequence
  Synthetic
ggugggugggauaguaguga

SEQ ID NO: 718589 - RNA, 20 nt, Artificial Sequence
  Synthetic
gcagagugggaagguaguga

SEQ ID NO: 718590 - RNA, 20 nt, Artificial Sequence
  Synthetic
gguccauaugcacaacguga

SEQ ID NO: 718591 - RNA, 20 nt, Artificial Sequence
  Synthetic
guauuugcaacuucucguga

SEQ ID NO: 718592 - RNA, 20 nt, Artificial Sequence
  Synthetic
gcucgaaggaauagagguga

SEQ ID NO: 718593 - RNA, 20 nt, Artificial Sequence
  Synthetic
gccauacauauaggagguga

SEQ ID NO: 718594 - RNA, 20 nt, Artificial Sequence
  Synthetic
gacauagguuacugagguga

SEQ ID NO: 718595 - RNA, 20 nt, Artificial Sequence
  Synthetic
guucacccuuuacaggguga

SEQ ID NO: 718596 - RNA, 20 nt, Artificial Sequence
  Synthetic
gguaccaagcccuaggguga

SEQ ID NO: 718597 - RNA, 20 nt, Artificial Sequence
  Synthetic
gcuucuuccauucaugguga

SEQ ID NO: 718598 - RNA, 20 nt, Artificial Sequence
  Synthetic
gauuuugaugccgcugguga

SEQ ID NO: 718599 - RNA, 20 nt, Artificial Sequence
  Synthetic
gcagauucauugucugguga

SEQ ID NO: 718600 - RNA, 20 nt, Artificial Sequence
  Synthetic
gauagaaggaucagugguga

SEQ ID NO: 718601 - RNA, 20 nt, Artificial Sequence
  Synthetic
gaugacgguuagggugguga

SEQ ID NO: 718602 - RNA, 20 nt, Artificial Sequence
  Synthetic
gugugaguggauuuugguga

SEQ ID NO: 718603 - RNA, 20 nt, Artificial Sequence
  Synthetic
gcaacauuuaacacauguga

SEQ ID NO: 718604 - RNA, 20 nt, Artificial Sequence
  Synthetic
gguuugugggguacauguga

SEQ ID NO: 718605 - RNA, 20 nt, Artificial Sequence
  Synthetic
gcaacuuacaagggauguga

SEQ ID NO: 718606 - RNA, 20 nt, Artificial Sequence
  Synthetic
gagaacucaaaauuauguga

SEQ ID NO: 718607 - RNA, 20 nt, Artificial Sequence
  Synthetic
gcacugcaaaagaccuguga

SEQ ID NO: 718608 - RNA, 20 nt, Artificial Sequence
  Synthetic
gguucuuguauuaucuguga

SEQ ID NO: 718609 - RNA, 20 nt, Artificial Sequence
  Synthetic
gugggucaggggaaguguga

SEQ ID NO: 718610 - RNA, 20 nt, Artificial Sequence
  Synthetic
gcaguuucuucauaguguga

SEQ ID NO: 718611 - RNA, 20 nt, Artificial Sequence
  Synthetic
gggaagggggagggguguga

SEQ ID NO: 718612 - RNA, 20 nt, Artificial Sequence
  Synthetic
gugaagggggagggguguga

SEQ ID NO: 718613 - RNA, 20 nt, Artificial Sequence
  Synthetic
gccuauaugcacguguguga

SEQ ID NO: 718614 - RNA, 20 nt, Artificial Sequence
  Synthetic
gcucccuauccauuguguga

SEQ ID NO: 718615 - RNA, 20 nt, Artificial Sequence
  Synthetic
gcuuaccuguggaauuguga

SEQ ID NO: 718616 - RNA, 20 nt, Artificial Sequence
  Synthetic
guuacaugaauaacuuguga

SEQ ID NO: 718617 - RNA, 20 nt, Artificial Sequence
  Synthetic
gaauguuccuugacuuguga

SEQ ID NO: 718618 - RNA, 20 nt, Artificial Sequence
  Synthetic
gagaaaaacacauuuuguga

SEQ ID NO: 718619 - RNA, 20 nt, Artificial Sequence
  Synthetic
gguuaaagauuuaaaauuga

SEQ ID NO: 718620 - RNA, 20 nt, Artificial Sequence
  Synthetic
gacuagaaagaguaaauuga

SEQ ID NO: 718621 - RNA, 20 nt, Artificial Sequence
  Synthetic
gaaugaguuugacgaauuga

SEQ ID NO: 718622 - RNA, 20 nt, Artificial Sequence
  Synthetic
gaaauaauguuaauaauuga

SEQ ID NO: 718623 - RNA, 20 nt, Artificial Sequence
  Synthetic
gagaguaacaauguaauuga

SEQ ID NO: 718624 - RNA, 20 nt, Artificial Sequence
  Synthetic
guggaaguauccaacauuga

SEQ ID NO: 718625 - RNA, 20 nt, Artificial Sequence
  Synthetic
guacugaaguagcacauuga

SEQ ID NO: 718626 - RNA, 20 nt, Artificial Sequence
  Synthetic
gaaaaaauggccuacauuga

SEQ ID NO: 718627 - RNA, 20 nt, Artificial Sequence
  Synthetic
gauggucuuuguuucauuga

SEQ ID NO: 718628 - RNA, 20 nt, Artificial Sequence
  Synthetic
gaacuucuguccaggauuga

SEQ ID NO: 718629 - RNA, 20 nt, Artificial Sequence
  Synthetic
guuuugugggcacauauuga

SEQ ID NO: 718630 - RNA, 20 nt, Artificial Sequence
  Synthetic
ggaauagaaaaugauauuga

SEQ ID NO: 718631 - RNA, 20 nt, Artificial Sequence
  Synthetic
gaggaagguguauauauuga

SEQ ID NO: 718632 - RNA, 20 nt, Artificial Sequence
  Synthetic
gauacuuugaaauguauuga

SEQ ID NO: 718633 - RNA, 20 nt, Artificial Sequence
  Synthetic
gggguguugaauuuuauuga

SEQ ID NO: 718634 - RNA, 20 nt, Artificial Sequence
  Synthetic
gaaaagagauauuuuauuga

SEQ ID NO: 718635 - RNA, 20 nt, Artificial Sequence
  Synthetic
gauagugauaguuuuauuga

SEQ ID NO: 718636 - RNA, 20 nt, Artificial Sequence
  Synthetic
ggaugagguucugcacuuga

SEQ ID NO: 718637 - RNA, 20 nt, Artificial Sequence
  Synthetic
gaucacucguuuugacuuga

SEQ ID NO: 718638 - RNA, 20 nt, Artificial Sequence
  Synthetic
gaauaauuaugcauacuuga

SEQ ID NO: 718639 - RNA, 20 nt, Artificial Sequence
  Synthetic
ggcuucuggauguuacuuga

SEQ ID NO: 718640 - RNA, 20 nt, Artificial Sequence
  Synthetic
ggacuuggcuugagccuuga

SEQ ID NO: 718641 - RNA, 20 nt, Artificial Sequence
  Synthetic
guaaauuucaagugccuuga

SEQ ID NO: 718642 - RNA, 20 nt, Artificial Sequence
  Synthetic
gauggagggucuugccuuga

SEQ ID NO: 718643 - RNA, 20 nt, Artificial Sequence
  Synthetic
gaaagucaaugguagcuuga

SEQ ID NO: 718644 - RNA, 20 nt, Artificial Sequence
  Synthetic
gaaaggcauugguagcuuga

SEQ ID NO: 718645 - RNA, 20 nt, Artificial Sequence
  Synthetic
gaaagucauugguagcuuga

SEQ ID NO: 718646 - RNA, 20 nt, Artificial Sequence
  Synthetic
ggcaacagaaaugugcuuga

SEQ ID NO: 718647 - RNA, 20 nt, Artificial Sequence
  Synthetic
gucagcaauccauugcuuga

SEQ ID NO: 718648 - RNA, 20 nt, Artificial Sequence
  Synthetic
ggcaagauacuauugcuuga

SEQ ID NO: 718649 - RNA, 20 nt, Artificial Sequence
  Synthetic
guagcuuagggauaucuuga

SEQ ID NO: 718650 - RNA, 20 nt, Artificial Sequence
  Synthetic
gcccaguuagaacuucuuga

SEQ ID NO: 718651 - RNA, 20 nt, Artificial Sequence
  Synthetic
guuuuuuguugaagaguuga

SEQ ID NO: 718652 - RNA, 20 nt, Artificial Sequence
  Synthetic
ggugggaggaaaugaguuga

SEQ ID NO: 718653 - RNA, 20 nt, Artificial Sequence
  Synthetic
gauuuaauaaugguaguuga

SEQ ID NO: 718654 - RNA, 20 nt, Artificial Sequence
  Synthetic
gcugagaaguccaagguuga

SEQ ID NO: 718655 - RNA, 20 nt, Artificial Sequence
  Synthetic
gaacccuuguacaauguuga

SEQ ID NO: 718656 - RNA, 20 nt, Artificial Sequence
  Synthetic
gaugcaaauuucaauguuga

SEQ ID NO: 718657 - RNA, 20 nt, Artificial Sequence
  Synthetic
gaguggcaggcccauguuga

SEQ ID NO: 718658 - RNA, 20 nt, Artificial Sequence
  Synthetic
gaauauucuuggcauguuga

SEQ ID NO: 718659 - RNA, 20 nt, Artificial Sequence
  Synthetic
guauuucuuaaugcuguuga

SEQ ID NO: 718660 - RNA, 20 nt, Artificial Sequence
  Synthetic
gcauauucagauuuuguuga

SEQ ID NO: 718661 - RNA, 20 nt, Artificial Sequence
  Synthetic
guuauuuaauauuuuguuga

SEQ ID NO: 718662 - RNA, 20 nt, Artificial Sequence
  Synthetic
ggugcuuccacugcauuuga

SEQ ID NO: 718663 - RNA, 20 nt, Artificial Sequence
  Synthetic
gcaguguguauaucauuuga

SEQ ID NO: 718664 - RNA, 20 nt, Artificial Sequence
  Synthetic
gucuuuugcagcaacuuuga

SEQ ID NO: 718665 - RNA, 20 nt, Artificial Sequence
  Synthetic
gaaaaggacugagacuuuga

SEQ ID NO: 718666 - RNA, 20 nt, Artificial Sequence
  Synthetic
ggagggaguuagcccuuuga

SEQ ID NO: 718667 - RNA, 20 nt, Artificial Sequence
  Synthetic
gaguuguuuauguccuuuga

SEQ ID NO: 718668 - RNA, 20 nt, Artificial Sequence
  Synthetic
gaacaagagucuuucuuuga

SEQ ID NO: 718669 - RNA, 20 nt, Artificial Sequence
  Synthetic
gauacugugauuugguuuga

SEQ ID NO: 718670 - RNA, 20 nt, Artificial Sequence
  Synthetic
ggccaaaaggaaguguuuga

SEQ ID NO: 718671 - RNA, 20 nt, Artificial Sequence
  Synthetic
gcuuuucuucaguuguuuga

SEQ ID NO: 718672 - RNA, 20 nt, Artificial Sequence
  Synthetic
gauuauuuucuugcuuuuga

SEQ ID NO: 718673 - RNA, 20 nt, Artificial Sequence
  Synthetic
guauugaaugggaguuuuga

SEQ ID NO: 718674 - RNA, 20 nt, Artificial Sequence
  Synthetic
gcuagaagagaggguuuuga

SEQ ID NO: 718675 - RNA, 20 nt, Artificial Sequence
  Synthetic
guuuucuucuaggguuuuga

SEQ ID NO: 718676 - RNA, 20 nt, Artificial Sequence
  Synthetic
ggaguuuuuccuuguuuuga

SEQ ID NO: 718677 - RNA, 20 nt, Artificial Sequence
  Synthetic
gucuguguccuuuguuuuga

SEQ ID NO: 718678 - RNA, 20 nt, Artificial Sequence
  Synthetic
guccuucacccacuuuuuga

SEQ ID NO: 718679 - RNA, 20 nt, Artificial Sequence
  Synthetic
guccuucgcccacuuuuuga

SEQ ID NO: 718680 - RNA, 20 nt, Artificial Sequence
  Synthetic
guccuucgcucacuuuuuga

SEQ ID NO: 718681 - RNA, 20 nt, Artificial Sequence
  Synthetic
ggauucauugauuuuuuuga

SEQ ID NO: 718682 - RNA, 20 nt, Artificial Sequence
  Synthetic
gaugaacaguaaaaaaaaua

SEQ ID NO: 718683 - RNA, 20 nt, Artificial Sequence
  Synthetic
guuucaaguugaaaaaaaua

SEQ ID NO: 718684 - RNA, 20 nt, Artificial Sequence
  Synthetic
gccauuugcuaagaaaaaua

SEQ ID NO: 718685 - RNA, 20 nt, Artificial Sequence
  Synthetic
gggagagagggagaaaaaua

SEQ ID NO: 718686 - RNA, 20 nt, Artificial Sequence
  Synthetic
gaaucguuucaauaaaaaua

SEQ ID NO: 718687 - RNA, 20 nt, Artificial Sequence
  Synthetic
ggauuaauaaauacaaaaua

SEQ ID NO: 718688 - RNA, 20 nt, Artificial Sequence
  Synthetic
gguuauaacuuugcaaaaua

SEQ ID NO: 718689 - RNA, 20 nt, Artificial Sequence
  Synthetic
ggggaauuuucaucaaaaua

SEQ ID NO: 718690 - RNA, 20 nt, Artificial Sequence
  Synthetic
gucaucucuuugucaaaaua

SEQ ID NO: 718691 - RNA, 20 nt, Artificial Sequence
  Synthetic
ggcaaaauguucagaaaaua

SEQ ID NO: 718692 - RNA, 20 nt, Artificial Sequence
  Synthetic
gcgcugagaaaccgaaaaua

SEQ ID NO: 718693 - RNA, 20 nt, Artificial Sequence
  Synthetic
gguacaaaaaagggaaaaua

SEQ ID NO: 718694 - RNA, 20 nt, Artificial Sequence
  Synthetic
gaauuuuucuuuggaaaaua

SEQ ID NO: 718695 - RNA, 20 nt, Artificial Sequence
  Synthetic
gagagagcgauaugaaaaua

SEQ ID NO: 718696 - RNA, 20 nt, Artificial Sequence
  Synthetic
guucaagcauccauaaaaua

SEQ ID NO: 718697 - RNA, 20 nt, Artificial Sequence
  Synthetic
gagcccaaggcccuaaaaua

SEQ ID NO: 718698 - RNA, 20 nt, Artificial Sequence
  Synthetic
guggacugugauuuaaaaua

SEQ ID NO: 718699 - RNA, 20 nt, Artificial Sequence
  Synthetic
ggccaaacacuucacaaaua

SEQ ID NO: 718700 - RNA, 20 nt, Artificial Sequence
  Synthetic
ggugcaauuuccuacaaaua

SEQ ID NO: 718701 - RNA, 20 nt, Artificial Sequence
  Synthetic
ggaaguucugcuuacaaaua

SEQ ID NO: 718702 - RNA, 20 nt, Artificial Sequence
  Synthetic
gagaaguuuuuucccaaaua

SEQ ID NO: 718703 - RNA, 20 nt, Artificial Sequence
  Synthetic
guuaguccucuuuccaaaua

SEQ ID NO: 718704 - RNA, 20 nt, Artificial Sequence
  Synthetic
gaaagcuuucuuuucaaaua

SEQ ID NO: 718705 - RNA, 20 nt, Artificial Sequence
  Synthetic
gguagagauaaaaagaaaua

SEQ ID NO: 718706 - RNA, 20 nt, Artificial Sequence
  Synthetic
gugauccuggaacagaaaua

SEQ ID NO: 718707 - RNA, 20 nt, Artificial Sequence
  Synthetic
gaagaguuugaccagaaaua

SEQ ID NO: 718708 - RNA, 20 nt, Artificial Sequence
  Synthetic
guuuggaaucaagagaaaua

SEQ ID NO: 718709 - RNA, 20 nt, Artificial Sequence
  Synthetic
gaagucccuaacuagaaaua

SEQ ID NO: 718710 - RNA, 20 nt, Artificial Sequence
  Synthetic
gcucuggcauuuuagaaaua

SEQ ID NO: 718711 - RNA, 20 nt, Artificial Sequence
  Synthetic
gacaguucuaaguggaaaua

SEQ ID NO: 718712 - RNA, 20 nt, Artificial Sequence
  Synthetic
gaaguagggagguggaaaua

SEQ ID NO: 718713 - RNA, 20 nt, Artificial Sequence
  Synthetic
gggcaugguagccugaaaua

SEQ ID NO: 718714 - RNA, 20 nt, Artificial Sequence
  Synthetic
gggugagaagaagugaaaua

SEQ ID NO: 718715 - RNA, 20 nt, Artificial Sequence
  Synthetic
gcccuacucuaugugaaaua

SEQ ID NO: 718716 - RNA, 20 nt, Artificial Sequence
  Synthetic
gauuccacuuacuugaaaua

SEQ ID NO: 718717 - RNA, 20 nt, Artificial Sequence
  Synthetic
gucucaaaaauacauaaaua

SEQ ID NO: 718718 - RNA, 20 nt, Artificial Sequence
  Synthetic
gugaaugcugaagauaaaua

SEQ ID NO: 718719 - RNA, 20 nt, Artificial Sequence
  Synthetic
gaaugacugcuggauaaaua

SEQ ID NO: 718720 - RNA, 20 nt, Artificial Sequence
  Synthetic
gaaagaaaauuauauaaaua

SEQ ID NO: 718721 - RNA, 20 nt, Artificial Sequence
  Synthetic
gaucugaaugacucuaaaua

SEQ ID NO: 718722 - RNA, 20 nt, Artificial Sequence
  Synthetic
guugagaggucagguaaaua

SEQ ID NO: 718723 - RNA, 20 nt, Artificial Sequence
  Synthetic
gauaccauuagcauuaaaua

SEQ ID NO: 718724 - RNA, 20 nt, Artificial Sequence
  Synthetic
gagucauucagauuuaaaua

SEQ ID NO: 718725 - RNA, 20 nt, Artificial Sequence
  Synthetic
guacauuccaauuuuaaaua

SEQ ID NO: 718726 - RNA, 20 nt, Artificial Sequence
  Synthetic
gguagcaagaacacacaaua

SEQ ID NO: 718727 - RNA, 20 nt, Artificial Sequence
  Synthetic
guacaaaagcaugcacaaua

SEQ ID NO: 718728 - RNA, 20 nt, Artificial Sequence
  Synthetic
gagcacuauacuucacaaua

SEQ ID NO: 718729 - RNA, 20 nt, Artificial Sequence
  Synthetic
ggaaggaaaacgauacaaua

SEQ ID NO: 718730 - RNA, 20 nt, Artificial Sequence
  Synthetic
gugcuucucuuuucccaaua

SEQ ID NO: 718731 - RNA, 20 nt, Artificial Sequence
  Synthetic
gaccauuggguuuugcaaua

SEQ ID NO: 718732 - RNA, 20 nt, Artificial Sequence
  Synthetic
gagauuuuucaguaucaaua

SEQ ID NO: 718733 - RNA, 20 nt, Artificial Sequence
  Synthetic
gaguauuauauaacucaaua

SEQ ID NO: 718734 - RNA, 20 nt, Artificial Sequence
  Synthetic
gaacuaacugcuucucaaua

SEQ ID NO: 718735 - RNA, 20 nt, Artificial Sequence
  Synthetic
gaguagaucagagaagaaua

SEQ ID NO: 718736 - RNA, 20 nt, Artificial Sequence
  Synthetic
guugcuuggaguccagaaua

SEQ ID NO: 718737 - RNA, 20 nt, Artificial Sequence
  Synthetic
ggauuaaaaguaucagaaua

SEQ ID NO: 718738 - RNA, 20 nt, Artificial Sequence
  Synthetic
gcaaagaaaaaaagagaaua

SEQ ID NO: 718739 - RNA, 20 nt, Artificial Sequence
  Synthetic
gaguaaauaagaggagaaua

SEQ ID NO: 718740 - RNA, 20 nt, Artificial Sequence
  Synthetic
gagaaauuacuuugagaaua

SEQ ID NO: 718741 - RNA, 20 nt, Artificial Sequence
  Synthetic
guuaaaauaaaacuagaaua

SEQ ID NO: 718742 - RNA, 20 nt, Artificial Sequence
  Synthetic
ggucuuuucauucuagaaua

SEQ ID NO: 718743 - RNA, 20 nt, Artificial Sequence
  Synthetic
gggagacaggcaggggaaua

SEQ ID NO: 718744 - RNA, 20 nt, Artificial Sequence
  Synthetic
ggcagaucuacaguggaaua

SEQ ID NO: 718745 - RNA, 20 nt, Artificial Sequence
  Synthetic
gaaguugcagaaaaugaaua

SEQ ID NO: 718746 - RNA, 20 nt, Artificial Sequence
  Synthetic
gacaauaacauagcugaaua

SEQ ID NO: 718747 - RNA, 20 nt, Artificial Sequence
  Synthetic
guuucuccacuccuugaaua

SEQ ID NO: 718748 - RNA, 20 nt, Artificial Sequence
  Synthetic
gaacaacuccaucuugaaua

SEQ ID NO: 718749 - RNA, 20 nt, Artificial Sequence
  Synthetic
gaaaaauggaaauuugaaua

SEQ ID NO: 718750 - RNA, 20 nt, Artificial Sequence
  Synthetic
ggggccuuugagaaauaaua

SEQ ID NO: 718751 - RNA, 20 nt, Artificial Sequence
  Synthetic
gauguguuauuaggauaaua

SEQ ID NO: 718752 - RNA, 20 nt, Artificial Sequence
  Synthetic
guuuggacagugggauaaua

SEQ ID NO: 718753 - RNA, 20 nt, Artificial Sequence
  Synthetic
gagugacacucgcuauaaua

SEQ ID NO: 718754 - RNA, 20 nt, Artificial Sequence
  Synthetic
gcuugauauguucacuaaua

SEQ ID NO: 718755 - RNA, 20 nt, Artificial Sequence
  Synthetic
ggauuuauaaaagccuaaua

SEQ ID NO: 718756 - RNA, 20 nt, Artificial Sequence
  Synthetic
gauaggaccaagugcuaaua

SEQ ID NO: 718757 - RNA, 20 nt, Artificial Sequence
  Synthetic
gguaauucauaaaauuaaua

SEQ ID NO: 718758 - RNA, 20 nt, Artificial Sequence
  Synthetic
guucucucauuuacuuaaua

SEQ ID NO: 718759 - RNA, 20 nt, Artificial Sequence
  Synthetic
guuaaaucagagccuuaaua

SEQ ID NO: 718760 - RNA, 20 nt, Artificial Sequence
  Synthetic
gaaacucuucuuccuuaaua

SEQ ID NO: 718761 - RNA, 20 nt, Artificial Sequence
  Synthetic
gaacagccuuauuguuaaua

SEQ ID NO: 718762 - RNA, 20 nt, Artificial Sequence
  Synthetic
gaacggccuuauuuuuaaua

SEQ ID NO: 718763 - RNA, 20 nt, Artificial Sequence
  Synthetic
gcugacagaagauaaacaua

SEQ ID NO: 718764 - RNA, 20 nt, Artificial Sequence
  Synthetic
gauuagcaagggguaacaua

SEQ ID NO: 718765 - RNA, 20 nt, Artificial Sequence
  Synthetic
guaauuuugcaauuaacaua

SEQ ID NO: 718766 - RNA, 20 nt, Artificial Sequence
  Synthetic
gcucugaugucuuuaacaua

SEQ ID NO: 718767 - RNA, 20 nt, Artificial Sequence
  Synthetic
guccuuugcaggaacacaua

SEQ ID NO: 718768 - RNA, 20 nt, Artificial Sequence
  Synthetic
gaauauuuuauauacacaua

SEQ ID NO: 718769 - RNA, 20 nt, Artificial Sequence
  Synthetic
gugaaggaaaugaccacaua

SEQ ID NO: 718770 - RNA, 20 nt, Artificial Sequence
  Synthetic
gucauuuacugaaggacaua

SEQ ID NO: 718771 - RNA, 20 nt, Artificial Sequence
  Synthetic
gaggaaaaaguugggacaua

SEQ ID NO: 718772 - RNA, 20 nt, Artificial Sequence
  Synthetic
ggaggagaaugagugacaua

SEQ ID NO: 718773 - RNA, 20 nt, Artificial Sequence
  Synthetic
gcacuuuaaaguaauacaua

SEQ ID NO: 718774 - RNA, 20 nt, Artificial Sequence
  Synthetic
gaucaucuaaauuauacaua

SEQ ID NO: 718775 - RNA, 20 nt, Artificial Sequence
  Synthetic
ggaggaugaaaagcuacaua

SEQ ID NO: 718776 - RNA, 20 nt, Artificial Sequence
  Synthetic
gaagcagaacgauguacaua

SEQ ID NO: 718777 - RNA, 20 nt, Artificial Sequence
  Synthetic
gcuuuacaauaucuuacaua

SEQ ID NO: 718778 - RNA, 20 nt, Artificial Sequence
  Synthetic
gggauguagaugaaaccaua

SEQ ID NO: 718779 - RNA, 20 nt, Artificial Sequence
  Synthetic
gugagccccagaugcccaua

SEQ ID NO: 718780 - RNA, 20 nt, Artificial Sequence
  Synthetic
gagcuagaaaagugcccaua

SEQ ID NO: 718781 - RNA, 20 nt, Artificial Sequence
  Synthetic
gggagcugaaauuucccaua

SEQ ID NO: 718782 - RNA, 20 nt, Artificial Sequence
  Synthetic
guuuaauacauaaugccaua

SEQ ID NO: 718783 - RNA, 20 nt, Artificial Sequence
  Synthetic
gagacuuauucacugccaua

SEQ ID NO: 718784 - RNA, 20 nt, Artificial Sequence
  Synthetic
gaaguuuucaaugguccaua

SEQ ID NO: 718785 - RNA, 20 nt, Artificial Sequence
  Synthetic
gacuagaccucugguccaua

SEQ ID NO: 718786 - RNA, 20 nt, Artificial Sequence
  Synthetic
gggcugcauaauauuccaua

SEQ ID NO: 718787 - RNA, 20 nt, Artificial Sequence
  Synthetic
gaaacauguccuaaagcaua

SEQ ID NO: 718788 - RNA, 20 nt, Artificial Sequence
  Synthetic
guuaauagggaaacagcaua

SEQ ID NO: 718789 - RNA, 20 nt, Artificial Sequence
  Synthetic
gaaaauaagucaggagcaua

SEQ ID NO: 718790 - RNA, 20 nt, Artificial Sequence
  Synthetic
ggcuuauuucauuuagcaua

SEQ ID NO: 718791 - RNA, 20 nt, Artificial Sequence
  Synthetic
gauauuaggggaaaggcaua

SEQ ID NO: 718792 - RNA, 20 nt, Artificial Sequence
  Synthetic
gaaaagcuacauagggcaua

SEQ ID NO: 718793 - RNA, 20 nt, Artificial Sequence
  Synthetic
gcagagcuccccguggcaua

SEQ ID NO: 718794 - RNA, 20 nt, Artificial Sequence
  Synthetic
guuuucacuguuuaugcaua

SEQ ID NO: 718795 - RNA, 20 nt, Artificial Sequence
  Synthetic
gucuagauucauucugcaua

SEQ ID NO: 718796 - RNA, 20 nt, Artificial Sequence
  Synthetic
gaaauucacucuucugcaua

SEQ ID NO: 718797 - RNA, 20 nt, Artificial Sequence
  Synthetic
guauuuguuguaugugcaua

SEQ ID NO: 718798 - RNA, 20 nt, Artificial Sequence
  Synthetic
guuuguaguucuauugcaua

SEQ ID NO: 718799 - RNA, 20 nt, Artificial Sequence
  Synthetic
gauaagauugcuaaaucaua

SEQ ID NO: 718800 - RNA, 20 nt, Artificial Sequence
  Synthetic
guggagguaauggaaucaua

SEQ ID NO: 718801 - RNA, 20 nt, Artificial Sequence
  Synthetic
gccgaggcgggcggaucaua

SEQ ID NO: 718802 - RNA, 20 nt, Artificial Sequence
  Synthetic
ggaaguacauuccacucaua

SEQ ID NO: 718803 - RNA, 20 nt, Artificial Sequence
  Synthetic
gguuuucuuauagccucaua

SEQ ID NO: 718804 - RNA, 20 nt, Artificial Sequence
  Synthetic
gcauagucucuuagcucaua

SEQ ID NO: 718805 - RNA, 20 nt, Artificial Sequence
  Synthetic
gaugaauuugcaaagucaua

SEQ ID NO: 718806 - RNA, 20 nt, Artificial Sequence
  Synthetic
guagcagcgggaaggucaua

SEQ ID NO: 718807 - RNA, 20 nt, Artificial Sequence
  Synthetic
gacuuauauaacaugucaua

SEQ ID NO: 718808 - RNA, 20 nt, Artificial Sequence
  Synthetic
gacagugugguacugucaua

SEQ ID NO: 718809 - RNA, 20 nt, Artificial Sequence
  Synthetic
gcuggaaauacaaauucaua

SEQ ID NO: 718810 - RNA, 20 nt, Artificial Sequence
  Synthetic
gaaagacuugacaauucaua

SEQ ID NO: 718811 - RNA, 20 nt, Artificial Sequence
  Synthetic
guuucaagucuauauucaua

SEQ ID NO: 718812 - RNA, 20 nt, Artificial Sequence
  Synthetic
guugaggcaguuucuucaua

SEQ ID NO: 718813 - RNA, 20 nt, Artificial Sequence
  Synthetic
guuuaacuuccuauuucaua

SEQ ID NO: 718814 - RNA, 20 nt, Artificial Sequence
  Synthetic
gcuucuuguaacccaagaua

SEQ ID NO: 718815 - RNA, 20 nt, Artificial Sequence
  Synthetic
gaagaauguucuauaagaua

SEQ ID NO: 718816 - RNA, 20 nt, Artificial Sequence
  Synthetic
gcauguugaaugcacagaua

SEQ ID NO: 718817 - RNA, 20 nt, Artificial Sequence
  Synthetic
ggccuuaaggacuacagaua

SEQ ID NO: 718818 - RNA, 20 nt, Artificial Sequence
  Synthetic
gaauguauccccuacagaua

SEQ ID NO: 718819 - RNA, 20 nt, Artificial Sequence
  Synthetic
gaggaaaguauuaagagaua

SEQ ID NO: 718820 - RNA, 20 nt, Artificial Sequence
  Synthetic
gggagggaggaagagagaua

SEQ ID NO: 718821 - RNA, 20 nt, Artificial Sequence
  Synthetic
gaaagcucaagaaggagaua

SEQ ID NO: 718822 - RNA, 20 nt, Artificial Sequence
  Synthetic
guggugagaaacuggagaua

SEQ ID NO: 718823 - RNA, 20 nt, Artificial Sequence
  Synthetic
gagucuuuaucugugagaua

SEQ ID NO: 718824 - RNA, 20 nt, Artificial Sequence
  Synthetic
gucucaauaguucauagaua

SEQ ID NO: 718825 - RNA, 20 nt, Artificial Sequence
  Synthetic
gguuacuugucaaguagaua

SEQ ID NO: 718826 - RNA, 20 nt, Artificial Sequence
  Synthetic
gaaaaacuaacuauuagaua

SEQ ID NO: 718827 - RNA, 20 nt, Artificial Sequence
  Synthetic
guuggagacuguguuagaua

SEQ ID NO: 718828 - RNA, 20 nt, Artificial Sequence
  Synthetic
gaauagugacauuuuagaua

SEQ ID NO: 718829 - RNA, 20 nt, Artificial Sequence
  Synthetic
guuaaguaagauuuuagaua

SEQ ID NO: 718830 - RNA, 20 nt, Artificial Sequence
  Synthetic
gaggcaagauuuuaaggaua

SEQ ID NO: 718831 - RNA, 20 nt, Artificial Sequence
  Synthetic
gguagaaagagaugaggaua

SEQ ID NO: 718832 - RNA, 20 nt, Artificial Sequence
  Synthetic
gauucagugggucuaggaua

SEQ ID NO: 718833 - RNA, 20 nt, Artificial Sequence
  Synthetic
gaguucaguaaagagggaua

SEQ ID NO: 718834 - RNA, 20 nt, Artificial Sequence
  Synthetic
gucauuugcuaagagggaua

SEQ ID NO: 718835 - RNA, 20 nt, Artificial Sequence
  Synthetic
ggcucacacauuuagggaua

SEQ ID NO: 718836 - RNA, 20 nt, Artificial Sequence
  Synthetic
guggcaaggaugaggggaua

SEQ ID NO: 718837 - RNA, 20 nt, Artificial Sequence
  Synthetic
guugccaggggcuggggaua

SEQ ID NO: 718838 - RNA, 20 nt, Artificial Sequence
  Synthetic
gaagaagguaguuggggaua

SEQ ID NO: 718839 - RNA, 20 nt, Artificial Sequence
  Synthetic
ggagcauaagcaaauggaua

SEQ ID NO: 718840 - RNA, 20 nt, Artificial Sequence
  Synthetic
guaugugaaagaaauggaua

SEQ ID NO: 718841 - RNA, 20 nt, Artificial Sequence
  Synthetic
gaagagugaccagcuggaua

SEQ ID NO: 718842 - RNA, 20 nt, Artificial Sequence
  Synthetic
ggaugaguccaagguggaua

SEQ ID NO: 718843 - RNA, 20 nt, Artificial Sequence
  Synthetic
gggcaugaauaagguggaua

SEQ ID NO: 718844 - RNA, 20 nt, Artificial Sequence
  Synthetic
gagaauucagguauuggaua

SEQ ID NO: 718845 - RNA, 20 nt, Artificial Sequence
  Synthetic
gugggucaaggauuuggaua

SEQ ID NO: 718846 - RNA, 20 nt, Artificial Sequence
  Synthetic
ggucccaaguguuuuggaua

SEQ ID NO: 718847 - RNA, 20 nt, Artificial Sequence
  Synthetic
gggccagggaugaaaugaua

SEQ ID NO: 718848 - RNA, 20 nt, Artificial Sequence
  Synthetic
gugcccuuugaccaaugaua

SEQ ID NO: 718849 - RNA, 20 nt, Artificial Sequence
  Synthetic
gccuguugacucucaugaua

SEQ ID NO: 718850 - RNA, 20 nt, Artificial Sequence
  Synthetic
gucccagguauuucaugaua

SEQ ID NO: 718851 - RNA, 20 nt, Artificial Sequence
  Synthetic
gauaguaugggaggaugaua

SEQ ID NO: 718852 - RNA, 20 nt, Artificial Sequence
  Synthetic
guaaggaaaaugaacugaua

SEQ ID NO: 718853 - RNA, 20 nt, Artificial Sequence
  Synthetic
gaucacuuuacucccugaua

SEQ ID NO: 718854 - RNA, 20 nt, Artificial Sequence
  Synthetic
guuagauuagaauccugaua

SEQ ID NO: 718855 - RNA, 20 nt, Artificial Sequence
  Synthetic
guuguuuuucagaggugaua

SEQ ID NO: 718856 - RNA, 20 nt, Artificial Sequence
  Synthetic
gcugagguaggagggugaua

SEQ ID NO: 718857 - RNA, 20 nt, Artificial Sequence
  Synthetic
gaacauagauuaacuugaua

SEQ ID NO: 718858 - RNA, 20 nt, Artificial Sequence
  Synthetic
guuccuguauuaguuugaua

SEQ ID NO: 718859 - RNA, 20 nt, Artificial Sequence
  Synthetic
gugauuuacaugcaaauaua

SEQ ID NO: 718860 - RNA, 20 nt, Artificial Sequence
  Synthetic
gcgaaaugaaaggaaauaua

SEQ ID NO: 718861 - RNA, 20 nt, Artificial Sequence
  Synthetic
gaaaauaagcauacaauaua

SEQ ID NO: 718862 - RNA, 20 nt, Artificial Sequence
  Synthetic
gaaguaaauuauacaauaua

SEQ ID NO: 718863 - RNA, 20 nt, Artificial Sequence
  Synthetic
gagcuauagcuuauaauaua

SEQ ID NO: 718864 - RNA, 20 nt, Artificial Sequence
  Synthetic
gcguguguuuguuuaauaua

SEQ ID NO: 718865 - RNA, 20 nt, Artificial Sequence
  Synthetic
gggacaaaagauaacauaua

SEQ ID NO: 718866 - RNA, 20 nt, Artificial Sequence
  Synthetic
gaaugcaaggauaacauaua

SEQ ID NO: 718867 - RNA, 20 nt, Artificial Sequence
  Synthetic
gcuauaggaaaaaccauaua

SEQ ID NO: 718868 - RNA, 20 nt, Artificial Sequence
  Synthetic
gaucagcucauguccauaua

SEQ ID NO: 718869 - RNA, 20 nt, Artificial Sequence
  Synthetic
ggugugagcagcugcauaua

SEQ ID NO: 718870 - RNA, 20 nt, Artificial Sequence
  Synthetic
gugggagugaguuucauaua

SEQ ID NO: 718871 - RNA, 20 nt, Artificial Sequence
  Synthetic
gaaagaauaaagcauauaua

SEQ ID NO: 718872 - RNA, 20 nt, Artificial Sequence
  Synthetic
gagauaaguauucauauaua

SEQ ID NO: 718873 - RNA, 20 nt, Artificial Sequence
  Synthetic
gugggguacauauauauaua

SEQ ID NO: 718874 - RNA, 20 nt, Artificial Sequence
  Synthetic
guccaugucagagcuauaua

SEQ ID NO: 718875 - RNA, 20 nt, Artificial Sequence
  Synthetic
guaagaauuagauuuauaua

SEQ ID NO: 718876 - RNA, 20 nt, Artificial Sequence
  Synthetic
gcagagaaaugagaacuaua

SEQ ID NO: 718877 - RNA, 20 nt, Artificial Sequence
  Synthetic
guuacaaccuagucccuaua

SEQ ID NO: 718878 - RNA, 20 nt, Artificial Sequence
  Synthetic
gggagucaccugugccuaua

SEQ ID NO: 718879 - RNA, 20 nt, Artificial Sequence
  Synthetic
gauuuuuuuuaaaggcuaua

SEQ ID NO: 718880 - RNA, 20 nt, Artificial Sequence
  Synthetic
gccaaagaaaaacugcuaua

SEQ ID NO: 718881 - RNA, 20 nt, Artificial Sequence
  Synthetic
gguuggggauugcugcuaua

SEQ ID NO: 718882 - RNA, 20 nt, Artificial Sequence
  Synthetic
guagaucuggaaaaucuaua

SEQ ID NO: 718883 - RNA, 20 nt, Artificial Sequence
  Synthetic
gcuauuauccagaaucuaua

SEQ ID NO: 718884 - RNA, 20 nt, Artificial Sequence
  Synthetic
gcuaauacccggaaucuaua

SEQ ID NO: 718885 - RNA, 20 nt, Artificial Sequence
  Synthetic
guuagcugcaaauuucuaua

SEQ ID NO: 718886 - RNA, 20 nt, Artificial Sequence
  Synthetic
ggccagguuugccaaguaua

SEQ ID NO: 718887 - RNA, 20 nt, Artificial Sequence
  Synthetic
gaagggggccagagaguaua

SEQ ID NO: 718888 - RNA, 20 nt, Artificial Sequence
  Synthetic
gaguuuucuaaauuaguaua

SEQ ID NO: 718889 - RNA, 20 nt, Artificial Sequence
  Synthetic
ggaaaaggcauaaccguaua

SEQ ID NO: 718890 - RNA, 20 nt, Artificial Sequence
  Synthetic
ggaucugcaugguggguaua

SEQ ID NO: 718891 - RNA, 20 nt, Artificial Sequence
  Synthetic
ggcaacaaagaacauguaua

SEQ ID NO: 718892 - RNA, 20 nt, Artificial Sequence
  Synthetic
gugauuauccauuauguaua

SEQ ID NO: 718893 - RNA, 20 nt, Artificial Sequence
  Synthetic
gucauuugcaugucuguaua

SEQ ID NO: 718894 - RNA, 20 nt, Artificial Sequence
  Synthetic
gauuuauuuucauuuguaua

SEQ ID NO: 718895 - RNA, 20 nt, Artificial Sequence
  Synthetic
gcuaugugaauguuuguaua

SEQ ID NO: 718896 - RNA, 20 nt, Artificial Sequence
  Synthetic
gaaugagugacagaauuaua

SEQ ID NO: 718897 - RNA, 20 nt, Artificial Sequence
  Synthetic
gccaaaauaucaccauuaua

SEQ ID NO: 718898 - RNA, 20 nt, Artificial Sequence
  Synthetic
gugaccucuuucccauuaua

SEQ ID NO: 718899 - RNA, 20 nt, Artificial Sequence
  Synthetic
gccaguauaaaagccuuaua

SEQ ID NO: 718900 - RNA, 20 nt, Artificial Sequence
  Synthetic
gcuuuugugaggaucuuaua

SEQ ID NO: 718901 - RNA, 20 nt, Artificial Sequence
  Synthetic
gauuucauucaaauguuaua

SEQ ID NO: 718902 - RNA, 20 nt, Artificial Sequence
  Synthetic
gcuccauaaccuauguuaua

SEQ ID NO: 718903 - RNA, 20 nt, Artificial Sequence
  Synthetic
gaggguacuaaagauuuaua

SEQ ID NO: 718904 - RNA, 20 nt, Artificial Sequence
  Synthetic
guugguguaaaggauuuaua

SEQ ID NO: 718905 - RNA, 20 nt, Artificial Sequence
  Synthetic
guauuuuccuacuauuuaua

SEQ ID NO: 718906 - RNA, 20 nt, Artificial Sequence
  Synthetic
gauuuugaaaguaguuuaua

SEQ ID NO: 718907 - RNA, 20 nt, Artificial Sequence
  Synthetic
guucuaaaauggauuuuaua

SEQ ID NO: 718908 - RNA, 20 nt, Artificial Sequence
  Synthetic
gcugaacucccacuuuuaua

SEQ ID NO: 718909 - RNA, 20 nt, Artificial Sequence
  Synthetic
gaaauucagaaaguuuuaua

SEQ ID NO: 718910 - RNA, 20 nt, Artificial Sequence
  Synthetic
gaacacaguugcuuuuuaua

SEQ ID NO: 718911 - RNA, 20 nt, Artificial Sequence
  Synthetic
gaugcuuuuuucuuuuuaua

SEQ ID NO: 718912 - RNA, 20 nt, Artificial Sequence
  Synthetic
gaugucaugugguuuuuaua

SEQ ID NO: 718913 - RNA, 20 nt, Artificial Sequence
  Synthetic
gggcagagggcagcaaacua

SEQ ID NO: 718914 - RNA, 20 nt, Artificial Sequence
  Synthetic
gcacguaugcugagaaacua

SEQ ID NO: 718915 - RNA, 20 nt, Artificial Sequence
  Synthetic
gauggcaacaguagaaacua

SEQ ID NO: 718916 - RNA, 20 nt, Artificial Sequence
  Synthetic
gcaaacucuaauguaaacua

SEQ ID NO: 718917 - RNA, 20 nt, Artificial Sequence
  Synthetic
gcuaaaguacuccacaacua

SEQ ID NO: 718918 - RNA, 20 nt, Artificial Sequence
  Synthetic
ggcaaugucaugggcaacua

SEQ ID NO: 718919 - RNA, 20 nt, Artificial Sequence
  Synthetic
gagaaggauaaagagaacua

SEQ ID NO: 718920 - RNA, 20 nt, Artificial Sequence
  Synthetic
gaaaugcuauccaggaacua

SEQ ID NO: 718921 - RNA, 20 nt, Artificial Sequence
  Synthetic
gcuguguuacaauauaacua

SEQ ID NO: 718922 - RNA, 20 nt, Artificial Sequence
  Synthetic
gaguauuaagauacuaacua

SEQ ID NO: 718923 - RNA, 20 nt, Artificial Sequence
  Synthetic
gcuuaaaguagcuuuaacua

SEQ ID NO: 718924 - RNA, 20 nt, Artificial Sequence
  Synthetic
gaagcagggcaaaaccacua

SEQ ID NO: 718925 - RNA, 20 nt, Artificial Sequence
  Synthetic
guaaauuagcacaaccacua

SEQ ID NO: 718926 - RNA, 20 nt, Artificial Sequence
  Synthetic
gggaaauggguagcccacua

SEQ ID NO: 718927 - RNA, 20 nt, Artificial Sequence
  Synthetic
gugaaaagguguagccacua

SEQ ID NO: 718928 - RNA, 20 nt, Artificial Sequence
  Synthetic
guggcacacuagaaucacua

SEQ ID NO: 718929 - RNA, 20 nt, Artificial Sequence
  Synthetic
gcugcacguuagaaucacua

SEQ ID NO: 718930 - RNA, 20 nt, Artificial Sequence
  Synthetic
gauaucagauuguaucacua

SEQ ID NO: 718931 - RNA, 20 nt, Artificial Sequence
  Synthetic
gugauauaaguuccucacua

SEQ ID NO: 718932 - RNA, 20 nt, Artificial Sequence
  Synthetic
gcaacaaugaaguuucacua

SEQ ID NO: 718933 - RNA, 20 nt, Artificial Sequence
  Synthetic
guagagaugggguuucacua

SEQ ID NO: 718934 - RNA, 20 nt, Artificial Sequence
  Synthetic
ggcuaagagcuagaggacua

SEQ ID NO: 718935 - RNA, 20 nt, Artificial Sequence
  Synthetic
ggagggguggagggauacua

SEQ ID NO: 718936 - RNA, 20 nt, Artificial Sequence
  Synthetic
gcugaagaacccugauacua

SEQ ID NO: 718937 - RNA, 20 nt, Artificial Sequence
  Synthetic
gugaauguaugauacuacua

SEQ ID NO: 718938 - RNA, 20 nt, Artificial Sequence
  Synthetic
guacuuuuaaauaccuacua

SEQ ID NO: 718939 - RNA, 20 nt, Artificial Sequence
  Synthetic
gccuauaaucccagcuacua

SEQ ID NO: 718940 - RNA, 20 nt, Artificial Sequence
  Synthetic
gccuguaaucccagcuacua

SEQ ID NO: 718941 - RNA, 20 nt, Artificial Sequence
  Synthetic
gcuaguagucccagcuacua

SEQ ID NO: 718942 - RNA, 20 nt, Artificial Sequence
  Synthetic
gccaguuaauaaccguacua

SEQ ID NO: 718943 - RNA, 20 nt, Artificial Sequence
  Synthetic
gcuuugaugauaauguacua

SEQ ID NO: 718944 - RNA, 20 nt, Artificial Sequence
  Synthetic
guuugagaaccacuguacua

SEQ ID NO: 718945 - RNA, 20 nt, Artificial Sequence
  Synthetic
gauuuaggaucauauuacua

SEQ ID NO: 718946 - RNA, 20 nt, Artificial Sequence
  Synthetic
gguuaguccccaacuuacua

SEQ ID NO: 718947 - RNA, 20 nt, Artificial Sequence
  Synthetic
guuaaauuuauugcuuacua

SEQ ID NO: 718948 - RNA, 20 nt, Artificial Sequence
  Synthetic
gguaacauuguacauaccua

SEQ ID NO: 718949 - RNA, 20 nt, Artificial Sequence
  Synthetic
gugggcacaagaacuaccua

SEQ ID NO: 718950 - RNA, 20 nt, Artificial Sequence
  Synthetic
gcaaacuucaacucuaccua

SEQ ID NO: 718951 - RNA, 20 nt, Artificial Sequence
  Synthetic
ggcaaguggauuuguaccua

SEQ ID NO: 718952 - RNA, 20 nt, Artificial Sequence
  Synthetic
ggaauauuugcauuacccua

SEQ ID NO: 718953 - RNA, 20 nt, Artificial Sequence
  Synthetic
gagguugccaaaauccccua

SEQ ID NO: 718954 - RNA, 20 nt, Artificial Sequence
  Synthetic
gccacccacaccauccccua

SEQ ID NO: 718955 - RNA, 20 nt, Artificial Sequence
  Synthetic
gagagauuuguaaugcccua

SEQ ID NO: 718956 - RNA, 20 nt, Artificial Sequence
  Synthetic
guaugagaacaacugcccua

SEQ ID NO: 718957 - RNA, 20 nt, Artificial Sequence
  Synthetic
ggauaaacaugucaucccua

SEQ ID NO: 718958 - RNA, 20 nt, Artificial Sequence
  Synthetic
gucuccuguugucaucccua

SEQ ID NO: 718959 - RNA, 20 nt, Artificial Sequence
  Synthetic
gaaaugccauccucucccua

SEQ ID NO: 718960 - RNA, 20 nt, Artificial Sequence
  Synthetic
gggcaucuacucuuucccua

SEQ ID NO: 718961 - RNA, 20 nt, Artificial Sequence
  Synthetic
ggaccaaucuuaaaagccua

SEQ ID NO: 718962 - RNA, 20 nt, Artificial Sequence
  Synthetic
gcucucacucagccagccua

SEQ ID NO: 718963 - RNA, 20 nt, Artificial Sequence
  Synthetic
guauacuuuaauauagccua

SEQ ID NO: 718964 - RNA, 20 nt, Artificial Sequence
  Synthetic
gaaagccaaaggaaugccua

SEQ ID NO: 718965 - RNA, 20 nt, Artificial Sequence
  Synthetic
gacaaguaauuugaugccua

SEQ ID NO: 718966 - RNA, 20 nt, Artificial Sequence
  Synthetic
gcuuaacccauuuaugccua

SEQ ID NO: 718967 - RNA, 20 nt, Artificial Sequence
  Synthetic
gaauugucuuuuccugccua

SEQ ID NO: 718968 - RNA, 20 nt, Artificial Sequence
  Synthetic
gcaaauguucauuuugccua

SEQ ID NO: 718969 - RNA, 20 nt, Artificial Sequence
  Synthetic
guuuuauuugaugaauccua

SEQ ID NO: 718970 - RNA, 20 nt, Artificial Sequence
  Synthetic
ggaaggcuagggucauccua

SEQ ID NO: 718971 - RNA, 20 nt, Artificial Sequence
  Synthetic
gaugaaauuauaugauccua

SEQ ID NO: 718972 - RNA, 20 nt, Artificial Sequence
  Synthetic
gacaaucuaggcuuauccua

SEQ ID NO: 718973 - RNA, 20 nt, Artificial Sequence
  Synthetic
gcagcccagcucaucuccua

SEQ ID NO: 718974 - RNA, 20 nt, Artificial Sequence
  Synthetic
gcugagcuccuuauguccua

SEQ ID NO: 718975 - RNA, 20 nt, Artificial Sequence
  Synthetic
guggguccaauuucuuccua

SEQ ID NO: 718976 - RNA, 20 nt, Artificial Sequence
  Synthetic
gauucuacuguuuuuuccua

SEQ ID NO: 718977 - RNA, 20 nt, Artificial Sequence
  Synthetic
ggggcuuguguaucaagcua

SEQ ID NO: 718978 - RNA, 20 nt, Artificial Sequence
  Synthetic
gcuaaaaacugcugaagcua

SEQ ID NO: 718979 - RNA, 20 nt, Artificial Sequence
  Synthetic
gguaagaaauucugaagcua

SEQ ID NO: 718980 - RNA, 20 nt, Artificial Sequence
  Synthetic
gaaaagaccaguaacagcua

SEQ ID NO: 718981 - RNA, 20 nt, Artificial Sequence
  Synthetic
ggcgccuguagucccagcua

SEQ ID NO: 718982 - RNA, 20 nt, Artificial Sequence
  Synthetic
ggucuggagaauaggagcua

SEQ ID NO: 718983 - RNA, 20 nt, Artificial Sequence
  Synthetic
gacacauugugauggagcua

SEQ ID NO: 718984 - RNA, 20 nt, Artificial Sequence
  Synthetic
gaaugaacaaagcugagcua

SEQ ID NO: 718985 - RNA, 20 nt, Artificial Sequence
  Synthetic
gaggaaugcaaaggacgcua

SEQ ID NO: 718986 - RNA, 20 nt, Artificial Sequence
  Synthetic
gugugcgcgcgcgugcgcua

SEQ ID NO: 718987 - RNA, 20 nt, Artificial Sequence
  Synthetic
gcacaccacaguguucgcua

SEQ ID NO: 718988 - RNA, 20 nt, Artificial Sequence
  Synthetic
gaaggcugcaggaaaggcua

SEQ ID NO: 718989 - RNA, 20 nt, Artificial Sequence
  Synthetic
gugugccagugcccaggcua

SEQ ID NO: 718990 - RNA, 20 nt, Artificial Sequence
  Synthetic
gagugauuuuuagggggcua

SEQ ID NO: 718991 - RNA, 20 nt, Artificial Sequence
  Synthetic
guguuaacuuggcugggcua

SEQ ID NO: 718992 - RNA, 20 nt, Artificial Sequence
  Synthetic
gucagcuaaugggugggcua

SEQ ID NO: 718993 - RNA, 20 nt, Artificial Sequence
  Synthetic
gaggguugcaaguugggcua

SEQ ID NO: 718994 - RNA, 20 nt, Artificial Sequence
  Synthetic
gcuaaguuaccaaauggcua

SEQ ID NO: 718995 - RNA, 20 nt, Artificial Sequence
  Synthetic
gacaccagcuggcauggcua

SEQ ID NO: 718996 - RNA, 20 nt, Artificial Sequence
  Synthetic
gaguuaucauaccuuggcua

SEQ ID NO: 718997 - RNA, 20 nt, Artificial Sequence
  Synthetic
gcugccuuauaaguuggcua

SEQ ID NO: 718998 - RNA, 20 nt, Artificial Sequence
  Synthetic
gauaauugagaauuuggcua

SEQ ID NO: 718999 - RNA, 20 nt, Artificial Sequence
  Synthetic
gaaaaguaggcaaaaugcua

SEQ ID NO: 719000 - RNA, 20 nt, Artificial Sequence
  Synthetic
gaaaagggggcagaaugcua

SEQ ID NO: 719001 - RNA, 20 nt, Artificial Sequence
  Synthetic
gaggggaacaacacaugcua

SEQ ID NO: 719002 - RNA, 20 nt, Artificial Sequence
  Synthetic
guaauguuugcucuaugcua

SEQ ID NO: 719003 - RNA, 20 nt, Artificial Sequence
  Synthetic
gcuuuccaauggguaugcua

SEQ ID NO: 719004 - RNA, 20 nt, Artificial Sequence
  Synthetic
gaacaugagguaaacugcua

SEQ ID NO: 719005 - RNA, 20 nt, Artificial Sequence
  Synthetic
gaaguugacucuugcugcua

SEQ ID NO: 719006 - RNA, 20 nt, Artificial Sequence
  Synthetic
guauuacuaugauagugcua

SEQ ID NO: 719007 - RNA, 20 nt, Artificial Sequence
  Synthetic
gaagucccacuagauugcua

SEQ ID NO: 719008 - RNA, 20 nt, Artificial Sequence
  Synthetic
guagagacggagucuugcua

SEQ ID NO: 719009 - RNA, 20 nt, Artificial Sequence
  Synthetic
ggucaugcuuuagguugcua

SEQ ID NO: 719010 - RNA, 20 nt, Artificial Sequence
  Synthetic
gaaagcuacauuuguugcua

SEQ ID NO: 719011 - RNA, 20 nt, Artificial Sequence
  Synthetic
guuuccauauaaguuugcua

SEQ ID NO: 719012 - RNA, 20 nt, Artificial Sequence
  Synthetic
guuccugcauuaguuugcua

SEQ ID NO: 719013 - RNA, 20 nt, Artificial Sequence
  Synthetic
gaacaaaggcuaaaaaucua

SEQ ID NO: 719014 - RNA, 20 nt, Artificial Sequence
  Synthetic
gcagccuccuuaaaaaucua

SEQ ID NO: 719015 - RNA, 20 nt, Artificial Sequence
  Synthetic
gguacugagcccucaaucua

SEQ ID NO: 719016 - RNA, 20 nt, Artificial Sequence
  Synthetic
gagugccccauaauaaucua

SEQ ID NO: 719017 - RNA, 20 nt, Artificial Sequence
  Synthetic
gagcucuuguccagcaucua

SEQ ID NO: 719018 - RNA, 20 nt, Artificial Sequence
  Synthetic
guaauauuugcccugaucua

SEQ ID NO: 719019 - RNA, 20 nt, Artificial Sequence
  Synthetic
gcuuuucaauagaauaucua

SEQ ID NO: 719020 - RNA, 20 nt, Artificial Sequence
  Synthetic
ggauauuguuuuauuaucua

SEQ ID NO: 719021 - RNA, 20 nt, Artificial Sequence
  Synthetic
gaaaacaguuagcuuaucua

SEQ ID NO: 719022 - RNA, 20 nt, Artificial Sequence
  Synthetic
gacuaucacaaaugacucua

SEQ ID NO: 719023 - RNA, 20 nt, Artificial Sequence
  Synthetic
gauuagaugcuucaccucua

SEQ ID NO: 719024 - RNA, 20 nt, Artificial Sequence
  Synthetic
gugcugaauuuccagcucua

SEQ ID NO: 719025 - RNA, 20 nt, Artificial Sequence
  Synthetic
gagaaaaucuucaggcucua

SEQ ID NO: 719026 - RNA, 20 nt, Artificial Sequence
  Synthetic
gguauccuuaaugaucucua

SEQ ID NO: 719027 - RNA, 20 nt, Artificial Sequence
  Synthetic
guuggaauaguuauucucua

SEQ ID NO: 719028 - RNA, 20 nt, Artificial Sequence
  Synthetic
guugucugaugccuucucua

SEQ ID NO: 719029 - RNA, 20 nt, Artificial Sequence
  Synthetic
ggauuggcauggcuucucua

SEQ ID NO: 719030 - RNA, 20 nt, Artificial Sequence
  Synthetic
guuuaauuuuaucuucucua

SEQ ID NO: 719031 - RNA, 20 nt, Artificial Sequence
  Synthetic
gaaagaaacacuuaagucua

SEQ ID NO: 719032 - RNA, 20 nt, Artificial Sequence
  Synthetic
gacugaaauuccagagucua

SEQ ID NO: 719033 - RNA, 20 nt, Artificial Sequence
  Synthetic
gagcuaacguaacuugucua

SEQ ID NO: 719034 - RNA, 20 nt, Artificial Sequence
  Synthetic
gaauauugagaccuugucua

SEQ ID NO: 719035 - RNA, 20 nt, Artificial Sequence
  Synthetic
guuaaaccauauucauucua

SEQ ID NO: 719036 - RNA, 20 nt, Artificial Sequence
  Synthetic
gcagauuugagaugauucua

SEQ ID NO: 719037 - RNA, 20 nt, Artificial Sequence
  Synthetic
gugaccauuccuaacuucua

SEQ ID NO: 719038 - RNA, 20 nt, Artificial Sequence
  Synthetic
guauucuuaaauggcuucua

SEQ ID NO: 719039 - RNA, 20 nt, Artificial Sequence
  Synthetic
gcaaccuguucacaguucua

SEQ ID NO: 719040 - RNA, 20 nt, Artificial Sequence
  Synthetic
guuccaauaagcaauuucua

SEQ ID NO: 719041 - RNA, 20 nt, Artificial Sequence
  Synthetic
ggugauagcauccauuucua

SEQ ID NO: 719042 - RNA, 20 nt, Artificial Sequence
  Synthetic
gguuuuuccauauauuucua

SEQ ID NO: 719043 - RNA, 20 nt, Artificial Sequence
  Synthetic
guuacguuucuaaguuucua

SEQ ID NO: 719044 - RNA, 20 nt, Artificial Sequence
  Synthetic
gagagaaucugggguuucua

SEQ ID NO: 719045 - RNA, 20 nt, Artificial Sequence
  Synthetic
gucaccgcuuaaauuuucua

SEQ ID NO: 719046 - RNA, 20 nt, Artificial Sequence
  Synthetic
guuucugauuugauuuucua

SEQ ID NO: 719047 - RNA, 20 nt, Artificial Sequence
  Synthetic
guguuaucuucccaaaagua

SEQ ID NO: 719048 - RNA, 20 nt, Artificial Sequence
  Synthetic
gucacagaggcaggaaagua

SEQ ID NO: 719049 - RNA, 20 nt, Artificial Sequence
  Synthetic
gaauaagagaagguaaagua

SEQ ID NO: 719050 - RNA, 20 nt, Artificial Sequence
  Synthetic
guguuuuuagauguaaagua

SEQ ID NO: 719051 - RNA, 20 nt, Artificial Sequence
  Synthetic
gaacauucaaaaaagaagua

SEQ ID NO: 719052 - RNA, 20 nt, Artificial Sequence
  Synthetic
gacaggaagcagaagaagua

SEQ ID NO: 719053 - RNA, 20 nt, Artificial Sequence
  Synthetic
gauaagaggggacagaagua

SEQ ID NO: 719054 - RNA, 20 nt, Artificial Sequence
  Synthetic
gugaauacuauacugaagua

SEQ ID NO: 719055 - RNA, 20 nt, Artificial Sequence
  Synthetic
gugauaugcuaggcuaagua

SEQ ID NO: 719056 - RNA, 20 nt, Artificial Sequence
  Synthetic
gcuaagguauuguguaagua

SEQ ID NO: 719057 - RNA, 20 nt, Artificial Sequence
  Synthetic
ggagguaauuauuuuaagua

SEQ ID NO: 719058 - RNA, 20 nt, Artificial Sequence
  Synthetic
ggagacuauugucaacagua

SEQ ID NO: 719059 - RNA, 20 nt, Artificial Sequence
  Synthetic
guagauagagaggcacagua

SEQ ID NO: 719060 - RNA, 20 nt, Artificial Sequence
  Synthetic
gucucuguauucagacagua

SEQ ID NO: 719061 - RNA, 20 nt, Artificial Sequence
  Synthetic
gaacaugggaggggacagua

SEQ ID NO: 719062 - RNA, 20 nt, Artificial Sequence
  Synthetic
guaaauuaauuuggacagua

SEQ ID NO: 719063 - RNA, 20 nt, Artificial Sequence
  Synthetic
gcccauacucuucaccagua

SEQ ID NO: 719064 - RNA, 20 nt, Artificial Sequence
  Synthetic
guguggagaauuauccagua

SEQ ID NO: 719065 - RNA, 20 nt, Artificial Sequence
  Synthetic
gaacccucaagguuccagua

SEQ ID NO: 719066 - RNA, 20 nt, Artificial Sequence
  Synthetic
gacaucuguauuuuccagua

SEQ ID NO: 719067 - RNA, 20 nt, Artificial Sequence
  Synthetic
gucuuuccaugaaggcagua

SEQ ID NO: 719068 - RNA, 20 nt, Artificial Sequence
  Synthetic
guaaaucaccuugggcagua

SEQ ID NO: 719069 - RNA, 20 nt, Artificial Sequence
  Synthetic
guaaauuaccuugggcagua

SEQ ID NO: 719070 - RNA, 20 nt, Artificial Sequence
  Synthetic
gaucauuuuuacaugcagua

SEQ ID NO: 719071 - RNA, 20 nt, Artificial Sequence
  Synthetic
gaaagacaaauuauucagua

SEQ ID NO: 719072 - RNA, 20 nt, Artificial Sequence
  Synthetic
gaagugaggcagacagagua

SEQ ID NO: 719073 - RNA, 20 nt, Artificial Sequence
  Synthetic
gguuagaggcagugagagua

SEQ ID NO: 719074 - RNA, 20 nt, Artificial Sequence
  Synthetic
gcacuuugggaggccgagua

SEQ ID NO: 719075 - RNA, 20 nt, Artificial Sequence
  Synthetic
ggcaccaccauacucgagua

SEQ ID NO: 719076 - RNA, 20 nt, Artificial Sequence
  Synthetic
gagugacagacgaaggagua

SEQ ID NO: 719077 - RNA, 20 nt, Artificial Sequence
  Synthetic
ggaaacaauugcagggagua

SEQ ID NO: 719078 - RNA, 20 nt, Artificial Sequence
  Synthetic
guguguguguggcgggagua

SEQ ID NO: 719079 - RNA, 20 nt, Artificial Sequence
  Synthetic
gcugagaauuugauggagua

SEQ ID NO: 719080 - RNA, 20 nt, Artificial Sequence
  Synthetic
gcuuugguguggggauagua

SEQ ID NO: 719081 - RNA, 20 nt, Artificial Sequence
  Synthetic
guauauauauauuuauagua

SEQ ID NO: 719082 - RNA, 20 nt, Artificial Sequence
  Synthetic
gacaacauuguuuuauagua

SEQ ID NO: 719083 - RNA, 20 nt, Artificial Sequence
  Synthetic
guacauacuggaaacuagua

SEQ ID NO: 719084 - RNA, 20 nt, Artificial Sequence
  Synthetic
gggaauacuaaaaccuagua

SEQ ID NO: 719085 - RNA, 20 nt, Artificial Sequence
  Synthetic
gagagaugacacagcuagua

SEQ ID NO: 719086 - RNA, 20 nt, Artificial Sequence
  Synthetic
gacuugacuaaacucuagua

SEQ ID NO: 719087 - RNA, 20 nt, Artificial Sequence
  Synthetic
ggcacauguuauaaguagua

SEQ ID NO: 719088 - RNA, 20 nt, Artificial Sequence
  Synthetic
ggcgcacacuuugaguagua

SEQ ID NO: 719089 - RNA, 20 nt, Artificial Sequence
  Synthetic
gugcugguagaauaguagua

SEQ ID NO: 719090 - RNA, 20 nt, Artificial Sequence
  Synthetic
gcucaacuagguagguagua

SEQ ID NO: 719091 - RNA, 20 nt, Artificial Sequence
  Synthetic
gcucugacgcagucuuagua

SEQ ID NO: 719092 - RNA, 20 nt, Artificial Sequence
  Synthetic
gaagaaauuuuugguuagua

SEQ ID NO: 719093 - RNA, 20 nt, Artificial Sequence
  Synthetic
gaagaagaggaggaaccgua

SEQ ID NO: 719094 - RNA, 20 nt, Artificial Sequence
  Synthetic
guauauauuuuacaugcgua

SEQ ID NO: 719095 - RNA, 20 nt, Artificial Sequence
  Synthetic
ggacagaagguuacaucgua

SEQ ID NO: 719096 - RNA, 20 nt, Artificial Sequence
  Synthetic
gccucuggaggcaaaaggua

SEQ ID NO: 719097 - RNA, 20 nt, Artificial Sequence
  Synthetic
gaaaggugaaaagaaaggua

SEQ ID NO: 719098 - RNA, 20 nt, Artificial Sequence
  Synthetic
gaauauaaaauauaaaggua

SEQ ID NO: 719099 - RNA, 20 nt, Artificial Sequence
  Synthetic
gcaaagauuggaagaaggua

SEQ ID NO: 719100 - RNA, 20 nt, Artificial Sequence
  Synthetic
gcucugggagguagaaggua

SEQ ID NO: 719101 - RNA, 20 nt, Artificial Sequence
  Synthetic
guuucuucugugaagaggua

SEQ ID NO: 719102 - RNA, 20 nt, Artificial Sequence
  Synthetic
guaugccaggcuaagaggua

SEQ ID NO: 719103 - RNA, 20 nt, Artificial Sequence
  Synthetic
gggagcuugggagugaggua

SEQ ID NO: 719104 - RNA, 20 nt, Artificial Sequence
  Synthetic
gagaugcauagggugaggua

SEQ ID NO: 719105 - RNA, 20 nt, Artificial Sequence
  Synthetic
gacaaucuauuguguaggua

SEQ ID NO: 719106 - RNA, 20 nt, Artificial Sequence
  Synthetic
gccuuccauuuugagcggua

SEQ ID NO: 719107 - RNA, 20 nt, Artificial Sequence
  Synthetic
gaguuuuaccaaucagggua

SEQ ID NO: 719108 - RNA, 20 nt, Artificial Sequence
  Synthetic
ggggguggggggcuagggua

SEQ ID NO: 719109 - RNA, 20 nt, Artificial Sequence
  Synthetic
gaggaggugagaugggggua

SEQ ID NO: 719110 - RNA, 20 nt, Artificial Sequence
  Synthetic
gaaggaacuuggcuggggua

SEQ ID NO: 719111 - RNA, 20 nt, Artificial Sequence
  Synthetic
gguagagcagaugaugggua

SEQ ID NO: 719112 - RNA, 20 nt, Artificial Sequence
  Synthetic
gagaagguaaaguaugggua

SEQ ID NO: 719113 - RNA, 20 nt, Artificial Sequence
  Synthetic
gagagauugguuacugggua

SEQ ID NO: 719114 - RNA, 20 nt, Artificial Sequence
  Synthetic
gagcagcagacagcugggua

SEQ ID NO: 719115 - RNA, 20 nt, Artificial Sequence
  Synthetic
ggcauugauaguagugggua

SEQ ID NO: 719116 - RNA, 20 nt, Artificial Sequence
  Synthetic
gcagaacagucuggugggua

SEQ ID NO: 719117 - RNA, 20 nt, Artificial Sequence
  Synthetic
ggcacaauuaggauugggua

SEQ ID NO: 719118 - RNA, 20 nt, Artificial Sequence
  Synthetic
gcuucucaagagccauggua

SEQ ID NO: 719119 - RNA, 20 nt, Artificial Sequence
  Synthetic
gaaggaaguuugguauggua

SEQ ID NO: 719120 - RNA, 20 nt, Artificial Sequence
  Synthetic
guuuucaagaaacacuggua

SEQ ID NO: 719121 - RNA, 20 nt, Artificial Sequence
  Synthetic
gguagcuucuucaccuggua

SEQ ID NO: 719122 - RNA, 20 nt, Artificial Sequence
  Synthetic
gacugggaaggguaguggua

SEQ ID NO: 719123 - RNA, 20 nt, Artificial Sequence
  Synthetic
ggggagugcaguuuguggua

SEQ ID NO: 719124 - RNA, 20 nt, Artificial Sequence
  Synthetic
gaaaccuuaagucauuggua

SEQ ID NO: 719125 - RNA, 20 nt, Artificial Sequence
  Synthetic
guuuuauuccauuguuggua

SEQ ID NO: 719126 - RNA, 20 nt, Artificial Sequence
  Synthetic
gaauuuguaugaguuuggua

SEQ ID NO: 719127 - RNA, 20 nt, Artificial Sequence
  Synthetic
gaucacugcagauaaaugua

SEQ ID NO: 719128 - RNA, 20 nt, Artificial Sequence
  Synthetic
gugcuaauucacccaaugua

SEQ ID NO: 719129 - RNA, 20 nt, Artificial Sequence
  Synthetic
gcuaccuagaugaagaugua

SEQ ID NO: 719130 - RNA, 20 nt, Artificial Sequence
  Synthetic
gaaggcaguuuuaagaugua

SEQ ID NO: 719131 - RNA, 20 nt, Artificial Sequence
  Synthetic
gcacagccagcccagaugua

SEQ ID NO: 719132 - RNA, 20 nt, Artificial Sequence
  Synthetic
gucagccauguaaugaugua

SEQ ID NO: 719133 - RNA, 20 nt, Artificial Sequence
  Synthetic
ggggccagcucugugaugua

SEQ ID NO: 719134 - RNA, 20 nt, Artificial Sequence
  Synthetic
gaauuuucuuaaauuaugua

SEQ ID NO: 719135 - RNA, 20 nt, Artificial Sequence
  Synthetic
ggcuuucagaguauuaugua

SEQ ID NO: 719136 - RNA, 20 nt, Artificial Sequence
  Synthetic
gcugcggcuuuguuuaugua

SEQ ID NO: 719137 - RNA, 20 nt, Artificial Sequence
  Synthetic
ggguugagaguagaacugua

SEQ ID NO: 719138 - RNA, 20 nt, Artificial Sequence
  Synthetic
guguuguaguugugacugua

SEQ ID NO: 719139 - RNA, 20 nt, Artificial Sequence
  Synthetic
ggcacaugucuaaaccugua

SEQ ID NO: 719140 - RNA, 20 nt, Artificial Sequence
  Synthetic
guugcaaauucuugccugua

SEQ ID NO: 719141 - RNA, 20 nt, Artificial Sequence
  Synthetic
gaaaagcaguuuugccugua

SEQ ID NO: 719142 - RNA, 20 nt, Artificial Sequence
  Synthetic
gcaccaaccuaacagcugua

SEQ ID NO: 719143 - RNA, 20 nt, Artificial Sequence
  Synthetic
gaaaauaaauaaucgcugua

SEQ ID NO: 719144 - RNA, 20 nt, Artificial Sequence
  Synthetic
gaucaccucagucugcugua

SEQ ID NO: 719145 - RNA, 20 nt, Artificial Sequence
  Synthetic
gcaaguagcccaaaucugua

SEQ ID NO: 719146 - RNA, 20 nt, Artificial Sequence
  Synthetic
gcugcccagaugauucugua

SEQ ID NO: 719147 - RNA, 20 nt, Artificial Sequence
  Synthetic
gauuuuuaucugauucugua

SEQ ID NO: 719148 - RNA, 20 nt, Artificial Sequence
  Synthetic
guuagcaaacuuauucugua

SEQ ID NO: 719149 - RNA, 20 nt, Artificial Sequence
  Synthetic
guguacacaucacaagugua

SEQ ID NO: 719150 - RNA, 20 nt, Artificial Sequence
  Synthetic
guuguaauauggugagugua

SEQ ID NO: 719151 - RNA, 20 nt, Artificial Sequence
  Synthetic
gacaccauaagcuacgugua

SEQ ID NO: 719152 - RNA, 20 nt, Artificial Sequence
  Synthetic
ggugccugcuguuuggugua

SEQ ID NO: 719153 - RNA, 20 nt, Artificial Sequence
  Synthetic
gcucaaagucacaaugugua

SEQ ID NO: 719154 - RNA, 20 nt, Artificial Sequence
  Synthetic
gugcuaguaaagugugugua

SEQ ID NO: 719155 - RNA, 20 nt, Artificial Sequence
  Synthetic
guuggcuaugccuuugugua

SEQ ID NO: 719156 - RNA, 20 nt, Artificial Sequence
  Synthetic
gccccaugcuggacauugua

SEQ ID NO: 719157 - RNA, 20 nt, Artificial Sequence
  Synthetic
ggaccuuugaagccauugua

SEQ ID NO: 719158 - RNA, 20 nt, Artificial Sequence
  Synthetic
guauauuuuauuccauugua

SEQ ID NO: 719159 - RNA, 20 nt, Artificial Sequence
  Synthetic
guacaucucccuggcuugua

SEQ ID NO: 719160 - RNA, 20 nt, Artificial Sequence
  Synthetic
gauguagcgccuggcuugua

SEQ ID NO: 719161 - RNA, 20 nt, Artificial Sequence
  Synthetic
gaggauguguguagguugua

SEQ ID NO: 719162 - RNA, 20 nt, Artificial Sequence
  Synthetic
gauaauuuccacaauuugua

SEQ ID NO: 719163 - RNA, 20 nt, Artificial Sequence
  Synthetic
gaugauuaaauagauuugua

SEQ ID NO: 719164 - RNA, 20 nt, Artificial Sequence
  Synthetic
gcaauugauaaauauuugua

SEQ ID NO: 719165 - RNA, 20 nt, Artificial Sequence
  Synthetic
gaaaaggaaaauacuuugua

SEQ ID NO: 719166 - RNA, 20 nt, Artificial Sequence
  Synthetic
ggcuuguucuuucuuuugua

SEQ ID NO: 719167 - RNA, 20 nt, Artificial Sequence
  Synthetic
ggauauaaaauauuuuugua

SEQ ID NO: 719168 - RNA, 20 nt, Artificial Sequence
  Synthetic
ggaguucuuagaaaaaauua

SEQ ID NO: 719169 - RNA, 20 nt, Artificial Sequence
  Synthetic
guggaaaagcccaaaaauua

SEQ ID NO: 719170 - RNA, 20 nt, Artificial Sequence
  Synthetic
gaagagauauguuaaaauua

SEQ ID NO: 719171 - RNA, 20 nt, Artificial Sequence
  Synthetic
guguaguaaaagagaaauua

SEQ ID NO: 719172 - RNA, 20 nt, Artificial Sequence
  Synthetic
gaaccagcaucuugaaauua

SEQ ID NO: 719173 - RNA, 20 nt, Artificial Sequence
  Synthetic
gaaugcacauuuauaaauua

SEQ ID NO: 719174 - RNA, 20 nt, Artificial Sequence
  Synthetic
guugucaccugaguaaauua

SEQ ID NO: 719175 - RNA, 20 nt, Artificial Sequence
  Synthetic
gaugauagggacguaaauua

SEQ ID NO: 719176 - RNA, 20 nt, Artificial Sequence
  Synthetic
gaaauuggcucaugcaauua

SEQ ID NO: 719177 - RNA, 20 nt, Artificial Sequence
  Synthetic
ggaauggucauaaagaauua

SEQ ID NO: 719178 - RNA, 20 nt, Artificial Sequence
  Synthetic
gguauaugaaaagagaauua

SEQ ID NO: 719179 - RNA, 20 nt, Artificial Sequence
  Synthetic
guuucuucuccuuagaauua

SEQ ID NO: 719180 - RNA, 20 nt, Artificial Sequence
  Synthetic
gcacaaucaauuuugaauua

SEQ ID NO: 719181 - RNA, 20 nt, Artificial Sequence
  Synthetic
ggguuuuuacauuauaauua

SEQ ID NO: 719182 - RNA, 20 nt, Artificial Sequence
  Synthetic
gauuacuugcuuuauaauua

SEQ ID NO: 719183 - RNA, 20 nt, Artificial Sequence
  Synthetic
gauauauguuuuucuaauua

SEQ ID NO: 719184 - RNA, 20 nt, Artificial Sequence
  Synthetic
ggccuuuaaagggguaauua

SEQ ID NO: 719185 - RNA, 20 nt, Artificial Sequence
  Synthetic
gaagaucuguuuguuaauua

SEQ ID NO: 719186 - RNA, 20 nt, Artificial Sequence
  Synthetic
gacuaggaagucuaacauua

SEQ ID NO: 719187 - RNA, 20 nt, Artificial Sequence
  Synthetic
gagaaaaaagguucacauua

SEQ ID NO: 719188 - RNA, 20 nt, Artificial Sequence
  Synthetic
guauauuaguacaaccauua

SEQ ID NO: 719189 - RNA, 20 nt, Artificial Sequence
  Synthetic
gaguaugucuaaagccauua

SEQ ID NO: 719190 - RNA, 20 nt, Artificial Sequence
  Synthetic
ggagugcaguugugccauua

SEQ ID NO: 719191 - RNA, 20 nt, Artificial Sequence
  Synthetic
guaaaugaguacauccauua

SEQ ID NO: 719192 - RNA, 20 nt, Artificial Sequence
  Synthetic
gaagaacauggauuccauua

SEQ ID NO: 719193 - RNA, 20 nt, Artificial Sequence
  Synthetic
gauggaagcaccuugcauua

SEQ ID NO: 719194 - RNA, 20 nt, Artificial Sequence
  Synthetic
gucuuuucuggucaucauua

SEQ ID NO: 719195 - RNA, 20 nt, Artificial Sequence
  Synthetic
guacagaagaguuaucauua

SEQ ID NO: 719196 - RNA, 20 nt, Artificial Sequence
  Synthetic
gauuugcgaauuuaucauua

SEQ ID NO: 719197 - RNA, 20 nt, Artificial Sequence
  Synthetic
gaugcuacgaagaaagauua

SEQ ID NO: 719198 - RNA, 20 nt, Artificial Sequence
  Synthetic
guugaggauuugcaagauua

SEQ ID NO: 719199 - RNA, 20 nt, Artificial Sequence
  Synthetic
gaguaugacagucaagauua

SEQ ID NO: 719200 - RNA, 20 nt, Artificial Sequence
  Synthetic
gcagaaauaagagcagauua

SEQ ID NO: 719201 - RNA, 20 nt, Artificial Sequence
  Synthetic
gaagcguagugugcagauua

SEQ ID NO: 719202 - RNA, 20 nt, Artificial Sequence
  Synthetic
ggagagauagugauagauua

SEQ ID NO: 719203 - RNA, 20 nt, Artificial Sequence
  Synthetic
guuaaguucccuauagauua

SEQ ID NO: 719204 - RNA, 20 nt, Artificial Sequence
  Synthetic
gaggggagauagcuagauua

SEQ ID NO: 719205 - RNA, 20 nt, Artificial Sequence
  Synthetic
guguuuuagaaaaccgauua

SEQ ID NO: 719206 - RNA, 20 nt, Artificial Sequence
  Synthetic
guugaaaaaaauagggauua

SEQ ID NO: 719207 - RNA, 20 nt, Artificial Sequence
  Synthetic
gaaaucaagaauggggauua

SEQ ID NO: 719208 - RNA, 20 nt, Artificial Sequence
  Synthetic
ggcaucuguggaugggauua

SEQ ID NO: 719209 - RNA, 20 nt, Artificial Sequence
  Synthetic
gaaagcaggaauuuggauua

SEQ ID NO: 719210 - RNA, 20 nt, Artificial Sequence
  Synthetic
gaacauggaggaagugauua

SEQ ID NO: 719211 - RNA, 20 nt, Artificial Sequence
  Synthetic
ggagcuuuaggaggugauua

SEQ ID NO: 719212 - RNA, 20 nt, Artificial Sequence
  Synthetic
gacagaucaaaaacauauua

SEQ ID NO: 719213 - RNA, 20 nt, Artificial Sequence
  Synthetic
ggcauaggaaacagauauua

SEQ ID NO: 719214 - RNA, 20 nt, Artificial Sequence
  Synthetic
gcaucaaucuaaauauauua

SEQ ID NO: 719215 - RNA, 20 nt, Artificial Sequence
  Synthetic
guaaagagaacaguauauua

SEQ ID NO: 719216 - RNA, 20 nt, Artificial Sequence
  Synthetic
gaguaauaaggaguauauua

SEQ ID NO: 719217 - RNA, 20 nt, Artificial Sequence
  Synthetic
guccuuacugaggccuauua

SEQ ID NO: 719218 - RNA, 20 nt, Artificial Sequence
  Synthetic
gcuaguuuucacagcuauua

SEQ ID NO: 719219 - RNA, 20 nt, Artificial Sequence
  Synthetic
gugagagccugucucuauua

SEQ ID NO: 719220 - RNA, 20 nt, Artificial Sequence
  Synthetic
guauuuucccuagauuauua

SEQ ID NO: 719221 - RNA, 20 nt, Artificial Sequence
  Synthetic
gaaaugaaucuguauuauua

SEQ ID NO: 719222 - RNA, 20 nt, Artificial Sequence
  Synthetic
gggagcagccauacuuauua

SEQ ID NO: 719223 - RNA, 20 nt, Artificial Sequence
  Synthetic
ggguacaaugcaucuuauua

SEQ ID NO: 719224 - RNA, 20 nt, Artificial Sequence
  Synthetic
guacuugcaucucccacuua

SEQ ID NO: 719225 - RNA, 20 nt, Artificial Sequence
  Synthetic
gguucccugaauuccacuua

SEQ ID NO: 719226 - RNA, 20 nt, Artificial Sequence
  Synthetic
gguauuauuaauuccacuua

SEQ ID NO: 719227 - RNA, 20 nt, Artificial Sequence
  Synthetic
gccuguaaucccagcacuua

SEQ ID NO: 719228 - RNA, 20 nt, Artificial Sequence
  Synthetic
guuuaauuaaaguauacuua

SEQ ID NO: 719229 - RNA, 20 nt, Artificial Sequence
  Synthetic
gcuuucacuauaguuacuua

SEQ ID NO: 719230 - RNA, 20 nt, Artificial Sequence
  Synthetic
gcaagcagaaaccuaccuua

SEQ ID NO: 719231 - RNA, 20 nt, Artificial Sequence
  Synthetic
gguccugcaaauggcccuua

SEQ ID NO: 719232 - RNA, 20 nt, Artificial Sequence
  Synthetic
gaacauaaugggaagccuua

SEQ ID NO: 719233 - RNA, 20 nt, Artificial Sequence
  Synthetic
guugguagagaaaggccuua

SEQ ID NO: 719234 - RNA, 20 nt, Artificial Sequence
  Synthetic
gacccguucccucugccuua

SEQ ID NO: 719235 - RNA, 20 nt, Artificial Sequence
  Synthetic
gucucugacuguuugccuua

SEQ ID NO: 719236 - RNA, 20 nt, Artificial Sequence
  Synthetic
gccauuucccaugcuccuua

SEQ ID NO: 719237 - RNA, 20 nt, Artificial Sequence
  Synthetic
gaggcuaaauaauuuccuua

SEQ ID NO: 719238 - RNA, 20 nt, Artificial Sequence
  Synthetic
gacaacuagucauuuccuua

SEQ ID NO: 719239 - RNA, 20 nt, Artificial Sequence
  Synthetic
gucuuagaugagccagcuua

SEQ ID NO: 719240 - RNA, 20 nt, Artificial Sequence
  Synthetic
gagcugugauagucagcuua

SEQ ID NO: 719241 - RNA, 20 nt, Artificial Sequence
  Synthetic
ggagagaaacccugagcuua

SEQ ID NO: 719242 - RNA, 20 nt, Artificial Sequence
  Synthetic
gccuguaacccuagcgcuua

SEQ ID NO: 719243 - RNA, 20 nt, Artificial Sequence
  Synthetic
gggcagcaaacuauggcuua

SEQ ID NO: 719244 - RNA, 20 nt, Artificial Sequence
  Synthetic
ggaagguauuuuguggcuua

SEQ ID NO: 719245 - RNA, 20 nt, Artificial Sequence
  Synthetic
ggaaaaacauuccaugcuua

SEQ ID NO: 719246 - RNA, 20 nt, Artificial Sequence
  Synthetic
ggauccagaguugcugcuua

SEQ ID NO: 719247 - RNA, 20 nt, Artificial Sequence
  Synthetic
guacuuguuuucucugcuua

SEQ ID NO: 719248 - RNA, 20 nt, Artificial Sequence
  Synthetic
ggauggaaggguggugcuua

SEQ ID NO: 719249 - RNA, 20 nt, Artificial Sequence
  Synthetic
gaggaaagaaaaauugcuua

SEQ ID NO: 719250 - RNA, 20 nt, Artificial Sequence
  Synthetic
gaagggaaugaguaaucuua

SEQ ID NO: 719251 - RNA, 20 nt, Artificial Sequence
  Synthetic
ggaaauuugcuuuaaucuua

SEQ ID NO: 719252 - RNA, 20 nt, Artificial Sequence
  Synthetic
guugggugacagucaucuua

SEQ ID NO: 719253 - RNA, 20 nt, Artificial Sequence
  Synthetic
ggagcaguggcuuucucuua

SEQ ID NO: 719254 - RNA, 20 nt, Artificial Sequence
  Synthetic
gacuucagucuuuucucuua

SEQ ID NO: 719255 - RNA, 20 nt, Artificial Sequence
  Synthetic
guagugaauuuucagucuua

SEQ ID NO: 719256 - RNA, 20 nt, Artificial Sequence
  Synthetic
guaauauuuauggugucuua

SEQ ID NO: 719257 - RNA, 20 nt, Artificial Sequence
  Synthetic
gaaguucucuugaauucuua

SEQ ID NO: 719258 - RNA, 20 nt, Artificial Sequence
  Synthetic
gcacauaagaaagauucuua

SEQ ID NO: 719259 - RNA, 20 nt, Artificial Sequence
  Synthetic
gagucuuuuucagauucuua

SEQ ID NO: 719260 - RNA, 20 nt, Artificial Sequence
  Synthetic
gaagcugaaguggauucuua

SEQ ID NO: 719261 - RNA, 20 nt, Artificial Sequence
  Synthetic
gaaguacaaggaacuucuua

SEQ ID NO: 719262 - RNA, 20 nt, Artificial Sequence
  Synthetic
guguuucccuaaucuucuua

SEQ ID NO: 719263 - RNA, 20 nt, Artificial Sequence
  Synthetic
gaaaaacuaagacuuucuua

SEQ ID NO: 719264 - RNA, 20 nt, Artificial Sequence
  Synthetic
gaaaaaguagcauuuucuua

SEQ ID NO: 719265 - RNA, 20 nt, Artificial Sequence
  Synthetic
gggaagaauaggaaaaguua

SEQ ID NO: 719266 - RNA, 20 nt, Artificial Sequence
  Synthetic
guauuuucaacuaaaaguua

SEQ ID NO: 719267 - RNA, 20 nt, Artificial Sequence
  Synthetic
gauuucauuacacaaaguua

SEQ ID NO: 719268 - RNA, 20 nt, Artificial Sequence
  Synthetic
gccuacuagaauguaaguua

SEQ ID NO: 719269 - RNA, 20 nt, Artificial Sequence
  Synthetic
gauauaugaaucuuaaguua

SEQ ID NO: 719270 - RNA, 20 nt, Artificial Sequence
  Synthetic
gaguuuacuucuuacaguua

SEQ ID NO: 719271 - RNA, 20 nt, Artificial Sequence
  Synthetic
gcuuuuauccuuugcaguua

SEQ ID NO: 719272 - RNA, 20 nt, Artificial Sequence
  Synthetic
ggacccuaagagcucaguua

SEQ ID NO: 719273 - RNA, 20 nt, Artificial Sequence
  Synthetic
gagguaugcugcuucaguua

SEQ ID NO: 719274 - RNA, 20 nt, Artificial Sequence
  Synthetic
ggaauaguugcuaagaguua

SEQ ID NO: 719275 - RNA, 20 nt, Artificial Sequence
  Synthetic
gccugggaaaguaggaguua

SEQ ID NO: 719276 - RNA, 20 nt, Artificial Sequence
  Synthetic
gcuacaaaggaauugaguua

SEQ ID NO: 719277 - RNA, 20 nt, Artificial Sequence
  Synthetic
guaaaacauacaucuaguua

SEQ ID NO: 719278 - RNA, 20 nt, Artificial Sequence
  Synthetic
gauaguuuuguauguaguua

SEQ ID NO: 719279 - RNA, 20 nt, Artificial Sequence
  Synthetic
guugaaaaaacaucacguua

SEQ ID NO: 719280 - RNA, 20 nt, Artificial Sequence
  Synthetic
gagaaacauuuaaaagguua

SEQ ID NO: 719281 - RNA, 20 nt, Artificial Sequence
  Synthetic
gggaggaauggcaaagguua

SEQ ID NO: 719282 - RNA, 20 nt, Artificial Sequence
  Synthetic
gggcagaagggagaagguua

SEQ ID NO: 719283 - RNA, 20 nt, Artificial Sequence
  Synthetic
gaguauagaaagggagguua

SEQ ID NO: 719284 - RNA, 20 nt, Artificial Sequence
  Synthetic
ggcacuggauuauaggguua

SEQ ID NO: 719285 - RNA, 20 nt, Artificial Sequence
  Synthetic
gaaaguauucaaguggguua

SEQ ID NO: 719286 - RNA, 20 nt, Artificial Sequence
  Synthetic
gugggaucaggcugauguua

SEQ ID NO: 719287 - RNA, 20 nt, Artificial Sequence
  Synthetic
ggaaauuauugaauauguua

SEQ ID NO: 719288 - RNA, 20 nt, Artificial Sequence
  Synthetic
gaauuuuaucaacuauguua

SEQ ID NO: 719289 - RNA, 20 nt, Artificial Sequence
  Synthetic
gggaaauguacuguauguua

SEQ ID NO: 719290 - RNA, 20 nt, Artificial Sequence
  Synthetic
ggacacauaauuuuauguua

SEQ ID NO: 719291 - RNA, 20 nt, Artificial Sequence
  Synthetic
gguuagggcgaaguguguua

SEQ ID NO: 719292 - RNA, 20 nt, Artificial Sequence
  Synthetic
gaaauuaagagaaauuguua

SEQ ID NO: 719293 - RNA, 20 nt, Artificial Sequence
  Synthetic
gcuuuggcaaacacuuguua

SEQ ID NO: 719294 - RNA, 20 nt, Artificial Sequence
  Synthetic
ggcaaggacccuacuuguua

SEQ ID NO: 719295 - RNA, 20 nt, Artificial Sequence
  Synthetic
gaaaaaauauagucuuguua

SEQ ID NO: 719296 - RNA, 20 nt, Artificial Sequence
  Synthetic
gaguuagggagaguuuguua

SEQ ID NO: 719297 - RNA, 20 nt, Artificial Sequence
  Synthetic
gucuguuaaugacaaauuua

SEQ ID NO: 719298 - RNA, 20 nt, Artificial Sequence
  Synthetic
gcaaagucgaaagaaauuua

SEQ ID NO: 719299 - RNA, 20 nt, Artificial Sequence
  Synthetic
gaaugaguucgagaaauuua

SEQ ID NO: 719300 - RNA, 20 nt, Artificial Sequence
  Synthetic
gagaaugcagaggcaauuua

SEQ ID NO: 719301 - RNA, 20 nt, Artificial Sequence
  Synthetic
guacagucucuugcaauuua

SEQ ID NO: 719302 - RNA, 20 nt, Artificial Sequence
  Synthetic
ggacaaauagaaaacauuua

SEQ ID NO: 719303 - RNA, 20 nt, Artificial Sequence
  Synthetic
gacuguggcucacacauuua

SEQ ID NO: 719304 - RNA, 20 nt, Artificial Sequence
  Synthetic
ggguccccagaccacauuua

SEQ ID NO: 719305 - RNA, 20 nt, Artificial Sequence
  Synthetic
guuugugaguccagcauuua

SEQ ID NO: 719306 - RNA, 20 nt, Artificial Sequence
  Synthetic
gauuuuuuuaaaaagauuua

SEQ ID NO: 719307 - RNA, 20 nt, Artificial Sequence
  Synthetic
guguuggagucugagauuua

SEQ ID NO: 719308 - RNA, 20 nt, Artificial Sequence
  Synthetic
ggaauaugcugaaggauuua

SEQ ID NO: 719309 - RNA, 20 nt, Artificial Sequence
  Synthetic
gacugagauuguaauauuua

SEQ ID NO: 719310 - RNA, 20 nt, Artificial Sequence
  Synthetic
gguaucaugcuucauauuua

SEQ ID NO: 719311 - RNA, 20 nt, Artificial Sequence
  Synthetic
gcaauaaacucuuauauuua

SEQ ID NO: 719312 - RNA, 20 nt, Artificial Sequence
  Synthetic
ggucuuucgucuuauauuua

SEQ ID NO: 719313 - RNA, 20 nt, Artificial Sequence
  Synthetic
guuuauucuacagcuauuua

SEQ ID NO: 719314 - RNA, 20 nt, Artificial Sequence
  Synthetic
gaaaaaugcugaaguauuua

SEQ ID NO: 719315 - RNA, 20 nt, Artificial Sequence
  Synthetic
guaauaacuauauguauuua

SEQ ID NO: 719316 - RNA, 20 nt, Artificial Sequence
  Synthetic
guuaaaagaaaaauuauuua

SEQ ID NO: 719317 - RNA, 20 nt, Artificial Sequence
  Synthetic
gacacaugcugaauuauuua

SEQ ID NO: 719318 - RNA, 20 nt, Artificial Sequence
  Synthetic
gaagcuaaguaacuuauuua

SEQ ID NO: 719319 - RNA, 20 nt, Artificial Sequence
  Synthetic
guuuuguuuuguuuuauuua

SEQ ID NO: 719320 - RNA, 20 nt, Artificial Sequence
  Synthetic
ggaucauuuugccaacuuua

SEQ ID NO: 719321 - RNA, 20 nt, Artificial Sequence
  Synthetic
gaauuuggaaaaacacuuua

SEQ ID NO: 719322 - RNA, 20 nt, Artificial Sequence
  Synthetic
guuauaaauccaacacuuua

SEQ ID NO: 719323 - RNA, 20 nt, Artificial Sequence
  Synthetic
gugaguaguggggcacuuua

SEQ ID NO: 719324 - RNA, 20 nt, Artificial Sequence
  Synthetic
gcugaaaacaauguacuuua

SEQ ID NO: 719325 - RNA, 20 nt, Artificial Sequence
  Synthetic
gaauguaagucauuacuuua

SEQ ID NO: 719326 - RNA, 20 nt, Artificial Sequence
  Synthetic
gucucuagucacuuacuuua

SEQ ID NO: 719327 - RNA, 20 nt, Artificial Sequence
  Synthetic
gcaccugaagguaaccuuua

SEQ ID NO: 719328 - RNA, 20 nt, Artificial Sequence
  Synthetic
ggucuccagccaccccuuua

SEQ ID NO: 719329 - RNA, 20 nt, Artificial Sequence
  Synthetic
gaacuuuugguugcccuuua

SEQ ID NO: 719330 - RNA, 20 nt, Artificial Sequence
  Synthetic
guaaauucucucucccuuua

SEQ ID NO: 719331 - RNA, 20 nt, Artificial Sequence
  Synthetic
ggacugaguccuucccuuua

SEQ ID NO: 719332 - RNA, 20 nt, Artificial Sequence
  Synthetic
gacuaagucccuggccuuua

SEQ ID NO: 719333 - RNA, 20 nt, Artificial Sequence
  Synthetic
gaagucuuauguuuccuuua

SEQ ID NO: 719334 - RNA, 20 nt, Artificial Sequence
  Synthetic
gcauugauguguuuccuuua

SEQ ID NO: 719335 - RNA, 20 nt, Artificial Sequence
  Synthetic
gaauuuauaauuuaucuuua

SEQ ID NO: 719336 - RNA, 20 nt, Artificial Sequence
  Synthetic
guacauuguauugcucuuua

SEQ ID NO: 719337 - RNA, 20 nt, Artificial Sequence
  Synthetic
gggagaguguagaaaguuua

SEQ ID NO: 719338 - RNA, 20 nt, Artificial Sequence
  Synthetic
guuuccuuuagggaaguuua

SEQ ID NO: 719339 - RNA, 20 nt, Artificial Sequence
  Synthetic
ggaaacaacccugaaguuua

SEQ ID NO: 719340 - RNA, 20 nt, Artificial Sequence
  Synthetic
guuuuaggccaguaaguuua

SEQ ID NO: 719341 - RNA, 20 nt, Artificial Sequence
  Synthetic
gucuuuauuauuucaguuua

SEQ ID NO: 719342 - RNA, 20 nt, Artificial Sequence
  Synthetic
guauauauguauauaguuua

SEQ ID NO: 719343 - RNA, 20 nt, Artificial Sequence
  Synthetic
ggaauuuuauccaagguuua

SEQ ID NO: 719344 - RNA, 20 nt, Artificial Sequence
  Synthetic
guuaaaaccacuaagguuua

SEQ ID NO: 719345 - RNA, 20 nt, Artificial Sequence
  Synthetic
guugaaaacuaugagguuua

SEQ ID NO: 719346 - RNA, 20 nt, Artificial Sequence
  Synthetic
ggagguaacgcauagguuua

SEQ ID NO: 719347 - RNA, 20 nt, Artificial Sequence
  Synthetic
ggaggugaugcauagguuua

SEQ ID NO: 719348 - RNA, 20 nt, Artificial Sequence
  Synthetic
ggaggauuaugaaggguuua

SEQ ID NO: 719349 - RNA, 20 nt, Artificial Sequence
  Synthetic
guugauauuuuaaugguuua

SEQ ID NO: 719350 - RNA, 20 nt, Artificial Sequence
  Synthetic
gaucuuaaaacaaauguuua

SEQ ID NO: 719351 - RNA, 20 nt, Artificial Sequence
  Synthetic
gguuguauuggugauguuua

SEQ ID NO: 719352 - RNA, 20 nt, Artificial Sequence
  Synthetic
gaaugcuuauacacuguuua

SEQ ID NO: 719353 - RNA, 20 nt, Artificial Sequence
  Synthetic
guuggcauauuuauuguuua

SEQ ID NO: 719354 - RNA, 20 nt, Artificial Sequence
  Synthetic
gcucuaucauuaaaauuuua

SEQ ID NO: 719355 - RNA, 20 nt, Artificial Sequence
  Synthetic
guaaaauggccacaauuuua

SEQ ID NO: 719356 - RNA, 20 nt, Artificial Sequence
  Synthetic
gguaagcaucaugaauuuua

SEQ ID NO: 719357 - RNA, 20 nt, Artificial Sequence
  Synthetic
gaacauauucaaacauuuua

SEQ ID NO: 719358 - RNA, 20 nt, Artificial Sequence
  Synthetic
guuauuaaacaaucauuuua

SEQ ID NO: 719359 - RNA, 20 nt, Artificial Sequence
  Synthetic
ggauauagugcuggauuuua

SEQ ID NO: 719360 - RNA, 20 nt, Artificial Sequence
  Synthetic
gcaucuugcauaugauuuua

SEQ ID NO: 719361 - RNA, 20 nt, Artificial Sequence
  Synthetic
gaacugggacccauauuuua

SEQ ID NO: 719362 - RNA, 20 nt, Artificial Sequence
  Synthetic
gaaaaaaauauaguauuuua

SEQ ID NO: 719363 - RNA, 20 nt, Artificial Sequence
  Synthetic
gugggggaaaauguauuuua

SEQ ID NO: 719364 - RNA, 20 nt, Artificial Sequence
  Synthetic
ggacaaaauguauuauuuua

SEQ ID NO: 719365 - RNA, 20 nt, Artificial Sequence
  Synthetic
gaaaaaaauaaauacuuuua

SEQ ID NO: 719366 - RNA, 20 nt, Artificial Sequence
  Synthetic
gaauauucagcauacuuuua

SEQ ID NO: 719367 - RNA, 20 nt, Artificial Sequence
  Synthetic
gucuccaacuuccccuuuua

SEQ ID NO: 719368 - RNA, 20 nt, Artificial Sequence
  Synthetic
gcuauguaacugugcuuuua

SEQ ID NO: 719369 - RNA, 20 nt, Artificial Sequence
  Synthetic
guuuccuacaucuucuuuua

SEQ ID NO: 719370 - RNA, 20 nt, Artificial Sequence
  Synthetic
gaaaauuuaacuuucuuuua

SEQ ID NO: 719371 - RNA, 20 nt, Artificial Sequence
  Synthetic
gcaaucaguaguuucuuuua

SEQ ID NO: 719372 - RNA, 20 nt, Artificial Sequence
  Synthetic
gucagaugugaccaguuuua

SEQ ID NO: 719373 - RNA, 20 nt, Artificial Sequence
  Synthetic
gccuucagcucucaguuuua

SEQ ID NO: 719374 - RNA, 20 nt, Artificial Sequence
  Synthetic
gggaucuacuacagguuuua

SEQ ID NO: 719375 - RNA, 20 nt, Artificial Sequence
  Synthetic
ggagggccagguagguuuua

SEQ ID NO: 719376 - RNA, 20 nt, Artificial Sequence
  Synthetic
gguuuucuucuaggguuuua

SEQ ID NO: 719377 - RNA, 20 nt, Artificial Sequence
  Synthetic
ggaaaguacuaaugguuuua

SEQ ID NO: 719378 - RNA, 20 nt, Artificial Sequence
  Synthetic
ggucagggaccacuguuuua

SEQ ID NO: 719379 - RNA, 20 nt, Artificial Sequence
  Synthetic
gcaaguagcucgcuguuuua

SEQ ID NO: 719380 - RNA, 20 nt, Artificial Sequence
  Synthetic
ggaaucagagacuauuuuua

SEQ ID NO: 719381 - RNA, 20 nt, Artificial Sequence
  Synthetic
guaguaggggucuauuuuua

SEQ ID NO: 719382 - RNA, 20 nt, Artificial Sequence
  Synthetic
ggugacaaaaugacuuuuua

SEQ ID NO: 719383 - RNA, 20 nt, Artificial Sequence
  Synthetic
gucuccuaauuaccuuuuua

SEQ ID NO: 719384 - RNA, 20 nt, Artificial Sequence
  Synthetic
gaagaagcugugccuuuuua

SEQ ID NO: 719385 - RNA, 20 nt, Artificial Sequence
  Synthetic
gacagaucuucuucuuuuua

SEQ ID NO: 719386 - RNA, 20 nt, Artificial Sequence
  Synthetic
guuuucuucuagaguuuuua

SEQ ID NO: 719387 - RNA, 20 nt, Artificial Sequence
  Synthetic
ggaguauuuugagguuuuua

SEQ ID NO: 719388 - RNA, 20 nt, Artificial Sequence
  Synthetic
guuaucuucuaggguuuuua

SEQ ID NO: 719389 - RNA, 20 nt, Artificial Sequence
  Synthetic
guuuucuucuaggguuuuua

SEQ ID NO: 719390 - RNA, 20 nt, Artificial Sequence
  Synthetic
ggucuuugugucuguuuuua

SEQ ID NO: 719391 - RNA, 20 nt, Artificial Sequence
  Synthetic
gcaaaagagauucuuuuuua

SEQ ID NO: 719392 - RNA, 20 nt, Artificial Sequence
  Synthetic
gugaacucauccuuuuuuua

SEQ ID NO: 719393 - RNA, 20 nt, Artificial Sequence
  Synthetic
gaaaagcaaaaagcaaaaac

SEQ ID NO: 719394 - RNA, 20 nt, Artificial Sequence
  Synthetic
guuccucagaaacuaaaaac

SEQ ID NO: 719395 - RNA, 20 nt, Artificial Sequence
  Synthetic
gaagcacucccuuuaaaaac

SEQ ID NO: 719396 - RNA, 20 nt, Artificial Sequence
  Synthetic
gaagcauucccuuuaaaaac

SEQ ID NO: 719397 - RNA, 20 nt, Artificial Sequence
  Synthetic
guugucauucuugucaaaac

SEQ ID NO: 719398 - RNA, 20 nt, Artificial Sequence
  Synthetic
gaaaaagcccuucagaaaac

SEQ ID NO: 719399 - RNA, 20 nt, Artificial Sequence
  Synthetic
gaaacgaaaggagagaaaac

SEQ ID NO: 719400 - RNA, 20 nt, Artificial Sequence
  Synthetic
guuccuuaaggggagaaaac

SEQ ID NO: 719401 - RNA, 20 nt, Artificial Sequence
  Synthetic
gauaaaaacuaugagaaaac

SEQ ID NO: 719402 - RNA, 20 nt, Artificial Sequence
  Synthetic
gaaguagggaaauggaaaac

SEQ ID NO: 719403 - RNA, 20 nt, Artificial Sequence
  Synthetic
ggaaaaaucuacuggaaaac

SEQ ID NO: 719404 - RNA, 20 nt, Artificial Sequence
  Synthetic
ggaagauacaagaugaaaac

SEQ ID NO: 719405 - RNA, 20 nt, Artificial Sequence
  Synthetic
gcuucuaaguuuaugaaaac

SEQ ID NO: 719406 - RNA, 20 nt, Artificial Sequence
  Synthetic
gaagcauucccuuugaaaac

SEQ ID NO: 719407 - RNA, 20 nt, Artificial Sequence
  Synthetic
guucacauacagaauaaaac

SEQ ID NO: 719408 - RNA, 20 nt, Artificial Sequence
  Synthetic
gaaaguuaugaggauaaaac

SEQ ID NO: 719409 - RNA, 20 nt, Artificial Sequence
  Synthetic
guauuaguuauauauaaaac

SEQ ID NO: 719410 - RNA, 20 nt, Artificial Sequence
  Synthetic
gacuaguauuuaucuaaaac

SEQ ID NO: 719411 - RNA, 20 nt, Artificial Sequence
  Synthetic
gcugauaaaggcucuaaaac

SEQ ID NO: 719412 - RNA, 20 nt, Artificial Sequence
  Synthetic
gccuuuuaucuuucuaaaac

SEQ ID NO: 719413 - RNA, 20 nt, Artificial Sequence
  Synthetic
guauuaagcacaauuaaaac

SEQ ID NO: 719414 - RNA, 20 nt, Artificial Sequence
  Synthetic
gugucagaauuaacacaaac

SEQ ID NO: 719415 - RNA, 20 nt, Artificial Sequence
  Synthetic
gaaaauuacuagugacaaac

SEQ ID NO: 719416 - RNA, 20 nt, Artificial Sequence
  Synthetic
gagacuggaggucuacaaac

SEQ ID NO: 719417 - RNA, 20 nt, Artificial Sequence
  Synthetic
gauuccugaacaucccaaac

SEQ ID NO: 719418 - RNA, 20 nt, Artificial Sequence
  Synthetic
gauauuuauuaaggccaaac

SEQ ID NO: 719419 - RNA, 20 nt, Artificial Sequence
  Synthetic
gguuuauuacauaggcaaac

SEQ ID NO: 719420 - RNA, 20 nt, Artificial Sequence
  Synthetic
gacaaaacuuugagucaaac

SEQ ID NO: 719421 - RNA, 20 nt, Artificial Sequence
  Synthetic
ggaauauucagaauucaaac

SEQ ID NO: 719422 - RNA, 20 nt, Artificial Sequence
  Synthetic
ggauaaagcaggaaagaaac

SEQ ID NO: 719423 - RNA, 20 nt, Artificial Sequence
  Synthetic
guucccugaauguaagaaac

SEQ ID NO: 719424 - RNA, 20 nt, Artificial Sequence
  Synthetic
gcuucaagaaguuaagaaac

SEQ ID NO: 719425 - RNA, 20 nt, Artificial Sequence
  Synthetic
guauagaggccaccagaaac

SEQ ID NO: 719426 - RNA, 20 nt, Artificial Sequence
  Synthetic
gcaguaaaaaaaugagaaac

SEQ ID NO: 719427 - RNA, 20 nt, Artificial Sequence
  Synthetic
gaaacaguauuuauagaaac

SEQ ID NO: 719428 - RNA, 20 nt, Artificial Sequence
  Synthetic
gcaggagaaucacucgaaac

SEQ ID NO: 719429 - RNA, 20 nt, Artificial Sequence
  Synthetic
gaauagaacagaagggaaac

SEQ ID NO: 719430 - RNA, 20 nt, Artificial Sequence
  Synthetic
ggugauauaauaaaugaaac

SEQ ID NO: 719431 - RNA, 20 nt, Artificial Sequence
  Synthetic
ggagaugaaguuacugaaac

SEQ ID NO: 719432 - RNA, 20 nt, Artificial Sequence
  Synthetic
gcacuuuggguggcugaaac

SEQ ID NO: 719433 - RNA, 20 nt, Artificial Sequence
  Synthetic
gucuacacaguugcugaaac

SEQ ID NO: 719434 - RNA, 20 nt, Artificial Sequence
  Synthetic
gaaucuuaucagagugaaac

SEQ ID NO: 719435 - RNA, 20 nt, Artificial Sequence
  Synthetic
gcaggagaauuacuugaaac

SEQ ID NO: 719436 - RNA, 20 nt, Artificial Sequence
  Synthetic
gcaugagaauugcuugaaac

SEQ ID NO: 719437 - RNA, 20 nt, Artificial Sequence
  Synthetic
guuuuucuuaaagaauaaac

SEQ ID NO: 719438 - RNA, 20 nt, Artificial Sequence
  Synthetic
gcuuuuaacuguuaauaaac

SEQ ID NO: 719439 - RNA, 20 nt, Artificial Sequence
  Synthetic
gucauuuugauugaguaaac

SEQ ID NO: 719440 - RNA, 20 nt, Artificial Sequence
  Synthetic
guaaauggugcuggguaaac

SEQ ID NO: 719441 - RNA, 20 nt, Artificial Sequence
  Synthetic
gguugcugagagcauuaaac

SEQ ID NO: 719442 - RNA, 20 nt, Artificial Sequence
  Synthetic
ggaagagcuagaauuuaaac

SEQ ID NO: 719443 - RNA, 20 nt, Artificial Sequence
  Synthetic
gucccaacgaaaaaaacaac

SEQ ID NO: 719444 - RNA, 20 nt, Artificial Sequence
  Synthetic
gaauguguuacauaaacaac

SEQ ID NO: 719445 - RNA, 20 nt, Artificial Sequence
  Synthetic
gacuggguggcuuaaacaac

SEQ ID NO: 719446 - RNA, 20 nt, Artificial Sequence
  Synthetic
gacacauuaacaucaacaac

SEQ ID NO: 719447 - RNA, 20 nt, Artificial Sequence
  Synthetic
gggugccaagaauacacaac

SEQ ID NO: 719448 - RNA, 20 nt, Artificial Sequence
  Synthetic
guuguagcacuguucacaac

SEQ ID NO: 719449 - RNA, 20 nt, Artificial Sequence
  Synthetic
gagaaauaagacuggacaac

SEQ ID NO: 719450 - RNA, 20 nt, Artificial Sequence
  Synthetic
gaacauauugaccugacaac

SEQ ID NO: 719451 - RNA, 20 nt, Artificial Sequence
  Synthetic
guggaaaauccugugacaac

SEQ ID NO: 719452 - RNA, 20 nt, Artificial Sequence
  Synthetic
gacaacauaaucuguacaac

SEQ ID NO: 719453 - RNA, 20 nt, Artificial Sequence
  Synthetic
gaaagaggagacauuacaac

SEQ ID NO: 719454 - RNA, 20 nt, Artificial Sequence
  Synthetic
gcagaaaaauauucaccaac

SEQ ID NO: 719455 - RNA, 20 nt, Artificial Sequence
  Synthetic
gauucaaugcuauccccaac

SEQ ID NO: 719456 - RNA, 20 nt, Artificial Sequence
  Synthetic
gcagagaaaaaacucccaac

SEQ ID NO: 719457 - RNA, 20 nt, Artificial Sequence
  Synthetic
gauuauaacaaggucccaac

SEQ ID NO: 719458 - RNA, 20 nt, Artificial Sequence
  Synthetic
gcauucacaacuuggccaac

SEQ ID NO: 719459 - RNA, 20 nt, Artificial Sequence
  Synthetic
guaauucaauuaccuccaac

SEQ ID NO: 719460 - RNA, 20 nt, Artificial Sequence
  Synthetic
gaguggaaagaaacagcaac

SEQ ID NO: 719461 - RNA, 20 nt, Artificial Sequence
  Synthetic
gcuacuauuaugaaugcaac

SEQ ID NO: 719462 - RNA, 20 nt, Artificial Sequence
  Synthetic
ggcaggagacugacugcaac

SEQ ID NO: 719463 - RNA, 20 nt, Artificial Sequence
  Synthetic
gagaaacaagucugugcaac

SEQ ID NO: 719464 - RNA, 20 nt, Artificial Sequence
  Synthetic
gcugguagauguauaucaac

SEQ ID NO: 719465 - RNA, 20 nt, Artificial Sequence
  Synthetic
gauuguuaauacaacucaac

SEQ ID NO: 719466 - RNA, 20 nt, Artificial Sequence
  Synthetic
gcugcaaaagacaucucaac

SEQ ID NO: 719467 - RNA, 20 nt, Artificial Sequence
  Synthetic
gugugcaggucaccuucaac

SEQ ID NO: 719468 - RNA, 20 nt, Artificial Sequence
  Synthetic
gacucacauuuuauuucaac

SEQ ID NO: 719469 - RNA, 20 nt, Artificial Sequence
  Synthetic
ggugggaggguagaaagaac

SEQ ID NO: 719470 - RNA, 20 nt, Artificial Sequence
  Synthetic
guugaaagauugugaagaac

SEQ ID NO: 719471 - RNA, 20 nt, Artificial Sequence
  Synthetic
gaucuagucuuuugaagaac

SEQ ID NO: 719472 - RNA, 20 nt, Artificial Sequence
  Synthetic
guauuuauuauaauaagaac

SEQ ID NO: 719473 - RNA, 20 nt, Artificial Sequence
  Synthetic
gucguggcagaaggcagaac

SEQ ID NO: 719474 - RNA, 20 nt, Artificial Sequence
  Synthetic
ggccacuuggagaucagaac

SEQ ID NO: 719475 - RNA, 20 nt, Artificial Sequence
  Synthetic
gaguuccuagggcagagaac

SEQ ID NO: 719476 - RNA, 20 nt, Artificial Sequence
  Synthetic
ggauuugguacagagagaac

SEQ ID NO: 719477 - RNA, 20 nt, Artificial Sequence
  Synthetic
guggugaaugcugagagaac

SEQ ID NO: 719478 - RNA, 20 nt, Artificial Sequence
  Synthetic
gucagaauaccaacuagaac

SEQ ID NO: 719479 - RNA, 20 nt, Artificial Sequence
  Synthetic
gaggagacggaauuuagaac

SEQ ID NO: 719480 - RNA, 20 nt, Artificial Sequence
  Synthetic
gaaauuguguccuuuagaac

SEQ ID NO: 719481 - RNA, 20 nt, Artificial Sequence
  Synthetic
ggguuaggggaagaaggaac

SEQ ID NO: 719482 - RNA, 20 nt, Artificial Sequence
  Synthetic
gauuccuugaacccaggaac

SEQ ID NO: 719483 - RNA, 20 nt, Artificial Sequence
  Synthetic
gaacuuucaaaagcaggaac

SEQ ID NO: 719484 - RNA, 20 nt, Artificial Sequence
  Synthetic
gagaagcuagcuggaggaac

SEQ ID NO: 719485 - RNA, 20 nt, Artificial Sequence
  Synthetic
ggaaaaauaugcugaggaac

SEQ ID NO: 719486 - RNA, 20 nt, Artificial Sequence
  Synthetic
gucagugaccuguuaggaac

SEQ ID NO: 719487 - RNA, 20 nt, Artificial Sequence
  Synthetic
gaaggagggaggaagggaac

SEQ ID NO: 719488 - RNA, 20 nt, Artificial Sequence
  Synthetic
gguaggaagagaaggggaac

SEQ ID NO: 719489 - RNA, 20 nt, Artificial Sequence
  Synthetic
gggcugggcgaagggggaac

SEQ ID NO: 719490 - RNA, 20 nt, Artificial Sequence
  Synthetic
gucaguaauaccauuggaac

SEQ ID NO: 719491 - RNA, 20 nt, Artificial Sequence
  Synthetic
gcaaguauggcauuuggaac

SEQ ID NO: 719492 - RNA, 20 nt, Artificial Sequence
  Synthetic
gcuuuugaugggaaaugaac

SEQ ID NO: 719493 - RNA, 20 nt, Artificial Sequence
  Synthetic
ggcagaggaagaagaugaac

SEQ ID NO: 719494 - RNA, 20 nt, Artificial Sequence
  Synthetic
ggccucccaagucccugaac

SEQ ID NO: 719495 - RNA, 20 nt, Artificial Sequence
  Synthetic
ggccucaggaaaagcugaac

SEQ ID NO: 719496 - RNA, 20 nt, Artificial Sequence
  Synthetic
gagcuuccggguagcugaac

SEQ ID NO: 719497 - RNA, 20 nt, Artificial Sequence
  Synthetic
gaauuaauaaaugagugaac

SEQ ID NO: 719498 - RNA, 20 nt, Artificial Sequence
  Synthetic
gugacccaaacaaggugaac

SEQ ID NO: 719499 - RNA, 20 nt, Artificial Sequence
  Synthetic
ggacaggaaaacaugugaac

SEQ ID NO: 719500 - RNA, 20 nt, Artificial Sequence
  Synthetic
gcuauuuuggugacuugaac

SEQ ID NO: 719501 - RNA, 20 nt, Artificial Sequence
  Synthetic
guaacauuuucagcuugaac

SEQ ID NO: 719502 - RNA, 20 nt, Artificial Sequence
  Synthetic
gccuccgccucccaaauaac

SEQ ID NO: 719503 - RNA, 20 nt, Artificial Sequence
  Synthetic
gaaauaauagggcaaauaac

SEQ ID NO: 719504 - RNA, 20 nt, Artificial Sequence
  Synthetic
gcuaguaaaugucaaauaac

SEQ ID NO: 719505 - RNA, 20 nt, Artificial Sequence
  Synthetic
gccaauguauccuaaauaac

SEQ ID NO: 719506 - RNA, 20 nt, Artificial Sequence
  Synthetic
gcuuuuagggcauuaauaac

SEQ ID NO: 719507 - RNA, 20 nt, Artificial Sequence
  Synthetic
guucucuguggaaacauaac

SEQ ID NO: 719508 - RNA, 20 nt, Artificial Sequence
  Synthetic
gggcugugggacuacauaac

SEQ ID NO: 719509 - RNA, 20 nt, Artificial Sequence
  Synthetic
gcaauaacuaguuccauaac

SEQ ID NO: 719510 - RNA, 20 nt, Artificial Sequence
  Synthetic
gcaggggagaggcucauaac

SEQ ID NO: 719511 - RNA, 20 nt, Artificial Sequence
  Synthetic
gucuauaaaggggagauaac

SEQ ID NO: 719512 - RNA, 20 nt, Artificial Sequence
  Synthetic
gugccagcaagacugauaac

SEQ ID NO: 719513 - RNA, 20 nt, Artificial Sequence
  Synthetic
gcuauuaaugugaauauaac

SEQ ID NO: 719514 - RNA, 20 nt, Artificial Sequence
  Synthetic
gugcuguauuuuuauauaac

SEQ ID NO: 719515 - RNA, 20 nt, Artificial Sequence
  Synthetic
guaacacuagccacuauaac

SEQ ID NO: 719516 - RNA, 20 nt, Artificial Sequence
  Synthetic
gauaguuaauaauuuauaac

SEQ ID NO: 719517 - RNA, 20 nt, Artificial Sequence
  Synthetic
gaucaggaaagucaacuaac

SEQ ID NO: 719518 - RNA, 20 nt, Artificial Sequence
  Synthetic
gaagacugucauucacuaac

SEQ ID NO: 719519 - RNA, 20 nt, Artificial Sequence
  Synthetic
guuuauaugcaaugacuaac

SEQ ID NO: 719520 - RNA, 20 nt, Artificial Sequence
  Synthetic
gguuuauaagaaauccuaac

SEQ ID NO: 719521 - RNA, 20 nt, Artificial Sequence
  Synthetic
guggggccccgguuccuaac

SEQ ID NO: 719522 - RNA, 20 nt, Artificial Sequence
  Synthetic
gcauucacaacuuagcuaac

SEQ ID NO: 719523 - RNA, 20 nt, Artificial Sequence
  Synthetic
guuauuucugauaugcuaac

SEQ ID NO: 719524 - RNA, 20 nt, Artificial Sequence
  Synthetic
gaauagcaccacuaucuaac

SEQ ID NO: 719525 - RNA, 20 nt, Artificial Sequence
  Synthetic
ggcaagcagaaaauucuaac

SEQ ID NO: 719526 - RNA, 20 nt, Artificial Sequence
  Synthetic
gggcucucuugccuucuaac

SEQ ID NO: 719527 - RNA, 20 nt, Artificial Sequence
  Synthetic
guauuacauauuuuucuaac

SEQ ID NO: 719528 - RNA, 20 nt, Artificial Sequence
  Synthetic
guauauucuuaaaaaguaac

SEQ ID NO: 719529 - RNA, 20 nt, Artificial Sequence
  Synthetic
ggauuucaaaaugcaguaac

SEQ ID NO: 719530 - RNA, 20 nt, Artificial Sequence
  Synthetic
gccucagccucccgaguaac

SEQ ID NO: 719531 - RNA, 20 nt, Artificial Sequence
  Synthetic
gaaaaauaggauggaguaac

SEQ ID NO: 719532 - RNA, 20 nt, Artificial Sequence
  Synthetic
guauuugguuaauauguaac

SEQ ID NO: 719533 - RNA, 20 nt, Artificial Sequence
  Synthetic
ggcuuuauucaguauguaac

SEQ ID NO: 719534 - RNA, 20 nt, Artificial Sequence
  Synthetic
gcagugugguagaguguaac

SEQ ID NO: 719535 - RNA, 20 nt, Artificial Sequence
  Synthetic
gcaaaaugucauaguguaac

SEQ ID NO: 719536 - RNA, 20 nt, Artificial Sequence
  Synthetic
gacauuuugacagaauuaac

SEQ ID NO: 719537 - RNA, 20 nt, Artificial Sequence
  Synthetic
gguguccugcacccauuaac

SEQ ID NO: 719538 - RNA, 20 nt, Artificial Sequence
  Synthetic
gagaugaaacugggauuaac

SEQ ID NO: 719539 - RNA, 20 nt, Artificial Sequence
  Synthetic
gccauaguacgguuauuaac

SEQ ID NO: 719540 - RNA, 20 nt, Artificial Sequence
  Synthetic
gguaaggaaaagcacuuaac

SEQ ID NO: 719541 - RNA, 20 nt, Artificial Sequence
  Synthetic
gaaauucacgaaagguuaac

SEQ ID NO: 719542 - RNA, 20 nt, Artificial Sequence
  Synthetic
gacucuggauauauguuaac

SEQ ID NO: 719543 - RNA, 20 nt, Artificial Sequence
  Synthetic
gcugcugccauucuguuaac

SEQ ID NO: 719544 - RNA, 20 nt, Artificial Sequence
  Synthetic
guagaaaauuuaaauuuaac

SEQ ID NO: 719545 - RNA, 20 nt, Artificial Sequence
  Synthetic
guggaguaugugucuuuaac

SEQ ID NO: 719546 - RNA, 20 nt, Artificial Sequence
  Synthetic
gggagaauuuagguuuuaac

SEQ ID NO: 719547 - RNA, 20 nt, Artificial Sequence
  Synthetic
gauguaaaagagaaaaacac

SEQ ID NO: 719548 - RNA, 20 nt, Artificial Sequence
  Synthetic
gaauguguccugaaaaacac

SEQ ID NO: 719549 - RNA, 20 nt, Artificial Sequence
  Synthetic
guuauaacuugggcaaacac

SEQ ID NO: 719550 - RNA, 20 nt, Artificial Sequence
  Synthetic
ggauaugcugaugcaaacac

SEQ ID NO: 719551 - RNA, 20 nt, Artificial Sequence
  Synthetic
gauguguuuucaagaaacac

SEQ ID NO: 719552 - RNA, 20 nt, Artificial Sequence
  Synthetic
guggugagguugggaaacac

SEQ ID NO: 719553 - RNA, 20 nt, Artificial Sequence
  Synthetic
gaaauagaauagaauaacac

SEQ ID NO: 719554 - RNA, 20 nt, Artificial Sequence
  Synthetic
gggaggggaacaacacacac

SEQ ID NO: 719555 - RNA, 20 nt, Artificial Sequence
  Synthetic
gcgcaggcaacaucacacac

SEQ ID NO: 719556 - RNA, 20 nt, Artificial Sequence
  Synthetic
gggacgggaacaucacacac

SEQ ID NO: 719557 - RNA, 20 nt, Artificial Sequence
  Synthetic
ggaaggggaacaucacacac

SEQ ID NO: 719558 - RNA, 20 nt, Artificial Sequence
  Synthetic
gggaggggaacaucacacac

SEQ ID NO: 719559 - RNA, 20 nt, Artificial Sequence
  Synthetic
gggcggggaacaucacacac

SEQ ID NO: 719560 - RNA, 20 nt, Artificial Sequence
  Synthetic
gcuuguagucccagacacac

SEQ ID NO: 719561 - RNA, 20 nt, Artificial Sequence
  Synthetic
guugaaauuaaacuacacac

SEQ ID NO: 719562 - RNA, 20 nt, Artificial Sequence
  Synthetic
gaggcagcgcccagccacac

SEQ ID NO: 719563 - RNA, 20 nt, Artificial Sequence
  Synthetic
gggagaaagaaagagcacac

SEQ ID NO: 719564 - RNA, 20 nt, Artificial Sequence
  Synthetic
gugcacgcacgcgcgcacac

SEQ ID NO: 719565 - RNA, 20 nt, Artificial Sequence
  Synthetic
gaugcuaauaauaaucacac

SEQ ID NO: 719566 - RNA, 20 nt, Artificial Sequence
  Synthetic
guuucaguuguucuucacac

SEQ ID NO: 719567 - RNA, 20 nt, Artificial Sequence
  Synthetic
gaaaagcagagagaagacac

SEQ ID NO: 719568 - RNA, 20 nt, Artificial Sequence
  Synthetic
gcacauaucugagaagacac

SEQ ID NO: 719569 - RNA, 20 nt, Artificial Sequence
  Synthetic
guagcugggaccacagacac

SEQ ID NO: 719570 - RNA, 20 nt, Artificial Sequence
  Synthetic
gaguguggaauaauagacac

SEQ ID NO: 719571 - RNA, 20 nt, Artificial Sequence
  Synthetic
gccuaguauacaguagacac

SEQ ID NO: 719572 - RNA, 20 nt, Artificial Sequence
  Synthetic
gaaagcguaugaaaggacac

SEQ ID NO: 719573 - RNA, 20 nt, Artificial Sequence
  Synthetic
ggaggggcugcaguggacac

SEQ ID NO: 719574 - RNA, 20 nt, Artificial Sequence
  Synthetic
guuauuuaacuucaugacac

SEQ ID NO: 719575 - RNA, 20 nt, Artificial Sequence
  Synthetic
gcugcaugggaggcugacac

SEQ ID NO: 719576 - RNA, 20 nt, Artificial Sequence
  Synthetic
gggaaaaucucucuugacac

SEQ ID NO: 719577 - RNA, 20 nt, Artificial Sequence
  Synthetic
gaaacuucuccgguauacac

SEQ ID NO: 719578 - RNA, 20 nt, Artificial Sequence
  Synthetic
gccuguagucccagcuacac

SEQ ID NO: 719579 - RNA, 20 nt, Artificial Sequence
  Synthetic
guguaugcuaacuucuacac

SEQ ID NO: 719580 - RNA, 20 nt, Artificial Sequence
  Synthetic
gauaauauacagggguacac

SEQ ID NO: 719581 - RNA, 20 nt, Artificial Sequence
  Synthetic
gcucuaagucugcuuuacac

SEQ ID NO: 719582 - RNA, 20 nt, Artificial Sequence
  Synthetic
gagagagaaaggggaaccac

SEQ ID NO: 719583 - RNA, 20 nt, Artificial Sequence
  Synthetic
gaugggccuaaucuaaccac

SEQ ID NO: 719584 - RNA, 20 nt, Artificial Sequence
  Synthetic
ggacuacaagcacacaccac

SEQ ID NO: 719585 - RNA, 20 nt, Artificial Sequence
  Synthetic
gcucugcugcagcacaccac

SEQ ID NO: 719586 - RNA, 20 nt, Artificial Sequence
  Synthetic
gcuuuuaguauauccaccac

SEQ ID NO: 719587 - RNA, 20 nt, Artificial Sequence
  Synthetic
gacaccaugcuuucuaccac

SEQ ID NO: 719588 - RNA, 20 nt, Artificial Sequence
  Synthetic
gcucuacccugcaaacccac

SEQ ID NO: 719589 - RNA, 20 nt, Artificial Sequence
  Synthetic
gugcaaagacaaugacccac

SEQ ID NO: 719590 - RNA, 20 nt, Artificial Sequence
  Synthetic
ggaaaaaaaaaaaaccccac

SEQ ID NO: 719591 - RNA, 20 nt, Artificial Sequence
  Synthetic
gcuccacacagaguccccac

SEQ ID NO: 719592 - RNA, 20 nt, Artificial Sequence
  Synthetic
gcagcucugcugacgcccac

SEQ ID NO: 719593 - RNA, 20 nt, Artificial Sequence
  Synthetic
guggcuaaugacuaucccac

SEQ ID NO: 719594 - RNA, 20 nt, Artificial Sequence
  Synthetic
gaauuagaaaauacucccac

SEQ ID NO: 719595 - RNA, 20 nt, Artificial Sequence
  Synthetic
gcaaguuggauuggagccac

SEQ ID NO: 719596 - RNA, 20 nt, Artificial Sequence
  Synthetic
gcaggacuguagguagccac

SEQ ID NO: 719597 - RNA, 20 nt, Artificial Sequence
  Synthetic
gugagcuaugauagcgccac

SEQ ID NO: 719598 - RNA, 20 nt, Artificial Sequence
  Synthetic
ggccauuccuuccaugccac

SEQ ID NO: 719599 - RNA, 20 nt, Artificial Sequence
  Synthetic
guccccaugacugaauccac

SEQ ID NO: 719600 - RNA, 20 nt, Artificial Sequence
  Synthetic
gccccauaacaguuauccac

SEQ ID NO: 719601 - RNA, 20 nt, Artificial Sequence
  Synthetic
ggguucugcuuggccuccac

SEQ ID NO: 719602 - RNA, 20 nt, Artificial Sequence
  Synthetic
guuuuuuuuuuuuucuccac

SEQ ID NO: 719603 - RNA, 20 nt, Artificial Sequence
  Synthetic
gauuaaaagcuaaaguccac

SEQ ID NO: 719604 - RNA, 20 nt, Artificial Sequence
  Synthetic
gauccuaccuacaauuccac

SEQ ID NO: 719605 - RNA, 20 nt, Artificial Sequence
  Synthetic
ggaaaagguuguucuuccac

SEQ ID NO: 719606 - RNA, 20 nt, Artificial Sequence
  Synthetic
gaaacugcagggauuuccac

SEQ ID NO: 719607 - RNA, 20 nt, Artificial Sequence
  Synthetic
gaaagccucuugguuuccac

SEQ ID NO: 719608 - RNA, 20 nt, Artificial Sequence
  Synthetic
ggaggguaaaaaaaaagcac

SEQ ID NO: 719609 - RNA, 20 nt, Artificial Sequence
  Synthetic
gccucagccucccaaagcac

SEQ ID NO: 719610 - RNA, 20 nt, Artificial Sequence
  Synthetic
gaguaauauccuauaagcac

SEQ ID NO: 719611 - RNA, 20 nt, Artificial Sequence
  Synthetic
gcuguugcugcuuuaagcac

SEQ ID NO: 719612 - RNA, 20 nt, Artificial Sequence
  Synthetic
gacaaaggagaaaacagcac

SEQ ID NO: 719613 - RNA, 20 nt, Artificial Sequence
  Synthetic
gguguucuuuugcacagcac

SEQ ID NO: 719614 - RNA, 20 nt, Artificial Sequence
  Synthetic
gcuaccguguuggacagcac

SEQ ID NO: 719615 - RNA, 20 nt, Artificial Sequence
  Synthetic
ggccaaauacacagcagcac

SEQ ID NO: 719616 - RNA, 20 nt, Artificial Sequence
  Synthetic
gaggggugaaggagcagcac

SEQ ID NO: 719617 - RNA, 20 nt, Artificial Sequence
  Synthetic
guguagacagaagagagcac

SEQ ID NO: 719618 - RNA, 20 nt, Artificial Sequence
  Synthetic
gaacuggagugcaugagcac

SEQ ID NO: 719619 - RNA, 20 nt, Artificial Sequence
  Synthetic
gugcauucucucaugagcac

SEQ ID NO: 719620 - RNA, 20 nt, Artificial Sequence
  Synthetic
gcucuguccgcagguagcac

SEQ ID NO: 719621 - RNA, 20 nt, Artificial Sequence
  Synthetic
gcacaugacuagaaaggcac

SEQ ID NO: 719622 - RNA, 20 nt, Artificial Sequence
  Synthetic
gaaguucaagaucaaggcac

SEQ ID NO: 719623 - RNA, 20 nt, Artificial Sequence
  Synthetic
gucucccagucaggaggcac

SEQ ID NO: 719624 - RNA, 20 nt, Artificial Sequence
  Synthetic
gucacaguaggauagggcac

SEQ ID NO: 719625 - RNA, 20 nt, Artificial Sequence
  Synthetic
gucuauuauauguugggcac

SEQ ID NO: 719626 - RNA, 20 nt, Artificial Sequence
  Synthetic
gcagcacuccaacauggcac

SEQ ID NO: 719627 - RNA, 20 nt, Artificial Sequence
  Synthetic
gcacacacacgugcaugcac

SEQ ID NO: 719628 - RNA, 20 nt, Artificial Sequence
  Synthetic
guagagcuacuuugaugcac

SEQ ID NO: 719629 - RNA, 20 nt, Artificial Sequence
  Synthetic
gaaaauuauauucagugcac

SEQ ID NO: 719630 - RNA, 20 nt, Artificial Sequence
  Synthetic
gucuaauuguaucauugcac

SEQ ID NO: 719631 - RNA, 20 nt, Artificial Sequence
  Synthetic
gcaggguauuuuaguugcac

SEQ ID NO: 719632 - RNA, 20 nt, Artificial Sequence
  Synthetic
gcagacccucuauaaaucac

SEQ ID NO: 719633 - RNA, 20 nt, Artificial Sequence
  Synthetic
ggcugaggcaggagaaucac

SEQ ID NO: 719634 - RNA, 20 nt, Artificial Sequence
  Synthetic
gucagagcugauggaaucac

SEQ ID NO: 719635 - RNA, 20 nt, Artificial Sequence
  Synthetic
gugggagguaauugaaucac

SEQ ID NO: 719636 - RNA, 20 nt, Artificial Sequence
  Synthetic
gucaaguuucagcuaaucac

SEQ ID NO: 719637 - RNA, 20 nt, Artificial Sequence
  Synthetic
gaaaaaauccucaccaucac

SEQ ID NO: 719638 - RNA, 20 nt, Artificial Sequence
  Synthetic
gaaaaaaugcucaccaucac

SEQ ID NO: 719639 - RNA, 20 nt, Artificial Sequence
  Synthetic
gagaagaaaauaagcaucac

SEQ ID NO: 719640 - RNA, 20 nt, Artificial Sequence
  Synthetic
gggucccagaucagcaucac

SEQ ID NO: 719641 - RNA, 20 nt, Artificial Sequence
  Synthetic
gaaaaaaaccucaucaucac

SEQ ID NO: 719642 - RNA, 20 nt, Artificial Sequence
  Synthetic
gaaaaaaagcucaucaucac

SEQ ID NO: 719643 - RNA, 20 nt, Artificial Sequence
  Synthetic
gaaaaaaugcucaucaucac

SEQ ID NO: 719644 - RNA, 20 nt, Artificial Sequence
  Synthetic
gaagaaaugcucaucaucac

SEQ ID NO: 719645 - RNA, 20 nt, Artificial Sequence
  Synthetic
ggcugggaugggcagaucac

SEQ ID NO: 719646 - RNA, 20 nt, Artificial Sequence
  Synthetic
gaggugcagucagagaucac

SEQ ID NO: 719647 - RNA, 20 nt, Artificial Sequence
  Synthetic
guugagccaguaaauaucac

SEQ ID NO: 719648 - RNA, 20 nt, Artificial Sequence
  Synthetic
gauaucaauauuauuaucac

SEQ ID NO: 719649 - RNA, 20 nt, Artificial Sequence
  Synthetic
guaauuugguuauuuaucac

SEQ ID NO: 719650 - RNA, 20 nt, Artificial Sequence
  Synthetic
guccccuucccccaccucac

SEQ ID NO: 719651 - RNA, 20 nt, Artificial Sequence
  Synthetic
gucuuuucauccucccucac

SEQ ID NO: 719652 - RNA, 20 nt, Artificial Sequence
  Synthetic
gccauaugaagaaagcucac

SEQ ID NO: 719653 - RNA, 20 nt, Artificial Sequence
  Synthetic
gagcaagaggcuaggcucac

SEQ ID NO: 719654 - RNA, 20 nt, Artificial Sequence
  Synthetic
gguugggcauucuuagucac

SEQ ID NO: 719655 - RNA, 20 nt, Artificial Sequence
  Synthetic
gcagaugaaauagcugucac

SEQ ID NO: 719656 - RNA, 20 nt, Artificial Sequence
  Synthetic
gcacuuauccucauauucac

SEQ ID NO: 719657 - RNA, 20 nt, Artificial Sequence
  Synthetic
guacacuguauuauauucac

SEQ ID NO: 719658 - RNA, 20 nt, Artificial Sequence
  Synthetic
gguugcuucauuaccuucac

SEQ ID NO: 719659 - RNA, 20 nt, Artificial Sequence
  Synthetic
ggcagaaggcaccucuucac

SEQ ID NO: 719660 - RNA, 20 nt, Artificial Sequence
  Synthetic
gagcaagccaccuucuucac

SEQ ID NO: 719661 - RNA, 20 nt, Artificial Sequence
  Synthetic
gagaucacuggcagguucac

SEQ ID NO: 719662 - RNA, 20 nt, Artificial Sequence
  Synthetic
gugacuugaaaacauuucac

SEQ ID NO: 719663 - RNA, 20 nt, Artificial Sequence
  Synthetic
gauucuggacaugauuucac

SEQ ID NO: 719664 - RNA, 20 nt, Artificial Sequence
  Synthetic
gacugugcuaauaguuucac

SEQ ID NO: 719665 - RNA, 20 nt, Artificial Sequence
  Synthetic
ggaggaaggcaccuuuucac

SEQ ID NO: 719666 - RNA, 20 nt, Artificial Sequence
  Synthetic
gcaucuuauauauuuuucac

SEQ ID NO: 719667 - RNA, 20 nt, Artificial Sequence
  Synthetic
gacacagccuguucaaagac

SEQ ID NO: 719668 - RNA, 20 nt, Artificial Sequence
  Synthetic
gaauguaaaaaaugaaagac

SEQ ID NO: 719669 - RNA, 20 nt, Artificial Sequence
  Synthetic
gugcacauggacauaaagac

SEQ ID NO: 719670 - RNA, 20 nt, Artificial Sequence
  Synthetic
ggagucuauuaauuaaagac

SEQ ID NO: 719671 - RNA, 20 nt, Artificial Sequence
  Synthetic
ggaucaugauaaaacaagac

SEQ ID NO: 719672 - RNA, 20 nt, Artificial Sequence
  Synthetic
ggcaugucaaaagccaagac

SEQ ID NO: 719673 - RNA, 20 nt, Artificial Sequence
  Synthetic
gcacuuugggaggccaagac

SEQ ID NO: 719674 - RNA, 20 nt, Artificial Sequence
  Synthetic
gauggaccauucuccaagac

SEQ ID NO: 719675 - RNA, 20 nt, Artificial Sequence
  Synthetic
gggaaaagggaaagcaagac

SEQ ID NO: 719676 - RNA, 20 nt, Artificial Sequence
  Synthetic
gggaggacucagaagaagac

SEQ ID NO: 719677 - RNA, 20 nt, Artificial Sequence
  Synthetic
gacaaagugagagagaagac

SEQ ID NO: 719678 - RNA, 20 nt, Artificial Sequence
  Synthetic
gucuuuaucuggaguaagac

SEQ ID NO: 719679 - RNA, 20 nt, Artificial Sequence
  Synthetic
gcccacgaucuggaacagac

SEQ ID NO: 719680 - RNA, 20 nt, Artificial Sequence
  Synthetic
ggcaacucagagcaccagac

SEQ ID NO: 719681 - RNA, 20 nt, Artificial Sequence
  Synthetic
ggugauagcaugggccagac

SEQ ID NO: 719682 - RNA, 20 nt, Artificial Sequence
  Synthetic
gaaacaugggcugagcagac

SEQ ID NO: 719683 - RNA, 20 nt, Artificial Sequence
  Synthetic
ggugcccaucaguggcagac

SEQ ID NO: 719684 - RNA, 20 nt, Artificial Sequence
  Synthetic
gcugaguccagcucucagac

SEQ ID NO: 719685 - RNA, 20 nt, Artificial Sequence
  Synthetic
gcuaugacuaacaaagagac

SEQ ID NO: 719686 - RNA, 20 nt, Artificial Sequence
  Synthetic
ggaaaagagauguaagagac

SEQ ID NO: 719687 - RNA, 20 nt, Artificial Sequence
  Synthetic
gucaccacaaagugagagac

SEQ ID NO: 719688 - RNA, 20 nt, Artificial Sequence
  Synthetic
uuuguauuuuuaguagagac

SEQ ID NO: 719689 - RNA, 20 nt, Artificial Sequence
  Synthetic
gaauuacagcagguagagac

SEQ ID NO: 719690 - RNA, 20 nt, Artificial Sequence
  Synthetic
gcaugugaaaauuuagagac

SEQ ID NO: 719691 - RNA, 20 nt, Artificial Sequence
  Synthetic
gauaaagacauacccgagac

SEQ ID NO: 719692 - RNA, 20 nt, Artificial Sequence
  Synthetic
gcacuuugggaggccgagac

SEQ ID NO: 719693 - RNA, 20 nt, Artificial Sequence
  Synthetic
guuuaauauuuccaggagac

SEQ ID NO: 719694 - RNA, 20 nt, Artificial Sequence
  Synthetic
gguuuuaccuucagggagac

SEQ ID NO: 719695 - RNA, 20 nt, Artificial Sequence
  Synthetic
gaagagggauggugggagac

SEQ ID NO: 719696 - RNA, 20 nt, Artificial Sequence
  Synthetic
gaagaguggaaaaaugagac

SEQ ID NO: 719697 - RNA, 20 nt, Artificial Sequence
  Synthetic
gauaaagacauacaugagac

SEQ ID NO: 719698 - RNA, 20 nt, Artificial Sequence
  Synthetic
gcuacucgggaggcugagac

SEQ ID NO: 719699 - RNA, 20 nt, Artificial Sequence
  Synthetic
gcacuuugggaggcugagac

SEQ ID NO: 719700 - RNA, 20 nt, Artificial Sequence
  Synthetic
gauaaagacauacuugagac

SEQ ID NO: 719701 - RNA, 20 nt, Artificial Sequence
  Synthetic
gagaugagaggacacuagac

SEQ ID NO: 719702 - RNA, 20 nt, Artificial Sequence
  Synthetic
guacaaaguuccaguuagac

SEQ ID NO: 719703 - RNA, 20 nt, Artificial Sequence
  Synthetic
gaaauuagcauuuguuagac

SEQ ID NO: 719704 - RNA, 20 nt, Artificial Sequence
  Synthetic
ggaaaagaggaagacacgac

SEQ ID NO: 719705 - RNA, 20 nt, Artificial Sequence
  Synthetic
guucugccuucugccacgac

SEQ ID NO: 719706 - RNA, 20 nt, Artificial Sequence
  Synthetic
ggagcgaaggagacagcgac

SEQ ID NO: 719707 - RNA, 20 nt, Artificial Sequence
  Synthetic
gcuccccagaaccccucgac

SEQ ID NO: 719708 - RNA, 20 nt, Artificial Sequence
  Synthetic
gcuucaaaaguucaaaggac

SEQ ID NO: 719709 - RNA, 20 nt, Artificial Sequence
  Synthetic
gcuucgaaaguucaaaggac

SEQ ID NO: 719710 - RNA, 20 nt, Artificial Sequence
  Synthetic
gaugaauaggcaugaaggac

SEQ ID NO: 719711 - RNA, 20 nt, Artificial Sequence
  Synthetic
ggaaauucaauacagaggac

SEQ ID NO: 719712 - RNA, 20 nt, Artificial Sequence
  Synthetic
gucaagggcauauuuaggac

SEQ ID NO: 719713 - RNA, 20 nt, Artificial Sequence
  Synthetic
gagcccauggacacagggac

SEQ ID NO: 719714 - RNA, 20 nt, Artificial Sequence
  Synthetic
gguuuuuaaagacaugggac

SEQ ID NO: 719715 - RNA, 20 nt, Artificial Sequence
  Synthetic
guggcuuagcagggugggac

SEQ ID NO: 719716 - RNA, 20 nt, Artificial Sequence
  Synthetic
gcccuauugccauuugggac

SEQ ID NO: 719717 - RNA, 20 nt, Artificial Sequence
  Synthetic
gaugucaugagagaguggac

SEQ ID NO: 719718 - RNA, 20 nt, Artificial Sequence
  Synthetic
gagggagagaggagguggac

SEQ ID NO: 719719 - RNA, 20 nt, Artificial Sequence
  Synthetic
gaugaccaucaaugguggac

SEQ ID NO: 719720 - RNA, 20 nt, Artificial Sequence
  Synthetic
ggugcccauuaaugguggac

SEQ ID NO: 719721 - RNA, 20 nt, Artificial Sequence
  Synthetic
gcucaaauuugaaaaaugac

SEQ ID NO: 719722 - RNA, 20 nt, Artificial Sequence
  Synthetic
gggcuuaaaaccuaaaugac

SEQ ID NO: 719723 - RNA, 20 nt, Artificial Sequence
  Synthetic
ggugugcaaaaugcaaugac

SEQ ID NO: 719724 - RNA, 20 nt, Artificial Sequence
  Synthetic
gaaguacuuagaucaaugac

SEQ ID NO: 719725 - RNA, 20 nt, Artificial Sequence
  Synthetic
guuuuacauguuuucaugac

SEQ ID NO: 719726 - RNA, 20 nt, Artificial Sequence
  Synthetic
ggggaaggagaacagaugac

SEQ ID NO: 719727 - RNA, 20 nt, Artificial Sequence
  Synthetic
gggcuuaaaaccuagaugac

SEQ ID NO: 719728 - RNA, 20 nt, Artificial Sequence
  Synthetic
aaauaccuaauguagaugac

SEQ ID NO: 719729 - RNA, 20 nt, Artificial Sequence
  Synthetic
guauuucaggaauugaugac

SEQ ID NO: 719730 - RNA, 20 nt, Artificial Sequence
  Synthetic
gccucagucucuuuuaugac

SEQ ID NO: 719731 - RNA, 20 nt, Artificial Sequence
  Synthetic
gauuggaacaaguaacugac

SEQ ID NO: 719732 - RNA, 20 nt, Artificial Sequence
  Synthetic
gaagguccacacauacugac

SEQ ID NO: 719733 - RNA, 20 nt, Artificial Sequence
  Synthetic
gacauuguaggguuacugac

SEQ ID NO: 719734 - RNA, 20 nt, Artificial Sequence
  Synthetic
gcugccuguggacugcugac

SEQ ID NO: 719735 - RNA, 20 nt, Artificial Sequence
  Synthetic
ggaaaaaguacuuaucugac

SEQ ID NO: 719736 - RNA, 20 nt, Artificial Sequence
  Synthetic
gugaagaccuagauucugac

SEQ ID NO: 719737 - RNA, 20 nt, Artificial Sequence
  Synthetic
gugcgcacuaucucagugac

SEQ ID NO: 719738 - RNA, 20 nt, Artificial Sequence
  Synthetic
gccaaguccuugaaggugac

SEQ ID NO: 719739 - RNA, 20 nt, Artificial Sequence
  Synthetic
ggggccuggugagaggugac

SEQ ID NO: 719740 - RNA, 20 nt, Artificial Sequence
  Synthetic
ggggccuggugggaggugac

SEQ ID NO: 719741 - RNA, 20 nt, Artificial Sequence
  Synthetic
gaggcuucagcccaugugac

SEQ ID NO: 719742 - RNA, 20 nt, Artificial Sequence
  Synthetic
gauuuaggaugaacugugac

SEQ ID NO: 719743 - RNA, 20 nt, Artificial Sequence
  Synthetic
guuugguccauaucugugac

SEQ ID NO: 719744 - RNA, 20 nt, Artificial Sequence
  Synthetic
guaaaauuacagauugugac

SEQ ID NO: 719745 - RNA, 20 nt, Artificial Sequence
  Synthetic
gugaagaccuagauugugac

SEQ ID NO: 719746 - RNA, 20 nt, Artificial Sequence
  Synthetic
gaugguaauggcuuugugac

SEQ ID NO: 719747 - RNA, 20 nt, Artificial Sequence
  Synthetic
gagacucugauauaauugac

SEQ ID NO: 719748 - RNA, 20 nt, Artificial Sequence
  Synthetic
ggcauuguuaccauauugac

SEQ ID NO: 719749 - RNA, 20 nt, Artificial Sequence
  Synthetic
ggccguuuauuauuauugac

SEQ ID NO: 719750 - RNA, 20 nt, Artificial Sequence
  Synthetic
gaggaugagauuaucuugac

SEQ ID NO: 719751 - RNA, 20 nt, Artificial Sequence
  Synthetic
gcaaaauaaucaaaguugac

SEQ ID NO: 719752 - RNA, 20 nt, Artificial Sequence
  Synthetic
guucacauuuucagguugac

SEQ ID NO: 719753 - RNA, 20 nt, Artificial Sequence
  Synthetic
guaguuaacaaaauguugac

SEQ ID NO: 719754 - RNA, 20 nt, Artificial Sequence
  Synthetic
ggagagagggagaaaaauac

SEQ ID NO: 719755 - RNA, 20 nt, Artificial Sequence
  Synthetic
gaaaauccucaauaaaauac

SEQ ID NO: 719756 - RNA, 20 nt, Artificial Sequence
  Synthetic
gaauuaaacggaacaaauac

SEQ ID NO: 719757 - RNA, 20 nt, Artificial Sequence
  Synthetic
gaagagaagaccagaaauac

SEQ ID NO: 719758 - RNA, 20 nt, Artificial Sequence
  Synthetic
gcacacauggacauaaauac

SEQ ID NO: 719759 - RNA, 20 nt, Artificial Sequence
  Synthetic
gaaacauaacuacuaaauac

SEQ ID NO: 719760 - RNA, 20 nt, Artificial Sequence
  Synthetic
gucagacauagaaacaauac

SEQ ID NO: 719761 - RNA, 20 nt, Artificial Sequence
  Synthetic
gaaugaguuaggaacaauac

SEQ ID NO: 719762 - RNA, 20 nt, Artificial Sequence
  Synthetic
gaugacugcuguuacaauac

SEQ ID NO: 719763 - RNA, 20 nt, Artificial Sequence
  Synthetic
guuuuccugaaaaccaauac

SEQ ID NO: 719764 - RNA, 20 nt, Artificial Sequence
  Synthetic
gucaacuacagaagcaauac

SEQ ID NO: 719765 - RNA, 20 nt, Artificial Sequence
  Synthetic
guggggacugggggcaauac

SEQ ID NO: 719766 - RNA, 20 nt, Artificial Sequence
  Synthetic
gcgguugagaaguucaauac

SEQ ID NO: 719767 - RNA, 20 nt, Artificial Sequence
  Synthetic
ggcaccauuccaaagaauac

SEQ ID NO: 719768 - RNA, 20 nt, Artificial Sequence
  Synthetic
gcaaaauuauuuucgaauac

SEQ ID NO: 719769 - RNA, 20 nt, Artificial Sequence
  Synthetic
gguuguguaaggcauaauac

SEQ ID NO: 719770 - RNA, 20 nt, Artificial Sequence
  Synthetic
gauauuauuuuucauaauac

SEQ ID NO: 719771 - RNA, 20 nt, Artificial Sequence
  Synthetic
ggaagggugggugauaauac

SEQ ID NO: 719772 - RNA, 20 nt, Artificial Sequence
  Synthetic
guuacaccuuuuuauaauac

SEQ ID NO: 719773 - RNA, 20 nt, Artificial Sequence
  Synthetic
ggagaaaaacaugcuaauac

SEQ ID NO: 719774 - RNA, 20 nt, Artificial Sequence
  Synthetic
gaaaaccuaccacaacauac

SEQ ID NO: 719775 - RNA, 20 nt, Artificial Sequence
  Synthetic
gagaacacauggacacauac

SEQ ID NO: 719776 - RNA, 20 nt, Artificial Sequence
  Synthetic
gauacaugauaagcacauac

SEQ ID NO: 719777 - RNA, 20 nt, Artificial Sequence
  Synthetic
guagcuaaugacuaccauac

SEQ ID NO: 719778 - RNA, 20 nt, Artificial Sequence
  Synthetic
ggcuuucccaauuugcauac

SEQ ID NO: 719779 - RNA, 20 nt, Artificial Sequence
  Synthetic
guugacagacacccucauac

SEQ ID NO: 719780 - RNA, 20 nt, Artificial Sequence
  Synthetic
ggagggaggaagagagauac

SEQ ID NO: 719781 - RNA, 20 nt, Artificial Sequence
  Synthetic
ggcagagaacauugagauac

SEQ ID NO: 719782 - RNA, 20 nt, Artificial Sequence
  Synthetic
gugaacuuuccuauagauac

SEQ ID NO: 719783 - RNA, 20 nt, Artificial Sequence
  Synthetic
guucuggauuuaguagauac

SEQ ID NO: 719784 - RNA, 20 nt, Artificial Sequence
  Synthetic
ggcaauaccauucaggauac

SEQ ID NO: 719785 - RNA, 20 nt, Artificial Sequence
  Synthetic
gugaauguauuaaaugauac

SEQ ID NO: 719786 - RNA, 20 nt, Artificial Sequence
  Synthetic
gcagcaucuuucagugauac

SEQ ID NO: 719787 - RNA, 20 nt, Artificial Sequence
  Synthetic
guuacuuuuuaagaauauac

SEQ ID NO: 719788 - RNA, 20 nt, Artificial Sequence
  Synthetic
gcacaccacuggccauauac

SEQ ID NO: 719789 - RNA, 20 nt, Artificial Sequence
  Synthetic
gugcccacaaaacaguauac

SEQ ID NO: 719790 - RNA, 20 nt, Artificial Sequence
  Synthetic
guucagaaaugacauuauac

SEQ ID NO: 719791 - RNA, 20 nt, Artificial Sequence
  Synthetic
gguuuuauuccaaguuauac

SEQ ID NO: 719792 - RNA, 20 nt, Artificial Sequence
  Synthetic
guauguauaguuaacacuac

SEQ ID NO: 719793 - RNA, 20 nt, Artificial Sequence
  Synthetic
guuaugcucccugccacuac

SEQ ID NO: 719794 - RNA, 20 nt, Artificial Sequence
  Synthetic
gugacuguacugaauacuac

SEQ ID NO: 719795 - RNA, 20 nt, Artificial Sequence
  Synthetic
gauucugacgugaguacuac

SEQ ID NO: 719796 - RNA, 20 nt, Artificial Sequence
  Synthetic
gguuuguuuccuaaaccuac

SEQ ID NO: 719797 - RNA, 20 nt, Artificial Sequence
  Synthetic
gaauuuugaugauggccuac

SEQ ID NO: 719798 - RNA, 20 nt, Artificial Sequence
  Synthetic
gccaccugcuuagcuccuac

SEQ ID NO: 719799 - RNA, 20 nt, Artificial Sequence
  Synthetic
gacaccauccagacagcuac

SEQ ID NO: 719800 - RNA, 20 nt, Artificial Sequence
  Synthetic
ggaagggacaguacagcuac

SEQ ID NO: 719801 - RNA, 20 nt, Artificial Sequence
  Synthetic
gagccuguaaucccagcuac

SEQ ID NO: 719802 - RNA, 20 nt, Artificial Sequence
  Synthetic
gcgccuguagucccagcuac

SEQ ID NO: 719803 - RNA, 20 nt, Artificial Sequence
  Synthetic
gaucucuuuguuauagcuac

SEQ ID NO: 719804 - RNA, 20 nt, Artificial Sequence
  Synthetic
gggggaggagaaagugcuac

SEQ ID NO: 719805 - RNA, 20 nt, Artificial Sequence
  Synthetic
guacuuauuauaugugcuac

SEQ ID NO: 719806 - RNA, 20 nt, Artificial Sequence
  Synthetic
gugaagaaugucauugcuac

SEQ ID NO: 719807 - RNA, 20 nt, Artificial Sequence
  Synthetic
gacgauucugcaggcucuac

SEQ ID NO: 719808 - RNA, 20 nt, Artificial Sequence
  Synthetic
gggaaaaaauucaagucuac

SEQ ID NO: 719809 - RNA, 20 nt, Artificial Sequence
  Synthetic
gaguuuugaacuuauucuac

SEQ ID NO: 719810 - RNA, 20 nt, Artificial Sequence
  Synthetic
ggcucacauuuuauuucuac

SEQ ID NO: 719811 - RNA, 20 nt, Artificial Sequence
  Synthetic
guaauuguuauuguuucuac

SEQ ID NO: 719812 - RNA, 20 nt, Artificial Sequence
  Synthetic
guaaacacuccagaaaguac

SEQ ID NO: 719813 - RNA, 20 nt, Artificial Sequence
  Synthetic
guggagagggagagaaguac

SEQ ID NO: 719814 - RNA, 20 nt, Artificial Sequence
  Synthetic
guacuuuuuauauugaguac

SEQ ID NO: 719815 - RNA, 20 nt, Artificial Sequence
  Synthetic
guugggagaaucacuaguac

SEQ ID NO: 719816 - RNA, 20 nt, Artificial Sequence
  Synthetic
gcaacaaaggacgguaguac

SEQ ID NO: 719817 - RNA, 20 nt, Artificial Sequence
  Synthetic
gaauucuguaagccagguac

SEQ ID NO: 719818 - RNA, 20 nt, Artificial Sequence
  Synthetic
guucuccuuuaaaaugguac

SEQ ID NO: 719819 - RNA, 20 nt, Artificial Sequence
  Synthetic
gauuuugcagcggcugguac

SEQ ID NO: 719820 - RNA, 20 nt, Artificial Sequence
  Synthetic
gguguugauguuggugguac

SEQ ID NO: 719821 - RNA, 20 nt, Artificial Sequence
  Synthetic
guaaugaaauauaaauguac

SEQ ID NO: 719822 - RNA, 20 nt, Artificial Sequence
  Synthetic
gauacacgugcagaauguac

SEQ ID NO: 719823 - RNA, 20 nt, Artificial Sequence
  Synthetic
gauacaugugcagaauguac

SEQ ID NO: 719824 - RNA, 20 nt, Artificial Sequence
  Synthetic
gcugaaagagugaacuguac

SEQ ID NO: 719825 - RNA, 20 nt, Artificial Sequence
  Synthetic
gaugguucugcaggcuguac

SEQ ID NO: 719826 - RNA, 20 nt, Artificial Sequence
  Synthetic
gugaauugcagauucuguac

SEQ ID NO: 719827 - RNA, 20 nt, Artificial Sequence
  Synthetic
ggguuaaccuugcuguguac

SEQ ID NO: 719828 - RNA, 20 nt, Artificial Sequence
  Synthetic
gcuaccacaugcaguuguac

SEQ ID NO: 719829 - RNA, 20 nt, Artificial Sequence
  Synthetic
gauauaaaauauuuuuguac

SEQ ID NO: 719830 - RNA, 20 nt, Artificial Sequence
  Synthetic
guuggagguaauugaauuac

SEQ ID NO: 719831 - RNA, 20 nt, Artificial Sequence
  Synthetic
guuccagcuccaauaauuac

SEQ ID NO: 719832 - RNA, 20 nt, Artificial Sequence
  Synthetic
ggaugcuguuccauaauuac

SEQ ID NO: 719833 - RNA, 20 nt, Artificial Sequence
  Synthetic
gcuuggaauuuucacauuac

SEQ ID NO: 719834 - RNA, 20 nt, Artificial Sequence
  Synthetic
gaagagugucuucagauuac

SEQ ID NO: 719835 - RNA, 20 nt, Artificial Sequence
  Synthetic
gugcuggagaaauauauuac

SEQ ID NO: 719836 - RNA, 20 nt, Artificial Sequence
  Synthetic
guuuaucaaacaccuauuac

SEQ ID NO: 719837 - RNA, 20 nt, Artificial Sequence
  Synthetic
gauucugaugugaguauuac

SEQ ID NO: 719838 - RNA, 20 nt, Artificial Sequence
  Synthetic
gacacaaauuauauuauuac

SEQ ID NO: 719839 - RNA, 20 nt, Artificial Sequence
  Synthetic
gcauuuuuaauuauuauuac

SEQ ID NO: 719840 - RNA, 20 nt, Artificial Sequence
  Synthetic
gaauuggaauuuuaacuuac

SEQ ID NO: 719841 - RNA, 20 nt, Artificial Sequence
  Synthetic
gcauuaagucaguuacuuac

SEQ ID NO: 719842 - RNA, 20 nt, Artificial Sequence
  Synthetic
guaacuaaagcagugcuuac

SEQ ID NO: 719843 - RNA, 20 nt, Artificial Sequence
  Synthetic
gcaaaacuuggaagucuuac

SEQ ID NO: 719844 - RNA, 20 nt, Artificial Sequence
  Synthetic
gucuucucuaacuuucuuac

SEQ ID NO: 719845 - RNA, 20 nt, Artificial Sequence
  Synthetic
gaauguggcagucaaguuac

SEQ ID NO: 719846 - RNA, 20 nt, Artificial Sequence
  Synthetic
gagugucacugcugaguuac

SEQ ID NO: 719847 - RNA, 20 nt, Artificial Sequence
  Synthetic
gaguuaaauuauauaguuac

SEQ ID NO: 719848 - RNA, 20 nt, Artificial Sequence
  Synthetic
ggugguguagguauaguuac

SEQ ID NO: 719849 - RNA, 20 nt, Artificial Sequence
  Synthetic
ggccaaaauaaagggguuac

SEQ ID NO: 719850 - RNA, 20 nt, Artificial Sequence
  Synthetic
guaggaacuguuaugguuac

SEQ ID NO: 719851 - RNA, 20 nt, Artificial Sequence
  Synthetic
ggugaagagagauugguuac

SEQ ID NO: 719852 - RNA, 20 nt, Artificial Sequence
  Synthetic
gacaauugcaggaguguuac

SEQ ID NO: 719853 - RNA, 20 nt, Artificial Sequence
  Synthetic
gacccccaagauuuuguuac

SEQ ID NO: 719854 - RNA, 20 nt, Artificial Sequence
  Synthetic
guaguaaauaaccaauuuac

SEQ ID NO: 719855 - RNA, 20 nt, Artificial Sequence
  Synthetic
gcuauacucaaauuauuuac

SEQ ID NO: 719856 - RNA, 20 nt, Artificial Sequence
  Synthetic
gguauucccuucuuauuuac

SEQ ID NO: 719857 - RNA, 20 nt, Artificial Sequence
  Synthetic
gauaaugcaccacucuuuac

SEQ ID NO: 719858 - RNA, 20 nt, Artificial Sequence
  Synthetic
ggucccaagcuuuucuuuac

SEQ ID NO: 719859 - RNA, 20 nt, Artificial Sequence
  Synthetic
ggagugaacuugguguuuac

SEQ ID NO: 719860 - RNA, 20 nt, Artificial Sequence
  Synthetic
gggaauucugguuuguuuac

SEQ ID NO: 719861 - RNA, 20 nt, Artificial Sequence
  Synthetic
guuccaugagaaaauuuuac

SEQ ID NO: 719862 - RNA, 20 nt, Artificial Sequence
  Synthetic
guguuuauuuaauauuuuac

SEQ ID NO: 719863 - RNA, 20 nt, Artificial Sequence
  Synthetic
gaagggguggacuauuuuac

SEQ ID NO: 719864 - RNA, 20 nt, Artificial Sequence
  Synthetic
gaaggaguugugccuuuuac

SEQ ID NO: 719865 - RNA, 20 nt, Artificial Sequence
  Synthetic
gaaaacagugguccuuuuac

SEQ ID NO: 719866 - RNA, 20 nt, Artificial Sequence
  Synthetic
gcuacuuuggguauuuuuac

SEQ ID NO: 719867 - RNA, 20 nt, Artificial Sequence
  Synthetic
gcaucucgacaacuuuuuac

SEQ ID NO: 719868 - RNA, 20 nt, Artificial Sequence
  Synthetic
guucccccaagcaaaaaacc

SEQ ID NO: 719869 - RNA, 20 nt, Artificial Sequence
  Synthetic
ggauggguaauauaaaaacc

SEQ ID NO: 719870 - RNA, 20 nt, Artificial Sequence
  Synthetic
guucuccaauauuaaaaacc

SEQ ID NO: 719871 - RNA, 20 nt, Artificial Sequence
  Synthetic
gaugucagcugaagaaaacc

SEQ ID NO: 719872 - RNA, 20 nt, Artificial Sequence
  Synthetic
gcgagaagaaugagaaaacc

SEQ ID NO: 719873 - RNA, 20 nt, Artificial Sequence
  Synthetic
gcacagugaauuagaaaacc

SEQ ID NO: 719874 - RNA, 20 nt, Artificial Sequence
  Synthetic
gaacagucugcuugaaaacc

SEQ ID NO: 719875 - RNA, 20 nt, Artificial Sequence
  Synthetic
gucuucuaguuacagaaacc

SEQ ID NO: 719876 - RNA, 20 nt, Artificial Sequence
  Synthetic
ggagagguccuaaggaaacc

SEQ ID NO: 719877 - RNA, 20 nt, Artificial Sequence
  Synthetic
ggauugggaauuaauaaacc

SEQ ID NO: 719878 - RNA, 20 nt, Artificial Sequence
  Synthetic
gauggacaacacacuaaacc

SEQ ID NO: 719879 - RNA, 20 nt, Artificial Sequence
  Synthetic
gagaaugguguaaguaaacc

SEQ ID NO: 719880 - RNA, 20 nt, Artificial Sequence
  Synthetic
gcaggagaauggcguaaacc

SEQ ID NO: 719881 - RNA, 20 nt, Artificial Sequence
  Synthetic
guguccgugguauguaaacc

SEQ ID NO: 719882 - RNA, 20 nt, Artificial Sequence
  Synthetic
gacucugcuucucuuaaacc

SEQ ID NO: 719883 - RNA, 20 nt, Artificial Sequence
  Synthetic
guuaaauuuacuaaacaacc

SEQ ID NO: 719884 - RNA, 20 nt, Artificial Sequence
  Synthetic
guacaacucaagcaccaacc

SEQ ID NO: 719885 - RNA, 20 nt, Artificial Sequence
  Synthetic
ggagucucgcucugucaacc

SEQ ID NO: 719886 - RNA, 20 nt, Artificial Sequence
  Synthetic
gccugggcugggccagaacc

SEQ ID NO: 719887 - RNA, 20 nt, Artificial Sequence
  Synthetic
gaggagauggggcuagaacc

SEQ ID NO: 719888 - RNA, 20 nt, Artificial Sequence
  Synthetic
gcaggggaaucacucgaacc

SEQ ID NO: 719889 - RNA, 20 nt, Artificial Sequence
  Synthetic
gcagaagaauugcucgaacc

SEQ ID NO: 719890 - RNA, 20 nt, Artificial Sequence
  Synthetic
gugggagaguugcucgaacc

SEQ ID NO: 719891 - RNA, 20 nt, Artificial Sequence
  Synthetic
gguguuaugagccaggaacc

SEQ ID NO: 719892 - RNA, 20 nt, Artificial Sequence
  Synthetic
guaaauaggaacuaggaacc

SEQ ID NO: 719893 - RNA, 20 nt, Artificial Sequence
  Synthetic
gaaccaaauguccaugaacc

SEQ ID NO: 719894 - RNA, 20 nt, Artificial Sequence
  Synthetic
gcaggagaauggcaugaacc

SEQ ID NO: 719895 - RNA, 20 nt, Artificial Sequence
  Synthetic
gcaaucacacuuuaugaacc

SEQ ID NO: 719896 - RNA, 20 nt, Artificial Sequence
  Synthetic
gcaugagaaucaccugaacc

SEQ ID NO: 719897 - RNA, 20 nt, Artificial Sequence
  Synthetic
gcgggagaaaggcgugaacc

SEQ ID NO: 719898 - RNA, 20 nt, Artificial Sequence
  Synthetic
gcaggagaauggcgugaacc

SEQ ID NO: 719899 - RNA, 20 nt, Artificial Sequence
  Synthetic
gcaggaaaauggugugaacc

SEQ ID NO: 719900 - RNA, 20 nt, Artificial Sequence
  Synthetic
gcaggagaaccacuugaacc

SEQ ID NO: 719901 - RNA, 20 nt, Artificial Sequence
  Synthetic
gcacaagaaucacuugaacc

SEQ ID NO: 719902 - RNA, 20 nt, Artificial Sequence
  Synthetic
gcagaagaaucacuugaacc

SEQ ID NO: 719903 - RNA, 20 nt, Artificial Sequence
  Synthetic
gcaggagaaucacuugaacc

SEQ ID NO: 719904 - RNA, 20 nt, Artificial Sequence
  Synthetic
guaggagaaucacuugaacc

SEQ ID NO: 719905 - RNA, 20 nt, Artificial Sequence
  Synthetic
gcaggagaaucccuugaacc

SEQ ID NO: 719906 - RNA, 20 nt, Artificial Sequence
  Synthetic
gcaugagaagcgcuugaacc

SEQ ID NO: 719907 - RNA, 20 nt, Artificial Sequence
  Synthetic
gcaggagaaucgcuugaacc

SEQ ID NO: 719908 - RNA, 20 nt, Artificial Sequence
  Synthetic
gcaggggaaucgcuugaacc

SEQ ID NO: 719909 - RNA, 20 nt, Artificial Sequence
  Synthetic
guuggaggaucgcuugaacc

SEQ ID NO: 719910 - RNA, 20 nt, Artificial Sequence
  Synthetic
gcagcagaauugcuugaacc

SEQ ID NO: 719911 - RNA, 20 nt, Artificial Sequence
  Synthetic
gcaggagaauugcuugaacc

SEQ ID NO: 719912 - RNA, 20 nt, Artificial Sequence
  Synthetic
gcgggagaauugcuugaacc

SEQ ID NO: 719913 - RNA, 20 nt, Artificial Sequence
  Synthetic
gcgggaagauugcuugaacc

SEQ ID NO: 719914 - RNA, 20 nt, Artificial Sequence
  Synthetic
gaguuagugaguguugaacc

SEQ ID NO: 719915 - RNA, 20 nt, Artificial Sequence
  Synthetic
gugaaaucaaaauuugaacc

SEQ ID NO: 719916 - RNA, 20 nt, Artificial Sequence
  Synthetic
gcaggagaaucauuugaacc

SEQ ID NO: 719917 - RNA, 20 nt, Artificial Sequence
  Synthetic
gcaggagaauuguuugaacc

SEQ ID NO: 719918 - RNA, 20 nt, Artificial Sequence
  Synthetic
guaggagaaucuuuugaacc

SEQ ID NO: 719919 - RNA, 20 nt, Artificial Sequence
  Synthetic
gugaaguguaaugaauaacc

SEQ ID NO: 719920 - RNA, 20 nt, Artificial Sequence
  Synthetic
gauaucuuauacauauaacc

SEQ ID NO: 719921 - RNA, 20 nt, Artificial Sequence
  Synthetic
gaagcuguuguucuuuaacc

SEQ ID NO: 719922 - RNA, 20 nt, Artificial Sequence
  Synthetic
ggaacuaacugcagaacacc

SEQ ID NO: 719923 - RNA, 20 nt, Artificial Sequence
  Synthetic
gcuugaaaucaaggaacacc

SEQ ID NO: 719924 - RNA, 20 nt, Artificial Sequence
  Synthetic
ggacgggaacaucacacacc

SEQ ID NO: 719925 - RNA, 20 nt, Artificial Sequence
  Synthetic
gaaggggaacaucacacacc

SEQ ID NO: 719926 - RNA, 20 nt, Artificial Sequence
  Synthetic
ggaggggaacaucacacacc

SEQ ID NO: 719927 - RNA, 20 nt, Artificial Sequence
  Synthetic
ggcggggaacaucacacacc

SEQ ID NO: 719928 - RNA, 20 nt, Artificial Sequence
  Synthetic
gguggggaacaucacacacc

SEQ ID NO: 719929 - RNA, 20 nt, Artificial Sequence
  Synthetic
gaauuaaagcuagacacacc

SEQ ID NO: 719930 - RNA, 20 nt, Artificial Sequence
  Synthetic
gugacuauucauugcacacc

SEQ ID NO: 719931 - RNA, 20 nt, Artificial Sequence
  Synthetic
guaaacugaaauaucacacc

SEQ ID NO: 719932 - RNA, 20 nt, Artificial Sequence
  Synthetic
gacugugucugccugacacc

SEQ ID NO: 719933 - RNA, 20 nt, Artificial Sequence
  Synthetic
gcuacaagugaaguuacacc

SEQ ID NO: 719934 - RNA, 20 nt, Artificial Sequence
  Synthetic
gacuagaggcaugcaccacc

SEQ ID NO: 719935 - RNA, 20 nt, Artificial Sequence
  Synthetic
gaucauugagacuacccacc

SEQ ID NO: 719936 - RNA, 20 nt, Artificial Sequence
  Synthetic
gauacauacacacagccacc

SEQ ID NO: 719937 - RNA, 20 nt, Artificial Sequence
  Synthetic
gauaaugggugagcuccacc

SEQ ID NO: 719938 - RNA, 20 nt, Artificial Sequence
  Synthetic
gagguuagggaugaagcacc

SEQ ID NO: 719939 - RNA, 20 nt, Artificial Sequence
  Synthetic
gcacccaauauaggagcacc

SEQ ID NO: 719940 - RNA, 20 nt, Artificial Sequence
  Synthetic
guuacuaauagccaggcacc

SEQ ID NO: 719941 - RNA, 20 nt, Artificial Sequence
  Synthetic
ggcgugugacuccaggcacc

SEQ ID NO: 719942 - RNA, 20 nt, Artificial Sequence
  Synthetic
gaccucacaacuauggcacc

SEQ ID NO: 719943 - RNA, 20 nt, Artificial Sequence
  Synthetic
gguucacuuuucuuugcacc

SEQ ID NO: 719944 - RNA, 20 nt, Artificial Sequence
  Synthetic
gacuguacauugaaaucacc

SEQ ID NO: 719945 - RNA, 20 nt, Artificial Sequence
  Synthetic
gauugcguaucugaaucacc

SEQ ID NO: 719946 - RNA, 20 nt, Artificial Sequence
  Synthetic
ggcuacuuggcuacaucacc

SEQ ID NO: 719947 - RNA, 20 nt, Artificial Sequence
  Synthetic
gaacauuuucaguuaucacc

SEQ ID NO: 719948 - RNA, 20 nt, Artificial Sequence
  Synthetic
gcaagaagaagguucucacc

SEQ ID NO: 719949 - RNA, 20 nt, Artificial Sequence
  Synthetic
guggucucaguuuucucacc

SEQ ID NO: 719950 - RNA, 20 nt, Artificial Sequence
  Synthetic
guagagguagcuucuucacc

SEQ ID NO: 719951 - RNA, 20 nt, Artificial Sequence
  Synthetic
guacuugaugucugaagacc

SEQ ID NO: 719952 - RNA, 20 nt, Artificial Sequence
  Synthetic
gaaguaggaaucaacagacc

SEQ ID NO: 719953 - RNA, 20 nt, Artificial Sequence
  Synthetic
gccuccgcaacaugcagacc

SEQ ID NO: 719954 - RNA, 20 nt, Artificial Sequence
  Synthetic
gcuuuggccucccagagacc

SEQ ID NO: 719955 - RNA, 20 nt, Artificial Sequence
  Synthetic
ggcauuuuaucucugagacc

SEQ ID NO: 719956 - RNA, 20 nt, Artificial Sequence
  Synthetic
gaccucaggaguuugagacc

SEQ ID NO: 719957 - RNA, 20 nt, Artificial Sequence
  Synthetic
gacucauucuagacuagacc

SEQ ID NO: 719958 - RNA, 20 nt, Artificial Sequence
  Synthetic
gccucuucuuagaguagacc

SEQ ID NO: 719959 - RNA, 20 nt, Artificial Sequence
  Synthetic
gugguacaugccuguagacc

SEQ ID NO: 719960 - RNA, 20 nt, Artificial Sequence
  Synthetic
gccaccagagaguguagacc

SEQ ID NO: 719961 - RNA, 20 nt, Artificial Sequence
  Synthetic
gacaguccuggaccaggacc

SEQ ID NO: 719962 - RNA, 20 nt, Artificial Sequence
  Synthetic
gaggccagauaaugaggacc

SEQ ID NO: 719963 - RNA, 20 nt, Artificial Sequence
  Synthetic
guuaggcuuggcauaggacc

SEQ ID NO: 719964 - RNA, 20 nt, Artificial Sequence
  Synthetic
gaugccgcuggugagggacc

SEQ ID NO: 719965 - RNA, 20 nt, Artificial Sequence
  Synthetic
gugggguugggggggggacc

SEQ ID NO: 719966 - RNA, 20 nt, Artificial Sequence
  Synthetic
gaaggaccuggccugggacc

SEQ ID NO: 719967 - RNA, 20 nt, Artificial Sequence
  Synthetic
gagggggcacugcugggacc

SEQ ID NO: 719968 - RNA, 20 nt, Artificial Sequence
  Synthetic
gauaaugaaaaauugggacc

SEQ ID NO: 719969 - RNA, 20 nt, Artificial Sequence
  Synthetic
guagacuuucuaaguggacc

SEQ ID NO: 719970 - RNA, 20 nt, Artificial Sequence
  Synthetic
gaggaugcuuaagaaugacc

SEQ ID NO: 719971 - RNA, 20 nt, Artificial Sequence
  Synthetic
gcucucuaaauuuucugacc

SEQ ID NO: 719972 - RNA, 20 nt, Artificial Sequence
  Synthetic
gcaagagggcagaggugacc

SEQ ID NO: 719973 - RNA, 20 nt, Artificial Sequence
  Synthetic
gcugaaaaguggaugugacc

SEQ ID NO: 719974 - RNA, 20 nt, Artificial Sequence
  Synthetic
gggguuucaucaaguugacc

SEQ ID NO: 719975 - RNA, 20 nt, Artificial Sequence
  Synthetic
gggguuuggccauguugacc

SEQ ID NO: 719976 - RNA, 20 nt, Artificial Sequence
  Synthetic
ggaggaggcugaauuugacc

SEQ ID NO: 719977 - RNA, 20 nt, Artificial Sequence
  Synthetic
gggauauucuacaaaauacc

SEQ ID NO: 719978 - RNA, 20 nt, Artificial Sequence
  Synthetic
gaugcagcccucaguauacc

SEQ ID NO: 719979 - RNA, 20 nt, Artificial Sequence
  Synthetic
guucaacaucacuaacuacc

SEQ ID NO: 719980 - RNA, 20 nt, Artificial Sequence
  Synthetic
guauuucuagcccuacuacc

SEQ ID NO: 719981 - RNA, 20 nt, Artificial Sequence
  Synthetic
guggcaggaucucggcuacc

SEQ ID NO: 719982 - RNA, 20 nt, Artificial Sequence
  Synthetic
gauauuuuguuuccucuacc

SEQ ID NO: 719983 - RNA, 20 nt, Artificial Sequence
  Synthetic
gauuuucuguuucuucuacc

SEQ ID NO: 719984 - RNA, 20 nt, Artificial Sequence
  Synthetic
gccucagccucccaaguacc

SEQ ID NO: 719985 - RNA, 20 nt, Artificial Sequence
  Synthetic
gaaauagcaccucaaguacc

SEQ ID NO: 719986 - RNA, 20 nt, Artificial Sequence
  Synthetic
gccucagccuccgaaguacc

SEQ ID NO: 719987 - RNA, 20 nt, Artificial Sequence
  Synthetic
gcauuuccaacugcaguacc

SEQ ID NO: 719988 - RNA, 20 nt, Artificial Sequence
  Synthetic
gggucacauucugagguacc

SEQ ID NO: 719989 - RNA, 20 nt, Artificial Sequence
  Synthetic
gggaaaacugucccgguacc

SEQ ID NO: 719990 - RNA, 20 nt, Artificial Sequence
  Synthetic
gugacacuuaaaaugguacc

SEQ ID NO: 719991 - RNA, 20 nt, Artificial Sequence
  Synthetic
gaagccuaagaaauuguacc

SEQ ID NO: 719992 - RNA, 20 nt, Artificial Sequence
  Synthetic
gaacaacccagaauauuacc

SEQ ID NO: 719993 - RNA, 20 nt, Artificial Sequence
  Synthetic
gggucggggaagaccuuacc

SEQ ID NO: 719994 - RNA, 20 nt, Artificial Sequence
  Synthetic
gcccagagcugcuucuuacc

SEQ ID NO: 719995 - RNA, 20 nt, Artificial Sequence
  Synthetic
gcuuuugaaaauggguuacc

SEQ ID NO: 719996 - RNA, 20 nt, Artificial Sequence
  Synthetic
gacugccucucagguuuacc

SEQ ID NO: 719997 - RNA, 20 nt, Artificial Sequence
  Synthetic
gaaaucuuuugucuuuuacc

SEQ ID NO: 719998 - RNA, 20 nt, Artificial Sequence
  Synthetic
gguucuaaguauucaaaccc

SEQ ID NO: 719999 - RNA, 20 nt, Artificial Sequence
  Synthetic
gacacagggguuggaaaccc

SEQ ID NO: 720000 - RNA, 20 nt, Artificial Sequence
  Synthetic
ggaucuucauuccacaaccc

SEQ ID NO: 720001 - RNA, 20 nt, Artificial Sequence
  Synthetic
guaccauuguacuccaaccc

SEQ ID NO: 720002 - RNA, 20 nt, Artificial Sequence
  Synthetic
gacugguauuuauggaaccc

SEQ ID NO: 720003 - RNA, 20 nt, Artificial Sequence
  Synthetic
gagggccuaggagugaaccc

SEQ ID NO: 720004 - RNA, 20 nt, Artificial Sequence
  Synthetic
gcagagaauugcuugaaccc

SEQ ID NO: 720005 - RNA, 20 nt, Artificial Sequence
  Synthetic
caggagaauugcuugaaccc

SEQ ID NO: 720006 - RNA, 20 nt, Artificial Sequence
  Synthetic
guugucugauaagauaaccc

SEQ ID NO: 720007 - RNA, 20 nt, Artificial Sequence
  Synthetic
gaaagcaaacaagguaaccc

SEQ ID NO: 720008 - RNA, 20 nt, Artificial Sequence
  Synthetic
ggagucucacccuguaaccc

SEQ ID NO: 720009 - RNA, 20 nt, Artificial Sequence
  Synthetic
gaguuuugcucuuguaaccc

SEQ ID NO: 720010 - RNA, 20 nt, Artificial Sequence
  Synthetic
ggaaggggaacaucacaccc

SEQ ID NO: 720011 - RNA, 20 nt, Artificial Sequence
  Synthetic
gccugaggcugcccgcaccc

SEQ ID NO: 720012 - RNA, 20 nt, Artificial Sequence
  Synthetic
ggagucuugcuccaucaccc

SEQ ID NO: 720013 - RNA, 20 nt, Artificial Sequence
  Synthetic
ggugggaugucgccucaccc

SEQ ID NO: 720014 - RNA, 20 nt, Artificial Sequence
  Synthetic
ggagucucacuacgucaccc

SEQ ID NO: 720015 - RNA, 20 nt, Artificial Sequence
  Synthetic
ggagucucacucugucaccc

SEQ ID NO: 720016 - RNA, 20 nt, Artificial Sequence
  Synthetic
ggagucuagcucugucaccc

SEQ ID NO: 720017 - RNA, 20 nt, Artificial Sequence
  Synthetic
ggagucucgcucugucaccc

SEQ ID NO: 720018 - RNA, 20 nt, Artificial Sequence
  Synthetic
guagucucgcucugucaccc

SEQ ID NO: 720019 - RNA, 20 nt, Artificial Sequence
  Synthetic
ggagccuugcucugucaccc

SEQ ID NO: 720020 - RNA, 20 nt, Artificial Sequence
  Synthetic
ggagucuugcucugucaccc

SEQ ID NO: 720021 - RNA, 20 nt, Artificial Sequence
  Synthetic
ggaguuuugcucugucaccc

SEQ ID NO: 720022 - RNA, 20 nt, Artificial Sequence
  Synthetic
ggagucucacugugucaccc

SEQ ID NO: 720023 - RNA, 20 nt, Artificial Sequence
  Synthetic
gaagucucacuuugucaccc

SEQ ID NO: 720024 - RNA, 20 nt, Artificial Sequence
  Synthetic
gaauuuugcuuuugucaccc

SEQ ID NO: 720025 - RNA, 20 nt, Artificial Sequence
  Synthetic
gagcccuaugaaaaagaccc

SEQ ID NO: 720026 - RNA, 20 nt, Artificial Sequence
  Synthetic
gagaacaugaaagaagaccc

SEQ ID NO: 720027 - RNA, 20 nt, Artificial Sequence
  Synthetic
gaauaauagucaucagaccc

SEQ ID NO: 720028 - RNA, 20 nt, Artificial Sequence
  Synthetic
ggcauccucaucugagaccc

SEQ ID NO: 720029 - RNA, 20 nt, Artificial Sequence
  Synthetic
ggaaauguuucuuaggaccc

SEQ ID NO: 720030 - RNA, 20 nt, Artificial Sequence
  Synthetic
gagaaaacaucuuaugaccc

SEQ ID NO: 720031 - RNA, 20 nt, Artificial Sequence
  Synthetic
guuuccacacugugugaccc

SEQ ID NO: 720032 - RNA, 20 nt, Artificial Sequence
  Synthetic
gaaagucaacaaggauaccc

SEQ ID NO: 720033 - RNA, 20 nt, Artificial Sequence
  Synthetic
gccuguagucccagcuaccc

SEQ ID NO: 720034 - RNA, 20 nt, Artificial Sequence
  Synthetic
gccaguagccucagcuaccc

SEQ ID NO: 720035 - RNA, 20 nt, Artificial Sequence
  Synthetic
gaaaaguuaagcuucuaccc

SEQ ID NO: 720036 - RNA, 20 nt, Artificial Sequence
  Synthetic
ggacaucaaccagaguaccc

SEQ ID NO: 720037 - RNA, 20 nt, Artificial Sequence
  Synthetic
gaggucucgcuguguuaccc

SEQ ID NO: 720038 - RNA, 20 nt, Artificial Sequence
  Synthetic
ggaagaaguaacaaaacccc

SEQ ID NO: 720039 - RNA, 20 nt, Artificial Sequence
  Synthetic
gugccacugcacuccacccc

SEQ ID NO: 720040 - RNA, 20 nt, Artificial Sequence
  Synthetic
gccaccuccaccuccacccc

SEQ ID NO: 720041 - RNA, 20 nt, Artificial Sequence
  Synthetic
gcgugcagcagaaucacccc

SEQ ID NO: 720042 - RNA, 20 nt, Artificial Sequence
  Synthetic
gagucucgcucugucacccc

SEQ ID NO: 720043 - RNA, 20 nt, Artificial Sequence
  Synthetic
ggguuuucccuuuguacccc

SEQ ID NO: 720044 - RNA, 20 nt, Artificial Sequence
  Synthetic
ggacaaagcuugcuuacccc

SEQ ID NO: 720045 - RNA, 20 nt, Artificial Sequence
  Synthetic
gccuucuuuaucaugccccc

SEQ ID NO: 720046 - RNA, 20 nt, Artificial Sequence
  Synthetic
gccagcggcagcaaagcccc

SEQ ID NO: 720047 - RNA, 20 nt, Artificial Sequence
  Synthetic
gggagaguccuuagagcccc

SEQ ID NO: 720048 - RNA, 20 nt, Artificial Sequence
  Synthetic
gauagaaccauucacucccc

SEQ ID NO: 720049 - RNA, 20 nt, Artificial Sequence
  Synthetic
guauuuauaacaagcucccc

SEQ ID NO: 720050 - RNA, 20 nt, Artificial Sequence
  Synthetic
gagaagcacaugcauucccc

SEQ ID NO: 720051 - RNA, 20 nt, Artificial Sequence
  Synthetic
ggagugacaacagaaagccc

SEQ ID NO: 720052 - RNA, 20 nt, Artificial Sequence
  Synthetic
gccagguucuggcccagccc

SEQ ID NO: 720053 - RNA, 20 nt, Artificial Sequence
  Synthetic
gugccacugcacuccagccc

SEQ ID NO: 720054 - RNA, 20 nt, Artificial Sequence
  Synthetic
gagucacugcacuccagccc

SEQ ID NO: 720055 - RNA, 20 nt, Artificial Sequence
  Synthetic
gcugcacaaauuugcagccc

SEQ ID NO: 720056 - RNA, 20 nt, Artificial Sequence
  Synthetic
guggguggcaaauucagccc

SEQ ID NO: 720057 - RNA, 20 nt, Artificial Sequence
  Synthetic
ggaaagaaagagaagagccc

SEQ ID NO: 720058 - RNA, 20 nt, Artificial Sequence
  Synthetic
gggagugcaaagaugagccc

SEQ ID NO: 720059 - RNA, 20 nt, Artificial Sequence
  Synthetic
gcggagaacugcuugagccc

SEQ ID NO: 720060 - RNA, 20 nt, Artificial Sequence
  Synthetic
ggcucucugucugguagccc

SEQ ID NO: 720061 - RNA, 20 nt, Artificial Sequence
  Synthetic
gaagucucgcuccaucgccc

SEQ ID NO: 720062 - RNA, 20 nt, Artificial Sequence
  Synthetic
ggagucuugcucagucgccc

SEQ ID NO: 720063 - RNA, 20 nt, Artificial Sequence
  Synthetic
ggagucucacucugucgccc

SEQ ID NO: 720064 - RNA, 20 nt, Artificial Sequence
  Synthetic
ggagucucccucugucgccc

SEQ ID NO: 720065 - RNA, 20 nt, Artificial Sequence
  Synthetic
gaagucucgcucugucgccc

SEQ ID NO: 720066 - RNA, 20 nt, Artificial Sequence
  Synthetic
gcagucucgcucugucgccc

SEQ ID NO: 720067 - RNA, 20 nt, Artificial Sequence
  Synthetic
ggagucucgcucugucgccc

SEQ ID NO: 720068 - RNA, 20 nt, Artificial Sequence
  Synthetic
ggaguuucgcucugucgccc

SEQ ID NO: 720069 - RNA, 20 nt, Artificial Sequence
  Synthetic
ggagucuggcucugucgccc

SEQ ID NO: 720070 - RNA, 20 nt, Artificial Sequence
  Synthetic
ggagucuugcucugucgccc

SEQ ID NO: 720071 - RNA, 20 nt, Artificial Sequence
  Synthetic
gaguuucgcucgugucgccc

SEQ ID NO: 720072 - RNA, 20 nt, Artificial Sequence
  Synthetic
gaguuuugcucuugucgccc

SEQ ID NO: 720073 - RNA, 20 nt, Artificial Sequence
  Synthetic
ggagucucgcucuuucgccc

SEQ ID NO: 720074 - RNA, 20 nt, Artificial Sequence
  Synthetic
ggaguuucgcucuuucgccc

SEQ ID NO: 720075 - RNA, 20 nt, Artificial Sequence
  Synthetic
gacagcaagugcaaaggccc

SEQ ID NO: 720076 - RNA, 20 nt, Artificial Sequence
  Synthetic
gggggcucugggcccggccc

SEQ ID NO: 720077 - RNA, 20 nt, Artificial Sequence
  Synthetic
gugcuugaaacccagggccc

SEQ ID NO: 720078 - RNA, 20 nt, Artificial Sequence
  Synthetic
guguauuuuauguguggccc

SEQ ID NO: 720079 - RNA, 20 nt, Artificial Sequence
  Synthetic
guuuacuaacuauaaugccc

SEQ ID NO: 720080 - RNA, 20 nt, Artificial Sequence
  Synthetic
gaguuucacucuugcugccc

SEQ ID NO: 720081 - RNA, 20 nt, Artificial Sequence
  Synthetic
guuaauuccuuucucugccc

SEQ ID NO: 720082 - RNA, 20 nt, Artificial Sequence
  Synthetic
gccacaaaagcgaagugccc

SEQ ID NO: 720083 - RNA, 20 nt, Artificial Sequence
  Synthetic
gucauccaggugaagugccc

SEQ ID NO: 720084 - RNA, 20 nt, Artificial Sequence
  Synthetic
guugcugugugccagugccc

SEQ ID NO: 720085 - RNA, 20 nt, Artificial Sequence
  Synthetic
ggaguuuuguuccauugccc

SEQ ID NO: 720086 - RNA, 20 nt, Artificial Sequence
  Synthetic
gggguuuugcuauauugccc

SEQ ID NO: 720087 - RNA, 20 nt, Artificial Sequence
  Synthetic
ggagucucgcucucuugccc

SEQ ID NO: 720088 - RNA, 20 nt, Artificial Sequence
  Synthetic
gggguuucaccauguugccc

SEQ ID NO: 720089 - RNA, 20 nt, Artificial Sequence
  Synthetic
gggguuugaccauguugccc

SEQ ID NO: 720090 - RNA, 20 nt, Artificial Sequence
  Synthetic
ggggccuugccauguugccc

SEQ ID NO: 720091 - RNA, 20 nt, Artificial Sequence
  Synthetic
gggguuuugccauguugccc

SEQ ID NO: 720092 - RNA, 20 nt, Artificial Sequence
  Synthetic
gguaucucacuauguugccc

SEQ ID NO: 720093 - RNA, 20 nt, Artificial Sequence
  Synthetic
gaugugucauuauguugccc

SEQ ID NO: 720094 - RNA, 20 nt, Artificial Sequence
  Synthetic
gaaccauggaacuguugccc

SEQ ID NO: 720095 - RNA, 20 nt, Artificial Sequence
  Synthetic
ggagucucgcacuguugccc

SEQ ID NO: 720096 - RNA, 20 nt, Artificial Sequence
  Synthetic
ggggucucaaucuguugccc

SEQ ID NO: 720097 - RNA, 20 nt, Artificial Sequence
  Synthetic
gaagucucacucuguugccc

SEQ ID NO: 720098 - RNA, 20 nt, Artificial Sequence
  Synthetic
ggagucucacucuguugccc

SEQ ID NO: 720099 - RNA, 20 nt, Artificial Sequence
  Synthetic
ggagucucgcucuguugccc

SEQ ID NO: 720100 - RNA, 20 nt, Artificial Sequence
  Synthetic
ggaguuucgcucuguugccc

SEQ ID NO: 720101 - RNA, 20 nt, Artificial Sequence
  Synthetic
ggagucuugcucuguugccc

SEQ ID NO: 720102 - RNA, 20 nt, Artificial Sequence
  Synthetic
ggagucuuucucuguugccc

SEQ ID NO: 720103 - RNA, 20 nt, Artificial Sequence
  Synthetic
gaguuucacucuuguugccc

SEQ ID NO: 720104 - RNA, 20 nt, Artificial Sequence
  Synthetic
guguuucacucuuguugccc

SEQ ID NO: 720105 - RNA, 20 nt, Artificial Sequence
  Synthetic
gaguuucgcucuuguugccc

SEQ ID NO: 720106 - RNA, 20 nt, Artificial Sequence
  Synthetic
gaguuuugcucuuguugccc

SEQ ID NO: 720107 - RNA, 20 nt, Artificial Sequence
  Synthetic
gaguuucacuguuguugccc

SEQ ID NO: 720108 - RNA, 20 nt, Artificial Sequence
  Synthetic
gaaucaguuuuucuuugccc

SEQ ID NO: 720109 - RNA, 20 nt, Artificial Sequence
  Synthetic
gccagcuagcaagaaauccc

SEQ ID NO: 720110 - RNA, 20 nt, Artificial Sequence
  Synthetic
gauguccauauccuaauccc

SEQ ID NO: 720111 - RNA, 20 nt, Artificial Sequence
  Synthetic
guggcucacgcuguaauccc

SEQ ID NO: 720112 - RNA, 20 nt, Artificial Sequence
  Synthetic
gauguauggaaggacauccc

SEQ ID NO: 720113 - RNA, 20 nt, Artificial Sequence
  Synthetic
gaucaagugggcuucauccc

SEQ ID NO: 720114 - RNA, 20 nt, Artificial Sequence
  Synthetic
gaucaaguuggcuucauccc

SEQ ID NO: 720115 - RNA, 20 nt, Artificial Sequence
  Synthetic
gagggcaagaacaagauccc

SEQ ID NO: 720116 - RNA, 20 nt, Artificial Sequence
  Synthetic
ggcugaaacaggcagauccc

SEQ ID NO: 720117 - RNA, 20 nt, Artificial Sequence
  Synthetic
ggcaaaagcuuugggauccc

SEQ ID NO: 720118 - RNA, 20 nt, Artificial Sequence
  Synthetic
gaaucuaaauuucauauccc

SEQ ID NO: 720119 - RNA, 20 nt, Artificial Sequence
  Synthetic
gaccaagagggauuuauccc

SEQ ID NO: 720120 - RNA, 20 nt, Artificial Sequence
  Synthetic
ggggcuggucucaaacuccc

SEQ ID NO: 720121 - RNA, 20 nt, Artificial Sequence
  Synthetic
gcaggggaugucacacuccc

SEQ ID NO: 720122 - RNA, 20 nt, Artificial Sequence
  Synthetic
gaggcagggaacauacuccc

SEQ ID NO: 720123 - RNA, 20 nt, Artificial Sequence
  Synthetic
gacaaaaccauucuacuccc

SEQ ID NO: 720124 - RNA, 20 nt, Artificial Sequence
  Synthetic
cacugcaaccuccaccuccc

SEQ ID NO: 720125 - RNA, 20 nt, Artificial Sequence
  Synthetic
cacugcaaccuccgccuccc

SEQ ID NO: 720126 - RNA, 20 nt, Artificial Sequence
  Synthetic
gggguuaaauaccagcuccc

SEQ ID NO: 720127 - RNA, 20 nt, Artificial Sequence
  Synthetic
gccuuaucuaacagaguccc

SEQ ID NO: 720128 - RNA, 20 nt, Artificial Sequence
  Synthetic
guauagcagaaacgaguccc

SEQ ID NO: 720129 - RNA, 20 nt, Artificial Sequence
  Synthetic
gacccugcucccaguguccc

SEQ ID NO: 720130 - RNA, 20 nt, Artificial Sequence
  Synthetic
gguggggacaaaauuguccc

SEQ ID NO: 720131 - RNA, 20 nt, Artificial Sequence
  Synthetic
gcuuccugcucaauuguccc

SEQ ID NO: 720132 - RNA, 20 nt, Artificial Sequence
  Synthetic
gaucuguccuugauuguccc

SEQ ID NO: 720133 - RNA, 20 nt, Artificial Sequence
  Synthetic
ggccaucacauuguuguccc

SEQ ID NO: 720134 - RNA, 20 nt, Artificial Sequence
  Synthetic
gaauuuuaggucaaauuccc

SEQ ID NO: 720135 - RNA, 20 nt, Artificial Sequence
  Synthetic
gauuucuugaucacauuccc

SEQ ID NO: 720136 - RNA, 20 nt, Artificial Sequence
  Synthetic
gaccuggaaauuuuauuccc

SEQ ID NO: 720137 - RNA, 20 nt, Artificial Sequence
  Synthetic
gcuaauauccauuccuuccc

SEQ ID NO: 720138 - RNA, 20 nt, Artificial Sequence
  Synthetic
gagacaguuucccucuuccc

SEQ ID NO: 720139 - RNA, 20 nt, Artificial Sequence
  Synthetic
gucugggaaauguaguuccc

SEQ ID NO: 720140 - RNA, 20 nt, Artificial Sequence
  Synthetic
guggaggugccauuguuccc

SEQ ID NO: 720141 - RNA, 20 nt, Artificial Sequence
  Synthetic
ggauuugauuugcauuuccc

SEQ ID NO: 720142 - RNA, 20 nt, Artificial Sequence
  Synthetic
gaauguaaaucugcuuuccc

SEQ ID NO: 720143 - RNA, 20 nt, Artificial Sequence
  Synthetic
ggagaaacuggcaguuuccc

SEQ ID NO: 720144 - RNA, 20 nt, Artificial Sequence
  Synthetic
gugucaagagagauuuuccc

SEQ ID NO: 720145 - RNA, 20 nt, Artificial Sequence
  Synthetic
gauccucauaguugaaagcc

SEQ ID NO: 720146 - RNA, 20 nt, Artificial Sequence
  Synthetic
guacuaugaguuguaaagcc

SEQ ID NO: 720147 - RNA, 20 nt, Artificial Sequence
  Synthetic
gucuguuugacuuuaaagcc

SEQ ID NO: 720148 - RNA, 20 nt, Artificial Sequence
  Synthetic
guucugucaagagacaagcc

SEQ ID NO: 720149 - RNA, 20 nt, Artificial Sequence
  Synthetic
guacuuguaacugacaagcc

SEQ ID NO: 720150 - RNA, 20 nt, Artificial Sequence
  Synthetic
gaagccuugggcuucaagcc

SEQ ID NO: 720151 - RNA, 20 nt, Artificial Sequence
  Synthetic
gcuuuucaaacaaagaagcc

SEQ ID NO: 720152 - RNA, 20 nt, Artificial Sequence
  Synthetic
ggaacaaugucugggaagcc

SEQ ID NO: 720153 - RNA, 20 nt, Artificial Sequence
  Synthetic
guagaaguagauaauaagcc

SEQ ID NO: 720154 - RNA, 20 nt, Artificial Sequence
  Synthetic
gaguuugaaaagucuaagcc

SEQ ID NO: 720155 - RNA, 20 nt, Artificial Sequence
  Synthetic
gauugggaauucuguaagcc

SEQ ID NO: 720156 - RNA, 20 nt, Artificial Sequence
  Synthetic
gaaaaagugcuauuuaagcc

SEQ ID NO: 720157 - RNA, 20 nt, Artificial Sequence
  Synthetic
gugcuggggccucaccagcc

SEQ ID NO: 720158 - RNA, 20 nt, Artificial Sequence
  Synthetic
gaaaccaauccucaccagcc

SEQ ID NO: 720159 - RNA, 20 nt, Artificial Sequence
  Synthetic
gucagaguucaagaccagcc

SEQ ID NO: 720160 - RNA, 20 nt, Artificial Sequence
  Synthetic
guaagcuaccacacccagcc

SEQ ID NO: 720161 - RNA, 20 nt, Artificial Sequence
  Synthetic
gugccauugcaacuccagcc

SEQ ID NO: 720162 - RNA, 20 nt, Artificial Sequence
  Synthetic
gagaucaugccacuccagcc

SEQ ID NO: 720163 - RNA, 20 nt, Artificial Sequence
  Synthetic
ggcacaacugcacuccagcc

SEQ ID NO: 720164 - RNA, 20 nt, Artificial Sequence
  Synthetic
ggcaccacugcacuccagcc

SEQ ID NO: 720165 - RNA, 20 nt, Artificial Sequence
  Synthetic
ggcgccacugcacuccagcc

SEQ ID NO: 720166 - RNA, 20 nt, Artificial Sequence
  Synthetic
gaggcuacugcacuccagcc

SEQ ID NO: 720167 - RNA, 20 nt, Artificial Sequence
  Synthetic
gcugagauugcacuccagcc

SEQ ID NO: 720168 - RNA, 20 nt, Artificial Sequence
  Synthetic
gcaacugcccuucuccagcc

SEQ ID NO: 720169 - RNA, 20 nt, Artificial Sequence
  Synthetic
gccagccuguaaaagcagcc

SEQ ID NO: 720170 - RNA, 20 nt, Artificial Sequence
  Synthetic
gcuagccugugaaagcagcc

SEQ ID NO: 720171 - RNA, 20 nt, Artificial Sequence
  Synthetic
gucaggaguucaaggcagcc

SEQ ID NO: 720172 - RNA, 20 nt, Artificial Sequence
  Synthetic
gaaaauacaaaaaaucagcc

SEQ ID NO: 720173 - RNA, 20 nt, Artificial Sequence
  Synthetic
gaaggaccuuagcaucagcc

SEQ ID NO: 720174 - RNA, 20 nt, Artificial Sequence
  Synthetic
ggaggaguuccagaucagcc

SEQ ID NO: 720175 - RNA, 20 nt, Artificial Sequence
  Synthetic
gacauuuuucuguaucagcc

SEQ ID NO: 720176 - RNA, 20 nt, Artificial Sequence
  Synthetic
gggaacagcuuaacucagcc

SEQ ID NO: 720177 - RNA, 20 nt, Artificial Sequence
  Synthetic
ggugccacugcacuucagcc

SEQ ID NO: 720178 - RNA, 20 nt, Artificial Sequence
  Synthetic
gauaccuacugccuucagcc

SEQ ID NO: 720179 - RNA, 20 nt, Artificial Sequence
  Synthetic
ggcucuggagucaaagagcc

SEQ ID NO: 720180 - RNA, 20 nt, Artificial Sequence
  Synthetic
gugauguacuucacagagcc

SEQ ID NO: 720181 - RNA, 20 nt, Artificial Sequence
  Synthetic
gugcagugacgcccagagcc

SEQ ID NO: 720182 - RNA, 20 nt, Artificial Sequence
  Synthetic
gaagucauugaggcagagcc

SEQ ID NO: 720183 - RNA, 20 nt, Artificial Sequence
  Synthetic
gugaaaaagaaauuagagcc

SEQ ID NO: 720184 - RNA, 20 nt, Artificial Sequence
  Synthetic
gucagguuuaauuuagagcc

SEQ ID NO: 720185 - RNA, 20 nt, Artificial Sequence
  Synthetic
gccacaaggacacaggagcc

SEQ ID NO: 720186 - RNA, 20 nt, Artificial Sequence
  Synthetic
gacauggguguggaggagcc

SEQ ID NO: 720187 - RNA, 20 nt, Artificial Sequence
  Synthetic
gauuugacaugcauggagcc

SEQ ID NO: 720188 - RNA, 20 nt, Artificial Sequence
  Synthetic
ggcuauggguguuaugagcc

SEQ ID NO: 720189 - RNA, 20 nt, Artificial Sequence
  Synthetic
gugggaggaucaccugagcc

SEQ ID NO: 720190 - RNA, 20 nt, Artificial Sequence
  Synthetic
ggcagagguugcagugagcc

SEQ ID NO: 720191 - RNA, 20 nt, Artificial Sequence
  Synthetic
ggcaaaguccaaggugagcc

SEQ ID NO: 720192 - RNA, 20 nt, Artificial Sequence
  Synthetic
gcugaaggaucacuugagcc

SEQ ID NO: 720193 - RNA, 20 nt, Artificial Sequence
  Synthetic
gcaggagaaccgcuugagcc

SEQ ID NO: 720194 - RNA, 20 nt, Artificial Sequence
  Synthetic
gcaggaggauugcuugagcc

SEQ ID NO: 720195 - RNA, 20 nt, Artificial Sequence
  Synthetic
gacaagguuaaaucauagcc

SEQ ID NO: 720196 - RNA, 20 nt, Artificial Sequence
  Synthetic
gagaaacucugcuucuagcc

SEQ ID NO: 720197 - RNA, 20 nt, Artificial Sequence
  Synthetic
cuaaaaauacaaaauuagcc

SEQ ID NO: 720198 - RNA, 20 nt, Artificial Sequence
  Synthetic
gaagauuguacauauuagcc

SEQ ID NO: 720199 - RNA, 20 nt, Artificial Sequence
  Synthetic
ggggugucaccauguuagcc

SEQ ID NO: 720200 - RNA, 20 nt, Artificial Sequence
  Synthetic
ggggcuucaccauguuagcc

SEQ ID NO: 720201 - RNA, 20 nt, Artificial Sequence
  Synthetic
gggguuucaccauguuagcc

SEQ ID NO: 720202 - RNA, 20 nt, Artificial Sequence
  Synthetic
ggaguuucaccguguuagcc

SEQ ID NO: 720203 - RNA, 20 nt, Artificial Sequence
  Synthetic
gagguuucaccguguuagcc

SEQ ID NO: 720204 - RNA, 20 nt, Artificial Sequence
  Synthetic
gggguuucaccguguuagcc

SEQ ID NO: 720205 - RNA, 20 nt, Artificial Sequence
  Synthetic
gugguuucaccguguuagcc

SEQ ID NO: 720206 - RNA, 20 nt, Artificial Sequence
  Synthetic
ggguuuucaccguguuagcc

SEQ ID NO: 720207 - RNA, 20 nt, Artificial Sequence
  Synthetic
gggguuuuaccguguuagcc

SEQ ID NO: 720208 - RNA, 20 nt, Artificial Sequence
  Synthetic
gggguuucacuguguuagcc

SEQ ID NO: 720209 - RNA, 20 nt, Artificial Sequence
  Synthetic
gggguuucuccuuguuagcc

SEQ ID NO: 720210 - RNA, 20 nt, Artificial Sequence
  Synthetic
gaggcgcccacaaccacgcc

SEQ ID NO: 720211 - RNA, 20 nt, Artificial Sequence
  Synthetic
gaccuugugaucugcccgcc

SEQ ID NO: 720212 - RNA, 20 nt, Artificial Sequence
  Synthetic
caggcgugagccaccgcgcc

SEQ ID NO: 720213 - RNA, 20 nt, Artificial Sequence
  Synthetic
ggaagaguugccccugcgcc

SEQ ID NO: 720214 - RNA, 20 nt, Artificial Sequence
  Synthetic
gagauggagucucugucgcc

SEQ ID NO: 720215 - RNA, 20 nt, Artificial Sequence
  Synthetic
gggguuucaccguguucgcc

SEQ ID NO: 720216 - RNA, 20 nt, Artificial Sequence
  Synthetic
gaauacuaugcauaaaggcc

SEQ ID NO: 720217 - RNA, 20 nt, Artificial Sequence
  Synthetic
gucuauugaaaagcaaggcc

SEQ ID NO: 720218 - RNA, 20 nt, Artificial Sequence
  Synthetic
guacacuuagaggcaaggcc

SEQ ID NO: 720219 - RNA, 20 nt, Artificial Sequence
  Synthetic
ggggcaugauaaagaaggcc

SEQ ID NO: 720220 - RNA, 20 nt, Artificial Sequence
  Synthetic
gaaauauaaauguacaggcc

SEQ ID NO: 720221 - RNA, 20 nt, Artificial Sequence
  Synthetic
gauuuugucaccaccaggcc

SEQ ID NO: 720222 - RNA, 20 nt, Artificial Sequence
  Synthetic
gagaaccauaaccccaggcc

SEQ ID NO: 720223 - RNA, 20 nt, Artificial Sequence
  Synthetic
ggggucccuggucccaggcc

SEQ ID NO: 720224 - RNA, 20 nt, Artificial Sequence
  Synthetic
gagcucuuguaagccaggcc

SEQ ID NO: 720225 - RNA, 20 nt, Artificial Sequence
  Synthetic
gagcucuuuuagggcaggcc

SEQ ID NO: 720226 - RNA, 20 nt, Artificial Sequence
  Synthetic
ggucagaaguuccagaggcc

SEQ ID NO: 720227 - RNA, 20 nt, Artificial Sequence
  Synthetic
gagacccgggaauggaggcc

SEQ ID NO: 720228 - RNA, 20 nt, Artificial Sequence
  Synthetic
gauagcauagcauauaggcc

SEQ ID NO: 720229 - RNA, 20 nt, Artificial Sequence
  Synthetic
gcuguccaagaaccuaggcc

SEQ ID NO: 720230 - RNA, 20 nt, Artificial Sequence
  Synthetic
ggaguuucacccuguaggcc

SEQ ID NO: 720231 - RNA, 20 nt, Artificial Sequence
  Synthetic
gaguagaagaaacaccggcc

SEQ ID NO: 720232 - RNA, 20 nt, Artificial Sequence
  Synthetic
gaggguucgccaugucggcc

SEQ ID NO: 720233 - RNA, 20 nt, Artificial Sequence
  Synthetic
ggaucaggaauacaagggcc

SEQ ID NO: 720234 - RNA, 20 nt, Artificial Sequence
  Synthetic
gguccccugaaaacagggcc

SEQ ID NO: 720235 - RNA, 20 nt, Artificial Sequence
  Synthetic
gggauuccaagaucagggcc

SEQ ID NO: 720236 - RNA, 20 nt, Artificial Sequence
  Synthetic
gucaggcaucagucagggcc

SEQ ID NO: 720237 - RNA, 20 nt, Artificial Sequence
  Synthetic
gcugcacaggaaggagggcc

SEQ ID NO: 720238 - RNA, 20 nt, Artificial Sequence
  Synthetic
gcuauccaggaacuagggcc

SEQ ID NO: 720239 - RNA, 20 nt, Artificial Sequence
  Synthetic
ggcagauagagcccggggcc

SEQ ID NO: 720240 - RNA, 20 nt, Artificial Sequence
  Synthetic
gacauagggcuuuuggggcc

SEQ ID NO: 720241 - RNA, 20 nt, Artificial Sequence
  Synthetic
gcaaaaugguuuccugggcc

SEQ ID NO: 720242 - RNA, 20 nt, Artificial Sequence
  Synthetic
gucuagaugugaucugggcc

SEQ ID NO: 720243 - RNA, 20 nt, Artificial Sequence
  Synthetic
gucaagaguaagcuugggcc

SEQ ID NO: 720244 - RNA, 20 nt, Artificial Sequence
  Synthetic
gcauucaagagaguauggcc

SEQ ID NO: 720245 - RNA, 20 nt, Artificial Sequence
  Synthetic
gugagccacugcaccuggcc

SEQ ID NO: 720246 - RNA, 20 nt, Artificial Sequence
  Synthetic
gggaugaguagcagcuggcc

SEQ ID NO: 720247 - RNA, 20 nt, Artificial Sequence
  Synthetic
gggguuucgccaugcuggcc

SEQ ID NO: 720248 - RNA, 20 nt, Artificial Sequence
  Synthetic
gauagggguuauaucuggcc

SEQ ID NO: 720249 - RNA, 20 nt, Artificial Sequence
  Synthetic
gaucaugacacucucuggcc

SEQ ID NO: 720250 - RNA, 20 nt, Artificial Sequence
  Synthetic
gaaaaaaauaaucaguggcc

SEQ ID NO: 720251 - RNA, 20 nt, Artificial Sequence
  Synthetic
gggguuucacuaugguggcc

SEQ ID NO: 720252 - RNA, 20 nt, Artificial Sequence
  Synthetic
ggggguuucaccuuguggcc

SEQ ID NO: 720253 - RNA, 20 nt, Artificial Sequence
  Synthetic
ggagguuguuaaaauuggcc

SEQ ID NO: 720254 - RNA, 20 nt, Artificial Sequence
  Synthetic
gauccagccagccauuggcc

SEQ ID NO: 720255 - RNA, 20 nt, Artificial Sequence
  Synthetic
gggguuucaccauauuggcc

SEQ ID NO: 720256 - RNA, 20 nt, Artificial Sequence
  Synthetic
gggguuucaucaccuuggcc

SEQ ID NO: 720257 - RNA, 20 nt, Artificial Sequence
  Synthetic
gggguuucaccacguuggcc

SEQ ID NO: 720258 - RNA, 20 nt, Artificial Sequence
  Synthetic
gggguuuuaccacguuggcc

SEQ ID NO: 720259 - RNA, 20 nt, Artificial Sequence
  Synthetic
ggggucucaccauguuggcc

SEQ ID NO: 720260 - RNA, 20 nt, Artificial Sequence
  Synthetic
gggauuucaccauguuggcc

SEQ ID NO: 720261 - RNA, 20 nt, Artificial Sequence
  Synthetic
gggguuucaccauguuggcc

SEQ ID NO: 720262 - RNA, 20 nt, Artificial Sequence
  Synthetic
ggguuuucaccauguuggcc

SEQ ID NO: 720263 - RNA, 20 nt, Artificial Sequence
  Synthetic
gggguuuuaccauguuggcc

SEQ ID NO: 720264 - RNA, 20 nt, Artificial Sequence
  Synthetic
gggguuucgccauguuggcc

SEQ ID NO: 720265 - RNA, 20 nt, Artificial Sequence
  Synthetic
gugguuucgccauguuggcc

SEQ ID NO: 720266 - RNA, 20 nt, Artificial Sequence
  Synthetic
gggguuuugccauguuggcc

SEQ ID NO: 720267 - RNA, 20 nt, Artificial Sequence
  Synthetic
gggguuucaucauguuggcc

SEQ ID NO: 720268 - RNA, 20 nt, Artificial Sequence
  Synthetic
gggguuucgucauguuggcc

SEQ ID NO: 720269 - RNA, 20 nt, Artificial Sequence
  Synthetic
gggguuucaugauguuggcc

SEQ ID NO: 720270 - RNA, 20 nt, Artificial Sequence
  Synthetic
guaguuucacuauguuggcc

SEQ ID NO: 720271 - RNA, 20 nt, Artificial Sequence
  Synthetic
ggaguuucacuguguuggcc

SEQ ID NO: 720272 - RNA, 20 nt, Artificial Sequence
  Synthetic
gggguuucaccuuguuggcc

SEQ ID NO: 720273 - RNA, 20 nt, Artificial Sequence
  Synthetic
gugcuuuuaagaaaaaugcc

SEQ ID NO: 720274 - RNA, 20 nt, Artificial Sequence
  Synthetic
ggucucagagauaaaaugcc

SEQ ID NO: 720275 - RNA, 20 nt, Artificial Sequence
  Synthetic
gguuuaucaagccaaaugcc

SEQ ID NO: 720276 - RNA, 20 nt, Artificial Sequence
  Synthetic
gauuacucuauaacaaugcc

SEQ ID NO: 720277 - RNA, 20 nt, Artificial Sequence
  Synthetic
gauaugcauagcacaaugcc

SEQ ID NO: 720278 - RNA, 20 nt, Artificial Sequence
  Synthetic
gcuagagagaagucaaugcc

SEQ ID NO: 720279 - RNA, 20 nt, Artificial Sequence
  Synthetic
gaaaagggaagaguaaugcc

SEQ ID NO: 720280 - RNA, 20 nt, Artificial Sequence
  Synthetic
gcgcacaccaccaccaugcc

SEQ ID NO: 720281 - RNA, 20 nt, Artificial Sequence
  Synthetic
gaggcgccuuccaccaugcc

SEQ ID NO: 720282 - RNA, 20 nt, Artificial Sequence
  Synthetic
guauagacaacuuucaugcc

SEQ ID NO: 720283 - RNA, 20 nt, Artificial Sequence
  Synthetic
gaugauauaucuaggaugcc

SEQ ID NO: 720284 - RNA, 20 nt, Artificial Sequence
  Synthetic
ggcuucaucccugggaugcc

SEQ ID NO: 720285 - RNA, 20 nt, Artificial Sequence
  Synthetic
gcuauuuauuugaauaugcc

SEQ ID NO: 720286 - RNA, 20 nt, Artificial Sequence
  Synthetic
gauuuaccuagcauacugcc

SEQ ID NO: 720287 - RNA, 20 nt, Artificial Sequence
  Synthetic
ggaccugcccacuuacugcc

SEQ ID NO: 720288 - RNA, 20 nt, Artificial Sequence
  Synthetic
gucacugaaugagggcugcc

SEQ ID NO: 720289 - RNA, 20 nt, Artificial Sequence
  Synthetic
gcccauccauucuugcugcc

SEQ ID NO: 720290 - RNA, 20 nt, Artificial Sequence
  Synthetic
gagacaugaccuauucugcc

SEQ ID NO: 720291 - RNA, 20 nt, Artificial Sequence
  Synthetic
gugauggagagguaagugcc

SEQ ID NO: 720292 - RNA, 20 nt, Artificial Sequence
  Synthetic
gaaaagguuagcacagugcc

SEQ ID NO: 720293 - RNA, 20 nt, Artificial Sequence
  Synthetic
caggcgugagccaccgugcc

SEQ ID NO: 720294 - RNA, 20 nt, Artificial Sequence
  Synthetic
gagugagaacaugcggugcc

SEQ ID NO: 720295 - RNA, 20 nt, Artificial Sequence
  Synthetic
guauguaccuucucugugcc

SEQ ID NO: 720296 - RNA, 20 nt, Artificial Sequence
  Synthetic
gguauuugucuuucugugcc

SEQ ID NO: 720297 - RNA, 20 nt, Artificial Sequence
  Synthetic
gauguuugucuuucugugcc

SEQ ID NO: 720298 - RNA, 20 nt, Artificial Sequence
  Synthetic
gucaagacaaauccauugcc

SEQ ID NO: 720299 - RNA, 20 nt, Artificial Sequence
  Synthetic
ggcaggaguuguuuauugcc

SEQ ID NO: 720300 - RNA, 20 nt, Artificial Sequence
  Synthetic
guaccacauucucccuugcc

SEQ ID NO: 720301 - RNA, 20 nt, Artificial Sequence
  Synthetic
gaaggacagugauccuugcc

SEQ ID NO: 720302 - RNA, 20 nt, Artificial Sequence
  Synthetic
gcuugagaaucacaguugcc

SEQ ID NO: 720303 - RNA, 20 nt, Artificial Sequence
  Synthetic
gaggggaggcaucaguugcc

SEQ ID NO: 720304 - RNA, 20 nt, Artificial Sequence
  Synthetic
gucuggugcucugaguugcc

SEQ ID NO: 720305 - RNA, 20 nt, Artificial Sequence
  Synthetic
gggguuucaccauauuugcc

SEQ ID NO: 720306 - RNA, 20 nt, Artificial Sequence
  Synthetic
gaacagucaaauuauuugcc

SEQ ID NO: 720307 - RNA, 20 nt, Artificial Sequence
  Synthetic
gaaaauaaaucaguuuugcc

SEQ ID NO: 720308 - RNA, 20 nt, Artificial Sequence
  Synthetic
gucauugaguuuuaaaaucc

SEQ ID NO: 720309 - RNA, 20 nt, Artificial Sequence
  Synthetic
guuggguguuggacaaaucc

SEQ ID NO: 720310 - RNA, 20 nt, Artificial Sequence
  Synthetic
guggugagagaaggcaaucc

SEQ ID NO: 720311 - RNA, 20 nt, Artificial Sequence
  Synthetic
gggagucuuuuauucaaucc

SEQ ID NO: 720312 - RNA, 20 nt, Artificial Sequence
  Synthetic
gggguauuaggaaagaaucc

SEQ ID NO: 720313 - RNA, 20 nt, Artificial Sequence
  Synthetic
gagacaaaaugucugaaucc

SEQ ID NO: 720314 - RNA, 20 nt, Artificial Sequence
  Synthetic
guggugcacagcuauaaucc

SEQ ID NO: 720315 - RNA, 20 nt, Artificial Sequence
  Synthetic
guauagccuacugcacaucc

SEQ ID NO: 720316 - RNA, 20 nt, Artificial Sequence
  Synthetic
guuuccagauuuugacaucc

SEQ ID NO: 720317 - RNA, 20 nt, Artificial Sequence
  Synthetic
gcucacugccucaaccaucc

SEQ ID NO: 720318 - RNA, 20 nt, Artificial Sequence
  Synthetic
ggccacauucaaagccaucc

SEQ ID NO: 720319 - RNA, 20 nt, Artificial Sequence
  Synthetic
gaucgagaaagaggccaucc

SEQ ID NO: 720320 - RNA, 20 nt, Artificial Sequence
  Synthetic
gugcagcuugcuugccaucc

SEQ ID NO: 720321 - RNA, 20 nt, Artificial Sequence
  Synthetic
gauagucuccaaucgcaucc

SEQ ID NO: 720322 - RNA, 20 nt, Artificial Sequence
  Synthetic
gggauggagaaccaucaucc

SEQ ID NO: 720323 - RNA, 20 nt, Artificial Sequence
  Synthetic
ggagucucccucugucaucc

SEQ ID NO: 720324 - RNA, 20 nt, Artificial Sequence
  Synthetic
gugggaggauuacuucaucc

SEQ ID NO: 720325 - RNA, 20 nt, Artificial Sequence
  Synthetic
gcuuucugaccauuucaucc

SEQ ID NO: 720326 - RNA, 20 nt, Artificial Sequence
  Synthetic
gucucagucuggaaggaucc

SEQ ID NO: 720327 - RNA, 20 nt, Artificial Sequence
  Synthetic
ggagugcaguggcaugaucc

SEQ ID NO: 720328 - RNA, 20 nt, Artificial Sequence
  Synthetic
guuggagcuaaggcugaucc

SEQ ID NO: 720329 - RNA, 20 nt, Artificial Sequence
  Synthetic
gaugcuaacgcugcugaucc

SEQ ID NO: 720330 - RNA, 20 nt, Artificial Sequence
  Synthetic
gaaggcucugguucugaucc

SEQ ID NO: 720331 - RNA, 20 nt, Artificial Sequence
  Synthetic
guuuucuuauuaagugaucc

SEQ ID NO: 720332 - RNA, 20 nt, Artificial Sequence
  Synthetic
ggaauacaguggugugaucc

SEQ ID NO: 720333 - RNA, 20 nt, Artificial Sequence
  Synthetic
gagcuauuaucuagauaucc

SEQ ID NO: 720334 - RNA, 20 nt, Artificial Sequence
  Synthetic
gcagaguugagauuauaucc

SEQ ID NO: 720335 - RNA, 20 nt, Artificial Sequence
  Synthetic
gccuaacauaugaucuaucc

SEQ ID NO: 720336 - RNA, 20 nt, Artificial Sequence
  Synthetic
guacauacugguuucuaucc

SEQ ID NO: 720337 - RNA, 20 nt, Artificial Sequence
  Synthetic
gucuuuugaauacauuaucc

SEQ ID NO: 720338 - RNA, 20 nt, Artificial Sequence
  Synthetic
gagaggcacaaauguuaucc

SEQ ID NO: 720339 - RNA, 20 nt, Artificial Sequence
  Synthetic
ggaaaauggcgugugacucc

SEQ ID NO: 720340 - RNA, 20 nt, Artificial Sequence
  Synthetic
guagauacaacugguacucc

SEQ ID NO: 720341 - RNA, 20 nt, Artificial Sequence
  Synthetic
ggaaccuugcuaccaccucc

SEQ ID NO: 720342 - RNA, 20 nt, Artificial Sequence
  Synthetic
gccauauuuagauuaccucc

SEQ ID NO: 720343 - RNA, 20 nt, Artificial Sequence
  Synthetic
gagagcauuugccacccucc

SEQ ID NO: 720344 - RNA, 20 nt, Artificial Sequence
  Synthetic
ggugugugauguuccccucc

SEQ ID NO: 720345 - RNA, 20 nt, Artificial Sequence
  Synthetic
ucacugcaaccuccgccucc

SEQ ID NO: 720346 - RNA, 20 nt, Artificial Sequence
  Synthetic
ggucaaauucagccuccucc

SEQ ID NO: 720347 - RNA, 20 nt, Artificial Sequence
  Synthetic
gcgguuugacaguuuccucc

SEQ ID NO: 720348 - RNA, 20 nt, Artificial Sequence
  Synthetic
gccuacaaagcagcagcucc

SEQ ID NO: 720349 - RNA, 20 nt, Artificial Sequence
  Synthetic
ggcccaaacaaaggggcucc

SEQ ID NO: 720350 - RNA, 20 nt, Artificial Sequence
  Synthetic
ggagaagaaaauagugcucc

SEQ ID NO: 720351 - RNA, 20 nt, Artificial Sequence
  Synthetic
guagaaacuauaggugcucc

SEQ ID NO: 720352 - RNA, 20 nt, Artificial Sequence
  Synthetic
gaacacugagaaaaaucucc

SEQ ID NO: 720353 - RNA, 20 nt, Artificial Sequence
  Synthetic
gugucaguuuuaaaaucucc

SEQ ID NO: 720354 - RNA, 20 nt, Artificial Sequence
  Synthetic
gguaaccuauugaccucucc

SEQ ID NO: 720355 - RNA, 20 nt, Artificial Sequence
  Synthetic
gcaggguagagccccucucc

SEQ ID NO: 720356 - RNA, 20 nt, Artificial Sequence
  Synthetic
ggggguagacagcccucucc

SEQ ID NO: 720357 - RNA, 20 nt, Artificial Sequence
  Synthetic
gcugugucucagcucucucc

SEQ ID NO: 720358 - RNA, 20 nt, Artificial Sequence
  Synthetic
gaagauuuuuucaagucucc

SEQ ID NO: 720359 - RNA, 20 nt, Artificial Sequence
  Synthetic
gcaaugggaaaauugucucc

SEQ ID NO: 720360 - RNA, 20 nt, Artificial Sequence
  Synthetic
gaugccuugagaaauucucc

SEQ ID NO: 720361 - RNA, 20 nt, Artificial Sequence
  Synthetic
guacacauguaacauucucc

SEQ ID NO: 720362 - RNA, 20 nt, Artificial Sequence
  Synthetic
gcccucccuuuucauucucc

SEQ ID NO: 720363 - RNA, 20 nt, Artificial Sequence
  Synthetic
gaauagcuaacagcuucucc

SEQ ID NO: 720364 - RNA, 20 nt, Artificial Sequence
  Synthetic
gcuuccaugauuucuucucc

SEQ ID NO: 720365 - RNA, 20 nt, Artificial Sequence
  Synthetic
gauuuuuuauuuauuucucc

SEQ ID NO: 720366 - RNA, 20 nt, Artificial Sequence
  Synthetic
gguaaaagauauguuucucc

SEQ ID NO: 720367 - RNA, 20 nt, Artificial Sequence
  Synthetic
gucuguaauaugaaaagucc

SEQ ID NO: 720368 - RNA, 20 nt, Artificial Sequence
  Synthetic
gccucggccucccaaagucc

SEQ ID NO: 720369 - RNA, 20 nt, Artificial Sequence
  Synthetic
gccuuggccucccaaagucc

SEQ ID NO: 720370 - RNA, 20 nt, Artificial Sequence
  Synthetic
ggggucaguuguagaagucc

SEQ ID NO: 720371 - RNA, 20 nt, Artificial Sequence
  Synthetic
guagaagacaaaguaagucc

SEQ ID NO: 720372 - RNA, 20 nt, Artificial Sequence
  Synthetic
gcaaaucuggccuccagucc

SEQ ID NO: 720373 - RNA, 20 nt, Artificial Sequence
  Synthetic
gucaaaauuggcuggagucc

SEQ ID NO: 720374 - RNA, 20 nt, Artificial Sequence
  Synthetic
guuccuauucaggcuagucc

SEQ ID NO: 720375 - RNA, 20 nt, Artificial Sequence
  Synthetic
guggugugugcuuguagucc

SEQ ID NO: 720376 - RNA, 20 nt, Artificial Sequence
  Synthetic
guuucgaacucuugacgucc

SEQ ID NO: 720377 - RNA, 20 nt, Artificial Sequence
  Synthetic
gaguucagcaaaaaaggucc

SEQ ID NO: 720378 - RNA, 20 nt, Artificial Sequence
  Synthetic
gcugugaauccaucuggucc

SEQ ID NO: 720379 - RNA, 20 nt, Artificial Sequence
  Synthetic
gcugugaauccgucuggucc

SEQ ID NO: 720380 - RNA, 20 nt, Artificial Sequence
  Synthetic
gauauccacaugucaugucc

SEQ ID NO: 720381 - RNA, 20 nt, Artificial Sequence
  Synthetic
ggaguucggaggagaugucc

SEQ ID NO: 720382 - RNA, 20 nt, Artificial Sequence
  Synthetic
gcaguauaaacaauaugucc

SEQ ID NO: 720383 - RNA, 20 nt, Artificial Sequence
  Synthetic
gaacacuuuugagagugucc

SEQ ID NO: 720384 - RNA, 20 nt, Artificial Sequence
  Synthetic
gcacacuauugaaauugucc

SEQ ID NO: 720385 - RNA, 20 nt, Artificial Sequence
  Synthetic
gagguuucacuauguugucc

SEQ ID NO: 720386 - RNA, 20 nt, Artificial Sequence
  Synthetic
ggaguguugcuauguugucc

SEQ ID NO: 720387 - RNA, 20 nt, Artificial Sequence
  Synthetic
ggagucaaccuuuguugucc

SEQ ID NO: 720388 - RNA, 20 nt, Artificial Sequence
  Synthetic
gggggaaauaaggcaauucc

SEQ ID NO: 720389 - RNA, 20 nt, Artificial Sequence
  Synthetic
gcagagcugaguucaauucc

SEQ ID NO: 720390 - RNA, 20 nt, Artificial Sequence
  Synthetic
guuucuugaaugagaauucc

SEQ ID NO: 720391 - RNA, 20 nt, Artificial Sequence
  Synthetic
gagaugccaugaaacauucc

SEQ ID NO: 720392 - RNA, 20 nt, Artificial Sequence
  Synthetic
gcauucagaaagggcauucc

SEQ ID NO: 720393 - RNA, 20 nt, Artificial Sequence
  Synthetic
gcacauccacuguucauucc

SEQ ID NO: 720394 - RNA, 20 nt, Artificial Sequence
  Synthetic
gaaaucuuaaaagggauucc

SEQ ID NO: 720395 - RNA, 20 nt, Artificial Sequence
  Synthetic
gguacagguuuggugauucc

SEQ ID NO: 720396 - RNA, 20 nt, Artificial Sequence
  Synthetic
ggaacaaaagaaaauauucc

SEQ ID NO: 720397 - RNA, 20 nt, Artificial Sequence
  Synthetic
gagaaucaaauccauauucc

SEQ ID NO: 720398 - RNA, 20 nt, Artificial Sequence
  Synthetic
ggagacaguugagcuauucc

SEQ ID NO: 720399 - RNA, 20 nt, Artificial Sequence
  Synthetic
ggucuccuuacuucuauucc

SEQ ID NO: 720400 - RNA, 20 nt, Artificial Sequence
  Synthetic
ggacuaagguagauuauucc

SEQ ID NO: 720401 - RNA, 20 nt, Artificial Sequence
  Synthetic
gagggggggauauuuauucc

SEQ ID NO: 720402 - RNA, 20 nt, Artificial Sequence
  Synthetic
gcaagaguacaacaacuucc

SEQ ID NO: 720403 - RNA, 20 nt, Artificial Sequence
  Synthetic
gauccagcaaucccacuucc

SEQ ID NO: 720404 - RNA, 20 nt, Artificial Sequence
  Synthetic
gacaugacuuucucacuucc

SEQ ID NO: 720405 - RNA, 20 nt, Artificial Sequence
  Synthetic
gcaggucucuccccccuucc

SEQ ID NO: 720406 - RNA, 20 nt, Artificial Sequence
  Synthetic
gcaggguacagcccccuucc

SEQ ID NO: 720407 - RNA, 20 nt, Artificial Sequence
  Synthetic
gaauggcuuaaugcccuucc

SEQ ID NO: 720408 - RNA, 20 nt, Artificial Sequence
  Synthetic
gcacguucauuaauccuucc

SEQ ID NO: 720409 - RNA, 20 nt, Artificial Sequence
  Synthetic
gaaaaucgggaaaagcuucc

SEQ ID NO: 720410 - RNA, 20 nt, Artificial Sequence
  Synthetic
gggcuuaguggaaugcuucc

SEQ ID NO: 720411 - RNA, 20 nt, Artificial Sequence
  Synthetic
gaaacaagacuacugcuucc

SEQ ID NO: 720412 - RNA, 20 nt, Artificial Sequence
  Synthetic
ggucuuuagagaaaucuucc

SEQ ID NO: 720413 - RNA, 20 nt, Artificial Sequence
  Synthetic
gagggcaauuauaaucuucc

SEQ ID NO: 720414 - RNA, 20 nt, Artificial Sequence
  Synthetic
gaugaauaaacagcucuucc

SEQ ID NO: 720415 - RNA, 20 nt, Artificial Sequence
  Synthetic
gaaaaagggcuaagucuucc

SEQ ID NO: 720416 - RNA, 20 nt, Artificial Sequence
  Synthetic
gaaaacaguuuggaaguucc

SEQ ID NO: 720417 - RNA, 20 nt, Artificial Sequence
  Synthetic
guuuucuuuauguaaguucc

SEQ ID NO: 720418 - RNA, 20 nt, Artificial Sequence
  Synthetic
guaaaauugaguuacguucc

SEQ ID NO: 720419 - RNA, 20 nt, Artificial Sequence
  Synthetic
guaacauauucacagguucc

SEQ ID NO: 720420 - RNA, 20 nt, Artificial Sequence
  Synthetic
gugcugacagaugugguucc

SEQ ID NO: 720421 - RNA, 20 nt, Artificial Sequence
  Synthetic
gguaacuaaaaacauguucc

SEQ ID NO: 720422 - RNA, 20 nt, Artificial Sequence
  Synthetic
gcugugaauccaucuguucc

SEQ ID NO: 720423 - RNA, 20 nt, Artificial Sequence
  Synthetic
gcagagcuguucaguguucc

SEQ ID NO: 720424 - RNA, 20 nt, Artificial Sequence
  Synthetic
guaaaauaaauguuuguucc

SEQ ID NO: 720425 - RNA, 20 nt, Artificial Sequence
  Synthetic
gauccugcaucaaaauuucc

SEQ ID NO: 720426 - RNA, 20 nt, Artificial Sequence
  Synthetic
ggacauguucaguaauuucc

SEQ ID NO: 720427 - RNA, 20 nt, Artificial Sequence
  Synthetic
gaaacacaguuagcauuucc

SEQ ID NO: 720428 - RNA, 20 nt, Artificial Sequence
  Synthetic
ggagguauuguggcauuucc

SEQ ID NO: 720429 - RNA, 20 nt, Artificial Sequence
  Synthetic
gagauuaaucuugcauuucc

SEQ ID NO: 720430 - RNA, 20 nt, Artificial Sequence
  Synthetic
gcuucauguuuaauauuucc

SEQ ID NO: 720431 - RNA, 20 nt, Artificial Sequence
  Synthetic
gaaaauauugagaacuuucc

SEQ ID NO: 720432 - RNA, 20 nt, Artificial Sequence
  Synthetic
ggagagaaacuugccuuucc

SEQ ID NO: 720433 - RNA, 20 nt, Artificial Sequence
  Synthetic
gcaaguuuagugaucuuucc

SEQ ID NO: 720434 - RNA, 20 nt, Artificial Sequence
  Synthetic
gguccacugauaaaguuucc

SEQ ID NO: 720435 - RNA, 20 nt, Artificial Sequence
  Synthetic
gaacugcuauuucaguuucc

SEQ ID NO: 720436 - RNA, 20 nt, Artificial Sequence
  Synthetic
gcaagcaagacaagguuucc

SEQ ID NO: 720437 - RNA, 20 nt, Artificial Sequence
  Synthetic
gaaauagaauggugguuucc

SEQ ID NO: 720438 - RNA, 20 nt, Artificial Sequence
  Synthetic
gaacaaacauuaaauuuucc

SEQ ID NO: 720439 - RNA, 20 nt, Artificial Sequence
  Synthetic
gaaaaauuaaacaauuuucc

SEQ ID NO: 720440 - RNA, 20 nt, Artificial Sequence
  Synthetic
ggccaagaguugaauuuucc

SEQ ID NO: 720441 - RNA, 20 nt, Artificial Sequence
  Synthetic
gaaaaaguaaaacauuuucc

SEQ ID NO: 720442 - RNA, 20 nt, Artificial Sequence
  Synthetic
gccagauuuguagcuuuucc

SEQ ID NO: 720443 - RNA, 20 nt, Artificial Sequence
  Synthetic
gcaaaaugauccucuuuucc

SEQ ID NO: 720444 - RNA, 20 nt, Artificial Sequence
  Synthetic
gcaacaaucauuucuuuucc

SEQ ID NO: 720445 - RNA, 20 nt, Artificial Sequence
  Synthetic
ggagccuauguagguuuucc

SEQ ID NO: 720446 - RNA, 20 nt, Artificial Sequence
  Synthetic
gggaucucucuauguuuucc

SEQ ID NO: 720447 - RNA, 20 nt, Artificial Sequence
  Synthetic
gcugaaguguucuguuuucc

SEQ ID NO: 720448 - RNA, 20 nt, Artificial Sequence
  Synthetic
ggaaaugccuucauuuuucc

SEQ ID NO: 720449 - RNA, 20 nt, Artificial Sequence
  Synthetic
gauaauacuauuguuuuucc

SEQ ID NO: 720450 - RNA, 20 nt, Artificial Sequence
  Synthetic
gacaguaagggaauaaaagc

SEQ ID NO: 720451 - RNA, 20 nt, Artificial Sequence
  Synthetic
gugugugugugccuaaaagc

SEQ ID NO: 720452 - RNA, 20 nt, Artificial Sequence
  Synthetic
ggucucugggaggccaaagc

SEQ ID NO: 720453 - RNA, 20 nt, Artificial Sequence
  Synthetic
ggacuuugggaggccaaagc

SEQ ID NO: 720454 - RNA, 20 nt, Artificial Sequence
  Synthetic
ggccuaauuuggcucaaagc

SEQ ID NO: 720455 - RNA, 20 nt, Artificial Sequence
  Synthetic
ggagaaaguggggucaaagc

SEQ ID NO: 720456 - RNA, 20 nt, Artificial Sequence
  Synthetic
gaaguaacaucuaagaaagc

SEQ ID NO: 720457 - RNA, 20 nt, Artificial Sequence
  Synthetic
guuaaaagccaaaggaaagc

SEQ ID NO: 720458 - RNA, 20 nt, Artificial Sequence
  Synthetic
gcucggggagagaggaaagc

SEQ ID NO: 720459 - RNA, 20 nt, Artificial Sequence
  Synthetic
gucuuauuaaaaaugaaagc

SEQ ID NO: 720460 - RNA, 20 nt, Artificial Sequence
  Synthetic
ggaauaaucgaaaugaaagc

SEQ ID NO: 720461 - RNA, 20 nt, Artificial Sequence
  Synthetic
gcuaagggcagauauaaagc

SEQ ID NO: 720462 - RNA, 20 nt, Artificial Sequence
  Synthetic
gaacugugggaggcuaaagc

SEQ ID NO: 720463 - RNA, 20 nt, Artificial Sequence
  Synthetic
ggaaguucagagguuaaagc

SEQ ID NO: 720464 - RNA, 20 nt, Artificial Sequence
  Synthetic
gaggaguaaaauuuacaagc

SEQ ID NO: 720465 - RNA, 20 nt, Artificial Sequence
  Synthetic
gaaggcaagagagcccaagc

SEQ ID NO: 720466 - RNA, 20 nt, Artificial Sequence
  Synthetic
ggucuugcuauugcccaagc

SEQ ID NO: 720467 - RNA, 20 nt, Artificial Sequence
  Synthetic
gugaaaagaggcugucaagc

SEQ ID NO: 720468 - RNA, 20 nt, Artificial Sequence
  Synthetic
gaccacacaaaauuucaagc

SEQ ID NO: 720469 - RNA, 20 nt, Artificial Sequence
  Synthetic
ggauuggaauuggaagaagc

SEQ ID NO: 720470 - RNA, 20 nt, Artificial Sequence
  Synthetic
gaguccuaguaaacagaagc

SEQ ID NO: 720471 - RNA, 20 nt, Artificial Sequence
  Synthetic
gaagcccugcaagcagaagc

SEQ ID NO: 720472 - RNA, 20 nt, Artificial Sequence
  Synthetic
gcugagaccugaagagaagc

SEQ ID NO: 720473 - RNA, 20 nt, Artificial Sequence
  Synthetic
gauugggcagaaggagaagc

SEQ ID NO: 720474 - RNA, 20 nt, Artificial Sequence
  Synthetic
ggagauagguaaguggaagc

SEQ ID NO: 720475 - RNA, 20 nt, Artificial Sequence
  Synthetic
gcugaguucugauuggaagc

SEQ ID NO: 720476 - RNA, 20 nt, Artificial Sequence
  Synthetic
gagaugacauaaaaugaagc

SEQ ID NO: 720477 - RNA, 20 nt, Artificial Sequence
  Synthetic
ggcagggacauggaugaagc

SEQ ID NO: 720478 - RNA, 20 nt, Artificial Sequence
  Synthetic
gcuacucaggaggcugaagc

SEQ ID NO: 720479 - RNA, 20 nt, Artificial Sequence
  Synthetic
gcuacuugggaggcugaagc

SEQ ID NO: 720480 - RNA, 20 nt, Artificial Sequence
  Synthetic
gcacuuugggaggcugaagc

SEQ ID NO: 720481 - RNA, 20 nt, Artificial Sequence
  Synthetic
gaagaagugcccagugaagc

SEQ ID NO: 720482 - RNA, 20 nt, Artificial Sequence
  Synthetic
gcaggagaaucacuugaagc

SEQ ID NO: 720483 - RNA, 20 nt, Artificial Sequence
  Synthetic
gcuacuugggagguugaagc

SEQ ID NO: 720484 - RNA, 20 nt, Artificial Sequence
  Synthetic
gaaguaaauuaauuugaagc

SEQ ID NO: 720485 - RNA, 20 nt, Artificial Sequence
  Synthetic
gcagguucacaggaauaagc

SEQ ID NO: 720486 - RNA, 20 nt, Artificial Sequence
  Synthetic
gaaaagccacuggaauaagc

SEQ ID NO: 720487 - RNA, 20 nt, Artificial Sequence
  Synthetic
gauauuuuuauaauauaagc

SEQ ID NO: 720488 - RNA, 20 nt, Artificial Sequence
  Synthetic
guguuauuguguuuauaagc

SEQ ID NO: 720489 - RNA, 20 nt, Artificial Sequence
  Synthetic
gcuccucccuuugccuaagc

SEQ ID NO: 720490 - RNA, 20 nt, Artificial Sequence
  Synthetic
gggaagacuagagucuaagc

SEQ ID NO: 720491 - RNA, 20 nt, Artificial Sequence
  Synthetic
guuggugguuugaaaacagc

SEQ ID NO: 720492 - RNA, 20 nt, Artificial Sequence
  Synthetic
ggggcaggaaaaauaacagc

SEQ ID NO: 720493 - RNA, 20 nt, Artificial Sequence
  Synthetic
gaccucaauacaauaacagc

SEQ ID NO: 720494 - RNA, 20 nt, Artificial Sequence
  Synthetic
gacuuacaguuccacacagc

SEQ ID NO: 720495 - RNA, 20 nt, Artificial Sequence
  Synthetic
ggagucacaggugacacagc

SEQ ID NO: 720496 - RNA, 20 nt, Artificial Sequence
  Synthetic
guugaaaaaaaagccacagc

SEQ ID NO: 720497 - RNA, 20 nt, Artificial Sequence
  Synthetic
guugggaguaaaagcacagc

SEQ ID NO: 720498 - RNA, 20 nt, Artificial Sequence
  Synthetic
gaagaacuauucagcacagc

SEQ ID NO: 720499 - RNA, 20 nt, Artificial Sequence
  Synthetic
gacaaaauguguaagacagc

SEQ ID NO: 720500 - RNA, 20 nt, Artificial Sequence
  Synthetic
gacuaacauuagcagacagc

SEQ ID NO: 720501 - RNA, 20 nt, Artificial Sequence
  Synthetic
gcucagaguuuuaggacagc

SEQ ID NO: 720502 - RNA, 20 nt, Artificial Sequence
  Synthetic
ggcacuucuuacaugacagc

SEQ ID NO: 720503 - RNA, 20 nt, Artificial Sequence
  Synthetic
gucacuacuuuugugacagc

SEQ ID NO: 720504 - RNA, 20 nt, Artificial Sequence
  Synthetic
gggaaaggauuuccgccagc

SEQ ID NO: 720505 - RNA, 20 nt, Artificial Sequence
  Synthetic
gagggagaaugagugccagc

SEQ ID NO: 720506 - RNA, 20 nt, Artificial Sequence
  Synthetic
gaaauggcuuccccuccagc

SEQ ID NO: 720507 - RNA, 20 nt, Artificial Sequence
  Synthetic
gccucggccucccaagcagc

SEQ ID NO: 720508 - RNA, 20 nt, Artificial Sequence
  Synthetic
guaaaucuacaguaagcagc

SEQ ID NO: 720509 - RNA, 20 nt, Artificial Sequence
  Synthetic
gcauguaucuuuacagcagc

SEQ ID NO: 720510 - RNA, 20 nt, Artificial Sequence
  Synthetic
gaaagacaugggccagcagc

SEQ ID NO: 720511 - RNA, 20 nt, Artificial Sequence
  Synthetic
gccucagccuccagagcagc

SEQ ID NO: 720512 - RNA, 20 nt, Artificial Sequence
  Synthetic
gccucagccucccgagcagc

SEQ ID NO: 720513 - RNA, 20 nt, Artificial Sequence
  Synthetic
gcgucauccucccgagcagc

SEQ ID NO: 720514 - RNA, 20 nt, Artificial Sequence
  Synthetic
gagaguuaauucugagcagc

SEQ ID NO: 720515 - RNA, 20 nt, Artificial Sequence
  Synthetic
gugcuagccaugauagcagc

SEQ ID NO: 720516 - RNA, 20 nt, Artificial Sequence
  Synthetic
ggcauuucuauuauagcagc

SEQ ID NO: 720517 - RNA, 20 nt, Artificial Sequence
  Synthetic
gucagcaguccacaggcagc

SEQ ID NO: 720518 - RNA, 20 nt, Artificial Sequence
  Synthetic
ggagucggggagggggcagc

SEQ ID NO: 720519 - RNA, 20 nt, Artificial Sequence
  Synthetic
gugucagccucccaugcagc

SEQ ID NO: 720520 - RNA, 20 nt, Artificial Sequence
  Synthetic
guacucacgucagaaucagc

SEQ ID NO: 720521 - RNA, 20 nt, Artificial Sequence
  Synthetic
gaucaaccucacuaaucagc

SEQ ID NO: 720522 - RNA, 20 nt, Artificial Sequence
  Synthetic
ggugagggaauaugaucagc

SEQ ID NO: 720523 - RNA, 20 nt, Artificial Sequence
  Synthetic
gcuacagaaacugacucagc

SEQ ID NO: 720524 - RNA, 20 nt, Artificial Sequence
  Synthetic
guucugcucuccagcucagc

SEQ ID NO: 720525 - RNA, 20 nt, Artificial Sequence
  Synthetic
gcuuuagcugaguucucagc

SEQ ID NO: 720526 - RNA, 20 nt, Artificial Sequence
  Synthetic
gagaaauggagaaagucagc

SEQ ID NO: 720527 - RNA, 20 nt, Artificial Sequence
  Synthetic
gccuuguucccccaaagagc

SEQ ID NO: 720528 - RNA, 20 nt, Artificial Sequence
  Synthetic
ggggagauuggugaaagagc

SEQ ID NO: 720529 - RNA, 20 nt, Artificial Sequence
  Synthetic
ggaggcuagaacagaagagc

SEQ ID NO: 720530 - RNA, 20 nt, Artificial Sequence
  Synthetic
guagguacucagagaagagc

SEQ ID NO: 720531 - RNA, 20 nt, Artificial Sequence
  Synthetic
gaaauagaguagggaagagc

SEQ ID NO: 720532 - RNA, 20 nt, Artificial Sequence
  Synthetic
gugaggaugagaauaagagc

SEQ ID NO: 720533 - RNA, 20 nt, Artificial Sequence
  Synthetic
guuuuagaguaacacagagc

SEQ ID NO: 720534 - RNA, 20 nt, Artificial Sequence
  Synthetic
guagcucuguaagacagagc

SEQ ID NO: 720535 - RNA, 20 nt, Artificial Sequence
  Synthetic
gaggaaagaaccagcagagc

SEQ ID NO: 720536 - RNA, 20 nt, Artificial Sequence
  Synthetic
gucagaacccccuggagagc

SEQ ID NO: 720537 - RNA, 20 nt, Artificial Sequence
  Synthetic
gcacuucaccuggcuagagc

SEQ ID NO: 720538 - RNA, 20 nt, Artificial Sequence
  Synthetic
gaaaaaggcaacauucgagc

SEQ ID NO: 720539 - RNA, 20 nt, Artificial Sequence
  Synthetic
guucuagaucuuugaggagc

SEQ ID NO: 720540 - RNA, 20 nt, Artificial Sequence
  Synthetic
gguugggagaggagcggagc

SEQ ID NO: 720541 - RNA, 20 nt, Artificial Sequence
  Synthetic
gcagaaggcagaacgggagc

SEQ ID NO: 720542 - RNA, 20 nt, Artificial Sequence
  Synthetic
ggugaagggcaaaggggagc

SEQ ID NO: 720543 - RNA, 20 nt, Artificial Sequence
  Synthetic
ggacugucucgcaggggagc

SEQ ID NO: 720544 - RNA, 20 nt, Artificial Sequence
  Synthetic
gaaugccagaucaugggagc

SEQ ID NO: 720545 - RNA, 20 nt, Artificial Sequence
  Synthetic
gauggacaaagagauggagc

SEQ ID NO: 720546 - RNA, 20 nt, Artificial Sequence
  Synthetic
gaaagaagagaagaaugagc

SEQ ID NO: 720547 - RNA, 20 nt, Artificial Sequence
  Synthetic
guuacuuggagagaaugagc

SEQ ID NO: 720548 - RNA, 20 nt, Artificial Sequence
  Synthetic
gucaacauauaguaaugagc

SEQ ID NO: 720549 - RNA, 20 nt, Artificial Sequence
  Synthetic
guauucccuaggagaugagc

SEQ ID NO: 720550 - RNA, 20 nt, Artificial Sequence
  Synthetic
gccacauauauauuaugagc

SEQ ID NO: 720551 - RNA, 20 nt, Artificial Sequence
  Synthetic
gagaaaaaggcccgcugagc

SEQ ID NO: 720552 - RNA, 20 nt, Artificial Sequence
  Synthetic
gacugugccacuggcugagc

SEQ ID NO: 720553 - RNA, 20 nt, Artificial Sequence
  Synthetic
ggaaaauguagcaucugagc

SEQ ID NO: 720554 - RNA, 20 nt, Artificial Sequence
  Synthetic
guaugugguguuuucugagc

SEQ ID NO: 720555 - RNA, 20 nt, Artificial Sequence
  Synthetic
ggaaugucaaaugugugagc

SEQ ID NO: 720556 - RNA, 20 nt, Artificial Sequence
  Synthetic
ggcacaagaaccgcuugagc

SEQ ID NO: 720557 - RNA, 20 nt, Artificial Sequence
  Synthetic
gaguucugcccauuuugagc

SEQ ID NO: 720558 - RNA, 20 nt, Artificial Sequence
  Synthetic
gccacugauacguuuugagc

SEQ ID NO: 720559 - RNA, 20 nt, Artificial Sequence
  Synthetic
gccucagccucccaaauagc

SEQ ID NO: 720560 - RNA, 20 nt, Artificial Sequence
  Synthetic
gccucagccuccugaauagc

SEQ ID NO: 720561 - RNA, 20 nt, Artificial Sequence
  Synthetic
gucccuaggcugcacauagc

SEQ ID NO: 720562 - RNA, 20 nt, Artificial Sequence
  Synthetic
gaagaggauauccagauagc

SEQ ID NO: 720563 - RNA, 20 nt, Artificial Sequence
  Synthetic
gcuuagaaggagaugauagc

SEQ ID NO: 720564 - RNA, 20 nt, Artificial Sequence
  Synthetic
guguuuuaggcaaauauagc

SEQ ID NO: 720565 - RNA, 20 nt, Artificial Sequence
  Synthetic
ggguauuguuuucuuauagc

SEQ ID NO: 720566 - RNA, 20 nt, Artificial Sequence
  Synthetic
gagcuggacccuccacuagc

SEQ ID NO: 720567 - RNA, 20 nt, Artificial Sequence
  Synthetic
guccuaaaccaaugacuagc

SEQ ID NO: 720568 - RNA, 20 nt, Artificial Sequence
  Synthetic
gaggucaaagagaagcuagc

SEQ ID NO: 720569 - RNA, 20 nt, Artificial Sequence
  Synthetic
guuuucuguagauggcuagc

SEQ ID NO: 720570 - RNA, 20 nt, Artificial Sequence
  Synthetic
ggucuucacauguuucuagc

SEQ ID NO: 720571 - RNA, 20 nt, Artificial Sequence
  Synthetic
gcuucaaccucccaaguagc

SEQ ID NO: 720572 - RNA, 20 nt, Artificial Sequence
  Synthetic
gccacagccucccaaguagc

SEQ ID NO: 720573 - RNA, 20 nt, Artificial Sequence
  Synthetic
gccucagccucccaaguagc

SEQ ID NO: 720574 - RNA, 20 nt, Artificial Sequence
  Synthetic
gcuucagccucccaaguagc

SEQ ID NO: 720575 - RNA, 20 nt, Artificial Sequence
  Synthetic
gccucagcuucccaaguagc

SEQ ID NO: 720576 - RNA, 20 nt, Artificial Sequence
  Synthetic
gccucagccuuccaaguagc

SEQ ID NO: 720577 - RNA, 20 nt, Artificial Sequence
  Synthetic
gaaaauucaauagaaguagc

SEQ ID NO: 720578 - RNA, 20 nt, Artificial Sequence
  Synthetic
gccucagccugcuaaguagc

SEQ ID NO: 720579 - RNA, 20 nt, Artificial Sequence
  Synthetic
gcucagauaauuuaaguagc

SEQ ID NO: 720580 - RNA, 20 nt, Artificial Sequence
  Synthetic
gccucagccuccagaguagc

SEQ ID NO: 720581 - RNA, 20 nt, Artificial Sequence
  Synthetic
gccucagccuaccgaguagc

SEQ ID NO: 720582 - RNA, 20 nt, Artificial Sequence
  Synthetic
gccuuaaccucccgaguagc

SEQ ID NO: 720583 - RNA, 20 nt, Artificial Sequence
  Synthetic
gccucagccucccgaguagc

SEQ ID NO: 720584 - RNA, 20 nt, Artificial Sequence
  Synthetic
gucucagccucccgaguagc

SEQ ID NO: 720585 - RNA, 20 nt, Artificial Sequence
  Synthetic
gcuucagccucccgaguagc

SEQ ID NO: 720586 - RNA, 20 nt, Artificial Sequence
  Synthetic
gcaguagccucccgaguagc

SEQ ID NO: 720587 - RNA, 20 nt, Artificial Sequence
  Synthetic
gccuuagccucccgaguagc

SEQ ID NO: 720588 - RNA, 20 nt, Artificial Sequence
  Synthetic
gccucagcuucccgaguagc

SEQ ID NO: 720589 - RNA, 20 nt, Artificial Sequence
  Synthetic
gccucagccucucgaguagc

SEQ ID NO: 720590 - RNA, 20 nt, Artificial Sequence
  Synthetic
gccucagccucaggaguagc

SEQ ID NO: 720591 - RNA, 20 nt, Artificial Sequence
  Synthetic
gccucagcccccugaguagc

SEQ ID NO: 720592 - RNA, 20 nt, Artificial Sequence
  Synthetic
gccucagccuccugaguagc

SEQ ID NO: 720593 - RNA, 20 nt, Artificial Sequence
  Synthetic
gcuucagccuccugaguagc

SEQ ID NO: 720594 - RNA, 20 nt, Artificial Sequence
  Synthetic
gccuuagccuccugaguagc

SEQ ID NO: 720595 - RNA, 20 nt, Artificial Sequence
  Synthetic
gccucaggcuccugaguagc

SEQ ID NO: 720596 - RNA, 20 nt, Artificial Sequence
  Synthetic
gccucagcguccugaguagc

SEQ ID NO: 720597 - RNA, 20 nt, Artificial Sequence
  Synthetic
gccucagccaucugaguagc

SEQ ID NO: 720598 - RNA, 20 nt, Artificial Sequence
  Synthetic
gccucagccucuugaguagc

SEQ ID NO: 720599 - RNA, 20 nt, Artificial Sequence
  Synthetic
gccucagccucccuaguagc

SEQ ID NO: 720600 - RNA, 20 nt, Artificial Sequence
  Synthetic
gccucagccucccccguagc

SEQ ID NO: 720601 - RNA, 20 nt, Artificial Sequence
  Synthetic
gccagggucauaaagguagc

SEQ ID NO: 720602 - RNA, 20 nt, Artificial Sequence
  Synthetic
gccucagccucccagguagc

SEQ ID NO: 720603 - RNA, 20 nt, Artificial Sequence
  Synthetic
gccccagccuuucggguagc

SEQ ID NO: 720604 - RNA, 20 nt, Artificial Sequence
  Synthetic
guuucucagacugugguagc

SEQ ID NO: 720605 - RNA, 20 nt, Artificial Sequence
  Synthetic
guguucaggguaaauguagc

SEQ ID NO: 720606 - RNA, 20 nt, Artificial Sequence
  Synthetic
gccucagccucccguguagc

SEQ ID NO: 720607 - RNA, 20 nt, Artificial Sequence
  Synthetic
cuaaaaauacaaaaauuagc

SEQ ID NO: 720608 - RNA, 20 nt, Artificial Sequence
  Synthetic
ggaaacaucugaagauuagc

SEQ ID NO: 720609 - RNA, 20 nt, Artificial Sequence
  Synthetic
gaaucugagaguggcuuagc

SEQ ID NO: 720610 - RNA, 20 nt, Artificial Sequence
  Synthetic
gcuuuguuuuaucauaacgc

SEQ ID NO: 720611 - RNA, 20 nt, Artificial Sequence
  Synthetic
gcaugagacugggaggacgc

SEQ ID NO: 720612 - RNA, 20 nt, Artificial Sequence
  Synthetic
gcugcucgggaggaugacgc

SEQ ID NO: 720613 - RNA, 20 nt, Artificial Sequence
  Synthetic
gcugguguuccaggugacgc

SEQ ID NO: 720614 - RNA, 20 nt, Artificial Sequence
  Synthetic
gcaacacccaacccucccgc

SEQ ID NO: 720615 - RNA, 20 nt, Artificial Sequence
  Synthetic
gccucagccucccaaagcgc

SEQ ID NO: 720616 - RNA, 20 nt, Artificial Sequence
  Synthetic
guagcugguacuacaggcgc

SEQ ID NO: 720617 - RNA, 20 nt, Artificial Sequence
  Synthetic
guagcuaggauuacaggcgc

SEQ ID NO: 720618 - RNA, 20 nt, Artificial Sequence
  Synthetic
guaggacagcuugcuugcgc

SEQ ID NO: 720619 - RNA, 20 nt, Artificial Sequence
  Synthetic
gguuagcaaugcagaaucgc

SEQ ID NO: 720620 - RNA, 20 nt, Artificial Sequence
  Synthetic
guggaacugcaccucaucgc

SEQ ID NO: 720621 - RNA, 20 nt, Artificial Sequence
  Synthetic
gaggccuaagccagucucgc

SEQ ID NO: 720622 - RNA, 20 nt, Artificial Sequence
  Synthetic
ggaccaagcucccaaaaggc

SEQ ID NO: 720623 - RNA, 20 nt, Artificial Sequence
  Synthetic
gcacaucaaauggaaaaggc

SEQ ID NO: 720624 - RNA, 20 nt, Artificial Sequence
  Synthetic
gaaggucaggacagaaaggc

SEQ ID NO: 720625 - RNA, 20 nt, Artificial Sequence
  Synthetic
gggcagccagagagaaaggc

SEQ ID NO: 720626 - RNA, 20 nt, Artificial Sequence
  Synthetic
gucccagcuacccgaaaggc

SEQ ID NO: 720627 - RNA, 20 nt, Artificial Sequence
  Synthetic
gacucagacaaaaacaaggc

SEQ ID NO: 720628 - RNA, 20 nt, Artificial Sequence
  Synthetic
gcuccccucuggcccaaggc

SEQ ID NO: 720629 - RNA, 20 nt, Artificial Sequence
  Synthetic
gcacuuagggaggccaaggc

SEQ ID NO: 720630 - RNA, 20 nt, Artificial Sequence
  Synthetic
gcacugugggaggccaaggc

SEQ ID NO: 720631 - RNA, 20 nt, Artificial Sequence
  Synthetic
gcacuuugggaggccaaggc

SEQ ID NO: 720632 - RNA, 20 nt, Artificial Sequence
  Synthetic
ggacuuugggaggccaaggc

SEQ ID NO: 720633 - RNA, 20 nt, Artificial Sequence
  Synthetic
gcacuuugggaguccaaggc

SEQ ID NO: 720634 - RNA, 20 nt, Artificial Sequence
  Synthetic
gcaagacaaggcaggaaggc

SEQ ID NO: 720635 - RNA, 20 nt, Artificial Sequence
  Synthetic
gaaauggggucucggaaggc

SEQ ID NO: 720636 - RNA, 20 nt, Artificial Sequence
  Synthetic
gguaguggaaggcugaaggc

SEQ ID NO: 720637 - RNA, 20 nt, Artificial Sequence
  Synthetic
gcuacucgggaggcuaaggc

SEQ ID NO: 720638 - RNA, 20 nt, Artificial Sequence
  Synthetic
gcaauuugggaggcuaaggc

SEQ ID NO: 720639 - RNA, 20 nt, Artificial Sequence
  Synthetic
gcuacucgggagguuaaggc

SEQ ID NO: 720640 - RNA, 20 nt, Artificial Sequence
  Synthetic
gugagaccugaagaacaggc

SEQ ID NO: 720641 - RNA, 20 nt, Artificial Sequence
  Synthetic
gaagugauagugcuacaggc

SEQ ID NO: 720642 - RNA, 20 nt, Artificial Sequence
  Synthetic
gucucacucugucaccaggc

SEQ ID NO: 720643 - RNA, 20 nt, Artificial Sequence
  Synthetic
gucuagcucugucaccaggc

SEQ ID NO: 720644 - RNA, 20 nt, Artificial Sequence
  Synthetic
gucucgcucugucaccaggc

SEQ ID NO: 720645 - RNA, 20 nt, Artificial Sequence
  Synthetic
gucuugcucugucaccaggc

SEQ ID NO: 720646 - RNA, 20 nt, Artificial Sequence
  Synthetic
gucucgccugcagcccaggc

SEQ ID NO: 720647 - RNA, 20 nt, Artificial Sequence
  Synthetic
gcacuuugggaggcccaggc

SEQ ID NO: 720648 - RNA, 20 nt, Artificial Sequence
  Synthetic
gucucacucugucgccaggc

SEQ ID NO: 720649 - RNA, 20 nt, Artificial Sequence
  Synthetic
gucucgcucugucgccaggc

SEQ ID NO: 720650 - RNA, 20 nt, Artificial Sequence
  Synthetic
gucuugcucugucgccaggc

SEQ ID NO: 720651 - RNA, 20 nt, Artificial Sequence
  Synthetic
gggaauguaaaaggccaggc

SEQ ID NO: 720652 - RNA, 20 nt, Artificial Sequence
  Synthetic
guucgccaugucggccaggc

SEQ ID NO: 720653 - RNA, 20 nt, Artificial Sequence
  Synthetic
guucaccauguuggccaggc

SEQ ID NO: 720654 - RNA, 20 nt, Artificial Sequence
  Synthetic
uuucaccauguuggccaggc

SEQ ID NO: 720655 - RNA, 20 nt, Artificial Sequence
  Synthetic
guuucaccauuuggccaggc

SEQ ID NO: 720656 - RNA, 20 nt, Artificial Sequence
  Synthetic
guguugcucuguugccaggc

SEQ ID NO: 720657 - RNA, 20 nt, Artificial Sequence
  Synthetic
guuccuuugggauggcaggc

SEQ ID NO: 720658 - RNA, 20 nt, Artificial Sequence
  Synthetic
guucaccaaguugaucaggc

SEQ ID NO: 720659 - RNA, 20 nt, Artificial Sequence
  Synthetic
gaggccuauuuuacucaggc

SEQ ID NO: 720660 - RNA, 20 nt, Artificial Sequence
  Synthetic
guuucacauguuggucaggc

SEQ ID NO: 720661 - RNA, 20 nt, Artificial Sequence
  Synthetic
gaaugaauggcuauucaggc

SEQ ID NO: 720662 - RNA, 20 nt, Artificial Sequence
  Synthetic
guguuucagguguuucaggc

SEQ ID NO: 720663 - RNA, 20 nt, Artificial Sequence
  Synthetic
gucuacauagaggaagaggc

SEQ ID NO: 720664 - RNA, 20 nt, Artificial Sequence
  Synthetic
gaaagguaguugccagaggc

SEQ ID NO: 720665 - RNA, 20 nt, Artificial Sequence
  Synthetic
gcacuuugggaggcagaggc

SEQ ID NO: 720666 - RNA, 20 nt, Artificial Sequence
  Synthetic
gaaggagcaagaagagaggc

SEQ ID NO: 720667 - RNA, 20 nt, Artificial Sequence
  Synthetic
ggagcauugauaagagaggc

SEQ ID NO: 720668 - RNA, 20 nt, Artificial Sequence
  Synthetic
gaugugacaaccagagaggc

SEQ ID NO: 720669 - RNA, 20 nt, Artificial Sequence
  Synthetic
gcacuuuggaaggccgaggc

SEQ ID NO: 720670 - RNA, 20 nt, Artificial Sequence
  Synthetic
gcacuuugcgaggccgaggc

SEQ ID NO: 720671 - RNA, 20 nt, Artificial Sequence
  Synthetic
gcgcuucaggaggccgaggc

SEQ ID NO: 720672 - RNA, 20 nt, Artificial Sequence
  Synthetic
gcacuuggggaggccgaggc

SEQ ID NO: 720673 - RNA, 20 nt, Artificial Sequence
  Synthetic
gcacucugggaggccgaggc

SEQ ID NO: 720674 - RNA, 20 nt, Artificial Sequence
  Synthetic
gcacuuugggaggccgaggc

SEQ ID NO: 720675 - RNA, 20 nt, Artificial Sequence
  Synthetic
guacuuugggaggccgaggc

SEQ ID NO: 720676 - RNA, 20 nt, Artificial Sequence
  Synthetic
gauaaaaaggaaaaggaggc

SEQ ID NO: 720677 - RNA, 20 nt, Artificial Sequence
  Synthetic
guuauaaauuauuaggaggc

SEQ ID NO: 720678 - RNA, 20 nt, Artificial Sequence
  Synthetic
gaaucagaaucuauggaggc

SEQ ID NO: 720679 - RNA, 20 nt, Artificial Sequence
  Synthetic
ggauguaagguccaugaggc

SEQ ID NO: 720680 - RNA, 20 nt, Artificial Sequence
  Synthetic
gcacuuugggaggaugaggc

SEQ ID NO: 720681 - RNA, 20 nt, Artificial Sequence
  Synthetic
gcacuuugggagccugaggc

SEQ ID NO: 720682 - RNA, 20 nt, Artificial Sequence
  Synthetic
gcuacucgggaagcugaggc

SEQ ID NO: 720683 - RNA, 20 nt, Artificial Sequence
  Synthetic
gcacuuugggaagcugaggc

SEQ ID NO: 720684 - RNA, 20 nt, Artificial Sequence
  Synthetic
gcuacucaggacgcugaggc

SEQ ID NO: 720685 - RNA, 20 nt, Artificial Sequence
  Synthetic
gcuacuuggaaggcugaggc

SEQ ID NO: 720686 - RNA, 20 nt, Artificial Sequence
  Synthetic
gcuacuuagcaggcugaggc

SEQ ID NO: 720687 - RNA, 20 nt, Artificial Sequence
  Synthetic
gcuacucaagaggcugaggc

SEQ ID NO: 720688 - RNA, 20 nt, Artificial Sequence
  Synthetic
gcacuuugagaggcugaggc

SEQ ID NO: 720689 - RNA, 20 nt, Artificial Sequence
  Synthetic
gauacucaggaggcugaggc

SEQ ID NO: 720690 - RNA, 20 nt, Artificial Sequence
  Synthetic
gcuacucaggaggcugaggc

SEQ ID NO: 720691 - RNA, 20 nt, Artificial Sequence
  Synthetic
gcuauucaggaggcugaggc

SEQ ID NO: 720692 - RNA, 20 nt, Artificial Sequence
  Synthetic
gguacuucggaggcugaggc

SEQ ID NO: 720693 - RNA, 20 nt, Artificial Sequence
  Synthetic
gcuacuagggaggcugaggc

SEQ ID NO: 720694 - RNA, 20 nt, Artificial Sequence
  Synthetic
gcuacacgggaggcugaggc

SEQ ID NO: 720695 - RNA, 20 nt, Artificial Sequence
  Synthetic
gcuacucgggaggcugaggc

SEQ ID NO: 720696 - RNA, 20 nt, Artificial Sequence
  Synthetic
guuacucgggaggcugaggc

SEQ ID NO: 720697 - RNA, 20 nt, Artificial Sequence
  Synthetic
gcugcucgggaggcugaggc

SEQ ID NO: 720698 - RNA, 20 nt, Artificial Sequence
  Synthetic
gcuacgggggaggcugaggc

SEQ ID NO: 720699 - RNA, 20 nt, Artificial Sequence
  Synthetic
gcacuaugggaggcugaggc

SEQ ID NO: 720700 - RNA, 20 nt, Artificial Sequence
  Synthetic
gcuacuugggaggcugaggc

SEQ ID NO: 720701 - RNA, 20 nt, Artificial Sequence
  Synthetic
gguacuugggaggcugaggc

SEQ ID NO: 720702 - RNA, 20 nt, Artificial Sequence
  Synthetic
gcuauuugggaggcugaggc

SEQ ID NO: 720703 - RNA, 20 nt, Artificial Sequence
  Synthetic
gcacuuugggaggcugaggc

SEQ ID NO: 720704 - RNA, 20 nt, Artificial Sequence
  Synthetic
gcgcuuugggaggcugaggc

SEQ ID NO: 720705 - RNA, 20 nt, Artificial Sequence
  Synthetic
gugcuuugggaggcugaggc

SEQ ID NO: 720706 - RNA, 20 nt, Artificial Sequence
  Synthetic
gacacacuggaggcugaggc

SEQ ID NO: 720707 - RNA, 20 nt, Artificial Sequence
  Synthetic
gccacucuggaggcugaggc

SEQ ID NO: 720708 - RNA, 20 nt, Artificial Sequence
  Synthetic
gcuacucuggaggcugaggc

SEQ ID NO: 720709 - RNA, 20 nt, Artificial Sequence
  Synthetic
gcuacuccugaggcugaggc

SEQ ID NO: 720710 - RNA, 20 nt, Artificial Sequence
  Synthetic
gcuacucgguaggcugaggc

SEQ ID NO: 720711 - RNA, 20 nt, Artificial Sequence
  Synthetic
gcuacucagauggcugaggc

SEQ ID NO: 720712 - RNA, 20 nt, Artificial Sequence
  Synthetic
gcacuuugggaugcugaggc

SEQ ID NO: 720713 - RNA, 20 nt, Artificial Sequence
  Synthetic
gcuacuuggcagucugaggc

SEQ ID NO: 720714 - RNA, 20 nt, Artificial Sequence
  Synthetic
gaaaaaaagaauggugaggc

SEQ ID NO: 720715 - RNA, 20 nt, Artificial Sequence
  Synthetic
gcaacucuggagguugaggc

SEQ ID NO: 720716 - RNA, 20 nt, Artificial Sequence
  Synthetic
guaauaacaaugauauaggc

SEQ ID NO: 720717 - RNA, 20 nt, Artificial Sequence
  Synthetic
guuucaccaguugccuaggc

SEQ ID NO: 720718 - RNA, 20 nt, Artificial Sequence
  Synthetic
gaacaccuaaacaucuaggc

SEQ ID NO: 720719 - RNA, 20 nt, Artificial Sequence
  Synthetic
guuggaaauggaauuuaggc

SEQ ID NO: 720720 - RNA, 20 nt, Artificial Sequence
  Synthetic
gagaccacgaacccaccggc

SEQ ID NO: 720721 - RNA, 20 nt, Artificial Sequence
  Synthetic
gucucacucugucgcccggc

SEQ ID NO: 720722 - RNA, 20 nt, Artificial Sequence
  Synthetic
guugaaaagagcauugcggc

SEQ ID NO: 720723 - RNA, 20 nt, Artificial Sequence
  Synthetic
gucccagcagguggaagggc

SEQ ID NO: 720724 - RNA, 20 nt, Artificial Sequence
  Synthetic
guagguuugggaugaagggc

SEQ ID NO: 720725 - RNA, 20 nt, Artificial Sequence
  Synthetic
gugacucaucagugaagggc

SEQ ID NO: 720726 - RNA, 20 nt, Artificial Sequence
  Synthetic
guagggggaugaaacagggc

SEQ ID NO: 720727 - RNA, 20 nt, Artificial Sequence
  Synthetic
gaacuuuaaauacacagggc

SEQ ID NO: 720728 - RNA, 20 nt, Artificial Sequence
  Synthetic
gcaguuuuccaagagagggc

SEQ ID NO: 720729 - RNA, 20 nt, Artificial Sequence
  Synthetic
ggccacugcgaauagagggc

SEQ ID NO: 720730 - RNA, 20 nt, Artificial Sequence
  Synthetic
ggaggggcuugcuauagggc

SEQ ID NO: 720731 - RNA, 20 nt, Artificial Sequence
  Synthetic
gacacacgugcagaacgggc

SEQ ID NO: 720732 - RNA, 20 nt, Artificial Sequence
  Synthetic
gaggaaaacagaccacgggc

SEQ ID NO: 720733 - RNA, 20 nt, Artificial Sequence
  Synthetic
gaaguccaagaucaaggggc

SEQ ID NO: 720734 - RNA, 20 nt, Artificial Sequence
  Synthetic
gggggaaaggguacaggggc

SEQ ID NO: 720735 - RNA, 20 nt, Artificial Sequence
  Synthetic
gaaugauaguaaccaggggc

SEQ ID NO: 720736 - RNA, 20 nt, Artificial Sequence
  Synthetic
gccagccauuggccaggggc

SEQ ID NO: 720737 - RNA, 20 nt, Artificial Sequence
  Synthetic
gacuggugguugccaggggc

SEQ ID NO: 720738 - RNA, 20 nt, Artificial Sequence
  Synthetic
gaauggugguuuccaggggc

SEQ ID NO: 720739 - RNA, 20 nt, Artificial Sequence
  Synthetic
gcguuuugggaggccggggc

SEQ ID NO: 720740 - RNA, 20 nt, Artificial Sequence
  Synthetic
guggcacuguuccagggggc

SEQ ID NO: 720741 - RNA, 20 nt, Artificial Sequence
  Synthetic
gguaauugaaucaugggggc

SEQ ID NO: 720742 - RNA, 20 nt, Artificial Sequence
  Synthetic
gguaauuuaaucaugggggc

SEQ ID NO: 720743 - RNA, 20 nt, Artificial Sequence
  Synthetic
gguuuccaggggcugggggc

SEQ ID NO: 720744 - RNA, 20 nt, Artificial Sequence
  Synthetic
gcuacccgaaaggcuggggc

SEQ ID NO: 720745 - RNA, 20 nt, Artificial Sequence
  Synthetic
gaugucauggauucuggggc

SEQ ID NO: 720746 - RNA, 20 nt, Artificial Sequence
  Synthetic
gaauaggugccuauuggggc

SEQ ID NO: 720747 - RNA, 20 nt, Artificial Sequence
  Synthetic
guuuaucugcuguuuggggc

SEQ ID NO: 720748 - RNA, 20 nt, Artificial Sequence
  Synthetic
gguguaauuggcccaugggc

SEQ ID NO: 720749 - RNA, 20 nt, Artificial Sequence
  Synthetic
gugugcgagcaugcaugggc

SEQ ID NO: 720750 - RNA, 20 nt, Artificial Sequence
  Synthetic
guacugggaaacuacugggc

SEQ ID NO: 720751 - RNA, 20 nt, Artificial Sequence
  Synthetic
ggcaaaaugguuuccugggc

SEQ ID NO: 720752 - RNA, 20 nt, Artificial Sequence
  Synthetic
gauugaaaaucaugcugggc

SEQ ID NO: 720753 - RNA, 20 nt, Artificial Sequence
  Synthetic
gaaaagcauagugucugggc

SEQ ID NO: 720754 - RNA, 20 nt, Artificial Sequence
  Synthetic
ggguaaaacccaaggugggc

SEQ ID NO: 720755 - RNA, 20 nt, Artificial Sequence
  Synthetic
gauguuuuccuuuugugggc

SEQ ID NO: 720756 - RNA, 20 nt, Artificial Sequence
  Synthetic
gauauuaaagauccuugggc

SEQ ID NO: 720757 - RNA, 20 nt, Artificial Sequence
  Synthetic
gaagccaugaaguuuugggc

SEQ ID NO: 720758 - RNA, 20 nt, Artificial Sequence
  Synthetic
gcagguggccagaaaauggc

SEQ ID NO: 720759 - RNA, 20 nt, Artificial Sequence
  Synthetic
gggauaauccuuaaaauggc

SEQ ID NO: 720760 - RNA, 20 nt, Artificial Sequence
  Synthetic
gccagccccuggccaauggc

SEQ ID NO: 720761 - RNA, 20 nt, Artificial Sequence
  Synthetic
gacucacaguuccacauggc

SEQ ID NO: 720762 - RNA, 20 nt, Artificial Sequence
  Synthetic
gacucaccauucuacauggc

SEQ ID NO: 720763 - RNA, 20 nt, Artificial Sequence
  Synthetic
gacacacaguucagcauggc

SEQ ID NO: 720764 - RNA, 20 nt, Artificial Sequence
  Synthetic
gacucacaguucagcauggc

SEQ ID NO: 720765 - RNA, 20 nt, Artificial Sequence
  Synthetic
gacucauaguucagcauggc

SEQ ID NO: 720766 - RNA, 20 nt, Artificial Sequence
  Synthetic
gauucaccauucugcauggc

SEQ ID NO: 720767 - RNA, 20 nt, Artificial Sequence
  Synthetic
gacucacugguuugcauggc

SEQ ID NO: 720768 - RNA, 20 nt, Artificial Sequence
  Synthetic
gcaagggggcucuucauggc

SEQ ID NO: 720769 - RNA, 20 nt, Artificial Sequence
  Synthetic
gaaaagcaaaaaaagauggc

SEQ ID NO: 720770 - RNA, 20 nt, Artificial Sequence
  Synthetic
gagaagaggaguaagauggc

SEQ ID NO: 720771 - RNA, 20 nt, Artificial Sequence
  Synthetic
gacucacaguucaauauggc

SEQ ID NO: 720772 - RNA, 20 nt, Artificial Sequence
  Synthetic
gcaagagagaaaaguauggc

SEQ ID NO: 720773 - RNA, 20 nt, Artificial Sequence
  Synthetic
gaguaaugcaaucaacuggc

SEQ ID NO: 720774 - RNA, 20 nt, Artificial Sequence
  Synthetic
guuguggauaaaggacuggc

SEQ ID NO: 720775 - RNA, 20 nt, Artificial Sequence
  Synthetic
gucucacucugcacccuggc

SEQ ID NO: 720776 - RNA, 20 nt, Artificial Sequence
  Synthetic
guaaaauccaaaagccuggc

SEQ ID NO: 720777 - RNA, 20 nt, Artificial Sequence
  Synthetic
gccaguggaucuuagcuggc

SEQ ID NO: 720778 - RNA, 20 nt, Artificial Sequence
  Synthetic
gccccuggccaauggcuggc

SEQ ID NO: 720779 - RNA, 20 nt, Artificial Sequence
  Synthetic
ggaaaauugagaauucuggc

SEQ ID NO: 720780 - RNA, 20 nt, Artificial Sequence
  Synthetic
gaauuauaccaaguucuggc

SEQ ID NO: 720781 - RNA, 20 nt, Artificial Sequence
  Synthetic
gcaucagccucccaaguggc

SEQ ID NO: 720782 - RNA, 20 nt, Artificial Sequence
  Synthetic
gguauguuucucucaguggc

SEQ ID NO: 720783 - RNA, 20 nt, Artificial Sequence
  Synthetic
gcgaugcccaguucaguggc

SEQ ID NO: 720784 - RNA, 20 nt, Artificial Sequence
  Synthetic
gccucagccuccagaguggc

SEQ ID NO: 720785 - RNA, 20 nt, Artificial Sequence
  Synthetic
gucucagccucccgaguggc

SEQ ID NO: 720786 - RNA, 20 nt, Artificial Sequence
  Synthetic
gccucagccucuuuaguggc

SEQ ID NO: 720787 - RNA, 20 nt, Artificial Sequence
  Synthetic
gagggguuugcugccguggc

SEQ ID NO: 720788 - RNA, 20 nt, Artificial Sequence
  Synthetic
gcaccucuucacaggguggc

SEQ ID NO: 720789 - RNA, 20 nt, Artificial Sequence
  Synthetic
ggcauggcuuacaugguggc

SEQ ID NO: 720790 - RNA, 20 nt, Artificial Sequence
  Synthetic
ggucugcauuccuguguggc

SEQ ID NO: 720791 - RNA, 20 nt, Artificial Sequence
  Synthetic
gacucacaguucuguguggc

SEQ ID NO: 720792 - RNA, 20 nt, Artificial Sequence
  Synthetic
gauagugguguucaauuggc

SEQ ID NO: 720793 - RNA, 20 nt, Artificial Sequence
  Synthetic
gagauggaaaaaauauuggc

SEQ ID NO: 720794 - RNA, 20 nt, Artificial Sequence
  Synthetic
gacuuacgguuccacuuggc

SEQ ID NO: 720795 - RNA, 20 nt, Artificial Sequence
  Synthetic
gaugaguucauguccuuggc

SEQ ID NO: 720796 - RNA, 20 nt, Artificial Sequence
  Synthetic
guaaucuggauauaguuggc

SEQ ID NO: 720797 - RNA, 20 nt, Artificial Sequence
  Synthetic
ggggacauagcaggguuggc

SEQ ID NO: 720798 - RNA, 20 nt, Artificial Sequence
  Synthetic
gacuccuguacacuguuggc

SEQ ID NO: 720799 - RNA, 20 nt, Artificial Sequence
  Synthetic
ggccgcaggggccuguuggc

SEQ ID NO: 720800 - RNA, 20 nt, Artificial Sequence
  Synthetic
gaucccuuagucauuuuggc

SEQ ID NO: 720801 - RNA, 20 nt, Artificial Sequence
  Synthetic
gacuuuugugcauuuuuggc

SEQ ID NO: 720802 - RNA, 20 nt, Artificial Sequence
  Synthetic
gccuuguguuuauuuuuggc

SEQ ID NO: 720803 - RNA, 20 nt, Artificial Sequence
  Synthetic
gcaauaugaaaaaaaaaugc

SEQ ID NO: 720804 - RNA, 20 nt, Artificial Sequence
  Synthetic
ggggcuauuaggaaaaaugc

SEQ ID NO: 720805 - RNA, 20 nt, Artificial Sequence
  Synthetic
ggccaagagccaagaaaugc

SEQ ID NO: 720806 - RNA, 20 nt, Artificial Sequence
  Synthetic
gauugcauuuagagaaaugc

SEQ ID NO: 720807 - RNA, 20 nt, Artificial Sequence
  Synthetic
gccuucaggcaaugaaaugc

SEQ ID NO: 720808 - RNA, 20 nt, Artificial Sequence
  Synthetic
gggguuaagugguuaaaugc

SEQ ID NO: 720809 - RNA, 20 nt, Artificial Sequence
  Synthetic
guucuuacaggcaacaaugc

SEQ ID NO: 720810 - RNA, 20 nt, Artificial Sequence
  Synthetic
ggacaggauguuucgaaugc

SEQ ID NO: 720811 - RNA, 20 nt, Artificial Sequence
  Synthetic
guguaggcagaaaggaaugc

SEQ ID NO: 720812 - RNA, 20 nt, Artificial Sequence
  Synthetic
gagucauagauugggaaugc

SEQ ID NO: 720813 - RNA, 20 nt, Artificial Sequence
  Synthetic
gauuguuauggacugaaugc

SEQ ID NO: 720814 - RNA, 20 nt, Artificial Sequence
  Synthetic
gagaaguugagcuguaaugc

SEQ ID NO: 720815 - RNA, 20 nt, Artificial Sequence
  Synthetic
guaacacaaaagauuaaugc

SEQ ID NO: 720816 - RNA, 20 nt, Artificial Sequence
  Synthetic
gguacaugugcacaacaugc

SEQ ID NO: 720817 - RNA, 20 nt, Artificial Sequence
  Synthetic
gguucaugugcacaacaugc

SEQ ID NO: 720818 - RNA, 20 nt, Artificial Sequence
  Synthetic
gagaugggguuucgccaugc

SEQ ID NO: 720819 - RNA, 20 nt, Artificial Sequence
  Synthetic
gcauuucaaaaucuccaugc

SEQ ID NO: 720820 - RNA, 20 nt, Artificial Sequence
  Synthetic
gacaaauaccuaaugcaugc

SEQ ID NO: 720821 - RNA, 20 nt, Artificial Sequence
  Synthetic
gaaaaauagcuaaugcaugc

SEQ ID NO: 720822 - RNA, 20 nt, Artificial Sequence
  Synthetic
guucuucagguggugcaugc

SEQ ID NO: 720823 - RNA, 20 nt, Artificial Sequence
  Synthetic
ggggggugauuaggucaugc

SEQ ID NO: 720824 - RNA, 20 nt, Artificial Sequence
  Synthetic
gaaugaggaugcugagaugc

SEQ ID NO: 720825 - RNA, 20 nt, Artificial Sequence
  Synthetic
gggauugggauuauagaugc

SEQ ID NO: 720826 - RNA, 20 nt, Artificial Sequence
  Synthetic
gcugacuguguucuagaugc

SEQ ID NO: 720827 - RNA, 20 nt, Artificial Sequence
  Synthetic
gagggagagguugaggaugc

SEQ ID NO: 720828 - RNA, 20 nt, Artificial Sequence
  Synthetic
ggcuggaguggcugggaugc

SEQ ID NO: 720829 - RNA, 20 nt, Artificial Sequence
  Synthetic
gguauucuuaacauggaugc

SEQ ID NO: 720830 - RNA, 20 nt, Artificial Sequence
  Synthetic
gaggacauuccagaugaugc

SEQ ID NO: 720831 - RNA, 20 nt, Artificial Sequence
  Synthetic
gauuggugguuaccugaugc

SEQ ID NO: 720832 - RNA, 20 nt, Artificial Sequence
  Synthetic
gccacuugggaggcugaugc

SEQ ID NO: 720833 - RNA, 20 nt, Artificial Sequence
  Synthetic
guaaaacuacaucuugaugc

SEQ ID NO: 720834 - RNA, 20 nt, Artificial Sequence
  Synthetic
guaggaacugugcaauaugc

SEQ ID NO: 720835 - RNA, 20 nt, Artificial Sequence
  Synthetic
gugguguccuuugaauaugc

SEQ ID NO: 720836 - RNA, 20 nt, Artificial Sequence
  Synthetic
gccucauuuugcagauaugc

SEQ ID NO: 720837 - RNA, 20 nt, Artificial Sequence
  Synthetic
guuuuuaaaaaauacuaugc

SEQ ID NO: 720838 - RNA, 20 nt, Artificial Sequence
  Synthetic
guucaauauuuucuguaugc

SEQ ID NO: 720839 - RNA, 20 nt, Artificial Sequence
  Synthetic
gcuaauaauaguacuuaugc

SEQ ID NO: 720840 - RNA, 20 nt, Artificial Sequence
  Synthetic
gugcacugguucagaacugc

SEQ ID NO: 720841 - RNA, 20 nt, Artificial Sequence
  Synthetic
gcaacacuagucuccacugc

SEQ ID NO: 720842 - RNA, 20 nt, Artificial Sequence
  Synthetic
guugcugcaagcuucacugc

SEQ ID NO: 720843 - RNA, 20 nt, Artificial Sequence
  Synthetic
gacccccugaaguucacugc

SEQ ID NO: 720844 - RNA, 20 nt, Artificial Sequence
  Synthetic
ggacuccggaggcagacugc

SEQ ID NO: 720845 - RNA, 20 nt, Artificial Sequence
  Synthetic
gaaacuugaguucugacugc

SEQ ID NO: 720846 - RNA, 20 nt, Artificial Sequence
  Synthetic
gacagaaaaaauuauacugc

SEQ ID NO: 720847 - RNA, 20 nt, Artificial Sequence
  Synthetic
guccuuuuuuuuucuacugc

SEQ ID NO: 720848 - RNA, 20 nt, Artificial Sequence
  Synthetic
ggagcuacccuguguacugc

SEQ ID NO: 720849 - RNA, 20 nt, Artificial Sequence
  Synthetic
gggccagugccaccaccugc

SEQ ID NO: 720850 - RNA, 20 nt, Artificial Sequence
  Synthetic
gauuauuucccuucaccugc

SEQ ID NO: 720851 - RNA, 20 nt, Artificial Sequence
  Synthetic
gggugucugucaaccccugc

SEQ ID NO: 720852 - RNA, 20 nt, Artificial Sequence
  Synthetic
gagaugaagauagccccugc

SEQ ID NO: 720853 - RNA, 20 nt, Artificial Sequence
  Synthetic
gugucuggcguuuccccugc

SEQ ID NO: 720854 - RNA, 20 nt, Artificial Sequence
  Synthetic
gagcaauacaaugagccugc

SEQ ID NO: 720855 - RNA, 20 nt, Artificial Sequence
  Synthetic
gcuucagguaggaauccugc

SEQ ID NO: 720856 - RNA, 20 nt, Artificial Sequence
  Synthetic
ggcuaacucccuccuccugc

SEQ ID NO: 720857 - RNA, 20 nt, Artificial Sequence
  Synthetic
ggaagcagcccaccagcugc

SEQ ID NO: 720858 - RNA, 20 nt, Artificial Sequence
  Synthetic
gugugaagagaaagagcugc

SEQ ID NO: 720859 - RNA, 20 nt, Artificial Sequence
  Synthetic
gagaucauggauggagcugc

SEQ ID NO: 720860 - RNA, 20 nt, Artificial Sequence
  Synthetic
gaaaggagaaacauagcugc

SEQ ID NO: 720861 - RNA, 20 nt, Artificial Sequence
  Synthetic
gcagacaccgagcuagcugc

SEQ ID NO: 720862 - RNA, 20 nt, Artificial Sequence
  Synthetic
ggucaaggcugcaaggcugc

SEQ ID NO: 720863 - RNA, 20 nt, Artificial Sequence
  Synthetic
gauauauguggugaggcugc

SEQ ID NO: 720864 - RNA, 20 nt, Artificial Sequence
  Synthetic
gcggguuaacucaaugcugc

SEQ ID NO: 720865 - RNA, 20 nt, Artificial Sequence
  Synthetic
gccaggaauuuggaugcugc

SEQ ID NO: 720866 - RNA, 20 nt, Artificial Sequence
  Synthetic
gagcauagauucacugcugc

SEQ ID NO: 720867 - RNA, 20 nt, Artificial Sequence
  Synthetic
gauuaugaaaacagugcugc

SEQ ID NO: 720868 - RNA, 20 nt, Artificial Sequence
  Synthetic
gguaucuggauuucaucugc

SEQ ID NO: 720869 - RNA, 20 nt, Artificial Sequence
  Synthetic
gggcuugaucacagaucugc

SEQ ID NO: 720870 - RNA, 20 nt, Artificial Sequence
  Synthetic
ggaacacugaacagcucugc

SEQ ID NO: 720871 - RNA, 20 nt, Artificial Sequence
  Synthetic
gaauuuuaucccagcucugc

SEQ ID NO: 720872 - RNA, 20 nt, Artificial Sequence
  Synthetic
gccaggaguucagauucugc

SEQ ID NO: 720873 - RNA, 20 nt, Artificial Sequence
  Synthetic
gcugcucaugaggauucugc

SEQ ID NO: 720874 - RNA, 20 nt, Artificial Sequence
  Synthetic
ggagacaugaccuauucugc

SEQ ID NO: 720875 - RNA, 20 nt, Artificial Sequence
  Synthetic
guguuuauaaauauuucugc

SEQ ID NO: 720876 - RNA, 20 nt, Artificial Sequence
  Synthetic
guuucagccacccaaagugc

SEQ ID NO: 720877 - RNA, 20 nt, Artificial Sequence
  Synthetic
gccuuggacucccaaagugc

SEQ ID NO: 720878 - RNA, 20 nt, Artificial Sequence
  Synthetic
gccucagccucccaaagugc

SEQ ID NO: 720879 - RNA, 20 nt, Artificial Sequence
  Synthetic
gucucagccucccaaagugc

SEQ ID NO: 720880 - RNA, 20 nt, Artificial Sequence
  Synthetic
gcuucagccucccaaagugc

SEQ ID NO: 720881 - RNA, 20 nt, Artificial Sequence
  Synthetic
gccucggccucccaaagugc

SEQ ID NO: 720882 - RNA, 20 nt, Artificial Sequence
  Synthetic
gucucggccucccaaagugc

SEQ ID NO: 720883 - RNA, 20 nt, Artificial Sequence
  Synthetic
gccugggccucccaaagugc

SEQ ID NO: 720884 - RNA, 20 nt, Artificial Sequence
  Synthetic
gccuuggccucccaaagugc

SEQ ID NO: 720885 - RNA, 20 nt, Artificial Sequence
  Synthetic
gucuuggccucccaaagugc

SEQ ID NO: 720886 - RNA, 20 nt, Artificial Sequence
  Synthetic
gccucugccucccaaagugc

SEQ ID NO: 720887 - RNA, 20 nt, Artificial Sequence
  Synthetic
gccucauccucccaaagugc

SEQ ID NO: 720888 - RNA, 20 nt, Artificial Sequence
  Synthetic
gccucaggcucccaaagugc

SEQ ID NO: 720889 - RNA, 20 nt, Artificial Sequence
  Synthetic
gccccagcuucccaaagugc

SEQ ID NO: 720890 - RNA, 20 nt, Artificial Sequence
  Synthetic
gccucagcuucccaaagugc

SEQ ID NO: 720891 - RNA, 20 nt, Artificial Sequence
  Synthetic
gccucggccuuccaaagugc

SEQ ID NO: 720892 - RNA, 20 nt, Artificial Sequence
  Synthetic
gccucggccucgcaaagugc

SEQ ID NO: 720893 - RNA, 20 nt, Artificial Sequence
  Synthetic
gccucagccucucaaagugc

SEQ ID NO: 720894 - RNA, 20 nt, Artificial Sequence
  Synthetic
gauacaugugcagaaagugc

SEQ ID NO: 720895 - RNA, 20 nt, Artificial Sequence
  Synthetic
gccucagcauccgaaagugc

SEQ ID NO: 720896 - RNA, 20 nt, Artificial Sequence
  Synthetic
gccucggccuccccaagugc

SEQ ID NO: 720897 - RNA, 20 nt, Artificial Sequence
  Synthetic
ggugcgcuggccagaagugc

SEQ ID NO: 720898 - RNA, 20 nt, Artificial Sequence
  Synthetic
gccuuggccucccuaagugc

SEQ ID NO: 720899 - RNA, 20 nt, Artificial Sequence
  Synthetic
gccuuggccucccacagugc

SEQ ID NO: 720900 - RNA, 20 nt, Artificial Sequence
  Synthetic
guaucuccauuucacagugc

SEQ ID NO: 720901 - RNA, 20 nt, Artificial Sequence
  Synthetic
gaccacagcaaaagcagugc

SEQ ID NO: 720902 - RNA, 20 nt, Artificial Sequence
  Synthetic
gcagagcccugaggcagugc

SEQ ID NO: 720903 - RNA, 20 nt, Artificial Sequence
  Synthetic
gcucauucuguuaucagugc

SEQ ID NO: 720904 - RNA, 20 nt, Artificial Sequence
  Synthetic
gccucggccucccagagugc

SEQ ID NO: 720905 - RNA, 20 nt, Artificial Sequence
  Synthetic
gccucagccucccauagugc

SEQ ID NO: 720906 - RNA, 20 nt, Artificial Sequence
  Synthetic
ggcacaugugcacaacgugc

SEQ ID NO: 720907 - RNA, 20 nt, Artificial Sequence
  Synthetic
gguacaugugcacaacgugc

SEQ ID NO: 720908 - RNA, 20 nt, Artificial Sequence
  Synthetic
gauacauguacagaacgugc

SEQ ID NO: 720909 - RNA, 20 nt, Artificial Sequence
  Synthetic
gauacaggugcagaacgugc

SEQ ID NO: 720910 - RNA, 20 nt, Artificial Sequence
  Synthetic
gauacaugugcagaacgugc

SEQ ID NO: 720911 - RNA, 20 nt, Artificial Sequence
  Synthetic
gcuguugcuucagagggugc

SEQ ID NO: 720912 - RNA, 20 nt, Artificial Sequence
  Synthetic
ggcacaugugcacaaugugc

SEQ ID NO: 720913 - RNA, 20 nt, Artificial Sequence
  Synthetic
gguacaugugcacaaugugc

SEQ ID NO: 720914 - RNA, 20 nt, Artificial Sequence
  Synthetic
gauuuaagggguacaugugc

SEQ ID NO: 720915 - RNA, 20 nt, Artificial Sequence
  Synthetic
gcaggcaagagagcaugugc

SEQ ID NO: 720916 - RNA, 20 nt, Artificial Sequence
  Synthetic
gguacaugugcaggaugugc

SEQ ID NO: 720917 - RNA, 20 nt, Artificial Sequence
  Synthetic
gcucaagagaacagcugugc

SEQ ID NO: 720918 - RNA, 20 nt, Artificial Sequence
  Synthetic
gcagagcucgagugcugugc

SEQ ID NO: 720919 - RNA, 20 nt, Artificial Sequence
  Synthetic
ggaauacgagcccagugugc

SEQ ID NO: 720920 - RNA, 20 nt, Artificial Sequence
  Synthetic
guauauggccaguggugugc

SEQ ID NO: 720921 - RNA, 20 nt, Artificial Sequence
  Synthetic
gaaguucucaaccugugugc

SEQ ID NO: 720922 - RNA, 20 nt, Artificial Sequence
  Synthetic
gguacaugugcacauugugc

SEQ ID NO: 720923 - RNA, 20 nt, Artificial Sequence
  Synthetic
gccuuagccucccaaauugc

SEQ ID NO: 720924 - RNA, 20 nt, Artificial Sequence
  Synthetic
guaaacauguuaugaauugc

SEQ ID NO: 720925 - RNA, 20 nt, Artificial Sequence
  Synthetic
gcagagcuguccugaauugc

SEQ ID NO: 720926 - RNA, 20 nt, Artificial Sequence
  Synthetic
gcccuugaguuuauaauugc

SEQ ID NO: 720927 - RNA, 20 nt, Artificial Sequence
  Synthetic
gcuuugugcggaggcauugc

SEQ ID NO: 720928 - RNA, 20 nt, Artificial Sequence
  Synthetic
gaccuuaggcauuucauugc

SEQ ID NO: 720929 - RNA, 20 nt, Artificial Sequence
  Synthetic
guugaaaacauagagauugc

SEQ ID NO: 720930 - RNA, 20 nt, Artificial Sequence
  Synthetic
gcaggaucagucuauauugc

SEQ ID NO: 720931 - RNA, 20 nt, Artificial Sequence
  Synthetic
gguacaugugcacaacuugc

SEQ ID NO: 720932 - RNA, 20 nt, Artificial Sequence
  Synthetic
guuauuuauugaacacuugc

SEQ ID NO: 720933 - RNA, 20 nt, Artificial Sequence
  Synthetic
ggaaaaauguagccacuugc

SEQ ID NO: 720934 - RNA, 20 nt, Artificial Sequence
  Synthetic
guuccaaaugccauacuugc

SEQ ID NO: 720935 - RNA, 20 nt, Artificial Sequence
  Synthetic
gaaucuagcccuucccuugc

SEQ ID NO: 720936 - RNA, 20 nt, Artificial Sequence
  Synthetic
gcaucuggcauuucccuugc

SEQ ID NO: 720937 - RNA, 20 nt, Artificial Sequence
  Synthetic
gaauaguccagccugcuugc

SEQ ID NO: 720938 - RNA, 20 nt, Artificial Sequence
  Synthetic
gucauccagcuucugcuugc

SEQ ID NO: 720939 - RNA, 20 nt, Artificial Sequence
  Synthetic
guugggggaaaaccucuugc

SEQ ID NO: 720940 - RNA, 20 nt, Artificial Sequence
  Synthetic
gccauacuuuucucucuugc

SEQ ID NO: 720941 - RNA, 20 nt, Artificial Sequence
  Synthetic
gcauucauucucccaguugc

SEQ ID NO: 720942 - RNA, 20 nt, Artificial Sequence
  Synthetic
gccucaaccuccagaguugc

SEQ ID NO: 720943 - RNA, 20 nt, Artificial Sequence
  Synthetic
gggcugggaaauguaguugc

SEQ ID NO: 720944 - RNA, 20 nt, Artificial Sequence
  Synthetic
gguuucucaguuaauguugc

SEQ ID NO: 720945 - RNA, 20 nt, Artificial Sequence
  Synthetic
ggaugaauuauauauguugc

SEQ ID NO: 720946 - RNA, 20 nt, Artificial Sequence
  Synthetic
gugagugggaguuauguugc

SEQ ID NO: 720947 - RNA, 20 nt, Artificial Sequence
  Synthetic
gaacucugauacacuguugc

SEQ ID NO: 720948 - RNA, 20 nt, Artificial Sequence
  Synthetic
gaaugugucaguucuguugc

SEQ ID NO: 720949 - RNA, 20 nt, Artificial Sequence
  Synthetic
gaucacuguuagaaauuugc

SEQ ID NO: 720950 - RNA, 20 nt, Artificial Sequence
  Synthetic
gcaggucugcuggaauuugc

SEQ ID NO: 720951 - RNA, 20 nt, Artificial Sequence
  Synthetic
gagaaaguacuuagauuugc

SEQ ID NO: 720952 - RNA, 20 nt, Artificial Sequence
  Synthetic
guaauauuuggcauauuugc

SEQ ID NO: 720953 - RNA, 20 nt, Artificial Sequence
  Synthetic
gaugagaucauguccuuugc

SEQ ID NO: 720954 - RNA, 20 nt, Artificial Sequence
  Synthetic
gaugacuucauguccuuugc

SEQ ID NO: 720955 - RNA, 20 nt, Artificial Sequence
  Synthetic
guaaauauuauaggcuuugc

SEQ ID NO: 720956 - RNA, 20 nt, Artificial Sequence
  Synthetic
guaaauguuuuaggcuuugc

SEQ ID NO: 720957 - RNA, 20 nt, Artificial Sequence
  Synthetic
gaccuggaacagugguuugc

SEQ ID NO: 720958 - RNA, 20 nt, Artificial Sequence
  Synthetic
gcaccaacuaugugguuugc

SEQ ID NO: 720959 - RNA, 20 nt, Artificial Sequence
  Synthetic
gcauuaaucacuguguuugc

SEQ ID NO: 720960 - RNA, 20 nt, Artificial Sequence
  Synthetic
gucaacuuugauuauuuugc

SEQ ID NO: 720961 - RNA, 20 nt, Artificial Sequence
  Synthetic
gggagucauaaucuuuuugc

SEQ ID NO: 720962 - RNA, 20 nt, Artificial Sequence
  Synthetic
gacuggccauguuaaaaauc

SEQ ID NO: 720963 - RNA, 20 nt, Artificial Sequence
  Synthetic
gauuuggaaaaaagaaaauc

SEQ ID NO: 720964 - RNA, 20 nt, Artificial Sequence
  Synthetic
gcaauauggggaagaaaauc

SEQ ID NO: 720965 - RNA, 20 nt, Artificial Sequence
  Synthetic
gagacucuguggguaaaauc

SEQ ID NO: 720966 - RNA, 20 nt, Artificial Sequence
  Synthetic
ggaaacaacaguggcaaauc

SEQ ID NO: 720967 - RNA, 20 nt, Artificial Sequence
  Synthetic
gauugcucaaugaucaaauc

SEQ ID NO: 720968 - RNA, 20 nt, Artificial Sequence
  Synthetic
gaaagagaagagaggaaauc

SEQ ID NO: 720969 - RNA, 20 nt, Artificial Sequence
  Synthetic
gcuaccgagcaauugaaauc

SEQ ID NO: 720970 - RNA, 20 nt, Artificial Sequence
  Synthetic
gucaccagcauaaauaaauc

SEQ ID NO: 720971 - RNA, 20 nt, Artificial Sequence
  Synthetic
guggucauauuaaauaaauc

SEQ ID NO: 720972 - RNA, 20 nt, Artificial Sequence
  Synthetic
gaacaaguaguaaaacaauc

SEQ ID NO: 720973 - RNA, 20 nt, Artificial Sequence
  Synthetic
gauuuuaugauuccacaauc

SEQ ID NO: 720974 - RNA, 20 nt, Artificial Sequence
  Synthetic
gaguuguauguuucacaauc

SEQ ID NO: 720975 - RNA, 20 nt, Artificial Sequence
  Synthetic
gugucucauguuuuacaauc

SEQ ID NO: 720976 - RNA, 20 nt, Artificial Sequence
  Synthetic
gauuguaaaacgcaccaauc

SEQ ID NO: 720977 - RNA, 20 nt, Artificial Sequence
  Synthetic
gaaugagaguuuuaccaauc

SEQ ID NO: 720978 - RNA, 20 nt, Artificial Sequence
  Synthetic
gagaagugaaaagagcaauc

SEQ ID NO: 720979 - RNA, 20 nt, Artificial Sequence
  Synthetic
gcuggagaccagcaucaauc

SEQ ID NO: 720980 - RNA, 20 nt, Artificial Sequence
  Synthetic
guuuuuuuuuuuugucaauc

SEQ ID NO: 720981 - RNA, 20 nt, Artificial Sequence
  Synthetic
guucaaaagacauuucaauc

SEQ ID NO: 720982 - RNA, 20 nt, Artificial Sequence
  Synthetic
gaaaauacuuucagagaauc

SEQ ID NO: 720983 - RNA, 20 nt, Artificial Sequence
  Synthetic
ggagaaggaaaacuagaauc

SEQ ID NO: 720984 - RNA, 20 nt, Artificial Sequence
  Synthetic
gcaggaggauggcaugaauc

SEQ ID NO: 720985 - RNA, 20 nt, Artificial Sequence
  Synthetic
gagaucauaacgauugaauc

SEQ ID NO: 720986 - RNA, 20 nt, Artificial Sequence
  Synthetic
gcaagagaauagcuugaauc

SEQ ID NO: 720987 - RNA, 20 nt, Artificial Sequence
  Synthetic
gcaggagaaucgcuugaauc

SEQ ID NO: 720988 - RNA, 20 nt, Artificial Sequence
  Synthetic
ggaaguucaguuuuugaauc

SEQ ID NO: 720989 - RNA, 20 nt, Artificial Sequence
  Synthetic
guauaaauugaugaauaauc

SEQ ID NO: 720990 - RNA, 20 nt, Artificial Sequence
  Synthetic
ggaagugacaccgucuaauc

SEQ ID NO: 720991 - RNA, 20 nt, Artificial Sequence
  Synthetic
guuaauuuuguuuaguaauc

SEQ ID NO: 720992 - RNA, 20 nt, Artificial Sequence
  Synthetic
guguugccuugaagguaauc

SEQ ID NO: 720993 - RNA, 20 nt, Artificial Sequence
  Synthetic
ggcaggaguuccuuuuaauc

SEQ ID NO: 720994 - RNA, 20 nt, Artificial Sequence
  Synthetic
gaaaaguuuuuaaaaacauc

SEQ ID NO: 720995 - RNA, 20 nt, Artificial Sequence
  Synthetic
guggccaugugacagacauc

SEQ ID NO: 720996 - RNA, 20 nt, Artificial Sequence
  Synthetic
gaaaggaaauaaaguacauc

SEQ ID NO: 720997 - RNA, 20 nt, Artificial Sequence
  Synthetic
gcccagaaaccagaaccauc

SEQ ID NO: 720998 - RNA, 20 nt, Artificial Sequence
  Synthetic
gaaucuuccucauaaccauc

SEQ ID NO: 720999 - RNA, 20 nt, Artificial Sequence
  Synthetic
gucaagagaucgagaccauc

SEQ ID NO: 721000 - RNA, 20 nt, Artificial Sequence
  Synthetic
ggagauaccuaguggccauc

SEQ ID NO: 721001 - RNA, 20 nt, Artificial Sequence
  Synthetic
gaagacauaggguuuccauc

SEQ ID NO: 721002 - RNA, 20 nt, Artificial Sequence
  Synthetic
guucuuguuuuuuuuccauc

SEQ ID NO: 721003 - RNA, 20 nt, Artificial Sequence
  Synthetic
gaagugaauccuccagcauc

SEQ ID NO: 721004 - RNA, 20 nt, Artificial Sequence
  Synthetic
gagagaugauuuagggcauc

SEQ ID NO: 721005 - RNA, 20 nt, Artificial Sequence
  Synthetic
ggagagcucuggcuggcauc

SEQ ID NO: 721006 - RNA, 20 nt, Artificial Sequence
  Synthetic
gaaggaagacaauaugcauc

SEQ ID NO: 721007 - RNA, 20 nt, Artificial Sequence
  Synthetic
guacgaugaaaaaaaucauc

SEQ ID NO: 721008 - RNA, 20 nt, Artificial Sequence
  Synthetic
gaacacugugcaaaaucauc

SEQ ID NO: 721009 - RNA, 20 nt, Artificial Sequence
  Synthetic
gaggcugaggaugaaucauc

SEQ ID NO: 721010 - RNA, 20 nt, Artificial Sequence
  Synthetic
gaggaagugaucuccucauc

SEQ ID NO: 721011 - RNA, 20 nt, Artificial Sequence
  Synthetic
gcucagcaucacuagucauc

SEQ ID NO: 721012 - RNA, 20 nt, Artificial Sequence
  Synthetic
gaauuacauggcuagucauc

SEQ ID NO: 721013 - RNA, 20 nt, Artificial Sequence
  Synthetic
guuucuuagauguggucauc

SEQ ID NO: 721014 - RNA, 20 nt, Artificial Sequence
  Synthetic
gauaaacuuccucugucauc

SEQ ID NO: 721015 - RNA, 20 nt, Artificial Sequence
  Synthetic
ggaagccuuuaggugucauc

SEQ ID NO: 721016 - RNA, 20 nt, Artificial Sequence
  Synthetic
gucuuuauuaugguuucauc

SEQ ID NO: 721017 - RNA, 20 nt, Artificial Sequence
  Synthetic
ggauggaaaauaaaaagauc

SEQ ID NO: 721018 - RNA, 20 nt, Artificial Sequence
  Synthetic
gaaguguguaaagaaagauc

SEQ ID NO: 721019 - RNA, 20 nt, Artificial Sequence
  Synthetic
gguugcagugagccaagauc

SEQ ID NO: 721020 - RNA, 20 nt, Artificial Sequence
  Synthetic
gaggcugggauuccaagauc

SEQ ID NO: 721021 - RNA, 20 nt, Artificial Sequence
  Synthetic
gaaugcuuuccccuaagauc

SEQ ID NO: 721022 - RNA, 20 nt, Artificial Sequence
  Synthetic
gaaggcuuuucucuaagauc

SEQ ID NO: 721023 - RNA, 20 nt, Artificial Sequence
  Synthetic
guuuaauaaaucaagagauc

SEQ ID NO: 721024 - RNA, 20 nt, Artificial Sequence
  Synthetic
gguucuuauugccagagauc

SEQ ID NO: 721025 - RNA, 20 nt, Artificial Sequence
  Synthetic
ggcaggcagaucacgagauc

SEQ ID NO: 721026 - RNA, 20 nt, Artificial Sequence
  Synthetic
ggcuaaaauaccaggagauc

SEQ ID NO: 721027 - RNA, 20 nt, Artificial Sequence
  Synthetic
gaucacaaggucaggagauc

SEQ ID NO: 721028 - RNA, 20 nt, Artificial Sequence
  Synthetic
ggugaacggaucaugagauc

SEQ ID NO: 721029 - RNA, 20 nt, Artificial Sequence
  Synthetic
gagugaguuuucaugagauc

SEQ ID NO: 721030 - RNA, 20 nt, Artificial Sequence
  Synthetic
ggagaacaaucccaaggauc

SEQ ID NO: 721031 - RNA, 20 nt, Artificial Sequence
  Synthetic
ggucucagucuggaaggauc

SEQ ID NO: 721032 - RNA, 20 nt, Artificial Sequence
  Synthetic
gugggaggagcgagaggauc

SEQ ID NO: 721033 - RNA, 20 nt, Artificial Sequence
  Synthetic
gucuggaggcagcuaggauc

SEQ ID NO: 721034 - RNA, 20 nt, Artificial Sequence
  Synthetic
ggugaguccacugauggauc

SEQ ID NO: 721035 - RNA, 20 nt, Artificial Sequence
  Synthetic
ggccaauggcuggcuggauc

SEQ ID NO: 721036 - RNA, 20 nt, Artificial Sequence
  Synthetic
gugacacucagcuuuggauc

SEQ ID NO: 721037 - RNA, 20 nt, Artificial Sequence
  Synthetic
ggauuucagguuuuuggauc

SEQ ID NO: 721038 - RNA, 20 nt, Artificial Sequence
  Synthetic
gaaugggcuucacaaugauc

SEQ ID NO: 721039 - RNA, 20 nt, Artificial Sequence
  Synthetic
gaagccccgcucccaugauc

SEQ ID NO: 721040 - RNA, 20 nt, Artificial Sequence
  Synthetic
guaaaauauggaaagugauc

SEQ ID NO: 721041 - RNA, 20 nt, Artificial Sequence
  Synthetic
ggggguucaccaaguugauc

SEQ ID NO: 721042 - RNA, 20 nt, Artificial Sequence
  Synthetic
gggguuucaccacguugauc

SEQ ID NO: 721043 - RNA, 20 nt, Artificial Sequence
  Synthetic
gggguugcuccauguugauc

SEQ ID NO: 721044 - RNA, 20 nt, Artificial Sequence
  Synthetic
guuauuagauucuuuugauc

SEQ ID NO: 721045 - RNA, 20 nt, Artificial Sequence
  Synthetic
ggaaggaaagaaaaaauauc

SEQ ID NO: 721046 - RNA, 20 nt, Artificial Sequence
  Synthetic
guuaaucauuucaaaauauc

SEQ ID NO: 721047 - RNA, 20 nt, Artificial Sequence
  Synthetic
gagauuucaagugaaauauc

SEQ ID NO: 721048 - RNA, 20 nt, Artificial Sequence
  Synthetic
gcauuuucaccuuaaauauc

SEQ ID NO: 721049 - RNA, 20 nt, Artificial Sequence
  Synthetic
guucucucauuuugaauauc

SEQ ID NO: 721050 - RNA, 20 nt, Artificial Sequence
  Synthetic
gccuccauaaauuacauauc

SEQ ID NO: 721051 - RNA, 20 nt, Artificial Sequence
  Synthetic
gcagcaacuaccaucauauc

SEQ ID NO: 721052 - RNA, 20 nt, Artificial Sequence
  Synthetic
ggaguuaaugagaucauauc

SEQ ID NO: 721053 - RNA, 20 nt, Artificial Sequence
  Synthetic
gugagaaaguacuagauauc

SEQ ID NO: 721054 - RNA, 20 nt, Artificial Sequence
  Synthetic
gauguguucaucaugauauc

SEQ ID NO: 721055 - RNA, 20 nt, Artificial Sequence
  Synthetic
gucaguuuuuaaaauauauc

SEQ ID NO: 721056 - RNA, 20 nt, Artificial Sequence
  Synthetic
gaagaccuguguuauauauc

SEQ ID NO: 721057 - RNA, 20 nt, Artificial Sequence
  Synthetic
gcaaauauccaaacuauauc

SEQ ID NO: 721058 - RNA, 20 nt, Artificial Sequence
  Synthetic
gaaaauguauuaucuauauc

SEQ ID NO: 721059 - RNA, 20 nt, Artificial Sequence
  Synthetic
gugaaacucauaaguauauc

SEQ ID NO: 721060 - RNA, 20 nt, Artificial Sequence
  Synthetic
gauauuuuaucuauuauauc

SEQ ID NO: 721061 - RNA, 20 nt, Artificial Sequence
  Synthetic
gaaaguuucaggcuuauauc

SEQ ID NO: 721062 - RNA, 20 nt, Artificial Sequence
  Synthetic
gugagaacucacucacuauc

SEQ ID NO: 721063 - RNA, 20 nt, Artificial Sequence
  Synthetic
ggguugaaaaacuaccuauc

SEQ ID NO: 721064 - RNA, 20 nt, Artificial Sequence
  Synthetic
ggcacaggugugugccuauc

SEQ ID NO: 721065 - RNA, 20 nt, Artificial Sequence
  Synthetic
gggaaggacucaguccuauc

SEQ ID NO: 721066 - RNA, 20 nt, Artificial Sequence
  Synthetic
guuuuauuuuuccagcuauc

SEQ ID NO: 721067 - RNA, 20 nt, Artificial Sequence
  Synthetic
guguuccagcuuuagcuauc

SEQ ID NO: 721068 - RNA, 20 nt, Artificial Sequence
  Synthetic
guacugaugaaaaaaguauc

SEQ ID NO: 721069 - RNA, 20 nt, Artificial Sequence
  Synthetic
gccucaaacucccaaguauc

SEQ ID NO: 721070 - RNA, 20 nt, Artificial Sequence
  Synthetic
gaaauguguaacacaguauc

SEQ ID NO: 721071 - RNA, 20 nt, Artificial Sequence
  Synthetic
guucuuggacacagaguauc

SEQ ID NO: 721072 - RNA, 20 nt, Artificial Sequence
  Synthetic
gccucagccuccugaguauc

SEQ ID NO: 721073 - RNA, 20 nt, Artificial Sequence
  Synthetic
gccucggccuccugaguauc

SEQ ID NO: 721074 - RNA, 20 nt, Artificial Sequence
  Synthetic
gaggaaccuggauguguauc

SEQ ID NO: 721075 - RNA, 20 nt, Artificial Sequence
  Synthetic
guacgaucaugaaaauuauc

SEQ ID NO: 721076 - RNA, 20 nt, Artificial Sequence
  Synthetic
gucaaaauaucaacauuauc

SEQ ID NO: 721077 - RNA, 20 nt, Artificial Sequence
  Synthetic
gugaaauggaagaucuuauc

SEQ ID NO: 721078 - RNA, 20 nt, Artificial Sequence
  Synthetic
gugacauguuuugucuuauc

SEQ ID NO: 721079 - RNA, 20 nt, Artificial Sequence
  Synthetic
gagcaaauaaaaugguuauc

SEQ ID NO: 721080 - RNA, 20 nt, Artificial Sequence
  Synthetic
guaaggcacguucauuuauc

SEQ ID NO: 721081 - RNA, 20 nt, Artificial Sequence
  Synthetic
gagggaaaagggucuuuauc

SEQ ID NO: 721082 - RNA, 20 nt, Artificial Sequence
  Synthetic
gagugcuuuugguguuuauc

SEQ ID NO: 721083 - RNA, 20 nt, Artificial Sequence
  Synthetic
guacaucacaggauuuuauc

SEQ ID NO: 721084 - RNA, 20 nt, Artificial Sequence
  Synthetic
ggcucuaugggaguuuuauc

SEQ ID NO: 721085 - RNA, 20 nt, Artificial Sequence
  Synthetic
gauauaucugcauuuuuauc

SEQ ID NO: 721086 - RNA, 20 nt, Artificial Sequence
  Synthetic
ggacaagaugccuuuuuauc

SEQ ID NO: 721087 - RNA, 20 nt, Artificial Sequence
  Synthetic
gaucauguuucagaaaacuc

SEQ ID NO: 721088 - RNA, 20 nt, Artificial Sequence
  Synthetic
gaauuuuauuuaucaaacuc

SEQ ID NO: 721089 - RNA, 20 nt, Artificial Sequence
  Synthetic
gugcuuaagagcagaaacuc

SEQ ID NO: 721090 - RNA, 20 nt, Artificial Sequence
  Synthetic
gccuguaaucccagcaacuc

SEQ ID NO: 721091 - RNA, 20 nt, Artificial Sequence
  Synthetic
gaggaacaagaggagaacuc

SEQ ID NO: 721092 - RNA, 20 nt, Artificial Sequence
  Synthetic
gugcaaucaaacuagaacuc

SEQ ID NO: 721093 - RNA, 20 nt, Artificial Sequence
  Synthetic
guacaaucaaauuagaacuc

SEQ ID NO: 721094 - RNA, 20 nt, Artificial Sequence
  Synthetic
guucucugcccuaggaacuc

SEQ ID NO: 721095 - RNA, 20 nt, Artificial Sequence
  Synthetic
gcauuuucuaccuggaacuc

SEQ ID NO: 721096 - RNA, 20 nt, Artificial Sequence
  Synthetic
gcucacugagccuugaacuc

SEQ ID NO: 721097 - RNA, 20 nt, Artificial Sequence
  Synthetic
gcuggcccacuucuuaacuc

SEQ ID NO: 721098 - RNA, 20 nt, Artificial Sequence
  Synthetic
ggaaggggaacaucacacuc

SEQ ID NO: 721099 - RNA, 20 nt, Artificial Sequence
  Synthetic
ggaaugggaacaucacacuc

SEQ ID NO: 721100 - RNA, 20 nt, Artificial Sequence
  Synthetic
ggaaggggaauaucacacuc

SEQ ID NO: 721101 - RNA, 20 nt, Artificial Sequence
  Synthetic
guuggggguuguagacacuc

SEQ ID NO: 721102 - RNA, 20 nt, Artificial Sequence
  Synthetic
gagauccaguuuuaccacuc

SEQ ID NO: 721103 - RNA, 20 nt, Artificial Sequence
  Synthetic
gccuguaaucccagccacuc

SEQ ID NO: 721104 - RNA, 20 nt, Artificial Sequence
  Synthetic
gugguaugucagagucacuc

SEQ ID NO: 721105 - RNA, 20 nt, Artificial Sequence
  Synthetic
ggagucucgcucugucacuc

SEQ ID NO: 721106 - RNA, 20 nt, Artificial Sequence
  Synthetic
ggguucuggcucugucacuc

SEQ ID NO: 721107 - RNA, 20 nt, Artificial Sequence
  Synthetic
gccaccuauuuuucagacuc

SEQ ID NO: 721108 - RNA, 20 nt, Artificial Sequence
  Synthetic
gcgacagagaggggagacuc

SEQ ID NO: 721109 - RNA, 20 nt, Artificial Sequence
  Synthetic
gcccaguggccuuuagacuc

SEQ ID NO: 721110 - RNA, 20 nt, Artificial Sequence
  Synthetic
gacagagucauauuggacuc

SEQ ID NO: 721111 - RNA, 20 nt, Artificial Sequence
  Synthetic
gcauuccuucacagugacuc

SEQ ID NO: 721112 - RNA, 20 nt, Artificial Sequence
  Synthetic
gccuguagucccagauacuc

SEQ ID NO: 721113 - RNA, 20 nt, Artificial Sequence
  Synthetic
gccuguaaucccaacuacuc

SEQ ID NO: 721114 - RNA, 20 nt, Artificial Sequence
  Synthetic
gccuguaguaccagcuacuc

SEQ ID NO: 721115 - RNA, 20 nt, Artificial Sequence
  Synthetic
gccuguaaccccagcuacuc

SEQ ID NO: 721116 - RNA, 20 nt, Artificial Sequence
  Synthetic
gccucuaaucccagcuacuc

SEQ ID NO: 721117 - RNA, 20 nt, Artificial Sequence
  Synthetic
gccuguaaucccagcuacuc

SEQ ID NO: 721118 - RNA, 20 nt, Artificial Sequence
  Synthetic
gucuguaaucccagcuacuc

SEQ ID NO: 721119 - RNA, 20 nt, Artificial Sequence
  Synthetic
gcuuguaaucccagcuacuc

SEQ ID NO: 721120 - RNA, 20 nt, Artificial Sequence
  Synthetic
gcugauagucccagcuacuc

SEQ ID NO: 721121 - RNA, 20 nt, Artificial Sequence
  Synthetic
gccuauagucccagcuacuc

SEQ ID NO: 721122 - RNA, 20 nt, Artificial Sequence
  Synthetic
gccgguagucccagcuacuc

SEQ ID NO: 721123 - RNA, 20 nt, Artificial Sequence
  Synthetic
gccuguagucccagcuacuc

SEQ ID NO: 721124 - RNA, 20 nt, Artificial Sequence
  Synthetic
gcuuguagucccagcuacuc

SEQ ID NO: 721125 - RNA, 20 nt, Artificial Sequence
  Synthetic
gccuguggucccagcuacuc

SEQ ID NO: 721126 - RNA, 20 nt, Artificial Sequence
  Synthetic
gucuguggucccagcuacuc

SEQ ID NO: 721127 - RNA, 20 nt, Artificial Sequence
  Synthetic
gccuguaaucucagcuacuc

SEQ ID NO: 721128 - RNA, 20 nt, Artificial Sequence
  Synthetic
gucuguagucucagcuacuc

SEQ ID NO: 721129 - RNA, 20 nt, Artificial Sequence
  Synthetic
gccuauaauccuagcuacuc

SEQ ID NO: 721130 - RNA, 20 nt, Artificial Sequence
  Synthetic
guaguacugaguagcuacuc

SEQ ID NO: 721131 - RNA, 20 nt, Artificial Sequence
  Synthetic
gcuuguagccuuagcuacuc

SEQ ID NO: 721132 - RNA, 20 nt, Artificial Sequence
  Synthetic
gccuguaguuccugcuacuc

SEQ ID NO: 721133 - RNA, 20 nt, Artificial Sequence
  Synthetic
gccuguagucccaucuacuc

SEQ ID NO: 721134 - RNA, 20 nt, Artificial Sequence
  Synthetic
ggguacaguauauaguacuc

SEQ ID NO: 721135 - RNA, 20 nt, Artificial Sequence
  Synthetic
guucauacaagguuguacuc

SEQ ID NO: 721136 - RNA, 20 nt, Artificial Sequence
  Synthetic
ggguuuuagagggauuacuc

SEQ ID NO: 721137 - RNA, 20 nt, Artificial Sequence
  Synthetic
gccuguaaucccaguuacuc

SEQ ID NO: 721138 - RNA, 20 nt, Artificial Sequence
  Synthetic
ggucucgagcucccaaccuc

SEQ ID NO: 721139 - RNA, 20 nt, Artificial Sequence
  Synthetic
ggggggaaaugcagaaccuc

SEQ ID NO: 721140 - RNA, 20 nt, Artificial Sequence
  Synthetic
gucuggguacauauaaccuc

SEQ ID NO: 721141 - RNA, 20 nt, Artificial Sequence
  Synthetic
ggucucaaacacccgaccuc

SEQ ID NO: 721142 - RNA, 20 nt, Artificial Sequence
  Synthetic
ggucucaaacucccgaccuc

SEQ ID NO: 721143 - RNA, 20 nt, Artificial Sequence
  Synthetic
ggucuuaaacucccgaccuc

SEQ ID NO: 721144 - RNA, 20 nt, Artificial Sequence
  Synthetic
ggucucgaacucccgaccuc

SEQ ID NO: 721145 - RNA, 20 nt, Artificial Sequence
  Synthetic
ggccuugaacuccggaccuc

SEQ ID NO: 721146 - RNA, 20 nt, Artificial Sequence
  Synthetic
ggucucgaaauccugaccuc

SEQ ID NO: 721147 - RNA, 20 nt, Artificial Sequence
  Synthetic
ggucgcaaacuccugaccuc

SEQ ID NO: 721148 - RNA, 20 nt, Artificial Sequence
  Synthetic
ggucucaaacuccugaccuc

SEQ ID NO: 721149 - RNA, 20 nt, Artificial Sequence
  Synthetic
ggucucgaacuccugaccuc

SEQ ID NO: 721150 - RNA, 20 nt, Artificial Sequence
  Synthetic
gguuucgaacuccugaccuc

SEQ ID NO: 721151 - RNA, 20 nt, Artificial Sequence
  Synthetic
ggucuugaacuccugaccuc

SEQ ID NO: 721152 - RNA, 20 nt, Artificial Sequence
  Synthetic
ggucucgagcuccugaccuc

SEQ ID NO: 721153 - RNA, 20 nt, Artificial Sequence
  Synthetic
guucucgagcuccugaccuc

SEQ ID NO: 721154 - RNA, 20 nt, Artificial Sequence
  Synthetic
ggucucgaacuucugaccuc

SEQ ID NO: 721155 - RNA, 20 nt, Artificial Sequence
  Synthetic
ggucuugaacucuugaccuc

SEQ ID NO: 721156 - RNA, 20 nt, Artificial Sequence
  Synthetic
gcucucucuuuuucuaccuc

SEQ ID NO: 721157 - RNA, 20 nt, Artificial Sequence
  Synthetic
ggaucuagauuuuguaccuc

SEQ ID NO: 721158 - RNA, 20 nt, Artificial Sequence
  Synthetic
gagcacuguaacacacccuc

SEQ ID NO: 721159 - RNA, 20 nt, Artificial Sequence
  Synthetic
gaucauugccucccacccuc

SEQ ID NO: 721160 - RNA, 20 nt, Artificial Sequence
  Synthetic
gcaucuggcaggugccccuc

SEQ ID NO: 721161 - RNA, 20 nt, Artificial Sequence
  Synthetic
ggagauaggguagagcccuc

SEQ ID NO: 721162 - RNA, 20 nt, Artificial Sequence
  Synthetic
gccauguagguaauucccuc

SEQ ID NO: 721163 - RNA, 20 nt, Artificial Sequence
  Synthetic
gcagaccaggagauucccuc

SEQ ID NO: 721164 - RNA, 20 nt, Artificial Sequence
  Synthetic
gggucuuccccucuucccuc

SEQ ID NO: 721165 - RNA, 20 nt, Artificial Sequence
  Synthetic
gugaagaaugcagaagccuc

SEQ ID NO: 721166 - RNA, 20 nt, Artificial Sequence
  Synthetic
gccugggugcgggcagccuc

SEQ ID NO: 721167 - RNA, 20 nt, Artificial Sequence
  Synthetic
gauucuccugccucagccuc

SEQ ID NO: 721168 - RNA, 20 nt, Artificial Sequence
  Synthetic
gcuugaacagcuguagccuc

SEQ ID NO: 721169 - RNA, 20 nt, Artificial Sequence
  Synthetic
gaauucuggauguuagccuc

SEQ ID NO: 721170 - RNA, 20 nt, Artificial Sequence
  Synthetic
gggccugagcucuaggccuc

SEQ ID NO: 721171 - RNA, 20 nt, Artificial Sequence
  Synthetic
gaaucaggucacacggccuc

SEQ ID NO: 721172 - RNA, 20 nt, Artificial Sequence
  Synthetic
ggucucgaacuccuggccuc

SEQ ID NO: 721173 - RNA, 20 nt, Artificial Sequence
  Synthetic
guaauguccugcacugccuc

SEQ ID NO: 721174 - RNA, 20 nt, Artificial Sequence
  Synthetic
gcagucccgcagucugccuc

SEQ ID NO: 721175 - RNA, 20 nt, Artificial Sequence
  Synthetic
gccucucagcucagugccuc

SEQ ID NO: 721176 - RNA, 20 nt, Artificial Sequence
  Synthetic
gcaguuuaaagcuuugccuc

SEQ ID NO: 721177 - RNA, 20 nt, Artificial Sequence
  Synthetic
guauaaauauuuucauccuc

SEQ ID NO: 721178 - RNA, 20 nt, Artificial Sequence
  Synthetic
gcucuuaaguuucuauccuc

SEQ ID NO: 721179 - RNA, 20 nt, Artificial Sequence
  Synthetic
gguucacauucaagcuccuc

SEQ ID NO: 721180 - RNA, 20 nt, Artificial Sequence
  Synthetic
gccaauuuguuuggcuccuc

SEQ ID NO: 721181 - RNA, 20 nt, Artificial Sequence
  Synthetic
gugucuuguucucucuccuc

SEQ ID NO: 721182 - RNA, 20 nt, Artificial Sequence
  Synthetic
ggaguccaguuucauuccuc

SEQ ID NO: 721183 - RNA, 20 nt, Artificial Sequence
  Synthetic
gcuggaaugcuccguuccuc

SEQ ID NO: 721184 - RNA, 20 nt, Artificial Sequence
  Synthetic
gauagucuacaacaaagcuc

SEQ ID NO: 721185 - RNA, 20 nt, Artificial Sequence
  Synthetic
gaucucaaacucccaagcuc

SEQ ID NO: 721186 - RNA, 20 nt, Artificial Sequence
  Synthetic
gacaauugagcaggaagcuc

SEQ ID NO: 721187 - RNA, 20 nt, Artificial Sequence
  Synthetic
gauuaagcuuccuuaagcuc

SEQ ID NO: 721188 - RNA, 20 nt, Artificial Sequence
  Synthetic
ggugcuauguguuuaagcuc

SEQ ID NO: 721189 - RNA, 20 nt, Artificial Sequence
  Synthetic
ggucucgaguuccucagcuc

SEQ ID NO: 721190 - RNA, 20 nt, Artificial Sequence
  Synthetic
guggaggaucaccagagcuc

SEQ ID NO: 721191 - RNA, 20 nt, Artificial Sequence
  Synthetic
ggaccaugagacacgagcuc

SEQ ID NO: 721192 - RNA, 20 nt, Artificial Sequence
  Synthetic
gaggaggauugcuugagcuc

SEQ ID NO: 721193 - RNA, 20 nt, Artificial Sequence
  Synthetic
gaaguccaagauaaaggcuc

SEQ ID NO: 721194 - RNA, 20 nt, Artificial Sequence
  Synthetic
gggcugccagcugaaggcuc

SEQ ID NO: 721195 - RNA, 20 nt, Artificial Sequence
  Synthetic
gacugacauugagggggcuc

SEQ ID NO: 721196 - RNA, 20 nt, Artificial Sequence
  Synthetic
gucuuccagcuugggggcuc

SEQ ID NO: 721197 - RNA, 20 nt, Artificial Sequence
  Synthetic
gaugugaaaucuuggggcuc

SEQ ID NO: 721198 - RNA, 20 nt, Artificial Sequence
  Synthetic
ggguuacaagaagcuggcuc

SEQ ID NO: 721199 - RNA, 20 nt, Artificial Sequence
  Synthetic
guuucauuauauuuuggcuc

SEQ ID NO: 721200 - RNA, 20 nt, Artificial Sequence
  Synthetic
gccuguaguccuagaugcuc

SEQ ID NO: 721201 - RNA, 20 nt, Artificial Sequence
  Synthetic
gauaaaaggucaaacugcuc

SEQ ID NO: 721202 - RNA, 20 nt, Artificial Sequence
  Synthetic
gccugugguaccagcugcuc

SEQ ID NO: 721203 - RNA, 20 nt, Artificial Sequence
  Synthetic
gccuguagucccagcugcuc

SEQ ID NO: 721204 - RNA, 20 nt, Artificial Sequence
  Synthetic
gcgaugaaugccuucugcuc

SEQ ID NO: 721205 - RNA, 20 nt, Artificial Sequence
  Synthetic
gcaggcucauuguauugcuc

SEQ ID NO: 721206 - RNA, 20 nt, Artificial Sequence
  Synthetic
gcagggaagagagcuugcuc

SEQ ID NO: 721207 - RNA, 20 nt, Artificial Sequence
  Synthetic
gucccuaucaucucuugcuc

SEQ ID NO: 721208 - RNA, 20 nt, Artificial Sequence
  Synthetic
ggaagacagagacuuugcuc

SEQ ID NO: 721209 - RNA, 20 nt, Artificial Sequence
  Synthetic
guucugagaguugaaaucuc

SEQ ID NO: 721210 - RNA, 20 nt, Artificial Sequence
  Synthetic
gaacagcauauucacaucuc

SEQ ID NO: 721211 - RNA, 20 nt, Artificial Sequence
  Synthetic
gauuguggucaagccaucuc

SEQ ID NO: 721212 - RNA, 20 nt, Artificial Sequence
  Synthetic
gcagagugagacuccaucuc

SEQ ID NO: 721213 - RNA, 20 nt, Artificial Sequence
  Synthetic
gagccuggucuuuucaucuc

SEQ ID NO: 721214 - RNA, 20 nt, Artificial Sequence
  Synthetic
gucaggaaacauaagaucuc

SEQ ID NO: 721215 - RNA, 20 nt, Artificial Sequence
  Synthetic
gccaggauggucuugaucuc

SEQ ID NO: 721216 - RNA, 20 nt, Artificial Sequence
  Synthetic
gagccccuccauccuaucuc

SEQ ID NO: 721217 - RNA, 20 nt, Artificial Sequence
  Synthetic
gaauugcuugucaguaucuc

SEQ ID NO: 721218 - RNA, 20 nt, Artificial Sequence
  Synthetic
gcuggggugaagaguaucuc

SEQ ID NO: 721219 - RNA, 20 nt, Artificial Sequence
  Synthetic
gacaugaugauaauuaucuc

SEQ ID NO: 721220 - RNA, 20 nt, Artificial Sequence
  Synthetic
gcuggggaggagauuaucuc

SEQ ID NO: 721221 - RNA, 20 nt, Artificial Sequence
  Synthetic
gagauuucccguauacucuc

SEQ ID NO: 721222 - RNA, 20 nt, Artificial Sequence
  Synthetic
guuacuaucauucuacucuc

SEQ ID NO: 721223 - RNA, 20 nt, Artificial Sequence
  Synthetic
gaaagaggucauaagcucuc

SEQ ID NO: 721224 - RNA, 20 nt, Artificial Sequence
  Synthetic
guuaaucaggagcugcucuc

SEQ ID NO: 721225 - RNA, 20 nt, Artificial Sequence
  Synthetic
gcagcauuucaguugcucuc

SEQ ID NO: 721226 - RNA, 20 nt, Artificial Sequence
  Synthetic
gugacauuaucuuugcucuc

SEQ ID NO: 721227 - RNA, 20 nt, Artificial Sequence
  Synthetic
guuaauuaguugcaucucuc

SEQ ID NO: 721228 - RNA, 20 nt, Artificial Sequence
  Synthetic
guugucuuucuugcucucuc

SEQ ID NO: 721229 - RNA, 20 nt, Artificial Sequence
  Synthetic
gagccaugcuagugucucuc

SEQ ID NO: 721230 - RNA, 20 nt, Artificial Sequence
  Synthetic
gguaacucgaccuuucucuc

SEQ ID NO: 721231 - RNA, 20 nt, Artificial Sequence
  Synthetic
gguagccugaccuuucucuc

SEQ ID NO: 721232 - RNA, 20 nt, Artificial Sequence
  Synthetic
gguaacccagccuuucucuc

SEQ ID NO: 721233 - RNA, 20 nt, Artificial Sequence
  Synthetic
gugcugcuuuguggagucuc

SEQ ID NO: 721234 - RNA, 20 nt, Artificial Sequence
  Synthetic
gguuucagugguagggucuc

SEQ ID NO: 721235 - RNA, 20 nt, Artificial Sequence
  Synthetic
gcuacucaaaguguggucuc

SEQ ID NO: 721236 - RNA, 20 nt, Artificial Sequence
  Synthetic
gucuguuuucuggcugucuc

SEQ ID NO: 721237 - RNA, 20 nt, Artificial Sequence
  Synthetic
guucuccaaaauucugucuc

SEQ ID NO: 721238 - RNA, 20 nt, Artificial Sequence
  Synthetic
guguagucuuaccuugucuc

SEQ ID NO: 721239 - RNA, 20 nt, Artificial Sequence
  Synthetic
gaaaggugcagucaauucuc

SEQ ID NO: 721240 - RNA, 20 nt, Artificial Sequence
  Synthetic
gaaauuugaaacgcauucuc

SEQ ID NO: 721241 - RNA, 20 nt, Artificial Sequence
  Synthetic
gggaauucucugugauucuc

SEQ ID NO: 721242 - RNA, 20 nt, Artificial Sequence
  Synthetic
gaggauagagauugauucuc

SEQ ID NO: 721243 - RNA, 20 nt, Artificial Sequence
  Synthetic
guguuugcugguauauucuc

SEQ ID NO: 721244 - RNA, 20 nt, Artificial Sequence
  Synthetic
gugacuuauuuuauauucuc

SEQ ID NO: 721245 - RNA, 20 nt, Artificial Sequence
  Synthetic
gcugagacacagcuauucuc

SEQ ID NO: 721246 - RNA, 20 nt, Artificial Sequence
  Synthetic
gauaaauuuucuguauucuc

SEQ ID NO: 721247 - RNA, 20 nt, Artificial Sequence
  Synthetic
gaaugugagagaaacuucuc

SEQ ID NO: 721248 - RNA, 20 nt, Artificial Sequence
  Synthetic
guguuacagguuggguucuc

SEQ ID NO: 721249 - RNA, 20 nt, Artificial Sequence
  Synthetic
gggauauggggaguguucuc

SEQ ID NO: 721250 - RNA, 20 nt, Artificial Sequence
  Synthetic
guacuaaacaaauuguucuc

SEQ ID NO: 721251 - RNA, 20 nt, Artificial Sequence
  Synthetic
gccaaauuuccauauuucuc

SEQ ID NO: 721252 - RNA, 20 nt, Artificial Sequence
  Synthetic
ggcauucuuaucuauuucuc

SEQ ID NO: 721253 - RNA, 20 nt, Artificial Sequence
  Synthetic
gaguauuuccuugcuuucuc

SEQ ID NO: 721254 - RNA, 20 nt, Artificial Sequence
  Synthetic
gucacaaaauuggaaaaguc

SEQ ID NO: 721255 - RNA, 20 nt, Artificial Sequence
  Synthetic
ggugggcggaucacaaaguc

SEQ ID NO: 721256 - RNA, 20 nt, Artificial Sequence
  Synthetic
gguuauauagcuagaaaguc

SEQ ID NO: 721257 - RNA, 20 nt, Artificial Sequence
  Synthetic
ggaaggucaggucuaaaguc

SEQ ID NO: 721258 - RNA, 20 nt, Artificial Sequence
  Synthetic
ggaaggauauguuuaaaguc

SEQ ID NO: 721259 - RNA, 20 nt, Artificial Sequence
  Synthetic
guucucagugucaccaaguc

SEQ ID NO: 721260 - RNA, 20 nt, Artificial Sequence
  Synthetic
gagaauuuucaugugaaguc

SEQ ID NO: 721261 - RNA, 20 nt, Artificial Sequence
  Synthetic
gaaacaauggcaaguaaguc

SEQ ID NO: 721262 - RNA, 20 nt, Artificial Sequence
  Synthetic
gaauguauaaugauuaaguc

SEQ ID NO: 721263 - RNA, 20 nt, Artificial Sequence
  Synthetic
ggcuaguguccaaaacaguc

SEQ ID NO: 721264 - RNA, 20 nt, Artificial Sequence
  Synthetic
guaucaucuggaaaacaguc

SEQ ID NO: 721265 - RNA, 20 nt, Artificial Sequence
  Synthetic
gaugacagcaaaagacaguc

SEQ ID NO: 721266 - RNA, 20 nt, Artificial Sequence
  Synthetic
gaaaggcagcagccccaguc

SEQ ID NO: 721267 - RNA, 20 nt, Artificial Sequence
  Synthetic
gucccaguuugaaggcaguc

SEQ ID NO: 721268 - RNA, 20 nt, Artificial Sequence
  Synthetic
gguaaaccugagaggcaguc

SEQ ID NO: 721269 - RNA, 20 nt, Artificial Sequence
  Synthetic
gagacagcagcacugcaguc

SEQ ID NO: 721270 - RNA, 20 nt, Artificial Sequence
  Synthetic
ggauucccaauuaaucaguc

SEQ ID NO: 721271 - RNA, 20 nt, Artificial Sequence
  Synthetic
gcagugacccuaccucaguc

SEQ ID NO: 721272 - RNA, 20 nt, Artificial Sequence
  Synthetic
ggcaaauuggauaaagaguc

SEQ ID NO: 721273 - RNA, 20 nt, Artificial Sequence
  Synthetic
ggagggcagcacugagaguc

SEQ ID NO: 721274 - RNA, 20 nt, Artificial Sequence
  Synthetic
gucaauauauuuauagaguc

SEQ ID NO: 721275 - RNA, 20 nt, Artificial Sequence
  Synthetic
gaaauaauacccuuagaguc

SEQ ID NO: 721276 - RNA, 20 nt, Artificial Sequence
  Synthetic
ggaaggauaguggaggaguc

SEQ ID NO: 721277 - RNA, 20 nt, Artificial Sequence
  Synthetic
gggguuucaccauguuaguc

SEQ ID NO: 721278 - RNA, 20 nt, Artificial Sequence
  Synthetic
gauuguguaauggucacguc

SEQ ID NO: 721279 - RNA, 20 nt, Artificial Sequence
  Synthetic
gguuaaaaugggaaaagguc

SEQ ID NO: 721280 - RNA, 20 nt, Artificial Sequence
  Synthetic
ggcagccagagagaaagguc

SEQ ID NO: 721281 - RNA, 20 nt, Artificial Sequence
  Synthetic
ggcgggcagaucacaagguc

SEQ ID NO: 721282 - RNA, 20 nt, Artificial Sequence
  Synthetic
ggcggguggaucacaagguc

SEQ ID NO: 721283 - RNA, 20 nt, Artificial Sequence
  Synthetic
gcucuaagaaaaggaagguc

SEQ ID NO: 721284 - RNA, 20 nt, Artificial Sequence
  Synthetic
gguggcgguugcugaagguc

SEQ ID NO: 721285 - RNA, 20 nt, Artificial Sequence
  Synthetic
ggcgggcggaucauaagguc

SEQ ID NO: 721286 - RNA, 20 nt, Artificial Sequence
  Synthetic
ggcauauauacucacagguc

SEQ ID NO: 721287 - RNA, 20 nt, Artificial Sequence
  Synthetic
gaaaucaggcugcccagguc

SEQ ID NO: 721288 - RNA, 20 nt, Artificial Sequence
  Synthetic
gguuuggaagaaaagagguc

SEQ ID NO: 721289 - RNA, 20 nt, Artificial Sequence
  Synthetic
gccaacuggcacaagagguc

SEQ ID NO: 721290 - RNA, 20 nt, Artificial Sequence
  Synthetic
gcuugcagugagcagagguc

SEQ ID NO: 721291 - RNA, 20 nt, Artificial Sequence
  Synthetic
ggcaggcagaucacgagguc

SEQ ID NO: 721292 - RNA, 20 nt, Artificial Sequence
  Synthetic
ggcgggcagaucacgagguc

SEQ ID NO: 721293 - RNA, 20 nt, Artificial Sequence
  Synthetic
ggugggcagaucacgagguc

SEQ ID NO: 721294 - RNA, 20 nt, Artificial Sequence
  Synthetic
ggcagaaggaucacgagguc

SEQ ID NO: 721295 - RNA, 20 nt, Artificial Sequence
  Synthetic
ggcaggcggaucacgagguc

SEQ ID NO: 721296 - RNA, 20 nt, Artificial Sequence
  Synthetic
gacgggcggaucacgagguc

SEQ ID NO: 721297 - RNA, 20 nt, Artificial Sequence
  Synthetic
ggcgggcggaucacgagguc

SEQ ID NO: 721298 - RNA, 20 nt, Artificial Sequence
  Synthetic
ggugggcggaucacgagguc

SEQ ID NO: 721299 - RNA, 20 nt, Artificial Sequence
  Synthetic
ggcagguggaucacgagguc

SEQ ID NO: 721300 - RNA, 20 nt, Artificial Sequence
  Synthetic
ggcggguggaucacgagguc

SEQ ID NO: 721301 - RNA, 20 nt, Artificial Sequence
  Synthetic
gguggguggaucacgagguc

SEQ ID NO: 721302 - RNA, 20 nt, Artificial Sequence
  Synthetic
ggcaguuggaucacgagguc

SEQ ID NO: 721303 - RNA, 20 nt, Artificial Sequence
  Synthetic
ggcgggcugaucacgagguc

SEQ ID NO: 721304 - RNA, 20 nt, Artificial Sequence
  Synthetic
ggugagcagaucaugagguc

SEQ ID NO: 721305 - RNA, 20 nt, Artificial Sequence
  Synthetic
ggcaggcagaucaugagguc

SEQ ID NO: 721306 - RNA, 20 nt, Artificial Sequence
  Synthetic
ggcgggcagaucaugagguc

SEQ ID NO: 721307 - RNA, 20 nt, Artificial Sequence
  Synthetic
ggugggcagaucaugagguc

SEQ ID NO: 721308 - RNA, 20 nt, Artificial Sequence
  Synthetic
ggcaggcggaucaugagguc

SEQ ID NO: 721309 - RNA, 20 nt, Artificial Sequence
  Synthetic
ggcagguggaucaugagguc

SEQ ID NO: 721310 - RNA, 20 nt, Artificial Sequence
  Synthetic
gguggguggaucaugagguc

SEQ ID NO: 721311 - RNA, 20 nt, Artificial Sequence
  Synthetic
gacgggcagauuaugagguc

SEQ ID NO: 721312 - RNA, 20 nt, Artificial Sequence
  Synthetic
gugguagaacaccugagguc

SEQ ID NO: 721313 - RNA, 20 nt, Artificial Sequence
  Synthetic
ugggcggaucaccugagguc

SEQ ID NO: 721314 - RNA, 20 nt, Artificial Sequence
  Synthetic
gcgauggaucaccugagguc

SEQ ID NO: 721315 - RNA, 20 nt, Artificial Sequence
  Synthetic
guacuuggaaugcugagguc

SEQ ID NO: 721316 - RNA, 20 nt, Artificial Sequence
  Synthetic
gaagaggguuaugugagguc

SEQ ID NO: 721317 - RNA, 20 nt, Artificial Sequence
  Synthetic
gucucagugacauauagguc

SEQ ID NO: 721318 - RNA, 20 nt, Artificial Sequence
  Synthetic
ggcagguggaucacuagguc

SEQ ID NO: 721319 - RNA, 20 nt, Artificial Sequence
  Synthetic
gucaguccaggagcuagguc

SEQ ID NO: 721320 - RNA, 20 nt, Artificial Sequence
  Synthetic
guuccacagaucucuagguc

SEQ ID NO: 721321 - RNA, 20 nt, Artificial Sequence
  Synthetic
gcgaguuccacaaagggguc

SEQ ID NO: 721322 - RNA, 20 nt, Artificial Sequence
  Synthetic
gaagauuaacaagcuggguc

SEQ ID NO: 721323 - RNA, 20 nt, Artificial Sequence
  Synthetic
ggauauuaaagcauuggguc

SEQ ID NO: 721324 - RNA, 20 nt, Artificial Sequence
  Synthetic
gguuuuaguuauguuggguc

SEQ ID NO: 721325 - RNA, 20 nt, Artificial Sequence
  Synthetic
gagguugggaaacacugguc

SEQ ID NO: 721326 - RNA, 20 nt, Artificial Sequence
  Synthetic
gacaguugaagauacugguc

SEQ ID NO: 721327 - RNA, 20 nt, Artificial Sequence
  Synthetic
gagccauuauaauucugguc

SEQ ID NO: 721328 - RNA, 20 nt, Artificial Sequence
  Synthetic
guauuuccuuaaaugugguc

SEQ ID NO: 721329 - RNA, 20 nt, Artificial Sequence
  Synthetic
ggaaguuuuauuucuugguc

SEQ ID NO: 721330 - RNA, 20 nt, Artificial Sequence
  Synthetic
gggacuucaccauguugguc

SEQ ID NO: 721331 - RNA, 20 nt, Artificial Sequence
  Synthetic
gagauuucaccauguugguc

SEQ ID NO: 721332 - RNA, 20 nt, Artificial Sequence
  Synthetic
gggguuucaccauguugguc

SEQ ID NO: 721333 - RNA, 20 nt, Artificial Sequence
  Synthetic
gggguuucgccauguugguc

SEQ ID NO: 721334 - RNA, 20 nt, Artificial Sequence
  Synthetic
gggguuucuccauguugguc

SEQ ID NO: 721335 - RNA, 20 nt, Artificial Sequence
  Synthetic
gggguuucaucauguugguc

SEQ ID NO: 721336 - RNA, 20 nt, Artificial Sequence
  Synthetic
ggugauaaggugauuugguc

SEQ ID NO: 721337 - RNA, 20 nt, Artificial Sequence
  Synthetic
gggagauaaggaacaauguc

SEQ ID NO: 721338 - RNA, 20 nt, Artificial Sequence
  Synthetic
gcauucugccaaggaauguc

SEQ ID NO: 721339 - RNA, 20 nt, Artificial Sequence
  Synthetic
gguuccuaaaauauaauguc

SEQ ID NO: 721340 - RNA, 20 nt, Artificial Sequence
  Synthetic
gauugcacaugacacauguc

SEQ ID NO: 721341 - RNA, 20 nt, Artificial Sequence
  Synthetic
gagaaaugaauguggauguc

SEQ ID NO: 721342 - RNA, 20 nt, Artificial Sequence
  Synthetic
ggcgggcggaucaugauguc

SEQ ID NO: 721343 - RNA, 20 nt, Artificial Sequence
  Synthetic
gacuugguauucaauauguc

SEQ ID NO: 721344 - RNA, 20 nt, Artificial Sequence
  Synthetic
gcccugaguugagcacuguc

SEQ ID NO: 721345 - RNA, 20 nt, Artificial Sequence
  Synthetic
gguccugguccaggacuguc

SEQ ID NO: 721346 - RNA, 20 nt, Artificial Sequence
  Synthetic
guuuuccuaaccuaccuguc

SEQ ID NO: 721347 - RNA, 20 nt, Artificial Sequence
  Synthetic
gcagguguuauuucucuguc

SEQ ID NO: 721348 - RNA, 20 nt, Artificial Sequence
  Synthetic
gugaucuuacauugucuguc

SEQ ID NO: 721349 - RNA, 20 nt, Artificial Sequence
  Synthetic
guccuucagggaacaguguc

SEQ ID NO: 721350 - RNA, 20 nt, Artificial Sequence
  Synthetic
ggugcuuagaaguuaguguc

SEQ ID NO: 721351 - RNA, 20 nt, Artificial Sequence
  Synthetic
ggaaaaggaguucagguguc

SEQ ID NO: 721352 - RNA, 20 nt, Artificial Sequence
  Synthetic
gcacuggcagguuugguguc

SEQ ID NO: 721353 - RNA, 20 nt, Artificial Sequence
  Synthetic
guuucuaccucagauguguc

SEQ ID NO: 721354 - RNA, 20 nt, Artificial Sequence
  Synthetic
gccucagccuccaguguguc

SEQ ID NO: 721355 - RNA, 20 nt, Artificial Sequence
  Synthetic
gguuuugaaguuacauuguc

SEQ ID NO: 721356 - RNA, 20 nt, Artificial Sequence
  Synthetic
guaaagaaacuugccuuguc

SEQ ID NO: 721357 - RNA, 20 nt, Artificial Sequence
  Synthetic
gagcagccccaugcuuuguc

SEQ ID NO: 721358 - RNA, 20 nt, Artificial Sequence
  Synthetic
gacagugaaucuucuuuguc

SEQ ID NO: 721359 - RNA, 20 nt, Artificial Sequence
  Synthetic
gaggaaugaauaaguuuguc

SEQ ID NO: 721360 - RNA, 20 nt, Artificial Sequence
  Synthetic
gagcuuguucuacuuuuguc

SEQ ID NO: 721361 - RNA, 20 nt, Artificial Sequence
  Synthetic
gagaaaaugagauuuuuguc

SEQ ID NO: 721362 - RNA, 20 nt, Artificial Sequence
  Synthetic
gauaaacuaccucaaaauuc

SEQ ID NO: 721363 - RNA, 20 nt, Artificial Sequence
  Synthetic
guauguaucugauaaaauuc

SEQ ID NO: 721364 - RNA, 20 nt, Artificial Sequence
  Synthetic
gcugugugagucugaaauuc

SEQ ID NO: 721365 - RNA, 20 nt, Artificial Sequence
  Synthetic
gugauucuagauugaaauuc

SEQ ID NO: 721366 - RNA, 20 nt, Artificial Sequence
  Synthetic
gaaauguauaauugcaauuc

SEQ ID NO: 721367 - RNA, 20 nt, Artificial Sequence
  Synthetic
gguuucuggacucucaauuc

SEQ ID NO: 721368 - RNA, 20 nt, Artificial Sequence
  Synthetic
ggccacuuggauuucaauuc

SEQ ID NO: 721369 - RNA, 20 nt, Artificial Sequence
  Synthetic
guuaggaaaauugagaauuc

SEQ ID NO: 721370 - RNA, 20 nt, Artificial Sequence
  Synthetic
gcagggaaaauacggaauuc

SEQ ID NO: 721371 - RNA, 20 nt, Artificial Sequence
  Synthetic
guucuaaguacuuggaauuc

SEQ ID NO: 721372 - RNA, 20 nt, Artificial Sequence
  Synthetic
guggaggcaggguugaauuc

SEQ ID NO: 721373 - RNA, 20 nt, Artificial Sequence
  Synthetic
gacccuggaacacauaauuc

SEQ ID NO: 721374 - RNA, 20 nt, Artificial Sequence
  Synthetic
gggcuggcuguuuuuaauuc

SEQ ID NO: 721375 - RNA, 20 nt, Artificial Sequence
  Synthetic
gagucuugucucuaacauuc

SEQ ID NO: 721376 - RNA, 20 nt, Artificial Sequence
  Synthetic
guucucuuuucuccacauuc

SEQ ID NO: 721377 - RNA, 20 nt, Artificial Sequence
  Synthetic
gaaauugaaauaagacauuc

SEQ ID NO: 721378 - RNA, 20 nt, Artificial Sequence
  Synthetic
gggagggagagggcccauuc

SEQ ID NO: 721379 - RNA, 20 nt, Artificial Sequence
  Synthetic
guuggcuuaaugagccauuc

SEQ ID NO: 721380 - RNA, 20 nt, Artificial Sequence
  Synthetic
gagcaagcauucauccauuc

SEQ ID NO: 721381 - RNA, 20 nt, Artificial Sequence
  Synthetic
guucaugaaaaucuccauuc

SEQ ID NO: 721382 - RNA, 20 nt, Artificial Sequence
  Synthetic
gauguaggggcaaagcauuc

SEQ ID NO: 721383 - RNA, 20 nt, Artificial Sequence
  Synthetic
gggagauggggggagcauuc

SEQ ID NO: 721384 - RNA, 20 nt, Artificial Sequence
  Synthetic
gcucagcuauucuaucauuc

SEQ ID NO: 721385 - RNA, 20 nt, Artificial Sequence
  Synthetic
gaacaaaaccaugcucauuc

SEQ ID NO: 721386 - RNA, 20 nt, Artificial Sequence
  Synthetic
gcaaagacauacagucauuc

SEQ ID NO: 721387 - RNA, 20 nt, Artificial Sequence
  Synthetic
gacuaaauaauaauucauuc

SEQ ID NO: 721388 - RNA, 20 nt, Artificial Sequence
  Synthetic
gagaacuuguuucuucauuc

SEQ ID NO: 721389 - RNA, 20 nt, Artificial Sequence
  Synthetic
gcaggccaacguucagauuc

SEQ ID NO: 721390 - RNA, 20 nt, Artificial Sequence
  Synthetic
gacgcaaaucucuaugauuc

SEQ ID NO: 721391 - RNA, 20 nt, Artificial Sequence
  Synthetic
guuauucuuaccucauauuc

SEQ ID NO: 721392 - RNA, 20 nt, Artificial Sequence
  Synthetic
gucugaaauguuucauauuc

SEQ ID NO: 721393 - RNA, 20 nt, Artificial Sequence
  Synthetic
gaaaauuaacaaggauauuc

SEQ ID NO: 721394 - RNA, 20 nt, Artificial Sequence
  Synthetic
gccaaagaaggcugauauuc

SEQ ID NO: 721395 - RNA, 20 nt, Artificial Sequence
  Synthetic
gcugacuuuucuauauauuc

SEQ ID NO: 721396 - RNA, 20 nt, Artificial Sequence
  Synthetic
gggaguucagaauuauauuc

SEQ ID NO: 721397 - RNA, 20 nt, Artificial Sequence
  Synthetic
gauaagauaaggaacuauuc

SEQ ID NO: 721398 - RNA, 20 nt, Artificial Sequence
  Synthetic
ggcacuagagaauacuauuc

SEQ ID NO: 721399 - RNA, 20 nt, Artificial Sequence
  Synthetic
gggagacaguugagcuauuc

SEQ ID NO: 721400 - RNA, 20 nt, Artificial Sequence
  Synthetic
gaauuuuuaaaaaaguauuc

SEQ ID NO: 721401 - RNA, 20 nt, Artificial Sequence
  Synthetic
guaaaguuguagaaguauuc

SEQ ID NO: 721402 - RNA, 20 nt, Artificial Sequence
  Synthetic
gucuuguaccaucuguauuc

SEQ ID NO: 721403 - RNA, 20 nt, Artificial Sequence
  Synthetic
gucaaggguuuauauuauuc

SEQ ID NO: 721404 - RNA, 20 nt, Artificial Sequence
  Synthetic
guuguaguaugcaguuauuc

SEQ ID NO: 721405 - RNA, 20 nt, Artificial Sequence
  Synthetic
gcugaagaacagaaaacuuc

SEQ ID NO: 721406 - RNA, 20 nt, Artificial Sequence
  Synthetic
ggggcugccaugaaaacuuc

SEQ ID NO: 721407 - RNA, 20 nt, Artificial Sequence
  Synthetic
ggaagaggcaggagaacuuc

SEQ ID NO: 721408 - RNA, 20 nt, Artificial Sequence
  Synthetic
gucuuuguauccauaacuuc

SEQ ID NO: 721409 - RNA, 20 nt, Artificial Sequence
  Synthetic
ggauccagcaaucccacuuc

SEQ ID NO: 721410 - RNA, 20 nt, Artificial Sequence
  Synthetic
gccuguaaucccagcacuuc

SEQ ID NO: 721411 - RNA, 20 nt, Artificial Sequence
  Synthetic
gaagaauccggcuggacuuc

SEQ ID NO: 721412 - RNA, 20 nt, Artificial Sequence
  Synthetic
gugucuggguacaugacuuc

SEQ ID NO: 721413 - RNA, 20 nt, Artificial Sequence
  Synthetic
ggucucgaacuccugacuuc

SEQ ID NO: 721414 - RNA, 20 nt, Artificial Sequence
  Synthetic
gaaccucuuucugugacuuc

SEQ ID NO: 721415 - RNA, 20 nt, Artificial Sequence
  Synthetic
ggucucaaacucuugacuuc

SEQ ID NO: 721416 - RNA, 20 nt, Artificial Sequence
  Synthetic
gugacuguacugaauacuuc

SEQ ID NO: 721417 - RNA, 20 nt, Artificial Sequence
  Synthetic
gcuggaucaaaugguacuuc

SEQ ID NO: 721418 - RNA, 20 nt, Artificial Sequence
  Synthetic
ggccauucaguuacaccuuc

SEQ ID NO: 721419 - RNA, 20 nt, Artificial Sequence
  Synthetic
gaugugauugcuuccccuuc

SEQ ID NO: 721420 - RNA, 20 nt, Artificial Sequence
  Synthetic
gagccuuucuucaugccuuc

SEQ ID NO: 721421 - RNA, 20 nt, Artificial Sequence
  Synthetic
guaaaaggcacaacuccuuc

SEQ ID NO: 721422 - RNA, 20 nt, Artificial Sequence
  Synthetic
gacaacucccucccuccuuc

SEQ ID NO: 721423 - RNA, 20 nt, Artificial Sequence
  Synthetic
guugauucucuaguuccuuc

SEQ ID NO: 721424 - RNA, 20 nt, Artificial Sequence
  Synthetic
gccucccaacuaccagcuuc

SEQ ID NO: 721425 - RNA, 20 nt, Artificial Sequence
  Synthetic
gaagggggauccugagcuuc

SEQ ID NO: 721426 - RNA, 20 nt, Artificial Sequence
  Synthetic
gacagaguccagugagcuuc

SEQ ID NO: 721427 - RNA, 20 nt, Artificial Sequence
  Synthetic
gaaccuuuuccucuagcuuc

SEQ ID NO: 721428 - RNA, 20 nt, Artificial Sequence
  Synthetic
gccuguaaucucagcgcuuc

SEQ ID NO: 721429 - RNA, 20 nt, Artificial Sequence
  Synthetic
guggguucugaaacggcuuc

SEQ ID NO: 721430 - RNA, 20 nt, Artificial Sequence
  Synthetic
ggaaaaaugagaaaaucuuc

SEQ ID NO: 721431 - RNA, 20 nt, Artificial Sequence
  Synthetic
gaguaauauauuugaucuuc

SEQ ID NO: 721432 - RNA, 20 nt, Artificial Sequence
  Synthetic
gcauuaucuuaucuaucuuc

SEQ ID NO: 721433 - RNA, 20 nt, Artificial Sequence
  Synthetic
guuagcaaagcuuuaucuuc

SEQ ID NO: 721434 - RNA, 20 nt, Artificial Sequence
  Synthetic
guguuagagcugaacucuuc

SEQ ID NO: 721435 - RNA, 20 nt, Artificial Sequence
  Synthetic
gagaaggggaaagacucuuc

SEQ ID NO: 721436 - RNA, 20 nt, Artificial Sequence
  Synthetic
guaaugacagcuaccucuuc

SEQ ID NO: 721437 - RNA, 20 nt, Artificial Sequence
  Synthetic
gcuaucuggauauccucuuc

SEQ ID NO: 721438 - RNA, 20 nt, Artificial Sequence
  Synthetic
guaaauaaugcaagcucuuc

SEQ ID NO: 721439 - RNA, 20 nt, Artificial Sequence
  Synthetic
gaaugccuacggugcucuuc

SEQ ID NO: 721440 - RNA, 20 nt, Artificial Sequence
  Synthetic
ggcaucuucaauaggucuuc

SEQ ID NO: 721441 - RNA, 20 nt, Artificial Sequence
  Synthetic
ggaaauuuagcacauucuuc

SEQ ID NO: 721442 - RNA, 20 nt, Artificial Sequence
  Synthetic
gcacccuuugacccuucuuc

SEQ ID NO: 721443 - RNA, 20 nt, Artificial Sequence
  Synthetic
ggauccagagcuccuucuuc

SEQ ID NO: 721444 - RNA, 20 nt, Artificial Sequence
  Synthetic
gcuuaaguuuuuccuucuuc

SEQ ID NO: 721445 - RNA, 20 nt, Artificial Sequence
  Synthetic
ggaaaaggcuagauuucuuc

SEQ ID NO: 721446 - RNA, 20 nt, Artificial Sequence
  Synthetic
guagagcaaauucuuucuuc

SEQ ID NO: 721447 - RNA, 20 nt, Artificial Sequence
  Synthetic
gacugggcaguugaaaguuc

SEQ ID NO: 721448 - RNA, 20 nt, Artificial Sequence
  Synthetic
ggaagaauuauaccaaguuc

SEQ ID NO: 721449 - RNA, 20 nt, Artificial Sequence
  Synthetic
gaguaaucccaaagaaguuc

SEQ ID NO: 721450 - RNA, 20 nt, Artificial Sequence
  Synthetic
gaaaggaagggaggaaguuc

SEQ ID NO: 721451 - RNA, 20 nt, Artificial Sequence
  Synthetic
guuuuuuaaauuuuaaguuc

SEQ ID NO: 721452 - RNA, 20 nt, Artificial Sequence
  Synthetic
gcuuuagccucccacaguuc

SEQ ID NO: 721453 - RNA, 20 nt, Artificial Sequence
  Synthetic
gguggcagaaaguacaguuc

SEQ ID NO: 721454 - RNA, 20 nt, Artificial Sequence
  Synthetic
gcauuugaagaaaucaguuc

SEQ ID NO: 721455 - RNA, 20 nt, Artificial Sequence
  Synthetic
gcaugguagccccggaguuc

SEQ ID NO: 721456 - RNA, 20 nt, Artificial Sequence
  Synthetic
guucaaguccucuugaguuc

SEQ ID NO: 721457 - RNA, 20 nt, Artificial Sequence
  Synthetic
gauuuguuggcucauaguuc

SEQ ID NO: 721458 - RNA, 20 nt, Artificial Sequence
  Synthetic
gaauuuauugcuuauaguuc

SEQ ID NO: 721459 - RNA, 20 nt, Artificial Sequence
  Synthetic
guaauuuucuuuuuacguuc

SEQ ID NO: 721460 - RNA, 20 nt, Artificial Sequence
  Synthetic
ggaucacugcagccagguuc

SEQ ID NO: 721461 - RNA, 20 nt, Artificial Sequence
  Synthetic
gcaguuguuuuucacgguuc

SEQ ID NO: 721462 - RNA, 20 nt, Artificial Sequence
  Synthetic
guucccaugcacuaggguuc

SEQ ID NO: 721463 - RNA, 20 nt, Artificial Sequence
  Synthetic
gaaauuugaguuugggguuc

SEQ ID NO: 721464 - RNA, 20 nt, Artificial Sequence
  Synthetic
gcuuuaucaaagaaugguuc

SEQ ID NO: 721465 - RNA, 20 nt, Artificial Sequence
  Synthetic
ggaaauaaguguaaugguuc

SEQ ID NO: 721466 - RNA, 20 nt, Artificial Sequence
  Synthetic
ggaggcuauuccagugguuc

SEQ ID NO: 721467 - RNA, 20 nt, Artificial Sequence
  Synthetic
ggggcucuuccucgugguuc

SEQ ID NO: 721468 - RNA, 20 nt, Artificial Sequence
  Synthetic
gguucauggacauuugguuc

SEQ ID NO: 721469 - RNA, 20 nt, Artificial Sequence
  Synthetic
gcuggcuuagagacauguuc

SEQ ID NO: 721470 - RNA, 20 nt, Artificial Sequence
  Synthetic
gauccagaggguacauguuc

SEQ ID NO: 721471 - RNA, 20 nt, Artificial Sequence
  Synthetic
gauaaauauuagguauguuc

SEQ ID NO: 721472 - RNA, 20 nt, Artificial Sequence
  Synthetic
gcccuaaacuuacacuguuc

SEQ ID NO: 721473 - RNA, 20 nt, Artificial Sequence
  Synthetic
ggacacucucaaaaguguuc

SEQ ID NO: 721474 - RNA, 20 nt, Artificial Sequence
  Synthetic
ggcuuuagaaaagauuguuc

SEQ ID NO: 721475 - RNA, 20 nt, Artificial Sequence
  Synthetic
gcucucaugccccuuuguuc

SEQ ID NO: 721476 - RNA, 20 nt, Artificial Sequence
  Synthetic
ggguguucuguaguuuguuc

SEQ ID NO: 721477 - RNA, 20 nt, Artificial Sequence
  Synthetic
gaaauucuuaguuuuuguuc

SEQ ID NO: 721478 - RNA, 20 nt, Artificial Sequence
  Synthetic
gagaaugcguuucaaauuuc

SEQ ID NO: 721479 - RNA, 20 nt, Artificial Sequence
  Synthetic
gaaaauuuaaaguaaauuuc

SEQ ID NO: 721480 - RNA, 20 nt, Artificial Sequence
  Synthetic
guaacauuuacuuaaauuuc

SEQ ID NO: 721481 - RNA, 20 nt, Artificial Sequence
  Synthetic
ggugagaaauacucaauuuc

SEQ ID NO: 721482 - RNA, 20 nt, Artificial Sequence
  Synthetic
gucuacugaaucagaauuuc

SEQ ID NO: 721483 - RNA, 20 nt, Artificial Sequence
  Synthetic
gacuaacacaaaauaauuuc

SEQ ID NO: 721484 - RNA, 20 nt, Artificial Sequence
  Synthetic
gaggauuuuguuauaauuuc

SEQ ID NO: 721485 - RNA, 20 nt, Artificial Sequence
  Synthetic
guugcugaugguuuaauuuc

SEQ ID NO: 721486 - RNA, 20 nt, Artificial Sequence
  Synthetic
gacucuacauaucccauuuc

SEQ ID NO: 721487 - RNA, 20 nt, Artificial Sequence
  Synthetic
gcaggagaaggggagauuuc

SEQ ID NO: 721488 - RNA, 20 nt, Artificial Sequence
  Synthetic
guggggccaacaaggauuuc

SEQ ID NO: 721489 - RNA, 20 nt, Artificial Sequence
  Synthetic
guacccagaagugggauuuc

SEQ ID NO: 721490 - RNA, 20 nt, Artificial Sequence
  Synthetic
guaggcuauugcaauauuuc

SEQ ID NO: 721491 - RNA, 20 nt, Artificial Sequence
  Synthetic
gaagagacuguccauauuuc

SEQ ID NO: 721492 - RNA, 20 nt, Artificial Sequence
  Synthetic
gucaaacaaauuuauauuuc

SEQ ID NO: 721493 - RNA, 20 nt, Artificial Sequence
  Synthetic
gagcuacaaaaagcuauuuc

SEQ ID NO: 721494 - RNA, 20 nt, Artificial Sequence
  Synthetic
gcugggucaaaugguauuuc

SEQ ID NO: 721495 - RNA, 20 nt, Artificial Sequence
  Synthetic
gcugaguuaaaugguauuuc

SEQ ID NO: 721496 - RNA, 20 nt, Artificial Sequence
  Synthetic
gugucugucagccuuauuuc

SEQ ID NO: 721497 - RNA, 20 nt, Artificial Sequence
  Synthetic
ggccuucuaucucuuauuuc

SEQ ID NO: 721498 - RNA, 20 nt, Artificial Sequence
  Synthetic
guguguguauaauuuauuuc

SEQ ID NO: 721499 - RNA, 20 nt, Artificial Sequence
  Synthetic
gggcauacuuuaacacuuuc

SEQ ID NO: 721500 - RNA, 20 nt, Artificial Sequence
  Synthetic
gaaaugcuuuuaacacuuuc

SEQ ID NO: 721501 - RNA, 20 nt, Artificial Sequence
  Synthetic
gugaggccagcuggacuuuc

SEQ ID NO: 721502 - RNA, 20 nt, Artificial Sequence
  Synthetic
gguucuucucuauuacuuuc

SEQ ID NO: 721503 - RNA, 20 nt, Artificial Sequence
  Synthetic
ggaacuuuuaacaagcuuuc

SEQ ID NO: 721504 - RNA, 20 nt, Artificial Sequence
  Synthetic
gggagggcaaggaagcuuuc

SEQ ID NO: 721505 - RNA, 20 nt, Artificial Sequence
  Synthetic
gaggcagcgugagggcuuuc

SEQ ID NO: 721506 - RNA, 20 nt, Artificial Sequence
  Synthetic
gaucuccuccaccaucuuuc

SEQ ID NO: 721507 - RNA, 20 nt, Artificial Sequence
  Synthetic
ggaagaacaguaacucuuuc

SEQ ID NO: 721508 - RNA, 20 nt, Artificial Sequence
  Synthetic
gaugauuaugcugcucuuuc

SEQ ID NO: 721509 - RNA, 20 nt, Artificial Sequence
  Synthetic
gucuuucuagucagucuuuc

SEQ ID NO: 721510 - RNA, 20 nt, Artificial Sequence
  Synthetic
gauaucaucaccauucuuuc

SEQ ID NO: 721511 - RNA, 20 nt, Artificial Sequence
  Synthetic
gcacugaucuagauucuuuc

SEQ ID NO: 721512 - RNA, 20 nt, Artificial Sequence
  Synthetic
ggagggguguucuuucuuuc

SEQ ID NO: 721513 - RNA, 20 nt, Artificial Sequence
  Synthetic
gaagaggaaguaaaaguuuc

SEQ ID NO: 721514 - RNA, 20 nt, Artificial Sequence
  Synthetic
gaagugcauggaacaguuuc

SEQ ID NO: 721515 - RNA, 20 nt, Artificial Sequence
  Synthetic
gauaaaauaaagagaguuuc

SEQ ID NO: 721516 - RNA, 20 nt, Artificial Sequence
  Synthetic
guuaaaaccagaauaguuuc

SEQ ID NO: 721517 - RNA, 20 nt, Artificial Sequence
  Synthetic
guuacuauuuuaauaguuuc

SEQ ID NO: 721518 - RNA, 20 nt, Artificial Sequence
  Synthetic
gugaaaggggacauaguuuc

SEQ ID NO: 721519 - RNA, 20 nt, Artificial Sequence
  Synthetic
gugaaaggggguauaguuuc

SEQ ID NO: 721520 - RNA, 20 nt, Artificial Sequence
  Synthetic
gaaugguaucagaugguuuc

SEQ ID NO: 721521 - RNA, 20 nt, Artificial Sequence
  Synthetic
gugaugacaggguugguuuc

SEQ ID NO: 721522 - RNA, 20 nt, Artificial Sequence
  Synthetic
gauucauuuucuuugguuuc

SEQ ID NO: 721523 - RNA, 20 nt, Artificial Sequence
  Synthetic
ggugaugaacucuauguuuc

SEQ ID NO: 721524 - RNA, 20 nt, Artificial Sequence
  Synthetic
gauugccuuaauaaauuuuc

SEQ ID NO: 721525 - RNA, 20 nt, Artificial Sequence
  Synthetic
guuaaaacuuguaaauuuuc

SEQ ID NO: 721526 - RNA, 20 nt, Artificial Sequence
  Synthetic
gccugauaccuucaauuuuc

SEQ ID NO: 721527 - RNA, 20 nt, Artificial Sequence
  Synthetic
gaaaagaaaaacccauuuuc

SEQ ID NO: 721528 - RNA, 20 nt, Artificial Sequence
  Synthetic
gcugaaaaaacgccauuuuc

SEQ ID NO: 721529 - RNA, 20 nt, Artificial Sequence
  Synthetic
gaaauacugaagucauuuuc

SEQ ID NO: 721530 - RNA, 20 nt, Artificial Sequence
  Synthetic
guaacacuguuggacuuuuc

SEQ ID NO: 721531 - RNA, 20 nt, Artificial Sequence
  Synthetic
gcaaacacaggugacuuuuc

SEQ ID NO: 721532 - RNA, 20 nt, Artificial Sequence
  Synthetic
gagcaacacucauacuuuuc

SEQ ID NO: 721533 - RNA, 20 nt, Artificial Sequence
  Synthetic
gcuuuauaauauuacuuuuc

SEQ ID NO: 721534 - RNA, 20 nt, Artificial Sequence
  Synthetic
gaagaguuuaucaccuuuuc

SEQ ID NO: 721535 - RNA, 20 nt, Artificial Sequence
  Synthetic
gucugguacaguaccuuuuc

SEQ ID NO: 721536 - RNA, 20 nt, Artificial Sequence
  Synthetic
ggcugcccggaccccuuuuc

SEQ ID NO: 721537 - RNA, 20 nt, Artificial Sequence
  Synthetic
gaaaauccaggccccuuuuc

SEQ ID NO: 721538 - RNA, 20 nt, Artificial Sequence
  Synthetic
gguaaguuucaugucuuuuc

SEQ ID NO: 721539 - RNA, 20 nt, Artificial Sequence
  Synthetic
gguacagcaaagaaguuuuc

SEQ ID NO: 721540 - RNA, 20 nt, Artificial Sequence
  Synthetic
gaaaauuaauagaauuuuuc

SEQ ID NO: 721541 - RNA, 20 nt, Artificial Sequence
  Synthetic
gauguguggcauuauuuuuc

SEQ ID NO: 721542 - RNA, 20 nt, Artificial Sequence
  Synthetic
gaggcauuagugacuuuuuc

SEQ ID NO: 721543 - RNA, 20 nt, Artificial Sequence
  Synthetic
guacgcugcuguucuuuuuc

SEQ ID NO: 721544 - RNA, 20 nt, Artificial Sequence
  Synthetic
gaauuggucacacguuuuuc

SEQ ID NO: 721545 - RNA, 20 nt, Artificial Sequence
  Synthetic
gcaaacuuccaggguuuuuc

SEQ ID NO: 721546 - RNA, 20 nt, Artificial Sequence
  Synthetic
ggcauuguuaacuguuuuuc

SEQ ID NO: 721547 - RNA, 20 nt, Artificial Sequence
  Synthetic
gugaggccacuuuguuuuuc

SEQ ID NO: 721548 - RNA, 20 nt, Artificial Sequence
  Synthetic
gcugcugcuuuuuguuuuuc

SEQ ID NO: 721549 - RNA, 20 nt, Artificial Sequence
  Synthetic
gugaucaauaagauuuuuuc

SEQ ID NO: 721550 - RNA, 20 nt, Artificial Sequence
  Synthetic
gaaguuuaaggacuuuuuuc

SEQ ID NO: 721551 - RNA, 20 nt, Artificial Sequence
  Synthetic
gaauaaaaauuucuuuuuuc

SEQ ID NO: 721552 - RNA, 20 nt, Artificial Sequence
  Synthetic
gauuuucuucgauuuuuuuc

SEQ ID NO: 721553 - RNA, 20 nt, Artificial Sequence
  Synthetic
guaauccauuuuuuuuuuuc

SEQ ID NO: 721554 - RNA, 20 nt, Artificial Sequence
  Synthetic
gggaaaaaaaaaaaaaaaag

SEQ ID NO: 721555 - RNA, 20 nt, Artificial Sequence
  Synthetic
guaauugaaaacaaaaaaag

SEQ ID NO: 721556 - RNA, 20 nt, Artificial Sequence
  Synthetic
ggagugagugggaaaaaaag

SEQ ID NO: 721557 - RNA, 20 nt, Artificial Sequence
  Synthetic
gaaggcuuucagcaaaaaag

SEQ ID NO: 721558 - RNA, 20 nt, Artificial Sequence
  Synthetic
guuuacacauuuuaaaaaag

SEQ ID NO: 721559 - RNA, 20 nt, Artificial Sequence
  Synthetic
gucugucauuaaccaaaaag

SEQ ID NO: 721560 - RNA, 20 nt, Artificial Sequence
  Synthetic
ggaaggaaagcaggaaaaag

SEQ ID NO: 721561 - RNA, 20 nt, Artificial Sequence
  Synthetic
gugagaaaugcaggaaaaag

SEQ ID NO: 721562 - RNA, 20 nt, Artificial Sequence
  Synthetic
gguaauuuauaaguaaaaag

SEQ ID NO: 721563 - RNA, 20 nt, Artificial Sequence
  Synthetic
gauuuuuauauuuuaaaaag

SEQ ID NO: 721564 - RNA, 20 nt, Artificial Sequence
  Synthetic
gaacuuaaaguuuuaaaaag

SEQ ID NO: 721565 - RNA, 20 nt, Artificial Sequence
  Synthetic
gccaaguuagucaacaaaag

SEQ ID NO: 721566 - RNA, 20 nt, Artificial Sequence
  Synthetic
gaauaguacccuuacaaaag

SEQ ID NO: 721567 - RNA, 20 nt, Artificial Sequence
  Synthetic
gaucuggcacucaccaaaag

SEQ ID NO: 721568 - RNA, 20 nt, Artificial Sequence
  Synthetic
ggaagguuagaggccaaaag

SEQ ID NO: 721569 - RNA, 20 nt, Artificial Sequence
  Synthetic
ggggagauguugaucaaaag

SEQ ID NO: 721570 - RNA, 20 nt, Artificial Sequence
  Synthetic
gcuaacagcagcuucaaaag

SEQ ID NO: 721571 - RNA, 20 nt, Artificial Sequence
  Synthetic
gggugcuuuaaaaagaaaag

SEQ ID NO: 721572 - RNA, 20 nt, Artificial Sequence
  Synthetic
ggguaauuuauaaagaaaag

SEQ ID NO: 721573 - RNA, 20 nt, Artificial Sequence
  Synthetic
gguuggguuuggaagaaaag

SEQ ID NO: 721574 - RNA, 20 nt, Artificial Sequence
  Synthetic
ggagagagugugaagaaaag

SEQ ID NO: 721575 - RNA, 20 nt, Artificial Sequence
  Synthetic
gcucuaaaaauccagaaaag

SEQ ID NO: 721576 - RNA, 20 nt, Artificial Sequence
  Synthetic
ggguauucaauuaggaaaag

SEQ ID NO: 721577 - RNA, 20 nt, Artificial Sequence
  Synthetic
gggaugaggggagggaaaag

SEQ ID NO: 721578 - RNA, 20 nt, Artificial Sequence
  Synthetic
gguucuuaguggaugaaaag

SEQ ID NO: 721579 - RNA, 20 nt, Artificial Sequence
  Synthetic
ggagagaauuauaugaaaag

SEQ ID NO: 721580 - RNA, 20 nt, Artificial Sequence
  Synthetic
gagcgcuaaaugcugaaaag

SEQ ID NO: 721581 - RNA, 20 nt, Artificial Sequence
  Synthetic
gucccuuugagagugaaaag

SEQ ID NO: 721582 - RNA, 20 nt, Artificial Sequence
  Synthetic
gaucugaugguuuugaaaag

SEQ ID NO: 721583 - RNA, 20 nt, Artificial Sequence
  Synthetic
guacaaaagguaaauaaaag

SEQ ID NO: 721584 - RNA, 20 nt, Artificial Sequence
  Synthetic
gaagaaugccacaauaaaag

SEQ ID NO: 721585 - RNA, 20 nt, Artificial Sequence
  Synthetic
gaucagugcccuuauaaaag

SEQ ID NO: 721586 - RNA, 20 nt, Artificial Sequence
  Synthetic
guuugguucccuuauaaaag

SEQ ID NO: 721587 - RNA, 20 nt, Artificial Sequence
  Synthetic
gcauauagaaaaucuaaaag

SEQ ID NO: 721588 - RNA, 20 nt, Artificial Sequence
  Synthetic
gggaagucauuuucuaaaag

SEQ ID NO: 721589 - RNA, 20 nt, Artificial Sequence
  Synthetic
gaaauaaaaagaaguaaaag

SEQ ID NO: 721590 - RNA, 20 nt, Artificial Sequence
  Synthetic
gaagguuauuugguuaaaag

SEQ ID NO: 721591 - RNA, 20 nt, Artificial Sequence
  Synthetic
gauucugaagcauuuaaaag

SEQ ID NO: 721592 - RNA, 20 nt, Artificial Sequence
  Synthetic
gcaauaacgaaugaacaaag

SEQ ID NO: 721593 - RNA, 20 nt, Artificial Sequence
  Synthetic
gagagcacaccugaacaaag

SEQ ID NO: 721594 - RNA, 20 nt, Artificial Sequence
  Synthetic
gaaguaaggcagacacaaag

SEQ ID NO: 721595 - RNA, 20 nt, Artificial Sequence
  Synthetic
gagaacauauggacacaaag

SEQ ID NO: 721596 - RNA, 20 nt, Artificial Sequence
  Synthetic
gucauagacuuuacacaaag

SEQ ID NO: 721597 - RNA, 20 nt, Artificial Sequence
  Synthetic
gaaguguggcagucacaaag

SEQ ID NO: 721598 - RNA, 20 nt, Artificial Sequence
  Synthetic
ggaaggaaacugagacaaag

SEQ ID NO: 721599 - RNA, 20 nt, Artificial Sequence
  Synthetic
ggaauggaagcuagacaaag

SEQ ID NO: 721600 - RNA, 20 nt, Artificial Sequence
  Synthetic
gaaaacuacaagaaccaaag

SEQ ID NO: 721601 - RNA, 20 nt, Artificial Sequence
  Synthetic
ggaaacaaggaguaccaaag

SEQ ID NO: 721602 - RNA, 20 nt, Artificial Sequence
  Synthetic
gugggaaaggaaagccaaag

SEQ ID NO: 721603 - RNA, 20 nt, Artificial Sequence
  Synthetic
gugguuguuaucauccaaag

SEQ ID NO: 721604 - RNA, 20 nt, Artificial Sequence
  Synthetic
ggugccaugaugaggcaaag

SEQ ID NO: 721605 - RNA, 20 nt, Artificial Sequence
  Synthetic
gugaaaguucugcggcaaag

SEQ ID NO: 721606 - RNA, 20 nt, Artificial Sequence
  Synthetic
gacucacaugcauggcaaag

SEQ ID NO: 721607 - RNA, 20 nt, Artificial Sequence
  Synthetic
gguacaugaaggaaucaaag

SEQ ID NO: 721608 - RNA, 20 nt, Artificial Sequence
  Synthetic
gacaggacauuuaaucaaag

SEQ ID NO: 721609 - RNA, 20 nt, Artificial Sequence
  Synthetic
guucaaauaucacaucaaag

SEQ ID NO: 721610 - RNA, 20 nt, Artificial Sequence
  Synthetic
gcaagaauugaugaucaaag

SEQ ID NO: 721611 - RNA, 20 nt, Artificial Sequence
  Synthetic
gauuacagugcugaucaaag

SEQ ID NO: 721612 - RNA, 20 nt, Artificial Sequence
  Synthetic
gaaaaagaaaaaaaagaaag

SEQ ID NO: 721613 - RNA, 20 nt, Artificial Sequence
  Synthetic
gggcaauuuacaaaagaaag

SEQ ID NO: 721614 - RNA, 20 nt, Artificial Sequence
  Synthetic
ggguaauuuauaaaagaaag

SEQ ID NO: 721615 - RNA, 20 nt, Artificial Sequence
  Synthetic
gguucccuuguaaaagaaag

SEQ ID NO: 721616 - RNA, 20 nt, Artificial Sequence
  Synthetic
ggaauugcagaagaagaaag

SEQ ID NO: 721617 - RNA, 20 nt, Artificial Sequence
  Synthetic
gugcuaggaaacgaagaaag

SEQ ID NO: 721618 - RNA, 20 nt, Artificial Sequence
  Synthetic
ggacagauggacacagaaag

SEQ ID NO: 721619 - RNA, 20 nt, Artificial Sequence
  Synthetic
gucacaaacccagcagaaag

SEQ ID NO: 721620 - RNA, 20 nt, Artificial Sequence
  Synthetic
ggaugggaagagagagaaag

SEQ ID NO: 721621 - RNA, 20 nt, Artificial Sequence
  Synthetic
ggcuuugaagauagagaaag

SEQ ID NO: 721622 - RNA, 20 nt, Artificial Sequence
  Synthetic
gcaauucgaauauuagaaag

SEQ ID NO: 721623 - RNA, 20 nt, Artificial Sequence
  Synthetic
ggguaauuuauaaaggaaag

SEQ ID NO: 721624 - RNA, 20 nt, Artificial Sequence
  Synthetic
gggugauuuauaaaggaaag

SEQ ID NO: 721625 - RNA, 20 nt, Artificial Sequence
  Synthetic
ggguaauuucuaaaggaaag

SEQ ID NO: 721626 - RNA, 20 nt, Artificial Sequence
  Synthetic
ggguuaaugaaacaggaaag

SEQ ID NO: 721627 - RNA, 20 nt, Artificial Sequence
  Synthetic
gaaugucuccuggaggaaag

SEQ ID NO: 721628 - RNA, 20 nt, Artificial Sequence
  Synthetic
gcaaugaagaaugaggaaag

SEQ ID NO: 721629 - RNA, 20 nt, Artificial Sequence
  Synthetic
gggaagagcaucuaggaaag

SEQ ID NO: 721630 - RNA, 20 nt, Artificial Sequence
  Synthetic
ggguagugguagggggaaag

SEQ ID NO: 721631 - RNA, 20 nt, Artificial Sequence
  Synthetic
gagaguaacugaauggaaag

SEQ ID NO: 721632 - RNA, 20 nt, Artificial Sequence
  Synthetic
gagggagguucucuggaaag

SEQ ID NO: 721633 - RNA, 20 nt, Artificial Sequence
  Synthetic
gauuguacugccgaugaaag

SEQ ID NO: 721634 - RNA, 20 nt, Artificial Sequence
  Synthetic
guugcccaaagcagugaaag

SEQ ID NO: 721635 - RNA, 20 nt, Artificial Sequence
  Synthetic
gagguuaagguuagugaaag

SEQ ID NO: 721636 - RNA, 20 nt, Artificial Sequence
  Synthetic
gcuaaaaauaugugugaaag

SEQ ID NO: 721637 - RNA, 20 nt, Artificial Sequence
  Synthetic
gaucugcccaauguugaaag

SEQ ID NO: 721638 - RNA, 20 nt, Artificial Sequence
  Synthetic
gagaggggcuggaaauaaag

SEQ ID NO: 721639 - RNA, 20 nt, Artificial Sequence
  Synthetic
gcaagagaacuagaauaaag

SEQ ID NO: 721640 - RNA, 20 nt, Artificial Sequence
  Synthetic
gacaacucuauaagauaaag

SEQ ID NO: 721641 - RNA, 20 nt, Artificial Sequence
  Synthetic
ggaagaaaugaaggauaaag

SEQ ID NO: 721642 - RNA, 20 nt, Artificial Sequence
  Synthetic
gguacaugaaacugauaaag

SEQ ID NO: 721643 - RNA, 20 nt, Artificial Sequence
  Synthetic
gaucugaugguuuuauaaag

SEQ ID NO: 721644 - RNA, 20 nt, Artificial Sequence
  Synthetic
guacaaauaaaaagcuaaag

SEQ ID NO: 721645 - RNA, 20 nt, Artificial Sequence
  Synthetic
gaggagagugaaaaguaaag

SEQ ID NO: 721646 - RNA, 20 nt, Artificial Sequence
  Synthetic
gauuguagaguucaguaaag

SEQ ID NO: 721647 - RNA, 20 nt, Artificial Sequence
  Synthetic
gcauaauuaaacgaguaaag

SEQ ID NO: 721648 - RNA, 20 nt, Artificial Sequence
  Synthetic
gagguuuuuaggggguaaag

SEQ ID NO: 721649 - RNA, 20 nt, Artificial Sequence
  Synthetic
gggacaauguguggguaaag

SEQ ID NO: 721650 - RNA, 20 nt, Artificial Sequence
  Synthetic
ggcuucccucagcuguaaag

SEQ ID NO: 721651 - RNA, 20 nt, Artificial Sequence
  Synthetic
ggauauuuuuuucuguaaag

SEQ ID NO: 721652 - RNA, 20 nt, Artificial Sequence
  Synthetic
guuaagugacuaaauuaaag

SEQ ID NO: 721653 - RNA, 20 nt, Artificial Sequence
  Synthetic
ggauucagauuagauuaaag

SEQ ID NO: 721654 - RNA, 20 nt, Artificial Sequence
  Synthetic
ggaagcucuccaccuuaaag

SEQ ID NO: 721655 - RNA, 20 nt, Artificial Sequence
  Synthetic
gcagaauuaaacauuuaaag

SEQ ID NO: 721656 - RNA, 20 nt, Artificial Sequence
  Synthetic
guuuauuucugugaaacaag

SEQ ID NO: 721657 - RNA, 20 nt, Artificial Sequence
  Synthetic
ggcuuggaguuugaaacaag

SEQ ID NO: 721658 - RNA, 20 nt, Artificial Sequence
  Synthetic
gcaguagagaaacuaacaag

SEQ ID NO: 721659 - RNA, 20 nt, Artificial Sequence
  Synthetic
gcugguaaauguuuaacaag

SEQ ID NO: 721660 - RNA, 20 nt, Artificial Sequence
  Synthetic
gcagaaaguuggaacacaag

SEQ ID NO: 721661 - RNA, 20 nt, Artificial Sequence
  Synthetic
gcuuuuucagaagacacaag

SEQ ID NO: 721662 - RNA, 20 nt, Artificial Sequence
  Synthetic
gccaaacugccuuccacaag

SEQ ID NO: 721663 - RNA, 20 nt, Artificial Sequence
  Synthetic
guuggauacagacucacaag

SEQ ID NO: 721664 - RNA, 20 nt, Artificial Sequence
  Synthetic
ggaggauuuauucagacaag

SEQ ID NO: 721665 - RNA, 20 nt, Artificial Sequence
  Synthetic
ggcaaggccgcagagacaag

SEQ ID NO: 721666 - RNA, 20 nt, Artificial Sequence
  Synthetic
guagaaauuccagauacaag

SEQ ID NO: 721667 - RNA, 20 nt, Artificial Sequence
  Synthetic
gaaggcaaccuuuauacaag

SEQ ID NO: 721668 - RNA, 20 nt, Artificial Sequence
  Synthetic
gaaccuucccgucuuacaag

SEQ ID NO: 721669 - RNA, 20 nt, Artificial Sequence
  Synthetic
gaacuuuucugucuuacaag

SEQ ID NO: 721670 - RNA, 20 nt, Artificial Sequence
  Synthetic
gugaaaugcaccaaaccaag

SEQ ID NO: 721671 - RNA, 20 nt, Artificial Sequence
  Synthetic
gagaagugcauggaaccaag

SEQ ID NO: 721672 - RNA, 20 nt, Artificial Sequence
  Synthetic
gauuauucaccaugaccaag

SEQ ID NO: 721673 - RNA, 20 nt, Artificial Sequence
  Synthetic
gagaauagcuugaacccaag

SEQ ID NO: 721674 - RNA, 20 nt, Artificial Sequence
  Synthetic
guguagauaaaauccccaag

SEQ ID NO: 721675 - RNA, 20 nt, Artificial Sequence
  Synthetic
gugaggucuccccagccaag

SEQ ID NO: 721676 - RNA, 20 nt, Artificial Sequence
  Synthetic
gcauuuuuacaguagccaag

SEQ ID NO: 721677 - RNA, 20 nt, Artificial Sequence
  Synthetic
gucaauguagaauggccaag

SEQ ID NO: 721678 - RNA, 20 nt, Artificial Sequence
  Synthetic
guucauuucucugauccaag

SEQ ID NO: 721679 - RNA, 20 nt, Artificial Sequence
  Synthetic
gaugaauucucaucuccaag

SEQ ID NO: 721680 - RNA, 20 nt, Artificial Sequence
  Synthetic
gaauagccauucauuccaag

SEQ ID NO: 721681 - RNA, 20 nt, Artificial Sequence
  Synthetic
gaacagagaaggauuccaag

SEQ ID NO: 721682 - RNA, 20 nt, Artificial Sequence
  Synthetic
gugcaaaaugcuauuccaag

SEQ ID NO: 721683 - RNA, 20 nt, Artificial Sequence
  Synthetic
gaagaaaugaguguuccaag

SEQ ID NO: 721684 - RNA, 20 nt, Artificial Sequence
  Synthetic
ggggaaagagcggaagcaag

SEQ ID NO: 721685 - RNA, 20 nt, Artificial Sequence
  Synthetic
gaaagaacuuacggagcaag

SEQ ID NO: 721686 - RNA, 20 nt, Artificial Sequence
  Synthetic
gagaauuagauaauagcaag

SEQ ID NO: 721687 - RNA, 20 nt, Artificial Sequence
  Synthetic
gaaggaaggugauuagcaag

SEQ ID NO: 721688 - RNA, 20 nt, Artificial Sequence
  Synthetic
gucaaggggugaggggcaag

SEQ ID NO: 721689 - RNA, 20 nt, Artificial Sequence
  Synthetic
gucgcgagguggggggcaag

SEQ ID NO: 721690 - RNA, 20 nt, Artificial Sequence
  Synthetic
guuggcggguggggggcaag

SEQ ID NO: 721691 - RNA, 20 nt, Artificial Sequence
  Synthetic
gguugauuguuguaugcaag

SEQ ID NO: 721692 - RNA, 20 nt, Artificial Sequence
  Synthetic
ggccacaucuaagcugcaag

SEQ ID NO: 721693 - RNA, 20 nt, Artificial Sequence
  Synthetic
gagcacagaaaaaaaucaag

SEQ ID NO: 721694 - RNA, 20 nt, Artificial Sequence
  Synthetic
ggugggcacguaaaaucaag

SEQ ID NO: 721695 - RNA, 20 nt, Artificial Sequence
  Synthetic
gauugauauggagaaucaag

SEQ ID NO: 721696 - RNA, 20 nt, Artificial Sequence
  Synthetic
gucugugcauuugaaucaag

SEQ ID NO: 721697 - RNA, 20 nt, Artificial Sequence
  Synthetic
gggauacugcugucaucaag

SEQ ID NO: 721698 - RNA, 20 nt, Artificial Sequence
  Synthetic
gcuuauccaccaugaucaag

SEQ ID NO: 721699 - RNA, 20 nt, Artificial Sequence
  Synthetic
gcaaaaaaccugaacucaag

SEQ ID NO: 721700 - RNA, 20 nt, Artificial Sequence
  Synthetic
gguggucucagcuacucaag

SEQ ID NO: 721701 - RNA, 20 nt, Artificial Sequence
  Synthetic
gauagaagguggagcucaag

SEQ ID NO: 721702 - RNA, 20 nt, Artificial Sequence
  Synthetic
guggucucagugggcucaag

SEQ ID NO: 721703 - RNA, 20 nt, Artificial Sequence
  Synthetic
gccgccacucaaaucucaag

SEQ ID NO: 721704 - RNA, 20 nt, Artificial Sequence
  Synthetic
gaggcugauggggucucaag

SEQ ID NO: 721705 - RNA, 20 nt, Artificial Sequence
  Synthetic
ggacagacugccuucucaag

SEQ ID NO: 721706 - RNA, 20 nt, Artificial Sequence
  Synthetic
gcauugccuuagaggucaag

SEQ ID NO: 721707 - RNA, 20 nt, Artificial Sequence
  Synthetic
gcuguagacaaauggucaag

SEQ ID NO: 721708 - RNA, 20 nt, Artificial Sequence
  Synthetic
gggaagaaugccuggucaag

SEQ ID NO: 721709 - RNA, 20 nt, Artificial Sequence
  Synthetic
gucaaaagaagaaauucaag

SEQ ID NO: 721710 - RNA, 20 nt, Artificial Sequence
  Synthetic
gugcucaugauuguuucaag

SEQ ID NO: 721711 - RNA, 20 nt, Artificial Sequence
  Synthetic
gggccuagagaauuuucaag

SEQ ID NO: 721712 - RNA, 20 nt, Artificial Sequence
  Synthetic
gaggaaaagacaaaaagaag

SEQ ID NO: 721713 - RNA, 20 nt, Artificial Sequence
  Synthetic
gcuggagaacagaaaagaag

SEQ ID NO: 721714 - RNA, 20 nt, Artificial Sequence
  Synthetic
gguacgauuuugaaaagaag

SEQ ID NO: 721715 - RNA, 20 nt, Artificial Sequence
  Synthetic
gaggaggagaaagaaagaag

SEQ ID NO: 721716 - RNA, 20 nt, Artificial Sequence
  Synthetic
gagaucugaaugacaagaag

SEQ ID NO: 721717 - RNA, 20 nt, Artificial Sequence
  Synthetic
gguggaauuuccucaagaag

SEQ ID NO: 721718 - RNA, 20 nt, Artificial Sequence
  Synthetic
gggaguggaagaagaagaag

SEQ ID NO: 721719 - RNA, 20 nt, Artificial Sequence
  Synthetic
guugcuuauuuuagaagaag

SEQ ID NO: 721720 - RNA, 20 nt, Artificial Sequence
  Synthetic
ggugugguagagauaagaag

SEQ ID NO: 721721 - RNA, 20 nt, Artificial Sequence
  Synthetic
gaugguauuuuuauaagaag

SEQ ID NO: 721722 - RNA, 20 nt, Artificial Sequence
  Synthetic
gggauuuuuaaaguaagaag

SEQ ID NO: 721723 - RNA, 20 nt, Artificial Sequence
  Synthetic
gaucuguuugacuuaagaag

SEQ ID NO: 721724 - RNA, 20 nt, Artificial Sequence
  Synthetic
guuuagaaguggaacagaag

SEQ ID NO: 721725 - RNA, 20 nt, Artificial Sequence
  Synthetic
gaaaaaugaguuaacagaag

SEQ ID NO: 721726 - RNA, 20 nt, Artificial Sequence
  Synthetic
gaauaugcaauucccagaag

SEQ ID NO: 721727 - RNA, 20 nt, Artificial Sequence
  Synthetic
gaauagauuguaagcagaag

SEQ ID NO: 721728 - RNA, 20 nt, Artificial Sequence
  Synthetic
gucauugaaaacugcagaag

SEQ ID NO: 721729 - RNA, 20 nt, Artificial Sequence
  Synthetic
ggacuuugaagacucagaag

SEQ ID NO: 721730 - RNA, 20 nt, Artificial Sequence
  Synthetic
gacuaggaaguuuucagaag

SEQ ID NO: 721731 - RNA, 20 nt, Artificial Sequence
  Synthetic
gcuggagguaggaagagaag

SEQ ID NO: 721732 - RNA, 20 nt, Artificial Sequence
  Synthetic
gggaauagacaagagagaag

SEQ ID NO: 721733 - RNA, 20 nt, Artificial Sequence
  Synthetic
gagagagagagagagagaag

SEQ ID NO: 721734 - RNA, 20 nt, Artificial Sequence
  Synthetic
gacaggaggauggagagaag

SEQ ID NO: 721735 - RNA, 20 nt, Artificial Sequence
  Synthetic
gugaucauuuggaggagaag

SEQ ID NO: 721736 - RNA, 20 nt, Artificial Sequence
  Synthetic
ggguauucaauuaggagaag

SEQ ID NO: 721737 - RNA, 20 nt, Artificial Sequence
  Synthetic
gcagcuggccaggggagaag

SEQ ID NO: 721738 - RNA, 20 nt, Artificial Sequence
  Synthetic
gaccugcuucaggggagaag

SEQ ID NO: 721739 - RNA, 20 nt, Artificial Sequence
  Synthetic
gagaaggcaguggggagaag

SEQ ID NO: 721740 - RNA, 20 nt, Artificial Sequence
  Synthetic
gggucuuaaaggaugagaag

SEQ ID NO: 721741 - RNA, 20 nt, Artificial Sequence
  Synthetic
gcacacauuccauugagaag

SEQ ID NO: 721742 - RNA, 20 nt, Artificial Sequence
  Synthetic
gaaauugaggccuugagaag

SEQ ID NO: 721743 - RNA, 20 nt, Artificial Sequence
  Synthetic
ggcauugugacaaauagaag

SEQ ID NO: 721744 - RNA, 20 nt, Artificial Sequence
  Synthetic
guuagugacaaaauuagaag

SEQ ID NO: 721745 - RNA, 20 nt, Artificial Sequence
  Synthetic
gacacucagauguuuagaag

SEQ ID NO: 721746 - RNA, 20 nt, Artificial Sequence
  Synthetic
gaaauuaaaaaaaaaggaag

SEQ ID NO: 721747 - RNA, 20 nt, Artificial Sequence
  Synthetic
gagaauucaaccaaaggaag

SEQ ID NO: 721748 - RNA, 20 nt, Artificial Sequence
  Synthetic
gaacagaaaucucaaggaag

SEQ ID NO: 721749 - RNA, 20 nt, Artificial Sequence
  Synthetic
gaacacauggacacaggaag

SEQ ID NO: 721750 - RNA, 20 nt, Artificial Sequence
  Synthetic
gaucacauggacacaggaag

SEQ ID NO: 721751 - RNA, 20 nt, Artificial Sequence
  Synthetic
gacuagaaaggcacaggaag

SEQ ID NO: 721752 - RNA, 20 nt, Artificial Sequence
  Synthetic
gaacacauggucacaggaag

SEQ ID NO: 721753 - RNA, 20 nt, Artificial Sequence
  Synthetic
gccaucugcaaaccaggaag

SEQ ID NO: 721754 - RNA, 20 nt, Artificial Sequence
  Synthetic
gaacaccuggacgcaggaag

SEQ ID NO: 721755 - RNA, 20 nt, Artificial Sequence
  Synthetic
gugagaauuuugagaggaag

SEQ ID NO: 721756 - RNA, 20 nt, Artificial Sequence
  Synthetic
ggcuguguguaaugaggaag

SEQ ID NO: 721757 - RNA, 20 nt, Artificial Sequence
  Synthetic
guaacagaagugauaggaag

SEQ ID NO: 721758 - RNA, 20 nt, Artificial Sequence
  Synthetic
gagaggggagggaagggaag

SEQ ID NO: 721759 - RNA, 20 nt, Artificial Sequence
  Synthetic
gucaucuaugggaagggaag

SEQ ID NO: 721760 - RNA, 20 nt, Artificial Sequence
  Synthetic
gaaucuaugaauaagggaag

SEQ ID NO: 721761 - RNA, 20 nt, Artificial Sequence
  Synthetic
ggaucaacagauacgggaag

SEQ ID NO: 721762 - RNA, 20 nt, Artificial Sequence
  Synthetic
gacagagcaccacggggaag

SEQ ID NO: 721763 - RNA, 20 nt, Artificial Sequence
  Synthetic
ggccugugaggugggggaag

SEQ ID NO: 721764 - RNA, 20 nt, Artificial Sequence
  Synthetic
ggaagcaaggcagugggaag

SEQ ID NO: 721765 - RNA, 20 nt, Artificial Sequence
  Synthetic
gaacaaacagauaauggaag

SEQ ID NO: 721766 - RNA, 20 nt, Artificial Sequence
  Synthetic
gauagccaaacacauggaag

SEQ ID NO: 721767 - RNA, 20 nt, Artificial Sequence
  Synthetic
gggcuaccagaagcuggaag

SEQ ID NO: 721768 - RNA, 20 nt, Artificial Sequence
  Synthetic
gagagagagggagguggaag

SEQ ID NO: 721769 - RNA, 20 nt, Artificial Sequence
  Synthetic
gaaaucuacaaaggaugaag

SEQ ID NO: 721770 - RNA, 20 nt, Artificial Sequence
  Synthetic
gcaaaugauccuggaugaag

SEQ ID NO: 721771 - RNA, 20 nt, Artificial Sequence
  Synthetic
gucagauuugacauaugaag

SEQ ID NO: 721772 - RNA, 20 nt, Artificial Sequence
  Synthetic
gauuaugacuuucuaugaag

SEQ ID NO: 721773 - RNA, 20 nt, Artificial Sequence
  Synthetic
gauauaugagaauacugaag

SEQ ID NO: 721774 - RNA, 20 nt, Artificial Sequence
  Synthetic
gagcaagaacuaagcugaag

SEQ ID NO: 721775 - RNA, 20 nt, Artificial Sequence
  Synthetic
gaaaagagucuuagcugaag

SEQ ID NO: 721776 - RNA, 20 nt, Artificial Sequence
  Synthetic
gccagcacagcagucugaag

SEQ ID NO: 721777 - RNA, 20 nt, Artificial Sequence
  Synthetic
gccuugggaauggucugaag

SEQ ID NO: 721778 - RNA, 20 nt, Artificial Sequence
  Synthetic
guggagaccaugaagugaag

SEQ ID NO: 721779 - RNA, 20 nt, Artificial Sequence
  Synthetic
gaauagaaauuacagugaag

SEQ ID NO: 721780 - RNA, 20 nt, Artificial Sequence
  Synthetic
guaguguuucuucugugaag

SEQ ID NO: 721781 - RNA, 20 nt, Artificial Sequence
  Synthetic
gaagggggaggggugugaag

SEQ ID NO: 721782 - RNA, 20 nt, Artificial Sequence
  Synthetic
ggagggccuggauugugaag

SEQ ID NO: 721783 - RNA, 20 nt, Artificial Sequence
  Synthetic
ggauuuauuuuuuauugaag

SEQ ID NO: 721784 - RNA, 20 nt, Artificial Sequence
  Synthetic
guuuguaguucuccuugaag

SEQ ID NO: 721785 - RNA, 20 nt, Artificial Sequence
  Synthetic
gaacguggcagugguugaag

SEQ ID NO: 721786 - RNA, 20 nt, Artificial Sequence
  Synthetic
gaagguauacucauuugaag

SEQ ID NO: 721787 - RNA, 20 nt, Artificial Sequence
  Synthetic
gucaaaaaagguguuugaag

SEQ ID NO: 721788 - RNA, 20 nt, Artificial Sequence
  Synthetic
ggguaguuaauaaaaauaag

SEQ ID NO: 721789 - RNA, 20 nt, Artificial Sequence
  Synthetic
gugagauaaacagaaauaag

SEQ ID NO: 721790 - RNA, 20 nt, Artificial Sequence
  Synthetic
gccaucauaagcuaaauaag

SEQ ID NO: 721791 - RNA, 20 nt, Artificial Sequence
  Synthetic
gcuaguaagugcuaaauaag

SEQ ID NO: 721792 - RNA, 20 nt, Artificial Sequence
  Synthetic
gcaaaaaagaauuaaauaag

SEQ ID NO: 721793 - RNA, 20 nt, Artificial Sequence
  Synthetic
guguuagcuaggacaauaag

SEQ ID NO: 721794 - RNA, 20 nt, Artificial Sequence
  Synthetic
gaaggaacagcgagaauaag

SEQ ID NO: 721795 - RNA, 20 nt, Artificial Sequence
  Synthetic
gucuagugcuuccuaauaag

SEQ ID NO: 721796 - RNA, 20 nt, Artificial Sequence
  Synthetic
guggcuggguacuccauaag

SEQ ID NO: 721797 - RNA, 20 nt, Artificial Sequence
  Synthetic
gaagaacuagaacagauaag

SEQ ID NO: 721798 - RNA, 20 nt, Artificial Sequence
  Synthetic
gaaaaaaaaggucagauaag

SEQ ID NO: 721799 - RNA, 20 nt, Artificial Sequence
  Synthetic
ggcaauagauaagagauaag

SEQ ID NO: 721800 - RNA, 20 nt, Artificial Sequence
  Synthetic
ggcaagauuuuaaggauaag

SEQ ID NO: 721801 - RNA, 20 nt, Artificial Sequence
  Synthetic
ggcuacacaggauggauaag

SEQ ID NO: 721802 - RNA, 20 nt, Artificial Sequence
  Synthetic
guauuuucauuuuugauaag

SEQ ID NO: 721803 - RNA, 20 nt, Artificial Sequence
  Synthetic
gugauaaaauagaauauaag

SEQ ID NO: 721804 - RNA, 20 nt, Artificial Sequence
  Synthetic
gaauuauuuuuuaauauaag

SEQ ID NO: 721805 - RNA, 20 nt, Artificial Sequence
  Synthetic
gacauuuuuaauuauauaag

SEQ ID NO: 721806 - RNA, 20 nt, Artificial Sequence
  Synthetic
ggaucugaugguuuuauaag

SEQ ID NO: 721807 - RNA, 20 nt, Artificial Sequence
  Synthetic
gagaaucacuugaaacuaag

SEQ ID NO: 721808 - RNA, 20 nt, Artificial Sequence
  Synthetic
gcucccgcgugcgcacuaag

SEQ ID NO: 721809 - RNA, 20 nt, Artificial Sequence
  Synthetic
gagaaauauuuacuacuaag

SEQ ID NO: 721810 - RNA, 20 nt, Artificial Sequence
  Synthetic
gugauuuuuagggggcuaag

SEQ ID NO: 721811 - RNA, 20 nt, Artificial Sequence
  Synthetic
guagcaaaagcagugcuaag

SEQ ID NO: 721812 - RNA, 20 nt, Artificial Sequence
  Synthetic
ggcaaucuguguuuucuaag

SEQ ID NO: 721813 - RNA, 20 nt, Artificial Sequence
  Synthetic
gagcccuaaccucaaguaag

SEQ ID NO: 721814 - RNA, 20 nt, Artificial Sequence
  Synthetic
gauaccuuauuucaaguaag

SEQ ID NO: 721815 - RNA, 20 nt, Artificial Sequence
  Synthetic
gacagaugccagggaguaag

SEQ ID NO: 721816 - RNA, 20 nt, Artificial Sequence
  Synthetic
ggaaaaaggagauagguaag

SEQ ID NO: 721817 - RNA, 20 nt, Artificial Sequence
  Synthetic
gaacuugaacaaaggguaag

SEQ ID NO: 721818 - RNA, 20 nt, Artificial Sequence
  Synthetic
gaggaaacaucagggguaag

SEQ ID NO: 721819 - RNA, 20 nt, Artificial Sequence
  Synthetic
gugacuuggaacuggguaag

SEQ ID NO: 721820 - RNA, 20 nt, Artificial Sequence
  Synthetic
gagaaacaucaggauguaag

SEQ ID NO: 721821 - RNA, 20 nt, Artificial Sequence
  Synthetic
gccuggaacaaugguguaag

SEQ ID NO: 721822 - RNA, 20 nt, Artificial Sequence
  Synthetic
gaaaccugcuugaaauuaag

SEQ ID NO: 721823 - RNA, 20 nt, Artificial Sequence
  Synthetic
guuaaaaguaacucauuaag

SEQ ID NO: 721824 - RNA, 20 nt, Artificial Sequence
  Synthetic
guuuuagaaaaccgauuaag

SEQ ID NO: 721825 - RNA, 20 nt, Artificial Sequence
  Synthetic
gaauggcaaccaauauuaag

SEQ ID NO: 721826 - RNA, 20 nt, Artificial Sequence
  Synthetic
gccauugugacaguauuaag

SEQ ID NO: 721827 - RNA, 20 nt, Artificial Sequence
  Synthetic
guagauggaaaauuauuaag

SEQ ID NO: 721828 - RNA, 20 nt, Artificial Sequence
  Synthetic
gcacuuaaauuauuauuaag

SEQ ID NO: 721829 - RNA, 20 nt, Artificial Sequence
  Synthetic
gaacugguggucaucuuaag

SEQ ID NO: 721830 - RNA, 20 nt, Artificial Sequence
  Synthetic
guuaagaacagauucuuaag

SEQ ID NO: 721831 - RNA, 20 nt, Artificial Sequence
  Synthetic
gucuuuuaugucaaguuaag

SEQ ID NO: 721832 - RNA, 20 nt, Artificial Sequence
  Synthetic
ggauuauagguauaguuaag

SEQ ID NO: 721833 - RNA, 20 nt, Artificial Sequence
  Synthetic
gguuuauauugcaauuuaag

SEQ ID NO: 721834 - RNA, 20 nt, Artificial Sequence
  Synthetic
gucugccugguacuuuuaag

SEQ ID NO: 721835 - RNA, 20 nt, Artificial Sequence
  Synthetic
gaucaaaaagcuaaaaacag

SEQ ID NO: 721836 - RNA, 20 nt, Artificial Sequence
  Synthetic
gcauuucuacuuuaaaacag

SEQ ID NO: 721837 - RNA, 20 nt, Artificial Sequence
  Synthetic
gcaccugggugcacaaacag

SEQ ID NO: 721838 - RNA, 20 nt, Artificial Sequence
  Synthetic
gcuaaguuccucagaaacag

SEQ ID NO: 721839 - RNA, 20 nt, Artificial Sequence
  Synthetic
gaagauggggcaugaaacag

SEQ ID NO: 721840 - RNA, 20 nt, Artificial Sequence
  Synthetic
ggagcugacaaacccaacag

SEQ ID NO: 721841 - RNA, 20 nt, Artificial Sequence
  Synthetic
gaaagacaacaaugcaacag

SEQ ID NO: 721842 - RNA, 20 nt, Artificial Sequence
  Synthetic
gucaauaucaaguagaacag

SEQ ID NO: 721843 - RNA, 20 nt, Artificial Sequence
  Synthetic
guagggcagcagcugaacag

SEQ ID NO: 721844 - RNA, 20 nt, Artificial Sequence
  Synthetic
gaauacaagaacgugaacag

SEQ ID NO: 721845 - RNA, 20 nt, Artificial Sequence
  Synthetic
gccuuacaguuucauaacag

SEQ ID NO: 721846 - RNA, 20 nt, Artificial Sequence
  Synthetic
gaagggacaguaacuaacag

SEQ ID NO: 721847 - RNA, 20 nt, Artificial Sequence
  Synthetic
gaagcccaucagacuaacag

SEQ ID NO: 721848 - RNA, 20 nt, Artificial Sequence
  Synthetic
guucugagugcaucuaacag

SEQ ID NO: 721849 - RNA, 20 nt, Artificial Sequence
  Synthetic
gaucagagagaggaacacag

SEQ ID NO: 721850 - RNA, 20 nt, Artificial Sequence
  Synthetic
ggagacaccuguacacacag

SEQ ID NO: 721851 - RNA, 20 nt, Artificial Sequence
  Synthetic
gagauaugccaggcacacag

SEQ ID NO: 721852 - RNA, 20 nt, Artificial Sequence
  Synthetic
gagaggugauauauacacag

SEQ ID NO: 721853 - RNA, 20 nt, Artificial Sequence
  Synthetic
ggagacagacacguacacag

SEQ ID NO: 721854 - RNA, 20 nt, Artificial Sequence
  Synthetic
guagaaaguuaaauccacag

SEQ ID NO: 721855 - RNA, 20 nt, Artificial Sequence
  Synthetic
gagcacacagucuuccacag

SEQ ID NO: 721856 - RNA, 20 nt, Artificial Sequence
  Synthetic
ggcucucguggaaggcacag

SEQ ID NO: 721857 - RNA, 20 nt, Artificial Sequence
  Synthetic
gaaauacaggcugggcacag

SEQ ID NO: 721858 - RNA, 20 nt, Artificial Sequence
  Synthetic
ggggcuaucugcaugcacag

SEQ ID NO: 721859 - RNA, 20 nt, Artificial Sequence
  Synthetic
ggauguguggggaugcacag

SEQ ID NO: 721860 - RNA, 20 nt, Artificial Sequence
  Synthetic
gcaauuuuacuucugcacag

SEQ ID NO: 721861 - RNA, 20 nt, Artificial Sequence
  Synthetic
ggacaugaauucauucacag

SEQ ID NO: 721862 - RNA, 20 nt, Artificial Sequence
  Synthetic
gaggaaaaggaggaagacag

SEQ ID NO: 721863 - RNA, 20 nt, Artificial Sequence
  Synthetic
gguaaaaggguuugagacag

SEQ ID NO: 721864 - RNA, 20 nt, Artificial Sequence
  Synthetic
gaauaauuuauaaaggacag

SEQ ID NO: 721865 - RNA, 20 nt, Artificial Sequence
  Synthetic
gcaaacauagugaaggacag

SEQ ID NO: 721866 - RNA, 20 nt, Artificial Sequence
  Synthetic
gaagacacaggaugggacag

SEQ ID NO: 721867 - RNA, 20 nt, Artificial Sequence
  Synthetic
gacaaaaaauuuugggacag

SEQ ID NO: 721868 - RNA, 20 nt, Artificial Sequence
  Synthetic
gguuggaauugaguggacag

SEQ ID NO: 721869 - RNA, 20 nt, Artificial Sequence
  Synthetic
gcauuucagcucucugacag

SEQ ID NO: 721870 - RNA, 20 nt, Artificial Sequence
  Synthetic
gaguaaguagagagugacag

SEQ ID NO: 721871 - RNA, 20 nt, Artificial Sequence
  Synthetic
gauuguggugguggugacag

SEQ ID NO: 721872 - RNA, 20 nt, Artificial Sequence
  Synthetic
gauccgucuaauauugacag

SEQ ID NO: 721873 - RNA, 20 nt, Artificial Sequence
  Synthetic
gaucugucuaauguugacag

SEQ ID NO: 721874 - RNA, 20 nt, Artificial Sequence
  Synthetic
gaaauaauguuaaaauacag

SEQ ID NO: 721875 - RNA, 20 nt, Artificial Sequence
  Synthetic
gucaccaggcuggaauacag

SEQ ID NO: 721876 - RNA, 20 nt, Artificial Sequence
  Synthetic
gaucuucuagucuaauacag

SEQ ID NO: 721877 - RNA, 20 nt, Artificial Sequence
  Synthetic
gaacacauggacacauacag

SEQ ID NO: 721878 - RNA, 20 nt, Artificial Sequence
  Synthetic
ggacuucccuaaagauacag

SEQ ID NO: 721879 - RNA, 20 nt, Artificial Sequence
  Synthetic
ggcuaggauuuauuauacag

SEQ ID NO: 721880 - RNA, 20 nt, Artificial Sequence
  Synthetic
gcugagaaauuugacuacag

SEQ ID NO: 721881 - RNA, 20 nt, Artificial Sequence
  Synthetic
gagaggcaaucuggcuacag

SEQ ID NO: 721882 - RNA, 20 nt, Artificial Sequence
  Synthetic
guccaaacugcuuucuacag

SEQ ID NO: 721883 - RNA, 20 nt, Artificial Sequence
  Synthetic
guaauggacuuuaaguacag

SEQ ID NO: 721884 - RNA, 20 nt, Artificial Sequence
  Synthetic
gguaaugucuuauaguacag

SEQ ID NO: 721885 - RNA, 20 nt, Artificial Sequence
  Synthetic
gagaugaugagauuguacag

SEQ ID NO: 721886 - RNA, 20 nt, Artificial Sequence
  Synthetic
gcugaaccuggauuuuacag

SEQ ID NO: 721887 - RNA, 20 nt, Artificial Sequence
  Synthetic
ggagcauauuuuucaaccag

SEQ ID NO: 721888 - RNA, 20 nt, Artificial Sequence
  Synthetic
gggcuuuaagugaacaccag

SEQ ID NO: 721889 - RNA, 20 nt, Artificial Sequence
  Synthetic
gccugagugaaaaugaccag

SEQ ID NO: 721890 - RNA, 20 nt, Artificial Sequence
  Synthetic
gcuuccagaugacugaccag

SEQ ID NO: 721891 - RNA, 20 nt, Artificial Sequence
  Synthetic
gucacauucugagguaccag

SEQ ID NO: 721892 - RNA, 20 nt, Artificial Sequence
  Synthetic
gguggaaggaugguuaccag

SEQ ID NO: 721893 - RNA, 20 nt, Artificial Sequence
  Synthetic
gaagucucccuaagacccag

SEQ ID NO: 721894 - RNA, 20 nt, Artificial Sequence
  Synthetic
guguuaugggagggacccag

SEQ ID NO: 721895 - RNA, 20 nt, Artificial Sequence
  Synthetic
guguugugggagggacccag

SEQ ID NO: 721896 - RNA, 20 nt, Artificial Sequence
  Synthetic
gugagcauaaauuuacccag

SEQ ID NO: 721897 - RNA, 20 nt, Artificial Sequence
  Synthetic
gauuucucacaucgccccag

SEQ ID NO: 721898 - RNA, 20 nt, Artificial Sequence
  Synthetic
gguuggaaggagcagcccag

SEQ ID NO: 721899 - RNA, 20 nt, Artificial Sequence
  Synthetic
gccuccccuccagcucccag

SEQ ID NO: 721900 - RNA, 20 nt, Artificial Sequence
  Synthetic
gcugaagcaaaacaagccag

SEQ ID NO: 721901 - RNA, 20 nt, Artificial Sequence
  Synthetic
gauguacuucacagagccag

SEQ ID NO: 721902 - RNA, 20 nt, Artificial Sequence
  Synthetic
ggagagggagggagagccag

SEQ ID NO: 721903 - RNA, 20 nt, Artificial Sequence
  Synthetic
ggaaagcagagaaaggccag

SEQ ID NO: 721904 - RNA, 20 nt, Artificial Sequence
  Synthetic
gcaccugcugcucaggccag

SEQ ID NO: 721905 - RNA, 20 nt, Artificial Sequence
  Synthetic
gcaagccuguauauggccag

SEQ ID NO: 721906 - RNA, 20 nt, Artificial Sequence
  Synthetic
gaugaguagcagcuggccag

SEQ ID NO: 721907 - RNA, 20 nt, Artificial Sequence
  Synthetic
gauuccagaaacaaugccag

SEQ ID NO: 721908 - RNA, 20 nt, Artificial Sequence
  Synthetic
gccugggaguugggugccag

SEQ ID NO: 721909 - RNA, 20 nt, Artificial Sequence
  Synthetic
gagacagauaguggugccag

SEQ ID NO: 721910 - RNA, 20 nt, Artificial Sequence
  Synthetic
gauggugaaucaggauccag

SEQ ID NO: 721911 - RNA, 20 nt, Artificial Sequence
  Synthetic
gcuacauugcagaacuccag

SEQ ID NO: 721912 - RNA, 20 nt, Artificial Sequence
  Synthetic
gacaguggagaggacuccag

SEQ ID NO: 721913 - RNA, 20 nt, Artificial Sequence
  Synthetic
gcaaagucaugacccuccag

SEQ ID NO: 721914 - RNA, 20 nt, Artificial Sequence
  Synthetic
gguuugcugaacagcuccag

SEQ ID NO: 721915 - RNA, 20 nt, Artificial Sequence
  Synthetic
gagauuauuccuccuuccag

SEQ ID NO: 721916 - RNA, 20 nt, Artificial Sequence
  Synthetic
gaaucauuauuuccuuccag

SEQ ID NO: 721917 - RNA, 20 nt, Artificial Sequence
  Synthetic
gacuucaguccccuuuccag

SEQ ID NO: 721918 - RNA, 20 nt, Artificial Sequence
  Synthetic
gguggccuuaacaaaagcag

SEQ ID NO: 721919 - RNA, 20 nt, Artificial Sequence
  Synthetic
gacuuuugcuaugaaagcag

SEQ ID NO: 721920 - RNA, 20 nt, Artificial Sequence
  Synthetic
gaagguagcauguaaagcag

SEQ ID NO: 721921 - RNA, 20 nt, Artificial Sequence
  Synthetic
guuuuaauauggagaagcag

SEQ ID NO: 721922 - RNA, 20 nt, Artificial Sequence
  Synthetic
guuacuuucucuggaagcag

SEQ ID NO: 721923 - RNA, 20 nt, Artificial Sequence
  Synthetic
gagagugaaauuugaagcag

SEQ ID NO: 721924 - RNA, 20 nt, Artificial Sequence
  Synthetic
guggagagugagaacagcag

SEQ ID NO: 721925 - RNA, 20 nt, Artificial Sequence
  Synthetic
guggccacauguaacagcag

SEQ ID NO: 721926 - RNA, 20 nt, Artificial Sequence
  Synthetic
ggguguugaggacacagcag

SEQ ID NO: 721927 - RNA, 20 nt, Artificial Sequence
  Synthetic
gaaaaguuggaagccagcag

SEQ ID NO: 721928 - RNA, 20 nt, Artificial Sequence
  Synthetic
gccaugccugcagccagcag

SEQ ID NO: 721929 - RNA, 20 nt, Artificial Sequence
  Synthetic
gggagaaugagugccagcag

SEQ ID NO: 721930 - RNA, 20 nt, Artificial Sequence
  Synthetic
ggcacuguuccagagagcag

SEQ ID NO: 721931 - RNA, 20 nt, Artificial Sequence
  Synthetic
gacugcacauaugagagcag

SEQ ID NO: 721932 - RNA, 20 nt, Artificial Sequence
  Synthetic
guaauuauacuuuagagcag

SEQ ID NO: 721933 - RNA, 20 nt, Artificial Sequence
  Synthetic
ggucaacauagguggagcag

SEQ ID NO: 721934 - RNA, 20 nt, Artificial Sequence
  Synthetic
gcggagcuugcagugagcag

SEQ ID NO: 721935 - RNA, 20 nt, Artificial Sequence
  Synthetic
gaauugugaaucaauagcag

SEQ ID NO: 721936 - RNA, 20 nt, Artificial Sequence
  Synthetic
gguuuauagucugggcgcag

SEQ ID NO: 721937 - RNA, 20 nt, Artificial Sequence
  Synthetic
gcccugcccucuauucgcag

SEQ ID NO: 721938 - RNA, 20 nt, Artificial Sequence
  Synthetic
ggccauacagaaaaaggcag

SEQ ID NO: 721939 - RNA, 20 nt, Artificial Sequence
  Synthetic
gggagacggaagcaaggcag

SEQ ID NO: 721940 - RNA, 20 nt, Artificial Sequence
  Synthetic
gaguugcacccauaaggcag

SEQ ID NO: 721941 - RNA, 20 nt, Artificial Sequence
  Synthetic
gauccacccuucuaaggcag

SEQ ID NO: 721942 - RNA, 20 nt, Artificial Sequence
  Synthetic
gaguuugaauuguaaggcag

SEQ ID NO: 721943 - RNA, 20 nt, Artificial Sequence
  Synthetic
gccacagggaguacaggcag

SEQ ID NO: 721944 - RNA, 20 nt, Artificial Sequence
  Synthetic
gagaagggcaauccaggcag

SEQ ID NO: 721945 - RNA, 20 nt, Artificial Sequence
  Synthetic
gaacacugaaguccaggcag

SEQ ID NO: 721946 - RNA, 20 nt, Artificial Sequence
  Synthetic
ggcaaaaacauuccaggcag

SEQ ID NO: 721947 - RNA, 20 nt, Artificial Sequence
  Synthetic
gacaaggaggagagaggcag

SEQ ID NO: 721948 - RNA, 20 nt, Artificial Sequence
  Synthetic
guacaauuaccaugaggcag

SEQ ID NO: 721949 - RNA, 20 nt, Artificial Sequence
  Synthetic
gagaaauaccauugaggcag

SEQ ID NO: 721950 - RNA, 20 nt, Artificial Sequence
  Synthetic
ggaaugggagagauaggcag

SEQ ID NO: 721951 - RNA, 20 nt, Artificial Sequence
  Synthetic
gaguacaguugaguaggcag

SEQ ID NO: 721952 - RNA, 20 nt, Artificial Sequence
  Synthetic
gggaggauuauuuuaggcag

SEQ ID NO: 721953 - RNA, 20 nt, Artificial Sequence
  Synthetic
gaaagaaaacaauagggcag

SEQ ID NO: 721954 - RNA, 20 nt, Artificial Sequence
  Synthetic
guugggggauuggggggcag

SEQ ID NO: 721955 - RNA, 20 nt, Artificial Sequence
  Synthetic
gaaacaaaauaauuaugcag

SEQ ID NO: 721956 - RNA, 20 nt, Artificial Sequence
  Synthetic
gcacuggaauuauccugcag

SEQ ID NO: 721957 - RNA, 20 nt, Artificial Sequence
  Synthetic
gaggugauuuuguccugcag

SEQ ID NO: 721958 - RNA, 20 nt, Artificial Sequence
  Synthetic
guggugaucaaaagcugcag

SEQ ID NO: 721959 - RNA, 20 nt, Artificial Sequence
  Synthetic
guugucaggcugaagugcag

SEQ ID NO: 721960 - RNA, 20 nt, Artificial Sequence
  Synthetic
gucaccaggcuggagugcag

SEQ ID NO: 721961 - RNA, 20 nt, Artificial Sequence
  Synthetic
uugcccaggcuggagugcag

SEQ ID NO: 721962 - RNA, 20 nt, Artificial Sequence
  Synthetic
gucgccaggcuggagugcag

SEQ ID NO: 721963 - RNA, 20 nt, Artificial Sequence
  Synthetic
guugccaggcuggagugcag

SEQ ID NO: 721964 - RNA, 20 nt, Artificial Sequence
  Synthetic
gucgcccggcuggagugcag

SEQ ID NO: 721965 - RNA, 20 nt, Artificial Sequence
  Synthetic
gcacccuggcuggagugcag

SEQ ID NO: 721966 - RNA, 20 nt, Artificial Sequence
  Synthetic
gcacuguucuuugagugcag

SEQ ID NO: 721967 - RNA, 20 nt, Artificial Sequence
  Synthetic
gcaaacuuuguggggugcag

SEQ ID NO: 721968 - RNA, 20 nt, Artificial Sequence
  Synthetic
ggcccuaccuccacuugcag

SEQ ID NO: 721969 - RNA, 20 nt, Artificial Sequence
  Synthetic
gaugcaaaacaggcuugcag

SEQ ID NO: 721970 - RNA, 20 nt, Artificial Sequence
  Synthetic
gguuuacuuauuaguugcag

SEQ ID NO: 721971 - RNA, 20 nt, Artificial Sequence
  Synthetic
gaaagagagcuguguugcag

SEQ ID NO: 721972 - RNA, 20 nt, Artificial Sequence
  Synthetic
gauucguggaguuguugcag

SEQ ID NO: 721973 - RNA, 20 nt, Artificial Sequence
  Synthetic
gugagugacaguguuugcag

SEQ ID NO: 721974 - RNA, 20 nt, Artificial Sequence
  Synthetic
gcucuucuuuaauuuugcag

SEQ ID NO: 721975 - RNA, 20 nt, Artificial Sequence
  Synthetic
ggaaaaaggagaaaaaucag

SEQ ID NO: 721976 - RNA, 20 nt, Artificial Sequence
  Synthetic
ggacagaaaaaaauaaucag

SEQ ID NO: 721977 - RNA, 20 nt, Artificial Sequence
  Synthetic
ggaaagauaacucuaaucag

SEQ ID NO: 721978 - RNA, 20 nt, Artificial Sequence
  Synthetic
gcaggagaugucaccaucag

SEQ ID NO: 721979 - RNA, 20 nt, Artificial Sequence
  Synthetic
ggagaugguccuugcaucag

SEQ ID NO: 721980 - RNA, 20 nt, Artificial Sequence
  Synthetic
gaaaaugaaaguaauaucag

SEQ ID NO: 721981 - RNA, 20 nt, Artificial Sequence
  Synthetic
gauacuggucuggaacucag

SEQ ID NO: 721982 - RNA, 20 nt, Artificial Sequence
  Synthetic
gugagauaacugagacucag

SEQ ID NO: 721983 - RNA, 20 nt, Artificial Sequence
  Synthetic
gaaaaucuucauugacucag

SEQ ID NO: 721984 - RNA, 20 nt, Artificial Sequence
  Synthetic
gugaaaaagcauacccucag

SEQ ID NO: 721985 - RNA, 20 nt, Artificial Sequence
  Synthetic
gcaguguggcgauuccucag

SEQ ID NO: 721986 - RNA, 20 nt, Artificial Sequence
  Synthetic
guugaaaauucucagcucag

SEQ ID NO: 721987 - RNA, 20 nt, Artificial Sequence
  Synthetic
ggaggaucaccagagcucag

SEQ ID NO: 721988 - RNA, 20 nt, Artificial Sequence
  Synthetic
gugcuuaaaaaccugcucag

SEQ ID NO: 721989 - RNA, 20 nt, Artificial Sequence
  Synthetic
gcuggcugugagcugcucag

SEQ ID NO: 721990 - RNA, 20 nt, Artificial Sequence
  Synthetic
guacuucaaagagcucucag

SEQ ID NO: 721991 - RNA, 20 nt, Artificial Sequence
  Synthetic
gcucacaaucacucucucag

SEQ ID NO: 721992 - RNA, 20 nt, Artificial Sequence
  Synthetic
ggcuucuuaauuauucucag

SEQ ID NO: 721993 - RNA, 20 nt, Artificial Sequence
  Synthetic
gaaucaaguggaguucucag

SEQ ID NO: 721994 - RNA, 20 nt, Artificial Sequence
  Synthetic
gaaagcaaaaauuuucucag

SEQ ID NO: 721995 - RNA, 20 nt, Artificial Sequence
  Synthetic
gaugguuuugcgaaagucag

SEQ ID NO: 721996 - RNA, 20 nt, Artificial Sequence
  Synthetic
gugguauauucauaagucag

SEQ ID NO: 721997 - RNA, 20 nt, Artificial Sequence
  Synthetic
gugugagcguuuggagucag

SEQ ID NO: 721998 - RNA, 20 nt, Artificial Sequence
  Synthetic
ggagagcaggagaaggucag

SEQ ID NO: 721999 - RNA, 20 nt, Artificial Sequence
  Synthetic
ggcuuauuucaggaggucag

SEQ ID NO: 722000 - RNA, 20 nt, Artificial Sequence
  Synthetic
guagggggaugacuggucag

SEQ ID NO: 722001 - RNA, 20 nt, Artificial Sequence
  Synthetic
ggcagaguacacaaugucag

SEQ ID NO: 722002 - RNA, 20 nt, Artificial Sequence
  Synthetic
gaguuguuugguaaugucag

SEQ ID NO: 722003 - RNA, 20 nt, Artificial Sequence
  Synthetic
guucuguauuuuuaugucag

SEQ ID NO: 722004 - RNA, 20 nt, Artificial Sequence
  Synthetic
ggggggaaagaaauugucag

SEQ ID NO: 722005 - RNA, 20 nt, Artificial Sequence
  Synthetic
ggcaucaaauuacuugucag

SEQ ID NO: 722006 - RNA, 20 nt, Artificial Sequence
  Synthetic
gacauuaugcuucuugucag

SEQ ID NO: 722007 - RNA, 20 nt, Artificial Sequence
  Synthetic
guuucuaaaauagaauucag

SEQ ID NO: 722008 - RNA, 20 nt, Artificial Sequence
  Synthetic
gagaagcagcuugacuucag

SEQ ID NO: 722009 - RNA, 20 nt, Artificial Sequence
  Synthetic
gucucucuacaaugcuucag

SEQ ID NO: 722010 - RNA, 20 nt, Artificial Sequence
  Synthetic
gccucuuucucgaucuucag

SEQ ID NO: 722011 - RNA, 20 nt, Artificial Sequence
  Synthetic
gagcaaugggagcucuucag

SEQ ID NO: 722012 - RNA, 20 nt, Artificial Sequence
  Synthetic
ggcaauuauaaaauguucag

SEQ ID NO: 722013 - RNA, 20 nt, Artificial Sequence
  Synthetic
gcaauguuccagauguucag

SEQ ID NO: 722014 - RNA, 20 nt, Artificial Sequence
  Synthetic
gaaacauuuaauguguucag

SEQ ID NO: 722015 - RNA, 20 nt, Artificial Sequence
  Synthetic
gaaaugaccaaauuguucag

SEQ ID NO: 722016 - RNA, 20 nt, Artificial Sequence
  Synthetic
gauauuugaggaaauuucag

SEQ ID NO: 722017 - RNA, 20 nt, Artificial Sequence
  Synthetic
ggaaaauggcaaaguuucag

SEQ ID NO: 722018 - RNA, 20 nt, Artificial Sequence
  Synthetic
gaaaauuuaauugguuucag

SEQ ID NO: 722019 - RNA, 20 nt, Artificial Sequence
  Synthetic
gcaaauguugagguuuucag

SEQ ID NO: 722020 - RNA, 20 nt, Artificial Sequence
  Synthetic
gauucaaaaauagaaaagag

SEQ ID NO: 722021 - RNA, 20 nt, Artificial Sequence
  Synthetic
gaacauauggacacaaagag

SEQ ID NO: 722022 - RNA, 20 nt, Artificial Sequence
  Synthetic
ggguaccauucaccaaagag

SEQ ID NO: 722023 - RNA, 20 nt, Artificial Sequence
  Synthetic
gugggaggaaccucaaagag

SEQ ID NO: 722024 - RNA, 20 nt, Artificial Sequence
  Synthetic
ggagcaaacaacagaaagag

SEQ ID NO: 722025 - RNA, 20 nt, Artificial Sequence
  Synthetic
gcagagugguugagaaagag

SEQ ID NO: 722026 - RNA, 20 nt, Artificial Sequence
  Synthetic
guucaaggccagugaaagag

SEQ ID NO: 722027 - RNA, 20 nt, Artificial Sequence
  Synthetic
ggggaaaaaaacauaaagag

SEQ ID NO: 722028 - RNA, 20 nt, Artificial Sequence
  Synthetic
gugacaauagggauaaagag

SEQ ID NO: 722029 - RNA, 20 nt, Artificial Sequence
  Synthetic
gcaaggcagccaguaaagag

SEQ ID NO: 722030 - RNA, 20 nt, Artificial Sequence
  Synthetic
gucuuauuucccaacaagag

SEQ ID NO: 722031 - RNA, 20 nt, Artificial Sequence
  Synthetic
gagggagaggugaacaagag

SEQ ID NO: 722032 - RNA, 20 nt, Artificial Sequence
  Synthetic
gacauaggagaagacaagag

SEQ ID NO: 722033 - RNA, 20 nt, Artificial Sequence
  Synthetic
gagauuaugagagacaagag

SEQ ID NO: 722034 - RNA, 20 nt, Artificial Sequence
  Synthetic
gaaaaacagcaaaccaagag

SEQ ID NO: 722035 - RNA, 20 nt, Artificial Sequence
  Synthetic
gaaggaucaggacccaagag

SEQ ID NO: 722036 - RNA, 20 nt, Artificial Sequence
  Synthetic
ggggaagaacuucccaagag

SEQ ID NO: 722037 - RNA, 20 nt, Artificial Sequence
  Synthetic
ggcaugucgaaagccaagag

SEQ ID NO: 722038 - RNA, 20 nt, Artificial Sequence
  Synthetic
gaccaauacauauucaagag

SEQ ID NO: 722039 - RNA, 20 nt, Artificial Sequence
  Synthetic
gcucauggagcugagaagag

SEQ ID NO: 722040 - RNA, 20 nt, Artificial Sequence
  Synthetic
gguagaguguaguagaagag

SEQ ID NO: 722041 - RNA, 20 nt, Artificial Sequence
  Synthetic
gcacagacaacuuagaagag

SEQ ID NO: 722042 - RNA, 20 nt, Artificial Sequence
  Synthetic
gcuuguagguuuccgaagag

SEQ ID NO: 722043 - RNA, 20 nt, Artificial Sequence
  Synthetic
gggaaaaaaagaaggaagag

SEQ ID NO: 722044 - RNA, 20 nt, Artificial Sequence
  Synthetic
ggguauucaaauaggaagag

SEQ ID NO: 722045 - RNA, 20 nt, Artificial Sequence
  Synthetic
gaguggaaaaaugggaagag

SEQ ID NO: 722046 - RNA, 20 nt, Artificial Sequence
  Synthetic
ggagggggaaauaugaagag

SEQ ID NO: 722047 - RNA, 20 nt, Artificial Sequence
  Synthetic
gaagggagcauugauaagag

SEQ ID NO: 722048 - RNA, 20 nt, Artificial Sequence
  Synthetic
gaggcuuguccuucuaagag

SEQ ID NO: 722049 - RNA, 20 nt, Artificial Sequence
  Synthetic
gucagaauuuuagguaagag

SEQ ID NO: 722050 - RNA, 20 nt, Artificial Sequence
  Synthetic
gcagauuuuagaaaacagag

SEQ ID NO: 722051 - RNA, 20 nt, Artificial Sequence
  Synthetic
gcaagggacaaggaacagag

SEQ ID NO: 722052 - RNA, 20 nt, Artificial Sequence
  Synthetic
ggaaguaacaaauaacagag

SEQ ID NO: 722053 - RNA, 20 nt, Artificial Sequence
  Synthetic
gauaugccaggcacacagag

SEQ ID NO: 722054 - RNA, 20 nt, Artificial Sequence
  Synthetic
gagaacacauggacacagag

SEQ ID NO: 722055 - RNA, 20 nt, Artificial Sequence
  Synthetic
gaagaaagugaggcacagag

SEQ ID NO: 722056 - RNA, 20 nt, Artificial Sequence
  Synthetic
gacugaaaucauucacagag

SEQ ID NO: 722057 - RNA, 20 nt, Artificial Sequence
  Synthetic
guacacaaaggcagacagag

SEQ ID NO: 722058 - RNA, 20 nt, Artificial Sequence
  Synthetic
gacacgacaggaggacagag

SEQ ID NO: 722059 - RNA, 20 nt, Artificial Sequence
  Synthetic
gguccugccuugggccagag

SEQ ID NO: 722060 - RNA, 20 nt, Artificial Sequence
  Synthetic
ggccacauguaacagcagag

SEQ ID NO: 722061 - RNA, 20 nt, Artificial Sequence
  Synthetic
gaagucagaauacagcagag

SEQ ID NO: 722062 - RNA, 20 nt, Artificial Sequence
  Synthetic
ggguugguguugaggcagag

SEQ ID NO: 722063 - RNA, 20 nt, Artificial Sequence
  Synthetic
gggagagagguggugcagag

SEQ ID NO: 722064 - RNA, 20 nt, Artificial Sequence
  Synthetic
gauggugcuuuggaucagag

SEQ ID NO: 722065 - RNA, 20 nt, Artificial Sequence
  Synthetic
guacaaugaauauaucagag

SEQ ID NO: 722066 - RNA, 20 nt, Artificial Sequence
  Synthetic
gugauucucuauuaucagag

SEQ ID NO: 722067 - RNA, 20 nt, Artificial Sequence
  Synthetic
gaguaaauggagauucagag

SEQ ID NO: 722068 - RNA, 20 nt, Artificial Sequence
  Synthetic
gagcaugagaaugaagagag

SEQ ID NO: 722069 - RNA, 20 nt, Artificial Sequence
  Synthetic
guucuaucaacugaagagag

SEQ ID NO: 722070 - RNA, 20 nt, Artificial Sequence
  Synthetic
gaacaaagcauugaagagag

SEQ ID NO: 722071 - RNA, 20 nt, Artificial Sequence
  Synthetic
gucugagcuugcacagagag

SEQ ID NO: 722072 - RNA, 20 nt, Artificial Sequence
  Synthetic
gauuuuagagagacagagag

SEQ ID NO: 722073 - RNA, 20 nt, Artificial Sequence
  Synthetic
gaauucuagcuuacagagag

SEQ ID NO: 722074 - RNA, 20 nt, Artificial Sequence
  Synthetic
gaaggugagauuccagagag

SEQ ID NO: 722075 - RNA, 20 nt, Artificial Sequence
  Synthetic
gaacagagagagagagagag

SEQ ID NO: 722076 - RNA, 20 nt, Artificial Sequence
  Synthetic
ggggagagagagagagagag

SEQ ID NO: 722077 - RNA, 20 nt, Artificial Sequence
  Synthetic
gaaaacaaguggagagagag

SEQ ID NO: 722078 - RNA, 20 nt, Artificial Sequence
  Synthetic
gagaugccgggaggagagag

SEQ ID NO: 722079 - RNA, 20 nt, Artificial Sequence
  Synthetic
ggaagggaagggaaggagag

SEQ ID NO: 722080 - RNA, 20 nt, Artificial Sequence
  Synthetic
gaucuggagcucggggagag

SEQ ID NO: 722081 - RNA, 20 nt, Artificial Sequence
  Synthetic
gaagccguuguuggggagag

SEQ ID NO: 722082 - RNA, 20 nt, Artificial Sequence
  Synthetic
gaauaacuaaagugggagag

SEQ ID NO: 722083 - RNA, 20 nt, Artificial Sequence
  Synthetic
gcauauuuaggacuggagag

SEQ ID NO: 722084 - RNA, 20 nt, Artificial Sequence
  Synthetic
gaaaccuccucuguggagag

SEQ ID NO: 722085 - RNA, 20 nt, Artificial Sequence
  Synthetic
gauuuucaugaauuggagag

SEQ ID NO: 722086 - RNA, 20 nt, Artificial Sequence
  Synthetic
ggcuggcugcugccugagag

SEQ ID NO: 722087 - RNA, 20 nt, Artificial Sequence
  Synthetic
gaaggucaagaaucugagag

SEQ ID NO: 722088 - RNA, 20 nt, Artificial Sequence
  Synthetic
gucauggcagaaagugagag

SEQ ID NO: 722089 - RNA, 20 nt, Artificial Sequence
  Synthetic
guggaagggugguuugagag

SEQ ID NO: 722090 - RNA, 20 nt, Artificial Sequence
  Synthetic
ggcugccucuccaaauagag

SEQ ID NO: 722091 - RNA, 20 nt, Artificial Sequence
  Synthetic
gcguuggcauuuguauagag

SEQ ID NO: 722092 - RNA, 20 nt, Artificial Sequence
  Synthetic
gaaacggaggacuacuagag

SEQ ID NO: 722093 - RNA, 20 nt, Artificial Sequence
  Synthetic
guaauuugguaccaguagag

SEQ ID NO: 722094 - RNA, 20 nt, Artificial Sequence
  Synthetic
gaacacauggacacguagag

SEQ ID NO: 722095 - RNA, 20 nt, Artificial Sequence
  Synthetic
guaaagugucugguguagag

SEQ ID NO: 722096 - RNA, 20 nt, Artificial Sequence
  Synthetic
gaggugaauagauauuagag

SEQ ID NO: 722097 - RNA, 20 nt, Artificial Sequence
  Synthetic
guuagaacugaaacuuagag

SEQ ID NO: 722098 - RNA, 20 nt, Artificial Sequence
  Synthetic
gagggcuccacccucacgag

SEQ ID NO: 722099 - RNA, 20 nt, Artificial Sequence
  Synthetic
gagaaucacuugaacccgag

SEQ ID NO: 722100 - RNA, 20 nt, Artificial Sequence
  Synthetic
gaguaucgcuugaacccgag

SEQ ID NO: 722101 - RNA, 20 nt, Artificial Sequence
  Synthetic
gaaggccauauauucccgag

SEQ ID NO: 722102 - RNA, 20 nt, Artificial Sequence
  Synthetic
gcuggacuuucugggucgag

SEQ ID NO: 722103 - RNA, 20 nt, Artificial Sequence
  Synthetic
gaacuuuacuucaaaaggag

SEQ ID NO: 722104 - RNA, 20 nt, Artificial Sequence
  Synthetic
ggcaauccaauguaaaggag

SEQ ID NO: 722105 - RNA, 20 nt, Artificial Sequence
  Synthetic
gacacugaaguuuaaaggag

SEQ ID NO: 722106 - RNA, 20 nt, Artificial Sequence
  Synthetic
gggcugcaaacaacaaggag

SEQ ID NO: 722107 - RNA, 20 nt, Artificial Sequence
  Synthetic
guuuggguuugaccaaggag

SEQ ID NO: 722108 - RNA, 20 nt, Artificial Sequence
  Synthetic
gaauagggaggcccaaggag

SEQ ID NO: 722109 - RNA, 20 nt, Artificial Sequence
  Synthetic
gaaugcaacaggugaaggag

SEQ ID NO: 722110 - RNA, 20 nt, Artificial Sequence
  Synthetic
gaaucgcuugaacccaggag

SEQ ID NO: 722111 - RNA, 20 nt, Artificial Sequence
  Synthetic
gaaguaaccgggaagaggag

SEQ ID NO: 722112 - RNA, 20 nt, Artificial Sequence
  Synthetic
gagauuaugaaagagaggag

SEQ ID NO: 722113 - RNA, 20 nt, Artificial Sequence
  Synthetic
gaucagugagacuagaggag

SEQ ID NO: 722114 - RNA, 20 nt, Artificial Sequence
  Synthetic
ggaggggugugaaggaggag

SEQ ID NO: 722115 - RNA, 20 nt, Artificial Sequence
  Synthetic
gggccuaagagagugaggag

SEQ ID NO: 722116 - RNA, 20 nt, Artificial Sequence
  Synthetic
gaggugaauguggugaggag

SEQ ID NO: 722117 - RNA, 20 nt, Artificial Sequence
  Synthetic
ggagauugaagacauaggag

SEQ ID NO: 722118 - RNA, 20 nt, Artificial Sequence
  Synthetic
ggcuagggaguggguaggag

SEQ ID NO: 722119 - RNA, 20 nt, Artificial Sequence
  Synthetic
gaaaccuuugaauguaggag

SEQ ID NO: 722120 - RNA, 20 nt, Artificial Sequence
  Synthetic
gaagcaggagggaaagggag

SEQ ID NO: 722121 - RNA, 20 nt, Artificial Sequence
  Synthetic
gggauaauaaaagaagggag

SEQ ID NO: 722122 - RNA, 20 nt, Artificial Sequence
  Synthetic
gggcuggaggacacagggag

SEQ ID NO: 722123 - RNA, 20 nt, Artificial Sequence
  Synthetic
gaacacauggacacagggag

SEQ ID NO: 722124 - RNA, 20 nt, Artificial Sequence
  Synthetic
guggugagggccacagggag

SEQ ID NO: 722125 - RNA, 20 nt, Artificial Sequence
  Synthetic
gagauuggaugcacagggag

SEQ ID NO: 722126 - RNA, 20 nt, Artificial Sequence
  Synthetic
gguugccagggaccagggag

SEQ ID NO: 722127 - RNA, 20 nt, Artificial Sequence
  Synthetic
ggaagaaaagcuagagggag

SEQ ID NO: 722128 - RNA, 20 nt, Artificial Sequence
  Synthetic
gggagggugggaggagggag

SEQ ID NO: 722129 - RNA, 20 nt, Artificial Sequence
  Synthetic
gaaagggaggagggagggag

SEQ ID NO: 722130 - RNA, 20 nt, Artificial Sequence
  Synthetic
gaaaggaggaggggagggag

SEQ ID NO: 722131 - RNA, 20 nt, Artificial Sequence
  Synthetic
gagcuauuuaggggagggag

SEQ ID NO: 722132 - RNA, 20 nt, Artificial Sequence
  Synthetic
ggcugaggagguggagggag

SEQ ID NO: 722133 - RNA, 20 nt, Artificial Sequence
  Synthetic
guuacauacaggcuagggag

SEQ ID NO: 722134 - RNA, 20 nt, Artificial Sequence
  Synthetic
gaacacauggacaccgggag

SEQ ID NO: 722135 - RNA, 20 nt, Artificial Sequence
  Synthetic
gggagggaagggaaggggag

SEQ ID NO: 722136 - RNA, 20 nt, Artificial Sequence
  Synthetic
gguuaaaugcauaaggggag

SEQ ID NO: 722137 - RNA, 20 nt, Artificial Sequence
  Synthetic
ggaagggaaggggaggggag

SEQ ID NO: 722138 - RNA, 20 nt, Artificial Sequence
  Synthetic
ggaaggggaggggaggggag

SEQ ID NO: 722139 - RNA, 20 nt, Artificial Sequence
  Synthetic
gggaggggaggggaggggag

SEQ ID NO: 722140 - RNA, 20 nt, Artificial Sequence
  Synthetic
ggggugagauuggaggggag

SEQ ID NO: 722141 - RNA, 20 nt, Artificial Sequence
  Synthetic
ggaggggugugaagggggag

SEQ ID NO: 722142 - RNA, 20 nt, Artificial Sequence
  Synthetic
ggaaaagcgagaauggggag

SEQ ID NO: 722143 - RNA, 20 nt, Artificial Sequence
  Synthetic
gcgggugggguuguggggag

SEQ ID NO: 722144 - RNA, 20 nt, Artificial Sequence
  Synthetic
ggcugggaucagaaugggag

SEQ ID NO: 722145 - RNA, 20 nt, Artificial Sequence
  Synthetic
guuggauauacaccugggag

SEQ ID NO: 722146 - RNA, 20 nt, Artificial Sequence
  Synthetic
gaauuagcuagcccugggag

SEQ ID NO: 722147 - RNA, 20 nt, Artificial Sequence
  Synthetic
gccaugauagcagcugggag

SEQ ID NO: 722148 - RNA, 20 nt, Artificial Sequence
  Synthetic
gagagacuugagucugggag

SEQ ID NO: 722149 - RNA, 20 nt, Artificial Sequence
  Synthetic
gacucacucguaagugggag

SEQ ID NO: 722150 - RNA, 20 nt, Artificial Sequence
  Synthetic
gaacuucuuaggggugggag

SEQ ID NO: 722151 - RNA, 20 nt, Artificial Sequence
  Synthetic
ggucugcugacacuugggag

SEQ ID NO: 722152 - RNA, 20 nt, Artificial Sequence
  Synthetic
gaaagaaaaaagguugggag

SEQ ID NO: 722153 - RNA, 20 nt, Artificial Sequence
  Synthetic
gacuuagauuauguugggag

SEQ ID NO: 722154 - RNA, 20 nt, Artificial Sequence
  Synthetic
gaagacgugccauuugggag

SEQ ID NO: 722155 - RNA, 20 nt, Artificial Sequence
  Synthetic
gaugacaugagauuugggag

SEQ ID NO: 722156 - RNA, 20 nt, Artificial Sequence
  Synthetic
gaaacagacuuauuugggag

SEQ ID NO: 722157 - RNA, 20 nt, Artificial Sequence
  Synthetic
gcccaaacugcuccauggag

SEQ ID NO: 722158 - RNA, 20 nt, Artificial Sequence
  Synthetic
gaacacauggacucauggag

SEQ ID NO: 722159 - RNA, 20 nt, Artificial Sequence
  Synthetic
gggcuuucaggaagauggag

SEQ ID NO: 722160 - RNA, 20 nt, Artificial Sequence
  Synthetic
ggugauugaagaauauggag

SEQ ID NO: 722161 - RNA, 20 nt, Artificial Sequence
  Synthetic
gcugccucugggagcuggag

SEQ ID NO: 722162 - RNA, 20 nt, Artificial Sequence
  Synthetic
ggaaacaacagaugcuggag

SEQ ID NO: 722163 - RNA, 20 nt, Artificial Sequence
  Synthetic
ggcaacaacagaugcuggag

SEQ ID NO: 722164 - RNA, 20 nt, Artificial Sequence
  Synthetic
ggaaacaacaggugcuggag

SEQ ID NO: 722165 - RNA, 20 nt, Artificial Sequence
  Synthetic
guuuuguucccuugcuggag

SEQ ID NO: 722166 - RNA, 20 nt, Artificial Sequence
  Synthetic
gauuacuguguguucuggag

SEQ ID NO: 722167 - RNA, 20 nt, Artificial Sequence
  Synthetic
gaaaaacccauuuucuggag

SEQ ID NO: 722168 - RNA, 20 nt, Artificial Sequence
  Synthetic
gcacguaaaaucaaguggag

SEQ ID NO: 722169 - RNA, 20 nt, Artificial Sequence
  Synthetic
gagagagggagagaguggag

SEQ ID NO: 722170 - RNA, 20 nt, Artificial Sequence
  Synthetic
gacacuagguacagguggag

SEQ ID NO: 722171 - RNA, 20 nt, Artificial Sequence
  Synthetic
guggguauggggguguggag

SEQ ID NO: 722172 - RNA, 20 nt, Artificial Sequence
  Synthetic
guuuaugaguggguguggag

SEQ ID NO: 722173 - RNA, 20 nt, Artificial Sequence
  Synthetic
gaaaacgugaguguguggag

SEQ ID NO: 722174 - RNA, 20 nt, Artificial Sequence
  Synthetic
gggugggggugagauuggag

SEQ ID NO: 722175 - RNA, 20 nt, Artificial Sequence
  Synthetic
gguguagaaauagauuggag

SEQ ID NO: 722176 - RNA, 20 nt, Artificial Sequence
  Synthetic
ggucuguguagcuuuuggag

SEQ ID NO: 722177 - RNA, 20 nt, Artificial Sequence
  Synthetic
guugugggaaggaaaaugag

SEQ ID NO: 722178 - RNA, 20 nt, Artificial Sequence
  Synthetic
guauacuuauggaaaaugag

SEQ ID NO: 722179 - RNA, 20 nt, Artificial Sequence
  Synthetic
ggagcaauaaaacaaaugag

SEQ ID NO: 722180 - RNA, 20 nt, Artificial Sequence
  Synthetic
gcagauuuuuuuuaaaugag

SEQ ID NO: 722181 - RNA, 20 nt, Artificial Sequence
  Synthetic
gaaaggcugccaggaaugag

SEQ ID NO: 722182 - RNA, 20 nt, Artificial Sequence
  Synthetic
gauacaaagacaaacaugag

SEQ ID NO: 722183 - RNA, 20 nt, Artificial Sequence
  Synthetic
gaacagucacccaacaugag

SEQ ID NO: 722184 - RNA, 20 nt, Artificial Sequence
  Synthetic
ggagacucaaauaccaugag

SEQ ID NO: 722185 - RNA, 20 nt, Artificial Sequence
  Synthetic
gcugaaguggcaaggaugag

SEQ ID NO: 722186 - RNA, 20 nt, Artificial Sequence
  Synthetic
ggaacugaagagcugaugag

SEQ ID NO: 722187 - RNA, 20 nt, Artificial Sequence
  Synthetic
gauaaccaggauauuaugag

SEQ ID NO: 722188 - RNA, 20 nt, Artificial Sequence
  Synthetic
gaaggcuuaauguuuaugag

SEQ ID NO: 722189 - RNA, 20 nt, Artificial Sequence
  Synthetic
gagagagagaaguaacugag

SEQ ID NO: 722190 - RNA, 20 nt, Artificial Sequence
  Synthetic
gcuuguuuuaaaucacugag

SEQ ID NO: 722191 - RNA, 20 nt, Artificial Sequence
  Synthetic
ggggcaauaugcuuacugag

SEQ ID NO: 722192 - RNA, 20 nt, Artificial Sequence
  Synthetic
gagucccagguaaaccugag

SEQ ID NO: 722193 - RNA, 20 nt, Artificial Sequence
  Synthetic
gaauuugcucuaagccugag

SEQ ID NO: 722194 - RNA, 20 nt, Artificial Sequence
  Synthetic
gaauuaagcuaguugcugag

SEQ ID NO: 722195 - RNA, 20 nt, Artificial Sequence
  Synthetic
guguuuuaacaaaaucugag

SEQ ID NO: 722196 - RNA, 20 nt, Artificial Sequence
  Synthetic
gaaaagagcacuguucugag

SEQ ID NO: 722197 - RNA, 20 nt, Artificial Sequence
  Synthetic
gagucauggcagaaagugag

SEQ ID NO: 722198 - RNA, 20 nt, Artificial Sequence
  Synthetic
gagacagagguugcagugag

SEQ ID NO: 722199 - RNA, 20 nt, Artificial Sequence
  Synthetic
gaggcggagguugcagugag

SEQ ID NO: 722200 - RNA, 20 nt, Artificial Sequence
  Synthetic
gaaaaaaguaagagagugag

SEQ ID NO: 722201 - RNA, 20 nt, Artificial Sequence
  Synthetic
gguaaaugagcaggagugag

SEQ ID NO: 722202 - RNA, 20 nt, Artificial Sequence
  Synthetic
gcagugguacauaaggugag

SEQ ID NO: 722203 - RNA, 20 nt, Artificial Sequence
  Synthetic
gcuggguuaucagaggugag

SEQ ID NO: 722204 - RNA, 20 nt, Artificial Sequence
  Synthetic
gaauagaugaaauaggugag

SEQ ID NO: 722205 - RNA, 20 nt, Artificial Sequence
  Synthetic
ggaaaagaauucagggugag

SEQ ID NO: 722206 - RNA, 20 nt, Artificial Sequence
  Synthetic
guaccaagcccuagggugag

SEQ ID NO: 722207 - RNA, 20 nt, Artificial Sequence
  Synthetic
ggggccugucaaggggugag

SEQ ID NO: 722208 - RNA, 20 nt, Artificial Sequence
  Synthetic
gaucaagaaaugggggugag

SEQ ID NO: 722209 - RNA, 20 nt, Artificial Sequence
  Synthetic
ggggccugucguggggugag

SEQ ID NO: 722210 - RNA, 20 nt, Artificial Sequence
  Synthetic
ggaaagaugagcugggugag

SEQ ID NO: 722211 - RNA, 20 nt, Artificial Sequence
  Synthetic
gucuugaaguuaauggugag

SEQ ID NO: 722212 - RNA, 20 nt, Artificial Sequence
  Synthetic
gauugauauagcuaugugag

SEQ ID NO: 722213 - RNA, 20 nt, Artificial Sequence
  Synthetic
ggcuuuguuuacacugugag

SEQ ID NO: 722214 - RNA, 20 nt, Artificial Sequence
  Synthetic
gcauaauguagaaaauugag

SEQ ID NO: 722215 - RNA, 20 nt, Artificial Sequence
  Synthetic
gggugaggguuggaauugag

SEQ ID NO: 722216 - RNA, 20 nt, Artificial Sequence
  Synthetic
guaaguacagaaccauugag

SEQ ID NO: 722217 - RNA, 20 nt, Artificial Sequence
  Synthetic
ggaguugaaggugcauugag

SEQ ID NO: 722218 - RNA, 20 nt, Artificial Sequence
  Synthetic
gaagaaaauucaugauugag

SEQ ID NO: 722219 - RNA, 20 nt, Artificial Sequence
  Synthetic
gaaacauuuuccuacuugag

SEQ ID NO: 722220 - RNA, 20 nt, Artificial Sequence
  Synthetic
ggaagauaggcagucuugag

SEQ ID NO: 722221 - RNA, 20 nt, Artificial Sequence
  Synthetic
gaaggaaagugauucuugag

SEQ ID NO: 722222 - RNA, 20 nt, Artificial Sequence
  Synthetic
gagauguguaagaaguugag

SEQ ID NO: 722223 - RNA, 20 nt, Artificial Sequence
  Synthetic
gaccuuuuaugaacguugag

SEQ ID NO: 722224 - RNA, 20 nt, Artificial Sequence
  Synthetic
gcuggaagacaucuguugag

SEQ ID NO: 722225 - RNA, 20 nt, Artificial Sequence
  Synthetic
ggagggcaccuucuguugag

SEQ ID NO: 722226 - RNA, 20 nt, Artificial Sequence
  Synthetic
gugccuguguguguguugag

SEQ ID NO: 722227 - RNA, 20 nt, Artificial Sequence
  Synthetic
gugcuuccacugcauuugag

SEQ ID NO: 722228 - RNA, 20 nt, Artificial Sequence
  Synthetic
guucuuuccuuagcuuugag

SEQ ID NO: 722229 - RNA, 20 nt, Artificial Sequence
  Synthetic
gaggaaaccacgaguuugag

SEQ ID NO: 722230 - RNA, 20 nt, Artificial Sequence
  Synthetic
gauagaauguggaguuugag

SEQ ID NO: 722231 - RNA, 20 nt, Artificial Sequence
  Synthetic
gagagagugagaauuuugag

SEQ ID NO: 722232 - RNA, 20 nt, Artificial Sequence
  Synthetic
gaaaugcaacaaacaaauag

SEQ ID NO: 722233 - RNA, 20 nt, Artificial Sequence
  Synthetic
gguaaguguuucacaaauag

SEQ ID NO: 722234 - RNA, 20 nt, Artificial Sequence
  Synthetic
guucaaaacuuuugcaauag

SEQ ID NO: 722235 - RNA, 20 nt, Artificial Sequence
  Synthetic
guggugagaaguuagaauag

SEQ ID NO: 722236 - RNA, 20 nt, Artificial Sequence
  Synthetic
gcaucuaauagauauaauag

SEQ ID NO: 722237 - RNA, 20 nt, Artificial Sequence
  Synthetic
ggcugcucugcuuuuaauag

SEQ ID NO: 722238 - RNA, 20 nt, Artificial Sequence
  Synthetic
gcacaaauucugaaacauag

SEQ ID NO: 722239 - RNA, 20 nt, Artificial Sequence
  Synthetic
guuuucauuuuuaaacauag

SEQ ID NO: 722240 - RNA, 20 nt, Artificial Sequence
  Synthetic
gauuguuaccuaucacauag

SEQ ID NO: 722241 - RNA, 20 nt, Artificial Sequence
  Synthetic
gaucuuagaaugggacauag

SEQ ID NO: 722242 - RNA, 20 nt, Artificial Sequence
  Synthetic
guaguagguauaaaccauag

SEQ ID NO: 722243 - RNA, 20 nt, Artificial Sequence
  Synthetic
ggagaaugagguguccauag

SEQ ID NO: 722244 - RNA, 20 nt, Artificial Sequence
  Synthetic
guuuuacugaaaaaucauag

SEQ ID NO: 722245 - RNA, 20 nt, Artificial Sequence
  Synthetic
gaucaaaucaaagaucauag

SEQ ID NO: 722246 - RNA, 20 nt, Artificial Sequence
  Synthetic
guucaaaugucaccucauag

SEQ ID NO: 722247 - RNA, 20 nt, Artificial Sequence
  Synthetic
guacauguacagagucauag

SEQ ID NO: 722248 - RNA, 20 nt, Artificial Sequence
  Synthetic
guuccugaaugacuucauag

SEQ ID NO: 722249 - RNA, 20 nt, Artificial Sequence
  Synthetic
gcauaagaucacacagauag

SEQ ID NO: 722250 - RNA, 20 nt, Artificial Sequence
  Synthetic
gugugaaaaaaaucagauag

SEQ ID NO: 722251 - RNA, 20 nt, Artificial Sequence
  Synthetic
guuugucaaagaucagauag

SEQ ID NO: 722252 - RNA, 20 nt, Artificial Sequence
  Synthetic
gagagccuuuccugagauag

SEQ ID NO: 722253 - RNA, 20 nt, Artificial Sequence
  Synthetic
guccgugugagagaugauag

SEQ ID NO: 722254 - RNA, 20 nt, Artificial Sequence
  Synthetic
gaaaagagcauucgugauag

SEQ ID NO: 722255 - RNA, 20 nt, Artificial Sequence
  Synthetic
ggauauuacuuggaauauag

SEQ ID NO: 722256 - RNA, 20 nt, Artificial Sequence
  Synthetic
gcuauagcagagagauauag

SEQ ID NO: 722257 - RNA, 20 nt, Artificial Sequence
  Synthetic
gagagagaugaaugauauag

SEQ ID NO: 722258 - RNA, 20 nt, Artificial Sequence
  Synthetic
gcaaaaaagacaguauauag

SEQ ID NO: 722259 - RNA, 20 nt, Artificial Sequence
  Synthetic
guaagaaagaagaacuauag

SEQ ID NO: 722260 - RNA, 20 nt, Artificial Sequence
  Synthetic
gucagauaaaauaucuauag

SEQ ID NO: 722261 - RNA, 20 nt, Artificial Sequence
  Synthetic
gucgccaggcuggaguauag

SEQ ID NO: 722262 - RNA, 20 nt, Artificial Sequence
  Synthetic
ggaaacauagcuaauuauag

SEQ ID NO: 722263 - RNA, 20 nt, Artificial Sequence
  Synthetic
guagaagcuugucauuauag

SEQ ID NO: 722264 - RNA, 20 nt, Artificial Sequence
  Synthetic
gaaucauucagguguuauag

SEQ ID NO: 722265 - RNA, 20 nt, Artificial Sequence
  Synthetic
ggcaaggguugaagaacuag

SEQ ID NO: 722266 - RNA, 20 nt, Artificial Sequence
  Synthetic
ggugauauaauuggaacuag

SEQ ID NO: 722267 - RNA, 20 nt, Artificial Sequence
  Synthetic
gggggugggaggaucacuag

SEQ ID NO: 722268 - RNA, 20 nt, Artificial Sequence
  Synthetic
gagagacugucacagacuag

SEQ ID NO: 722269 - RNA, 20 nt, Artificial Sequence
  Synthetic
guuggagauguacagacuag

SEQ ID NO: 722270 - RNA, 20 nt, Artificial Sequence
  Synthetic
gaaucuuucuuagaaccuag

SEQ ID NO: 722271 - RNA, 20 nt, Artificial Sequence
  Synthetic
gguugccagcggcauccuag

SEQ ID NO: 722272 - RNA, 20 nt, Artificial Sequence
  Synthetic
gaacagguggggauuccuag

SEQ ID NO: 722273 - RNA, 20 nt, Artificial Sequence
  Synthetic
gacaguggaagaaaagcuag

SEQ ID NO: 722274 - RNA, 20 nt, Artificial Sequence
  Synthetic
gaccuugguuuaauagcuag

SEQ ID NO: 722275 - RNA, 20 nt, Artificial Sequence
  Synthetic
gauaauuuaaauuuagcuag

SEQ ID NO: 722276 - RNA, 20 nt, Artificial Sequence
  Synthetic
gucaggggguggggggcuag

SEQ ID NO: 722277 - RNA, 20 nt, Artificial Sequence
  Synthetic
gagguaauggauauugcuag

SEQ ID NO: 722278 - RNA, 20 nt, Artificial Sequence
  Synthetic
gagaauauuccagaaucuag

SEQ ID NO: 722279 - RNA, 20 nt, Artificial Sequence
  Synthetic
gaaggagauguuaccucuag

SEQ ID NO: 722280 - RNA, 20 nt, Artificial Sequence
  Synthetic
gauuggcauggcuucucuag

SEQ ID NO: 722281 - RNA, 20 nt, Artificial Sequence
  Synthetic
gagauacaacugaagucuag

SEQ ID NO: 722282 - RNA, 20 nt, Artificial Sequence
  Synthetic
gauggaguuuuucagucuag

SEQ ID NO: 722283 - RNA, 20 nt, Artificial Sequence
  Synthetic
guugaaaaucacuggucuag

SEQ ID NO: 722284 - RNA, 20 nt, Artificial Sequence
  Synthetic
gaauauaccagaaugucuag

SEQ ID NO: 722285 - RNA, 20 nt, Artificial Sequence
  Synthetic
guuaagaauauauauucuag

SEQ ID NO: 722286 - RNA, 20 nt, Artificial Sequence
  Synthetic
gcaagaugaaaaaguucuag

SEQ ID NO: 722287 - RNA, 20 nt, Artificial Sequence
  Synthetic
gguacacagguuugaaguag

SEQ ID NO: 722288 - RNA, 20 nt, Artificial Sequence
  Synthetic
gauuccaaaauaaacaguag

SEQ ID NO: 722289 - RNA, 20 nt, Artificial Sequence
  Synthetic
guuauaucauaguccaguag

SEQ ID NO: 722290 - RNA, 20 nt, Artificial Sequence
  Synthetic
gaaggguuuugccucaguag

SEQ ID NO: 722291 - RNA, 20 nt, Artificial Sequence
  Synthetic
guguagaggaaauagaguag

SEQ ID NO: 722292 - RNA, 20 nt, Artificial Sequence
  Synthetic
gguggggagauggggaguag

SEQ ID NO: 722293 - RNA, 20 nt, Artificial Sequence
  Synthetic
gcacauguuauaaguaguag

SEQ ID NO: 722294 - RNA, 20 nt, Artificial Sequence
  Synthetic
gcuauuuguaguaguaguag

SEQ ID NO: 722295 - RNA, 20 nt, Artificial Sequence
  Synthetic
gaaauauauuauuguaguag

SEQ ID NO: 722296 - RNA, 20 nt, Artificial Sequence
  Synthetic
gagaacacauggacacguag

SEQ ID NO: 722297 - RNA, 20 nt, Artificial Sequence
  Synthetic
gaugucaaaaauaaagguag

SEQ ID NO: 722298 - RNA, 20 nt, Artificial Sequence
  Synthetic
gagauggguuggucagguag

SEQ ID NO: 722299 - RNA, 20 nt, Artificial Sequence
  Synthetic
guuugccuaagucgagguag

SEQ ID NO: 722300 - RNA, 20 nt, Artificial Sequence
  Synthetic
guuguuguuccacuagguag

SEQ ID NO: 722301 - RNA, 20 nt, Artificial Sequence
  Synthetic
gaaagugaauauguagguag

SEQ ID NO: 722302 - RNA, 20 nt, Artificial Sequence
  Synthetic
guauuucuguauuuagguag

SEQ ID NO: 722303 - RNA, 20 nt, Artificial Sequence
  Synthetic
gagggguggggguaggguag

SEQ ID NO: 722304 - RNA, 20 nt, Artificial Sequence
  Synthetic
gcugggaggcuccgggguag

SEQ ID NO: 722305 - RNA, 20 nt, Artificial Sequence
  Synthetic
gaaauuaugguuauggguag

SEQ ID NO: 722306 - RNA, 20 nt, Artificial Sequence
  Synthetic
gagggccugacacaugguag

SEQ ID NO: 722307 - RNA, 20 nt, Artificial Sequence
  Synthetic
ggccucugucugccugguag

SEQ ID NO: 722308 - RNA, 20 nt, Artificial Sequence
  Synthetic
gcaaauaaucauaaauguag

SEQ ID NO: 722309 - RNA, 20 nt, Artificial Sequence
  Synthetic
gguuucaaucaaccauguag

SEQ ID NO: 722310 - RNA, 20 nt, Artificial Sequence
  Synthetic
guagcagaagauggauguag

SEQ ID NO: 722311 - RNA, 20 nt, Artificial Sequence
  Synthetic
gguugagaguagaacuguag

SEQ ID NO: 722312 - RNA, 20 nt, Artificial Sequence
  Synthetic
gcacaugucuaaaccuguag

SEQ ID NO: 722313 - RNA, 20 nt, Artificial Sequence
  Synthetic
gguuuaccccuuaucuguag

SEQ ID NO: 722314 - RNA, 20 nt, Artificial Sequence
  Synthetic
gcauucaaagcaguguguag

SEQ ID NO: 722315 - RNA, 20 nt, Artificial Sequence
  Synthetic
gcgcgcguguguguguguag

SEQ ID NO: 722316 - RNA, 20 nt, Artificial Sequence
  Synthetic
gaauuuguucuucauuguag

SEQ ID NO: 722317 - RNA, 20 nt, Artificial Sequence
  Synthetic
guuuacuccuuacuuuguag

SEQ ID NO: 722318 - RNA, 20 nt, Artificial Sequence
  Synthetic
ggauauaaagcauaaauuag

SEQ ID NO: 722319 - RNA, 20 nt, Artificial Sequence
  Synthetic
gaaauggcaauaagaauuag

SEQ ID NO: 722320 - RNA, 20 nt, Artificial Sequence
  Synthetic
guaucuuuaaaaugaauuag

SEQ ID NO: 722321 - RNA, 20 nt, Artificial Sequence
  Synthetic
gcagugaaaagguacauuag

SEQ ID NO: 722322 - RNA, 20 nt, Artificial Sequence
  Synthetic
guuagauauagaaccauuag

SEQ ID NO: 722323 - RNA, 20 nt, Artificial Sequence
  Synthetic
guuauaaaguaccugauuag

SEQ ID NO: 722324 - RNA, 20 nt, Artificial Sequence
  Synthetic
gauuagacacaagauauuag

SEQ ID NO: 722325 - RNA, 20 nt, Artificial Sequence
  Synthetic
gaaauuugcuuuaaucuuag

SEQ ID NO: 722326 - RNA, 20 nt, Artificial Sequence
  Synthetic
gcaacaccuaagccucuuag

SEQ ID NO: 722327 - RNA, 20 nt, Artificial Sequence
  Synthetic
guuauuuugcucucucuuag

SEQ ID NO: 722328 - RNA, 20 nt, Artificial Sequence
  Synthetic
gcucugaggguuucucuuag

SEQ ID NO: 722329 - RNA, 20 nt, Artificial Sequence
  Synthetic
guucaguuuugaguucuuag

SEQ ID NO: 722330 - RNA, 20 nt, Artificial Sequence
  Synthetic
gccaauccagaauuucuuag

SEQ ID NO: 722331 - RNA, 20 nt, Artificial Sequence
  Synthetic
gacugcugacaggaaguuag

SEQ ID NO: 722332 - RNA, 20 nt, Artificial Sequence
  Synthetic
gugcucuuacaaucaguuag

SEQ ID NO: 722333 - RNA, 20 nt, Artificial Sequence
  Synthetic
gaaugcuuaauuucaguuag

SEQ ID NO: 722334 - RNA, 20 nt, Artificial Sequence
  Synthetic
gugaaggagaggagaguuag

SEQ ID NO: 722335 - RNA, 20 nt, Artificial Sequence
  Synthetic
guauuguaauagcuaguuag

SEQ ID NO: 722336 - RNA, 20 nt, Artificial Sequence
  Synthetic
gaccucaacccuaagguuag

SEQ ID NO: 722337 - RNA, 20 nt, Artificial Sequence
  Synthetic
gucgaggggugggagguuag

SEQ ID NO: 722338 - RNA, 20 nt, Artificial Sequence
  Synthetic
gguuuaaaaaauuagguuag

SEQ ID NO: 722339 - RNA, 20 nt, Artificial Sequence
  Synthetic
ggaaagcggguagggguuag

SEQ ID NO: 722340 - RNA, 20 nt, Artificial Sequence
  Synthetic
gaaauauaucccuugguuag

SEQ ID NO: 722341 - RNA, 20 nt, Artificial Sequence
  Synthetic
gagcuauagaauaauguuag

SEQ ID NO: 722342 - RNA, 20 nt, Artificial Sequence
  Synthetic
guuuauuucauugguguuag

SEQ ID NO: 722343 - RNA, 20 nt, Artificial Sequence
  Synthetic
ggauagguggggauuguuag

SEQ ID NO: 722344 - RNA, 20 nt, Artificial Sequence
  Synthetic
ggggagcuaaggaaauuuag

SEQ ID NO: 722345 - RNA, 20 nt, Artificial Sequence
  Synthetic
guuuucccuugaacauuuag

SEQ ID NO: 722346 - RNA, 20 nt, Artificial Sequence
  Synthetic
ggcauggaaggaucauuuag

SEQ ID NO: 722347 - RNA, 20 nt, Artificial Sequence
  Synthetic
ggcggaaguaaaauauuuag

SEQ ID NO: 722348 - RNA, 20 nt, Artificial Sequence
  Synthetic
gcacagagagauguauuuag

SEQ ID NO: 722349 - RNA, 20 nt, Artificial Sequence
  Synthetic
gcaugucuucuauuauuuag

SEQ ID NO: 722350 - RNA, 20 nt, Artificial Sequence
  Synthetic
gcuuaacacagaaccuuuag

SEQ ID NO: 722351 - RNA, 20 nt, Artificial Sequence
  Synthetic
gcuaauuuuuguaucuuuag

SEQ ID NO: 722352 - RNA, 20 nt, Artificial Sequence
  Synthetic
gcaaugaguaaguucuuuag

SEQ ID NO: 722353 - RNA, 20 nt, Artificial Sequence
  Synthetic
ggcaccagagacugguuuag

SEQ ID NO: 722354 - RNA, 20 nt, Artificial Sequence
  Synthetic
gugcuugaccagcuguuuag

SEQ ID NO: 722355 - RNA, 20 nt, Artificial Sequence
  Synthetic
ggaacucugguuacuuuuag

SEQ ID NO: 722356 - RNA, 20 nt, Artificial Sequence
  Synthetic
gaccauccauuuucuuuuag

SEQ ID NO: 722357 - RNA, 20 nt, Artificial Sequence
  Synthetic
gcuaauuuuuguauuuuuag

SEQ ID NO: 722358 - RNA, 20 nt, Artificial Sequence
  Synthetic
gacuauggcuuccuuuuuag

SEQ ID NO: 722359 - RNA, 20 nt, Artificial Sequence
  Synthetic
gaccaggcaaggcuuuuuag

SEQ ID NO: 722360 - RNA, 20 nt, Artificial Sequence
  Synthetic
gguuaggcaaggcuuuuuag

SEQ ID NO: 722361 - RNA, 20 nt, Artificial Sequence
  Synthetic
gaguauuuugagguuuuuag

SEQ ID NO: 722362 - RNA, 20 nt, Artificial Sequence
  Synthetic
ggagugagccaagaaaaacg

SEQ ID NO: 722363 - RNA, 20 nt, Artificial Sequence
  Synthetic
gaacagugcuucaacaaacg

SEQ ID NO: 722364 - RNA, 20 nt, Artificial Sequence
  Synthetic
gaaauugcuuuagauaaacg

SEQ ID NO: 722365 - RNA, 20 nt, Artificial Sequence
  Synthetic
ggcaaugcaaagacacaacg

SEQ ID NO: 722366 - RNA, 20 nt, Artificial Sequence
  Synthetic
guuuaggacugcuuccaacg

SEQ ID NO: 722367 - RNA, 20 nt, Artificial Sequence
  Synthetic
gguagguguauaugucaacg

SEQ ID NO: 722368 - RNA, 20 nt, Artificial Sequence
  Synthetic
gucaaauguaaucaagaacg

SEQ ID NO: 722369 - RNA, 20 nt, Artificial Sequence
  Synthetic
gaaaauggcugaagagaacg

SEQ ID NO: 722370 - RNA, 20 nt, Artificial Sequence
  Synthetic
ggguaauuuauaaaggaacg

SEQ ID NO: 722371 - RNA, 20 nt, Artificial Sequence
  Synthetic
gcaggagaaucacuugaacg

SEQ ID NO: 722372 - RNA, 20 nt, Artificial Sequence
  Synthetic
gcauaaggaaggaaauaacg

SEQ ID NO: 722373 - RNA, 20 nt, Artificial Sequence
  Synthetic
gagguuugcuggggaacacg

SEQ ID NO: 722374 - RNA, 20 nt, Artificial Sequence
  Synthetic
ggucucucccuugacacacg

SEQ ID NO: 722375 - RNA, 20 nt, Artificial Sequence
  Synthetic
gagggcuucccugaaccacg

SEQ ID NO: 722376 - RNA, 20 nt, Artificial Sequence
  Synthetic
gccgaagugggcggaccacg

SEQ ID NO: 722377 - RNA, 20 nt, Artificial Sequence
  Synthetic
gagaaucgcuugaacccacg

SEQ ID NO: 722378 - RNA, 20 nt, Artificial Sequence
  Synthetic
gaaaaggcaggcauuccacg

SEQ ID NO: 722379 - RNA, 20 nt, Artificial Sequence
  Synthetic
ggucccagaucagcaucacg

SEQ ID NO: 722380 - RNA, 20 nt, Artificial Sequence
  Synthetic
gccaagacaggcagaucacg

SEQ ID NO: 722381 - RNA, 20 nt, Artificial Sequence
  Synthetic
gccgaggcaggcagaucacg

SEQ ID NO: 722382 - RNA, 20 nt, Artificial Sequence
  Synthetic
gccaaggcgggcagaucacg

SEQ ID NO: 722383 - RNA, 20 nt, Artificial Sequence
  Synthetic
gccgaggcgggcagaucacg

SEQ ID NO: 722384 - RNA, 20 nt, Artificial Sequence
  Synthetic
gccaaggugggcagaucacg

SEQ ID NO: 722385 - RNA, 20 nt, Artificial Sequence
  Synthetic
gcugaggugggcagaucacg

SEQ ID NO: 722386 - RNA, 20 nt, Artificial Sequence
  Synthetic
gccgaggcagaaggaucacg

SEQ ID NO: 722387 - RNA, 20 nt, Artificial Sequence
  Synthetic
gccgaggcaggcggaucacg

SEQ ID NO: 722388 - RNA, 20 nt, Artificial Sequence
  Synthetic
gccgagacgggcggaucacg

SEQ ID NO: 722389 - RNA, 20 nt, Artificial Sequence
  Synthetic
gcagaggcgggcggaucacg

SEQ ID NO: 722390 - RNA, 20 nt, Artificial Sequence
  Synthetic
gccgaggcgggcggaucacg

SEQ ID NO: 722391 - RNA, 20 nt, Artificial Sequence
  Synthetic
gaugaggcgggcggaucacg

SEQ ID NO: 722392 - RNA, 20 nt, Artificial Sequence
  Synthetic
gccaaggugggcggaucacg

SEQ ID NO: 722393 - RNA, 20 nt, Artificial Sequence
  Synthetic
gcugaagcagguggaucacg

SEQ ID NO: 722394 - RNA, 20 nt, Artificial Sequence
  Synthetic
gccgaggcagguggaucacg

SEQ ID NO: 722395 - RNA, 20 nt, Artificial Sequence
  Synthetic
gcugaggcagguggaucacg

SEQ ID NO: 722396 - RNA, 20 nt, Artificial Sequence
  Synthetic
gccaaggcggguggaucacg

SEQ ID NO: 722397 - RNA, 20 nt, Artificial Sequence
  Synthetic
gcugaggcggguggaucacg

SEQ ID NO: 722398 - RNA, 20 nt, Artificial Sequence
  Synthetic
gccaagguggguggaucacg

SEQ ID NO: 722399 - RNA, 20 nt, Artificial Sequence
  Synthetic
gccgagguggguggaucacg

SEQ ID NO: 722400 - RNA, 20 nt, Artificial Sequence
  Synthetic
gccgaggcaguuggaucacg

SEQ ID NO: 722401 - RNA, 20 nt, Artificial Sequence
  Synthetic
gccgaggcgggcugaucacg

SEQ ID NO: 722402 - RNA, 20 nt, Artificial Sequence
  Synthetic
gucaccugccaaaggucacg

SEQ ID NO: 722403 - RNA, 20 nt, Artificial Sequence
  Synthetic
gcaugugcagauuugucacg

SEQ ID NO: 722404 - RNA, 20 nt, Artificial Sequence
  Synthetic
gaagucuugauaccaagacg

SEQ ID NO: 722405 - RNA, 20 nt, Artificial Sequence
  Synthetic
gcuuuaaaaucauauagacg

SEQ ID NO: 722406 - RNA, 20 nt, Artificial Sequence
  Synthetic
guauuuaagcugaaaggacg

SEQ ID NO: 722407 - RNA, 20 nt, Artificial Sequence
  Synthetic
gcaggcacugugcugugacg

SEQ ID NO: 722408 - RNA, 20 nt, Artificial Sequence
  Synthetic
gagagagggagaaaaauacg

SEQ ID NO: 722409 - RNA, 20 nt, Artificial Sequence
  Synthetic
gcaauuaauaauuaauuacg

SEQ ID NO: 722410 - RNA, 20 nt, Artificial Sequence
  Synthetic
ggaacgagucacaucuuacg

SEQ ID NO: 722411 - RNA, 20 nt, Artificial Sequence
  Synthetic
gacgggaacaucacacaccg

SEQ ID NO: 722412 - RNA, 20 nt, Artificial Sequence
  Synthetic
gaggggaacaucacacaccg

SEQ ID NO: 722413 - RNA, 20 nt, Artificial Sequence
  Synthetic
gcggggaacaucacacaccg

SEQ ID NO: 722414 - RNA, 20 nt, Artificial Sequence
  Synthetic
gcagucauuuucucucaccg

SEQ ID NO: 722415 - RNA, 20 nt, Artificial Sequence
  Synthetic
gagucuuucucuguugcccg

SEQ ID NO: 722416 - RNA, 20 nt, Artificial Sequence
  Synthetic
gcaccauugcacuccagccg

SEQ ID NO: 722417 - RNA, 20 nt, Artificial Sequence
  Synthetic
gucgaagcugcagugagccg

SEQ ID NO: 722418 - RNA, 20 nt, Artificial Sequence
  Synthetic
gcagagguugcagugagccg

SEQ ID NO: 722419 - RNA, 20 nt, Artificial Sequence
  Synthetic
gggguagaaaaggggugccg

SEQ ID NO: 722420 - RNA, 20 nt, Artificial Sequence
  Synthetic
guucugcugcauuagguccg

SEQ ID NO: 722421 - RNA, 20 nt, Artificial Sequence
  Synthetic
guuaacgccuaagcuguccg

SEQ ID NO: 722422 - RNA, 20 nt, Artificial Sequence
  Synthetic
gcauagguauacauguuccg

SEQ ID NO: 722423 - RNA, 20 nt, Artificial Sequence
  Synthetic
gcucaguuaacuuaaaagcg

SEQ ID NO: 722424 - RNA, 20 nt, Artificial Sequence
  Synthetic
gcaggcaaggcacagaagcg

SEQ ID NO: 722425 - RNA, 20 nt, Artificial Sequence
  Synthetic
gagagagagagagagaagcg

SEQ ID NO: 722426 - RNA, 20 nt, Artificial Sequence
  Synthetic
guagaaaacagaaaugagcg

SEQ ID NO: 722427 - RNA, 20 nt, Artificial Sequence
  Synthetic
ggugugggauguugauagcg

SEQ ID NO: 722428 - RNA, 20 nt, Artificial Sequence
  Synthetic
gcuaaaaguaaucacuagcg

SEQ ID NO: 722429 - RNA, 20 nt, Artificial Sequence
  Synthetic
gggaaucgcuugaacccgcg

SEQ ID NO: 722430 - RNA, 20 nt, Artificial Sequence
  Synthetic
gaccuauaaucugaaaggcg

SEQ ID NO: 722431 - RNA, 20 nt, Artificial Sequence
  Synthetic
gaaaauaaaugggccaggcg

SEQ ID NO: 722432 - RNA, 20 nt, Artificial Sequence
  Synthetic
guguauuuuuaguagaggcg

SEQ ID NO: 722433 - RNA, 20 nt, Artificial Sequence
  Synthetic
gauaggguagauaugaggcg

SEQ ID NO: 722434 - RNA, 20 nt, Artificial Sequence
  Synthetic
gacacagagagagauaggcg

SEQ ID NO: 722435 - RNA, 20 nt, Artificial Sequence
  Synthetic
gaacacauagacacagggcg

SEQ ID NO: 722436 - RNA, 20 nt, Artificial Sequence
  Synthetic
gauagauagauagccgggcg

SEQ ID NO: 722437 - RNA, 20 nt, Artificial Sequence
  Synthetic
gauccauuuccggccgggcg

SEQ ID NO: 722438 - RNA, 20 nt, Artificial Sequence
  Synthetic
gacaucaucugggccgggcg

SEQ ID NO: 722439 - RNA, 20 nt, Artificial Sequence
  Synthetic
gauuaagagcuggccgggcg

SEQ ID NO: 722440 - RNA, 20 nt, Artificial Sequence
  Synthetic
gacuucuuggcugccgggcg

SEQ ID NO: 722441 - RNA, 20 nt, Artificial Sequence
  Synthetic
guugucacagcucaggggcg

SEQ ID NO: 722442 - RNA, 20 nt, Artificial Sequence
  Synthetic
gguucucaaaauggggggcg

SEQ ID NO: 722443 - RNA, 20 nt, Artificial Sequence
  Synthetic
gccugucgggggguggggcg

SEQ ID NO: 722444 - RNA, 20 nt, Artificial Sequence
  Synthetic
guucuuuauugggcugggcg

SEQ ID NO: 722445 - RNA, 20 nt, Artificial Sequence
  Synthetic
ggggugugagggagguggcg

SEQ ID NO: 722446 - RNA, 20 nt, Artificial Sequence
  Synthetic
guaguguuaacugcuuggcg

SEQ ID NO: 722447 - RNA, 20 nt, Artificial Sequence
  Synthetic
ggauauggacaucuuuggcg

SEQ ID NO: 722448 - RNA, 20 nt, Artificial Sequence
  Synthetic
guuuguuacauagguaugcg

SEQ ID NO: 722449 - RNA, 20 nt, Artificial Sequence
  Synthetic
ggguuguggggagaggugcg

SEQ ID NO: 722450 - RNA, 20 nt, Artificial Sequence
  Synthetic
gcuuuuaaaacuucaaaucg

SEQ ID NO: 722451 - RNA, 20 nt, Artificial Sequence
  Synthetic
gcuuggggcuugguucaucg

SEQ ID NO: 722452 - RNA, 20 nt, Artificial Sequence
  Synthetic
gaugauggggguagugaucg

SEQ ID NO: 722453 - RNA, 20 nt, Artificial Sequence
  Synthetic
guuuuuaauauuacauaucg

SEQ ID NO: 722454 - RNA, 20 nt, Artificial Sequence
  Synthetic
gccuucuuuauccccuaucg

SEQ ID NO: 722455 - RNA, 20 nt, Artificial Sequence
  Synthetic
gucuugaacuccugaccucg

SEQ ID NO: 722456 - RNA, 20 nt, Artificial Sequence
  Synthetic
gaggaaauggaaguagcucg

SEQ ID NO: 722457 - RNA, 20 nt, Artificial Sequence
  Synthetic
gaaaaaacauuucaugcucg

SEQ ID NO: 722458 - RNA, 20 nt, Artificial Sequence
  Synthetic
gaggauugccuaggaagucg

SEQ ID NO: 722459 - RNA, 20 nt, Artificial Sequence
  Synthetic
gaaggauaguggaggagucg

SEQ ID NO: 722460 - RNA, 20 nt, Artificial Sequence
  Synthetic
gaugagaggagagugagucg

SEQ ID NO: 722461 - RNA, 20 nt, Artificial Sequence
  Synthetic
guggaauuuauuuuacuucg

SEQ ID NO: 722462 - RNA, 20 nt, Artificial Sequence
  Synthetic
gguucccgccgguggguucg

SEQ ID NO: 722463 - RNA, 20 nt, Artificial Sequence
  Synthetic
gccuaaauuauucauguucg

SEQ ID NO: 722464 - RNA, 20 nt, Artificial Sequence
  Synthetic
ggaaauuuaaauuuauuucg

SEQ ID NO: 722465 - RNA, 20 nt, Artificial Sequence
  Synthetic
gagcccggggccagguuucg

SEQ ID NO: 722466 - RNA, 20 nt, Artificial Sequence
  Synthetic
guucuauuuuuaaguuuucg

SEQ ID NO: 722467 - RNA, 20 nt, Artificial Sequence
  Synthetic
gaauguuucccccaaaaagg

SEQ ID NO: 722468 - RNA, 20 nt, Artificial Sequence
  Synthetic
ggaugguaagccuaaaaagg

SEQ ID NO: 722469 - RNA, 20 nt, Artificial Sequence
  Synthetic
gggaccaagcucccaaaagg

SEQ ID NO: 722470 - RNA, 20 nt, Artificial Sequence
  Synthetic
gaagguuagaggccaaaagg

SEQ ID NO: 722471 - RNA, 20 nt, Artificial Sequence
  Synthetic
gggcaagaaagaucaaaagg

SEQ ID NO: 722472 - RNA, 20 nt, Artificial Sequence
  Synthetic
gaaagauaaaaaggaaaagg

SEQ ID NO: 722473 - RNA, 20 nt, Artificial Sequence
  Synthetic
guuaauguaugaggaaaagg

SEQ ID NO: 722474 - RNA, 20 nt, Artificial Sequence
  Synthetic
gagaaaaacacuggaaaagg

SEQ ID NO: 722475 - RNA, 20 nt, Artificial Sequence
  Synthetic
ggagaagugccgagcaaagg

SEQ ID NO: 722476 - RNA, 20 nt, Artificial Sequence
  Synthetic
ggagaagugcugagcaaagg

SEQ ID NO: 722477 - RNA, 20 nt, Artificial Sequence
  Synthetic
gggacuggcaaaaagaaagg

SEQ ID NO: 722478 - RNA, 20 nt, Artificial Sequence
  Synthetic
guaggcuguccuaagaaagg

SEQ ID NO: 722479 - RNA, 20 nt, Artificial Sequence
  Synthetic
gcugacugccaacagaaagg

SEQ ID NO: 722480 - RNA, 20 nt, Artificial Sequence
  Synthetic
ggagacaggagggagaaagg

SEQ ID NO: 722481 - RNA, 20 nt, Artificial Sequence
  Synthetic
gcaaaugcugcuuagaaagg

SEQ ID NO: 722482 - RNA, 20 nt, Artificial Sequence
  Synthetic
gaagugaacugaaggaaagg

SEQ ID NO: 722483 - RNA, 20 nt, Artificial Sequence
  Synthetic
ggagaaguacugaggaaagg

SEQ ID NO: 722484 - RNA, 20 nt, Artificial Sequence
  Synthetic
gguagugguagggggaaagg

SEQ ID NO: 722485 - RNA, 20 nt, Artificial Sequence
  Synthetic
gcuauuuaaaauaugaaagg

SEQ ID NO: 722486 - RNA, 20 nt, Artificial Sequence
  Synthetic
gaaaaguuuguccugaaagg

SEQ ID NO: 722487 - RNA, 20 nt, Artificial Sequence
  Synthetic
guguccguuucaucuaaagg

SEQ ID NO: 722488 - RNA, 20 nt, Artificial Sequence
  Synthetic
gaggauaaugaggcacaagg

SEQ ID NO: 722489 - RNA, 20 nt, Artificial Sequence
  Synthetic
gaggcaccuucuucacaagg

SEQ ID NO: 722490 - RNA, 20 nt, Artificial Sequence
  Synthetic
gugaaggucagaagacaagg

SEQ ID NO: 722491 - RNA, 20 nt, Artificial Sequence
  Synthetic
gucaauguauuuucccaagg

SEQ ID NO: 722492 - RNA, 20 nt, Artificial Sequence
  Synthetic
agcacuuugggaggccaagg

SEQ ID NO: 722493 - RNA, 20 nt, Artificial Sequence
  Synthetic
ggcauuuugggaggccaagg

SEQ ID NO: 722494 - RNA, 20 nt, Artificial Sequence
  Synthetic
gaaagcuccacccagcaagg

SEQ ID NO: 722495 - RNA, 20 nt, Artificial Sequence
  Synthetic
gggaaauuuucaaggcaagg

SEQ ID NO: 722496 - RNA, 20 nt, Artificial Sequence
  Synthetic
gauuuauauaguaugcaagg

SEQ ID NO: 722497 - RNA, 20 nt, Artificial Sequence
  Synthetic
gugggacaugccagucaagg

SEQ ID NO: 722498 - RNA, 20 nt, Artificial Sequence
  Synthetic
gguguggcaggucuucaagg

SEQ ID NO: 722499 - RNA, 20 nt, Artificial Sequence
  Synthetic
gaaaacuuaauaguucaagg

SEQ ID NO: 722500 - RNA, 20 nt, Artificial Sequence
  Synthetic
gagaaauaguugguucaagg

SEQ ID NO: 722501 - RNA, 20 nt, Artificial Sequence
  Synthetic
gcuuguggcuguguucaagg

SEQ ID NO: 722502 - RNA, 20 nt, Artificial Sequence
  Synthetic
guaacuuaaauuuuucaagg

SEQ ID NO: 722503 - RNA, 20 nt, Artificial Sequence
  Synthetic
guuguuuuaaggcaagaagg

SEQ ID NO: 722504 - RNA, 20 nt, Artificial Sequence
  Synthetic
gccauccuaaaaacagaagg

SEQ ID NO: 722505 - RNA, 20 nt, Artificial Sequence
  Synthetic
guuacgaccuugacagaagg

SEQ ID NO: 722506 - RNA, 20 nt, Artificial Sequence
  Synthetic
gacugaaaaggggcagaagg

SEQ ID NO: 722507 - RNA, 20 nt, Artificial Sequence
  Synthetic
gauuccaguguaagagaagg

SEQ ID NO: 722508 - RNA, 20 nt, Artificial Sequence
  Synthetic
gccaagacagagagagaagg

SEQ ID NO: 722509 - RNA, 20 nt, Artificial Sequence
  Synthetic
gaaugaaagacuagagaagg

SEQ ID NO: 722510 - RNA, 20 nt, Artificial Sequence
  Synthetic
ggacaaggcaaaugagaagg

SEQ ID NO: 722511 - RNA, 20 nt, Artificial Sequence
  Synthetic
gcugcugagcugauagaagg

SEQ ID NO: 722512 - RNA, 20 nt, Artificial Sequence
  Synthetic
gaacaagagacuauagaagg

SEQ ID NO: 722513 - RNA, 20 nt, Artificial Sequence
  Synthetic
gacuuaaaaaguauagaagg

SEQ ID NO: 722514 - RNA, 20 nt, Artificial Sequence
  Synthetic
ggaaagaaagggaaggaagg

SEQ ID NO: 722515 - RNA, 20 nt, Artificial Sequence
  Synthetic
gagaagguggggaaggaagg

SEQ ID NO: 722516 - RNA, 20 nt, Artificial Sequence
  Synthetic
gagggagggagggaggaagg

SEQ ID NO: 722517 - RNA, 20 nt, Artificial Sequence
  Synthetic
guguagaugggggaggaagg

SEQ ID NO: 722518 - RNA, 20 nt, Artificial Sequence
  Synthetic
gcuguguguaaugaggaagg

SEQ ID NO: 722519 - RNA, 20 nt, Artificial Sequence
  Synthetic
gcugaagugguugaggaagg

SEQ ID NO: 722520 - RNA, 20 nt, Artificial Sequence
  Synthetic
gaaugagugaggagggaagg

SEQ ID NO: 722521 - RNA, 20 nt, Artificial Sequence
  Synthetic
gcugugggguggggggaagg

SEQ ID NO: 722522 - RNA, 20 nt, Artificial Sequence
  Synthetic
gcuacacagaccugggaagg

SEQ ID NO: 722523 - RNA, 20 nt, Artificial Sequence
  Synthetic
gacuaguagaugugggaagg

SEQ ID NO: 722524 - RNA, 20 nt, Artificial Sequence
  Synthetic
guuucuucaccucuggaagg

SEQ ID NO: 722525 - RNA, 20 nt, Artificial Sequence
  Synthetic
gaagaaagaaaaaaugaagg

SEQ ID NO: 722526 - RNA, 20 nt, Artificial Sequence
  Synthetic
gacuggagaagacaugaagg

SEQ ID NO: 722527 - RNA, 20 nt, Artificial Sequence
  Synthetic
ggauuacauaaccaugaagg

SEQ ID NO: 722528 - RNA, 20 nt, Artificial Sequence
  Synthetic
guucccugaaggacugaagg

SEQ ID NO: 722529 - RNA, 20 nt, Artificial Sequence
  Synthetic
gcuacucaguaggcugaagg

SEQ ID NO: 722530 - RNA, 20 nt, Artificial Sequence
  Synthetic
guaacuagcacuguugaagg

SEQ ID NO: 722531 - RNA, 20 nt, Artificial Sequence
  Synthetic
gaaguggagugaaaauaagg

SEQ ID NO: 722532 - RNA, 20 nt, Artificial Sequence
  Synthetic
guugacauggaaugauaagg

SEQ ID NO: 722533 - RNA, 20 nt, Artificial Sequence
  Synthetic
gcugaguaaauaauauaagg

SEQ ID NO: 722534 - RNA, 20 nt, Artificial Sequence
  Synthetic
gccuccuuaaaaaucuaagg

SEQ ID NO: 722535 - RNA, 20 nt, Artificial Sequence
  Synthetic
gauaaaaauuaucaguaagg

SEQ ID NO: 722536 - RNA, 20 nt, Artificial Sequence
  Synthetic
gaguuggcucgggauuaagg

SEQ ID NO: 722537 - RNA, 20 nt, Artificial Sequence
  Synthetic
guauuuuucaauuauuaagg

SEQ ID NO: 722538 - RNA, 20 nt, Artificial Sequence
  Synthetic
gaguucgggauugcuuaagg

SEQ ID NO: 722539 - RNA, 20 nt, Artificial Sequence
  Synthetic
ggagaaucacucgaaacagg

SEQ ID NO: 722540 - RNA, 20 nt, Artificial Sequence
  Synthetic
guauuugauagugcaacagg

SEQ ID NO: 722541 - RNA, 20 nt, Artificial Sequence
  Synthetic
gauucacugccaguaacagg

SEQ ID NO: 722542 - RNA, 20 nt, Artificial Sequence
  Synthetic
gcaugggaggcugacacagg

SEQ ID NO: 722543 - RNA, 20 nt, Artificial Sequence
  Synthetic
gagacagacacguacacagg

SEQ ID NO: 722544 - RNA, 20 nt, Artificial Sequence
  Synthetic
gcaggaccugcaaccacagg

SEQ ID NO: 722545 - RNA, 20 nt, Artificial Sequence
  Synthetic
gaggacuguuugagcacagg

SEQ ID NO: 722546 - RNA, 20 nt, Artificial Sequence
  Synthetic
gagacucacuugaucacagg

SEQ ID NO: 722547 - RNA, 20 nt, Artificial Sequence
  Synthetic
gaacauuuuuugcucacagg

SEQ ID NO: 722548 - RNA, 20 nt, Artificial Sequence
  Synthetic
gccauuugucuuuucacagg

SEQ ID NO: 722549 - RNA, 20 nt, Artificial Sequence
  Synthetic
gagggauggugggagacagg

SEQ ID NO: 722550 - RNA, 20 nt, Artificial Sequence
  Synthetic
gcgaaggagacagcgacagg

SEQ ID NO: 722551 - RNA, 20 nt, Artificial Sequence
  Synthetic
guggcugcugaucugacagg

SEQ ID NO: 722552 - RNA, 20 nt, Artificial Sequence
  Synthetic
gaauugacacuagguacagg

SEQ ID NO: 722553 - RNA, 20 nt, Artificial Sequence
  Synthetic
guaaauuauugggguacagg

SEQ ID NO: 722554 - RNA, 20 nt, Artificial Sequence
  Synthetic
ggagaauugcuugaaccagg

SEQ ID NO: 722555 - RNA, 20 nt, Artificial Sequence
  Synthetic
gucaagggagagagaccagg

SEQ ID NO: 722556 - RNA, 20 nt, Artificial Sequence
  Synthetic
gugucaagggagagaccagg

SEQ ID NO: 722557 - RNA, 20 nt, Artificial Sequence
  Synthetic
gagaaccgcuucaacccagg

SEQ ID NO: 722558 - RNA, 20 nt, Artificial Sequence
  Synthetic
gagaaucacuggaacccagg

SEQ ID NO: 722559 - RNA, 20 nt, Artificial Sequence
  Synthetic
gagaauggcgugaacccagg

SEQ ID NO: 722560 - RNA, 20 nt, Artificial Sequence
  Synthetic
gagaaucacuugaacccagg

SEQ ID NO: 722561 - RNA, 20 nt, Artificial Sequence
  Synthetic
gagaaucccuugaacccagg

SEQ ID NO: 722562 - RNA, 20 nt, Artificial Sequence
  Synthetic
gagaaucgcuugaacccagg

SEQ ID NO: 722563 - RNA, 20 nt, Artificial Sequence
  Synthetic
gagaauugcuugaacccagg

SEQ ID NO: 722564 - RNA, 20 nt, Artificial Sequence
  Synthetic
gagaaucauuugaacccagg

SEQ ID NO: 722565 - RNA, 20 nt, Artificial Sequence
  Synthetic
gagaaucguuugaacccagg

SEQ ID NO: 722566 - RNA, 20 nt, Artificial Sequence
  Synthetic
gucucacucugucacccagg

SEQ ID NO: 722567 - RNA, 20 nt, Artificial Sequence
  Synthetic
ggggaucacccgagcccagg

SEQ ID NO: 722568 - RNA, 20 nt, Artificial Sequence
  Synthetic
gaggaucacuugagcccagg

SEQ ID NO: 722569 - RNA, 20 nt, Artificial Sequence
  Synthetic
gagaacugcuugagcccagg

SEQ ID NO: 722570 - RNA, 20 nt, Artificial Sequence
  Synthetic
ggcugaaacauucagccagg

SEQ ID NO: 722571 - RNA, 20 nt, Artificial Sequence
  Synthetic
ggggccauucaagcgccagg

SEQ ID NO: 722572 - RNA, 20 nt, Artificial Sequence
  Synthetic
ggacagugauccuugccagg

SEQ ID NO: 722573 - RNA, 20 nt, Artificial Sequence
  Synthetic
gagauaagguaagauccagg

SEQ ID NO: 722574 - RNA, 20 nt, Artificial Sequence
  Synthetic
guugugaccagcucuccagg

SEQ ID NO: 722575 - RNA, 20 nt, Artificial Sequence
  Synthetic
gaguuaaguaacuuuccagg

SEQ ID NO: 722576 - RNA, 20 nt, Artificial Sequence
  Synthetic
gcaaacaacgagacagcagg

SEQ ID NO: 722577 - RNA, 20 nt, Artificial Sequence
  Synthetic
gaagguugaauuucagcagg

SEQ ID NO: 722578 - RNA, 20 nt, Artificial Sequence
  Synthetic
gcaggaggaggaggagcagg

SEQ ID NO: 722579 - RNA, 20 nt, Artificial Sequence
  Synthetic
ggagcucccagaguagcagg

SEQ ID NO: 722580 - RNA, 20 nt, Artificial Sequence
  Synthetic
cuuugggaggccgaggcagg

SEQ ID NO: 722581 - RNA, 20 nt, Artificial Sequence
  Synthetic
gagagagagauguaggcagg

SEQ ID NO: 722582 - RNA, 20 nt, Artificial Sequence
  Synthetic
ggagaugucaauuaggcagg

SEQ ID NO: 722583 - RNA, 20 nt, Artificial Sequence
  Synthetic
gugguggggcuuggggcagg

SEQ ID NO: 722584 - RNA, 20 nt, Artificial Sequence
  Synthetic
guggggcaauuucuggcagg

SEQ ID NO: 722585 - RNA, 20 nt, Artificial Sequence
  Synthetic
ggcuggagugcaguggcagg

SEQ ID NO: 722586 - RNA, 20 nt, Artificial Sequence
  Synthetic
gagucaggcaauuuggcagg

SEQ ID NO: 722587 - RNA, 20 nt, Artificial Sequence
  Synthetic
gauuuaaaacaagcugcagg

SEQ ID NO: 722588 - RNA, 20 nt, Artificial Sequence
  Synthetic
gacgguggguggggugcagg

SEQ ID NO: 722589 - RNA, 20 nt, Artificial Sequence
  Synthetic
gaaaaaggagaaaaaucagg

SEQ ID NO: 722590 - RNA, 20 nt, Artificial Sequence
  Synthetic
gaacuagagagaccaucagg

SEQ ID NO: 722591 - RNA, 20 nt, Artificial Sequence
  Synthetic
gcuggagucuugguaucagg

SEQ ID NO: 722592 - RNA, 20 nt, Artificial Sequence
  Synthetic
gauagucccagcuacucagg

SEQ ID NO: 722593 - RNA, 20 nt, Artificial Sequence
  Synthetic
guacugaguagcuacucagg

SEQ ID NO: 722594 - RNA, 20 nt, Artificial Sequence
  Synthetic
ggugugggaaguuucucagg

SEQ ID NO: 722595 - RNA, 20 nt, Artificial Sequence
  Synthetic
ggaggugucucccagucagg

SEQ ID NO: 722596 - RNA, 20 nt, Artificial Sequence
  Synthetic
gguuaaaaacuuuagucagg

SEQ ID NO: 722597 - RNA, 20 nt, Artificial Sequence
  Synthetic
gguagacacauggggucagg

SEQ ID NO: 722598 - RNA, 20 nt, Artificial Sequence
  Synthetic
gucuccauuuagaugucagg

SEQ ID NO: 722599 - RNA, 20 nt, Artificial Sequence
  Synthetic
ggagaaauaaaguugucagg

SEQ ID NO: 722600 - RNA, 20 nt, Artificial Sequence
  Synthetic
guucagcaugacaauucagg

SEQ ID NO: 722601 - RNA, 20 nt, Artificial Sequence
  Synthetic
gagacaguuucuacuucagg

SEQ ID NO: 722602 - RNA, 20 nt, Artificial Sequence
  Synthetic
guuuuauuacuugcuucagg

SEQ ID NO: 722603 - RNA, 20 nt, Artificial Sequence
  Synthetic
gcuggcugaauaucuucagg

SEQ ID NO: 722604 - RNA, 20 nt, Artificial Sequence
  Synthetic
gaugauaugaaguguucagg

SEQ ID NO: 722605 - RNA, 20 nt, Artificial Sequence
  Synthetic
gaaaacagccuaaaaagagg

SEQ ID NO: 722606 - RNA, 20 nt, Artificial Sequence
  Synthetic
ggaaaacauuuaaaaagagg

SEQ ID NO: 722607 - RNA, 20 nt, Artificial Sequence
  Synthetic
gguaacacugaugcaagagg

SEQ ID NO: 722608 - RNA, 20 nt, Artificial Sequence
  Synthetic
ggucaugcugaugcaagagg

SEQ ID NO: 722609 - RNA, 20 nt, Artificial Sequence
  Synthetic
gcaggcuagaacagaagagg

SEQ ID NO: 722610 - RNA, 20 nt, Artificial Sequence
  Synthetic
guagaguguaguagaagagg

SEQ ID NO: 722611 - RNA, 20 nt, Artificial Sequence
  Synthetic
gugcuauaggagguaagagg

SEQ ID NO: 722612 - RNA, 20 nt, Artificial Sequence
  Synthetic
guugugugacucagcagagg

SEQ ID NO: 722613 - RNA, 20 nt, Artificial Sequence
  Synthetic
gcgcuaggggggugcagagg

SEQ ID NO: 722614 - RNA, 20 nt, Artificial Sequence
  Synthetic
ggaggaaccucaaagagagg

SEQ ID NO: 722615 - RNA, 20 nt, Artificial Sequence
  Synthetic
gcaagaguggugaagagagg

SEQ ID NO: 722616 - RNA, 20 nt, Artificial Sequence
  Synthetic
gcacuucucacucagagagg

SEQ ID NO: 722617 - RNA, 20 nt, Artificial Sequence
  Synthetic
ggaaggcuaggaaggagagg

SEQ ID NO: 722618 - RNA, 20 nt, Artificial Sequence
  Synthetic
gaguguuauuccuauagagg

SEQ ID NO: 722619 - RNA, 20 nt, Artificial Sequence
  Synthetic
gaagacaaccucuauagagg

SEQ ID NO: 722620 - RNA, 20 nt, Artificial Sequence
  Synthetic
guggcagagaggucuagagg

SEQ ID NO: 722621 - RNA, 20 nt, Artificial Sequence
  Synthetic
gagguugcagugagccgagg

SEQ ID NO: 722622 - RNA, 20 nt, Artificial Sequence
  Synthetic
gcacuuuggggaggccgagg

SEQ ID NO: 722623 - RNA, 20 nt, Artificial Sequence
  Synthetic
gcaauccaauguaaaggagg

SEQ ID NO: 722624 - RNA, 20 nt, Artificial Sequence
  Synthetic
ggggaggggugugaaggagg

SEQ ID NO: 722625 - RNA, 20 nt, Artificial Sequence
  Synthetic
gaaucacucgaaacaggagg

SEQ ID NO: 722626 - RNA, 20 nt, Artificial Sequence
  Synthetic
gucagaagacgaacaggagg

SEQ ID NO: 722627 - RNA, 20 nt, Artificial Sequence
  Synthetic
ggaccugcaaccacaggagg

SEQ ID NO: 722628 - RNA, 20 nt, Artificial Sequence
  Synthetic
gcugcugaucugacaggagg

SEQ ID NO: 722629 - RNA, 20 nt, Artificial Sequence
  Synthetic
gaauugcuugaaccaggagg

SEQ ID NO: 722630 - RNA, 20 nt, Artificial Sequence
  Synthetic
aaucgcuugaacccaggagg

SEQ ID NO: 722631 - RNA, 20 nt, Artificial Sequence
  Synthetic
gaucacccgagcccaggagg

SEQ ID NO: 722632 - RNA, 20 nt, Artificial Sequence
  Synthetic
guagaaacaaauagaggagg

SEQ ID NO: 722633 - RNA, 20 nt, Artificial Sequence
  Synthetic
gcaaggcuuuuuagaggagg

SEQ ID NO: 722634 - RNA, 20 nt, Artificial Sequence
  Synthetic
gagauguaggcaggaggagg

SEQ ID NO: 722635 - RNA, 20 nt, Artificial Sequence
  Synthetic
gucacagaaguuauaggagg

SEQ ID NO: 722636 - RNA, 20 nt, Artificial Sequence
  Synthetic
ggcuggaggacacagggagg

SEQ ID NO: 722637 - RNA, 20 nt, Artificial Sequence
  Synthetic
guguaaguaaacccgggagg

SEQ ID NO: 722638 - RNA, 20 nt, Artificial Sequence
  Synthetic
gauagcuugaacccgggagg

SEQ ID NO: 722639 - RNA, 20 nt, Artificial Sequence
  Synthetic
aauugcuugaacccgggagg

SEQ ID NO: 722640 - RNA, 20 nt, Artificial Sequence
  Synthetic
gauggcaugaauccgggagg

SEQ ID NO: 722641 - RNA, 20 nt, Artificial Sequence
  Synthetic
ggaauuuuauuuaggggagg

SEQ ID NO: 722642 - RNA, 20 nt, Artificial Sequence
  Synthetic
gugagagaaagugggggagg

SEQ ID NO: 722643 - RNA, 20 nt, Artificial Sequence
  Synthetic
ggaguggggagggugggagg

SEQ ID NO: 722644 - RNA, 20 nt, Artificial Sequence
  Synthetic
gaaacauaaaaugugggagg

SEQ ID NO: 722645 - RNA, 20 nt, Artificial Sequence
  Synthetic
gucccuuaccuugugggagg

SEQ ID NO: 722646 - RNA, 20 nt, Artificial Sequence
  Synthetic
gucauauguuuugugggagg

SEQ ID NO: 722647 - RNA, 20 nt, Artificial Sequence
  Synthetic
guuaacagaggcuugggagg

SEQ ID NO: 722648 - RNA, 20 nt, Artificial Sequence
  Synthetic
gaaucccuugaaccuggagg

SEQ ID NO: 722649 - RNA, 20 nt, Artificial Sequence
  Synthetic
guaugucccggggguggagg

SEQ ID NO: 722650 - RNA, 20 nt, Artificial Sequence
  Synthetic
gacaggcagaucuguggagg

SEQ ID NO: 722651 - RNA, 20 nt, Artificial Sequence
  Synthetic
guaacuuggaagauuggagg

SEQ ID NO: 722652 - RNA, 20 nt, Artificial Sequence
  Synthetic
gugguggugguuauuggagg

SEQ ID NO: 722653 - RNA, 20 nt, Artificial Sequence
  Synthetic
guagaaggugagguuggagg

SEQ ID NO: 722654 - RNA, 20 nt, Artificial Sequence
  Synthetic
guaauccccaauguuggagg

SEQ ID NO: 722655 - RNA, 20 nt, Artificial Sequence
  Synthetic
guaauucccaguguuggagg

SEQ ID NO: 722656 - RNA, 20 nt, Artificial Sequence
  Synthetic
gaaggcccauaaaaaugagg

SEQ ID NO: 722657 - RNA, 20 nt, Artificial Sequence
  Synthetic
guggugggucuugaaugagg

SEQ ID NO: 722658 - RNA, 20 nt, Artificial Sequence
  Synthetic
gaaagaaguaccuaaugagg

SEQ ID NO: 722659 - RNA, 20 nt, Artificial Sequence
  Synthetic
gugugucucugcacaugagg

SEQ ID NO: 722660 - RNA, 20 nt, Artificial Sequence
  Synthetic
gaguaaacgugaauaugagg

SEQ ID NO: 722661 - RNA, 20 nt, Artificial Sequence
  Synthetic
gacugugcuuuucacugagg

SEQ ID NO: 722662 - RNA, 20 nt, Artificial Sequence
  Synthetic
agcuacucaggaggcugagg

SEQ ID NO: 722663 - RNA, 20 nt, Artificial Sequence
  Synthetic
ggguauaaaaaaaagugagg

SEQ ID NO: 722664 - RNA, 20 nt, Artificial Sequence
  Synthetic
gauguccagcaggggugagg

SEQ ID NO: 722665 - RNA, 20 nt, Artificial Sequence
  Synthetic
guauaaguaugugugugagg

SEQ ID NO: 722666 - RNA, 20 nt, Artificial Sequence
  Synthetic
gauggucgcuuggauugagg

SEQ ID NO: 722667 - RNA, 20 nt, Artificial Sequence
  Synthetic
gaaggcaagauauauugagg

SEQ ID NO: 722668 - RNA, 20 nt, Artificial Sequence
  Synthetic
ggugggcggaucacuugagg

SEQ ID NO: 722669 - RNA, 20 nt, Artificial Sequence
  Synthetic
gaaaggagcccagcuugagg

SEQ ID NO: 722670 - RNA, 20 nt, Artificial Sequence
  Synthetic
gugggcugcacugcuugagg

SEQ ID NO: 722671 - RNA, 20 nt, Artificial Sequence
  Synthetic
ggacuaagcagcaguugagg

SEQ ID NO: 722672 - RNA, 20 nt, Artificial Sequence
  Synthetic
ggguaguggggggguugagg

SEQ ID NO: 722673 - RNA, 20 nt, Artificial Sequence
  Synthetic
ggagggucaggaagaauagg

SEQ ID NO: 722674 - RNA, 20 nt, Artificial Sequence
  Synthetic
gaacgcuaguacaccauagg

SEQ ID NO: 722675 - RNA, 20 nt, Artificial Sequence
  Synthetic
gauguacuaacucccauagg

SEQ ID NO: 722676 - RNA, 20 nt, Artificial Sequence
  Synthetic
guguggagguaggggauagg

SEQ ID NO: 722677 - RNA, 20 nt, Artificial Sequence
  Synthetic
gaaaggaaaaaugugauagg

SEQ ID NO: 722678 - RNA, 20 nt, Artificial Sequence
  Synthetic
gaacaggccauacauauagg

SEQ ID NO: 722679 - RNA, 20 nt, Artificial Sequence
  Synthetic
gauguuuuaaaguauauagg

SEQ ID NO: 722680 - RNA, 20 nt, Artificial Sequence
  Synthetic
gccucaaagaacucuauagg

SEQ ID NO: 722681 - RNA, 20 nt, Artificial Sequence
  Synthetic
gaaagaaugaaaguuauagg

SEQ ID NO: 722682 - RNA, 20 nt, Artificial Sequence
  Synthetic
gaaccaggaagauuuauagg

SEQ ID NO: 722683 - RNA, 20 nt, Artificial Sequence
  Synthetic
guaaaauaucccucacuagg

SEQ ID NO: 722684 - RNA, 20 nt, Artificial Sequence
  Synthetic
gagaaucgcuugaaccuagg

SEQ ID NO: 722685 - RNA, 20 nt, Artificial Sequence
  Synthetic
gaggcugugauuucccuagg

SEQ ID NO: 722686 - RNA, 20 nt, Artificial Sequence
  Synthetic
guguugugcuggguccuagg

SEQ ID NO: 722687 - RNA, 20 nt, Artificial Sequence
  Synthetic
gggucaaugcaaaagcuagg

SEQ ID NO: 722688 - RNA, 20 nt, Artificial Sequence
  Synthetic
ggguuacuuccugggcuagg

SEQ ID NO: 722689 - RNA, 20 nt, Artificial Sequence
  Synthetic
gcacuggagcagcaucuagg

SEQ ID NO: 722690 - RNA, 20 nt, Artificial Sequence
  Synthetic
guagagaacaagaaaguagg

SEQ ID NO: 722691 - RNA, 20 nt, Artificial Sequence
  Synthetic
guggagaauuauccaguagg

SEQ ID NO: 722692 - RNA, 20 nt, Artificial Sequence
  Synthetic
ggaaagccucacugaguagg

SEQ ID NO: 722693 - RNA, 20 nt, Artificial Sequence
  Synthetic
gaagcucacaauugaguagg

SEQ ID NO: 722694 - RNA, 20 nt, Artificial Sequence
  Synthetic
guagguuaaaauguaguagg

SEQ ID NO: 722695 - RNA, 20 nt, Artificial Sequence
  Synthetic
gagaaucgcuugaacguagg

SEQ ID NO: 722696 - RNA, 20 nt, Artificial Sequence
  Synthetic
gucucuaacauucagguagg

SEQ ID NO: 722697 - RNA, 20 nt, Artificial Sequence
  Synthetic
gaaguguugcuggggguagg

SEQ ID NO: 722698 - RNA, 20 nt, Artificial Sequence
  Synthetic
gugaagaguuuguggguagg

SEQ ID NO: 722699 - RNA, 20 nt, Artificial Sequence
  Synthetic
gaggcugggaagaguguagg

SEQ ID NO: 722700 - RNA, 20 nt, Artificial Sequence
  Synthetic
ggaguuaccaugaaauuagg

SEQ ID NO: 722701 - RNA, 20 nt, Artificial Sequence
  Synthetic
ggaaucuaaacuggauuagg

SEQ ID NO: 722702 - RNA, 20 nt, Artificial Sequence
  Synthetic
gagagccugucucuauuagg

SEQ ID NO: 722703 - RNA, 20 nt, Artificial Sequence
  Synthetic
gagaauggugugaacuuagg

SEQ ID NO: 722704 - RNA, 20 nt, Artificial Sequence
  Synthetic
gguggcaggacgcacuuagg

SEQ ID NO: 722705 - RNA, 20 nt, Artificial Sequence
  Synthetic
guugagauaaacuccuuagg

SEQ ID NO: 722706 - RNA, 20 nt, Artificial Sequence
  Synthetic
gacagcagaagaggguuagg

SEQ ID NO: 722707 - RNA, 20 nt, Artificial Sequence
  Synthetic
gcaauauacagcaauuuagg

SEQ ID NO: 722708 - RNA, 20 nt, Artificial Sequence
  Synthetic
gucagcucgggcaauuuagg

SEQ ID NO: 722709 - RNA, 20 nt, Artificial Sequence
  Synthetic
gagaaagaaacauauuuagg

SEQ ID NO: 722710 - RNA, 20 nt, Artificial Sequence
  Synthetic
guaaauguucuaagaaacgg

SEQ ID NO: 722711 - RNA, 20 nt, Artificial Sequence
  Synthetic
gauggcaacaauagaaacgg

SEQ ID NO: 722712 - RNA, 20 nt, Artificial Sequence
  Synthetic
guauuuguggccgggcacgg

SEQ ID NO: 722713 - RNA, 20 nt, Artificial Sequence
  Synthetic
gggcuauugccugggcacgg

SEQ ID NO: 722714 - RNA, 20 nt, Artificial Sequence
  Synthetic
gauguugaggcugggcacgg

SEQ ID NO: 722715 - RNA, 20 nt, Artificial Sequence
  Synthetic
guucucucggcugggcacgg

SEQ ID NO: 722716 - RNA, 20 nt, Artificial Sequence
  Synthetic
gaugaauuggcugggcacgg

SEQ ID NO: 722717 - RNA, 20 nt, Artificial Sequence
  Synthetic
gugagauguuugagucacgg

SEQ ID NO: 722718 - RNA, 20 nt, Artificial Sequence
  Synthetic
gucguggggugaggggacgg

SEQ ID NO: 722719 - RNA, 20 nt, Artificial Sequence
  Synthetic
gcaaguuaugcaucugacgg

SEQ ID NO: 722720 - RNA, 20 nt, Artificial Sequence
  Synthetic
gccuguagucccagcuacgg

SEQ ID NO: 722721 - RNA, 20 nt, Artificial Sequence
  Synthetic
gguagugguggggguuacgg

SEQ ID NO: 722722 - RNA, 20 nt, Artificial Sequence
  Synthetic
gguguggugguaugcaccgg

SEQ ID NO: 722723 - RNA, 20 nt, Artificial Sequence
  Synthetic
gauuaaaauugaaugaccgg

SEQ ID NO: 722724 - RNA, 20 nt, Artificial Sequence
  Synthetic
gguuugacaguuuccuccgg

SEQ ID NO: 722725 - RNA, 20 nt, Artificial Sequence
  Synthetic
gagauauauauuuuuuccgg

SEQ ID NO: 722726 - RNA, 20 nt, Artificial Sequence
  Synthetic
gggaaguggggaagaagcgg

SEQ ID NO: 722727 - RNA, 20 nt, Artificial Sequence
  Synthetic
ggauuaacaccugugagcgg

SEQ ID NO: 722728 - RNA, 20 nt, Artificial Sequence
  Synthetic
guucucaaaauggggggcgg

SEQ ID NO: 722729 - RNA, 20 nt, Artificial Sequence
  Synthetic
gacaguguuugcaguggcgg

SEQ ID NO: 722730 - RNA, 20 nt, Artificial Sequence
  Synthetic
gauauggacaucuuuggcgg

SEQ ID NO: 722731 - RNA, 20 nt, Artificial Sequence
  Synthetic
gguuucccggccagaugcgg

SEQ ID NO: 722732 - RNA, 20 nt, Artificial Sequence
  Synthetic
gguaaauuggccaggugcgg

SEQ ID NO: 722733 - RNA, 20 nt, Artificial Sequence
  Synthetic
gagaaacaggccgggugcgg

SEQ ID NO: 722734 - RNA, 20 nt, Artificial Sequence
  Synthetic
gucacugugcaaguaaucgg

SEQ ID NO: 722735 - RNA, 20 nt, Artificial Sequence
  Synthetic
ggggacugugguggggucgg

SEQ ID NO: 722736 - RNA, 20 nt, Artificial Sequence
  Synthetic
guccaggagaaugaaaaggg

SEQ ID NO: 722737 - RNA, 20 nt, Artificial Sequence
  Synthetic
gcaugaucucuauaaaaggg

SEQ ID NO: 722738 - RNA, 20 nt, Artificial Sequence
  Synthetic
gaguaguaguucucaaaggg

SEQ ID NO: 722739 - RNA, 20 nt, Artificial Sequence
  Synthetic
gggaaggaaaagggaaaggg

SEQ ID NO: 722740 - RNA, 20 nt, Artificial Sequence
  Synthetic
guagugguagggggaaaggg

SEQ ID NO: 722741 - RNA, 20 nt, Artificial Sequence
  Synthetic
guuagaggauggugcaaggg

SEQ ID NO: 722742 - RNA, 20 nt, Artificial Sequence
  Synthetic
guuucauacaaaaagaaggg

SEQ ID NO: 722743 - RNA, 20 nt, Artificial Sequence
  Synthetic
guauagaaugagaagaaggg

SEQ ID NO: 722744 - RNA, 20 nt, Artificial Sequence
  Synthetic
gaaauaugacuggagaaggg

SEQ ID NO: 722745 - RNA, 20 nt, Artificial Sequence
  Synthetic
gguagaaagaacaggaaggg

SEQ ID NO: 722746 - RNA, 20 nt, Artificial Sequence
  Synthetic
guggagaucaccaggaaggg

SEQ ID NO: 722747 - RNA, 20 nt, Artificial Sequence
  Synthetic
ggcccuguacuagggaaggg

SEQ ID NO: 722748 - RNA, 20 nt, Artificial Sequence
  Synthetic
ggauucacucaggggaaggg

SEQ ID NO: 722749 - RNA, 20 nt, Artificial Sequence
  Synthetic
guuguggggugggggaaggg

SEQ ID NO: 722750 - RNA, 20 nt, Artificial Sequence
  Synthetic
ggaugugugugugggaaggg

SEQ ID NO: 722751 - RNA, 20 nt, Artificial Sequence
  Synthetic
guuguauguagguggaaggg

SEQ ID NO: 722752 - RNA, 20 nt, Artificial Sequence
  Synthetic
gaaaaagugauaaugaaggg

SEQ ID NO: 722753 - RNA, 20 nt, Artificial Sequence
  Synthetic
gagaacacauagacacaggg

SEQ ID NO: 722754 - RNA, 20 nt, Artificial Sequence
  Synthetic
gagaacacauggacacaggg

SEQ ID NO: 722755 - RNA, 20 nt, Artificial Sequence
  Synthetic
gaaaacauauggacacaggg

SEQ ID NO: 722756 - RNA, 20 nt, Artificial Sequence
  Synthetic
gagaacacuuggacacaggg

SEQ ID NO: 722757 - RNA, 20 nt, Artificial Sequence
  Synthetic
gaaggcaccucuucacaggg

SEQ ID NO: 722758 - RNA, 20 nt, Artificial Sequence
  Synthetic
gcauuugccacccuccaggg

SEQ ID NO: 722759 - RNA, 20 nt, Artificial Sequence
  Synthetic
gcugaaggcaauuuccaggg

SEQ ID NO: 722760 - RNA, 20 nt, Artificial Sequence
  Synthetic
gagaugucaauuaggcaggg

SEQ ID NO: 722761 - RNA, 20 nt, Artificial Sequence
  Synthetic
gggcuucacaaugaucaggg

SEQ ID NO: 722762 - RNA, 20 nt, Artificial Sequence
  Synthetic
gguuauugcucuucucaggg

SEQ ID NO: 722763 - RNA, 20 nt, Artificial Sequence
  Synthetic
guuccaggcccacaagaggg

SEQ ID NO: 722764 - RNA, 20 nt, Artificial Sequence
  Synthetic
ggggauuggggggcagaggg

SEQ ID NO: 722765 - RNA, 20 nt, Artificial Sequence
  Synthetic
ggcaguuuuccaagagaggg

SEQ ID NO: 722766 - RNA, 20 nt, Artificial Sequence
  Synthetic
ggagagagagagagagaggg

SEQ ID NO: 722767 - RNA, 20 nt, Artificial Sequence
  Synthetic
gaagugugaaggagagaggg

SEQ ID NO: 722768 - RNA, 20 nt, Artificial Sequence
  Synthetic
gcaacacagaugagagaggg

SEQ ID NO: 722769 - RNA, 20 nt, Artificial Sequence
  Synthetic
gacucagaagggcgagaggg

SEQ ID NO: 722770 - RNA, 20 nt, Artificial Sequence
  Synthetic
gagggagagaguggagaggg

SEQ ID NO: 722771 - RNA, 20 nt, Artificial Sequence
  Synthetic
gaacacuuggagauagaggg

SEQ ID NO: 722772 - RNA, 20 nt, Artificial Sequence
  Synthetic
gaagacacagaaaaggaggg

SEQ ID NO: 722773 - RNA, 20 nt, Artificial Sequence
  Synthetic
gaagagaaccagaaggaggg

SEQ ID NO: 722774 - RNA, 20 nt, Artificial Sequence
  Synthetic
ggacuacagaggaaggaggg

SEQ ID NO: 722775 - RNA, 20 nt, Artificial Sequence
  Synthetic
gagggagggaggaaggaggg

SEQ ID NO: 722776 - RNA, 20 nt, Artificial Sequence
  Synthetic
gacuacuagagggaggaggg

SEQ ID NO: 722777 - RNA, 20 nt, Artificial Sequence
  Synthetic
gcaaaacaaaacuaggaggg

SEQ ID NO: 722778 - RNA, 20 nt, Artificial Sequence
  Synthetic
gagagaguggagagggaggg

SEQ ID NO: 722779 - RNA, 20 nt, Artificial Sequence
  Synthetic
gagggaggaaggagggaggg

SEQ ID NO: 722780 - RNA, 20 nt, Artificial Sequence
  Synthetic
gaggaaggagggagggaggg

SEQ ID NO: 722781 - RNA, 20 nt, Artificial Sequence
  Synthetic
ggcuccgggguaggggaggg

SEQ ID NO: 722782 - RNA, 20 nt, Artificial Sequence
  Synthetic
gugguggggucgggggaggg

SEQ ID NO: 722783 - RNA, 20 nt, Artificial Sequence
  Synthetic
guuguggggucgggggaggg

SEQ ID NO: 722784 - RNA, 20 nt, Artificial Sequence
  Synthetic
gucgugggguggggggaggg

SEQ ID NO: 722785 - RNA, 20 nt, Artificial Sequence
  Synthetic
guggugggguggggggaggg

SEQ ID NO: 722786 - RNA, 20 nt, Artificial Sequence
  Synthetic
gcugugggguggggggaggg

SEQ ID NO: 722787 - RNA, 20 nt, Artificial Sequence
  Synthetic
guugugggguggggggaggg

SEQ ID NO: 722788 - RNA, 20 nt, Artificial Sequence
  Synthetic
gacuacuagaguggggaggg

SEQ ID NO: 722789 - RNA, 20 nt, Artificial Sequence
  Synthetic
gccuacuggaguggggaggg

SEQ ID NO: 722790 - RNA, 20 nt, Artificial Sequence
  Synthetic
gggaggcugaggugggaggg

SEQ ID NO: 722791 - RNA, 20 nt, Artificial Sequence
  Synthetic
ggugguuugagaguggaggg

SEQ ID NO: 722792 - RNA, 20 nt, Artificial Sequence
  Synthetic
gacuauuagaguguggaggg

SEQ ID NO: 722793 - RNA, 20 nt, Artificial Sequence
  Synthetic
guuccuucacucuaugaggg

SEQ ID NO: 722794 - RNA, 20 nt, Artificial Sequence
  Synthetic
ggcuuccuuuuggcugaggg

SEQ ID NO: 722795 - RNA, 20 nt, Artificial Sequence
  Synthetic
ggucauuaggaugcugaggg

SEQ ID NO: 722796 - RNA, 20 nt, Artificial Sequence
  Synthetic
gaauguuagugaggugaggg

SEQ ID NO: 722797 - RNA, 20 nt, Artificial Sequence
  Synthetic
gaucuguggcaaugugaggg

SEQ ID NO: 722798 - RNA, 20 nt, Artificial Sequence
  Synthetic
ggcauccuagaaauugaggg

SEQ ID NO: 722799 - RNA, 20 nt, Artificial Sequence
  Synthetic
gauguguaagaaguugaggg

SEQ ID NO: 722800 - RNA, 20 nt, Artificial Sequence
  Synthetic
gggaaucuuauuuuugaggg

SEQ ID NO: 722801 - RNA, 20 nt, Artificial Sequence
  Synthetic
gagggucaggaagaauaggg

SEQ ID NO: 722802 - RNA, 20 nt, Artificial Sequence
  Synthetic
gggagugggaaugaguaggg

SEQ ID NO: 722803 - RNA, 20 nt, Artificial Sequence
  Synthetic
gaacagucugguggguaggg

SEQ ID NO: 722804 - RNA, 20 nt, Artificial Sequence
  Synthetic
guagagauugcauuguaggg

SEQ ID NO: 722805 - RNA, 20 nt, Artificial Sequence
  Synthetic
gaaaagcccaaaaauuaggg

SEQ ID NO: 722806 - RNA, 20 nt, Artificial Sequence
  Synthetic
gagacccuuucccauuaggg

SEQ ID NO: 722807 - RNA, 20 nt, Artificial Sequence
  Synthetic
gugaggggaaaaaguuaggg

SEQ ID NO: 722808 - RNA, 20 nt, Artificial Sequence
  Synthetic
gugauuuuucaacuuuaggg

SEQ ID NO: 722809 - RNA, 20 nt, Artificial Sequence
  Synthetic
gagagaaagagagggacggg

SEQ ID NO: 722810 - RNA, 20 nt, Artificial Sequence
  Synthetic
gagaacacauggacaccggg

SEQ ID NO: 722811 - RNA, 20 nt, Artificial Sequence
  Synthetic
gagaauggcguaaacccggg

SEQ ID NO: 722812 - RNA, 20 nt, Artificial Sequence
  Synthetic
gagaguugcucgaacccggg

SEQ ID NO: 722813 - RNA, 20 nt, Artificial Sequence
  Synthetic
gagaauggcaugaacccggg

SEQ ID NO: 722814 - RNA, 20 nt, Artificial Sequence
  Synthetic
gagaauggcgugaacccggg

SEQ ID NO: 722815 - RNA, 20 nt, Artificial Sequence
  Synthetic
gaaaauggugugaacccggg

SEQ ID NO: 722816 - RNA, 20 nt, Artificial Sequence
  Synthetic
gagaaucacuugaacccggg

SEQ ID NO: 722817 - RNA, 20 nt, Artificial Sequence
  Synthetic
gaggauagcuugaacccggg

SEQ ID NO: 722818 - RNA, 20 nt, Artificial Sequence
  Synthetic
gagaaucgcuugaacccggg

SEQ ID NO: 722819 - RNA, 20 nt, Artificial Sequence
  Synthetic
gggaaucgcuugaacccggg

SEQ ID NO: 722820 - RNA, 20 nt, Artificial Sequence
  Synthetic
gagaauugcuugaacccggg

SEQ ID NO: 722821 - RNA, 20 nt, Artificial Sequence
  Synthetic
gagaaucauuugaacccggg

SEQ ID NO: 722822 - RNA, 20 nt, Artificial Sequence
  Synthetic
gagaaucuuuugaacccggg

SEQ ID NO: 722823 - RNA, 20 nt, Artificial Sequence
  Synthetic
gagaaucacuugaagccggg

SEQ ID NO: 722824 - RNA, 20 nt, Artificial Sequence
  Synthetic
gaggauggcaugaauccggg

SEQ ID NO: 722825 - RNA, 20 nt, Artificial Sequence
  Synthetic
gauaauugaaucacggcggg

SEQ ID NO: 722826 - RNA, 20 nt, Artificial Sequence
  Synthetic
ggaaaacaggaguuggcggg

SEQ ID NO: 722827 - RNA, 20 nt, Artificial Sequence
  Synthetic
gcuagcugaucaucugcggg

SEQ ID NO: 722828 - RNA, 20 nt, Artificial Sequence
  Synthetic
gagaaucacuugaacucggg

SEQ ID NO: 722829 - RNA, 20 nt, Artificial Sequence
  Synthetic
gguagucccagcuacucggg

SEQ ID NO: 722830 - RNA, 20 nt, Artificial Sequence
  Synthetic
gcgagguggggggcaagggg

SEQ ID NO: 722831 - RNA, 20 nt, Artificial Sequence
  Synthetic
ggcggguggggggcaagggg

SEQ ID NO: 722832 - RNA, 20 nt, Artificial Sequence
  Synthetic
gaacacagagccucaagggg

SEQ ID NO: 722833 - RNA, 20 nt, Artificial Sequence
  Synthetic
gcaagaaucuacugaagggg

SEQ ID NO: 722834 - RNA, 20 nt, Artificial Sequence
  Synthetic
gauucccuuuugcucagggg

SEQ ID NO: 722835 - RNA, 20 nt, Artificial Sequence
  Synthetic
gccucugggagcuggagggg

SEQ ID NO: 722836 - RNA, 20 nt, Artificial Sequence
  Synthetic
gaaaauucaugauugagggg

SEQ ID NO: 722837 - RNA, 20 nt, Artificial Sequence
  Synthetic
ggaaagugauucuugagggg

SEQ ID NO: 722838 - RNA, 20 nt, Artificial Sequence
  Synthetic
gcacaacaguauuugagggg

SEQ ID NO: 722839 - RNA, 20 nt, Artificial Sequence
  Synthetic
gggaggcuccgggguagggg

SEQ ID NO: 722840 - RNA, 20 nt, Artificial Sequence
  Synthetic
gaggggugggagguuagggg

SEQ ID NO: 722841 - RNA, 20 nt, Artificial Sequence
  Synthetic
gaaaauaguaacucacgggg

SEQ ID NO: 722842 - RNA, 20 nt, Artificial Sequence
  Synthetic
ggauaguggaggagucgggg

SEQ ID NO: 722843 - RNA, 20 nt, Artificial Sequence
  Synthetic
gggugcuucauuggucgggg

SEQ ID NO: 722844 - RNA, 20 nt, Artificial Sequence
  Synthetic
guaagcuauaaagaaggggg

SEQ ID NO: 722845 - RNA, 20 nt, Artificial Sequence
  Synthetic
gugggguggggggaaggggg

SEQ ID NO: 722846 - RNA, 20 nt, Artificial Sequence
  Synthetic
gcaaauuuuggggaaggggg

SEQ ID NO: 722847 - RNA, 20 nt, Artificial Sequence
  Synthetic
ggggaggggugugaaggggg

SEQ ID NO: 722848 - RNA, 20 nt, Artificial Sequence
  Synthetic
gaggcucuguguucaggggg

SEQ ID NO: 722849 - RNA, 20 nt, Artificial Sequence
  Synthetic
gagaaggagaauauaggggg

SEQ ID NO: 722850 - RNA, 20 nt, Artificial Sequence
  Synthetic
gccacauggagaaacggggg

SEQ ID NO: 722851 - RNA, 20 nt, Artificial Sequence
  Synthetic
guggggugaggggacggggg

SEQ ID NO: 722852 - RNA, 20 nt, Artificial Sequence
  Synthetic
gacugugguggggucggggg

SEQ ID NO: 722853 - RNA, 20 nt, Artificial Sequence
  Synthetic
gccuguuguggggucggggg

SEQ ID NO: 722854 - RNA, 20 nt, Artificial Sequence
  Synthetic
guggggugggggaagggggg

SEQ ID NO: 722855 - RNA, 20 nt, Artificial Sequence
  Synthetic
guggggucgggggagggggg

SEQ ID NO: 722856 - RNA, 20 nt, Artificial Sequence
  Synthetic
gugggguggggggagggggg

SEQ ID NO: 722857 - RNA, 20 nt, Artificial Sequence
  Synthetic
guguaagaaguugagggggg

SEQ ID NO: 722858 - RNA, 20 nt, Artificial Sequence
  Synthetic
gccuccuuguuggggggggg

SEQ ID NO: 722859 - RNA, 20 nt, Artificial Sequence
  Synthetic
ggccuccuuguugggggggg

SEQ ID NO: 722860 - RNA, 20 nt, Artificial Sequence
  Synthetic
gguaacugaaucaugggggg

SEQ ID NO: 722861 - RNA, 20 nt, Artificial Sequence
  Synthetic
gauuuuuuaaagaugggggg

SEQ ID NO: 722862 - RNA, 20 nt, Artificial Sequence
  Synthetic
gcuguguucaaggugggggg

SEQ ID NO: 722863 - RNA, 20 nt, Artificial Sequence
  Synthetic
gccugucguggggugggggg

SEQ ID NO: 722864 - RNA, 20 nt, Artificial Sequence
  Synthetic
gacugugguggggugggggg

SEQ ID NO: 722865 - RNA, 20 nt, Artificial Sequence
  Synthetic
gccugcuguggggugggggg

SEQ ID NO: 722866 - RNA, 20 nt, Artificial Sequence
  Synthetic
gacuguuguggggugggggg

SEQ ID NO: 722867 - RNA, 20 nt, Artificial Sequence
  Synthetic
gccuguuguggggugggggg

SEQ ID NO: 722868 - RNA, 20 nt, Artificial Sequence
  Synthetic
guuggggguugugugggggg

SEQ ID NO: 722869 - RNA, 20 nt, Artificial Sequence
  Synthetic
gugguugucacacauggggg

SEQ ID NO: 722870 - RNA, 20 nt, Artificial Sequence
  Synthetic
ggucauuugaaucauggggg

SEQ ID NO: 722871 - RNA, 20 nt, Artificial Sequence
  Synthetic
gaaguguggggucauggggg

SEQ ID NO: 722872 - RNA, 20 nt, Artificial Sequence
  Synthetic
gaugacauuuuuucuggggg

SEQ ID NO: 722873 - RNA, 20 nt, Artificial Sequence
  Synthetic
gaucuguaguuuaguggggg

SEQ ID NO: 722874 - RNA, 20 nt, Artificial Sequence
  Synthetic
gggucguggggagguggggg

SEQ ID NO: 722875 - RNA, 20 nt, Artificial Sequence
  Synthetic
gagagaguuggugguggggg

SEQ ID NO: 722876 - RNA, 20 nt, Artificial Sequence
  Synthetic
ggcaaaaaaaaauguggggg

SEQ ID NO: 722877 - RNA, 20 nt, Artificial Sequence
  Synthetic
gaaagcuauuugguuggggg

SEQ ID NO: 722878 - RNA, 20 nt, Artificial Sequence
  Synthetic
gauuuauaggcuauaugggg

SEQ ID NO: 722879 - RNA, 20 nt, Artificial Sequence
  Synthetic
guccuaaaauugcacugggg

SEQ ID NO: 722880 - RNA, 20 nt, Artificial Sequence
  Synthetic
gaaaguugaaaggacugggg

SEQ ID NO: 722881 - RNA, 20 nt, Artificial Sequence
  Synthetic
gaaaggccagucuccugggg

SEQ ID NO: 722882 - RNA, 20 nt, Artificial Sequence
  Synthetic
gagcaggcuggaagcugggg

SEQ ID NO: 722883 - RNA, 20 nt, Artificial Sequence
  Synthetic
gcauuagagagaggcugggg

SEQ ID NO: 722884 - RNA, 20 nt, Artificial Sequence
  Synthetic
gugguuuccaggggcugggg

SEQ ID NO: 722885 - RNA, 20 nt, Artificial Sequence
  Synthetic
ggaggacuacuagagugggg

SEQ ID NO: 722886 - RNA, 20 nt, Artificial Sequence
  Synthetic
ggaagccuacuggagugggg

SEQ ID NO: 722887 - RNA, 20 nt, Artificial Sequence
  Synthetic
ggcugugaaggguagugggg

SEQ ID NO: 722888 - RNA, 20 nt, Artificial Sequence
  Synthetic
ggaugggaagggucgugggg

SEQ ID NO: 722889 - RNA, 20 nt, Artificial Sequence
  Synthetic
gugugugugugugugugggg

SEQ ID NO: 722890 - RNA, 20 nt, Artificial Sequence
  Synthetic
guugcaguuaaguugugggg

SEQ ID NO: 722891 - RNA, 20 nt, Artificial Sequence
  Synthetic
guaaucccagcacuuugggg

SEQ ID NO: 722892 - RNA, 20 nt, Artificial Sequence
  Synthetic
gcaaugguucucaaaauggg

SEQ ID NO: 722893 - RNA, 20 nt, Artificial Sequence
  Synthetic
gcuggagguaagagaauggg

SEQ ID NO: 722894 - RNA, 20 nt, Artificial Sequence
  Synthetic
gguguaaauaagauaauggg

SEQ ID NO: 722895 - RNA, 20 nt, Artificial Sequence
  Synthetic
gagaauuagaagguaauggg

SEQ ID NO: 722896 - RNA, 20 nt, Artificial Sequence
  Synthetic
guaaaugacaaguuaauggg

SEQ ID NO: 722897 - RNA, 20 nt, Artificial Sequence
  Synthetic
ggacagaaauggaacauggg

SEQ ID NO: 722898 - RNA, 20 nt, Artificial Sequence
  Synthetic
gggugggguggggccauggg

SEQ ID NO: 722899 - RNA, 20 nt, Artificial Sequence
  Synthetic
ggagguaacugaaucauggg

SEQ ID NO: 722900 - RNA, 20 nt, Artificial Sequence
  Synthetic
ggggccucucaggggauggg

SEQ ID NO: 722901 - RNA, 20 nt, Artificial Sequence
  Synthetic
ggcugagguggguggauggg

SEQ ID NO: 722902 - RNA, 20 nt, Artificial Sequence
  Synthetic
gccucugguccuaugauggg

SEQ ID NO: 722903 - RNA, 20 nt, Artificial Sequence
  Synthetic
gccucugggcuugugauggg

SEQ ID NO: 722904 - RNA, 20 nt, Artificial Sequence
  Synthetic
gaauucccauguguuauggg

SEQ ID NO: 722905 - RNA, 20 nt, Artificial Sequence
  Synthetic
gggagaggcucauaacuggg

SEQ ID NO: 722906 - RNA, 20 nt, Artificial Sequence
  Synthetic
gucaagaaguucuaacuggg

SEQ ID NO: 722907 - RNA, 20 nt, Artificial Sequence
  Synthetic
gaaagaggcaugagacuggg

SEQ ID NO: 722908 - RNA, 20 nt, Artificial Sequence
  Synthetic
gucacugcugaguuacuggg

SEQ ID NO: 722909 - RNA, 20 nt, Artificial Sequence
  Synthetic
gagaauggcaugaaccuggg

SEQ ID NO: 722910 - RNA, 20 nt, Artificial Sequence
  Synthetic
gagaaaggcgugaaccuggg

SEQ ID NO: 722911 - RNA, 20 nt, Artificial Sequence
  Synthetic
gagaauggcgugaaccuggg

SEQ ID NO: 722912 - RNA, 20 nt, Artificial Sequence
  Synthetic
gagaaccacuugaaccuggg

SEQ ID NO: 722913 - RNA, 20 nt, Artificial Sequence
  Synthetic
gagaaucacuugaaccuggg

SEQ ID NO: 722914 - RNA, 20 nt, Artificial Sequence
  Synthetic
gagaagcgcuugaaccuggg

SEQ ID NO: 722915 - RNA, 20 nt, Artificial Sequence
  Synthetic
gagaaucgcuugaaccuggg

SEQ ID NO: 722916 - RNA, 20 nt, Artificial Sequence
  Synthetic
gagaauugcuugaaccuggg

SEQ ID NO: 722917 - RNA, 20 nt, Artificial Sequence
  Synthetic
gagaauuguuugaaccuggg

SEQ ID NO: 722918 - RNA, 20 nt, Artificial Sequence
  Synthetic
gaaucucucaaauaccuggg

SEQ ID NO: 722919 - RNA, 20 nt, Artificial Sequence
  Synthetic
gaguuggauaccagccuggg

SEQ ID NO: 722920 - RNA, 20 nt, Artificial Sequence
  Synthetic
gaggauugcuugagccuggg

SEQ ID NO: 722921 - RNA, 20 nt, Artificial Sequence
  Synthetic
gcacugccaaauaugcuggg

SEQ ID NO: 722922 - RNA, 20 nt, Artificial Sequence
  Synthetic
gucugucaaccccugcuggg

SEQ ID NO: 722923 - RNA, 20 nt, Artificial Sequence
  Synthetic
ggagaaacauagcugcuggg

SEQ ID NO: 722924 - RNA, 20 nt, Artificial Sequence
  Synthetic
gagaauagcuugaaucuggg

SEQ ID NO: 722925 - RNA, 20 nt, Artificial Sequence
  Synthetic
gagaaucgcuugaaucuggg

SEQ ID NO: 722926 - RNA, 20 nt, Artificial Sequence
  Synthetic
gcuagauggucccaucuggg

SEQ ID NO: 722927 - RNA, 20 nt, Artificial Sequence
  Synthetic
gguagauuagcucaucuggg

SEQ ID NO: 722928 - RNA, 20 nt, Artificial Sequence
  Synthetic
gaucugacacuaucucuggg

SEQ ID NO: 722929 - RNA, 20 nt, Artificial Sequence
  Synthetic
cuuugggaggccaagguggg

SEQ ID NO: 722930 - RNA, 20 nt, Artificial Sequence
  Synthetic
guggcuguguucaagguggg

SEQ ID NO: 722931 - RNA, 20 nt, Artificial Sequence
  Synthetic
gcauacacaaaucagguggg

SEQ ID NO: 722932 - RNA, 20 nt, Artificial Sequence
  Synthetic
gcagcuauuugagagguggg

SEQ ID NO: 722933 - RNA, 20 nt, Artificial Sequence
  Synthetic
gaggccugucgcgagguggg

SEQ ID NO: 722934 - RNA, 20 nt, Artificial Sequence
  Synthetic
gaaaaugaagcaaggguggg

SEQ ID NO: 722935 - RNA, 20 nt, Artificial Sequence
  Synthetic
ggggccuguuggcggguggg

SEQ ID NO: 722936 - RNA, 20 nt, Artificial Sequence
  Synthetic
ggggccugucgagggguggg

SEQ ID NO: 722937 - RNA, 20 nt, Artificial Sequence
  Synthetic
ggggccugucaggggguggg

SEQ ID NO: 722938 - RNA, 20 nt, Artificial Sequence
  Synthetic
guugggguggcggggguggg

SEQ ID NO: 722939 - RNA, 20 nt, Artificial Sequence
  Synthetic
gggguugugugggggguggg

SEQ ID NO: 722940 - RNA, 20 nt, Artificial Sequence
  Synthetic
gaggccgagguggggguggg

SEQ ID NO: 722941 - RNA, 20 nt, Artificial Sequence
  Synthetic
gaguuggugguggggguggg

SEQ ID NO: 722942 - RNA, 20 nt, Artificial Sequence
  Synthetic
ggggccugucgugggguggg

SEQ ID NO: 722943 - RNA, 20 nt, Artificial Sequence
  Synthetic
ggggacuguggugggguggg

SEQ ID NO: 722944 - RNA, 20 nt, Artificial Sequence
  Synthetic
ggggacugcugugggguggg

SEQ ID NO: 722945 - RNA, 20 nt, Artificial Sequence
  Synthetic
ggggccugcugugggguggg

SEQ ID NO: 722946 - RNA, 20 nt, Artificial Sequence
  Synthetic
gggaacuguugugggguggg

SEQ ID NO: 722947 - RNA, 20 nt, Artificial Sequence
  Synthetic
ggggacuguugugggguggg

SEQ ID NO: 722948 - RNA, 20 nt, Artificial Sequence
  Synthetic
ggggccuguugugggguggg

SEQ ID NO: 722949 - RNA, 20 nt, Artificial Sequence
  Synthetic
gauuuaaaacaguggguggg

SEQ ID NO: 722950 - RNA, 20 nt, Artificial Sequence
  Synthetic
gcgugugagcaguggguggg

SEQ ID NO: 722951 - RNA, 20 nt, Artificial Sequence
  Synthetic
guguguccuuacaugguggg

SEQ ID NO: 722952 - RNA, 20 nt, Artificial Sequence
  Synthetic
ggccucagaaucaugguggg

SEQ ID NO: 722953 - RNA, 20 nt, Artificial Sequence
  Synthetic
gagaagacaagagugguggg

SEQ ID NO: 722954 - RNA, 20 nt, Artificial Sequence
  Synthetic
gaaaaacuugaacauguggg

SEQ ID NO: 722955 - RNA, 20 nt, Artificial Sequence
  Synthetic
gugugauuggaucauguggg

SEQ ID NO: 722956 - RNA, 20 nt, Artificial Sequence
  Synthetic
gccaggcguguggauguggg

SEQ ID NO: 722957 - RNA, 20 nt, Artificial Sequence
  Synthetic
gguguuuucucaucuguggg

SEQ ID NO: 722958 - RNA, 20 nt, Artificial Sequence
  Synthetic
ggaggaagguuuguuguggg

SEQ ID NO: 722959 - RNA, 20 nt, Artificial Sequence
  Synthetic
gagucuguagaucaauuggg

SEQ ID NO: 722960 - RNA, 20 nt, Artificial Sequence
  Synthetic
gaaaugaggauagaauuggg

SEQ ID NO: 722961 - RNA, 20 nt, Artificial Sequence
  Synthetic
gggccauauguauaauuggg

SEQ ID NO: 722962 - RNA, 20 nt, Artificial Sequence
  Synthetic
guggacuuguuuagauuggg

SEQ ID NO: 722963 - RNA, 20 nt, Artificial Sequence
  Synthetic
ggaccuuacauccgauuggg

SEQ ID NO: 722964 - RNA, 20 nt, Artificial Sequence
  Synthetic
gcauccucaccauuauuggg

SEQ ID NO: 722965 - RNA, 20 nt, Artificial Sequence
  Synthetic
gagaaucacuugaacuuggg

SEQ ID NO: 722966 - RNA, 20 nt, Artificial Sequence
  Synthetic
guaguccuggcuaacuuggg

SEQ ID NO: 722967 - RNA, 20 nt, Artificial Sequence
  Synthetic
guggucugcugacacuuggg

SEQ ID NO: 722968 - RNA, 20 nt, Artificial Sequence
  Synthetic
gcagauuuuaaugccuuggg

SEQ ID NO: 722969 - RNA, 20 nt, Artificial Sequence
  Synthetic
guugccgcugcuggcuuggg

SEQ ID NO: 722970 - RNA, 20 nt, Artificial Sequence
  Synthetic
gugcagagauacaaguuggg

SEQ ID NO: 722971 - RNA, 20 nt, Artificial Sequence
  Synthetic
guaggggagguaugguuggg

SEQ ID NO: 722972 - RNA, 20 nt, Artificial Sequence
  Synthetic
ggcuugguccuuguguuggg

SEQ ID NO: 722973 - RNA, 20 nt, Artificial Sequence
  Synthetic
gugaagacgugccauuuggg

SEQ ID NO: 722974 - RNA, 20 nt, Artificial Sequence
  Synthetic
gugaugacaugagauuuggg

SEQ ID NO: 722975 - RNA, 20 nt, Artificial Sequence
  Synthetic
gagcaagugauuuauuuggg

SEQ ID NO: 722976 - RNA, 20 nt, Artificial Sequence
  Synthetic
gugcuguaauccacuuuggg

SEQ ID NO: 722977 - RNA, 20 nt, Artificial Sequence
  Synthetic
guaaaucccagcacuuuggg

SEQ ID NO: 722978 - RNA, 20 nt, Artificial Sequence
  Synthetic
gauuuucuuucuuuuuuggg

SEQ ID NO: 722979 - RNA, 20 nt, Artificial Sequence
  Synthetic
guuucccuugaacaaaaugg

SEQ ID NO: 722980 - RNA, 20 nt, Artificial Sequence
  Synthetic
gccucauccucuuaaaaugg

SEQ ID NO: 722981 - RNA, 20 nt, Artificial Sequence
  Synthetic
gagaacauacucucaaaugg

SEQ ID NO: 722982 - RNA, 20 nt, Artificial Sequence
  Synthetic
guggucagacauggaaaugg

SEQ ID NO: 722983 - RNA, 20 nt, Artificial Sequence
  Synthetic
gaauuggaaaaaguaaaugg

SEQ ID NO: 722984 - RNA, 20 nt, Artificial Sequence
  Synthetic
ggcccauucagggacaaugg

SEQ ID NO: 722985 - RNA, 20 nt, Artificial Sequence
  Synthetic
ggcuaucugcaagccaaugg

SEQ ID NO: 722986 - RNA, 20 nt, Artificial Sequence
  Synthetic
gacccaaccccagccaaugg

SEQ ID NO: 722987 - RNA, 20 nt, Artificial Sequence
  Synthetic
gauuucuuaaaugucaaugg

SEQ ID NO: 722988 - RNA, 20 nt, Artificial Sequence
  Synthetic
guuacuguuucaaagaaugg

SEQ ID NO: 722989 - RNA, 20 nt, Artificial Sequence
  Synthetic
gaacugugguuccagaaugg

SEQ ID NO: 722990 - RNA, 20 nt, Artificial Sequence
  Synthetic
ggcuggagguaagagaaugg

SEQ ID NO: 722991 - RNA, 20 nt, Artificial Sequence
  Synthetic
ggauauauagcagggaaugg

SEQ ID NO: 722992 - RNA, 20 nt, Artificial Sequence
  Synthetic
ggaacuagggccuggaaugg

SEQ ID NO: 722993 - RNA, 20 nt, Artificial Sequence
  Synthetic
gagcuaaauauaaugaaugg

SEQ ID NO: 722994 - RNA, 20 nt, Artificial Sequence
  Synthetic
gacauuauaagaaauaaugg

SEQ ID NO: 722995 - RNA, 20 nt, Artificial Sequence
  Synthetic
guacaagguuacaauaaugg

SEQ ID NO: 722996 - RNA, 20 nt, Artificial Sequence
  Synthetic
gaagacaauuuuuauaaugg

SEQ ID NO: 722997 - RNA, 20 nt, Artificial Sequence
  Synthetic
gauguguuacaugguaaugg

SEQ ID NO: 722998 - RNA, 20 nt, Artificial Sequence
  Synthetic
gagagaucaauuaaacaugg

SEQ ID NO: 722999 - RNA, 20 nt, Artificial Sequence
  Synthetic
ggaguggccaaggaacaugg

SEQ ID NO: 723000 - RNA, 20 nt, Artificial Sequence
  Synthetic
gacuuccuuuucugacaugg

SEQ ID NO: 723001 - RNA, 20 nt, Artificial Sequence
  Synthetic
ggacucaccauucuacaugg

SEQ ID NO: 723002 - RNA, 20 nt, Artificial Sequence
  Synthetic
gaagaggggaagacccaugg

SEQ ID NO: 723003 - RNA, 20 nt, Artificial Sequence
  Synthetic
ggcugcauaguauuccaugg

SEQ ID NO: 723004 - RNA, 20 nt, Artificial Sequence
  Synthetic
gugcuccuggccaagcaugg

SEQ ID NO: 723005 - RNA, 20 nt, Artificial Sequence
  Synthetic
gaaugaucagccaggcaugg

SEQ ID NO: 723006 - RNA, 20 nt, Artificial Sequence
  Synthetic
gaaaaauuagccaggcaugg

SEQ ID NO: 723007 - RNA, 20 nt, Artificial Sequence
  Synthetic
gcuauuuaagccgggcaugg

SEQ ID NO: 723008 - RNA, 20 nt, Artificial Sequence
  Synthetic
gaaaaauuagccgggcaugg

SEQ ID NO: 723009 - RNA, 20 nt, Artificial Sequence
  Synthetic
gauaaauaggccgggcaugg

SEQ ID NO: 723010 - RNA, 20 nt, Artificial Sequence
  Synthetic
gaaaaauuaacugggcaugg

SEQ ID NO: 723011 - RNA, 20 nt, Artificial Sequence
  Synthetic
gaaauuuaggcugggcaugg

SEQ ID NO: 723012 - RNA, 20 nt, Artificial Sequence
  Synthetic
gggggguguucugugcaugg

SEQ ID NO: 723013 - RNA, 20 nt, Artificial Sequence
  Synthetic
guuuagucauuuuugcaugg

SEQ ID NO: 723014 - RNA, 20 nt, Artificial Sequence
  Synthetic
gggaggccucacaaucaugg

SEQ ID NO: 723015 - RNA, 20 nt, Artificial Sequence
  Synthetic
gggaggccucagaaucaugg

SEQ ID NO: 723016 - RNA, 20 nt, Artificial Sequence
  Synthetic
gggagguaacugaaucaugg

SEQ ID NO: 723017 - RNA, 20 nt, Artificial Sequence
  Synthetic
gagagguaauugaaucaugg

SEQ ID NO: 723018 - RNA, 20 nt, Artificial Sequence
  Synthetic
gggagguaauugaaucaugg

SEQ ID NO: 723019 - RNA, 20 nt, Artificial Sequence
  Synthetic
ggaggucauuugaaucaugg

SEQ ID NO: 723020 - RNA, 20 nt, Artificial Sequence
  Synthetic
gggagguaauuuaaucaugg

SEQ ID NO: 723021 - RNA, 20 nt, Artificial Sequence
  Synthetic
gggaggugauuggaucaugg

SEQ ID NO: 723022 - RNA, 20 nt, Artificial Sequence
  Synthetic
gagaacacauggacucaugg

SEQ ID NO: 723023 - RNA, 20 nt, Artificial Sequence
  Synthetic
guaaguuaccaaguucaugg

SEQ ID NO: 723024 - RNA, 20 nt, Artificial Sequence
  Synthetic
guauaguaaaauguucaugg

SEQ ID NO: 723025 - RNA, 20 nt, Artificial Sequence
  Synthetic
gugggcuggcagaaagaugg

SEQ ID NO: 723026 - RNA, 20 nt, Artificial Sequence
  Synthetic
ggugaccuggccuaagaugg

SEQ ID NO: 723027 - RNA, 20 nt, Artificial Sequence
  Synthetic
gugugcuuucuuuaagaugg

SEQ ID NO: 723028 - RNA, 20 nt, Artificial Sequence
  Synthetic
gaucccaggccuccagaugg

SEQ ID NO: 723029 - RNA, 20 nt, Artificial Sequence
  Synthetic
gaggagaacuacagagaugg

SEQ ID NO: 723030 - RNA, 20 nt, Artificial Sequence
  Synthetic
gguuacuuccagggagaugg

SEQ ID NO: 723031 - RNA, 20 nt, Artificial Sequence
  Synthetic
ggcucaaaauaaaaggaugg

SEQ ID NO: 723032 - RNA, 20 nt, Artificial Sequence
  Synthetic
gaaagaagaugccaggaugg

SEQ ID NO: 723033 - RNA, 20 nt, Artificial Sequence
  Synthetic
gugucaccaagucaggaugg

SEQ ID NO: 723034 - RNA, 20 nt, Artificial Sequence
  Synthetic
ggcucaaagcaaagggaugg

SEQ ID NO: 723035 - RNA, 20 nt, Artificial Sequence
  Synthetic
gaugagagagggagggaugg

SEQ ID NO: 723036 - RNA, 20 nt, Artificial Sequence
  Synthetic
gggagcugaaaaggggaugg

SEQ ID NO: 723037 - RNA, 20 nt, Artificial Sequence
  Synthetic
gguaaagacacacaugaugg

SEQ ID NO: 723038 - RNA, 20 nt, Artificial Sequence
  Synthetic
guccaggcacagccugaugg

SEQ ID NO: 723039 - RNA, 20 nt, Artificial Sequence
  Synthetic
gcagagaaagaugcugaugg

SEQ ID NO: 723040 - RNA, 20 nt, Artificial Sequence
  Synthetic
guauuaaacaauggugaugg

SEQ ID NO: 723041 - RNA, 20 nt, Artificial Sequence
  Synthetic
gagagggagccauuugaugg

SEQ ID NO: 723042 - RNA, 20 nt, Artificial Sequence
  Synthetic
gagaugggguuucacuaugg

SEQ ID NO: 723043 - RNA, 20 nt, Artificial Sequence
  Synthetic
guaguucaggguuccuaugg

SEQ ID NO: 723044 - RNA, 20 nt, Artificial Sequence
  Synthetic
gccacaggccugcucuaugg

SEQ ID NO: 723045 - RNA, 20 nt, Artificial Sequence
  Synthetic
guguauuuaugaaaguaugg

SEQ ID NO: 723046 - RNA, 20 nt, Artificial Sequence
  Synthetic
guaccaugagaacaguaugg

SEQ ID NO: 723047 - RNA, 20 nt, Artificial Sequence
  Synthetic
gaauggagugguggguaugg

SEQ ID NO: 723048 - RNA, 20 nt, Artificial Sequence
  Synthetic
gauuaaauagauuuguaugg

SEQ ID NO: 723049 - RNA, 20 nt, Artificial Sequence
  Synthetic
ggacacuaauccaauuaugg

SEQ ID NO: 723050 - RNA, 20 nt, Artificial Sequence
  Synthetic
gggccagguagguuuuaugg

SEQ ID NO: 723051 - RNA, 20 nt, Artificial Sequence
  Synthetic
gaggaagcuuagcaaacugg

SEQ ID NO: 723052 - RNA, 20 nt, Artificial Sequence
  Synthetic
gaggaagaagaauaaacugg

SEQ ID NO: 723053 - RNA, 20 nt, Artificial Sequence
  Synthetic
guugauaaacagauaacugg

SEQ ID NO: 723054 - RNA, 20 nt, Artificial Sequence
  Synthetic
gaacucuccaucaucacugg

SEQ ID NO: 723055 - RNA, 20 nt, Artificial Sequence
  Synthetic
gaagaagcugccaggacugg

SEQ ID NO: 723056 - RNA, 20 nt, Artificial Sequence
  Synthetic
ggagagaggagguggacugg

SEQ ID NO: 723057 - RNA, 20 nt, Artificial Sequence
  Synthetic
guacaugaaauuaguacugg

SEQ ID NO: 723058 - RNA, 20 nt, Artificial Sequence
  Synthetic
gagauggggcuagaaccugg

SEQ ID NO: 723059 - RNA, 20 nt, Artificial Sequence
  Synthetic
ggggaaucacucgaaccugg

SEQ ID NO: 723060 - RNA, 20 nt, Artificial Sequence
  Synthetic
gcagucaucuuggaaccugg

SEQ ID NO: 723061 - RNA, 20 nt, Artificial Sequence
  Synthetic
gacagcguggaugaaccugg

SEQ ID NO: 723062 - RNA, 20 nt, Artificial Sequence
  Synthetic
ggagaaucccuugaaccugg

SEQ ID NO: 723063 - RNA, 20 nt, Artificial Sequence
  Synthetic
gugucaugggagugaccugg

SEQ ID NO: 723064 - RNA, 20 nt, Artificial Sequence
  Synthetic
gagaauggcgcgaacccugg

SEQ ID NO: 723065 - RNA, 20 nt, Artificial Sequence
  Synthetic
gagaaucucuuccacccugg

SEQ ID NO: 723066 - RNA, 20 nt, Artificial Sequence
  Synthetic
gagaauugcuugaagccugg

SEQ ID NO: 723067 - RNA, 20 nt, Artificial Sequence
  Synthetic
gccauugcacuccagccugg

SEQ ID NO: 723068 - RNA, 20 nt, Artificial Sequence
  Synthetic
guguuggagguggggccugg

SEQ ID NO: 723069 - RNA, 20 nt, Artificial Sequence
  Synthetic
guaacgaggaacuggccugg

SEQ ID NO: 723070 - RNA, 20 nt, Artificial Sequence
  Synthetic
gugugagccaccaugccugg

SEQ ID NO: 723071 - RNA, 20 nt, Artificial Sequence
  Synthetic
gcggacgggacagauccugg

SEQ ID NO: 723072 - RNA, 20 nt, Artificial Sequence
  Synthetic
ggaaagcgaucugcuccugg

SEQ ID NO: 723073 - RNA, 20 nt, Artificial Sequence
  Synthetic
ggaguucucccugcagcugg

SEQ ID NO: 723074 - RNA, 20 nt, Artificial Sequence
  Synthetic
gcucuguaagacagagcugg

SEQ ID NO: 723075 - RNA, 20 nt, Artificial Sequence
  Synthetic
gucaaagagaagcuagcugg

SEQ ID NO: 723076 - RNA, 20 nt, Artificial Sequence
  Synthetic
guaaugaauaaccaggcugg

SEQ ID NO: 723077 - RNA, 20 nt, Artificial Sequence
  Synthetic
guuuuaaaucucauggcugg

SEQ ID NO: 723078 - RNA, 20 nt, Artificial Sequence
  Synthetic
gguagauugccugaugcugg

SEQ ID NO: 723079 - RNA, 20 nt, Artificial Sequence
  Synthetic
ggcacugccaaauaugcugg

SEQ ID NO: 723080 - RNA, 20 nt, Artificial Sequence
  Synthetic
gcuuugugauaauaugcugg

SEQ ID NO: 723081 - RNA, 20 nt, Artificial Sequence
  Synthetic
gcauuuagaagaugugcugg

SEQ ID NO: 723082 - RNA, 20 nt, Artificial Sequence
  Synthetic
gaucauucacauauugcugg

SEQ ID NO: 723083 - RNA, 20 nt, Artificial Sequence
  Synthetic
gaagcuuuuaaucuugcugg

SEQ ID NO: 723084 - RNA, 20 nt, Artificial Sequence
  Synthetic
ggucugcuggaauuugcugg

SEQ ID NO: 723085 - RNA, 20 nt, Artificial Sequence
  Synthetic
gggcucccuugggaaucugg

SEQ ID NO: 723086 - RNA, 20 nt, Artificial Sequence
  Synthetic
gaaaauggaucuggaucugg

SEQ ID NO: 723087 - RNA, 20 nt, Artificial Sequence
  Synthetic
ggacauuuagcaauaucugg

SEQ ID NO: 723088 - RNA, 20 nt, Artificial Sequence
  Synthetic
gaaccacagugauucucugg

SEQ ID NO: 723089 - RNA, 20 nt, Artificial Sequence
  Synthetic
ggaauaaaaguggggucugg

SEQ ID NO: 723090 - RNA, 20 nt, Artificial Sequence
  Synthetic
gauauucacagauggucugg

SEQ ID NO: 723091 - RNA, 20 nt, Artificial Sequence
  Synthetic
gcugcuuguuucacuucugg

SEQ ID NO: 723092 - RNA, 20 nt, Artificial Sequence
  Synthetic
guauucacucacaguucugg

SEQ ID NO: 723093 - RNA, 20 nt, Artificial Sequence
  Synthetic
guuguuuuucacgguucugg

SEQ ID NO: 723094 - RNA, 20 nt, Artificial Sequence
  Synthetic
gccucagccucccaaagugg

SEQ ID NO: 723095 - RNA, 20 nt, Artificial Sequence
  Synthetic
gguuauaggaaucaaagugg

SEQ ID NO: 723096 - RNA, 20 nt, Artificial Sequence
  Synthetic
gccccacagauagaaagugg

SEQ ID NO: 723097 - RNA, 20 nt, Artificial Sequence
  Synthetic
guagguauaauugaaagugg

SEQ ID NO: 723098 - RNA, 20 nt, Artificial Sequence
  Synthetic
guuuuuaggggguaaagugg

SEQ ID NO: 723099 - RNA, 20 nt, Artificial Sequence
  Synthetic
ggaggguggaacacaagugg

SEQ ID NO: 723100 - RNA, 20 nt, Artificial Sequence
  Synthetic
gugggauguauuucaagugg

SEQ ID NO: 723101 - RNA, 20 nt, Artificial Sequence
  Synthetic
gaagcacuuuaaugaagugg

SEQ ID NO: 723102 - RNA, 20 nt, Artificial Sequence
  Synthetic
gugaucaaaagcugcagugg

SEQ ID NO: 723103 - RNA, 20 nt, Artificial Sequence
  Synthetic
gcugagagcaauuucagugg

SEQ ID NO: 723104 - RNA, 20 nt, Artificial Sequence
  Synthetic
guguuagaggguuucagugg

SEQ ID NO: 723105 - RNA, 20 nt, Artificial Sequence
  Synthetic
ggugcuuuggaucagagugg

SEQ ID NO: 723106 - RNA, 20 nt, Artificial Sequence
  Synthetic
gaagggugguuugagagugg

SEQ ID NO: 723107 - RNA, 20 nt, Artificial Sequence
  Synthetic
gaaggagggagaaggagugg

SEQ ID NO: 723108 - RNA, 20 nt, Artificial Sequence
  Synthetic
gaaaacucagaauggagugg

SEQ ID NO: 723109 - RNA, 20 nt, Artificial Sequence
  Synthetic
gaggcugggaaggauagugg

SEQ ID NO: 723110 - RNA, 20 nt, Artificial Sequence
  Synthetic
guuacacuuccuuauagugg

SEQ ID NO: 723111 - RNA, 20 nt, Artificial Sequence
  Synthetic
gaggcugugaaggguagugg

SEQ ID NO: 723112 - RNA, 20 nt, Artificial Sequence
  Synthetic
gauuuccugaauguuagugg

SEQ ID NO: 723113 - RNA, 20 nt, Artificial Sequence
  Synthetic
guuacauugucauuuagugg

SEQ ID NO: 723114 - RNA, 20 nt, Artificial Sequence
  Synthetic
guucagcauuuauuuagugg

SEQ ID NO: 723115 - RNA, 20 nt, Artificial Sequence
  Synthetic
gcuaaaugcaacuuacgugg

SEQ ID NO: 723116 - RNA, 20 nt, Artificial Sequence
  Synthetic
caaaaauuagccaggcgugg

SEQ ID NO: 723117 - RNA, 20 nt, Artificial Sequence
  Synthetic
guaaaauuagcugggcgugg

SEQ ID NO: 723118 - RNA, 20 nt, Artificial Sequence
  Synthetic
guaaaaucggcugggcgugg

SEQ ID NO: 723119 - RNA, 20 nt, Artificial Sequence
  Synthetic
gacaggagggagaaaggugg

SEQ ID NO: 723120 - RNA, 20 nt, Artificial Sequence
  Synthetic
gugaugguauuagaaggugg

SEQ ID NO: 723121 - RNA, 20 nt, Artificial Sequence
  Synthetic
ggagagcaggaaacaggugg

SEQ ID NO: 723122 - RNA, 20 nt, Artificial Sequence
  Synthetic
ggagucuugguaucaggugg

SEQ ID NO: 723123 - RNA, 20 nt, Artificial Sequence
  Synthetic
ggcgugaacccgggaggugg

SEQ ID NO: 723124 - RNA, 20 nt, Artificial Sequence
  Synthetic
gaagggucguggggaggugg

SEQ ID NO: 723125 - RNA, 20 nt, Artificial Sequence
  Synthetic
ggcugcacugcuugaggugg

SEQ ID NO: 723126 - RNA, 20 nt, Artificial Sequence
  Synthetic
gacacagaaaaggagggugg

SEQ ID NO: 723127 - RNA, 20 nt, Artificial Sequence
  Synthetic
gugggguggggggagggugg

SEQ ID NO: 723128 - RNA, 20 nt, Artificial Sequence
  Synthetic
gguugggguggcgggggugg

SEQ ID NO: 723129 - RNA, 20 nt, Artificial Sequence
  Synthetic
gugagguaugguuggggugg

SEQ ID NO: 723130 - RNA, 20 nt, Artificial Sequence
  Synthetic
gacauuccugguuggggugg

SEQ ID NO: 723131 - RNA, 20 nt, Artificial Sequence
  Synthetic
guaguugagugugugggugg

SEQ ID NO: 723132 - RNA, 20 nt, Artificial Sequence
  Synthetic
ggaagguuuguugugggugg

SEQ ID NO: 723133 - RNA, 20 nt, Artificial Sequence
  Synthetic
aaauuagccaggcauggugg

SEQ ID NO: 723134 - RNA, 20 nt, Artificial Sequence
  Synthetic
gaaucacucgaaccuggugg

SEQ ID NO: 723135 - RNA, 20 nt, Artificial Sequence
  Synthetic
ggagaagacaagaguggugg

SEQ ID NO: 723136 - RNA, 20 nt, Artificial Sequence
  Synthetic
guggggacaaggaguggugg

SEQ ID NO: 723137 - RNA, 20 nt, Artificial Sequence
  Synthetic
gaauauuacauauguggugg

SEQ ID NO: 723138 - RNA, 20 nt, Artificial Sequence
  Synthetic
gcuaaauguccacuuggugg

SEQ ID NO: 723139 - RNA, 20 nt, Artificial Sequence
  Synthetic
guuaacauuaacuuuggugg

SEQ ID NO: 723140 - RNA, 20 nt, Artificial Sequence
  Synthetic
gaacacacguguguaugugg

SEQ ID NO: 723141 - RNA, 20 nt, Artificial Sequence
  Synthetic
gugcccucaaaaaucugugg

SEQ ID NO: 723142 - RNA, 20 nt, Artificial Sequence
  Synthetic
gcaugguuggccaagugugg

SEQ ID NO: 723143 - RNA, 20 nt, Artificial Sequence
  Synthetic
ggcuacaaaggguagugugg

SEQ ID NO: 723144 - RNA, 20 nt, Artificial Sequence
  Synthetic
gugauacaagccaggugugg

SEQ ID NO: 723145 - RNA, 20 nt, Artificial Sequence
  Synthetic
gcaaucagggccaggugugg

SEQ ID NO: 723146 - RNA, 20 nt, Artificial Sequence
  Synthetic
guuauuaaaauugggugugg

SEQ ID NO: 723147 - RNA, 20 nt, Artificial Sequence
  Synthetic
gugugugugugugugugugg

SEQ ID NO: 723148 - RNA, 20 nt, Artificial Sequence
  Synthetic
gaaaauauggaauugugugg

SEQ ID NO: 723149 - RNA, 20 nt, Artificial Sequence
  Synthetic
guuguuuccugcuugugugg

SEQ ID NO: 723150 - RNA, 20 nt, Artificial Sequence
  Synthetic
gcaccauucuuuuugugugg

SEQ ID NO: 723151 - RNA, 20 nt, Artificial Sequence
  Synthetic
gccuaaauaauuccuugugg

SEQ ID NO: 723152 - RNA, 20 nt, Artificial Sequence
  Synthetic
guuuaaaagucaauuugugg

SEQ ID NO: 723153 - RNA, 20 nt, Artificial Sequence
  Synthetic
ggacuuaauucaauuugugg

SEQ ID NO: 723154 - RNA, 20 nt, Artificial Sequence
  Synthetic
guuuacaucaauauuugugg

SEQ ID NO: 723155 - RNA, 20 nt, Artificial Sequence
  Synthetic
guuuaauggugcguuugugg

SEQ ID NO: 723156 - RNA, 20 nt, Artificial Sequence
  Synthetic
gacguaauuaugguuugugg

SEQ ID NO: 723157 - RNA, 20 nt, Artificial Sequence
  Synthetic
gaaaaauauuguaaaauugg

SEQ ID NO: 723158 - RNA, 20 nt, Artificial Sequence
  Synthetic
ggaacuuccuagagaauugg

SEQ ID NO: 723159 - RNA, 20 nt, Artificial Sequence
  Synthetic
guguaucaucucaagauugg

SEQ ID NO: 723160 - RNA, 20 nt, Artificial Sequence
  Synthetic
gacaaaaagaaggggauugg

SEQ ID NO: 723161 - RNA, 20 nt, Artificial Sequence
  Synthetic
guaaaacuuucugugauugg

SEQ ID NO: 723162 - RNA, 20 nt, Artificial Sequence
  Synthetic
gauauuuuugaaauuauugg

SEQ ID NO: 723163 - RNA, 20 nt, Artificial Sequence
  Synthetic
gaaagcaucaguuuuauugg

SEQ ID NO: 723164 - RNA, 20 nt, Artificial Sequence
  Synthetic
guucuaauucuugaacuugg

SEQ ID NO: 723165 - RNA, 20 nt, Artificial Sequence
  Synthetic
gcuaauuucucaacacuugg

SEQ ID NO: 723166 - RNA, 20 nt, Artificial Sequence
  Synthetic
gguagcugguaaagacuugg

SEQ ID NO: 723167 - RNA, 20 nt, Artificial Sequence
  Synthetic
gaguuaaaauacugacuugg

SEQ ID NO: 723168 - RNA, 20 nt, Artificial Sequence
  Synthetic
gaaugcuuauaucaccuugg

SEQ ID NO: 723169 - RNA, 20 nt, Artificial Sequence
  Synthetic
gagcuucaauuucaccuugg

SEQ ID NO: 723170 - RNA, 20 nt, Artificial Sequence
  Synthetic
gguaagaauaacagccuugg

SEQ ID NO: 723171 - RNA, 20 nt, Artificial Sequence
  Synthetic
guauucuguguuuuccuugg

SEQ ID NO: 723172 - RNA, 20 nt, Artificial Sequence
  Synthetic
gggaagacacuggagcuugg

SEQ ID NO: 723173 - RNA, 20 nt, Artificial Sequence
  Synthetic
ggaaaauauauucugcuugg

SEQ ID NO: 723174 - RNA, 20 nt, Artificial Sequence
  Synthetic
gguaaucucccaaaucuugg

SEQ ID NO: 723175 - RNA, 20 nt, Artificial Sequence
  Synthetic
guuuaacaagaggcucuugg

SEQ ID NO: 723176 - RNA, 20 nt, Artificial Sequence
  Synthetic
gucuuuggaaaaaaaguugg

SEQ ID NO: 723177 - RNA, 20 nt, Artificial Sequence
  Synthetic
guuaauuauuacaaaguugg

SEQ ID NO: 723178 - RNA, 20 nt, Artificial Sequence
  Synthetic
gaacauguagaauaaguugg

SEQ ID NO: 723179 - RNA, 20 nt, Artificial Sequence
  Synthetic
gagaaacaaguaacaguugg

SEQ ID NO: 723180 - RNA, 20 nt, Artificial Sequence
  Synthetic
gaacaucacacaccaguugg

SEQ ID NO: 723181 - RNA, 20 nt, Artificial Sequence
  Synthetic
ggaagcacggaugcaguugg

SEQ ID NO: 723182 - RNA, 20 nt, Artificial Sequence
  Synthetic
gaacacuuucacaccguugg

SEQ ID NO: 723183 - RNA, 20 nt, Artificial Sequence
  Synthetic
gcacacaguggugggguugg

SEQ ID NO: 723184 - RNA, 20 nt, Artificial Sequence
  Synthetic
gggaggugauuuuugguugg

SEQ ID NO: 723185 - RNA, 20 nt, Artificial Sequence
  Synthetic
gaaguaugaacauauguugg

SEQ ID NO: 723186 - RNA, 20 nt, Artificial Sequence
  Synthetic
gaacacuucuacacuguugg

SEQ ID NO: 723187 - RNA, 20 nt, Artificial Sequence
  Synthetic
gaacacucuuacacuguugg

SEQ ID NO: 723188 - RNA, 20 nt, Artificial Sequence
  Synthetic
gaacacuuuuacacuguugg

SEQ ID NO: 723189 - RNA, 20 nt, Artificial Sequence
  Synthetic
gaacgcuuuuacacuguugg

SEQ ID NO: 723190 - RNA, 20 nt, Artificial Sequence
  Synthetic
gugugcuuuuacacuguugg

SEQ ID NO: 723191 - RNA, 20 nt, Artificial Sequence
  Synthetic
gaacucuuuuacacuguugg

SEQ ID NO: 723192 - RNA, 20 nt, Artificial Sequence
  Synthetic
gaacccuuaugcacuguugg

SEQ ID NO: 723193 - RNA, 20 nt, Artificial Sequence
  Synthetic
gaacccuuguauacuguugg

SEQ ID NO: 723194 - RNA, 20 nt, Artificial Sequence
  Synthetic
gaaugcuuauacccuguugg

SEQ ID NO: 723195 - RNA, 20 nt, Artificial Sequence
  Synthetic
ggaacauuauacgcuguugg

SEQ ID NO: 723196 - RNA, 20 nt, Artificial Sequence
  Synthetic
gggggugauggcaguguugg

SEQ ID NO: 723197 - RNA, 20 nt, Artificial Sequence
  Synthetic
gauaaacaacacaaauuugg

SEQ ID NO: 723198 - RNA, 20 nt, Artificial Sequence
  Synthetic
ggaacauguaguaaauuugg

SEQ ID NO: 723199 - RNA, 20 nt, Artificial Sequence
  Synthetic
gagacuuuuggagaauuugg

SEQ ID NO: 723200 - RNA, 20 nt, Artificial Sequence
  Synthetic
gccuuuuuacuuccauuugg

SEQ ID NO: 723201 - RNA, 20 nt, Artificial Sequence
  Synthetic
gaggaguugugaucauuugg

SEQ ID NO: 723202 - RNA, 20 nt, Artificial Sequence
  Synthetic
gaguuaguuugaucauuugg

SEQ ID NO: 723203 - RNA, 20 nt, Artificial Sequence
  Synthetic
gcagaauccuuaggauuugg

SEQ ID NO: 723204 - RNA, 20 nt, Artificial Sequence
  Synthetic
ggaaguguugauggauuugg

SEQ ID NO: 723205 - RNA, 20 nt, Artificial Sequence
  Synthetic
ggcuaaaccaugauauuugg

SEQ ID NO: 723206 - RNA, 20 nt, Artificial Sequence
  Synthetic
guuacgucauuucuauuugg

SEQ ID NO: 723207 - RNA, 20 nt, Artificial Sequence
  Synthetic
gugguuaacauuaacuuugg

SEQ ID NO: 723208 - RNA, 20 nt, Artificial Sequence
  Synthetic
gacaagacagcauccuuugg

SEQ ID NO: 723209 - RNA, 20 nt, Artificial Sequence
  Synthetic
gucauaucuuaaaaguuugg

SEQ ID NO: 723210 - RNA, 20 nt, Artificial Sequence
  Synthetic
gguauuacaacuuaguuugg

SEQ ID NO: 723211 - RNA, 20 nt, Artificial Sequence
  Synthetic
ggcuaagaauacagguuugg

SEQ ID NO: 723212 - RNA, 20 nt, Artificial Sequence
  Synthetic
gaaauaccuuaacuguuugg

SEQ ID NO: 723213 - RNA, 20 nt, Artificial Sequence
  Synthetic
ggaguaauaaaaaauuuugg

SEQ ID NO: 723214 - RNA, 20 nt, Artificial Sequence
  Synthetic
guuccucaguuuacuuuugg

SEQ ID NO: 723215 - RNA, 20 nt, Artificial Sequence
  Synthetic
gucaaagagagagcuuuugg

SEQ ID NO: 723216 - RNA, 20 nt, Artificial Sequence
  Synthetic
gagaaggggaaaucuuuugg

SEQ ID NO: 723217 - RNA, 20 nt, Artificial Sequence
  Synthetic
guguacaaagacaguuuugg

SEQ ID NO: 723218 - RNA, 20 nt, Artificial Sequence
  Synthetic
gcaccacuauuagguuuugg

SEQ ID NO: 723219 - RNA, 20 nt, Artificial Sequence
  Synthetic
guugggacauacgguuuugg

SEQ ID NO: 723220 - RNA, 20 nt, Artificial Sequence
  Synthetic
guggauugucacuguuuugg

SEQ ID NO: 723221 - RNA, 20 nt, Artificial Sequence
  Synthetic
gccauuagggaaaaaaaaug

SEQ ID NO: 723222 - RNA, 20 nt, Artificial Sequence
  Synthetic
gaauugaguucuaaaaaaug

SEQ ID NO: 723223 - RNA, 20 nt, Artificial Sequence
  Synthetic
gggauaugaaguaaaaaaug

SEQ ID NO: 723224 - RNA, 20 nt, Artificial Sequence
  Synthetic
gauaaacggauuaaaaaaug

SEQ ID NO: 723225 - RNA, 20 nt, Artificial Sequence
  Synthetic
guuacuuuuucugaaaaaug

SEQ ID NO: 723226 - RNA, 20 nt, Artificial Sequence
  Synthetic
gucacauggugauaaaaaug

SEQ ID NO: 723227 - RNA, 20 nt, Artificial Sequence
  Synthetic
gacauugaaauuacaaaaug

SEQ ID NO: 723228 - RNA, 20 nt, Artificial Sequence
  Synthetic
gaaauggaaaagucaaaaug

SEQ ID NO: 723229 - RNA, 20 nt, Artificial Sequence
  Synthetic
gaugaauugaaaagaaaaug

SEQ ID NO: 723230 - RNA, 20 nt, Artificial Sequence
  Synthetic
gcgaauggauacagaaaaug

SEQ ID NO: 723231 - RNA, 20 nt, Artificial Sequence
  Synthetic
gucacaccccucagaaaaug

SEQ ID NO: 723232 - RNA, 20 nt, Artificial Sequence
  Synthetic
gcucagaagaaaggaaaaug

SEQ ID NO: 723233 - RNA, 20 nt, Artificial Sequence
  Synthetic
gacagugcagaaggaaaaug

SEQ ID NO: 723234 - RNA, 20 nt, Artificial Sequence
  Synthetic
ggguugugggaaggaaaaug

SEQ ID NO: 723235 - RNA, 20 nt, Artificial Sequence
  Synthetic
ggauuuagggguggaaaaug

SEQ ID NO: 723236 - RNA, 20 nt, Artificial Sequence
  Synthetic
gccaaauacacaugaaaaug

SEQ ID NO: 723237 - RNA, 20 nt, Artificial Sequence
  Synthetic
ggagugcugccaugaaaaug

SEQ ID NO: 723238 - RNA, 20 nt, Artificial Sequence
  Synthetic
gacuucaaccucugaaaaug

SEQ ID NO: 723239 - RNA, 20 nt, Artificial Sequence
  Synthetic
ggaaaaaaucaaauaaaaug

SEQ ID NO: 723240 - RNA, 20 nt, Artificial Sequence
  Synthetic
guaaauaucacaauaaaaug

SEQ ID NO: 723241 - RNA, 20 nt, Artificial Sequence
  Synthetic
gauguuagaaacauaaaaug

SEQ ID NO: 723242 - RNA, 20 nt, Artificial Sequence
  Synthetic
guuuaucuagcuauaaaaug

SEQ ID NO: 723243 - RNA, 20 nt, Artificial Sequence
  Synthetic
guuuucucgucuauaaaaug

SEQ ID NO: 723244 - RNA, 20 nt, Artificial Sequence
  Synthetic
guugucucaucuguaaaaug

SEQ ID NO: 723245 - RNA, 20 nt, Artificial Sequence
  Synthetic
guguccucauuuguaaaaug

SEQ ID NO: 723246 - RNA, 20 nt, Artificial Sequence
  Synthetic
gucaaaguuugauuaaaaug

SEQ ID NO: 723247 - RNA, 20 nt, Artificial Sequence
  Synthetic
gagauaaucaacuuaaaaug

SEQ ID NO: 723248 - RNA, 20 nt, Artificial Sequence
  Synthetic
gauacugagcucuuaaaaug

SEQ ID NO: 723249 - RNA, 20 nt, Artificial Sequence
  Synthetic
ggagucuuuaaguuaaaaug

SEQ ID NO: 723250 - RNA, 20 nt, Artificial Sequence
  Synthetic
gguaaaugcagaaacaaaug

SEQ ID NO: 723251 - RNA, 20 nt, Artificial Sequence
  Synthetic
gcaucacuguuggacaaaug

SEQ ID NO: 723252 - RNA, 20 nt, Artificial Sequence
  Synthetic
gcaaucacagcuuacaaaug

SEQ ID NO: 723253 - RNA, 20 nt, Artificial Sequence
  Synthetic
gaguuuucuuuuuccaaaug

SEQ ID NO: 723254 - RNA, 20 nt, Artificial Sequence
  Synthetic
gugaauacugaaagcaaaug

SEQ ID NO: 723255 - RNA, 20 nt, Artificial Sequence
  Synthetic
ggucuuugaggaaagaaaug

SEQ ID NO: 723256 - RNA, 20 nt, Artificial Sequence
  Synthetic
gucagugcagaagagaaaug

SEQ ID NO: 723257 - RNA, 20 nt, Artificial Sequence
  Synthetic
gggaaccacugauagaaaug

SEQ ID NO: 723258 - RNA, 20 nt, Artificial Sequence
  Synthetic
gacaguguggaagggaaaug

SEQ ID NO: 723259 - RNA, 20 nt, Artificial Sequence
  Synthetic
gaacaugugggugggaaaug

SEQ ID NO: 723260 - RNA, 20 nt, Artificial Sequence
  Synthetic
gguuuugagcauuggaaaug

SEQ ID NO: 723261 - RNA, 20 nt, Artificial Sequence
  Synthetic
gacugauaugaacugaaaug

SEQ ID NO: 723262 - RNA, 20 nt, Artificial Sequence
  Synthetic
guuuuauccaaugugaaaug

SEQ ID NO: 723263 - RNA, 20 nt, Artificial Sequence
  Synthetic
gcuacugagcacuugaaaug

SEQ ID NO: 723264 - RNA, 20 nt, Artificial Sequence
  Synthetic
ggcagaugaauagauaaaug

SEQ ID NO: 723265 - RNA, 20 nt, Artificial Sequence
  Synthetic
gaacuggugaaauauaaaug

SEQ ID NO: 723266 - RNA, 20 nt, Artificial Sequence
  Synthetic
guuaaaacuacagcuaaaug

SEQ ID NO: 723267 - RNA, 20 nt, Artificial Sequence
  Synthetic
gaccauguuauaauuaaaug

SEQ ID NO: 723268 - RNA, 20 nt, Artificial Sequence
  Synthetic
gcacauauauauauuaaaug

SEQ ID NO: 723269 - RNA, 20 nt, Artificial Sequence
  Synthetic
gaaacaauggaaguuaaaug

SEQ ID NO: 723270 - RNA, 20 nt, Artificial Sequence
  Synthetic
gaaagcuuuucaguuaaaug

SEQ ID NO: 723271 - RNA, 20 nt, Artificial Sequence
  Synthetic
gagacuagaaaucaacaaug

SEQ ID NO: 723272 - RNA, 20 nt, Artificial Sequence
  Synthetic
gcagauuacccuccacaaug

SEQ ID NO: 723273 - RNA, 20 nt, Artificial Sequence
  Synthetic
gaaguaaguggaagacaaug

SEQ ID NO: 723274 - RNA, 20 nt, Artificial Sequence
  Synthetic
gauuuugggcugagacaaug

SEQ ID NO: 723275 - RNA, 20 nt, Artificial Sequence
  Synthetic
guuacuuccaggauacaaug

SEQ ID NO: 723276 - RNA, 20 nt, Artificial Sequence
  Synthetic
guuuuuggaaaccuacaaug

SEQ ID NO: 723277 - RNA, 20 nt, Artificial Sequence
  Synthetic
gagaucagugcucuccaaug

SEQ ID NO: 723278 - RNA, 20 nt, Artificial Sequence
  Synthetic
gacaguuuuuacaagcaaug

SEQ ID NO: 723279 - RNA, 20 nt, Artificial Sequence
  Synthetic
gucuucaugagcaagcaaug

SEQ ID NO: 723280 - RNA, 20 nt, Artificial Sequence
  Synthetic
gcugggggcaggaagcaaug

SEQ ID NO: 723281 - RNA, 20 nt, Artificial Sequence
  Synthetic
guauucauuucugagcaaug

SEQ ID NO: 723282 - RNA, 20 nt, Artificial Sequence
  Synthetic
gcuucuugucagaggcaaug

SEQ ID NO: 723283 - RNA, 20 nt, Artificial Sequence
  Synthetic
gguaaacuuugucugcaaug

SEQ ID NO: 723284 - RNA, 20 nt, Artificial Sequence
  Synthetic
gacaguucuugggugcaaug

SEQ ID NO: 723285 - RNA, 20 nt, Artificial Sequence
  Synthetic
gcuggaucacuugugcaaug

SEQ ID NO: 723286 - RNA, 20 nt, Artificial Sequence
  Synthetic
guuguggugaaaauucaaug

SEQ ID NO: 723287 - RNA, 20 nt, Artificial Sequence
  Synthetic
gccuugacagauuuucaaug

SEQ ID NO: 723288 - RNA, 20 nt, Artificial Sequence
  Synthetic
gguggacaggauaaagaaug

SEQ ID NO: 723289 - RNA, 20 nt, Artificial Sequence
  Synthetic
ggcauguggaaauaagaaug

SEQ ID NO: 723290 - RNA, 20 nt, Artificial Sequence
  Synthetic
gauaugcuuagaacagaaug

SEQ ID NO: 723291 - RNA, 20 nt, Artificial Sequence
  Synthetic
gaugugugauacacagaaug

SEQ ID NO: 723292 - RNA, 20 nt, Artificial Sequence
  Synthetic
gaaaaguguuggccagaaug

SEQ ID NO: 723293 - RNA, 20 nt, Artificial Sequence
  Synthetic
gcauauugccccucagaaug

SEQ ID NO: 723294 - RNA, 20 nt, Artificial Sequence
  Synthetic
gcuggaggaagaagagaaug

SEQ ID NO: 723295 - RNA, 20 nt, Artificial Sequence
  Synthetic
gggcuggagguaagagaaug

SEQ ID NO: 723296 - RNA, 20 nt, Artificial Sequence
  Synthetic
gaaauguaaagcagagaaug

SEQ ID NO: 723297 - RNA, 20 nt, Artificial Sequence
  Synthetic
gaauuuuucaggagagaaug

SEQ ID NO: 723298 - RNA, 20 nt, Artificial Sequence
  Synthetic
guaggggaaaagcgagaaug

SEQ ID NO: 723299 - RNA, 20 nt, Artificial Sequence
  Synthetic
gaggugacucagcuagaaug

SEQ ID NO: 723300 - RNA, 20 nt, Artificial Sequence
  Synthetic
gauauagaaaaggaggaaug

SEQ ID NO: 723301 - RNA, 20 nt, Artificial Sequence
  Synthetic
gugucugagagguaggaaug

SEQ ID NO: 723302 - RNA, 20 nt, Artificial Sequence
  Synthetic
guuucacugggguaggaaug

SEQ ID NO: 723303 - RNA, 20 nt, Artificial Sequence
  Synthetic
gauuuuaagauaauggaaug

SEQ ID NO: 723304 - RNA, 20 nt, Artificial Sequence
  Synthetic
gguagucagagaaaugaaug

SEQ ID NO: 723305 - RNA, 20 nt, Artificial Sequence
  Synthetic
gaggagaaggguaaugaaug

SEQ ID NO: 723306 - RNA, 20 nt, Artificial Sequence
  Synthetic
gaaagcaguaaaacugaaug

SEQ ID NO: 723307 - RNA, 20 nt, Artificial Sequence
  Synthetic
guuauaauaaaagcugaaug

SEQ ID NO: 723308 - RNA, 20 nt, Artificial Sequence
  Synthetic
gcuguuuuguuacuugaaug

SEQ ID NO: 723309 - RNA, 20 nt, Artificial Sequence
  Synthetic
gccuuugauugaaaauaaug

SEQ ID NO: 723310 - RNA, 20 nt, Artificial Sequence
  Synthetic
gucuugcauacuucauaaug

SEQ ID NO: 723311 - RNA, 20 nt, Artificial Sequence
  Synthetic
guuagaaaugcaguauaaug

SEQ ID NO: 723312 - RNA, 20 nt, Artificial Sequence
  Synthetic
guaaugcaauaaaccuaaug

SEQ ID NO: 723313 - RNA, 20 nt, Artificial Sequence
  Synthetic
guuacucaacucugcuaaug

SEQ ID NO: 723314 - RNA, 20 nt, Artificial Sequence
  Synthetic
gcauuuuuucuucuguaaug

SEQ ID NO: 723315 - RNA, 20 nt, Artificial Sequence
  Synthetic
gggguaggcuguguguaaug

SEQ ID NO: 723316 - RNA, 20 nt, Artificial Sequence
  Synthetic
guuaaacaacacacuuaaug

SEQ ID NO: 723317 - RNA, 20 nt, Artificial Sequence
  Synthetic
guuuuuucuugugcuuaaug

SEQ ID NO: 723318 - RNA, 20 nt, Artificial Sequence
  Synthetic
gaaaaugaauaaauuuaaug

SEQ ID NO: 723319 - RNA, 20 nt, Artificial Sequence
  Synthetic
gcuccuaugggaauuuaaug

SEQ ID NO: 723320 - RNA, 20 nt, Artificial Sequence
  Synthetic
gagugaggcuuagaaacaug

SEQ ID NO: 723321 - RNA, 20 nt, Artificial Sequence
  Synthetic
gguagggggaaggaaacaug

SEQ ID NO: 723322 - RNA, 20 nt, Artificial Sequence
  Synthetic
gagcuccaucuugcaacaug

SEQ ID NO: 723323 - RNA, 20 nt, Artificial Sequence
  Synthetic
guagaauaaauaucaacaug

SEQ ID NO: 723324 - RNA, 20 nt, Artificial Sequence
  Synthetic
gugggaaaaacuugaacaug

SEQ ID NO: 723325 - RNA, 20 nt, Artificial Sequence
  Synthetic
ggaaaucauauuaacacaug

SEQ ID NO: 723326 - RNA, 20 nt, Artificial Sequence
  Synthetic
ggucccucacaugacacaug

SEQ ID NO: 723327 - RNA, 20 nt, Artificial Sequence
  Synthetic
ggucacucccaugacacaug

SEQ ID NO: 723328 - RNA, 20 nt, Artificial Sequence
  Synthetic
ggauagucauuagccacaug

SEQ ID NO: 723329 - RNA, 20 nt, Artificial Sequence
  Synthetic
gacacauaaacacucacaug

SEQ ID NO: 723330 - RNA, 20 nt, Artificial Sequence
  Synthetic
ggaagagaccuuaugacaug

SEQ ID NO: 723331 - RNA, 20 nt, Artificial Sequence
  Synthetic
ggucucucucccuugacaug

SEQ ID NO: 723332 - RNA, 20 nt, Artificial Sequence
  Synthetic
gucaauaucuaaaauacaug

SEQ ID NO: 723333 - RNA, 20 nt, Artificial Sequence
  Synthetic
guuagcccuugaacuacaug

SEQ ID NO: 723334 - RNA, 20 nt, Artificial Sequence
  Synthetic
gggugcucaauagcuacaug

SEQ ID NO: 723335 - RNA, 20 nt, Artificial Sequence
  Synthetic
gaggacaauacaaaaccaug

SEQ ID NO: 723336 - RNA, 20 nt, Artificial Sequence
  Synthetic
gauauuaccucacaaccaug

SEQ ID NO: 723337 - RNA, 20 nt, Artificial Sequence
  Synthetic
gucaauuauccaagaccaug

SEQ ID NO: 723338 - RNA, 20 nt, Artificial Sequence
  Synthetic
guguugugggagggaccaug

SEQ ID NO: 723339 - RNA, 20 nt, Artificial Sequence
  Synthetic
gagaaucguuugagcccaug

SEQ ID NO: 723340 - RNA, 20 nt, Artificial Sequence
  Synthetic
gugaucugggaauucccaug

SEQ ID NO: 723341 - RNA, 20 nt, Artificial Sequence
  Synthetic
gaugaauaacugaagccaug

SEQ ID NO: 723342 - RNA, 20 nt, Artificial Sequence
  Synthetic
gcagaaaucuauaagccaug

SEQ ID NO: 723343 - RNA, 20 nt, Artificial Sequence
  Synthetic
gugaggccucuccagccaug

SEQ ID NO: 723344 - RNA, 20 nt, Artificial Sequence
  Synthetic
gcuugagugacaacuccaug

SEQ ID NO: 723345 - RNA, 20 nt, Artificial Sequence
  Synthetic
guaacuaaaauaucuccaug

SEQ ID NO: 723346 - RNA, 20 nt, Artificial Sequence
  Synthetic
ggucuucagggaauuccaug

SEQ ID NO: 723347 - RNA, 20 nt, Artificial Sequence
  Synthetic
gcuuuccuauugauuccaug

SEQ ID NO: 723348 - RNA, 20 nt, Artificial Sequence
  Synthetic
gcuuugccuuugaaagcaug

SEQ ID NO: 723349 - RNA, 20 nt, Artificial Sequence
  Synthetic
gauuuccuuuuuaaagcaug

SEQ ID NO: 723350 - RNA, 20 nt, Artificial Sequence
  Synthetic
gagguaggaaugagggcaug

SEQ ID NO: 723351 - RNA, 20 nt, Artificial Sequence
  Synthetic
gugccugauucaguggcaug

SEQ ID NO: 723352 - RNA, 20 nt, Artificial Sequence
  Synthetic
gggcaaagggagguggcaug

SEQ ID NO: 723353 - RNA, 20 nt, Artificial Sequence
  Synthetic
ggacaaauaccuaaugcaug

SEQ ID NO: 723354 - RNA, 20 nt, Artificial Sequence
  Synthetic
gaagacaggggauaugcaug

SEQ ID NO: 723355 - RNA, 20 nt, Artificial Sequence
  Synthetic
gcaaacaugcugagugcaug

SEQ ID NO: 723356 - RNA, 20 nt, Artificial Sequence
  Synthetic
ggggggguguucugugcaug

SEQ ID NO: 723357 - RNA, 20 nt, Artificial Sequence
  Synthetic
gauuaaccuauguuugcaug

SEQ ID NO: 723358 - RNA, 20 nt, Artificial Sequence
  Synthetic
guggagguaauugaaucaug

SEQ ID NO: 723359 - RNA, 20 nt, Artificial Sequence
  Synthetic
gggaggucauuugaaucaug

SEQ ID NO: 723360 - RNA, 20 nt, Artificial Sequence
  Synthetic
gcugaggugagcagaucaug

SEQ ID NO: 723361 - RNA, 20 nt, Artificial Sequence
  Synthetic
gcugaggcaggcagaucaug

SEQ ID NO: 723362 - RNA, 20 nt, Artificial Sequence
  Synthetic
gccgaggcgggcagaucaug

SEQ ID NO: 723363 - RNA, 20 nt, Artificial Sequence
  Synthetic
gccgaggugggcagaucaug

SEQ ID NO: 723364 - RNA, 20 nt, Artificial Sequence
  Synthetic
gccgaggcaggcggaucaug

SEQ ID NO: 723365 - RNA, 20 nt, Artificial Sequence
  Synthetic
gccgaggcgggcggaucaug

SEQ ID NO: 723366 - RNA, 20 nt, Artificial Sequence
  Synthetic
gccaaggcagguggaucaug

SEQ ID NO: 723367 - RNA, 20 nt, Artificial Sequence
  Synthetic
gccaaagcggguggaucaug

SEQ ID NO: 723368 - RNA, 20 nt, Artificial Sequence
  Synthetic
gccaagguggguggaucaug

SEQ ID NO: 723369 - RNA, 20 nt, Artificial Sequence
  Synthetic
guaggugugauuggaucaug

SEQ ID NO: 723370 - RNA, 20 nt, Artificial Sequence
  Synthetic
ggcaaagaauucugaucaug

SEQ ID NO: 723371 - RNA, 20 nt, Artificial Sequence
  Synthetic
gcagauauaucauccucaug

SEQ ID NO: 723372 - RNA, 20 nt, Artificial Sequence
  Synthetic
ggggcaugggcagagucaug

SEQ ID NO: 723373 - RNA, 20 nt, Artificial Sequence
  Synthetic
gcuaaguaaacuuagucaug

SEQ ID NO: 723374 - RNA, 20 nt, Artificial Sequence
  Synthetic
gggggggugauuaggucaug

SEQ ID NO: 723375 - RNA, 20 nt, Artificial Sequence
  Synthetic
gugugcaucucauugucaug

SEQ ID NO: 723376 - RNA, 20 nt, Artificial Sequence
  Synthetic
guuuaaaaaugauugucaug

SEQ ID NO: 723377 - RNA, 20 nt, Artificial Sequence
  Synthetic
gacccucauaggcauucaug

SEQ ID NO: 723378 - RNA, 20 nt, Artificial Sequence
  Synthetic
gacaaguuaacauauucaug

SEQ ID NO: 723379 - RNA, 20 nt, Artificial Sequence
  Synthetic
gaauuuucacccuauucaug

SEQ ID NO: 723380 - RNA, 20 nt, Artificial Sequence
  Synthetic
gcaagauuaaaagcuucaug

SEQ ID NO: 723381 - RNA, 20 nt, Artificial Sequence
  Synthetic
gcuuauuugaccuuuucaug

SEQ ID NO: 723382 - RNA, 20 nt, Artificial Sequence
  Synthetic
gccugagcaacggaaagaug

SEQ ID NO: 723383 - RNA, 20 nt, Artificial Sequence
  Synthetic
ggaagcucugcuucaagaug

SEQ ID NO: 723384 - RNA, 20 nt, Artificial Sequence
  Synthetic
gccuacacagaaagaagaug

SEQ ID NO: 723385 - RNA, 20 nt, Artificial Sequence
  Synthetic
ggaggcaguaucagaagaug

SEQ ID NO: 723386 - RNA, 20 nt, Artificial Sequence
  Synthetic
ggucagaagacaggaagaug

SEQ ID NO: 723387 - RNA, 20 nt, Artificial Sequence
  Synthetic
gaaauauugaggggaagaug

SEQ ID NO: 723388 - RNA, 20 nt, Artificial Sequence
  Synthetic
gaauaagugugaauaagaug

SEQ ID NO: 723389 - RNA, 20 nt, Artificial Sequence
  Synthetic
gaucauggugcugacagaug

SEQ ID NO: 723390 - RNA, 20 nt, Artificial Sequence
  Synthetic
ggcagcuggguugacagaug

SEQ ID NO: 723391 - RNA, 20 nt, Artificial Sequence
  Synthetic
gcauuuguaacuuacagaug

SEQ ID NO: 723392 - RNA, 20 nt, Artificial Sequence
  Synthetic
gagaaggcucugaccagaug

SEQ ID NO: 723393 - RNA, 20 nt, Artificial Sequence
  Synthetic
guggguuucccggccagaug

SEQ ID NO: 723394 - RNA, 20 nt, Artificial Sequence
  Synthetic
gugcauuuuuaguagagaug

SEQ ID NO: 723395 - RNA, 20 nt, Artificial Sequence
  Synthetic
gaaaucaaacucaggagaug

SEQ ID NO: 723396 - RNA, 20 nt, Artificial Sequence
  Synthetic
gaaauuaaacucaggagaug

SEQ ID NO: 723397 - RNA, 20 nt, Artificial Sequence
  Synthetic
ggcaaugguauuaggagaug

SEQ ID NO: 723398 - RNA, 20 nt, Artificial Sequence
  Synthetic
gaugagaacacauggagaug

SEQ ID NO: 723399 - RNA, 20 nt, Artificial Sequence
  Synthetic
gccugagauuccuggagaug

SEQ ID NO: 723400 - RNA, 20 nt, Artificial Sequence
  Synthetic
ggucaucauuuacugagaug

SEQ ID NO: 723401 - RNA, 20 nt, Artificial Sequence
  Synthetic
gaucaagcaggucugagaug

SEQ ID NO: 723402 - RNA, 20 nt, Artificial Sequence
  Synthetic
gcuucugaggaggugagaug

SEQ ID NO: 723403 - RNA, 20 nt, Artificial Sequence
  Synthetic
gaacuuucuuuuuugagaug

SEQ ID NO: 723404 - RNA, 20 nt, Artificial Sequence
  Synthetic
gaugccaauuaacguagaug

SEQ ID NO: 723405 - RNA, 20 nt, Artificial Sequence
  Synthetic
guggcagacaaauguagaug

SEQ ID NO: 723406 - RNA, 20 nt, Artificial Sequence
  Synthetic
ggcuucuguugccuuagaug

SEQ ID NO: 723407 - RNA, 20 nt, Artificial Sequence
  Synthetic
ggucagcaguuucuuagaug

SEQ ID NO: 723408 - RNA, 20 nt, Artificial Sequence
  Synthetic
gaaauaauaaggguuagaug

SEQ ID NO: 723409 - RNA, 20 nt, Artificial Sequence
  Synthetic
gauuuugggcugagacgaug

SEQ ID NO: 723410 - RNA, 20 nt, Artificial Sequence
  Synthetic
guuuuugggcugagacgaug

SEQ ID NO: 723411 - RNA, 20 nt, Artificial Sequence
  Synthetic
gauuuuggguugagacgaug

SEQ ID NO: 723412 - RNA, 20 nt, Artificial Sequence
  Synthetic
guauuuucuuaguagcgaug

SEQ ID NO: 723413 - RNA, 20 nt, Artificial Sequence
  Synthetic
gugcugaaguggcaaggaug

SEQ ID NO: 723414 - RNA, 20 nt, Artificial Sequence
  Synthetic
guuuuuauaggcacaggaug

SEQ ID NO: 723415 - RNA, 20 nt, Artificial Sequence
  Synthetic
guaauagcauuuauaggaug

SEQ ID NO: 723416 - RNA, 20 nt, Artificial Sequence
  Synthetic
gucaucuguaaacuaggaug

SEQ ID NO: 723417 - RNA, 20 nt, Artificial Sequence
  Synthetic
gaugaagaggcuuuaggaug

SEQ ID NO: 723418 - RNA, 20 nt, Artificial Sequence
  Synthetic
ggggagcugaaaaggggaug

SEQ ID NO: 723419 - RNA, 20 nt, Artificial Sequence
  Synthetic
gauucaguagaucugggaug

SEQ ID NO: 723420 - RNA, 20 nt, Artificial Sequence
  Synthetic
gugucaguuggucugggaug

SEQ ID NO: 723421 - RNA, 20 nt, Artificial Sequence
  Synthetic
gcccacaaccucgugggaug

SEQ ID NO: 723422 - RNA, 20 nt, Artificial Sequence
  Synthetic
guaggggaagucacuggaug

SEQ ID NO: 723423 - RNA, 20 nt, Artificial Sequence
  Synthetic
ggguaugugagguguggaug

SEQ ID NO: 723424 - RNA, 20 nt, Artificial Sequence
  Synthetic
gauucugauuuaguuggaug

SEQ ID NO: 723425 - RNA, 20 nt, Artificial Sequence
  Synthetic
gauuaaaaaaaaaaaugaug

SEQ ID NO: 723426 - RNA, 20 nt, Artificial Sequence
  Synthetic
gaaucacugaguaaaugaug

SEQ ID NO: 723427 - RNA, 20 nt, Artificial Sequence
  Synthetic
gcagggcuggcaacaugaug

SEQ ID NO: 723428 - RNA, 20 nt, Artificial Sequence
  Synthetic
guuuuugcagagccaugaug

SEQ ID NO: 723429 - RNA, 20 nt, Artificial Sequence
  Synthetic
gagaugaaauagagaugaug

SEQ ID NO: 723430 - RNA, 20 nt, Artificial Sequence
  Synthetic
guuaaguagaugggaugaug

SEQ ID NO: 723431 - RNA, 20 nt, Artificial Sequence
  Synthetic
ggauauagugcaugaugaug

SEQ ID NO: 723432 - RNA, 20 nt, Artificial Sequence
  Synthetic
gaugauuuucuuugaugaug

SEQ ID NO: 723433 - RNA, 20 nt, Artificial Sequence
  Synthetic
gaaguuaaggguauaugaug

SEQ ID NO: 723434 - RNA, 20 nt, Artificial Sequence
  Synthetic
ggcuacuugggaggcugaug

SEQ ID NO: 723435 - RNA, 20 nt, Artificial Sequence
  Synthetic
gacacauucugacugugaug

SEQ ID NO: 723436 - RNA, 20 nt, Artificial Sequence
  Synthetic
ggaagguguauauauugaug

SEQ ID NO: 723437 - RNA, 20 nt, Artificial Sequence
  Synthetic
gaagaggaaugcauuugaug

SEQ ID NO: 723438 - RNA, 20 nt, Artificial Sequence
  Synthetic
gagucucagaagaaaauaug

SEQ ID NO: 723439 - RNA, 20 nt, Artificial Sequence
  Synthetic
gaaaggagaaaauaaauaug

SEQ ID NO: 723440 - RNA, 20 nt, Artificial Sequence
  Synthetic
guguuucuaaaguaaauaug

SEQ ID NO: 723441 - RNA, 20 nt, Artificial Sequence
  Synthetic
ggguuagaauuuacaauaug

SEQ ID NO: 723442 - RNA, 20 nt, Artificial Sequence
  Synthetic
ggguaaucauagugaauaug

SEQ ID NO: 723443 - RNA, 20 nt, Artificial Sequence
  Synthetic
ggugcuacagaaauaauaug

SEQ ID NO: 723444 - RNA, 20 nt, Artificial Sequence
  Synthetic
gcuagguucugcauaauaug

SEQ ID NO: 723445 - RNA, 20 nt, Artificial Sequence
  Synthetic
gucuucugcauagucauaug

SEQ ID NO: 723446 - RNA, 20 nt, Artificial Sequence
  Synthetic
guuaaggguguagauauaug

SEQ ID NO: 723447 - RNA, 20 nt, Artificial Sequence
  Synthetic
gccugcucauaauauauaug

SEQ ID NO: 723448 - RNA, 20 nt, Artificial Sequence
  Synthetic
gugggguacauauauauaug

SEQ ID NO: 723449 - RNA, 20 nt, Artificial Sequence
  Synthetic
gggguacauauauauauaug

SEQ ID NO: 723450 - RNA, 20 nt, Artificial Sequence
  Synthetic
gucucucuugcuuauauaug

SEQ ID NO: 723451 - RNA, 20 nt, Artificial Sequence
  Synthetic
guuuacuccucuauuauaug

SEQ ID NO: 723452 - RNA, 20 nt, Artificial Sequence
  Synthetic
gggaaagggcauacacuaug

SEQ ID NO: 723453 - RNA, 20 nt, Artificial Sequence
  Synthetic
ggaagaaggaauuuacuaug

SEQ ID NO: 723454 - RNA, 20 nt, Artificial Sequence
  Synthetic
ggaaugcaaaggacgcuaug

SEQ ID NO: 723455 - RNA, 20 nt, Artificial Sequence
  Synthetic
gugucaaaggagaggcuaug

SEQ ID NO: 723456 - RNA, 20 nt, Artificial Sequence
  Synthetic
ggcaaagaagaaaaucuaug

SEQ ID NO: 723457 - RNA, 20 nt, Artificial Sequence
  Synthetic
gacucuuaccacaaucuaug

SEQ ID NO: 723458 - RNA, 20 nt, Artificial Sequence
  Synthetic
gaugcugaauaaacucuaug

SEQ ID NO: 723459 - RNA, 20 nt, Artificial Sequence
  Synthetic
gccccaguggggacucuaug

SEQ ID NO: 723460 - RNA, 20 nt, Artificial Sequence
  Synthetic
ggaacuucucccccucuaug

SEQ ID NO: 723461 - RNA, 20 nt, Artificial Sequence
  Synthetic
gcaggauaucauagucuaug

SEQ ID NO: 723462 - RNA, 20 nt, Artificial Sequence
  Synthetic
gaggaaaauguuagucuaug

SEQ ID NO: 723463 - RNA, 20 nt, Artificial Sequence
  Synthetic
gaaauuuuacuucuucuaug

SEQ ID NO: 723464 - RNA, 20 nt, Artificial Sequence
  Synthetic
gagcuuuacuuccaaguaug

SEQ ID NO: 723465 - RNA, 20 nt, Artificial Sequence
  Synthetic
gaauuucaaacaugaguaug

SEQ ID NO: 723466 - RNA, 20 nt, Artificial Sequence
  Synthetic
gaguaguauugcaugguaug

SEQ ID NO: 723467 - RNA, 20 nt, Artificial Sequence
  Synthetic
gaguuucuuuuacugguaug

SEQ ID NO: 723468 - RNA, 20 nt, Artificial Sequence
  Synthetic
gucccagagauucugguaug

SEQ ID NO: 723469 - RNA, 20 nt, Artificial Sequence
  Synthetic
gacaugguuuuauauguaug

SEQ ID NO: 723470 - RNA, 20 nt, Artificial Sequence
  Synthetic
gcaguugaacuuuguguaug

SEQ ID NO: 723471 - RNA, 20 nt, Artificial Sequence
  Synthetic
gugagaaggugcuuuguaug

SEQ ID NO: 723472 - RNA, 20 nt, Artificial Sequence
  Synthetic
gaagaaguucugaaauuaug

SEQ ID NO: 723473 - RNA, 20 nt, Artificial Sequence
  Synthetic
guguuuuacuuccaauuaug

SEQ ID NO: 723474 - RNA, 20 nt, Artificial Sequence
  Synthetic
gggaagcauaacccauuaug

SEQ ID NO: 723475 - RNA, 20 nt, Artificial Sequence
  Synthetic
gaauucagugcaagauuaug

SEQ ID NO: 723476 - RNA, 20 nt, Artificial Sequence
  Synthetic
gcugagacgggcagauuaug

SEQ ID NO: 723477 - RNA, 20 nt, Artificial Sequence
  Synthetic
gaaaucugauguagauuaug

SEQ ID NO: 723478 - RNA, 20 nt, Artificial Sequence
  Synthetic
gcccacaacuguaucuuaug

SEQ ID NO: 723479 - RNA, 20 nt, Artificial Sequence
  Synthetic
gucuuuuucagauucuuaug

SEQ ID NO: 723480 - RNA, 20 nt, Artificial Sequence
  Synthetic
gaauauuaacaguauuuaug

SEQ ID NO: 723481 - RNA, 20 nt, Artificial Sequence
  Synthetic
gguuuauuauuucuuuuaug

SEQ ID NO: 723482 - RNA, 20 nt, Artificial Sequence
  Synthetic
ggccaaauguuucuuuuaug

SEQ ID NO: 723483 - RNA, 20 nt, Artificial Sequence
  Synthetic
gaacuugcagaaaaaaacug

SEQ ID NO: 723484 - RNA, 20 nt, Artificial Sequence
  Synthetic
gaaaaacaaaaacaaaacug

SEQ ID NO: 723485 - RNA, 20 nt, Artificial Sequence
  Synthetic
guaccaagcagacaaaacug

SEQ ID NO: 723486 - RNA, 20 nt, Artificial Sequence
  Synthetic
gaguagggccaagaaaacug

SEQ ID NO: 723487 - RNA, 20 nt, Artificial Sequence
  Synthetic
gggacaggugcugcaaacug

SEQ ID NO: 723488 - RNA, 20 nt, Artificial Sequence
  Synthetic
gcaaagucauauggaaacug

SEQ ID NO: 723489 - RNA, 20 nt, Artificial Sequence
  Synthetic
guuuuugcccucugaaacug

SEQ ID NO: 723490 - RNA, 20 nt, Artificial Sequence
  Synthetic
gaaaugaagggcauaaacug

SEQ ID NO: 723491 - RNA, 20 nt, Artificial Sequence
  Synthetic
gaauauggagaucuaaacug

SEQ ID NO: 723492 - RNA, 20 nt, Artificial Sequence
  Synthetic
gauccuccaaaaguaaacug

SEQ ID NO: 723493 - RNA, 20 nt, Artificial Sequence
  Synthetic
gcaauaaucuaguuaaacug

SEQ ID NO: 723494 - RNA, 20 nt, Artificial Sequence
  Synthetic
ggcucagagauuagcaacug

SEQ ID NO: 723495 - RNA, 20 nt, Artificial Sequence
  Synthetic
gaaggaaaagaaggcaacug

SEQ ID NO: 723496 - RNA, 20 nt, Artificial Sequence
  Synthetic
gucagcaauuccuagaacug

SEQ ID NO: 723497 - RNA, 20 nt, Artificial Sequence
  Synthetic
guuaggggaagaaggaacug

SEQ ID NO: 723498 - RNA, 20 nt, Artificial Sequence
  Synthetic
gggcuugucuuuuuuaacug

SEQ ID NO: 723499 - RNA, 20 nt, Artificial Sequence
  Synthetic
gaggggaacaacacacacug

SEQ ID NO: 723500 - RNA, 20 nt, Artificial Sequence
  Synthetic
gaggggaauaacacacacug

SEQ ID NO: 723501 - RNA, 20 nt, Artificial Sequence
  Synthetic
gcaggcaacaucacacacug

SEQ ID NO: 723502 - RNA, 20 nt, Artificial Sequence
  Synthetic
gaggggaacaucacacacug

SEQ ID NO: 723503 - RNA, 20 nt, Artificial Sequence
  Synthetic
gacaggaacaauagacacug

SEQ ID NO: 723504 - RNA, 20 nt, Artificial Sequence
  Synthetic
guacauuaguucacccacug

SEQ ID NO: 723505 - RNA, 20 nt, Artificial Sequence
  Synthetic
guaaauuaguucagccacug

SEQ ID NO: 723506 - RNA, 20 nt, Artificial Sequence
  Synthetic
guuauugcuuugggccacug

SEQ ID NO: 723507 - RNA, 20 nt, Artificial Sequence
  Synthetic
guaaaugaguuuaggcacug

SEQ ID NO: 723508 - RNA, 20 nt, Artificial Sequence
  Synthetic
guucuaguuugauugcacug

SEQ ID NO: 723509 - RNA, 20 nt, Artificial Sequence
  Synthetic
gcugcuuccaacaaucacug

SEQ ID NO: 723510 - RNA, 20 nt, Artificial Sequence
  Synthetic
gcuaauacucagagucacug

SEQ ID NO: 723511 - RNA, 20 nt, Artificial Sequence
  Synthetic
gaggucauuaaucuucacug

SEQ ID NO: 723512 - RNA, 20 nt, Artificial Sequence
  Synthetic
gugcuuacuauguuucacug

SEQ ID NO: 723513 - RNA, 20 nt, Artificial Sequence
  Synthetic
ggacaauaaaguccagacug

SEQ ID NO: 723514 - RNA, 20 nt, Artificial Sequence
  Synthetic
guuucccauacagcagacug

SEQ ID NO: 723515 - RNA, 20 nt, Artificial Sequence
  Synthetic
gcugacuguuucucagacug

SEQ ID NO: 723516 - RNA, 20 nt, Artificial Sequence
  Synthetic
gggguucagauacgagacug

SEQ ID NO: 723517 - RNA, 20 nt, Artificial Sequence
  Synthetic
ggcaucugccucccugacug

SEQ ID NO: 723518 - RNA, 20 nt, Artificial Sequence
  Synthetic
gacucugauauaauugacug

SEQ ID NO: 723519 - RNA, 20 nt, Artificial Sequence
  Synthetic
gucauaugauggcuugacug

SEQ ID NO: 723520 - RNA, 20 nt, Artificial Sequence
  Synthetic
gaaaagugggaaaaauacug

SEQ ID NO: 723521 - RNA, 20 nt, Artificial Sequence
  Synthetic
gggaaugguggagaauacug

SEQ ID NO: 723522 - RNA, 20 nt, Artificial Sequence
  Synthetic
guaauugaaaaaauauacug

SEQ ID NO: 723523 - RNA, 20 nt, Artificial Sequence
  Synthetic
guaggguuaguuuacuacug

SEQ ID NO: 723524 - RNA, 20 nt, Artificial Sequence
  Synthetic
gaugaccucaugaccuacug

SEQ ID NO: 723525 - RNA, 20 nt, Artificial Sequence
  Synthetic
gcccaugccccauccuacug

SEQ ID NO: 723526 - RNA, 20 nt, Artificial Sequence
  Synthetic
ggcaggaaggagaaguacug

SEQ ID NO: 723527 - RNA, 20 nt, Artificial Sequence
  Synthetic
guucuaauuugauuguacug

SEQ ID NO: 723528 - RNA, 20 nt, Artificial Sequence
  Synthetic
gaagcaauggggaauuacug

SEQ ID NO: 723529 - RNA, 20 nt, Artificial Sequence
  Synthetic
gaauuugcuuuagauuacug

SEQ ID NO: 723530 - RNA, 20 nt, Artificial Sequence
  Synthetic
gauguaaaauuuuauuacug

SEQ ID NO: 723531 - RNA, 20 nt, Artificial Sequence
  Synthetic
gucugaugcugauguuacug

SEQ ID NO: 723532 - RNA, 20 nt, Artificial Sequence
  Synthetic
gagauaaaaaggagaaccug

SEQ ID NO: 723533 - RNA, 20 nt, Artificial Sequence
  Synthetic
ggucccucccaugacaccug

SEQ ID NO: 723534 - RNA, 20 nt, Artificial Sequence
  Synthetic
gugugcacaggauucaccug

SEQ ID NO: 723535 - RNA, 20 nt, Artificial Sequence
  Synthetic
guauugaacuccugacccug

SEQ ID NO: 723536 - RNA, 20 nt, Artificial Sequence
  Synthetic
gcaaguuuuauuucccccug

SEQ ID NO: 723537 - RNA, 20 nt, Artificial Sequence
  Synthetic
ggggacacagcagagcccug

SEQ ID NO: 723538 - RNA, 20 nt, Artificial Sequence
  Synthetic
gaacaauggagaaaucccug

SEQ ID NO: 723539 - RNA, 20 nt, Artificial Sequence
  Synthetic
gggcaagaacaagaucccug

SEQ ID NO: 723540 - RNA, 20 nt, Artificial Sequence
  Synthetic
ggcagaggauccucucccug

SEQ ID NO: 723541 - RNA, 20 nt, Artificial Sequence
  Synthetic
ggaggugccauuguucccug

SEQ ID NO: 723542 - RNA, 20 nt, Artificial Sequence
  Synthetic
guugcgugauaugcagccug

SEQ ID NO: 723543 - RNA, 20 nt, Artificial Sequence
  Synthetic
gcugagccucagauagccug

SEQ ID NO: 723544 - RNA, 20 nt, Artificial Sequence
  Synthetic
gacaugguggcaggcgccug

SEQ ID NO: 723545 - RNA, 20 nt, Artificial Sequence
  Synthetic
gguguuguggugggcgccug

SEQ ID NO: 723546 - RNA, 20 nt, Artificial Sequence
  Synthetic
gccaccauagagcaggccug

SEQ ID NO: 723547 - RNA, 20 nt, Artificial Sequence
  Synthetic
ggauuguuggauuaggccug

SEQ ID NO: 723548 - RNA, 20 nt, Artificial Sequence
  Synthetic
ggcgugguggugggugccug

SEQ ID NO: 723549 - RNA, 20 nt, Artificial Sequence
  Synthetic
gaugcaucacuucuugccug

SEQ ID NO: 723550 - RNA, 20 nt, Artificial Sequence
  Synthetic
gaauaaugcucaaaauccug

SEQ ID NO: 723551 - RNA, 20 nt, Artificial Sequence
  Synthetic
gaauaaaauuccaaauccug

SEQ ID NO: 723552 - RNA, 20 nt, Artificial Sequence
  Synthetic
gcuaauaggaacacauccug

SEQ ID NO: 723553 - RNA, 20 nt, Artificial Sequence
  Synthetic
gauggcaaagcaaacuccug

SEQ ID NO: 723554 - RNA, 20 nt, Artificial Sequence
  Synthetic
guugaucgcaucggcuccug

SEQ ID NO: 723555 - RNA, 20 nt, Artificial Sequence
  Synthetic
gaacaugagaggggcuccug

SEQ ID NO: 723556 - RNA, 20 nt, Artificial Sequence
  Synthetic
gucggaaugaagugcuccug

SEQ ID NO: 723557 - RNA, 20 nt, Artificial Sequence
  Synthetic
gaugccaugaaacauuccug

SEQ ID NO: 723558 - RNA, 20 nt, Artificial Sequence
  Synthetic
gaaucaaauccauauuccug

SEQ ID NO: 723559 - RNA, 20 nt, Artificial Sequence
  Synthetic
gaauguauaacaucuuccug

SEQ ID NO: 723560 - RNA, 20 nt, Artificial Sequence
  Synthetic
gagaaaagugccuuuuccug

SEQ ID NO: 723561 - RNA, 20 nt, Artificial Sequence
  Synthetic
guccuguucagcuuuuccug

SEQ ID NO: 723562 - RNA, 20 nt, Artificial Sequence
  Synthetic
gcaugauaacugaaaagcug

SEQ ID NO: 723563 - RNA, 20 nt, Artificial Sequence
  Synthetic
gcagugauucuaggaagcug

SEQ ID NO: 723564 - RNA, 20 nt, Artificial Sequence
  Synthetic
gcagagcaggcuggaagcug

SEQ ID NO: 723565 - RNA, 20 nt, Artificial Sequence
  Synthetic
gacuucggugaagacagcug

SEQ ID NO: 723566 - RNA, 20 nt, Artificial Sequence
  Synthetic
ggugccuguagucccagcug

SEQ ID NO: 723567 - RNA, 20 nt, Artificial Sequence
  Synthetic
guuuuucugagagccagcug

SEQ ID NO: 723568 - RNA, 20 nt, Artificial Sequence
  Synthetic
gcucgauauaguuccagcug

SEQ ID NO: 723569 - RNA, 20 nt, Artificial Sequence
  Synthetic
ggagauuggugaaagagcug

SEQ ID NO: 723570 - RNA, 20 nt, Artificial Sequence
  Synthetic
gagauuucacuggagagcug

SEQ ID NO: 723571 - RNA, 20 nt, Artificial Sequence
  Synthetic
gagaaggaacccuugagcug

SEQ ID NO: 723572 - RNA, 20 nt, Artificial Sequence
  Synthetic
guugugcaugauguuagcug

SEQ ID NO: 723573 - RNA, 20 nt, Artificial Sequence
  Synthetic
guauagaaacucuuuagcug

SEQ ID NO: 723574 - RNA, 20 nt, Artificial Sequence
  Synthetic
ggugauucugcugcacgcug

SEQ ID NO: 723575 - RNA, 20 nt, Artificial Sequence
  Synthetic
ggacgaugaaguccaggcug

SEQ ID NO: 723576 - RNA, 20 nt, Artificial Sequence
  Synthetic
ggggcaugaaacagaggcug

SEQ ID NO: 723577 - RNA, 20 nt, Artificial Sequence
  Synthetic
ggaguauuucccugaggcug

SEQ ID NO: 723578 - RNA, 20 nt, Artificial Sequence
  Synthetic
gauucaguagagcuaggcug

SEQ ID NO: 723579 - RNA, 20 nt, Artificial Sequence
  Synthetic
gccagcuacucgguaggcug

SEQ ID NO: 723580 - RNA, 20 nt, Artificial Sequence
  Synthetic
gugauggccacccagggcug

SEQ ID NO: 723581 - RNA, 20 nt, Artificial Sequence
  Synthetic
ggucuguggccccagggcug

SEQ ID NO: 723582 - RNA, 20 nt, Artificial Sequence
  Synthetic
ggaaacauuaugaggggcug

SEQ ID NO: 723583 - RNA, 20 nt, Artificial Sequence
  Synthetic
gcuguucucacuuauggcug

SEQ ID NO: 723584 - RNA, 20 nt, Artificial Sequence
  Synthetic
gggcgauucccuucuggcug

SEQ ID NO: 723585 - RNA, 20 nt, Artificial Sequence
  Synthetic
gggugaauuuauaguggcug

SEQ ID NO: 723586 - RNA, 20 nt, Artificial Sequence
  Synthetic
gaaguugagggggguggcug

SEQ ID NO: 723587 - RNA, 20 nt, Artificial Sequence
  Synthetic
gcagcauacugggcaugcug

SEQ ID NO: 723588 - RNA, 20 nt, Artificial Sequence
  Synthetic
gauugggauuauagaugcug

SEQ ID NO: 723589 - RNA, 20 nt, Artificial Sequence
  Synthetic
gggaauagcgcaugaugcug

SEQ ID NO: 723590 - RNA, 20 nt, Artificial Sequence
  Synthetic
gggaguauugcaugaugcug

SEQ ID NO: 723591 - RNA, 20 nt, Artificial Sequence
  Synthetic
ggauauauggcgugaugcug

SEQ ID NO: 723592 - RNA, 20 nt, Artificial Sequence
  Synthetic
ggguauacugcgugaugcug

SEQ ID NO: 723593 - RNA, 20 nt, Artificial Sequence
  Synthetic
ggugauucugauguaugcug

SEQ ID NO: 723594 - RNA, 20 nt, Artificial Sequence
  Synthetic
gccacaauugagcacugcug

SEQ ID NO: 723595 - RNA, 20 nt, Artificial Sequence
  Synthetic
gauugauuuaaauacugcug

SEQ ID NO: 723596 - RNA, 20 nt, Artificial Sequence
  Synthetic
gcauagauucacugcugcug

SEQ ID NO: 723597 - RNA, 20 nt, Artificial Sequence
  Synthetic
gaugagugugagaagugcug

SEQ ID NO: 723598 - RNA, 20 nt, Artificial Sequence
  Synthetic
guaccuaccccaaggugcug

SEQ ID NO: 723599 - RNA, 20 nt, Artificial Sequence
  Synthetic
gggccuuguggugggugcug

SEQ ID NO: 723600 - RNA, 20 nt, Artificial Sequence
  Synthetic
guacaauuagaaauuugcug

SEQ ID NO: 723601 - RNA, 20 nt, Artificial Sequence
  Synthetic
guuccuguguuaguuugcug

SEQ ID NO: 723602 - RNA, 20 nt, Artificial Sequence
  Synthetic
gagaaagcucacaaaaucug

SEQ ID NO: 723603 - RNA, 20 nt, Artificial Sequence
  Synthetic
gugacaugguaauaaaucug

SEQ ID NO: 723604 - RNA, 20 nt, Artificial Sequence
  Synthetic
gcaggugcucaguaaaucug

SEQ ID NO: 723605 - RNA, 20 nt, Artificial Sequence
  Synthetic
guuuucguauauuuaaucug

SEQ ID NO: 723606 - RNA, 20 nt, Artificial Sequence
  Synthetic
gaucccucccaugacaucug

SEQ ID NO: 723607 - RNA, 20 nt, Artificial Sequence
  Synthetic
gaagaaaaaaauaccaucug

SEQ ID NO: 723608 - RNA, 20 nt, Artificial Sequence
  Synthetic
guuuuccauaugggcaucug

SEQ ID NO: 723609 - RNA, 20 nt, Artificial Sequence
  Synthetic
gccccuguccgagagaucug

SEQ ID NO: 723610 - RNA, 20 nt, Artificial Sequence
  Synthetic
gacccugaccuagagaucug

SEQ ID NO: 723611 - RNA, 20 nt, Artificial Sequence
  Synthetic
gugagcuccaccuggaucug

SEQ ID NO: 723612 - RNA, 20 nt, Artificial Sequence
  Synthetic
gggacuucugauucuaucug

SEQ ID NO: 723613 - RNA, 20 nt, Artificial Sequence
  Synthetic
gcuccaccacuuucuaucug

SEQ ID NO: 723614 - RNA, 20 nt, Artificial Sequence
  Synthetic
gcacaucuuuuaaaacucug

SEQ ID NO: 723615 - RNA, 20 nt, Artificial Sequence
  Synthetic
gaaaucucaccccaacucug

SEQ ID NO: 723616 - RNA, 20 nt, Artificial Sequence
  Synthetic
gucaauucuaagcaacucug

SEQ ID NO: 723617 - RNA, 20 nt, Artificial Sequence
  Synthetic
guuacccauuuuucacucug

SEQ ID NO: 723618 - RNA, 20 nt, Artificial Sequence
  Synthetic
gcacuguaacacacccucug

SEQ ID NO: 723619 - RNA, 20 nt, Artificial Sequence
  Synthetic
ggggcagaagggggccucug

SEQ ID NO: 723620 - RNA, 20 nt, Artificial Sequence
  Synthetic
gguacgggucuguggcucug

SEQ ID NO: 723621 - RNA, 20 nt, Artificial Sequence
  Synthetic
gauuugcuuuaauugcucug

SEQ ID NO: 723622 - RNA, 20 nt, Artificial Sequence
  Synthetic
ggcaaauccuuucaucucug

SEQ ID NO: 723623 - RNA, 20 nt, Artificial Sequence
  Synthetic
guguguauguauacucucug

SEQ ID NO: 723624 - RNA, 20 nt, Artificial Sequence
  Synthetic
gcaaaugccugggcucucug

SEQ ID NO: 723625 - RNA, 20 nt, Artificial Sequence
  Synthetic
gauuuuaaucugagucucug

SEQ ID NO: 723626 - RNA, 20 nt, Artificial Sequence
  Synthetic
gggguuuucuuuugucucug

SEQ ID NO: 723627 - RNA, 20 nt, Artificial Sequence
  Synthetic
ggauuaagcaaucuucucug

SEQ ID NO: 723628 - RNA, 20 nt, Artificial Sequence
  Synthetic
gccacgugguguugagucug

SEQ ID NO: 723629 - RNA, 20 nt, Artificial Sequence
  Synthetic
gagggcaucugaauagucug

SEQ ID NO: 723630 - RNA, 20 nt, Artificial Sequence
  Synthetic
gcagaucuaaagcaugucug

SEQ ID NO: 723631 - RNA, 20 nt, Artificial Sequence
  Synthetic
gaacacaaaggaagugucug

SEQ ID NO: 723632 - RNA, 20 nt, Artificial Sequence
  Synthetic
gguguaguagcccgugucug

SEQ ID NO: 723633 - RNA, 20 nt, Artificial Sequence
  Synthetic
gaaaguuuaaugugugucug

SEQ ID NO: 723634 - RNA, 20 nt, Artificial Sequence
  Synthetic
ggcuuucuauuacuugucug

SEQ ID NO: 723635 - RNA, 20 nt, Artificial Sequence
  Synthetic
gaccauaucugccuugucug

SEQ ID NO: 723636 - RNA, 20 nt, Artificial Sequence
  Synthetic
gcuaaugacugugaauucug

SEQ ID NO: 723637 - RNA, 20 nt, Artificial Sequence
  Synthetic
guauuaucaucuccauucug

SEQ ID NO: 723638 - RNA, 20 nt, Artificial Sequence
  Synthetic
guuacuauaauagcauucug

SEQ ID NO: 723639 - RNA, 20 nt, Artificial Sequence
  Synthetic
gccugucugacaucauucug

SEQ ID NO: 723640 - RNA, 20 nt, Artificial Sequence
  Synthetic
gaucuaugugucucauucug

SEQ ID NO: 723641 - RNA, 20 nt, Artificial Sequence
  Synthetic
gagaucaggaagucauucug

SEQ ID NO: 723642 - RNA, 20 nt, Artificial Sequence
  Synthetic
gacauugaauuuucauucug

SEQ ID NO: 723643 - RNA, 20 nt, Artificial Sequence
  Synthetic
gcuugaugucauggauucug

SEQ ID NO: 723644 - RNA, 20 nt, Artificial Sequence
  Synthetic
gaguuuaaaucgugauucug

SEQ ID NO: 723645 - RNA, 20 nt, Artificial Sequence
  Synthetic
guguuuguaaagcuauucug

SEQ ID NO: 723646 - RNA, 20 nt, Artificial Sequence
  Synthetic
ggcuuuaaaacauuauucug

SEQ ID NO: 723647 - RNA, 20 nt, Artificial Sequence
  Synthetic
gcccauucucacaacuucug

SEQ ID NO: 723648 - RNA, 20 nt, Artificial Sequence
  Synthetic
gucuggguacaugacuucug

SEQ ID NO: 723649 - RNA, 20 nt, Artificial Sequence
  Synthetic
gauaugcggcguuacuucug

SEQ ID NO: 723650 - RNA, 20 nt, Artificial Sequence
  Synthetic
gucaguuuacuugccuucug

SEQ ID NO: 723651 - RNA, 20 nt, Artificial Sequence
  Synthetic
guuaaaagagauugcuucug

SEQ ID NO: 723652 - RNA, 20 nt, Artificial Sequence
  Synthetic
gagaggaaagugcucuucug

SEQ ID NO: 723653 - RNA, 20 nt, Artificial Sequence
  Synthetic
gcuucuccacuacaguucug

SEQ ID NO: 723654 - RNA, 20 nt, Artificial Sequence
  Synthetic
gucuuaagccuccaguucug

SEQ ID NO: 723655 - RNA, 20 nt, Artificial Sequence
  Synthetic
ggcauuuaaacaggguucug

SEQ ID NO: 723656 - RNA, 20 nt, Artificial Sequence
  Synthetic
guagcauuugccaauuucug

SEQ ID NO: 723657 - RNA, 20 nt, Artificial Sequence
  Synthetic
gggguuuauuaauauuucug

SEQ ID NO: 723658 - RNA, 20 nt, Artificial Sequence
  Synthetic
gauguguggugauauuucug

SEQ ID NO: 723659 - RNA, 20 nt, Artificial Sequence
  Synthetic
gacgguaguuuguauuucug

SEQ ID NO: 723660 - RNA, 20 nt, Artificial Sequence
  Synthetic
gaugguaguuuguauuucug

SEQ ID NO: 723661 - RNA, 20 nt, Artificial Sequence
  Synthetic
gauaugcggcauuauuucug

SEQ ID NO: 723662 - RNA, 20 nt, Artificial Sequence
  Synthetic
gauguguggcauuauuucug

SEQ ID NO: 723663 - RNA, 20 nt, Artificial Sequence
  Synthetic
gaugugugguauuauuucug

SEQ ID NO: 723664 - RNA, 20 nt, Artificial Sequence
  Synthetic
gguauguggcguuauuucug

SEQ ID NO: 723665 - RNA, 20 nt, Artificial Sequence
  Synthetic
gguguaaguaggucuuucug

SEQ ID NO: 723666 - RNA, 20 nt, Artificial Sequence
  Synthetic
guaauuuuugaaauuuucug

SEQ ID NO: 723667 - RNA, 20 nt, Artificial Sequence
  Synthetic
gcaaguuuuacuuuuuucug

SEQ ID NO: 723668 - RNA, 20 nt, Artificial Sequence
  Synthetic
gauggguauaaaaaaaagug

SEQ ID NO: 723669 - RNA, 20 nt, Artificial Sequence
  Synthetic
gcuucuggaacauaaaagug

SEQ ID NO: 723670 - RNA, 20 nt, Artificial Sequence
  Synthetic
gagcaguuguuuucaaagug

SEQ ID NO: 723671 - RNA, 20 nt, Artificial Sequence
  Synthetic
gcauuuuggaggagaaagug

SEQ ID NO: 723672 - RNA, 20 nt, Artificial Sequence
  Synthetic
gauugagaauugagaaagug

SEQ ID NO: 723673 - RNA, 20 nt, Artificial Sequence
  Synthetic
gguaaugggaaaugaaagug

SEQ ID NO: 723674 - RNA, 20 nt, Artificial Sequence
  Synthetic
guauucauaucaguaaagug

SEQ ID NO: 723675 - RNA, 20 nt, Artificial Sequence
  Synthetic
gguuuuuaggggguaaagug

SEQ ID NO: 723676 - RNA, 20 nt, Artificial Sequence
  Synthetic
guuucuccauuuguaaagug

SEQ ID NO: 723677 - RNA, 20 nt, Artificial Sequence
  Synthetic
gcaagcacacuaaccaagug

SEQ ID NO: 723678 - RNA, 20 nt, Artificial Sequence
  Synthetic
ggaauauaggagaccaagug

SEQ ID NO: 723679 - RNA, 20 nt, Artificial Sequence
  Synthetic
ggugggauguauuucaagug

SEQ ID NO: 723680 - RNA, 20 nt, Artificial Sequence
  Synthetic
gagggagaacaucagaagug

SEQ ID NO: 723681 - RNA, 20 nt, Artificial Sequence
  Synthetic
gguauggagucagagaagug

SEQ ID NO: 723682 - RNA, 20 nt, Artificial Sequence
  Synthetic
gacuuuuagcuguagaagug

SEQ ID NO: 723683 - RNA, 20 nt, Artificial Sequence
  Synthetic
ggugaugacauuaggaagug

SEQ ID NO: 723684 - RNA, 20 nt, Artificial Sequence
  Synthetic
guggggcuuaacgggaagug

SEQ ID NO: 723685 - RNA, 20 nt, Artificial Sequence
  Synthetic
gauucaacaguucugaagug

SEQ ID NO: 723686 - RNA, 20 nt, Artificial Sequence
  Synthetic
guggucuuacgguugaagug

SEQ ID NO: 723687 - RNA, 20 nt, Artificial Sequence
  Synthetic
gauucaacaguuuugaagug

SEQ ID NO: 723688 - RNA, 20 nt, Artificial Sequence
  Synthetic
gacuuuggggacucuaagug

SEQ ID NO: 723689 - RNA, 20 nt, Artificial Sequence
  Synthetic
ggagaaauaugguguaagug

SEQ ID NO: 723690 - RNA, 20 nt, Artificial Sequence
  Synthetic
guuacagcaauguguaagug

SEQ ID NO: 723691 - RNA, 20 nt, Artificial Sequence
  Synthetic
gauauuugcuacacacagug

SEQ ID NO: 723692 - RNA, 20 nt, Artificial Sequence
  Synthetic
gaaccucggcuaggacagug

SEQ ID NO: 723693 - RNA, 20 nt, Artificial Sequence
  Synthetic
guccucauuucuugacagug

SEQ ID NO: 723694 - RNA, 20 nt, Artificial Sequence
  Synthetic
gaugccaugaaaauacagug

SEQ ID NO: 723695 - RNA, 20 nt, Artificial Sequence
  Synthetic
ggugccaagaacauacagug

SEQ ID NO: 723696 - RNA, 20 nt, Artificial Sequence
  Synthetic
gcucuaacuagaugccagug

SEQ ID NO: 723697 - RNA, 20 nt, Artificial Sequence
  Synthetic
ggacaauucuucuuccagug

SEQ ID NO: 723698 - RNA, 20 nt, Artificial Sequence
  Synthetic
gcacgaagaaauaagcagug

SEQ ID NO: 723699 - RNA, 20 nt, Artificial Sequence
  Synthetic
gcauuugaaucucagcagug

SEQ ID NO: 723700 - RNA, 20 nt, Artificial Sequence
  Synthetic
guucauuguggaaggcagug

SEQ ID NO: 723701 - RNA, 20 nt, Artificial Sequence
  Synthetic
ggggcugguuaucugcagug

SEQ ID NO: 723702 - RNA, 20 nt, Artificial Sequence
  Synthetic
guguuuuuaaagauucagug

SEQ ID NO: 723703 - RNA, 20 nt, Artificial Sequence
  Synthetic
gugaacccauuucaagagug

SEQ ID NO: 723704 - RNA, 20 nt, Artificial Sequence
  Synthetic
gcaaauacacccacagagug

SEQ ID NO: 723705 - RNA, 20 nt, Artificial Sequence
  Synthetic
guacacaugcgcacagagug

SEQ ID NO: 723706 - RNA, 20 nt, Artificial Sequence
  Synthetic
ggaggggaaucaagagagug

SEQ ID NO: 723707 - RNA, 20 nt, Artificial Sequence
  Synthetic
ggaaugggccuaagagagug

SEQ ID NO: 723708 - RNA, 20 nt, Artificial Sequence
  Synthetic
gcuauuuauucuggagagug

SEQ ID NO: 723709 - RNA, 20 nt, Artificial Sequence
  Synthetic
gguuuaugaaucugagagug

SEQ ID NO: 723710 - RNA, 20 nt, Artificial Sequence
  Synthetic
gggauauauacccaggagug

SEQ ID NO: 723711 - RNA, 20 nt, Artificial Sequence
  Synthetic
gaaagccagaaaugggagug

SEQ ID NO: 723712 - RNA, 20 nt, Artificial Sequence
  Synthetic
gcuugaccaagcugggagug

SEQ ID NO: 723713 - RNA, 20 nt, Artificial Sequence
  Synthetic
gaguucagggcuugggagug

SEQ ID NO: 723714 - RNA, 20 nt, Artificial Sequence
  Synthetic
gaggcuugggagguggagug

SEQ ID NO: 723715 - RNA, 20 nt, Artificial Sequence
  Synthetic
gaucuagacuuuuuggagug

SEQ ID NO: 723716 - RNA, 20 nt, Artificial Sequence
  Synthetic
ggcaagaaggagaaugagug

SEQ ID NO: 723717 - RNA, 20 nt, Artificial Sequence
  Synthetic
gauaaagaggaagcauagug

SEQ ID NO: 723718 - RNA, 20 nt, Artificial Sequence
  Synthetic
gcacuaggaggucccuagug

SEQ ID NO: 723719 - RNA, 20 nt, Artificial Sequence
  Synthetic
guauaacuaggcuccuagug

SEQ ID NO: 723720 - RNA, 20 nt, Artificial Sequence
  Synthetic
gcaguuagaggcaucuagug

SEQ ID NO: 723721 - RNA, 20 nt, Artificial Sequence
  Synthetic
gaaaacgagucagucuagug

SEQ ID NO: 723722 - RNA, 20 nt, Artificial Sequence
  Synthetic
ggaugcaaguaggaguagug

SEQ ID NO: 723723 - RNA, 20 nt, Artificial Sequence
  Synthetic
ggcagagugggaagguagug

SEQ ID NO: 723724 - RNA, 20 nt, Artificial Sequence
  Synthetic
ggaagucuuggaguguagug

SEQ ID NO: 723725 - RNA, 20 nt, Artificial Sequence
  Synthetic
gggcacaugugcacaacgug

SEQ ID NO: 723726 - RNA, 20 nt, Artificial Sequence
  Synthetic
ggucccucccacaacacgug

SEQ ID NO: 723727 - RNA, 20 nt, Artificial Sequence
  Synthetic
ggucucucccuugacacgug

SEQ ID NO: 723728 - RNA, 20 nt, Artificial Sequence
  Synthetic
gacuucagaaggcucccgug

SEQ ID NO: 723729 - RNA, 20 nt, Artificial Sequence
  Synthetic
gugcugggauuacaggcgug

SEQ ID NO: 723730 - RNA, 20 nt, Artificial Sequence
  Synthetic
gguauuugcaacuucucgug

SEQ ID NO: 723731 - RNA, 20 nt, Artificial Sequence
  Synthetic
guggacacagggaaaaggug

SEQ ID NO: 723732 - RNA, 20 nt, Artificial Sequence
  Synthetic
ggugaugguauuagaaggug

SEQ ID NO: 723733 - RNA, 20 nt, Artificial Sequence
  Synthetic
gcugggugauugggaaggug

SEQ ID NO: 723734 - RNA, 20 nt, Artificial Sequence
  Synthetic
gucaacccacuuuuaaggug

SEQ ID NO: 723735 - RNA, 20 nt, Artificial Sequence
  Synthetic
gggagagcaggaaacaggug

SEQ ID NO: 723736 - RNA, 20 nt, Artificial Sequence
  Synthetic
guggaaaaaugagacaggug

SEQ ID NO: 723737 - RNA, 20 nt, Artificial Sequence
  Synthetic
gaagguaaauuggccaggug

SEQ ID NO: 723738 - RNA, 20 nt, Artificial Sequence
  Synthetic
gcggagauugcuuccaggug

SEQ ID NO: 723739 - RNA, 20 nt, Artificial Sequence
  Synthetic
ggggcaauuucuggcaggug

SEQ ID NO: 723740 - RNA, 20 nt, Artificial Sequence
  Synthetic
gaggcagcuaggaucaggug

SEQ ID NO: 723741 - RNA, 20 nt, Artificial Sequence
  Synthetic
gccccaugcuuugucaggug

SEQ ID NO: 723742 - RNA, 20 nt, Artificial Sequence
  Synthetic
gaaaugggcauaaagaggug

SEQ ID NO: 723743 - RNA, 20 nt, Artificial Sequence
  Synthetic
ggaagggucguggggaggug

SEQ ID NO: 723744 - RNA, 20 nt, Artificial Sequence
  Synthetic
gauccucaauauuggaggug

SEQ ID NO: 723745 - RNA, 20 nt, Artificial Sequence
  Synthetic
gguggugguuauuggaggug

SEQ ID NO: 723746 - RNA, 20 nt, Artificial Sequence
  Synthetic
gagagaauguuagugaggug

SEQ ID NO: 723747 - RNA, 20 nt, Artificial Sequence
  Synthetic
gggcugcacugcuugaggug

SEQ ID NO: 723748 - RNA, 20 nt, Artificial Sequence
  Synthetic
ggucaauuuuggaauaggug

SEQ ID NO: 723749 - RNA, 20 nt, Artificial Sequence
  Synthetic
guggagguaggggauaggug

SEQ ID NO: 723750 - RNA, 20 nt, Artificial Sequence
  Synthetic
gguuuuugagagaguaggug

SEQ ID NO: 723751 - RNA, 20 nt, Artificial Sequence
  Synthetic
gcugaggacccagguaggug

SEQ ID NO: 723752 - RNA, 20 nt, Artificial Sequence
  Synthetic
gauuugaaugccuuuaggug

SEQ ID NO: 723753 - RNA, 20 nt, Artificial Sequence
  Synthetic
gggaaagauguucaagggug

SEQ ID NO: 723754 - RNA, 20 nt, Artificial Sequence
  Synthetic
gaacacuuggacacagggug

SEQ ID NO: 723755 - RNA, 20 nt, Artificial Sequence
  Synthetic
ggcuuuuuggcuugagggug

SEQ ID NO: 723756 - RNA, 20 nt, Artificial Sequence
  Synthetic
gugacagucaucuuagggug

SEQ ID NO: 723757 - RNA, 20 nt, Artificial Sequence
  Synthetic
gaggggaaaaaguuagggug

SEQ ID NO: 723758 - RNA, 20 nt, Artificial Sequence
  Synthetic
gcgcaaaaauuaaucgggug

SEQ ID NO: 723759 - RNA, 20 nt, Artificial Sequence
  Synthetic
guggauguccagcaggggug

SEQ ID NO: 723760 - RNA, 20 nt, Artificial Sequence
  Synthetic
gcauuugaagugagggggug

SEQ ID NO: 723761 - RNA, 20 nt, Artificial Sequence
  Synthetic
gcugggaaggguagggggug

SEQ ID NO: 723762 - RNA, 20 nt, Artificial Sequence
  Synthetic
guaacugaaucaugggggug

SEQ ID NO: 723763 - RNA, 20 nt, Artificial Sequence
  Synthetic
gagugguggguaugggggug

SEQ ID NO: 723764 - RNA, 20 nt, Artificial Sequence
  Synthetic
guuauuagauccugggggug

SEQ ID NO: 723765 - RNA, 20 nt, Artificial Sequence
  Synthetic
guaaagacaaugugggggug

SEQ ID NO: 723766 - RNA, 20 nt, Artificial Sequence
  Synthetic
gguuuccaggggcuggggug

SEQ ID NO: 723767 - RNA, 20 nt, Artificial Sequence
  Synthetic
gcacaggaugggguggggug

SEQ ID NO: 723768 - RNA, 20 nt, Artificial Sequence
  Synthetic
gauuuaguaggcuuggggug

SEQ ID NO: 723769 - RNA, 20 nt, Artificial Sequence
  Synthetic
guugggguugggaaugggug

SEQ ID NO: 723770 - RNA, 20 nt, Artificial Sequence
  Synthetic
gcaauacuccagacugggug

SEQ ID NO: 723771 - RNA, 20 nt, Artificial Sequence
  Synthetic
ggaaccucccaauaauggug

SEQ ID NO: 723772 - RNA, 20 nt, Artificial Sequence
  Synthetic
guuagcuggcugugauggug

SEQ ID NO: 723773 - RNA, 20 nt, Artificial Sequence
  Synthetic
gguagaauaguaguauggug

SEQ ID NO: 723774 - RNA, 20 nt, Artificial Sequence
  Synthetic
ggaaucacucgaaccuggug

SEQ ID NO: 723775 - RNA, 20 nt, Artificial Sequence
  Synthetic
gugagccaccaugccuggug

SEQ ID NO: 723776 - RNA, 20 nt, Artificial Sequence
  Synthetic
gcugaauugccuggcuggug

SEQ ID NO: 723777 - RNA, 20 nt, Artificial Sequence
  Synthetic
ggaaacaacaggugcuggug

SEQ ID NO: 723778 - RNA, 20 nt, Artificial Sequence
  Synthetic
gagugguuugcuuucuggug

SEQ ID NO: 723779 - RNA, 20 nt, Artificial Sequence
  Synthetic
guuaucagaggugaguggug

SEQ ID NO: 723780 - RNA, 20 nt, Artificial Sequence
  Synthetic
gcagaacccucaugguggug

SEQ ID NO: 723781 - RNA, 20 nt, Artificial Sequence
  Synthetic
gagagagagaguugguggug

SEQ ID NO: 723782 - RNA, 20 nt, Artificial Sequence
  Synthetic
ggguguagauauauguggug

SEQ ID NO: 723783 - RNA, 20 nt, Artificial Sequence
  Synthetic
gguuaacauuaacuuuggug

SEQ ID NO: 723784 - RNA, 20 nt, Artificial Sequence
  Synthetic
ggaggugagcagaaaaugug

SEQ ID NO: 723785 - RNA, 20 nt, Artificial Sequence
  Synthetic
gaaauacuuagacaaaugug

SEQ ID NO: 723786 - RNA, 20 nt, Artificial Sequence
  Synthetic
guugacccucaaacaaugug

SEQ ID NO: 723787 - RNA, 20 nt, Artificial Sequence
  Synthetic
gaagcuggggccagaaugug

SEQ ID NO: 723788 - RNA, 20 nt, Artificial Sequence
  Synthetic
gauugcauggauuuaaugug

SEQ ID NO: 723789 - RNA, 20 nt, Artificial Sequence
  Synthetic
ggcuccacccuugacaugug

SEQ ID NO: 723790 - RNA, 20 nt, Artificial Sequence
  Synthetic
guucucucaucugucaugug

SEQ ID NO: 723791 - RNA, 20 nt, Artificial Sequence
  Synthetic
gcugugccugagaagaugug

SEQ ID NO: 723792 - RNA, 20 nt, Artificial Sequence
  Synthetic
gguucagaaaaggcgaugug

SEQ ID NO: 723793 - RNA, 20 nt, Artificial Sequence
  Synthetic
gaaauguuguugaggaugug

SEQ ID NO: 723794 - RNA, 20 nt, Artificial Sequence
  Synthetic
gcagcucaccuccugaugug

SEQ ID NO: 723795 - RNA, 20 nt, Artificial Sequence
  Synthetic
guuggaaccaaagugaugug

SEQ ID NO: 723796 - RNA, 20 nt, Artificial Sequence
  Synthetic
gacuagugaaauuugaugug

SEQ ID NO: 723797 - RNA, 20 nt, Artificial Sequence
  Synthetic
gggguacauauauauaugug

SEQ ID NO: 723798 - RNA, 20 nt, Artificial Sequence
  Synthetic
gguacauauauauauaugug

SEQ ID NO: 723799 - RNA, 20 nt, Artificial Sequence
  Synthetic
gugggguauauauauaugug

SEQ ID NO: 723800 - RNA, 20 nt, Artificial Sequence
  Synthetic
gaggaguacuggccuaugug

SEQ ID NO: 723801 - RNA, 20 nt, Artificial Sequence
  Synthetic
gcgauugauauagcuaugug

SEQ ID NO: 723802 - RNA, 20 nt, Artificial Sequence
  Synthetic
gaggugccugucaguaugug

SEQ ID NO: 723803 - RNA, 20 nt, Artificial Sequence
  Synthetic
ggacuggagagugguaugug

SEQ ID NO: 723804 - RNA, 20 nt, Artificial Sequence
  Synthetic
gauuccagaugauguaugug

SEQ ID NO: 723805 - RNA, 20 nt, Artificial Sequence
  Synthetic
ggaacacacguguguaugug

SEQ ID NO: 723806 - RNA, 20 nt, Artificial Sequence
  Synthetic
guauuuuaaaauuuuaugug

SEQ ID NO: 723807 - RNA, 20 nt, Artificial Sequence
  Synthetic
guguuaguguauuuuaugug

SEQ ID NO: 723808 - RNA, 20 nt, Artificial Sequence
  Synthetic
gugucauguucaaaacugug

SEQ ID NO: 723809 - RNA, 20 nt, Artificial Sequence
  Synthetic
guaaugaugauaccacugug

SEQ ID NO: 723810 - RNA, 20 nt, Artificial Sequence
  Synthetic
gacagacagaagggacugug

SEQ ID NO: 723811 - RNA, 20 nt, Artificial Sequence
  Synthetic
guagccucccaagcccugug

SEQ ID NO: 723812 - RNA, 20 nt, Artificial Sequence
  Synthetic
gaggacagcaucaagcugug

SEQ ID NO: 723813 - RNA, 20 nt, Artificial Sequence
  Synthetic
gugaggccuccccagcugug

SEQ ID NO: 723814 - RNA, 20 nt, Artificial Sequence
  Synthetic
guucugauaagguagcugug

SEQ ID NO: 723815 - RNA, 20 nt, Artificial Sequence
  Synthetic
gugaaaucucugaaucugug

SEQ ID NO: 723816 - RNA, 20 nt, Artificial Sequence
  Synthetic
gauuugugcagaacucugug

SEQ ID NO: 723817 - RNA, 20 nt, Artificial Sequence
  Synthetic
gccccaguggggacucugug

SEQ ID NO: 723818 - RNA, 20 nt, Artificial Sequence
  Synthetic
guucuaaccaugucucugug

SEQ ID NO: 723819 - RNA, 20 nt, Artificial Sequence
  Synthetic
gucauccuucagugucugug

SEQ ID NO: 723820 - RNA, 20 nt, Artificial Sequence
  Synthetic
gaaagggaaaacauucugug

SEQ ID NO: 723821 - RNA, 20 nt, Artificial Sequence
  Synthetic
ggaagaaaaacaaaagugug

SEQ ID NO: 723822 - RNA, 20 nt, Artificial Sequence
  Synthetic
gaaguuggaggcaaagugug

SEQ ID NO: 723823 - RNA, 20 nt, Artificial Sequence
  Synthetic
gagggugagaugaaagugug

SEQ ID NO: 723824 - RNA, 20 nt, Artificial Sequence
  Synthetic
ggggcuuaacgggaagugug

SEQ ID NO: 723825 - RNA, 20 nt, Artificial Sequence
  Synthetic
gcauuggagacugaagugug

SEQ ID NO: 723826 - RNA, 20 nt, Artificial Sequence
  Synthetic
gauauugcauacuaagugug

SEQ ID NO: 723827 - RNA, 20 nt, Artificial Sequence
  Synthetic
guugacccucaaacagugug

SEQ ID NO: 723828 - RNA, 20 nt, Artificial Sequence
  Synthetic
ggcagaagcaucccagugug

SEQ ID NO: 723829 - RNA, 20 nt, Artificial Sequence
  Synthetic
ggcaggaaaacgugagugug

SEQ ID NO: 723830 - RNA, 20 nt, Artificial Sequence
  Synthetic
gugaaauagaagauagugug

SEQ ID NO: 723831 - RNA, 20 nt, Artificial Sequence
  Synthetic
guguugggauuacuagugug

SEQ ID NO: 723832 - RNA, 20 nt, Artificial Sequence
  Synthetic
ggauacucaagcuuagugug

SEQ ID NO: 723833 - RNA, 20 nt, Artificial Sequence
  Synthetic
gaucccucccaggacgugug

SEQ ID NO: 723834 - RNA, 20 nt, Artificial Sequence
  Synthetic
gcauuacauuaagucgugug

SEQ ID NO: 723835 - RNA, 20 nt, Artificial Sequence
  Synthetic
ggccauaucuguagggugug

SEQ ID NO: 723836 - RNA, 20 nt, Artificial Sequence
  Synthetic
gauaauaugcugggggugug

SEQ ID NO: 723837 - RNA, 20 nt, Artificial Sequence
  Synthetic
gcuacauggauggaugugug

SEQ ID NO: 723838 - RNA, 20 nt, Artificial Sequence
  Synthetic
ggaaaaaaaauguaugugug

SEQ ID NO: 723839 - RNA, 20 nt, Artificial Sequence
  Synthetic
ggaauuuaugucccugugug

SEQ ID NO: 723840 - RNA, 20 nt, Artificial Sequence
  Synthetic
guugguguuggaugugugug

SEQ ID NO: 723841 - RNA, 20 nt, Artificial Sequence
  Synthetic
ggugugugugugugugugug

SEQ ID NO: 723842 - RNA, 20 nt, Artificial Sequence
  Synthetic
ggaaucacagggauugugug

SEQ ID NO: 723843 - RNA, 20 nt, Artificial Sequence
  Synthetic
gcaggguuggggguugugug

SEQ ID NO: 723844 - RNA, 20 nt, Artificial Sequence
  Synthetic
gaauuaauucuuaaauugug

SEQ ID NO: 723845 - RNA, 20 nt, Artificial Sequence
  Synthetic
gggcuucuuuagauauugug

SEQ ID NO: 723846 - RNA, 20 nt, Artificial Sequence
  Synthetic
gacaggcugacugucuugug

SEQ ID NO: 723847 - RNA, 20 nt, Artificial Sequence
  Synthetic
gaaguugcaguuaaguugug

SEQ ID NO: 723848 - RNA, 20 nt, Artificial Sequence
  Synthetic
guuucaguaggucuguugug

SEQ ID NO: 723849 - RNA, 20 nt, Artificial Sequence
  Synthetic
gggcacuggacaguguugug

SEQ ID NO: 723850 - RNA, 20 nt, Artificial Sequence
  Synthetic
gacuucugaaaugauuugug

SEQ ID NO: 723851 - RNA, 20 nt, Artificial Sequence
  Synthetic
guauuuaaaugaaaaaauug

SEQ ID NO: 723852 - RNA, 20 nt, Artificial Sequence
  Synthetic
guguuaaacucaagaaauug

SEQ ID NO: 723853 - RNA, 20 nt, Artificial Sequence
  Synthetic
guugggaagguuugaaauug

SEQ ID NO: 723854 - RNA, 20 nt, Artificial Sequence
  Synthetic
gagaauagauaaauaaauug

SEQ ID NO: 723855 - RNA, 20 nt, Artificial Sequence
  Synthetic
gaauugcuauauauaaauug

SEQ ID NO: 723856 - RNA, 20 nt, Artificial Sequence
  Synthetic
gcugucuuauuuauaaauug

SEQ ID NO: 723857 - RNA, 20 nt, Artificial Sequence
  Synthetic
gaaguggaauuccuaaauug

SEQ ID NO: 723858 - RNA, 20 nt, Artificial Sequence
  Synthetic
guaaaucuaaaaaacaauug

SEQ ID NO: 723859 - RNA, 20 nt, Artificial Sequence
  Synthetic
gaaggugaaugaugcaauug

SEQ ID NO: 723860 - RNA, 20 nt, Artificial Sequence
  Synthetic
gggucugauccaaucaauug

SEQ ID NO: 723861 - RNA, 20 nt, Artificial Sequence
  Synthetic
gaauugggagcaaagaauug

SEQ ID NO: 723862 - RNA, 20 nt, Artificial Sequence
  Synthetic
gugauaugaauacagaauug

SEQ ID NO: 723863 - RNA, 20 nt, Artificial Sequence
  Synthetic
ggagagaaaucccagaauug

SEQ ID NO: 723864 - RNA, 20 nt, Artificial Sequence
  Synthetic
ggcucuuggauuaggaauug

SEQ ID NO: 723865 - RNA, 20 nt, Artificial Sequence
  Synthetic
gcugagcuuggaaugaauug

SEQ ID NO: 723866 - RNA, 20 nt, Artificial Sequence
  Synthetic
gauagaaaaacuguuaauug

SEQ ID NO: 723867 - RNA, 20 nt, Artificial Sequence
  Synthetic
gugagcuccuuuaaacauug

SEQ ID NO: 723868 - RNA, 20 nt, Artificial Sequence
  Synthetic
gagaaggcccacccacauug

SEQ ID NO: 723869 - RNA, 20 nt, Artificial Sequence
  Synthetic
ggugaaaacaauagacauug

SEQ ID NO: 723870 - RNA, 20 nt, Artificial Sequence
  Synthetic
gugaauuacuucaaccauug

SEQ ID NO: 723871 - RNA, 20 nt, Artificial Sequence
  Synthetic
guaaacuaguucaaccauug

SEQ ID NO: 723872 - RNA, 20 nt, Artificial Sequence
  Synthetic
guaaauuaguucaaccauug

SEQ ID NO: 723873 - RNA, 20 nt, Artificial Sequence
  Synthetic
guaaauuaguuccaccauug

SEQ ID NO: 723874 - RNA, 20 nt, Artificial Sequence
  Synthetic
guaauagagaaauaccauug

SEQ ID NO: 723875 - RNA, 20 nt, Artificial Sequence
  Synthetic
guguaaaauaguuaccauug

SEQ ID NO: 723876 - RNA, 20 nt, Artificial Sequence
  Synthetic
gagggggauggggagcauug

SEQ ID NO: 723877 - RNA, 20 nt, Artificial Sequence
  Synthetic
ggcuaaauggccaggcauug

SEQ ID NO: 723878 - RNA, 20 nt, Artificial Sequence
  Synthetic
gacaaauaccuaaugcauug

SEQ ID NO: 723879 - RNA, 20 nt, Artificial Sequence
  Synthetic
gcaauaaaagcuguucauug

SEQ ID NO: 723880 - RNA, 20 nt, Artificial Sequence
  Synthetic
gcaugaauagagaaagauug

SEQ ID NO: 723881 - RNA, 20 nt, Artificial Sequence
  Synthetic
guuuucugggaucaagauug

SEQ ID NO: 723882 - RNA, 20 nt, Artificial Sequence
  Synthetic
gaagagcacaagggagauug

SEQ ID NO: 723883 - RNA, 20 nt, Artificial Sequence
  Synthetic
ggaagcauacccugagauug

SEQ ID NO: 723884 - RNA, 20 nt, Artificial Sequence
  Synthetic
gugucagaucccauagauug

SEQ ID NO: 723885 - RNA, 20 nt, Artificial Sequence
  Synthetic
gaguaaaggcagcaggauug

SEQ ID NO: 723886 - RNA, 20 nt, Artificial Sequence
  Synthetic
gugaguggguaucaggauug

SEQ ID NO: 723887 - RNA, 20 nt, Artificial Sequence
  Synthetic
ggguagauggcaugggauug

SEQ ID NO: 723888 - RNA, 20 nt, Artificial Sequence
  Synthetic
gccauuaacucauaugauug

SEQ ID NO: 723889 - RNA, 20 nt, Artificial Sequence
  Synthetic
gucuuugugcuuucugauug

SEQ ID NO: 723890 - RNA, 20 nt, Artificial Sequence
  Synthetic
gguugacaaacaaaauauug

SEQ ID NO: 723891 - RNA, 20 nt, Artificial Sequence
  Synthetic
gaaaagggauggaaauauug

SEQ ID NO: 723892 - RNA, 20 nt, Artificial Sequence
  Synthetic
gcuuaauugaguauauauug

SEQ ID NO: 723893 - RNA, 20 nt, Artificial Sequence
  Synthetic
gcagggagcacuuuauauug

SEQ ID NO: 723894 - RNA, 20 nt, Artificial Sequence
  Synthetic
gugcaucuuccauccuauug

SEQ ID NO: 723895 - RNA, 20 nt, Artificial Sequence
  Synthetic
gagcaaagagaggucuauug

SEQ ID NO: 723896 - RNA, 20 nt, Artificial Sequence
  Synthetic
guaaauuaguauaauuauug

SEQ ID NO: 723897 - RNA, 20 nt, Artificial Sequence
  Synthetic
gucugcugugucacuuauug

SEQ ID NO: 723898 - RNA, 20 nt, Artificial Sequence
  Synthetic
gcuaucucccugacuuauug

SEQ ID NO: 723899 - RNA, 20 nt, Artificial Sequence
  Synthetic
gguaacacauucaguuauug

SEQ ID NO: 723900 - RNA, 20 nt, Artificial Sequence
  Synthetic
gugcacacauauguuuauug

SEQ ID NO: 723901 - RNA, 20 nt, Artificial Sequence
  Synthetic
ggaaaagagauauuuuauug

SEQ ID NO: 723902 - RNA, 20 nt, Artificial Sequence
  Synthetic
gguaugccaguauuuuauug

SEQ ID NO: 723903 - RNA, 20 nt, Artificial Sequence
  Synthetic
gguuugccaguauuuuauug

SEQ ID NO: 723904 - RNA, 20 nt, Artificial Sequence
  Synthetic
gauggugucagaaaaacuug

SEQ ID NO: 723905 - RNA, 20 nt, Artificial Sequence
  Synthetic
gaaaagcaaggacaaacuug

SEQ ID NO: 723906 - RNA, 20 nt, Artificial Sequence
  Synthetic
ggguuguccauccaaacuug

SEQ ID NO: 723907 - RNA, 20 nt, Artificial Sequence
  Synthetic
guuugaaacauggaaacuug

SEQ ID NO: 723908 - RNA, 20 nt, Artificial Sequence
  Synthetic
gggccugggcagagaacuug

SEQ ID NO: 723909 - RNA, 20 nt, Artificial Sequence
  Synthetic
gacaucccuuccaacacuug

SEQ ID NO: 723910 - RNA, 20 nt, Artificial Sequence
  Synthetic
gccuuuuguauucacacuug

SEQ ID NO: 723911 - RNA, 20 nt, Artificial Sequence
  Synthetic
ggugugaaauuuuccacuug

SEQ ID NO: 723912 - RNA, 20 nt, Artificial Sequence
  Synthetic
gccuguaaucccagcacuug

SEQ ID NO: 723913 - RNA, 20 nt, Artificial Sequence
  Synthetic
gaaagcgggcagaucacuug

SEQ ID NO: 723914 - RNA, 20 nt, Artificial Sequence
  Synthetic
guggauggguggaucacuug

SEQ ID NO: 723915 - RNA, 20 nt, Artificial Sequence
  Synthetic
gcccugggaacuuggacuug

SEQ ID NO: 723916 - RNA, 20 nt, Artificial Sequence
  Synthetic
gaggaccacaagcugacuug

SEQ ID NO: 723917 - RNA, 20 nt, Artificial Sequence
  Synthetic
gagacggggguuucaccuug

SEQ ID NO: 723918 - RNA, 20 nt, Artificial Sequence
  Synthetic
guagaaaaaaaaaacccuug

SEQ ID NO: 723919 - RNA, 20 nt, Artificial Sequence
  Synthetic
gcaguuucacaugacccuug

SEQ ID NO: 723920 - RNA, 20 nt, Artificial Sequence
  Synthetic
ggucccaccauauacccuug

SEQ ID NO: 723921 - RNA, 20 nt, Artificial Sequence
  Synthetic
gcacuugcugaguccccuug

SEQ ID NO: 723922 - RNA, 20 nt, Artificial Sequence
  Synthetic
gaggaaacaaaauauccuug

SEQ ID NO: 723923 - RNA, 20 nt, Artificial Sequence
  Synthetic
gaagaaguaaaauuuccuug

SEQ ID NO: 723924 - RNA, 20 nt, Artificial Sequence
  Synthetic
gcaaacucaguaaaagcuug

SEQ ID NO: 723925 - RNA, 20 nt, Artificial Sequence
  Synthetic
gaaaaucugaaaaaggcuug

SEQ ID NO: 723926 - RNA, 20 nt, Artificial Sequence
  Synthetic
ggucagugaacuacggcuug

SEQ ID NO: 723927 - RNA, 20 nt, Artificial Sequence
  Synthetic
gcaguauacagaguggcuug

SEQ ID NO: 723928 - RNA, 20 nt, Artificial Sequence
  Synthetic
guuucaggcuuuuuggcuug

SEQ ID NO: 723929 - RNA, 20 nt, Artificial Sequence
  Synthetic
guuauguaaaugugugcuug

SEQ ID NO: 723930 - RNA, 20 nt, Artificial Sequence
  Synthetic
gcauacagucugcuugcuug

SEQ ID NO: 723931 - RNA, 20 nt, Artificial Sequence
  Synthetic
gauggcaucugcaaaucuug

SEQ ID NO: 723932 - RNA, 20 nt, Artificial Sequence
  Synthetic
gcucugccuaauaaaucuug

SEQ ID NO: 723933 - RNA, 20 nt, Artificial Sequence
  Synthetic
guauauuuucucucaucuug

SEQ ID NO: 723934 - RNA, 20 nt, Artificial Sequence
  Synthetic
gauuuucaaagaagaucuug

SEQ ID NO: 723935 - RNA, 20 nt, Artificial Sequence
  Synthetic
ggggauauuaagagaucuug

SEQ ID NO: 723936 - RNA, 20 nt, Artificial Sequence
  Synthetic
guggaggcaauuggaucuug

SEQ ID NO: 723937 - RNA, 20 nt, Artificial Sequence
  Synthetic
gcuaaaucaagaaccucuug

SEQ ID NO: 723938 - RNA, 20 nt, Artificial Sequence
  Synthetic
gaagaggguagacccucuug

SEQ ID NO: 723939 - RNA, 20 nt, Artificial Sequence
  Synthetic
gauauuugaucagggucuug

SEQ ID NO: 723940 - RNA, 20 nt, Artificial Sequence
  Synthetic
gauuguuaguugaugucuug

SEQ ID NO: 723941 - RNA, 20 nt, Artificial Sequence
  Synthetic
gugauagacucuaugucuug

SEQ ID NO: 723942 - RNA, 20 nt, Artificial Sequence
  Synthetic
gugcuucaaagaacuucuug

SEQ ID NO: 723943 - RNA, 20 nt, Artificial Sequence
  Synthetic
gcuaaugggaccacuucuug

SEQ ID NO: 723944 - RNA, 20 nt, Artificial Sequence
  Synthetic
gugaaacuacucucuucuug

SEQ ID NO: 723945 - RNA, 20 nt, Artificial Sequence
  Synthetic
ggaaccagggauucuucuug

SEQ ID NO: 723946 - RNA, 20 nt, Artificial Sequence
  Synthetic
gucuuucugauuauuucuug

SEQ ID NO: 723947 - RNA, 20 nt, Artificial Sequence
  Synthetic
gguuaauuauuacaaaguug

SEQ ID NO: 723948 - RNA, 20 nt, Artificial Sequence
  Synthetic
gggagucaaaaagaaaguug

SEQ ID NO: 723949 - RNA, 20 nt, Artificial Sequence
  Synthetic
gaaaagaaacagacaaguug

SEQ ID NO: 723950 - RNA, 20 nt, Artificial Sequence
  Synthetic
gaguuagacaggucaaguug

SEQ ID NO: 723951 - RNA, 20 nt, Artificial Sequence
  Synthetic
gacccaugggcuucaaguug

SEQ ID NO: 723952 - RNA, 20 nt, Artificial Sequence
  Synthetic
gaaaggaauucuugaaguug

SEQ ID NO: 723953 - RNA, 20 nt, Artificial Sequence
  Synthetic
ggaacaucacacaccaguug

SEQ ID NO: 723954 - RNA, 20 nt, Artificial Sequence
  Synthetic
guuucaguugauaucaguug

SEQ ID NO: 723955 - RNA, 20 nt, Artificial Sequence
  Synthetic
ggugauagcuggcagaguug

SEQ ID NO: 723956 - RNA, 20 nt, Artificial Sequence
  Synthetic
gaaugauagucauagaguug

SEQ ID NO: 723957 - RNA, 20 nt, Artificial Sequence
  Synthetic
gcccuguucuuccuuaguug

SEQ ID NO: 723958 - RNA, 20 nt, Artificial Sequence
  Synthetic
gaagaaagucuguuuaguug

SEQ ID NO: 723959 - RNA, 20 nt, Artificial Sequence
  Synthetic
gugaagccugcagugcguug

SEQ ID NO: 723960 - RNA, 20 nt, Artificial Sequence
  Synthetic
ggcugagaaguccaagguug

SEQ ID NO: 723961 - RNA, 20 nt, Artificial Sequence
  Synthetic
gaagacacuuccccagguug

SEQ ID NO: 723962 - RNA, 20 nt, Artificial Sequence
  Synthetic
gaaggguaguggggggguug

SEQ ID NO: 723963 - RNA, 20 nt, Artificial Sequence
  Synthetic
ggucuguggcucugggguug

SEQ ID NO: 723964 - RNA, 20 nt, Artificial Sequence
  Synthetic
gcuugauaaaauaaugguug

SEQ ID NO: 723965 - RNA, 20 nt, Artificial Sequence
  Synthetic
ggggaggugauuuuugguug

SEQ ID NO: 723966 - RNA, 20 nt, Artificial Sequence
  Synthetic
gcauuuaaaaccagauguug

SEQ ID NO: 723967 - RNA, 20 nt, Artificial Sequence
  Synthetic
gacuaguugucaauauguug

SEQ ID NO: 723968 - RNA, 20 nt, Artificial Sequence
  Synthetic
gaaguauuauuccuauguug

SEQ ID NO: 723969 - RNA, 20 nt, Artificial Sequence
  Synthetic
ggcucagagaaucuauguug

SEQ ID NO: 723970 - RNA, 20 nt, Artificial Sequence
  Synthetic
gaggaaauaagugacuguug

SEQ ID NO: 723971 - RNA, 20 nt, Artificial Sequence
  Synthetic
guguguguguguguguguug

SEQ ID NO: 723972 - RNA, 20 nt, Artificial Sequence
  Synthetic
gugccuugucacccuuguug

SEQ ID NO: 723973 - RNA, 20 nt, Artificial Sequence
  Synthetic
guaacuguacuuucuuguug

SEQ ID NO: 723974 - RNA, 20 nt, Artificial Sequence
  Synthetic
gaaaagcugcaggguuguug

SEQ ID NO: 723975 - RNA, 20 nt, Artificial Sequence
  Synthetic
gaccaaauaauucuuuguug

SEQ ID NO: 723976 - RNA, 20 nt, Artificial Sequence
  Synthetic
ggagguuauuuuaaaauuug

SEQ ID NO: 723977 - RNA, 20 nt, Artificial Sequence
  Synthetic
gacuuuuaugaccaaauuug

SEQ ID NO: 723978 - RNA, 20 nt, Artificial Sequence
  Synthetic
gggaacauguaguaaauuug

SEQ ID NO: 723979 - RNA, 20 nt, Artificial Sequence
  Synthetic
gaauguauugauacaauuug

SEQ ID NO: 723980 - RNA, 20 nt, Artificial Sequence
  Synthetic
gauuucaacauaggaauuug

SEQ ID NO: 723981 - RNA, 20 nt, Artificial Sequence
  Synthetic
gcuauuuagaaaugaauuug

SEQ ID NO: 723982 - RNA, 20 nt, Artificial Sequence
  Synthetic
guugaccuuuauugaauuug

SEQ ID NO: 723983 - RNA, 20 nt, Artificial Sequence
  Synthetic
gagaaacaagaguuaauuug

SEQ ID NO: 723984 - RNA, 20 nt, Artificial Sequence
  Synthetic
gacuacacaugucucauuug

SEQ ID NO: 723985 - RNA, 20 nt, Artificial Sequence
  Synthetic
gacacaacuguauucauuug

SEQ ID NO: 723986 - RNA, 20 nt, Artificial Sequence
  Synthetic
ggugagugugugaggauuug

SEQ ID NO: 723987 - RNA, 20 nt, Artificial Sequence
  Synthetic
guugagugaagggugauuug

SEQ ID NO: 723988 - RNA, 20 nt, Artificial Sequence
  Synthetic
gauacgcauguacauauuug

SEQ ID NO: 723989 - RNA, 20 nt, Artificial Sequence
  Synthetic
gcaauugcuggagauauuug

SEQ ID NO: 723990 - RNA, 20 nt, Artificial Sequence
  Synthetic
ggaauggcaguagauauuug

SEQ ID NO: 723991 - RNA, 20 nt, Artificial Sequence
  Synthetic
gagugcauagcauauauuug

SEQ ID NO: 723992 - RNA, 20 nt, Artificial Sequence
  Synthetic
guugacagaucuuauauuug

SEQ ID NO: 723993 - RNA, 20 nt, Artificial Sequence
  Synthetic
gacuguucugagaaacuuug

SEQ ID NO: 723994 - RNA, 20 nt, Artificial Sequence
  Synthetic
gggggcaaagguucacuuug

SEQ ID NO: 723995 - RNA, 20 nt, Artificial Sequence
  Synthetic
gagugauacaauggacuuug

SEQ ID NO: 723996 - RNA, 20 nt, Artificial Sequence
  Synthetic
ggacuucccuguuuacuuug

SEQ ID NO: 723997 - RNA, 20 nt, Artificial Sequence
  Synthetic
gggauaaaaaauuaccuuug

SEQ ID NO: 723998 - RNA, 20 nt, Artificial Sequence
  Synthetic
gugguuuuagggacccuuug

SEQ ID NO: 723999 - RNA, 20 nt, Artificial Sequence
  Synthetic
gucugaugggcuucccuuug

SEQ ID NO: 724000 - RNA, 20 nt, Artificial Sequence
  Synthetic
gucauucugaaaagccuuug

SEQ ID NO: 724001 - RNA, 20 nt, Artificial Sequence
  Synthetic
gaaugaaaucauguccuuug

SEQ ID NO: 724002 - RNA, 20 nt, Artificial Sequence
  Synthetic
gcuugaaaauauuuccuuug

SEQ ID NO: 724003 - RNA, 20 nt, Artificial Sequence
  Synthetic
gucugaugggcuuuccuuug

SEQ ID NO: 724004 - RNA, 20 nt, Artificial Sequence
  Synthetic
ggaagggguaguaagcuuug

SEQ ID NO: 724005 - RNA, 20 nt, Artificial Sequence
  Synthetic
gucucaaaggacaggcuuug

SEQ ID NO: 724006 - RNA, 20 nt, Artificial Sequence
  Synthetic
ggguugaacugguggcuuug

SEQ ID NO: 724007 - RNA, 20 nt, Artificial Sequence
  Synthetic
gagaacaaaaaaaugcuuug

SEQ ID NO: 724008 - RNA, 20 nt, Artificial Sequence
  Synthetic
gauuuugccccaaaucuuug

SEQ ID NO: 724009 - RNA, 20 nt, Artificial Sequence
  Synthetic
guccuaagaucagcucuuug

SEQ ID NO: 724010 - RNA, 20 nt, Artificial Sequence
  Synthetic
gcaaauugcuguggucuuug

SEQ ID NO: 724011 - RNA, 20 nt, Artificial Sequence
  Synthetic
guuccacuguaaauucuuug

SEQ ID NO: 724012 - RNA, 20 nt, Artificial Sequence
  Synthetic
ggaauuuaagauuuucuuug

SEQ ID NO: 724013 - RNA, 20 nt, Artificial Sequence
  Synthetic
gaggucuagucugaaguuug

SEQ ID NO: 724014 - RNA, 20 nt, Artificial Sequence
  Synthetic
gcuuuuuaaaaaucaguuug

SEQ ID NO: 724015 - RNA, 20 nt, Artificial Sequence
  Synthetic
gaagaguugaugggaguuug

SEQ ID NO: 724016 - RNA, 20 nt, Artificial Sequence
  Synthetic
gagagaaauauuugcguuug

SEQ ID NO: 724017 - RNA, 20 nt, Artificial Sequence
  Synthetic
gaauaaaaauugcagguuug

SEQ ID NO: 724018 - RNA, 20 nt, Artificial Sequence
  Synthetic
gcgcaugaugcugagguuug

SEQ ID NO: 724019 - RNA, 20 nt, Artificial Sequence
  Synthetic
gcgugggaggcgaugguuug

SEQ ID NO: 724020 - RNA, 20 nt, Artificial Sequence
  Synthetic
ggggacguaauuaugguuug

SEQ ID NO: 724021 - RNA, 20 nt, Artificial Sequence
  Synthetic
gcucugauuuaacugguuug

SEQ ID NO: 724022 - RNA, 20 nt, Artificial Sequence
  Synthetic
gggucaaacacaccuguuug

SEQ ID NO: 724023 - RNA, 20 nt, Artificial Sequence
  Synthetic
gaaugcuuuugauguguuug

SEQ ID NO: 724024 - RNA, 20 nt, Artificial Sequence
  Synthetic
gacguuaagaaauaauuuug

SEQ ID NO: 724025 - RNA, 20 nt, Artificial Sequence
  Synthetic
ggaaguaacucauaauuuug

SEQ ID NO: 724026 - RNA, 20 nt, Artificial Sequence
  Synthetic
gacagcacaagagcauuuug

SEQ ID NO: 724027 - RNA, 20 nt, Artificial Sequence
  Synthetic
guaauauuacaaucauuuug

SEQ ID NO: 724028 - RNA, 20 nt, Artificial Sequence
  Synthetic
gugaaaauaguaucauuuug

SEQ ID NO: 724029 - RNA, 20 nt, Artificial Sequence
  Synthetic
gcaguuccauugagauuuug

SEQ ID NO: 724030 - RNA, 20 nt, Artificial Sequence
  Synthetic
gugcagugguugagauuuug

SEQ ID NO: 724031 - RNA, 20 nt, Artificial Sequence
  Synthetic
ggcaccaggaacugauuuug

SEQ ID NO: 724032 - RNA, 20 nt, Artificial Sequence
  Synthetic
ggaaagcuugaaguauuuug

SEQ ID NO: 724033 - RNA, 20 nt, Artificial Sequence
  Synthetic
guaaaucaucacuacuuuug

SEQ ID NO: 724034 - RNA, 20 nt, Artificial Sequence
  Synthetic
gccauuuuucguaccuuuug

SEQ ID NO: 724035 - RNA, 20 nt, Artificial Sequence
  Synthetic
gugggaagggaaagcuuuug

SEQ ID NO: 724036 - RNA, 20 nt, Artificial Sequence
  Synthetic
gaauauuaaauuagcuuuug

SEQ ID NO: 724037 - RNA, 20 nt, Artificial Sequence
  Synthetic
guuggggaaacaaucuuuug

SEQ ID NO: 724038 - RNA, 20 nt, Artificial Sequence
  Synthetic
gaaucugggcugaucuuuug

SEQ ID NO: 724039 - RNA, 20 nt, Artificial Sequence
  Synthetic
gauaaagcucuuaucuuuug

SEQ ID NO: 724040 - RNA, 20 nt, Artificial Sequence
  Synthetic
gacaggcugacucucuuuug

SEQ ID NO: 724041 - RNA, 20 nt, Artificial Sequence
  Synthetic
ggaaacucacagaaguuuug

SEQ ID NO: 724042 - RNA, 20 nt, Artificial Sequence
  Synthetic
gccuuuggauuuuaguuuug

SEQ ID NO: 724043 - RNA, 20 nt, Artificial Sequence
  Synthetic
gucguuuugaaaggguuuug

SEQ ID NO: 724044 - RNA, 20 nt, Artificial Sequence
  Synthetic
gaguuauauaaaauguuuug

SEQ ID NO: 724045 - RNA, 20 nt, Artificial Sequence
  Synthetic
guucuauuuuuaauguuuug

SEQ ID NO: 724046 - RNA, 20 nt, Artificial Sequence
  Synthetic
ggcuacaucaagguguuuug

SEQ ID NO: 724047 - RNA, 20 nt, Artificial Sequence
  Synthetic
ggugaauauguggauuuuug

SEQ ID NO: 724048 - RNA, 20 nt, Artificial Sequence
  Synthetic
gaggagaggagugguuuuug

SEQ ID NO: 724049 - RNA, 20 nt, Artificial Sequence
  Synthetic
gaaagaugagacauuuuuug

SEQ ID NO: 724050 - RNA, 20 nt, Artificial Sequence
  Synthetic
gcucuauuuuuacuuuuuug

SEQ ID NO: 724051 - RNA, 20 nt, Artificial Sequence
  Synthetic
gcucuauuuuuaguuuuuug

SEQ ID NO: 724052 - RNA, 20 nt, Artificial Sequence
  Synthetic
guuucuguuuuuguuuuuug

SEQ ID NO: 724053 - RNA, 20 nt, Artificial Sequence
  Synthetic
gauguguggcauaaaaaaau

SEQ ID NO: 724054 - RNA, 20 nt, Artificial Sequence
  Synthetic
gaccaaaagagagaaaaaau

SEQ ID NO: 724055 - RNA, 20 nt, Artificial Sequence
  Synthetic
gaaaaaaccuaaucaaaaau

SEQ ID NO: 724056 - RNA, 20 nt, Artificial Sequence
  Synthetic
ggcugguuagucagaaaaau

SEQ ID NO: 724057 - RNA, 20 nt, Artificial Sequence
  Synthetic
gucugcagaacaugaaaaau

SEQ ID NO: 724058 - RNA, 20 nt, Artificial Sequence
  Synthetic
guuauuagauacugaaaaau

SEQ ID NO: 724059 - RNA, 20 nt, Artificial Sequence
  Synthetic
ggaguaaguaaaauaaaaau

SEQ ID NO: 724060 - RNA, 20 nt, Artificial Sequence
  Synthetic
ggguaacaucuaauaaaaau

SEQ ID NO: 724061 - RNA, 20 nt, Artificial Sequence
  Synthetic
ggucucagcaauauaaaaau

SEQ ID NO: 724062 - RNA, 20 nt, Artificial Sequence
  Synthetic
gaaaauagauauauaaaaau

SEQ ID NO: 724063 - RNA, 20 nt, Artificial Sequence
  Synthetic
guaauaucugguauaaaaau

SEQ ID NO: 724064 - RNA, 20 nt, Artificial Sequence
  Synthetic
gauccaucuuuaguaaaaau

SEQ ID NO: 724065 - RNA, 20 nt, Artificial Sequence
  Synthetic
guuugcugaauuuuaaaaau

SEQ ID NO: 724066 - RNA, 20 nt, Artificial Sequence
  Synthetic
gagacuaaguaaaacaaaau

SEQ ID NO: 724067 - RNA, 20 nt, Artificial Sequence
  Synthetic
gcucaaguuuaaaacaaaau

SEQ ID NO: 724068 - RNA, 20 nt, Artificial Sequence
  Synthetic
guuauaacuuaagacaaaau

SEQ ID NO: 724069 - RNA, 20 nt, Artificial Sequence
  Synthetic
gaacaggcaaccuacaaaau

SEQ ID NO: 724070 - RNA, 20 nt, Artificial Sequence
  Synthetic
gauuuuugauauuacaaaau

SEQ ID NO: 724071 - RNA, 20 nt, Artificial Sequence
  Synthetic
gguauacugaguaccaaaau

SEQ ID NO: 724072 - RNA, 20 nt, Artificial Sequence
  Synthetic
gguccagauucugccaaaau

SEQ ID NO: 724073 - RNA, 20 nt, Artificial Sequence
  Synthetic
gcccuugauuaguucaaaau

SEQ ID NO: 724074 - RNA, 20 nt, Artificial Sequence
  Synthetic
gcuuguauuucucagaaaau

SEQ ID NO: 724075 - RNA, 20 nt, Artificial Sequence
  Synthetic
gagagagagagagagaaaau

SEQ ID NO: 724076 - RNA, 20 nt, Artificial Sequence
  Synthetic
gugucaaauugagagaaaau

SEQ ID NO: 724077 - RNA, 20 nt, Artificial Sequence
  Synthetic
guuaaaggaaaugagaaaau

SEQ ID NO: 724078 - RNA, 20 nt, Artificial Sequence
  Synthetic
gaaacacugacagggaaaau

SEQ ID NO: 724079 - RNA, 20 nt, Artificial Sequence
  Synthetic
gagaaaaucugagggaaaau

SEQ ID NO: 724080 - RNA, 20 nt, Artificial Sequence
  Synthetic
ggacuucucauuuggaaaau

SEQ ID NO: 724081 - RNA, 20 nt, Artificial Sequence
  Synthetic
guaacagaauaccugaaaau

SEQ ID NO: 724082 - RNA, 20 nt, Artificial Sequence
  Synthetic
gucaacugcugucugaaaau

SEQ ID NO: 724083 - RNA, 20 nt, Artificial Sequence
  Synthetic
guuauuaaaucauugaaaau

SEQ ID NO: 724084 - RNA, 20 nt, Artificial Sequence
  Synthetic
gaaucagcaaacuugaaaau

SEQ ID NO: 724085 - RNA, 20 nt, Artificial Sequence
  Synthetic
gaagacuuaaaacauaaaau

SEQ ID NO: 724086 - RNA, 20 nt, Artificial Sequence
  Synthetic
gaauaaaacaagcauaaaau

SEQ ID NO: 724087 - RNA, 20 nt, Artificial Sequence
  Synthetic
guacccagacaggauaaaau

SEQ ID NO: 724088 - RNA, 20 nt, Artificial Sequence
  Synthetic
gguuaucucaucuauaaaau

SEQ ID NO: 724089 - RNA, 20 nt, Artificial Sequence
  Synthetic
gaauuauuggucucuaaaau

SEQ ID NO: 724090 - RNA, 20 nt, Artificial Sequence
  Synthetic
guaagcacaucauguaaaau

SEQ ID NO: 724091 - RNA, 20 nt, Artificial Sequence
  Synthetic
guccuuuugggauguaaaau

SEQ ID NO: 724092 - RNA, 20 nt, Artificial Sequence
  Synthetic
gguugucucaucuguaaaau

SEQ ID NO: 724093 - RNA, 20 nt, Artificial Sequence
  Synthetic
gaaaaaugauacauuaaaau

SEQ ID NO: 724094 - RNA, 20 nt, Artificial Sequence
  Synthetic
gauaauuacacacuuaaaau

SEQ ID NO: 724095 - RNA, 20 nt, Artificial Sequence
  Synthetic
gcauaagaggaauuuaaaau

SEQ ID NO: 724096 - RNA, 20 nt, Artificial Sequence
  Synthetic
gauuugcaaagaaaacaaau

SEQ ID NO: 724097 - RNA, 20 nt, Artificial Sequence
  Synthetic
gaugacugccagcaacaaau

SEQ ID NO: 724098 - RNA, 20 nt, Artificial Sequence
  Synthetic
gagauagaaaaggaacaaau

SEQ ID NO: 724099 - RNA, 20 nt, Artificial Sequence
  Synthetic
gaaauaugacaauaacaaau

SEQ ID NO: 724100 - RNA, 20 nt, Artificial Sequence
  Synthetic
gaaauuauugaaagacaaau

SEQ ID NO: 724101 - RNA, 20 nt, Artificial Sequence
  Synthetic
guugaggcacagagacaaau

SEQ ID NO: 724102 - RNA, 20 nt, Artificial Sequence
  Synthetic
guguaguuggggagacaaau

SEQ ID NO: 724103 - RNA, 20 nt, Artificial Sequence
  Synthetic
gucagaacuggcuuccaaau

SEQ ID NO: 724104 - RNA, 20 nt, Artificial Sequence
  Synthetic
ggaguuuucuuuuuccaaau

SEQ ID NO: 724105 - RNA, 20 nt, Artificial Sequence
  Synthetic
guucagcauuugaagcaaau

SEQ ID NO: 724106 - RNA, 20 nt, Artificial Sequence
  Synthetic
gaaaaaacacaugagcaaau

SEQ ID NO: 724107 - RNA, 20 nt, Artificial Sequence
  Synthetic
gggagauaaaagaggcaaau

SEQ ID NO: 724108 - RNA, 20 nt, Artificial Sequence
  Synthetic
gaaauaaaggguauucaaau

SEQ ID NO: 724109 - RNA, 20 nt, Artificial Sequence
  Synthetic
gguuucuauacuguucaaau

SEQ ID NO: 724110 - RNA, 20 nt, Artificial Sequence
  Synthetic
gcggaauugccauuucaaau

SEQ ID NO: 724111 - RNA, 20 nt, Artificial Sequence
  Synthetic
guuuuucaggagaaagaaau

SEQ ID NO: 724112 - RNA, 20 nt, Artificial Sequence
  Synthetic
gcagaagguggagaagaaau

SEQ ID NO: 724113 - RNA, 20 nt, Artificial Sequence
  Synthetic
gaaucaucugaggaagaaau

SEQ ID NO: 724114 - RNA, 20 nt, Artificial Sequence
  Synthetic
guuguuuuauucuaagaaau

SEQ ID NO: 724115 - RNA, 20 nt, Artificial Sequence
  Synthetic
guuuguaugugguaagaaau

SEQ ID NO: 724116 - RNA, 20 nt, Artificial Sequence
  Synthetic
gguuaccagagaucagaaau

SEQ ID NO: 724117 - RNA, 20 nt, Artificial Sequence
  Synthetic
ggcuucucccaaagagaaau

SEQ ID NO: 724118 - RNA, 20 nt, Artificial Sequence
  Synthetic
guguguugguuaagagaaau

SEQ ID NO: 724119 - RNA, 20 nt, Artificial Sequence
  Synthetic
ggggcugcuccccgagaaau

SEQ ID NO: 724120 - RNA, 20 nt, Artificial Sequence
  Synthetic
ggugaauggaaaauagaaau

SEQ ID NO: 724121 - RNA, 20 nt, Artificial Sequence
  Synthetic
gcuuaauugcaugacgaaau

SEQ ID NO: 724122 - RNA, 20 nt, Artificial Sequence
  Synthetic
gcacuuugagaggccgaaau

SEQ ID NO: 724123 - RNA, 20 nt, Artificial Sequence
  Synthetic
ggcuggggauagggcgaaau

SEQ ID NO: 724124 - RNA, 20 nt, Artificial Sequence
  Synthetic
gcugagugcuaaggggaaau

SEQ ID NO: 724125 - RNA, 20 nt, Artificial Sequence
  Synthetic
gauguauacgauugggaaau

SEQ ID NO: 724126 - RNA, 20 nt, Artificial Sequence
  Synthetic
gugccagagucauuggaaau

SEQ ID NO: 724127 - RNA, 20 nt, Artificial Sequence
  Synthetic
gaaacuuaauagcaugaaau

SEQ ID NO: 724128 - RNA, 20 nt, Artificial Sequence
  Synthetic
gcaaauaaugaugaugaaau

SEQ ID NO: 724129 - RNA, 20 nt, Artificial Sequence
  Synthetic
gaugauucauuaacugaaau

SEQ ID NO: 724130 - RNA, 20 nt, Artificial Sequence
  Synthetic
gcaucagugacuacugaaau

SEQ ID NO: 724131 - RNA, 20 nt, Artificial Sequence
  Synthetic
gcccagugugcaggugaaau

SEQ ID NO: 724132 - RNA, 20 nt, Artificial Sequence
  Synthetic
gacuugucuguauuugaaau

SEQ ID NO: 724133 - RNA, 20 nt, Artificial Sequence
  Synthetic
ggaagucagaaguuugaaau

SEQ ID NO: 724134 - RNA, 20 nt, Artificial Sequence
  Synthetic
ggaaauaaauaggaauaaau

SEQ ID NO: 724135 - RNA, 20 nt, Artificial Sequence
  Synthetic
guguauguguguguauaaau

SEQ ID NO: 724136 - RNA, 20 nt, Artificial Sequence
  Synthetic
gaagaagaggcauuauaaau

SEQ ID NO: 724137 - RNA, 20 nt, Artificial Sequence
  Synthetic
ggggaaaagcauauguaaau

SEQ ID NO: 724138 - RNA, 20 nt, Artificial Sequence
  Synthetic
gcccaccucucucuguaaau

SEQ ID NO: 724139 - RNA, 20 nt, Artificial Sequence
  Synthetic
gggaggaaaacaguguaaau

SEQ ID NO: 724140 - RNA, 20 nt, Artificial Sequence
  Synthetic
gcuguuaaauuaaauuaaau

SEQ ID NO: 724141 - RNA, 20 nt, Artificial Sequence
  Synthetic
gaauggaaaggcaauuaaau

SEQ ID NO: 724142 - RNA, 20 nt, Artificial Sequence
  Synthetic
gguugaaaaaaacauuaaau

SEQ ID NO: 724143 - RNA, 20 nt, Artificial Sequence
  Synthetic
gaugagauuaacauuuaaau

SEQ ID NO: 724144 - RNA, 20 nt, Artificial Sequence
  Synthetic
gguauaguguauauuuaaau

SEQ ID NO: 724145 - RNA, 20 nt, Artificial Sequence
  Synthetic
guaggucaacauguuuaaau

SEQ ID NO: 724146 - RNA, 20 nt, Artificial Sequence
  Synthetic
gcuuuuagaaagaaaacaau

SEQ ID NO: 724147 - RNA, 20 nt, Artificial Sequence
  Synthetic
guacaaucuaugacaacaau

SEQ ID NO: 724148 - RNA, 20 nt, Artificial Sequence
  Synthetic
gaacucacaauuagaacaau

SEQ ID NO: 724149 - RNA, 20 nt, Artificial Sequence
  Synthetic
gagaaugaaaaguuaacaau

SEQ ID NO: 724150 - RNA, 20 nt, Artificial Sequence
  Synthetic
gcgugguguucaaucacaau

SEQ ID NO: 724151 - RNA, 20 nt, Artificial Sequence
  Synthetic
gauacaauaagccugacaau

SEQ ID NO: 724152 - RNA, 20 nt, Artificial Sequence
  Synthetic
ggugcuccucaacguacaau

SEQ ID NO: 724153 - RNA, 20 nt, Artificial Sequence
  Synthetic
gagccuaauaaauguacaau

SEQ ID NO: 724154 - RNA, 20 nt, Artificial Sequence
  Synthetic
gaacaacaccaucaaccaau

SEQ ID NO: 724155 - RNA, 20 nt, Artificial Sequence
  Synthetic
ggagaaaauauuuaaccaau

SEQ ID NO: 724156 - RNA, 20 nt, Artificial Sequence
  Synthetic
gcaguggauaacugcccaau

SEQ ID NO: 724157 - RNA, 20 nt, Artificial Sequence
  Synthetic
gauuugcucaguuucccaau

SEQ ID NO: 724158 - RNA, 20 nt, Artificial Sequence
  Synthetic
gcggcuaucugcaagccaau

SEQ ID NO: 724159 - RNA, 20 nt, Artificial Sequence
  Synthetic
gaaagaagcauuuggccaau

SEQ ID NO: 724160 - RNA, 20 nt, Artificial Sequence
  Synthetic
ggacaguuuuuacaagcaau

SEQ ID NO: 724161 - RNA, 20 nt, Artificial Sequence
  Synthetic
ggcugggggcaggaagcaau

SEQ ID NO: 724162 - RNA, 20 nt, Artificial Sequence
  Synthetic
guacuugauaaaggagcaau

SEQ ID NO: 724163 - RNA, 20 nt, Artificial Sequence
  Synthetic
guuuauagccuaggagcaau

SEQ ID NO: 724164 - RNA, 20 nt, Artificial Sequence
  Synthetic
gcugggguacagggagcaau

SEQ ID NO: 724165 - RNA, 20 nt, Artificial Sequence
  Synthetic
ggugaauuauucugagcaau

SEQ ID NO: 724166 - RNA, 20 nt, Artificial Sequence
  Synthetic
guacacuauugauuagcaau

SEQ ID NO: 724167 - RNA, 20 nt, Artificial Sequence
  Synthetic
gucauaaaugaaaaggcaau

SEQ ID NO: 724168 - RNA, 20 nt, Artificial Sequence
  Synthetic
gauuucaugcuguaggcaau

SEQ ID NO: 724169 - RNA, 20 nt, Artificial Sequence
  Synthetic
gagguagcacacaaugcaau

SEQ ID NO: 724170 - RNA, 20 nt, Artificial Sequence
  Synthetic
gucuucaaccucagugcaau

SEQ ID NO: 724171 - RNA, 20 nt, Artificial Sequence
  Synthetic
gauuuuuucuucugugcaau

SEQ ID NO: 724172 - RNA, 20 nt, Artificial Sequence
  Synthetic
gaauaucaguuguuugcaau

SEQ ID NO: 724173 - RNA, 20 nt, Artificial Sequence
  Synthetic
gacauucauggcaaaucaau

SEQ ID NO: 724174 - RNA, 20 nt, Artificial Sequence
  Synthetic
gagcacacagcagaaucaau

SEQ ID NO: 724175 - RNA, 20 nt, Artificial Sequence
  Synthetic
gagagaugugaagcaucaau

SEQ ID NO: 724176 - RNA, 20 nt, Artificial Sequence
  Synthetic
gaauaagaaaaacacucaau

SEQ ID NO: 724177 - RNA, 20 nt, Artificial Sequence
  Synthetic
gagaaagcagaaaagucaau

SEQ ID NO: 724178 - RNA, 20 nt, Artificial Sequence
  Synthetic
guuuagaaaagggagucaau

SEQ ID NO: 724179 - RNA, 20 nt, Artificial Sequence
  Synthetic
gucuacagauugaugucaau

SEQ ID NO: 724180 - RNA, 20 nt, Artificial Sequence
  Synthetic
guggauauaaguuauucaau

SEQ ID NO: 724181 - RNA, 20 nt, Artificial Sequence
  Synthetic
guuaaaaaaaugaaaagaau

SEQ ID NO: 724182 - RNA, 20 nt, Artificial Sequence
  Synthetic
gacgguggucaccaaagaau

SEQ ID NO: 724183 - RNA, 20 nt, Artificial Sequence
  Synthetic
gaguuacuguuucaaagaau

SEQ ID NO: 724184 - RNA, 20 nt, Artificial Sequence
  Synthetic
guaauguauuuugaaagaau

SEQ ID NO: 724185 - RNA, 20 nt, Artificial Sequence
  Synthetic
ggcuuuuggauuuaaagaau

SEQ ID NO: 724186 - RNA, 20 nt, Artificial Sequence
  Synthetic
gugauauaaaucagaagaau

SEQ ID NO: 724187 - RNA, 20 nt, Artificial Sequence
  Synthetic
gcguugucacagagaagaau

SEQ ID NO: 724188 - RNA, 20 nt, Artificial Sequence
  Synthetic
gaagcuaucuuacuaagaau

SEQ ID NO: 724189 - RNA, 20 nt, Artificial Sequence
  Synthetic
gauuuuuuuccaguaagaau

SEQ ID NO: 724190 - RNA, 20 nt, Artificial Sequence
  Synthetic
gauuuauaggugguaagaau

SEQ ID NO: 724191 - RNA, 20 nt, Artificial Sequence
  Synthetic
ggaugugugauacacagaau

SEQ ID NO: 724192 - RNA, 20 nt, Artificial Sequence
  Synthetic
gaacaagcaaccuacagaau

SEQ ID NO: 724193 - RNA, 20 nt, Artificial Sequence
  Synthetic
gaacaggcagccuacagaau

SEQ ID NO: 724194 - RNA, 20 nt, Artificial Sequence
  Synthetic
gcauauguagagcccagaau

SEQ ID NO: 724195 - RNA, 20 nt, Artificial Sequence
  Synthetic
gacgucauugaaugcagaau

SEQ ID NO: 724196 - RNA, 20 nt, Artificial Sequence
  Synthetic
gaaugaaaauauugcagaau

SEQ ID NO: 724197 - RNA, 20 nt, Artificial Sequence
  Synthetic
gaaaagacaauccucagaau

SEQ ID NO: 724198 - RNA, 20 nt, Artificial Sequence
  Synthetic
guuuccauauuccucagaau

SEQ ID NO: 724199 - RNA, 20 nt, Artificial Sequence
  Synthetic
guuauuuaaaaagucagaau

SEQ ID NO: 724200 - RNA, 20 nt, Artificial Sequence
  Synthetic
gaaucuaaacucuucagaau

SEQ ID NO: 724201 - RNA, 20 nt, Artificial Sequence
  Synthetic
gucucccagucaaagagaau

SEQ ID NO: 724202 - RNA, 20 nt, Artificial Sequence
  Synthetic
gacauagcaauaaauagaau

SEQ ID NO: 724203 - RNA, 20 nt, Artificial Sequence
  Synthetic
gaauguauaaccucuagaau

SEQ ID NO: 724204 - RNA, 20 nt, Artificial Sequence
  Synthetic
gaauauuuaaauucuagaau

SEQ ID NO: 724205 - RNA, 20 nt, Artificial Sequence
  Synthetic
gauuauaugaagauuagaau

SEQ ID NO: 724206 - RNA, 20 nt, Artificial Sequence
  Synthetic
gcauucauggaucuuagaau

SEQ ID NO: 724207 - RNA, 20 nt, Artificial Sequence
  Synthetic
gcacuguaauauuuuagaau

SEQ ID NO: 724208 - RNA, 20 nt, Artificial Sequence
  Synthetic
gugcugugcuuuauacgaau

SEQ ID NO: 724209 - RNA, 20 nt, Artificial Sequence
  Synthetic
guuucagcagcagaaggaau

SEQ ID NO: 724210 - RNA, 20 nt, Artificial Sequence
  Synthetic
gaacacauggacacaggaau

SEQ ID NO: 724211 - RNA, 20 nt, Artificial Sequence
  Synthetic
guaaaauuuccuugaggaau

SEQ ID NO: 724212 - RNA, 20 nt, Artificial Sequence
  Synthetic
gagcaaugcagacuaggaau

SEQ ID NO: 724213 - RNA, 20 nt, Artificial Sequence
  Synthetic
gaaaguaauaucagcggaau

SEQ ID NO: 724214 - RNA, 20 nt, Artificial Sequence
  Synthetic
ggcaaauuaaauuugggaau

SEQ ID NO: 724215 - RNA, 20 nt, Artificial Sequence
  Synthetic
gauucucuaauaaauggaau

SEQ ID NO: 724216 - RNA, 20 nt, Artificial Sequence
  Synthetic
gacuuugaaaauguuggaau

SEQ ID NO: 724217 - RNA, 20 nt, Artificial Sequence
  Synthetic
ggugaguaaaacaaaugaau

SEQ ID NO: 724218 - RNA, 20 nt, Artificial Sequence
  Synthetic
gaugcucugaugaaaugaau

SEQ ID NO: 724219 - RNA, 20 nt, Artificial Sequence
  Synthetic
gcuucacaaguugaaugaau

SEQ ID NO: 724220 - RNA, 20 nt, Artificial Sequence
  Synthetic
gaagccugauuuucaugaau

SEQ ID NO: 724221 - RNA, 20 nt, Artificial Sequence
  Synthetic
guugagagccuacuaugaau

SEQ ID NO: 724222 - RNA, 20 nt, Artificial Sequence
  Synthetic
guggcuagggggcacugaau

SEQ ID NO: 724223 - RNA, 20 nt, Artificial Sequence
  Synthetic
ggcuggcaagauggcugaau

SEQ ID NO: 724224 - RNA, 20 nt, Artificial Sequence
  Synthetic
guuucaguuucuggcugaau

SEQ ID NO: 724225 - RNA, 20 nt, Artificial Sequence
  Synthetic
guuugaauacuuggcugaau

SEQ ID NO: 724226 - RNA, 20 nt, Artificial Sequence
  Synthetic
gagagagagaaagagugaau

SEQ ID NO: 724227 - RNA, 20 nt, Artificial Sequence
  Synthetic
ggggggaaaaugaugugaau

SEQ ID NO: 724228 - RNA, 20 nt, Artificial Sequence
  Synthetic
gaaaaaauaauuaugugaau

SEQ ID NO: 724229 - RNA, 20 nt, Artificial Sequence
  Synthetic
gcugcgguguaggauugaau

SEQ ID NO: 724230 - RNA, 20 nt, Artificial Sequence
  Synthetic
gaugggaagagggauugaau

SEQ ID NO: 724231 - RNA, 20 nt, Artificial Sequence
  Synthetic
gaaaaagaaugguauugaau

SEQ ID NO: 724232 - RNA, 20 nt, Artificial Sequence
  Synthetic
guuuucuuuaauuauugaau

SEQ ID NO: 724233 - RNA, 20 nt, Artificial Sequence
  Synthetic
gauuuaaaauucccuugaau

SEQ ID NO: 724234 - RNA, 20 nt, Artificial Sequence
  Synthetic
guacuacauauucuuugaau

SEQ ID NO: 724235 - RNA, 20 nt, Artificial Sequence
  Synthetic
gaaucaacaauaaaaauaau

SEQ ID NO: 724236 - RNA, 20 nt, Artificial Sequence
  Synthetic
gaagggcaucagaaaauaau

SEQ ID NO: 724237 - RNA, 20 nt, Artificial Sequence
  Synthetic
gauuaagaaaguaaaauaau

SEQ ID NO: 724238 - RNA, 20 nt, Artificial Sequence
  Synthetic
guaauuuuaauacaaauaau

SEQ ID NO: 724239 - RNA, 20 nt, Artificial Sequence
  Synthetic
gcauaacuugaucaaauaau

SEQ ID NO: 724240 - RNA, 20 nt, Artificial Sequence
  Synthetic
gcuaaucauuaugaaauaau

SEQ ID NO: 724241 - RNA, 20 nt, Artificial Sequence
  Synthetic
gugcuuauagcuacaauaau

SEQ ID NO: 724242 - RNA, 20 nt, Artificial Sequence
  Synthetic
gaaacuagguuaagaauaau

SEQ ID NO: 724243 - RNA, 20 nt, Artificial Sequence
  Synthetic
ggaaguacuuucugaauaau

SEQ ID NO: 724244 - RNA, 20 nt, Artificial Sequence
  Synthetic
gacucccacacauuaauaau

SEQ ID NO: 724245 - RNA, 20 nt, Artificial Sequence
  Synthetic
guggauauccagaacauaau

SEQ ID NO: 724246 - RNA, 20 nt, Artificial Sequence
  Synthetic
gaacaagcaaccuacauaau

SEQ ID NO: 724247 - RNA, 20 nt, Artificial Sequence
  Synthetic
guauuagugauuuacauaau

SEQ ID NO: 724248 - RNA, 20 nt, Artificial Sequence
  Synthetic
gggcagggguugagcauaau

SEQ ID NO: 724249 - RNA, 20 nt, Artificial Sequence
  Synthetic
ggagguaaguacuucauaau

SEQ ID NO: 724250 - RNA, 20 nt, Artificial Sequence
  Synthetic
guguccaggcccaagauaau

SEQ ID NO: 724251 - RNA, 20 nt, Artificial Sequence
  Synthetic
gagguaaugcauacgauaau

SEQ ID NO: 724252 - RNA, 20 nt, Artificial Sequence
  Synthetic
gaauuauuucuucugauaau

SEQ ID NO: 724253 - RNA, 20 nt, Artificial Sequence
  Synthetic
gaauauuauucauugauaau

SEQ ID NO: 724254 - RNA, 20 nt, Artificial Sequence
  Synthetic
guuagagugggugauauaau

SEQ ID NO: 724255 - RNA, 20 nt, Artificial Sequence
  Synthetic
guagaagaguccccuauaau

SEQ ID NO: 724256 - RNA, 20 nt, Artificial Sequence
  Synthetic
guggugaaugacuguauaau

SEQ ID NO: 724257 - RNA, 20 nt, Artificial Sequence
  Synthetic
gugcuugcaaaguguauaau

SEQ ID NO: 724258 - RNA, 20 nt, Artificial Sequence
  Synthetic
gaaaaguauacuuguauaau

SEQ ID NO: 724259 - RNA, 20 nt, Artificial Sequence
  Synthetic
gaccauuuuuuuuaacuaau

SEQ ID NO: 724260 - RNA, 20 nt, Artificial Sequence
  Synthetic
gggauuuaucauacacuaau

SEQ ID NO: 724261 - RNA, 20 nt, Artificial Sequence
  Synthetic
gcuugcacuaggauacuaau

SEQ ID NO: 724262 - RNA, 20 nt, Artificial Sequence
  Synthetic
ggaacuaugaauaaccuaau

SEQ ID NO: 724263 - RNA, 20 nt, Artificial Sequence
  Synthetic
ggcugcaauuuucagcuaau

SEQ ID NO: 724264 - RNA, 20 nt, Artificial Sequence
  Synthetic
gaguagugcuuucggcuaau

SEQ ID NO: 724265 - RNA, 20 nt, Artificial Sequence
  Synthetic
gaaagggggggauggcuaau

SEQ ID NO: 724266 - RNA, 20 nt, Artificial Sequence
  Synthetic
gcacugugcuggcugcuaau

SEQ ID NO: 724267 - RNA, 20 nt, Artificial Sequence
  Synthetic
guuaaagaauugcugcuaau

SEQ ID NO: 724268 - RNA, 20 nt, Artificial Sequence
  Synthetic
gaguacuauuggcaucuaau

SEQ ID NO: 724269 - RNA, 20 nt, Artificial Sequence
  Synthetic
gaaaauaauggaacucuaau

SEQ ID NO: 724270 - RNA, 20 nt, Artificial Sequence
  Synthetic
gcagaagcccgugaaguaau

SEQ ID NO: 724271 - RNA, 20 nt, Artificial Sequence
  Synthetic
guuuuauuuaauacaguaau

SEQ ID NO: 724272 - RNA, 20 nt, Artificial Sequence
  Synthetic
gauuucauuuaaagaguaau

SEQ ID NO: 724273 - RNA, 20 nt, Artificial Sequence
  Synthetic
guuauuauccauauaguaau

SEQ ID NO: 724274 - RNA, 20 nt, Artificial Sequence
  Synthetic
gauagaacacagguaguaau

SEQ ID NO: 724275 - RNA, 20 nt, Artificial Sequence
  Synthetic
guagagaauuagaagguaau

SEQ ID NO: 724276 - RNA, 20 nt, Artificial Sequence
  Synthetic
gaauaaugaauuuugguaau

SEQ ID NO: 724277 - RNA, 20 nt, Artificial Sequence
  Synthetic
gauacgaaagaacauguaau

SEQ ID NO: 724278 - RNA, 20 nt, Artificial Sequence
  Synthetic
gcuuauaacagaucuguaau

SEQ ID NO: 724279 - RNA, 20 nt, Artificial Sequence
  Synthetic
ggccaagaguuaucuguaau

SEQ ID NO: 724280 - RNA, 20 nt, Artificial Sequence
  Synthetic
gauuuuacugcuauuguaau

SEQ ID NO: 724281 - RNA, 20 nt, Artificial Sequence
  Synthetic
gguauauucuaaauauuaau

SEQ ID NO: 724282 - RNA, 20 nt, Artificial Sequence
  Synthetic
guuauaauuaggauauuaau

SEQ ID NO: 724283 - RNA, 20 nt, Artificial Sequence
  Synthetic
gucaacacucucaacuuaau

SEQ ID NO: 724284 - RNA, 20 nt, Artificial Sequence
  Synthetic
gccagacuucaccccuuaau

SEQ ID NO: 724285 - RNA, 20 nt, Artificial Sequence
  Synthetic
gucaugcagauuggcuuaau

SEQ ID NO: 724286 - RNA, 20 nt, Artificial Sequence
  Synthetic
ggauuuaauaaucucuuaau

SEQ ID NO: 724287 - RNA, 20 nt, Artificial Sequence
  Synthetic
ggggcagcgggaugguuaau

SEQ ID NO: 724288 - RNA, 20 nt, Artificial Sequence
  Synthetic
gcagagguacacaauuuaau

SEQ ID NO: 724289 - RNA, 20 nt, Artificial Sequence
  Synthetic
gagguucuuaauaauuuaau

SEQ ID NO: 724290 - RNA, 20 nt, Artificial Sequence
  Synthetic
gaauacuguuauaauuuaau

SEQ ID NO: 724291 - RNA, 20 nt, Artificial Sequence
  Synthetic
guuuacaugaauuauuuaau

SEQ ID NO: 724292 - RNA, 20 nt, Artificial Sequence
  Synthetic
gcugccaguguuacuuuaau

SEQ ID NO: 724293 - RNA, 20 nt, Artificial Sequence
  Synthetic
gaaaaacuauuuucuuuaau

SEQ ID NO: 724294 - RNA, 20 nt, Artificial Sequence
  Synthetic
gccagucugugucuuuuaau

SEQ ID NO: 724295 - RNA, 20 nt, Artificial Sequence
  Synthetic
gccaaucuccgguuuuuaau

SEQ ID NO: 724296 - RNA, 20 nt, Artificial Sequence
  Synthetic
guguagguuuuuuuuuuaau

SEQ ID NO: 724297 - RNA, 20 nt, Artificial Sequence
  Synthetic
gacauggggucauaaaacau

SEQ ID NO: 724298 - RNA, 20 nt, Artificial Sequence
  Synthetic
gauauuccacaugcaaacau

SEQ ID NO: 724299 - RNA, 20 nt, Artificial Sequence
  Synthetic
ggggcugguggaagaaacau

SEQ ID NO: 724300 - RNA, 20 nt, Artificial Sequence
  Synthetic
gagaaagcccuuagaaacau

SEQ ID NO: 724301 - RNA, 20 nt, Artificial Sequence
  Synthetic
gggaaggaaagaggaaacau

SEQ ID NO: 724302 - RNA, 20 nt, Artificial Sequence
  Synthetic
gauaguuagaagcuaaacau

SEQ ID NO: 724303 - RNA, 20 nt, Artificial Sequence
  Synthetic
gaauagaaagagguaaacau

SEQ ID NO: 724304 - RNA, 20 nt, Artificial Sequence
  Synthetic
gaacaggcaaccuacaacau

SEQ ID NO: 724305 - RNA, 20 nt, Artificial Sequence
  Synthetic
gaacagggaaccuacaacau

SEQ ID NO: 724306 - RNA, 20 nt, Artificial Sequence
  Synthetic
gagguuucccagggcaacau

SEQ ID NO: 724307 - RNA, 20 nt, Artificial Sequence
  Synthetic
ggcuuuuauuauaagaacau

SEQ ID NO: 724308 - RNA, 20 nt, Artificial Sequence
  Synthetic
gacaaaaucugaaugaacau

SEQ ID NO: 724309 - RNA, 20 nt, Artificial Sequence
  Synthetic
guaagaaacuauaugaacau

SEQ ID NO: 724310 - RNA, 20 nt, Artificial Sequence
  Synthetic
gcacauuuaccauauaacau

SEQ ID NO: 724311 - RNA, 20 nt, Artificial Sequence
  Synthetic
gauucaacgucuauuaacau

SEQ ID NO: 724312 - RNA, 20 nt, Artificial Sequence
  Synthetic
gcagcuugaggucuuaacau

SEQ ID NO: 724313 - RNA, 20 nt, Artificial Sequence
  Synthetic
gcgcaacuguagguuaacau

SEQ ID NO: 724314 - RNA, 20 nt, Artificial Sequence
  Synthetic
gggucccucccacaacacau

SEQ ID NO: 724315 - RNA, 20 nt, Artificial Sequence
  Synthetic
gcugcgaagggacaacacau

SEQ ID NO: 724316 - RNA, 20 nt, Artificial Sequence
  Synthetic
gggucccucccauaacacau

SEQ ID NO: 724317 - RNA, 20 nt, Artificial Sequence
  Synthetic
gggaaaucauauuaacacau

SEQ ID NO: 724318 - RNA, 20 nt, Artificial Sequence
  Synthetic
gggucccucacaugacacau

SEQ ID NO: 724319 - RNA, 20 nt, Artificial Sequence
  Synthetic
gcaaaacaaaauguacacau

SEQ ID NO: 724320 - RNA, 20 nt, Artificial Sequence
  Synthetic
gauauuauaaguauccacau

SEQ ID NO: 724321 - RNA, 20 nt, Artificial Sequence
  Synthetic
gugaagucagggcuccacau

SEQ ID NO: 724322 - RNA, 20 nt, Artificial Sequence
  Synthetic
ggggggaauuaaaugcacau

SEQ ID NO: 724323 - RNA, 20 nt, Artificial Sequence
  Synthetic
gguuaaaaacuaaaucacau

SEQ ID NO: 724324 - RNA, 20 nt, Artificial Sequence
  Synthetic
gaacucacucacuaucacau

SEQ ID NO: 724325 - RNA, 20 nt, Artificial Sequence
  Synthetic
gaaauucuugguugucacau

SEQ ID NO: 724326 - RNA, 20 nt, Artificial Sequence
  Synthetic
gccuccauggcauuucacau

SEQ ID NO: 724327 - RNA, 20 nt, Artificial Sequence
  Synthetic
gugcacggggcugcagacau

SEQ ID NO: 724328 - RNA, 20 nt, Artificial Sequence
  Synthetic
gguucuaaaaagggagacau

SEQ ID NO: 724329 - RNA, 20 nt, Artificial Sequence
  Synthetic
gagccuuccuugggagacau

SEQ ID NO: 724330 - RNA, 20 nt, Artificial Sequence
  Synthetic
ggcauuaccauucaggacau

SEQ ID NO: 724331 - RNA, 20 nt, Artificial Sequence
  Synthetic
ggcagcaauguggaggacau

SEQ ID NO: 724332 - RNA, 20 nt, Artificial Sequence
  Synthetic
ggaaauaccauucuggacau

SEQ ID NO: 724333 - RNA, 20 nt, Artificial Sequence
  Synthetic
gggagccauucccuugacau

SEQ ID NO: 724334 - RNA, 20 nt, Artificial Sequence
  Synthetic
gcaauuugaucaaaauacau

SEQ ID NO: 724335 - RNA, 20 nt, Artificial Sequence
  Synthetic
gauuagaaaucugaauacau

SEQ ID NO: 724336 - RNA, 20 nt, Artificial Sequence
  Synthetic
gccuguuauuuaggauacau

SEQ ID NO: 724337 - RNA, 20 nt, Artificial Sequence
  Synthetic
gggaccugggaguuauacau

SEQ ID NO: 724338 - RNA, 20 nt, Artificial Sequence
  Synthetic
gcaauagcaaaauacuacau

SEQ ID NO: 724339 - RNA, 20 nt, Artificial Sequence
  Synthetic
guuaaaaauauauacuacau

SEQ ID NO: 724340 - RNA, 20 nt, Artificial Sequence
  Synthetic
gccuguagucccagcuacau

SEQ ID NO: 724341 - RNA, 20 nt, Artificial Sequence
  Synthetic
gaaaaaaaaaauguguacau

SEQ ID NO: 724342 - RNA, 20 nt, Artificial Sequence
  Synthetic
gaaucaugggaauuguacau

SEQ ID NO: 724343 - RNA, 20 nt, Artificial Sequence
  Synthetic
ggcccaauaaaugauuacau

SEQ ID NO: 724344 - RNA, 20 nt, Artificial Sequence
  Synthetic
gaggacucuugugauuacau

SEQ ID NO: 724345 - RNA, 20 nt, Artificial Sequence
  Synthetic
gugguauuguuuuauuacau

SEQ ID NO: 724346 - RNA, 20 nt, Artificial Sequence
  Synthetic
gaugugcagguuuguuacau

SEQ ID NO: 724347 - RNA, 20 nt, Artificial Sequence
  Synthetic
gccagccaagagaaaaccau

SEQ ID NO: 724348 - RNA, 20 nt, Artificial Sequence
  Synthetic
gggacacaaagccaaaccau

SEQ ID NO: 724349 - RNA, 20 nt, Artificial Sequence
  Synthetic
gauugcacuuaaaacaccau

SEQ ID NO: 724350 - RNA, 20 nt, Artificial Sequence
  Synthetic
gauauauauauaugcaccau

SEQ ID NO: 724351 - RNA, 20 nt, Artificial Sequence
  Synthetic
guggagcuuaccaagaccau

SEQ ID NO: 724352 - RNA, 20 nt, Artificial Sequence
  Synthetic
ggaauuaggaaaaugaccau

SEQ ID NO: 724353 - RNA, 20 nt, Artificial Sequence
  Synthetic
gaaaagaaaacucuuaccau

SEQ ID NO: 724354 - RNA, 20 nt, Artificial Sequence
  Synthetic
ggaccaucuuugagacccau

SEQ ID NO: 724355 - RNA, 20 nt, Artificial Sequence
  Synthetic
gccuugagaaggggacccau

SEQ ID NO: 724356 - RNA, 20 nt, Artificial Sequence
  Synthetic
ggcccuguucucuuacccau

SEQ ID NO: 724357 - RNA, 20 nt, Artificial Sequence
  Synthetic
gagaccagccacuuccccau

SEQ ID NO: 724358 - RNA, 20 nt, Artificial Sequence
  Synthetic
gguggguguaauuggcccau

SEQ ID NO: 724359 - RNA, 20 nt, Artificial Sequence
  Synthetic
gaaacaaccuaaaugcccau

SEQ ID NO: 724360 - RNA, 20 nt, Artificial Sequence
  Synthetic
gucaauaaucuccugcccau

SEQ ID NO: 724361 - RNA, 20 nt, Artificial Sequence
  Synthetic
gaaaacucugcucugcccau

SEQ ID NO: 724362 - RNA, 20 nt, Artificial Sequence
  Synthetic
gaaguuauauuuuaucccau

SEQ ID NO: 724363 - RNA, 20 nt, Artificial Sequence
  Synthetic
gguuucuucaugccucccau

SEQ ID NO: 724364 - RNA, 20 nt, Artificial Sequence
  Synthetic
ggucauaggaguaaagccau

SEQ ID NO: 724365 - RNA, 20 nt, Artificial Sequence
  Synthetic
gaguucagcagugcagccau

SEQ ID NO: 724366 - RNA, 20 nt, Artificial Sequence
  Synthetic
gcuucuaaaaacaaggccau

SEQ ID NO: 724367 - RNA, 20 nt, Artificial Sequence
  Synthetic
gcagagcugcccaaggccau

SEQ ID NO: 724368 - RNA, 20 nt, Artificial Sequence
  Synthetic
gacaucauguugaaggccau

SEQ ID NO: 724369 - RNA, 20 nt, Artificial Sequence
  Synthetic
gagccacugcgcccggccau

SEQ ID NO: 724370 - RNA, 20 nt, Artificial Sequence
  Synthetic
gagauuaaauaauuugccau

SEQ ID NO: 724371 - RNA, 20 nt, Artificial Sequence
  Synthetic
gaaaaaucaucccaauccau

SEQ ID NO: 724372 - RNA, 20 nt, Artificial Sequence
  Synthetic
guuuuucgagaagaauccau

SEQ ID NO: 724373 - RNA, 20 nt, Artificial Sequence
  Synthetic
gucuuaauucaggcauccau

SEQ ID NO: 724374 - RNA, 20 nt, Artificial Sequence
  Synthetic
gaaaguucuacuucauccau

SEQ ID NO: 724375 - RNA, 20 nt, Artificial Sequence
  Synthetic
gugguuaaaaauauauccau

SEQ ID NO: 724376 - RNA, 20 nt, Artificial Sequence
  Synthetic
gguauucuucucaaguccau

SEQ ID NO: 724377 - RNA, 20 nt, Artificial Sequence
  Synthetic
guucccgucccuguguccau

SEQ ID NO: 724378 - RNA, 20 nt, Artificial Sequence
  Synthetic
gaaagaaauuuuguguccau

SEQ ID NO: 724379 - RNA, 20 nt, Artificial Sequence
  Synthetic
ggaucucuauucuguuccau

SEQ ID NO: 724380 - RNA, 20 nt, Artificial Sequence
  Synthetic
gacucacauuauauuuccau

SEQ ID NO: 724381 - RNA, 20 nt, Artificial Sequence
  Synthetic
gguucucuagucuuuuccau

SEQ ID NO: 724382 - RNA, 20 nt, Artificial Sequence
  Synthetic
gcaaucggauauuaaagcau

SEQ ID NO: 724383 - RNA, 20 nt, Artificial Sequence
  Synthetic
guaaguuuuuuaacaagcau

SEQ ID NO: 724384 - RNA, 20 nt, Artificial Sequence
  Synthetic
gucaacaaaaaaauaagcau

SEQ ID NO: 724385 - RNA, 20 nt, Artificial Sequence
  Synthetic
gaguguguagugauaagcau

SEQ ID NO: 724386 - RNA, 20 nt, Artificial Sequence
  Synthetic
gguccucugacuggcagcau

SEQ ID NO: 724387 - RNA, 20 nt, Artificial Sequence
  Synthetic
guagaaggagaggagagcau

SEQ ID NO: 724388 - RNA, 20 nt, Artificial Sequence
  Synthetic
ggcgaggggagggagagcau

SEQ ID NO: 724389 - RNA, 20 nt, Artificial Sequence
  Synthetic
guuaugcaagaugagagcau

SEQ ID NO: 724390 - RNA, 20 nt, Artificial Sequence
  Synthetic
gacagcagugaagggagcau

SEQ ID NO: 724391 - RNA, 20 nt, Artificial Sequence
  Synthetic
ggaagggggagggauagcau

SEQ ID NO: 724392 - RNA, 20 nt, Artificial Sequence
  Synthetic
ggacgggggagggauagcau

SEQ ID NO: 724393 - RNA, 20 nt, Artificial Sequence
  Synthetic
gaaggggggagggauagcau

SEQ ID NO: 724394 - RNA, 20 nt, Artificial Sequence
  Synthetic
ggaggggggagggauagcau

SEQ ID NO: 724395 - RNA, 20 nt, Artificial Sequence
  Synthetic
gaccaauauggcaguagcau

SEQ ID NO: 724396 - RNA, 20 nt, Artificial Sequence
  Synthetic
gcuuagcaggaagguagcau

SEQ ID NO: 724397 - RNA, 20 nt, Artificial Sequence
  Synthetic
guacacccauguuguagcau

SEQ ID NO: 724398 - RNA, 20 nt, Artificial Sequence
  Synthetic
ggcuaaaguuaucuuagcau

SEQ ID NO: 724399 - RNA, 20 nt, Artificial Sequence
  Synthetic
gagcuagaaaggaaacgcau

SEQ ID NO: 724400 - RNA, 20 nt, Artificial Sequence
  Synthetic
gaaggagggagggugcgcau

SEQ ID NO: 724401 - RNA, 20 nt, Artificial Sequence
  Synthetic
gaaacuauguuacaaggcau

SEQ ID NO: 724402 - RNA, 20 nt, Artificial Sequence
  Synthetic
gaacauugcauuuaaggcau

SEQ ID NO: 724403 - RNA, 20 nt, Artificial Sequence
  Synthetic
gaaaagugaggcagaggcau

SEQ ID NO: 724404 - RNA, 20 nt, Artificial Sequence
  Synthetic
gaucucaaagaaugaggcau

SEQ ID NO: 724405 - RNA, 20 nt, Artificial Sequence
  Synthetic
ggaaaguggaagugaggcau

SEQ ID NO: 724406 - RNA, 20 nt, Artificial Sequence
  Synthetic
guagcugggauuauaggcau

SEQ ID NO: 724407 - RNA, 20 nt, Artificial Sequence
  Synthetic
gaauguaaaacucuaggcau

SEQ ID NO: 724408 - RNA, 20 nt, Artificial Sequence
  Synthetic
gcaucucaguaagagggcau

SEQ ID NO: 724409 - RNA, 20 nt, Artificial Sequence
  Synthetic
gccacaguaggauggggcau

SEQ ID NO: 724410 - RNA, 20 nt, Artificial Sequence
  Synthetic
gccagugaaagagugggcau

SEQ ID NO: 724411 - RNA, 20 nt, Artificial Sequence
  Synthetic
gaguggaggcaggauggcau

SEQ ID NO: 724412 - RNA, 20 nt, Artificial Sequence
  Synthetic
ggaggggggagggauggcau

SEQ ID NO: 724413 - RNA, 20 nt, Artificial Sequence
  Synthetic
gaaaauucugcugccugcau

SEQ ID NO: 724414 - RNA, 20 nt, Artificial Sequence
  Synthetic
gcuuaacugaaaagcugcau

SEQ ID NO: 724415 - RNA, 20 nt, Artificial Sequence
  Synthetic
gggggggguguucugugcau

SEQ ID NO: 724416 - RNA, 20 nt, Artificial Sequence
  Synthetic
gguucuuagcuuccuugcau

SEQ ID NO: 724417 - RNA, 20 nt, Artificial Sequence
  Synthetic
ggcaauauaauuauuugcau

SEQ ID NO: 724418 - RNA, 20 nt, Artificial Sequence
  Synthetic
ggauuuauggaguaaaucau

SEQ ID NO: 724419 - RNA, 20 nt, Artificial Sequence
  Synthetic
gugggagguaacugaaucau

SEQ ID NO: 724420 - RNA, 20 nt, Artificial Sequence
  Synthetic
gguggagguaacugaaucau

SEQ ID NO: 724421 - RNA, 20 nt, Artificial Sequence
  Synthetic
gggggaaguaauugaaucau

SEQ ID NO: 724422 - RNA, 20 nt, Artificial Sequence
  Synthetic
gugggagguaauugaaucau

SEQ ID NO: 724423 - RNA, 20 nt, Artificial Sequence
  Synthetic
gugggagguaauuuaaucau

SEQ ID NO: 724424 - RNA, 20 nt, Artificial Sequence
  Synthetic
guauuuuguguuuucaucau

SEQ ID NO: 724425 - RNA, 20 nt, Artificial Sequence
  Synthetic
gauucugaaugccagaucau

SEQ ID NO: 724426 - RNA, 20 nt, Artificial Sequence
  Synthetic
gugagguaauugaggaucau

SEQ ID NO: 724427 - RNA, 20 nt, Artificial Sequence
  Synthetic
gugggaggugauuggaucau

SEQ ID NO: 724428 - RNA, 20 nt, Artificial Sequence
  Synthetic
guggauacuuauaauaucau

SEQ ID NO: 724429 - RNA, 20 nt, Artificial Sequence
  Synthetic
gguauuuaaaaugcuaucau

SEQ ID NO: 724430 - RNA, 20 nt, Artificial Sequence
  Synthetic
ggaagccacccaucacucau

SEQ ID NO: 724431 - RNA, 20 nt, Artificial Sequence
  Synthetic
gugaagauuaaugaccucau

SEQ ID NO: 724432 - RNA, 20 nt, Artificial Sequence
  Synthetic
gcaaauuaacuuucccucau

SEQ ID NO: 724433 - RNA, 20 nt, Artificial Sequence
  Synthetic
gauuuuauacauuuccucau

SEQ ID NO: 724434 - RNA, 20 nt, Artificial Sequence
  Synthetic
guugaauuugucaagcucau

SEQ ID NO: 724435 - RNA, 20 nt, Artificial Sequence
  Synthetic
gaagaacauuccaugcucau

SEQ ID NO: 724436 - RNA, 20 nt, Artificial Sequence
  Synthetic
gaagaauauuccaugcucau

SEQ ID NO: 724437 - RNA, 20 nt, Artificial Sequence
  Synthetic
gaagaacauuccgugcucau

SEQ ID NO: 724438 - RNA, 20 nt, Artificial Sequence
  Synthetic
guuagagccuuuuugcucau

SEQ ID NO: 724439 - RNA, 20 nt, Artificial Sequence
  Synthetic
gaaaaccaugucuaucucau

SEQ ID NO: 724440 - RNA, 20 nt, Artificial Sequence
  Synthetic
gagauuguacuaaaagucau

SEQ ID NO: 724441 - RNA, 20 nt, Artificial Sequence
  Synthetic
gugcacaagucugaagucau

SEQ ID NO: 724442 - RNA, 20 nt, Artificial Sequence
  Synthetic
gugaagaaaccuuaagucau

SEQ ID NO: 724443 - RNA, 20 nt, Artificial Sequence
  Synthetic
gccaucccugcgccagucau

SEQ ID NO: 724444 - RNA, 20 nt, Artificial Sequence
  Synthetic
gggcuggaacuuaacgucau

SEQ ID NO: 724445 - RNA, 20 nt, Artificial Sequence
  Synthetic
gaacccaaagagagggucau

SEQ ID NO: 724446 - RNA, 20 nt, Artificial Sequence
  Synthetic
gcgggagguuuuugggucau

SEQ ID NO: 724447 - RNA, 20 nt, Artificial Sequence
  Synthetic
gacauuuggaaccaugucau

SEQ ID NO: 724448 - RNA, 20 nt, Artificial Sequence
  Synthetic
guuuuuaugauauaugucau

SEQ ID NO: 724449 - RNA, 20 nt, Artificial Sequence
  Synthetic
guaaucuaaagcaaauucau

SEQ ID NO: 724450 - RNA, 20 nt, Artificial Sequence
  Synthetic
gagcauaugacacaauucau

SEQ ID NO: 724451 - RNA, 20 nt, Artificial Sequence
  Synthetic
gauuauguuuuuagauucau

SEQ ID NO: 724452 - RNA, 20 nt, Artificial Sequence
  Synthetic
guacauaucugugacuucau

SEQ ID NO: 724453 - RNA, 20 nt, Artificial Sequence
  Synthetic
gaaaauguuauguacuucau

SEQ ID NO: 724454 - RNA, 20 nt, Artificial Sequence
  Synthetic
gucaguuuuugaggcuucau

SEQ ID NO: 724455 - RNA, 20 nt, Artificial Sequence
  Synthetic
gugcuuuauuaaaucuucau

SEQ ID NO: 724456 - RNA, 20 nt, Artificial Sequence
  Synthetic
gugaauauauuccucuucau

SEQ ID NO: 724457 - RNA, 20 nt, Artificial Sequence
  Synthetic
gaugguauuuuuuucuucau

SEQ ID NO: 724458 - RNA, 20 nt, Artificial Sequence
  Synthetic
ggggaagggacagcguucau

SEQ ID NO: 724459 - RNA, 20 nt, Artificial Sequence
  Synthetic
gcccagggaagccaaaagau

SEQ ID NO: 724460 - RNA, 20 nt, Artificial Sequence
  Synthetic
gcucaaaggcaggaaaagau

SEQ ID NO: 724461 - RNA, 20 nt, Artificial Sequence
  Synthetic
gaauuuauuaguucaaagau

SEQ ID NO: 724462 - RNA, 20 nt, Artificial Sequence
  Synthetic
gcaauagcauuuucaaagau

SEQ ID NO: 724463 - RNA, 20 nt, Artificial Sequence
  Synthetic
gaaauugauuuuuuaaagau

SEQ ID NO: 724464 - RNA, 20 nt, Artificial Sequence
  Synthetic
gcacauugggaggccaagau

SEQ ID NO: 724465 - RNA, 20 nt, Artificial Sequence
  Synthetic
gggaguuaaaaucucaagau

SEQ ID NO: 724466 - RNA, 20 nt, Artificial Sequence
  Synthetic
guggaagaagaauucaagau

SEQ ID NO: 724467 - RNA, 20 nt, Artificial Sequence
  Synthetic
gcauaauauaaccagaagau

SEQ ID NO: 724468 - RNA, 20 nt, Artificial Sequence
  Synthetic
gugaaagugucagggaagau

SEQ ID NO: 724469 - RNA, 20 nt, Artificial Sequence
  Synthetic
ggaaauauugaggggaagau

SEQ ID NO: 724470 - RNA, 20 nt, Artificial Sequence
  Synthetic
guuauauguaaaaauaagau

SEQ ID NO: 724471 - RNA, 20 nt, Artificial Sequence
  Synthetic
ggaaaacauccaaauaagau

SEQ ID NO: 724472 - RNA, 20 nt, Artificial Sequence
  Synthetic
gguaaaauaagaaauaagau

SEQ ID NO: 724473 - RNA, 20 nt, Artificial Sequence
  Synthetic
gaggugaccuggccuaagau

SEQ ID NO: 724474 - RNA, 20 nt, Artificial Sequence
  Synthetic
guguauaauauuguuaagau

SEQ ID NO: 724475 - RNA, 20 nt, Artificial Sequence
  Synthetic
gacgguuucuccuuuaagau

SEQ ID NO: 724476 - RNA, 20 nt, Artificial Sequence
  Synthetic
gugugugcuuucuuuaagau

SEQ ID NO: 724477 - RNA, 20 nt, Artificial Sequence
  Synthetic
guaagacaacuguuuaagau

SEQ ID NO: 724478 - RNA, 20 nt, Artificial Sequence
  Synthetic
gaaauuguacaaugacagau

SEQ ID NO: 724479 - RNA, 20 nt, Artificial Sequence
  Synthetic
guuuaacagaggguacagau

SEQ ID NO: 724480 - RNA, 20 nt, Artificial Sequence
  Synthetic
gaaggaacagucaugcagau

SEQ ID NO: 724481 - RNA, 20 nt, Artificial Sequence
  Synthetic
gagaaaagcuguuugcagau

SEQ ID NO: 724482 - RNA, 20 nt, Artificial Sequence
  Synthetic
ggauuaauaaaaccucagau

SEQ ID NO: 724483 - RNA, 20 nt, Artificial Sequence
  Synthetic
gauguuggugaccuucagau

SEQ ID NO: 724484 - RNA, 20 nt, Artificial Sequence
  Synthetic
ggacauggcugacaagagau

SEQ ID NO: 724485 - RNA, 20 nt, Artificial Sequence
  Synthetic
guguaugcaaauccagagau

SEQ ID NO: 724486 - RNA, 20 nt, Artificial Sequence
  Synthetic
gaagcacuugcugcagagau

SEQ ID NO: 724487 - RNA, 20 nt, Artificial Sequence
  Synthetic
gagcucuagggaucagagau

SEQ ID NO: 724488 - RNA, 20 nt, Artificial Sequence
  Synthetic
gcagcacggucuucagagau

SEQ ID NO: 724489 - RNA, 20 nt, Artificial Sequence
  Synthetic
gagguuggauagagagagau

SEQ ID NO: 724490 - RNA, 20 nt, Artificial Sequence
  Synthetic
gaagaaggaaugguagagau

SEQ ID NO: 724491 - RNA, 20 nt, Artificial Sequence
  Synthetic
gagaagucagauuuagagau

SEQ ID NO: 724492 - RNA, 20 nt, Artificial Sequence
  Synthetic
gcacuuugggaggccgagau

SEQ ID NO: 724493 - RNA, 20 nt, Artificial Sequence
  Synthetic
gaaugaggguuuaaggagau

SEQ ID NO: 724494 - RNA, 20 nt, Artificial Sequence
  Synthetic
gggaggcguuggcaggagau

SEQ ID NO: 724495 - RNA, 20 nt, Artificial Sequence
  Synthetic
ggaucacaaggucaggagau

SEQ ID NO: 724496 - RNA, 20 nt, Artificial Sequence
  Synthetic
gaccaagcuaaagaggagau

SEQ ID NO: 724497 - RNA, 20 nt, Artificial Sequence
  Synthetic
gccaauuaaaaaccggagau

SEQ ID NO: 724498 - RNA, 20 nt, Artificial Sequence
  Synthetic
gugcucugucccagggagau

SEQ ID NO: 724499 - RNA, 20 nt, Artificial Sequence
  Synthetic
gaacaacuaagcagggagau

SEQ ID NO: 724500 - RNA, 20 nt, Artificial Sequence
  Synthetic
gagauugguaauggggagau

SEQ ID NO: 724501 - RNA, 20 nt, Artificial Sequence
  Synthetic
gccuacaguuugugggagau

SEQ ID NO: 724502 - RNA, 20 nt, Artificial Sequence
  Synthetic
guacagagagaacuggagau

SEQ ID NO: 724503 - RNA, 20 nt, Artificial Sequence
  Synthetic
gcuggucauuaaaaugagau

SEQ ID NO: 724504 - RNA, 20 nt, Artificial Sequence
  Synthetic
gcuuuuaaucugaaugagau

SEQ ID NO: 724505 - RNA, 20 nt, Artificial Sequence
  Synthetic
gggucaucauuuacugagau

SEQ ID NO: 724506 - RNA, 20 nt, Artificial Sequence
  Synthetic
gcuacucaggaggcugagau

SEQ ID NO: 724507 - RNA, 20 nt, Artificial Sequence
  Synthetic
guauuuuuugaugcugagau

SEQ ID NO: 724508 - RNA, 20 nt, Artificial Sequence
  Synthetic
gaauuccuaguaagugagau

SEQ ID NO: 724509 - RNA, 20 nt, Artificial Sequence
  Synthetic
ggaagugagguaggugagau

SEQ ID NO: 724510 - RNA, 20 nt, Artificial Sequence
  Synthetic
guuuauguacagugugagau

SEQ ID NO: 724511 - RNA, 20 nt, Artificial Sequence
  Synthetic
gcauguaauuucauugagau

SEQ ID NO: 724512 - RNA, 20 nt, Artificial Sequence
  Synthetic
gauuucacuuaaaaauagau

SEQ ID NO: 724513 - RNA, 20 nt, Artificial Sequence
  Synthetic
gcuuuuguguagaaauagau

SEQ ID NO: 724514 - RNA, 20 nt, Artificial Sequence
  Synthetic
gaaguuaccagauaauagau

SEQ ID NO: 724515 - RNA, 20 nt, Artificial Sequence
  Synthetic
gaaggcacuggcagauagau

SEQ ID NO: 724516 - RNA, 20 nt, Artificial Sequence
  Synthetic
guuggccugccuuacuagau

SEQ ID NO: 724517 - RNA, 20 nt, Artificial Sequence
  Synthetic
guccaaaucauacccuagau

SEQ ID NO: 724518 - RNA, 20 nt, Artificial Sequence
  Synthetic
gacuuuuuaaauagcuagau

SEQ ID NO: 724519 - RNA, 20 nt, Artificial Sequence
  Synthetic
guugugaaacaaugguagau

SEQ ID NO: 724520 - RNA, 20 nt, Artificial Sequence
  Synthetic
gagcccagucuaaguuagau

SEQ ID NO: 724521 - RNA, 20 nt, Artificial Sequence
  Synthetic
ggguagguggauaguuagau

SEQ ID NO: 724522 - RNA, 20 nt, Artificial Sequence
  Synthetic
gcugggcccagcauuuagau

SEQ ID NO: 724523 - RNA, 20 nt, Artificial Sequence
  Synthetic
gaagguggacuuguuuagau

SEQ ID NO: 724524 - RNA, 20 nt, Artificial Sequence
  Synthetic
ggaauagugacauuuuagau

SEQ ID NO: 724525 - RNA, 20 nt, Artificial Sequence
  Synthetic
ggucagaaaagauacacgau

SEQ ID NO: 724526 - RNA, 20 nt, Artificial Sequence
  Synthetic
guauuuaagguguacacgau

SEQ ID NO: 724527 - RNA, 20 nt, Artificial Sequence
  Synthetic
gaaucauuugagcccacgau

SEQ ID NO: 724528 - RNA, 20 nt, Artificial Sequence
  Synthetic
gauuguaaaugucaaucgau

SEQ ID NO: 724529 - RNA, 20 nt, Artificial Sequence
  Synthetic
guccuuggcaacaacucgau

SEQ ID NO: 724530 - RNA, 20 nt, Artificial Sequence
  Synthetic
ggagaaaaagauagaaggau

SEQ ID NO: 724531 - RNA, 20 nt, Artificial Sequence
  Synthetic
gugggaugggggcgaaggau

SEQ ID NO: 724532 - RNA, 20 nt, Artificial Sequence
  Synthetic
guugugagcaacuuaaggau

SEQ ID NO: 724533 - RNA, 20 nt, Artificial Sequence
  Synthetic
gaguagagaagacacaggau

SEQ ID NO: 724534 - RNA, 20 nt, Artificial Sequence
  Synthetic
gguuuuuauaggcacaggau

SEQ ID NO: 724535 - RNA, 20 nt, Artificial Sequence
  Synthetic
gagauuuuaacucccaggau

SEQ ID NO: 724536 - RNA, 20 nt, Artificial Sequence
  Synthetic
gcacuuugggaggccaggau

SEQ ID NO: 724537 - RNA, 20 nt, Artificial Sequence
  Synthetic
gugcucugaguugccaggau

SEQ ID NO: 724538 - RNA, 20 nt, Artificial Sequence
  Synthetic
gugaagaaugaaagcaggau

SEQ ID NO: 724539 - RNA, 20 nt, Artificial Sequence
  Synthetic
gaaaggaaagggagcaggau

SEQ ID NO: 724540 - RNA, 20 nt, Artificial Sequence
  Synthetic
gggugaguggguaucaggau

SEQ ID NO: 724541 - RNA, 20 nt, Artificial Sequence
  Synthetic
ggggagaagggaaggaggau

SEQ ID NO: 724542 - RNA, 20 nt, Artificial Sequence
  Synthetic
gagcugggugagaggaggau

SEQ ID NO: 724543 - RNA, 20 nt, Artificial Sequence
  Synthetic
guaguauugugaaugaggau

SEQ ID NO: 724544 - RNA, 20 nt, Artificial Sequence
  Synthetic
ggcuaugcaaaacugaggau

SEQ ID NO: 724545 - RNA, 20 nt, Artificial Sequence
  Synthetic
gaagagaaaagcucuaggau

SEQ ID NO: 724546 - RNA, 20 nt, Artificial Sequence
  Synthetic
gaugcuccucaccuuaggau

SEQ ID NO: 724547 - RNA, 20 nt, Artificial Sequence
  Synthetic
gucccuaacaggcaacggau

SEQ ID NO: 724548 - RNA, 20 nt, Artificial Sequence
  Synthetic
ggaaagaaaggguaucggau

SEQ ID NO: 724549 - RNA, 20 nt, Artificial Sequence
  Synthetic
gaucaaaacaacccagggau

SEQ ID NO: 724550 - RNA, 20 nt, Artificial Sequence
  Synthetic
guuucccuuguaggagggau

SEQ ID NO: 724551 - RNA, 20 nt, Artificial Sequence
  Synthetic
gauacugguaggauagggau

SEQ ID NO: 724552 - RNA, 20 nt, Artificial Sequence
  Synthetic
guaguguggagguaggggau

SEQ ID NO: 724553 - RNA, 20 nt, Artificial Sequence
  Synthetic
gguugccaggggcuggggau

SEQ ID NO: 724554 - RNA, 20 nt, Artificial Sequence
  Synthetic
gacacagaaacucuggggau

SEQ ID NO: 724555 - RNA, 20 nt, Artificial Sequence
  Synthetic
gucagaagcucucuggggau

SEQ ID NO: 724556 - RNA, 20 nt, Artificial Sequence
  Synthetic
gagauagcaggaaaugggau

SEQ ID NO: 724557 - RNA, 20 nt, Artificial Sequence
  Synthetic
gcgcuuugggaggcugggau

SEQ ID NO: 724558 - RNA, 20 nt, Artificial Sequence
  Synthetic
gagagacagaaaucugggau

SEQ ID NO: 724559 - RNA, 20 nt, Artificial Sequence
  Synthetic
gguaauucuaaaucugggau

SEQ ID NO: 724560 - RNA, 20 nt, Artificial Sequence
  Synthetic
gaagggcgagagggugggau

SEQ ID NO: 724561 - RNA, 20 nt, Artificial Sequence
  Synthetic
gccuugcaguaucuugggau

SEQ ID NO: 724562 - RNA, 20 nt, Artificial Sequence
  Synthetic
gagaggguguagaaauggau

SEQ ID NO: 724563 - RNA, 20 nt, Artificial Sequence
  Synthetic
ggaaaacaucauagauggau

SEQ ID NO: 724564 - RNA, 20 nt, Artificial Sequence
  Synthetic
guuggaaaagaucgauggau

SEQ ID NO: 724565 - RNA, 20 nt, Artificial Sequence
  Synthetic
guagugccugguagcuggau

SEQ ID NO: 724566 - RNA, 20 nt, Artificial Sequence
  Synthetic
gagucacaucuuacguggau

SEQ ID NO: 724567 - RNA, 20 nt, Artificial Sequence
  Synthetic
ggaggcugagguggguggau

SEQ ID NO: 724568 - RNA, 20 nt, Artificial Sequence
  Synthetic
gaccugguuaguacuuggau

SEQ ID NO: 724569 - RNA, 20 nt, Artificial Sequence
  Synthetic
gguguccgucaacguuggau

SEQ ID NO: 724570 - RNA, 20 nt, Artificial Sequence
  Synthetic
guuugggggaugguuuggau

SEQ ID NO: 724571 - RNA, 20 nt, Artificial Sequence
  Synthetic
guuauuagaaauaaaaugau

SEQ ID NO: 724572 - RNA, 20 nt, Artificial Sequence
  Synthetic
gaaguuacacaagaaaugau

SEQ ID NO: 724573 - RNA, 20 nt, Artificial Sequence
  Synthetic
ggaaauauauuagaaaugau

SEQ ID NO: 724574 - RNA, 20 nt, Artificial Sequence
  Synthetic
gcauugccuuaugcaaugau

SEQ ID NO: 724575 - RNA, 20 nt, Artificial Sequence
  Synthetic
gucaaauuugccugaaugau

SEQ ID NO: 724576 - RNA, 20 nt, Artificial Sequence
  Synthetic
gugcaacuucaagucaugau

SEQ ID NO: 724577 - RNA, 20 nt, Artificial Sequence
  Synthetic
gaaaacauucauuucaugau

SEQ ID NO: 724578 - RNA, 20 nt, Artificial Sequence
  Synthetic
gaaaaagacauuaagaugau

SEQ ID NO: 724579 - RNA, 20 nt, Artificial Sequence
  Synthetic
gugaggguagagcagaugau

SEQ ID NO: 724580 - RNA, 20 nt, Artificial Sequence
  Synthetic
gagcuauuaaaaauuaugau

SEQ ID NO: 724581 - RNA, 20 nt, Artificial Sequence
  Synthetic
gaugcuccucaucuuaugau

SEQ ID NO: 724582 - RNA, 20 nt, Artificial Sequence
  Synthetic
guuguaacaagucaacugau

SEQ ID NO: 724583 - RNA, 20 nt, Artificial Sequence
  Synthetic
gcauuuuacagagcgcugau

SEQ ID NO: 724584 - RNA, 20 nt, Artificial Sequence
  Synthetic
gauaacuuuuauaugcugau

SEQ ID NO: 724585 - RNA, 20 nt, Artificial Sequence
  Synthetic
ggcaggcuggaauugcugau

SEQ ID NO: 724586 - RNA, 20 nt, Artificial Sequence
  Synthetic
ggccaucuguguuugcugau

SEQ ID NO: 724587 - RNA, 20 nt, Artificial Sequence
  Synthetic
ggcuuuaaguagguucugau

SEQ ID NO: 724588 - RNA, 20 nt, Artificial Sequence
  Synthetic
gucuaggagaguaaagugau

SEQ ID NO: 724589 - RNA, 20 nt, Artificial Sequence
  Synthetic
gguuguuuuucagaggugau

SEQ ID NO: 724590 - RNA, 20 nt, Artificial Sequence
  Synthetic
ggaaccuggugggaggugau

SEQ ID NO: 724591 - RNA, 20 nt, Artificial Sequence
  Synthetic
gggcuuaauaucuaggugau

SEQ ID NO: 724592 - RNA, 20 nt, Artificial Sequence
  Synthetic
gcaccuuuucacagggugau

SEQ ID NO: 724593 - RNA, 20 nt, Artificial Sequence
  Synthetic
ggucccaucuggggggugau

SEQ ID NO: 724594 - RNA, 20 nt, Artificial Sequence
  Synthetic
gaaggaggaaugguggugau

SEQ ID NO: 724595 - RNA, 20 nt, Artificial Sequence
  Synthetic
guguauacuacucgugugau

SEQ ID NO: 724596 - RNA, 20 nt, Artificial Sequence
  Synthetic
gagaacaaguucugugugau

SEQ ID NO: 724597 - RNA, 20 nt, Artificial Sequence
  Synthetic
guugcaaagcaugcauugau

SEQ ID NO: 724598 - RNA, 20 nt, Artificial Sequence
  Synthetic
guaugaauauagguauugau

SEQ ID NO: 724599 - RNA, 20 nt, Artificial Sequence
  Synthetic
gauaaaaaucugcccuugau

SEQ ID NO: 724600 - RNA, 20 nt, Artificial Sequence
  Synthetic
gacacuguaucucucuugau

SEQ ID NO: 724601 - RNA, 20 nt, Artificial Sequence
  Synthetic
gcaguauucuauuucuugau

SEQ ID NO: 724602 - RNA, 20 nt, Artificial Sequence
  Synthetic
gcuguugauuaaugguugau

SEQ ID NO: 724603 - RNA, 20 nt, Artificial Sequence
  Synthetic
gccaacacacaucuguugau

SEQ ID NO: 724604 - RNA, 20 nt, Artificial Sequence
  Synthetic
gaaguucacugacauuugau

SEQ ID NO: 724605 - RNA, 20 nt, Artificial Sequence
  Synthetic
gaauuucugauucauuugau

SEQ ID NO: 724606 - RNA, 20 nt, Artificial Sequence
  Synthetic
gcccaggggauggcuuugau

SEQ ID NO: 724607 - RNA, 20 nt, Artificial Sequence
  Synthetic
ggagaaaacuggcaaaauau

SEQ ID NO: 724608 - RNA, 20 nt, Artificial Sequence
  Synthetic
gacuuacagagugaaaauau

SEQ ID NO: 724609 - RNA, 20 nt, Artificial Sequence
  Synthetic
gaugagagaauugaaaauau

SEQ ID NO: 724610 - RNA, 20 nt, Artificial Sequence
  Synthetic
gaagaacuggaauaaaauau

SEQ ID NO: 724611 - RNA, 20 nt, Artificial Sequence
  Synthetic
gaaguucugcuuacaaauau

SEQ ID NO: 724612 - RNA, 20 nt, Artificial Sequence
  Synthetic
gcaaagccuccaagaaauau

SEQ ID NO: 724613 - RNA, 20 nt, Artificial Sequence
  Synthetic
gagauguuacuuuuaaauau

SEQ ID NO: 724614 - RNA, 20 nt, Artificial Sequence
  Synthetic
guuuauuucacaaacaauau

SEQ ID NO: 724615 - RNA, 20 nt, Artificial Sequence
  Synthetic
gaaaaaaaaaaaaagaauau

SEQ ID NO: 724616 - RNA, 20 nt, Artificial Sequence
  Synthetic
gaaaaugggugcacgaauau

SEQ ID NO: 724617 - RNA, 20 nt, Artificial Sequence
  Synthetic
guagcuuuacuauggaauau

SEQ ID NO: 724618 - RNA, 20 nt, Artificial Sequence
  Synthetic
gaaaacuugaguaugaauau

SEQ ID NO: 724619 - RNA, 20 nt, Artificial Sequence
  Synthetic
gagaauauguuaauuaauau

SEQ ID NO: 724620 - RNA, 20 nt, Artificial Sequence
  Synthetic
ggagagauaauuuuuaauau

SEQ ID NO: 724621 - RNA, 20 nt, Artificial Sequence
  Synthetic
gauacucucuucugacauau

SEQ ID NO: 724622 - RNA, 20 nt, Artificial Sequence
  Synthetic
gcagauucuuucugacauau

SEQ ID NO: 724623 - RNA, 20 nt, Artificial Sequence
  Synthetic
ggauguagaugaaaccauau

SEQ ID NO: 724624 - RNA, 20 nt, Artificial Sequence
  Synthetic
gagacaggguuucaccauau

SEQ ID NO: 724625 - RNA, 20 nt, Artificial Sequence
  Synthetic
gagaugggguuucaccauau

SEQ ID NO: 724626 - RNA, 20 nt, Artificial Sequence
  Synthetic
ggugaaguaaaugaccauau

SEQ ID NO: 724627 - RNA, 20 nt, Artificial Sequence
  Synthetic
gccacaaacagugcccauau

SEQ ID NO: 724628 - RNA, 20 nt, Artificial Sequence
  Synthetic
ggacuugugaauuugcauau

SEQ ID NO: 724629 - RNA, 20 nt, Artificial Sequence
  Synthetic
guggaaguggaucaucauau

SEQ ID NO: 724630 - RNA, 20 nt, Artificial Sequence
  Synthetic
guuaagaauuuuuaucauau

SEQ ID NO: 724631 - RNA, 20 nt, Artificial Sequence
  Synthetic
gcaaggguacauacucauau

SEQ ID NO: 724632 - RNA, 20 nt, Artificial Sequence
  Synthetic
ggaaaaagauacaaagauau

SEQ ID NO: 724633 - RNA, 20 nt, Artificial Sequence
  Synthetic
guuuuucugauuuaagauau

SEQ ID NO: 724634 - RNA, 20 nt, Artificial Sequence
  Synthetic
guaacucugaagacagauau

SEQ ID NO: 724635 - RNA, 20 nt, Artificial Sequence
  Synthetic
gaagaacccuaugcagauau

SEQ ID NO: 724636 - RNA, 20 nt, Artificial Sequence
  Synthetic
gcucuauaacacucagauau

SEQ ID NO: 724637 - RNA, 20 nt, Artificial Sequence
  Synthetic
gauauaaauaauucagauau

SEQ ID NO: 724638 - RNA, 20 nt, Artificial Sequence
  Synthetic
ggcaauaccauucaggauau

SEQ ID NO: 724639 - RNA, 20 nt, Artificial Sequence
  Synthetic
guagaaagagaugaggauau

SEQ ID NO: 724640 - RNA, 20 nt, Artificial Sequence
  Synthetic
gguaagugcuaaagggauau

SEQ ID NO: 724641 - RNA, 20 nt, Artificial Sequence
  Synthetic
ggaauggggaaaugggauau

SEQ ID NO: 724642 - RNA, 20 nt, Artificial Sequence
  Synthetic
gugguccacuccugggauau

SEQ ID NO: 724643 - RNA, 20 nt, Artificial Sequence
  Synthetic
gucuuguauccuuuggauau

SEQ ID NO: 724644 - RNA, 20 nt, Artificial Sequence
  Synthetic
gccauacaaagaaaugauau

SEQ ID NO: 724645 - RNA, 20 nt, Artificial Sequence
  Synthetic
gcugagucaggaaaugauau

SEQ ID NO: 724646 - RNA, 20 nt, Artificial Sequence
  Synthetic
gauaguaauaacaaugauau

SEQ ID NO: 724647 - RNA, 20 nt, Artificial Sequence
  Synthetic
gaaagggguagugaugauau

SEQ ID NO: 724648 - RNA, 20 nt, Artificial Sequence
  Synthetic
gaaaaaaagaaaaaauauau

SEQ ID NO: 724649 - RNA, 20 nt, Artificial Sequence
  Synthetic
gaaaaauauucacaauauau

SEQ ID NO: 724650 - RNA, 20 nt, Artificial Sequence
  Synthetic
gauuguauucauuaauauau

SEQ ID NO: 724651 - RNA, 20 nt, Artificial Sequence
  Synthetic
ggaugacuuuauauauauau

SEQ ID NO: 724652 - RNA, 20 nt, Artificial Sequence
  Synthetic
gcuagucacuuuauauauau

SEQ ID NO: 724653 - RNA, 20 nt, Artificial Sequence
  Synthetic
gaaguuaaucugcacuauau

SEQ ID NO: 724654 - RNA, 20 nt, Artificial Sequence
  Synthetic
gccugauucuaucccuauau

SEQ ID NO: 724655 - RNA, 20 nt, Artificial Sequence
  Synthetic
gaauccgggugcuccuauau

SEQ ID NO: 724656 - RNA, 20 nt, Artificial Sequence
  Synthetic
gcuaguaagaagggcuauau

SEQ ID NO: 724657 - RNA, 20 nt, Artificial Sequence
  Synthetic
guuuauccuuuuccuuauau

SEQ ID NO: 724658 - RNA, 20 nt, Artificial Sequence
  Synthetic
gaaaacuucuacucuuauau

SEQ ID NO: 724659 - RNA, 20 nt, Artificial Sequence
  Synthetic
gauuuggcuuggucuuauau

SEQ ID NO: 724660 - RNA, 20 nt, Artificial Sequence
  Synthetic
gugagggagauuaguuauau

SEQ ID NO: 724661 - RNA, 20 nt, Artificial Sequence
  Synthetic
gaaauaauaugugguuauau

SEQ ID NO: 724662 - RNA, 20 nt, Artificial Sequence
  Synthetic
guuuaaaucagaauuuauau

SEQ ID NO: 724663 - RNA, 20 nt, Artificial Sequence
  Synthetic
guuuuugagguagaaacuau

SEQ ID NO: 724664 - RNA, 20 nt, Artificial Sequence
  Synthetic
gggcaguuugcacacacuau

SEQ ID NO: 724665 - RNA, 20 nt, Artificial Sequence
  Synthetic
gccuguaaucccagcacuau

SEQ ID NO: 724666 - RNA, 20 nt, Artificial Sequence
  Synthetic
gaugugccagagaagacuau

SEQ ID NO: 724667 - RNA, 20 nt, Artificial Sequence
  Synthetic
gcauuacuauuuaauacuau

SEQ ID NO: 724668 - RNA, 20 nt, Artificial Sequence
  Synthetic
gaauccaaaguuuauacuau

SEQ ID NO: 724669 - RNA, 20 nt, Artificial Sequence
  Synthetic
guuuuugcuuuugcuacuau

SEQ ID NO: 724670 - RNA, 20 nt, Artificial Sequence
  Synthetic
gugaugcucuugaagccuau

SEQ ID NO: 724671 - RNA, 20 nt, Artificial Sequence
  Synthetic
gugcuucaauuagauccuau

SEQ ID NO: 724672 - RNA, 20 nt, Artificial Sequence
  Synthetic
gucuccaucucaauuccuau

SEQ ID NO: 724673 - RNA, 20 nt, Artificial Sequence
  Synthetic
gagaacucagcuaaagcuau

SEQ ID NO: 724674 - RNA, 20 nt, Artificial Sequence
  Synthetic
gaaacagcauuauuagcuau

SEQ ID NO: 724675 - RNA, 20 nt, Artificial Sequence
  Synthetic
guuauggcugcaaucgcuau

SEQ ID NO: 724676 - RNA, 20 nt, Artificial Sequence
  Synthetic
gauuaucuuucuacugcuau

SEQ ID NO: 724677 - RNA, 20 nt, Artificial Sequence
  Synthetic
gcaugaaaaauaagugcuau

SEQ ID NO: 724678 - RNA, 20 nt, Artificial Sequence
  Synthetic
guacugagcccucaaucuau

SEQ ID NO: 724679 - RNA, 20 nt, Artificial Sequence
  Synthetic
gucuaauauucagaaucuau

SEQ ID NO: 724680 - RNA, 20 nt, Artificial Sequence
  Synthetic
ggaaggaggaaggaaucuau

SEQ ID NO: 724681 - RNA, 20 nt, Artificial Sequence
  Synthetic
gaagaacuggauacaucuau

SEQ ID NO: 724682 - RNA, 20 nt, Artificial Sequence
  Synthetic
ggcaacuuuccuguaucuau

SEQ ID NO: 724683 - RNA, 20 nt, Artificial Sequence
  Synthetic
gucaccagugauuacucuau

SEQ ID NO: 724684 - RNA, 20 nt, Artificial Sequence
  Synthetic
gaugacaaggcaggcucuau

SEQ ID NO: 724685 - RNA, 20 nt, Artificial Sequence
  Synthetic
gagguuuucagaggcucuau

SEQ ID NO: 724686 - RNA, 20 nt, Artificial Sequence
  Synthetic
gaaagaauauguuagucuau

SEQ ID NO: 724687 - RNA, 20 nt, Artificial Sequence
  Synthetic
gugcaguuggaugaaaguau

SEQ ID NO: 724688 - RNA, 20 nt, Artificial Sequence
  Synthetic
gaauuugcauacauaaguau

SEQ ID NO: 724689 - RNA, 20 nt, Artificial Sequence
  Synthetic
gaaguaauaguuguaaguau

SEQ ID NO: 724690 - RNA, 20 nt, Artificial Sequence
  Synthetic
gauuaucaggagaacaguau

SEQ ID NO: 724691 - RNA, 20 nt, Artificial Sequence
  Synthetic
ggucucuggacuagcaguau

SEQ ID NO: 724692 - RNA, 20 nt, Artificial Sequence
  Synthetic
ggaagugaaggaggcaguau

SEQ ID NO: 724693 - RNA, 20 nt, Artificial Sequence
  Synthetic
gguggcuuaaacuggaguau

SEQ ID NO: 724694 - RNA, 20 nt, Artificial Sequence
  Synthetic
gcauguucuaugcauaguau

SEQ ID NO: 724695 - RNA, 20 nt, Artificial Sequence
  Synthetic
guagacccauaaacuaguau

SEQ ID NO: 724696 - RNA, 20 nt, Artificial Sequence
  Synthetic
gauugaggcauuauuaguau

SEQ ID NO: 724697 - RNA, 20 nt, Artificial Sequence
  Synthetic
gcuuacagugugcaagguau

SEQ ID NO: 724698 - RNA, 20 nt, Artificial Sequence
  Synthetic
guggaagagaauucagguau

SEQ ID NO: 724699 - RNA, 20 nt, Artificial Sequence
  Synthetic
ggaauaagagacuuagguau

SEQ ID NO: 724700 - RNA, 20 nt, Artificial Sequence
  Synthetic
gucucuucaauaaaugguau

SEQ ID NO: 724701 - RNA, 20 nt, Artificial Sequence
  Synthetic
gugggugucauuaaugguau

SEQ ID NO: 724702 - RNA, 20 nt, Artificial Sequence
  Synthetic
guuaaguugggaugugguau

SEQ ID NO: 724703 - RNA, 20 nt, Artificial Sequence
  Synthetic
guuuauuaugaaaaauguau

SEQ ID NO: 724704 - RNA, 20 nt, Artificial Sequence
  Synthetic
gguuagcauggcaaauguau

SEQ ID NO: 724705 - RNA, 20 nt, Artificial Sequence
  Synthetic
gcccucucuugaauauguau

SEQ ID NO: 724706 - RNA, 20 nt, Artificial Sequence
  Synthetic
guuuucauauaauuauguau

SEQ ID NO: 724707 - RNA, 20 nt, Artificial Sequence
  Synthetic
guuuggaaagaagacuguau

SEQ ID NO: 724708 - RNA, 20 nt, Artificial Sequence
  Synthetic
gcaaacagaaucuacuguau

SEQ ID NO: 724709 - RNA, 20 nt, Artificial Sequence
  Synthetic
gaaucugggugcuccuguau

SEQ ID NO: 724710 - RNA, 20 nt, Artificial Sequence
  Synthetic
gugccugcuguuugguguau

SEQ ID NO: 724711 - RNA, 20 nt, Artificial Sequence
  Synthetic
ggaggaaccuggauguguau

SEQ ID NO: 724712 - RNA, 20 nt, Artificial Sequence
  Synthetic
gaaaacuuuuauguguguau

SEQ ID NO: 724713 - RNA, 20 nt, Artificial Sequence
  Synthetic
guguguguguguguguguau

SEQ ID NO: 724714 - RNA, 20 nt, Artificial Sequence
  Synthetic
ggaguggaugucaguuguau

SEQ ID NO: 724715 - RNA, 20 nt, Artificial Sequence
  Synthetic
gcugccugcuggaguuguau

SEQ ID NO: 724716 - RNA, 20 nt, Artificial Sequence
  Synthetic
gucuuaucaacagguuguau

SEQ ID NO: 724717 - RNA, 20 nt, Artificial Sequence
  Synthetic
guaucuaguggcuguuguau

SEQ ID NO: 724718 - RNA, 20 nt, Artificial Sequence
  Synthetic
guuaaguaggauuguuguau

SEQ ID NO: 724719 - RNA, 20 nt, Artificial Sequence
  Synthetic
ggcuaugugaauguuuguau

SEQ ID NO: 724720 - RNA, 20 nt, Artificial Sequence
  Synthetic
guuuccuaauaaaaaauuau

SEQ ID NO: 724721 - RNA, 20 nt, Artificial Sequence
  Synthetic
guccuuucuuucaaaauuau

SEQ ID NO: 724722 - RNA, 20 nt, Artificial Sequence
  Synthetic
gucuccaguauucaaauuau

SEQ ID NO: 724723 - RNA, 20 nt, Artificial Sequence
  Synthetic
gaacuaagcauuccaauuau

SEQ ID NO: 724724 - RNA, 20 nt, Artificial Sequence
  Synthetic
gucaggacacuaagaauuau

SEQ ID NO: 724725 - RNA, 20 nt, Artificial Sequence
  Synthetic
ggaucacauuacagaauuau

SEQ ID NO: 724726 - RNA, 20 nt, Artificial Sequence
  Synthetic
guauaugaaaagagaauuau

SEQ ID NO: 724727 - RNA, 20 nt, Artificial Sequence
  Synthetic
gacagauuuucauacauuau

SEQ ID NO: 724728 - RNA, 20 nt, Artificial Sequence
  Synthetic
guggaagcacauugcauuau

SEQ ID NO: 724729 - RNA, 20 nt, Artificial Sequence
  Synthetic
ggaaguauaauaaucauuau

SEQ ID NO: 724730 - RNA, 20 nt, Artificial Sequence
  Synthetic
guugauuuguccuucauuau

SEQ ID NO: 724731 - RNA, 20 nt, Artificial Sequence
  Synthetic
guuacuugaauggggauuau

SEQ ID NO: 724732 - RNA, 20 nt, Artificial Sequence
  Synthetic
gacuguaacagaaugauuau

SEQ ID NO: 724733 - RNA, 20 nt, Artificial Sequence
  Synthetic
gcacucucuuugucuauuau

SEQ ID NO: 724734 - RNA, 20 nt, Artificial Sequence
  Synthetic
ggauuaugauuaaguauuau

SEQ ID NO: 724735 - RNA, 20 nt, Artificial Sequence
  Synthetic
gacaauucaacaauuauuau

SEQ ID NO: 724736 - RNA, 20 nt, Artificial Sequence
  Synthetic
guaacucucauuauuauuau

SEQ ID NO: 724737 - RNA, 20 nt, Artificial Sequence
  Synthetic
ggaaaaaucagauuuauuau

SEQ ID NO: 724738 - RNA, 20 nt, Artificial Sequence
  Synthetic
gauggagaugaagaacuuau

SEQ ID NO: 724739 - RNA, 20 nt, Artificial Sequence
  Synthetic
gcaucucuucccgcacuuau

SEQ ID NO: 724740 - RNA, 20 nt, Artificial Sequence
  Synthetic
guaaaagucaaaucacuuau

SEQ ID NO: 724741 - RNA, 20 nt, Artificial Sequence
  Synthetic
guuggagaucaucuccuuau

SEQ ID NO: 724742 - RNA, 20 nt, Artificial Sequence
  Synthetic
ggcagcaaacuauggcuuau

SEQ ID NO: 724743 - RNA, 20 nt, Artificial Sequence
  Synthetic
gucccuuagaaauugcuuau

SEQ ID NO: 724744 - RNA, 20 nt, Artificial Sequence
  Synthetic
gaaaaauauuauaaucuuau

SEQ ID NO: 724745 - RNA, 20 nt, Artificial Sequence
  Synthetic
gcuuuaucugaaauucuuau

SEQ ID NO: 724746 - RNA, 20 nt, Artificial Sequence
  Synthetic
guuguuacuuguaaaguuau

SEQ ID NO: 724747 - RNA, 20 nt, Artificial Sequence
  Synthetic
gugguaacacauucaguuau

SEQ ID NO: 724748 - RNA, 20 nt, Artificial Sequence
  Synthetic
gaauaguugcuaagaguuau

SEQ ID NO: 724749 - RNA, 20 nt, Artificial Sequence
  Synthetic
gcacuggauuauaggguuau

SEQ ID NO: 724750 - RNA, 20 nt, Artificial Sequence
  Synthetic
gaauaauuuuuuaggguuau

SEQ ID NO: 724751 - RNA, 20 nt, Artificial Sequence
  Synthetic
gaauaaaacacaaugguuau

SEQ ID NO: 724752 - RNA, 20 nt, Artificial Sequence
  Synthetic
ggauaagauacaaugguuau

SEQ ID NO: 724753 - RNA, 20 nt, Artificial Sequence
  Synthetic
guaaaucagaaucugguuau

SEQ ID NO: 724754 - RNA, 20 nt, Artificial Sequence
  Synthetic
gucccuggguguaauguuau

SEQ ID NO: 724755 - RNA, 20 nt, Artificial Sequence
  Synthetic
guguuuccuuuucauguuau

SEQ ID NO: 724756 - RNA, 20 nt, Artificial Sequence
  Synthetic
gccugcuauuauuauguuau

SEQ ID NO: 724757 - RNA, 20 nt, Artificial Sequence
  Synthetic
gcucucuguuugucuguuau

SEQ ID NO: 724758 - RNA, 20 nt, Artificial Sequence
  Synthetic
guugaauucccauguguuau

SEQ ID NO: 724759 - RNA, 20 nt, Artificial Sequence
  Synthetic
gaauugguuauuauuguuau

SEQ ID NO: 724760 - RNA, 20 nt, Artificial Sequence
  Synthetic
gaaauaaaucauguuguuau

SEQ ID NO: 724761 - RNA, 20 nt, Artificial Sequence
  Synthetic
guuaacaauuuuuaauuuau

SEQ ID NO: 724762 - RNA, 20 nt, Artificial Sequence
  Synthetic
guuccuauguuaucauuuau

SEQ ID NO: 724763 - RNA, 20 nt, Artificial Sequence
  Synthetic
gcaucuuuucauggauuuau

SEQ ID NO: 724764 - RNA, 20 nt, Artificial Sequence
  Synthetic
gaaauucuuuauauauuuau

SEQ ID NO: 724765 - RNA, 20 nt, Artificial Sequence
  Synthetic
ggugagaaguugcuauuuau

SEQ ID NO: 724766 - RNA, 20 nt, Artificial Sequence
  Synthetic
gcaauaagauuugacuuuau

SEQ ID NO: 724767 - RNA, 20 nt, Artificial Sequence
  Synthetic
guguucaagaguugcuuuau

SEQ ID NO: 724768 - RNA, 20 nt, Artificial Sequence
  Synthetic
gugauaugggugaucuuuau

SEQ ID NO: 724769 - RNA, 20 nt, Artificial Sequence
  Synthetic
gauucucuuguuaucuuuau

SEQ ID NO: 724770 - RNA, 20 nt, Artificial Sequence
  Synthetic
gaucuucucugaggguuuau

SEQ ID NO: 724771 - RNA, 20 nt, Artificial Sequence
  Synthetic
gagauacucuacauguuuau

SEQ ID NO: 724772 - RNA, 20 nt, Artificial Sequence
  Synthetic
gacgcauuuuucauguuuau

SEQ ID NO: 724773 - RNA, 20 nt, Artificial Sequence
  Synthetic
gaauuuaaaaaauauuuuau

SEQ ID NO: 724774 - RNA, 20 nt, Artificial Sequence
  Synthetic
gguaauaauaauuauuuuau

SEQ ID NO: 724775 - RNA, 20 nt, Artificial Sequence
  Synthetic
gccacugucuugccuuuuau

SEQ ID NO: 724776 - RNA, 20 nt, Artificial Sequence
  Synthetic
gacaaauuauaagcuuuuau

SEQ ID NO: 724777 - RNA, 20 nt, Artificial Sequence
  Synthetic
guuuaaaaauaaaguuuuau

SEQ ID NO: 724778 - RNA, 20 nt, Artificial Sequence
  Synthetic
gucaacccaaacaguuuuau

SEQ ID NO: 724779 - RNA, 20 nt, Artificial Sequence
  Synthetic
gucagggaccacuguuuuau

SEQ ID NO: 724780 - RNA, 20 nt, Artificial Sequence
  Synthetic
gcucauuugaagauuuuuau

SEQ ID NO: 724781 - RNA, 20 nt, Artificial Sequence
  Synthetic
gcaagaaauuagcuuuuuau

SEQ ID NO: 724782 - RNA, 20 nt, Artificial Sequence
  Synthetic
gcugagucugggguuuuuau

SEQ ID NO: 724783 - RNA, 20 nt, Artificial Sequence
  Synthetic
ggaaaaacaaaaacaaaacu

SEQ ID NO: 724784 - RNA, 20 nt, Artificial Sequence
  Synthetic
gaauccugauggacaaaacu

SEQ ID NO: 724785 - RNA, 20 nt, Artificial Sequence
  Synthetic
ggaaaaaauaaaugaaaacu

SEQ ID NO: 724786 - RNA, 20 nt, Artificial Sequence
  Synthetic
gugaccaagagcauaaaacu

SEQ ID NO: 724787 - RNA, 20 nt, Artificial Sequence
  Synthetic
gacugguuuagacuaaaacu

SEQ ID NO: 724788 - RNA, 20 nt, Artificial Sequence
  Synthetic
guuuguucaacuguaaaacu

SEQ ID NO: 724789 - RNA, 20 nt, Artificial Sequence
  Synthetic
ggucuuuauaaugacaaacu

SEQ ID NO: 724790 - RNA, 20 nt, Artificial Sequence
  Synthetic
gacaauugaaucuacaaacu

SEQ ID NO: 724791 - RNA, 20 nt, Artificial Sequence
  Synthetic
gauuuuuuaaaucucaaacu

SEQ ID NO: 724792 - RNA, 20 nt, Artificial Sequence
  Synthetic
gaccuggaaguuuucaaacu

SEQ ID NO: 724793 - RNA, 20 nt, Artificial Sequence
  Synthetic
guucauaugugaaagaaacu

SEQ ID NO: 724794 - RNA, 20 nt, Artificial Sequence
  Synthetic
gguguaugacaucagaaacu

SEQ ID NO: 724795 - RNA, 20 nt, Artificial Sequence
  Synthetic
gcuccuaacaucuggaaacu

SEQ ID NO: 724796 - RNA, 20 nt, Artificial Sequence
  Synthetic
gugauauaauaaaugaaacu

SEQ ID NO: 724797 - RNA, 20 nt, Artificial Sequence
  Synthetic
gacaugaaagagaugaaacu

SEQ ID NO: 724798 - RNA, 20 nt, Artificial Sequence
  Synthetic
gaccaugggucacugaaacu

SEQ ID NO: 724799 - RNA, 20 nt, Artificial Sequence
  Synthetic
gcauagaucuuccugaaacu

SEQ ID NO: 724800 - RNA, 20 nt, Artificial Sequence
  Synthetic
gagucagaggaauugaaacu

SEQ ID NO: 724801 - RNA, 20 nt, Artificial Sequence
  Synthetic
ggcuaaauugcaaauaaacu

SEQ ID NO: 724802 - RNA, 20 nt, Artificial Sequence
  Synthetic
gauuuugcagcacuuaaacu

SEQ ID NO: 724803 - RNA, 20 nt, Artificial Sequence
  Synthetic
gucacaaaacuuuuuaaacu

SEQ ID NO: 724804 - RNA, 20 nt, Artificial Sequence
  Synthetic
ggaaaaagugcuuaacaacu

SEQ ID NO: 724805 - RNA, 20 nt, Artificial Sequence
  Synthetic
ggugccaagaauacacaacu

SEQ ID NO: 724806 - RNA, 20 nt, Artificial Sequence
  Synthetic
gugucgcucauucuacaacu

SEQ ID NO: 724807 - RNA, 20 nt, Artificial Sequence
  Synthetic
gauuuagagaaaaagcaacu

SEQ ID NO: 724808 - RNA, 20 nt, Artificial Sequence
  Synthetic
guuuugcaucuaaaucaacu

SEQ ID NO: 724809 - RNA, 20 nt, Artificial Sequence
  Synthetic
guugcacauaagaaucaacu

SEQ ID NO: 724810 - RNA, 20 nt, Artificial Sequence
  Synthetic
gaaaugaaauuagaucaacu

SEQ ID NO: 724811 - RNA, 20 nt, Artificial Sequence
  Synthetic
guuaauuucaugugucaacu

SEQ ID NO: 724812 - RNA, 20 nt, Artificial Sequence
  Synthetic
gcaaauuaaccacuucaacu

SEQ ID NO: 724813 - RNA, 20 nt, Artificial Sequence
  Synthetic
ggaaaugcacuccaagaacu

SEQ ID NO: 724814 - RNA, 20 nt, Artificial Sequence
  Synthetic
guguagcaaagauaagaacu

SEQ ID NO: 724815 - RNA, 20 nt, Artificial Sequence
  Synthetic
gccacuuggagaucagaacu

SEQ ID NO: 724816 - RNA, 20 nt, Artificial Sequence
  Synthetic
gcuuggaaucaaagagaacu

SEQ ID NO: 724817 - RNA, 20 nt, Artificial Sequence
  Synthetic
guggaagcaacuuuagaacu

SEQ ID NO: 724818 - RNA, 20 nt, Artificial Sequence
  Synthetic
gguuaggggaagaaggaacu

SEQ ID NO: 724819 - RNA, 20 nt, Artificial Sequence
  Synthetic
ggagaaaaggaagaggaacu

SEQ ID NO: 724820 - RNA, 20 nt, Artificial Sequence
  Synthetic
ggcugggcgaagggggaacu

SEQ ID NO: 724821 - RNA, 20 nt, Artificial Sequence
  Synthetic
gauuacuaaucuggggaacu

SEQ ID NO: 724822 - RNA, 20 nt, Artificial Sequence
  Synthetic
guggaagcaacuuuggaacu

SEQ ID NO: 724823 - RNA, 20 nt, Artificial Sequence
  Synthetic
gcgaagggaaaaacugaacu

SEQ ID NO: 724824 - RNA, 20 nt, Artificial Sequence
  Synthetic
gcacgagaaucacuugaacu

SEQ ID NO: 724825 - RNA, 20 nt, Artificial Sequence
  Synthetic
gcaggagaaucacuugaacu

SEQ ID NO: 724826 - RNA, 20 nt, Artificial Sequence
  Synthetic
guaccagaaucgcuugaacu

SEQ ID NO: 724827 - RNA, 20 nt, Artificial Sequence
  Synthetic
gaaggauguuaaaaauaacu

SEQ ID NO: 724828 - RNA, 20 nt, Artificial Sequence
  Synthetic
guuaauuaucaagaauaacu

SEQ ID NO: 724829 - RNA, 20 nt, Artificial Sequence
  Synthetic
ggugcuaaugcugaauaacu

SEQ ID NO: 724830 - RNA, 20 nt, Artificial Sequence
  Synthetic
guggaaaagaauucauaacu

SEQ ID NO: 724831 - RNA, 20 nt, Artificial Sequence
  Synthetic
gaaaauccuccaggauaacu

SEQ ID NO: 724832 - RNA, 20 nt, Artificial Sequence
  Synthetic
gcuuguaguccuggcuaacu

SEQ ID NO: 724833 - RNA, 20 nt, Artificial Sequence
  Synthetic
gccgucaagaaguucuaacu

SEQ ID NO: 724834 - RNA, 20 nt, Artificial Sequence
  Synthetic
gaaaauuauuuaaauuaacu

SEQ ID NO: 724835 - RNA, 20 nt, Artificial Sequence
  Synthetic
guuauucuugauaauuaacu

SEQ ID NO: 724836 - RNA, 20 nt, Artificial Sequence
  Synthetic
guuguuaaauauacuuaacu

SEQ ID NO: 724837 - RNA, 20 nt, Artificial Sequence
  Synthetic
guaaauuuuauguguuaacu

SEQ ID NO: 724838 - RNA, 20 nt, Artificial Sequence
  Synthetic
gugucacauuaagaaacacu

SEQ ID NO: 724839 - RNA, 20 nt, Artificial Sequence
  Synthetic
guuuuucaauaugaaacacu

SEQ ID NO: 724840 - RNA, 20 nt, Artificial Sequence
  Synthetic
gagcuggaaaagauaacacu

SEQ ID NO: 724841 - RNA, 20 nt, Artificial Sequence
  Synthetic
gagcagaugaggauaacacu

SEQ ID NO: 724842 - RNA, 20 nt, Artificial Sequence
  Synthetic
gaaggggaacaucacacacu

SEQ ID NO: 724843 - RNA, 20 nt, Artificial Sequence
  Synthetic
ggaggggaacaucacacacu

SEQ ID NO: 724844 - RNA, 20 nt, Artificial Sequence
  Synthetic
ggcaaacagucagagacacu

SEQ ID NO: 724845 - RNA, 20 nt, Artificial Sequence
  Synthetic
gcugaacgaacucugacacu

SEQ ID NO: 724846 - RNA, 20 nt, Artificial Sequence
  Synthetic
guaagguauagaaauacacu

SEQ ID NO: 724847 - RNA, 20 nt, Artificial Sequence
  Synthetic
gauacaauuuuagauacacu

SEQ ID NO: 724848 - RNA, 20 nt, Artificial Sequence
  Synthetic
gucuuucuacaaccuacacu

SEQ ID NO: 724849 - RNA, 20 nt, Artificial Sequence
  Synthetic
gaugcucauugauuuacacu

SEQ ID NO: 724850 - RNA, 20 nt, Artificial Sequence
  Synthetic
gauaguacuuuuuacccacu

SEQ ID NO: 724851 - RNA, 20 nt, Artificial Sequence
  Synthetic
gaaaaaaaaaaaaccccacu

SEQ ID NO: 724852 - RNA, 20 nt, Artificial Sequence
  Synthetic
gagauguguauaaagccacu

SEQ ID NO: 724853 - RNA, 20 nt, Artificial Sequence
  Synthetic
ggauugugcucuuagccacu

SEQ ID NO: 724854 - RNA, 20 nt, Artificial Sequence
  Synthetic
gagauacccagauggccacu

SEQ ID NO: 724855 - RNA, 20 nt, Artificial Sequence
  Synthetic
gacaacagcaugcauccacu

SEQ ID NO: 724856 - RNA, 20 nt, Artificial Sequence
  Synthetic
gauauugcuaaauguccacu

SEQ ID NO: 724857 - RNA, 20 nt, Artificial Sequence
  Synthetic
gaaucuaaaauaagagcacu

SEQ ID NO: 724858 - RNA, 20 nt, Artificial Sequence
  Synthetic
gauaguaaagcuuuagcacu

SEQ ID NO: 724859 - RNA, 20 nt, Artificial Sequence
  Synthetic
gugauuacauugggcgcacu

SEQ ID NO: 724860 - RNA, 20 nt, Artificial Sequence
  Synthetic
ggugaccacaacauggcacu

SEQ ID NO: 724861 - RNA, 20 nt, Artificial Sequence
  Synthetic
ggcaaugaaaugcuggcacu

SEQ ID NO: 724862 - RNA, 20 nt, Artificial Sequence
  Synthetic
guuauuugcuuucuggcacu

SEQ ID NO: 724863 - RNA, 20 nt, Artificial Sequence
  Synthetic
guaaugaaauuauuggcacu

SEQ ID NO: 724864 - RNA, 20 nt, Artificial Sequence
  Synthetic
gaaauuuaaccccaugcacu

SEQ ID NO: 724865 - RNA, 20 nt, Artificial Sequence
  Synthetic
guauauuguucccaugcacu

SEQ ID NO: 724866 - RNA, 20 nt, Artificial Sequence
  Synthetic
gauggcaagcaagcugcacu

SEQ ID NO: 724867 - RNA, 20 nt, Artificial Sequence
  Synthetic
ggcugcuuccaacaaucacu

SEQ ID NO: 724868 - RNA, 20 nt, Artificial Sequence
  Synthetic
gguggcacacuagaaucacu

SEQ ID NO: 724869 - RNA, 20 nt, Artificial Sequence
  Synthetic
ggcugcacguuagaaucacu

SEQ ID NO: 724870 - RNA, 20 nt, Artificial Sequence
  Synthetic
gccgaggcaggcagaucacu

SEQ ID NO: 724871 - RNA, 20 nt, Artificial Sequence
  Synthetic
gcugaggcagguggaucacu

SEQ ID NO: 724872 - RNA, 20 nt, Artificial Sequence
  Synthetic
gauuaaaacugucuaucacu

SEQ ID NO: 724873 - RNA, 20 nt, Artificial Sequence
  Synthetic
gucacucuacaaguaucacu

SEQ ID NO: 724874 - RNA, 20 nt, Artificial Sequence
  Synthetic
ggaauuuggaacaacucacu

SEQ ID NO: 724875 - RNA, 20 nt, Artificial Sequence
  Synthetic
gugguaaaauaucccucacu

SEQ ID NO: 724876 - RNA, 20 nt, Artificial Sequence
  Synthetic
guuugagacagagucucacu

SEQ ID NO: 724877 - RNA, 20 nt, Artificial Sequence
  Synthetic
ggggcucuuccugcuucacu

SEQ ID NO: 724878 - RNA, 20 nt, Artificial Sequence
  Synthetic
gaaugauaaaauuuuucacu

SEQ ID NO: 724879 - RNA, 20 nt, Artificial Sequence
  Synthetic
gaugggcaauagcaaagacu

SEQ ID NO: 724880 - RNA, 20 nt, Artificial Sequence
  Synthetic
ggauuugccucagaaagacu

SEQ ID NO: 724881 - RNA, 20 nt, Artificial Sequence
  Synthetic
guuuuugucguuagaagacu

SEQ ID NO: 724882 - RNA, 20 nt, Artificial Sequence
  Synthetic
gcaggauaggaaauaagacu

SEQ ID NO: 724883 - RNA, 20 nt, Artificial Sequence
  Synthetic
gugugauguugaauaagacu

SEQ ID NO: 724884 - RNA, 20 nt, Artificial Sequence
  Synthetic
gauaaccugaauauaagacu

SEQ ID NO: 724885 - RNA, 20 nt, Artificial Sequence
  Synthetic
guaacaaaguaccuaagacu

SEQ ID NO: 724886 - RNA, 20 nt, Artificial Sequence
  Synthetic
guaacaaaauaccacagacu

SEQ ID NO: 724887 - RNA, 20 nt, Artificial Sequence
  Synthetic
gugccacugcacuccagacu

SEQ ID NO: 724888 - RNA, 20 nt, Artificial Sequence
  Synthetic
gccauagagcaaugcagacu

SEQ ID NO: 724889 - RNA, 20 nt, Artificial Sequence
  Synthetic
gcugcaugauuacagagacu

SEQ ID NO: 724890 - RNA, 20 nt, Artificial Sequence
  Synthetic
ggcucacaguucuggagacu

SEQ ID NO: 724891 - RNA, 20 nt, Artificial Sequence
  Synthetic
gugaagaagugauauagacu

SEQ ID NO: 724892 - RNA, 20 nt, Artificial Sequence
  Synthetic
gaaauuuaaggaaaaggacu

SEQ ID NO: 724893 - RNA, 20 nt, Artificial Sequence
  Synthetic
gaagcauuuaaaagaggacu

SEQ ID NO: 724894 - RNA, 20 nt, Artificial Sequence
  Synthetic
gagguugaauagagaggacu

SEQ ID NO: 724895 - RNA, 20 nt, Artificial Sequence
  Synthetic
gggcuaagagcuagaggacu

SEQ ID NO: 724896 - RNA, 20 nt, Artificial Sequence
  Synthetic
gaagcaggcuucuagggacu

SEQ ID NO: 724897 - RNA, 20 nt, Artificial Sequence
  Synthetic
gaaucucuggggaugggacu

SEQ ID NO: 724898 - RNA, 20 nt, Artificial Sequence
  Synthetic
gcuuaggaaucaaauggacu

SEQ ID NO: 724899 - RNA, 20 nt, Artificial Sequence
  Synthetic
gcaacuaugaagugaugacu

SEQ ID NO: 724900 - RNA, 20 nt, Artificial Sequence
  Synthetic
gcagaguuaaaauacugacu

SEQ ID NO: 724901 - RNA, 20 nt, Artificial Sequence
  Synthetic
gacccccgugccuccugacu

SEQ ID NO: 724902 - RNA, 20 nt, Artificial Sequence
  Synthetic
gacaagugaauuuccugacu

SEQ ID NO: 724903 - RNA, 20 nt, Artificial Sequence
  Synthetic
gggaggaccacaagcugacu

SEQ ID NO: 724904 - RNA, 20 nt, Artificial Sequence
  Synthetic
guaguuuaucugcucugacu

SEQ ID NO: 724905 - RNA, 20 nt, Artificial Sequence
  Synthetic
gcaccuacacuuuucugacu

SEQ ID NO: 724906 - RNA, 20 nt, Artificial Sequence
  Synthetic
gcuauuaaggagaagugacu

SEQ ID NO: 724907 - RNA, 20 nt, Artificial Sequence
  Synthetic
gaauucacaagaaugugacu

SEQ ID NO: 724908 - RNA, 20 nt, Artificial Sequence
  Synthetic
guaacugcugacaauugacu

SEQ ID NO: 724909 - RNA, 20 nt, Artificial Sequence
  Synthetic
gugucccauucucuuugacu

SEQ ID NO: 724910 - RNA, 20 nt, Artificial Sequence
  Synthetic
gguuaaaaaauauuuugacu

SEQ ID NO: 724911 - RNA, 20 nt, Artificial Sequence
  Synthetic
gcaaccacaccacaaauacu

SEQ ID NO: 724912 - RNA, 20 nt, Artificial Sequence
  Synthetic
gccccaaaaugugaaauacu

SEQ ID NO: 724913 - RNA, 20 nt, Artificial Sequence
  Synthetic
gaguaucaauuuuaaauacu

SEQ ID NO: 724914 - RNA, 20 nt, Artificial Sequence
  Synthetic
gccaugaaaauaagaauacu

SEQ ID NO: 724915 - RNA, 20 nt, Artificial Sequence
  Synthetic
gcuacuuuaguacacauacu

SEQ ID NO: 724916 - RNA, 20 nt, Artificial Sequence
  Synthetic
gaguuaagacuaugcauacu

SEQ ID NO: 724917 - RNA, 20 nt, Artificial Sequence
  Synthetic
gguguguggagugagauacu

SEQ ID NO: 724918 - RNA, 20 nt, Artificial Sequence
  Synthetic
ggaauggagagauauauacu

SEQ ID NO: 724919 - RNA, 20 nt, Artificial Sequence
  Synthetic
guguuucuuuccacuauacu

SEQ ID NO: 724920 - RNA, 20 nt, Artificial Sequence
  Synthetic
gacaggguacugguuauacu

SEQ ID NO: 724921 - RNA, 20 nt, Artificial Sequence
  Synthetic
gggguguaauguacacuacu

SEQ ID NO: 724922 - RNA, 20 nt, Artificial Sequence
  Synthetic
gauccagcaaucccacuacu

SEQ ID NO: 724923 - RNA, 20 nt, Artificial Sequence
  Synthetic
gauacagcaauuccacuacu

SEQ ID NO: 724924 - RNA, 20 nt, Artificial Sequence
  Synthetic
gauauugauauuuuccuacu

SEQ ID NO: 724925 - RNA, 20 nt, Artificial Sequence
  Synthetic
gaagggacaguacagcuacu

SEQ ID NO: 724926 - RNA, 20 nt, Artificial Sequence
  Synthetic
gcauuuuaaucccagcuacu

SEQ ID NO: 724927 - RNA, 20 nt, Artificial Sequence
  Synthetic
gcaccuguaucccagcuacu

SEQ ID NO: 724928 - RNA, 20 nt, Artificial Sequence
  Synthetic
ggcuaguagucccagcuacu

SEQ ID NO: 724929 - RNA, 20 nt, Artificial Sequence
  Synthetic
cgccuguagucccagcuacu

SEQ ID NO: 724930 - RNA, 20 nt, Artificial Sequence
  Synthetic
caccuguaaucucagcuacu

SEQ ID NO: 724931 - RNA, 20 nt, Artificial Sequence
  Synthetic
ggagucauaagucagcuacu

SEQ ID NO: 724932 - RNA, 20 nt, Artificial Sequence
  Synthetic
gcuggaacaaaauagcuacu

SEQ ID NO: 724933 - RNA, 20 nt, Artificial Sequence
  Synthetic
ggauaugucagaagucuacu

SEQ ID NO: 724934 - RNA, 20 nt, Artificial Sequence
  Synthetic
gcucacauuuuauuucuacu

SEQ ID NO: 724935 - RNA, 20 nt, Artificial Sequence
  Synthetic
gguucgaccugguuaguacu

SEQ ID NO: 724936 - RNA, 20 nt, Artificial Sequence
  Synthetic
gcagugcucagcgcuguacu

SEQ ID NO: 724937 - RNA, 20 nt, Artificial Sequence
  Synthetic
guagggcaaaugcuuguacu

SEQ ID NO: 724938 - RNA, 20 nt, Artificial Sequence
  Synthetic
guuacaagaauuguuguacu

SEQ ID NO: 724939 - RNA, 20 nt, Artificial Sequence
  Synthetic
guuuaaguuccacaauuacu

SEQ ID NO: 724940 - RNA, 20 nt, Artificial Sequence
  Synthetic
gaauaacuuuuugaauuacu

SEQ ID NO: 724941 - RNA, 20 nt, Artificial Sequence
  Synthetic
gacccagccaucccauuacu

SEQ ID NO: 724942 - RNA, 20 nt, Artificial Sequence
  Synthetic
gacccggccaucccauuacu

SEQ ID NO: 724943 - RNA, 20 nt, Artificial Sequence
  Synthetic
gacccagcuaucccauuacu

SEQ ID NO: 724944 - RNA, 20 nt, Artificial Sequence
  Synthetic
gguuauguucauguauuacu

SEQ ID NO: 724945 - RNA, 20 nt, Artificial Sequence
  Synthetic
gaugagaaaagacacuuacu

SEQ ID NO: 724946 - RNA, 20 nt, Artificial Sequence
  Synthetic
guaagauuugaaaucuuacu

SEQ ID NO: 724947 - RNA, 20 nt, Artificial Sequence
  Synthetic
guaauuuuuguauucuuacu

SEQ ID NO: 724948 - RNA, 20 nt, Artificial Sequence
  Synthetic
gggagguugaaaugguuacu

SEQ ID NO: 724949 - RNA, 20 nt, Artificial Sequence
  Synthetic
gugaagagagauugguuacu

SEQ ID NO: 724950 - RNA, 20 nt, Artificial Sequence
  Synthetic
ggucugaugcugauguuacu

SEQ ID NO: 724951 - RNA, 20 nt, Artificial Sequence
  Synthetic
gucacagaccuuuuguuacu

SEQ ID NO: 724952 - RNA, 20 nt, Artificial Sequence
  Synthetic
gaacuucuauuuuuguuacu

SEQ ID NO: 724953 - RNA, 20 nt, Artificial Sequence
  Synthetic
gaacugccuaaauauuuacu

SEQ ID NO: 724954 - RNA, 20 nt, Artificial Sequence
  Synthetic
gcacucuuugugacuuuacu

SEQ ID NO: 724955 - RNA, 20 nt, Artificial Sequence
  Synthetic
gacaauggugcuucuuuacu

SEQ ID NO: 724956 - RNA, 20 nt, Artificial Sequence
  Synthetic
gucccaagcuuuucuuuacu

SEQ ID NO: 724957 - RNA, 20 nt, Artificial Sequence
  Synthetic
gccuucuaauuuaguuuacu

SEQ ID NO: 724958 - RNA, 20 nt, Artificial Sequence
  Synthetic
gaaaguuacucaguuuuacu

SEQ ID NO: 724959 - RNA, 20 nt, Artificial Sequence
  Synthetic
gacaggucaggugaaaaccu

SEQ ID NO: 724960 - RNA, 20 nt, Artificial Sequence
  Synthetic
guguguaccuacacaaaccu

SEQ ID NO: 724961 - RNA, 20 nt, Artificial Sequence
  Synthetic
gauccacaaaaugcaaaccu

SEQ ID NO: 724962 - RNA, 20 nt, Artificial Sequence
  Synthetic
ggcuagaaguacagaaaccu

SEQ ID NO: 724963 - RNA, 20 nt, Artificial Sequence
  Synthetic
gauugggaauuaauaaaccu

SEQ ID NO: 724964 - RNA, 20 nt, Artificial Sequence
  Synthetic
gagaacaaggcucacaaccu

SEQ ID NO: 724965 - RNA, 20 nt, Artificial Sequence
  Synthetic
guuuauuucaaauacaaccu

SEQ ID NO: 724966 - RNA, 20 nt, Artificial Sequence
  Synthetic
gugccacugcacuccaaccu

SEQ ID NO: 724967 - RNA, 20 nt, Artificial Sequence
  Synthetic
gugccacugcgcuccaaccu

SEQ ID NO: 724968 - RNA, 20 nt, Artificial Sequence
  Synthetic
gcgccacuggauuccaaccu

SEQ ID NO: 724969 - RNA, 20 nt, Artificial Sequence
  Synthetic
gguuuaccuuaaggcaaccu

SEQ ID NO: 724970 - RNA, 20 nt, Artificial Sequence
  Synthetic
gcauuguuauugcagaaccu

SEQ ID NO: 724971 - RNA, 20 nt, Artificial Sequence
  Synthetic
gaagaccucauggagaaccu

SEQ ID NO: 724972 - RNA, 20 nt, Artificial Sequence
  Synthetic
ggguaaaaauugaggaaccu

SEQ ID NO: 724973 - RNA, 20 nt, Artificial Sequence
  Synthetic
gugcaaagaaaagugaaccu

SEQ ID NO: 724974 - RNA, 20 nt, Artificial Sequence
  Synthetic
guugcuuauaaauugaaccu

SEQ ID NO: 724975 - RNA, 20 nt, Artificial Sequence
  Synthetic
caggagaaucgcuugaaccu

SEQ ID NO: 724976 - RNA, 20 nt, Artificial Sequence
  Synthetic
ggccagcaucagcauaaccu

SEQ ID NO: 724977 - RNA, 20 nt, Artificial Sequence
  Synthetic
gguaucuuugauacuaaccu

SEQ ID NO: 724978 - RNA, 20 nt, Artificial Sequence
  Synthetic
ggggacacuuuaccuaaccu

SEQ ID NO: 724979 - RNA, 20 nt, Artificial Sequence
  Synthetic
gucuuccuaacuaguaaccu

SEQ ID NO: 724980 - RNA, 20 nt, Artificial Sequence
  Synthetic
gucagcaucagugguaaccu

SEQ ID NO: 724981 - RNA, 20 nt, Artificial Sequence
  Synthetic
ggagggaugugaucacaccu

SEQ ID NO: 724982 - RNA, 20 nt, Artificial Sequence
  Synthetic
gggucccucccaugacaccu

SEQ ID NO: 724983 - RNA, 20 nt, Artificial Sequence
  Synthetic
gggacugguaaauuacaccu

SEQ ID NO: 724984 - RNA, 20 nt, Artificial Sequence
  Synthetic
gcauuucuggcauaccaccu

SEQ ID NO: 724985 - RNA, 20 nt, Artificial Sequence
  Synthetic
guaggcuauauguaccaccu

SEQ ID NO: 724986 - RNA, 20 nt, Artificial Sequence
  Synthetic
ggagugcaguggcgccaccu

SEQ ID NO: 724987 - RNA, 20 nt, Artificial Sequence
  Synthetic
gugauucuagugugccaccu

SEQ ID NO: 724988 - RNA, 20 nt, Artificial Sequence
  Synthetic
gcaagagugaaacuccaccu

SEQ ID NO: 724989 - RNA, 20 nt, Artificial Sequence
  Synthetic
gauggagcaagacuccaccu

SEQ ID NO: 724990 - RNA, 20 nt, Artificial Sequence
  Synthetic
gcacgguuuugucugcaccu

SEQ ID NO: 724991 - RNA, 20 nt, Artificial Sequence
  Synthetic
gaugugcaucagaaucaccu

SEQ ID NO: 724992 - RNA, 20 nt, Artificial Sequence
  Synthetic
gagacgggguuucaucaccu

SEQ ID NO: 724993 - RNA, 20 nt, Artificial Sequence
  Synthetic
guuccuauguuauuucaccu

SEQ ID NO: 724994 - RNA, 20 nt, Artificial Sequence
  Synthetic
gcaauuuaagccuuucaccu

SEQ ID NO: 724995 - RNA, 20 nt, Artificial Sequence
  Synthetic
ggaguuuugcucuuucaccu

SEQ ID NO: 724996 - RNA, 20 nt, Artificial Sequence
  Synthetic
gaggccuaacaaaaagaccu

SEQ ID NO: 724997 - RNA, 20 nt, Artificial Sequence
  Synthetic
gaaaagagucccaaagaccu

SEQ ID NO: 724998 - RNA, 20 nt, Artificial Sequence
  Synthetic
ggugcagaggaggcagaccu

SEQ ID NO: 724999 - RNA, 20 nt, Artificial Sequence
  Synthetic
gaauuuuugcaaucagaccu

SEQ ID NO: 725000 - RNA, 20 nt, Artificial Sequence
  Synthetic
gagcaaaauaacugagaccu

SEQ ID NO: 725001 - RNA, 20 nt, Artificial Sequence
  Synthetic
gcaccacugcacuccgaccu

SEQ ID NO: 725002 - RNA, 20 nt, Artificial Sequence
  Synthetic
gggauuaaggugggcgaccu

SEQ ID NO: 725003 - RNA, 20 nt, Artificial Sequence
  Synthetic
guggaucuguugggcgaccu

SEQ ID NO: 725004 - RNA, 20 nt, Artificial Sequence
  Synthetic
gaagaagaugaacaggaccu

SEQ ID NO: 725005 - RNA, 20 nt, Artificial Sequence
  Synthetic
guggaaaguacauaggaccu

SEQ ID NO: 725006 - RNA, 20 nt, Artificial Sequence
  Synthetic
gcugucacauauuaugaccu

SEQ ID NO: 725007 - RNA, 20 nt, Artificial Sequence
  Synthetic
gugaccaucacuuuugaccu

SEQ ID NO: 725008 - RNA, 20 nt, Artificial Sequence
  Synthetic
gucucuaucugccaauaccu

SEQ ID NO: 725009 - RNA, 20 nt, Artificial Sequence
  Synthetic
ggguaccaggauuaauaccu

SEQ ID NO: 725010 - RNA, 20 nt, Artificial Sequence
  Synthetic
guguacuacgcuuaauaccu

SEQ ID NO: 725011 - RNA, 20 nt, Artificial Sequence
  Synthetic
gaguaguuggcuuaauaccu

SEQ ID NO: 725012 - RNA, 20 nt, Artificial Sequence
  Synthetic
ggucacauuugcagauaccu

SEQ ID NO: 725013 - RNA, 20 nt, Artificial Sequence
  Synthetic
ggaacagguuggugauaccu

SEQ ID NO: 725014 - RNA, 20 nt, Artificial Sequence
  Synthetic
guaacuaaguugugauaccu

SEQ ID NO: 725015 - RNA, 20 nt, Artificial Sequence
  Synthetic
gguuaccaugcucgcuaccu

SEQ ID NO: 725016 - RNA, 20 nt, Artificial Sequence
  Synthetic
gguuacuaugcucaguaccu

SEQ ID NO: 725017 - RNA, 20 nt, Artificial Sequence
  Synthetic
gaacauagauaagauuaccu

SEQ ID NO: 725018 - RNA, 20 nt, Artificial Sequence
  Synthetic
guuaucaguauuuguuaccu

SEQ ID NO: 725019 - RNA, 20 nt, Artificial Sequence
  Synthetic
gaacagucauuucuuuaccu

SEQ ID NO: 725020 - RNA, 20 nt, Artificial Sequence
  Synthetic
gaugaaaaugauaaaacccu

SEQ ID NO: 725021 - RNA, 20 nt, Artificial Sequence
  Synthetic
guuuaacauaaccuaacccu

SEQ ID NO: 725022 - RNA, 20 nt, Artificial Sequence
  Synthetic
gaaggggaacaucacacccu

SEQ ID NO: 725023 - RNA, 20 nt, Artificial Sequence
  Synthetic
gugaauggcacugccacccu

SEQ ID NO: 725024 - RNA, 20 nt, Artificial Sequence
  Synthetic
gaauuuaagcuggucacccu

SEQ ID NO: 725025 - RNA, 20 nt, Artificial Sequence
  Synthetic
ggaugcuuauuagagacccu

SEQ ID NO: 725026 - RNA, 20 nt, Artificial Sequence
  Synthetic
gauuauuuauaauugacccu

SEQ ID NO: 725027 - RNA, 20 nt, Artificial Sequence
  Synthetic
gauucuuuccuaauaccccu

SEQ ID NO: 725028 - RNA, 20 nt, Artificial Sequence
  Synthetic
gguaaguaaagucagccccu

SEQ ID NO: 725029 - RNA, 20 nt, Artificial Sequence
  Synthetic
gccaaucaaagccauccccu

SEQ ID NO: 725030 - RNA, 20 nt, Artificial Sequence
  Synthetic
gaggggcacuuaguuccccu

SEQ ID NO: 725031 - RNA, 20 nt, Artificial Sequence
  Synthetic
gaaaauaaguuaaaagcccu

SEQ ID NO: 725032 - RNA, 20 nt, Artificial Sequence
  Synthetic
guugucugguaccaagcccu

SEQ ID NO: 725033 - RNA, 20 nt, Artificial Sequence
  Synthetic
gggacugauuccacagcccu

SEQ ID NO: 725034 - RNA, 20 nt, Artificial Sequence
  Synthetic
gagcaaggguccccagcccu

SEQ ID NO: 725035 - RNA, 20 nt, Artificial Sequence
  Synthetic
gcuacacaggaaggagcccu

SEQ ID NO: 725036 - RNA, 20 nt, Artificial Sequence
  Synthetic
gaauuaaguccuaacgcccu

SEQ ID NO: 725037 - RNA, 20 nt, Artificial Sequence
  Synthetic
gccuacgccaccagggcccu

SEQ ID NO: 725038 - RNA, 20 nt, Artificial Sequence
  Synthetic
ggaggacuaaauguggcccu

SEQ ID NO: 725039 - RNA, 20 nt, Artificial Sequence
  Synthetic
gcauuauuaacaagcucccu

SEQ ID NO: 725040 - RNA, 20 nt, Artificial Sequence
  Synthetic
gauaaaacucccaucucccu

SEQ ID NO: 725041 - RNA, 20 nt, Artificial Sequence
  Synthetic
ggaaaugccauccucucccu

SEQ ID NO: 725042 - RNA, 20 nt, Artificial Sequence
  Synthetic
gacauacuugucuauucccu

SEQ ID NO: 725043 - RNA, 20 nt, Artificial Sequence
  Synthetic
gaggcccaagacaguucccu

SEQ ID NO: 725044 - RNA, 20 nt, Artificial Sequence
  Synthetic
gaguucauaaccuguucccu

SEQ ID NO: 725045 - RNA, 20 nt, Artificial Sequence
  Synthetic
gaaguuuucaucauuucccu

SEQ ID NO: 725046 - RNA, 20 nt, Artificial Sequence
  Synthetic
guuuuguuuugguuuucccu

SEQ ID NO: 725047 - RNA, 20 nt, Artificial Sequence
  Synthetic
gaggauguauggaaaagccu

SEQ ID NO: 725048 - RNA, 20 nt, Artificial Sequence
  Synthetic
gcaccacugcacucaagccu

SEQ ID NO: 725049 - RNA, 20 nt, Artificial Sequence
  Synthetic
guucugaguggcagaagccu

SEQ ID NO: 725050 - RNA, 20 nt, Artificial Sequence
  Synthetic
gcaccacugcacuacagccu

SEQ ID NO: 725051 - RNA, 20 nt, Artificial Sequence
  Synthetic
gugccacugcacuacagccu

SEQ ID NO: 725052 - RNA, 20 nt, Artificial Sequence
  Synthetic
gcgccacugcaccccagccu

SEQ ID NO: 725053 - RNA, 20 nt, Artificial Sequence
  Synthetic
gcaccauugcaccccagccu

SEQ ID NO: 725054 - RNA, 20 nt, Artificial Sequence
  Synthetic
gcgccaccgcacuccagccu

SEQ ID NO: 725055 - RNA, 20 nt, Artificial Sequence
  Synthetic
gugccaccgcacuccagccu

SEQ ID NO: 725056 - RNA, 20 nt, Artificial Sequence
  Synthetic
gcaccacugcacuccagccu

SEQ ID NO: 725057 - RNA, 20 nt, Artificial Sequence
  Synthetic
gcgccacugcacuccagccu

SEQ ID NO: 725058 - RNA, 20 nt, Artificial Sequence
  Synthetic
gugccacugcacuccagccu

SEQ ID NO: 725059 - RNA, 20 nt, Artificial Sequence
  Synthetic
gcagcacugcacuccagccu

SEQ ID NO: 725060 - RNA, 20 nt, Artificial Sequence
  Synthetic
gcaccgcugcacuccagccu

SEQ ID NO: 725061 - RNA, 20 nt, Artificial Sequence
  Synthetic
gcacugcugcacuccagccu

SEQ ID NO: 725062 - RNA, 20 nt, Artificial Sequence
  Synthetic
gcaacauugcacuccagccu

SEQ ID NO: 725063 - RNA, 20 nt, Artificial Sequence
  Synthetic
gcaccauugcacuccagccu

SEQ ID NO: 725064 - RNA, 20 nt, Artificial Sequence
  Synthetic
gcgccauugcacuccagccu

SEQ ID NO: 725065 - RNA, 20 nt, Artificial Sequence
  Synthetic
gugccauugcacuccagccu

SEQ ID NO: 725066 - RNA, 20 nt, Artificial Sequence
  Synthetic
gcgcuguugcacuccagccu

SEQ ID NO: 725067 - RNA, 20 nt, Artificial Sequence
  Synthetic
gcgccaccucacuccagccu

SEQ ID NO: 725068 - RNA, 20 nt, Artificial Sequence
  Synthetic
gcaccacuucacuccagccu

SEQ ID NO: 725069 - RNA, 20 nt, Artificial Sequence
  Synthetic
gcgccacuguacuccagccu

SEQ ID NO: 725070 - RNA, 20 nt, Artificial Sequence
  Synthetic
gcaccauuguacuccagccu

SEQ ID NO: 725071 - RNA, 20 nt, Artificial Sequence
  Synthetic
gugccauuguacuccagccu

SEQ ID NO: 725072 - RNA, 20 nt, Artificial Sequence
  Synthetic
gcaccacugcgcuccagccu

SEQ ID NO: 725073 - RNA, 20 nt, Artificial Sequence
  Synthetic
gugccauugcgcuccagccu

SEQ ID NO: 725074 - RNA, 20 nt, Artificial Sequence
  Synthetic
gcgccacugugcuccagccu

SEQ ID NO: 725075 - RNA, 20 nt, Artificial Sequence
  Synthetic
gcgccacugcauuccagccu

SEQ ID NO: 725076 - RNA, 20 nt, Artificial Sequence
  Synthetic
gugccauugcauuccagccu

SEQ ID NO: 725077 - RNA, 20 nt, Artificial Sequence
  Synthetic
gguugcgugauaugcagccu

SEQ ID NO: 725078 - RNA, 20 nt, Artificial Sequence
  Synthetic
gaggugacaguuuucagccu

SEQ ID NO: 725079 - RNA, 20 nt, Artificial Sequence
  Synthetic
gcucuggagucaaagagccu

SEQ ID NO: 725080 - RNA, 20 nt, Artificial Sequence
  Synthetic
gcaaaguccaaggugagccu

SEQ ID NO: 725081 - RNA, 20 nt, Artificial Sequence
  Synthetic
ggcugagccucagauagccu

SEQ ID NO: 725082 - RNA, 20 nt, Artificial Sequence
  Synthetic
gcuguacugguuuauagccu

SEQ ID NO: 725083 - RNA, 20 nt, Artificial Sequence
  Synthetic
gaauaaguaacaacuagccu

SEQ ID NO: 725084 - RNA, 20 nt, Artificial Sequence
  Synthetic
gagccacuacacucuagccu

SEQ ID NO: 725085 - RNA, 20 nt, Artificial Sequence
  Synthetic
gcaccacugcacucuagccu

SEQ ID NO: 725086 - RNA, 20 nt, Artificial Sequence
  Synthetic
gugccacugcacucuagccu

SEQ ID NO: 725087 - RNA, 20 nt, Artificial Sequence
  Synthetic
gcaguacagguuuguagccu

SEQ ID NO: 725088 - RNA, 20 nt, Artificial Sequence
  Synthetic
gugccacugcacuuuagccu

SEQ ID NO: 725089 - RNA, 20 nt, Artificial Sequence
  Synthetic
gacccuguggucacccgccu

SEQ ID NO: 725090 - RNA, 20 nt, Artificial Sequence
  Synthetic
guguucuaacucuaaggccu

SEQ ID NO: 725091 - RNA, 20 nt, Artificial Sequence
  Synthetic
guauagaucucuuaaggccu

SEQ ID NO: 725092 - RNA, 20 nt, Artificial Sequence
  Synthetic
guagagcuaggcugaggccu

SEQ ID NO: 725093 - RNA, 20 nt, Artificial Sequence
  Synthetic
gcagcacugcaguccggccu

SEQ ID NO: 725094 - RNA, 20 nt, Artificial Sequence
  Synthetic
ggacccauauuuuagggccu

SEQ ID NO: 725095 - RNA, 20 nt, Artificial Sequence
  Synthetic
gaguggaagaaauggggccu

SEQ ID NO: 725096 - RNA, 20 nt, Artificial Sequence
  Synthetic
gaggugggcucccauggccu

SEQ ID NO: 725097 - RNA, 20 nt, Artificial Sequence
  Synthetic
ggauuucugaguccuggccu

SEQ ID NO: 725098 - RNA, 20 nt, Artificial Sequence
  Synthetic
gagucuuagguaucuggccu

SEQ ID NO: 725099 - RNA, 20 nt, Artificial Sequence
  Synthetic
gaaaucagucccaaaugccu

SEQ ID NO: 725100 - RNA, 20 nt, Artificial Sequence
  Synthetic
guuuaucaagccaaaugccu

SEQ ID NO: 725101 - RNA, 20 nt, Artificial Sequence
  Synthetic
gugauaacauccaaaugccu

SEQ ID NO: 725102 - RNA, 20 nt, Artificial Sequence
  Synthetic
gaaaagaaauuguaaugccu

SEQ ID NO: 725103 - RNA, 20 nt, Artificial Sequence
  Synthetic
gcuuucacuauaauaugccu

SEQ ID NO: 725104 - RNA, 20 nt, Artificial Sequence
  Synthetic
ggauacuaugcucacugccu

SEQ ID NO: 725105 - RNA, 20 nt, Artificial Sequence
  Synthetic
guuuacaaauuauacugccu

SEQ ID NO: 725106 - RNA, 20 nt, Artificial Sequence
  Synthetic
gcgccacugcacuccugccu

SEQ ID NO: 725107 - RNA, 20 nt, Artificial Sequence
  Synthetic
ggaauugucuuuuccugccu

SEQ ID NO: 725108 - RNA, 20 nt, Artificial Sequence
  Synthetic
guauuugucuuucugugccu

SEQ ID NO: 725109 - RNA, 20 nt, Artificial Sequence
  Synthetic
gcugguacugaggugugccu

SEQ ID NO: 725110 - RNA, 20 nt, Artificial Sequence
  Synthetic
gaaaggucagaaacuugccu

SEQ ID NO: 725111 - RNA, 20 nt, Artificial Sequence
  Synthetic
gagucuuuuuaaucuugccu

SEQ ID NO: 725112 - RNA, 20 nt, Artificial Sequence
  Synthetic
gucguucuucaaaguugccu

SEQ ID NO: 725113 - RNA, 20 nt, Artificial Sequence
  Synthetic
gauacuuuaugcaaaauccu

SEQ ID NO: 725114 - RNA, 20 nt, Artificial Sequence
  Synthetic
gaauugaguaugaaaauccu

SEQ ID NO: 725115 - RNA, 20 nt, Artificial Sequence
  Synthetic
guugugggguauaaaauccu

SEQ ID NO: 725116 - RNA, 20 nt, Artificial Sequence
  Synthetic
gccucagcuucccaaauccu

SEQ ID NO: 725117 - RNA, 20 nt, Artificial Sequence
  Synthetic
ggaggcaauuacuaaauccu

SEQ ID NO: 725118 - RNA, 20 nt, Artificial Sequence
  Synthetic
gagacuauaccuucaauccu

SEQ ID NO: 725119 - RNA, 20 nt, Artificial Sequence
  Synthetic
gacacagacuggaccauccu

SEQ ID NO: 725120 - RNA, 20 nt, Artificial Sequence
  Synthetic
gccacauucaaagccauccu

SEQ ID NO: 725121 - RNA, 20 nt, Artificial Sequence
  Synthetic
gaacuuccuagaaucauccu

SEQ ID NO: 725122 - RNA, 20 nt, Artificial Sequence
  Synthetic
ggauggagaaccaucauccu

SEQ ID NO: 725123 - RNA, 20 nt, Artificial Sequence
  Synthetic
gggaaggcuagggucauccu

SEQ ID NO: 725124 - RNA, 20 nt, Artificial Sequence
  Synthetic
gaucaagugggcuucauccu

SEQ ID NO: 725125 - RNA, 20 nt, Artificial Sequence
  Synthetic
gaagagggauaggugauccu

SEQ ID NO: 725126 - RNA, 20 nt, Artificial Sequence
  Synthetic
gccuuuucuagaaauauccu

SEQ ID NO: 725127 - RNA, 20 nt, Artificial Sequence
  Synthetic
gacuuaacaggaaauauccu

SEQ ID NO: 725128 - RNA, 20 nt, Artificial Sequence
  Synthetic
gaagugucuguuccuauccu

SEQ ID NO: 725129 - RNA, 20 nt, Artificial Sequence
  Synthetic
gggccuucccugaguauccu

SEQ ID NO: 725130 - RNA, 20 nt, Artificial Sequence
  Synthetic
gagcuggaggccauuauccu

SEQ ID NO: 725131 - RNA, 20 nt, Artificial Sequence
  Synthetic
gauccagcaaccucacuccu

SEQ ID NO: 725132 - RNA, 20 nt, Artificial Sequence
  Synthetic
gcaagauuuugcagacuccu

SEQ ID NO: 725133 - RNA, 20 nt, Artificial Sequence
  Synthetic
gacuuuggacuuggacuccu

SEQ ID NO: 725134 - RNA, 20 nt, Artificial Sequence
  Synthetic
gccaauuuuaacaaccuccu

SEQ ID NO: 725135 - RNA, 20 nt, Artificial Sequence
  Synthetic
gccauauuggucaaccuccu

SEQ ID NO: 725136 - RNA, 20 nt, Artificial Sequence
  Synthetic
gcaaccucugucccccuccu

SEQ ID NO: 725137 - RNA, 20 nt, Artificial Sequence
  Synthetic
gcccucuccaggacucuccu

SEQ ID NO: 725138 - RNA, 20 nt, Artificial Sequence
  Synthetic
gaaauauuuucuagucuccu

SEQ ID NO: 725139 - RNA, 20 nt, Artificial Sequence
  Synthetic
gaaugaaugagaauucuccu

SEQ ID NO: 725140 - RNA, 20 nt, Artificial Sequence
  Synthetic
gaaucaguuaaauuucuccu

SEQ ID NO: 725141 - RNA, 20 nt, Artificial Sequence
  Synthetic
gucaguuggaauacaguccu

SEQ ID NO: 725142 - RNA, 20 nt, Artificial Sequence
  Synthetic
guuuauuuuaugccaguccu

SEQ ID NO: 725143 - RNA, 20 nt, Artificial Sequence
  Synthetic
gugguucuucucugaguccu

SEQ ID NO: 725144 - RNA, 20 nt, Artificial Sequence
  Synthetic
guguuauuuaaaauaguccu

SEQ ID NO: 725145 - RNA, 20 nt, Artificial Sequence
  Synthetic
gaauuucuuucaaugguccu

SEQ ID NO: 725146 - RNA, 20 nt, Artificial Sequence
  Synthetic
gagcaaacuguaacuguccu

SEQ ID NO: 725147 - RNA, 20 nt, Artificial Sequence
  Synthetic
gcuugcuagauuuguguccu

SEQ ID NO: 725148 - RNA, 20 nt, Artificial Sequence
  Synthetic
gugaguuguuccaaauuccu

SEQ ID NO: 725149 - RNA, 20 nt, Artificial Sequence
  Synthetic
ggggaaauaaggcaauuccu

SEQ ID NO: 725150 - RNA, 20 nt, Artificial Sequence
  Synthetic
ggagguuaccagacauuccu

SEQ ID NO: 725151 - RNA, 20 nt, Artificial Sequence
  Synthetic
gugucagagaugagauuccu

SEQ ID NO: 725152 - RNA, 20 nt, Artificial Sequence
  Synthetic
ggucaucuagguugauuccu

SEQ ID NO: 725153 - RNA, 20 nt, Artificial Sequence
  Synthetic
cacugcagccucgacuuccu

SEQ ID NO: 725154 - RNA, 20 nt, Artificial Sequence
  Synthetic
ggaaaccauuuugccuuccu

SEQ ID NO: 725155 - RNA, 20 nt, Artificial Sequence
  Synthetic
guuuuucauucuugcuuccu

SEQ ID NO: 725156 - RNA, 20 nt, Artificial Sequence
  Synthetic
gcaggcaguggcuucuuccu

SEQ ID NO: 725157 - RNA, 20 nt, Artificial Sequence
  Synthetic
gaauccuaaccaaauuuccu

SEQ ID NO: 725158 - RNA, 20 nt, Artificial Sequence
  Synthetic
gccaagguuuucaguuuccu

SEQ ID NO: 725159 - RNA, 20 nt, Artificial Sequence
  Synthetic
ggaaggcaaaaugguuuccu

SEQ ID NO: 725160 - RNA, 20 nt, Artificial Sequence
  Synthetic
gauggcaucuuaguuuuccu

SEQ ID NO: 725161 - RNA, 20 nt, Artificial Sequence
  Synthetic
gugaauguauuuuuuuuccu

SEQ ID NO: 725162 - RNA, 20 nt, Artificial Sequence
  Synthetic
gcucugaagauuaacaagcu

SEQ ID NO: 725163 - RNA, 20 nt, Artificial Sequence
  Synthetic
guaacaaauuaccacaagcu

SEQ ID NO: 725164 - RNA, 20 nt, Artificial Sequence
  Synthetic
gcagcauauaaaaucaagcu

SEQ ID NO: 725165 - RNA, 20 nt, Artificial Sequence
  Synthetic
gcaguucucccccucaagcu

SEQ ID NO: 725166 - RNA, 20 nt, Artificial Sequence
  Synthetic
gcuuuauuuauuuucaagcu

SEQ ID NO: 725167 - RNA, 20 nt, Artificial Sequence
  Synthetic
gauuggaauuggaagaagcu

SEQ ID NO: 725168 - RNA, 20 nt, Artificial Sequence
  Synthetic
gccucagccucugagaagcu

SEQ ID NO: 725169 - RNA, 20 nt, Artificial Sequence
  Synthetic
ggagaagucugugagaagcu

SEQ ID NO: 725170 - RNA, 20 nt, Artificial Sequence
  Synthetic
gaaaucagguaguagaagcu

SEQ ID NO: 725171 - RNA, 20 nt, Artificial Sequence
  Synthetic
gcuauaauguagccgaagcu

SEQ ID NO: 725172 - RNA, 20 nt, Artificial Sequence
  Synthetic
gccaagagaggcuggaagcu

SEQ ID NO: 725173 - RNA, 20 nt, Artificial Sequence
  Synthetic
gaugucaagugaaauaagcu

SEQ ID NO: 725174 - RNA, 20 nt, Artificial Sequence
  Synthetic
gaaaugccuuacaauaagcu

SEQ ID NO: 725175 - RNA, 20 nt, Artificial Sequence
  Synthetic
ggcauaguagaugcuaagcu

SEQ ID NO: 725176 - RNA, 20 nt, Artificial Sequence
  Synthetic
gagcauguuuaagguaagcu

SEQ ID NO: 725177 - RNA, 20 nt, Artificial Sequence
  Synthetic
gacuucuugaagcuuaagcu

SEQ ID NO: 725178 - RNA, 20 nt, Artificial Sequence
  Synthetic
gaacuggaagaaucacagcu

SEQ ID NO: 725179 - RNA, 20 nt, Artificial Sequence
  Synthetic
ggugucuggaauucacagcu

SEQ ID NO: 725180 - RNA, 20 nt, Artificial Sequence
  Synthetic
guuuugagcagcagacagcu

SEQ ID NO: 725181 - RNA, 20 nt, Artificial Sequence
  Synthetic
ggucacuuuuuucaccagcu

SEQ ID NO: 725182 - RNA, 20 nt, Artificial Sequence
  Synthetic
guguuuuuuaacauccagcu

SEQ ID NO: 725183 - RNA, 20 nt, Artificial Sequence
  Synthetic
gggcggagcucaccgcagcu

SEQ ID NO: 725184 - RNA, 20 nt, Artificial Sequence
  Synthetic
gaaagcccccuucugcagcu

SEQ ID NO: 725185 - RNA, 20 nt, Artificial Sequence
  Synthetic
guaccuugacugacucagcu

SEQ ID NO: 725186 - RNA, 20 nt, Artificial Sequence
  Synthetic
ggacugugauaugcucagcu

SEQ ID NO: 725187 - RNA, 20 nt, Artificial Sequence
  Synthetic
gaaaaaacuguaucucagcu

SEQ ID NO: 725188 - RNA, 20 nt, Artificial Sequence
  Synthetic
gcuauuccaaaauuucagcu

SEQ ID NO: 725189 - RNA, 20 nt, Artificial Sequence
  Synthetic
gugaacagaggcaaagagcu

SEQ ID NO: 725190 - RNA, 20 nt, Artificial Sequence
  Synthetic
gggagauuggugaaagagcu

SEQ ID NO: 725191 - RNA, 20 nt, Artificial Sequence
  Synthetic
gguugauugaaaccagagcu

SEQ ID NO: 725192 - RNA, 20 nt, Artificial Sequence
  Synthetic
gucucugauucaguagagcu

SEQ ID NO: 725193 - RNA, 20 nt, Artificial Sequence
  Synthetic
guugggagaggagcggagcu

SEQ ID NO: 725194 - RNA, 20 nt, Artificial Sequence
  Synthetic
gggacucuaaguggggagcu

SEQ ID NO: 725195 - RNA, 20 nt, Artificial Sequence
  Synthetic
gugacagggacacuggagcu

SEQ ID NO: 725196 - RNA, 20 nt, Artificial Sequence
  Synthetic
gcagguggauugccugagcu

SEQ ID NO: 725197 - RNA, 20 nt, Artificial Sequence
  Synthetic
guggguaaagaaggugagcu

SEQ ID NO: 725198 - RNA, 20 nt, Artificial Sequence
  Synthetic
guugugucacucauugagcu

SEQ ID NO: 725199 - RNA, 20 nt, Artificial Sequence
  Synthetic
gcacaagaaccgcuugagcu

SEQ ID NO: 725200 - RNA, 20 nt, Artificial Sequence
  Synthetic
gugggaggauugcuugagcu

SEQ ID NO: 725201 - RNA, 20 nt, Artificial Sequence
  Synthetic
gaaugauauuuacaauagcu

SEQ ID NO: 725202 - RNA, 20 nt, Artificial Sequence
  Synthetic
guuucuaccaaaaacuagcu

SEQ ID NO: 725203 - RNA, 20 nt, Artificial Sequence
  Synthetic
guuuccaaaaaggacuagcu

SEQ ID NO: 725204 - RNA, 20 nt, Artificial Sequence
  Synthetic
gaggaugcuguuuucuagcu

SEQ ID NO: 725205 - RNA, 20 nt, Artificial Sequence
  Synthetic
ccucagccucccaaguagcu

SEQ ID NO: 725206 - RNA, 20 nt, Artificial Sequence
  Synthetic
gccucugucuuccaguagcu

SEQ ID NO: 725207 - RNA, 20 nt, Artificial Sequence
  Synthetic
gccucagccuccgaguagcu

SEQ ID NO: 725208 - RNA, 20 nt, Artificial Sequence
  Synthetic
gcugugcccacuuaguagcu

SEQ ID NO: 725209 - RNA, 20 nt, Artificial Sequence
  Synthetic
guggacagcauuuaguagcu

SEQ ID NO: 725210 - RNA, 20 nt, Artificial Sequence
  Synthetic
gccucagccucccgguagcu

SEQ ID NO: 725211 - RNA, 20 nt, Artificial Sequence
  Synthetic
gaaacaucugaagauuagcu

SEQ ID NO: 725212 - RNA, 20 nt, Artificial Sequence
  Synthetic
gaaaagaaaacguguuagcu

SEQ ID NO: 725213 - RNA, 20 nt, Artificial Sequence
  Synthetic
gcgauucagaauuguuagcu

SEQ ID NO: 725214 - RNA, 20 nt, Artificial Sequence
  Synthetic
gaauggcuugccauuuagcu

SEQ ID NO: 725215 - RNA, 20 nt, Artificial Sequence
  Synthetic
ggggcucuuccuacuucgcu

SEQ ID NO: 725216 - RNA, 20 nt, Artificial Sequence
  Synthetic
ggcagccagagagaaaggcu

SEQ ID NO: 725217 - RNA, 20 nt, Artificial Sequence
  Synthetic
gcauaaaguuauucaaggcu

SEQ ID NO: 725218 - RNA, 20 nt, Artificial Sequence
  Synthetic
gagaggaaaucaggaaggcu

SEQ ID NO: 725219 - RNA, 20 nt, Artificial Sequence
  Synthetic
gagagaagcgggggaaggcu

SEQ ID NO: 725220 - RNA, 20 nt, Artificial Sequence
  Synthetic
gacuuuaguggcaugaggcu

SEQ ID NO: 725221 - RNA, 20 nt, Artificial Sequence
  Synthetic
gaccauguugaagguaggcu

SEQ ID NO: 725222 - RNA, 20 nt, Artificial Sequence
  Synthetic
gacuacuaccacacagggcu

SEQ ID NO: 725223 - RNA, 20 nt, Artificial Sequence
  Synthetic
guugguuccuucugagggcu

SEQ ID NO: 725224 - RNA, 20 nt, Artificial Sequence
  Synthetic
gaauuaauagugguggggcu

SEQ ID NO: 725225 - RNA, 20 nt, Artificial Sequence
  Synthetic
guucaucuaggcacugggcu

SEQ ID NO: 725226 - RNA, 20 nt, Artificial Sequence
  Synthetic
gggcuuuuggggccugggcu

SEQ ID NO: 725227 - RNA, 20 nt, Artificial Sequence
  Synthetic
guggacagugaagcauggcu

SEQ ID NO: 725228 - RNA, 20 nt, Artificial Sequence
  Synthetic
gagugagucgagggauggcu

SEQ ID NO: 725229 - RNA, 20 nt, Artificial Sequence
  Synthetic
gauuaucauguacuauggcu

SEQ ID NO: 725230 - RNA, 20 nt, Artificial Sequence
  Synthetic
gaaucagaagcucuauggcu

SEQ ID NO: 725231 - RNA, 20 nt, Artificial Sequence
  Synthetic
guuuugguuccuguauggcu

SEQ ID NO: 725232 - RNA, 20 nt, Artificial Sequence
  Synthetic
gacucaaaagucuacuggcu

SEQ ID NO: 725233 - RNA, 20 nt, Artificial Sequence
  Synthetic
gggcuuugcugccgcuggcu

SEQ ID NO: 725234 - RNA, 20 nt, Artificial Sequence
  Synthetic
gcagguugccgcugcuggcu

SEQ ID NO: 725235 - RNA, 20 nt, Artificial Sequence
  Synthetic
gcuguucacgaucaguggcu

SEQ ID NO: 725236 - RNA, 20 nt, Artificial Sequence
  Synthetic
gucaagagaugacuguggcu

SEQ ID NO: 725237 - RNA, 20 nt, Artificial Sequence
  Synthetic
gcugcaccuugccuguggcu

SEQ ID NO: 725238 - RNA, 20 nt, Artificial Sequence
  Synthetic
gucugcauuccuguguggcu

SEQ ID NO: 725239 - RNA, 20 nt, Artificial Sequence
  Synthetic
gugcagaacucuguguggcu

SEQ ID NO: 725240 - RNA, 20 nt, Artificial Sequence
  Synthetic
ggcuugcuugucuauuggcu

SEQ ID NO: 725241 - RNA, 20 nt, Artificial Sequence
  Synthetic
gaaucugaaggaacuuggcu

SEQ ID NO: 725242 - RNA, 20 nt, Artificial Sequence
  Synthetic
gggguuucaccaaguuggcu

SEQ ID NO: 725243 - RNA, 20 nt, Artificial Sequence
  Synthetic
gggguuucaccauguuggcu

SEQ ID NO: 725244 - RNA, 20 nt, Artificial Sequence
  Synthetic
ggaguuuugccauguuggcu

SEQ ID NO: 725245 - RNA, 20 nt, Artificial Sequence
  Synthetic
ggacccagaaagauuuggcu

SEQ ID NO: 725246 - RNA, 20 nt, Artificial Sequence
  Synthetic
gcuaaauguuuacuuuggcu

SEQ ID NO: 725247 - RNA, 20 nt, Artificial Sequence
  Synthetic
gcagagcuguugcuuuggcu

SEQ ID NO: 725248 - RNA, 20 nt, Artificial Sequence
  Synthetic
gaaaagggauaccaaaugcu

SEQ ID NO: 725249 - RNA, 20 nt, Artificial Sequence
  Synthetic
ggugguaugccagaaaugcu

SEQ ID NO: 725250 - RNA, 20 nt, Artificial Sequence
  Synthetic
gugugacaauuuagcaugcu

SEQ ID NO: 725251 - RNA, 20 nt, Artificial Sequence
  Synthetic
gauugccacaaauucaugcu

SEQ ID NO: 725252 - RNA, 20 nt, Artificial Sequence
  Synthetic
ggaaauagucaauucaugcu

SEQ ID NO: 725253 - RNA, 20 nt, Artificial Sequence
  Synthetic
gaagaaagacugaagaugcu

SEQ ID NO: 725254 - RNA, 20 nt, Artificial Sequence
  Synthetic
gggaguaacagaaugaugcu

SEQ ID NO: 725255 - RNA, 20 nt, Artificial Sequence
  Synthetic
gggaaucucugugauaugcu

SEQ ID NO: 725256 - RNA, 20 nt, Artificial Sequence
  Synthetic
gaaauggaggucaguaugcu

SEQ ID NO: 725257 - RNA, 20 nt, Artificial Sequence
  Synthetic
gauguauggaauguuaugcu

SEQ ID NO: 725258 - RNA, 20 nt, Artificial Sequence
  Synthetic
gucaagguaggacaacugcu

SEQ ID NO: 725259 - RNA, 20 nt, Artificial Sequence
  Synthetic
gauccagcaaucccacugcu

SEQ ID NO: 725260 - RNA, 20 nt, Artificial Sequence
  Synthetic
ggauugauuuaaauacugcu

SEQ ID NO: 725261 - RNA, 20 nt, Artificial Sequence
  Synthetic
gccagcagcggcaaccugcu

SEQ ID NO: 725262 - RNA, 20 nt, Artificial Sequence
  Synthetic
ggugucugucaaccccugcu

SEQ ID NO: 725263 - RNA, 20 nt, Artificial Sequence
  Synthetic
ggaagaagccacugccugcu

SEQ ID NO: 725264 - RNA, 20 nt, Artificial Sequence
  Synthetic
gcuaacucccuccuccugcu

SEQ ID NO: 725265 - RNA, 20 nt, Artificial Sequence
  Synthetic
ggaagucaggugaagcugcu

SEQ ID NO: 725266 - RNA, 20 nt, Artificial Sequence
  Synthetic
gacuuaguuccccagcugcu

SEQ ID NO: 725267 - RNA, 20 nt, Artificial Sequence
  Synthetic
guuacccuuuuauugcugcu

SEQ ID NO: 725268 - RNA, 20 nt, Artificial Sequence
  Synthetic
gugauccuucuuuugcugcu

SEQ ID NO: 725269 - RNA, 20 nt, Artificial Sequence
  Synthetic
gauacacuguucccucugcu

SEQ ID NO: 725270 - RNA, 20 nt, Artificial Sequence
  Synthetic
gagccucaguuuugucugcu

SEQ ID NO: 725271 - RNA, 20 nt, Artificial Sequence
  Synthetic
gucucugagauaauucugcu

SEQ ID NO: 725272 - RNA, 20 nt, Artificial Sequence
  Synthetic
ccucagccucccaaagugcu

SEQ ID NO: 725273 - RNA, 20 nt, Artificial Sequence
  Synthetic
guuauuucuggggcagugcu

SEQ ID NO: 725274 - RNA, 20 nt, Artificial Sequence
  Synthetic
gagugagaacaugcagugcu

SEQ ID NO: 725275 - RNA, 20 nt, Artificial Sequence
  Synthetic
gucaggaaacaucaggugcu

SEQ ID NO: 725276 - RNA, 20 nt, Artificial Sequence
  Synthetic
gauaugugguuacaauugcu

SEQ ID NO: 725277 - RNA, 20 nt, Artificial Sequence
  Synthetic
gucaggauucaugcauugcu

SEQ ID NO: 725278 - RNA, 20 nt, Artificial Sequence
  Synthetic
gauguacaucauagauugcu

SEQ ID NO: 725279 - RNA, 20 nt, Artificial Sequence
  Synthetic
gaugaggcgggaggauugcu

SEQ ID NO: 725280 - RNA, 20 nt, Artificial Sequence
  Synthetic
gcuuucugccuuguauugcu

SEQ ID NO: 725281 - RNA, 20 nt, Artificial Sequence
  Synthetic
gacagaaagccauuauugcu

SEQ ID NO: 725282 - RNA, 20 nt, Artificial Sequence
  Synthetic
guugggaaauauuacuugcu

SEQ ID NO: 725283 - RNA, 20 nt, Artificial Sequence
  Synthetic
gauuaugucacuaccuugcu

SEQ ID NO: 725284 - RNA, 20 nt, Artificial Sequence
  Synthetic
gaagugcaguggcccuugcu

SEQ ID NO: 725285 - RNA, 20 nt, Artificial Sequence
  Synthetic
gagauuuuccucagcuugcu

SEQ ID NO: 725286 - RNA, 20 nt, Artificial Sequence
  Synthetic
guuauucugauggucuugcu

SEQ ID NO: 725287 - RNA, 20 nt, Artificial Sequence
  Synthetic
gaauguuggccugucuugcu

SEQ ID NO: 725288 - RNA, 20 nt, Artificial Sequence
  Synthetic
gaauaggaagcagaguugcu

SEQ ID NO: 725289 - RNA, 20 nt, Artificial Sequence
  Synthetic
guguggcacaggcauuugcu

SEQ ID NO: 725290 - RNA, 20 nt, Artificial Sequence
  Synthetic
ggggcuuuuccuccuuugcu

SEQ ID NO: 725291 - RNA, 20 nt, Artificial Sequence
  Synthetic
guuuucaaauuugcuuugcu

SEQ ID NO: 725292 - RNA, 20 nt, Artificial Sequence
  Synthetic
guuauugguugagguuugcu

SEQ ID NO: 725293 - RNA, 20 nt, Artificial Sequence
  Synthetic
gcugaaggauauguuuugcu

SEQ ID NO: 725294 - RNA, 20 nt, Artificial Sequence
  Synthetic
gacagcacacacaaaaaucu

SEQ ID NO: 725295 - RNA, 20 nt, Artificial Sequence
  Synthetic
gcuauccaguaacaaaaucu

SEQ ID NO: 725296 - RNA, 20 nt, Artificial Sequence
  Synthetic
ggacauauuauuuaaaaucu

SEQ ID NO: 725297 - RNA, 20 nt, Artificial Sequence
  Synthetic
gaaacaacaguggcaaaucu

SEQ ID NO: 725298 - RNA, 20 nt, Artificial Sequence
  Synthetic
gugguuggcuucagaaaucu

SEQ ID NO: 725299 - RNA, 20 nt, Artificial Sequence
  Synthetic
ggagcgcaauggcacaaucu

SEQ ID NO: 725300 - RNA, 20 nt, Artificial Sequence
  Synthetic
ggaaugcaauggcacaaucu

SEQ ID NO: 725301 - RNA, 20 nt, Artificial Sequence
  Synthetic
ggagugcaauggcacaaucu

SEQ ID NO: 725302 - RNA, 20 nt, Artificial Sequence
  Synthetic
gaguugcaauggcacaaucu

SEQ ID NO: 725303 - RNA, 20 nt, Artificial Sequence
  Synthetic
gcucuaaauuuagacaaucu

SEQ ID NO: 725304 - RNA, 20 nt, Artificial Sequence
  Synthetic
gugacuuaaauguacaaucu

SEQ ID NO: 725305 - RNA, 20 nt, Artificial Sequence
  Synthetic
gcuuuuaacuaaagcaaucu

SEQ ID NO: 725306 - RNA, 20 nt, Artificial Sequence
  Synthetic
ggagugcaauggcgcaaucu

SEQ ID NO: 725307 - RNA, 20 nt, Artificial Sequence
  Synthetic
ggagugcaguggcgcaaucu

SEQ ID NO: 725308 - RNA, 20 nt, Artificial Sequence
  Synthetic
gccugaacguacugcaaucu

SEQ ID NO: 725309 - RNA, 20 nt, Artificial Sequence
  Synthetic
gcaguggcgcagugcaaucu

SEQ ID NO: 725310 - RNA, 20 nt, Artificial Sequence
  Synthetic
ggagugcaguggugcaaucu

SEQ ID NO: 725311 - RNA, 20 nt, Artificial Sequence
  Synthetic
guuauuauaauuaagaaucu

SEQ ID NO: 725312 - RNA, 20 nt, Artificial Sequence
  Synthetic
guagcaaauaaacagaaucu

SEQ ID NO: 725313 - RNA, 20 nt, Artificial Sequence
  Synthetic
gagagagagagagagaaucu

SEQ ID NO: 725314 - RNA, 20 nt, Artificial Sequence
  Synthetic
ggaacuugcuuuacgaaucu

SEQ ID NO: 725315 - RNA, 20 nt, Artificial Sequence
  Synthetic
gacuccugcuaggggaaucu

SEQ ID NO: 725316 - RNA, 20 nt, Artificial Sequence
  Synthetic
gaaguaacccagaugaaucu

SEQ ID NO: 725317 - RNA, 20 nt, Artificial Sequence
  Synthetic
gagggacagaugcauaaucu

SEQ ID NO: 725318 - RNA, 20 nt, Artificial Sequence
  Synthetic
gaagugacaccgucuaaucu

SEQ ID NO: 725319 - RNA, 20 nt, Artificial Sequence
  Synthetic
gccucaggaaggaaacaucu

SEQ ID NO: 725320 - RNA, 20 nt, Artificial Sequence
  Synthetic
gucuagaaauaagaacaucu

SEQ ID NO: 725321 - RNA, 20 nt, Artificial Sequence
  Synthetic
ggaucccucccaugacaucu

SEQ ID NO: 725322 - RNA, 20 nt, Artificial Sequence
  Synthetic
guacauccuacuauacaucu

SEQ ID NO: 725323 - RNA, 20 nt, Artificial Sequence
  Synthetic
gaaaugccuauuauacaucu

SEQ ID NO: 725324 - RNA, 20 nt, Artificial Sequence
  Synthetic
guagagcuguuacuacaucu

SEQ ID NO: 725325 - RNA, 20 nt, Artificial Sequence
  Synthetic
guacguagaaacguacaucu

SEQ ID NO: 725326 - RNA, 20 nt, Artificial Sequence
  Synthetic
gaagugcaguggcaccaucu

SEQ ID NO: 725327 - RNA, 20 nt, Artificial Sequence
  Synthetic
ggaaguugauuucaccaucu

SEQ ID NO: 725328 - RNA, 20 nt, Artificial Sequence
  Synthetic
gagacaggguuucaccaucu

SEQ ID NO: 725329 - RNA, 20 nt, Artificial Sequence
  Synthetic
gagacgguguuucaccaucu

SEQ ID NO: 725330 - RNA, 20 nt, Artificial Sequence
  Synthetic
gcagcuagauggucccaucu

SEQ ID NO: 725331 - RNA, 20 nt, Artificial Sequence
  Synthetic
ggagugcaguggcgccaucu

SEQ ID NO: 725332 - RNA, 20 nt, Artificial Sequence
  Synthetic
gagauaccuaguggccaucu

SEQ ID NO: 725333 - RNA, 20 nt, Artificial Sequence
  Synthetic
gacagagugagacuccaucu

SEQ ID NO: 725334 - RNA, 20 nt, Artificial Sequence
  Synthetic
ggcugaugguaucuccaucu

SEQ ID NO: 725335 - RNA, 20 nt, Artificial Sequence
  Synthetic
gaggauucugucuugcaucu

SEQ ID NO: 725336 - RNA, 20 nt, Artificial Sequence
  Synthetic
gaagacuuugucuugcaucu

SEQ ID NO: 725337 - RNA, 20 nt, Artificial Sequence
  Synthetic
guugacuaaguaaaucaucu

SEQ ID NO: 725338 - RNA, 20 nt, Artificial Sequence
  Synthetic
gcuauuauugucucucaucu

SEQ ID NO: 725339 - RNA, 20 nt, Artificial Sequence
  Synthetic
gaaaucuuuuauugucaucu

SEQ ID NO: 725340 - RNA, 20 nt, Artificial Sequence
  Synthetic
gauaaagugaagcuucaucu

SEQ ID NO: 725341 - RNA, 20 nt, Artificial Sequence
  Synthetic
gauacgucauuuguucaucu

SEQ ID NO: 725342 - RNA, 20 nt, Artificial Sequence
  Synthetic
ggagagcaguggcaagaucu

SEQ ID NO: 725343 - RNA, 20 nt, Artificial Sequence
  Synthetic
ggagugcaauggccagaucu

SEQ ID NO: 725344 - RNA, 20 nt, Artificial Sequence
  Synthetic
ggaaugcaguggugagaucu

SEQ ID NO: 725345 - RNA, 20 nt, Artificial Sequence
  Synthetic
ggagugcaguggugagaucu

SEQ ID NO: 725346 - RNA, 20 nt, Artificial Sequence
  Synthetic
gcuucugauucaguagaucu

SEQ ID NO: 725347 - RNA, 20 nt, Artificial Sequence
  Synthetic
ggaguacaauggcacgaucu

SEQ ID NO: 725348 - RNA, 20 nt, Artificial Sequence
  Synthetic
ggagugcaauggcacgaucu

SEQ ID NO: 725349 - RNA, 20 nt, Artificial Sequence
  Synthetic
ggagugcaguggcacgaucu

SEQ ID NO: 725350 - RNA, 20 nt, Artificial Sequence
  Synthetic
ggagugcaacagcgcgaucu

SEQ ID NO: 725351 - RNA, 20 nt, Artificial Sequence
  Synthetic
ggagugcagcggcgcgaucu

SEQ ID NO: 725352 - RNA, 20 nt, Artificial Sequence
  Synthetic
ggagcacaguggcgcgaucu

SEQ ID NO: 725353 - RNA, 20 nt, Artificial Sequence
  Synthetic
ggaguacaguggcgcgaucu

SEQ ID NO: 725354 - RNA, 20 nt, Artificial Sequence
  Synthetic
ggagugcaguggcgcgaucu

SEQ ID NO: 725355 - RNA, 20 nt, Artificial Sequence
  Synthetic
ggggugcaguggcgcgaucu

SEQ ID NO: 725356 - RNA, 20 nt, Artificial Sequence
  Synthetic
ggagugcgguggcgcgaucu

SEQ ID NO: 725357 - RNA, 20 nt, Artificial Sequence
  Synthetic
ggagugcagcggugcgaucu

SEQ ID NO: 725358 - RNA, 20 nt, Artificial Sequence
  Synthetic
ggaguacaauggugcgaucu

SEQ ID NO: 725359 - RNA, 20 nt, Artificial Sequence
  Synthetic
ggagugcaauggugcgaucu

SEQ ID NO: 725360 - RNA, 20 nt, Artificial Sequence
  Synthetic
ggggugcaauggugcgaucu

SEQ ID NO: 725361 - RNA, 20 nt, Artificial Sequence
  Synthetic
ggagugaaguggugcgaucu

SEQ ID NO: 725362 - RNA, 20 nt, Artificial Sequence
  Synthetic
gcagugcaguggugcgaucu

SEQ ID NO: 725363 - RNA, 20 nt, Artificial Sequence
  Synthetic
ggagugcaguggugcgaucu

SEQ ID NO: 725364 - RNA, 20 nt, Artificial Sequence
  Synthetic
guagugcaguggugcgaucu

SEQ ID NO: 725365 - RNA, 20 nt, Artificial Sequence
  Synthetic
ggagugcagugacucgaucu

SEQ ID NO: 725366 - RNA, 20 nt, Artificial Sequence
  Synthetic
gagaacaaucccaaggaucu

SEQ ID NO: 725367 - RNA, 20 nt, Artificial Sequence
  Synthetic
ggaguggaguggcaggaucu

SEQ ID NO: 725368 - RNA, 20 nt, Artificial Sequence
  Synthetic
ggagugcaguggcgggaucu

SEQ ID NO: 725369 - RNA, 20 nt, Artificial Sequence
  Synthetic
gcgauuccucugauggaucu

SEQ ID NO: 725370 - RNA, 20 nt, Artificial Sequence
  Synthetic
ggagugcagcggcaugaucu

SEQ ID NO: 725371 - RNA, 20 nt, Artificial Sequence
  Synthetic
ggaguauagcggcaugaucu

SEQ ID NO: 725372 - RNA, 20 nt, Artificial Sequence
  Synthetic
ggagugcaguggcaugaucu

SEQ ID NO: 725373 - RNA, 20 nt, Artificial Sequence
  Synthetic
gaagugcagugguaugaucu

SEQ ID NO: 725374 - RNA, 20 nt, Artificial Sequence
  Synthetic
ggagugcaguggucugaucu

SEQ ID NO: 725375 - RNA, 20 nt, Artificial Sequence
  Synthetic
ggagugcaguggcgugaucu

SEQ ID NO: 725376 - RNA, 20 nt, Artificial Sequence
  Synthetic
gauaccuucaucugugaucu

SEQ ID NO: 725377 - RNA, 20 nt, Artificial Sequence
  Synthetic
ggagugcaauggugugaucu

SEQ ID NO: 725378 - RNA, 20 nt, Artificial Sequence
  Synthetic
ggagugcaguggugugaucu

SEQ ID NO: 725379 - RNA, 20 nt, Artificial Sequence
  Synthetic
ggagugcaguggcuugaucu

SEQ ID NO: 725380 - RNA, 20 nt, Artificial Sequence
  Synthetic
gauucuuguccuuuugaucu

SEQ ID NO: 725381 - RNA, 20 nt, Artificial Sequence
  Synthetic
gacuauaaaauaaaauaucu

SEQ ID NO: 725382 - RNA, 20 nt, Artificial Sequence
  Synthetic
ggguacuaggcuuaauaucu

SEQ ID NO: 725383 - RNA, 20 nt, Artificial Sequence
  Synthetic
gcaugcugggcuuaauaucu

SEQ ID NO: 725384 - RNA, 20 nt, Artificial Sequence
  Synthetic
gauuaaaaacaaugauaucu

SEQ ID NO: 725385 - RNA, 20 nt, Artificial Sequence
  Synthetic
gcuaugcuguauugauaucu

SEQ ID NO: 725386 - RNA, 20 nt, Artificial Sequence
  Synthetic
guaaaugagaugauauaucu

SEQ ID NO: 725387 - RNA, 20 nt, Artificial Sequence
  Synthetic
gacagucauauauuauaucu

SEQ ID NO: 725388 - RNA, 20 nt, Artificial Sequence
  Synthetic
ggcauuuacauaaacuaucu

SEQ ID NO: 725389 - RNA, 20 nt, Artificial Sequence
  Synthetic
ggguacuauguucacuaucu

SEQ ID NO: 725390 - RNA, 20 nt, Artificial Sequence
  Synthetic
ggagugcaguggugcuaucu

SEQ ID NO: 725391 - RNA, 20 nt, Artificial Sequence
  Synthetic
ggggacucuaauaaguaucu

SEQ ID NO: 725392 - RNA, 20 nt, Artificial Sequence
  Synthetic
gugcauuauuaagaguaucu

SEQ ID NO: 725393 - RNA, 20 nt, Artificial Sequence
  Synthetic
gguaucccacguauguaucu

SEQ ID NO: 725394 - RNA, 20 nt, Artificial Sequence
  Synthetic
gaauuuccaauuguguaucu

SEQ ID NO: 725395 - RNA, 20 nt, Artificial Sequence
  Synthetic
gucagucuguaaaauuaucu

SEQ ID NO: 725396 - RNA, 20 nt, Artificial Sequence
  Synthetic
guggagcucacccauuaucu

SEQ ID NO: 725397 - RNA, 20 nt, Artificial Sequence
  Synthetic
gaccuugaauuugauuaucu

SEQ ID NO: 725398 - RNA, 20 nt, Artificial Sequence
  Synthetic
gcuuugugaagagcuuaucu

SEQ ID NO: 725399 - RNA, 20 nt, Artificial Sequence
  Synthetic
gcuaugacuagaaguuaucu

SEQ ID NO: 725400 - RNA, 20 nt, Artificial Sequence
  Synthetic
gggccugagaacauuuaucu

SEQ ID NO: 725401 - RNA, 20 nt, Artificial Sequence
  Synthetic
guaacugaauguaaaacucu

SEQ ID NO: 725402 - RNA, 20 nt, Artificial Sequence
  Synthetic
guacucaguuuccaaacucu

SEQ ID NO: 725403 - RNA, 20 nt, Artificial Sequence
  Synthetic
gcuaguaaaucagaaacucu

SEQ ID NO: 725404 - RNA, 20 nt, Artificial Sequence
  Synthetic
gaauaacagaaauaaacucu

SEQ ID NO: 725405 - RNA, 20 nt, Artificial Sequence
  Synthetic
gacaagaugagaggaacucu

SEQ ID NO: 725406 - RNA, 20 nt, Artificial Sequence
  Synthetic
gagauggguucuugaacucu

SEQ ID NO: 725407 - RNA, 20 nt, Artificial Sequence
  Synthetic
ggucuaguaaaauuaacucu

SEQ ID NO: 725408 - RNA, 20 nt, Artificial Sequence
  Synthetic
gaaggggaacaucacacucu

SEQ ID NO: 725409 - RNA, 20 nt, Artificial Sequence
  Synthetic
gaaugggaacaucacacucu

SEQ ID NO: 725410 - RNA, 20 nt, Artificial Sequence
  Synthetic
gaaggggaauaucacacucu

SEQ ID NO: 725411 - RNA, 20 nt, Artificial Sequence
  Synthetic
gccuguaaucccagcacucu

SEQ ID NO: 725412 - RNA, 20 nt, Artificial Sequence
  Synthetic
gugcugcuacuccucacucu

SEQ ID NO: 725413 - RNA, 20 nt, Artificial Sequence
  Synthetic
gaauaaaauaaucucacucu

SEQ ID NO: 725414 - RNA, 20 nt, Artificial Sequence
  Synthetic
gguagacagucagagacucu

SEQ ID NO: 725415 - RNA, 20 nt, Artificial Sequence
  Synthetic
gaaaaugcagcuaauacucu

SEQ ID NO: 725416 - RNA, 20 nt, Artificial Sequence
  Synthetic
gacuuauuuuaauauacucu

SEQ ID NO: 725417 - RNA, 20 nt, Artificial Sequence
  Synthetic
gggaaaccuccugcuacucu

SEQ ID NO: 725418 - RNA, 20 nt, Artificial Sequence
  Synthetic
ggcaugugagugagcccucu

SEQ ID NO: 725419 - RNA, 20 nt, Artificial Sequence
  Synthetic
gugcaucucaugugcccucu

SEQ ID NO: 725420 - RNA, 20 nt, Artificial Sequence
  Synthetic
gcuucaccugacuucccucu

SEQ ID NO: 725421 - RNA, 20 nt, Artificial Sequence
  Synthetic
gcauguuccauguucccucu

SEQ ID NO: 725422 - RNA, 20 nt, Artificial Sequence
  Synthetic
gaacaaauucaucagccucu

SEQ ID NO: 725423 - RNA, 20 nt, Artificial Sequence
  Synthetic
guuccccuuuuucugccucu

SEQ ID NO: 725424 - RNA, 20 nt, Artificial Sequence
  Synthetic
gaagauugucccaaagcucu

SEQ ID NO: 725425 - RNA, 20 nt, Artificial Sequence
  Synthetic
gcaggaggcagagaagcucu

SEQ ID NO: 725426 - RNA, 20 nt, Artificial Sequence
  Synthetic
gccugguaagaagcagcucu

SEQ ID NO: 725427 - RNA, 20 nt, Artificial Sequence
  Synthetic
gauccugaugaaggagcucu

SEQ ID NO: 725428 - RNA, 20 nt, Artificial Sequence
  Synthetic
gcugcaaagugaauagcucu

SEQ ID NO: 725429 - RNA, 20 nt, Artificial Sequence
  Synthetic
gcccccaguggcauagcucu

SEQ ID NO: 725430 - RNA, 20 nt, Artificial Sequence
  Synthetic
guuucugauuuacuagcucu

SEQ ID NO: 725431 - RNA, 20 nt, Artificial Sequence
  Synthetic
gacauauuccucagggcucu

SEQ ID NO: 725432 - RNA, 20 nt, Artificial Sequence
  Synthetic
gcacauagcaggggggcucu

SEQ ID NO: 725433 - RNA, 20 nt, Artificial Sequence
  Synthetic
ggaaaggcuagauaugcucu

SEQ ID NO: 725434 - RNA, 20 nt, Artificial Sequence
  Synthetic
guuagugcucuaggugcucu

SEQ ID NO: 725435 - RNA, 20 nt, Artificial Sequence
  Synthetic
gcaggacucaaaguugcucu

SEQ ID NO: 725436 - RNA, 20 nt, Artificial Sequence
  Synthetic
gcuuggagccugguugcucu

SEQ ID NO: 725437 - RNA, 20 nt, Artificial Sequence
  Synthetic
gaagacagagacuuugcucu

SEQ ID NO: 725438 - RNA, 20 nt, Artificial Sequence
  Synthetic
ggcauaaaaacaaaaucucu

SEQ ID NO: 725439 - RNA, 20 nt, Artificial Sequence
  Synthetic
gcuuauuuauuugaaucucu

SEQ ID NO: 725440 - RNA, 20 nt, Artificial Sequence
  Synthetic
gcugaggugacaugaucucu

SEQ ID NO: 725441 - RNA, 20 nt, Artificial Sequence
  Synthetic
guuuagcuaugcuuaucucu

SEQ ID NO: 725442 - RNA, 20 nt, Artificial Sequence
  Synthetic
gauuuagcaaucuuaucucu

SEQ ID NO: 725443 - RNA, 20 nt, Artificial Sequence
  Synthetic
gauacaguccuugacucucu

SEQ ID NO: 725444 - RNA, 20 nt, Artificial Sequence
  Synthetic
gaaauucuauugaccucucu

SEQ ID NO: 725445 - RNA, 20 nt, Artificial Sequence
  Synthetic
gccuagcuuccagccucucu

SEQ ID NO: 725446 - RNA, 20 nt, Artificial Sequence
  Synthetic
guaaauagucauugcucucu

SEQ ID NO: 725447 - RNA, 20 nt, Artificial Sequence
  Synthetic
gcuccuuuaaaacucucucu

SEQ ID NO: 725448 - RNA, 20 nt, Artificial Sequence
  Synthetic
guggacauuagaaagucucu

SEQ ID NO: 725449 - RNA, 20 nt, Artificial Sequence
  Synthetic
gccuguaaucccaggucucu

SEQ ID NO: 725450 - RNA, 20 nt, Artificial Sequence
  Synthetic
guuucagugguagggucucu

SEQ ID NO: 725451 - RNA, 20 nt, Artificial Sequence
  Synthetic
guaugagcagcagugucucu

SEQ ID NO: 725452 - RNA, 20 nt, Artificial Sequence
  Synthetic
gaugcaugaagauugucucu

SEQ ID NO: 725453 - RNA, 20 nt, Artificial Sequence
  Synthetic
gcagaaggugccccuucucu

SEQ ID NO: 725454 - RNA, 20 nt, Artificial Sequence
  Synthetic
ggacuuccauuuaguucucu

SEQ ID NO: 725455 - RNA, 20 nt, Artificial Sequence
  Synthetic
gauacugucaaauguucucu

SEQ ID NO: 725456 - RNA, 20 nt, Artificial Sequence
  Synthetic
gugcacaugaaauuuucucu

SEQ ID NO: 725457 - RNA, 20 nt, Artificial Sequence
  Synthetic
gacuuccccuacuaaagucu

SEQ ID NO: 725458 - RNA, 20 nt, Artificial Sequence
  Synthetic
ggaaaagcucuuuaaagucu

SEQ ID NO: 725459 - RNA, 20 nt, Artificial Sequence
  Synthetic
guuuuguuuaaaugaagucu

SEQ ID NO: 725460 - RNA, 20 nt, Artificial Sequence
  Synthetic
gacuucuucuacugaagucu

SEQ ID NO: 725461 - RNA, 20 nt, Artificial Sequence
  Synthetic
ggagugcgguggcacagucu

SEQ ID NO: 725462 - RNA, 20 nt, Artificial Sequence
  Synthetic
guaaaccugagaggcagucu

SEQ ID NO: 725463 - RNA, 20 nt, Artificial Sequence
  Synthetic
gggcuguugcaggucagucu

SEQ ID NO: 725464 - RNA, 20 nt, Artificial Sequence
  Synthetic
gcugccaguauggagagucu

SEQ ID NO: 725465 - RNA, 20 nt, Artificial Sequence
  Synthetic
guccauuggcauaugagucu

SEQ ID NO: 725466 - RNA, 20 nt, Artificial Sequence
  Synthetic
gcauacuuggcuuugagucu

SEQ ID NO: 725467 - RNA, 20 nt, Artificial Sequence
  Synthetic
gaaacuaugguuuauagucu

SEQ ID NO: 725468 - RNA, 20 nt, Artificial Sequence
  Synthetic
gggugguacuaucuuagucu

SEQ ID NO: 725469 - RNA, 20 nt, Artificial Sequence
  Synthetic
gucagcccuugucuuagucu

SEQ ID NO: 725470 - RNA, 20 nt, Artificial Sequence
  Synthetic
ggacaucagaagccacgucu

SEQ ID NO: 725471 - RNA, 20 nt, Artificial Sequence
  Synthetic
gcuucuaauuggggaggucu

SEQ ID NO: 725472 - RNA, 20 nt, Artificial Sequence
  Synthetic
gaugcugauucaguaggucu

SEQ ID NO: 725473 - RNA, 20 nt, Artificial Sequence
  Synthetic
gacccugagaacaggggucu

SEQ ID NO: 725474 - RNA, 20 nt, Artificial Sequence
  Synthetic
guuguaugcaagaggggucu

SEQ ID NO: 725475 - RNA, 20 nt, Artificial Sequence
  Synthetic
gauugugauucagugggucu

SEQ ID NO: 725476 - RNA, 20 nt, Artificial Sequence
  Synthetic
gaacuggugggaaauggucu

SEQ ID NO: 725477 - RNA, 20 nt, Artificial Sequence
  Synthetic
gagguggguucccauggucu

SEQ ID NO: 725478 - RNA, 20 nt, Artificial Sequence
  Synthetic
gagcuccaugacauuggucu

SEQ ID NO: 725479 - RNA, 20 nt, Artificial Sequence
  Synthetic
gaaguuuuauuucuuggucu

SEQ ID NO: 725480 - RNA, 20 nt, Artificial Sequence
  Synthetic
gguugaaaagaaguuggucu

SEQ ID NO: 725481 - RNA, 20 nt, Artificial Sequence
  Synthetic
guuucugugucaguuggucu

SEQ ID NO: 725482 - RNA, 20 nt, Artificial Sequence
  Synthetic
guuccugauucaaaaugucu

SEQ ID NO: 725483 - RNA, 20 nt, Artificial Sequence
  Synthetic
gaauguugucuuaaaugucu

SEQ ID NO: 725484 - RNA, 20 nt, Artificial Sequence
  Synthetic
ggagauaaggaacaaugucu

SEQ ID NO: 725485 - RNA, 20 nt, Artificial Sequence
  Synthetic
guuccuaaaauauaaugucu

SEQ ID NO: 725486 - RNA, 20 nt, Artificial Sequence
  Synthetic
gaucaugauucuguaugucu

SEQ ID NO: 725487 - RNA, 20 nt, Artificial Sequence
  Synthetic
ggacacuagagccacugucu

SEQ ID NO: 725488 - RNA, 20 nt, Artificial Sequence
  Synthetic
gucucuuguaugaccugucu

SEQ ID NO: 725489 - RNA, 20 nt, Artificial Sequence
  Synthetic
gucuggcuuucagccugucu

SEQ ID NO: 725490 - RNA, 20 nt, Artificial Sequence
  Synthetic
ggacugcagugcugcugucu

SEQ ID NO: 725491 - RNA, 20 nt, Artificial Sequence
  Synthetic
ggagugcaguggugcugucu

SEQ ID NO: 725492 - RNA, 20 nt, Artificial Sequence
  Synthetic
gugggaaaagcauagugucu

SEQ ID NO: 725493 - RNA, 20 nt, Artificial Sequence
  Synthetic
gugcuuagaaguuagugucu

SEQ ID NO: 725494 - RNA, 20 nt, Artificial Sequence
  Synthetic
ggcugaaaaucacauugucu

SEQ ID NO: 725495 - RNA, 20 nt, Artificial Sequence
  Synthetic
guuuugaaguuacauugucu

SEQ ID NO: 725496 - RNA, 20 nt, Artificial Sequence
  Synthetic
gcacauacuuccuauugucu

SEQ ID NO: 725497 - RNA, 20 nt, Artificial Sequence
  Synthetic
guuugauugcucaaaauucu

SEQ ID NO: 725498 - RNA, 20 nt, Artificial Sequence
  Synthetic
gugggcuuagacacaauucu

SEQ ID NO: 725499 - RNA, 20 nt, Artificial Sequence
  Synthetic
gggaaugaagggacaauucu

SEQ ID NO: 725500 - RNA, 20 nt, Artificial Sequence
  Synthetic
gggauaaauuucucaauucu

SEQ ID NO: 725501 - RNA, 20 nt, Artificial Sequence
  Synthetic
guguuuaaauagagaauucu

SEQ ID NO: 725502 - RNA, 20 nt, Artificial Sequence
  Synthetic
gcugaauuuucccuaauucu

SEQ ID NO: 725503 - RNA, 20 nt, Artificial Sequence
  Synthetic
gaugcagcaaagaacauucu

SEQ ID NO: 725504 - RNA, 20 nt, Artificial Sequence
  Synthetic
guuugauccauugacauucu

SEQ ID NO: 725505 - RNA, 20 nt, Artificial Sequence
  Synthetic
guuaaauggauuuacauucu

SEQ ID NO: 725506 - RNA, 20 nt, Artificial Sequence
  Synthetic
guguuuucuccaagcauucu

SEQ ID NO: 725507 - RNA, 20 nt, Artificial Sequence
  Synthetic
gagaaaaggaagagcauucu

SEQ ID NO: 725508 - RNA, 20 nt, Artificial Sequence
  Synthetic
guacuucaacugugcauucu

SEQ ID NO: 725509 - RNA, 20 nt, Artificial Sequence
  Synthetic
gaaucuuagaagaucauucu

SEQ ID NO: 725510 - RNA, 20 nt, Artificial Sequence
  Synthetic
gggcuaucucugcucauucu

SEQ ID NO: 725511 - RNA, 20 nt, Artificial Sequence
  Synthetic
guaaauuaggaugagauucu

SEQ ID NO: 725512 - RNA, 20 nt, Artificial Sequence
  Synthetic
guguguguacacacgauucu

SEQ ID NO: 725513 - RNA, 20 nt, Artificial Sequence
  Synthetic
gagaacauagaagauauucu

SEQ ID NO: 725514 - RNA, 20 nt, Artificial Sequence
  Synthetic
gcucucuguuugucuauucu

SEQ ID NO: 725515 - RNA, 20 nt, Artificial Sequence
  Synthetic
gagguaggcaguauuauucu

SEQ ID NO: 725516 - RNA, 20 nt, Artificial Sequence
  Synthetic
gagggagaugagaaacuucu

SEQ ID NO: 725517 - RNA, 20 nt, Artificial Sequence
  Synthetic
gaauauuuuaauaaacuucu

SEQ ID NO: 725518 - RNA, 20 nt, Artificial Sequence
  Synthetic
gauggagauuaggaacuucu

SEQ ID NO: 725519 - RNA, 20 nt, Artificial Sequence
  Synthetic
ggcuucaaagccuaacuucu

SEQ ID NO: 725520 - RNA, 20 nt, Artificial Sequence
  Synthetic
guuccagaaaucccacuucu

SEQ ID NO: 725521 - RNA, 20 nt, Artificial Sequence
  Synthetic
gagguaacaauuccacuucu

SEQ ID NO: 725522 - RNA, 20 nt, Artificial Sequence
  Synthetic
gauccaauaauuccacuucu

SEQ ID NO: 725523 - RNA, 20 nt, Artificial Sequence
  Synthetic
guuugugauauuucacuucu

SEQ ID NO: 725524 - RNA, 20 nt, Artificial Sequence
  Synthetic
gcacugggcugccuacuucu

SEQ ID NO: 725525 - RNA, 20 nt, Artificial Sequence
  Synthetic
gcagucccucuucaccuucu

SEQ ID NO: 725526 - RNA, 20 nt, Artificial Sequence
  Synthetic
gaaaaaaaaaaaucccuucu

SEQ ID NO: 725527 - RNA, 20 nt, Artificial Sequence
  Synthetic
gauacuauuuacaaucuucu

SEQ ID NO: 725528 - RNA, 20 nt, Artificial Sequence
  Synthetic
gaagugacucggcaucuucu

SEQ ID NO: 725529 - RNA, 20 nt, Artificial Sequence
  Synthetic
gggacuggaugaagucuucu

SEQ ID NO: 725530 - RNA, 20 nt, Artificial Sequence
  Synthetic
guuuucagucagcaaguucu

SEQ ID NO: 725531 - RNA, 20 nt, Artificial Sequence
  Synthetic
guauuucacgauucaguucu

SEQ ID NO: 725532 - RNA, 20 nt, Artificial Sequence
  Synthetic
gagggauaauguauaguucu

SEQ ID NO: 725533 - RNA, 20 nt, Artificial Sequence
  Synthetic
guaauuuuccauuagguucu

SEQ ID NO: 725534 - RNA, 20 nt, Artificial Sequence
  Synthetic
guuugguaugguaugguucu

SEQ ID NO: 725535 - RNA, 20 nt, Artificial Sequence
  Synthetic
gaugauucauauuugguucu

SEQ ID NO: 725536 - RNA, 20 nt, Artificial Sequence
  Synthetic
gugcacgagggaaauguucu

SEQ ID NO: 725537 - RNA, 20 nt, Artificial Sequence
  Synthetic
gcuugguuucauuauguucu

SEQ ID NO: 725538 - RNA, 20 nt, Artificial Sequence
  Synthetic
gccuguucaaagucuguucu

SEQ ID NO: 725539 - RNA, 20 nt, Artificial Sequence
  Synthetic
gcagaggccaugaguguucu

SEQ ID NO: 725540 - RNA, 20 nt, Artificial Sequence
  Synthetic
gcuuuagaaaagauuguucu

SEQ ID NO: 725541 - RNA, 20 nt, Artificial Sequence
  Synthetic
gaauugauuguacuuguucu

SEQ ID NO: 725542 - RNA, 20 nt, Artificial Sequence
  Synthetic
gucugcugagagaaauuucu

SEQ ID NO: 725543 - RNA, 20 nt, Artificial Sequence
  Synthetic
gauaaccaauaauuauuucu

SEQ ID NO: 725544 - RNA, 20 nt, Artificial Sequence
  Synthetic
gauaggagcuaauuauuucu

SEQ ID NO: 725545 - RNA, 20 nt, Artificial Sequence
  Synthetic
guauaugugagcuuauuucu

SEQ ID NO: 725546 - RNA, 20 nt, Artificial Sequence
  Synthetic
gugaugcuagguuuauuucu

SEQ ID NO: 725547 - RNA, 20 nt, Artificial Sequence
  Synthetic
gagcucaaauuuuuauuucu

SEQ ID NO: 725548 - RNA, 20 nt, Artificial Sequence
  Synthetic
gggaaaaucaugcccuuucu

SEQ ID NO: 725549 - RNA, 20 nt, Artificial Sequence
  Synthetic
gaaucugagcaugccuuucu

SEQ ID NO: 725550 - RNA, 20 nt, Artificial Sequence
  Synthetic
guagaauauuuaggcuuucu

SEQ ID NO: 725551 - RNA, 20 nt, Artificial Sequence
  Synthetic
gcuggguuucugggcuuucu

SEQ ID NO: 725552 - RNA, 20 nt, Artificial Sequence
  Synthetic
gaucuugaugaauucuuucu

SEQ ID NO: 725553 - RNA, 20 nt, Artificial Sequence
  Synthetic
gcagggcucuuucaguuucu

SEQ ID NO: 725554 - RNA, 20 nt, Artificial Sequence
  Synthetic
gaccuacugcaaagguuucu

SEQ ID NO: 725555 - RNA, 20 nt, Artificial Sequence
  Synthetic
gcauagcaacaucuguuucu

SEQ ID NO: 725556 - RNA, 20 nt, Artificial Sequence
  Synthetic
ggauagcucucauauuuucu

SEQ ID NO: 725557 - RNA, 20 nt, Artificial Sequence
  Synthetic
gggcuuuuaacuuauuuucu

SEQ ID NO: 725558 - RNA, 20 nt, Artificial Sequence
  Synthetic
guacaaacauguuauuuucu

SEQ ID NO: 725559 - RNA, 20 nt, Artificial Sequence
  Synthetic
gcagaauuccuuccuuuucu

SEQ ID NO: 725560 - RNA, 20 nt, Artificial Sequence
  Synthetic
gagauacaagaggcuuuucu

SEQ ID NO: 725561 - RNA, 20 nt, Artificial Sequence
  Synthetic
gucuaucuucuuucuuuucu

SEQ ID NO: 725562 - RNA, 20 nt, Artificial Sequence
  Synthetic
ggauuauucaugaguuuucu

SEQ ID NO: 725563 - RNA, 20 nt, Artificial Sequence
  Synthetic
gcauuugaugacuguuuucu

SEQ ID NO: 725564 - RNA, 20 nt, Artificial Sequence
  Synthetic
gacauguuugugauuuuucu

SEQ ID NO: 725565 - RNA, 20 nt, Artificial Sequence
  Synthetic
guagaccuguuacuuuuucu

SEQ ID NO: 725566 - RNA, 20 nt, Artificial Sequence
  Synthetic
gaauuuguucauuuuuuucu

SEQ ID NO: 725567 - RNA, 20 nt, Artificial Sequence
  Synthetic
ggaaaaaaaguuuuuuuucu

SEQ ID NO: 725568 - RNA, 20 nt, Artificial Sequence
  Synthetic
guuugugaugcaaaaaaagu

SEQ ID NO: 725569 - RNA, 20 nt, Artificial Sequence
  Synthetic
ggccuuuuaaagaaaaaagu

SEQ ID NO: 725570 - RNA, 20 nt, Artificial Sequence
  Synthetic
gauaaccccauguaaaaagu

SEQ ID NO: 725571 - RNA, 20 nt, Artificial Sequence
  Synthetic
guaaauaucaucacaaaagu

SEQ ID NO: 725572 - RNA, 20 nt, Artificial Sequence
  Synthetic
ggaaauuguagaagaaaagu

SEQ ID NO: 725573 - RNA, 20 nt, Artificial Sequence
  Synthetic
ggcagaaugauaagaaaagu

SEQ ID NO: 725574 - RNA, 20 nt, Artificial Sequence
  Synthetic
ggaagcugcagcagaaaagu

SEQ ID NO: 725575 - RNA, 20 nt, Artificial Sequence
  Synthetic
ggaagucauuuucuaaaagu

SEQ ID NO: 725576 - RNA, 20 nt, Artificial Sequence
  Synthetic
gcauguucucgcuuaaaagu

SEQ ID NO: 725577 - RNA, 20 nt, Artificial Sequence
  Synthetic
guuuguauagggaccaaagu

SEQ ID NO: 725578 - RNA, 20 nt, Artificial Sequence
  Synthetic
guagggaaaccacucaaagu

SEQ ID NO: 725579 - RNA, 20 nt, Artificial Sequence
  Synthetic
gggggagucaaaaagaaagu

SEQ ID NO: 725580 - RNA, 20 nt, Artificial Sequence
  Synthetic
ggaaaugcuggaaagaaagu

SEQ ID NO: 725581 - RNA, 20 nt, Artificial Sequence
  Synthetic
gaaguagagaacaagaaagu

SEQ ID NO: 725582 - RNA, 20 nt, Artificial Sequence
  Synthetic
ggaugcgucaagcagaaagu

SEQ ID NO: 725583 - RNA, 20 nt, Artificial Sequence
  Synthetic
gaauuggaaagagagaaagu

SEQ ID NO: 725584 - RNA, 20 nt, Artificial Sequence
  Synthetic
gugauugaauccuggaaagu

SEQ ID NO: 725585 - RNA, 20 nt, Artificial Sequence
  Synthetic
gaagaaaugaaggauaaagu

SEQ ID NO: 725586 - RNA, 20 nt, Artificial Sequence
  Synthetic
gaagcucuccaccuuaaagu

SEQ ID NO: 725587 - RNA, 20 nt, Artificial Sequence
  Synthetic
guguaccuaggcaaacaagu

SEQ ID NO: 725588 - RNA, 20 nt, Artificial Sequence
  Synthetic
ggaucccucccacaacaagu

SEQ ID NO: 725589 - RNA, 20 nt, Artificial Sequence
  Synthetic
gagacgggguuucaccaagu

SEQ ID NO: 725590 - RNA, 20 nt, Artificial Sequence
  Synthetic
guguugugcuuaugccaagu

SEQ ID NO: 725591 - RNA, 20 nt, Artificial Sequence
  Synthetic
gccacaucuaagcugcaagu

SEQ ID NO: 725592 - RNA, 20 nt, Artificial Sequence
  Synthetic
ggauacugcugucaucaagu

SEQ ID NO: 725593 - RNA, 20 nt, Artificial Sequence
  Synthetic
gaaaaaucaacauaucaagu

SEQ ID NO: 725594 - RNA, 20 nt, Artificial Sequence
  Synthetic
gaguacccagccacucaagu

SEQ ID NO: 725595 - RNA, 20 nt, Artificial Sequence
  Synthetic
gacagacugccuucucaagu

SEQ ID NO: 725596 - RNA, 20 nt, Artificial Sequence
  Synthetic
ggauaagaaaaaugucaagu

SEQ ID NO: 725597 - RNA, 20 nt, Artificial Sequence
  Synthetic
gcuuugaugcauguucaagu

SEQ ID NO: 725598 - RNA, 20 nt, Artificial Sequence
  Synthetic
ggauuauaauauuuucaagu

SEQ ID NO: 725599 - RNA, 20 nt, Artificial Sequence
  Synthetic
gacagugguugaaaagaagu

SEQ ID NO: 725600 - RNA, 20 nt, Artificial Sequence
  Synthetic
gcacuuugggaggcagaagu

SEQ ID NO: 725601 - RNA, 20 nt, Artificial Sequence
  Synthetic
gaugagugaguuggagaagu

SEQ ID NO: 725602 - RNA, 20 nt, Artificial Sequence
  Synthetic
gacacauuuuuuugagaagu

SEQ ID NO: 725603 - RNA, 20 nt, Artificial Sequence
  Synthetic
gcacuuugggaggccgaagu

SEQ ID NO: 725604 - RNA, 20 nt, Artificial Sequence
  Synthetic
ggagaagcgcccagcgaagu

SEQ ID NO: 725605 - RNA, 20 nt, Artificial Sequence
  Synthetic
gcacuuugggaggcugaagu

SEQ ID NO: 725606 - RNA, 20 nt, Artificial Sequence
  Synthetic
gugaaaaagaaaagugaagu

SEQ ID NO: 725607 - RNA, 20 nt, Artificial Sequence
  Synthetic
gugcuauagagauuugaagu

SEQ ID NO: 725608 - RNA, 20 nt, Artificial Sequence
  Synthetic
gauacgcuauuuaaauaagu

SEQ ID NO: 725609 - RNA, 20 nt, Artificial Sequence
  Synthetic
gggcuuuucuuauaauaagu

SEQ ID NO: 725610 - RNA, 20 nt, Artificial Sequence
  Synthetic
gacagagacuccacauaagu

SEQ ID NO: 725611 - RNA, 20 nt, Artificial Sequence
  Synthetic
gcauggucucacucauaagu

SEQ ID NO: 725612 - RNA, 20 nt, Artificial Sequence
  Synthetic
gcauguucucacucauaagu

SEQ ID NO: 725613 - RNA, 20 nt, Artificial Sequence
  Synthetic
gauguucagaaaagauaagu

SEQ ID NO: 725614 - RNA, 20 nt, Artificial Sequence
  Synthetic
ggcgaaaaaacucgauaagu

SEQ ID NO: 725615 - RNA, 20 nt, Artificial Sequence
  Synthetic
guauguucucacuuauaagu

SEQ ID NO: 725616 - RNA, 20 nt, Artificial Sequence
  Synthetic
guucucacuuacuuauaagu

SEQ ID NO: 725617 - RNA, 20 nt, Artificial Sequence
  Synthetic
guugcuuugacauacuaagu

SEQ ID NO: 725618 - RNA, 20 nt, Artificial Sequence
  Synthetic
guaaauaaauuuaucuaagu

SEQ ID NO: 725619 - RNA, 20 nt, Artificial Sequence
  Synthetic
ggacuuuggggacucuaagu

SEQ ID NO: 725620 - RNA, 20 nt, Artificial Sequence
  Synthetic
ggcaccaccuggcaguaagu

SEQ ID NO: 725621 - RNA, 20 nt, Artificial Sequence
  Synthetic
gcauggacucacucguaagu

SEQ ID NO: 725622 - RNA, 20 nt, Artificial Sequence
  Synthetic
gcauguucucacucguaagu

SEQ ID NO: 725623 - RNA, 20 nt, Artificial Sequence
  Synthetic
gugaggcugcagguguaagu

SEQ ID NO: 725624 - RNA, 20 nt, Artificial Sequence
  Synthetic
gggaucaacaaauuguaagu

SEQ ID NO: 725625 - RNA, 20 nt, Artificial Sequence
  Synthetic
guaauuuuugagaauuaagu

SEQ ID NO: 725626 - RNA, 20 nt, Artificial Sequence
  Synthetic
gacuuuacacuucauuaagu

SEQ ID NO: 725627 - RNA, 20 nt, Artificial Sequence
  Synthetic
guuugucaucaggauuaagu

SEQ ID NO: 725628 - RNA, 20 nt, Artificial Sequence
  Synthetic
guuacaaauauuacuuaagu

SEQ ID NO: 725629 - RNA, 20 nt, Artificial Sequence
  Synthetic
guuuauauugcaauuuaagu

SEQ ID NO: 725630 - RNA, 20 nt, Artificial Sequence
  Synthetic
gagcuccaggccauuuaagu

SEQ ID NO: 725631 - RNA, 20 nt, Artificial Sequence
  Synthetic
gaaaauuaugcacuuuaagu

SEQ ID NO: 725632 - RNA, 20 nt, Artificial Sequence
  Synthetic
gccuuuaagaaguuuuaagu

SEQ ID NO: 725633 - RNA, 20 nt, Artificial Sequence
  Synthetic
gugauuccaaaauaaacagu

SEQ ID NO: 725634 - RNA, 20 nt, Artificial Sequence
  Synthetic
gaagagauguccuaaacagu

SEQ ID NO: 725635 - RNA, 20 nt, Artificial Sequence
  Synthetic
ggaaaaggcuuuagaacagu

SEQ ID NO: 725636 - RNA, 20 nt, Artificial Sequence
  Synthetic
guaucugcuuugcacacagu

SEQ ID NO: 725637 - RNA, 20 nt, Artificial Sequence
  Synthetic
gauaccagcucagccacagu

SEQ ID NO: 725638 - RNA, 20 nt, Artificial Sequence
  Synthetic
gauuuuuauuaguccacagu

SEQ ID NO: 725639 - RNA, 20 nt, Artificial Sequence
  Synthetic
gcacuuagcuuaggcacagu

SEQ ID NO: 725640 - RNA, 20 nt, Artificial Sequence
  Synthetic
gauaccagcuuagucacagu

SEQ ID NO: 725641 - RNA, 20 nt, Artificial Sequence
  Synthetic
gagacccaaaucaagacagu

SEQ ID NO: 725642 - RNA, 20 nt, Artificial Sequence
  Synthetic
gaugcugagggugggacagu

SEQ ID NO: 725643 - RNA, 20 nt, Artificial Sequence
  Synthetic
gauuaauacaaauuuacagu

SEQ ID NO: 725644 - RNA, 20 nt, Artificial Sequence
  Synthetic
ggggaacaucacacaccagu

SEQ ID NO: 725645 - RNA, 20 nt, Artificial Sequence
  Synthetic
guuuuccauaaaauaccagu

SEQ ID NO: 725646 - RNA, 20 nt, Artificial Sequence
  Synthetic
gagcacagagaaguaccagu

SEQ ID NO: 725647 - RNA, 20 nt, Artificial Sequence
  Synthetic
ggaacagaggcguccccagu

SEQ ID NO: 725648 - RNA, 20 nt, Artificial Sequence
  Synthetic
gugcaauagguauggccagu

SEQ ID NO: 725649 - RNA, 20 nt, Artificial Sequence
  Synthetic
ggcucuaacuagaugccagu

SEQ ID NO: 725650 - RNA, 20 nt, Artificial Sequence
  Synthetic
gccagaccucuugugccagu

SEQ ID NO: 725651 - RNA, 20 nt, Artificial Sequence
  Synthetic
gguauuugagagauuccagu

SEQ ID NO: 725652 - RNA, 20 nt, Artificial Sequence
  Synthetic
gcccaugaagaccuuccagu

SEQ ID NO: 725653 - RNA, 20 nt, Artificial Sequence
  Synthetic
guggccuuaacaaaagcagu

SEQ ID NO: 725654 - RNA, 20 nt, Artificial Sequence
  Synthetic
gacccgauucgcaaagcagu

SEQ ID NO: 725655 - RNA, 20 nt, Artificial Sequence
  Synthetic
gggagacucugcaaagcagu

SEQ ID NO: 725656 - RNA, 20 nt, Artificial Sequence
  Synthetic
guacuuuugggguaagcagu

SEQ ID NO: 725657 - RNA, 20 nt, Artificial Sequence
  Synthetic
gguguugaggacacagcagu

SEQ ID NO: 725658 - RNA, 20 nt, Artificial Sequence
  Synthetic
guaguaaauuucacagcagu

SEQ ID NO: 725659 - RNA, 20 nt, Artificial Sequence
  Synthetic
ggguauuucuucauagcagu

SEQ ID NO: 725660 - RNA, 20 nt, Artificial Sequence
  Synthetic
gaaagacggaagcuagcagu

SEQ ID NO: 725661 - RNA, 20 nt, Artificial Sequence
  Synthetic
gcuaaauauacguuagcagu

SEQ ID NO: 725662 - RNA, 20 nt, Artificial Sequence
  Synthetic
ggagacggaagcaaggcagu

SEQ ID NO: 725663 - RNA, 20 nt, Artificial Sequence
  Synthetic
gugcagagcaugcaugcagu

SEQ ID NO: 725664 - RNA, 20 nt, Artificial Sequence
  Synthetic
gaugagccggguacugcagu

SEQ ID NO: 725665 - RNA, 20 nt, Artificial Sequence
  Synthetic
gcucagauggcuucugcagu

SEQ ID NO: 725666 - RNA, 20 nt, Artificial Sequence
  Synthetic
gaccuucugugcuuugcagu

SEQ ID NO: 725667 - RNA, 20 nt, Artificial Sequence
  Synthetic
ggauuucauaacucaucagu

SEQ ID NO: 725668 - RNA, 20 nt, Artificial Sequence
  Synthetic
gcugacagcaaaggaucagu

SEQ ID NO: 725669 - RNA, 20 nt, Artificial Sequence
  Synthetic
gucaaaccaucguagucagu

SEQ ID NO: 725670 - RNA, 20 nt, Artificial Sequence
  Synthetic
gcaaagcacagaaggucagu

SEQ ID NO: 725671 - RNA, 20 nt, Artificial Sequence
  Synthetic
gcuaagcaaugauguucagu

SEQ ID NO: 725672 - RNA, 20 nt, Artificial Sequence
  Synthetic
guucaaacaagagaaagagu

SEQ ID NO: 725673 - RNA, 20 nt, Artificial Sequence
  Synthetic
gaauguuuucuagaaagagu

SEQ ID NO: 725674 - RNA, 20 nt, Artificial Sequence
  Synthetic
gacaucacaauugcaagagu

SEQ ID NO: 725675 - RNA, 20 nt, Artificial Sequence
  Synthetic
gaaggccugccucuaagagu

SEQ ID NO: 725676 - RNA, 20 nt, Artificial Sequence
  Synthetic
gguuacaauguuuuaagagu

SEQ ID NO: 725677 - RNA, 20 nt, Artificial Sequence
  Synthetic
gauauuagauagcacagagu

SEQ ID NO: 725678 - RNA, 20 nt, Artificial Sequence
  Synthetic
gagcuagucagugacagagu

SEQ ID NO: 725679 - RNA, 20 nt, Artificial Sequence
  Synthetic
ggagcuugaacauccagagu

SEQ ID NO: 725680 - RNA, 20 nt, Artificial Sequence
  Synthetic
ggucauaguguguccagagu

SEQ ID NO: 725681 - RNA, 20 nt, Artificial Sequence
  Synthetic
gaaaauggaagcaggagagu

SEQ ID NO: 725682 - RNA, 20 nt, Artificial Sequence
  Synthetic
ggaaguaccaguaggagagu

SEQ ID NO: 725683 - RNA, 20 nt, Artificial Sequence
  Synthetic
gccugccagcuauugagagu

SEQ ID NO: 725684 - RNA, 20 nt, Artificial Sequence
  Synthetic
gguauguguggcuugagagu

SEQ ID NO: 725685 - RNA, 20 nt, Artificial Sequence
  Synthetic
gaccuuauuucacauagagu

SEQ ID NO: 725686 - RNA, 20 nt, Artificial Sequence
  Synthetic
gaaggccuauuucauagagu

SEQ ID NO: 725687 - RNA, 20 nt, Artificial Sequence
  Synthetic
guguuuuuaaaagcuagagu

SEQ ID NO: 725688 - RNA, 20 nt, Artificial Sequence
  Synthetic
gaaggaggaagcaaaggagu

SEQ ID NO: 725689 - RNA, 20 nt, Artificial Sequence
  Synthetic
gagugaguggaagaaggagu

SEQ ID NO: 725690 - RNA, 20 nt, Artificial Sequence
  Synthetic
gcugggagaauggaaggagu

SEQ ID NO: 725691 - RNA, 20 nt, Artificial Sequence
  Synthetic
gacugcuugagcccaggagu

SEQ ID NO: 725692 - RNA, 20 nt, Artificial Sequence
  Synthetic
gggaaggauaguggaggagu

SEQ ID NO: 725693 - RNA, 20 nt, Artificial Sequence
  Synthetic
gaucuccugagccuaggagu

SEQ ID NO: 725694 - RNA, 20 nt, Artificial Sequence
  Synthetic
gauuuguugucucuaggagu

SEQ ID NO: 725695 - RNA, 20 nt, Artificial Sequence
  Synthetic
gcuagggaguggguaggagu

SEQ ID NO: 725696 - RNA, 20 nt, Artificial Sequence
  Synthetic
ggauaauaaaagaagggagu

SEQ ID NO: 725697 - RNA, 20 nt, Artificial Sequence
  Synthetic
gagggaggagggaggggagu

SEQ ID NO: 725698 - RNA, 20 nt, Artificial Sequence
  Synthetic
gggcuugggagugggggagu

SEQ ID NO: 725699 - RNA, 20 nt, Artificial Sequence
  Synthetic
guuguuagaaagacuggagu

SEQ ID NO: 725700 - RNA, 20 nt, Artificial Sequence
  Synthetic
gagaguugagagacuggagu

SEQ ID NO: 725701 - RNA, 20 nt, Artificial Sequence
  Synthetic
gggaaauuuuuucguggagu

SEQ ID NO: 725702 - RNA, 20 nt, Artificial Sequence
  Synthetic
gguuuggauacuaaaugagu

SEQ ID NO: 725703 - RNA, 20 nt, Artificial Sequence
  Synthetic
guuugggagugggaaugagu

SEQ ID NO: 725704 - RNA, 20 nt, Artificial Sequence
  Synthetic
gaaaauagggagagaugagu

SEQ ID NO: 725705 - RNA, 20 nt, Artificial Sequence
  Synthetic
guauggcugaagcacugagu

SEQ ID NO: 725706 - RNA, 20 nt, Artificial Sequence
  Synthetic
guucuguugaaaugcugagu

SEQ ID NO: 725707 - RNA, 20 nt, Artificial Sequence
  Synthetic
gaaggagaggcugucugagu

SEQ ID NO: 725708 - RNA, 20 nt, Artificial Sequence
  Synthetic
gaagucuuauuguggugagu

SEQ ID NO: 725709 - RNA, 20 nt, Artificial Sequence
  Synthetic
gugaccaauugaaugugagu

SEQ ID NO: 725710 - RNA, 20 nt, Artificial Sequence
  Synthetic
gccauuacugaagcuugagu

SEQ ID NO: 725711 - RNA, 20 nt, Artificial Sequence
  Synthetic
gguaauucaacaaaaauagu

SEQ ID NO: 725712 - RNA, 20 nt, Artificial Sequence
  Synthetic
gguguggauguggaaauagu

SEQ ID NO: 725713 - RNA, 20 nt, Artificial Sequence
  Synthetic
gaugcccauacaauaauagu

SEQ ID NO: 725714 - RNA, 20 nt, Artificial Sequence
  Synthetic
gacagcaaugcaauaauagu

SEQ ID NO: 725715 - RNA, 20 nt, Artificial Sequence
  Synthetic
gaaggugguguggccauagu

SEQ ID NO: 725716 - RNA, 20 nt, Artificial Sequence
  Synthetic
gugaucaggcuuuucauagu

SEQ ID NO: 725717 - RNA, 20 nt, Artificial Sequence
  Synthetic
gauauuacuuggaauauagu

SEQ ID NO: 725718 - RNA, 20 nt, Artificial Sequence
  Synthetic
gagauauggccauauauagu

SEQ ID NO: 725719 - RNA, 20 nt, Artificial Sequence
  Synthetic
ggaguuuuguuauguauagu

SEQ ID NO: 725720 - RNA, 20 nt, Artificial Sequence
  Synthetic
gacaccauacugauuauagu

SEQ ID NO: 725721 - RNA, 20 nt, Artificial Sequence
  Synthetic
gugauauaauuggaacuagu

SEQ ID NO: 725722 - RNA, 20 nt, Artificial Sequence
  Synthetic
ggaagaacauuagagcuagu

SEQ ID NO: 725723 - RNA, 20 nt, Artificial Sequence
  Synthetic
ggacagggagaggugcuagu

SEQ ID NO: 725724 - RNA, 20 nt, Artificial Sequence
  Synthetic
guaauuuaaauuucucuagu

SEQ ID NO: 725725 - RNA, 20 nt, Artificial Sequence
  Synthetic
guaguuuaaauuucucuagu

SEQ ID NO: 725726 - RNA, 20 nt, Artificial Sequence
  Synthetic
gugaguuggugcugucuagu

SEQ ID NO: 725727 - RNA, 20 nt, Artificial Sequence
  Synthetic
gucauuuuuuuuaaaguagu

SEQ ID NO: 725728 - RNA, 20 nt, Artificial Sequence
  Synthetic
gugagcaaggggagaguagu

SEQ ID NO: 725729 - RNA, 20 nt, Artificial Sequence
  Synthetic
gccucugccucccgaguagu

SEQ ID NO: 725730 - RNA, 20 nt, Artificial Sequence
  Synthetic
gggauucagaaagcgguagu

SEQ ID NO: 725731 - RNA, 20 nt, Artificial Sequence
  Synthetic
ggauggagggaaaauguagu

SEQ ID NO: 725732 - RNA, 20 nt, Artificial Sequence
  Synthetic
gugguagguuaaaauguagu

SEQ ID NO: 725733 - RNA, 20 nt, Artificial Sequence
  Synthetic
gauaaaaucauagcuguagu

SEQ ID NO: 725734 - RNA, 20 nt, Artificial Sequence
  Synthetic
ggagcaauaagcaguguagu

SEQ ID NO: 725735 - RNA, 20 nt, Artificial Sequence
  Synthetic
gauuuaaugauguguguagu

SEQ ID NO: 725736 - RNA, 20 nt, Artificial Sequence
  Synthetic
ggugcugacucauuauuagu

SEQ ID NO: 725737 - RNA, 20 nt, Artificial Sequence
  Synthetic
gcauguucucacuuauuagu

SEQ ID NO: 725738 - RNA, 20 nt, Artificial Sequence
  Synthetic
gaauauucuguaaacuuagu

SEQ ID NO: 725739 - RNA, 20 nt, Artificial Sequence
  Synthetic
gucaaccauuagaucuuagu

SEQ ID NO: 725740 - RNA, 20 nt, Artificial Sequence
  Synthetic
ggaaaauaaguuuucuuagu

SEQ ID NO: 725741 - RNA, 20 nt, Artificial Sequence
  Synthetic
gcucaguuucaaaauuuagu

SEQ ID NO: 725742 - RNA, 20 nt, Artificial Sequence
  Synthetic
gccaaguccgugaguuuagu

SEQ ID NO: 725743 - RNA, 20 nt, Artificial Sequence
  Synthetic
guuaaucagagcaaaaacgu

SEQ ID NO: 725744 - RNA, 20 nt, Artificial Sequence
  Synthetic
gaaaacagagaacccaacgu

SEQ ID NO: 725745 - RNA, 20 nt, Artificial Sequence
  Synthetic
guugguagaaaauaacacgu

SEQ ID NO: 725746 - RNA, 20 nt, Artificial Sequence
  Synthetic
gagaugggguuucaccacgu

SEQ ID NO: 725747 - RNA, 20 nt, Artificial Sequence
  Synthetic
gagaugggguuucuccacgu

SEQ ID NO: 725748 - RNA, 20 nt, Artificial Sequence
  Synthetic
gggggauugagaggagacgu

SEQ ID NO: 725749 - RNA, 20 nt, Artificial Sequence
  Synthetic
ggcaauaccauucaggacgu

SEQ ID NO: 725750 - RNA, 20 nt, Artificial Sequence
  Synthetic
gucaguaugugugaugacgu

SEQ ID NO: 725751 - RNA, 20 nt, Artificial Sequence
  Synthetic
gcacuuugggaggccuacgu

SEQ ID NO: 725752 - RNA, 20 nt, Artificial Sequence
  Synthetic
gagaucggguuccauuacgu

SEQ ID NO: 725753 - RNA, 20 nt, Artificial Sequence
  Synthetic
gcagcucccuuucaccccgu

SEQ ID NO: 725754 - RNA, 20 nt, Artificial Sequence
  Synthetic
guaaaauaaauaaaagccgu

SEQ ID NO: 725755 - RNA, 20 nt, Artificial Sequence
  Synthetic
gcugcauugagcaaguccgu

SEQ ID NO: 725756 - RNA, 20 nt, Artificial Sequence
  Synthetic
gguuguggggagaggugcgu

SEQ ID NO: 725757 - RNA, 20 nt, Artificial Sequence
  Synthetic
ggguuguuuugugguugcgu

SEQ ID NO: 725758 - RNA, 20 nt, Artificial Sequence
  Synthetic
gcaaccagacaucaacucgu

SEQ ID NO: 725759 - RNA, 20 nt, Artificial Sequence
  Synthetic
gauugcugugccccacucgu

SEQ ID NO: 725760 - RNA, 20 nt, Artificial Sequence
  Synthetic
gaaaaccucuuccaccucgu

SEQ ID NO: 725761 - RNA, 20 nt, Artificial Sequence
  Synthetic
gcucucuguuugucugucgu

SEQ ID NO: 725762 - RNA, 20 nt, Artificial Sequence
  Synthetic
gucucuggugccgaaaaggu

SEQ ID NO: 725763 - RNA, 20 nt, Artificial Sequence
  Synthetic
gacaaggcaaaugaaaaggu

SEQ ID NO: 725764 - RNA, 20 nt, Artificial Sequence
  Synthetic
guuuaauucuucuaaaaggu

SEQ ID NO: 725765 - RNA, 20 nt, Artificial Sequence
  Synthetic
gagguaauuauaggaaaggu

SEQ ID NO: 725766 - RNA, 20 nt, Artificial Sequence
  Synthetic
guggacacugauguaaaggu

SEQ ID NO: 725767 - RNA, 20 nt, Artificial Sequence
  Synthetic
ggauaagaaggagacaaggu

SEQ ID NO: 725768 - RNA, 20 nt, Artificial Sequence
  Synthetic
gcacuuugagagaccaaggu

SEQ ID NO: 725769 - RNA, 20 nt, Artificial Sequence
  Synthetic
gcacguugucaggccaaggu

SEQ ID NO: 725770 - RNA, 20 nt, Artificial Sequence
  Synthetic
gcacuucgggaggccaaggu

SEQ ID NO: 725771 - RNA, 20 nt, Artificial Sequence
  Synthetic
gcacuuugggaggccaaggu

SEQ ID NO: 725772 - RNA, 20 nt, Artificial Sequence
  Synthetic
gcauuuugggaggccaaggu

SEQ ID NO: 725773 - RNA, 20 nt, Artificial Sequence
  Synthetic
gcauuuuuggaggccaaggu

SEQ ID NO: 725774 - RNA, 20 nt, Artificial Sequence
  Synthetic
ggacuuugggaguccaaggu

SEQ ID NO: 725775 - RNA, 20 nt, Artificial Sequence
  Synthetic
guuagaagugguuccaaggu

SEQ ID NO: 725776 - RNA, 20 nt, Artificial Sequence
  Synthetic
gaagucuuuauccucaaggu

SEQ ID NO: 725777 - RNA, 20 nt, Artificial Sequence
  Synthetic
gugagaucaacacagaaggu

SEQ ID NO: 725778 - RNA, 20 nt, Artificial Sequence
  Synthetic
ggaaguaggcuucagaaggu

SEQ ID NO: 725779 - RNA, 20 nt, Artificial Sequence
  Synthetic
gucucuaggaguuggaaggu

SEQ ID NO: 725780 - RNA, 20 nt, Artificial Sequence
  Synthetic
ggguggcgguugcugaaggu

SEQ ID NO: 725781 - RNA, 20 nt, Artificial Sequence
  Synthetic
guucugaccauguugaaggu

SEQ ID NO: 725782 - RNA, 20 nt, Artificial Sequence
  Synthetic
gaauguucuggccauaaggu

SEQ ID NO: 725783 - RNA, 20 nt, Artificial Sequence
  Synthetic
gcacuuuggaaggcuaaggu

SEQ ID NO: 725784 - RNA, 20 nt, Artificial Sequence
  Synthetic
gcuacuugggaggcuaaggu

SEQ ID NO: 725785 - RNA, 20 nt, Artificial Sequence
  Synthetic
gauaauggcucaguuaaggu

SEQ ID NO: 725786 - RNA, 20 nt, Artificial Sequence
  Synthetic
ggggagagcaggaaacaggu

SEQ ID NO: 725787 - RNA, 20 nt, Artificial Sequence
  Synthetic
gucauugcauauaaacaggu

SEQ ID NO: 725788 - RNA, 20 nt, Artificial Sequence
  Synthetic
guaugacugaaugcacaggu

SEQ ID NO: 725789 - RNA, 20 nt, Artificial Sequence
  Synthetic
gcauacucucacucacaggu

SEQ ID NO: 725790 - RNA, 20 nt, Artificial Sequence
  Synthetic
gcauauucucacucacaggu

SEQ ID NO: 725791 - RNA, 20 nt, Artificial Sequence
  Synthetic
guagggcuagaaauacaggu

SEQ ID NO: 725792 - RNA, 20 nt, Artificial Sequence
  Synthetic
gaaaacaacccagaccaggu

SEQ ID NO: 725793 - RNA, 20 nt, Artificial Sequence
  Synthetic
ggagagcugaggacccaggu

SEQ ID NO: 725794 - RNA, 20 nt, Artificial Sequence
  Synthetic
guuuuaugaaauuuccaggu

SEQ ID NO: 725795 - RNA, 20 nt, Artificial Sequence
  Synthetic
ggaggcagcuaggaucaggu

SEQ ID NO: 725796 - RNA, 20 nt, Artificial Sequence
  Synthetic
gggcuuguagaaacucaggu

SEQ ID NO: 725797 - RNA, 20 nt, Artificial Sequence
  Synthetic
gucuacaacaaagcucaggu

SEQ ID NO: 725798 - RNA, 20 nt, Artificial Sequence
  Synthetic
ggauauguuuaaagucaggu

SEQ ID NO: 725799 - RNA, 20 nt, Artificial Sequence
  Synthetic
gucagacagaaaaaagaggu

SEQ ID NO: 725800 - RNA, 20 nt, Artificial Sequence
  Synthetic
guaacacugaugcaagaggu

SEQ ID NO: 725801 - RNA, 20 nt, Artificial Sequence
  Synthetic
gucaugcugaugcaagaggu

SEQ ID NO: 725802 - RNA, 20 nt, Artificial Sequence
  Synthetic
guaacaaauaacagagaggu

SEQ ID NO: 725803 - RNA, 20 nt, Artificial Sequence
  Synthetic
gcaauuugagaggccgaggu

SEQ ID NO: 725804 - RNA, 20 nt, Artificial Sequence
  Synthetic
gcaauuugggaggccgaggu

SEQ ID NO: 725805 - RNA, 20 nt, Artificial Sequence
  Synthetic
gcacuuugggaggccgaggu

SEQ ID NO: 725806 - RNA, 20 nt, Artificial Sequence
  Synthetic
gugcuuugggaggccgaggu

SEQ ID NO: 725807 - RNA, 20 nt, Artificial Sequence
  Synthetic
gcucuuugugaggccgaggu

SEQ ID NO: 725808 - RNA, 20 nt, Artificial Sequence
  Synthetic
gccaguagguaguccgaggu

SEQ ID NO: 725809 - RNA, 20 nt, Artificial Sequence
  Synthetic
gggcugcauucccaggaggu

SEQ ID NO: 725810 - RNA, 20 nt, Artificial Sequence
  Synthetic
guuccaaauuccucggaggu

SEQ ID NO: 725811 - RNA, 20 nt, Artificial Sequence
  Synthetic
gaauuuuauuuaggggaggu

SEQ ID NO: 725812 - RNA, 20 nt, Artificial Sequence
  Synthetic
gggaagggucguggggaggu

SEQ ID NO: 725813 - RNA, 20 nt, Artificial Sequence
  Synthetic
gacuuagauggacuggaggu

SEQ ID NO: 725814 - RNA, 20 nt, Artificial Sequence
  Synthetic
gccuaucagaggguggaggu

SEQ ID NO: 725815 - RNA, 20 nt, Artificial Sequence
  Synthetic
gugggcagaucaccugaggu

SEQ ID NO: 725816 - RNA, 20 nt, Artificial Sequence
  Synthetic
gugggcggaucaccugaggu

SEQ ID NO: 725817 - RNA, 20 nt, Artificial Sequence
  Synthetic
gcggguggaucaccugaggu

SEQ ID NO: 725818 - RNA, 20 nt, Artificial Sequence
  Synthetic
guggguggaucaccugaggu

SEQ ID NO: 725819 - RNA, 20 nt, Artificial Sequence
  Synthetic
gcagccugaucaccugaggu

SEQ ID NO: 725820 - RNA, 20 nt, Artificial Sequence
  Synthetic
gcuacccaggaagcugaggu

SEQ ID NO: 725821 - RNA, 20 nt, Artificial Sequence
  Synthetic
gcuacucaggaggcugaggu

SEQ ID NO: 725822 - RNA, 20 nt, Artificial Sequence
  Synthetic
gcuacuuaggaggcugaggu

SEQ ID NO: 725823 - RNA, 20 nt, Artificial Sequence
  Synthetic
gcuacccgggaggcugaggu

SEQ ID NO: 725824 - RNA, 20 nt, Artificial Sequence
  Synthetic
gcuacucgggaggcugaggu

SEQ ID NO: 725825 - RNA, 20 nt, Artificial Sequence
  Synthetic
gccacuugggaggcugaggu

SEQ ID NO: 725826 - RNA, 20 nt, Artificial Sequence
  Synthetic
gcuacuugggaggcugaggu

SEQ ID NO: 725827 - RNA, 20 nt, Artificial Sequence
  Synthetic
gcacuuugggaggcugaggu

SEQ ID NO: 725828 - RNA, 20 nt, Artificial Sequence
  Synthetic
gcuacaugggagucugaggu

SEQ ID NO: 725829 - RNA, 20 nt, Artificial Sequence
  Synthetic
gcacuuugggagucugaggu

SEQ ID NO: 725830 - RNA, 20 nt, Artificial Sequence
  Synthetic
gcugagggcagcagugaggu

SEQ ID NO: 725831 - RNA, 20 nt, Artificial Sequence
  Synthetic
gcauguccucacucauaggu

SEQ ID NO: 725832 - RNA, 20 nt, Artificial Sequence
  Synthetic
gcauauucucacucauaggu

SEQ ID NO: 725833 - RNA, 20 nt, Artificial Sequence
  Synthetic
gcauguucucacucauaggu

SEQ ID NO: 725834 - RNA, 20 nt, Artificial Sequence
  Synthetic
gcauguucucgcucauaggu

SEQ ID NO: 725835 - RNA, 20 nt, Artificial Sequence
  Synthetic
gcauauucucauucauaggu

SEQ ID NO: 725836 - RNA, 20 nt, Artificial Sequence
  Synthetic
guaugaaguuugugcuaggu

SEQ ID NO: 725837 - RNA, 20 nt, Artificial Sequence
  Synthetic
guuggccugucuugcuaggu

SEQ ID NO: 725838 - RNA, 20 nt, Artificial Sequence
  Synthetic
gcugcuuugcaaagguaggu

SEQ ID NO: 725839 - RNA, 20 nt, Artificial Sequence
  Synthetic
guuuaaauaagacuguaggu

SEQ ID NO: 725840 - RNA, 20 nt, Artificial Sequence
  Synthetic
gaaguagauaacuauuaggu

SEQ ID NO: 725841 - RNA, 20 nt, Artificial Sequence
  Synthetic
guggcaggacgcacuuaggu

SEQ ID NO: 725842 - RNA, 20 nt, Artificial Sequence
  Synthetic
gcauguucucacucuuaggu

SEQ ID NO: 725843 - RNA, 20 nt, Artificial Sequence
  Synthetic
gucucaaaaugaguuuaggu

SEQ ID NO: 725844 - RNA, 20 nt, Artificial Sequence
  Synthetic
guaacuauagcuuuuuaggu

SEQ ID NO: 725845 - RNA, 20 nt, Artificial Sequence
  Synthetic
ggagggaacauuuuuuaggu

SEQ ID NO: 725846 - RNA, 20 nt, Artificial Sequence
  Synthetic
guacuaaguuaaacaagggu

SEQ ID NO: 725847 - RNA, 20 nt, Artificial Sequence
  Synthetic
gcuguggggaacacaagggu

SEQ ID NO: 725848 - RNA, 20 nt, Artificial Sequence
  Synthetic
guacaaggaccgacaagggu

SEQ ID NO: 725849 - RNA, 20 nt, Artificial Sequence
  Synthetic
gcacacaaauaaagaagggu

SEQ ID NO: 725850 - RNA, 20 nt, Artificial Sequence
  Synthetic
gcugaugauaugagaagggu

SEQ ID NO: 725851 - RNA, 20 nt, Artificial Sequence
  Synthetic
gaauaaugagauagaagggu

SEQ ID NO: 725852 - RNA, 20 nt, Artificial Sequence
  Synthetic
gaaauuaugaaaaacagggu

SEQ ID NO: 725853 - RNA, 20 nt, Artificial Sequence
  Synthetic
gacuauuagcaagacagggu

SEQ ID NO: 725854 - RNA, 20 nt, Artificial Sequence
  Synthetic
gauuaaggugaugacagggu

SEQ ID NO: 725855 - RNA, 20 nt, Artificial Sequence
  Synthetic
gaucaaggugucaggagggu

SEQ ID NO: 725856 - RNA, 20 nt, Artificial Sequence
  Synthetic
gcucaggccagcgggagggu

SEQ ID NO: 725857 - RNA, 20 nt, Artificial Sequence
  Synthetic
gucauuaggaugcugagggu

SEQ ID NO: 725858 - RNA, 20 nt, Artificial Sequence
  Synthetic
gguuaccucugggugagggu

SEQ ID NO: 725859 - RNA, 20 nt, Artificial Sequence
  Synthetic
gccagaauuccaaaacgggu

SEQ ID NO: 725860 - RNA, 20 nt, Artificial Sequence
  Synthetic
gaaaacaggaguuggcgggu

SEQ ID NO: 725861 - RNA, 20 nt, Artificial Sequence
  Synthetic
gcaggggccuguuggcgggu

SEQ ID NO: 725862 - RNA, 20 nt, Artificial Sequence
  Synthetic
guuuucauugauuuucgggu

SEQ ID NO: 725863 - RNA, 20 nt, Artificial Sequence
  Synthetic
gcuaugugagcauaaggggu

SEQ ID NO: 725864 - RNA, 20 nt, Artificial Sequence
  Synthetic
gaucaccagagcucaggggu

SEQ ID NO: 725865 - RNA, 20 nt, Artificial Sequence
  Synthetic
gaauuuuagguaagaggggu

SEQ ID NO: 725866 - RNA, 20 nt, Artificial Sequence
  Synthetic
gguggagggagaggaggggu

SEQ ID NO: 725867 - RNA, 20 nt, Artificial Sequence
  Synthetic
gccagggaccagggaggggu

SEQ ID NO: 725868 - RNA, 20 nt, Artificial Sequence
  Synthetic
gcagagccaugaugaggggu

SEQ ID NO: 725869 - RNA, 20 nt, Artificial Sequence
  Synthetic
gaaaaauccaagugaggggu

SEQ ID NO: 725870 - RNA, 20 nt, Artificial Sequence
  Synthetic
gaaaaagcaaaaaacggggu

SEQ ID NO: 725871 - RNA, 20 nt, Artificial Sequence
  Synthetic
gguaacugaaucaugggggu

SEQ ID NO: 725872 - RNA, 20 nt, Artificial Sequence
  Synthetic
gguuauuagauccugggggu

SEQ ID NO: 725873 - RNA, 20 nt, Artificial Sequence
  Synthetic
gaaaaaaaaaaauugggggu

SEQ ID NO: 725874 - RNA, 20 nt, Artificial Sequence
  Synthetic
ggcugggcuccguugggggu

SEQ ID NO: 725875 - RNA, 20 nt, Artificial Sequence
  Synthetic
gaaauaucagagaauggggu

SEQ ID NO: 725876 - RNA, 20 nt, Artificial Sequence
  Synthetic
gaugcugauguuacuggggu

SEQ ID NO: 725877 - RNA, 20 nt, Artificial Sequence
  Synthetic
gauggcuucugcaguggggu

SEQ ID NO: 725878 - RNA, 20 nt, Artificial Sequence
  Synthetic
gauuagagaaucaguggggu

SEQ ID NO: 725879 - RNA, 20 nt, Artificial Sequence
  Synthetic
ggcacaggaugggguggggu

SEQ ID NO: 725880 - RNA, 20 nt, Artificial Sequence
  Synthetic
gccgcacacagugguggggu

SEQ ID NO: 725881 - RNA, 20 nt, Artificial Sequence
  Synthetic
gcagaaggaaaauguggggu

SEQ ID NO: 725882 - RNA, 20 nt, Artificial Sequence
  Synthetic
gcagaagagaaauguggggu

SEQ ID NO: 725883 - RNA, 20 nt, Artificial Sequence
  Synthetic
guggaagggaaauguggggu

SEQ ID NO: 725884 - RNA, 20 nt, Artificial Sequence
  Synthetic
gucaauguagaguaaugggu

SEQ ID NO: 725885 - RNA, 20 nt, Artificial Sequence
  Synthetic
ggguagagcagaugaugggu

SEQ ID NO: 725886 - RNA, 20 nt, Artificial Sequence
  Synthetic
ggaauuucuaauuuaugggu

SEQ ID NO: 725887 - RNA, 20 nt, Artificial Sequence
  Synthetic
ggagcgugugagcagugggu

SEQ ID NO: 725888 - RNA, 20 nt, Artificial Sequence
  Synthetic
ggcagaacagucuggugggu

SEQ ID NO: 725889 - RNA, 20 nt, Artificial Sequence
  Synthetic
gccucuucuccauugugggu

SEQ ID NO: 725890 - RNA, 20 nt, Artificial Sequence
  Synthetic
guaaacuaaguagaaauggu

SEQ ID NO: 725891 - RNA, 20 nt, Artificial Sequence
  Synthetic
ggauuuacauauuaaauggu

SEQ ID NO: 725892 - RNA, 20 nt, Artificial Sequence
  Synthetic
guagucuuacuuucaauggu

SEQ ID NO: 725893 - RNA, 20 nt, Artificial Sequence
  Synthetic
gcuaaagggagcauaauggu

SEQ ID NO: 725894 - RNA, 20 nt, Artificial Sequence
  Synthetic
gaaagaagucaauuaauggu

SEQ ID NO: 725895 - RNA, 20 nt, Artificial Sequence
  Synthetic
gagcagggaaguaacauggu

SEQ ID NO: 725896 - RNA, 20 nt, Artificial Sequence
  Synthetic
gucagcagcaaaaccauggu

SEQ ID NO: 725897 - RNA, 20 nt, Artificial Sequence
  Synthetic
ggaggccucagaaucauggu

SEQ ID NO: 725898 - RNA, 20 nt, Artificial Sequence
  Synthetic
ggaaaaagacacaucauggu

SEQ ID NO: 725899 - RNA, 20 nt, Artificial Sequence
  Synthetic
gcuaucaagcuauucauggu

SEQ ID NO: 725900 - RNA, 20 nt, Artificial Sequence
  Synthetic
gcuggacaaaccaagauggu

SEQ ID NO: 725901 - RNA, 20 nt, Artificial Sequence
  Synthetic
gaaaggagauaacagauggu

SEQ ID NO: 725902 - RNA, 20 nt, Artificial Sequence
  Synthetic
gggaaagggaaagggauggu

SEQ ID NO: 725903 - RNA, 20 nt, Artificial Sequence
  Synthetic
ggaaauggaagagggauggu

SEQ ID NO: 725904 - RNA, 20 nt, Artificial Sequence
  Synthetic
gagguaaauguuaugauggu

SEQ ID NO: 725905 - RNA, 20 nt, Artificial Sequence
  Synthetic
guuuuucaacauuugauggu

SEQ ID NO: 725906 - RNA, 20 nt, Artificial Sequence
  Synthetic
gcaauuauuacuuugauggu

SEQ ID NO: 725907 - RNA, 20 nt, Artificial Sequence
  Synthetic
gauugacuaaaucauauggu

SEQ ID NO: 725908 - RNA, 20 nt, Artificial Sequence
  Synthetic
gggaaucacucgaaccuggu

SEQ ID NO: 725909 - RNA, 20 nt, Artificial Sequence
  Synthetic
gguugccugacauuccuggu

SEQ ID NO: 725910 - RNA, 20 nt, Artificial Sequence
  Synthetic
gaguucucccugcagcuggu

SEQ ID NO: 725911 - RNA, 20 nt, Artificial Sequence
  Synthetic
gaccucaugcccuagcuggu

SEQ ID NO: 725912 - RNA, 20 nt, Artificial Sequence
  Synthetic
gacucuucuacguggcuggu

SEQ ID NO: 725913 - RNA, 20 nt, Artificial Sequence
  Synthetic
guuuucuggcugucucuggu

SEQ ID NO: 725914 - RNA, 20 nt, Artificial Sequence
  Synthetic
guuugcugaacaguaguggu

SEQ ID NO: 725915 - RNA, 20 nt, Artificial Sequence
  Synthetic
gaagggaaauaauccguggu

SEQ ID NO: 725916 - RNA, 20 nt, Artificial Sequence
  Synthetic
guuauaacaguguugguggu

SEQ ID NO: 725917 - RNA, 20 nt, Artificial Sequence
  Synthetic
guuuuauuucccccuguggu

SEQ ID NO: 725918 - RNA, 20 nt, Artificial Sequence
  Synthetic
gcucacuaccuguguguggu

SEQ ID NO: 725919 - RNA, 20 nt, Artificial Sequence
  Synthetic
gagguagagcucacauuggu

SEQ ID NO: 725920 - RNA, 20 nt, Artificial Sequence
  Synthetic
gcaaugugacagauauuggu

SEQ ID NO: 725921 - RNA, 20 nt, Artificial Sequence
  Synthetic
gcugguggcuuggacuuggu

SEQ ID NO: 725922 - RNA, 20 nt, Artificial Sequence
  Synthetic
gucaucaggauuaaguuggu

SEQ ID NO: 725923 - RNA, 20 nt, Artificial Sequence
  Synthetic
gaacauuauacgcuguuggu

SEQ ID NO: 725924 - RNA, 20 nt, Artificial Sequence
  Synthetic
gaguuuauuguagauuuggu

SEQ ID NO: 725925 - RNA, 20 nt, Artificial Sequence
  Synthetic
gcuaaaccaugauauuuggu

SEQ ID NO: 725926 - RNA, 20 nt, Artificial Sequence
  Synthetic
gguccuggacucuuuuuggu

SEQ ID NO: 725927 - RNA, 20 nt, Artificial Sequence
  Synthetic
guuccugggcuuuuuuuggu

SEQ ID NO: 725928 - RNA, 20 nt, Artificial Sequence
  Synthetic
gaacuggcucaauaaaaugu

SEQ ID NO: 725929 - RNA, 20 nt, Artificial Sequence
  Synthetic
gugaauaguuuaccaaaugu

SEQ ID NO: 725930 - RNA, 20 nt, Artificial Sequence
  Synthetic
guuuauaugcaaagaaaugu

SEQ ID NO: 725931 - RNA, 20 nt, Artificial Sequence
  Synthetic
ggaaccacugauagaaaugu

SEQ ID NO: 725932 - RNA, 20 nt, Artificial Sequence
  Synthetic
gaaguggaaaacauaaaugu

SEQ ID NO: 725933 - RNA, 20 nt, Artificial Sequence
  Synthetic
gguuuucaggccauaaaugu

SEQ ID NO: 725934 - RNA, 20 nt, Artificial Sequence
  Synthetic
ggccauuagccaaacaaugu

SEQ ID NO: 725935 - RNA, 20 nt, Artificial Sequence
  Synthetic
gagacaggguuugacaaugu

SEQ ID NO: 725936 - RNA, 20 nt, Artificial Sequence
  Synthetic
ggaaauauaauucccaaugu

SEQ ID NO: 725937 - RNA, 20 nt, Artificial Sequence
  Synthetic
gugaggaaauggggcaaugu

SEQ ID NO: 725938 - RNA, 20 nt, Artificial Sequence
  Synthetic
gguuaugugucucucaaugu

SEQ ID NO: 725939 - RNA, 20 nt, Artificial Sequence
  Synthetic
gucugcuaucauuagaaugu

SEQ ID NO: 725940 - RNA, 20 nt, Artificial Sequence
  Synthetic
gucugaagauaaaugaaugu

SEQ ID NO: 725941 - RNA, 20 nt, Artificial Sequence
  Synthetic
gagagguugaaauauaaugu

SEQ ID NO: 725942 - RNA, 20 nt, Artificial Sequence
  Synthetic
guugagaacuucuauaaugu

SEQ ID NO: 725943 - RNA, 20 nt, Artificial Sequence
  Synthetic
gcauauccaggugguaaugu

SEQ ID NO: 725944 - RNA, 20 nt, Artificial Sequence
  Synthetic
ggcccuaagacaagacaugu

SEQ ID NO: 725945 - RNA, 20 nt, Artificial Sequence
  Synthetic
gucucucucccuugacaugu

SEQ ID NO: 725946 - RNA, 20 nt, Artificial Sequence
  Synthetic
gaacaaaaaguucuacaugu

SEQ ID NO: 725947 - RNA, 20 nt, Artificial Sequence
  Synthetic
gagaugggacuucaccaugu

SEQ ID NO: 725948 - RNA, 20 nt, Artificial Sequence
  Synthetic
gagacagggguucaccaugu

SEQ ID NO: 725949 - RNA, 20 nt, Artificial Sequence
  Synthetic
gagacgagauuucaccaugu

SEQ ID NO: 725950 - RNA, 20 nt, Artificial Sequence
  Synthetic
gagacgggauuucaccaugu

SEQ ID NO: 725951 - RNA, 20 nt, Artificial Sequence
  Synthetic
gagauagaguuucaccaugu

SEQ ID NO: 725952 - RNA, 20 nt, Artificial Sequence
  Synthetic
gagacaagguuucaccaugu

SEQ ID NO: 725953 - RNA, 20 nt, Artificial Sequence
  Synthetic
gagacaggguuucaccaugu

SEQ ID NO: 725954 - RNA, 20 nt, Artificial Sequence
  Synthetic
gaaacgggguuucaccaugu

SEQ ID NO: 725955 - RNA, 20 nt, Artificial Sequence
  Synthetic
gagacgggguuucaccaugu

SEQ ID NO: 725956 - RNA, 20 nt, Artificial Sequence
  Synthetic
gagaugggguuucaccaugu

SEQ ID NO: 725957 - RNA, 20 nt, Artificial Sequence
  Synthetic
gagacggguuuucaccaugu

SEQ ID NO: 725958 - RNA, 20 nt, Artificial Sequence
  Synthetic
ggguuuccaagugaccaugu

SEQ ID NO: 725959 - RNA, 20 nt, Artificial Sequence
  Synthetic
gagaugggguuuuaccaugu

SEQ ID NO: 725960 - RNA, 20 nt, Artificial Sequence
  Synthetic
gacugccuaucuucccaugu

SEQ ID NO: 725961 - RNA, 20 nt, Artificial Sequence
  Synthetic
gcugacacugggagccaugu

SEQ ID NO: 725962 - RNA, 20 nt, Artificial Sequence
  Synthetic
gagacagaguuucgccaugu

SEQ ID NO: 725963 - RNA, 20 nt, Artificial Sequence
  Synthetic
gagacgggguuucgccaugu

SEQ ID NO: 725964 - RNA, 20 nt, Artificial Sequence
  Synthetic
gagaugggguuucgccaugu

SEQ ID NO: 725965 - RNA, 20 nt, Artificial Sequence
  Synthetic
gcgaugugguuucgccaugu

SEQ ID NO: 725966 - RNA, 20 nt, Artificial Sequence
  Synthetic
gagacggaguuuugccaugu

SEQ ID NO: 725967 - RNA, 20 nt, Artificial Sequence
  Synthetic
gagaugggguuuugccaugu

SEQ ID NO: 725968 - RNA, 20 nt, Artificial Sequence
  Synthetic
gagacagaguuucuccaugu

SEQ ID NO: 725969 - RNA, 20 nt, Artificial Sequence
  Synthetic
gagacacgguuucuccaugu

SEQ ID NO: 725970 - RNA, 20 nt, Artificial Sequence
  Synthetic
gagacgggguuucuccaugu

SEQ ID NO: 725971 - RNA, 20 nt, Artificial Sequence
  Synthetic
gguaaguuucaguuccaugu

SEQ ID NO: 725972 - RNA, 20 nt, Artificial Sequence
  Synthetic
gagacuggguuucagcaugu

SEQ ID NO: 725973 - RNA, 20 nt, Artificial Sequence
  Synthetic
gacaaauaccuaaugcaugu

SEQ ID NO: 725974 - RNA, 20 nt, Artificial Sequence
  Synthetic
gagacgggguuucaucaugu

SEQ ID NO: 725975 - RNA, 20 nt, Artificial Sequence
  Synthetic
gagaugggguuucaucaugu

SEQ ID NO: 725976 - RNA, 20 nt, Artificial Sequence
  Synthetic
gugccugcccaauaucaugu

SEQ ID NO: 725977 - RNA, 20 nt, Artificial Sequence
  Synthetic
ggcaauaauucuuaucaugu

SEQ ID NO: 725978 - RNA, 20 nt, Artificial Sequence
  Synthetic
gguacuaauaacacucaugu

SEQ ID NO: 725979 - RNA, 20 nt, Artificial Sequence
  Synthetic
gggugaugagacccucaugu

SEQ ID NO: 725980 - RNA, 20 nt, Artificial Sequence
  Synthetic
gggacgggguuucgucaugu

SEQ ID NO: 725981 - RNA, 20 nt, Artificial Sequence
  Synthetic
gguucucucaucugucaugu

SEQ ID NO: 725982 - RNA, 20 nt, Artificial Sequence
  Synthetic
gaagcucugcuucaagaugu

SEQ ID NO: 725983 - RNA, 20 nt, Artificial Sequence
  Synthetic
gucagaagacaggaagaugu

SEQ ID NO: 725984 - RNA, 20 nt, Artificial Sequence
  Synthetic
gaauugacaguuacagaugu

SEQ ID NO: 725985 - RNA, 20 nt, Artificial Sequence
  Synthetic
gaggucccacauucagaugu

SEQ ID NO: 725986 - RNA, 20 nt, Artificial Sequence
  Synthetic
gggacagggauaugagaugu

SEQ ID NO: 725987 - RNA, 20 nt, Artificial Sequence
  Synthetic
gcaccuuaggagguagaugu

SEQ ID NO: 725988 - RNA, 20 nt, Artificial Sequence
  Synthetic
ggugcuguugaauuagaugu

SEQ ID NO: 725989 - RNA, 20 nt, Artificial Sequence
  Synthetic
gcgcuuagggaggccgaugu

SEQ ID NO: 725990 - RNA, 20 nt, Artificial Sequence
  Synthetic
ggggaaauuuaaaaggaugu

SEQ ID NO: 725991 - RNA, 20 nt, Artificial Sequence
  Synthetic
gccuuccaagaauaggaugu

SEQ ID NO: 725992 - RNA, 20 nt, Artificial Sequence
  Synthetic
guggaauauugaagggaugu

SEQ ID NO: 725993 - RNA, 20 nt, Artificial Sequence
  Synthetic
ggggcuuaaaaccuggaugu

SEQ ID NO: 725994 - RNA, 20 nt, Artificial Sequence
  Synthetic
guagccaggcguguggaugu

SEQ ID NO: 725995 - RNA, 20 nt, Artificial Sequence
  Synthetic
gaguugggguuucaugaugu

SEQ ID NO: 725996 - RNA, 20 nt, Artificial Sequence
  Synthetic
gcuacuugggaggcugaugu

SEQ ID NO: 725997 - RNA, 20 nt, Artificial Sequence
  Synthetic
gaacuuuggaacucugaugu

SEQ ID NO: 725998 - RNA, 20 nt, Artificial Sequence
  Synthetic
gucacuuuagguguugaugu

SEQ ID NO: 725999 - RNA, 20 nt, Artificial Sequence
  Synthetic
gaaugguuagauuuugaugu

SEQ ID NO: 726000 - RNA, 20 nt, Artificial Sequence
  Synthetic
gauguuguugauagauaugu

SEQ ID NO: 726001 - RNA, 20 nt, Artificial Sequence
  Synthetic
guaauccaguuuggauaugu

SEQ ID NO: 726002 - RNA, 20 nt, Artificial Sequence
  Synthetic
ggguacauauauauauaugu

SEQ ID NO: 726003 - RNA, 20 nt, Artificial Sequence
  Synthetic
guaauguuuuaauuauaugu

SEQ ID NO: 726004 - RNA, 20 nt, Artificial Sequence
  Synthetic
ggggacuuccuuuuauaugu

SEQ ID NO: 726005 - RNA, 20 nt, Artificial Sequence
  Synthetic
gaaauauuuaaacacuaugu

SEQ ID NO: 726006 - RNA, 20 nt, Artificial Sequence
  Synthetic
gaaacguaguuucacuaugu

SEQ ID NO: 726007 - RNA, 20 nt, Artificial Sequence
  Synthetic
gagacaggguuucacuaugu

SEQ ID NO: 726008 - RNA, 20 nt, Artificial Sequence
  Synthetic
gagacgggguuucacuaugu

SEQ ID NO: 726009 - RNA, 20 nt, Artificial Sequence
  Synthetic
ggacuugaaggagccuaugu

SEQ ID NO: 726010 - RNA, 20 nt, Artificial Sequence
  Synthetic
gcauggcucagauucuaugu

SEQ ID NO: 726011 - RNA, 20 nt, Artificial Sequence
  Synthetic
guuuauucagagaaguaugu

SEQ ID NO: 726012 - RNA, 20 nt, Artificial Sequence
  Synthetic
gcaaaauauacaagguaugu

SEQ ID NO: 726013 - RNA, 20 nt, Artificial Sequence
  Synthetic
gucuuuucuuuuagguaugu

SEQ ID NO: 726014 - RNA, 20 nt, Artificial Sequence
  Synthetic
guauucuugaauaauuaugu

SEQ ID NO: 726015 - RNA, 20 nt, Artificial Sequence
  Synthetic
gggcuuucagaguauuaugu

SEQ ID NO: 726016 - RNA, 20 nt, Artificial Sequence
  Synthetic
ggauagugaaggauuuaugu

SEQ ID NO: 726017 - RNA, 20 nt, Artificial Sequence
  Synthetic
gccucugaauauuuuuaugu

SEQ ID NO: 726018 - RNA, 20 nt, Artificial Sequence
  Synthetic
gcuuuggaaauuuuuuaugu

SEQ ID NO: 726019 - RNA, 20 nt, Artificial Sequence
  Synthetic
gugcucagauagaaaacugu

SEQ ID NO: 726020 - RNA, 20 nt, Artificial Sequence
  Synthetic
gcccaucucccacaaacugu

SEQ ID NO: 726021 - RNA, 20 nt, Artificial Sequence
  Synthetic
gacaaguauuuuguaacugu

SEQ ID NO: 726022 - RNA, 20 nt, Artificial Sequence
  Synthetic
gucaaaaaugaguuaacugu

SEQ ID NO: 726023 - RNA, 20 nt, Artificial Sequence
  Synthetic
gcaguuccuucuuuaacugu

SEQ ID NO: 726024 - RNA, 20 nt, Artificial Sequence
  Synthetic
ggcuugucuuuuuuaacugu

SEQ ID NO: 726025 - RNA, 20 nt, Artificial Sequence
  Synthetic
gugauccuaggaaacacugu

SEQ ID NO: 726026 - RNA, 20 nt, Artificial Sequence
  Synthetic
gcauguaaucccagcacugu

SEQ ID NO: 726027 - RNA, 20 nt, Artificial Sequence
  Synthetic
gccuguaaucccagcacugu

SEQ ID NO: 726028 - RNA, 20 nt, Artificial Sequence
  Synthetic
gcuucauaaugcaucacugu

SEQ ID NO: 726029 - RNA, 20 nt, Artificial Sequence
  Synthetic
gcaucuauguuagucacugu

SEQ ID NO: 726030 - RNA, 20 nt, Artificial Sequence
  Synthetic
gguguuguagcagauacugu

SEQ ID NO: 726031 - RNA, 20 nt, Artificial Sequence
  Synthetic
ggcuuucugguaaguacugu

SEQ ID NO: 726032 - RNA, 20 nt, Artificial Sequence
  Synthetic
ggagucacuuuuguuacugu

SEQ ID NO: 726033 - RNA, 20 nt, Artificial Sequence
  Synthetic
gcaccuuuucacauaccugu

SEQ ID NO: 726034 - RNA, 20 nt, Artificial Sequence
  Synthetic
gagguggaguuucacccugu

SEQ ID NO: 726035 - RNA, 20 nt, Artificial Sequence
  Synthetic
ggggaaugcuuauacccugu

SEQ ID NO: 726036 - RNA, 20 nt, Artificial Sequence
  Synthetic
gccauucuggguggcccugu

SEQ ID NO: 726037 - RNA, 20 nt, Artificial Sequence
  Synthetic
gcauucaggauucagccugu

SEQ ID NO: 726038 - RNA, 20 nt, Artificial Sequence
  Synthetic
gaaagucagugguagccugu

SEQ ID NO: 726039 - RNA, 20 nt, Artificial Sequence
  Synthetic
ggaaaagcaguuuugccugu

SEQ ID NO: 726040 - RNA, 20 nt, Artificial Sequence
  Synthetic
gaggguccuucggguccugu

SEQ ID NO: 726041 - RNA, 20 nt, Artificial Sequence
  Synthetic
ggaaauuuuggcaaagcugu

SEQ ID NO: 726042 - RNA, 20 nt, Artificial Sequence
  Synthetic
gaacucaaccaccaagcugu

SEQ ID NO: 726043 - RNA, 20 nt, Artificial Sequence
  Synthetic
gauauaaccccaaaggcugu

SEQ ID NO: 726044 - RNA, 20 nt, Artificial Sequence
  Synthetic
guggagcuacccaaggcugu

SEQ ID NO: 726045 - RNA, 20 nt, Artificial Sequence
  Synthetic
guuaaagaucagauggcugu

SEQ ID NO: 726046 - RNA, 20 nt, Artificial Sequence
  Synthetic
gauaucugacagcuggcugu

SEQ ID NO: 726047 - RNA, 20 nt, Artificial Sequence
  Synthetic
gagccaaacaaauuggcugu

SEQ ID NO: 726048 - RNA, 20 nt, Artificial Sequence
  Synthetic
gacagaauuuucuuggcugu

SEQ ID NO: 726049 - RNA, 20 nt, Artificial Sequence
  Synthetic
gaacuggggcucaaugcugu

SEQ ID NO: 726050 - RNA, 20 nt, Artificial Sequence
  Synthetic
guaaagcgagcacaugcugu

SEQ ID NO: 726051 - RNA, 20 nt, Artificial Sequence
  Synthetic
gggaaggcaaguuaugcugu

SEQ ID NO: 726052 - RNA, 20 nt, Artificial Sequence
  Synthetic
ggauuagaaaagacugcugu

SEQ ID NO: 726053 - RNA, 20 nt, Artificial Sequence
  Synthetic
gaggaugaagagggugcugu

SEQ ID NO: 726054 - RNA, 20 nt, Artificial Sequence
  Synthetic
gauggaggcgauugugcugu

SEQ ID NO: 726055 - RNA, 20 nt, Artificial Sequence
  Synthetic
gaguuuuucuuuaaaucugu

SEQ ID NO: 726056 - RNA, 20 nt, Artificial Sequence
  Synthetic
guacagaauugagaaucugu

SEQ ID NO: 726057 - RNA, 20 nt, Artificial Sequence
  Synthetic
gcuuccagguguggaucugu

SEQ ID NO: 726058 - RNA, 20 nt, Artificial Sequence
  Synthetic
gaacauuauagguuaucugu

SEQ ID NO: 726059 - RNA, 20 nt, Artificial Sequence
  Synthetic
guugccucacuguccucugu

SEQ ID NO: 726060 - RNA, 20 nt, Artificial Sequence
  Synthetic
ggguuuucuuuugucucugu

SEQ ID NO: 726061 - RNA, 20 nt, Artificial Sequence
  Synthetic
gcugaaacaacauucucugu

SEQ ID NO: 726062 - RNA, 20 nt, Artificial Sequence
  Synthetic
gugugugugugugugucugu

SEQ ID NO: 726063 - RNA, 20 nt, Artificial Sequence
  Synthetic
guuuuuggaaauucuucugu

SEQ ID NO: 726064 - RNA, 20 nt, Artificial Sequence
  Synthetic
gagauauaugguucuucugu

SEQ ID NO: 726065 - RNA, 20 nt, Artificial Sequence
  Synthetic
gacucagccucccaaagugu

SEQ ID NO: 726066 - RNA, 20 nt, Artificial Sequence
  Synthetic
gccucagccucccaaagugu

SEQ ID NO: 726067 - RNA, 20 nt, Artificial Sequence
  Synthetic
gauaugucauuuccaagugu

SEQ ID NO: 726068 - RNA, 20 nt, Artificial Sequence
  Synthetic
ggugaugacuuuucaagugu

SEQ ID NO: 726069 - RNA, 20 nt, Artificial Sequence
  Synthetic
gaugggggugauggcagugu

SEQ ID NO: 726070 - RNA, 20 nt, Artificial Sequence
  Synthetic
guaaacaauuacaucagugu

SEQ ID NO: 726071 - RNA, 20 nt, Artificial Sequence
  Synthetic
gauuucugauuggagagugu

SEQ ID NO: 726072 - RNA, 20 nt, Artificial Sequence
  Synthetic
gcuccuauucaacauagugu

SEQ ID NO: 726073 - RNA, 20 nt, Artificial Sequence
  Synthetic
gucaagcugguugauagugu

SEQ ID NO: 726074 - RNA, 20 nt, Artificial Sequence
  Synthetic
ggggagcuggcagcuagugu

SEQ ID NO: 726075 - RNA, 20 nt, Artificial Sequence
  Synthetic
gcacagcugaaagguagugu

SEQ ID NO: 726076 - RNA, 20 nt, Artificial Sequence
  Synthetic
gggauacucaagcuuagugu

SEQ ID NO: 726077 - RNA, 20 nt, Artificial Sequence
  Synthetic
gagacaggguuucaccgugu

SEQ ID NO: 726078 - RNA, 20 nt, Artificial Sequence
  Synthetic
guggcuaauggcuaccgugu

SEQ ID NO: 726079 - RNA, 20 nt, Artificial Sequence
  Synthetic
guggaaggcagagcaggugu

SEQ ID NO: 726080 - RNA, 20 nt, Artificial Sequence
  Synthetic
guccauucccagcccggugu

SEQ ID NO: 726081 - RNA, 20 nt, Artificial Sequence
  Synthetic
gcugauuugucugggggugu

SEQ ID NO: 726082 - RNA, 20 nt, Artificial Sequence
  Synthetic
gacuucucuuuugggggugu

SEQ ID NO: 726083 - RNA, 20 nt, Artificial Sequence
  Synthetic
guaugauggaaucugggugu

SEQ ID NO: 726084 - RNA, 20 nt, Artificial Sequence
  Synthetic
gcuuaacaaugcuugggugu

SEQ ID NO: 726085 - RNA, 20 nt, Artificial Sequence
  Synthetic
gauaaaucuagcaguggugu

SEQ ID NO: 726086 - RNA, 20 nt, Artificial Sequence
  Synthetic
gggggugugggacguggugu

SEQ ID NO: 726087 - RNA, 20 nt, Artificial Sequence
  Synthetic
gaauucauguuaguuggugu

SEQ ID NO: 726088 - RNA, 20 nt, Artificial Sequence
  Synthetic
ggaauguuuuugguuggugu

SEQ ID NO: 726089 - RNA, 20 nt, Artificial Sequence
  Synthetic
gcauuucagcuaaaaugugu

SEQ ID NO: 726090 - RNA, 20 nt, Artificial Sequence
  Synthetic
gucucccauuauuaaugugu

SEQ ID NO: 726091 - RNA, 20 nt, Artificial Sequence
  Synthetic
gauucagggaguacaugugu

SEQ ID NO: 726092 - RNA, 20 nt, Artificial Sequence
  Synthetic
ggauugucuuuuacaugugu

SEQ ID NO: 726093 - RNA, 20 nt, Artificial Sequence
  Synthetic
gucccccaaauuucaugugu

SEQ ID NO: 726094 - RNA, 20 nt, Artificial Sequence
  Synthetic
ggcuacauggauggaugugu

SEQ ID NO: 726095 - RNA, 20 nt, Artificial Sequence
  Synthetic
guauguguucccuuaugugu

SEQ ID NO: 726096 - RNA, 20 nt, Artificial Sequence
  Synthetic
gagucggaguuucacugugu

SEQ ID NO: 726097 - RNA, 20 nt, Artificial Sequence
  Synthetic
gagacaggguuucacugugu

SEQ ID NO: 726098 - RNA, 20 nt, Artificial Sequence
  Synthetic
gucucucacuauuacugugu

SEQ ID NO: 726099 - RNA, 20 nt, Artificial Sequence
  Synthetic
gguuuuuuuuuaaagugugu

SEQ ID NO: 726100 - RNA, 20 nt, Artificial Sequence
  Synthetic
guaauugcugaacagugugu

SEQ ID NO: 726101 - RNA, 20 nt, Artificial Sequence
  Synthetic
guggcaaaaccuucgugugu

SEQ ID NO: 726102 - RNA, 20 nt, Artificial Sequence
  Synthetic
gccauaucuguagggugugu

SEQ ID NO: 726103 - RNA, 20 nt, Artificial Sequence
  Synthetic
guggccaauuacaugugugu

SEQ ID NO: 726104 - RNA, 20 nt, Artificial Sequence
  Synthetic
guauauaggaggaugugugu

SEQ ID NO: 726105 - RNA, 20 nt, Artificial Sequence
  Synthetic
gaaaaaaaauguaugugugu

SEQ ID NO: 726106 - RNA, 20 nt, Artificial Sequence
  Synthetic
gaauuuaugucccugugugu

SEQ ID NO: 726107 - RNA, 20 nt, Artificial Sequence
  Synthetic
gguacaugugcacauugugu

SEQ ID NO: 726108 - RNA, 20 nt, Artificial Sequence
  Synthetic
ggcaggguuggggguugugu

SEQ ID NO: 726109 - RNA, 20 nt, Artificial Sequence
  Synthetic
gaaaguuuacaaauuugugu

SEQ ID NO: 726110 - RNA, 20 nt, Artificial Sequence
  Synthetic
guauuccaugguauuugugu

SEQ ID NO: 726111 - RNA, 20 nt, Artificial Sequence
  Synthetic
ggcccuaagucccuuugugu

SEQ ID NO: 726112 - RNA, 20 nt, Artificial Sequence
  Synthetic
gugguuuauagguuuugugu

SEQ ID NO: 726113 - RNA, 20 nt, Artificial Sequence
  Synthetic
gaaaaaaaaucaguaauugu

SEQ ID NO: 726114 - RNA, 20 nt, Artificial Sequence
  Synthetic
gucaucugcaacaacauugu

SEQ ID NO: 726115 - RNA, 20 nt, Artificial Sequence
  Synthetic
gaacacuuagaggacauugu

SEQ ID NO: 726116 - RNA, 20 nt, Artificial Sequence
  Synthetic
ggccccaugcuggacauugu

SEQ ID NO: 726117 - RNA, 20 nt, Artificial Sequence
  Synthetic
guugaucgcucuaccauugu

SEQ ID NO: 726118 - RNA, 20 nt, Artificial Sequence
  Synthetic
gcaacaacucaccccauugu

SEQ ID NO: 726119 - RNA, 20 nt, Artificial Sequence
  Synthetic
gaaaaggcagagagcauugu

SEQ ID NO: 726120 - RNA, 20 nt, Artificial Sequence
  Synthetic
gcuaaauggccaggcauugu

SEQ ID NO: 726121 - RNA, 20 nt, Artificial Sequence
  Synthetic
gcagcuauccucugcauugu

SEQ ID NO: 726122 - RNA, 20 nt, Artificial Sequence
  Synthetic
guggcuguccugugcauugu

SEQ ID NO: 726123 - RNA, 20 nt, Artificial Sequence
  Synthetic
uuaauccagucuaucauugu

SEQ ID NO: 726124 - RNA, 20 nt, Artificial Sequence
  Synthetic
guguuauaguaccucauugu

SEQ ID NO: 726125 - RNA, 20 nt, Artificial Sequence
  Synthetic
guaacuuccccagugauugu

SEQ ID NO: 726126 - RNA, 20 nt, Artificial Sequence
  Synthetic
gaaucucacaaacauauugu

SEQ ID NO: 726127 - RNA, 20 nt, Artificial Sequence
  Synthetic
gaagaaagccauuauauugu

SEQ ID NO: 726128 - RNA, 20 nt, Artificial Sequence
  Synthetic
gacuuuuuuuuuccuauugu

SEQ ID NO: 726129 - RNA, 20 nt, Artificial Sequence
  Synthetic
gugcuacagggucuuauugu

SEQ ID NO: 726130 - RNA, 20 nt, Artificial Sequence
  Synthetic
gacauuuuuuauuuuauugu

SEQ ID NO: 726131 - RNA, 20 nt, Artificial Sequence
  Synthetic
gaaaaauauuucacacuugu

SEQ ID NO: 726132 - RNA, 20 nt, Artificial Sequence
  Synthetic
gucuuucucugaagacuugu

SEQ ID NO: 726133 - RNA, 20 nt, Artificial Sequence
  Synthetic
gauauuauuauuuuacuugu

SEQ ID NO: 726134 - RNA, 20 nt, Artificial Sequence
  Synthetic
ggaaggucugauaaccuugu

SEQ ID NO: 726135 - RNA, 20 nt, Artificial Sequence
  Synthetic
gagacgggguuucaccuugu

SEQ ID NO: 726136 - RNA, 20 nt, Artificial Sequence
  Synthetic
gagacuggguuucaccuugu

SEQ ID NO: 726137 - RNA, 20 nt, Artificial Sequence
  Synthetic
gguuuagucuaaucccuugu

SEQ ID NO: 726138 - RNA, 20 nt, Artificial Sequence
  Synthetic
gucagugaacuacggcuugu

SEQ ID NO: 726139 - RNA, 20 nt, Artificial Sequence
  Synthetic
guauguuuucagaugcuugu

SEQ ID NO: 726140 - RNA, 20 nt, Artificial Sequence
  Synthetic
gcuuuuuuucauaugcuugu

SEQ ID NO: 726141 - RNA, 20 nt, Artificial Sequence
  Synthetic
ggcuauuuucuggaucuugu

SEQ ID NO: 726142 - RNA, 20 nt, Artificial Sequence
  Synthetic
gcaggcacacagccucuugu

SEQ ID NO: 726143 - RNA, 20 nt, Artificial Sequence
  Synthetic
gucaaagaucagauaguugu

SEQ ID NO: 726144 - RNA, 20 nt, Artificial Sequence
  Synthetic
ggguagaaaaaucuaguugu

SEQ ID NO: 726145 - RNA, 20 nt, Artificial Sequence
  Synthetic
gaugaguucauguccguugu

SEQ ID NO: 726146 - RNA, 20 nt, Artificial Sequence
  Synthetic
gaaauuuucucccauguugu

SEQ ID NO: 726147 - RNA, 20 nt, Artificial Sequence
  Synthetic
ggaugcuuauacacuguugu

SEQ ID NO: 726148 - RNA, 20 nt, Artificial Sequence
  Synthetic
gcucucuguuugucuguugu

SEQ ID NO: 726149 - RNA, 20 nt, Artificial Sequence
  Synthetic
guaauacugcuaccauuugu

SEQ ID NO: 726150 - RNA, 20 nt, Artificial Sequence
  Synthetic
gauuuauuguuaucauuugu

SEQ ID NO: 726151 - RNA, 20 nt, Artificial Sequence
  Synthetic
gaaucuuacuauugauuugu

SEQ ID NO: 726152 - RNA, 20 nt, Artificial Sequence
  Synthetic
gagagugcauggauauuugu

SEQ ID NO: 726153 - RNA, 20 nt, Artificial Sequence
  Synthetic
gaccuuuaaaauauauuugu

SEQ ID NO: 726154 - RNA, 20 nt, Artificial Sequence
  Synthetic
gcauguucucacuuauuugu

SEQ ID NO: 726155 - RNA, 20 nt, Artificial Sequence
  Synthetic
ggagcuaaauacuuauuugu

SEQ ID NO: 726156 - RNA, 20 nt, Artificial Sequence
  Synthetic
guaaauauuuuagacuuugu

SEQ ID NO: 726157 - RNA, 20 nt, Artificial Sequence
  Synthetic
gaugaguucacauccuuugu

SEQ ID NO: 726158 - RNA, 20 nt, Artificial Sequence
  Synthetic
gaugaguucaaguccuuugu

SEQ ID NO: 726159 - RNA, 20 nt, Artificial Sequence
  Synthetic
gaugaguucacguccuuugu

SEQ ID NO: 726160 - RNA, 20 nt, Artificial Sequence
  Synthetic
gaugaguucauguccuuugu

SEQ ID NO: 726161 - RNA, 20 nt, Artificial Sequence
  Synthetic
guuuaaaaaaauggcuuugu

SEQ ID NO: 726162 - RNA, 20 nt, Artificial Sequence
  Synthetic
gaaaacaaugcuggcuuugu

SEQ ID NO: 726163 - RNA, 20 nt, Artificial Sequence
  Synthetic
gccuggagcugcugcuuugu

SEQ ID NO: 726164 - RNA, 20 nt, Artificial Sequence
  Synthetic
guaauacuagaaaucuuugu

SEQ ID NO: 726165 - RNA, 20 nt, Artificial Sequence
  Synthetic
gaaacagcuucucucuuugu

SEQ ID NO: 726166 - RNA, 20 nt, Artificial Sequence
  Synthetic
gggagucuaagucucuuugu

SEQ ID NO: 726167 - RNA, 20 nt, Artificial Sequence
  Synthetic
gggcaucuaugucucuuugu

SEQ ID NO: 726168 - RNA, 20 nt, Artificial Sequence
  Synthetic
gguccugggcuuuucuuugu

SEQ ID NO: 726169 - RNA, 20 nt, Artificial Sequence
  Synthetic
gaacaaguuuucaaguuugu

SEQ ID NO: 726170 - RNA, 20 nt, Artificial Sequence
  Synthetic
ggcauuuuuuugaaguuugu

SEQ ID NO: 726171 - RNA, 20 nt, Artificial Sequence
  Synthetic
gaaaacaauauuaaguuugu

SEQ ID NO: 726172 - RNA, 20 nt, Artificial Sequence
  Synthetic
gaaauuuaauuuaaguuugu

SEQ ID NO: 726173 - RNA, 20 nt, Artificial Sequence
  Synthetic
gacauaacuuggggguuugu

SEQ ID NO: 726174 - RNA, 20 nt, Artificial Sequence
  Synthetic
gagcauuuuuucauguuugu

SEQ ID NO: 726175 - RNA, 20 nt, Artificial Sequence
  Synthetic
gagcuuuuuuucauguuugu

SEQ ID NO: 726176 - RNA, 20 nt, Artificial Sequence
  Synthetic
gguuuuuuucuuauguuugu

SEQ ID NO: 726177 - RNA, 20 nt, Artificial Sequence
  Synthetic
guaaacuuugagacuuuugu

SEQ ID NO: 726178 - RNA, 20 nt, Artificial Sequence
  Synthetic
gccacugaaauuacuuuugu

SEQ ID NO: 726179 - RNA, 20 nt, Artificial Sequence
  Synthetic
ggugacaaucccaguuuugu

SEQ ID NO: 726180 - RNA, 20 nt, Artificial Sequence
  Synthetic
guuacaaucacuaguuuugu

SEQ ID NO: 726181 - RNA, 20 nt, Artificial Sequence
  Synthetic
gucuuugcaauuguuuuugu

SEQ ID NO: 726182 - RNA, 20 nt, Artificial Sequence
  Synthetic
gagagggaacuguuuuuugu

SEQ ID NO: 726183 - RNA, 20 nt, Artificial Sequence
  Synthetic
ggccuguggcuaccaaaauu

SEQ ID NO: 726184 - RNA, 20 nt, Artificial Sequence
  Synthetic
gccuauuuucagucaaaauu

SEQ ID NO: 726185 - RNA, 20 nt, Artificial Sequence
  Synthetic
ggcaauuuugguucaaaauu

SEQ ID NO: 726186 - RNA, 20 nt, Artificial Sequence
  Synthetic
guguggccugugggaaaauu

SEQ ID NO: 726187 - RNA, 20 nt, Artificial Sequence
  Synthetic
gaaucagaguucauaaaauu

SEQ ID NO: 726188 - RNA, 20 nt, Artificial Sequence
  Synthetic
gugucuuuaagacacaaauu

SEQ ID NO: 726189 - RNA, 20 nt, Artificial Sequence
  Synthetic
ggaaaaaaauuccacaaauu

SEQ ID NO: 726190 - RNA, 20 nt, Artificial Sequence
  Synthetic
gggacagccggagacaaauu

SEQ ID NO: 726191 - RNA, 20 nt, Artificial Sequence
  Synthetic
guccugcuuugagccaaauu

SEQ ID NO: 726192 - RNA, 20 nt, Artificial Sequence
  Synthetic
gaguguggcagcugcaaauu

SEQ ID NO: 726193 - RNA, 20 nt, Artificial Sequence
  Synthetic
gaaauaaaauacaucaaauu

SEQ ID NO: 726194 - RNA, 20 nt, Artificial Sequence
  Synthetic
ggaagacugucauucaaauu

SEQ ID NO: 726195 - RNA, 20 nt, Artificial Sequence
  Synthetic
gaauucaacagaaggaaauu

SEQ ID NO: 726196 - RNA, 20 nt, Artificial Sequence
  Synthetic
gccugagaaauauggaaauu

SEQ ID NO: 726197 - RNA, 20 nt, Artificial Sequence
  Synthetic
ggaaccagcaucuugaaauu

SEQ ID NO: 726198 - RNA, 20 nt, Artificial Sequence
  Synthetic
guaggaagacaagauaaauu

SEQ ID NO: 726199 - RNA, 20 nt, Artificial Sequence
  Synthetic
gguccucauguugcuaaauu

SEQ ID NO: 726200 - RNA, 20 nt, Artificial Sequence
  Synthetic
gacugaaaccauaguaaauu

SEQ ID NO: 726201 - RNA, 20 nt, Artificial Sequence
  Synthetic
gugguuuggcaaauuaaauu

SEQ ID NO: 726202 - RNA, 20 nt, Artificial Sequence
  Synthetic
gauuagggaggcauuaaauu

SEQ ID NO: 726203 - RNA, 20 nt, Artificial Sequence
  Synthetic
ggauuuauuauuuuuaaauu

SEQ ID NO: 726204 - RNA, 20 nt, Artificial Sequence
  Synthetic
gggcaagaaguauaacaauu

SEQ ID NO: 726205 - RNA, 20 nt, Artificial Sequence
  Synthetic
gaaagaaaaucuugacaauu

SEQ ID NO: 726206 - RNA, 20 nt, Artificial Sequence
  Synthetic
ggucgauggucuuuacaauu

SEQ ID NO: 726207 - RNA, 20 nt, Artificial Sequence
  Synthetic
gucuuguccauuuuccaauu

SEQ ID NO: 726208 - RNA, 20 nt, Artificial Sequence
  Synthetic
gaguccuagccagagcaauu

SEQ ID NO: 726209 - RNA, 20 nt, Artificial Sequence
  Synthetic
ggaaguguuugaaggcaauu

SEQ ID NO: 726210 - RNA, 20 nt, Artificial Sequence
  Synthetic
gacacagaaaauaggcaauu

SEQ ID NO: 726211 - RNA, 20 nt, Artificial Sequence
  Synthetic
gccucaaucagguugcaauu

SEQ ID NO: 726212 - RNA, 20 nt, Artificial Sequence
  Synthetic
guugcacucagaugucaauu

SEQ ID NO: 726213 - RNA, 20 nt, Artificial Sequence
  Synthetic
gaaauaaaggguauucaauu

SEQ ID NO: 726214 - RNA, 20 nt, Artificial Sequence
  Synthetic
gcagaagguuuuuaagaauu

SEQ ID NO: 726215 - RNA, 20 nt, Artificial Sequence
  Synthetic
gaaguagaauucacagaauu

SEQ ID NO: 726216 - RNA, 20 nt, Artificial Sequence
  Synthetic
ggugagacuuuuggagaauu

SEQ ID NO: 726217 - RNA, 20 nt, Artificial Sequence
  Synthetic
guaaggugggccugagaauu

SEQ ID NO: 726218 - RNA, 20 nt, Artificial Sequence
  Synthetic
gagcuauaaaagauagaauu

SEQ ID NO: 726219 - RNA, 20 nt, Artificial Sequence
  Synthetic
gguuucuucuccuuagaauu

SEQ ID NO: 726220 - RNA, 20 nt, Artificial Sequence
  Synthetic
gauaaauauauuaaggaauu

SEQ ID NO: 726221 - RNA, 20 nt, Artificial Sequence
  Synthetic
gagcuuggcccugaggaauu

SEQ ID NO: 726222 - RNA, 20 nt, Artificial Sequence
  Synthetic
gaguaaaggugaaaugaauu

SEQ ID NO: 726223 - RNA, 20 nt, Artificial Sequence
  Synthetic
gaaacugacuggccugaauu

SEQ ID NO: 726224 - RNA, 20 nt, Artificial Sequence
  Synthetic
gcaugaagggcuguugaauu

SEQ ID NO: 726225 - RNA, 20 nt, Artificial Sequence
  Synthetic
guaaaccuagaguuugaauu

SEQ ID NO: 726226 - RNA, 20 nt, Artificial Sequence
  Synthetic
gaacucugcacuuuugaauu

SEQ ID NO: 726227 - RNA, 20 nt, Artificial Sequence
  Synthetic
guauuauuacgaaaauaauu

SEQ ID NO: 726228 - RNA, 20 nt, Artificial Sequence
  Synthetic
gagacaguacuucaauaauu

SEQ ID NO: 726229 - RNA, 20 nt, Artificial Sequence
  Synthetic
gagacacuagaguaauaauu

SEQ ID NO: 726230 - RNA, 20 nt, Artificial Sequence
  Synthetic
gauucuuuuaaaacauaauu

SEQ ID NO: 726231 - RNA, 20 nt, Artificial Sequence
  Synthetic
gcauuuucucacucauaauu

SEQ ID NO: 726232 - RNA, 20 nt, Artificial Sequence
  Synthetic
guauccuaaaauaacuaauu

SEQ ID NO: 726233 - RNA, 20 nt, Artificial Sequence
  Synthetic
ggaggauuugaagccuaauu

SEQ ID NO: 726234 - RNA, 20 nt, Artificial Sequence
  Synthetic
gaaaguauagaggccuaauu

SEQ ID NO: 726235 - RNA, 20 nt, Artificial Sequence
  Synthetic
gcugcaauuuucagcuaauu

SEQ ID NO: 726236 - RNA, 20 nt, Artificial Sequence
  Synthetic
ggauauauguuuuucuaauu

SEQ ID NO: 726237 - RNA, 20 nt, Artificial Sequence
  Synthetic
guuuacuuuuugaaguaauu

SEQ ID NO: 726238 - RNA, 20 nt, Artificial Sequence
  Synthetic
guacaguauaggcaguaauu

SEQ ID NO: 726239 - RNA, 20 nt, Artificial Sequence
  Synthetic
guggagaggagagaguaauu

SEQ ID NO: 726240 - RNA, 20 nt, Artificial Sequence
  Synthetic
ggggccuuuggaagguaauu

SEQ ID NO: 726241 - RNA, 20 nt, Artificial Sequence
  Synthetic
gaaaauaacuuguauuaauu

SEQ ID NO: 726242 - RNA, 20 nt, Artificial Sequence
  Synthetic
guuaguuuuaaucuuuaauu

SEQ ID NO: 726243 - RNA, 20 nt, Artificial Sequence
  Synthetic
gugauucaaguauuuuaauu

SEQ ID NO: 726244 - RNA, 20 nt, Artificial Sequence
  Synthetic
guucagagaucaaaaacauu

SEQ ID NO: 726245 - RNA, 20 nt, Artificial Sequence
  Synthetic
guccccauaaaagaaacauu

SEQ ID NO: 726246 - RNA, 20 nt, Artificial Sequence
  Synthetic
gauacugcauuuuaaacauu

SEQ ID NO: 726247 - RNA, 20 nt, Artificial Sequence
  Synthetic
guuugcuuuaacccaacauu

SEQ ID NO: 726248 - RNA, 20 nt, Artificial Sequence
  Synthetic
ggacuagggcgugcaacauu

SEQ ID NO: 726249 - RNA, 20 nt, Artificial Sequence
  Synthetic
ggaaaaagucucucaacauu

SEQ ID NO: 726250 - RNA, 20 nt, Artificial Sequence
  Synthetic
gaacaaauggaaagaacauu

SEQ ID NO: 726251 - RNA, 20 nt, Artificial Sequence
  Synthetic
guuuuggaauuuggaacauu

SEQ ID NO: 726252 - RNA, 20 nt, Artificial Sequence
  Synthetic
guaacucgucaguuaacauu

SEQ ID NO: 726253 - RNA, 20 nt, Artificial Sequence
  Synthetic
guuagauucagagacacauu

SEQ ID NO: 726254 - RNA, 20 nt, Artificial Sequence
  Synthetic
gauaagcucagucccacauu

SEQ ID NO: 726255 - RNA, 20 nt, Artificial Sequence
  Synthetic
gccugcaaucccagcacauu

SEQ ID NO: 726256 - RNA, 20 nt, Artificial Sequence
  Synthetic
gaaaaaugacuggucacauu

SEQ ID NO: 726257 - RNA, 20 nt, Artificial Sequence
  Synthetic
gccauacauauuuucacauu

SEQ ID NO: 726258 - RNA, 20 nt, Artificial Sequence
  Synthetic
gucaaguuucaaaagacauu

SEQ ID NO: 726259 - RNA, 20 nt, Artificial Sequence
  Synthetic
gucagguuucaucagacauu

SEQ ID NO: 726260 - RNA, 20 nt, Artificial Sequence
  Synthetic
guucuaaaaagggagacauu

SEQ ID NO: 726261 - RNA, 20 nt, Artificial Sequence
  Synthetic
ggaugagccuggaggacauu

SEQ ID NO: 726262 - RNA, 20 nt, Artificial Sequence
  Synthetic
gucuaucauugucggacauu

SEQ ID NO: 726263 - RNA, 20 nt, Artificial Sequence
  Synthetic
gucuaucacugauggacauu

SEQ ID NO: 726264 - RNA, 20 nt, Artificial Sequence
  Synthetic
gucuaucauugauggacauu

SEQ ID NO: 726265 - RNA, 20 nt, Artificial Sequence
  Synthetic
gucuauuauugauggacauu

SEQ ID NO: 726266 - RNA, 20 nt, Artificial Sequence
  Synthetic
gucuaucacuguuggacauu

SEQ ID NO: 726267 - RNA, 20 nt, Artificial Sequence
  Synthetic
gucuaucauuguuggacauu

SEQ ID NO: 726268 - RNA, 20 nt, Artificial Sequence
  Synthetic
guuccuugaaaugugacauu

SEQ ID NO: 726269 - RNA, 20 nt, Artificial Sequence
  Synthetic
ggucauaagauguguacauu

SEQ ID NO: 726270 - RNA, 20 nt, Artificial Sequence
  Synthetic
gucuuuauggaucuuacauu

SEQ ID NO: 726271 - RNA, 20 nt, Artificial Sequence
  Synthetic
gugggcugaugguuuacauu

SEQ ID NO: 726272 - RNA, 20 nt, Artificial Sequence
  Synthetic
guugcaugaagucaaccauu

SEQ ID NO: 726273 - RNA, 20 nt, Artificial Sequence
  Synthetic
ggccccccugauccaccauu

SEQ ID NO: 726274 - RNA, 20 nt, Artificial Sequence
  Synthetic
guucuuuuucaggucccauu

SEQ ID NO: 726275 - RNA, 20 nt, Artificial Sequence
  Synthetic
gucauaggaguaaagccauu

SEQ ID NO: 726276 - RNA, 20 nt, Artificial Sequence
  Synthetic
ggacaaaauuguuagccauu

SEQ ID NO: 726277 - RNA, 20 nt, Artificial Sequence
  Synthetic
gcuucagcccuauugccauu

SEQ ID NO: 726278 - RNA, 20 nt, Artificial Sequence
  Synthetic
gaaaauugaaauaauccauu

SEQ ID NO: 726279 - RNA, 20 nt, Artificial Sequence
  Synthetic
gaaagcucuagaaguccauu

SEQ ID NO: 726280 - RNA, 20 nt, Artificial Sequence
  Synthetic
gaggggggagggacagcauu

SEQ ID NO: 726281 - RNA, 20 nt, Artificial Sequence
  Synthetic
gcaaggggacagagagcauu

SEQ ID NO: 726282 - RNA, 20 nt, Artificial Sequence
  Synthetic
gcaaggggagggagagcauu

SEQ ID NO: 726283 - RNA, 20 nt, Artificial Sequence
  Synthetic
gcgaggggagggagagcauu

SEQ ID NO: 726284 - RNA, 20 nt, Artificial Sequence
  Synthetic
gucuaucauugaugagcauu

SEQ ID NO: 726285 - RNA, 20 nt, Artificial Sequence
  Synthetic
gcaaggggagggauagcauu

SEQ ID NO: 726286 - RNA, 20 nt, Artificial Sequence
  Synthetic
gcuaggggagggauagcauu

SEQ ID NO: 726287 - RNA, 20 nt, Artificial Sequence
  Synthetic
guuaggggagggauagcauu

SEQ ID NO: 726288 - RNA, 20 nt, Artificial Sequence
  Synthetic
gaagggggagggauagcauu

SEQ ID NO: 726289 - RNA, 20 nt, Artificial Sequence
  Synthetic
gacgggggagggauagcauu

SEQ ID NO: 726290 - RNA, 20 nt, Artificial Sequence
  Synthetic
gaggggggagggauagcauu

SEQ ID NO: 726291 - RNA, 20 nt, Artificial Sequence
  Synthetic
ggcuggggagggauagcauu

SEQ ID NO: 726292 - RNA, 20 nt, Artificial Sequence
  Synthetic
gaggguggagggauagcauu

SEQ ID NO: 726293 - RNA, 20 nt, Artificial Sequence
  Synthetic
gcuaggguagggauagcauu

SEQ ID NO: 726294 - RNA, 20 nt, Artificial Sequence
  Synthetic
gaauagaacacccaggcauu

SEQ ID NO: 726295 - RNA, 20 nt, Artificial Sequence
  Synthetic
guaaguaaacccuaggcauu

SEQ ID NO: 726296 - RNA, 20 nt, Artificial Sequence
  Synthetic
ggcucuuugauguaggcauu

SEQ ID NO: 726297 - RNA, 20 nt, Artificial Sequence
  Synthetic
guccaucacugaugggcauu

SEQ ID NO: 726298 - RNA, 20 nt, Artificial Sequence
  Synthetic
gucuaucacugaugggcauu

SEQ ID NO: 726299 - RNA, 20 nt, Artificial Sequence
  Synthetic
guauaucauugaugggcauu

SEQ ID NO: 726300 - RNA, 20 nt, Artificial Sequence
  Synthetic
gucuaucacuggugggcauu

SEQ ID NO: 726301 - RNA, 20 nt, Artificial Sequence
  Synthetic
gaggggggagggauggcauu

SEQ ID NO: 726302 - RNA, 20 nt, Artificial Sequence
  Synthetic
gaccauggcagacuggcauu

SEQ ID NO: 726303 - RNA, 20 nt, Artificial Sequence
  Synthetic
gaaauccaaaugcuggcauu

SEQ ID NO: 726304 - RNA, 20 nt, Artificial Sequence
  Synthetic
gcauggaaccaaguggcauu

SEQ ID NO: 726305 - RNA, 20 nt, Artificial Sequence
  Synthetic
gugguauaaauuuuggcauu

SEQ ID NO: 726306 - RNA, 20 nt, Artificial Sequence
  Synthetic
gaaauacuaaaaaaugcauu

SEQ ID NO: 726307 - RNA, 20 nt, Artificial Sequence
  Synthetic
ggacaaauaccuaaugcauu

SEQ ID NO: 726308 - RNA, 20 nt, Artificial Sequence
  Synthetic
guucuuagcuuccuugcauu

SEQ ID NO: 726309 - RNA, 20 nt, Artificial Sequence
  Synthetic
gcucaacaucacuaaucauu

SEQ ID NO: 726310 - RNA, 20 nt, Artificial Sequence
  Synthetic
ggcugaccucugucaucauu

SEQ ID NO: 726311 - RNA, 20 nt, Artificial Sequence
  Synthetic
ggagaggaguugugaucauu

SEQ ID NO: 726312 - RNA, 20 nt, Artificial Sequence
  Synthetic
guugaguuaguuugaucauu

SEQ ID NO: 726313 - RNA, 20 nt, Artificial Sequence
  Synthetic
gaaguaagaggaauaucauu

SEQ ID NO: 726314 - RNA, 20 nt, Artificial Sequence
  Synthetic
gauuaaacauggauaucauu

SEQ ID NO: 726315 - RNA, 20 nt, Artificial Sequence
  Synthetic
gacacaaauucacuaucauu

SEQ ID NO: 726316 - RNA, 20 nt, Artificial Sequence
  Synthetic
guauuuaaaaugcuaucauu

SEQ ID NO: 726317 - RNA, 20 nt, Artificial Sequence
  Synthetic
gauaauauauuauuaucauu

SEQ ID NO: 726318 - RNA, 20 nt, Artificial Sequence
  Synthetic
ggcaguagaacaaacucauu

SEQ ID NO: 726319 - RNA, 20 nt, Artificial Sequence
  Synthetic
guuuucuaaguaaacucauu

SEQ ID NO: 726320 - RNA, 20 nt, Artificial Sequence
  Synthetic
guauguuugagaugcucauu

SEQ ID NO: 726321 - RNA, 20 nt, Artificial Sequence
  Synthetic
ggagagagggacuucucauu

SEQ ID NO: 726322 - RNA, 20 nt, Artificial Sequence
  Synthetic
ggaaaacugucagagucauu

SEQ ID NO: 726323 - RNA, 20 nt, Artificial Sequence
  Synthetic
guucugaaaaaugugucauu

SEQ ID NO: 726324 - RNA, 20 nt, Artificial Sequence
  Synthetic
gcaauaaauaagcauucauu

SEQ ID NO: 726325 - RNA, 20 nt, Artificial Sequence
  Synthetic
gaguguuacugguauucauu

SEQ ID NO: 726326 - RNA, 20 nt, Artificial Sequence
  Synthetic
gacauuuuaauuucuucauu

SEQ ID NO: 726327 - RNA, 20 nt, Artificial Sequence
  Synthetic
gugcuuccuuuaauuucauu

SEQ ID NO: 726328 - RNA, 20 nt, Artificial Sequence
  Synthetic
gggaaaaaaauccuuucauu

SEQ ID NO: 726329 - RNA, 20 nt, Artificial Sequence
  Synthetic
guucucuauucuguuucauu

SEQ ID NO: 726330 - RNA, 20 nt, Artificial Sequence
  Synthetic
gccuucacuuuguuuucauu

SEQ ID NO: 726331 - RNA, 20 nt, Artificial Sequence
  Synthetic
guuggagcauuuuuuucauu

SEQ ID NO: 726332 - RNA, 20 nt, Artificial Sequence
  Synthetic
ggugacauuugcaaaagauu

SEQ ID NO: 726333 - RNA, 20 nt, Artificial Sequence
  Synthetic
gaugcuuuguuauaaagauu

SEQ ID NO: 726334 - RNA, 20 nt, Artificial Sequence
  Synthetic
gaggaagccuuaagaagauu

SEQ ID NO: 726335 - RNA, 20 nt, Artificial Sequence
  Synthetic
gucaauggaaguagaagauu

SEQ ID NO: 726336 - RNA, 20 nt, Artificial Sequence
  Synthetic
guaaaaguacauguaagauu

SEQ ID NO: 726337 - RNA, 20 nt, Artificial Sequence
  Synthetic
gguuccuccaguaacagauu

SEQ ID NO: 726338 - RNA, 20 nt, Artificial Sequence
  Synthetic
gaacaggcaaacuacagauu

SEQ ID NO: 726339 - RNA, 20 nt, Artificial Sequence
  Synthetic
gcucaaagaccuuacagauu

SEQ ID NO: 726340 - RNA, 20 nt, Artificial Sequence
  Synthetic
gaucaaaauaccagcagauu

SEQ ID NO: 726341 - RNA, 20 nt, Artificial Sequence
  Synthetic
ggauuuuggauuuucagauu

SEQ ID NO: 726342 - RNA, 20 nt, Artificial Sequence
  Synthetic
gaaaugaaugaggagagauu

SEQ ID NO: 726343 - RNA, 20 nt, Artificial Sequence
  Synthetic
gaaagaaggaaauagagauu

SEQ ID NO: 726344 - RNA, 20 nt, Artificial Sequence
  Synthetic
gucagcuggguuuagagauu

SEQ ID NO: 726345 - RNA, 20 nt, Artificial Sequence
  Synthetic
gguggucucagauggagauu

SEQ ID NO: 726346 - RNA, 20 nt, Artificial Sequence
  Synthetic
guagaauucaagaugagauu

SEQ ID NO: 726347 - RNA, 20 nt, Artificial Sequence
  Synthetic
ggcagcaugagucauagauu

SEQ ID NO: 726348 - RNA, 20 nt, Artificial Sequence
  Synthetic
gguuaaccauaauuuagauu

SEQ ID NO: 726349 - RNA, 20 nt, Artificial Sequence
  Synthetic
gucugaauacagagacgauu

SEQ ID NO: 726350 - RNA, 20 nt, Artificial Sequence
  Synthetic
ggaacaaaguaguuucgauu

SEQ ID NO: 726351 - RNA, 20 nt, Artificial Sequence
  Synthetic
gugggggcacaauuaggauu

SEQ ID NO: 726352 - RNA, 20 nt, Artificial Sequence
  Synthetic
guuucuuuacauuuaggauu

SEQ ID NO: 726353 - RNA, 20 nt, Artificial Sequence
  Synthetic
gacaggucaaguuggggauu

SEQ ID NO: 726354 - RNA, 20 nt, Artificial Sequence
  Synthetic
guguacguucagaugggauu

SEQ ID NO: 726355 - RNA, 20 nt, Artificial Sequence
  Synthetic
ggaaaucuagauaugggauu

SEQ ID NO: 726356 - RNA, 20 nt, Artificial Sequence
  Synthetic
guaucagucuauuauggauu

SEQ ID NO: 726357 - RNA, 20 nt, Artificial Sequence
  Synthetic
guugaagauaauaguggauu

SEQ ID NO: 726358 - RNA, 20 nt, Artificial Sequence
  Synthetic
gaaauuacaaaauguggauu

SEQ ID NO: 726359 - RNA, 20 nt, Artificial Sequence
  Synthetic
guaugguuaauaauuggauu

SEQ ID NO: 726360 - RNA, 20 nt, Artificial Sequence
  Synthetic
gcuuccucagaaaaaugauu

SEQ ID NO: 726361 - RNA, 20 nt, Artificial Sequence
  Synthetic
gaaaugacggaaccaugauu

SEQ ID NO: 726362 - RNA, 20 nt, Artificial Sequence
  Synthetic
gacuggcucaugcuaugauu

SEQ ID NO: 726363 - RNA, 20 nt, Artificial Sequence
  Synthetic
gagaucugauucaacugauu

SEQ ID NO: 726364 - RNA, 20 nt, Artificial Sequence
  Synthetic
gcaguacuaauuugcugauu

SEQ ID NO: 726365 - RNA, 20 nt, Artificial Sequence
  Synthetic
ggcaggcuuccucucugauu

SEQ ID NO: 726366 - RNA, 20 nt, Artificial Sequence
  Synthetic
gauacuuuaccaaagugauu

SEQ ID NO: 726367 - RNA, 20 nt, Artificial Sequence
  Synthetic
gugaccuugaagaggugauu

SEQ ID NO: 726368 - RNA, 20 nt, Artificial Sequence
  Synthetic
ggggguuugggggggugauu

SEQ ID NO: 726369 - RNA, 20 nt, Artificial Sequence
  Synthetic
gcaauuucaaugucuugauu

SEQ ID NO: 726370 - RNA, 20 nt, Artificial Sequence
  Synthetic
gguuuuguuuugauuugauu

SEQ ID NO: 726371 - RNA, 20 nt, Artificial Sequence
  Synthetic
guacaaaggagaaaaauauu

SEQ ID NO: 726372 - RNA, 20 nt, Artificial Sequence
  Synthetic
ggguugacaaacaaaauauu

SEQ ID NO: 726373 - RNA, 20 nt, Artificial Sequence
  Synthetic
guauuuucauugaaaauauu

SEQ ID NO: 726374 - RNA, 20 nt, Artificial Sequence
  Synthetic
gcaguagcuuuacaaauauu

SEQ ID NO: 726375 - RNA, 20 nt, Artificial Sequence
  Synthetic
gugaaguuuuaggaaauauu

SEQ ID NO: 726376 - RNA, 20 nt, Artificial Sequence
  Synthetic
gucagcacuugauaaauauu

SEQ ID NO: 726377 - RNA, 20 nt, Artificial Sequence
  Synthetic
gcuucaguuaaguaaauauu

SEQ ID NO: 726378 - RNA, 20 nt, Artificial Sequence
  Synthetic
gaauuaagguaaagaauauu

SEQ ID NO: 726379 - RNA, 20 nt, Artificial Sequence
  Synthetic
gccacuuagaaaauaauauu

SEQ ID NO: 726380 - RNA, 20 nt, Artificial Sequence
  Synthetic
gucuaugcuuccauaauauu

SEQ ID NO: 726381 - RNA, 20 nt, Artificial Sequence
  Synthetic
gguaaaacagaaaacauauu

SEQ ID NO: 726382 - RNA, 20 nt, Artificial Sequence
  Synthetic
gcagugccuugaaacauauu

SEQ ID NO: 726383 - RNA, 20 nt, Artificial Sequence
  Synthetic
guaaagagugaaagcauauu

SEQ ID NO: 726384 - RNA, 20 nt, Artificial Sequence
  Synthetic
gaauuuuaaaccugcauauu

SEQ ID NO: 726385 - RNA, 20 nt, Artificial Sequence
  Synthetic
guacgacuuuuaaagauauu

SEQ ID NO: 726386 - RNA, 20 nt, Artificial Sequence
  Synthetic
gguccuaucuccaagauauu

SEQ ID NO: 726387 - RNA, 20 nt, Artificial Sequence
  Synthetic
guauauaauccagagauauu

SEQ ID NO: 726388 - RNA, 20 nt, Artificial Sequence
  Synthetic
ggcuuuggacuagagauauu

SEQ ID NO: 726389 - RNA, 20 nt, Artificial Sequence
  Synthetic
gcuaacccccaauggauauu

SEQ ID NO: 726390 - RNA, 20 nt, Artificial Sequence
  Synthetic
guucaaauuauuaauauauu

SEQ ID NO: 726391 - RNA, 20 nt, Artificial Sequence
  Synthetic
gauauuauaagccauauauu

SEQ ID NO: 726392 - RNA, 20 nt, Artificial Sequence
  Synthetic
gaaaacauguaucauauauu

SEQ ID NO: 726393 - RNA, 20 nt, Artificial Sequence
  Synthetic
gcaaucacaaaauauauauu

SEQ ID NO: 726394 - RNA, 20 nt, Artificial Sequence
  Synthetic
gaauuguagacuuauauauu

SEQ ID NO: 726395 - RNA, 20 nt, Artificial Sequence
  Synthetic
gacaauguuuuggguauauu

SEQ ID NO: 726396 - RNA, 20 nt, Artificial Sequence
  Synthetic
guaggagaaauuuguauauu

SEQ ID NO: 726397 - RNA, 20 nt, Artificial Sequence
  Synthetic
gauggaaguagauaacuauu

SEQ ID NO: 726398 - RNA, 20 nt, Artificial Sequence
  Synthetic
gauauuucugccuaacuauu

SEQ ID NO: 726399 - RNA, 20 nt, Artificial Sequence
  Synthetic
gauguuuuguuuuuacuauu

SEQ ID NO: 726400 - RNA, 20 nt, Artificial Sequence
  Synthetic
gguauaaaaaauggccuauu

SEQ ID NO: 726401 - RNA, 20 nt, Artificial Sequence
  Synthetic
guucaaggguaaaggcuauu

SEQ ID NO: 726402 - RNA, 20 nt, Artificial Sequence
  Synthetic
guagaagccauaaaucuauu

SEQ ID NO: 726403 - RNA, 20 nt, Artificial Sequence
  Synthetic
gaauaugaaucacaucuauu

SEQ ID NO: 726404 - RNA, 20 nt, Artificial Sequence
  Synthetic
gaaacaaaaucuccucuauu

SEQ ID NO: 726405 - RNA, 20 nt, Artificial Sequence
  Synthetic
gaguucuguagaugucuauu

SEQ ID NO: 726406 - RNA, 20 nt, Artificial Sequence
  Synthetic
ggaaccuuuuaauuucuauu

SEQ ID NO: 726407 - RNA, 20 nt, Artificial Sequence
  Synthetic
gcucaaaucacaaaaguauu

SEQ ID NO: 726408 - RNA, 20 nt, Artificial Sequence
  Synthetic
gagcuugaacucgaaguauu

SEQ ID NO: 726409 - RNA, 20 nt, Artificial Sequence
  Synthetic
gaagugaaggaggcaguauu

SEQ ID NO: 726410 - RNA, 20 nt, Artificial Sequence
  Synthetic
guguaaauuagaauaguauu

SEQ ID NO: 726411 - RNA, 20 nt, Artificial Sequence
  Synthetic
guauuuuuuguuguaguauu

SEQ ID NO: 726412 - RNA, 20 nt, Artificial Sequence
  Synthetic
guaagagugacuuuaguauu

SEQ ID NO: 726413 - RNA, 20 nt, Artificial Sequence
  Synthetic
gccugauguauuucgguauu

SEQ ID NO: 726414 - RNA, 20 nt, Artificial Sequence
  Synthetic
gauuccaugucuuugguauu

SEQ ID NO: 726415 - RNA, 20 nt, Artificial Sequence
  Synthetic
guaucauuaguauauguauu

SEQ ID NO: 726416 - RNA, 20 nt, Artificial Sequence
  Synthetic
guuugguaauauacuguauu

SEQ ID NO: 726417 - RNA, 20 nt, Artificial Sequence
  Synthetic
ggcuaagguuauuguguauu

SEQ ID NO: 726418 - RNA, 20 nt, Artificial Sequence
  Synthetic
gauugaaucuaaguuguauu

SEQ ID NO: 726419 - RNA, 20 nt, Artificial Sequence
  Synthetic
gaauauguuauggaauuauu

SEQ ID NO: 726420 - RNA, 20 nt, Artificial Sequence
  Synthetic
gaucaggaaaaauaauuauu

SEQ ID NO: 726421 - RNA, 20 nt, Artificial Sequence
  Synthetic
gaaccuuaagauuaauuauu

SEQ ID NO: 726422 - RNA, 20 nt, Artificial Sequence
  Synthetic
gacccagcaaucccauuauu

SEQ ID NO: 726423 - RNA, 20 nt, Artificial Sequence
  Synthetic
guuccuggaaauccauuauu

SEQ ID NO: 726424 - RNA, 20 nt, Artificial Sequence
  Synthetic
guaaccuuuaaggcauuauu

SEQ ID NO: 726425 - RNA, 20 nt, Artificial Sequence
  Synthetic
ggaugauugcucucauuauu

SEQ ID NO: 726426 - RNA, 20 nt, Artificial Sequence
  Synthetic
gacugaaguucaauauuauu

SEQ ID NO: 726427 - RNA, 20 nt, Artificial Sequence
  Synthetic
ggaguuagcaaggacuuauu

SEQ ID NO: 726428 - RNA, 20 nt, Artificial Sequence
  Synthetic
guuucuccuacugacuuauu

SEQ ID NO: 726429 - RNA, 20 nt, Artificial Sequence
  Synthetic
gcucaguugagugacuuauu

SEQ ID NO: 726430 - RNA, 20 nt, Artificial Sequence
  Synthetic
gaugaaaagaagugcuuauu

SEQ ID NO: 726431 - RNA, 20 nt, Artificial Sequence
  Synthetic
guucaauucuaucucuuauu

SEQ ID NO: 726432 - RNA, 20 nt, Artificial Sequence
  Synthetic
ggaaaacaaguguucuuauu

SEQ ID NO: 726433 - RNA, 20 nt, Artificial Sequence
  Synthetic
gggagaaaguuuuucuuauu

SEQ ID NO: 726434 - RNA, 20 nt, Artificial Sequence
  Synthetic
guuuaaacucuuuaguuauu

SEQ ID NO: 726435 - RNA, 20 nt, Artificial Sequence
  Synthetic
guaacacuaugcagguuauu

SEQ ID NO: 726436 - RNA, 20 nt, Artificial Sequence
  Synthetic
guacauauauuuagguuauu

SEQ ID NO: 726437 - RNA, 20 nt, Artificial Sequence
  Synthetic
ggaagugccaggcuguuauu

SEQ ID NO: 726438 - RNA, 20 nt, Artificial Sequence
  Synthetic
gucugauaguuuuuguuauu

SEQ ID NO: 726439 - RNA, 20 nt, Artificial Sequence
  Synthetic
guuauaugcuuaaauuuauu

SEQ ID NO: 726440 - RNA, 20 nt, Artificial Sequence
  Synthetic
gauauuuuaucauauuuauu

SEQ ID NO: 726441 - RNA, 20 nt, Artificial Sequence
  Synthetic
guuacauuuauauauuuauu

SEQ ID NO: 726442 - RNA, 20 nt, Artificial Sequence
  Synthetic
gggauaaaagacuauuuauu

SEQ ID NO: 726443 - RNA, 20 nt, Artificial Sequence
  Synthetic
gugauaacucauuauuuauu

SEQ ID NO: 726444 - RNA, 20 nt, Artificial Sequence
  Synthetic
gcaagucuuaagaguuuauu

SEQ ID NO: 726445 - RNA, 20 nt, Artificial Sequence
  Synthetic
gauguucuauaucguuuauu

SEQ ID NO: 726446 - RNA, 20 nt, Artificial Sequence
  Synthetic
gcucuugggagauguuuauu

SEQ ID NO: 726447 - RNA, 20 nt, Artificial Sequence
  Synthetic
guguccaaauucauuuuauu

SEQ ID NO: 726448 - RNA, 20 nt, Artificial Sequence
  Synthetic
guuuaauuuucuguuuuauu

SEQ ID NO: 726449 - RNA, 20 nt, Artificial Sequence
  Synthetic
guaaagcaauuuguuuuauu

SEQ ID NO: 726450 - RNA, 20 nt, Artificial Sequence
  Synthetic
guccuauugccauuuuuauu

SEQ ID NO: 726451 - RNA, 20 nt, Artificial Sequence
  Synthetic
guauuauuucucuuuuuauu

SEQ ID NO: 726452 - RNA, 20 nt, Artificial Sequence
  Synthetic
guauccuauaauuuuuuauu

SEQ ID NO: 726453 - RNA, 20 nt, Artificial Sequence
  Synthetic
guuuucccauugaaaaacuu

SEQ ID NO: 726454 - RNA, 20 nt, Artificial Sequence
  Synthetic
gacaaggagaaacaaaacuu

SEQ ID NO: 726455 - RNA, 20 nt, Artificial Sequence
  Synthetic
gauucuaaagucagaaacuu

SEQ ID NO: 726456 - RNA, 20 nt, Artificial Sequence
  Synthetic
guuucauucuuuugaaacuu

SEQ ID NO: 726457 - RNA, 20 nt, Artificial Sequence
  Synthetic
guguauguuuggaacaacuu

SEQ ID NO: 726458 - RNA, 20 nt, Artificial Sequence
  Synthetic
gcuggcuuacacuccaacuu

SEQ ID NO: 726459 - RNA, 20 nt, Artificial Sequence
  Synthetic
gguuuguugagacucaacuu

SEQ ID NO: 726460 - RNA, 20 nt, Artificial Sequence
  Synthetic
guuucaggcaaucucaacuu

SEQ ID NO: 726461 - RNA, 20 nt, Artificial Sequence
  Synthetic
ggaagcuggagaaagaacuu

SEQ ID NO: 726462 - RNA, 20 nt, Artificial Sequence
  Synthetic
gacuagcuuaaauagaacuu

SEQ ID NO: 726463 - RNA, 20 nt, Artificial Sequence
  Synthetic
gucuuucagugucauaacuu

SEQ ID NO: 726464 - RNA, 20 nt, Artificial Sequence
  Synthetic
gccacaagggaauuuaacuu

SEQ ID NO: 726465 - RNA, 20 nt, Artificial Sequence
  Synthetic
gcuauuuauuggaaacacuu

SEQ ID NO: 726466 - RNA, 20 nt, Artificial Sequence
  Synthetic
gaagcauuacuacaacacuu

SEQ ID NO: 726467 - RNA, 20 nt, Artificial Sequence
  Synthetic
gccuguaaucccagccacuu

SEQ ID NO: 726468 - RNA, 20 nt, Artificial Sequence
  Synthetic
gccuguagucccagccacuu

SEQ ID NO: 726469 - RNA, 20 nt, Artificial Sequence
  Synthetic
gauuauuucuggaagcacuu

SEQ ID NO: 726470 - RNA, 20 nt, Artificial Sequence
  Synthetic
gccuguaaaucccagcacuu

SEQ ID NO: 726471 - RNA, 20 nt, Artificial Sequence
  Synthetic
ggccuguaaucccagcacuu

SEQ ID NO: 726472 - RNA, 20 nt, Artificial Sequence
  Synthetic
ggucuguaaucccagcacuu

SEQ ID NO: 726473 - RNA, 20 nt, Artificial Sequence
  Synthetic
ggugcgguggcucagcacuu

SEQ ID NO: 726474 - RNA, 20 nt, Artificial Sequence
  Synthetic
gugagugguuucccucacuu

SEQ ID NO: 726475 - RNA, 20 nt, Artificial Sequence
  Synthetic
gagauuuaaagaauucacuu

SEQ ID NO: 726476 - RNA, 20 nt, Artificial Sequence
  Synthetic
guuccugcauuaauucacuu

SEQ ID NO: 726477 - RNA, 20 nt, Artificial Sequence
  Synthetic
gcucaugucagucuucacuu

SEQ ID NO: 726478 - RNA, 20 nt, Artificial Sequence
  Synthetic
gagaaaagaaaaaaagacuu

SEQ ID NO: 726479 - RNA, 20 nt, Artificial Sequence
  Synthetic
gaaagacuuugggaagacuu

SEQ ID NO: 726480 - RNA, 20 nt, Artificial Sequence
  Synthetic
guuggaaugaguuaagacuu

SEQ ID NO: 726481 - RNA, 20 nt, Artificial Sequence
  Synthetic
gcccaggcaugaacagacuu

SEQ ID NO: 726482 - RNA, 20 nt, Artificial Sequence
  Synthetic
gcuaguaagaaaugagacuu

SEQ ID NO: 726483 - RNA, 20 nt, Artificial Sequence
  Synthetic
gacacauuugggugagacuu

SEQ ID NO: 726484 - RNA, 20 nt, Artificial Sequence
  Synthetic
guaguuggggauacggacuu

SEQ ID NO: 726485 - RNA, 20 nt, Artificial Sequence
  Synthetic
guauuccaguucagggacuu

SEQ ID NO: 726486 - RNA, 20 nt, Artificial Sequence
  Synthetic
gagacccauuuuuuggacuu

SEQ ID NO: 726487 - RNA, 20 nt, Artificial Sequence
  Synthetic
gucaauuguggggaugacuu

SEQ ID NO: 726488 - RNA, 20 nt, Artificial Sequence
  Synthetic
gacuugggaaaaccugacuu

SEQ ID NO: 726489 - RNA, 20 nt, Artificial Sequence
  Synthetic
ggaggaccacaagcugacuu

SEQ ID NO: 726490 - RNA, 20 nt, Artificial Sequence
  Synthetic
guacuuuuauuaggugacuu

SEQ ID NO: 726491 - RNA, 20 nt, Artificial Sequence
  Synthetic
gagaaugauuuauaauacuu

SEQ ID NO: 726492 - RNA, 20 nt, Artificial Sequence
  Synthetic
gcugaaaugaauuaauacuu

SEQ ID NO: 726493 - RNA, 20 nt, Artificial Sequence
  Synthetic
gccuguaaucccagauacuu

SEQ ID NO: 726494 - RNA, 20 nt, Artificial Sequence
  Synthetic
ggagaacugaacugauacuu

SEQ ID NO: 726495 - RNA, 20 nt, Artificial Sequence
  Synthetic
gacuuagagcugcuauacuu

SEQ ID NO: 726496 - RNA, 20 nt, Artificial Sequence
  Synthetic
gaauaaaaugugcuauacuu

SEQ ID NO: 726497 - RNA, 20 nt, Artificial Sequence
  Synthetic
ggguguaauguacacuacuu

SEQ ID NO: 726498 - RNA, 20 nt, Artificial Sequence
  Synthetic
gacaaccucacuuccuacuu

SEQ ID NO: 726499 - RNA, 20 nt, Artificial Sequence
  Synthetic
gacuugaaucacagcuacuu

SEQ ID NO: 726500 - RNA, 20 nt, Artificial Sequence
  Synthetic
gccucuaaucccagcuacuu

SEQ ID NO: 726501 - RNA, 20 nt, Artificial Sequence
  Synthetic
gccuguaaucccagcuacuu

SEQ ID NO: 726502 - RNA, 20 nt, Artificial Sequence
  Synthetic
ggcuguaaucccagcuacuu

SEQ ID NO: 726503 - RNA, 20 nt, Artificial Sequence
  Synthetic
gcuuguaaucccagcuacuu

SEQ ID NO: 726504 - RNA, 20 nt, Artificial Sequence
  Synthetic
gccuagagucccagcuacuu

SEQ ID NO: 726505 - RNA, 20 nt, Artificial Sequence
  Synthetic
gccuauagucccagcuacuu

SEQ ID NO: 726506 - RNA, 20 nt, Artificial Sequence
  Synthetic
gccuguagucccagcuacuu

SEQ ID NO: 726507 - RNA, 20 nt, Artificial Sequence
  Synthetic
guuuguagucccagcuacuu

SEQ ID NO: 726508 - RNA, 20 nt, Artificial Sequence
  Synthetic
gccuguaauccuagcuacuu

SEQ ID NO: 726509 - RNA, 20 nt, Artificial Sequence
  Synthetic
gccuguagaccuggcuacuu

SEQ ID NO: 726510 - RNA, 20 nt, Artificial Sequence
  Synthetic
gccuguagucucugcuacuu

SEQ ID NO: 726511 - RNA, 20 nt, Artificial Sequence
  Synthetic
ggagaucuauacaucuacuu

SEQ ID NO: 726512 - RNA, 20 nt, Artificial Sequence
  Synthetic
gccuguaguuccaucuacuu

SEQ ID NO: 726513 - RNA, 20 nt, Artificial Sequence
  Synthetic
gccuguaaucccagguacuu

SEQ ID NO: 726514 - RNA, 20 nt, Artificial Sequence
  Synthetic
gaagauaucccugauuacuu

SEQ ID NO: 726515 - RNA, 20 nt, Artificial Sequence
  Synthetic
gcuuagaauuugccuuacuu

SEQ ID NO: 726516 - RNA, 20 nt, Artificial Sequence
  Synthetic
gcauauucuccuauuuacuu

SEQ ID NO: 726517 - RNA, 20 nt, Artificial Sequence
  Synthetic
gagcucccacaauuaaccuu

SEQ ID NO: 726518 - RNA, 20 nt, Artificial Sequence
  Synthetic
gccuguaauuccagcaccuu

SEQ ID NO: 726519 - RNA, 20 nt, Artificial Sequence
  Synthetic
gaaaaugggauagucaccuu

SEQ ID NO: 726520 - RNA, 20 nt, Artificial Sequence
  Synthetic
gaauucuuaauggucaccuu

SEQ ID NO: 726521 - RNA, 20 nt, Artificial Sequence
  Synthetic
guuaccaacucuaagaccuu

SEQ ID NO: 726522 - RNA, 20 nt, Artificial Sequence
  Synthetic
gacacaaugagaaugaccuu

SEQ ID NO: 726523 - RNA, 20 nt, Artificial Sequence
  Synthetic
gcccaauaaacagcuaccuu

SEQ ID NO: 726524 - RNA, 20 nt, Artificial Sequence
  Synthetic
gcaacaccauuugcuaccuu

SEQ ID NO: 726525 - RNA, 20 nt, Artificial Sequence
  Synthetic
gagggauaaaaaauuaccuu

SEQ ID NO: 726526 - RNA, 20 nt, Artificial Sequence
  Synthetic
gggucccaccauauacccuu

SEQ ID NO: 726527 - RNA, 20 nt, Artificial Sequence
  Synthetic
gcauuggaaauugaccccuu

SEQ ID NO: 726528 - RNA, 20 nt, Artificial Sequence
  Synthetic
gggacuuugucuugccccuu

SEQ ID NO: 726529 - RNA, 20 nt, Artificial Sequence
  Synthetic
gcuuuguaaauuaggcccuu

SEQ ID NO: 726530 - RNA, 20 nt, Artificial Sequence
  Synthetic
gacaucuauuuucugcccuu

SEQ ID NO: 726531 - RNA, 20 nt, Artificial Sequence
  Synthetic
gaacaaauuuucacucccuu

SEQ ID NO: 726532 - RNA, 20 nt, Artificial Sequence
  Synthetic
gacauuuccaaaugucccuu

SEQ ID NO: 726533 - RNA, 20 nt, Artificial Sequence
  Synthetic
gcuuuaauuucuugucccuu

SEQ ID NO: 726534 - RNA, 20 nt, Artificial Sequence
  Synthetic
gagaggaucuuucuucccuu

SEQ ID NO: 726535 - RNA, 20 nt, Artificial Sequence
  Synthetic
gugagacaaauaugagccuu

SEQ ID NO: 726536 - RNA, 20 nt, Artificial Sequence
  Synthetic
guaacuaucugauuagccuu

SEQ ID NO: 726537 - RNA, 20 nt, Artificial Sequence
  Synthetic
gaaaaagucauaagggccuu

SEQ ID NO: 726538 - RNA, 20 nt, Artificial Sequence
  Synthetic
ggcaaguagccuugugccuu

SEQ ID NO: 726539 - RNA, 20 nt, Artificial Sequence
  Synthetic
guaagauauuaaagauccuu

SEQ ID NO: 726540 - RNA, 20 nt, Artificial Sequence
  Synthetic
gcaaguuaaaauggcuccuu

SEQ ID NO: 726541 - RNA, 20 nt, Artificial Sequence
  Synthetic
gucacuacaauugaguccuu

SEQ ID NO: 726542 - RNA, 20 nt, Artificial Sequence
  Synthetic
gaaaauaauugucuguccuu

SEQ ID NO: 726543 - RNA, 20 nt, Artificial Sequence
  Synthetic
gagauagaaagauauuccuu

SEQ ID NO: 726544 - RNA, 20 nt, Artificial Sequence
  Synthetic
gauccugcuuucucuuccuu

SEQ ID NO: 726545 - RNA, 20 nt, Artificial Sequence
  Synthetic
gcaaagaauuagcaaagcuu

SEQ ID NO: 726546 - RNA, 20 nt, Artificial Sequence
  Synthetic
gauaaggcaaaucaaagcuu

SEQ ID NO: 726547 - RNA, 20 nt, Artificial Sequence
  Synthetic
gcaaguaauaacacaagcuu

SEQ ID NO: 726548 - RNA, 20 nt, Artificial Sequence
  Synthetic
guuucuuaagguagaagcuu

SEQ ID NO: 726549 - RNA, 20 nt, Artificial Sequence
  Synthetic
gguuugaaacucugaagcuu

SEQ ID NO: 726550 - RNA, 20 nt, Artificial Sequence
  Synthetic
guugacagguaauuaagcuu

SEQ ID NO: 726551 - RNA, 20 nt, Artificial Sequence
  Synthetic
ggaugaaaaaauuacagcuu

SEQ ID NO: 726552 - RNA, 20 nt, Artificial Sequence
  Synthetic
ggucuuagaugagccagcuu

SEQ ID NO: 726553 - RNA, 20 nt, Artificial Sequence
  Synthetic
gcaucgcggcacuccagcuu

SEQ ID NO: 726554 - RNA, 20 nt, Artificial Sequence
  Synthetic
gacaagaugucuuccagcuu

SEQ ID NO: 726555 - RNA, 20 nt, Artificial Sequence
  Synthetic
gcaccacugcacugcagcuu

SEQ ID NO: 726556 - RNA, 20 nt, Artificial Sequence
  Synthetic
gaaauuucuuggaagagcuu

SEQ ID NO: 726557 - RNA, 20 nt, Artificial Sequence
  Synthetic
gguagaaaaagagagagcuu

SEQ ID NO: 726558 - RNA, 20 nt, Artificial Sequence
  Synthetic
guuuauguuuucaugagcuu

SEQ ID NO: 726559 - RNA, 20 nt, Artificial Sequence
  Synthetic
gccuaucuuuagaguagcuu

SEQ ID NO: 726560 - RNA, 20 nt, Artificial Sequence
  Synthetic
gcucuugacugagguagcuu

SEQ ID NO: 726561 - RNA, 20 nt, Artificial Sequence
  Synthetic
gcaaugauguuugguagcuu

SEQ ID NO: 726562 - RNA, 20 nt, Artificial Sequence
  Synthetic
ggcaaagaugaguuuagcuu

SEQ ID NO: 726563 - RNA, 20 nt, Artificial Sequence
  Synthetic
gucagcuggacugaaggcuu

SEQ ID NO: 726564 - RNA, 20 nt, Artificial Sequence
  Synthetic
guauccuaaauaacaggcuu

SEQ ID NO: 726565 - RNA, 20 nt, Artificial Sequence
  Synthetic
guugugucucugccaggcuu

SEQ ID NO: 726566 - RNA, 20 nt, Artificial Sequence
  Synthetic
guugugucucugcccggcuu

SEQ ID NO: 726567 - RNA, 20 nt, Artificial Sequence
  Synthetic
gauuuacaaugguucggcuu

SEQ ID NO: 726568 - RNA, 20 nt, Artificial Sequence
  Synthetic
gaagagaaagaaaagggcuu

SEQ ID NO: 726569 - RNA, 20 nt, Artificial Sequence
  Synthetic
ggagaauuuacccagggcuu

SEQ ID NO: 726570 - RNA, 20 nt, Artificial Sequence
  Synthetic
guguugaggcagaggggcuu

SEQ ID NO: 726571 - RNA, 20 nt, Artificial Sequence
  Synthetic
gauacuuuuggcaugggcuu

SEQ ID NO: 726572 - RNA, 20 nt, Artificial Sequence
  Synthetic
guucuuaagugugugggcuu

SEQ ID NO: 726573 - RNA, 20 nt, Artificial Sequence
  Synthetic
ggcuccugcgagacuggcuu

SEQ ID NO: 726574 - RNA, 20 nt, Artificial Sequence
  Synthetic
gauagauuuuggacuggcuu

SEQ ID NO: 726575 - RNA, 20 nt, Artificial Sequence
  Synthetic
gccuuuaucaagccuggcuu

SEQ ID NO: 726576 - RNA, 20 nt, Artificial Sequence
  Synthetic
guagugucuuugccuggcuu

SEQ ID NO: 726577 - RNA, 20 nt, Artificial Sequence
  Synthetic
gaggguugaacugguggcuu

SEQ ID NO: 726578 - RNA, 20 nt, Artificial Sequence
  Synthetic
gucugugagaagcuuggcuu

SEQ ID NO: 726579 - RNA, 20 nt, Artificial Sequence
  Synthetic
gcuccuuaaaugcaaugcuu

SEQ ID NO: 726580 - RNA, 20 nt, Artificial Sequence
  Synthetic
gaauacuaaauugaaugcuu

SEQ ID NO: 726581 - RNA, 20 nt, Artificial Sequence
  Synthetic
guuacuuaagauacaugcuu

SEQ ID NO: 726582 - RNA, 20 nt, Artificial Sequence
  Synthetic
guguuugaaaauucaugcuu

SEQ ID NO: 726583 - RNA, 20 nt, Artificial Sequence
  Synthetic
gugggugggaggagaugcuu

SEQ ID NO: 726584 - RNA, 20 nt, Artificial Sequence
  Synthetic
gggaaaaucugaggaugcuu

SEQ ID NO: 726585 - RNA, 20 nt, Artificial Sequence
  Synthetic
gcagucuuuccuggaugcuu

SEQ ID NO: 726586 - RNA, 20 nt, Artificial Sequence
  Synthetic
gucaucagaauaugaugcuu

SEQ ID NO: 726587 - RNA, 20 nt, Artificial Sequence
  Synthetic
gccucuaaucccagcugcuu

SEQ ID NO: 726588 - RNA, 20 nt, Artificial Sequence
  Synthetic
gcuaaucuaugacgcugcuu

SEQ ID NO: 726589 - RNA, 20 nt, Artificial Sequence
  Synthetic
gagugagcgagaggcugcuu

SEQ ID NO: 726590 - RNA, 20 nt, Artificial Sequence
  Synthetic
guuuaauauuagaagugcuu

SEQ ID NO: 726591 - RNA, 20 nt, Artificial Sequence
  Synthetic
guuccugcguuaacgugcuu

SEQ ID NO: 726592 - RNA, 20 nt, Artificial Sequence
  Synthetic
gaaagagcacacuggugcuu

SEQ ID NO: 726593 - RNA, 20 nt, Artificial Sequence
  Synthetic
gaguuuuaaaagaugugcuu

SEQ ID NO: 726594 - RNA, 20 nt, Artificial Sequence
  Synthetic
gcucauauuuauaugugcuu

SEQ ID NO: 726595 - RNA, 20 nt, Artificial Sequence
  Synthetic
gcuaaaacaaaacauugcuu

SEQ ID NO: 726596 - RNA, 20 nt, Artificial Sequence
  Synthetic
gaacagaaugacccuugcuu

SEQ ID NO: 726597 - RNA, 20 nt, Artificial Sequence
  Synthetic
gugcucacaaaugcuugcuu

SEQ ID NO: 726598 - RNA, 20 nt, Artificial Sequence
  Synthetic
gggaagcugaaagguugcuu

SEQ ID NO: 726599 - RNA, 20 nt, Artificial Sequence
  Synthetic
guucuuauguuaauuugcuu

SEQ ID NO: 726600 - RNA, 20 nt, Artificial Sequence
  Synthetic
gccugccuugugauuugcuu

SEQ ID NO: 726601 - RNA, 20 nt, Artificial Sequence
  Synthetic
guacuugcaucucuuugcuu

SEQ ID NO: 726602 - RNA, 20 nt, Artificial Sequence
  Synthetic
ggauuuccagcauuuugcuu

SEQ ID NO: 726603 - RNA, 20 nt, Artificial Sequence
  Synthetic
gauuuuucgguggaaaucuu

SEQ ID NO: 726604 - RNA, 20 nt, Artificial Sequence
  Synthetic
gcuugcugacuguaaaucuu

SEQ ID NO: 726605 - RNA, 20 nt, Artificial Sequence
  Synthetic
gaugguuuguuggcaaucuu

SEQ ID NO: 726606 - RNA, 20 nt, Artificial Sequence
  Synthetic
gaagggaguauuucaaucuu

SEQ ID NO: 726607 - RNA, 20 nt, Artificial Sequence
  Synthetic
ggcagaacuaaaaacaucuu

SEQ ID NO: 726608 - RNA, 20 nt, Artificial Sequence
  Synthetic
gauaauuuauggcacaucuu

SEQ ID NO: 726609 - RNA, 20 nt, Artificial Sequence
  Synthetic
gauuaggauauggacaucuu

SEQ ID NO: 726610 - RNA, 20 nt, Artificial Sequence
  Synthetic
ggacaaguauaguccaucuu

SEQ ID NO: 726611 - RNA, 20 nt, Artificial Sequence
  Synthetic
gaggauagguccugcaucuu

SEQ ID NO: 726612 - RNA, 20 nt, Artificial Sequence
  Synthetic
gguugggugacagucaucuu

SEQ ID NO: 726613 - RNA, 20 nt, Artificial Sequence
  Synthetic
ggggaugcucugaggaucuu

SEQ ID NO: 726614 - RNA, 20 nt, Artificial Sequence
  Synthetic
ggaaagccaaaggggaucuu

SEQ ID NO: 726615 - RNA, 20 nt, Artificial Sequence
  Synthetic
gguuuguaagagaugaucuu

SEQ ID NO: 726616 - RNA, 20 nt, Artificial Sequence
  Synthetic
gaagguaauuaauauaucuu

SEQ ID NO: 726617 - RNA, 20 nt, Artificial Sequence
  Synthetic
guuuagcuucuaacuaucuu

SEQ ID NO: 726618 - RNA, 20 nt, Artificial Sequence
  Synthetic
gauuuuacuguaccuaucuu

SEQ ID NO: 726619 - RNA, 20 nt, Artificial Sequence
  Synthetic
guuucuuaugccccuaucuu

SEQ ID NO: 726620 - RNA, 20 nt, Artificial Sequence
  Synthetic
gucaaaagagugcuuaucuu

SEQ ID NO: 726621 - RNA, 20 nt, Artificial Sequence
  Synthetic
gaauaaguaucuccacucuu

SEQ ID NO: 726622 - RNA, 20 nt, Artificial Sequence
  Synthetic
gcuggaagcagaagacucuu

SEQ ID NO: 726623 - RNA, 20 nt, Artificial Sequence
  Synthetic
gccacaucaggcccccucuu

SEQ ID NO: 726624 - RNA, 20 nt, Artificial Sequence
  Synthetic
gacuguaaucucagccucuu

SEQ ID NO: 726625 - RNA, 20 nt, Artificial Sequence
  Synthetic
ggugaguuuccuggccucuu

SEQ ID NO: 726626 - RNA, 20 nt, Artificial Sequence
  Synthetic
gaugcacacaauuggcucuu

SEQ ID NO: 726627 - RNA, 20 nt, Artificial Sequence
  Synthetic
guuguaaaauuuacucucuu

SEQ ID NO: 726628 - RNA, 20 nt, Artificial Sequence
  Synthetic
gguucccaugacccucucuu

SEQ ID NO: 726629 - RNA, 20 nt, Artificial Sequence
  Synthetic
gagugugaucugccucucuu

SEQ ID NO: 726630 - RNA, 20 nt, Artificial Sequence
  Synthetic
gacuuugacuggucucucuu

SEQ ID NO: 726631 - RNA, 20 nt, Artificial Sequence
  Synthetic
gaaaauaaaaucauucucuu

SEQ ID NO: 726632 - RNA, 20 nt, Artificial Sequence
  Synthetic
gccacucugaggcuucucuu

SEQ ID NO: 726633 - RNA, 20 nt, Artificial Sequence
  Synthetic
gaaacaggccuauuucucuu

SEQ ID NO: 726634 - RNA, 20 nt, Artificial Sequence
  Synthetic
gaucaacacauuuuucucuu

SEQ ID NO: 726635 - RNA, 20 nt, Artificial Sequence
  Synthetic
gaaaagcucuuuaaagucuu

SEQ ID NO: 726636 - RNA, 20 nt, Artificial Sequence
  Synthetic
gauuuagaaucagaagucuu

SEQ ID NO: 726637 - RNA, 20 nt, Artificial Sequence
  Synthetic
ggcuccaagccuggagucuu

SEQ ID NO: 726638 - RNA, 20 nt, Artificial Sequence
  Synthetic
gaagaacuugaaugagucuu

SEQ ID NO: 726639 - RNA, 20 nt, Artificial Sequence
  Synthetic
guguaauaaugguaggucuu

SEQ ID NO: 726640 - RNA, 20 nt, Artificial Sequence
  Synthetic
ggauuguuaguugaugucuu

SEQ ID NO: 726641 - RNA, 20 nt, Artificial Sequence
  Synthetic
guaucuauucugaaauucuu

SEQ ID NO: 726642 - RNA, 20 nt, Artificial Sequence
  Synthetic
gaguuggagauugaauucuu

SEQ ID NO: 726643 - RNA, 20 nt, Artificial Sequence
  Synthetic
gagguugacaagccauucuu

SEQ ID NO: 726644 - RNA, 20 nt, Artificial Sequence
  Synthetic
ggcuaucucugcucauucuu

SEQ ID NO: 726645 - RNA, 20 nt, Artificial Sequence
  Synthetic
gucccauuuuacugauucuu

SEQ ID NO: 726646 - RNA, 20 nt, Artificial Sequence
  Synthetic
guuauggaaccuguauucuu

SEQ ID NO: 726647 - RNA, 20 nt, Artificial Sequence
  Synthetic
ggaaguacaaggaacuucuu

SEQ ID NO: 726648 - RNA, 20 nt, Artificial Sequence
  Synthetic
gcuucaaagccuaacuucuu

SEQ ID NO: 726649 - RNA, 20 nt, Artificial Sequence
  Synthetic
guagagaucuuucacuucuu

SEQ ID NO: 726650 - RNA, 20 nt, Artificial Sequence
  Synthetic
gcccauguaugagacuucuu

SEQ ID NO: 726651 - RNA, 20 nt, Artificial Sequence
  Synthetic
guguuguuuaacugcuucuu

SEQ ID NO: 726652 - RNA, 20 nt, Artificial Sequence
  Synthetic
gcccuuuuuacacucuucuu

SEQ ID NO: 726653 - RNA, 20 nt, Artificial Sequence
  Synthetic
ggucauuuuaaugucuucuu

SEQ ID NO: 726654 - RNA, 20 nt, Artificial Sequence
  Synthetic
ggccauuucuaugucuucuu

SEQ ID NO: 726655 - RNA, 20 nt, Artificial Sequence
  Synthetic
gcuacauaauuguucuucuu

SEQ ID NO: 726656 - RNA, 20 nt, Artificial Sequence
  Synthetic
gguaugacauuuuucuucuu

SEQ ID NO: 726657 - RNA, 20 nt, Artificial Sequence
  Synthetic
gguuguucuguucuguucuu

SEQ ID NO: 726658 - RNA, 20 nt, Artificial Sequence
  Synthetic
gucuauuuaggaguguucuu

SEQ ID NO: 726659 - RNA, 20 nt, Artificial Sequence
  Synthetic
ggagaccacauauauuucuu

SEQ ID NO: 726660 - RNA, 20 nt, Artificial Sequence
  Synthetic
gcuugucauccuccuuucuu

SEQ ID NO: 726661 - RNA, 20 nt, Artificial Sequence
  Synthetic
gugaguucaaauaguuucuu

SEQ ID NO: 726662 - RNA, 20 nt, Artificial Sequence
  Synthetic
gagcacugcugugguuucuu

SEQ ID NO: 726663 - RNA, 20 nt, Artificial Sequence
  Synthetic
ggcagagggaaauguuucuu

SEQ ID NO: 726664 - RNA, 20 nt, Artificial Sequence
  Synthetic
gcaaaguuuuguuguuucuu

SEQ ID NO: 726665 - RNA, 20 nt, Artificial Sequence
  Synthetic
guccagugauucauuuucuu

SEQ ID NO: 726666 - RNA, 20 nt, Artificial Sequence
  Synthetic
gaggaauuuaagauuuucuu

SEQ ID NO: 726667 - RNA, 20 nt, Artificial Sequence
  Synthetic
ggcuguguauauauuuucuu

SEQ ID NO: 726668 - RNA, 20 nt, Artificial Sequence
  Synthetic
gauacugauuuccuuuucuu

SEQ ID NO: 726669 - RNA, 20 nt, Artificial Sequence
  Synthetic
gucuagcaauaauuuuucuu

SEQ ID NO: 726670 - RNA, 20 nt, Artificial Sequence
  Synthetic
gcaaaaaucgucuuuuucuu

SEQ ID NO: 726671 - RNA, 20 nt, Artificial Sequence
  Synthetic
ggauacaacuuuaaaaaguu

SEQ ID NO: 726672 - RNA, 20 nt, Artificial Sequence
  Synthetic
guagcucaagauacaaaguu

SEQ ID NO: 726673 - RNA, 20 nt, Artificial Sequence
  Synthetic
ggguuaauuauuacaaaguu

SEQ ID NO: 726674 - RNA, 20 nt, Artificial Sequence
  Synthetic
ggaagcagagcaucaaaguu

SEQ ID NO: 726675 - RNA, 20 nt, Artificial Sequence
  Synthetic
ggggagucaaaaagaaaguu

SEQ ID NO: 726676 - RNA, 20 nt, Artificial Sequence
  Synthetic
gaaaugcuggaaagaaaguu

SEQ ID NO: 726677 - RNA, 20 nt, Artificial Sequence
  Synthetic
guuaaaugaggaagaaaguu

SEQ ID NO: 726678 - RNA, 20 nt, Artificial Sequence
  Synthetic
guuucauauaaggacaaguu

SEQ ID NO: 726679 - RNA, 20 nt, Artificial Sequence
  Synthetic
gagugagaggguugcaaguu

SEQ ID NO: 726680 - RNA, 20 nt, Artificial Sequence
  Synthetic
guucacauugaagucaaguu

SEQ ID NO: 726681 - RNA, 20 nt, Artificial Sequence
  Synthetic
ggaguuagacaggucaaguu

SEQ ID NO: 726682 - RNA, 20 nt, Artificial Sequence
  Synthetic
gauaagaaaaaugucaaguu

SEQ ID NO: 726683 - RNA, 20 nt, Artificial Sequence
  Synthetic
gaaagcagugaguucaaguu

SEQ ID NO: 726684 - RNA, 20 nt, Artificial Sequence
  Synthetic
ggauuugaacccaagaaguu

SEQ ID NO: 726685 - RNA, 20 nt, Artificial Sequence
  Synthetic
gauucuugcagaacgaaguu

SEQ ID NO: 726686 - RNA, 20 nt, Artificial Sequence
  Synthetic
gauuaaaacauaaggaaguu

SEQ ID NO: 726687 - RNA, 20 nt, Artificial Sequence
  Synthetic
gaauuaggauauaauaaguu

SEQ ID NO: 726688 - RNA, 20 nt, Artificial Sequence
  Synthetic
guccaugagaaguauaaguu

SEQ ID NO: 726689 - RNA, 20 nt, Artificial Sequence
  Synthetic
gaggacacugaggcuaaguu

SEQ ID NO: 726690 - RNA, 20 nt, Artificial Sequence
  Synthetic
ggaucaacaaauuguaaguu

SEQ ID NO: 726691 - RNA, 20 nt, Artificial Sequence
  Synthetic
ggauuaaugaucuaacaguu

SEQ ID NO: 726692 - RNA, 20 nt, Artificial Sequence
  Synthetic
gaauuccaggcugcacaguu

SEQ ID NO: 726693 - RNA, 20 nt, Artificial Sequence
  Synthetic
gucucuaaggucucacaguu

SEQ ID NO: 726694 - RNA, 20 nt, Artificial Sequence
  Synthetic
gggaacaucacacaccaguu

SEQ ID NO: 726695 - RNA, 20 nt, Artificial Sequence
  Synthetic
gaagaugauguaauccaguu

SEQ ID NO: 726696 - RNA, 20 nt, Artificial Sequence
  Synthetic
gaccucuccauggagcaguu

SEQ ID NO: 726697 - RNA, 20 nt, Artificial Sequence
  Synthetic
gaugaacuuucaaugcaguu

SEQ ID NO: 726698 - RNA, 20 nt, Artificial Sequence
  Synthetic
gugcaaaagaaauugcaguu

SEQ ID NO: 726699 - RNA, 20 nt, Artificial Sequence
  Synthetic
gcauuaugagugucucaguu

SEQ ID NO: 726700 - RNA, 20 nt, Artificial Sequence
  Synthetic
gaaauaaaagguauucaguu

SEQ ID NO: 726701 - RNA, 20 nt, Artificial Sequence
  Synthetic
gaguuaauguuguuucaguu

SEQ ID NO: 726702 - RNA, 20 nt, Artificial Sequence
  Synthetic
gaacgaacggguaaagaguu

SEQ ID NO: 726703 - RNA, 20 nt, Artificial Sequence
  Synthetic
ggaaugauagucauagaguu

SEQ ID NO: 726704 - RNA, 20 nt, Artificial Sequence
  Synthetic
gcauugugaggucuagaguu

SEQ ID NO: 726705 - RNA, 20 nt, Artificial Sequence
  Synthetic
guauucucccgcaaggaguu

SEQ ID NO: 726706 - RNA, 20 nt, Artificial Sequence
  Synthetic
guggcauuugccugggaguu

SEQ ID NO: 726707 - RNA, 20 nt, Artificial Sequence
  Synthetic
gagaagccuguauuggaguu

SEQ ID NO: 726708 - RNA, 20 nt, Artificial Sequence
  Synthetic
gagacccuucagaaugaguu

SEQ ID NO: 726709 - RNA, 20 nt, Artificial Sequence
  Synthetic
gcccucuggaaaacugaguu

SEQ ID NO: 726710 - RNA, 20 nt, Artificial Sequence
  Synthetic
gaugcucgggaggcugaguu

SEQ ID NO: 726711 - RNA, 20 nt, Artificial Sequence
  Synthetic
guuuauugugauccauaguu

SEQ ID NO: 726712 - RNA, 20 nt, Artificial Sequence
  Synthetic
gccauauaauuuugauaguu

SEQ ID NO: 726713 - RNA, 20 nt, Artificial Sequence
  Synthetic
ggguaagauuucauauaguu

SEQ ID NO: 726714 - RNA, 20 nt, Artificial Sequence
  Synthetic
gaauggcccaagggcuaguu

SEQ ID NO: 726715 - RNA, 20 nt, Artificial Sequence
  Synthetic
guuagaugaagaagguaguu

SEQ ID NO: 726716 - RNA, 20 nt, Artificial Sequence
  Synthetic
ggugggaacguaaauuaguu

SEQ ID NO: 726717 - RNA, 20 nt, Artificial Sequence
  Synthetic
gcuuugcagaaacauuaguu

SEQ ID NO: 726718 - RNA, 20 nt, Artificial Sequence
  Synthetic
gaaaauaaguuuucuuaguu

SEQ ID NO: 726719 - RNA, 20 nt, Artificial Sequence
  Synthetic
gucuccuauaaauguuaguu

SEQ ID NO: 726720 - RNA, 20 nt, Artificial Sequence
  Synthetic
gcagagggagggauaacguu

SEQ ID NO: 726721 - RNA, 20 nt, Artificial Sequence
  Synthetic
gaggggggagggauagcguu

SEQ ID NO: 726722 - RNA, 20 nt, Artificial Sequence
  Synthetic
guuauaauguugguugcguu

SEQ ID NO: 726723 - RNA, 20 nt, Artificial Sequence
  Synthetic
gaauggaaagaaaaaagguu

SEQ ID NO: 726724 - RNA, 20 nt, Artificial Sequence
  Synthetic
ggggcagaagggagaagguu

SEQ ID NO: 726725 - RNA, 20 nt, Artificial Sequence
  Synthetic
gugaauguaaaucuaagguu

SEQ ID NO: 726726 - RNA, 20 nt, Artificial Sequence
  Synthetic
gaagaaaaucugaccagguu

SEQ ID NO: 726727 - RNA, 20 nt, Artificial Sequence
  Synthetic
gaaggauggaugcccagguu

SEQ ID NO: 726728 - RNA, 20 nt, Artificial Sequence
  Synthetic
gaaaacaguugauccagguu

SEQ ID NO: 726729 - RNA, 20 nt, Artificial Sequence
  Synthetic
gaucaaggcacuggcagguu

SEQ ID NO: 726730 - RNA, 20 nt, Artificial Sequence
  Synthetic
gagaauaaaaauugcagguu

SEQ ID NO: 726731 - RNA, 20 nt, Artificial Sequence
  Synthetic
gggagccuaggaaucagguu

SEQ ID NO: 726732 - RNA, 20 nt, Artificial Sequence
  Synthetic
gacaguaacuaacagagguu

SEQ ID NO: 726733 - RNA, 20 nt, Artificial Sequence
  Synthetic
guaauccaaagagagagguu

SEQ ID NO: 726734 - RNA, 20 nt, Artificial Sequence
  Synthetic
ggcgggcagaucacgagguu

SEQ ID NO: 726735 - RNA, 20 nt, Artificial Sequence
  Synthetic
ggcugcauucccaggagguu

SEQ ID NO: 726736 - RNA, 20 nt, Artificial Sequence
  Synthetic
gucugcaaaugacugagguu

SEQ ID NO: 726737 - RNA, 20 nt, Artificial Sequence
  Synthetic
ggauuauaugugaauagguu

SEQ ID NO: 726738 - RNA, 20 nt, Artificial Sequence
  Synthetic
gccuccuuucagcauagguu

SEQ ID NO: 726739 - RNA, 20 nt, Artificial Sequence
  Synthetic
gcaaugauguucaguagguu

SEQ ID NO: 726740 - RNA, 20 nt, Artificial Sequence
  Synthetic
gaaugaggagagauuagguu

SEQ ID NO: 726741 - RNA, 20 nt, Artificial Sequence
  Synthetic
gcauuacuaacauuuagguu

SEQ ID NO: 726742 - RNA, 20 nt, Artificial Sequence
  Synthetic
ggaaaccacaauaaaggguu

SEQ ID NO: 726743 - RNA, 20 nt, Artificial Sequence
  Synthetic
gaagacagcagaagaggguu

SEQ ID NO: 726744 - RNA, 20 nt, Artificial Sequence
  Synthetic
gaaguugagucauagggguu

SEQ ID NO: 726745 - RNA, 20 nt, Artificial Sequence
  Synthetic
gguauuagaagguggggguu

SEQ ID NO: 726746 - RNA, 20 nt, Artificial Sequence
  Synthetic
gaaucagcaucucugggguu

SEQ ID NO: 726747 - RNA, 20 nt, Artificial Sequence
  Synthetic
gauaaaguugguuguggguu

SEQ ID NO: 726748 - RNA, 20 nt, Artificial Sequence
  Synthetic
gauuuacauauuaaaugguu

SEQ ID NO: 726749 - RNA, 20 nt, Artificial Sequence
  Synthetic
ggcuugauaaaauaaugguu

SEQ ID NO: 726750 - RNA, 20 nt, Artificial Sequence
  Synthetic
ggcaauaucacuuaaugguu

SEQ ID NO: 726751 - RNA, 20 nt, Artificial Sequence
  Synthetic
gugcgugggaggcgaugguu

SEQ ID NO: 726752 - RNA, 20 nt, Artificial Sequence
  Synthetic
gguuuguuugggggaugguu

SEQ ID NO: 726753 - RNA, 20 nt, Artificial Sequence
  Synthetic
guaggugagauuggaugguu

SEQ ID NO: 726754 - RNA, 20 nt, Artificial Sequence
  Synthetic
guauccacaaagauaugguu

SEQ ID NO: 726755 - RNA, 20 nt, Artificial Sequence
  Synthetic
ggauauuuauugauaugguu

SEQ ID NO: 726756 - RNA, 20 nt, Artificial Sequence
  Synthetic
gcauagggugagguaugguu

SEQ ID NO: 726757 - RNA, 20 nt, Artificial Sequence
  Synthetic
gacuuggguaaguuaugguu

SEQ ID NO: 726758 - RNA, 20 nt, Artificial Sequence
  Synthetic
guucuucauguaaacugguu

SEQ ID NO: 726759 - RNA, 20 nt, Artificial Sequence
  Synthetic
gcauuuaucaacaacugguu

SEQ ID NO: 726760 - RNA, 20 nt, Artificial Sequence
  Synthetic
guugccugacauuccugguu

SEQ ID NO: 726761 - RNA, 20 nt, Artificial Sequence
  Synthetic
gaaacauuucuuuccugguu

SEQ ID NO: 726762 - RNA, 20 nt, Artificial Sequence
  Synthetic
gguaguguaggguucugguu

SEQ ID NO: 726763 - RNA, 20 nt, Artificial Sequence
  Synthetic
gauuaauggugaaagugguu

SEQ ID NO: 726764 - RNA, 20 nt, Artificial Sequence
  Synthetic
gugaacuauucccagugguu

SEQ ID NO: 726765 - RNA, 20 nt, Artificial Sequence
  Synthetic
gcaacaaauaaacugugguu

SEQ ID NO: 726766 - RNA, 20 nt, Artificial Sequence
  Synthetic
gggugggggaaauauugguu

SEQ ID NO: 726767 - RNA, 20 nt, Artificial Sequence
  Synthetic
gguuagcuuugugguugguu

SEQ ID NO: 726768 - RNA, 20 nt, Artificial Sequence
  Synthetic
guuaccaaggaaauuugguu

SEQ ID NO: 726769 - RNA, 20 nt, Artificial Sequence
  Synthetic
guaaugaauuacauuugguu

SEQ ID NO: 726770 - RNA, 20 nt, Artificial Sequence
  Synthetic
gcacauucucugguuugguu

SEQ ID NO: 726771 - RNA, 20 nt, Artificial Sequence
  Synthetic
gggggaggugauuuuugguu

SEQ ID NO: 726772 - RNA, 20 nt, Artificial Sequence
  Synthetic
gaaaacuuggcuaaaauguu

SEQ ID NO: 726773 - RNA, 20 nt, Artificial Sequence
  Synthetic
guagauguguaauaaauguu

SEQ ID NO: 726774 - RNA, 20 nt, Artificial Sequence
  Synthetic
guuaugugucucucaauguu

SEQ ID NO: 726775 - RNA, 20 nt, Artificial Sequence
  Synthetic
gauacagaagcaagaauguu

SEQ ID NO: 726776 - RNA, 20 nt, Artificial Sequence
  Synthetic
guuuccugagguauaauguu

SEQ ID NO: 726777 - RNA, 20 nt, Artificial Sequence
  Synthetic
ggagaccaagaaguaauguu

SEQ ID NO: 726778 - RNA, 20 nt, Artificial Sequence
  Synthetic
gguuuccaagugaccauguu

SEQ ID NO: 726779 - RNA, 20 nt, Artificial Sequence
  Synthetic
guuaaaagaccuuucauguu

SEQ ID NO: 726780 - RNA, 20 nt, Artificial Sequence
  Synthetic
gauaauuaaauuuucauguu

SEQ ID NO: 726781 - RNA, 20 nt, Artificial Sequence
  Synthetic
gagauagaaagacagauguu

SEQ ID NO: 726782 - RNA, 20 nt, Artificial Sequence
  Synthetic
gaaacaauucaucagauguu

SEQ ID NO: 726783 - RNA, 20 nt, Artificial Sequence
  Synthetic
ggguagaauauaaggauguu

SEQ ID NO: 726784 - RNA, 20 nt, Artificial Sequence
  Synthetic
gggcuuaaaaccuggauguu

SEQ ID NO: 726785 - RNA, 20 nt, Artificial Sequence
  Synthetic
guuccuucaggugugauguu

SEQ ID NO: 726786 - RNA, 20 nt, Artificial Sequence
  Synthetic
guucuuuuaauugugauguu

SEQ ID NO: 726787 - RNA, 20 nt, Artificial Sequence
  Synthetic
ggaucaucuaaugauauguu

SEQ ID NO: 726788 - RNA, 20 nt, Artificial Sequence
  Synthetic
ggaagaguuguuuauauguu

SEQ ID NO: 726789 - RNA, 20 nt, Artificial Sequence
  Synthetic
ggaauuuuaucaacuauguu

SEQ ID NO: 726790 - RNA, 20 nt, Artificial Sequence
  Synthetic
gaaaaacuuuuguguauguu

SEQ ID NO: 726791 - RNA, 20 nt, Artificial Sequence
  Synthetic
guguuuauuaacacacuguu

SEQ ID NO: 726792 - RNA, 20 nt, Artificial Sequence
  Synthetic
gaaguuuacaaagcacuguu

SEQ ID NO: 726793 - RNA, 20 nt, Artificial Sequence
  Synthetic
guuguuucuaaaucacuguu

SEQ ID NO: 726794 - RNA, 20 nt, Artificial Sequence
  Synthetic
ggagccccaggaucacuguu

SEQ ID NO: 726795 - RNA, 20 nt, Artificial Sequence
  Synthetic
guacaggucagugaccuguu

SEQ ID NO: 726796 - RNA, 20 nt, Artificial Sequence
  Synthetic
guagaguuagaaucccuguu

SEQ ID NO: 726797 - RNA, 20 nt, Artificial Sequence
  Synthetic
guaccaauccguugccuguu

SEQ ID NO: 726798 - RNA, 20 nt, Artificial Sequence
  Synthetic
gugcugcaaaacuuccuguu

SEQ ID NO: 726799 - RNA, 20 nt, Artificial Sequence
  Synthetic
gaaauuuuggcaaagcuguu

SEQ ID NO: 726800 - RNA, 20 nt, Artificial Sequence
  Synthetic
gagugagaacaugcgcuguu

SEQ ID NO: 726801 - RNA, 20 nt, Artificial Sequence
  Synthetic
gucuuggugcagcugcuguu

SEQ ID NO: 726802 - RNA, 20 nt, Artificial Sequence
  Synthetic
gaugcucuucccuugcuguu

SEQ ID NO: 726803 - RNA, 20 nt, Artificial Sequence
  Synthetic
gagugacugcucauucuguu

SEQ ID NO: 726804 - RNA, 20 nt, Artificial Sequence
  Synthetic
gaaaucacaguguuucuguu

SEQ ID NO: 726805 - RNA, 20 nt, Artificial Sequence
  Synthetic
gagugagaccaugcaguguu

SEQ ID NO: 726806 - RNA, 20 nt, Artificial Sequence
  Synthetic
gagugagaauaugcaguguu

SEQ ID NO: 726807 - RNA, 20 nt, Artificial Sequence
  Synthetic
gagugagaguaugcaguguu

SEQ ID NO: 726808 - RNA, 20 nt, Artificial Sequence
  Synthetic
gagcgagaacaugcgguguu

SEQ ID NO: 726809 - RNA, 20 nt, Artificial Sequence
  Synthetic
gagugagaacaugcgguguu

SEQ ID NO: 726810 - RNA, 20 nt, Artificial Sequence
  Synthetic
gagugaggacaugcgguguu

SEQ ID NO: 726811 - RNA, 20 nt, Artificial Sequence
  Synthetic
gaaugagaauaugcgguguu

SEQ ID NO: 726812 - RNA, 20 nt, Artificial Sequence
  Synthetic
gagugagaauaugcgguguu

SEQ ID NO: 726813 - RNA, 20 nt, Artificial Sequence
  Synthetic
gauuuucagugucugguguu

SEQ ID NO: 726814 - RNA, 20 nt, Artificial Sequence
  Synthetic
gaguaagaacaugugguguu

SEQ ID NO: 726815 - RNA, 20 nt, Artificial Sequence
  Synthetic
gagugagaacaugugguguu

SEQ ID NO: 726816 - RNA, 20 nt, Artificial Sequence
  Synthetic
gggugagaauaugugguguu

SEQ ID NO: 726817 - RNA, 20 nt, Artificial Sequence
  Synthetic
guauugucauaaaauguguu

SEQ ID NO: 726818 - RNA, 20 nt, Artificial Sequence
  Synthetic
gaauucagugacuguguguu

SEQ ID NO: 726819 - RNA, 20 nt, Artificial Sequence
  Synthetic
guuacuauuguguguguguu

SEQ ID NO: 726820 - RNA, 20 nt, Artificial Sequence
  Synthetic
gccuuggaauauuguguguu

SEQ ID NO: 726821 - RNA, 20 nt, Artificial Sequence
  Synthetic
guuugagaaagauuuguguu

SEQ ID NO: 726822 - RNA, 20 nt, Artificial Sequence
  Synthetic
gguuggagggggaaauuguu

SEQ ID NO: 726823 - RNA, 20 nt, Artificial Sequence
  Synthetic
guagaaugcacccaauuguu

SEQ ID NO: 726824 - RNA, 20 nt, Artificial Sequence
  Synthetic
gucaccuuagaagaauuguu

SEQ ID NO: 726825 - RNA, 20 nt, Artificial Sequence
  Synthetic
gggguacaaucugcauuguu

SEQ ID NO: 726826 - RNA, 20 nt, Artificial Sequence
  Synthetic
ggucuuuaaguugcauuguu

SEQ ID NO: 726827 - RNA, 20 nt, Artificial Sequence
  Synthetic
guaauauauuaaagauuguu

SEQ ID NO: 726828 - RNA, 20 nt, Artificial Sequence
  Synthetic
gcuauuuauugguacuuguu

SEQ ID NO: 726829 - RNA, 20 nt, Artificial Sequence
  Synthetic
ggcuaugguucccaguuguu

SEQ ID NO: 726830 - RNA, 20 nt, Artificial Sequence
  Synthetic
gaugcuuauacacuguuguu

SEQ ID NO: 726831 - RNA, 20 nt, Artificial Sequence
  Synthetic
ggcauucauccuuuguuguu

SEQ ID NO: 726832 - RNA, 20 nt, Artificial Sequence
  Synthetic
ggaauguuuuuccauuuguu

SEQ ID NO: 726833 - RNA, 20 nt, Artificial Sequence
  Synthetic
gacaagcaaguucauuuguu

SEQ ID NO: 726834 - RNA, 20 nt, Artificial Sequence
  Synthetic
gucuaaaucucuuauuuguu

SEQ ID NO: 726835 - RNA, 20 nt, Artificial Sequence
  Synthetic
gagccuggagccccuuuguu

SEQ ID NO: 726836 - RNA, 20 nt, Artificial Sequence
  Synthetic
ggaguuagggagaguuuguu

SEQ ID NO: 726837 - RNA, 20 nt, Artificial Sequence
  Synthetic
gcuuccuaggucuuuuuguu

SEQ ID NO: 726838 - RNA, 20 nt, Artificial Sequence
  Synthetic
guuggaguaauaaaaaauuu

SEQ ID NO: 726839 - RNA, 20 nt, Artificial Sequence
  Synthetic
guggcaauugucaaaaauuu

SEQ ID NO: 726840 - RNA, 20 nt, Artificial Sequence
  Synthetic
ggaagguaagagaaaaauuu

SEQ ID NO: 726841 - RNA, 20 nt, Artificial Sequence
  Synthetic
gaaguuucucaccaaaauuu

SEQ ID NO: 726842 - RNA, 20 nt, Artificial Sequence
  Synthetic
ggucuaguggaaggaaauuu

SEQ ID NO: 726843 - RNA, 20 nt, Artificial Sequence
  Synthetic
gauguaauaaaaugaaauuu

SEQ ID NO: 726844 - RNA, 20 nt, Artificial Sequence
  Synthetic
guuuccaacacaugaaauuu

SEQ ID NO: 726845 - RNA, 20 nt, Artificial Sequence
  Synthetic
guauucccaagcugaaauuu

SEQ ID NO: 726846 - RNA, 20 nt, Artificial Sequence
  Synthetic
gugaccuuucaaauaaauuu

SEQ ID NO: 726847 - RNA, 20 nt, Artificial Sequence
  Synthetic
guuuuuaagcugcuaaauuu

SEQ ID NO: 726848 - RNA, 20 nt, Artificial Sequence
  Synthetic
guagauacauuauuaaauuu

SEQ ID NO: 726849 - RNA, 20 nt, Artificial Sequence
  Synthetic
gcguaaucuuugaacaauuu

SEQ ID NO: 726850 - RNA, 20 nt, Artificial Sequence
  Synthetic
gguuuucuguaggacaauuu

SEQ ID NO: 726851 - RNA, 20 nt, Artificial Sequence
  Synthetic
guuuuuuaguaagccaauuu

SEQ ID NO: 726852 - RNA, 20 nt, Artificial Sequence
  Synthetic
gagcagauauucuccaauuu

SEQ ID NO: 726853 - RNA, 20 nt, Artificial Sequence
  Synthetic
gaggcaauauacagcaauuu

SEQ ID NO: 726854 - RNA, 20 nt, Artificial Sequence
  Synthetic
gacuguaaucccagcaauuu

SEQ ID NO: 726855 - RNA, 20 nt, Artificial Sequence
  Synthetic
gccuguaauaucagcaauuu

SEQ ID NO: 726856 - RNA, 20 nt, Artificial Sequence
  Synthetic
gaaccuuaaaaaaucaauuu

SEQ ID NO: 726857 - RNA, 20 nt, Artificial Sequence
  Synthetic
gagaacuucccaaucaauuu

SEQ ID NO: 726858 - RNA, 20 nt, Artificial Sequence
  Synthetic
gccucucuccagcucaauuu

SEQ ID NO: 726859 - RNA, 20 nt, Artificial Sequence
  Synthetic
gagaaaccauuugucaauuu

SEQ ID NO: 726860 - RNA, 20 nt, Artificial Sequence
  Synthetic
gcaacauccuuggagaauuu

SEQ ID NO: 726861 - RNA, 20 nt, Artificial Sequence
  Synthetic
gcucaaugaaguuagaauuu

SEQ ID NO: 726862 - RNA, 20 nt, Artificial Sequence
  Synthetic
gcugauuuucuaacgaauuu

SEQ ID NO: 726863 - RNA, 20 nt, Artificial Sequence
  Synthetic
guauuuccaauuuugaauuu

SEQ ID NO: 726864 - RNA, 20 nt, Artificial Sequence
  Synthetic
ggcuacaauguacauaauuu

SEQ ID NO: 726865 - RNA, 20 nt, Artificial Sequence
  Synthetic
guaugagauuauaguaauuu

SEQ ID NO: 726866 - RNA, 20 nt, Artificial Sequence
  Synthetic
gcauuguucuuauuuaauuu

SEQ ID NO: 726867 - RNA, 20 nt, Artificial Sequence
  Synthetic
guagcaucauuguuuaauuu

SEQ ID NO: 726868 - RNA, 20 nt, Artificial Sequence
  Synthetic
gcauuugcaaaaaaacauuu

SEQ ID NO: 726869 - RNA, 20 nt, Artificial Sequence
  Synthetic
gcaauacuuugggaacauuu

SEQ ID NO: 726870 - RNA, 20 nt, Artificial Sequence
  Synthetic
guauauaugaccuaacauuu

SEQ ID NO: 726871 - RNA, 20 nt, Artificial Sequence
  Synthetic
ggaaaccagaauuaacauuu

SEQ ID NO: 726872 - RNA, 20 nt, Artificial Sequence
  Synthetic
gagaaggaaaggagacauuu

SEQ ID NO: 726873 - RNA, 20 nt, Artificial Sequence
  Synthetic
guccagcuccugauacauuu

SEQ ID NO: 726874 - RNA, 20 nt, Artificial Sequence
  Synthetic
gaaucaggcaccacccauuu

SEQ ID NO: 726875 - RNA, 20 nt, Artificial Sequence
  Synthetic
gggaauagagaauuccauuu

SEQ ID NO: 726876 - RNA, 20 nt, Artificial Sequence
  Synthetic
gcagaaacagccaagcauuu

SEQ ID NO: 726877 - RNA, 20 nt, Artificial Sequence
  Synthetic
gguuugugaguccagcauuu

SEQ ID NO: 726878 - RNA, 20 nt, Artificial Sequence
  Synthetic
gggggaaaggagacgcauuu

SEQ ID NO: 726879 - RNA, 20 nt, Artificial Sequence
  Synthetic
ggauuuuaaaguacgcauuu

SEQ ID NO: 726880 - RNA, 20 nt, Artificial Sequence
  Synthetic
gaagggaaacgugggcauuu

SEQ ID NO: 726881 - RNA, 20 nt, Artificial Sequence
  Synthetic
guauaccuaguaaugcauuu

SEQ ID NO: 726882 - RNA, 20 nt, Artificial Sequence
  Synthetic
guagucaaaggagaucauuu

SEQ ID NO: 726883 - RNA, 20 nt, Artificial Sequence
  Synthetic
gacaucaguuucccucauuu

SEQ ID NO: 726884 - RNA, 20 nt, Artificial Sequence
  Synthetic
gugugaaauaugugucauuu

SEQ ID NO: 726885 - RNA, 20 nt, Artificial Sequence
  Synthetic
ggccuguagccccuucauuu

SEQ ID NO: 726886 - RNA, 20 nt, Artificial Sequence
  Synthetic
gauucuuuaucucuucauuu

SEQ ID NO: 726887 - RNA, 20 nt, Artificial Sequence
  Synthetic
ggacacagggcaguucauuu

SEQ ID NO: 726888 - RNA, 20 nt, Artificial Sequence
  Synthetic
guagacuucuuauuucauuu

SEQ ID NO: 726889 - RNA, 20 nt, Artificial Sequence
  Synthetic
gugaguuaugguaaagauuu

SEQ ID NO: 726890 - RNA, 20 nt, Artificial Sequence
  Synthetic
guaguaagccuccaagauuu

SEQ ID NO: 726891 - RNA, 20 nt, Artificial Sequence
  Synthetic
gugagauuacuuacagauuu

SEQ ID NO: 726892 - RNA, 20 nt, Artificial Sequence
  Synthetic
ggccucagaguugcagauuu

SEQ ID NO: 726893 - RNA, 20 nt, Artificial Sequence
  Synthetic
gauuuuggauuuucagauuu

SEQ ID NO: 726894 - RNA, 20 nt, Artificial Sequence
  Synthetic
gggaauucaacaugagauuu

SEQ ID NO: 726895 - RNA, 20 nt, Artificial Sequence
  Synthetic
gugaaagggacaugagauuu

SEQ ID NO: 726896 - RNA, 20 nt, Artificial Sequence
  Synthetic
gaacugagacagugagauuu

SEQ ID NO: 726897 - RNA, 20 nt, Artificial Sequence
  Synthetic
gagcagugaaaaguagauuu

SEQ ID NO: 726898 - RNA, 20 nt, Artificial Sequence
  Synthetic
gaaggaugguaaguagauuu

SEQ ID NO: 726899 - RNA, 20 nt, Artificial Sequence
  Synthetic
gccuguaaucccaaggauuu

SEQ ID NO: 726900 - RNA, 20 nt, Artificial Sequence
  Synthetic
gucacccuuguugaggauuu

SEQ ID NO: 726901 - RNA, 20 nt, Artificial Sequence
  Synthetic
ggaguucuccaaagggauuu

SEQ ID NO: 726902 - RNA, 20 nt, Artificial Sequence
  Synthetic
guuacacguuaaauggauuu

SEQ ID NO: 726903 - RNA, 20 nt, Artificial Sequence
  Synthetic
ggaaaagugugaguggauuu

SEQ ID NO: 726904 - RNA, 20 nt, Artificial Sequence
  Synthetic
guuaaaggacaaaaugauuu

SEQ ID NO: 726905 - RNA, 20 nt, Artificial Sequence
  Synthetic
gauuuucuguaaaaugauuu

SEQ ID NO: 726906 - RNA, 20 nt, Artificial Sequence
  Synthetic
gaacaugagagagaugauuu

SEQ ID NO: 726907 - RNA, 20 nt, Artificial Sequence
  Synthetic
gacuuuggguuauaugauuu

SEQ ID NO: 726908 - RNA, 20 nt, Artificial Sequence
  Synthetic
ggcuuugagaacacugauuu

SEQ ID NO: 726909 - RNA, 20 nt, Artificial Sequence
  Synthetic
gcaggcuuccucucugauuu

SEQ ID NO: 726910 - RNA, 20 nt, Artificial Sequence
  Synthetic
guggcagugguaugugauuu

SEQ ID NO: 726911 - RNA, 20 nt, Artificial Sequence
  Synthetic
gcauguuuucagauugauuu

SEQ ID NO: 726912 - RNA, 20 nt, Artificial Sequence
  Synthetic
gggauaauugaccuugauuu

SEQ ID NO: 726913 - RNA, 20 nt, Artificial Sequence
  Synthetic
gccugcuggaaucuugauuu

SEQ ID NO: 726914 - RNA, 20 nt, Artificial Sequence
  Synthetic
gaagccaacugucuugauuu

SEQ ID NO: 726915 - RNA, 20 nt, Artificial Sequence
  Synthetic
gcuccuauuccaaaauauuu

SEQ ID NO: 726916 - RNA, 20 nt, Artificial Sequence
  Synthetic
gaguaggagcuaaaauauuu

SEQ ID NO: 726917 - RNA, 20 nt, Artificial Sequence
  Synthetic
gagauucccaguaaauauuu

SEQ ID NO: 726918 - RNA, 20 nt, Artificial Sequence
  Synthetic
gaaaauaguuuuaaauauuu

SEQ ID NO: 726919 - RNA, 20 nt, Artificial Sequence
  Synthetic
gauuaauaaugucaauauuu

SEQ ID NO: 726920 - RNA, 20 nt, Artificial Sequence
  Synthetic
ggauaacugaaauaauauuu

SEQ ID NO: 726921 - RNA, 20 nt, Artificial Sequence
  Synthetic
guuucuagccacuaauauuu

SEQ ID NO: 726922 - RNA, 20 nt, Artificial Sequence
  Synthetic
ggggagaaagaaacauauuu

SEQ ID NO: 726923 - RNA, 20 nt, Artificial Sequence
  Synthetic
gcuccaggaguaacauauuu

SEQ ID NO: 726924 - RNA, 20 nt, Artificial Sequence
  Synthetic
gauacuccacagacauauuu

SEQ ID NO: 726925 - RNA, 20 nt, Artificial Sequence
  Synthetic
guagaaaaaaauacauauuu

SEQ ID NO: 726926 - RNA, 20 nt, Artificial Sequence
  Synthetic
gguauguugucuacauauuu

SEQ ID NO: 726927 - RNA, 20 nt, Artificial Sequence
  Synthetic
ggugaagguccaucauauuu

SEQ ID NO: 726928 - RNA, 20 nt, Artificial Sequence
  Synthetic
gcacuauugucgucauauuu

SEQ ID NO: 726929 - RNA, 20 nt, Artificial Sequence
  Synthetic
gcaaguaacauaagauauuu

SEQ ID NO: 726930 - RNA, 20 nt, Artificial Sequence
  Synthetic
guuucaauuuguugauauuu

SEQ ID NO: 726931 - RNA, 20 nt, Artificial Sequence
  Synthetic
gcauuucuaagcauauauuu

SEQ ID NO: 726932 - RNA, 20 nt, Artificial Sequence
  Synthetic
gguuggauucuacuauauuu

SEQ ID NO: 726933 - RNA, 20 nt, Artificial Sequence
  Synthetic
gaaaagugaaaucuauauuu

SEQ ID NO: 726934 - RNA, 20 nt, Artificial Sequence
  Synthetic
guauuuggacaaguauauuu

SEQ ID NO: 726935 - RNA, 20 nt, Artificial Sequence
  Synthetic
gaaauaguuucauuauauuu

SEQ ID NO: 726936 - RNA, 20 nt, Artificial Sequence
  Synthetic
gaaagauaaagcaacuauuu

SEQ ID NO: 726937 - RNA, 20 nt, Artificial Sequence
  Synthetic
guauaaaaaauggccuauuu

SEQ ID NO: 726938 - RNA, 20 nt, Artificial Sequence
  Synthetic
gucuguaaucccagcuauuu

SEQ ID NO: 726939 - RNA, 20 nt, Artificial Sequence
  Synthetic
gccuguagucccagcuauuu

SEQ ID NO: 726940 - RNA, 20 nt, Artificial Sequence
  Synthetic
gaauguuauguacgcuauuu

SEQ ID NO: 726941 - RNA, 20 nt, Artificial Sequence
  Synthetic
ggcuagucaucaggcuauuu

SEQ ID NO: 726942 - RNA, 20 nt, Artificial Sequence
  Synthetic
gaauaaugaagaggcuauuu

SEQ ID NO: 726943 - RNA, 20 nt, Artificial Sequence
  Synthetic
gacuaaaucuagggcuauuu

SEQ ID NO: 726944 - RNA, 20 nt, Artificial Sequence
  Synthetic
gauaagcaucuucucuauuu

SEQ ID NO: 726945 - RNA, 20 nt, Artificial Sequence
  Synthetic
gccuuuuugauuuucuauuu

SEQ ID NO: 726946 - RNA, 20 nt, Artificial Sequence
  Synthetic
gaagaacaccaucaguauuu

SEQ ID NO: 726947 - RNA, 20 nt, Artificial Sequence
  Synthetic
guagaguuguuugaguauuu

SEQ ID NO: 726948 - RNA, 20 nt, Artificial Sequence
  Synthetic
guuuuuuaauaaacguauuu

SEQ ID NO: 726949 - RNA, 20 nt, Artificial Sequence
  Synthetic
guaaaguaaguguuguauuu

SEQ ID NO: 726950 - RNA, 20 nt, Artificial Sequence
  Synthetic
gguuaaaagaaaaauuauuu

SEQ ID NO: 726951 - RNA, 20 nt, Artificial Sequence
  Synthetic
gcccagagccuggauuauuu

SEQ ID NO: 726952 - RNA, 20 nt, Artificial Sequence
  Synthetic
gccauauaauccacuuauuu

SEQ ID NO: 726953 - RNA, 20 nt, Artificial Sequence
  Synthetic
guuagucaaugugcuuauuu

SEQ ID NO: 726954 - RNA, 20 nt, Artificial Sequence
  Synthetic
guggugucaaaaaguuauuu

SEQ ID NO: 726955 - RNA, 20 nt, Artificial Sequence
  Synthetic
gccucuagucccaguuauuu

SEQ ID NO: 726956 - RNA, 20 nt, Artificial Sequence
  Synthetic
gacuggcuuuggaguuauuu

SEQ ID NO: 726957 - RNA, 20 nt, Artificial Sequence
  Synthetic
guauuguauuguauuuauuu

SEQ ID NO: 726958 - RNA, 20 nt, Artificial Sequence
  Synthetic
ggccuguaaccccuuuauuu

SEQ ID NO: 726959 - RNA, 20 nt, Artificial Sequence
  Synthetic
guucauuuguuuguuuauuu

SEQ ID NO: 726960 - RNA, 20 nt, Artificial Sequence
  Synthetic
gacacaaaggaauuuuauuu

SEQ ID NO: 726961 - RNA, 20 nt, Artificial Sequence
  Synthetic
gaaaugagcccuuuuuauuu

SEQ ID NO: 726962 - RNA, 20 nt, Artificial Sequence
  Synthetic
ggugaggcugaaacaacuuu

SEQ ID NO: 726963 - RNA, 20 nt, Artificial Sequence
  Synthetic
gagauggcaaaaggaacuuu

SEQ ID NO: 726964 - RNA, 20 nt, Artificial Sequence
  Synthetic
gcaguucuuaauauaacuuu

SEQ ID NO: 726965 - RNA, 20 nt, Artificial Sequence
  Synthetic
gggacauaguggguaacuuu

SEQ ID NO: 726966 - RNA, 20 nt, Artificial Sequence
  Synthetic
gccuguaaucccaacacuuu

SEQ ID NO: 726967 - RNA, 20 nt, Artificial Sequence
  Synthetic
gcuuguaaucccaacacuuu

SEQ ID NO: 726968 - RNA, 20 nt, Artificial Sequence
  Synthetic
gccucuacucccaacacuuu

SEQ ID NO: 726969 - RNA, 20 nt, Artificial Sequence
  Synthetic
gguuauaaauccaacacuuu

SEQ ID NO: 726970 - RNA, 20 nt, Artificial Sequence
  Synthetic
ggggcauacuuuaacacuuu

SEQ ID NO: 726971 - RNA, 20 nt, Artificial Sequence
  Synthetic
gccuguaaucccaccacuuu

SEQ ID NO: 726972 - RNA, 20 nt, Artificial Sequence
  Synthetic
gccuguaauccaagcacuuu

SEQ ID NO: 726973 - RNA, 20 nt, Artificial Sequence
  Synthetic
gccuguaauaccagcacuuu

SEQ ID NO: 726974 - RNA, 20 nt, Artificial Sequence
  Synthetic
gccuguaaacccagcacuuu

SEQ ID NO: 726975 - RNA, 20 nt, Artificial Sequence
  Synthetic
gccuguaaccccagcacuuu

SEQ ID NO: 726976 - RNA, 20 nt, Artificial Sequence
  Synthetic
gucugcaaucccagcacuuu

SEQ ID NO: 726977 - RNA, 20 nt, Artificial Sequence
  Synthetic
gcauauaaucccagcacuuu

SEQ ID NO: 726978 - RNA, 20 nt, Artificial Sequence
  Synthetic
gccuauaaucccagcacuuu

SEQ ID NO: 726979 - RNA, 20 nt, Artificial Sequence
  Synthetic
gcccguaaucccagcacuuu

SEQ ID NO: 726980 - RNA, 20 nt, Artificial Sequence
  Synthetic
gacuguaaucccagcacuuu

SEQ ID NO: 726981 - RNA, 20 nt, Artificial Sequence
  Synthetic
gccuguaaucccagcacuuu

SEQ ID NO: 726982 - RNA, 20 nt, Artificial Sequence
  Synthetic
gucuguaaucccagcacuuu

SEQ ID NO: 726983 - RNA, 20 nt, Artificial Sequence
  Synthetic
gccuguaaucgcagcacuuu

SEQ ID NO: 726984 - RNA, 20 nt, Artificial Sequence
  Synthetic
gugcgguggcucagcacuuu

SEQ ID NO: 726985 - RNA, 20 nt, Artificial Sequence
  Synthetic
gccuguaaucucagcacuuu

SEQ ID NO: 726986 - RNA, 20 nt, Artificial Sequence
  Synthetic
gucuguaauuucagcacuuu

SEQ ID NO: 726987 - RNA, 20 nt, Artificial Sequence
  Synthetic
gccuauaauccuagcacuuu

SEQ ID NO: 726988 - RNA, 20 nt, Artificial Sequence
  Synthetic
gccuguaauccuagcacuuu

SEQ ID NO: 726989 - RNA, 20 nt, Artificial Sequence
  Synthetic
gucugugauuuuagcacuuu

SEQ ID NO: 726990 - RNA, 20 nt, Artificial Sequence
  Synthetic
gccuguaauccccgcacuuu

SEQ ID NO: 726991 - RNA, 20 nt, Artificial Sequence
  Synthetic
gaugcguuuuaaggcacuuu

SEQ ID NO: 726992 - RNA, 20 nt, Artificial Sequence
  Synthetic
ggaaaaaaaauccagacuuu

SEQ ID NO: 726993 - RNA, 20 nt, Artificial Sequence
  Synthetic
gauuaagaaggugagacuuu

SEQ ID NO: 726994 - RNA, 20 nt, Artificial Sequence
  Synthetic
gccuguaaucccaggacuuu

SEQ ID NO: 726995 - RNA, 20 nt, Artificial Sequence
  Synthetic
gucuguaacccuaggacuuu

SEQ ID NO: 726996 - RNA, 20 nt, Artificial Sequence
  Synthetic
ggagugauacaauggacuuu

SEQ ID NO: 726997 - RNA, 20 nt, Artificial Sequence
  Synthetic
gaucagggucaucugacuuu

SEQ ID NO: 726998 - RNA, 20 nt, Artificial Sequence
  Synthetic
gaacuaaucagcaauacuuu

SEQ ID NO: 726999 - RNA, 20 nt, Artificial Sequence
  Synthetic
guucagaaaacuaauacuuu

SEQ ID NO: 727000 - RNA, 20 nt, Artificial Sequence
  Synthetic
gauaaaaacagacauacuuu

SEQ ID NO: 727001 - RNA, 20 nt, Artificial Sequence
  Synthetic
gauaguaacaugcauacuuu

SEQ ID NO: 727002 - RNA, 20 nt, Artificial Sequence
  Synthetic
ggcaguuguucucauacuuu

SEQ ID NO: 727003 - RNA, 20 nt, Artificial Sequence
  Synthetic
gcuuuugcuacauauacuuu

SEQ ID NO: 727004 - RNA, 20 nt, Artificial Sequence
  Synthetic
gaucuuuauuauccuacuuu

SEQ ID NO: 727005 - RNA, 20 nt, Artificial Sequence
  Synthetic
gccuguaaucccaguacuuu

SEQ ID NO: 727006 - RNA, 20 nt, Artificial Sequence
  Synthetic
guuuuaaaugcuauuacuuu

SEQ ID NO: 727007 - RNA, 20 nt, Artificial Sequence
  Synthetic
gacagaggcauuguuacuuu

SEQ ID NO: 727008 - RNA, 20 nt, Artificial Sequence
  Synthetic
gauauuauuaaaauaccuuu

SEQ ID NO: 727009 - RNA, 20 nt, Artificial Sequence
  Synthetic
gccuuccuuuucuuaccuuu

SEQ ID NO: 727010 - RNA, 20 nt, Artificial Sequence
  Synthetic
gugggucaaugaaccccuuu

SEQ ID NO: 727011 - RNA, 20 nt, Artificial Sequence
  Synthetic
gagcuaauauaagccccuuu

SEQ ID NO: 727012 - RNA, 20 nt, Artificial Sequence
  Synthetic
ggucaccuuucugccccuuu

SEQ ID NO: 727013 - RNA, 20 nt, Artificial Sequence
  Synthetic
gcuagauuucaguucccuuu

SEQ ID NO: 727014 - RNA, 20 nt, Artificial Sequence
  Synthetic
guccuccugccccagccuuu

SEQ ID NO: 727015 - RNA, 20 nt, Artificial Sequence
  Synthetic
gcuucuacauaauagccuuu

SEQ ID NO: 727016 - RNA, 20 nt, Artificial Sequence
  Synthetic
gagggaucuuuuuauccuuu

SEQ ID NO: 727017 - RNA, 20 nt, Artificial Sequence
  Synthetic
gucuuuuaaaucucuccuuu

SEQ ID NO: 727018 - RNA, 20 nt, Artificial Sequence
  Synthetic
guagaauaaagucuuccuuu

SEQ ID NO: 727019 - RNA, 20 nt, Artificial Sequence
  Synthetic
gccggaaguucuuuuccuuu

SEQ ID NO: 727020 - RNA, 20 nt, Artificial Sequence
  Synthetic
guuugaaacucugaagcuuu

SEQ ID NO: 727021 - RNA, 20 nt, Artificial Sequence
  Synthetic
gcagucaaagagagagcuuu

SEQ ID NO: 727022 - RNA, 20 nt, Artificial Sequence
  Synthetic
gaagucaagaacugagcuuu

SEQ ID NO: 727023 - RNA, 20 nt, Artificial Sequence
  Synthetic
gccugcacucccagcgcuuu

SEQ ID NO: 727024 - RNA, 20 nt, Artificial Sequence
  Synthetic
gcuaaaagcugguaggcuuu

SEQ ID NO: 727025 - RNA, 20 nt, Artificial Sequence
  Synthetic
ggcugcagacauagggcuuu

SEQ ID NO: 727026 - RNA, 20 nt, Artificial Sequence
  Synthetic
gauuaaaauacaugggcuuu

SEQ ID NO: 727027 - RNA, 20 nt, Artificial Sequence
  Synthetic
gacagacgaacuauggcuuu

SEQ ID NO: 727028 - RNA, 20 nt, Artificial Sequence
  Synthetic
guauuagcaaauguggcuuu

SEQ ID NO: 727029 - RNA, 20 nt, Artificial Sequence
  Synthetic
gcaagguguuuuguggcuuu

SEQ ID NO: 727030 - RNA, 20 nt, Artificial Sequence
  Synthetic
ggagaacaaaaaaaugcuuu

SEQ ID NO: 727031 - RNA, 20 nt, Artificial Sequence
  Synthetic
gaaaaauuugagaaugcuuu

SEQ ID NO: 727032 - RNA, 20 nt, Artificial Sequence
  Synthetic
ggagagaguagaacugcuuu

SEQ ID NO: 727033 - RNA, 20 nt, Artificial Sequence
  Synthetic
gccaagaauauuccugcuuu

SEQ ID NO: 727034 - RNA, 20 nt, Artificial Sequence
  Synthetic
gucuggaauuccagugcuuu

SEQ ID NO: 727035 - RNA, 20 nt, Artificial Sequence
  Synthetic
gccugucaucucagugcuuu

SEQ ID NO: 727036 - RNA, 20 nt, Artificial Sequence
  Synthetic
gccuguaauccuagugcuuu

SEQ ID NO: 727037 - RNA, 20 nt, Artificial Sequence
  Synthetic
gccuguaauccaggugcuuu

SEQ ID NO: 727038 - RNA, 20 nt, Artificial Sequence
  Synthetic
gccuguaaucccugugcuuu

SEQ ID NO: 727039 - RNA, 20 nt, Artificial Sequence
  Synthetic
gauuuaaacucaauugcuuu

SEQ ID NO: 727040 - RNA, 20 nt, Artificial Sequence
  Synthetic
gcuucuguugccauugcuuu

SEQ ID NO: 727041 - RNA, 20 nt, Artificial Sequence
  Synthetic
gcuuuuguugccauugcuuu

SEQ ID NO: 727042 - RNA, 20 nt, Artificial Sequence
  Synthetic
gcaaguacaucgauugcuuu

SEQ ID NO: 727043 - RNA, 20 nt, Artificial Sequence
  Synthetic
gcuuuuguugcccuugcuuu

SEQ ID NO: 727044 - RNA, 20 nt, Artificial Sequence
  Synthetic
gcuuuuguugcuguugcuuu

SEQ ID NO: 727045 - RNA, 20 nt, Artificial Sequence
  Synthetic
gccagcuugcauuuugcuuu

SEQ ID NO: 727046 - RNA, 20 nt, Artificial Sequence
  Synthetic
gcagaacuaaaaacaucuuu

SEQ ID NO: 727047 - RNA, 20 nt, Artificial Sequence
  Synthetic
ggaucaugcuguacaucuuu

SEQ ID NO: 727048 - RNA, 20 nt, Artificial Sequence
  Synthetic
gcacaaguuagugcaucuuu

SEQ ID NO: 727049 - RNA, 20 nt, Artificial Sequence
  Synthetic
gaauaguguagcauaucuuu

SEQ ID NO: 727050 - RNA, 20 nt, Artificial Sequence
  Synthetic
gauuuugccuauggcucuuu

SEQ ID NO: 727051 - RNA, 20 nt, Artificial Sequence
  Synthetic
guucccaugacccucucuuu

SEQ ID NO: 727052 - RNA, 20 nt, Artificial Sequence
  Synthetic
gccccauuuuuucucucuuu

SEQ ID NO: 727053 - RNA, 20 nt, Artificial Sequence
  Synthetic
guagaagucccauucucuuu

SEQ ID NO: 727054 - RNA, 20 nt, Artificial Sequence
  Synthetic
guaaauuguugauucucuuu

SEQ ID NO: 727055 - RNA, 20 nt, Artificial Sequence
  Synthetic
gauuuacuuuaucugucuuu

SEQ ID NO: 727056 - RNA, 20 nt, Artificial Sequence
  Synthetic
gccgugacaauucugucuuu

SEQ ID NO: 727057 - RNA, 20 nt, Artificial Sequence
  Synthetic
gcauuuuuucaugugucuuu

SEQ ID NO: 727058 - RNA, 20 nt, Artificial Sequence
  Synthetic
gcuuuuuuucaugugucuuu

SEQ ID NO: 727059 - RNA, 20 nt, Artificial Sequence
  Synthetic
gauucugguuuuaauucuuu

SEQ ID NO: 727060 - RNA, 20 nt, Artificial Sequence
  Synthetic
gauccuguuuuuaauucuuu

SEQ ID NO: 727061 - RNA, 20 nt, Artificial Sequence
  Synthetic
gauaagccaugucauucuuu

SEQ ID NO: 727062 - RNA, 20 nt, Artificial Sequence
  Synthetic
guacugguauaaacuucuuu

SEQ ID NO: 727063 - RNA, 20 nt, Artificial Sequence
  Synthetic
ggugucuccugaacuucuuu

SEQ ID NO: 727064 - RNA, 20 nt, Artificial Sequence
  Synthetic
gcaauuagaaucacuucuuu

SEQ ID NO: 727065 - RNA, 20 nt, Artificial Sequence
  Synthetic
guaagacaacagacuucuuu

SEQ ID NO: 727066 - RNA, 20 nt, Artificial Sequence
  Synthetic
guggucaacuuuauuucuuu

SEQ ID NO: 727067 - RNA, 20 nt, Artificial Sequence
  Synthetic
guuauuguucccuaaaguuu

SEQ ID NO: 727068 - RNA, 20 nt, Artificial Sequence
  Synthetic
ggggaaacucacagaaguuu

SEQ ID NO: 727069 - RNA, 20 nt, Artificial Sequence
  Synthetic
ggaacacugcagagaaguuu

SEQ ID NO: 727070 - RNA, 20 nt, Artificial Sequence
  Synthetic
gaauucaagaauugaaguuu

SEQ ID NO: 727071 - RNA, 20 nt, Artificial Sequence
  Synthetic
gugaauggguauugaaguuu

SEQ ID NO: 727072 - RNA, 20 nt, Artificial Sequence
  Synthetic
ggggauucaaaaauaaguuu

SEQ ID NO: 727073 - RNA, 20 nt, Artificial Sequence
  Synthetic
gacucugauucaguaaguuu

SEQ ID NO: 727074 - RNA, 20 nt, Artificial Sequence
  Synthetic
gaaaaaaaaauguuaaguuu

SEQ ID NO: 727075 - RNA, 20 nt, Artificial Sequence
  Synthetic
gauuuucacuuuuacaguuu

SEQ ID NO: 727076 - RNA, 20 nt, Artificial Sequence
  Synthetic
gaaguguuguuugucaguuu

SEQ ID NO: 727077 - RNA, 20 nt, Artificial Sequence
  Synthetic
gaagauaaugaguucaguuu

SEQ ID NO: 727078 - RNA, 20 nt, Artificial Sequence
  Synthetic
gcaguaggggauuucaguuu

SEQ ID NO: 727079 - RNA, 20 nt, Artificial Sequence
  Synthetic
gaguaccugaguuucaguuu

SEQ ID NO: 727080 - RNA, 20 nt, Artificial Sequence
  Synthetic
gugauuuuuuggaagaguuu

SEQ ID NO: 727081 - RNA, 20 nt, Artificial Sequence
  Synthetic
gucuucuaggaggagaguuu

SEQ ID NO: 727082 - RNA, 20 nt, Artificial Sequence
  Synthetic
ggaauauuuagcuagaguuu

SEQ ID NO: 727083 - RNA, 20 nt, Artificial Sequence
  Synthetic
gagagucucaaaaugaguuu

SEQ ID NO: 727084 - RNA, 20 nt, Artificial Sequence
  Synthetic
guuuuuuagagaaugaguuu

SEQ ID NO: 727085 - RNA, 20 nt, Artificial Sequence
  Synthetic
gagauuaauuugaugaguuu

SEQ ID NO: 727086 - RNA, 20 nt, Artificial Sequence
  Synthetic
gaauauaacauguugaguuu

SEQ ID NO: 727087 - RNA, 20 nt, Artificial Sequence
  Synthetic
guccauggaaauuugaguuu

SEQ ID NO: 727088 - RNA, 20 nt, Artificial Sequence
  Synthetic
gaucuuuucugcaauaguuu

SEQ ID NO: 727089 - RNA, 20 nt, Artificial Sequence
  Synthetic
gaagaaucuuuuaauaguuu

SEQ ID NO: 727090 - RNA, 20 nt, Artificial Sequence
  Synthetic
guugcuaaauuacauaguuu

SEQ ID NO: 727091 - RNA, 20 nt, Artificial Sequence
  Synthetic
guggaaacaaagcauaguuu

SEQ ID NO: 727092 - RNA, 20 nt, Artificial Sequence
  Synthetic
gguaagauuucauauaguuu

SEQ ID NO: 727093 - RNA, 20 nt, Artificial Sequence
  Synthetic
ggaagcacacacucuaguuu

SEQ ID NO: 727094 - RNA, 20 nt, Artificial Sequence
  Synthetic
gagaggucauugauuaguuu

SEQ ID NO: 727095 - RNA, 20 nt, Artificial Sequence
  Synthetic
ggagcacauuuauuuaguuu

SEQ ID NO: 727096 - RNA, 20 nt, Artificial Sequence
  Synthetic
gugccuuuggauuuuaguuu

SEQ ID NO: 727097 - RNA, 20 nt, Artificial Sequence
  Synthetic
gccuauuaguaguuacguuu

SEQ ID NO: 727098 - RNA, 20 nt, Artificial Sequence
  Synthetic
gaaagcagauaucagcguuu

SEQ ID NO: 727099 - RNA, 20 nt, Artificial Sequence
  Synthetic
gcuucuaacaguuggcguuu

SEQ ID NO: 727100 - RNA, 20 nt, Artificial Sequence
  Synthetic
gcguucauauugacucguuu

SEQ ID NO: 727101 - RNA, 20 nt, Artificial Sequence
  Synthetic
guugugugaugccaagguuu

SEQ ID NO: 727102 - RNA, 20 nt, Artificial Sequence
  Synthetic
guugugucucugccagguuu

SEQ ID NO: 727103 - RNA, 20 nt, Artificial Sequence
  Synthetic
guugugucuuugccagguuu

SEQ ID NO: 727104 - RNA, 20 nt, Artificial Sequence
  Synthetic
ggggaaauauucucagguuu

SEQ ID NO: 727105 - RNA, 20 nt, Artificial Sequence
  Synthetic
guauuucaaauuucagguuu

SEQ ID NO: 727106 - RNA, 20 nt, Artificial Sequence
  Synthetic
gaaguaagugagagagguuu

SEQ ID NO: 727107 - RNA, 20 nt, Artificial Sequence
  Synthetic
gaagagcugaugagagguuu

SEQ ID NO: 727108 - RNA, 20 nt, Artificial Sequence
  Synthetic
gacacugauucaauagguuu

SEQ ID NO: 727109 - RNA, 20 nt, Artificial Sequence
  Synthetic
gaauagauuauaauagguuu

SEQ ID NO: 727110 - RNA, 20 nt, Artificial Sequence
  Synthetic
gacacugauucaguagguuu

SEQ ID NO: 727111 - RNA, 20 nt, Artificial Sequence
  Synthetic
gaaaccacaauaaaggguuu

SEQ ID NO: 727112 - RNA, 20 nt, Artificial Sequence
  Synthetic
gggaggauuaugaaggguuu

SEQ ID NO: 727113 - RNA, 20 nt, Artificial Sequence
  Synthetic
guauuagaagguggggguuu

SEQ ID NO: 727114 - RNA, 20 nt, Artificial Sequence
  Synthetic
gcaaaauacuacauggguuu

SEQ ID NO: 727115 - RNA, 20 nt, Artificial Sequence
  Synthetic
ggcucugauuuaacugguuu

SEQ ID NO: 727116 - RNA, 20 nt, Artificial Sequence
  Synthetic
gauuaccuggcuucugguuu

SEQ ID NO: 727117 - RNA, 20 nt, Artificial Sequence
  Synthetic
guuauuuccuuuucugguuu

SEQ ID NO: 727118 - RNA, 20 nt, Artificial Sequence
  Synthetic
gcuuuuguugccauugguuu

SEQ ID NO: 727119 - RNA, 20 nt, Artificial Sequence
  Synthetic
guuagcuuugugguugguuu

SEQ ID NO: 727120 - RNA, 20 nt, Artificial Sequence
  Synthetic
gucuuuuguuugguugguuu

SEQ ID NO: 727121 - RNA, 20 nt, Artificial Sequence
  Synthetic
ggucaucugacuuuugguuu

SEQ ID NO: 727122 - RNA, 20 nt, Artificial Sequence
  Synthetic
gcccaaagcagaaaauguuu

SEQ ID NO: 727123 - RNA, 20 nt, Artificial Sequence
  Synthetic
gagucuuggguggaauguuu

SEQ ID NO: 727124 - RNA, 20 nt, Artificial Sequence
  Synthetic
gagaccaagaaguaauguuu

SEQ ID NO: 727125 - RNA, 20 nt, Artificial Sequence
  Synthetic
gcuguuuccuguacauguuu

SEQ ID NO: 727126 - RNA, 20 nt, Artificial Sequence
  Synthetic
gacauugaaaagguauguuu

SEQ ID NO: 727127 - RNA, 20 nt, Artificial Sequence
  Synthetic
guaccaauaccauacuguuu

SEQ ID NO: 727128 - RNA, 20 nt, Artificial Sequence
  Synthetic
gaaagcucauucuccuguuu

SEQ ID NO: 727129 - RNA, 20 nt, Artificial Sequence
  Synthetic
guaccaguaccaugcuguuu

SEQ ID NO: 727130 - RNA, 20 nt, Artificial Sequence
  Synthetic
gcuaucaguauaaucuguuu

SEQ ID NO: 727131 - RNA, 20 nt, Artificial Sequence
  Synthetic
gcuugggauuggaaguguuu

SEQ ID NO: 727132 - RNA, 20 nt, Artificial Sequence
  Synthetic
guggauacugauaaguguuu

SEQ ID NO: 727133 - RNA, 20 nt, Artificial Sequence
  Synthetic
ggucuugugacucuguguuu

SEQ ID NO: 727134 - RNA, 20 nt, Artificial Sequence
  Synthetic
guguguguguguguguguuu

SEQ ID NO: 727135 - RNA, 20 nt, Artificial Sequence
  Synthetic
gauuaaagauuguuguguuu

SEQ ID NO: 727136 - RNA, 20 nt, Artificial Sequence
  Synthetic
gaauuuuaucaauauuguuu

SEQ ID NO: 727137 - RNA, 20 nt, Artificial Sequence
  Synthetic
ggcuauaauuuauauuguuu

SEQ ID NO: 727138 - RNA, 20 nt, Artificial Sequence
  Synthetic
guuguuaugcaguauuguuu

SEQ ID NO: 727139 - RNA, 20 nt, Artificial Sequence
  Synthetic
guuuuuaugcuuuauuguuu

SEQ ID NO: 727140 - RNA, 20 nt, Artificial Sequence
  Synthetic
gaguccaguucaccuuguuu

SEQ ID NO: 727141 - RNA, 20 nt, Artificial Sequence
  Synthetic
guaccaguaccauguuguuu

SEQ ID NO: 727142 - RNA, 20 nt, Artificial Sequence
  Synthetic
gaauguuuuuccauuuguuu

SEQ ID NO: 727143 - RNA, 20 nt, Artificial Sequence
  Synthetic
guuuaugcauuacuuuguuu

SEQ ID NO: 727144 - RNA, 20 nt, Artificial Sequence
  Synthetic
gguuuucuaucccuuuguuu

SEQ ID NO: 727145 - RNA, 20 nt, Artificial Sequence
  Synthetic
gaaucuguuuuuguuuguuu

SEQ ID NO: 727146 - RNA, 20 nt, Artificial Sequence
  Synthetic
gcagucacuccuuuuuguuu

SEQ ID NO: 727147 - RNA, 20 nt, Artificial Sequence
  Synthetic
guaugugugucuuuuuguuu

SEQ ID NO: 727148 - RNA, 20 nt, Artificial Sequence
  Synthetic
gccuucugagguuuuuguuu

SEQ ID NO: 727149 - RNA, 20 nt, Artificial Sequence
  Synthetic
gaauaucauuuuuuuuguuu

SEQ ID NO: 727150 - RNA, 20 nt, Artificial Sequence
  Synthetic
gcagaaguaaaacaaauuuu

SEQ ID NO: 727151 - RNA, 20 nt, Artificial Sequence
  Synthetic
gguggcacugaccaaauuuu

SEQ ID NO: 727152 - RNA, 20 nt, Artificial Sequence
  Synthetic
gcaaauucaaaauaaauuuu

SEQ ID NO: 727153 - RNA, 20 nt, Artificial Sequence
  Synthetic
gcaaagcaaaacacaauuuu

SEQ ID NO: 727154 - RNA, 20 nt, Artificial Sequence
  Synthetic
gcuggggguuugagaauuuu

SEQ ID NO: 727155 - RNA, 20 nt, Artificial Sequence
  Synthetic
guugguuugguuuuaauuuu

SEQ ID NO: 727156 - RNA, 20 nt, Artificial Sequence
  Synthetic
gagauauuguagaacauuuu

SEQ ID NO: 727157 - RNA, 20 nt, Artificial Sequence
  Synthetic
guaaugucaggagacauuuu

SEQ ID NO: 727158 - RNA, 20 nt, Artificial Sequence
  Synthetic
gcaauuucuggagacauuuu

SEQ ID NO: 727159 - RNA, 20 nt, Artificial Sequence
  Synthetic
gcuaaauaauauuccauuuu

SEQ ID NO: 727160 - RNA, 20 nt, Artificial Sequence
  Synthetic
ggacagcacaagagcauuuu

SEQ ID NO: 727161 - RNA, 20 nt, Artificial Sequence
  Synthetic
gauuuuaaaguacgcauuuu

SEQ ID NO: 727162 - RNA, 20 nt, Artificial Sequence
  Synthetic
gccuguaaucucggcauuuu

SEQ ID NO: 727163 - RNA, 20 nt, Artificial Sequence
  Synthetic
gcgcacucugaaugcauuuu

SEQ ID NO: 727164 - RNA, 20 nt, Artificial Sequence
  Synthetic
gcuuuugcugguuucauuuu

SEQ ID NO: 727165 - RNA, 20 nt, Artificial Sequence
  Synthetic
gugaaaggcauuuucauuuu

SEQ ID NO: 727166 - RNA, 20 nt, Artificial Sequence
  Synthetic
ggcuuuguauuguagauuuu

SEQ ID NO: 727167 - RNA, 20 nt, Artificial Sequence
  Synthetic
guucucugauuauggauuuu

SEQ ID NO: 727168 - RNA, 20 nt, Artificial Sequence
  Synthetic
gccuuuagggaggugauuuu

SEQ ID NO: 727169 - RNA, 20 nt, Artificial Sequence
  Synthetic
gguauuaaaucaaauauuuu

SEQ ID NO: 727170 - RNA, 20 nt, Artificial Sequence
  Synthetic
ggccagagaguaaauauuuu

SEQ ID NO: 727171 - RNA, 20 nt, Artificial Sequence
  Synthetic
ggcuaguuaguaaauauuuu

SEQ ID NO: 727172 - RNA, 20 nt, Artificial Sequence
  Synthetic
guuuacuuacugaauauuuu

SEQ ID NO: 727173 - RNA, 20 nt, Artificial Sequence
  Synthetic
guuggauucuacuauauuuu

SEQ ID NO: 727174 - RNA, 20 nt, Artificial Sequence
  Synthetic
gagcccagacauuauauuuu

SEQ ID NO: 727175 - RNA, 20 nt, Artificial Sequence
  Synthetic
gacagagaacaagcuauuuu

SEQ ID NO: 727176 - RNA, 20 nt, Artificial Sequence
  Synthetic
gugacagugggcucuauuuu

SEQ ID NO: 727177 - RNA, 20 nt, Artificial Sequence
  Synthetic
gaauagauuuauaguauuuu

SEQ ID NO: 727178 - RNA, 20 nt, Artificial Sequence
  Synthetic
gaagcuaaaaaauguauuuu

SEQ ID NO: 727179 - RNA, 20 nt, Artificial Sequence
  Synthetic
guguguugaucuuguauuuu

SEQ ID NO: 727180 - RNA, 20 nt, Artificial Sequence
  Synthetic
gccaacuauuagguuauuuu

SEQ ID NO: 727181 - RNA, 20 nt, Artificial Sequence
  Synthetic
gacaauuauguauuuauuuu

SEQ ID NO: 727182 - RNA, 20 nt, Artificial Sequence
  Synthetic
gaaacuccucugcaacuuuu

SEQ ID NO: 727183 - RNA, 20 nt, Artificial Sequence
  Synthetic
gacuuuggacuuggacuuuu

SEQ ID NO: 727184 - RNA, 20 nt, Artificial Sequence
  Synthetic
gcuagccacauaauacuuuu

SEQ ID NO: 727185 - RNA, 20 nt, Artificial Sequence
  Synthetic
gugauguuauauguacuuuu

SEQ ID NO: 727186 - RNA, 20 nt, Artificial Sequence
  Synthetic
gaccauuuauccuuacuuuu

SEQ ID NO: 727187 - RNA, 20 nt, Artificial Sequence
  Synthetic
gcagcaauccccaaccuuuu

SEQ ID NO: 727188 - RNA, 20 nt, Artificial Sequence
  Synthetic
gagacucaaaauauccuuuu

SEQ ID NO: 727189 - RNA, 20 nt, Artificial Sequence
  Synthetic
ggagaaggcacaguccuuuu

SEQ ID NO: 727190 - RNA, 20 nt, Artificial Sequence
  Synthetic
guuucugcauucuagcuuuu

SEQ ID NO: 727191 - RNA, 20 nt, Artificial Sequence
  Synthetic
guguuugagcaaaggcuuuu

SEQ ID NO: 727192 - RNA, 20 nt, Artificial Sequence
  Synthetic
gaacucauaguuaggcuuuu

SEQ ID NO: 727193 - RNA, 20 nt, Artificial Sequence
  Synthetic
gcuugaguucaauggcuuuu

SEQ ID NO: 727194 - RNA, 20 nt, Artificial Sequence
  Synthetic
gcaguuuuucuuuggcuuuu

SEQ ID NO: 727195 - RNA, 20 nt, Artificial Sequence
  Synthetic
gagacccauuuagugcuuuu

SEQ ID NO: 727196 - RNA, 20 nt, Artificial Sequence
  Synthetic
gcaaaaccauucuugcuuuu

SEQ ID NO: 727197 - RNA, 20 nt, Artificial Sequence
  Synthetic
guugcuuucaaauaucuuuu

SEQ ID NO: 727198 - RNA, 20 nt, Artificial Sequence
  Synthetic
gugcauaccaauugucuuuu

SEQ ID NO: 727199 - RNA, 20 nt, Artificial Sequence
  Synthetic
ggcaaucaguaguuucuuuu

SEQ ID NO: 727200 - RNA, 20 nt, Artificial Sequence
  Synthetic
guuugauuuguucaaguuuu

SEQ ID NO: 727201 - RNA, 20 nt, Artificial Sequence
  Synthetic
gggaaacucacagaaguuuu

SEQ ID NO: 727202 - RNA, 20 nt, Artificial Sequence
  Synthetic
guuuugaacuguuaaguuuu

SEQ ID NO: 727203 - RNA, 20 nt, Artificial Sequence
  Synthetic
gaauauaagaaaccaguuuu

SEQ ID NO: 727204 - RNA, 20 nt, Artificial Sequence
  Synthetic
guucacaguauagcaguuuu

SEQ ID NO: 727205 - RNA, 20 nt, Artificial Sequence
  Synthetic
gaauauaacauuucaguuuu

SEQ ID NO: 727206 - RNA, 20 nt, Artificial Sequence
  Synthetic
gccuacuaaaucagaguuuu

SEQ ID NO: 727207 - RNA, 20 nt, Artificial Sequence
  Synthetic
ggggaauucuucauaguuuu

SEQ ID NO: 727208 - RNA, 20 nt, Artificial Sequence
  Synthetic
gcuauaguuauuauaguuuu

SEQ ID NO: 727209 - RNA, 20 nt, Artificial Sequence
  Synthetic
ggggccuggcgggagguuuu

SEQ ID NO: 727210 - RNA, 20 nt, Artificial Sequence
  Synthetic
ggcuaugguuuggggguuuu

SEQ ID NO: 727211 - RNA, 20 nt, Artificial Sequence
  Synthetic
ggauuaugaaauaugguuuu

SEQ ID NO: 727212 - RNA, 20 nt, Artificial Sequence
  Synthetic
gucaucugacuuuugguuuu

SEQ ID NO: 727213 - RNA, 20 nt, Artificial Sequence
  Synthetic
guccagaugguaaauguuuu

SEQ ID NO: 727214 - RNA, 20 nt, Artificial Sequence
  Synthetic
gagcagugacuuaauguuuu

SEQ ID NO: 727215 - RNA, 20 nt, Artificial Sequence
  Synthetic
gauacuggaaaguauguuuu

SEQ ID NO: 727216 - RNA, 20 nt, Artificial Sequence
  Synthetic
ggacagcguuugucuguuuu

SEQ ID NO: 727217 - RNA, 20 nt, Artificial Sequence
  Synthetic
guucauuacuuuucuguuuu

SEQ ID NO: 727218 - RNA, 20 nt, Artificial Sequence
  Synthetic
gaucagaaggagaguguuuu

SEQ ID NO: 727219 - RNA, 20 nt, Artificial Sequence
  Synthetic
gaagcagaucagauuguuuu

SEQ ID NO: 727220 - RNA, 20 nt, Artificial Sequence
  Synthetic
gguauaaauaagaaauuuuu

SEQ ID NO: 727221 - RNA, 20 nt, Artificial Sequence
  Synthetic
gaaugacucaagugauuuuu

SEQ ID NO: 727222 - RNA, 20 nt, Artificial Sequence
  Synthetic
guauuaaaucaaauauuuuu

SEQ ID NO: 727223 - RNA, 20 nt, Artificial Sequence
  Synthetic
gguauugcacuaauauuuuu

SEQ ID NO: 727224 - RNA, 20 nt, Artificial Sequence
  Synthetic
ggaaagcaauacauauuuuu

SEQ ID NO: 727225 - RNA, 20 nt, Artificial Sequence
  Synthetic
ggaaaauauacuauauuuuu

SEQ ID NO: 727226 - RNA, 20 nt, Artificial Sequence
  Synthetic
gagauauagcguauauuuuu

SEQ ID NO: 727227 - RNA, 20 nt, Artificial Sequence
  Synthetic
gacuuccaguuuauauuuuu

SEQ ID NO: 727228 - RNA, 20 nt, Artificial Sequence
  Synthetic
gaauagcacacaguauuuuu

SEQ ID NO: 727229 - RNA, 20 nt, Artificial Sequence
  Synthetic
gugcaaaguguauucuuuuu

SEQ ID NO: 727230 - RNA, 20 nt, Artificial Sequence
  Synthetic
ggagaaagccuuuucuuuuu

SEQ ID NO: 727231 - RNA, 20 nt, Artificial Sequence
  Synthetic
gggaauucuucauaguuuuu

SEQ ID NO: 727232 - RNA, 20 nt, Artificial Sequence
  Synthetic
gggguccaaaacagguuuuu

SEQ ID NO: 727233 - RNA, 20 nt, Artificial Sequence
  Synthetic
gggccuggcgggagguuuuu

SEQ ID NO: 727234 - RNA, 20 nt, Artificial Sequence
  Synthetic
gggaguauuuugagguuuuu

SEQ ID NO: 727235 - RNA, 20 nt, Artificial Sequence
  Synthetic
gacccuccuggucuguuuuu

SEQ ID NO: 727236 - RNA, 20 nt, Artificial Sequence
  Synthetic
gucccccuccuucuguuuuu

SEQ ID NO: 727237 - RNA, 20 nt, Artificial Sequence
  Synthetic
gcauuucuucauguguuuuu

SEQ ID NO: 727238 - RNA, 20 nt, Artificial Sequence
  Synthetic
gcauuuuuucauguguuuuu

SEQ ID NO: 727239 - RNA, 20 nt, Artificial Sequence
  Synthetic
ggauuuuuucauguguuuuu

SEQ ID NO: 727240 - RNA, 20 nt, Artificial Sequence
  Synthetic
guguuucuguuuuuguuuuu

SEQ ID NO: 727241 - RNA, 20 nt, Artificial Sequence
  Synthetic
guguagguuuuuuuguuuuu

SEQ ID NO: 727242 - RNA, 20 nt, Artificial Sequence
  Synthetic
gccacugaauuaaauuuuuu

SEQ ID NO: 727243 - RNA, 20 nt, Artificial Sequence
  Synthetic
gacaggagggaacauuuuuu

SEQ ID NO: 727244 - RNA, 20 nt, Artificial Sequence
  Synthetic
gcaaaauaccuccauuuuuu

SEQ ID NO: 727245 - RNA, 20 nt, Artificial Sequence
  Synthetic
gagagcugagagcauuuuuu

SEQ ID NO: 727246 - RNA, 20 nt, Artificial Sequence
  Synthetic
gaggguuauuauuauuuuuu

SEQ ID NO: 727247 - RNA, 20 nt, Artificial Sequence
  Synthetic
gucugguccuggacuuuuuu

SEQ ID NO: 727248 - RNA, 20 nt, Artificial Sequence
  Synthetic
gaugauuuucuuucuuuuuu

SEQ ID NO: 727249 - RNA, 20 nt, Artificial Sequence
  Synthetic
gucuucacaauaauuuuuuu

SEQ ID NO: 727250 - RNA, 20 nt, Artificial Sequence
  Synthetic
guuaaaaaaaaccuuuuuuu

SEQ ID NO: 727251 - RNA, 20 nt, Artificial Sequence
  Synthetic
gcuacagcuauuuuuuuuuu

SEQ ID NO: 727252 - RNA, 20 nt, Artificial Sequence
  Synthetic
gcuaauuuuuuuuuuuuuuu

SEQ ID NO: 727253 - RNA, 17 nt, Artificial Sequence
  Synthetic
aaaaaaaaaaaaaaaaa

SEQ ID NO: 727254 - RNA, 17 nt, Artificial Sequence
  Synthetic
gaaaaaaaaaaaaaaaa

SEQ ID NO: 727255 - RNA, 17 nt, Artificial Sequence
  Synthetic
uuaaaaaaaaaaaaaaa

SEQ ID NO: 727256 - RNA, 17 nt, Artificial Sequence
  Synthetic
aacaaaaaaaaaaaaaa

SEQ ID NO: 727257 - RNA, 17 nt, Artificial Sequence
  Synthetic
uguaaaaaaaaaaaaaa

SEQ ID NO: 727258 - RNA, 17 nt, Artificial Sequence
  Synthetic
uuuaaaaaaaaaaaaaa

SEQ ID NO: 727259 - RNA, 17 nt, Artificial Sequence
  Synthetic
ugacaaaaaaaaaaaaa

SEQ ID NO: 727260 - RNA, 17 nt, Artificial Sequence
  Synthetic
auugcaaaaaaaaaaaa

SEQ ID NO: 727261 - RNA, 17 nt, Artificial Sequence
  Synthetic
aucucaaaaaaaaaaaa

SEQ ID NO: 727262 - RNA, 17 nt, Artificial Sequence
  Synthetic
acuuuaaaaaaaaaaaa

SEQ ID NO: 727263 - RNA, 17 nt, Artificial Sequence
  Synthetic
agggagaaaaaaaaaaa

SEQ ID NO: 727264 - RNA, 17 nt, Artificial Sequence
  Synthetic
acccugaaaaaaaaaaa

SEQ ID NO: 727265 - RNA, 17 nt, Artificial Sequence
  Synthetic
uacuuuaaaaaaaaaaa

SEQ ID NO: 727266 - RNA, 17 nt, Artificial Sequence
  Synthetic
acugcacaaaaaaaaaa

SEQ ID NO: 727267 - RNA, 17 nt, Artificial Sequence
  Synthetic
ccagaccaaaaaaaaaa

SEQ ID NO: 727268 - RNA, 17 nt, Artificial Sequence
  Synthetic
uauaauuaaaaaaaaaa

SEQ ID NO: 727269 - RNA, 17 nt, Artificial Sequence
  Synthetic
cgcaguuaaaaaaaaaa

SEQ ID NO: 727270 - RNA, 17 nt, Artificial Sequence
  Synthetic
uaggaaagaaaaaaaaa

SEQ ID NO: 727271 - RNA, 17 nt, Artificial Sequence
  Synthetic
aaaaaggacaaaaaaaa

SEQ ID NO: 727272 - RNA, 17 nt, Artificial Sequence
  Synthetic
ccugucuccaaaaaaaa

SEQ ID NO: 727273 - RNA, 17 nt, Artificial Sequence
  Synthetic
aaccccaucaaaaaaaa

SEQ ID NO: 727274 - RNA, 17 nt, Artificial Sequence
  Synthetic
acagcacucaaaaaaaa

SEQ ID NO: 727275 - RNA, 17 nt, Artificial Sequence
  Synthetic
uuaggaaagaaaaaaaa

SEQ ID NO: 727276 - RNA, 17 nt, Artificial Sequence
  Synthetic
cugcaguagaaaaaaaa

SEQ ID NO: 727277 - RNA, 17 nt, Artificial Sequence
  Synthetic
auuacuccuaaaaaaaa

SEQ ID NO: 727278 - RNA, 17 nt, Artificial Sequence
  Synthetic
acagaaauuaaaaaaaa

SEQ ID NO: 727279 - RNA, 17 nt, Artificial Sequence
  Synthetic
ucauauauuaaaaaaaa

SEQ ID NO: 727280 - RNA, 17 nt, Artificial Sequence
  Synthetic
cuauuaguuaaaaaaaa

SEQ ID NO: 727281 - RNA, 17 nt, Artificial Sequence
  Synthetic
ccuuguguuaaaaaaaa

SEQ ID NO: 727282 - RNA, 17 nt, Artificial Sequence
  Synthetic
cauuuuuuuaaaaaaaa

SEQ ID NO: 727283 - RNA, 17 nt, Artificial Sequence
  Synthetic
acugucacacaaaaaaa

SEQ ID NO: 727284 - RNA, 17 nt, Artificial Sequence
  Synthetic
cuauguaaccaaaaaaa

SEQ ID NO: 727285 - RNA, 17 nt, Artificial Sequence
  Synthetic
ccauuuauccaaaaaaa

SEQ ID NO: 727286 - RNA, 17 nt, Artificial Sequence
  Synthetic
cccugucuccaaaaaaa

SEQ ID NO: 727287 - RNA, 17 nt, Artificial Sequence
  Synthetic
cuugaaguucaaaaaaa

SEQ ID NO: 727288 - RNA, 17 nt, Artificial Sequence
  Synthetic
uauucuuuagaaaaaaa

SEQ ID NO: 727289 - RNA, 17 nt, Artificial Sequence
  Synthetic
aggaaacaggaaaaaaa

SEQ ID NO: 727290 - RNA, 17 nt, Artificial Sequence
  Synthetic
auauucagugaaaaaaa

SEQ ID NO: 727291 - RNA, 17 nt, Artificial Sequence
  Synthetic
uaaaaacaauaaaaaaa

SEQ ID NO: 727292 - RNA, 17 nt, Artificial Sequence
  Synthetic
uaacccuaauaaaaaaa

SEQ ID NO: 727293 - RNA, 17 nt, Artificial Sequence
  Synthetic
uguguggcauaaaaaaa

SEQ ID NO: 727294 - RNA, 17 nt, Artificial Sequence
  Synthetic
uuucucagguaaaaaaa

SEQ ID NO: 727295 - RNA, 17 nt, Artificial Sequence
  Synthetic
agaaaaugguaaaaaaa

SEQ ID NO: 727296 - RNA, 17 nt, Artificial Sequence
  Synthetic
uaagaaccuuaaaaaaa

SEQ ID NO: 727297 - RNA, 17 nt, Artificial Sequence
  Synthetic
uucuagucuuaaaaaaa

SEQ ID NO: 727298 - RNA, 17 nt, Artificial Sequence
  Synthetic
accuuguguuaaaaaaa

SEQ ID NO: 727299 - RNA, 17 nt, Artificial Sequence
  Synthetic
uuuuauguuuaaaaaaa

SEQ ID NO: 727300 - RNA, 17 nt, Artificial Sequence
  Synthetic
cauuuuuuuuaaaaaaa

SEQ ID NO: 727301 - RNA, 17 nt, Artificial Sequence
  Synthetic
aaauggaaaacaaaaaa

SEQ ID NO: 727302 - RNA, 17 nt, Artificial Sequence
  Synthetic
acagcaacaacaaaaaa

SEQ ID NO: 727303 - RNA, 17 nt, Artificial Sequence
  Synthetic
aagaagacaacaaaaaa

SEQ ID NO: 727304 - RNA, 17 nt, Artificial Sequence
  Synthetic
auauuaccaacaaaaaa

SEQ ID NO: 727305 - RNA, 17 nt, Artificial Sequence
  Synthetic
acauaaagaacaaaaaa

SEQ ID NO: 727306 - RNA, 17 nt, Artificial Sequence
  Synthetic
uaaaaaugaacaaaaaa

SEQ ID NO: 727307 - RNA, 17 nt, Artificial Sequence
  Synthetic
uacugucacacaaaaaa

SEQ ID NO: 727308 - RNA, 17 nt, Artificial Sequence
  Synthetic
aaccaagccacaaaaaa

SEQ ID NO: 727309 - RNA, 17 nt, Artificial Sequence
  Synthetic
aggaaguggacaaaaaa

SEQ ID NO: 727310 - RNA, 17 nt, Artificial Sequence
  Synthetic
aaaggagguacaaaaaa

SEQ ID NO: 727311 - RNA, 17 nt, Artificial Sequence
  Synthetic
cauauggaaccaaaaaa

SEQ ID NO: 727312 - RNA, 17 nt, Artificial Sequence
  Synthetic
uauaucucaccaaaaaa

SEQ ID NO: 727313 - RNA, 17 nt, Artificial Sequence
  Synthetic
auagaauccccaaaaaa

SEQ ID NO: 727314 - RNA, 17 nt, Artificial Sequence
  Synthetic
uugaauaucccaaaaaa

SEQ ID NO: 727315 - RNA, 17 nt, Artificial Sequence
  Synthetic
aaaaacacuccaaaaaa

SEQ ID NO: 727316 - RNA, 17 nt, Artificial Sequence
  Synthetic
acugaaaaagcaaaaaa

SEQ ID NO: 727317 - RNA, 17 nt, Artificial Sequence
  Synthetic
cauagguuagcaaaaaa

SEQ ID NO: 727318 - RNA, 17 nt, Artificial Sequence
  Synthetic
uuucuuuacucaaaaaa

SEQ ID NO: 727319 - RNA, 17 nt, Artificial Sequence
  Synthetic
acaaaacaaagaaaaaa

SEQ ID NO: 727320 - RNA, 17 nt, Artificial Sequence
  Synthetic
acugaagcaagaaaaaa

SEQ ID NO: 727321 - RNA, 17 nt, Artificial Sequence
  Synthetic
auucaaaucagaaaaaa

SEQ ID NO: 727322 - RNA, 17 nt, Artificial Sequence
  Synthetic
ccaaaagagagaaaaaa

SEQ ID NO: 727323 - RNA, 17 nt, Artificial Sequence
  Synthetic
cuggcaaugagaaaaaa

SEQ ID NO: 727324 - RNA, 17 nt, Artificial Sequence
  Synthetic
agaaaaucuagaaaaaa

SEQ ID NO: 727325 - RNA, 17 nt, Artificial Sequence
  Synthetic
aagcuuagaugaaaaaa

SEQ ID NO: 727326 - RNA, 17 nt, Artificial Sequence
  Synthetic
agaaauuuaugaaaaaa

SEQ ID NO: 727327 - RNA, 17 nt, Artificial Sequence
  Synthetic
acaaaauccugaaaaaa

SEQ ID NO: 727328 - RNA, 17 nt, Artificial Sequence
  Synthetic
uuuuuaaucugaaaaaa

SEQ ID NO: 727329 - RNA, 17 nt, Artificial Sequence
  Synthetic
cuacaaaauugaaaaaa

SEQ ID NO: 727330 - RNA, 17 nt, Artificial Sequence
  Synthetic
caaaacuuuugaaaaaa

SEQ ID NO: 727331 - RNA, 17 nt, Artificial Sequence
  Synthetic
uaugcagccauaaaaaa

SEQ ID NO: 727332 - RNA, 17 nt, Artificial Sequence
  Synthetic
agacuugguauaaaaaa

SEQ ID NO: 727333 - RNA, 17 nt, Artificial Sequence
  Synthetic
ugccuuuaucuaaaaaa

SEQ ID NO: 727334 - RNA, 17 nt, Artificial Sequence
  Synthetic
uuuuaaugaguaaaaaa

SEQ ID NO: 727335 - RNA, 17 nt, Artificial Sequence
  Synthetic
aaauagagauuaaaaaa

SEQ ID NO: 727336 - RNA, 17 nt, Artificial Sequence
  Synthetic
aacaaaaauuuaaaaaa

SEQ ID NO: 727337 - RNA, 17 nt, Artificial Sequence
  Synthetic
aaacaucauuuaaaaaa

SEQ ID NO: 727338 - RNA, 17 nt, Artificial Sequence
  Synthetic
ccauuuucuuuaaaaaa

SEQ ID NO: 727339 - RNA, 17 nt, Artificial Sequence
  Synthetic
accaauuguuuaaaaaa

SEQ ID NO: 727340 - RNA, 17 nt, Artificial Sequence
  Synthetic
uuucacuuuuuaaaaaa

SEQ ID NO: 727341 - RNA, 17 nt, Artificial Sequence
  Synthetic
aucuagaaaaacaaaaa

SEQ ID NO: 727342 - RNA, 17 nt, Artificial Sequence
  Synthetic
ugaauaaagaacaaaaa

SEQ ID NO: 727343 - RNA, 17 nt, Artificial Sequence
  Synthetic
uacauaaagaacaaaaa

SEQ ID NO: 727344 - RNA, 17 nt, Artificial Sequence
  Synthetic
auaaagcagaacaaaaa

SEQ ID NO: 727345 - RNA, 17 nt, Artificial Sequence
  Synthetic
caucuuuaucacaaaaa

SEQ ID NO: 727346 - RNA, 17 nt, Artificial Sequence
  Synthetic
cacaaagccgacaaaaa

SEQ ID NO: 727347 - RNA, 17 nt, Artificial Sequence
  Synthetic
uaggaaguggacaaaaa

SEQ ID NO: 727348 - RNA, 17 nt, Artificial Sequence
  Synthetic
auuuguuaugacaaaaa

SEQ ID NO: 727349 - RNA, 17 nt, Artificial Sequence
  Synthetic
ccucuuggugacaaaaa

SEQ ID NO: 727350 - RNA, 17 nt, Artificial Sequence
  Synthetic
cagggauuugacaaaaa

SEQ ID NO: 727351 - RNA, 17 nt, Artificial Sequence
  Synthetic
uugccacaauacaaaaa

SEQ ID NO: 727352 - RNA, 17 nt, Artificial Sequence
  Synthetic
aaauggcccuacaaaaa

SEQ ID NO: 727353 - RNA, 17 nt, Artificial Sequence
  Synthetic
aaaaggagguacaaaaa

SEQ ID NO: 727354 - RNA, 17 nt, Artificial Sequence
  Synthetic
uuuucuauuuacaaaaa

SEQ ID NO: 727355 - RNA, 17 nt, Artificial Sequence
  Synthetic
aacuuuauuuacaaaaa

SEQ ID NO: 727356 - RNA, 17 nt, Artificial Sequence
  Synthetic
ucauauggaaccaaaaa

SEQ ID NO: 727357 - RNA, 17 nt, Artificial Sequence
  Synthetic
augaauauggccaaaaa

SEQ ID NO: 727358 - RNA, 17 nt, Artificial Sequence
  Synthetic
aauuugaaugccaaaaa

SEQ ID NO: 727359 - RNA, 17 nt, Artificial Sequence
  Synthetic
ucaacauaauccaaaaa

SEQ ID NO: 727360 - RNA, 17 nt, Artificial Sequence
  Synthetic
uccucuacauccaaaaa

SEQ ID NO: 727361 - RNA, 17 nt, Artificial Sequence
  Synthetic
ucauaacacuccaaaaa

SEQ ID NO: 727362 - RNA, 17 nt, Artificial Sequence
  Synthetic
uaaaaaaucuccaaaaa

SEQ ID NO: 727363 - RNA, 17 nt, Artificial Sequence
  Synthetic
aaaagaagguccaaaaa

SEQ ID NO: 727364 - RNA, 17 nt, Artificial Sequence
  Synthetic
uuagaguucagcaaaaa

SEQ ID NO: 727365 - RNA, 17 nt, Artificial Sequence
  Synthetic
uagcagaagagcaaaaa

SEQ ID NO: 727366 - RNA, 17 nt, Artificial Sequence
  Synthetic
agcaggaggagcaaaaa

SEQ ID NO: 727367 - RNA, 17 nt, Artificial Sequence
  Synthetic
auaugugauagcaaaaa

SEQ ID NO: 727368 - RNA, 17 nt, Artificial Sequence
  Synthetic
uauagggguagcaaaaa

SEQ ID NO: 727369 - RNA, 17 nt, Artificial Sequence
  Synthetic
ugcucaaugggcaaaaa

SEQ ID NO: 727370 - RNA, 17 nt, Artificial Sequence
  Synthetic
uucuuggaaugcaaaaa

SEQ ID NO: 727371 - RNA, 17 nt, Artificial Sequence
  Synthetic
aaguuuuccugcaaaaa

SEQ ID NO: 727372 - RNA, 17 nt, Artificial Sequence
  Synthetic
aggaaaaaaaucaaaaa

SEQ ID NO: 727373 - RNA, 17 nt, Artificial Sequence
  Synthetic
aaugugguaaucaaaaa

SEQ ID NO: 727374 - RNA, 17 nt, Artificial Sequence
  Synthetic
caucuaguucucaaaaa

SEQ ID NO: 727375 - RNA, 17 nt, Artificial Sequence
  Synthetic
uucauaacagucaaaaa

SEQ ID NO: 727376 - RNA, 17 nt, Artificial Sequence
  Synthetic
cacauugccuucaaaaa

SEQ ID NO: 727377 - RNA, 17 nt, Artificial Sequence
  Synthetic
uucaagaaaaagaaaaa

SEQ ID NO: 727378 - RNA, 17 nt, Artificial Sequence
  Synthetic
aaaacuuaaaagaaaaa

SEQ ID NO: 727379 - RNA, 17 nt, Artificial Sequence
  Synthetic
agcccuucaaagaaaaa

SEQ ID NO: 727380 - RNA, 17 nt, Artificial Sequence
  Synthetic
aauagaagaaagaaaaa

SEQ ID NO: 727381 - RNA, 17 nt, Artificial Sequence
  Synthetic
uuugagagaaagaaaaa

SEQ ID NO: 727382 - RNA, 17 nt, Artificial Sequence
  Synthetic
ucauguugaaagaaaaa

SEQ ID NO: 727383 - RNA, 17 nt, Artificial Sequence
  Synthetic
cuucuaaacaagaaaaa

SEQ ID NO: 727384 - RNA, 17 nt, Artificial Sequence
  Synthetic
uguaguuagaagaaaaa

SEQ ID NO: 727385 - RNA, 17 nt, Artificial Sequence
  Synthetic
agacuaaugaagaaaaa

SEQ ID NO: 727386 - RNA, 17 nt, Artificial Sequence
  Synthetic
aaaaaggauaagaaaaa

SEQ ID NO: 727387 - RNA, 17 nt, Artificial Sequence
  Synthetic
uucauuucuaagaaaaa

SEQ ID NO: 727388 - RNA, 17 nt, Artificial Sequence
  Synthetic
agugcucuuaagaaaaa

SEQ ID NO: 727389 - RNA, 17 nt, Artificial Sequence
  Synthetic
uaugaauuuaagaaaaa

SEQ ID NO: 727390 - RNA, 17 nt, Artificial Sequence
  Synthetic
auccaaacacagaaaaa

SEQ ID NO: 727391 - RNA, 17 nt, Artificial Sequence
  Synthetic
cacugcacacagaaaaa

SEQ ID NO: 727392 - RNA, 17 nt, Artificial Sequence
  Synthetic
uccgagaggcagaaaaa

SEQ ID NO: 727393 - RNA, 17 nt, Artificial Sequence
  Synthetic
uucaugaaagagaaaaa

SEQ ID NO: 727394 - RNA, 17 nt, Artificial Sequence
  Synthetic
ucuagauaagagaaaaa

SEQ ID NO: 727395 - RNA, 17 nt, Artificial Sequence
  Synthetic
cuuugguaagagaaaaa

SEQ ID NO: 727396 - RNA, 17 nt, Artificial Sequence
  Synthetic
aauuuuuaagagaaaaa

SEQ ID NO: 727397 - RNA, 17 nt, Artificial Sequence
  Synthetic
agagaaacagagaaaaa

SEQ ID NO: 727398 - RNA, 17 nt, Artificial Sequence
  Synthetic
aaguuuagagagaaaaa

SEQ ID NO: 727399 - RNA, 17 nt, Artificial Sequence
  Synthetic
aggagacgagagaaaaa

SEQ ID NO: 727400 - RNA, 17 nt, Artificial Sequence
  Synthetic
uguguggaggagaaaaa

SEQ ID NO: 727401 - RNA, 17 nt, Artificial Sequence
  Synthetic
acacaggaugagaaaaa

SEQ ID NO: 727402 - RNA, 17 nt, Artificial Sequence
  Synthetic
aauauguaugagaaaaa

SEQ ID NO: 727403 - RNA, 17 nt, Artificial Sequence
  Synthetic
auaauccaauagaaaaa

SEQ ID NO: 727404 - RNA, 17 nt, Artificial Sequence
  Synthetic
uguguugaauagaaaaa

SEQ ID NO: 727405 - RNA, 17 nt, Artificial Sequence
  Synthetic
cuccauauauagaaaaa

SEQ ID NO: 727406 - RNA, 17 nt, Artificial Sequence
  Synthetic
agcagagaguagaaaaa

SEQ ID NO: 727407 - RNA, 17 nt, Artificial Sequence
  Synthetic
auguuucuuuagaaaaa

SEQ ID NO: 727408 - RNA, 17 nt, Artificial Sequence
  Synthetic
acaaaagguacgaaaaa

SEQ ID NO: 727409 - RNA, 17 nt, Artificial Sequence
  Synthetic
aggcauguggcgaaaaa

SEQ ID NO: 727410 - RNA, 17 nt, Artificial Sequence
  Synthetic
aaaucauaaaggaaaaa

SEQ ID NO: 727411 - RNA, 17 nt, Artificial Sequence
  Synthetic
ucaggguaaaggaaaaa

SEQ ID NO: 727412 - RNA, 17 nt, Artificial Sequence
  Synthetic
ugaagcacaaggaaaaa

SEQ ID NO: 727413 - RNA, 17 nt, Artificial Sequence
  Synthetic
aucaagagaaggaaaaa

SEQ ID NO: 727414 - RNA, 17 nt, Artificial Sequence
  Synthetic
uaagagagaaggaaaaa

SEQ ID NO: 727415 - RNA, 17 nt, Artificial Sequence
  Synthetic
aguuauugaaggaaaaa

SEQ ID NO: 727416 - RNA, 17 nt, Artificial Sequence
  Synthetic
aaggaaagcaggaaaaa

SEQ ID NO: 727417 - RNA, 17 nt, Artificial Sequence
  Synthetic
agcacaucuaggaaaaa

SEQ ID NO: 727418 - RNA, 17 nt, Artificial Sequence
  Synthetic
cuuuccaaagggaaaaa

SEQ ID NO: 727419 - RNA, 17 nt, Artificial Sequence
  Synthetic
aaggagguagggaaaaa

SEQ ID NO: 727420 - RNA, 17 nt, Artificial Sequence
  Synthetic
agauuucuggggaaaaa

SEQ ID NO: 727421 - RNA, 17 nt, Artificial Sequence
  Synthetic
acacacuaugggaaaaa

SEQ ID NO: 727422 - RNA, 17 nt, Artificial Sequence
  Synthetic
cuguaaauugggaaaaa

SEQ ID NO: 727423 - RNA, 17 nt, Artificial Sequence
  Synthetic
ucaaggauauggaaaaa

SEQ ID NO: 727424 - RNA, 17 nt, Artificial Sequence
  Synthetic
aucauccacuggaaaaa

SEQ ID NO: 727425 - RNA, 17 nt, Artificial Sequence
  Synthetic
uguagcuacuggaaaaa

SEQ ID NO: 727426 - RNA, 17 nt, Artificial Sequence
  Synthetic
ucuugucccuggaaaaa

SEQ ID NO: 727427 - RNA, 17 nt, Artificial Sequence
  Synthetic
auugcugaguggaaaaa

SEQ ID NO: 727428 - RNA, 17 nt, Artificial Sequence
  Synthetic
agcgccagguggaaaaa

SEQ ID NO: 727429 - RNA, 17 nt, Artificial Sequence
  Synthetic
auuacuguguggaaaaa

SEQ ID NO: 727430 - RNA, 17 nt, Artificial Sequence
  Synthetic
acucuuagaaugaaaaa

SEQ ID NO: 727431 - RNA, 17 nt, Artificial Sequence
  Synthetic
aauacauuuaugaaaaa

SEQ ID NO: 727432 - RNA, 17 nt, Artificial Sequence
  Synthetic
auucauuuacugaaaaa

SEQ ID NO: 727433 - RNA, 17 nt, Artificial Sequence
  Synthetic
ugaaaaaaagugaaaaa

SEQ ID NO: 727434 - RNA, 17 nt, Artificial Sequence
  Synthetic
aagaaaacagugaaaaa

SEQ ID NO: 727435 - RNA, 17 nt, Artificial Sequence
  Synthetic
ugccacagagugaaaaa

SEQ ID NO: 727436 - RNA, 17 nt, Artificial Sequence
  Synthetic
ucacucucauugaaaaa

SEQ ID NO: 727437 - RNA, 17 nt, Artificial Sequence
  Synthetic
uggggaggauugaaaaa

SEQ ID NO: 727438 - RNA, 17 nt, Artificial Sequence
  Synthetic
ugcuucauauugaaaaa

SEQ ID NO: 727439 - RNA, 17 nt, Artificial Sequence
  Synthetic
uaugauaaguugaaaaa

SEQ ID NO: 727440 - RNA, 17 nt, Artificial Sequence
  Synthetic
acaaaacuuuugaaaaa

SEQ ID NO: 727441 - RNA, 17 nt, Artificial Sequence
  Synthetic
aaaauagaaaauaaaaa

SEQ ID NO: 727442 - RNA, 17 nt, Artificial Sequence
  Synthetic
uuucuguaaaauaaaaa

SEQ ID NO: 727443 - RNA, 17 nt, Artificial Sequence
  Synthetic
caugcaccaaauaaaaa

SEQ ID NO: 727444 - RNA, 17 nt, Artificial Sequence
  Synthetic
uauagaauaaauaaaaa

SEQ ID NO: 727445 - RNA, 17 nt, Artificial Sequence
  Synthetic
uuaccauuaaauaaaaa

SEQ ID NO: 727446 - RNA, 17 nt, Artificial Sequence
  Synthetic
cugacucucaauaaaaa

SEQ ID NO: 727447 - RNA, 17 nt, Artificial Sequence
  Synthetic
cuacgcaaccauaaaaa

SEQ ID NO: 727448 - RNA, 17 nt, Artificial Sequence
  Synthetic
cugugaagccauaaaaa

SEQ ID NO: 727449 - RNA, 17 nt, Artificial Sequence
  Synthetic
cuaugcagccauaaaaa

SEQ ID NO: 727450 - RNA, 17 nt, Artificial Sequence
  Synthetic
cugugcagccauaaaaa

SEQ ID NO: 727451 - RNA, 17 nt, Artificial Sequence
  Synthetic
uuuugguagcauaaaaa

SEQ ID NO: 727452 - RNA, 17 nt, Artificial Sequence
  Synthetic
aaacuacaucauaaaaa

SEQ ID NO: 727453 - RNA, 17 nt, Artificial Sequence
  Synthetic
uugaucacugauaaaaa

SEQ ID NO: 727454 - RNA, 17 nt, Artificial Sequence
  Synthetic
ucucagcaauauaaaaa

SEQ ID NO: 727455 - RNA, 17 nt, Artificial Sequence
  Synthetic
uucuuaucauauaaaaa

SEQ ID NO: 727456 - RNA, 17 nt, Artificial Sequence
  Synthetic
auaagaggauauaaaaa

SEQ ID NO: 727457 - RNA, 17 nt, Artificial Sequence
  Synthetic
ccagagggauauaaaaa

SEQ ID NO: 727458 - RNA, 17 nt, Artificial Sequence
  Synthetic
agaagcacguauaaaaa

SEQ ID NO: 727459 - RNA, 17 nt, Artificial Sequence
  Synthetic
auaggaaauuauaaaaa

SEQ ID NO: 727460 - RNA, 17 nt, Artificial Sequence
  Synthetic
caugaguguuauaaaaa

SEQ ID NO: 727461 - RNA, 17 nt, Artificial Sequence
  Synthetic
auuuagaaaacuaaaaa

SEQ ID NO: 727462 - RNA, 17 nt, Artificial Sequence
  Synthetic
uuuucuugaacuaaaaa

SEQ ID NO: 727463 - RNA, 17 nt, Artificial Sequence
  Synthetic
ucuaugaucacuaaaaa

SEQ ID NO: 727464 - RNA, 17 nt, Artificial Sequence
  Synthetic
aauuauuuuacuaaaaa

SEQ ID NO: 727465 - RNA, 17 nt, Artificial Sequence
  Synthetic
caauuucccccuaaaaa

SEQ ID NO: 727466 - RNA, 17 nt, Artificial Sequence
  Synthetic
uaugugaagccuaaaaa

SEQ ID NO: 727467 - RNA, 17 nt, Artificial Sequence
  Synthetic
uaaacauaagcuaaaaa

SEQ ID NO: 727468 - RNA, 17 nt, Artificial Sequence
  Synthetic
aauguugguucuaaaaa

SEQ ID NO: 727469 - RNA, 17 nt, Artificial Sequence
  Synthetic
auaccuacaaguaaaaa

SEQ ID NO: 727470 - RNA, 17 nt, Artificial Sequence
  Synthetic
aaggcccacaguaaaaa

SEQ ID NO: 727471 - RNA, 17 nt, Artificial Sequence
  Synthetic
uuauccaguaguaaaaa

SEQ ID NO: 727472 - RNA, 17 nt, Artificial Sequence
  Synthetic
uccaucuuuaguaaaaa

SEQ ID NO: 727473 - RNA, 17 nt, Artificial Sequence
  Synthetic
uguuuaacagguaaaaa

SEQ ID NO: 727474 - RNA, 17 nt, Artificial Sequence
  Synthetic
uacuuuuaggguaaaaa

SEQ ID NO: 727475 - RNA, 17 nt, Artificial Sequence
  Synthetic
cuauauagggguaaaaa

SEQ ID NO: 727476 - RNA, 17 nt, Artificial Sequence
  Synthetic
uaagaagaguguaaaaa

SEQ ID NO: 727477 - RNA, 17 nt, Artificial Sequence
  Synthetic
auuuagucuuguaaaaa

SEQ ID NO: 727478 - RNA, 17 nt, Artificial Sequence
  Synthetic
uagcaucuuuguaaaaa

SEQ ID NO: 727479 - RNA, 17 nt, Artificial Sequence
  Synthetic
aaacagcuaauuaaaaa

SEQ ID NO: 727480 - RNA, 17 nt, Artificial Sequence
  Synthetic
auuugcuuaauuaaaaa

SEQ ID NO: 727481 - RNA, 17 nt, Artificial Sequence
  Synthetic
caaauuugcauuaaaaa

SEQ ID NO: 727482 - RNA, 17 nt, Artificial Sequence
  Synthetic
aacuguauacuuaaaaa

SEQ ID NO: 727483 - RNA, 17 nt, Artificial Sequence
  Synthetic
acaguccguguuaaaaa

SEQ ID NO: 727484 - RNA, 17 nt, Artificial Sequence
  Synthetic
aggcuuugcuuuaaaaa

SEQ ID NO: 727485 - RNA, 17 nt, Artificial Sequence
  Synthetic
uuuuguuucuuuaaaaa

SEQ ID NO: 727486 - RNA, 17 nt, Artificial Sequence
  Synthetic
uugcugaauuuuaaaaa

SEQ ID NO: 727487 - RNA, 17 nt, Artificial Sequence
  Synthetic
uccuuugauuuuaaaaa

SEQ ID NO: 727488 - RNA, 17 nt, Artificial Sequence
  Synthetic
cuuuuuuauuuuaaaaa

SEQ ID NO: 727489 - RNA, 17 nt, Artificial Sequence
  Synthetic
aaugcauuuuuuaaaaa

SEQ ID NO: 727490 - RNA, 17 nt, Artificial Sequence
  Synthetic
uucaucuuuuuuaaaaa

SEQ ID NO: 727491 - RNA, 17 nt, Artificial Sequence
  Synthetic
uuuuuuuuuuuuaaaaa

SEQ ID NO: 727492 - RNA, 17 nt, Artificial Sequence
  Synthetic
uaucuagaaaaacaaaa

SEQ ID NO: 727493 - RNA, 17 nt, Artificial Sequence
  Synthetic
uaccagccaaaacaaaa

SEQ ID NO: 727494 - RNA, 17 nt, Artificial Sequence
  Synthetic
accucaauaaaacaaaa

SEQ ID NO: 727495 - RNA, 17 nt, Artificial Sequence
  Synthetic
ucacuacugaaacaaaa

SEQ ID NO: 727496 - RNA, 17 nt, Artificial Sequence
  Synthetic
auaauucaacaacaaaa

SEQ ID NO: 727497 - RNA, 17 nt, Artificial Sequence
  Synthetic
caucaacaucaacaaaa

SEQ ID NO: 727498 - RNA, 17 nt, Artificial Sequence
  Synthetic
aauaaagcagaacaaaa

SEQ ID NO: 727499 - RNA, 17 nt, Artificial Sequence
  Synthetic
uuuaggggagaacaaaa

SEQ ID NO: 727500 - RNA, 17 nt, Artificial Sequence
  Synthetic
ucagaugaggaacaaaa

SEQ ID NO: 727501 - RNA, 17 nt, Artificial Sequence
  Synthetic
uugaucucugaacaaaa

SEQ ID NO: 727502 - RNA, 17 nt, Artificial Sequence
  Synthetic
uucuuaaaauaacaaaa

SEQ ID NO: 727503 - RNA, 17 nt, Artificial Sequence
  Synthetic
cuguauggguaacaaaa

SEQ ID NO: 727504 - RNA, 17 nt, Artificial Sequence
  Synthetic
ugucaaauaacacaaaa

SEQ ID NO: 727505 - RNA, 17 nt, Artificial Sequence
  Synthetic
acacaauuaacacaaaa

SEQ ID NO: 727506 - RNA, 17 nt, Artificial Sequence
  Synthetic
aucauucugccacaaaa

SEQ ID NO: 727507 - RNA, 17 nt, Artificial Sequence
  Synthetic
augauacauccacaaaa

SEQ ID NO: 727508 - RNA, 17 nt, Artificial Sequence
  Synthetic
ugaagauguccacaaaa

SEQ ID NO: 727509 - RNA, 17 nt, Artificial Sequence
  Synthetic
caaagggcagcacaaaa

SEQ ID NO: 727510 - RNA, 17 nt, Artificial Sequence
  Synthetic
ugaaccauggcacaaaa

SEQ ID NO: 727511 - RNA, 17 nt, Artificial Sequence
  Synthetic
ccucagccuucacaaaa

SEQ ID NO: 727512 - RNA, 17 nt, Artificial Sequence
  Synthetic
uauaacuuaagacaaaa

SEQ ID NO: 727513 - RNA, 17 nt, Artificial Sequence
  Synthetic
ucuuauaucagacaaaa

SEQ ID NO: 727514 - RNA, 17 nt, Artificial Sequence
  Synthetic
ucacaaagccgacaaaa

SEQ ID NO: 727515 - RNA, 17 nt, Artificial Sequence
  Synthetic
auuauauaaugacaaaa

SEQ ID NO: 727516 - RNA, 17 nt, Artificial Sequence
  Synthetic
uguauucucugacaaaa

SEQ ID NO: 727517 - RNA, 17 nt, Artificial Sequence
  Synthetic
aaucaaaggauacaaaa

SEQ ID NO: 727518 - RNA, 17 nt, Artificial Sequence
  Synthetic
acaagucugauacaaaa

SEQ ID NO: 727519 - RNA, 17 nt, Artificial Sequence
  Synthetic
acaggcaaccuacaaaa

SEQ ID NO: 727520 - RNA, 17 nt, Artificial Sequence
  Synthetic
aggaauuagcuacaaaa

SEQ ID NO: 727521 - RNA, 17 nt, Artificial Sequence
  Synthetic
uuagaaauaguacaaaa

SEQ ID NO: 727522 - RNA, 17 nt, Artificial Sequence
  Synthetic
uuuuugauauuacaaaa

SEQ ID NO: 727523 - RNA, 17 nt, Artificial Sequence
  Synthetic
aaugaaaauuuacaaaa

SEQ ID NO: 727524 - RNA, 17 nt, Artificial Sequence
  Synthetic
ugguagaaaaaccaaaa

SEQ ID NO: 727525 - RNA, 17 nt, Artificial Sequence
  Synthetic
aauuaguacaaccaaaa

SEQ ID NO: 727526 - RNA, 17 nt, Artificial Sequence
  Synthetic
aauacuuagaaccaaaa

SEQ ID NO: 727527 - RNA, 17 nt, Artificial Sequence
  Synthetic
agauccagacaccaaaa

SEQ ID NO: 727528 - RNA, 17 nt, Artificial Sequence
  Synthetic
ccuguaagauaccaaaa

SEQ ID NO: 727529 - RNA, 17 nt, Artificial Sequence
  Synthetic
uucguguucuaccaaaa

SEQ ID NO: 727530 - RNA, 17 nt, Artificial Sequence
  Synthetic
uaauaaagguaccaaaa

SEQ ID NO: 727531 - RNA, 17 nt, Artificial Sequence
  Synthetic
ugucuugucucccaaaa

SEQ ID NO: 727532 - RNA, 17 nt, Artificial Sequence
  Synthetic
aauucagggucccaaaa

SEQ ID NO: 727533 - RNA, 17 nt, Artificial Sequence
  Synthetic
uuauagaguucccaaaa

SEQ ID NO: 727534 - RNA, 17 nt, Artificial Sequence
  Synthetic
uagcacaaaagccaaaa

SEQ ID NO: 727535 - RNA, 17 nt, Artificial Sequence
  Synthetic
aacagaaauagccaaaa

SEQ ID NO: 727536 - RNA, 17 nt, Artificial Sequence
  Synthetic
aagguuagaggccaaaa

SEQ ID NO: 727537 - RNA, 17 nt, Artificial Sequence
  Synthetic
cacacccugggccaaaa

SEQ ID NO: 727538 - RNA, 17 nt, Artificial Sequence
  Synthetic
uguguuaaaugccaaaa

SEQ ID NO: 727539 - RNA, 17 nt, Artificial Sequence
  Synthetic
uccagauucugccaaaa

SEQ ID NO: 727540 - RNA, 17 nt, Artificial Sequence
  Synthetic
aguuccuggugccaaaa

SEQ ID NO: 727541 - RNA, 17 nt, Artificial Sequence
  Synthetic
uggaugugacuccaaaa

SEQ ID NO: 727542 - RNA, 17 nt, Artificial Sequence
  Synthetic
agaaaucagcuccaaaa

SEQ ID NO: 727543 - RNA, 17 nt, Artificial Sequence
  Synthetic
aacauucagcuccaaaa

SEQ ID NO: 727544 - RNA, 17 nt, Artificial Sequence
  Synthetic
ccugcuccucuccaaaa

SEQ ID NO: 727545 - RNA, 17 nt, Artificial Sequence
  Synthetic
agcuggaaaguccaaaa

SEQ ID NO: 727546 - RNA, 17 nt, Artificial Sequence
  Synthetic
aacaagggaguccaaaa

SEQ ID NO: 727547 - RNA, 17 nt, Artificial Sequence
  Synthetic
uaggcaaaauuccaaaa

SEQ ID NO: 727548 - RNA, 17 nt, Artificial Sequence
  Synthetic
aggccagaauuccaaaa

SEQ ID NO: 727549 - RNA, 17 nt, Artificial Sequence
  Synthetic
cuauggagcuuccaaaa

SEQ ID NO: 727550 - RNA, 17 nt, Artificial Sequence
  Synthetic
acuuuuuaguuccaaaa

SEQ ID NO: 727551 - RNA, 17 nt, Artificial Sequence
  Synthetic
ugaaauuguuuccaaaa

SEQ ID NO: 727552 - RNA, 17 nt, Artificial Sequence
  Synthetic
uguuucauuuuccaaaa

SEQ ID NO: 727553 - RNA, 17 nt, Artificial Sequence
  Synthetic
cuauagcagaagcaaaa

SEQ ID NO: 727554 - RNA, 17 nt, Artificial Sequence
  Synthetic
ugguuguauaagcaaaa

SEQ ID NO: 727555 - RNA, 17 nt, Artificial Sequence
  Synthetic
cuacauugacagcaaaa

SEQ ID NO: 727556 - RNA, 17 nt, Artificial Sequence
  Synthetic
uuuauugugcagcaaaa

SEQ ID NO: 727557 - RNA, 17 nt, Artificial Sequence
  Synthetic
uaaagaaaagagcaaaa

SEQ ID NO: 727558 - RNA, 17 nt, Artificial Sequence
  Synthetic
uuagcagaagagcaaaa

SEQ ID NO: 727559 - RNA, 17 nt, Artificial Sequence
  Synthetic
aaagauguggagcaaaa

SEQ ID NO: 727560 - RNA, 17 nt, Artificial Sequence
  Synthetic
uguccccaugagcaaaa

SEQ ID NO: 727561 - RNA, 17 nt, Artificial Sequence
  Synthetic
uaaugauaugagcaaaa

SEQ ID NO: 727562 - RNA, 17 nt, Artificial Sequence
  Synthetic
cccuccccugagcaaaa

SEQ ID NO: 727563 - RNA, 17 nt, Artificial Sequence
  Synthetic
ugcugauuugagcaaaa

SEQ ID NO: 727564 - RNA, 17 nt, Artificial Sequence
  Synthetic
aauauaaaauagcaaaa

SEQ ID NO: 727565 - RNA, 17 nt, Artificial Sequence
  Synthetic
aaaugugaauagcaaaa

SEQ ID NO: 727566 - RNA, 17 nt, Artificial Sequence
  Synthetic
agaacugcuuagcaaaa

SEQ ID NO: 727567 - RNA, 17 nt, Artificial Sequence
  Synthetic
uaauuugguuagcaaaa

SEQ ID NO: 727568 - RNA, 17 nt, Artificial Sequence
  Synthetic
uauuuuauuuagcaaaa

SEQ ID NO: 727569 - RNA, 17 nt, Artificial Sequence
  Synthetic
aauaaggagacgcaaaa

SEQ ID NO: 727570 - RNA, 17 nt, Artificial Sequence
  Synthetic
acuacuaaaaggcaaaa

SEQ ID NO: 727571 - RNA, 17 nt, Artificial Sequence
  Synthetic
ucuggagggaggcaaaa

SEQ ID NO: 727572 - RNA, 17 nt, Artificial Sequence
  Synthetic
aacaguuggaggcaaaa

SEQ ID NO: 727573 - RNA, 17 nt, Artificial Sequence
  Synthetic
auuuacauagggcaaaa

SEQ ID NO: 727574 - RNA, 17 nt, Artificial Sequence
  Synthetic
caauaaaaugggcaaaa

SEQ ID NO: 727575 - RNA, 17 nt, Artificial Sequence
  Synthetic
auuuugcuguggcaaaa

SEQ ID NO: 727576 - RNA, 17 nt, Artificial Sequence
  Synthetic
auucuuccaaugcaaaa

SEQ ID NO: 727577 - RNA, 17 nt, Artificial Sequence
  Synthetic
uuagaugucaugcaaaa

SEQ ID NO: 727578 - RNA, 17 nt, Artificial Sequence
  Synthetic
uuucaccugaugcaaaa

SEQ ID NO: 727579 - RNA, 17 nt, Artificial Sequence
  Synthetic
caaguuuuccugcaaaa

SEQ ID NO: 727580 - RNA, 17 nt, Artificial Sequence
  Synthetic
uguccucaucugcaaaa

SEQ ID NO: 727581 - RNA, 17 nt, Artificial Sequence
  Synthetic
aaauaaacucugcaaaa

SEQ ID NO: 727582 - RNA, 17 nt, Artificial Sequence
  Synthetic
cauuuucuucugcaaaa

SEQ ID NO: 727583 - RNA, 17 nt, Artificial Sequence
  Synthetic
aauggugaagugcaaaa

SEQ ID NO: 727584 - RNA, 17 nt, Artificial Sequence
  Synthetic
ugaaccucugugcaaaa

SEQ ID NO: 727585 - RNA, 17 nt, Artificial Sequence
  Synthetic
cugguggcauugcaaaa

SEQ ID NO: 727586 - RNA, 17 nt, Artificial Sequence
  Synthetic
cacuggggcuugcaaaa

SEQ ID NO: 727587 - RNA, 17 nt, Artificial Sequence
  Synthetic
uuuggguuuuugcaaaa

SEQ ID NO: 727588 - RNA, 17 nt, Artificial Sequence
  Synthetic
aaggaaaaaaaucaaaa

SEQ ID NO: 727589 - RNA, 17 nt, Artificial Sequence
  Synthetic
aaaauagaaaaucaaaa

SEQ ID NO: 727590 - RNA, 17 nt, Artificial Sequence
  Synthetic
agaacugcaaaucaaaa

SEQ ID NO: 727591 - RNA, 17 nt, Artificial Sequence
  Synthetic
auacucucaaaucaaaa

SEQ ID NO: 727592 - RNA, 17 nt, Artificial Sequence
  Synthetic
cagcaagccaaucaaaa

SEQ ID NO: 727593 - RNA, 17 nt, Artificial Sequence
  Synthetic
uugagagggaaucaaaa

SEQ ID NO: 727594 - RNA, 17 nt, Artificial Sequence
  Synthetic
agagaauggaaucaaaa

SEQ ID NO: 727595 - RNA, 17 nt, Artificial Sequence
  Synthetic
agcaucaguaaucaaaa

SEQ ID NO: 727596 - RNA, 17 nt, Artificial Sequence
  Synthetic
aaaugauaacaucaaaa

SEQ ID NO: 727597 - RNA, 17 nt, Artificial Sequence
  Synthetic
cuaaauuugcaucaaaa

SEQ ID NO: 727598 - RNA, 17 nt, Artificial Sequence
  Synthetic
aaccaaagucaucaaaa

SEQ ID NO: 727599 - RNA, 17 nt, Artificial Sequence
  Synthetic
accaauaaagaucaaaa

SEQ ID NO: 727600 - RNA, 17 nt, Artificial Sequence
  Synthetic
uguuuagaagaucaaaa

SEQ ID NO: 727601 - RNA, 17 nt, Artificial Sequence
  Synthetic
auuaacacugaucaaaa

SEQ ID NO: 727602 - RNA, 17 nt, Artificial Sequence
  Synthetic
uaguagaaaacucaaaa

SEQ ID NO: 727603 - RNA, 17 nt, Artificial Sequence
  Synthetic
caagaaucaacucaaaa

SEQ ID NO: 727604 - RNA, 17 nt, Artificial Sequence
  Synthetic
agaacauuuacucaaaa

SEQ ID NO: 727605 - RNA, 17 nt, Artificial Sequence
  Synthetic
aaaacaaaaccucaaaa

SEQ ID NO: 727606 - RNA, 17 nt, Artificial Sequence
  Synthetic
agaaaauagccucaaaa

SEQ ID NO: 727607 - RNA, 17 nt, Artificial Sequence
  Synthetic
uuccaagguccucaaaa

SEQ ID NO: 727608 - RNA, 17 nt, Artificial Sequence
  Synthetic
agaaaaccagcucaaaa

SEQ ID NO: 727609 - RNA, 17 nt, Artificial Sequence
  Synthetic
uacccuaccgcucaaaa

SEQ ID NO: 727610 - RNA, 17 nt, Artificial Sequence
  Synthetic
agaaaaugggcucaaaa

SEQ ID NO: 727611 - RNA, 17 nt, Artificial Sequence
  Synthetic
uauggaauugcucaaaa

SEQ ID NO: 727612 - RNA, 17 nt, Artificial Sequence
  Synthetic
auggauagaucucaaaa

SEQ ID NO: 727613 - RNA, 17 nt, Artificial Sequence
  Synthetic
uauugcguaucucaaaa

SEQ ID NO: 727614 - RNA, 17 nt, Artificial Sequence
  Synthetic
cucccacacucucaaaa

SEQ ID NO: 727615 - RNA, 17 nt, Artificial Sequence
  Synthetic
ugcaaugguucucaaaa

SEQ ID NO: 727616 - RNA, 17 nt, Artificial Sequence
  Synthetic
uagcuuugaagucaaaa

SEQ ID NO: 727617 - RNA, 17 nt, Artificial Sequence
  Synthetic
cuauauuuaugucaaaa

SEQ ID NO: 727618 - RNA, 17 nt, Artificial Sequence
  Synthetic
uuuaaacauugucaaaa

SEQ ID NO: 727619 - RNA, 17 nt, Artificial Sequence
  Synthetic
caaagcucaauucaaaa

SEQ ID NO: 727620 - RNA, 17 nt, Artificial Sequence
  Synthetic
ucacauugccuucaaaa

SEQ ID NO: 727621 - RNA, 17 nt, Artificial Sequence
  Synthetic
auuggaauucuucaaaa

SEQ ID NO: 727622 - RNA, 17 nt, Artificial Sequence
  Synthetic
cuuauucgaguucaaaa

SEQ ID NO: 727623 - RNA, 17 nt, Artificial Sequence
  Synthetic
ccuugauuaguucaaaa

SEQ ID NO: 727624 - RNA, 17 nt, Artificial Sequence
  Synthetic
uuauuuuuauuucaaaa

SEQ ID NO: 727625 - RNA, 17 nt, Artificial Sequence
  Synthetic
ugcuccuaaaaagaaaa

SEQ ID NO: 727626 - RNA, 17 nt, Artificial Sequence
  Synthetic
aggucuuaaaaagaaaa

SEQ ID NO: 727627 - RNA, 17 nt, Artificial Sequence
  Synthetic
aucugaugaaaagaaaa

SEQ ID NO: 727628 - RNA, 17 nt, Artificial Sequence
  Synthetic
cucaggauaaaagaaaa

SEQ ID NO: 727629 - RNA, 17 nt, Artificial Sequence
  Synthetic
uuaccucuaaaagaaaa

SEQ ID NO: 727630 - RNA, 17 nt, Artificial Sequence
  Synthetic
uuaaaaguaaaagaaaa

SEQ ID NO: 727631 - RNA, 17 nt, Artificial Sequence
  Synthetic
aaacaagccaaagaaaa

SEQ ID NO: 727632 - RNA, 17 nt, Artificial Sequence
  Synthetic
augaugugcaaagaaaa

SEQ ID NO: 727633 - RNA, 17 nt, Artificial Sequence
  Synthetic
aacaugcagaaagaaaa

SEQ ID NO: 727634 - RNA, 17 nt, Artificial Sequence
  Synthetic
agagaagagaaagaaaa

SEQ ID NO: 727635 - RNA, 17 nt, Artificial Sequence
  Synthetic
uuguuaaggaaagaaaa

SEQ ID NO: 727636 - RNA, 17 nt, Artificial Sequence
  Synthetic
aucauguugaaagaaaa

SEQ ID NO: 727637 - RNA, 17 nt, Artificial Sequence
  Synthetic
aaguacuauaaagaaaa

SEQ ID NO: 727638 - RNA, 17 nt, Artificial Sequence
  Synthetic
agacuuacuaaagaaaa

SEQ ID NO: 727639 - RNA, 17 nt, Artificial Sequence
  Synthetic
uuauucucuaaagaaaa

SEQ ID NO: 727640 - RNA, 17 nt, Artificial Sequence
  Synthetic
ucagagguuaaagaaaa

SEQ ID NO: 727641 - RNA, 17 nt, Artificial Sequence
  Synthetic
ccuuuuuuuaaagaaaa

SEQ ID NO: 727642 - RNA, 17 nt, Artificial Sequence
  Synthetic
uucugaaaucaagaaaa

SEQ ID NO: 727643 - RNA, 17 nt, Artificial Sequence
  Synthetic
aaaaauggucaagaaaa

SEQ ID NO: 727644 - RNA, 17 nt, Artificial Sequence
  Synthetic
agauaacuucaagaaaa

SEQ ID NO: 727645 - RNA, 17 nt, Artificial Sequence
  Synthetic
uugggcaaagaagaaaa

SEQ ID NO: 727646 - RNA, 17 nt, Artificial Sequence
  Synthetic
uugacuuaagaagaaaa

SEQ ID NO: 727647 - RNA, 17 nt, Artificial Sequence
  Synthetic
ccacaagcagaagaaaa

SEQ ID NO: 727648 - RNA, 17 nt, Artificial Sequence
  Synthetic
ccuuuugcagaagaaaa

SEQ ID NO: 727649 - RNA, 17 nt, Artificial Sequence
  Synthetic
caaggcuaggaagaaaa

SEQ ID NO: 727650 - RNA, 17 nt, Artificial Sequence
  Synthetic
aaauagagggaagaaaa

SEQ ID NO: 727651 - RNA, 17 nt, Artificial Sequence
  Synthetic
caaguaugugaagaaaa

SEQ ID NO: 727652 - RNA, 17 nt, Artificial Sequence
  Synthetic
agagagugugaagaaaa

SEQ ID NO: 727653 - RNA, 17 nt, Artificial Sequence
  Synthetic
ucccaaauugaagaaaa

SEQ ID NO: 727654 - RNA, 17 nt, Artificial Sequence
  Synthetic
ucaauaacauaagaaaa

SEQ ID NO: 727655 - RNA, 17 nt, Artificial Sequence
  Synthetic
cauauuuccuaagaaaa

SEQ ID NO: 727656 - RNA, 17 nt, Artificial Sequence
  Synthetic
ccacuaugcuaagaaaa

SEQ ID NO: 727657 - RNA, 17 nt, Artificial Sequence
  Synthetic
cacuauuaguaagaaaa

SEQ ID NO: 727658 - RNA, 17 nt, Artificial Sequence
  Synthetic
uaaggaaauuaagaaaa

SEQ ID NO: 727659 - RNA, 17 nt, Artificial Sequence
  Synthetic
ucauucccuuaagaaaa

SEQ ID NO: 727660 - RNA, 17 nt, Artificial Sequence
  Synthetic
cauacuauuuaagaaaa

SEQ ID NO: 727661 - RNA, 17 nt, Artificial Sequence
  Synthetic
uucaauguaacagaaaa

SEQ ID NO: 727662 - RNA, 17 nt, Artificial Sequence
  Synthetic
aaauaaaacacagaaaa

SEQ ID NO: 727663 - RNA, 17 nt, Artificial Sequence
  Synthetic
cacacacacacagaaaa

SEQ ID NO: 727664 - RNA, 17 nt, Artificial Sequence
  Synthetic
uuuggccauacagaaaa

SEQ ID NO: 727665 - RNA, 17 nt, Artificial Sequence
  Synthetic
agcagguggccagaaaa

SEQ ID NO: 727666 - RNA, 17 nt, Artificial Sequence
  Synthetic
ucuaaaaauccagaaaa

SEQ ID NO: 727667 - RNA, 17 nt, Artificial Sequence
  Synthetic
ccagccucuccagaaaa

SEQ ID NO: 727668 - RNA, 17 nt, Artificial Sequence
  Synthetic
uguacagcagcagaaaa

SEQ ID NO: 727669 - RNA, 17 nt, Artificial Sequence
  Synthetic
agugaggcagcagaaaa

SEQ ID NO: 727670 - RNA, 17 nt, Artificial Sequence
  Synthetic
cuccgagaggcagaaaa

SEQ ID NO: 727671 - RNA, 17 nt, Artificial Sequence
  Synthetic
aagcucuaggcagaaaa

SEQ ID NO: 727672 - RNA, 17 nt, Artificial Sequence
  Synthetic
uggccauaugcagaaaa

SEQ ID NO: 727673 - RNA, 17 nt, Artificial Sequence
  Synthetic
uagucauaugcagaaaa

SEQ ID NO: 727674 - RNA, 17 nt, Artificial Sequence
  Synthetic
uugaugagugcagaaaa

SEQ ID NO: 727675 - RNA, 17 nt, Artificial Sequence
  Synthetic
acuuauaacucagaaaa

SEQ ID NO: 727676 - RNA, 17 nt, Artificial Sequence
  Synthetic
uuguauuucucagaaaa

SEQ ID NO: 727677 - RNA, 17 nt, Artificial Sequence
  Synthetic
aauucagaaagagaaaa

SEQ ID NO: 727678 - RNA, 17 nt, Artificial Sequence
  Synthetic
ugaauuucaagagaaaa

SEQ ID NO: 727679 - RNA, 17 nt, Artificial Sequence
  Synthetic
ugaggcugcagagaaaa

SEQ ID NO: 727680 - RNA, 17 nt, Artificial Sequence
  Synthetic
ugaggcuucagagaaaa

SEQ ID NO: 727681 - RNA, 17 nt, Artificial Sequence
  Synthetic
aaaagugagagagaaaa

SEQ ID NO: 727682 - RNA, 17 nt, Artificial Sequence
  Synthetic
uggcuggcccgagaaaa

SEQ ID NO: 727683 - RNA, 17 nt, Artificial Sequence
  Synthetic
uauuacagaggagaaaa

SEQ ID NO: 727684 - RNA, 17 nt, Artificial Sequence
  Synthetic
acugcuuuaggagaaaa

SEQ ID NO: 727685 - RNA, 17 nt, Artificial Sequence
  Synthetic
ugagguuggggagaaaa

SEQ ID NO: 727686 - RNA, 17 nt, Artificial Sequence
  Synthetic
caagaauauggagaaaa

SEQ ID NO: 727687 - RNA, 17 nt, Artificial Sequence
  Synthetic
caaggauguggagaaaa

SEQ ID NO: 727688 - RNA, 17 nt, Artificial Sequence
  Synthetic
agaggauguggagaaaa

SEQ ID NO: 727689 - RNA, 17 nt, Artificial Sequence
  Synthetic
cugugauuaugagaaaa

SEQ ID NO: 727690 - RNA, 17 nt, Artificial Sequence
  Synthetic
caaaguaauugagaaaa

SEQ ID NO: 727691 - RNA, 17 nt, Artificial Sequence
  Synthetic
uuucacauuugagaaaa

SEQ ID NO: 727692 - RNA, 17 nt, Artificial Sequence
  Synthetic
cuguguugaauagaaaa

SEQ ID NO: 727693 - RNA, 17 nt, Artificial Sequence
  Synthetic
uaccuaaacauagaaaa

SEQ ID NO: 727694 - RNA, 17 nt, Artificial Sequence
  Synthetic
cuucaaaccauagaaaa

SEQ ID NO: 727695 - RNA, 17 nt, Artificial Sequence
  Synthetic
uauuuauagauagaaaa

SEQ ID NO: 727696 - RNA, 17 nt, Artificial Sequence
  Synthetic
caagcaaguauagaaaa

SEQ ID NO: 727697 - RNA, 17 nt, Artificial Sequence
  Synthetic
aagcuccuuauagaaaa

SEQ ID NO: 727698 - RNA, 17 nt, Artificial Sequence
  Synthetic
agacaguaacuagaaaa

SEQ ID NO: 727699 - RNA, 17 nt, Artificial Sequence
  Synthetic
aaggauaaucuagaaaa

SEQ ID NO: 727700 - RNA, 17 nt, Artificial Sequence
  Synthetic
uuuucacaucuagaaaa

SEQ ID NO: 727701 - RNA, 17 nt, Artificial Sequence
  Synthetic
aauaugaaaguagaaaa

SEQ ID NO: 727702 - RNA, 17 nt, Artificial Sequence
  Synthetic
auuuuggaaguagaaaa

SEQ ID NO: 727703 - RNA, 17 nt, Artificial Sequence
  Synthetic
acaguugcaguagaaaa

SEQ ID NO: 727704 - RNA, 17 nt, Artificial Sequence
  Synthetic
agugaauuaguagaaaa

SEQ ID NO: 727705 - RNA, 17 nt, Artificial Sequence
  Synthetic
acuugggggguagaaaa

SEQ ID NO: 727706 - RNA, 17 nt, Artificial Sequence
  Synthetic
uuuuauuguguagaaaa

SEQ ID NO: 727707 - RNA, 17 nt, Artificial Sequence
  Synthetic
uccacuuguguagaaaa

SEQ ID NO: 727708 - RNA, 17 nt, Artificial Sequence
  Synthetic
agcacuuaauuagaaaa

SEQ ID NO: 727709 - RNA, 17 nt, Artificial Sequence
  Synthetic
cugucucuauuagaaaa

SEQ ID NO: 727710 - RNA, 17 nt, Artificial Sequence
  Synthetic
uguauacaguuagaaaa

SEQ ID NO: 727711 - RNA, 17 nt, Artificial Sequence
  Synthetic
auagaaacuuuagaaaa

SEQ ID NO: 727712 - RNA, 17 nt, Artificial Sequence
  Synthetic
auuaaaaguuuagaaaa

SEQ ID NO: 727713 - RNA, 17 nt, Artificial Sequence
  Synthetic
augggugguuuagaaaa

SEQ ID NO: 727714 - RNA, 17 nt, Artificial Sequence
  Synthetic
aguuaaauuuuagaaaa

SEQ ID NO: 727715 - RNA, 17 nt, Artificial Sequence
  Synthetic
aguauuauuuuagaaaa

SEQ ID NO: 727716 - RNA, 17 nt, Artificial Sequence
  Synthetic
ugaguauuuuuagaaaa

SEQ ID NO: 727717 - RNA, 17 nt, Artificial Sequence
  Synthetic
auuugugacaacgaaaa

SEQ ID NO: 727718 - RNA, 17 nt, Artificial Sequence
  Synthetic
aagggaagauucgaaaa

SEQ ID NO: 727719 - RNA, 17 nt, Artificial Sequence
  Synthetic
aggguaaaaaaggaaaa

SEQ ID NO: 727720 - RNA, 17 nt, Artificial Sequence
  Synthetic
auacauaaaaaggaaaa

SEQ ID NO: 727721 - RNA, 17 nt, Artificial Sequence
  Synthetic
aaagguaaaaaggaaaa

SEQ ID NO: 727722 - RNA, 17 nt, Artificial Sequence
  Synthetic
aaaaucauaaaggaaaa

SEQ ID NO: 727723 - RNA, 17 nt, Artificial Sequence
  Synthetic
aucaggguaaaggaaaa

SEQ ID NO: 727724 - RNA, 17 nt, Artificial Sequence
  Synthetic
cgccaagccaaggaaaa

SEQ ID NO: 727725 - RNA, 17 nt, Artificial Sequence
  Synthetic
uugagagucaaggaaaa

SEQ ID NO: 727726 - RNA, 17 nt, Artificial Sequence
  Synthetic
uuauucaggaaggaaaa

SEQ ID NO: 727727 - RNA, 17 nt, Artificial Sequence
  Synthetic
ccaucugggaaggaaaa

SEQ ID NO: 727728 - RNA, 17 nt, Artificial Sequence
  Synthetic
auaugggauaaggaaaa

SEQ ID NO: 727729 - RNA, 17 nt, Artificial Sequence
  Synthetic
acaacucaacaggaaaa

SEQ ID NO: 727730 - RNA, 17 nt, Artificial Sequence
  Synthetic
ucauuuauacaggaaaa

SEQ ID NO: 727731 - RNA, 17 nt, Artificial Sequence
  Synthetic
aggcugaggcaggaaaa

SEQ ID NO: 727732 - RNA, 17 nt, Artificial Sequence
  Synthetic
acugcagugcaggaaaa

SEQ ID NO: 727733 - RNA, 17 nt, Artificial Sequence
  Synthetic
aagucuagucaggaaaa

SEQ ID NO: 727734 - RNA, 17 nt, Artificial Sequence
  Synthetic
ugaaugugucaggaaaa

SEQ ID NO: 727735 - RNA, 17 nt, Artificial Sequence
  Synthetic
aaaaaaaaagaggaaaa

SEQ ID NO: 727736 - RNA, 17 nt, Artificial Sequence
  Synthetic
uucauuagagaggaaaa

SEQ ID NO: 727737 - RNA, 17 nt, Artificial Sequence
  Synthetic
cacuuuaccgaggaaaa

SEQ ID NO: 727738 - RNA, 17 nt, Artificial Sequence
  Synthetic
cagggagcggaggaaaa

SEQ ID NO: 727739 - RNA, 17 nt, Artificial Sequence
  Synthetic
cuguaaacugaggaaaa

SEQ ID NO: 727740 - RNA, 17 nt, Artificial Sequence
  Synthetic
auguaaacguaggaaaa

SEQ ID NO: 727741 - RNA, 17 nt, Artificial Sequence
  Synthetic
ucuagcaguuaggaaaa

SEQ ID NO: 727742 - RNA, 17 nt, Artificial Sequence
  Synthetic
aauggaagaagggaaaa

SEQ ID NO: 727743 - RNA, 17 nt, Artificial Sequence
  Synthetic
ugggggcucagggaaaa

SEQ ID NO: 727744 - RNA, 17 nt, Artificial Sequence
  Synthetic
ugaaaggauggggaaaa

SEQ ID NO: 727745 - RNA, 17 nt, Artificial Sequence
  Synthetic
aagaauuuuggggaaaa

SEQ ID NO: 727746 - RNA, 17 nt, Artificial Sequence
  Synthetic
uggcauauuugggaaaa

SEQ ID NO: 727747 - RNA, 17 nt, Artificial Sequence
  Synthetic
uuuucuccaauggaaaa

SEQ ID NO: 727748 - RNA, 17 nt, Artificial Sequence
  Synthetic
uaauguucaauggaaaa

SEQ ID NO: 727749 - RNA, 17 nt, Artificial Sequence
  Synthetic
aaaugaagcauggaaaa

SEQ ID NO: 727750 - RNA, 17 nt, Artificial Sequence
  Synthetic
uucaugcucauggaaaa

SEQ ID NO: 727751 - RNA, 17 nt, Artificial Sequence
  Synthetic
aauaguguacuggaaaa

SEQ ID NO: 727752 - RNA, 17 nt, Artificial Sequence
  Synthetic
cucuugucccuggaaaa

SEQ ID NO: 727753 - RNA, 17 nt, Artificial Sequence
  Synthetic
cuucuuugccuggaaaa

SEQ ID NO: 727754 - RNA, 17 nt, Artificial Sequence
  Synthetic
ucuucagaaguggaaaa

SEQ ID NO: 727755 - RNA, 17 nt, Artificial Sequence
  Synthetic
aagcgccagguggaaaa

SEQ ID NO: 727756 - RNA, 17 nt, Artificial Sequence
  Synthetic
uuacccaaauuggaaaa

SEQ ID NO: 727757 - RNA, 17 nt, Artificial Sequence
  Synthetic
aagaauacauuggaaaa

SEQ ID NO: 727758 - RNA, 17 nt, Artificial Sequence
  Synthetic
uagugaccauuggaaaa

SEQ ID NO: 727759 - RNA, 17 nt, Artificial Sequence
  Synthetic
agcgaggucuuggaaaa

SEQ ID NO: 727760 - RNA, 17 nt, Artificial Sequence
  Synthetic
acuucucauuuggaaaa

SEQ ID NO: 727761 - RNA, 17 nt, Artificial Sequence
  Synthetic
uacaaauauuuggaaaa

SEQ ID NO: 727762 - RNA, 17 nt, Artificial Sequence
  Synthetic
aggugauuuuuggaaaa

SEQ ID NO: 727763 - RNA, 17 nt, Artificial Sequence
  Synthetic
uucuucucaaaugaaaa

SEQ ID NO: 727764 - RNA, 17 nt, Artificial Sequence
  Synthetic
cacuggaagaaugaaaa

SEQ ID NO: 727765 - RNA, 17 nt, Artificial Sequence
  Synthetic
uacucuuagaaugaaaa

SEQ ID NO: 727766 - RNA, 17 nt, Artificial Sequence
  Synthetic
cuggguuagaaugaaaa

SEQ ID NO: 727767 - RNA, 17 nt, Artificial Sequence
  Synthetic
auaauuuugaaugaaaa

SEQ ID NO: 727768 - RNA, 17 nt, Artificial Sequence
  Synthetic
agggaaaaacaugaaaa

SEQ ID NO: 727769 - RNA, 17 nt, Artificial Sequence
  Synthetic
aaucaauaacaugaaaa

SEQ ID NO: 727770 - RNA, 17 nt, Artificial Sequence
  Synthetic
uuauaaagacaugaaaa

SEQ ID NO: 727771 - RNA, 17 nt, Artificial Sequence
  Synthetic
accuuucuacaugaaaa

SEQ ID NO: 727772 - RNA, 17 nt, Artificial Sequence
  Synthetic
ccuugguuccaugaaaa

SEQ ID NO: 727773 - RNA, 17 nt, Artificial Sequence
  Synthetic
uuaucacagcaugaaaa

SEQ ID NO: 727774 - RNA, 17 nt, Artificial Sequence
  Synthetic
uaaauggaugaugaaaa

SEQ ID NO: 727775 - RNA, 17 nt, Artificial Sequence
  Synthetic
aauuuugaugaugaaaa

SEQ ID NO: 727776 - RNA, 17 nt, Artificial Sequence
  Synthetic
ugugaaugugaugaaaa

SEQ ID NO: 727777 - RNA, 17 nt, Artificial Sequence
  Synthetic
caaggagaauaugaaaa

SEQ ID NO: 727778 - RNA, 17 nt, Artificial Sequence
  Synthetic
uuucaucuauaugaaaa

SEQ ID NO: 727779 - RNA, 17 nt, Artificial Sequence
  Synthetic
agagaauuauaugaaaa

SEQ ID NO: 727780 - RNA, 17 nt, Artificial Sequence
  Synthetic
uuauagcaguaugaaaa

SEQ ID NO: 727781 - RNA, 17 nt, Artificial Sequence
  Synthetic
uucuagcgguaugaaaa

SEQ ID NO: 727782 - RNA, 17 nt, Artificial Sequence
  Synthetic
acugaauauuaugaaaa

SEQ ID NO: 727783 - RNA, 17 nt, Artificial Sequence
  Synthetic
auaaaguaaacugaaaa

SEQ ID NO: 727784 - RNA, 17 nt, Artificial Sequence
  Synthetic
aaaaaugcaacugaaaa

SEQ ID NO: 727785 - RNA, 17 nt, Artificial Sequence
  Synthetic
agacugugcacugaaaa

SEQ ID NO: 727786 - RNA, 17 nt, Artificial Sequence
  Synthetic
cuacacuucacugaaaa

SEQ ID NO: 727787 - RNA, 17 nt, Artificial Sequence
  Synthetic
cacggagagacugaaaa

SEQ ID NO: 727788 - RNA, 17 nt, Artificial Sequence
  Synthetic
uauucauuuacugaaaa

SEQ ID NO: 727789 - RNA, 17 nt, Artificial Sequence
  Synthetic
aacagaauaccugaaaa

SEQ ID NO: 727790 - RNA, 17 nt, Artificial Sequence
  Synthetic
uauuucaguccugaaaa

SEQ ID NO: 727791 - RNA, 17 nt, Artificial Sequence
  Synthetic
acaaacugggcugaaaa

SEQ ID NO: 727792 - RNA, 17 nt, Artificial Sequence
  Synthetic
auuagcugugcugaaaa

SEQ ID NO: 727793 - RNA, 17 nt, Artificial Sequence
  Synthetic
uccugaaaaucugaaaa

SEQ ID NO: 727794 - RNA, 17 nt, Artificial Sequence
  Synthetic
ucaaaaauaucugaaaa

SEQ ID NO: 727795 - RNA, 17 nt, Artificial Sequence
  Synthetic
aaugccuacucugaaaa

SEQ ID NO: 727796 - RNA, 17 nt, Artificial Sequence
  Synthetic
auuccccagagugaaaa

SEQ ID NO: 727797 - RNA, 17 nt, Artificial Sequence
  Synthetic
aaucaguggagugaaaa

SEQ ID NO: 727798 - RNA, 17 nt, Artificial Sequence
  Synthetic
uaagcucugagugaaaa

SEQ ID NO: 727799 - RNA, 17 nt, Artificial Sequence
  Synthetic
caggagacuagugaaaa

SEQ ID NO: 727800 - RNA, 17 nt, Artificial Sequence
  Synthetic
aaucaauaucgugaaaa

SEQ ID NO: 727801 - RNA, 17 nt, Artificial Sequence
  Synthetic
uugccaaaaggugaaaa

SEQ ID NO: 727802 - RNA, 17 nt, Artificial Sequence
  Synthetic
ugaaagauaggugaaaa

SEQ ID NO: 727803 - RNA, 17 nt, Artificial Sequence
  Synthetic
uauccgcagugugaaaa

SEQ ID NO: 727804 - RNA, 17 nt, Artificial Sequence
  Synthetic
uaaacuaauugugaaaa

SEQ ID NO: 727805 - RNA, 17 nt, Artificial Sequence
  Synthetic
aaucaauauugugaaaa

SEQ ID NO: 727806 - RNA, 17 nt, Artificial Sequence
  Synthetic
cauuuuuuuugugaaaa

SEQ ID NO: 727807 - RNA, 17 nt, Artificial Sequence
  Synthetic
uuggauaucauugaaaa

SEQ ID NO: 727808 - RNA, 17 nt, Artificial Sequence
  Synthetic
aauauagcgauugaaaa

SEQ ID NO: 727809 - RNA, 17 nt, Artificial Sequence
  Synthetic
uauaguauuauugaaaa

SEQ ID NO: 727810 - RNA, 17 nt, Artificial Sequence
  Synthetic
cuaugauaaguugaaaa

SEQ ID NO: 727811 - RNA, 17 nt, Artificial Sequence
  Synthetic
uuuucauaauuugaaaa

SEQ ID NO: 727812 - RNA, 17 nt, Artificial Sequence
  Synthetic
agugguaacuuugaaaa

SEQ ID NO: 727813 - RNA, 17 nt, Artificial Sequence
  Synthetic
acuuuuaauuuugaaaa

SEQ ID NO: 727814 - RNA, 17 nt, Artificial Sequence
  Synthetic
uuaaauacuuuugaaaa

SEQ ID NO: 727815 - RNA, 17 nt, Artificial Sequence
  Synthetic
aaguuugcuuuugaaaa

SEQ ID NO: 727816 - RNA, 17 nt, Artificial Sequence
  Synthetic
aauccuaaaaaauaaaa

SEQ ID NO: 727817 - RNA, 17 nt, Artificial Sequence
  Synthetic
auuucuguaaaauaaaa

SEQ ID NO: 727818 - RNA, 17 nt, Artificial Sequence
  Synthetic
uacauuuuaaaauaaaa

SEQ ID NO: 727819 - RNA, 17 nt, Artificial Sequence
  Synthetic
uucguuuuaaaauaaaa

SEQ ID NO: 727820 - RNA, 17 nt, Artificial Sequence
  Synthetic
aaauaaaacaaauaaaa

SEQ ID NO: 727821 - RNA, 17 nt, Artificial Sequence
  Synthetic
uaaaaugacaaauaaaa

SEQ ID NO: 727822 - RNA, 17 nt, Artificial Sequence
  Synthetic
auguggggcaaauaaaa

SEQ ID NO: 727823 - RNA, 17 nt, Artificial Sequence
  Synthetic
aacucagucaaauaaaa

SEQ ID NO: 727824 - RNA, 17 nt, Artificial Sequence
  Synthetic
uucauggcgaaauaaaa

SEQ ID NO: 727825 - RNA, 17 nt, Artificial Sequence
  Synthetic
aaaucaaggaaauaaaa

SEQ ID NO: 727826 - RNA, 17 nt, Artificial Sequence
  Synthetic
uuuaacuggaaauaaaa

SEQ ID NO: 727827 - RNA, 17 nt, Artificial Sequence
  Synthetic
uuaguuaugaaauaaaa

SEQ ID NO: 727828 - RNA, 17 nt, Artificial Sequence
  Synthetic
caaauugauaaauaaaa

SEQ ID NO: 727829 - RNA, 17 nt, Artificial Sequence
  Synthetic
aaauagacuaaauaaaa

SEQ ID NO: 727830 - RNA, 17 nt, Artificial Sequence
  Synthetic
auaugauuuaaauaaaa

SEQ ID NO: 727831 - RNA, 17 nt, Artificial Sequence
  Synthetic
uccaagcagcaauaaaa

SEQ ID NO: 727832 - RNA, 17 nt, Artificial Sequence
  Synthetic
acuauucagcaauaaaa

SEQ ID NO: 727833 - RNA, 17 nt, Artificial Sequence
  Synthetic
aaagcaaggcaauaaaa

SEQ ID NO: 727834 - RNA, 17 nt, Artificial Sequence
  Synthetic
uauagcagucaauaaaa

SEQ ID NO: 727835 - RNA, 17 nt, Artificial Sequence
  Synthetic
auuaguaaggaauaaaa

SEQ ID NO: 727836 - RNA, 17 nt, Artificial Sequence
  Synthetic
augggagaugaauaaaa

SEQ ID NO: 727837 - RNA, 17 nt, Artificial Sequence
  Synthetic
ugagaaaaauaauaaaa

SEQ ID NO: 727838 - RNA, 17 nt, Artificial Sequence
  Synthetic
cuuaaugguuaauaaaa

SEQ ID NO: 727839 - RNA, 17 nt, Artificial Sequence
  Synthetic
aaugaaauuuaauaaaa

SEQ ID NO: 727840 - RNA, 17 nt, Artificial Sequence
  Synthetic
auuuaaauuuaauaaaa

SEQ ID NO: 727841 - RNA, 17 nt, Artificial Sequence
  Synthetic
acugauuggacauaaaa

SEQ ID NO: 727842 - RNA, 17 nt, Artificial Sequence
  Synthetic
uucuucaauacauaaaa

SEQ ID NO: 727843 - RNA, 17 nt, Artificial Sequence
  Synthetic
caacauaauacauaaaa

SEQ ID NO: 727844 - RNA, 17 nt, Artificial Sequence
  Synthetic
acucugcagccauaaaa

SEQ ID NO: 727845 - RNA, 17 nt, Artificial Sequence
  Synthetic
acuacucagccauaaaa

SEQ ID NO: 727846 - RNA, 17 nt, Artificial Sequence
  Synthetic
uaucauuuuccauaaaa

SEQ ID NO: 727847 - RNA, 17 nt, Artificial Sequence
  Synthetic
agcaagagagcauaaaa

SEQ ID NO: 727848 - RNA, 17 nt, Artificial Sequence
  Synthetic
auuauucagucauaaaa

SEQ ID NO: 727849 - RNA, 17 nt, Artificial Sequence
  Synthetic
uaucuuuguucauaaaa

SEQ ID NO: 727850 - RNA, 17 nt, Artificial Sequence
  Synthetic
ugguaggaaagauaaaa

SEQ ID NO: 727851 - RNA, 17 nt, Artificial Sequence
  Synthetic
uauugaacaagauaaaa

SEQ ID NO: 727852 - RNA, 17 nt, Artificial Sequence
  Synthetic
auaagaagcagauaaaa

SEQ ID NO: 727853 - RNA, 17 nt, Artificial Sequence
  Synthetic
uucaugaucagauaaaa

SEQ ID NO: 727854 - RNA, 17 nt, Artificial Sequence
  Synthetic
agaaauuggagauaaaa

SEQ ID NO: 727855 - RNA, 17 nt, Artificial Sequence
  Synthetic
uuacuuccuagauaaaa

SEQ ID NO: 727856 - RNA, 17 nt, Artificial Sequence
  Synthetic
aggucccuucgauaaaa

SEQ ID NO: 727857 - RNA, 17 nt, Artificial Sequence
  Synthetic
acccagacaggauaaaa

SEQ ID NO: 727858 - RNA, 17 nt, Artificial Sequence
  Synthetic
uguguguggggauaaaa

SEQ ID NO: 727859 - RNA, 17 nt, Artificial Sequence
  Synthetic
uccagccauggauaaaa

SEQ ID NO: 727860 - RNA, 17 nt, Artificial Sequence
  Synthetic
uuugaucacugauaaaa

SEQ ID NO: 727861 - RNA, 17 nt, Artificial Sequence
  Synthetic
auaaaaacuugauaaaa

SEQ ID NO: 727862 - RNA, 17 nt, Artificial Sequence
  Synthetic
acauguugaauauaaaa

SEQ ID NO: 727863 - RNA, 17 nt, Artificial Sequence
  Synthetic
auagauuagauauaaaa

SEQ ID NO: 727864 - RNA, 17 nt, Artificial Sequence
  Synthetic
auuaguuauauauaaaa

SEQ ID NO: 727865 - RNA, 17 nt, Artificial Sequence
  Synthetic
auuuauucuauauaaaa

SEQ ID NO: 727866 - RNA, 17 nt, Artificial Sequence
  Synthetic
cuacaaguuauauaaaa

SEQ ID NO: 727867 - RNA, 17 nt, Artificial Sequence
  Synthetic
aaauuauuuauauaaaa

SEQ ID NO: 727868 - RNA, 17 nt, Artificial Sequence
  Synthetic
uuuaucuagcuauaaaa

SEQ ID NO: 727869 - RNA, 17 nt, Artificial Sequence
  Synthetic
cuuugaaaucuauaaaa

SEQ ID NO: 727870 - RNA, 17 nt, Artificial Sequence
  Synthetic
uuaucucaucuauaaaa

SEQ ID NO: 727871 - RNA, 17 nt, Artificial Sequence
  Synthetic
uuuucucgucuauaaaa

SEQ ID NO: 727872 - RNA, 17 nt, Artificial Sequence
  Synthetic
uuuccuugucuauaaaa

SEQ ID NO: 727873 - RNA, 17 nt, Artificial Sequence
  Synthetic
uccaagccaguauaaaa

SEQ ID NO: 727874 - RNA, 17 nt, Artificial Sequence
  Synthetic
cacaguucaguauaaaa

SEQ ID NO: 727875 - RNA, 17 nt, Artificial Sequence
  Synthetic
uauaggaaauuauaaaa

SEQ ID NO: 727876 - RNA, 17 nt, Artificial Sequence
  Synthetic
ccucccguauuauaaaa

SEQ ID NO: 727877 - RNA, 17 nt, Artificial Sequence
  Synthetic
aacuuaaacuuauaaaa

SEQ ID NO: 727878 - RNA, 17 nt, Artificial Sequence
  Synthetic
acaugaguguuauaaaa

SEQ ID NO: 727879 - RNA, 17 nt, Artificial Sequence
  Synthetic
uacugcaaaaacuaaaa

SEQ ID NO: 727880 - RNA, 17 nt, Artificial Sequence
  Synthetic
uaaaaaacgaacuaaaa

SEQ ID NO: 727881 - RNA, 17 nt, Artificial Sequence
  Synthetic
aaauuauuuuacuaaaa

SEQ ID NO: 727882 - RNA, 17 nt, Artificial Sequence
  Synthetic
ugacagcacaccuaaaa

SEQ ID NO: 727883 - RNA, 17 nt, Artificial Sequence
  Synthetic
ccaauuucccccuaaaa

SEQ ID NO: 727884 - RNA, 17 nt, Artificial Sequence
  Synthetic
agugauaaucccuaaaa

SEQ ID NO: 727885 - RNA, 17 nt, Artificial Sequence
  Synthetic
uuguaagaagccuaaaa

SEQ ID NO: 727886 - RNA, 17 nt, Artificial Sequence
  Synthetic
ucacacauagccuaaaa

SEQ ID NO: 727887 - RNA, 17 nt, Artificial Sequence
  Synthetic
cuuaugauagccuaaaa

SEQ ID NO: 727888 - RNA, 17 nt, Artificial Sequence
  Synthetic
cagccucaggccuaaaa

SEQ ID NO: 727889 - RNA, 17 nt, Artificial Sequence
  Synthetic
uagaaaaucagcuaaaa

SEQ ID NO: 727890 - RNA, 17 nt, Artificial Sequence
  Synthetic
uuuccaaauagcuaaaa

SEQ ID NO: 727891 - RNA, 17 nt, Artificial Sequence
  Synthetic
acagaagagggcuaaaa

SEQ ID NO: 727892 - RNA, 17 nt, Artificial Sequence
  Synthetic
aauucauauggcuaaaa

SEQ ID NO: 727893 - RNA, 17 nt, Artificial Sequence
  Synthetic
aaauagaaaugcuaaaa

SEQ ID NO: 727894 - RNA, 17 nt, Artificial Sequence
  Synthetic
uuuuaccauugcuaaaa

SEQ ID NO: 727895 - RNA, 17 nt, Artificial Sequence
  Synthetic
agacuguauugcuaaaa

SEQ ID NO: 727896 - RNA, 17 nt, Artificial Sequence
  Synthetic
caugugcuuugcuaaaa

SEQ ID NO: 727897 - RNA, 17 nt, Artificial Sequence
  Synthetic
aaauauaugaucuaaaa

SEQ ID NO: 727898 - RNA, 17 nt, Artificial Sequence
  Synthetic
uagcaagaacucuaaaa

SEQ ID NO: 727899 - RNA, 17 nt, Artificial Sequence
  Synthetic
uuucugacccucuaaaa

SEQ ID NO: 727900 - RNA, 17 nt, Artificial Sequence
  Synthetic
uagucucugcucuaaaa

SEQ ID NO: 727901 - RNA, 17 nt, Artificial Sequence
  Synthetic
auuucucuucucuaaaa

SEQ ID NO: 727902 - RNA, 17 nt, Artificial Sequence
  Synthetic
uuauuguuucucuaaaa

SEQ ID NO: 727903 - RNA, 17 nt, Artificial Sequence
  Synthetic
agaguauaagucuaaaa

SEQ ID NO: 727904 - RNA, 17 nt, Artificial Sequence
  Synthetic
cccaauauggucuaaaa

SEQ ID NO: 727905 - RNA, 17 nt, Artificial Sequence
  Synthetic
caaacugucuucuaaaa

SEQ ID NO: 727906 - RNA, 17 nt, Artificial Sequence
  Synthetic
ccucaauaguucuaaaa

SEQ ID NO: 727907 - RNA, 17 nt, Artificial Sequence
  Synthetic
aaauguugguucuaaaa

SEQ ID NO: 727908 - RNA, 17 nt, Artificial Sequence
  Synthetic
uuuuagccuuucuaaaa

SEQ ID NO: 727909 - RNA, 17 nt, Artificial Sequence
  Synthetic
cuuuuaucuuucuaaaa

SEQ ID NO: 727910 - RNA, 17 nt, Artificial Sequence
  Synthetic
uccaaauggaaguaaaa

SEQ ID NO: 727911 - RNA, 17 nt, Artificial Sequence
  Synthetic
aaaaaguauaaguaaaa

SEQ ID NO: 727912 - RNA, 17 nt, Artificial Sequence
  Synthetic
agaaaaauccaguaaaa

SEQ ID NO: 727913 - RNA, 17 nt, Artificial Sequence
  Synthetic
cccaagaaucaguaaaa

SEQ ID NO: 727914 - RNA, 17 nt, Artificial Sequence
  Synthetic
auucacagugaguaaaa

SEQ ID NO: 727915 - RNA, 17 nt, Artificial Sequence
  Synthetic
uaguaacaauaguaaaa

SEQ ID NO: 727916 - RNA, 17 nt, Artificial Sequence
  Synthetic
aguguuucauaguaaaa

SEQ ID NO: 727917 - RNA, 17 nt, Artificial Sequence
  Synthetic
ugguaagucuaguaaaa

SEQ ID NO: 727918 - RNA, 17 nt, Artificial Sequence
  Synthetic
caauuucauuaguaaaa

SEQ ID NO: 727919 - RNA, 17 nt, Artificial Sequence
  Synthetic
ccaaucaaaagguaaaa

SEQ ID NO: 727920 - RNA, 17 nt, Artificial Sequence
  Synthetic
aucuaacaaagguaaaa

SEQ ID NO: 727921 - RNA, 17 nt, Artificial Sequence
  Synthetic
aaguugauuagguaaaa

SEQ ID NO: 727922 - RNA, 17 nt, Artificial Sequence
  Synthetic
ccaaauugucgguaaaa

SEQ ID NO: 727923 - RNA, 17 nt, Artificial Sequence
  Synthetic
acuauauagggguaaaa

SEQ ID NO: 727924 - RNA, 17 nt, Artificial Sequence
  Synthetic
ucugaacaaugguaaaa

SEQ ID NO: 727925 - RNA, 17 nt, Artificial Sequence
  Synthetic
ucaguugcaugguaaaa

SEQ ID NO: 727926 - RNA, 17 nt, Artificial Sequence
  Synthetic
ugaaauaaaauguaaaa

SEQ ID NO: 727927 - RNA, 17 nt, Artificial Sequence
  Synthetic
uuuuaagaaauguaaaa

SEQ ID NO: 727928 - RNA, 17 nt, Artificial Sequence
  Synthetic
cugguggaaauguaaaa

SEQ ID NO: 727929 - RNA, 17 nt, Artificial Sequence
  Synthetic
augagucccauguaaaa

SEQ ID NO: 727930 - RNA, 17 nt, Artificial Sequence
  Synthetic
aagcacaucauguaaaa

SEQ ID NO: 727931 - RNA, 17 nt, Artificial Sequence
  Synthetic
ccuuuugggauguaaaa

SEQ ID NO: 727932 - RNA, 17 nt, Artificial Sequence
  Synthetic
uuucgucaacuguaaaa

SEQ ID NO: 727933 - RNA, 17 nt, Artificial Sequence
  Synthetic
ugcccucgccuguaaaa

SEQ ID NO: 727934 - RNA, 17 nt, Artificial Sequence
  Synthetic
auuucucagcuguaaaa

SEQ ID NO: 727935 - RNA, 17 nt, Artificial Sequence
  Synthetic
uugucucaucuguaaaa

SEQ ID NO: 727936 - RNA, 17 nt, Artificial Sequence
  Synthetic
aauaaguuucuguaaaa

SEQ ID NO: 727937 - RNA, 17 nt, Artificial Sequence
  Synthetic
cuaagaagaguguaaaa

SEQ ID NO: 727938 - RNA, 17 nt, Artificial Sequence
  Synthetic
ugugguaauuuguaaaa

SEQ ID NO: 727939 - RNA, 17 nt, Artificial Sequence
  Synthetic
auagcaucuuuguaaaa

SEQ ID NO: 727940 - RNA, 17 nt, Artificial Sequence
  Synthetic
uaccuaaaaaauuaaaa

SEQ ID NO: 727941 - RNA, 17 nt, Artificial Sequence
  Synthetic
ucuaugacaaauuaaaa

SEQ ID NO: 727942 - RNA, 17 nt, Artificial Sequence
  Synthetic
ucucucccaaauuaaaa

SEQ ID NO: 727943 - RNA, 17 nt, Artificial Sequence
  Synthetic
ucuagauuaaauuaaaa

SEQ ID NO: 727944 - RNA, 17 nt, Artificial Sequence
  Synthetic
uucaauuuaaauuaaaa

SEQ ID NO: 727945 - RNA, 17 nt, Artificial Sequence
  Synthetic
caaauacucaauuaaaa

SEQ ID NO: 727946 - RNA, 17 nt, Artificial Sequence
  Synthetic
ccacaaaugaauuaaaa

SEQ ID NO: 727947 - RNA, 17 nt, Artificial Sequence
  Synthetic
aauuugcuuaauuaaaa

SEQ ID NO: 727948 - RNA, 17 nt, Artificial Sequence
  Synthetic
aacaggguuaauuaaaa

SEQ ID NO: 727949 - RNA, 17 nt, Artificial Sequence
  Synthetic
aaucaauaucauuaaaa

SEQ ID NO: 727950 - RNA, 17 nt, Artificial Sequence
  Synthetic
aaauaaucugauuaaaa

SEQ ID NO: 727951 - RNA, 17 nt, Artificial Sequence
  Synthetic
uaugaaugugauuaaaa

SEQ ID NO: 727952 - RNA, 17 nt, Artificial Sequence
  Synthetic
auauccuaauauuaaaa

SEQ ID NO: 727953 - RNA, 17 nt, Artificial Sequence
  Synthetic
auguuuuaauauuaaaa

SEQ ID NO: 727954 - RNA, 17 nt, Artificial Sequence
  Synthetic
ucucagcuauauuaaaa

SEQ ID NO: 727955 - RNA, 17 nt, Artificial Sequence
  Synthetic
uuuuggagguauuaaaa

SEQ ID NO: 727956 - RNA, 17 nt, Artificial Sequence
  Synthetic
aguagugacacuuaaaa

SEQ ID NO: 727957 - RNA, 17 nt, Artificial Sequence
  Synthetic
cgacaaaagacuuaaaa

SEQ ID NO: 727958 - RNA, 17 nt, Artificial Sequence
  Synthetic
caaacaaggacuuaaaa

SEQ ID NO: 727959 - RNA, 17 nt, Artificial Sequence
  Synthetic
caaagaucuacuuaaaa

SEQ ID NO: 727960 - RNA, 17 nt, Artificial Sequence
  Synthetic
uugaaggaaccuuaaaa

SEQ ID NO: 727961 - RNA, 17 nt, Artificial Sequence
  Synthetic
uuuugaaucccuuaaaa

SEQ ID NO: 727962 - RNA, 17 nt, Artificial Sequence
  Synthetic
uaauuuuagccuuaaaa

SEQ ID NO: 727963 - RNA, 17 nt, Artificial Sequence
  Synthetic
auuauuuggccuuaaaa

SEQ ID NO: 727964 - RNA, 17 nt, Artificial Sequence
  Synthetic
agggauaauccuuaaaa

SEQ ID NO: 727965 - RNA, 17 nt, Artificial Sequence
  Synthetic
uuuaaguauccuuaaaa

SEQ ID NO: 727966 - RNA, 17 nt, Artificial Sequence
  Synthetic
ccucucaguccuuaaaa

SEQ ID NO: 727967 - RNA, 17 nt, Artificial Sequence
  Synthetic
ugacucuguccuuaaaa

SEQ ID NO: 727968 - RNA, 17 nt, Artificial Sequence
  Synthetic
aucuagaaaucuuaaaa

SEQ ID NO: 727969 - RNA, 17 nt, Artificial Sequence
  Synthetic
uuaaacucaucuuaaaa

SEQ ID NO: 727970 - RNA, 17 nt, Artificial Sequence
  Synthetic
agaacacacucuuaaaa

SEQ ID NO: 727971 - RNA, 17 nt, Artificial Sequence
  Synthetic
uauguagcaaguuaaaa

SEQ ID NO: 727972 - RNA, 17 nt, Artificial Sequence
  Synthetic
ccucacucccguuaaaa

SEQ ID NO: 727973 - RNA, 17 nt, Artificial Sequence
  Synthetic
ugaauggcagguuaaaa

SEQ ID NO: 727974 - RNA, 17 nt, Artificial Sequence
  Synthetic
agaaggucagguuaaaa

SEQ ID NO: 727975 - RNA, 17 nt, Artificial Sequence
  Synthetic
uuaaaaagauguuaaaa

SEQ ID NO: 727976 - RNA, 17 nt, Artificial Sequence
  Synthetic
ccuuuuaaaauuuaaaa

SEQ ID NO: 727977 - RNA, 17 nt, Artificial Sequence
  Synthetic
aagacugcaauuuaaaa

SEQ ID NO: 727978 - RNA, 17 nt, Artificial Sequence
  Synthetic
uagcucuuaauuuaaaa

SEQ ID NO: 727979 - RNA, 17 nt, Artificial Sequence
  Synthetic
agugacuucauuuaaaa

SEQ ID NO: 727980 - RNA, 17 nt, Artificial Sequence
  Synthetic
ucaaagaagauuuaaaa

SEQ ID NO: 727981 - RNA, 17 nt, Artificial Sequence
  Synthetic
auuauguagauuuaaaa

SEQ ID NO: 727982 - RNA, 17 nt, Artificial Sequence
  Synthetic
aauaccuauauuuaaaa

SEQ ID NO: 727983 - RNA, 17 nt, Artificial Sequence
  Synthetic
aacuguacacuuuaaaa

SEQ ID NO: 727984 - RNA, 17 nt, Artificial Sequence
  Synthetic
auaaagagacuuuaaaa

SEQ ID NO: 727985 - RNA, 17 nt, Artificial Sequence
  Synthetic
augucuguacuuuaaaa

SEQ ID NO: 727986 - RNA, 17 nt, Artificial Sequence
  Synthetic
uccucaaaccuuuaaaa

SEQ ID NO: 727987 - RNA, 17 nt, Artificial Sequence
  Synthetic
augaagucccuuuaaaa

SEQ ID NO: 727988 - RNA, 17 nt, Artificial Sequence
  Synthetic
auccacaugcuuuaaaa

SEQ ID NO: 727989 - RNA, 17 nt, Artificial Sequence
  Synthetic
aguauucugcuuuaaaa

SEQ ID NO: 727990 - RNA, 17 nt, Artificial Sequence
  Synthetic
ugguucucucuuuaaaa

SEQ ID NO: 727991 - RNA, 17 nt, Artificial Sequence
  Synthetic
ugggauaggguuuaaaa

SEQ ID NO: 727992 - RNA, 17 nt, Artificial Sequence
  Synthetic
uccaaagguguuuaaaa

SEQ ID NO: 727993 - RNA, 17 nt, Artificial Sequence
  Synthetic
uuacugauuguuuaaaa

SEQ ID NO: 727994 - RNA, 17 nt, Artificial Sequence
  Synthetic
aaaauuguuguuuaaaa

SEQ ID NO: 727995 - RNA, 17 nt, Artificial Sequence
  Synthetic
ccauagaaauuuuaaaa

SEQ ID NO: 727996 - RNA, 17 nt, Artificial Sequence
  Synthetic
uuuaaaacauuuuaaaa

SEQ ID NO: 727997 - RNA, 17 nt, Artificial Sequence
  Synthetic
auauugacauuuuaaaa

SEQ ID NO: 727998 - RNA, 17 nt, Artificial Sequence
  Synthetic
uuaaccugauuuuaaaa

SEQ ID NO: 727999 - RNA, 17 nt, Artificial Sequence
  Synthetic
uaguaacuauuuuaaaa

SEQ ID NO: 728000 - RNA, 17 nt, Artificial Sequence
  Synthetic
acuaaucuauuuuaaaa

SEQ ID NO: 728001 - RNA, 17 nt, Artificial Sequence
  Synthetic
auucuaguauuuuaaaa

SEQ ID NO: 728002 - RNA, 17 nt, Artificial Sequence
  Synthetic
auuugauuauuuuaaaa

SEQ ID NO: 728003 - RNA, 17 nt, Artificial Sequence
  Synthetic
cacauuuuauuuuaaaa

SEQ ID NO: 728004 - RNA, 17 nt, Artificial Sequence
  Synthetic
aguauuuuauuuuaaaa

SEQ ID NO: 728005 - RNA, 17 nt, Artificial Sequence
  Synthetic
uccucugccuuuuaaaa

SEQ ID NO: 728006 - RNA, 17 nt, Artificial Sequence
  Synthetic
aaaacagucuuuuaaaa

SEQ ID NO: 728007 - RNA, 17 nt, Artificial Sequence
  Synthetic
ccagcuacguuuuaaaa

SEQ ID NO: 728008 - RNA, 17 nt, Artificial Sequence
  Synthetic
aaugauauguuuuaaaa

SEQ ID NO: 728009 - RNA, 17 nt, Artificial Sequence
  Synthetic
cauguuauguuuuaaaa

SEQ ID NO: 728010 - RNA, 17 nt, Artificial Sequence
  Synthetic
caauagaauuuuuaaaa

SEQ ID NO: 728011 - RNA, 17 nt, Artificial Sequence
  Synthetic
augaaaaaaaaaacaaa

SEQ ID NO: 728012 - RNA, 17 nt, Artificial Sequence
  Synthetic
cagccucccaaaacaaa

SEQ ID NO: 728013 - RNA, 17 nt, Artificial Sequence
  Synthetic
auccaaaagaaaacaaa

SEQ ID NO: 728014 - RNA, 17 nt, Artificial Sequence
  Synthetic
uaauaacagaaaacaaa

SEQ ID NO: 728015 - RNA, 17 nt, Artificial Sequence
  Synthetic
ccugucucgaaaacaaa

SEQ ID NO: 728016 - RNA, 17 nt, Artificial Sequence
  Synthetic
agaacuuggaaaacaaa

SEQ ID NO: 728017 - RNA, 17 nt, Artificial Sequence
  Synthetic
auggagcuuaaaacaaa

SEQ ID NO: 728018 - RNA, 17 nt, Artificial Sequence
  Synthetic
uagauaacacaaacaaa

SEQ ID NO: 728019 - RNA, 17 nt, Artificial Sequence
  Synthetic
aagaggacacaaacaaa

SEQ ID NO: 728020 - RNA, 17 nt, Artificial Sequence
  Synthetic
aggacaccacaaacaaa

SEQ ID NO: 728021 - RNA, 17 nt, Artificial Sequence
  Synthetic
ucaaagucacaaacaaa

SEQ ID NO: 728022 - RNA, 17 nt, Artificial Sequence
  Synthetic
caaagaugacaaacaaa

SEQ ID NO: 728023 - RNA, 17 nt, Artificial Sequence
  Synthetic
aagaggauacaaacaaa

SEQ ID NO: 728024 - RNA, 17 nt, Artificial Sequence
  Synthetic
cuugaucaccaaacaaa

SEQ ID NO: 728025 - RNA, 17 nt, Artificial Sequence
  Synthetic
aaauuggcccaaacaaa

SEQ ID NO: 728026 - RNA, 17 nt, Artificial Sequence
  Synthetic
agaaauaaagaaacaaa

SEQ ID NO: 728027 - RNA, 17 nt, Artificial Sequence
  Synthetic
agcauugcagaaacaaa

SEQ ID NO: 728028 - RNA, 17 nt, Artificial Sequence
  Synthetic
uuccuuagagaaacaaa

SEQ ID NO: 728029 - RNA, 17 nt, Artificial Sequence
  Synthetic
aauaacguagaaacaaa

SEQ ID NO: 728030 - RNA, 17 nt, Artificial Sequence
  Synthetic
agaagucaggaaacaaa

SEQ ID NO: 728031 - RNA, 17 nt, Artificial Sequence
  Synthetic
uccuguuuugaaacaaa

SEQ ID NO: 728032 - RNA, 17 nt, Artificial Sequence
  Synthetic
agaaaauaauaaacaaa

SEQ ID NO: 728033 - RNA, 17 nt, Artificial Sequence
  Synthetic
acgcugucauaaacaaa

SEQ ID NO: 728034 - RNA, 17 nt, Artificial Sequence
  Synthetic
ucccauuccuaaacaaa

SEQ ID NO: 728035 - RNA, 17 nt, Artificial Sequence
  Synthetic
caaaaacaguaaacaaa

SEQ ID NO: 728036 - RNA, 17 nt, Artificial Sequence
  Synthetic
uauucuuuuuaaacaaa

SEQ ID NO: 728037 - RNA, 17 nt, Artificial Sequence
  Synthetic
agucaguuuccaacaaa

SEQ ID NO: 728038 - RNA, 17 nt, Artificial Sequence
  Synthetic
ugacugccagcaacaaa

SEQ ID NO: 728039 - RNA, 17 nt, Artificial Sequence
  Synthetic
uguugaagagcaacaaa

SEQ ID NO: 728040 - RNA, 17 nt, Artificial Sequence
  Synthetic
cauaagaaaucaacaaa

SEQ ID NO: 728041 - RNA, 17 nt, Artificial Sequence
  Synthetic
uaacaaauaucaacaaa

SEQ ID NO: 728042 - RNA, 17 nt, Artificial Sequence
  Synthetic
ucuguucauucaacaaa

SEQ ID NO: 728043 - RNA, 17 nt, Artificial Sequence
  Synthetic
acagucucuucaacaaa

SEQ ID NO: 728044 - RNA, 17 nt, Artificial Sequence
  Synthetic
cucaccuuuucaacaaa

SEQ ID NO: 728045 - RNA, 17 nt, Artificial Sequence
  Synthetic
ccuaugcaaagaacaaa

SEQ ID NO: 728046 - RNA, 17 nt, Artificial Sequence
  Synthetic
caggaugcaagaacaaa

SEQ ID NO: 728047 - RNA, 17 nt, Artificial Sequence
  Synthetic
ugccacuuaagaacaaa

SEQ ID NO: 728048 - RNA, 17 nt, Artificial Sequence
  Synthetic
cuuuaggggagaacaaa

SEQ ID NO: 728049 - RNA, 17 nt, Artificial Sequence
  Synthetic
aaaauuaugagaacaaa

SEQ ID NO: 728050 - RNA, 17 nt, Artificial Sequence
  Synthetic
uuacacccuagaacaaa

SEQ ID NO: 728051 - RNA, 17 nt, Artificial Sequence
  Synthetic
uccagcauuagaacaaa

SEQ ID NO: 728052 - RNA, 17 nt, Artificial Sequence
  Synthetic
uuccguggaggaacaaa

SEQ ID NO: 728053 - RNA, 17 nt, Artificial Sequence
  Synthetic
cucagaugaggaacaaa

SEQ ID NO: 728054 - RNA, 17 nt, Artificial Sequence
  Synthetic
aauaacgaaugaacaaa

SEQ ID NO: 728055 - RNA, 17 nt, Artificial Sequence
  Synthetic
caagcugaaugaacaaa

SEQ ID NO: 728056 - RNA, 17 nt, Artificial Sequence
  Synthetic
uucagaacuugaacaaa

SEQ ID NO: 728057 - RNA, 17 nt, Artificial Sequence
  Synthetic
uuuuuauuuugaacaaa

SEQ ID NO: 728058 - RNA, 17 nt, Artificial Sequence
  Synthetic
aaaaaucaaauaacaaa

SEQ ID NO: 728059 - RNA, 17 nt, Artificial Sequence
  Synthetic
ugaguggaaauaacaaa

SEQ ID NO: 728060 - RNA, 17 nt, Artificial Sequence
  Synthetic
aagugaacacuaacaaa

SEQ ID NO: 728061 - RNA, 17 nt, Artificial Sequence
  Synthetic
aaggaugaucuaacaaa

SEQ ID NO: 728062 - RNA, 17 nt, Artificial Sequence
  Synthetic
ucucuccaaguaacaaa

SEQ ID NO: 728063 - RNA, 17 nt, Artificial Sequence
  Synthetic
cuuaaaacaguaacaaa

SEQ ID NO: 728064 - RNA, 17 nt, Artificial Sequence
  Synthetic
acuguauggguaacaaa

SEQ ID NO: 728065 - RNA, 17 nt, Artificial Sequence
  Synthetic
cccauaaaauuaacaaa

SEQ ID NO: 728066 - RNA, 17 nt, Artificial Sequence
  Synthetic
uucccugacaacacaaa

SEQ ID NO: 728067 - RNA, 17 nt, Artificial Sequence
  Synthetic
cagggauugcacacaaa

SEQ ID NO: 728068 - RNA, 17 nt, Artificial Sequence
  Synthetic
ugauagacagacacaaa

SEQ ID NO: 728069 - RNA, 17 nt, Artificial Sequence
  Synthetic
uaugagaaugacacaaa

SEQ ID NO: 728070 - RNA, 17 nt, Artificial Sequence
  Synthetic
cuaagugcauacacaaa

SEQ ID NO: 728071 - RNA, 17 nt, Artificial Sequence
  Synthetic
ugguacauauacacaaa

SEQ ID NO: 728072 - RNA, 17 nt, Artificial Sequence
  Synthetic
uacaagcacuacacaaa

SEQ ID NO: 728073 - RNA, 17 nt, Artificial Sequence
  Synthetic
uuccaaaccuacacaaa

SEQ ID NO: 728074 - RNA, 17 nt, Artificial Sequence
  Synthetic
aagaugcucuacacaaa

SEQ ID NO: 728075 - RNA, 17 nt, Artificial Sequence
  Synthetic
aaaucacaaaccacaaa

SEQ ID NO: 728076 - RNA, 17 nt, Artificial Sequence
  Synthetic
acaagcaaacccacaaa

SEQ ID NO: 728077 - RNA, 17 nt, Artificial Sequence
  Synthetic
uucugccagcccacaaa

SEQ ID NO: 728078 - RNA, 17 nt, Artificial Sequence
  Synthetic
auuacaaagagcacaaa

SEQ ID NO: 728079 - RNA, 17 nt, Artificial Sequence
  Synthetic
ucuucauguagcacaaa

SEQ ID NO: 728080 - RNA, 17 nt, Artificial Sequence
  Synthetic
aggauuccacgcacaaa

SEQ ID NO: 728081 - RNA, 17 nt, Artificial Sequence
  Synthetic
ugggaaaacugcacaaa

SEQ ID NO: 728082 - RNA, 17 nt, Artificial Sequence
  Synthetic
aauuuaaucugcacaaa

SEQ ID NO: 728083 - RNA, 17 nt, Artificial Sequence
  Synthetic
agaaaauucugcacaaa

SEQ ID NO: 728084 - RNA, 17 nt, Artificial Sequence
  Synthetic
ugacaugacaucacaaa

SEQ ID NO: 728085 - RNA, 17 nt, Artificial Sequence
  Synthetic
agagaccagaucacaaa

SEQ ID NO: 728086 - RNA, 17 nt, Artificial Sequence
  Synthetic
aaacauaugcucacaaa

SEQ ID NO: 728087 - RNA, 17 nt, Artificial Sequence
  Synthetic
uuccuuuuauucacaaa

SEQ ID NO: 728088 - RNA, 17 nt, Artificial Sequence
  Synthetic
cuugccauuuucacaaa

SEQ ID NO: 728089 - RNA, 17 nt, Artificial Sequence
  Synthetic
uccugugaaaagacaaa

SEQ ID NO: 728090 - RNA, 17 nt, Artificial Sequence
  Synthetic
aauaugucaaagacaaa

SEQ ID NO: 728091 - RNA, 17 nt, Artificial Sequence
  Synthetic
aauuauugaaagacaaa

SEQ ID NO: 728092 - RNA, 17 nt, Artificial Sequence
  Synthetic
ucucaaaagaagacaaa

SEQ ID NO: 728093 - RNA, 17 nt, Artificial Sequence
  Synthetic
uguggagcuaagacaaa

SEQ ID NO: 728094 - RNA, 17 nt, Artificial Sequence
  Synthetic
uaccuacuccagacaaa

SEQ ID NO: 728095 - RNA, 17 nt, Artificial Sequence
  Synthetic
uagcagaaagagacaaa

SEQ ID NO: 728096 - RNA, 17 nt, Artificial Sequence
  Synthetic
aaggaaacugagacaaa

SEQ ID NO: 728097 - RNA, 17 nt, Artificial Sequence
  Synthetic
aagcaaaaauagacaaa

SEQ ID NO: 728098 - RNA, 17 nt, Artificial Sequence
  Synthetic
uaauugcuguagacaaa

SEQ ID NO: 728099 - RNA, 17 nt, Artificial Sequence
  Synthetic
cagugccagacgacaaa

SEQ ID NO: 728100 - RNA, 17 nt, Artificial Sequence
  Synthetic
agauccagaaggacaaa

SEQ ID NO: 728101 - RNA, 17 nt, Artificial Sequence
  Synthetic
cuuuaaagcaggacaaa

SEQ ID NO: 728102 - RNA, 17 nt, Artificial Sequence
  Synthetic
aucuggccuaggacaaa

SEQ ID NO: 728103 - RNA, 17 nt, Artificial Sequence
  Synthetic
aagccaaaacggacaaa

SEQ ID NO: 728104 - RNA, 17 nt, Artificial Sequence
  Synthetic
uagggagaggggacaaa

SEQ ID NO: 728105 - RNA, 17 nt, Artificial Sequence
  Synthetic
uguuuuugggggacaaa

SEQ ID NO: 728106 - RNA, 17 nt, Artificial Sequence
  Synthetic
ucauacagauggacaaa

SEQ ID NO: 728107 - RNA, 17 nt, Artificial Sequence
  Synthetic
caguaugacuggacaaa

SEQ ID NO: 728108 - RNA, 17 nt, Artificial Sequence
  Synthetic
cauuauauaaugacaaa

SEQ ID NO: 728109 - RNA, 17 nt, Artificial Sequence
  Synthetic
ucuauacaucugacaaa

SEQ ID NO: 728110 - RNA, 17 nt, Artificial Sequence
  Synthetic
ucuacccaucugacaaa

SEQ ID NO: 728111 - RNA, 17 nt, Artificial Sequence
  Synthetic
ucuauccaucugacaaa

SEQ ID NO: 728112 - RNA, 17 nt, Artificial Sequence
  Synthetic
ccuacucaucugacaaa

SEQ ID NO: 728113 - RNA, 17 nt, Artificial Sequence
  Synthetic
ucuacucaucugacaaa

SEQ ID NO: 728114 - RNA, 17 nt, Artificial Sequence
  Synthetic
ucuauucaucugacaaa

SEQ ID NO: 728115 - RNA, 17 nt, Artificial Sequence
  Synthetic
auguauucucugacaaa

SEQ ID NO: 728116 - RNA, 17 nt, Artificial Sequence
  Synthetic
cacuuaggggugacaaa

SEQ ID NO: 728117 - RNA, 17 nt, Artificial Sequence
  Synthetic
aagccaaaauugacaaa

SEQ ID NO: 728118 - RNA, 17 nt, Artificial Sequence
  Synthetic
aagccagaauugacaaa

SEQ ID NO: 728119 - RNA, 17 nt, Artificial Sequence
  Synthetic
cucaggcccuugacaaa

SEQ ID NO: 728120 - RNA, 17 nt, Artificial Sequence
  Synthetic
cuauguccuuugacaaa

SEQ ID NO: 728121 - RNA, 17 nt, Artificial Sequence
  Synthetic
agagagguuuugacaaa

SEQ ID NO: 728122 - RNA, 17 nt, Artificial Sequence
  Synthetic
uuaaagaaaaauacaaa

SEQ ID NO: 728123 - RNA, 17 nt, Artificial Sequence
  Synthetic
aaauccccaaauacaaa

SEQ ID NO: 728124 - RNA, 17 nt, Artificial Sequence
  Synthetic
aaauccagaaauacaaa

SEQ ID NO: 728125 - RNA, 17 nt, Artificial Sequence
  Synthetic
aacaugcuaaauacaaa

SEQ ID NO: 728126 - RNA, 17 nt, Artificial Sequence
  Synthetic
uucagauuaaauacaaa

SEQ ID NO: 728127 - RNA, 17 nt, Artificial Sequence
  Synthetic
ugaaacgagaauacaaa

SEQ ID NO: 728128 - RNA, 17 nt, Artificial Sequence
  Synthetic
agccaauggaauacaaa

SEQ ID NO: 728129 - RNA, 17 nt, Artificial Sequence
  Synthetic
caagggcugaauacaaa

SEQ ID NO: 728130 - RNA, 17 nt, Artificial Sequence
  Synthetic
acaagugugaauacaaa

SEQ ID NO: 728131 - RNA, 17 nt, Artificial Sequence
  Synthetic
auaaaggauaauacaaa

SEQ ID NO: 728132 - RNA, 17 nt, Artificial Sequence
  Synthetic
uaaagcaaacauacaaa

SEQ ID NO: 728133 - RNA, 17 nt, Artificial Sequence
  Synthetic
aaaagaagacauacaaa

SEQ ID NO: 728134 - RNA, 17 nt, Artificial Sequence
  Synthetic
ucaagaauacauacaaa

SEQ ID NO: 728135 - RNA, 17 nt, Artificial Sequence
  Synthetic
cuaaauauacauacaaa

SEQ ID NO: 728136 - RNA, 17 nt, Artificial Sequence
  Synthetic
uuauucagccauacaaa

SEQ ID NO: 728137 - RNA, 17 nt, Artificial Sequence
  Synthetic
uguuuugaagauacaaa

SEQ ID NO: 728138 - RNA, 17 nt, Artificial Sequence
  Synthetic
aaaucaaaggauacaaa

SEQ ID NO: 728139 - RNA, 17 nt, Artificial Sequence
  Synthetic
uagaaaguugauacaaa

SEQ ID NO: 728140 - RNA, 17 nt, Artificial Sequence
  Synthetic
cuguaugaauauacaaa

SEQ ID NO: 728141 - RNA, 17 nt, Artificial Sequence
  Synthetic
auggauuaauauacaaa

SEQ ID NO: 728142 - RNA, 17 nt, Artificial Sequence
  Synthetic
uauaguagauauacaaa

SEQ ID NO: 728143 - RNA, 17 nt, Artificial Sequence
  Synthetic
auccauguuccuacaaa

SEQ ID NO: 728144 - RNA, 17 nt, Artificial Sequence
  Synthetic
uuaccagaggcuacaaa

SEQ ID NO: 728145 - RNA, 17 nt, Artificial Sequence
  Synthetic
auaauaauaucuacaaa

SEQ ID NO: 728146 - RNA, 17 nt, Artificial Sequence
  Synthetic
aaguaaaaaaguacaaa

SEQ ID NO: 728147 - RNA, 17 nt, Artificial Sequence
  Synthetic
uuaaauauucguacaaa

SEQ ID NO: 728148 - RNA, 17 nt, Artificial Sequence
  Synthetic
accaccagggguacaaa

SEQ ID NO: 728149 - RNA, 17 nt, Artificial Sequence
  Synthetic
uaaguaucauguacaaa

SEQ ID NO: 728150 - RNA, 17 nt, Artificial Sequence
  Synthetic
ugaguuucauguacaaa

SEQ ID NO: 728151 - RNA, 17 nt, Artificial Sequence
  Synthetic
agaaaaaacuguacaaa

SEQ ID NO: 728152 - RNA, 17 nt, Artificial Sequence
  Synthetic
aauauacccauuacaaa

SEQ ID NO: 728153 - RNA, 17 nt, Artificial Sequence
  Synthetic
auuauuuuacuuacaaa

SEQ ID NO: 728154 - RNA, 17 nt, Artificial Sequence
  Synthetic
uuuuugcugcuuacaaa

SEQ ID NO: 728155 - RNA, 17 nt, Artificial Sequence
  Synthetic
aaaauauugcuuacaaa

SEQ ID NO: 728156 - RNA, 17 nt, Artificial Sequence
  Synthetic
ugacuuaaaguuacaaa

SEQ ID NO: 728157 - RNA, 17 nt, Artificial Sequence
  Synthetic
uuguauguauuuacaaa

SEQ ID NO: 728158 - RNA, 17 nt, Artificial Sequence
  Synthetic
aaaccucacuuuacaaa

SEQ ID NO: 728159 - RNA, 17 nt, Artificial Sequence
  Synthetic
ucaaccuucuuuacaaa

SEQ ID NO: 728160 - RNA, 17 nt, Artificial Sequence
  Synthetic
uuaacauauuuuacaaa

SEQ ID NO: 728161 - RNA, 17 nt, Artificial Sequence
  Synthetic
auccacauuaaaccaaa

SEQ ID NO: 728162 - RNA, 17 nt, Artificial Sequence
  Synthetic
augucuauucaaccaaa

SEQ ID NO: 728163 - RNA, 17 nt, Artificial Sequence
  Synthetic
aaacuacaagaaccaaa

SEQ ID NO: 728164 - RNA, 17 nt, Artificial Sequence
  Synthetic
cuagcuauauaaccaaa

SEQ ID NO: 728165 - RNA, 17 nt, Artificial Sequence
  Synthetic
aacagacaaacaccaaa

SEQ ID NO: 728166 - RNA, 17 nt, Artificial Sequence
  Synthetic
auugaauugacaccaaa

SEQ ID NO: 728167 - RNA, 17 nt, Artificial Sequence
  Synthetic
caaugaccuacaccaaa

SEQ ID NO: 728168 - RNA, 17 nt, Artificial Sequence
  Synthetic
auuaaacauccaccaaa

SEQ ID NO: 728169 - RNA, 17 nt, Artificial Sequence
  Synthetic
aagggcagcucaccaaa

SEQ ID NO: 728170 - RNA, 17 nt, Artificial Sequence
  Synthetic
auaagccagucaccaaa

SEQ ID NO: 728171 - RNA, 17 nt, Artificial Sequence
  Synthetic
uauauucugucaccaaa

SEQ ID NO: 728172 - RNA, 17 nt, Artificial Sequence
  Synthetic
acuaacuugucaccaaa

SEQ ID NO: 728173 - RNA, 17 nt, Artificial Sequence
  Synthetic
auaauauauucaccaaa

SEQ ID NO: 728174 - RNA, 17 nt, Artificial Sequence
  Synthetic
acuugagcuucaccaaa

SEQ ID NO: 728175 - RNA, 17 nt, Artificial Sequence
  Synthetic
uuccaacagagaccaaa

SEQ ID NO: 728176 - RNA, 17 nt, Artificial Sequence
  Synthetic
ugacauuuuagaccaaa

SEQ ID NO: 728177 - RNA, 17 nt, Artificial Sequence
  Synthetic
aguauugaaugaccaaa

SEQ ID NO: 728178 - RNA, 17 nt, Artificial Sequence
  Synthetic
aaugccaucauaccaaa

SEQ ID NO: 728179 - RNA, 17 nt, Artificial Sequence
  Synthetic
ugccagaaccuaccaaa

SEQ ID NO: 728180 - RNA, 17 nt, Artificial Sequence
  Synthetic
aaacaaggaguaccaaa

SEQ ID NO: 728181 - RNA, 17 nt, Artificial Sequence
  Synthetic
aguuuuaaauuaccaaa

SEQ ID NO: 728182 - RNA, 17 nt, Artificial Sequence
  Synthetic
caagcuaaguuaccaaa

SEQ ID NO: 728183 - RNA, 17 nt, Artificial Sequence
  Synthetic
acuauacauuuaccaaa

SEQ ID NO: 728184 - RNA, 17 nt, Artificial Sequence
  Synthetic
uaaagagcucacccaaa

SEQ ID NO: 728185 - RNA, 17 nt, Artificial Sequence
  Synthetic
cccaccaccaccccaaa

SEQ ID NO: 728186 - RNA, 17 nt, Artificial Sequence
  Synthetic
uccuaauagaccccaaa

SEQ ID NO: 728187 - RNA, 17 nt, Artificial Sequence
  Synthetic
ucuuaauaucccccaaa

SEQ ID NO: 728188 - RNA, 17 nt, Artificial Sequence
  Synthetic
cugaaauccuccccaaa

SEQ ID NO: 728189 - RNA, 17 nt, Artificial Sequence
  Synthetic
uucaguuucagcccaaa

SEQ ID NO: 728190 - RNA, 17 nt, Artificial Sequence
  Synthetic
uuguauaaaugcccaaa

SEQ ID NO: 728191 - RNA, 17 nt, Artificial Sequence
  Synthetic
ccuggggugugcccaaa

SEQ ID NO: 728192 - RNA, 17 nt, Artificial Sequence
  Synthetic
ccauuuuacaucccaaa

SEQ ID NO: 728193 - RNA, 17 nt, Artificial Sequence
  Synthetic
cccuggccccucccaaa

SEQ ID NO: 728194 - RNA, 17 nt, Artificial Sequence
  Synthetic
aauuauccagucccaaa

SEQ ID NO: 728195 - RNA, 17 nt, Artificial Sequence
  Synthetic
ucaauuuauuucccaaa

SEQ ID NO: 728196 - RNA, 17 nt, Artificial Sequence
  Synthetic
aaaaaaaaaaagccaaa

SEQ ID NO: 728197 - RNA, 17 nt, Artificial Sequence
  Synthetic
uuagcacaaaagccaaa

SEQ ID NO: 728198 - RNA, 17 nt, Artificial Sequence
  Synthetic
accaacuggaagccaaa

SEQ ID NO: 728199 - RNA, 17 nt, Artificial Sequence
  Synthetic
aacuuccagcagccaaa

SEQ ID NO: 728200 - RNA, 17 nt, Artificial Sequence
  Synthetic
aaccucccucagccaaa

SEQ ID NO: 728201 - RNA, 17 nt, Artificial Sequence
  Synthetic
uugacaaaauagccaaa

SEQ ID NO: 728202 - RNA, 17 nt, Artificial Sequence
  Synthetic
caacagaaauagccaaa

SEQ ID NO: 728203 - RNA, 17 nt, Artificial Sequence
  Synthetic
acccucuacccgccaaa

SEQ ID NO: 728204 - RNA, 17 nt, Artificial Sequence
  Synthetic
aaaaaaaacaggccaaa

SEQ ID NO: 728205 - RNA, 17 nt, Artificial Sequence
  Synthetic
acacacccugggccaaa

SEQ ID NO: 728206 - RNA, 17 nt, Artificial Sequence
  Synthetic
uaacauuuugggccaaa

SEQ ID NO: 728207 - RNA, 17 nt, Artificial Sequence
  Synthetic
cugaacaccuggccaaa

SEQ ID NO: 728208 - RNA, 17 nt, Artificial Sequence
  Synthetic
agaccagccuggccaaa

SEQ ID NO: 728209 - RNA, 17 nt, Artificial Sequence
  Synthetic
aagauagaguggccaaa

SEQ ID NO: 728210 - RNA, 17 nt, Artificial Sequence
  Synthetic
acucacuauaugccaaa

SEQ ID NO: 728211 - RNA, 17 nt, Artificial Sequence
  Synthetic
cauagggcucugccaaa

SEQ ID NO: 728212 - RNA, 17 nt, Artificial Sequence
  Synthetic
uacuaaauagugccaaa

SEQ ID NO: 728213 - RNA, 17 nt, Artificial Sequence
  Synthetic
caguuccuggugccaaa

SEQ ID NO: 728214 - RNA, 17 nt, Artificial Sequence
  Synthetic
caaguuccauugccaaa

SEQ ID NO: 728215 - RNA, 17 nt, Artificial Sequence
  Synthetic
ccaaguaauuugccaaa

SEQ ID NO: 728216 - RNA, 17 nt, Artificial Sequence
  Synthetic
ccuaccccaaauccaaa

SEQ ID NO: 728217 - RNA, 17 nt, Artificial Sequence
  Synthetic
aaaauaagaaauccaaa

SEQ ID NO: 728218 - RNA, 17 nt, Artificial Sequence
  Synthetic
aaauacuagaauccaaa

SEQ ID NO: 728219 - RNA, 17 nt, Artificial Sequence
  Synthetic
aaaggcuguaauccaaa

SEQ ID NO: 728220 - RNA, 17 nt, Artificial Sequence
  Synthetic
ccaugaaaccauccaaa

SEQ ID NO: 728221 - RNA, 17 nt, Artificial Sequence
  Synthetic
uuuagggaauauccaaa

SEQ ID NO: 728222 - RNA, 17 nt, Artificial Sequence
  Synthetic
uacugggaaacuccaaa

SEQ ID NO: 728223 - RNA, 17 nt, Artificial Sequence
  Synthetic
uaaaaaucaacuccaaa

SEQ ID NO: 728224 - RNA, 17 nt, Artificial Sequence
  Synthetic
auggaugugacuccaaa

SEQ ID NO: 728225 - RNA, 17 nt, Artificial Sequence
  Synthetic
uuugaggaaccuccaaa

SEQ ID NO: 728226 - RNA, 17 nt, Artificial Sequence
  Synthetic
aguagauuuccuccaaa

SEQ ID NO: 728227 - RNA, 17 nt, Artificial Sequence
  Synthetic
uauauguggucuccaaa

SEQ ID NO: 728228 - RNA, 17 nt, Artificial Sequence
  Synthetic
uaaaggaguucuccaaa

SEQ ID NO: 728229 - RNA, 17 nt, Artificial Sequence
  Synthetic
uagcugauuucuccaaa

SEQ ID NO: 728230 - RNA, 17 nt, Artificial Sequence
  Synthetic
cucagucucuguccaaa

SEQ ID NO: 728231 - RNA, 17 nt, Artificial Sequence
  Synthetic
uuaggcaaaauuccaaa

SEQ ID NO: 728232 - RNA, 17 nt, Artificial Sequence
  Synthetic
augauccaaauuccaaa

SEQ ID NO: 728233 - RNA, 17 nt, Artificial Sequence
  Synthetic
cagaacuggcuuccaaa

SEQ ID NO: 728234 - RNA, 17 nt, Artificial Sequence
  Synthetic
aguccuucauuuccaaa

SEQ ID NO: 728235 - RNA, 17 nt, Artificial Sequence
  Synthetic
auccuagacuuuccaaa

SEQ ID NO: 728236 - RNA, 17 nt, Artificial Sequence
  Synthetic
auuauuuucuuuccaaa

SEQ ID NO: 728237 - RNA, 17 nt, Artificial Sequence
  Synthetic
aguuuucuuuuuccaaa

SEQ ID NO: 728238 - RNA, 17 nt, Artificial Sequence
  Synthetic
cauauagccaaagcaaa

SEQ ID NO: 728239 - RNA, 17 nt, Artificial Sequence
  Synthetic
cauaggcucaaagcaaa

SEQ ID NO: 728240 - RNA, 17 nt, Artificial Sequence
  Synthetic
ucaugguggaaagcaaa

SEQ ID NO: 728241 - RNA, 17 nt, Artificial Sequence
  Synthetic
acaacgucuaaagcaaa

SEQ ID NO: 728242 - RNA, 17 nt, Artificial Sequence
  Synthetic
ucaaauauuaaagcaaa

SEQ ID NO: 728243 - RNA, 17 nt, Artificial Sequence
  Synthetic
cagagcagacaagcaaa

SEQ ID NO: 728244 - RNA, 17 nt, Artificial Sequence
  Synthetic
ccuuaaaaccaagcaaa

SEQ ID NO: 728245 - RNA, 17 nt, Artificial Sequence
  Synthetic
aagaucuaccaagcaaa

SEQ ID NO: 728246 - RNA, 17 nt, Artificial Sequence
  Synthetic
aauauuuuccaagcaaa

SEQ ID NO: 728247 - RNA, 17 nt, Artificial Sequence
  Synthetic
uguucauagcaagcaaa

SEQ ID NO: 728248 - RNA, 17 nt, Artificial Sequence
  Synthetic
aaagauaaagaagcaaa

SEQ ID NO: 728249 - RNA, 17 nt, Artificial Sequence
  Synthetic
ucacagugagaagcaaa

SEQ ID NO: 728250 - RNA, 17 nt, Artificial Sequence
  Synthetic
cccaugaaugaagcaaa

SEQ ID NO: 728251 - RNA, 17 nt, Artificial Sequence
  Synthetic
ugagauucugaagcaaa

SEQ ID NO: 728252 - RNA, 17 nt, Artificial Sequence
  Synthetic
cauggagcauaagcaaa

SEQ ID NO: 728253 - RNA, 17 nt, Artificial Sequence
  Synthetic
ccauuaucuuaagcaaa

SEQ ID NO: 728254 - RNA, 17 nt, Artificial Sequence
  Synthetic
cuuugucuuuaagcaaa

SEQ ID NO: 728255 - RNA, 17 nt, Artificial Sequence
  Synthetic
uuacaagcaacagcaaa

SEQ ID NO: 728256 - RNA, 17 nt, Artificial Sequence
  Synthetic
uucuaaaauacagcaaa

SEQ ID NO: 728257 - RNA, 17 nt, Artificial Sequence
  Synthetic
aguaacuaaccagcaaa

SEQ ID NO: 728258 - RNA, 17 nt, Artificial Sequence
  Synthetic
agagauggaccagcaaa

SEQ ID NO: 728259 - RNA, 17 nt, Artificial Sequence
  Synthetic
cauggaaaagcagcaaa

SEQ ID NO: 728260 - RNA, 17 nt, Artificial Sequence
  Synthetic
auuuaccaagcagcaaa

SEQ ID NO: 728261 - RNA, 17 nt, Artificial Sequence
  Synthetic
uacuccagggcagcaaa

SEQ ID NO: 728262 - RNA, 17 nt, Artificial Sequence
  Synthetic
auggggaaaagagcaaa

SEQ ID NO: 728263 - RNA, 17 nt, Artificial Sequence
  Synthetic
ugucauuggagagcaaa

SEQ ID NO: 728264 - RNA, 17 nt, Artificial Sequence
  Synthetic
cuggaacugagagcaaa

SEQ ID NO: 728265 - RNA, 17 nt, Artificial Sequence
  Synthetic
auauuuuugagagcaaa

SEQ ID NO: 728266 - RNA, 17 nt, Artificial Sequence
  Synthetic
acccuccccugagcaaa

SEQ ID NO: 728267 - RNA, 17 nt, Artificial Sequence
  Synthetic
uacagaacccuagcaaa

SEQ ID NO: 728268 - RNA, 17 nt, Artificial Sequence
  Synthetic
uuuuacaaucuagcaaa

SEQ ID NO: 728269 - RNA, 17 nt, Artificial Sequence
  Synthetic
aauguauuucuagcaaa

SEQ ID NO: 728270 - RNA, 17 nt, Artificial Sequence
  Synthetic
acacugagcguagcaaa

SEQ ID NO: 728271 - RNA, 17 nt, Artificial Sequence
  Synthetic
aucccaaagguagcaaa

SEQ ID NO: 728272 - RNA, 17 nt, Artificial Sequence
  Synthetic
cagaguuacuuagcaaa

SEQ ID NO: 728273 - RNA, 17 nt, Artificial Sequence
  Synthetic
uuauuuuucuuagcaaa

SEQ ID NO: 728274 - RNA, 17 nt, Artificial Sequence
  Synthetic
uccauaagguuagcaaa

SEQ ID NO: 728275 - RNA, 17 nt, Artificial Sequence
  Synthetic
ugauuugcuuuagcaaa

SEQ ID NO: 728276 - RNA, 17 nt, Artificial Sequence
  Synthetic
ucgagcagaaaggcaaa

SEQ ID NO: 728277 - RNA, 17 nt, Artificial Sequence
  Synthetic
cuaugauacaaggcaaa

SEQ ID NO: 728278 - RNA, 17 nt, Artificial Sequence
  Synthetic
ccaugguggaaggcaaa

SEQ ID NO: 728279 - RNA, 17 nt, Artificial Sequence
  Synthetic
aaauauaugaaggcaaa

SEQ ID NO: 728280 - RNA, 17 nt, Artificial Sequence
  Synthetic
ucagucuugcaggcaaa

SEQ ID NO: 728281 - RNA, 17 nt, Artificial Sequence
  Synthetic
aaggggacagaggcaaa

SEQ ID NO: 728282 - RNA, 17 nt, Artificial Sequence
  Synthetic
cuauacuacgaggcaaa

SEQ ID NO: 728283 - RNA, 17 nt, Artificial Sequence
  Synthetic
ugcgaggccgaggcaaa

SEQ ID NO: 728284 - RNA, 17 nt, Artificial Sequence
  Synthetic
ugcagaugggaggcaaa

SEQ ID NO: 728285 - RNA, 17 nt, Artificial Sequence
  Synthetic
uugccucuggaggcaaa

SEQ ID NO: 728286 - RNA, 17 nt, Artificial Sequence
  Synthetic
ugccaugaugaggcaaa

SEQ ID NO: 728287 - RNA, 17 nt, Artificial Sequence
  Synthetic
uaccaaauugaggcaaa

SEQ ID NO: 728288 - RNA, 17 nt, Artificial Sequence
  Synthetic
uauuccacguaggcaaa

SEQ ID NO: 728289 - RNA, 17 nt, Artificial Sequence
  Synthetic
uaaccugcuuaggcaaa

SEQ ID NO: 728290 - RNA, 17 nt, Artificial Sequence
  Synthetic
ccaccagcaagggcaaa

SEQ ID NO: 728291 - RNA, 17 nt, Artificial Sequence
  Synthetic
ucauggugaagggcaaa

SEQ ID NO: 728292 - RNA, 17 nt, Artificial Sequence
  Synthetic
ucuaagaacagggcaaa

SEQ ID NO: 728293 - RNA, 17 nt, Artificial Sequence
  Synthetic
cuuagguauggggcaaa

SEQ ID NO: 728294 - RNA, 17 nt, Artificial Sequence
  Synthetic
ucaauaaaaugggcaaa

SEQ ID NO: 728295 - RNA, 17 nt, Artificial Sequence
  Synthetic
cgcaggaguugggcaaa

SEQ ID NO: 728296 - RNA, 17 nt, Artificial Sequence
  Synthetic
acaucuugaauggcaaa

SEQ ID NO: 728297 - RNA, 17 nt, Artificial Sequence
  Synthetic
uuaccuuacauggcaaa

SEQ ID NO: 728298 - RNA, 17 nt, Artificial Sequence
  Synthetic
cucacaugcauggcaaa

SEQ ID NO: 728299 - RNA, 17 nt, Artificial Sequence
  Synthetic
cugcaagagauggcaaa

SEQ ID NO: 728300 - RNA, 17 nt, Artificial Sequence
  Synthetic
aaauaccauauggcaaa

SEQ ID NO: 728301 - RNA, 17 nt, Artificial Sequence
  Synthetic
aauaagcugguggcaaa

SEQ ID NO: 728302 - RNA, 17 nt, Artificial Sequence
  Synthetic
augacuauaaaugcaaa

SEQ ID NO: 728303 - RNA, 17 nt, Artificial Sequence
  Synthetic
uggucucuaaaugcaaa

SEQ ID NO: 728304 - RNA, 17 nt, Artificial Sequence
  Synthetic
auuaccuuaaaugcaaa

SEQ ID NO: 728305 - RNA, 17 nt, Artificial Sequence
  Synthetic
uguucauuacaugcaaa

SEQ ID NO: 728306 - RNA, 17 nt, Artificial Sequence
  Synthetic
aagauacuccaugcaaa

SEQ ID NO: 728307 - RNA, 17 nt, Artificial Sequence
  Synthetic
uuugguuuccaugcaaa

SEQ ID NO: 728308 - RNA, 17 nt, Artificial Sequence
  Synthetic
uuugaauuuuaugcaaa

SEQ ID NO: 728309 - RNA, 17 nt, Artificial Sequence
  Synthetic
accauguaaacugcaaa

SEQ ID NO: 728310 - RNA, 17 nt, Artificial Sequence
  Synthetic
uuugaauauacugcaaa

SEQ ID NO: 728311 - RNA, 17 nt, Artificial Sequence
  Synthetic
aucucuuuuacugcaaa

SEQ ID NO: 728312 - RNA, 17 nt, Artificial Sequence
  Synthetic
uucaaaugagcugcaaa

SEQ ID NO: 728313 - RNA, 17 nt, Artificial Sequence
  Synthetic
auuguacauucugcaaa

SEQ ID NO: 728314 - RNA, 17 nt, Artificial Sequence
  Synthetic
ccauuuucuucugcaaa

SEQ ID NO: 728315 - RNA, 17 nt, Artificial Sequence
  Synthetic
uaauggugaagugcaaa

SEQ ID NO: 728316 - RNA, 17 nt, Artificial Sequence
  Synthetic
uuauauguaagugcaaa

SEQ ID NO: 728317 - RNA, 17 nt, Artificial Sequence
  Synthetic
uugguguucagugcaaa

SEQ ID NO: 728318 - RNA, 17 nt, Artificial Sequence
  Synthetic
aggauggggagugcaaa

SEQ ID NO: 728319 - RNA, 17 nt, Artificial Sequence
  Synthetic
uauaguaagugugcaaa

SEQ ID NO: 728320 - RNA, 17 nt, Artificial Sequence
  Synthetic
auucucauuauugcaaa

SEQ ID NO: 728321 - RNA, 17 nt, Artificial Sequence
  Synthetic
accauguggcuugcaaa

SEQ ID NO: 728322 - RNA, 17 nt, Artificial Sequence
  Synthetic
uauuguuguguugcaaa

SEQ ID NO: 728323 - RNA, 17 nt, Artificial Sequence
  Synthetic
caaucaucauuugcaaa

SEQ ID NO: 728324 - RNA, 17 nt, Artificial Sequence
  Synthetic
cuuaaauuguuugcaaa

SEQ ID NO: 728325 - RNA, 17 nt, Artificial Sequence
  Synthetic
aaucuguauuuugcaaa

SEQ ID NO: 728326 - RNA, 17 nt, Artificial Sequence
  Synthetic
auucauugaaaaucaaa

SEQ ID NO: 728327 - RNA, 17 nt, Artificial Sequence
  Synthetic
uacauguucaaaucaaa

SEQ ID NO: 728328 - RNA, 17 nt, Artificial Sequence
  Synthetic
uauauaccuaaaucaaa

SEQ ID NO: 728329 - RNA, 17 nt, Artificial Sequence
  Synthetic
cuauaauaacaaucaaa

SEQ ID NO: 728330 - RNA, 17 nt, Artificial Sequence
  Synthetic
aacaauaaccaaucaaa

SEQ ID NO: 728331 - RNA, 17 nt, Artificial Sequence
  Synthetic
ucagcaagccaaucaaa

SEQ ID NO: 728332 - RNA, 17 nt, Artificial Sequence
  Synthetic
uaaacucuccaaucaaa

SEQ ID NO: 728333 - RNA, 17 nt, Artificial Sequence
  Synthetic
aaacucaagcaaucaaa

SEQ ID NO: 728334 - RNA, 17 nt, Artificial Sequence
  Synthetic
aacuguguucaaucaaa

SEQ ID NO: 728335 - RNA, 17 nt, Artificial Sequence
  Synthetic
acaaaccuagaaucaaa

SEQ ID NO: 728336 - RNA, 17 nt, Artificial Sequence
  Synthetic
caagcuuaggaaucaaa

SEQ ID NO: 728337 - RNA, 17 nt, Artificial Sequence
  Synthetic
uuugagagggaaucaaa

SEQ ID NO: 728338 - RNA, 17 nt, Artificial Sequence
  Synthetic
aaagcacuggaaucaaa

SEQ ID NO: 728339 - RNA, 17 nt, Artificial Sequence
  Synthetic
acggucacauaaucaaa

SEQ ID NO: 728340 - RNA, 17 nt, Artificial Sequence
  Synthetic
uuuuuuuuuuaaucaaa

SEQ ID NO: 728341 - RNA, 17 nt, Artificial Sequence
  Synthetic
cucaagaaaacaucaaa

SEQ ID NO: 728342 - RNA, 17 nt, Artificial Sequence
  Synthetic
acagaaauaacaucaaa

SEQ ID NO: 728343 - RNA, 17 nt, Artificial Sequence
  Synthetic
aaaaugauaacaucaaa

SEQ ID NO: 728344 - RNA, 17 nt, Artificial Sequence
  Synthetic
aagauaaauacaucaaa

SEQ ID NO: 728345 - RNA, 17 nt, Artificial Sequence
  Synthetic
cagaaucaaccaucaaa

SEQ ID NO: 728346 - RNA, 17 nt, Artificial Sequence
  Synthetic
uuggcauaaccaucaaa

SEQ ID NO: 728347 - RNA, 17 nt, Artificial Sequence
  Synthetic
aaggacaugccaucaaa

SEQ ID NO: 728348 - RNA, 17 nt, Artificial Sequence
  Synthetic
ucuggcccuccaucaaa

SEQ ID NO: 728349 - RNA, 17 nt, Artificial Sequence
  Synthetic
ccugaauguccaucaaa

SEQ ID NO: 728350 - RNA, 17 nt, Artificial Sequence
  Synthetic
uuuccaugggcaucaaa

SEQ ID NO: 728351 - RNA, 17 nt, Artificial Sequence
  Synthetic
uaaacccauucaucaaa

SEQ ID NO: 728352 - RNA, 17 nt, Artificial Sequence
  Synthetic
aaaacaaaaagaucaaa

SEQ ID NO: 728353 - RNA, 17 nt, Artificial Sequence
  Synthetic
ucaacaccaagaucaaa

SEQ ID NO: 728354 - RNA, 17 nt, Artificial Sequence
  Synthetic
uggagugacugaucaaa

SEQ ID NO: 728355 - RNA, 17 nt, Artificial Sequence
  Synthetic
aaaacaaauugaucaaa

SEQ ID NO: 728356 - RNA, 17 nt, Artificial Sequence
  Synthetic
uguauuucaauaucaaa

SEQ ID NO: 728357 - RNA, 17 nt, Artificial Sequence
  Synthetic
aguuuucuaauaucaaa

SEQ ID NO: 728358 - RNA, 17 nt, Artificial Sequence
  Synthetic
aaaaauuuucuaucaaa

SEQ ID NO: 728359 - RNA, 17 nt, Artificial Sequence
  Synthetic
aauaauuauuuaucaaa

SEQ ID NO: 728360 - RNA, 17 nt, Artificial Sequence
  Synthetic
auaguagaaaacucaaa

SEQ ID NO: 728361 - RNA, 17 nt, Artificial Sequence
  Synthetic
cuuaacaaagacucaaa

SEQ ID NO: 728362 - RNA, 17 nt, Artificial Sequence
  Synthetic
uauuuuaaugacucaaa

SEQ ID NO: 728363 - RNA, 17 nt, Artificial Sequence
  Synthetic
agugcauaugacucaaa

SEQ ID NO: 728364 - RNA, 17 nt, Artificial Sequence
  Synthetic
auuuuagaauacucaaa

SEQ ID NO: 728365 - RNA, 17 nt, Artificial Sequence
  Synthetic
ugcacaagauacucaaa

SEQ ID NO: 728366 - RNA, 17 nt, Artificial Sequence
  Synthetic
agcugguuauacucaaa

SEQ ID NO: 728367 - RNA, 17 nt, Artificial Sequence
  Synthetic
aguauuuuauacucaaa

SEQ ID NO: 728368 - RNA, 17 nt, Artificial Sequence
  Synthetic
aacauaacuuacucaaa

SEQ ID NO: 728369 - RNA, 17 nt, Artificial Sequence
  Synthetic
uagaacauuuacucaaa

SEQ ID NO: 728370 - RNA, 17 nt, Artificial Sequence
  Synthetic
uauuaaccuaccucaaa

SEQ ID NO: 728371 - RNA, 17 nt, Artificial Sequence
  Synthetic
uaaaauaaagccucaaa

SEQ ID NO: 728372 - RNA, 17 nt, Artificial Sequence
  Synthetic
cagaaaauagccucaaa

SEQ ID NO: 728373 - RNA, 17 nt, Artificial Sequence
  Synthetic
aucuguugauccucaaa

SEQ ID NO: 728374 - RNA, 17 nt, Artificial Sequence
  Synthetic
ucauuuaaaggcucaaa

SEQ ID NO: 728375 - RNA, 17 nt, Artificial Sequence
  Synthetic
uccuaaauuggcucaaa

SEQ ID NO: 728376 - RNA, 17 nt, Artificial Sequence
  Synthetic
cgagacuccaucucaaa

SEQ ID NO: 728377 - RNA, 17 nt, Artificial Sequence
  Synthetic
uucacguggaucucaaa

SEQ ID NO: 728378 - RNA, 17 nt, Artificial Sequence
  Synthetic
ucucccacacucucaaa

SEQ ID NO: 728379 - RNA, 17 nt, Artificial Sequence
  Synthetic
cucuuuucacucucaaa

SEQ ID NO: 728380 - RNA, 17 nt, Artificial Sequence
  Synthetic
ccccuuauacucucaaa

SEQ ID NO: 728381 - RNA, 17 nt, Artificial Sequence
  Synthetic
uagucucugcucucaaa

SEQ ID NO: 728382 - RNA, 17 nt, Artificial Sequence
  Synthetic
cuuuugagucucucaaa

SEQ ID NO: 728383 - RNA, 17 nt, Artificial Sequence
  Synthetic
ccuuuccuucucucaaa

SEQ ID NO: 728384 - RNA, 17 nt, Artificial Sequence
  Synthetic
cugugucuucucucaaa

SEQ ID NO: 728385 - RNA, 17 nt, Artificial Sequence
  Synthetic
cauaauacagucucaaa

SEQ ID NO: 728386 - RNA, 17 nt, Artificial Sequence
  Synthetic
uuuauaauuuucucaaa

SEQ ID NO: 728387 - RNA, 17 nt, Artificial Sequence
  Synthetic
acaacuggcaagucaaa

SEQ ID NO: 728388 - RNA, 17 nt, Artificial Sequence
  Synthetic
cacccuggcaagucaaa

SEQ ID NO: 728389 - RNA, 17 nt, Artificial Sequence
  Synthetic
aauucucauaagucaaa

SEQ ID NO: 728390 - RNA, 17 nt, Artificial Sequence
  Synthetic
ccuaccuuaacgucaaa

SEQ ID NO: 728391 - RNA, 17 nt, Artificial Sequence
  Synthetic
ccagaagaagggucaaa

SEQ ID NO: 728392 - RNA, 17 nt, Artificial Sequence
  Synthetic
ccauaucauuggucaaa

SEQ ID NO: 728393 - RNA, 17 nt, Artificial Sequence
  Synthetic
ugaguaaagaugucaaa

SEQ ID NO: 728394 - RNA, 17 nt, Artificial Sequence
  Synthetic
ugagcucaacugucaaa

SEQ ID NO: 728395 - RNA, 17 nt, Artificial Sequence
  Synthetic
agguagaaccugucaaa

SEQ ID NO: 728396 - RNA, 17 nt, Artificial Sequence
  Synthetic
ucaggucacuugucaaa

SEQ ID NO: 728397 - RNA, 17 nt, Artificial Sequence
  Synthetic
uuucucuuuuugucaaa

SEQ ID NO: 728398 - RNA, 17 nt, Artificial Sequence
  Synthetic
acuguaacaaauucaaa

SEQ ID NO: 728399 - RNA, 17 nt, Artificial Sequence
  Synthetic
cuaaaacuaaauucaaa

SEQ ID NO: 728400 - RNA, 17 nt, Artificial Sequence
  Synthetic
uuccaccucaauucaaa

SEQ ID NO: 728401 - RNA, 17 nt, Artificial Sequence
  Synthetic
aaacugaagaauucaaa

SEQ ID NO: 728402 - RNA, 17 nt, Artificial Sequence
  Synthetic
uaugaagaagauucaaa

SEQ ID NO: 728403 - RNA, 17 nt, Artificial Sequence
  Synthetic
aucuauugagauucaaa

SEQ ID NO: 728404 - RNA, 17 nt, Artificial Sequence
  Synthetic
uuuucuuuagauucaaa

SEQ ID NO: 728405 - RNA, 17 nt, Artificial Sequence
  Synthetic
uauguuauauauucaaa

SEQ ID NO: 728406 - RNA, 17 nt, Artificial Sequence
  Synthetic
cucuccagguauucaaa

SEQ ID NO: 728407 - RNA, 17 nt, Artificial Sequence
  Synthetic
agcaauguguauucaaa

SEQ ID NO: 728408 - RNA, 17 nt, Artificial Sequence
  Synthetic
uaauccaauuauucaaa

SEQ ID NO: 728409 - RNA, 17 nt, Artificial Sequence
  Synthetic
caugaacaaacuucaaa

SEQ ID NO: 728410 - RNA, 17 nt, Artificial Sequence
  Synthetic
cagaacuuuacuucaaa

SEQ ID NO: 728411 - RNA, 17 nt, Artificial Sequence
  Synthetic
uagauuucuccuucaaa

SEQ ID NO: 728412 - RNA, 17 nt, Artificial Sequence
  Synthetic
acauauguagcuucaaa

SEQ ID NO: 728413 - RNA, 17 nt, Artificial Sequence
  Synthetic
aagccaacaucuucaaa

SEQ ID NO: 728414 - RNA, 17 nt, Artificial Sequence
  Synthetic
uggcuaugaucuucaaa

SEQ ID NO: 728415 - RNA, 17 nt, Artificial Sequence
  Synthetic
cucugcuuuucuucaaa

SEQ ID NO: 728416 - RNA, 17 nt, Artificial Sequence
  Synthetic
cuccaucauaguucaaa

SEQ ID NO: 728417 - RNA, 17 nt, Artificial Sequence
  Synthetic
aaaagaggugguucaaa

SEQ ID NO: 728418 - RNA, 17 nt, Artificial Sequence
  Synthetic
uuucuauacuguucaaa

SEQ ID NO: 728419 - RNA, 17 nt, Artificial Sequence
  Synthetic
cugaggaacauuucaaa

SEQ ID NO: 728420 - RNA, 17 nt, Artificial Sequence
  Synthetic
auuuuauagauuucaaa

SEQ ID NO: 728421 - RNA, 17 nt, Artificial Sequence
  Synthetic
uuaaggucgauuucaaa

SEQ ID NO: 728422 - RNA, 17 nt, Artificial Sequence
  Synthetic
aauaaugugauuucaaa

SEQ ID NO: 728423 - RNA, 17 nt, Artificial Sequence
  Synthetic
auagcuuugauuucaaa

SEQ ID NO: 728424 - RNA, 17 nt, Artificial Sequence
  Synthetic
auuguuaauauuucaaa

SEQ ID NO: 728425 - RNA, 17 nt, Artificial Sequence
  Synthetic
auaugugguauuucaaa

SEQ ID NO: 728426 - RNA, 17 nt, Artificial Sequence
  Synthetic
cgcuauauuauuucaaa

SEQ ID NO: 728427 - RNA, 17 nt, Artificial Sequence
  Synthetic
ucuuuuguuauuucaaa

SEQ ID NO: 728428 - RNA, 17 nt, Artificial Sequence
  Synthetic
uagauccuacuuucaaa

SEQ ID NO: 728429 - RNA, 17 nt, Artificial Sequence
  Synthetic
aaguuagugcuuucaaa

SEQ ID NO: 728430 - RNA, 17 nt, Artificial Sequence
  Synthetic
uugucaagucuuucaaa

SEQ ID NO: 728431 - RNA, 17 nt, Artificial Sequence
  Synthetic
uuaguuauucuuucaaa

SEQ ID NO: 728432 - RNA, 17 nt, Artificial Sequence
  Synthetic
uuauuucuucuuucaaa

SEQ ID NO: 728433 - RNA, 17 nt, Artificial Sequence
  Synthetic
aauauagaaguuucaaa

SEQ ID NO: 728434 - RNA, 17 nt, Artificial Sequence
  Synthetic
uugugccaguuuucaaa

SEQ ID NO: 728435 - RNA, 17 nt, Artificial Sequence
  Synthetic
cuuccaucuuuuucaaa

SEQ ID NO: 728436 - RNA, 17 nt, Artificial Sequence
  Synthetic
aaacacauuuuuucaaa

SEQ ID NO: 728437 - RNA, 17 nt, Artificial Sequence
  Synthetic
cuucuuguuuuuucaaa

SEQ ID NO: 728438 - RNA, 17 nt, Artificial Sequence
  Synthetic
acugauuuuuuuucaaa

SEQ ID NO: 728439 - RNA, 17 nt, Artificial Sequence
  Synthetic
auucaccaaaaaagaaa

SEQ ID NO: 728440 - RNA, 17 nt, Artificial Sequence
  Synthetic
auacacuaaaaaagaaa

SEQ ID NO: 728441 - RNA, 17 nt, Artificial Sequence
  Synthetic
auuaucagcaaaagaaa

SEQ ID NO: 728442 - RNA, 17 nt, Artificial Sequence
  Synthetic
uacauacucaaaagaaa

SEQ ID NO: 728443 - RNA, 17 nt, Artificial Sequence
  Synthetic
ucccauuucaaaagaaa

SEQ ID NO: 728444 - RNA, 17 nt, Artificial Sequence
  Synthetic
aaaaaaaagaaaagaaa

SEQ ID NO: 728445 - RNA, 17 nt, Artificial Sequence
  Synthetic
caaaaaauacaaagaaa

SEQ ID NO: 728446 - RNA, 17 nt, Artificial Sequence
  Synthetic
aaaacccuccaaagaaa

SEQ ID NO: 728447 - RNA, 17 nt, Artificial Sequence
  Synthetic
cccuuccaagaaagaaa

SEQ ID NO: 728448 - RNA, 17 nt, Artificial Sequence
  Synthetic
aaacaugcagaaagaaa

SEQ ID NO: 728449 - RNA, 17 nt, Artificial Sequence
  Synthetic
aggugaguagaaagaaa

SEQ ID NO: 728450 - RNA, 17 nt, Artificial Sequence
  Synthetic
agaagggaggaaagaaa

SEQ ID NO: 728451 - RNA, 17 nt, Artificial Sequence
  Synthetic
auugguuaggaaagaaa

SEQ ID NO: 728452 - RNA, 17 nt, Artificial Sequence
  Synthetic
ucagggggggaaagaaa

SEQ ID NO: 728453 - RNA, 17 nt, Artificial Sequence
  Synthetic
aauauucaugaaagaaa

SEQ ID NO: 728454 - RNA, 17 nt, Artificial Sequence
  Synthetic
uauguaugugaaagaaa

SEQ ID NO: 728455 - RNA, 17 nt, Artificial Sequence
  Synthetic
uagauaauugaaagaaa

SEQ ID NO: 728456 - RNA, 17 nt, Artificial Sequence
  Synthetic
uggacuggauaaagaaa

SEQ ID NO: 728457 - RNA, 17 nt, Artificial Sequence
  Synthetic
uaaguacuauaaagaaa

SEQ ID NO: 728458 - RNA, 17 nt, Artificial Sequence
  Synthetic
ucugggcuauaaagaaa

SEQ ID NO: 728459 - RNA, 17 nt, Artificial Sequence
  Synthetic
cugaaacuuuaaagaaa

SEQ ID NO: 728460 - RNA, 17 nt, Artificial Sequence
  Synthetic
cugagauuuuaaagaaa

SEQ ID NO: 728461 - RNA, 17 nt, Artificial Sequence
  Synthetic
ugacaaaaaacaagaaa

SEQ ID NO: 728462 - RNA, 17 nt, Artificial Sequence
  Synthetic
cugacaaaaacaagaaa

SEQ ID NO: 728463 - RNA, 17 nt, Artificial Sequence
  Synthetic
caucagccaacaagaaa

SEQ ID NO: 728464 - RNA, 17 nt, Artificial Sequence
  Synthetic
uauuuuuauacaagaaa

SEQ ID NO: 728465 - RNA, 17 nt, Artificial Sequence
  Synthetic
ugaugacugccaagaaa

SEQ ID NO: 728466 - RNA, 17 nt, Artificial Sequence
  Synthetic
acaauccgaucaagaaa

SEQ ID NO: 728467 - RNA, 17 nt, Artificial Sequence
  Synthetic
aguaauaacucaagaaa

SEQ ID NO: 728468 - RNA, 17 nt, Artificial Sequence
  Synthetic
auacaucauucaagaaa

SEQ ID NO: 728469 - RNA, 17 nt, Artificial Sequence
  Synthetic
aaguucuuuucaagaaa

SEQ ID NO: 728470 - RNA, 17 nt, Artificial Sequence
  Synthetic
uucuacaaaagaagaaa

SEQ ID NO: 728471 - RNA, 17 nt, Artificial Sequence
  Synthetic
auuguuucaagaagaaa

SEQ ID NO: 728472 - RNA, 17 nt, Artificial Sequence
  Synthetic
aucaugaccagaagaaa

SEQ ID NO: 728473 - RNA, 17 nt, Artificial Sequence
  Synthetic
aagagagggagaagaaa

SEQ ID NO: 728474 - RNA, 17 nt, Artificial Sequence
  Synthetic
agaagguggagaagaaa

SEQ ID NO: 728475 - RNA, 17 nt, Artificial Sequence
  Synthetic
agaaaaucuagaagaaa

SEQ ID NO: 728476 - RNA, 17 nt, Artificial Sequence
  Synthetic
ucaaggcuaggaagaaa

SEQ ID NO: 728477 - RNA, 17 nt, Artificial Sequence
  Synthetic
cuggaggagggaagaaa

SEQ ID NO: 728478 - RNA, 17 nt, Artificial Sequence
  Synthetic
aaggaguauggaagaaa

SEQ ID NO: 728479 - RNA, 17 nt, Artificial Sequence
  Synthetic
cgaucaacuggaagaaa

SEQ ID NO: 728480 - RNA, 17 nt, Artificial Sequence
  Synthetic
aaggagaguggaagaaa

SEQ ID NO: 728481 - RNA, 17 nt, Artificial Sequence
  Synthetic
uuacuuuuuggaagaaa

SEQ ID NO: 728482 - RNA, 17 nt, Artificial Sequence
  Synthetic
ugugacaaaugaagaaa

SEQ ID NO: 728483 - RNA, 17 nt, Artificial Sequence
  Synthetic
uguugaagaugaagaaa

SEQ ID NO: 728484 - RNA, 17 nt, Artificial Sequence
  Synthetic
ucaggaugaugaagaaa

SEQ ID NO: 728485 - RNA, 17 nt, Artificial Sequence
  Synthetic
aauagacacugaagaaa

SEQ ID NO: 728486 - RNA, 17 nt, Artificial Sequence
  Synthetic
ccucugcucugaagaaa

SEQ ID NO: 728487 - RNA, 17 nt, Artificial Sequence
  Synthetic
cuuuuccaaauaagaaa

SEQ ID NO: 728488 - RNA, 17 nt, Artificial Sequence
  Synthetic
auaaucuaaauaagaaa

SEQ ID NO: 728489 - RNA, 17 nt, Artificial Sequence
  Synthetic
cccucccucauaagaaa

SEQ ID NO: 728490 - RNA, 17 nt, Artificial Sequence
  Synthetic
cauguuuauauaagaaa

SEQ ID NO: 728491 - RNA, 17 nt, Artificial Sequence
  Synthetic
cccucccuuauaagaaa

SEQ ID NO: 728492 - RNA, 17 nt, Artificial Sequence
  Synthetic
caauuucuacuaagaaa

SEQ ID NO: 728493 - RNA, 17 nt, Artificial Sequence
  Synthetic
auaaauuggcuaagaaa

SEQ ID NO: 728494 - RNA, 17 nt, Artificial Sequence
  Synthetic
uccacuaugcuaagaaa

SEQ ID NO: 728495 - RNA, 17 nt, Artificial Sequence
  Synthetic
auccuaaagguaagaaa

SEQ ID NO: 728496 - RNA, 17 nt, Artificial Sequence
  Synthetic
uaguuaaauuuaagaaa

SEQ ID NO: 728497 - RNA, 17 nt, Artificial Sequence
  Synthetic
aaaaaugauuuaagaaa

SEQ ID NO: 728498 - RNA, 17 nt, Artificial Sequence
  Synthetic
aacgauacuuuaagaaa

SEQ ID NO: 728499 - RNA, 17 nt, Artificial Sequence
  Synthetic
uuauaaauuuuaagaaa

SEQ ID NO: 728500 - RNA, 17 nt, Artificial Sequence
  Synthetic
uggcgaauaaacagaaa

SEQ ID NO: 728501 - RNA, 17 nt, Artificial Sequence
  Synthetic
aaaacaaagaacagaaa

SEQ ID NO: 728502 - RNA, 17 nt, Artificial Sequence
  Synthetic
uuugagaagaacagaaa

SEQ ID NO: 728503 - RNA, 17 nt, Artificial Sequence
  Synthetic
uuauauucuaacagaaa

SEQ ID NO: 728504 - RNA, 17 nt, Artificial Sequence
  Synthetic
aacugaagacacagaaa

SEQ ID NO: 728505 - RNA, 17 nt, Artificial Sequence
  Synthetic
uuugcaaagcacagaaa

SEQ ID NO: 728506 - RNA, 17 nt, Artificial Sequence
  Synthetic
uacauggaagacagaaa

SEQ ID NO: 728507 - RNA, 17 nt, Artificial Sequence
  Synthetic
cucugauaggacagaaa

SEQ ID NO: 728508 - RNA, 17 nt, Artificial Sequence
  Synthetic
auuuuaucugacagaaa

SEQ ID NO: 728509 - RNA, 17 nt, Artificial Sequence
  Synthetic
uuccagaauuacagaaa

SEQ ID NO: 728510 - RNA, 17 nt, Artificial Sequence
  Synthetic
aaucacauuuacagaaa

SEQ ID NO: 728511 - RNA, 17 nt, Artificial Sequence
  Synthetic
aacaaccuuuacagaaa

SEQ ID NO: 728512 - RNA, 17 nt, Artificial Sequence
  Synthetic
aauaccaaaaccagaaa

SEQ ID NO: 728513 - RNA, 17 nt, Artificial Sequence
  Synthetic
caugucacaaccagaaa

SEQ ID NO: 728514 - RNA, 17 nt, Artificial Sequence
  Synthetic
accuugaccaccagaaa

SEQ ID NO: 728515 - RNA, 17 nt, Artificial Sequence
  Synthetic
acugaaguccccagaaa

SEQ ID NO: 728516 - RNA, 17 nt, Artificial Sequence
  Synthetic
uaggggaaagccagaaa

SEQ ID NO: 728517 - RNA, 17 nt, Artificial Sequence
  Synthetic
cucuaaaaauccagaaa

SEQ ID NO: 728518 - RNA, 17 nt, Artificial Sequence
  Synthetic
agcaucuaauccagaaa

SEQ ID NO: 728519 - RNA, 17 nt, Artificial Sequence
  Synthetic
cugcagugauccagaaa

SEQ ID NO: 728520 - RNA, 17 nt, Artificial Sequence
  Synthetic
uuaaguaguuccagaaa

SEQ ID NO: 728521 - RNA, 17 nt, Artificial Sequence
  Synthetic
uugaacagaagcagaaa

SEQ ID NO: 728522 - RNA, 17 nt, Artificial Sequence
  Synthetic
uuaaaccaaggcagaaa

SEQ ID NO: 728523 - RNA, 17 nt, Artificial Sequence
  Synthetic
cggucagcaggcagaaa

SEQ ID NO: 728524 - RNA, 17 nt, Artificial Sequence
  Synthetic
uggagcucaggcagaaa

SEQ ID NO: 728525 - RNA, 17 nt, Artificial Sequence
  Synthetic
cuuuagaaaugcagaaa

SEQ ID NO: 728526 - RNA, 17 nt, Artificial Sequence
  Synthetic
cucaauagaugcagaaa

SEQ ID NO: 728527 - RNA, 17 nt, Artificial Sequence
  Synthetic
aaaagccacugcagaaa

SEQ ID NO: 728528 - RNA, 17 nt, Artificial Sequence
  Synthetic
augauacacaucagaaa

SEQ ID NO: 728529 - RNA, 17 nt, Artificial Sequence
  Synthetic
ucaucuuugcucagaaa

SEQ ID NO: 728530 - RNA, 17 nt, Artificial Sequence
  Synthetic
uuuuugugucucagaaa

SEQ ID NO: 728531 - RNA, 17 nt, Artificial Sequence
  Synthetic
aacaagaaguucagaaa

SEQ ID NO: 728532 - RNA, 17 nt, Artificial Sequence
  Synthetic
uucccaggguucagaaa

SEQ ID NO: 728533 - RNA, 17 nt, Artificial Sequence
  Synthetic
agcuacacaaagagaaa

SEQ ID NO: 728534 - RNA, 17 nt, Artificial Sequence
  Synthetic
aggaggggaaagagaaa

SEQ ID NO: 728535 - RNA, 17 nt, Artificial Sequence
  Synthetic
ugcugauggaagagaaa

SEQ ID NO: 728536 - RNA, 17 nt, Artificial Sequence
  Synthetic
agcagcuggaagagaaa

SEQ ID NO: 728537 - RNA, 17 nt, Artificial Sequence
  Synthetic
ccaggcagacagagaaa

SEQ ID NO: 728538 - RNA, 17 nt, Artificial Sequence
  Synthetic
uauuuaugacagagaaa

SEQ ID NO: 728539 - RNA, 17 nt, Artificial Sequence
  Synthetic
agcuaaguccagagaaa

SEQ ID NO: 728540 - RNA, 17 nt, Artificial Sequence
  Synthetic
cacaugaggcagagaaa

SEQ ID NO: 728541 - RNA, 17 nt, Artificial Sequence
  Synthetic
cgaugggaagagagaaa

SEQ ID NO: 728542 - RNA, 17 nt, Artificial Sequence
  Synthetic
augggaagagagagaaa

SEQ ID NO: 728543 - RNA, 17 nt, Artificial Sequence
  Synthetic
agagagagagagagaaa

SEQ ID NO: 728544 - RNA, 17 nt, Artificial Sequence
  Synthetic
ugagagagagagagaaa

SEQ ID NO: 728545 - RNA, 17 nt, Artificial Sequence
  Synthetic
acagucuuggagagaaa

SEQ ID NO: 728546 - RNA, 17 nt, Artificial Sequence
  Synthetic
cuauagaaugagagaaa

SEQ ID NO: 728547 - RNA, 17 nt, Artificial Sequence
  Synthetic
acaauucaauagagaaa

SEQ ID NO: 728548 - RNA, 17 nt, Artificial Sequence
  Synthetic
cuuugaagauagagaaa

SEQ ID NO: 728549 - RNA, 17 nt, Artificial Sequence
  Synthetic
agacuaugauagagaaa

SEQ ID NO: 728550 - RNA, 17 nt, Artificial Sequence
  Synthetic
aggaaucacuagagaaa

SEQ ID NO: 728551 - RNA, 17 nt, Artificial Sequence
  Synthetic
acacugauguagagaaa

SEQ ID NO: 728552 - RNA, 17 nt, Artificial Sequence
  Synthetic
auuuuacuguagagaaa

SEQ ID NO: 728553 - RNA, 17 nt, Artificial Sequence
  Synthetic
acucaacuuucgagaaa

SEQ ID NO: 728554 - RNA, 17 nt, Artificial Sequence
  Synthetic
uauuaccguaggagaaa

SEQ ID NO: 728555 - RNA, 17 nt, Artificial Sequence
  Synthetic
agaaagguuaggagaaa

SEQ ID NO: 728556 - RNA, 17 nt, Artificial Sequence
  Synthetic
caaauccaagggagaaa

SEQ ID NO: 728557 - RNA, 17 nt, Artificial Sequence
  Synthetic
auugcuuaauggagaaa

SEQ ID NO: 728558 - RNA, 17 nt, Artificial Sequence
  Synthetic
aauuacacauggagaaa

SEQ ID NO: 728559 - RNA, 17 nt, Artificial Sequence
  Synthetic
agagccacauggagaaa

SEQ ID NO: 728560 - RNA, 17 nt, Artificial Sequence
  Synthetic
auacucagauggagaaa

SEQ ID NO: 728561 - RNA, 17 nt, Artificial Sequence
  Synthetic
aauuaugccuggagaaa

SEQ ID NO: 728562 - RNA, 17 nt, Artificial Sequence
  Synthetic
uguggcaucuggagaaa

SEQ ID NO: 728563 - RNA, 17 nt, Artificial Sequence
  Synthetic
cuagcuaaguggagaaa

SEQ ID NO: 728564 - RNA, 17 nt, Artificial Sequence
  Synthetic
agacccugguggagaaa

SEQ ID NO: 728565 - RNA, 17 nt, Artificial Sequence
  Synthetic
cagaagagcaugagaaa

SEQ ID NO: 728566 - RNA, 17 nt, Artificial Sequence
  Synthetic
aggauacaucugagaaa

SEQ ID NO: 728567 - RNA, 17 nt, Artificial Sequence
  Synthetic
aauguuuuucugagaaa

SEQ ID NO: 728568 - RNA, 17 nt, Artificial Sequence
  Synthetic
uuaggaaaugugagaaa

SEQ ID NO: 728569 - RNA, 17 nt, Artificial Sequence
  Synthetic
uaccuggaugugagaaa

SEQ ID NO: 728570 - RNA, 17 nt, Artificial Sequence
  Synthetic
cuuuuugccuugagaaa

SEQ ID NO: 728571 - RNA, 17 nt, Artificial Sequence
  Synthetic
acagaucuguugagaaa

SEQ ID NO: 728572 - RNA, 17 nt, Artificial Sequence
  Synthetic
auuucacauuugagaaa

SEQ ID NO: 728573 - RNA, 17 nt, Artificial Sequence
  Synthetic
auggcaauuuugagaaa

SEQ ID NO: 728574 - RNA, 17 nt, Artificial Sequence
  Synthetic
agugaaccaaauagaaa

SEQ ID NO: 728575 - RNA, 17 nt, Artificial Sequence
  Synthetic
auauuccuaaauagaaa

SEQ ID NO: 728576 - RNA, 17 nt, Artificial Sequence
  Synthetic
agaauagacaauagaaa

SEQ ID NO: 728577 - RNA, 17 nt, Artificial Sequence
  Synthetic
ugaagcaucaauagaaa

SEQ ID NO: 728578 - RNA, 17 nt, Artificial Sequence
  Synthetic
uugcauuucaauagaaa

SEQ ID NO: 728579 - RNA, 17 nt, Artificial Sequence
  Synthetic
acguuaaauaauagaaa

SEQ ID NO: 728580 - RNA, 17 nt, Artificial Sequence
  Synthetic
caaagaagacauagaaa

SEQ ID NO: 728581 - RNA, 17 nt, Artificial Sequence
  Synthetic
caaacagugcauagaaa

SEQ ID NO: 728582 - RNA, 17 nt, Artificial Sequence
  Synthetic
aguugaacucauagaaa

SEQ ID NO: 728583 - RNA, 17 nt, Artificial Sequence
  Synthetic
uaauguuuucauagaaa

SEQ ID NO: 728584 - RNA, 17 nt, Artificial Sequence
  Synthetic
cucuugagagauagaaa

SEQ ID NO: 728585 - RNA, 17 nt, Artificial Sequence
  Synthetic
uuaugugaugauagaaa

SEQ ID NO: 728586 - RNA, 17 nt, Artificial Sequence
  Synthetic
ucacuuagauauagaaa

SEQ ID NO: 728587 - RNA, 17 nt, Artificial Sequence
  Synthetic
uuagcugaguauagaaa

SEQ ID NO: 728588 - RNA, 17 nt, Artificial Sequence
  Synthetic
cacuguguguauagaaa

SEQ ID NO: 728589 - RNA, 17 nt, Artificial Sequence
  Synthetic
caagcuccuuauagaaa

SEQ ID NO: 728590 - RNA, 17 nt, Artificial Sequence
  Synthetic
cauuuuauuuauagaaa

SEQ ID NO: 728591 - RNA, 17 nt, Artificial Sequence
  Synthetic
auacuauuuuauagaaa

SEQ ID NO: 728592 - RNA, 17 nt, Artificial Sequence
  Synthetic
aguuacugaacuagaaa

SEQ ID NO: 728593 - RNA, 17 nt, Artificial Sequence
  Synthetic
uaggauauuucuagaaa

SEQ ID NO: 728594 - RNA, 17 nt, Artificial Sequence
  Synthetic
cucuuuauuucuagaaa

SEQ ID NO: 728595 - RNA, 17 nt, Artificial Sequence
  Synthetic
cugucuucaaguagaaa

SEQ ID NO: 728596 - RNA, 17 nt, Artificial Sequence
  Synthetic
aguaaacuaaguagaaa

SEQ ID NO: 728597 - RNA, 17 nt, Artificial Sequence
  Synthetic
uuuucuaggaguagaaa

SEQ ID NO: 728598 - RNA, 17 nt, Artificial Sequence
  Synthetic
aguuaaguccguagaaa

SEQ ID NO: 728599 - RNA, 17 nt, Artificial Sequence
  Synthetic
agcaagauagguagaaa

SEQ ID NO: 728600 - RNA, 17 nt, Artificial Sequence
  Synthetic
augaggguugguagaaa

SEQ ID NO: 728601 - RNA, 17 nt, Artificial Sequence
  Synthetic
uguauuuuugguagaaa

SEQ ID NO: 728602 - RNA, 17 nt, Artificial Sequence
  Synthetic
uugagaggguguagaaa

SEQ ID NO: 728603 - RNA, 17 nt, Artificial Sequence
  Synthetic
ugccuaggguguagaaa

SEQ ID NO: 728604 - RNA, 17 nt, Artificial Sequence
  Synthetic
uuccacuuguguagaaa

SEQ ID NO: 728605 - RNA, 17 nt, Artificial Sequence
  Synthetic
uuuauguuuuguagaaa

SEQ ID NO: 728606 - RNA, 17 nt, Artificial Sequence
  Synthetic
aauaaauacauuagaaa

SEQ ID NO: 728607 - RNA, 17 nt, Artificial Sequence
  Synthetic
uuccuagucauuagaaa

SEQ ID NO: 728608 - RNA, 17 nt, Artificial Sequence
  Synthetic
uauauuuugauuagaaa

SEQ ID NO: 728609 - RNA, 17 nt, Artificial Sequence
  Synthetic
ucugucucuauuagaaa

SEQ ID NO: 728610 - RNA, 17 nt, Artificial Sequence
  Synthetic
uaaauacugcuuagaaa

SEQ ID NO: 728611 - RNA, 17 nt, Artificial Sequence
  Synthetic
aagguuaacuuuagaaa

SEQ ID NO: 728612 - RNA, 17 nt, Artificial Sequence
  Synthetic
aauuaaaaguuuagaaa

SEQ ID NO: 728613 - RNA, 17 nt, Artificial Sequence
  Synthetic
uaauagaaguuuagaaa

SEQ ID NO: 728614 - RNA, 17 nt, Artificial Sequence
  Synthetic
agugugcauuuuagaaa

SEQ ID NO: 728615 - RNA, 17 nt, Artificial Sequence
  Synthetic
uuauucuuuuuuagaaa

SEQ ID NO: 728616 - RNA, 17 nt, Artificial Sequence
  Synthetic
cuuucuaguuaccgaaa

SEQ ID NO: 728617 - RNA, 17 nt, Artificial Sequence
  Synthetic
acuuugagaggccgaaa

SEQ ID NO: 728618 - RNA, 17 nt, Artificial Sequence
  Synthetic
agucucuggugccgaaa

SEQ ID NO: 728619 - RNA, 17 nt, Artificial Sequence
  Synthetic
caaugaauuuggcgaaa

SEQ ID NO: 728620 - RNA, 17 nt, Artificial Sequence
  Synthetic
cagaccagaagucgaaa

SEQ ID NO: 728621 - RNA, 17 nt, Artificial Sequence
  Synthetic
uaugagcaaaaaggaaa

SEQ ID NO: 728622 - RNA, 17 nt, Artificial Sequence
  Synthetic
auaaaagaaaaaggaaa

SEQ ID NO: 728623 - RNA, 17 nt, Artificial Sequence
  Synthetic
uuuucuucaaaaggaaa

SEQ ID NO: 728624 - RNA, 17 nt, Artificial Sequence
  Synthetic
cgcaaaggaaaaggaaa

SEQ ID NO: 728625 - RNA, 17 nt, Artificial Sequence
  Synthetic
aaggaacgcaaaggaaa

SEQ ID NO: 728626 - RNA, 17 nt, Artificial Sequence
  Synthetic
ugcagguucaaaggaaa

SEQ ID NO: 728627 - RNA, 17 nt, Artificial Sequence
  Synthetic
uagaaggggaaaggaaa

SEQ ID NO: 728628 - RNA, 17 nt, Artificial Sequence
  Synthetic
ccgcaacuacaaggaaa

SEQ ID NO: 728629 - RNA, 17 nt, Artificial Sequence
  Synthetic
ucgccaagccaaggaaa

SEQ ID NO: 728630 - RNA, 17 nt, Artificial Sequence
  Synthetic
aguucuaagcaaggaaa

SEQ ID NO: 728631 - RNA, 17 nt, Artificial Sequence
  Synthetic
caaggugggcaaggaaa

SEQ ID NO: 728632 - RNA, 17 nt, Artificial Sequence
  Synthetic
uauaauaaagaaggaaa

SEQ ID NO: 728633 - RNA, 17 nt, Artificial Sequence
  Synthetic
agauuuagagaaggaaa

SEQ ID NO: 728634 - RNA, 17 nt, Artificial Sequence
  Synthetic
uuuuauuaggaaggaaa

SEQ ID NO: 728635 - RNA, 17 nt, Artificial Sequence
  Synthetic
uccaucugggaaggaaa

SEQ ID NO: 728636 - RNA, 17 nt, Artificial Sequence
  Synthetic
ucuguaaaauaaggaaa

SEQ ID NO: 728637 - RNA, 17 nt, Artificial Sequence
  Synthetic
auuuauucauaaggaaa

SEQ ID NO: 728638 - RNA, 17 nt, Artificial Sequence
  Synthetic
uugcccauauaaggaaa

SEQ ID NO: 728639 - RNA, 17 nt, Artificial Sequence
  Synthetic
aaagaaauuuaaggaaa

SEQ ID NO: 728640 - RNA, 17 nt, Artificial Sequence
  Synthetic
ccaacuaaaacaggaaa

SEQ ID NO: 728641 - RNA, 17 nt, Artificial Sequence
  Synthetic
auaaccacaacaggaaa

SEQ ID NO: 728642 - RNA, 17 nt, Artificial Sequence
  Synthetic
ugcuuaaagacaggaaa

SEQ ID NO: 728643 - RNA, 17 nt, Artificial Sequence
  Synthetic
aagguuacuccaggaaa

SEQ ID NO: 728644 - RNA, 17 nt, Artificial Sequence
  Synthetic
agggagauagcaggaaa

SEQ ID NO: 728645 - RNA, 17 nt, Artificial Sequence
  Synthetic
auauaguacucaggaaa

SEQ ID NO: 728646 - RNA, 17 nt, Artificial Sequence
  Synthetic
cacauguccucaggaaa

SEQ ID NO: 728647 - RNA, 17 nt, Artificial Sequence
  Synthetic
cuccucucuucaggaaa

SEQ ID NO: 728648 - RNA, 17 nt, Artificial Sequence
  Synthetic
auuugguuuucaggaaa

SEQ ID NO: 728649 - RNA, 17 nt, Artificial Sequence
  Synthetic
agacauagaagaggaaa

SEQ ID NO: 728650 - RNA, 17 nt, Artificial Sequence
  Synthetic
agacugaggagaggaaa

SEQ ID NO: 728651 - RNA, 17 nt, Artificial Sequence
  Synthetic
ugaaagaauagaggaaa

SEQ ID NO: 728652 - RNA, 17 nt, Artificial Sequence
  Synthetic
ccugaagcuagaggaaa

SEQ ID NO: 728653 - RNA, 17 nt, Artificial Sequence
  Synthetic
agaaaaucuagaggaaa

SEQ ID NO: 728654 - RNA, 17 nt, Artificial Sequence
  Synthetic
aaggaaggaggaggaaa

SEQ ID NO: 728655 - RNA, 17 nt, Artificial Sequence
  Synthetic
aaugaagaaugaggaaa

SEQ ID NO: 728656 - RNA, 17 nt, Artificial Sequence
  Synthetic
uggaaaagaugaggaaa

SEQ ID NO: 728657 - RNA, 17 nt, Artificial Sequence
  Synthetic
acuguaaacugaggaaa

SEQ ID NO: 728658 - RNA, 17 nt, Artificial Sequence
  Synthetic
auaguauucauaggaaa

SEQ ID NO: 728659 - RNA, 17 nt, Artificial Sequence
  Synthetic
cuuggugauauaggaaa

SEQ ID NO: 728660 - RNA, 17 nt, Artificial Sequence
  Synthetic
cugaguggaguaggaaa

SEQ ID NO: 728661 - RNA, 17 nt, Artificial Sequence
  Synthetic
cauguaaacguaggaaa

SEQ ID NO: 728662 - RNA, 17 nt, Artificial Sequence
  Synthetic
acaaugcaauuaggaaa

SEQ ID NO: 728663 - RNA, 17 nt, Artificial Sequence
  Synthetic
agcuuauaauuaggaaa

SEQ ID NO: 728664 - RNA, 17 nt, Artificial Sequence
  Synthetic
ccacgcccggccggaaa

SEQ ID NO: 728665 - RNA, 17 nt, Artificial Sequence
  Synthetic
cucaauagaagcggaaa

SEQ ID NO: 728666 - RNA, 17 nt, Artificial Sequence
  Synthetic
cugagagcaaagggaaa

SEQ ID NO: 728667 - RNA, 17 nt, Artificial Sequence
  Synthetic
aagcacuagaagggaaa

SEQ ID NO: 728668 - RNA, 17 nt, Artificial Sequence
  Synthetic
uguaacaauaagggaaa

SEQ ID NO: 728669 - RNA, 17 nt, Artificial Sequence
  Synthetic
auguggacacagggaaa

SEQ ID NO: 728670 - RNA, 17 nt, Artificial Sequence
  Synthetic
auauacuuacagggaaa

SEQ ID NO: 728671 - RNA, 17 nt, Artificial Sequence
  Synthetic
cggaagcaggagggaaa

SEQ ID NO: 728672 - RNA, 17 nt, Artificial Sequence
  Synthetic
uucugaauuuagggaaa

SEQ ID NO: 728673 - RNA, 17 nt, Artificial Sequence
  Synthetic
cacaaaaaaaggggaaa

SEQ ID NO: 728674 - RNA, 17 nt, Artificial Sequence
  Synthetic
aaugaacaaaggggaaa

SEQ ID NO: 728675 - RNA, 17 nt, Artificial Sequence
  Synthetic
ugagugcuaaggggaaa

SEQ ID NO: 728676 - RNA, 17 nt, Artificial Sequence
  Synthetic
cagaaucugaggggaaa

SEQ ID NO: 728677 - RNA, 17 nt, Artificial Sequence
  Synthetic
aagauuggagggggaaa

SEQ ID NO: 728678 - RNA, 17 nt, Artificial Sequence
  Synthetic
cagccaauggggggaaa

SEQ ID NO: 728679 - RNA, 17 nt, Artificial Sequence
  Synthetic
uuacaggaauggggaaa

SEQ ID NO: 728680 - RNA, 17 nt, Artificial Sequence
  Synthetic
augauuagauggggaaa

SEQ ID NO: 728681 - RNA, 17 nt, Artificial Sequence
  Synthetic
uagauauuguggggaaa

SEQ ID NO: 728682 - RNA, 17 nt, Artificial Sequence
  Synthetic
ucacuacauuggggaaa

SEQ ID NO: 728683 - RNA, 17 nt, Artificial Sequence
  Synthetic
caagaauuuuggggaaa

SEQ ID NO: 728684 - RNA, 17 nt, Artificial Sequence
  Synthetic
cagguuaaaaugggaaa

SEQ ID NO: 728685 - RNA, 17 nt, Artificial Sequence
  Synthetic
aaauaaguaaugggaaa

SEQ ID NO: 728686 - RNA, 17 nt, Artificial Sequence
  Synthetic
cuaaggagcaugggaaa

SEQ ID NO: 728687 - RNA, 17 nt, Artificial Sequence
  Synthetic
caaaacaagaugggaaa

SEQ ID NO: 728688 - RNA, 17 nt, Artificial Sequence
  Synthetic
cugcccaguaugggaaa

SEQ ID NO: 728689 - RNA, 17 nt, Artificial Sequence
  Synthetic
aaaaucucacugggaaa

SEQ ID NO: 728690 - RNA, 17 nt, Artificial Sequence
  Synthetic
caugaaaaccugggaaa

SEQ ID NO: 728691 - RNA, 17 nt, Artificial Sequence
  Synthetic
uguacacugcugggaaa

SEQ ID NO: 728692 - RNA, 17 nt, Artificial Sequence
  Synthetic
augaguuuucugggaaa

SEQ ID NO: 728693 - RNA, 17 nt, Artificial Sequence
  Synthetic
uuaggggaggugggaaa

SEQ ID NO: 728694 - RNA, 17 nt, Artificial Sequence
  Synthetic
aguuggcgggugggaaa

SEQ ID NO: 728695 - RNA, 17 nt, Artificial Sequence
  Synthetic
aacaugugggugggaaa

SEQ ID NO: 728696 - RNA, 17 nt, Artificial Sequence
  Synthetic
uaagaacuggugggaaa

SEQ ID NO: 728697 - RNA, 17 nt, Artificial Sequence
  Synthetic
uuggaggucuugggaaa

SEQ ID NO: 728698 - RNA, 17 nt, Artificial Sequence
  Synthetic
uuuggaagaaauggaaa

SEQ ID NO: 728699 - RNA, 17 nt, Artificial Sequence
  Synthetic
uauuauugaaauggaaa

SEQ ID NO: 728700 - RNA, 17 nt, Artificial Sequence
  Synthetic
uaauuacuaaauggaaa

SEQ ID NO: 728701 - RNA, 17 nt, Artificial Sequence
  Synthetic
uauccuuuaaauggaaa

SEQ ID NO: 728702 - RNA, 17 nt, Artificial Sequence
  Synthetic
uauauccacaauggaaa

SEQ ID NO: 728703 - RNA, 17 nt, Artificial Sequence
  Synthetic
ucuuuguugaauggaaa

SEQ ID NO: 728704 - RNA, 17 nt, Artificial Sequence
  Synthetic
auuuuuauuaauggaaa

SEQ ID NO: 728705 - RNA, 17 nt, Artificial Sequence
  Synthetic
aaaaugaagcauggaaa

SEQ ID NO: 728706 - RNA, 17 nt, Artificial Sequence
  Synthetic
aaguaagaagauggaaa

SEQ ID NO: 728707 - RNA, 17 nt, Artificial Sequence
  Synthetic
aacaacauggauggaaa

SEQ ID NO: 728708 - RNA, 17 nt, Artificial Sequence
  Synthetic
auacacuaugauggaaa

SEQ ID NO: 728709 - RNA, 17 nt, Artificial Sequence
  Synthetic
auuuauggauauggaaa

SEQ ID NO: 728710 - RNA, 17 nt, Artificial Sequence
  Synthetic
auugaucaguauggaaa

SEQ ID NO: 728711 - RNA, 17 nt, Artificial Sequence
  Synthetic
ccuggccuuuauggaaa

SEQ ID NO: 728712 - RNA, 17 nt, Artificial Sequence
  Synthetic
acaacccuaacuggaaa

SEQ ID NO: 728713 - RNA, 17 nt, Artificial Sequence
  Synthetic
agcaaaaaaccuggaaa

SEQ ID NO: 728714 - RNA, 17 nt, Artificial Sequence
  Synthetic
auucacuccccuggaaa

SEQ ID NO: 728715 - RNA, 17 nt, Artificial Sequence
  Synthetic
ugagccacgccuggaaa

SEQ ID NO: 728716 - RNA, 17 nt, Artificial Sequence
  Synthetic
aacugagaagcuggaaa

SEQ ID NO: 728717 - RNA, 17 nt, Artificial Sequence
  Synthetic
ccaaucauggcuggaaa

SEQ ID NO: 728718 - RNA, 17 nt, Artificial Sequence
  Synthetic
cuuucucauucuggaaa

SEQ ID NO: 728719 - RNA, 17 nt, Artificial Sequence
  Synthetic
cuaaaauguucuggaaa

SEQ ID NO: 728720 - RNA, 17 nt, Artificial Sequence
  Synthetic
aucaccuauaguggaaa

SEQ ID NO: 728721 - RNA, 17 nt, Artificial Sequence
  Synthetic
ugaauauguaguggaaa

SEQ ID NO: 728722 - RNA, 17 nt, Artificial Sequence
  Synthetic
aagcacugcuguggaaa

SEQ ID NO: 728723 - RNA, 17 nt, Artificial Sequence
  Synthetic
ugaaugaacauuggaaa

SEQ ID NO: 728724 - RNA, 17 nt, Artificial Sequence
  Synthetic
uuagugaccauuggaaa

SEQ ID NO: 728725 - RNA, 17 nt, Artificial Sequence
  Synthetic
cagccuucuauuggaaa

SEQ ID NO: 728726 - RNA, 17 nt, Artificial Sequence
  Synthetic
agugggaguauuggaaa

SEQ ID NO: 728727 - RNA, 17 nt, Artificial Sequence
  Synthetic
ugggagcuuauuggaaa

SEQ ID NO: 728728 - RNA, 17 nt, Artificial Sequence
  Synthetic
cagaagacccuuggaaa

SEQ ID NO: 728729 - RNA, 17 nt, Artificial Sequence
  Synthetic
aagcgaggucuuggaaa

SEQ ID NO: 728730 - RNA, 17 nt, Artificial Sequence
  Synthetic
uuuagaacaguuggaaa

SEQ ID NO: 728731 - RNA, 17 nt, Artificial Sequence
  Synthetic
uggagaggaguuggaaa

SEQ ID NO: 728732 - RNA, 17 nt, Artificial Sequence
  Synthetic
aacaacauuguuggaaa

SEQ ID NO: 728733 - RNA, 17 nt, Artificial Sequence
  Synthetic
uaaagcaaauuuggaaa

SEQ ID NO: 728734 - RNA, 17 nt, Artificial Sequence
  Synthetic
ccugacuaauuuggaaa

SEQ ID NO: 728735 - RNA, 17 nt, Artificial Sequence
  Synthetic
ucaucagccuuuggaaa

SEQ ID NO: 728736 - RNA, 17 nt, Artificial Sequence
  Synthetic
aguauuucuuuuggaaa

SEQ ID NO: 728737 - RNA, 17 nt, Artificial Sequence
  Synthetic
aucaacucaaaaugaaa

SEQ ID NO: 728738 - RNA, 17 nt, Artificial Sequence
  Synthetic
cuacuuucaaaaugaaa

SEQ ID NO: 728739 - RNA, 17 nt, Artificial Sequence
  Synthetic
auacaaaucaaaugaaa

SEQ ID NO: 728740 - RNA, 17 nt, Artificial Sequence
  Synthetic
ucaccugucaaaugaaa

SEQ ID NO: 728741 - RNA, 17 nt, Artificial Sequence
  Synthetic
augaaauucaaaugaaa

SEQ ID NO: 728742 - RNA, 17 nt, Artificial Sequence
  Synthetic
augggucauaaaugaaa

SEQ ID NO: 728743 - RNA, 17 nt, Artificial Sequence
  Synthetic
uuuuaggaccaaugaaa

SEQ ID NO: 728744 - RNA, 17 nt, Artificial Sequence
  Synthetic
aauauuugucaaugaaa

SEQ ID NO: 728745 - RNA, 17 nt, Artificial Sequence
  Synthetic
cugaaaaaagaaugaaa

SEQ ID NO: 728746 - RNA, 17 nt, Artificial Sequence
  Synthetic
uguccaggagaaugaaa

SEQ ID NO: 728747 - RNA, 17 nt, Artificial Sequence
  Synthetic
uaggauacugaaugaaa

SEQ ID NO: 728748 - RNA, 17 nt, Artificial Sequence
  Synthetic
agcacaggauaaugaaa

SEQ ID NO: 728749 - RNA, 17 nt, Artificial Sequence
  Synthetic
uaaaacauauaaugaaa

SEQ ID NO: 728750 - RNA, 17 nt, Artificial Sequence
  Synthetic
aauguauauuaaugaaa

SEQ ID NO: 728751 - RNA, 17 nt, Artificial Sequence
  Synthetic
uuuauaaagacaugaaa

SEQ ID NO: 728752 - RNA, 17 nt, Artificial Sequence
  Synthetic
aauuuauagccaugaaa

SEQ ID NO: 728753 - RNA, 17 nt, Artificial Sequence
  Synthetic
acaugauccucaugaaa

SEQ ID NO: 728754 - RNA, 17 nt, Artificial Sequence
  Synthetic
ugggaccaaagaugaaa

SEQ ID NO: 728755 - RNA, 17 nt, Artificial Sequence
  Synthetic
aggagggaaagaugaaa

SEQ ID NO: 728756 - RNA, 17 nt, Artificial Sequence
  Synthetic
uccuccuuuagaugaaa

SEQ ID NO: 728757 - RNA, 17 nt, Artificial Sequence
  Synthetic
uaacacccuggaugaaa

SEQ ID NO: 728758 - RNA, 17 nt, Artificial Sequence
  Synthetic
cauuuucuuggaugaaa

SEQ ID NO: 728759 - RNA, 17 nt, Artificial Sequence
  Synthetic
uuguuagugugaugaaa

SEQ ID NO: 728760 - RNA, 17 nt, Artificial Sequence
  Synthetic
ugucucaguugaugaaa

SEQ ID NO: 728761 - RNA, 17 nt, Artificial Sequence
  Synthetic
agaaacaaaauaugaaa

SEQ ID NO: 728762 - RNA, 17 nt, Artificial Sequence
  Synthetic
ccaaggagaauaugaaa

SEQ ID NO: 728763 - RNA, 17 nt, Artificial Sequence
  Synthetic
caaacaagcauaugaaa

SEQ ID NO: 728764 - RNA, 17 nt, Artificial Sequence
  Synthetic
acaguccauauaugaaa

SEQ ID NO: 728765 - RNA, 17 nt, Artificial Sequence
  Synthetic
uuguucuuacuaugaaa

SEQ ID NO: 728766 - RNA, 17 nt, Artificial Sequence
  Synthetic
uguuuacaauuaugaaa

SEQ ID NO: 728767 - RNA, 17 nt, Artificial Sequence
  Synthetic
aaacugaucuuaugaaa

SEQ ID NO: 728768 - RNA, 17 nt, Artificial Sequence
  Synthetic
uguucaaaguuaugaaa

SEQ ID NO: 728769 - RNA, 17 nt, Artificial Sequence
  Synthetic
uucguauguuuaugaaa

SEQ ID NO: 728770 - RNA, 17 nt, Artificial Sequence
  Synthetic
aggcaaccaaacugaaa

SEQ ID NO: 728771 - RNA, 17 nt, Artificial Sequence
  Synthetic
agugcugcaaacugaaa

SEQ ID NO: 728772 - RNA, 17 nt, Artificial Sequence
  Synthetic
aaauguucacacugaaa

SEQ ID NO: 728773 - RNA, 17 nt, Artificial Sequence
  Synthetic
aagacugugcacugaaa

SEQ ID NO: 728774 - RNA, 17 nt, Artificial Sequence
  Synthetic
uagagguuagacugaaa

SEQ ID NO: 728775 - RNA, 17 nt, Artificial Sequence
  Synthetic
uccuuuggugacugaaa

SEQ ID NO: 728776 - RNA, 17 nt, Artificial Sequence
  Synthetic
aucagugacuacugaaa

SEQ ID NO: 728777 - RNA, 17 nt, Artificial Sequence
  Synthetic
aaaaggucuuacugaaa

SEQ ID NO: 728778 - RNA, 17 nt, Artificial Sequence
  Synthetic
agaugaaguuacugaaa

SEQ ID NO: 728779 - RNA, 17 nt, Artificial Sequence
  Synthetic
cuucuauguuacugaaa

SEQ ID NO: 728780 - RNA, 17 nt, Artificial Sequence
  Synthetic
ugagguuucaccugaaa

SEQ ID NO: 728781 - RNA, 17 nt, Artificial Sequence
  Synthetic
aaggaauaacccugaaa

SEQ ID NO: 728782 - RNA, 17 nt, Artificial Sequence
  Synthetic
agucuaugggccugaaa

SEQ ID NO: 728783 - RNA, 17 nt, Artificial Sequence
  Synthetic
uuaauuccauccugaaa

SEQ ID NO: 728784 - RNA, 17 nt, Artificial Sequence
  Synthetic
aaauuucagagcugaaa

SEQ ID NO: 728785 - RNA, 17 nt, Artificial Sequence
  Synthetic
uuaucacuaaucugaaa

SEQ ID NO: 728786 - RNA, 17 nt, Artificial Sequence
  Synthetic
aaacagcucaucugaaa

SEQ ID NO: 728787 - RNA, 17 nt, Artificial Sequence
  Synthetic
auugagauccucugaaa

SEQ ID NO: 728788 - RNA, 17 nt, Artificial Sequence
  Synthetic
accaaaagagucugaaa

SEQ ID NO: 728789 - RNA, 17 nt, Artificial Sequence
  Synthetic
aucuggcaggucugaaa

SEQ ID NO: 728790 - RNA, 17 nt, Artificial Sequence
  Synthetic
ugaggugcugucugaaa

SEQ ID NO: 728791 - RNA, 17 nt, Artificial Sequence
  Synthetic
uugaggguauucugaaa

SEQ ID NO: 728792 - RNA, 17 nt, Artificial Sequence
  Synthetic
cuuugaaacuucugaaa

SEQ ID NO: 728793 - RNA, 17 nt, Artificial Sequence
  Synthetic
agauguggguucugaaa

SEQ ID NO: 728794 - RNA, 17 nt, Artificial Sequence
  Synthetic
aguaguccuuucugaaa

SEQ ID NO: 728795 - RNA, 17 nt, Artificial Sequence
  Synthetic
uuucacaaaaagugaaa

SEQ ID NO: 728796 - RNA, 17 nt, Artificial Sequence
  Synthetic
auuuucacaaagugaaa

SEQ ID NO: 728797 - RNA, 17 nt, Artificial Sequence
  Synthetic
aguuuaaauaagugaaa

SEQ ID NO: 728798 - RNA, 17 nt, Artificial Sequence
  Synthetic
ucuugguggcagugaaa

SEQ ID NO: 728799 - RNA, 17 nt, Artificial Sequence
  Synthetic
augaugaugcagugaaa

SEQ ID NO: 728800 - RNA, 17 nt, Artificial Sequence
  Synthetic
uuauaaaacuagugaaa

SEQ ID NO: 728801 - RNA, 17 nt, Artificial Sequence
  Synthetic
aauaaauuagcgugaaa

SEQ ID NO: 728802 - RNA, 17 nt, Artificial Sequence
  Synthetic
aaucuucuggcgugaaa

SEQ ID NO: 728803 - RNA, 17 nt, Artificial Sequence
  Synthetic
acaaucccaaggugaaa

SEQ ID NO: 728804 - RNA, 17 nt, Artificial Sequence
  Synthetic
ucaagcagaaggugaaa

SEQ ID NO: 728805 - RNA, 17 nt, Artificial Sequence
  Synthetic
uucccuacggggugaaa

SEQ ID NO: 728806 - RNA, 17 nt, Artificial Sequence
  Synthetic
caaaaguuauggugaaa

SEQ ID NO: 728807 - RNA, 17 nt, Artificial Sequence
  Synthetic
ugaaacaaguggugaaa

SEQ ID NO: 728808 - RNA, 17 nt, Artificial Sequence
  Synthetic
aaaaugaaaaugugaaa

SEQ ID NO: 728809 - RNA, 17 nt, Artificial Sequence
  Synthetic
cuaauuaaaaugugaaa

SEQ ID NO: 728810 - RNA, 17 nt, Artificial Sequence
  Synthetic
uuuuauccaaugugaaa

SEQ ID NO: 728811 - RNA, 17 nt, Artificial Sequence
  Synthetic
uuggugggaaugugaaa

SEQ ID NO: 728812 - RNA, 17 nt, Artificial Sequence
  Synthetic
uuuaggugaaugugaaa

SEQ ID NO: 728813 - RNA, 17 nt, Artificial Sequence
  Synthetic
ccaacagguaugugaaa

SEQ ID NO: 728814 - RNA, 17 nt, Artificial Sequence
  Synthetic
aaucuuccacugugaaa

SEQ ID NO: 728815 - RNA, 17 nt, Artificial Sequence
  Synthetic
uuuccagcacugugaaa

SEQ ID NO: 728816 - RNA, 17 nt, Artificial Sequence
  Synthetic
uugagauuacugugaaa

SEQ ID NO: 728817 - RNA, 17 nt, Artificial Sequence
  Synthetic
ccuaucacccugugaaa

SEQ ID NO: 728818 - RNA, 17 nt, Artificial Sequence
  Synthetic
acuucuguguugugaaa

SEQ ID NO: 728819 - RNA, 17 nt, Artificial Sequence
  Synthetic
agaguauuaaauugaaa

SEQ ID NO: 728820 - RNA, 17 nt, Artificial Sequence
  Synthetic
caauaccucaauugaaa

SEQ ID NO: 728821 - RNA, 17 nt, Artificial Sequence
  Synthetic
aaauagcucaauugaaa

SEQ ID NO: 728822 - RNA, 17 nt, Artificial Sequence
  Synthetic
ccaaacaagaauugaaa

SEQ ID NO: 728823 - RNA, 17 nt, Artificial Sequence
  Synthetic
uggacuuagaauugaaa

SEQ ID NO: 728824 - RNA, 17 nt, Artificial Sequence
  Synthetic
aacaguggagauugaaa

SEQ ID NO: 728825 - RNA, 17 nt, Artificial Sequence
  Synthetic
ucuuacuuagauugaaa

SEQ ID NO: 728826 - RNA, 17 nt, Artificial Sequence
  Synthetic
uuucaguuggauugaaa

SEQ ID NO: 728827 - RNA, 17 nt, Artificial Sequence
  Synthetic
ucaugcuuugauugaaa

SEQ ID NO: 728828 - RNA, 17 nt, Artificial Sequence
  Synthetic
ugaugaaaauauugaaa

SEQ ID NO: 728829 - RNA, 17 nt, Artificial Sequence
  Synthetic
cuguauucauauugaaa

SEQ ID NO: 728830 - RNA, 17 nt, Artificial Sequence
  Synthetic
uuaaaguauuauugaaa

SEQ ID NO: 728831 - RNA, 17 nt, Artificial Sequence
  Synthetic
aaguugguuuauugaaa

SEQ ID NO: 728832 - RNA, 17 nt, Artificial Sequence
  Synthetic
uucuuugaaacuugaaa

SEQ ID NO: 728833 - RNA, 17 nt, Artificial Sequence
  Synthetic
uccagaucuccuugaaa

SEQ ID NO: 728834 - RNA, 17 nt, Artificial Sequence
  Synthetic
auuuuucaagcuugaaa

SEQ ID NO: 728835 - RNA, 17 nt, Artificial Sequence
  Synthetic
uuaugugaggcuugaaa

SEQ ID NO: 728836 - RNA, 17 nt, Artificial Sequence
  Synthetic
aaaaaaaaaucuugaaa

SEQ ID NO: 728837 - RNA, 17 nt, Artificial Sequence
  Synthetic
cacccacacucuugaaa

SEQ ID NO: 728838 - RNA, 17 nt, Artificial Sequence
  Synthetic
cgaauuugcucuugaaa

SEQ ID NO: 728839 - RNA, 17 nt, Artificial Sequence
  Synthetic
auacauaguucuugaaa

SEQ ID NO: 728840 - RNA, 17 nt, Artificial Sequence
  Synthetic
uuuuuuaaucguugaaa

SEQ ID NO: 728841 - RNA, 17 nt, Artificial Sequence
  Synthetic
ugagggggagguugaaa

SEQ ID NO: 728842 - RNA, 17 nt, Artificial Sequence
  Synthetic
ccaaucuaugguugaaa

SEQ ID NO: 728843 - RNA, 17 nt, Artificial Sequence
  Synthetic
uuaccauuauguugaaa

SEQ ID NO: 728844 - RNA, 17 nt, Artificial Sequence
  Synthetic
caagucuccuguugaaa

SEQ ID NO: 728845 - RNA, 17 nt, Artificial Sequence
  Synthetic
aggaccauuuguugaaa

SEQ ID NO: 728846 - RNA, 17 nt, Artificial Sequence
  Synthetic
auaauacacauuugaaa

SEQ ID NO: 728847 - RNA, 17 nt, Artificial Sequence
  Synthetic
ugaguagccauuugaaa

SEQ ID NO: 728848 - RNA, 17 nt, Artificial Sequence
  Synthetic
uucuacccuauuugaaa

SEQ ID NO: 728849 - RNA, 17 nt, Artificial Sequence
  Synthetic
aauuuaguuauuugaaa

SEQ ID NO: 728850 - RNA, 17 nt, Artificial Sequence
  Synthetic
ucuaagcuacuuugaaa

SEQ ID NO: 728851 - RNA, 17 nt, Artificial Sequence
  Synthetic
auaacuuuacuuugaaa

SEQ ID NO: 728852 - RNA, 17 nt, Artificial Sequence
  Synthetic
uggugacuucuuugaaa

SEQ ID NO: 728853 - RNA, 17 nt, Artificial Sequence
  Synthetic
aagucagaaguuugaaa

SEQ ID NO: 728854 - RNA, 17 nt, Artificial Sequence
  Synthetic
ucccaaggaguuugaaa

SEQ ID NO: 728855 - RNA, 17 nt, Artificial Sequence
  Synthetic
aggacacagguuugaaa

SEQ ID NO: 728856 - RNA, 17 nt, Artificial Sequence
  Synthetic
cuugcaaggguuugaaa

SEQ ID NO: 728857 - RNA, 17 nt, Artificial Sequence
  Synthetic
ccaaaaauauuuugaaa

SEQ ID NO: 728858 - RNA, 17 nt, Artificial Sequence
  Synthetic
ugacauauauuuugaaa

SEQ ID NO: 728859 - RNA, 17 nt, Artificial Sequence
  Synthetic
accaguguauuuugaaa

SEQ ID NO: 728860 - RNA, 17 nt, Artificial Sequence
  Synthetic
aggcuuuacuuuugaaa

SEQ ID NO: 728861 - RNA, 17 nt, Artificial Sequence
  Synthetic
ugccauuucuuuugaaa

SEQ ID NO: 728862 - RNA, 17 nt, Artificial Sequence
  Synthetic
acacggguguuuugaaa

SEQ ID NO: 728863 - RNA, 17 nt, Artificial Sequence
  Synthetic
uuuuucuuguuuugaaa

SEQ ID NO: 728864 - RNA, 17 nt, Artificial Sequence
  Synthetic
auacaguuguuuugaaa

SEQ ID NO: 728865 - RNA, 17 nt, Artificial Sequence
  Synthetic
agauauuauuuuugaaa

SEQ ID NO: 728866 - RNA, 17 nt, Artificial Sequence
  Synthetic
cugauagguuuuugaaa

SEQ ID NO: 728867 - RNA, 17 nt, Artificial Sequence
  Synthetic
agaagugguuuuugaaa

SEQ ID NO: 728868 - RNA, 17 nt, Artificial Sequence
  Synthetic
uuuuuuuuuuuuugaaa

SEQ ID NO: 728869 - RNA, 17 nt, Artificial Sequence
  Synthetic
aaugugcaaaaaauaaa

SEQ ID NO: 728870 - RNA, 17 nt, Artificial Sequence
  Synthetic
aagaugacaaaaauaaa

SEQ ID NO: 728871 - RNA, 17 nt, Artificial Sequence
  Synthetic
uaagaaauaaaaauaaa

SEQ ID NO: 728872 - RNA, 17 nt, Artificial Sequence
  Synthetic
aaauuggccaaaauaaa

SEQ ID NO: 728873 - RNA, 17 nt, Artificial Sequence
  Synthetic
cauaggcucaaaauaaa

SEQ ID NO: 728874 - RNA, 17 nt, Artificial Sequence
  Synthetic
ucauuaaugaaaauaaa

SEQ ID NO: 728875 - RNA, 17 nt, Artificial Sequence
  Synthetic
aauuaagugaaaauaaa

SEQ ID NO: 728876 - RNA, 17 nt, Artificial Sequence
  Synthetic
uugguuuauaaaauaaa

SEQ ID NO: 728877 - RNA, 17 nt, Artificial Sequence
  Synthetic
aaugagaguaaaauaaa

SEQ ID NO: 728878 - RNA, 17 nt, Artificial Sequence
  Synthetic
aagaugacacaaauaaa

SEQ ID NO: 728879 - RNA, 17 nt, Artificial Sequence
  Synthetic
uaaggaauacaaauaaa

SEQ ID NO: 728880 - RNA, 17 nt, Artificial Sequence
  Synthetic
uuucuaccccaaauaaa

SEQ ID NO: 728881 - RNA, 17 nt, Artificial Sequence
  Synthetic
cucccacuccaaauaaa

SEQ ID NO: 728882 - RNA, 17 nt, Artificial Sequence
  Synthetic
auuacucagcaaauaaa

SEQ ID NO: 728883 - RNA, 17 nt, Artificial Sequence
  Synthetic
aaucacuugcaaauaaa

SEQ ID NO: 728884 - RNA, 17 nt, Artificial Sequence
  Synthetic
caggaaaaagaaauaaa

SEQ ID NO: 728885 - RNA, 17 nt, Artificial Sequence
  Synthetic
caggagaaagaaauaaa

SEQ ID NO: 728886 - RNA, 17 nt, Artificial Sequence
  Synthetic
caagggaaagaaauaaa

SEQ ID NO: 728887 - RNA, 17 nt, Artificial Sequence
  Synthetic
aaacaaugagaaauaaa

SEQ ID NO: 728888 - RNA, 17 nt, Artificial Sequence
  Synthetic
aaauuacuagaaauaaa

SEQ ID NO: 728889 - RNA, 17 nt, Artificial Sequence
  Synthetic
cccaaaaaggaaauaaa

SEQ ID NO: 728890 - RNA, 17 nt, Artificial Sequence
  Synthetic
caggagaaggaaauaaa

SEQ ID NO: 728891 - RNA, 17 nt, Artificial Sequence
  Synthetic
aacaaggaggaaauaaa

SEQ ID NO: 728892 - RNA, 17 nt, Artificial Sequence
  Synthetic
cacagacuggaaauaaa

SEQ ID NO: 728893 - RNA, 17 nt, Artificial Sequence
  Synthetic
aaaauggcugaaauaaa

SEQ ID NO: 728894 - RNA, 17 nt, Artificial Sequence
  Synthetic
aauucugcugaaauaaa

SEQ ID NO: 728895 - RNA, 17 nt, Artificial Sequence
  Synthetic
aacaagcacuaaauaaa

SEQ ID NO: 728896 - RNA, 17 nt, Artificial Sequence
  Synthetic
uuaaaaaucuaaauaaa

SEQ ID NO: 728897 - RNA, 17 nt, Artificial Sequence
  Synthetic
cuuuuuuucuaaauaaa

SEQ ID NO: 728898 - RNA, 17 nt, Artificial Sequence
  Synthetic
uaaauccuguaaauaaa

SEQ ID NO: 728899 - RNA, 17 nt, Artificial Sequence
  Synthetic
ucaaaagauuaaauaaa

SEQ ID NO: 728900 - RNA, 17 nt, Artificial Sequence
  Synthetic
uucccuuauuaaauaaa

SEQ ID NO: 728901 - RNA, 17 nt, Artificial Sequence
  Synthetic
uuuugguuuuaaauaaa

SEQ ID NO: 728902 - RNA, 17 nt, Artificial Sequence
  Synthetic
uucauucacacaauaaa

SEQ ID NO: 728903 - RNA, 17 nt, Artificial Sequence
  Synthetic
auuuucuacacaauaaa

SEQ ID NO: 728904 - RNA, 17 nt, Artificial Sequence
  Synthetic
uuggaaaccacaauaaa

SEQ ID NO: 728905 - RNA, 17 nt, Artificial Sequence
  Synthetic
caaaggaugacaauaaa

SEQ ID NO: 728906 - RNA, 17 nt, Artificial Sequence
  Synthetic
uuccaagcagcaauaaa

SEQ ID NO: 728907 - RNA, 17 nt, Artificial Sequence
  Synthetic
caaagcaaggcaauaaa

SEQ ID NO: 728908 - RNA, 17 nt, Artificial Sequence
  Synthetic
auggacacaucaauaaa

SEQ ID NO: 728909 - RNA, 17 nt, Artificial Sequence
  Synthetic
agguauucaucaauaaa

SEQ ID NO: 728910 - RNA, 17 nt, Artificial Sequence
  Synthetic
acucccuacucaauaaa

SEQ ID NO: 728911 - RNA, 17 nt, Artificial Sequence
  Synthetic
aguagacccucaauaaa

SEQ ID NO: 728912 - RNA, 17 nt, Artificial Sequence
  Synthetic
uucuacaucucaauaaa

SEQ ID NO: 728913 - RNA, 17 nt, Artificial Sequence
  Synthetic
cuaaucucuucaauaaa

SEQ ID NO: 728914 - RNA, 17 nt, Artificial Sequence
  Synthetic
acagucucuucaauaaa

SEQ ID NO: 728915 - RNA, 17 nt, Artificial Sequence
  Synthetic
auuacuauaagaauaaa

SEQ ID NO: 728916 - RNA, 17 nt, Artificial Sequence
  Synthetic
cauggagacagaauaaa

SEQ ID NO: 728917 - RNA, 17 nt, Artificial Sequence
  Synthetic
uaaauaaggagaauaaa

SEQ ID NO: 728918 - RNA, 17 nt, Artificial Sequence
  Synthetic
aucaauaugagaauaaa

SEQ ID NO: 728919 - RNA, 17 nt, Artificial Sequence
  Synthetic
cugcacuauagaauaaa

SEQ ID NO: 728920 - RNA, 17 nt, Artificial Sequence
  Synthetic
cuuucaacuagaauaaa

SEQ ID NO: 728921 - RNA, 17 nt, Artificial Sequence
  Synthetic
aaggauuuuagaauaaa

SEQ ID NO: 728922 - RNA, 17 nt, Artificial Sequence
  Synthetic
accuugaaaugaauaaa

SEQ ID NO: 728923 - RNA, 17 nt, Artificial Sequence
  Synthetic
aaugaacaaugaauaaa

SEQ ID NO: 728924 - RNA, 17 nt, Artificial Sequence
  Synthetic
uacuuuccaugaauaaa

SEQ ID NO: 728925 - RNA, 17 nt, Artificial Sequence
  Synthetic
uucuugucaugaauaaa

SEQ ID NO: 728926 - RNA, 17 nt, Artificial Sequence
  Synthetic
aaccguuugugaauaaa

SEQ ID NO: 728927 - RNA, 17 nt, Artificial Sequence
  Synthetic
cagucaauaauaauaaa

SEQ ID NO: 728928 - RNA, 17 nt, Artificial Sequence
  Synthetic
agaaaugacauaauaaa

SEQ ID NO: 728929 - RNA, 17 nt, Artificial Sequence
  Synthetic
aaauuuaauauaauaaa

SEQ ID NO: 728930 - RNA, 17 nt, Artificial Sequence
  Synthetic
auccagcauauaauaaa

SEQ ID NO: 728931 - RNA, 17 nt, Artificial Sequence
  Synthetic
uccuuguagcuaauaaa

SEQ ID NO: 728932 - RNA, 17 nt, Artificial Sequence
  Synthetic
uugguuuagcuaauaaa

SEQ ID NO: 728933 - RNA, 17 nt, Artificial Sequence
  Synthetic
uuagauucucuaauaaa

SEQ ID NO: 728934 - RNA, 17 nt, Artificial Sequence
  Synthetic
acuaaagaaguaauaaa

SEQ ID NO: 728935 - RNA, 17 nt, Artificial Sequence
  Synthetic
agauguuggguaauaaa

SEQ ID NO: 728936 - RNA, 17 nt, Artificial Sequence
  Synthetic
caugguaaauuaauaaa

SEQ ID NO: 728937 - RNA, 17 nt, Artificial Sequence
  Synthetic
ugaaaauaauuaauaaa

SEQ ID NO: 728938 - RNA, 17 nt, Artificial Sequence
  Synthetic
uuccacaucuuaauaaa

SEQ ID NO: 728939 - RNA, 17 nt, Artificial Sequence
  Synthetic
auucccuauuuaauaaa

SEQ ID NO: 728940 - RNA, 17 nt, Artificial Sequence
  Synthetic
acaccaaguuuaauaaa

SEQ ID NO: 728941 - RNA, 17 nt, Artificial Sequence
  Synthetic
uugauuauuuuaauaaa

SEQ ID NO: 728942 - RNA, 17 nt, Artificial Sequence
  Synthetic
ugcuguguuuuaauaaa

SEQ ID NO: 728943 - RNA, 17 nt, Artificial Sequence
  Synthetic
auauacccaaacauaaa

SEQ ID NO: 728944 - RNA, 17 nt, Artificial Sequence
  Synthetic
augguagagaacauaaa

SEQ ID NO: 728945 - RNA, 17 nt, Artificial Sequence
  Synthetic
uuucccugacacauaaa

SEQ ID NO: 728946 - RNA, 17 nt, Artificial Sequence
  Synthetic
aguggacagcccauaaa

SEQ ID NO: 728947 - RNA, 17 nt, Artificial Sequence
  Synthetic
ccaggauaauccauaaa

SEQ ID NO: 728948 - RNA, 17 nt, Artificial Sequence
  Synthetic
ucauaacaaagcauaaa

SEQ ID NO: 728949 - RNA, 17 nt, Artificial Sequence
  Synthetic
aaacaaaagcgcauaaa

SEQ ID NO: 728950 - RNA, 17 nt, Artificial Sequence
  Synthetic
aauguacguaucauaaa

SEQ ID NO: 728951 - RNA, 17 nt, Artificial Sequence
  Synthetic
accucauaacucauaaa

SEQ ID NO: 728952 - RNA, 17 nt, Artificial Sequence
  Synthetic
ucuaauguccucauaaa

SEQ ID NO: 728953 - RNA, 17 nt, Artificial Sequence
  Synthetic
agaguuuuucucauaaa

SEQ ID NO: 728954 - RNA, 17 nt, Artificial Sequence
  Synthetic
uaugguguugucauaaa

SEQ ID NO: 728955 - RNA, 17 nt, Artificial Sequence
  Synthetic
uaaucuagaaagauaaa

SEQ ID NO: 728956 - RNA, 17 nt, Artificial Sequence
  Synthetic
cguuuuagaaagauaaa

SEQ ID NO: 728957 - RNA, 17 nt, Artificial Sequence
  Synthetic
ucaccaucacagauaaa

SEQ ID NO: 728958 - RNA, 17 nt, Artificial Sequence
  Synthetic
aguaauagccagauaaa

SEQ ID NO: 728959 - RNA, 17 nt, Artificial Sequence
  Synthetic
aaauaucuugagauaaa

SEQ ID NO: 728960 - RNA, 17 nt, Artificial Sequence
  Synthetic
uuuuauuuugagauaaa

SEQ ID NO: 728961 - RNA, 17 nt, Artificial Sequence
  Synthetic
uaaauaauaacgauaaa

SEQ ID NO: 728962 - RNA, 17 nt, Artificial Sequence
  Synthetic
auguacagagcgauaaa

SEQ ID NO: 728963 - RNA, 17 nt, Artificial Sequence
  Synthetic
cagguaccaaggauaaa

SEQ ID NO: 728964 - RNA, 17 nt, Artificial Sequence
  Synthetic
acagcuugaaggauaaa

SEQ ID NO: 728965 - RNA, 17 nt, Artificial Sequence
  Synthetic
caaaaaguaaggauaaa

SEQ ID NO: 728966 - RNA, 17 nt, Artificial Sequence
  Synthetic
ucacccuuaaggauaaa

SEQ ID NO: 728967 - RNA, 17 nt, Artificial Sequence
  Synthetic
uuguguguggggauaaa

SEQ ID NO: 728968 - RNA, 17 nt, Artificial Sequence
  Synthetic
auaaugcaauggauaaa

SEQ ID NO: 728969 - RNA, 17 nt, Artificial Sequence
  Synthetic
auauaggaauggauaaa

SEQ ID NO: 728970 - RNA, 17 nt, Artificial Sequence
  Synthetic
cuccagccauggauaaa

SEQ ID NO: 728971 - RNA, 17 nt, Artificial Sequence
  Synthetic
ccuuuuuuuuggauaaa

SEQ ID NO: 728972 - RNA, 17 nt, Artificial Sequence
  Synthetic
caagaaaaaaugauaaa

SEQ ID NO: 728973 - RNA, 17 nt, Artificial Sequence
  Synthetic
caauaaaaaaugauaaa

SEQ ID NO: 728974 - RNA, 17 nt, Artificial Sequence
  Synthetic
auaaacagaaugauaaa

SEQ ID NO: 728975 - RNA, 17 nt, Artificial Sequence
  Synthetic
cauuaaauaaugauaaa

SEQ ID NO: 728976 - RNA, 17 nt, Artificial Sequence
  Synthetic
cauuguauaaugauaaa

SEQ ID NO: 728977 - RNA, 17 nt, Artificial Sequence
  Synthetic
cauucauaacugauaaa

SEQ ID NO: 728978 - RNA, 17 nt, Artificial Sequence
  Synthetic
caaaguagacugauaaa

SEQ ID NO: 728979 - RNA, 17 nt, Artificial Sequence
  Synthetic
uuccucaaccugauaaa

SEQ ID NO: 728980 - RNA, 17 nt, Artificial Sequence
  Synthetic
caaucuuuccugauaaa

SEQ ID NO: 728981 - RNA, 17 nt, Artificial Sequence
  Synthetic
ccuacucaucugauaaa

SEQ ID NO: 728982 - RNA, 17 nt, Artificial Sequence
  Synthetic
cuguaaugcuugauaaa

SEQ ID NO: 728983 - RNA, 17 nt, Artificial Sequence
  Synthetic
agacaucauuugauaaa

SEQ ID NO: 728984 - RNA, 17 nt, Artificial Sequence
  Synthetic
auuguucaaaauauaaa

SEQ ID NO: 728985 - RNA, 17 nt, Artificial Sequence
  Synthetic
auuaguugaaauauaaa

SEQ ID NO: 728986 - RNA, 17 nt, Artificial Sequence
  Synthetic
uuaacuuuaaauauaaa

SEQ ID NO: 728987 - RNA, 17 nt, Artificial Sequence
  Synthetic
uagaagaaccauauaaa

SEQ ID NO: 728988 - RNA, 17 nt, Artificial Sequence
  Synthetic
cauugaaagcauauaaa

SEQ ID NO: 728989 - RNA, 17 nt, Artificial Sequence
  Synthetic
acugccuggcauauaaa

SEQ ID NO: 728990 - RNA, 17 nt, Artificial Sequence
  Synthetic
uagauacaucauauaaa

SEQ ID NO: 728991 - RNA, 17 nt, Artificial Sequence
  Synthetic
cagacaccucauauaaa

SEQ ID NO: 728992 - RNA, 17 nt, Artificial Sequence
  Synthetic
acacggauggauauaaa

SEQ ID NO: 728993 - RNA, 17 nt, Artificial Sequence
  Synthetic
uucuaaagugauauaaa

SEQ ID NO: 728994 - RNA, 17 nt, Artificial Sequence
  Synthetic
auguugaaauauauaaa

SEQ ID NO: 728995 - RNA, 17 nt, Artificial Sequence
  Synthetic
cuaagugaauauauaaa

SEQ ID NO: 728996 - RNA, 17 nt, Artificial Sequence
  Synthetic
cauguauaauauauaaa

SEQ ID NO: 728997 - RNA, 17 nt, Artificial Sequence
  Synthetic
caaaggagauauauaaa

SEQ ID NO: 728998 - RNA, 17 nt, Artificial Sequence
  Synthetic
aguaguaguuauauaaa

SEQ ID NO: 728999 - RNA, 17 nt, Artificial Sequence
  Synthetic
accagguguuauauaaa

SEQ ID NO: 729000 - RNA, 17 nt, Artificial Sequence
  Synthetic
uaaaaacaaacuauaaa

SEQ ID NO: 729001 - RNA, 17 nt, Artificial Sequence
  Synthetic
agaugugauccuauaaa

SEQ ID NO: 729002 - RNA, 17 nt, Artificial Sequence
  Synthetic
aacugaugagcuauaaa

SEQ ID NO: 729003 - RNA, 17 nt, Artificial Sequence
  Synthetic
ugccuaugcucuauaaa

SEQ ID NO: 729004 - RNA, 17 nt, Artificial Sequence
  Synthetic
uuuuccuugucuauaaa

SEQ ID NO: 729005 - RNA, 17 nt, Artificial Sequence
  Synthetic
uguuuuuugucuauaaa

SEQ ID NO: 729006 - RNA, 17 nt, Artificial Sequence
  Synthetic
uuuagaauuucuauaaa

SEQ ID NO: 729007 - RNA, 17 nt, Artificial Sequence
  Synthetic
uauuauucuaguauaaa

SEQ ID NO: 729008 - RNA, 17 nt, Artificial Sequence
  Synthetic
uauaaaucacguauaaa

SEQ ID NO: 729009 - RNA, 17 nt, Artificial Sequence
  Synthetic
uauaaaauugguauaaa

SEQ ID NO: 729010 - RNA, 17 nt, Artificial Sequence
  Synthetic
cugugugcaauuauaaa

SEQ ID NO: 729011 - RNA, 17 nt, Artificial Sequence
  Synthetic
uuaauugaucuuauaaa

SEQ ID NO: 729012 - RNA, 17 nt, Artificial Sequence
  Synthetic
uuguaauguguuauaaa

SEQ ID NO: 729013 - RNA, 17 nt, Artificial Sequence
  Synthetic
augaguuuauuuauaaa

SEQ ID NO: 729014 - RNA, 17 nt, Artificial Sequence
  Synthetic
uauucagccuuuauaaa

SEQ ID NO: 729015 - RNA, 17 nt, Artificial Sequence
  Synthetic
ccuagagaguuuauaaa

SEQ ID NO: 729016 - RNA, 17 nt, Artificial Sequence
  Synthetic
aguugugauuuuauaaa

SEQ ID NO: 729017 - RNA, 17 nt, Artificial Sequence
  Synthetic
ucagaugguuuuauaaa

SEQ ID NO: 729018 - RNA, 17 nt, Artificial Sequence
  Synthetic
ucugaugguuuuauaaa

SEQ ID NO: 729019 - RNA, 17 nt, Artificial Sequence
  Synthetic
auucaguguuuuauaaa

SEQ ID NO: 729020 - RNA, 17 nt, Artificial Sequence
  Synthetic
cauuuccccaaacuaaa

SEQ ID NO: 729021 - RNA, 17 nt, Artificial Sequence
  Synthetic
aagacagggaaacuaaa

SEQ ID NO: 729022 - RNA, 17 nt, Artificial Sequence
  Synthetic
cagccaagagaacuaaa

SEQ ID NO: 729023 - RNA, 17 nt, Artificial Sequence
  Synthetic
aauagcagggaacuaaa

SEQ ID NO: 729024 - RNA, 17 nt, Artificial Sequence
  Synthetic
uaaguuaauuaacuaaa

SEQ ID NO: 729025 - RNA, 17 nt, Artificial Sequence
  Synthetic
uucuuagggugacuaaa

SEQ ID NO: 729026 - RNA, 17 nt, Artificial Sequence
  Synthetic
ccaaaagaaauacuaaa

SEQ ID NO: 729027 - RNA, 17 nt, Artificial Sequence
  Synthetic
aagcaauacauacuaaa

SEQ ID NO: 729028 - RNA, 17 nt, Artificial Sequence
  Synthetic
uugauagaacuacuaaa

SEQ ID NO: 729029 - RNA, 17 nt, Artificial Sequence
  Synthetic
ugagagauuguacuaaa

SEQ ID NO: 729030 - RNA, 17 nt, Artificial Sequence
  Synthetic
cauauauaauuacuaaa

SEQ ID NO: 729031 - RNA, 17 nt, Artificial Sequence
  Synthetic
cuauaucaguuacuaaa

SEQ ID NO: 729032 - RNA, 17 nt, Artificial Sequence
  Synthetic
ucuuggcuguuacuaaa

SEQ ID NO: 729033 - RNA, 17 nt, Artificial Sequence
  Synthetic
uuguucuuuuuacuaaa

SEQ ID NO: 729034 - RNA, 17 nt, Artificial Sequence
  Synthetic
acauugugucaccuaaa

SEQ ID NO: 729035 - RNA, 17 nt, Artificial Sequence
  Synthetic
uuucacauucaccuaaa

SEQ ID NO: 729036 - RNA, 17 nt, Artificial Sequence
  Synthetic
cucuuaggggaccuaaa

SEQ ID NO: 729037 - RNA, 17 nt, Artificial Sequence
  Synthetic
cuaagcagauaccuaaa

SEQ ID NO: 729038 - RNA, 17 nt, Artificial Sequence
  Synthetic
agauagguugcccuaaa

SEQ ID NO: 729039 - RNA, 17 nt, Artificial Sequence
  Synthetic
agaccuaauucccuaaa

SEQ ID NO: 729040 - RNA, 17 nt, Artificial Sequence
  Synthetic
aguuuggguucccuaaa

SEQ ID NO: 729041 - RNA, 17 nt, Artificial Sequence
  Synthetic
cauagucucagccuaaa

SEQ ID NO: 729042 - RNA, 17 nt, Artificial Sequence
  Synthetic
aaguccacaggccuaaa

SEQ ID NO: 729043 - RNA, 17 nt, Artificial Sequence
  Synthetic
aagcccagaggccuaaa

SEQ ID NO: 729044 - RNA, 17 nt, Artificial Sequence
  Synthetic
uuuucuucucuccuaaa

SEQ ID NO: 729045 - RNA, 17 nt, Artificial Sequence
  Synthetic
acauauuuuguccuaaa

SEQ ID NO: 729046 - RNA, 17 nt, Artificial Sequence
  Synthetic
uauaguucuuuccuaaa

SEQ ID NO: 729047 - RNA, 17 nt, Artificial Sequence
  Synthetic
caaaauaaaaagcuaaa

SEQ ID NO: 729048 - RNA, 17 nt, Artificial Sequence
  Synthetic
aaggucaccaagcuaaa

SEQ ID NO: 729049 - RNA, 17 nt, Artificial Sequence
  Synthetic
auauuacagaagcuaaa

SEQ ID NO: 729050 - RNA, 17 nt, Artificial Sequence
  Synthetic
auuaaagcgaagcuaaa

SEQ ID NO: 729051 - RNA, 17 nt, Artificial Sequence
  Synthetic
aauaugugacagcuaaa

SEQ ID NO: 729052 - RNA, 17 nt, Artificial Sequence
  Synthetic
cuagaaaaucagcuaaa

SEQ ID NO: 729053 - RNA, 17 nt, Artificial Sequence
  Synthetic
ucaguauuucagcuaaa

SEQ ID NO: 729054 - RNA, 17 nt, Artificial Sequence
  Synthetic
uuuuuaguugagcuaaa

SEQ ID NO: 729055 - RNA, 17 nt, Artificial Sequence
  Synthetic
aaagucauauagcuaaa

SEQ ID NO: 729056 - RNA, 17 nt, Artificial Sequence
  Synthetic
ccaugugccuagcuaaa

SEQ ID NO: 729057 - RNA, 17 nt, Artificial Sequence
  Synthetic
uuggauaugacgcuaaa

SEQ ID NO: 729058 - RNA, 17 nt, Artificial Sequence
  Synthetic
aaaauuuaaaggcuaaa

SEQ ID NO: 729059 - RNA, 17 nt, Artificial Sequence
  Synthetic
uaagguaacaggcuaaa

SEQ ID NO: 729060 - RNA, 17 nt, Artificial Sequence
  Synthetic
cuccagccauggcuaaa

SEQ ID NO: 729061 - RNA, 17 nt, Artificial Sequence
  Synthetic
acucucugguggcuaaa

SEQ ID NO: 729062 - RNA, 17 nt, Artificial Sequence
  Synthetic
uauguuggccugcuaaa

SEQ ID NO: 729063 - RNA, 17 nt, Artificial Sequence
  Synthetic
aaaugguaagugcuaaa

SEQ ID NO: 729064 - RNA, 17 nt, Artificial Sequence
  Synthetic
uuuccuccuuugcuaaa

SEQ ID NO: 729065 - RNA, 17 nt, Artificial Sequence
  Synthetic
ucaugugcuuugcuaaa

SEQ ID NO: 729066 - RNA, 17 nt, Artificial Sequence
  Synthetic
uaaaaucuaaaucuaaa

SEQ ID NO: 729067 - RNA, 17 nt, Artificial Sequence
  Synthetic
cuugcagggaaucuaaa

SEQ ID NO: 729068 - RNA, 17 nt, Artificial Sequence
  Synthetic
aaagucuuuaaucuaaa

SEQ ID NO: 729069 - RNA, 17 nt, Artificial Sequence
  Synthetic
uccuccugacaucuaaa

SEQ ID NO: 729070 - RNA, 17 nt, Artificial Sequence
  Synthetic
ugccuuuaccaucuaaa

SEQ ID NO: 729071 - RNA, 17 nt, Artificial Sequence
  Synthetic
auccauauggaucuaaa

SEQ ID NO: 729072 - RNA, 17 nt, Artificial Sequence
  Synthetic
ucaugugaauaucuaaa

SEQ ID NO: 729073 - RNA, 17 nt, Artificial Sequence
  Synthetic
uguacuguauaucuaaa

SEQ ID NO: 729074 - RNA, 17 nt, Artificial Sequence
  Synthetic
uacgguaauacucuaaa

SEQ ID NO: 729075 - RNA, 17 nt, Artificial Sequence
  Synthetic
ugccuggagccucuaaa

SEQ ID NO: 729076 - RNA, 17 nt, Artificial Sequence
  Synthetic
uucagcgugucucuaaa

SEQ ID NO: 729077 - RNA, 17 nt, Artificial Sequence
  Synthetic
acguuauaaagucuaaa

SEQ ID NO: 729078 - RNA, 17 nt, Artificial Sequence
  Synthetic
acuggggaaauucuaaa

SEQ ID NO: 729079 - RNA, 17 nt, Artificial Sequence
  Synthetic
auacaacgaauucuaaa

SEQ ID NO: 729080 - RNA, 17 nt, Artificial Sequence
  Synthetic
cuuagcuuuauucuaaa

SEQ ID NO: 729081 - RNA, 17 nt, Artificial Sequence
  Synthetic
ugugcacagcuucuaaa

SEQ ID NO: 729082 - RNA, 17 nt, Artificial Sequence
  Synthetic
cuuuuuuugcuucuaaa

SEQ ID NO: 729083 - RNA, 17 nt, Artificial Sequence
  Synthetic
uguuuaauucuucuaaa

SEQ ID NO: 729084 - RNA, 17 nt, Artificial Sequence
  Synthetic
cuugugaaaguucuaaa

SEQ ID NO: 729085 - RNA, 17 nt, Artificial Sequence
  Synthetic
uucuuaagaguucuaaa

SEQ ID NO: 729086 - RNA, 17 nt, Artificial Sequence
  Synthetic
ucaauccuauuucuaaa

SEQ ID NO: 729087 - RNA, 17 nt, Artificial Sequence
  Synthetic
caaucacuuuuucuaaa

SEQ ID NO: 729088 - RNA, 17 nt, Artificial Sequence
  Synthetic
uuacuagaaaaaguaaa

SEQ ID NO: 729089 - RNA, 17 nt, Artificial Sequence
  Synthetic
agcagguaaaaaguaaa

SEQ ID NO: 729090 - RNA, 17 nt, Artificial Sequence
  Synthetic
uugcucaggaaaguaaa

SEQ ID NO: 729091 - RNA, 17 nt, Artificial Sequence
  Synthetic
cauagacugaaaguaaa

SEQ ID NO: 729092 - RNA, 17 nt, Artificial Sequence
  Synthetic
acauauuuccaaguaaa

SEQ ID NO: 729093 - RNA, 17 nt, Artificial Sequence
  Synthetic
uucacaugggaaguaaa

SEQ ID NO: 729094 - RNA, 17 nt, Artificial Sequence
  Synthetic
agcaacugauaaguaaa

SEQ ID NO: 729095 - RNA, 17 nt, Artificial Sequence
  Synthetic
uugcaaaucuaaguaaa

SEQ ID NO: 729096 - RNA, 17 nt, Artificial Sequence
  Synthetic
ugugagcccacaguaaa

SEQ ID NO: 729097 - RNA, 17 nt, Artificial Sequence
  Synthetic
aaaacaauuacaguaaa

SEQ ID NO: 729098 - RNA, 17 nt, Artificial Sequence
  Synthetic
uauuuucccccaguaaa

SEQ ID NO: 729099 - RNA, 17 nt, Artificial Sequence
  Synthetic
ucuaucugcccaguaaa

SEQ ID NO: 729100 - RNA, 17 nt, Artificial Sequence
  Synthetic
uguccuaucccaguaaa

SEQ ID NO: 729101 - RNA, 17 nt, Artificial Sequence
  Synthetic
cucauagaagcaguaaa

SEQ ID NO: 729102 - RNA, 17 nt, Artificial Sequence
  Synthetic
auucccuauucaguaaa

SEQ ID NO: 729103 - RNA, 17 nt, Artificial Sequence
  Synthetic
ucccucauuucaguaaa

SEQ ID NO: 729104 - RNA, 17 nt, Artificial Sequence
  Synthetic
agaguaaccagaguaaa

SEQ ID NO: 729105 - RNA, 17 nt, Artificial Sequence
  Synthetic
cuuguacagagaguaaa

SEQ ID NO: 729106 - RNA, 17 nt, Artificial Sequence
  Synthetic
cuuuacagaggaguaaa

SEQ ID NO: 729107 - RNA, 17 nt, Artificial Sequence
  Synthetic
ccacagguuggaguaaa

SEQ ID NO: 729108 - RNA, 17 nt, Artificial Sequence
  Synthetic
auauuacugugaguaaa

SEQ ID NO: 729109 - RNA, 17 nt, Artificial Sequence
  Synthetic
agaauucccauaguaaa

SEQ ID NO: 729110 - RNA, 17 nt, Artificial Sequence
  Synthetic
agucaggauauaguaaa

SEQ ID NO: 729111 - RNA, 17 nt, Artificial Sequence
  Synthetic
ucaauaguuauaguaaa

SEQ ID NO: 729112 - RNA, 17 nt, Artificial Sequence
  Synthetic
aauuuuaugcuaguaaa

SEQ ID NO: 729113 - RNA, 17 nt, Artificial Sequence
  Synthetic
uucaaugagguaguaaa

SEQ ID NO: 729114 - RNA, 17 nt, Artificial Sequence
  Synthetic
ucauucucuguaguaaa

SEQ ID NO: 729115 - RNA, 17 nt, Artificial Sequence
  Synthetic
cauuuugguguaguaaa

SEQ ID NO: 729116 - RNA, 17 nt, Artificial Sequence
  Synthetic
auuuuuggauuaguaaa

SEQ ID NO: 729117 - RNA, 17 nt, Artificial Sequence
  Synthetic
auuacuaacuuaguaaa

SEQ ID NO: 729118 - RNA, 17 nt, Artificial Sequence
  Synthetic
uguaauguaaacguaaa

SEQ ID NO: 729119 - RNA, 17 nt, Artificial Sequence
  Synthetic
uucaugugauacguaaa

SEQ ID NO: 729120 - RNA, 17 nt, Artificial Sequence
  Synthetic
ucuaaguaucccguaaa

SEQ ID NO: 729121 - RNA, 17 nt, Artificial Sequence
  Synthetic
aauaagcaagucguaaa

SEQ ID NO: 729122 - RNA, 17 nt, Artificial Sequence
  Synthetic
aaugggaggaagguaaa

SEQ ID NO: 729123 - RNA, 17 nt, Artificial Sequence
  Synthetic
acuugaaaauagguaaa

SEQ ID NO: 729124 - RNA, 17 nt, Artificial Sequence
  Synthetic
uuauauucaacgguaaa

SEQ ID NO: 729125 - RNA, 17 nt, Artificial Sequence
  Synthetic
aaguauuuaaggguaaa

SEQ ID NO: 729126 - RNA, 17 nt, Artificial Sequence
  Synthetic
ccuugcaugaggguaaa

SEQ ID NO: 729127 - RNA, 17 nt, Artificial Sequence
  Synthetic
aagaacuuagggguaaa

SEQ ID NO: 729128 - RNA, 17 nt, Artificial Sequence
  Synthetic
cauuacauaaugguaaa

SEQ ID NO: 729129 - RNA, 17 nt, Artificial Sequence
  Synthetic
uucaguugcaugguaaa

SEQ ID NO: 729130 - RNA, 17 nt, Artificial Sequence
  Synthetic
auaucacuugugguaaa

SEQ ID NO: 729131 - RNA, 17 nt, Artificial Sequence
  Synthetic
uucguuaccuugguaaa

SEQ ID NO: 729132 - RNA, 17 nt, Artificial Sequence
  Synthetic
agccuuucuuugguaaa

SEQ ID NO: 729133 - RNA, 17 nt, Artificial Sequence
  Synthetic
aaacacaguuugguaaa

SEQ ID NO: 729134 - RNA, 17 nt, Artificial Sequence
  Synthetic
cuuauacaaaauguaaa

SEQ ID NO: 729135 - RNA, 17 nt, Artificial Sequence
  Synthetic
uuaacuuuaaauguaaa

SEQ ID NO: 729136 - RNA, 17 nt, Artificial Sequence
  Synthetic
ugcucugggaauguaaa

SEQ ID NO: 729137 - RNA, 17 nt, Artificial Sequence
  Synthetic
uuuacuuugaauguaaa

SEQ ID NO: 729138 - RNA, 17 nt, Artificial Sequence
  Synthetic
aacauuuguaauguaaa

SEQ ID NO: 729139 - RNA, 17 nt, Artificial Sequence
  Synthetic
aaugagucccauguaaa

SEQ ID NO: 729140 - RNA, 17 nt, Artificial Sequence
  Synthetic
auuuaauggcauguaaa

SEQ ID NO: 729141 - RNA, 17 nt, Artificial Sequence
  Synthetic
ugcauuagugauguaaa

SEQ ID NO: 729142 - RNA, 17 nt, Artificial Sequence
  Synthetic
uuccccaaauauguaaa

SEQ ID NO: 729143 - RNA, 17 nt, Artificial Sequence
  Synthetic
uacuguuuauauguaaa

SEQ ID NO: 729144 - RNA, 17 nt, Artificial Sequence
  Synthetic
auaguguccuauguaaa

SEQ ID NO: 729145 - RNA, 17 nt, Artificial Sequence
  Synthetic
uuccuuuccuauguaaa

SEQ ID NO: 729146 - RNA, 17 nt, Artificial Sequence
  Synthetic
uacauaugcuauguaaa

SEQ ID NO: 729147 - RNA, 17 nt, Artificial Sequence
  Synthetic
acuuuguauuauguaaa

SEQ ID NO: 729148 - RNA, 17 nt, Artificial Sequence
  Synthetic
cauuuuugcccuguaaa

SEQ ID NO: 729149 - RNA, 17 nt, Artificial Sequence
  Synthetic
ugaggacuuccuguaaa

SEQ ID NO: 729150 - RNA, 17 nt, Artificial Sequence
  Synthetic
cuucccucagcuguaaa

SEQ ID NO: 729151 - RNA, 17 nt, Artificial Sequence
  Synthetic
uuguuaaaggcuguaaa

SEQ ID NO: 729152 - RNA, 17 nt, Artificial Sequence
  Synthetic
cugucuagugcuguaaa

SEQ ID NO: 729153 - RNA, 17 nt, Artificial Sequence
  Synthetic
caauagaaaucuguaaa

SEQ ID NO: 729154 - RNA, 17 nt, Artificial Sequence
  Synthetic
ccaccucucucuguaaa

SEQ ID NO: 729155 - RNA, 17 nt, Artificial Sequence
  Synthetic
auauuaguuucuguaaa

SEQ ID NO: 729156 - RNA, 17 nt, Artificial Sequence
  Synthetic
auauuuuuuucuguaaa

SEQ ID NO: 729157 - RNA, 17 nt, Artificial Sequence
  Synthetic
aacuagguuaguguaaa

SEQ ID NO: 729158 - RNA, 17 nt, Artificial Sequence
  Synthetic
aaucaauaucguguaaa

SEQ ID NO: 729159 - RNA, 17 nt, Artificial Sequence
  Synthetic
aaucagaaagguguaaa

SEQ ID NO: 729160 - RNA, 17 nt, Artificial Sequence
  Synthetic
aaaagugaauguguaaa

SEQ ID NO: 729161 - RNA, 17 nt, Artificial Sequence
  Synthetic
aaugacgauuguguaaa

SEQ ID NO: 729162 - RNA, 17 nt, Artificial Sequence
  Synthetic
ucauggaagauuguaaa

SEQ ID NO: 729163 - RNA, 17 nt, Artificial Sequence
  Synthetic
auaaugucaguuguaaa

SEQ ID NO: 729164 - RNA, 17 nt, Artificial Sequence
  Synthetic
aaaacaaauguuguaaa

SEQ ID NO: 729165 - RNA, 17 nt, Artificial Sequence
  Synthetic
uauaucuuauuuguaaa

SEQ ID NO: 729166 - RNA, 17 nt, Artificial Sequence
  Synthetic
auucuuuuguuuguaaa

SEQ ID NO: 729167 - RNA, 17 nt, Artificial Sequence
  Synthetic
augaagaaaaaauuaaa

SEQ ID NO: 729168 - RNA, 17 nt, Artificial Sequence
  Synthetic
caaaaauaaaaauuaaa

SEQ ID NO: 729169 - RNA, 17 nt, Artificial Sequence
  Synthetic
cuaaguauaaaauuaaa

SEQ ID NO: 729170 - RNA, 17 nt, Artificial Sequence
  Synthetic
ccuccuguaaaauuaaa

SEQ ID NO: 729171 - RNA, 17 nt, Artificial Sequence
  Synthetic
auauacaccaaauuaaa

SEQ ID NO: 729172 - RNA, 17 nt, Artificial Sequence
  Synthetic
acccaauagaaauuaaa

SEQ ID NO: 729173 - RNA, 17 nt, Artificial Sequence
  Synthetic
aucuuauagaaauuaaa

SEQ ID NO: 729174 - RNA, 17 nt, Artificial Sequence
  Synthetic
auuuccuauaaauuaaa

SEQ ID NO: 729175 - RNA, 17 nt, Artificial Sequence
  Synthetic
ugggugugacaauuaaa

SEQ ID NO: 729176 - RNA, 17 nt, Artificial Sequence
  Synthetic
agcaugucucaauuaaa

SEQ ID NO: 729177 - RNA, 17 nt, Artificial Sequence
  Synthetic
ucaacaccagaauuaaa

SEQ ID NO: 729178 - RNA, 17 nt, Artificial Sequence
  Synthetic
uuccacauagaauuaaa

SEQ ID NO: 729179 - RNA, 17 nt, Artificial Sequence
  Synthetic
uuuccuaaggaauuaaa

SEQ ID NO: 729180 - RNA, 17 nt, Artificial Sequence
  Synthetic
aauuaagaggaauuaaa

SEQ ID NO: 729181 - RNA, 17 nt, Artificial Sequence
  Synthetic
augcaucacuaauuaaa

SEQ ID NO: 729182 - RNA, 17 nt, Artificial Sequence
  Synthetic
cucagugcguaauuaaa

SEQ ID NO: 729183 - RNA, 17 nt, Artificial Sequence
  Synthetic
uuuaaaguguaauuaaa

SEQ ID NO: 729184 - RNA, 17 nt, Artificial Sequence
  Synthetic
uggcagcuuuaauuaaa

SEQ ID NO: 729185 - RNA, 17 nt, Artificial Sequence
  Synthetic
auaauuuuuuaauuaaa

SEQ ID NO: 729186 - RNA, 17 nt, Artificial Sequence
  Synthetic
aaauuagaaacauuaaa

SEQ ID NO: 729187 - RNA, 17 nt, Artificial Sequence
  Synthetic
cugcaaggaacauuaaa

SEQ ID NO: 729188 - RNA, 17 nt, Artificial Sequence
  Synthetic
caggaggagacauuaaa

SEQ ID NO: 729189 - RNA, 17 nt, Artificial Sequence
  Synthetic
aaaaauucuacauuaaa

SEQ ID NO: 729190 - RNA, 17 nt, Artificial Sequence
  Synthetic
ugucacuuuacauuaaa

SEQ ID NO: 729191 - RNA, 17 nt, Artificial Sequence
  Synthetic
uuaaaaacaccauuaaa

SEQ ID NO: 729192 - RNA, 17 nt, Artificial Sequence
  Synthetic
ucacucuccccauuaaa

SEQ ID NO: 729193 - RNA, 17 nt, Artificial Sequence
  Synthetic
cugcgcagcccauuaaa

SEQ ID NO: 729194 - RNA, 17 nt, Artificial Sequence
  Synthetic
cuccaggagccauuaaa

SEQ ID NO: 729195 - RNA, 17 nt, Artificial Sequence
  Synthetic
auuagaugcucauuaaa

SEQ ID NO: 729196 - RNA, 17 nt, Artificial Sequence
  Synthetic
aauugcuagagauuaaa

SEQ ID NO: 729197 - RNA, 17 nt, Artificial Sequence
  Synthetic
aaaacaacgagauuaaa

SEQ ID NO: 729198 - RNA, 17 nt, Artificial Sequence
  Synthetic
caaaaagccugauuaaa

SEQ ID NO: 729199 - RNA, 17 nt, Artificial Sequence
  Synthetic
uaacuaaagugauuaaa

SEQ ID NO: 729200 - RNA, 17 nt, Artificial Sequence
  Synthetic
acugaaguuugauuaaa

SEQ ID NO: 729201 - RNA, 17 nt, Artificial Sequence
  Synthetic
uuuugaggaauauuaaa

SEQ ID NO: 729202 - RNA, 17 nt, Artificial Sequence
  Synthetic
aacuccuuaauauuaaa

SEQ ID NO: 729203 - RNA, 17 nt, Artificial Sequence
  Synthetic
cgugaaaugauauuaaa

SEQ ID NO: 729204 - RNA, 17 nt, Artificial Sequence
  Synthetic
ccauuguggcuauuaaa

SEQ ID NO: 729205 - RNA, 17 nt, Artificial Sequence
  Synthetic
uaaaaauguguauuaaa

SEQ ID NO: 729206 - RNA, 17 nt, Artificial Sequence
  Synthetic
cuuauauaauuauuaaa

SEQ ID NO: 729207 - RNA, 17 nt, Artificial Sequence
  Synthetic
auuuaucucuuauuaaa

SEQ ID NO: 729208 - RNA, 17 nt, Artificial Sequence
  Synthetic
uacauucauuuauuaaa

SEQ ID NO: 729209 - RNA, 17 nt, Artificial Sequence
  Synthetic
uugcugacuuuauuaaa

SEQ ID NO: 729210 - RNA, 17 nt, Artificial Sequence
  Synthetic
acagggcaaaacuuaaa

SEQ ID NO: 729211 - RNA, 17 nt, Artificial Sequence
  Synthetic
acaaaaaccaacuuaaa

SEQ ID NO: 729212 - RNA, 17 nt, Artificial Sequence
  Synthetic
ugcuuaauucacuuaaa

SEQ ID NO: 729213 - RNA, 17 nt, Artificial Sequence
  Synthetic
uugcuauaugacuuaaa

SEQ ID NO: 729214 - RNA, 17 nt, Artificial Sequence
  Synthetic
ucaaagaucuacuuaaa

SEQ ID NO: 729215 - RNA, 17 nt, Artificial Sequence
  Synthetic
uuuuuaaauuacuuaaa

SEQ ID NO: 729216 - RNA, 17 nt, Artificial Sequence
  Synthetic
uuugccaaaaccuuaaa

SEQ ID NO: 729217 - RNA, 17 nt, Artificial Sequence
  Synthetic
aaugcaauaaccuuaaa

SEQ ID NO: 729218 - RNA, 17 nt, Artificial Sequence
  Synthetic
aauagaauacccuuaaa

SEQ ID NO: 729219 - RNA, 17 nt, Artificial Sequence
  Synthetic
aauguuugagccuuaaa

SEQ ID NO: 729220 - RNA, 17 nt, Artificial Sequence
  Synthetic
uauuauuuggccuuaaa

SEQ ID NO: 729221 - RNA, 17 nt, Artificial Sequence
  Synthetic
cuauaggucuccuuaaa

SEQ ID NO: 729222 - RNA, 17 nt, Artificial Sequence
  Synthetic
augacucuguccuuaaa

SEQ ID NO: 729223 - RNA, 17 nt, Artificial Sequence
  Synthetic
aggcauuuaugcuuaaa

SEQ ID NO: 729224 - RNA, 17 nt, Artificial Sequence
  Synthetic
uuugaccucugcuuaaa

SEQ ID NO: 729225 - RNA, 17 nt, Artificial Sequence
  Synthetic
aaucuaguuugcuuaaa

SEQ ID NO: 729226 - RNA, 17 nt, Artificial Sequence
  Synthetic
caaacaaaaaucuuaaa

SEQ ID NO: 729227 - RNA, 17 nt, Artificial Sequence
  Synthetic
caaaagaaaaucuuaaa

SEQ ID NO: 729228 - RNA, 17 nt, Artificial Sequence
  Synthetic
aagaacacacucuuaaa

SEQ ID NO: 729229 - RNA, 17 nt, Artificial Sequence
  Synthetic
ucaggcaggcucuuaaa

SEQ ID NO: 729230 - RNA, 17 nt, Artificial Sequence
  Synthetic
cauucauggcucuuaaa

SEQ ID NO: 729231 - RNA, 17 nt, Artificial Sequence
  Synthetic
uaucagagucucuuaaa

SEQ ID NO: 729232 - RNA, 17 nt, Artificial Sequence
  Synthetic
auuuguguauucuuaaa

SEQ ID NO: 729233 - RNA, 17 nt, Artificial Sequence
  Synthetic
uugcucuacuucuuaaa

SEQ ID NO: 729234 - RNA, 17 nt, Artificial Sequence
  Synthetic
uucuugcucuucuuaaa

SEQ ID NO: 729235 - RNA, 17 nt, Artificial Sequence
  Synthetic
uucaaucucuucuuaaa

SEQ ID NO: 729236 - RNA, 17 nt, Artificial Sequence
  Synthetic
uugguauuuuucuuaaa

SEQ ID NO: 729237 - RNA, 17 nt, Artificial Sequence
  Synthetic
cacuuaagaaaguuaaa

SEQ ID NO: 729238 - RNA, 17 nt, Artificial Sequence
  Synthetic
uguauuuuaaaguuaaa

SEQ ID NO: 729239 - RNA, 17 nt, Artificial Sequence
  Synthetic
uuaucuuccaaguuaaa

SEQ ID NO: 729240 - RNA, 17 nt, Artificial Sequence
  Synthetic
augcaggagaaguuaaa

SEQ ID NO: 729241 - RNA, 17 nt, Artificial Sequence
  Synthetic
aucacaggucaguuaaa

SEQ ID NO: 729242 - RNA, 17 nt, Artificial Sequence
  Synthetic
auuucacuucaguuaaa

SEQ ID NO: 729243 - RNA, 17 nt, Artificial Sequence
  Synthetic
uuuguccuggaguuaaa

SEQ ID NO: 729244 - RNA, 17 nt, Artificial Sequence
  Synthetic
uuaacuaaugaguuaaa

SEQ ID NO: 729245 - RNA, 17 nt, Artificial Sequence
  Synthetic
uucuuucucacguuaaa

SEQ ID NO: 729246 - RNA, 17 nt, Artificial Sequence
  Synthetic
agucaaaauagguuaaa

SEQ ID NO: 729247 - RNA, 17 nt, Artificial Sequence
  Synthetic
uccaguucuagguuaaa

SEQ ID NO: 729248 - RNA, 17 nt, Artificial Sequence
  Synthetic
acugcuuugggguuaaa

SEQ ID NO: 729249 - RNA, 17 nt, Artificial Sequence
  Synthetic
ucaccuaaaugguuaaa

SEQ ID NO: 729250 - RNA, 17 nt, Artificial Sequence
  Synthetic
ucuaagugcugguuaaa

SEQ ID NO: 729251 - RNA, 17 nt, Artificial Sequence
  Synthetic
aaaagaaggauguuaaa

SEQ ID NO: 729252 - RNA, 17 nt, Artificial Sequence
  Synthetic
uguguuuauauguuaaa

SEQ ID NO: 729253 - RNA, 17 nt, Artificial Sequence
  Synthetic
ucuuuauauguguuaaa

SEQ ID NO: 729254 - RNA, 17 nt, Artificial Sequence
  Synthetic
aaaacauguuuguuaaa

SEQ ID NO: 729255 - RNA, 17 nt, Artificial Sequence
  Synthetic
cgccuugcuaauuuaaa

SEQ ID NO: 729256 - RNA, 17 nt, Artificial Sequence
  Synthetic
aggaagcuuaauuuaaa

SEQ ID NO: 729257 - RNA, 17 nt, Artificial Sequence
  Synthetic
auagcucuuaauuuaaa

SEQ ID NO: 729258 - RNA, 17 nt, Artificial Sequence
  Synthetic
uaggagaaacauuuaaa

SEQ ID NO: 729259 - RNA, 17 nt, Artificial Sequence
  Synthetic
ucucauuuacauuuaaa

SEQ ID NO: 729260 - RNA, 17 nt, Artificial Sequence
  Synthetic
acagcuaugcauuuaaa

SEQ ID NO: 729261 - RNA, 17 nt, Artificial Sequence
  Synthetic
augauaaaagauuuaaa

SEQ ID NO: 729262 - RNA, 17 nt, Artificial Sequence
  Synthetic
acuugaacagauuuaaa

SEQ ID NO: 729263 - RNA, 17 nt, Artificial Sequence
  Synthetic
auugucauagauuuaaa

SEQ ID NO: 729264 - RNA, 17 nt, Artificial Sequence
  Synthetic
uauaguguauauuuaaa

SEQ ID NO: 729265 - RNA, 17 nt, Artificial Sequence
  Synthetic
agagauaccuauuuaaa

SEQ ID NO: 729266 - RNA, 17 nt, Artificial Sequence
  Synthetic
ucuuuauauuauuuaaa

SEQ ID NO: 729267 - RNA, 17 nt, Artificial Sequence
  Synthetic
aucuauauuuauuuaaa

SEQ ID NO: 729268 - RNA, 17 nt, Artificial Sequence
  Synthetic
uaaacaguuacuuuaaa

SEQ ID NO: 729269 - RNA, 17 nt, Artificial Sequence
  Synthetic
caugaagucccuuuaaa

SEQ ID NO: 729270 - RNA, 17 nt, Artificial Sequence
  Synthetic
agccuuuauccuuuaaa

SEQ ID NO: 729271 - RNA, 17 nt, Artificial Sequence
  Synthetic
ugcugugguucuuuaaa

SEQ ID NO: 729272 - RNA, 17 nt, Artificial Sequence
  Synthetic
caacuuuuuucuuuaaa

SEQ ID NO: 729273 - RNA, 17 nt, Artificial Sequence
  Synthetic
aggucaacauguuuaaa

SEQ ID NO: 729274 - RNA, 17 nt, Artificial Sequence
  Synthetic
acuuacacauguuuaaa

SEQ ID NO: 729275 - RNA, 17 nt, Artificial Sequence
  Synthetic
uggaaauuauguuuaaa

SEQ ID NO: 729276 - RNA, 17 nt, Artificial Sequence
  Synthetic
uuuaauaaaauuuuaaa

SEQ ID NO: 729277 - RNA, 17 nt, Artificial Sequence
  Synthetic
accauagaaauuuuaaa

SEQ ID NO: 729278 - RNA, 17 nt, Artificial Sequence
  Synthetic
auccuauaaauuuuaaa

SEQ ID NO: 729279 - RNA, 17 nt, Artificial Sequence
  Synthetic
uuuacuuaaauuuuaaa

SEQ ID NO: 729280 - RNA, 17 nt, Artificial Sequence
  Synthetic
ccauuuuaaauuuuaaa

SEQ ID NO: 729281 - RNA, 17 nt, Artificial Sequence
  Synthetic
caaaagagaauuuuaaa

SEQ ID NO: 729282 - RNA, 17 nt, Artificial Sequence
  Synthetic
aucaccuuaauuuuaaa

SEQ ID NO: 729283 - RNA, 17 nt, Artificial Sequence
  Synthetic
acaaaacacauuuuaaa

SEQ ID NO: 729284 - RNA, 17 nt, Artificial Sequence
  Synthetic
aauauugacauuuuaaa

SEQ ID NO: 729285 - RNA, 17 nt, Artificial Sequence
  Synthetic
aauauauucauuuuaaa

SEQ ID NO: 729286 - RNA, 17 nt, Artificial Sequence
  Synthetic
uaaaagcugauuuuaaa

SEQ ID NO: 729287 - RNA, 17 nt, Artificial Sequence
  Synthetic
uuccuaaauauuuuaaa

SEQ ID NO: 729288 - RNA, 17 nt, Artificial Sequence
  Synthetic
caaaauaauauuuuaaa

SEQ ID NO: 729289 - RNA, 17 nt, Artificial Sequence
  Synthetic
aaauaauauauuuuaaa

SEQ ID NO: 729290 - RNA, 17 nt, Artificial Sequence
  Synthetic
uucuuguauauuuuaaa

SEQ ID NO: 729291 - RNA, 17 nt, Artificial Sequence
  Synthetic
uucauuucuauuuuaaa

SEQ ID NO: 729292 - RNA, 17 nt, Artificial Sequence
  Synthetic
ccacauuuuauuuuaaa

SEQ ID NO: 729293 - RNA, 17 nt, Artificial Sequence
  Synthetic
uguuagucacuuuuaaa

SEQ ID NO: 729294 - RNA, 17 nt, Artificial Sequence
  Synthetic
accucuacccuuuuaaa

SEQ ID NO: 729295 - RNA, 17 nt, Artificial Sequence
  Synthetic
uuccuugcccuuuuaaa

SEQ ID NO: 729296 - RNA, 17 nt, Artificial Sequence
  Synthetic
auccucugccuuuuaaa

SEQ ID NO: 729297 - RNA, 17 nt, Artificial Sequence
  Synthetic
acauaaacaguuuuaaa

SEQ ID NO: 729298 - RNA, 17 nt, Artificial Sequence
  Synthetic
aacucaucaguuuuaaa

SEQ ID NO: 729299 - RNA, 17 nt, Artificial Sequence
  Synthetic
cucaaucauguuuuaaa

SEQ ID NO: 729300 - RNA, 17 nt, Artificial Sequence
  Synthetic
uggaacuuuguuuuaaa

SEQ ID NO: 729301 - RNA, 17 nt, Artificial Sequence
  Synthetic
uaaagugaauuuuuaaa

SEQ ID NO: 729302 - RNA, 17 nt, Artificial Sequence
  Synthetic
uaaaaaucauuuuuaaa

SEQ ID NO: 729303 - RNA, 17 nt, Artificial Sequence
  Synthetic
ugcaauucauuuuuaaa

SEQ ID NO: 729304 - RNA, 17 nt, Artificial Sequence
  Synthetic
aaugucagauuuuuaaa

SEQ ID NO: 729305 - RNA, 17 nt, Artificial Sequence
  Synthetic
acauauugauuuuuaaa

SEQ ID NO: 729306 - RNA, 17 nt, Artificial Sequence
  Synthetic
cagucuauauuuuuaaa

SEQ ID NO: 729307 - RNA, 17 nt, Artificial Sequence
  Synthetic
aagggaagcuuuuuaaa

SEQ ID NO: 729308 - RNA, 17 nt, Artificial Sequence
  Synthetic
uugugccaguuuuuaaa

SEQ ID NO: 729309 - RNA, 17 nt, Artificial Sequence
  Synthetic
uugugccgguuuuuaaa

SEQ ID NO: 729310 - RNA, 17 nt, Artificial Sequence
  Synthetic
aagugggauuuuuuaaa

SEQ ID NO: 729311 - RNA, 17 nt, Artificial Sequence
  Synthetic
aaacuaacuuuuuuaaa

SEQ ID NO: 729312 - RNA, 17 nt, Artificial Sequence
  Synthetic
ugcuuaauuuuuuuaaa

SEQ ID NO: 729313 - RNA, 17 nt, Artificial Sequence
  Synthetic
agaaggauuuuuuuaaa

SEQ ID NO: 729314 - RNA, 17 nt, Artificial Sequence
  Synthetic
uaaaauuuuuuuuuaaa

SEQ ID NO: 729315 - RNA, 17 nt, Artificial Sequence
  Synthetic
uauucaagaaaaaacaa

SEQ ID NO: 729316 - RNA, 17 nt, Artificial Sequence
  Synthetic
aaacaagacaaaaacaa

SEQ ID NO: 729317 - RNA, 17 nt, Artificial Sequence
  Synthetic
ugagacacacaaaacaa

SEQ ID NO: 729318 - RNA, 17 nt, Artificial Sequence
  Synthetic
ucagccucccaaaacaa

SEQ ID NO: 729319 - RNA, 17 nt, Artificial Sequence
  Synthetic
aguuuauuccaaaacaa

SEQ ID NO: 729320 - RNA, 17 nt, Artificial Sequence
  Synthetic
ucuaaaaaucaaaacaa

SEQ ID NO: 729321 - RNA, 17 nt, Artificial Sequence
  Synthetic
aaauuccuucaaaacaa

SEQ ID NO: 729322 - RNA, 17 nt, Artificial Sequence
  Synthetic
uugaaacaagaaaacaa

SEQ ID NO: 729323 - RNA, 17 nt, Artificial Sequence
  Synthetic
auaauaacagaaaacaa

SEQ ID NO: 729324 - RNA, 17 nt, Artificial Sequence
  Synthetic
aaguuuuuggaaaacaa

SEQ ID NO: 729325 - RNA, 17 nt, Artificial Sequence
  Synthetic
ccauuaggcuaaaacaa

SEQ ID NO: 729326 - RNA, 17 nt, Artificial Sequence
  Synthetic
cugcucaaguaaaacaa

SEQ ID NO: 729327 - RNA, 17 nt, Artificial Sequence
  Synthetic
aucuaggaaacaaacaa

SEQ ID NO: 729328 - RNA, 17 nt, Artificial Sequence
  Synthetic
aaucgcucaccaaacaa

SEQ ID NO: 729329 - RNA, 17 nt, Artificial Sequence
  Synthetic
uugaucugaucaaacaa

SEQ ID NO: 729330 - RNA, 17 nt, Artificial Sequence
  Synthetic
acuuaacaaagaaacaa

SEQ ID NO: 729331 - RNA, 17 nt, Artificial Sequence
  Synthetic
cauuaaauaagaaacaa

SEQ ID NO: 729332 - RNA, 17 nt, Artificial Sequence
  Synthetic
caauauagcagaaacaa

SEQ ID NO: 729333 - RNA, 17 nt, Artificial Sequence
  Synthetic
acgcggugcagaaacaa

SEQ ID NO: 729334 - RNA, 17 nt, Artificial Sequence
  Synthetic
aagaugcugagaaacaa

SEQ ID NO: 729335 - RNA, 17 nt, Artificial Sequence
  Synthetic
uaauaacguagaaacaa

SEQ ID NO: 729336 - RNA, 17 nt, Artificial Sequence
  Synthetic
ccaggcagaggaaacaa

SEQ ID NO: 729337 - RNA, 17 nt, Artificial Sequence
  Synthetic
uuuuuauuaggaaacaa

SEQ ID NO: 729338 - RNA, 17 nt, Artificial Sequence
  Synthetic
agcugccucggaaacaa

SEQ ID NO: 729339 - RNA, 17 nt, Artificial Sequence
  Synthetic
aagagcugaugaaacaa

SEQ ID NO: 729340 - RNA, 17 nt, Artificial Sequence
  Synthetic
cuggccuagugaaacaa

SEQ ID NO: 729341 - RNA, 17 nt, Artificial Sequence
  Synthetic
aucuaguugugaaacaa

SEQ ID NO: 729342 - RNA, 17 nt, Artificial Sequence
  Synthetic
aguuagaaaauaaacaa

SEQ ID NO: 729343 - RNA, 17 nt, Artificial Sequence
  Synthetic
uagaaaauaauaaacaa

SEQ ID NO: 729344 - RNA, 17 nt, Artificial Sequence
  Synthetic
acuugcaagauaaacaa

SEQ ID NO: 729345 - RNA, 17 nt, Artificial Sequence
  Synthetic
uuguucuagauaaacaa

SEQ ID NO: 729346 - RNA, 17 nt, Artificial Sequence
  Synthetic
aaaguagcacuaaacaa

SEQ ID NO: 729347 - RNA, 17 nt, Artificial Sequence
  Synthetic
uucccauuccuaaacaa

SEQ ID NO: 729348 - RNA, 17 nt, Artificial Sequence
  Synthetic
auuaacuagcuaaacaa

SEQ ID NO: 729349 - RNA, 17 nt, Artificial Sequence
  Synthetic
agccguacucuaaacaa

SEQ ID NO: 729350 - RNA, 17 nt, Artificial Sequence
  Synthetic
ucaaaaacaguaaacaa

SEQ ID NO: 729351 - RNA, 17 nt, Artificial Sequence
  Synthetic
agaugagauguaaacaa

SEQ ID NO: 729352 - RNA, 17 nt, Artificial Sequence
  Synthetic
ucuuuugauguaaacaa

SEQ ID NO: 729353 - RNA, 17 nt, Artificial Sequence
  Synthetic
auuucuuauguaaacaa

SEQ ID NO: 729354 - RNA, 17 nt, Artificial Sequence
  Synthetic
uuuucuuuuguaaacaa

SEQ ID NO: 729355 - RNA, 17 nt, Artificial Sequence
  Synthetic
aguacuaaguuaaacaa

SEQ ID NO: 729356 - RNA, 17 nt, Artificial Sequence
  Synthetic
ccuuaaauguuaaacaa

SEQ ID NO: 729357 - RNA, 17 nt, Artificial Sequence
  Synthetic
uuauucuuuuuaaacaa

SEQ ID NO: 729358 - RNA, 17 nt, Artificial Sequence
  Synthetic
ugagcucaaaacaacaa

SEQ ID NO: 729359 - RNA, 17 nt, Artificial Sequence
  Synthetic
cccccacccaacaacaa

SEQ ID NO: 729360 - RNA, 17 nt, Artificial Sequence
  Synthetic
cagcugcaccacaacaa

SEQ ID NO: 729361 - RNA, 17 nt, Artificial Sequence
  Synthetic
uguaaauuccacaacaa

SEQ ID NO: 729362 - RNA, 17 nt, Artificial Sequence
  Synthetic
uccuccuggcacaacaa

SEQ ID NO: 729363 - RNA, 17 nt, Artificial Sequence
  Synthetic
cuuuagguucacaacaa

SEQ ID NO: 729364 - RNA, 17 nt, Artificial Sequence
  Synthetic
uuuguccuggacaacaa

SEQ ID NO: 729365 - RNA, 17 nt, Artificial Sequence
  Synthetic
uguugaaaugacaacaa

SEQ ID NO: 729366 - RNA, 17 nt, Artificial Sequence
  Synthetic
acaaucuaugacaacaa

SEQ ID NO: 729367 - RNA, 17 nt, Artificial Sequence
  Synthetic
uuguaauauaccaacaa

SEQ ID NO: 729368 - RNA, 17 nt, Artificial Sequence
  Synthetic
uguccaacacccaacaa

SEQ ID NO: 729369 - RNA, 17 nt, Artificial Sequence
  Synthetic
accucucuccccaacaa

SEQ ID NO: 729370 - RNA, 17 nt, Artificial Sequence
  Synthetic
aguugacuucccaacaa

SEQ ID NO: 729371 - RNA, 17 nt, Artificial Sequence
  Synthetic
aaucuagcaagcaacaa

SEQ ID NO: 729372 - RNA, 17 nt, Artificial Sequence
  Synthetic
uacacugggagcaacaa

SEQ ID NO: 729373 - RNA, 17 nt, Artificial Sequence
  Synthetic
ccucagucuggcaacaa

SEQ ID NO: 729374 - RNA, 17 nt, Artificial Sequence
  Synthetic
uauaaacaaugcaacaa

SEQ ID NO: 729375 - RNA, 17 nt, Artificial Sequence
  Synthetic
aguugagauugcaacaa

SEQ ID NO: 729376 - RNA, 17 nt, Artificial Sequence
  Synthetic
uauuagucaaucaacaa

SEQ ID NO: 729377 - RNA, 17 nt, Artificial Sequence
  Synthetic
uuaacaaauaucaacaa

SEQ ID NO: 729378 - RNA, 17 nt, Artificial Sequence
  Synthetic
accaaaauccucaacaa

SEQ ID NO: 729379 - RNA, 17 nt, Artificial Sequence
  Synthetic
uaugggcaaaagaacaa

SEQ ID NO: 729380 - RNA, 17 nt, Artificial Sequence
  Synthetic
augaggguaaagaacaa

SEQ ID NO: 729381 - RNA, 17 nt, Artificial Sequence
  Synthetic
auggaagauaagaacaa

SEQ ID NO: 729382 - RNA, 17 nt, Artificial Sequence
  Synthetic
caacauuaacagaacaa

SEQ ID NO: 729383 - RNA, 17 nt, Artificial Sequence
  Synthetic
aaacuaaaccagaacaa

SEQ ID NO: 729384 - RNA, 17 nt, Artificial Sequence
  Synthetic
aucaaacugcagaacaa

SEQ ID NO: 729385 - RNA, 17 nt, Artificial Sequence
  Synthetic
ccuuaugaagagaacaa

SEQ ID NO: 729386 - RNA, 17 nt, Artificial Sequence
  Synthetic
auuucaguugagaacaa

SEQ ID NO: 729387 - RNA, 17 nt, Artificial Sequence
  Synthetic
aaaggcauauagaacaa

SEQ ID NO: 729388 - RNA, 17 nt, Artificial Sequence
  Synthetic
acucacaauuagaacaa

SEQ ID NO: 729389 - RNA, 17 nt, Artificial Sequence
  Synthetic
auugaacacucgaacaa

SEQ ID NO: 729390 - RNA, 17 nt, Artificial Sequence
  Synthetic
augaccccagggaacaa

SEQ ID NO: 729391 - RNA, 17 nt, Artificial Sequence
  Synthetic
ucugacagagggaacaa

SEQ ID NO: 729392 - RNA, 17 nt, Artificial Sequence
  Synthetic
uugugggccuggaacaa

SEQ ID NO: 729393 - RNA, 17 nt, Artificial Sequence
  Synthetic
augagugaaaugaacaa

SEQ ID NO: 729394 - RNA, 17 nt, Artificial Sequence
  Synthetic
caauaacgaaugaacaa

SEQ ID NO: 729395 - RNA, 17 nt, Artificial Sequence
  Synthetic
aagacagacaugaacaa

SEQ ID NO: 729396 - RNA, 17 nt, Artificial Sequence
  Synthetic
aaucaacauaugaacaa

SEQ ID NO: 729397 - RNA, 17 nt, Artificial Sequence
  Synthetic
cuaugagaacugaacaa

SEQ ID NO: 729398 - RNA, 17 nt, Artificial Sequence
  Synthetic
agagcacaccugaacaa

SEQ ID NO: 729399 - RNA, 17 nt, Artificial Sequence
  Synthetic
uuuaacaagcugaacaa

SEQ ID NO: 729400 - RNA, 17 nt, Artificial Sequence
  Synthetic
ugagaauaucugaacaa

SEQ ID NO: 729401 - RNA, 17 nt, Artificial Sequence
  Synthetic
auuuuuaaagugaacaa

SEQ ID NO: 729402 - RNA, 17 nt, Artificial Sequence
  Synthetic
cucucugaauugaacaa

SEQ ID NO: 729403 - RNA, 17 nt, Artificial Sequence
  Synthetic
uucaaaagauugaacaa

SEQ ID NO: 729404 - RNA, 17 nt, Artificial Sequence
  Synthetic
aaaaguaggaauaacaa

SEQ ID NO: 729405 - RNA, 17 nt, Artificial Sequence
  Synthetic
ugagauaauuauaacaa

SEQ ID NO: 729406 - RNA, 17 nt, Artificial Sequence
  Synthetic
ugguaguauuauaacaa

SEQ ID NO: 729407 - RNA, 17 nt, Artificial Sequence
  Synthetic
auuucucacccuaacaa

SEQ ID NO: 729408 - RNA, 17 nt, Artificial Sequence
  Synthetic
aacauaugugcuaacaa

SEQ ID NO: 729409 - RNA, 17 nt, Artificial Sequence
  Synthetic
auuuucucaucuaacaa

SEQ ID NO: 729410 - RNA, 17 nt, Artificial Sequence
  Synthetic
uaaggaugaucuaacaa

SEQ ID NO: 729411 - RNA, 17 nt, Artificial Sequence
  Synthetic
agaaacagauguaacaa

SEQ ID NO: 729412 - RNA, 17 nt, Artificial Sequence
  Synthetic
acaaaaaacuguaacaa

SEQ ID NO: 729413 - RNA, 17 nt, Artificial Sequence
  Synthetic
ugaguugugauuaacaa

SEQ ID NO: 729414 - RNA, 17 nt, Artificial Sequence
  Synthetic
auuuggcauauuaacaa

SEQ ID NO: 729415 - RNA, 17 nt, Artificial Sequence
  Synthetic
uggauggaacuuaacaa

SEQ ID NO: 729416 - RNA, 17 nt, Artificial Sequence
  Synthetic
aacaaauaaguuaacaa

SEQ ID NO: 729417 - RNA, 17 nt, Artificial Sequence
  Synthetic
agagcuagguuuaacaa

SEQ ID NO: 729418 - RNA, 17 nt, Artificial Sequence
  Synthetic
auguacuauuuuaacaa

SEQ ID NO: 729419 - RNA, 17 nt, Artificial Sequence
  Synthetic
cuguccaguuuuaacaa

SEQ ID NO: 729420 - RNA, 17 nt, Artificial Sequence
  Synthetic
aaaccaucaaaacacaa

SEQ ID NO: 729421 - RNA, 17 nt, Artificial Sequence
  Synthetic
cgaggaauaaaacacaa

SEQ ID NO: 729422 - RNA, 17 nt, Artificial Sequence
  Synthetic
uaaggaaacaaacacaa

SEQ ID NO: 729423 - RNA, 17 nt, Artificial Sequence
  Synthetic
aguggcuagaaacacaa

SEQ ID NO: 729424 - RNA, 17 nt, Artificial Sequence
  Synthetic
cccuuauauaaacacaa

SEQ ID NO: 729425 - RNA, 17 nt, Artificial Sequence
  Synthetic
ucucuauuuaaacacaa

SEQ ID NO: 729426 - RNA, 17 nt, Artificial Sequence
  Synthetic
ugaagucaggaacacaa

SEQ ID NO: 729427 - RNA, 17 nt, Artificial Sequence
  Synthetic
ugcuguggggaacacaa

SEQ ID NO: 729428 - RNA, 17 nt, Artificial Sequence
  Synthetic
aaauuuauugaacacaa

SEQ ID NO: 729429 - RNA, 17 nt, Artificial Sequence
  Synthetic
cacagucaauaacacaa

SEQ ID NO: 729430 - RNA, 17 nt, Artificial Sequence
  Synthetic
aggggaacaacacacaa

SEQ ID NO: 729431 - RNA, 17 nt, Artificial Sequence
  Synthetic
cuaggauagacacacaa

SEQ ID NO: 729432 - RNA, 17 nt, Artificial Sequence
  Synthetic
cagacccacccacacaa

SEQ ID NO: 729433 - RNA, 17 nt, Artificial Sequence
  Synthetic
auggucaaaucacacaa

SEQ ID NO: 729434 - RNA, 17 nt, Artificial Sequence
  Synthetic
cugcauuucucacacaa

SEQ ID NO: 729435 - RNA, 17 nt, Artificial Sequence
  Synthetic
uuuuucagaagacacaa

SEQ ID NO: 729436 - RNA, 17 nt, Artificial Sequence
  Synthetic
uugauagacagacacaa

SEQ ID NO: 729437 - RNA, 17 nt, Artificial Sequence
  Synthetic
aaaaaggcgagacacaa

SEQ ID NO: 729438 - RNA, 17 nt, Artificial Sequence
  Synthetic
ugugguauaggacacaa

SEQ ID NO: 729439 - RNA, 17 nt, Artificial Sequence
  Synthetic
aucaaacuuugacacaa

SEQ ID NO: 729440 - RNA, 17 nt, Artificial Sequence
  Synthetic
ugagaauaaauacacaa

SEQ ID NO: 729441 - RNA, 17 nt, Artificial Sequence
  Synthetic
ccauaccccauacacaa

SEQ ID NO: 729442 - RNA, 17 nt, Artificial Sequence
  Synthetic
uuuugaaaacuacacaa

SEQ ID NO: 729443 - RNA, 17 nt, Artificial Sequence
  Synthetic
aauggaauacuacacaa

SEQ ID NO: 729444 - RNA, 17 nt, Artificial Sequence
  Synthetic
uuuccaaaccuacacaa

SEQ ID NO: 729445 - RNA, 17 nt, Artificial Sequence
  Synthetic
acgcuguagguacacaa

SEQ ID NO: 729446 - RNA, 17 nt, Artificial Sequence
  Synthetic
acacacaccuuacacaa

SEQ ID NO: 729447 - RNA, 17 nt, Artificial Sequence
  Synthetic
uaguacuuuuuacacaa

SEQ ID NO: 729448 - RNA, 17 nt, Artificial Sequence
  Synthetic
aaaguugucaaccacaa

SEQ ID NO: 729449 - RNA, 17 nt, Artificial Sequence
  Synthetic
uucaugaguaaccacaa

SEQ ID NO: 729450 - RNA, 17 nt, Artificial Sequence
  Synthetic
uaguucuuuaaccacaa

SEQ ID NO: 729451 - RNA, 17 nt, Artificial Sequence
  Synthetic
aauauuucagaccacaa

SEQ ID NO: 729452 - RNA, 17 nt, Artificial Sequence
  Synthetic
caaguucgagaccacaa

SEQ ID NO: 729453 - RNA, 17 nt, Artificial Sequence
  Synthetic
aucuucucugaccacaa

SEQ ID NO: 729454 - RNA, 17 nt, Artificial Sequence
  Synthetic
auaaauccuacccacaa

SEQ ID NO: 729455 - RNA, 17 nt, Artificial Sequence
  Synthetic
uccaccagaccccacaa

SEQ ID NO: 729456 - RNA, 17 nt, Artificial Sequence
  Synthetic
agcacuuuggcccacaa

SEQ ID NO: 729457 - RNA, 17 nt, Artificial Sequence
  Synthetic
aagccacucucccacaa

SEQ ID NO: 729458 - RNA, 17 nt, Artificial Sequence
  Synthetic
uuucucaagucccacaa

SEQ ID NO: 729459 - RNA, 17 nt, Artificial Sequence
  Synthetic
acccugcaaagccacaa

SEQ ID NO: 729460 - RNA, 17 nt, Artificial Sequence
  Synthetic
ccuuuuaauagccacaa

SEQ ID NO: 729461 - RNA, 17 nt, Artificial Sequence
  Synthetic
ccaucuuugugccacaa

SEQ ID NO: 729462 - RNA, 17 nt, Artificial Sequence
  Synthetic
auccaacaaauccacaa

SEQ ID NO: 729463 - RNA, 17 nt, Artificial Sequence
  Synthetic
ugccauggaauccacaa

SEQ ID NO: 729464 - RNA, 17 nt, Artificial Sequence
  Synthetic
uacuagaaucuccacaa

SEQ ID NO: 729465 - RNA, 17 nt, Artificial Sequence
  Synthetic
ccaaucucauuccacaa

SEQ ID NO: 729466 - RNA, 17 nt, Artificial Sequence
  Synthetic
cacaccgacuuccacaa

SEQ ID NO: 729467 - RNA, 17 nt, Artificial Sequence
  Synthetic
cacacugacuuccacaa

SEQ ID NO: 729468 - RNA, 17 nt, Artificial Sequence
  Synthetic
cacacggucuuccacaa

SEQ ID NO: 729469 - RNA, 17 nt, Artificial Sequence
  Synthetic
cacacugucuuccacaa

SEQ ID NO: 729470 - RNA, 17 nt, Artificial Sequence
  Synthetic
uguugcgaguuccacaa

SEQ ID NO: 729471 - RNA, 17 nt, Artificial Sequence
  Synthetic
cagauugaguuccacaa

SEQ ID NO: 729472 - RNA, 17 nt, Artificial Sequence
  Synthetic
ucaccccggaagcacaa

SEQ ID NO: 729473 - RNA, 17 nt, Artificial Sequence
  Synthetic
uauuacaaagagcacaa

SEQ ID NO: 729474 - RNA, 17 nt, Artificial Sequence
  Synthetic
agauucagagagcacaa

SEQ ID NO: 729475 - RNA, 17 nt, Artificial Sequence
  Synthetic
cauuguuuguagcacaa

SEQ ID NO: 729476 - RNA, 17 nt, Artificial Sequence
  Synthetic
ugcuguaauuagcacaa

SEQ ID NO: 729477 - RNA, 17 nt, Artificial Sequence
  Synthetic
agagaugauuagcacaa

SEQ ID NO: 729478 - RNA, 17 nt, Artificial Sequence
  Synthetic
cuccuuuauuagcacaa

SEQ ID NO: 729479 - RNA, 17 nt, Artificial Sequence
  Synthetic
auuuuggcucggcacaa

SEQ ID NO: 729480 - RNA, 17 nt, Artificial Sequence
  Synthetic
aagcauuccgggcacaa

SEQ ID NO: 729481 - RNA, 17 nt, Artificial Sequence
  Synthetic
uguaagauuuggcacaa

SEQ ID NO: 729482 - RNA, 17 nt, Artificial Sequence
  Synthetic
uauccuucucugcacaa

SEQ ID NO: 729483 - RNA, 17 nt, Artificial Sequence
  Synthetic
ucuuaggcaaaucacaa

SEQ ID NO: 729484 - RNA, 17 nt, Artificial Sequence
  Synthetic
cuggaccaacaucacaa

SEQ ID NO: 729485 - RNA, 17 nt, Artificial Sequence
  Synthetic
uuccauuaucaucacaa

SEQ ID NO: 729486 - RNA, 17 nt, Artificial Sequence
  Synthetic
uagagaccagaucacaa

SEQ ID NO: 729487 - RNA, 17 nt, Artificial Sequence
  Synthetic
auuguuagagaucacaa

SEQ ID NO: 729488 - RNA, 17 nt, Artificial Sequence
  Synthetic
uuaaucacaacucacaa

SEQ ID NO: 729489 - RNA, 17 nt, Artificial Sequence
  Synthetic
aauuacccaucucacaa

SEQ ID NO: 729490 - RNA, 17 nt, Artificial Sequence
  Synthetic
uucggggucucucacaa

SEQ ID NO: 729491 - RNA, 17 nt, Artificial Sequence
  Synthetic
cacguggucucucacaa

SEQ ID NO: 729492 - RNA, 17 nt, Artificial Sequence
  Synthetic
uuuuuuuuuucucacaa

SEQ ID NO: 729493 - RNA, 17 nt, Artificial Sequence
  Synthetic
cuauuucugagucacaa

SEQ ID NO: 729494 - RNA, 17 nt, Artificial Sequence
  Synthetic
uguuucaaaggucacaa

SEQ ID NO: 729495 - RNA, 17 nt, Artificial Sequence
  Synthetic
ucucaaagaggucacaa

SEQ ID NO: 729496 - RNA, 17 nt, Artificial Sequence
  Synthetic
auuucucacugucacaa

SEQ ID NO: 729497 - RNA, 17 nt, Artificial Sequence
  Synthetic
ccuuaauacugucacaa

SEQ ID NO: 729498 - RNA, 17 nt, Artificial Sequence
  Synthetic
agaugaggaauucacaa

SEQ ID NO: 729499 - RNA, 17 nt, Artificial Sequence
  Synthetic
aauuaagucauucacaa

SEQ ID NO: 729500 - RNA, 17 nt, Artificial Sequence
  Synthetic
cacagcacuauucacaa

SEQ ID NO: 729501 - RNA, 17 nt, Artificial Sequence
  Synthetic
augcuuuugguucacaa

SEQ ID NO: 729502 - RNA, 17 nt, Artificial Sequence
  Synthetic
ucaugaacauuucacaa

SEQ ID NO: 729503 - RNA, 17 nt, Artificial Sequence
  Synthetic
uauuaaaccuuucacaa

SEQ ID NO: 729504 - RNA, 17 nt, Artificial Sequence
  Synthetic
agaggauaacaagacaa

SEQ ID NO: 729505 - RNA, 17 nt, Artificial Sequence
  Synthetic
cagaugguacaagacaa

SEQ ID NO: 729506 - RNA, 17 nt, Artificial Sequence
  Synthetic
cccagugcagaagacaa

SEQ ID NO: 729507 - RNA, 17 nt, Artificial Sequence
  Synthetic
acacauggagaagacaa

SEQ ID NO: 729508 - RNA, 17 nt, Artificial Sequence
  Synthetic
agcagauucgaagacaa

SEQ ID NO: 729509 - RNA, 17 nt, Artificial Sequence
  Synthetic
caucaggaggaagacaa

SEQ ID NO: 729510 - RNA, 17 nt, Artificial Sequence
  Synthetic
uaugcuaaugaagacaa

SEQ ID NO: 729511 - RNA, 17 nt, Artificial Sequence
  Synthetic
cacucgguauaagacaa

SEQ ID NO: 729512 - RNA, 17 nt, Artificial Sequence
  Synthetic
cucuagaauuaagacaa

SEQ ID NO: 729513 - RNA, 17 nt, Artificial Sequence
  Synthetic
ucuaugaauccagacaa

SEQ ID NO: 729514 - RNA, 17 nt, Artificial Sequence
  Synthetic
uucuuuguuucagacaa

SEQ ID NO: 729515 - RNA, 17 nt, Artificial Sequence
  Synthetic
auagcagaaagagacaa

SEQ ID NO: 729516 - RNA, 17 nt, Artificial Sequence
  Synthetic
uaagcuugaagagacaa

SEQ ID NO: 729517 - RNA, 17 nt, Artificial Sequence
  Synthetic
caaggccgcagagacaa

SEQ ID NO: 729518 - RNA, 17 nt, Artificial Sequence
  Synthetic
aggaaagggggagacaa

SEQ ID NO: 729519 - RNA, 17 nt, Artificial Sequence
  Synthetic
auagcuuuaugagacaa

SEQ ID NO: 729520 - RNA, 17 nt, Artificial Sequence
  Synthetic
aaagucuauauagacaa

SEQ ID NO: 729521 - RNA, 17 nt, Artificial Sequence
  Synthetic
uauaaaauuauagacaa

SEQ ID NO: 729522 - RNA, 17 nt, Artificial Sequence
  Synthetic
augacaucacuagacaa

SEQ ID NO: 729523 - RNA, 17 nt, Artificial Sequence
  Synthetic
aggugacuccuagacaa

SEQ ID NO: 729524 - RNA, 17 nt, Artificial Sequence
  Synthetic
acuagaaaaguagacaa

SEQ ID NO: 729525 - RNA, 17 nt, Artificial Sequence
  Synthetic
caccuacauuuagacaa

SEQ ID NO: 729526 - RNA, 17 nt, Artificial Sequence
  Synthetic
ugcuuuuauuuagacaa

SEQ ID NO: 729527 - RNA, 17 nt, Artificial Sequence
  Synthetic
uguacaaggaccgacaa

SEQ ID NO: 729528 - RNA, 17 nt, Artificial Sequence
  Synthetic
aacuuggacaaggacaa

SEQ ID NO: 729529 - RNA, 17 nt, Artificial Sequence
  Synthetic
uaguuugauaaggacaa

SEQ ID NO: 729530 - RNA, 17 nt, Artificial Sequence
  Synthetic
uaguuugcuaaggacaa

SEQ ID NO: 729531 - RNA, 17 nt, Artificial Sequence
  Synthetic
aauaccauucaggacaa

SEQ ID NO: 729532 - RNA, 17 nt, Artificial Sequence
  Synthetic
uuaauauuucaggacaa

SEQ ID NO: 729533 - RNA, 17 nt, Artificial Sequence
  Synthetic
aaugaaugaagggacaa

SEQ ID NO: 729534 - RNA, 17 nt, Artificial Sequence
  Synthetic
agaauuucuggggacaa

SEQ ID NO: 729535 - RNA, 17 nt, Artificial Sequence
  Synthetic
acaggugcuugggacaa

SEQ ID NO: 729536 - RNA, 17 nt, Artificial Sequence
  Synthetic
ucugaucucauggacaa

SEQ ID NO: 729537 - RNA, 17 nt, Artificial Sequence
  Synthetic
cucauacagauggacaa

SEQ ID NO: 729538 - RNA, 17 nt, Artificial Sequence
  Synthetic
aagugaggacuggacaa

SEQ ID NO: 729539 - RNA, 17 nt, Artificial Sequence
  Synthetic
ccaguaugacuggacaa

SEQ ID NO: 729540 - RNA, 17 nt, Artificial Sequence
  Synthetic
caugccaugcuggacaa

SEQ ID NO: 729541 - RNA, 17 nt, Artificial Sequence
  Synthetic
uuugauaacuuggacaa

SEQ ID NO: 729542 - RNA, 17 nt, Artificial Sequence
  Synthetic
cugcaguccuuggacaa

SEQ ID NO: 729543 - RNA, 17 nt, Artificial Sequence
  Synthetic
cacacagucuuggacaa

SEQ ID NO: 729544 - RNA, 17 nt, Artificial Sequence
  Synthetic
uugacaccaaaugacaa

SEQ ID NO: 729545 - RNA, 17 nt, Artificial Sequence
  Synthetic
uuuuacuugcaugacaa

SEQ ID NO: 729546 - RNA, 17 nt, Artificial Sequence
  Synthetic
aaaguguugcaugacaa

SEQ ID NO: 729547 - RNA, 17 nt, Artificial Sequence
  Synthetic
ucuuccagugaugacaa

SEQ ID NO: 729548 - RNA, 17 nt, Artificial Sequence
  Synthetic
ucuuauuaauaugacaa

SEQ ID NO: 729549 - RNA, 17 nt, Artificial Sequence
  Synthetic
caaucaauauaugacaa

SEQ ID NO: 729550 - RNA, 17 nt, Artificial Sequence
  Synthetic
aucuauacaucugacaa

SEQ ID NO: 729551 - RNA, 17 nt, Artificial Sequence
  Synthetic
aucuacccaucugacaa

SEQ ID NO: 729552 - RNA, 17 nt, Artificial Sequence
  Synthetic
aucuauccaucugacaa

SEQ ID NO: 729553 - RNA, 17 nt, Artificial Sequence
  Synthetic
aacuaugcaucugacaa

SEQ ID NO: 729554 - RNA, 17 nt, Artificial Sequence
  Synthetic
accuacucaucugacaa

SEQ ID NO: 729555 - RNA, 17 nt, Artificial Sequence
  Synthetic
aucuacucaucugacaa

SEQ ID NO: 729556 - RNA, 17 nt, Artificial Sequence
  Synthetic
aucuauucaucugacaa

SEQ ID NO: 729557 - RNA, 17 nt, Artificial Sequence
  Synthetic
augcauagaucugacaa

SEQ ID NO: 729558 - RNA, 17 nt, Artificial Sequence
  Synthetic
ucugugaguucugacaa

SEQ ID NO: 729559 - RNA, 17 nt, Artificial Sequence
  Synthetic
auuugacauggugacaa

SEQ ID NO: 729560 - RNA, 17 nt, Artificial Sequence
  Synthetic
uugccaucaugugacaa

SEQ ID NO: 729561 - RNA, 17 nt, Artificial Sequence
  Synthetic
aaagaaagaugugacaa

SEQ ID NO: 729562 - RNA, 17 nt, Artificial Sequence
  Synthetic
cugaauuccauugacaa

SEQ ID NO: 729563 - RNA, 17 nt, Artificial Sequence
  Synthetic
aagagguggauugacaa

SEQ ID NO: 729564 - RNA, 17 nt, Artificial Sequence
  Synthetic
ucuuccccuauugacaa

SEQ ID NO: 729565 - RNA, 17 nt, Artificial Sequence
  Synthetic
uucagagguauugacaa

SEQ ID NO: 729566 - RNA, 17 nt, Artificial Sequence
  Synthetic
auuuuuaacguugacaa

SEQ ID NO: 729567 - RNA, 17 nt, Artificial Sequence
  Synthetic
acuccuaauguugacaa

SEQ ID NO: 729568 - RNA, 17 nt, Artificial Sequence
  Synthetic
ucucaaucauuugacaa

SEQ ID NO: 729569 - RNA, 17 nt, Artificial Sequence
  Synthetic
caauuucuauuugacaa

SEQ ID NO: 729570 - RNA, 17 nt, Artificial Sequence
  Synthetic
uuucaaaaguuugacaa

SEQ ID NO: 729571 - RNA, 17 nt, Artificial Sequence
  Synthetic
auaucagauuuugacaa

SEQ ID NO: 729572 - RNA, 17 nt, Artificial Sequence
  Synthetic
aagagagguuuugacaa

SEQ ID NO: 729573 - RNA, 17 nt, Artificial Sequence
  Synthetic
uuuucugguuuugacaa

SEQ ID NO: 729574 - RNA, 17 nt, Artificial Sequence
  Synthetic
uaacucauuuuugacaa

SEQ ID NO: 729575 - RNA, 17 nt, Artificial Sequence
  Synthetic
caacugauuuuugacaa

SEQ ID NO: 729576 - RNA, 17 nt, Artificial Sequence
  Synthetic
caauugauuuuugacaa

SEQ ID NO: 729577 - RNA, 17 nt, Artificial Sequence
  Synthetic
cagaaaagaaaauacaa

SEQ ID NO: 729578 - RNA, 17 nt, Artificial Sequence
  Synthetic
auaacacagaaauacaa

SEQ ID NO: 729579 - RNA, 17 nt, Artificial Sequence
  Synthetic
caggauaggaaauacaa

SEQ ID NO: 729580 - RNA, 17 nt, Artificial Sequence
  Synthetic
auuuuuuauaaauacaa

SEQ ID NO: 729581 - RNA, 17 nt, Artificial Sequence
  Synthetic
cuggaucaggaauacaa

SEQ ID NO: 729582 - RNA, 17 nt, Artificial Sequence
  Synthetic
aaaauguaggaauacaa

SEQ ID NO: 729583 - RNA, 17 nt, Artificial Sequence
  Synthetic
uuuguguaauaauacaa

SEQ ID NO: 729584 - RNA, 17 nt, Artificial Sequence
  Synthetic
cuuccuguguaauacaa

SEQ ID NO: 729585 - RNA, 17 nt, Artificial Sequence
  Synthetic
uuaaucaauuaauacaa

SEQ ID NO: 729586 - RNA, 17 nt, Artificial Sequence
  Synthetic
ugcguauauacauacaa

SEQ ID NO: 729587 - RNA, 17 nt, Artificial Sequence
  Synthetic
auguuauauacauacaa

SEQ ID NO: 729588 - RNA, 17 nt, Artificial Sequence
  Synthetic
uacuaagucccauacaa

SEQ ID NO: 729589 - RNA, 17 nt, Artificial Sequence
  Synthetic
auuauucagccauacaa

SEQ ID NO: 729590 - RNA, 17 nt, Artificial Sequence
  Synthetic
uacacguagccauacaa

SEQ ID NO: 729591 - RNA, 17 nt, Artificial Sequence
  Synthetic
uaauggguugcauacaa

SEQ ID NO: 729592 - RNA, 17 nt, Artificial Sequence
  Synthetic
auuuuguuugcauacaa

SEQ ID NO: 729593 - RNA, 17 nt, Artificial Sequence
  Synthetic
ccgucaucaucauacaa

SEQ ID NO: 729594 - RNA, 17 nt, Artificial Sequence
  Synthetic
cagagaaaaagauacaa

SEQ ID NO: 729595 - RNA, 17 nt, Artificial Sequence
  Synthetic
cuuuaaggaagauacaa

SEQ ID NO: 729596 - RNA, 17 nt, Artificial Sequence
  Synthetic
aacaggauaagauacaa

SEQ ID NO: 729597 - RNA, 17 nt, Artificial Sequence
  Synthetic
uaauaaaagagauacaa

SEQ ID NO: 729598 - RNA, 17 nt, Artificial Sequence
  Synthetic
uuacuuccaggauacaa

SEQ ID NO: 729599 - RNA, 17 nt, Artificial Sequence
  Synthetic
auggauuagggauacaa

SEQ ID NO: 729600 - RNA, 17 nt, Artificial Sequence
  Synthetic
cauacggagugauacaa

SEQ ID NO: 729601 - RNA, 17 nt, Artificial Sequence
  Synthetic
auagaaaguugauacaa

SEQ ID NO: 729602 - RNA, 17 nt, Artificial Sequence
  Synthetic
caaagauaaauauacaa

SEQ ID NO: 729603 - RNA, 17 nt, Artificial Sequence
  Synthetic
cacacacacauauacaa

SEQ ID NO: 729604 - RNA, 17 nt, Artificial Sequence
  Synthetic
uauauguccauauacaa

SEQ ID NO: 729605 - RNA, 17 nt, Artificial Sequence
  Synthetic
acuuuuuucauauacaa

SEQ ID NO: 729606 - RNA, 17 nt, Artificial Sequence
  Synthetic
aagcaaaguauauacaa

SEQ ID NO: 729607 - RNA, 17 nt, Artificial Sequence
  Synthetic
uauugauuuauauacaa

SEQ ID NO: 729608 - RNA, 17 nt, Artificial Sequence
  Synthetic
uauaaauaccuauacaa

SEQ ID NO: 729609 - RNA, 17 nt, Artificial Sequence
  Synthetic
ccaccaacaguauacaa

SEQ ID NO: 729610 - RNA, 17 nt, Artificial Sequence
  Synthetic
acaaagcaaaacuacaa

SEQ ID NO: 729611 - RNA, 17 nt, Artificial Sequence
  Synthetic
cuugcuauaaacuacaa

SEQ ID NO: 729612 - RNA, 17 nt, Artificial Sequence
  Synthetic
uccuuccugcacuacaa

SEQ ID NO: 729613 - RNA, 17 nt, Artificial Sequence
  Synthetic
uuggggguccccuacaa

SEQ ID NO: 729614 - RNA, 17 nt, Artificial Sequence
  Synthetic
cagcugcugcccuacaa

SEQ ID NO: 729615 - RNA, 17 nt, Artificial Sequence
  Synthetic
cauccauaucccuacaa

SEQ ID NO: 729616 - RNA, 17 nt, Artificial Sequence
  Synthetic
cauccacgucccuacaa

SEQ ID NO: 729617 - RNA, 17 nt, Artificial Sequence
  Synthetic
cauccaugucccuacaa

SEQ ID NO: 729618 - RNA, 17 nt, Artificial Sequence
  Synthetic
cacccaugugccuacaa

SEQ ID NO: 729619 - RNA, 17 nt, Artificial Sequence
  Synthetic
cuuaguggcuccuacaa

SEQ ID NO: 729620 - RNA, 17 nt, Artificial Sequence
  Synthetic
aggaagaacagcuacaa

SEQ ID NO: 729621 - RNA, 17 nt, Artificial Sequence
  Synthetic
uguuccugcagcuacaa

SEQ ID NO: 729622 - RNA, 17 nt, Artificial Sequence
  Synthetic
aaaauggcaggcuacaa

SEQ ID NO: 729623 - RNA, 17 nt, Artificial Sequence
  Synthetic
caaaauauaugcuacaa

SEQ ID NO: 729624 - RNA, 17 nt, Artificial Sequence
  Synthetic
ugaagucauugcuacaa

SEQ ID NO: 729625 - RNA, 17 nt, Artificial Sequence
  Synthetic
acugaugguugcuacaa

SEQ ID NO: 729626 - RNA, 17 nt, Artificial Sequence
  Synthetic
caugcauguugcuacaa

SEQ ID NO: 729627 - RNA, 17 nt, Artificial Sequence
  Synthetic
cucccagaaaucuacaa

SEQ ID NO: 729628 - RNA, 17 nt, Artificial Sequence
  Synthetic
ugaauaucuaucuacaa

SEQ ID NO: 729629 - RNA, 17 nt, Artificial Sequence
  Synthetic
uagguuauuaucuacaa

SEQ ID NO: 729630 - RNA, 17 nt, Artificial Sequence
  Synthetic
ccaagcucauucuacaa

SEQ ID NO: 729631 - RNA, 17 nt, Artificial Sequence
  Synthetic
ugugauuuuuucuacaa

SEQ ID NO: 729632 - RNA, 17 nt, Artificial Sequence
  Synthetic
agaaacagaaaguacaa

SEQ ID NO: 729633 - RNA, 17 nt, Artificial Sequence
  Synthetic
agagaaaacaaguacaa

SEQ ID NO: 729634 - RNA, 17 nt, Artificial Sequence
  Synthetic
uauacguggaaguacaa

SEQ ID NO: 729635 - RNA, 17 nt, Artificial Sequence
  Synthetic
cccaggcuggaguacaa

SEQ ID NO: 729636 - RNA, 17 nt, Artificial Sequence
  Synthetic
cccggguuggaguacaa

SEQ ID NO: 729637 - RNA, 17 nt, Artificial Sequence
  Synthetic
ugcuccucaacguacaa

SEQ ID NO: 729638 - RNA, 17 nt, Artificial Sequence
  Synthetic
auuaaauauucguacaa

SEQ ID NO: 729639 - RNA, 17 nt, Artificial Sequence
  Synthetic
uuacuuucuagguacaa

SEQ ID NO: 729640 - RNA, 17 nt, Artificial Sequence
  Synthetic
aaccaccagggguacaa

SEQ ID NO: 729641 - RNA, 17 nt, Artificial Sequence
  Synthetic
cagugacauugguacaa

SEQ ID NO: 729642 - RNA, 17 nt, Artificial Sequence
  Synthetic
uagaaaaaacuguacaa

SEQ ID NO: 729643 - RNA, 17 nt, Artificial Sequence
  Synthetic
acaaccgaaguguacaa

SEQ ID NO: 729644 - RNA, 17 nt, Artificial Sequence
  Synthetic
uacauucauguguacaa

SEQ ID NO: 729645 - RNA, 17 nt, Artificial Sequence
  Synthetic
ccaucaacauuguacaa

SEQ ID NO: 729646 - RNA, 17 nt, Artificial Sequence
  Synthetic
auggcauacuuguacaa

SEQ ID NO: 729647 - RNA, 17 nt, Artificial Sequence
  Synthetic
ucacaaaagaauuacaa

SEQ ID NO: 729648 - RNA, 17 nt, Artificial Sequence
  Synthetic
caugaucuccauuacaa

SEQ ID NO: 729649 - RNA, 17 nt, Artificial Sequence
  Synthetic
auccuaugagauuacaa

SEQ ID NO: 729650 - RNA, 17 nt, Artificial Sequence
  Synthetic
cugucaugguauuacaa

SEQ ID NO: 729651 - RNA, 17 nt, Artificial Sequence
  Synthetic
aagcgaaaaacuuacaa

SEQ ID NO: 729652 - RNA, 17 nt, Artificial Sequence
  Synthetic
acaaauacaacuuacaa

SEQ ID NO: 729653 - RNA, 17 nt, Artificial Sequence
  Synthetic
aggaauacaacuuacaa

SEQ ID NO: 729654 - RNA, 17 nt, Artificial Sequence
  Synthetic
aggaauccaacuuacaa

SEQ ID NO: 729655 - RNA, 17 nt, Artificial Sequence
  Synthetic
aggaaugcaacuuacaa

SEQ ID NO: 729656 - RNA, 17 nt, Artificial Sequence
  Synthetic
aaauucucaacuuacaa

SEQ ID NO: 729657 - RNA, 17 nt, Artificial Sequence
  Synthetic
acuguauacacuuacaa

SEQ ID NO: 729658 - RNA, 17 nt, Artificial Sequence
  Synthetic
uugauauaaccuuacaa

SEQ ID NO: 729659 - RNA, 17 nt, Artificial Sequence
  Synthetic
cauccauguccuuacaa

SEQ ID NO: 729660 - RNA, 17 nt, Artificial Sequence
  Synthetic
aaagucaaugcuuacaa

SEQ ID NO: 729661 - RNA, 17 nt, Artificial Sequence
  Synthetic
auuuuugcugcuuacaa

SEQ ID NO: 729662 - RNA, 17 nt, Artificial Sequence
  Synthetic
cuagauauaucuuacaa

SEQ ID NO: 729663 - RNA, 17 nt, Artificial Sequence
  Synthetic
uggggauugucuuacaa

SEQ ID NO: 729664 - RNA, 17 nt, Artificial Sequence
  Synthetic
aaacacaccaguuacaa

SEQ ID NO: 729665 - RNA, 17 nt, Artificial Sequence
  Synthetic
uuggacuuuaguuacaa

SEQ ID NO: 729666 - RNA, 17 nt, Artificial Sequence
  Synthetic
cuauuuuaauguuacaa

SEQ ID NO: 729667 - RNA, 17 nt, Artificial Sequence
  Synthetic
aaggaaagaauuuacaa

SEQ ID NO: 729668 - RNA, 17 nt, Artificial Sequence
  Synthetic
agggagaacauuuacaa

SEQ ID NO: 729669 - RNA, 17 nt, Artificial Sequence
  Synthetic
aauguuuugauuuacaa

SEQ ID NO: 729670 - RNA, 17 nt, Artificial Sequence
  Synthetic
uaagaaaauauuuacaa

SEQ ID NO: 729671 - RNA, 17 nt, Artificial Sequence
  Synthetic
auuuuuggacuuuacaa

SEQ ID NO: 729672 - RNA, 17 nt, Artificial Sequence
  Synthetic
uagaaucuucuuuacaa

SEQ ID NO: 729673 - RNA, 17 nt, Artificial Sequence
  Synthetic
ccauagcuuguuuacaa

SEQ ID NO: 729674 - RNA, 17 nt, Artificial Sequence
  Synthetic
aaaucuccauuuuacaa

SEQ ID NO: 729675 - RNA, 17 nt, Artificial Sequence
  Synthetic
cauccuucauuuuacaa

SEQ ID NO: 729676 - RNA, 17 nt, Artificial Sequence
  Synthetic
aggcauguauuuuacaa

SEQ ID NO: 729677 - RNA, 17 nt, Artificial Sequence
  Synthetic
auauuuuuauuuuacaa

SEQ ID NO: 729678 - RNA, 17 nt, Artificial Sequence
  Synthetic
cucucucucuuuuacaa

SEQ ID NO: 729679 - RNA, 17 nt, Artificial Sequence
  Synthetic
cccucuuucuuuuacaa

SEQ ID NO: 729680 - RNA, 17 nt, Artificial Sequence
  Synthetic
agacuaaauuuuuacaa

SEQ ID NO: 729681 - RNA, 17 nt, Artificial Sequence
  Synthetic
aaggcuguuuuuuacaa

SEQ ID NO: 729682 - RNA, 17 nt, Artificial Sequence
  Synthetic
uucagaaaaaaaaccaa

SEQ ID NO: 729683 - RNA, 17 nt, Artificial Sequence
  Synthetic
aauagaggaaaaaccaa

SEQ ID NO: 729684 - RNA, 17 nt, Artificial Sequence
  Synthetic
uaaaacaccaaaaccaa

SEQ ID NO: 729685 - RNA, 17 nt, Artificial Sequence
  Synthetic
ugagaacuacaaaccaa

SEQ ID NO: 729686 - RNA, 17 nt, Artificial Sequence
  Synthetic
uaaauuauagaaaccaa

SEQ ID NO: 729687 - RNA, 17 nt, Artificial Sequence
  Synthetic
uuuauuagcuaaaccaa

SEQ ID NO: 729688 - RNA, 17 nt, Artificial Sequence
  Synthetic
cccuggauaucaaccaa

SEQ ID NO: 729689 - RNA, 17 nt, Artificial Sequence
  Synthetic
aaagagaauucaaccaa

SEQ ID NO: 729690 - RNA, 17 nt, Artificial Sequence
  Synthetic
auauccucuucaaccaa

SEQ ID NO: 729691 - RNA, 17 nt, Artificial Sequence
  Synthetic
aaaacuacaagaaccaa

SEQ ID NO: 729692 - RNA, 17 nt, Artificial Sequence
  Synthetic
uuuaaagggagaaccaa

SEQ ID NO: 729693 - RNA, 17 nt, Artificial Sequence
  Synthetic
uuacauucaugaaccaa

SEQ ID NO: 729694 - RNA, 17 nt, Artificial Sequence
  Synthetic
auagaugagauaaccaa

SEQ ID NO: 729695 - RNA, 17 nt, Artificial Sequence
  Synthetic
uucacagagcuaaccaa

SEQ ID NO: 729696 - RNA, 17 nt, Artificial Sequence
  Synthetic
uuugccaugcuaaccaa

SEQ ID NO: 729697 - RNA, 17 nt, Artificial Sequence
  Synthetic
uuaaguccucuaaccaa

SEQ ID NO: 729698 - RNA, 17 nt, Artificial Sequence
  Synthetic
cccugggaauuaaccaa

SEQ ID NO: 729699 - RNA, 17 nt, Artificial Sequence
  Synthetic
agacaugguuuaaccaa

SEQ ID NO: 729700 - RNA, 17 nt, Artificial Sequence
  Synthetic
ugaacgguuuuaaccaa

SEQ ID NO: 729701 - RNA, 17 nt, Artificial Sequence
  Synthetic
auuuaguuuuuaaccaa

SEQ ID NO: 729702 - RNA, 17 nt, Artificial Sequence
  Synthetic
aauuuuuuuuuaaccaa

SEQ ID NO: 729703 - RNA, 17 nt, Artificial Sequence
  Synthetic
acagagauauacaccaa

SEQ ID NO: 729704 - RNA, 17 nt, Artificial Sequence
  Synthetic
acagucaaugccaccaa

SEQ ID NO: 729705 - RNA, 17 nt, Artificial Sequence
  Synthetic
aaaaaaauuuccaccaa

SEQ ID NO: 729706 - RNA, 17 nt, Artificial Sequence
  Synthetic
aagaggauaaucaccaa

SEQ ID NO: 729707 - RNA, 17 nt, Artificial Sequence
  Synthetic
caagggcagcucaccaa

SEQ ID NO: 729708 - RNA, 17 nt, Artificial Sequence
  Synthetic
aauaagccagucaccaa

SEQ ID NO: 729709 - RNA, 17 nt, Artificial Sequence
  Synthetic
uccuuuucagucaccaa

SEQ ID NO: 729710 - RNA, 17 nt, Artificial Sequence
  Synthetic
aacuaacuugucaccaa

SEQ ID NO: 729711 - RNA, 17 nt, Artificial Sequence
  Synthetic
auccacauauucaccaa

SEQ ID NO: 729712 - RNA, 17 nt, Artificial Sequence
  Synthetic
ccaacaucaaagaccaa

SEQ ID NO: 729713 - RNA, 17 nt, Artificial Sequence
  Synthetic
cuuccucacaagaccaa

SEQ ID NO: 729714 - RNA, 17 nt, Artificial Sequence
  Synthetic
acauaaaaacagaccaa

SEQ ID NO: 729715 - RNA, 17 nt, Artificial Sequence
  Synthetic
ugagauuaagagaccaa

SEQ ID NO: 729716 - RNA, 17 nt, Artificial Sequence
  Synthetic
acagagauauagaccaa

SEQ ID NO: 729717 - RNA, 17 nt, Artificial Sequence
  Synthetic
acagauauauagaccaa

SEQ ID NO: 729718 - RNA, 17 nt, Artificial Sequence
  Synthetic
uggaugaggaugaccaa

SEQ ID NO: 729719 - RNA, 17 nt, Artificial Sequence
  Synthetic
uuuaugcuggugaccaa

SEQ ID NO: 729720 - RNA, 17 nt, Artificial Sequence
  Synthetic
uuggccagauugaccaa

SEQ ID NO: 729721 - RNA, 17 nt, Artificial Sequence
  Synthetic
cagauucauuugaccaa

SEQ ID NO: 729722 - RNA, 17 nt, Artificial Sequence
  Synthetic
acacuaaaaacuaccaa

SEQ ID NO: 729723 - RNA, 17 nt, Artificial Sequence
  Synthetic
cagagaaaagcuaccaa

SEQ ID NO: 729724 - RNA, 17 nt, Artificial Sequence
  Synthetic
uauuacacaucuaccaa

SEQ ID NO: 729725 - RNA, 17 nt, Artificial Sequence
  Synthetic
auaugguacaguaccaa

SEQ ID NO: 729726 - RNA, 17 nt, Artificial Sequence
  Synthetic
aaguugaaauuuaccaa

SEQ ID NO: 729727 - RNA, 17 nt, Artificial Sequence
  Synthetic
cauauugcaaaacccaa

SEQ ID NO: 729728 - RNA, 17 nt, Artificial Sequence
  Synthetic
cuucugagugaacccaa

SEQ ID NO: 729729 - RNA, 17 nt, Artificial Sequence
  Synthetic
aaagucugauaacccaa

SEQ ID NO: 729730 - RNA, 17 nt, Artificial Sequence
  Synthetic
aacuauuuuuaacccaa

SEQ ID NO: 729731 - RNA, 17 nt, Artificial Sequence
  Synthetic
acuccuaaaacacccaa

SEQ ID NO: 729732 - RNA, 17 nt, Artificial Sequence
  Synthetic
ucacuccacacacccaa

SEQ ID NO: 729733 - RNA, 17 nt, Artificial Sequence
  Synthetic
auauauuugacacccaa

SEQ ID NO: 729734 - RNA, 17 nt, Artificial Sequence
  Synthetic
uuacucuucucacccaa

SEQ ID NO: 729735 - RNA, 17 nt, Artificial Sequence
  Synthetic
aagacagccagacccaa

SEQ ID NO: 729736 - RNA, 17 nt, Artificial Sequence
  Synthetic
auacaucacauacccaa

SEQ ID NO: 729737 - RNA, 17 nt, Artificial Sequence
  Synthetic
acuggauauauacccaa

SEQ ID NO: 729738 - RNA, 17 nt, Artificial Sequence
  Synthetic
acuggguauauacccaa

SEQ ID NO: 729739 - RNA, 17 nt, Artificial Sequence
  Synthetic
acugguuauauacccaa

SEQ ID NO: 729740 - RNA, 17 nt, Artificial Sequence
  Synthetic
auugguuauauacccaa

SEQ ID NO: 729741 - RNA, 17 nt, Artificial Sequence
  Synthetic
aaucuguacuuacccaa

SEQ ID NO: 729742 - RNA, 17 nt, Artificial Sequence
  Synthetic
cugguuaaaaaccccaa

SEQ ID NO: 729743 - RNA, 17 nt, Artificial Sequence
  Synthetic
agaggauauaaccccaa

SEQ ID NO: 729744 - RNA, 17 nt, Artificial Sequence
  Synthetic
agauaaugacaccccaa

SEQ ID NO: 729745 - RNA, 17 nt, Artificial Sequence
  Synthetic
uguacauuacaccccaa

SEQ ID NO: 729746 - RNA, 17 nt, Artificial Sequence
  Synthetic
auagcccccuaccccaa

SEQ ID NO: 729747 - RNA, 17 nt, Artificial Sequence
  Synthetic
aggucaggcuaccccaa

SEQ ID NO: 729748 - RNA, 17 nt, Artificial Sequence
  Synthetic
accacuacaacccccaa

SEQ ID NO: 729749 - RNA, 17 nt, Artificial Sequence
  Synthetic
uuguaggggacccccaa

SEQ ID NO: 729750 - RNA, 17 nt, Artificial Sequence
  Synthetic
cucuuaauaucccccaa

SEQ ID NO: 729751 - RNA, 17 nt, Artificial Sequence
  Synthetic
cuuuacaauggccccaa

SEQ ID NO: 729752 - RNA, 17 nt, Artificial Sequence
  Synthetic
ucuauaguuugccccaa

SEQ ID NO: 729753 - RNA, 17 nt, Artificial Sequence
  Synthetic
uguaagacaauccccaa

SEQ ID NO: 729754 - RNA, 17 nt, Artificial Sequence
  Synthetic
uuauucagcauccccaa

SEQ ID NO: 729755 - RNA, 17 nt, Artificial Sequence
  Synthetic
auagaucuacuccccaa

SEQ ID NO: 729756 - RNA, 17 nt, Artificial Sequence
  Synthetic
ucugaaauccuccccaa

SEQ ID NO: 729757 - RNA, 17 nt, Artificial Sequence
  Synthetic
augauuuugcuccccaa

SEQ ID NO: 729758 - RNA, 17 nt, Artificial Sequence
  Synthetic
ucuccaccauuccccaa

SEQ ID NO: 729759 - RNA, 17 nt, Artificial Sequence
  Synthetic
cagcauuccuuccccaa

SEQ ID NO: 729760 - RNA, 17 nt, Artificial Sequence
  Synthetic
caaauucaaaagcccaa

SEQ ID NO: 729761 - RNA, 17 nt, Artificial Sequence
  Synthetic
auauucagccagcccaa

SEQ ID NO: 729762 - RNA, 17 nt, Artificial Sequence
  Synthetic
uuucaguuucagcccaa

SEQ ID NO: 729763 - RNA, 17 nt, Artificial Sequence
  Synthetic
acuacaucuaggcccaa

SEQ ID NO: 729764 - RNA, 17 nt, Artificial Sequence
  Synthetic
uggaaggaauggcccaa

SEQ ID NO: 729765 - RNA, 17 nt, Artificial Sequence
  Synthetic
aagaccgugcugcccaa

SEQ ID NO: 729766 - RNA, 17 nt, Artificial Sequence
  Synthetic
uuauguuacuugcccaa

SEQ ID NO: 729767 - RNA, 17 nt, Artificial Sequence
  Synthetic
auauauacaaaucccaa

SEQ ID NO: 729768 - RNA, 17 nt, Artificial Sequence
  Synthetic
ccagccugccaucccaa

SEQ ID NO: 729769 - RNA, 17 nt, Artificial Sequence
  Synthetic
cuaauuuaucaucccaa

SEQ ID NO: 729770 - RNA, 17 nt, Artificial Sequence
  Synthetic
uauuuacuguaucccaa

SEQ ID NO: 729771 - RNA, 17 nt, Artificial Sequence
  Synthetic
cuggcaagcagucccaa

SEQ ID NO: 729772 - RNA, 17 nt, Artificial Sequence
  Synthetic
uuauaacaaggucccaa

SEQ ID NO: 729773 - RNA, 17 nt, Artificial Sequence
  Synthetic
ugaacaccuugucccaa

SEQ ID NO: 729774 - RNA, 17 nt, Artificial Sequence
  Synthetic
acccuccagauucccaa

SEQ ID NO: 729775 - RNA, 17 nt, Artificial Sequence
  Synthetic
auaguguuaaaagccaa

SEQ ID NO: 729776 - RNA, 17 nt, Artificial Sequence
  Synthetic
auggcccacaaagccaa

SEQ ID NO: 729777 - RNA, 17 nt, Artificial Sequence
  Synthetic
cauguggccaaagccaa

SEQ ID NO: 729778 - RNA, 17 nt, Artificial Sequence
  Synthetic
agaauagucaaagccaa

SEQ ID NO: 729779 - RNA, 17 nt, Artificial Sequence
  Synthetic
auuuuuuucaaagccaa

SEQ ID NO: 729780 - RNA, 17 nt, Artificial Sequence
  Synthetic
ugggaaaggaaagccaa

SEQ ID NO: 729781 - RNA, 17 nt, Artificial Sequence
  Synthetic
uggccauggaaagccaa

SEQ ID NO: 729782 - RNA, 17 nt, Artificial Sequence
  Synthetic
auacugaauaaagccaa

SEQ ID NO: 729783 - RNA, 17 nt, Artificial Sequence
  Synthetic
aauggcagagaagccaa

SEQ ID NO: 729784 - RNA, 17 nt, Artificial Sequence
  Synthetic
agcuguggggaagccaa

SEQ ID NO: 729785 - RNA, 17 nt, Artificial Sequence
  Synthetic
aaccaacuggaagccaa

SEQ ID NO: 729786 - RNA, 17 nt, Artificial Sequence
  Synthetic
uucacagcauaagccaa

SEQ ID NO: 729787 - RNA, 17 nt, Artificial Sequence
  Synthetic
agauaaaacuaagccaa

SEQ ID NO: 729788 - RNA, 17 nt, Artificial Sequence
  Synthetic
uguggagauacagccaa

SEQ ID NO: 729789 - RNA, 17 nt, Artificial Sequence
  Synthetic
augcugggcccagccaa

SEQ ID NO: 729790 - RNA, 17 nt, Artificial Sequence
  Synthetic
auacuauuugcagccaa

SEQ ID NO: 729791 - RNA, 17 nt, Artificial Sequence
  Synthetic
augucgcucucagccaa

SEQ ID NO: 729792 - RNA, 17 nt, Artificial Sequence
  Synthetic
uaucucuuaugagccaa

SEQ ID NO: 729793 - RNA, 17 nt, Artificial Sequence
  Synthetic
cacucuuaaauagccaa

SEQ ID NO: 729794 - RNA, 17 nt, Artificial Sequence
  Synthetic
acugugaguguagccaa

SEQ ID NO: 729795 - RNA, 17 nt, Artificial Sequence
  Synthetic
uaggcucuagaggccaa

SEQ ID NO: 729796 - RNA, 17 nt, Artificial Sequence
  Synthetic
agccagccccuggccaa

SEQ ID NO: 729797 - RNA, 17 nt, Artificial Sequence
  Synthetic
aagaagcauuuggccaa

SEQ ID NO: 729798 - RNA, 17 nt, Artificial Sequence
  Synthetic
ugccuggcuuuggccaa

SEQ ID NO: 729799 - RNA, 17 nt, Artificial Sequence
  Synthetic
aagauauuccaugccaa

SEQ ID NO: 729800 - RNA, 17 nt, Artificial Sequence
  Synthetic
ccagacucauaugccaa

SEQ ID NO: 729801 - RNA, 17 nt, Artificial Sequence
  Synthetic
acacucaagccugccaa

SEQ ID NO: 729802 - RNA, 17 nt, Artificial Sequence
  Synthetic
uaagcucuugcugccaa

SEQ ID NO: 729803 - RNA, 17 nt, Artificial Sequence
  Synthetic
auuucauucucugccaa

SEQ ID NO: 729804 - RNA, 17 nt, Artificial Sequence
  Synthetic
ugaaggaugagugccaa

SEQ ID NO: 729805 - RNA, 17 nt, Artificial Sequence
  Synthetic
cauguaacuagugccaa

SEQ ID NO: 729806 - RNA, 17 nt, Artificial Sequence
  Synthetic
caacauccuagugccaa

SEQ ID NO: 729807 - RNA, 17 nt, Artificial Sequence
  Synthetic
auaagcaguggugccaa

SEQ ID NO: 729808 - RNA, 17 nt, Artificial Sequence
  Synthetic
uaaaauuauauugccaa

SEQ ID NO: 729809 - RNA, 17 nt, Artificial Sequence
  Synthetic
uggcuaggacuugccaa

SEQ ID NO: 729810 - RNA, 17 nt, Artificial Sequence
  Synthetic
agugucuugguugccaa

SEQ ID NO: 729811 - RNA, 17 nt, Artificial Sequence
  Synthetic
auuuaaaaauuugccaa

SEQ ID NO: 729812 - RNA, 17 nt, Artificial Sequence
  Synthetic
ugcuauggauuugccaa

SEQ ID NO: 729813 - RNA, 17 nt, Artificial Sequence
  Synthetic
cagcacuguuuugccaa

SEQ ID NO: 729814 - RNA, 17 nt, Artificial Sequence
  Synthetic
ccaaaacuaaaauccaa

SEQ ID NO: 729815 - RNA, 17 nt, Artificial Sequence
  Synthetic
uuuuucuccaaauccaa

SEQ ID NO: 729816 - RNA, 17 nt, Artificial Sequence
  Synthetic
aagcaugagaaauccaa

SEQ ID NO: 729817 - RNA, 17 nt, Artificial Sequence
  Synthetic
uauaaaaggcaauccaa

SEQ ID NO: 729818 - RNA, 17 nt, Artificial Sequence
  Synthetic
aaaauacuagaauccaa

SEQ ID NO: 729819 - RNA, 17 nt, Artificial Sequence
  Synthetic
auuuccuacgaauccaa

SEQ ID NO: 729820 - RNA, 17 nt, Artificial Sequence
  Synthetic
uuguuucucuaauccaa

SEQ ID NO: 729821 - RNA, 17 nt, Artificial Sequence
  Synthetic
uucacuucaucauccaa

SEQ ID NO: 729822 - RNA, 17 nt, Artificial Sequence
  Synthetic
cccuacccuucauccaa

SEQ ID NO: 729823 - RNA, 17 nt, Artificial Sequence
  Synthetic
ucugguagacuauccaa

SEQ ID NO: 729824 - RNA, 17 nt, Artificial Sequence
  Synthetic
uugauaacucuauccaa

SEQ ID NO: 729825 - RNA, 17 nt, Artificial Sequence
  Synthetic
aaaauucaguuauccaa

SEQ ID NO: 729826 - RNA, 17 nt, Artificial Sequence
  Synthetic
ccugggugugccuccaa

SEQ ID NO: 729827 - RNA, 17 nt, Artificial Sequence
  Synthetic
aaagacaauuccuccaa

SEQ ID NO: 729828 - RNA, 17 nt, Artificial Sequence
  Synthetic
uuuaacauaugcuccaa

SEQ ID NO: 729829 - RNA, 17 nt, Artificial Sequence
  Synthetic
ugaauucucaucuccaa

SEQ ID NO: 729830 - RNA, 17 nt, Artificial Sequence
  Synthetic
uucugcaggcucuccaa

SEQ ID NO: 729831 - RNA, 17 nt, Artificial Sequence
  Synthetic
acauguggagucuccaa

SEQ ID NO: 729832 - RNA, 17 nt, Artificial Sequence
  Synthetic
auauauguggucuccaa

SEQ ID NO: 729833 - RNA, 17 nt, Artificial Sequence
  Synthetic
auaaaggaguucuccaa

SEQ ID NO: 729834 - RNA, 17 nt, Artificial Sequence
  Synthetic
cuuggcugccaguccaa

SEQ ID NO: 729835 - RNA, 17 nt, Artificial Sequence
  Synthetic
uuccugucugaguccaa

SEQ ID NO: 729836 - RNA, 17 nt, Artificial Sequence
  Synthetic
ugcaaucuugaguccaa

SEQ ID NO: 729837 - RNA, 17 nt, Artificial Sequence
  Synthetic
caaggcagcagguccaa

SEQ ID NO: 729838 - RNA, 17 nt, Artificial Sequence
  Synthetic
agcaaacuaugguccaa

SEQ ID NO: 729839 - RNA, 17 nt, Artificial Sequence
  Synthetic
acucagucucuguccaa

SEQ ID NO: 729840 - RNA, 17 nt, Artificial Sequence
  Synthetic
aaagugguguuguccaa

SEQ ID NO: 729841 - RNA, 17 nt, Artificial Sequence
  Synthetic
auccugacuuuguccaa

SEQ ID NO: 729842 - RNA, 17 nt, Artificial Sequence
  Synthetic
cauccuguaaauuccaa

SEQ ID NO: 729843 - RNA, 17 nt, Artificial Sequence
  Synthetic
ccuucaauacauuccaa

SEQ ID NO: 729844 - RNA, 17 nt, Artificial Sequence
  Synthetic
auaauacaucauuccaa

SEQ ID NO: 729845 - RNA, 17 nt, Artificial Sequence
  Synthetic
auagccauucauuccaa

SEQ ID NO: 729846 - RNA, 17 nt, Artificial Sequence
  Synthetic
ugagugaugacuuccaa

SEQ ID NO: 729847 - RNA, 17 nt, Artificial Sequence
  Synthetic
auguuacauacuuccaa

SEQ ID NO: 729848 - RNA, 17 nt, Artificial Sequence
  Synthetic
ugaauucuaccuuccaa

SEQ ID NO: 729849 - RNA, 17 nt, Artificial Sequence
  Synthetic
accuaauuaccuuccaa

SEQ ID NO: 729850 - RNA, 17 nt, Artificial Sequence
  Synthetic
caaauguugccuuccaa

SEQ ID NO: 729851 - RNA, 17 nt, Artificial Sequence
  Synthetic
uucucuaguccuuccaa

SEQ ID NO: 729852 - RNA, 17 nt, Artificial Sequence
  Synthetic
uuuaggacugcuuccaa

SEQ ID NO: 729853 - RNA, 17 nt, Artificial Sequence
  Synthetic
uuuuaauaaucuuccaa

SEQ ID NO: 729854 - RNA, 17 nt, Artificial Sequence
  Synthetic
ugcuuaaacucuuccaa

SEQ ID NO: 729855 - RNA, 17 nt, Artificial Sequence
  Synthetic
uuuuuuuaaaguuccaa

SEQ ID NO: 729856 - RNA, 17 nt, Artificial Sequence
  Synthetic
caugcugccaguuccaa

SEQ ID NO: 729857 - RNA, 17 nt, Artificial Sequence
  Synthetic
aauugagaugguuccaa

SEQ ID NO: 729858 - RNA, 17 nt, Artificial Sequence
  Synthetic
aauaaaaccauuuccaa

SEQ ID NO: 729859 - RNA, 17 nt, Artificial Sequence
  Synthetic
aaguccuucauuuccaa

SEQ ID NO: 729860 - RNA, 17 nt, Artificial Sequence
  Synthetic
auacuuuuuauuuccaa

SEQ ID NO: 729861 - RNA, 17 nt, Artificial Sequence
  Synthetic
uguauaacacuuuccaa

SEQ ID NO: 729862 - RNA, 17 nt, Artificial Sequence
  Synthetic
aaaacagggcuuuccaa

SEQ ID NO: 729863 - RNA, 17 nt, Artificial Sequence
  Synthetic
aauuauuuucuuuccaa

SEQ ID NO: 729864 - RNA, 17 nt, Artificial Sequence
  Synthetic
aaaaaagaauuuuccaa

SEQ ID NO: 729865 - RNA, 17 nt, Artificial Sequence
  Synthetic
cuuaaaaccuuuuccaa

SEQ ID NO: 729866 - RNA, 17 nt, Artificial Sequence
  Synthetic
auaaaucccuuuuccaa

SEQ ID NO: 729867 - RNA, 17 nt, Artificial Sequence
  Synthetic
cacaaguuaaaaagcaa

SEQ ID NO: 729868 - RNA, 17 nt, Artificial Sequence
  Synthetic
uaaaacaccaaaagcaa

SEQ ID NO: 729869 - RNA, 17 nt, Artificial Sequence
  Synthetic
aaguuuuucaaaagcaa

SEQ ID NO: 729870 - RNA, 17 nt, Artificial Sequence
  Synthetic
uuuaccauuaaaagcaa

SEQ ID NO: 729871 - RNA, 17 nt, Artificial Sequence
  Synthetic
uucccaacacaaagcaa

SEQ ID NO: 729872 - RNA, 17 nt, Artificial Sequence
  Synthetic
aagcuucuacaaagcaa

SEQ ID NO: 729873 - RNA, 17 nt, Artificial Sequence
  Synthetic
uauuagauccaaagcaa

SEQ ID NO: 729874 - RNA, 17 nt, Artificial Sequence
  Synthetic
acauaggcucaaagcaa

SEQ ID NO: 729875 - RNA, 17 nt, Artificial Sequence
  Synthetic
cagauaauucaaagcaa

SEQ ID NO: 729876 - RNA, 17 nt, Artificial Sequence
  Synthetic
acaacugaagaaagcaa

SEQ ID NO: 729877 - RNA, 17 nt, Artificial Sequence
  Synthetic
aagacuugcgaaagcaa

SEQ ID NO: 729878 - RNA, 17 nt, Artificial Sequence
  Synthetic
aucaugguggaaagcaa

SEQ ID NO: 729879 - RNA, 17 nt, Artificial Sequence
  Synthetic
ccugagucauaaagcaa

SEQ ID NO: 729880 - RNA, 17 nt, Artificial Sequence
  Synthetic
aggcuaaucuaaagcaa

SEQ ID NO: 729881 - RNA, 17 nt, Artificial Sequence
  Synthetic
cacaacgucuaaagcaa

SEQ ID NO: 729882 - RNA, 17 nt, Artificial Sequence
  Synthetic
ugcuccugguaaagcaa

SEQ ID NO: 729883 - RNA, 17 nt, Artificial Sequence
  Synthetic
uuggcauuuuaaagcaa

SEQ ID NO: 729884 - RNA, 17 nt, Artificial Sequence
  Synthetic
cugacaaaaacaagcaa

SEQ ID NO: 729885 - RNA, 17 nt, Artificial Sequence
  Synthetic
cugagaaaaacaagcaa

SEQ ID NO: 729886 - RNA, 17 nt, Artificial Sequence
  Synthetic
cugaggaaaacaagcaa

SEQ ID NO: 729887 - RNA, 17 nt, Artificial Sequence
  Synthetic
auauaaaggacaagcaa

SEQ ID NO: 729888 - RNA, 17 nt, Artificial Sequence
  Synthetic
ucauuugauacaagcaa

SEQ ID NO: 729889 - RNA, 17 nt, Artificial Sequence
  Synthetic
acaguuuuuacaagcaa

SEQ ID NO: 729890 - RNA, 17 nt, Artificial Sequence
  Synthetic
uccuuaaaaccaagcaa

SEQ ID NO: 729891 - RNA, 17 nt, Artificial Sequence
  Synthetic
agaaagcaagcaagcaa

SEQ ID NO: 729892 - RNA, 17 nt, Artificial Sequence
  Synthetic
cucaaaggggcaagcaa

SEQ ID NO: 729893 - RNA, 17 nt, Artificial Sequence
  Synthetic
uggagaagugcaagcaa

SEQ ID NO: 729894 - RNA, 17 nt, Artificial Sequence
  Synthetic
aaagauguuucaagcaa

SEQ ID NO: 729895 - RNA, 17 nt, Artificial Sequence
  Synthetic
aaaagauaaagaagcaa

SEQ ID NO: 729896 - RNA, 17 nt, Artificial Sequence
  Synthetic
ucuuaaacaagaagcaa

SEQ ID NO: 729897 - RNA, 17 nt, Artificial Sequence
  Synthetic
cuauucuuaagaagcaa

SEQ ID NO: 729898 - RNA, 17 nt, Artificial Sequence
  Synthetic
uucaugaucagaagcaa

SEQ ID NO: 729899 - RNA, 17 nt, Artificial Sequence
  Synthetic
cugggggcaggaagcaa

SEQ ID NO: 729900 - RNA, 17 nt, Artificial Sequence
  Synthetic
uuugaaggaggaagcaa

SEQ ID NO: 729901 - RNA, 17 nt, Artificial Sequence
  Synthetic
uacauuucuggaagcaa

SEQ ID NO: 729902 - RNA, 17 nt, Artificial Sequence
  Synthetic
auaagaaaaugaagcaa

SEQ ID NO: 729903 - RNA, 17 nt, Artificial Sequence
  Synthetic
ugcucccucugaagcaa

SEQ ID NO: 729904 - RNA, 17 nt, Artificial Sequence
  Synthetic
uucuaaaauugaagcaa

SEQ ID NO: 729905 - RNA, 17 nt, Artificial Sequence
  Synthetic
aaauggaaaauaagcaa

SEQ ID NO: 729906 - RNA, 17 nt, Artificial Sequence
  Synthetic
cuaaguuucauaagcaa

SEQ ID NO: 729907 - RNA, 17 nt, Artificial Sequence
  Synthetic
ugagacuguauaagcaa

SEQ ID NO: 729908 - RNA, 17 nt, Artificial Sequence
  Synthetic
augaagaugguaagcaa

SEQ ID NO: 729909 - RNA, 17 nt, Artificial Sequence
  Synthetic
cgaaguuauuuaagcaa

SEQ ID NO: 729910 - RNA, 17 nt, Artificial Sequence
  Synthetic
agugggucuuuaagcaa

SEQ ID NO: 729911 - RNA, 17 nt, Artificial Sequence
  Synthetic
acuuugucuuuaagcaa

SEQ ID NO: 729912 - RNA, 17 nt, Artificial Sequence
  Synthetic
aacgacaaaaacagcaa

SEQ ID NO: 729913 - RNA, 17 nt, Artificial Sequence
  Synthetic
uggcauccaaacagcaa

SEQ ID NO: 729914 - RNA, 17 nt, Artificial Sequence
  Synthetic
uguuagcagaacagcaa

SEQ ID NO: 729915 - RNA, 17 nt, Artificial Sequence
  Synthetic
aaaaaaaaacacagcaa

SEQ ID NO: 729916 - RNA, 17 nt, Artificial Sequence
  Synthetic
agacuaugccacagcaa

SEQ ID NO: 729917 - RNA, 17 nt, Artificial Sequence
  Synthetic
aaagcuuugcacagcaa

SEQ ID NO: 729918 - RNA, 17 nt, Artificial Sequence
  Synthetic
ugguaagcugacagcaa

SEQ ID NO: 729919 - RNA, 17 nt, Artificial Sequence
  Synthetic
aaaaucuuugacagcaa

SEQ ID NO: 729920 - RNA, 17 nt, Artificial Sequence
  Synthetic
augucaaaauacagcaa

SEQ ID NO: 729921 - RNA, 17 nt, Artificial Sequence
  Synthetic
agugugagaaccagcaa

SEQ ID NO: 729922 - RNA, 17 nt, Artificial Sequence
  Synthetic
cugcccuccaccagcaa

SEQ ID NO: 729923 - RNA, 17 nt, Artificial Sequence
  Synthetic
auccagcaacccagcaa

SEQ ID NO: 729924 - RNA, 17 nt, Artificial Sequence
  Synthetic
aaaaaacaggccagcaa

SEQ ID NO: 729925 - RNA, 17 nt, Artificial Sequence
  Synthetic
agaaugagugccagcaa

SEQ ID NO: 729926 - RNA, 17 nt, Artificial Sequence
  Synthetic
ugagaaggauccagcaa

SEQ ID NO: 729927 - RNA, 17 nt, Artificial Sequence
  Synthetic
caacuccucuccagcaa

SEQ ID NO: 729928 - RNA, 17 nt, Artificial Sequence
  Synthetic
ugugaaagcagcagcaa

SEQ ID NO: 729929 - RNA, 17 nt, Artificial Sequence
  Synthetic
uugacuucuagcagcaa

SEQ ID NO: 729930 - RNA, 17 nt, Artificial Sequence
  Synthetic
auacauauaugcagcaa

SEQ ID NO: 729931 - RNA, 17 nt, Artificial Sequence
  Synthetic
ucguuuaucugcagcaa

SEQ ID NO: 729932 - RNA, 17 nt, Artificial Sequence
  Synthetic
ucugucaaaaucagcaa

SEQ ID NO: 729933 - RNA, 17 nt, Artificial Sequence
  Synthetic
aauuguggaaucagcaa

SEQ ID NO: 729934 - RNA, 17 nt, Artificial Sequence
  Synthetic
auaaaaagcaucagcaa

SEQ ID NO: 729935 - RNA, 17 nt, Artificial Sequence
  Synthetic
agaaaggguaucagcaa

SEQ ID NO: 729936 - RNA, 17 nt, Artificial Sequence
  Synthetic
cuacuucaacucagcaa

SEQ ID NO: 729937 - RNA, 17 nt, Artificial Sequence
  Synthetic
ucucuauuucucagcaa

SEQ ID NO: 729938 - RNA, 17 nt, Artificial Sequence
  Synthetic
uguuuaauuuucagcaa

SEQ ID NO: 729939 - RNA, 17 nt, Artificial Sequence
  Synthetic
cccagaauaaagagcaa

SEQ ID NO: 729940 - RNA, 17 nt, Artificial Sequence
  Synthetic
uuuaauauaaagagcaa

SEQ ID NO: 729941 - RNA, 17 nt, Artificial Sequence
  Synthetic
cuauagaaacagagcaa

SEQ ID NO: 729942 - RNA, 17 nt, Artificial Sequence
  Synthetic
augucauuggagagcaa

SEQ ID NO: 729943 - RNA, 17 nt, Artificial Sequence
  Synthetic
uuaacacuauagagcaa

SEQ ID NO: 729944 - RNA, 17 nt, Artificial Sequence
  Synthetic
uuuaagaaguagagcaa

SEQ ID NO: 729945 - RNA, 17 nt, Artificial Sequence
  Synthetic
acuugauaaaggagcaa

SEQ ID NO: 729946 - RNA, 17 nt, Artificial Sequence
  Synthetic
ugggguacagggagcaa

SEQ ID NO: 729947 - RNA, 17 nt, Artificial Sequence
  Synthetic
cuugggaacuggagcaa

SEQ ID NO: 729948 - RNA, 17 nt, Artificial Sequence
  Synthetic
auucauucacugagcaa

SEQ ID NO: 729949 - RNA, 17 nt, Artificial Sequence
  Synthetic
acaugacuacugagcaa

SEQ ID NO: 729950 - RNA, 17 nt, Artificial Sequence
  Synthetic
auuuuuagccugagcaa

SEQ ID NO: 729951 - RNA, 17 nt, Artificial Sequence
  Synthetic
uauauaucagugagcaa

SEQ ID NO: 729952 - RNA, 17 nt, Artificial Sequence
  Synthetic
uggaaucuagugagcaa

SEQ ID NO: 729953 - RNA, 17 nt, Artificial Sequence
  Synthetic
agaauguguuugagcaa

SEQ ID NO: 729954 - RNA, 17 nt, Artificial Sequence
  Synthetic
uaaauuugaaauagcaa

SEQ ID NO: 729955 - RNA, 17 nt, Artificial Sequence
  Synthetic
accauucacaauagcaa

SEQ ID NO: 729956 - RNA, 17 nt, Artificial Sequence
  Synthetic
acuauucacaauagcaa

SEQ ID NO: 729957 - RNA, 17 nt, Artificial Sequence
  Synthetic
uacugccaacauagcaa

SEQ ID NO: 729958 - RNA, 17 nt, Artificial Sequence
  Synthetic
ucucuucacacuagcaa

SEQ ID NO: 729959 - RNA, 17 nt, Artificial Sequence
  Synthetic
uuacagaacccuagcaa

SEQ ID NO: 729960 - RNA, 17 nt, Artificial Sequence
  Synthetic
cauuauuacccuagcaa

SEQ ID NO: 729961 - RNA, 17 nt, Artificial Sequence
  Synthetic
cuuaaaugaucuagcaa

SEQ ID NO: 729962 - RNA, 17 nt, Artificial Sequence
  Synthetic
accacauucaguagcaa

SEQ ID NO: 729963 - RNA, 17 nt, Artificial Sequence
  Synthetic
aggugaagggguagcaa

SEQ ID NO: 729964 - RNA, 17 nt, Artificial Sequence
  Synthetic
aacuuuguguguagcaa

SEQ ID NO: 729965 - RNA, 17 nt, Artificial Sequence
  Synthetic
auuucagccauuagcaa

SEQ ID NO: 729966 - RNA, 17 nt, Artificial Sequence
  Synthetic
aggaaggugauuagcaa

SEQ ID NO: 729967 - RNA, 17 nt, Artificial Sequence
  Synthetic
ucagaguuacuuagcaa

SEQ ID NO: 729968 - RNA, 17 nt, Artificial Sequence
  Synthetic
auauucccauuuagcaa

SEQ ID NO: 729969 - RNA, 17 nt, Artificial Sequence
  Synthetic
cuguuacuauuuagcaa

SEQ ID NO: 729970 - RNA, 17 nt, Artificial Sequence
  Synthetic
aaagcaaaggaacgcaa

SEQ ID NO: 729971 - RNA, 17 nt, Artificial Sequence
  Synthetic
cccaggcuggagcgcaa

SEQ ID NO: 729972 - RNA, 17 nt, Artificial Sequence
  Synthetic
aaauaggccaggcgcaa

SEQ ID NO: 729973 - RNA, 17 nt, Artificial Sequence
  Synthetic
uuucagggaaaaggcaa

SEQ ID NO: 729974 - RNA, 17 nt, Artificial Sequence
  Synthetic
cauaaaugaaaaggcaa

SEQ ID NO: 729975 - RNA, 17 nt, Artificial Sequence
  Synthetic
cucgagcagaaaggcaa

SEQ ID NO: 729976 - RNA, 17 nt, Artificial Sequence
  Synthetic
uugaaauggaaaggcaa

SEQ ID NO: 729977 - RNA, 17 nt, Artificial Sequence
  Synthetic
aucauggcagaaggcaa

SEQ ID NO: 729978 - RNA, 17 nt, Artificial Sequence
  Synthetic
accaugguggaaggcaa

SEQ ID NO: 729979 - RNA, 17 nt, Artificial Sequence
  Synthetic
cauucagaugaaggcaa

SEQ ID NO: 729980 - RNA, 17 nt, Artificial Sequence
  Synthetic
aaagagacugaaggcaa

SEQ ID NO: 729981 - RNA, 17 nt, Artificial Sequence
  Synthetic
acaaguacauaaggcaa

SEQ ID NO: 729982 - RNA, 17 nt, Artificial Sequence
  Synthetic
caaaacaccuaaggcaa

SEQ ID NO: 729983 - RNA, 17 nt, Artificial Sequence
  Synthetic
cuuucuuuuuaaggcaa

SEQ ID NO: 729984 - RNA, 17 nt, Artificial Sequence
  Synthetic
aggaagggaacaggcaa

SEQ ID NO: 729985 - RNA, 17 nt, Artificial Sequence
  Synthetic
aaauguggcacaggcaa

SEQ ID NO: 729986 - RNA, 17 nt, Artificial Sequence
  Synthetic
ucacuaaucacaggcaa

SEQ ID NO: 729987 - RNA, 17 nt, Artificial Sequence
  Synthetic
ugaagaaaaccaggcaa

SEQ ID NO: 729988 - RNA, 17 nt, Artificial Sequence
  Synthetic
uugacacaggcaggcaa

SEQ ID NO: 729989 - RNA, 17 nt, Artificial Sequence
  Synthetic
ccaggacaaucaggcaa

SEQ ID NO: 729990 - RNA, 17 nt, Artificial Sequence
  Synthetic
uuugaagaaagaggcaa

SEQ ID NO: 729991 - RNA, 17 nt, Artificial Sequence
  Synthetic
uaaggggacagaggcaa

SEQ ID NO: 729992 - RNA, 17 nt, Artificial Sequence
  Synthetic
uugaacccaggaggcaa

SEQ ID NO: 729993 - RNA, 17 nt, Artificial Sequence
  Synthetic
uugcagaugggaggcaa

SEQ ID NO: 729994 - RNA, 17 nt, Artificial Sequence
  Synthetic
uccagaaguggaggcaa

SEQ ID NO: 729995 - RNA, 17 nt, Artificial Sequence
  Synthetic
cuucauuucugaggcaa

SEQ ID NO: 729996 - RNA, 17 nt, Artificial Sequence
  Synthetic
uuaaccugcuuaggcaa

SEQ ID NO: 729997 - RNA, 17 nt, Artificial Sequence
  Synthetic
uguuuaauacucggcaa

SEQ ID NO: 729998 - RNA, 17 nt, Artificial Sequence
  Synthetic
agaggaaacaagggcaa

SEQ ID NO: 729999 - RNA, 17 nt, Artificial Sequence
  Synthetic
uccaccagcaagggcaa

SEQ ID NO: 730000 - RNA, 17 nt, Artificial Sequence
  Synthetic
aucagcaagaagggcaa

SEQ ID NO: 730001 - RNA, 17 nt, Artificial Sequence
  Synthetic
uuagaucugaagggcaa

SEQ ID NO: 730002 - RNA, 17 nt, Artificial Sequence
  Synthetic
uucauggugaagggcaa

SEQ ID NO: 730003 - RNA, 17 nt, Artificial Sequence
  Synthetic
uggucuccacagggcaa

SEQ ID NO: 730004 - RNA, 17 nt, Artificial Sequence
  Synthetic
aggggauuggagggcaa

SEQ ID NO: 730005 - RNA, 17 nt, Artificial Sequence
  Synthetic
auggugaauccgggcaa

SEQ ID NO: 730006 - RNA, 17 nt, Artificial Sequence
  Synthetic
uucuuucaaaggggcaa

SEQ ID NO: 730007 - RNA, 17 nt, Artificial Sequence
  Synthetic
aggaaggagaggggcaa

SEQ ID NO: 730008 - RNA, 17 nt, Artificial Sequence
  Synthetic
caaggggugaggggcaa

SEQ ID NO: 730009 - RNA, 17 nt, Artificial Sequence
  Synthetic
cgcgagguggggggcaa

SEQ ID NO: 730010 - RNA, 17 nt, Artificial Sequence
  Synthetic
uggcggguggggggcaa

SEQ ID NO: 730011 - RNA, 17 nt, Artificial Sequence
  Synthetic
cagauaacugggggcaa

SEQ ID NO: 730012 - RNA, 17 nt, Artificial Sequence
  Synthetic
acuuagguauggggcaa

SEQ ID NO: 730013 - RNA, 17 nt, Artificial Sequence
  Synthetic
uuuaggggcuggggcaa

SEQ ID NO: 730014 - RNA, 17 nt, Artificial Sequence
  Synthetic
cacuccagccugggcaa

SEQ ID NO: 730015 - RNA, 17 nt, Artificial Sequence
  Synthetic
cugaagaugcugggcaa

SEQ ID NO: 730016 - RNA, 17 nt, Artificial Sequence
  Synthetic
caucagaaagugggcaa

SEQ ID NO: 730017 - RNA, 17 nt, Artificial Sequence
  Synthetic
aaucaaaaauugggcaa

SEQ ID NO: 730018 - RNA, 17 nt, Artificial Sequence
  Synthetic
auuuacaaaaauggcaa

SEQ ID NO: 730019 - RNA, 17 nt, Artificial Sequence
  Synthetic
acuuuuuuaaauggcaa

SEQ ID NO: 730020 - RNA, 17 nt, Artificial Sequence
  Synthetic
aaagggaggaauggcaa

SEQ ID NO: 730021 - RNA, 17 nt, Artificial Sequence
  Synthetic
agccaaacuaauggcaa

SEQ ID NO: 730022 - RNA, 17 nt, Artificial Sequence
  Synthetic
cagagugcuaauggcaa

SEQ ID NO: 730023 - RNA, 17 nt, Artificial Sequence
  Synthetic
uguggauuccauggcaa

SEQ ID NO: 730024 - RNA, 17 nt, Artificial Sequence
  Synthetic
acucacaugcauggcaa

SEQ ID NO: 730025 - RNA, 17 nt, Artificial Sequence
  Synthetic
aagccuugagauggcaa

SEQ ID NO: 730026 - RNA, 17 nt, Artificial Sequence
  Synthetic
uggauuguguauggcaa

SEQ ID NO: 730027 - RNA, 17 nt, Artificial Sequence
  Synthetic
aaauucauaacuggcaa

SEQ ID NO: 730028 - RNA, 17 nt, Artificial Sequence
  Synthetic
ccuugcuugccuggcaa

SEQ ID NO: 730029 - RNA, 17 nt, Artificial Sequence
  Synthetic
agaauuuucaguggcaa

SEQ ID NO: 730030 - RNA, 17 nt, Artificial Sequence
  Synthetic
ugaaaaauagguggcaa

SEQ ID NO: 730031 - RNA, 17 nt, Artificial Sequence
  Synthetic
cacauguguuguggcaa

SEQ ID NO: 730032 - RNA, 17 nt, Artificial Sequence
  Synthetic
auuguuaaaauuggcaa

SEQ ID NO: 730033 - RNA, 17 nt, Artificial Sequence
  Synthetic
aaacacucaauuggcaa

SEQ ID NO: 730034 - RNA, 17 nt, Artificial Sequence
  Synthetic
uguuauaauauuggcaa

SEQ ID NO: 730035 - RNA, 17 nt, Artificial Sequence
  Synthetic
ugguccaaacuuggcaa

SEQ ID NO: 730036 - RNA, 17 nt, Artificial Sequence
  Synthetic
caacacauucuuggcaa

SEQ ID NO: 730037 - RNA, 17 nt, Artificial Sequence
  Synthetic
auguguuuucuuggcaa

SEQ ID NO: 730038 - RNA, 17 nt, Artificial Sequence
  Synthetic
aagaauugaguuggcaa

SEQ ID NO: 730039 - RNA, 17 nt, Artificial Sequence
  Synthetic
uucuuuaacuuuggcaa

SEQ ID NO: 730040 - RNA, 17 nt, Artificial Sequence
  Synthetic
uacaccaccaaaugcaa

SEQ ID NO: 730041 - RNA, 17 nt, Artificial Sequence
  Synthetic
uaaucaaugaaaugcaa

SEQ ID NO: 730042 - RNA, 17 nt, Artificial Sequence
  Synthetic
uuucuauugaaaugcaa

SEQ ID NO: 730043 - RNA, 17 nt, Artificial Sequence
  Synthetic
uugucuaaucaaugcaa

SEQ ID NO: 730044 - RNA, 17 nt, Artificial Sequence
  Synthetic
uaauaguaggaaugcaa

SEQ ID NO: 730045 - RNA, 17 nt, Artificial Sequence
  Synthetic
cccaggcuggaaugcaa

SEQ ID NO: 730046 - RNA, 17 nt, Artificial Sequence
  Synthetic
ccaaguugugaaugcaa

SEQ ID NO: 730047 - RNA, 17 nt, Artificial Sequence
  Synthetic
cuaaguugugaaugcaa

SEQ ID NO: 730048 - RNA, 17 nt, Artificial Sequence
  Synthetic
aaauaauuauaaugcaa

SEQ ID NO: 730049 - RNA, 17 nt, Artificial Sequence
  Synthetic
aauugcauguaaugcaa

SEQ ID NO: 730050 - RNA, 17 nt, Artificial Sequence
  Synthetic
agaaagaguuaaugcaa

SEQ ID NO: 730051 - RNA, 17 nt, Artificial Sequence
  Synthetic
aacaaguaaacaugcaa

SEQ ID NO: 730052 - RNA, 17 nt, Artificial Sequence
  Synthetic
aagcuaugaggaugcaa

SEQ ID NO: 730053 - RNA, 17 nt, Artificial Sequence
  Synthetic
auugcauauauaugcaa

SEQ ID NO: 730054 - RNA, 17 nt, Artificial Sequence
  Synthetic
aagcagacuguaugcaa

SEQ ID NO: 730055 - RNA, 17 nt, Artificial Sequence
  Synthetic
acaaugccaaacugcaa

SEQ ID NO: 730056 - RNA, 17 nt, Artificial Sequence
  Synthetic
aagggccauaacugcaa

SEQ ID NO: 730057 - RNA, 17 nt, Artificial Sequence
  Synthetic
cuaggagauaacugcaa

SEQ ID NO: 730058 - RNA, 17 nt, Artificial Sequence
  Synthetic
cauuuuuauaacugcaa

SEQ ID NO: 730059 - RNA, 17 nt, Artificial Sequence
  Synthetic
cacagggaccacugcaa

SEQ ID NO: 730060 - RNA, 17 nt, Artificial Sequence
  Synthetic
caggagacugacugcaa

SEQ ID NO: 730061 - RNA, 17 nt, Artificial Sequence
  Synthetic
aaggagaccuacugcaa

SEQ ID NO: 730062 - RNA, 17 nt, Artificial Sequence
  Synthetic
aaucccaaucccugcaa

SEQ ID NO: 730063 - RNA, 17 nt, Artificial Sequence
  Synthetic
cauccaugucccugcaa

SEQ ID NO: 730064 - RNA, 17 nt, Artificial Sequence
  Synthetic
caucuaugucccugcaa

SEQ ID NO: 730065 - RNA, 17 nt, Artificial Sequence
  Synthetic
aaaaguguagccugcaa

SEQ ID NO: 730066 - RNA, 17 nt, Artificial Sequence
  Synthetic
cauccauguuccugcaa

SEQ ID NO: 730067 - RNA, 17 nt, Artificial Sequence
  Synthetic
cauauguguuccugcaa

SEQ ID NO: 730068 - RNA, 17 nt, Artificial Sequence
  Synthetic
cauccaugucgcugcaa

SEQ ID NO: 730069 - RNA, 17 nt, Artificial Sequence
  Synthetic
acugugcccggcugcaa

SEQ ID NO: 730070 - RNA, 17 nt, Artificial Sequence
  Synthetic
ucacugaggugcugcaa

SEQ ID NO: 730071 - RNA, 17 nt, Artificial Sequence
  Synthetic
cauccauguugcugcaa

SEQ ID NO: 730072 - RNA, 17 nt, Artificial Sequence
  Synthetic
caucuauguugcugcaa

SEQ ID NO: 730073 - RNA, 17 nt, Artificial Sequence
  Synthetic
caguacaaccucugcaa

SEQ ID NO: 730074 - RNA, 17 nt, Artificial Sequence
  Synthetic
aauuguacauucugcaa

SEQ ID NO: 730075 - RNA, 17 nt, Artificial Sequence
  Synthetic
acagacuguuucugcaa

SEQ ID NO: 730076 - RNA, 17 nt, Artificial Sequence
  Synthetic
agagacagcaagugcaa

SEQ ID NO: 730077 - RNA, 17 nt, Artificial Sequence
  Synthetic
aaaauuuagaagugcaa

SEQ ID NO: 730078 - RNA, 17 nt, Artificial Sequence
  Synthetic
auuuuaucuaagugcaa

SEQ ID NO: 730079 - RNA, 17 nt, Artificial Sequence
  Synthetic
uuuauauguaagugcaa

SEQ ID NO: 730080 - RNA, 17 nt, Artificial Sequence
  Synthetic
agcaauguccagugcaa

SEQ ID NO: 730081 - RNA, 17 nt, Artificial Sequence
  Synthetic
cuucaaccucagugcaa

SEQ ID NO: 730082 - RNA, 17 nt, Artificial Sequence
  Synthetic
cccagguuagagugcaa

SEQ ID NO: 730083 - RNA, 17 nt, Artificial Sequence
  Synthetic
ccccagcuggagugcaa

SEQ ID NO: 730084 - RNA, 17 nt, Artificial Sequence
  Synthetic
cccaggcuggagugcaa

SEQ ID NO: 730085 - RNA, 17 nt, Artificial Sequence
  Synthetic
ccuaggcuggagugcaa

SEQ ID NO: 730086 - RNA, 17 nt, Artificial Sequence
  Synthetic
ccccggcuggagugcaa

SEQ ID NO: 730087 - RNA, 17 nt, Artificial Sequence
  Synthetic
cucagucuggagugcaa

SEQ ID NO: 730088 - RNA, 17 nt, Artificial Sequence
  Synthetic
cagagaaacacgugcaa

SEQ ID NO: 730089 - RNA, 17 nt, Artificial Sequence
  Synthetic
cggaauaguacgugcaa

SEQ ID NO: 730090 - RNA, 17 nt, Artificial Sequence
  Synthetic
cauccauguccgugcaa

SEQ ID NO: 730091 - RNA, 17 nt, Artificial Sequence
  Synthetic
cccaggcuggggugcaa

SEQ ID NO: 730092 - RNA, 17 nt, Artificial Sequence
  Synthetic
agugugggggugugcaa

SEQ ID NO: 730093 - RNA, 17 nt, Artificial Sequence
  Synthetic
cugggaaccaauugcaa

SEQ ID NO: 730094 - RNA, 17 nt, Artificial Sequence
  Synthetic
auuaauuuucauugcaa

SEQ ID NO: 730095 - RNA, 17 nt, Artificial Sequence
  Synthetic
agaaaucaagauugcaa

SEQ ID NO: 730096 - RNA, 17 nt, Artificial Sequence
  Synthetic
uagacauuauauugcaa

SEQ ID NO: 730097 - RNA, 17 nt, Artificial Sequence
  Synthetic
uaauuugucuauugcaa

SEQ ID NO: 730098 - RNA, 17 nt, Artificial Sequence
  Synthetic
acaauauuguauugcaa

SEQ ID NO: 730099 - RNA, 17 nt, Artificial Sequence
  Synthetic
uagaauuguuauugcaa

SEQ ID NO: 730100 - RNA, 17 nt, Artificial Sequence
  Synthetic
aggaauacaacuugcaa

SEQ ID NO: 730101 - RNA, 17 nt, Artificial Sequence
  Synthetic
uaauuaaaaccuugcaa

SEQ ID NO: 730102 - RNA, 17 nt, Artificial Sequence
  Synthetic
cauauugaaccuugcaa

SEQ ID NO: 730103 - RNA, 17 nt, Artificial Sequence
  Synthetic
cguaauauaaguugcaa

SEQ ID NO: 730104 - RNA, 17 nt, Artificial Sequence
  Synthetic
ucagacaacaguugcaa

SEQ ID NO: 730105 - RNA, 17 nt, Artificial Sequence
  Synthetic
ccaggcuggaguugcaa

SEQ ID NO: 730106 - RNA, 17 nt, Artificial Sequence
  Synthetic
auuuacuacuguugcaa

SEQ ID NO: 730107 - RNA, 17 nt, Artificial Sequence
  Synthetic
uuccccaaaauuugcaa

SEQ ID NO: 730108 - RNA, 17 nt, Artificial Sequence
  Synthetic
uuaggaaaacuuugcaa

SEQ ID NO: 730109 - RNA, 17 nt, Artificial Sequence
  Synthetic
agacccagacuuugcaa

SEQ ID NO: 730110 - RNA, 17 nt, Artificial Sequence
  Synthetic
ucccagcugcuuugcaa

SEQ ID NO: 730111 - RNA, 17 nt, Artificial Sequence
  Synthetic
acaaaaucuuuuugcaa

SEQ ID NO: 730112 - RNA, 17 nt, Artificial Sequence
  Synthetic
aaagagaucaaaaucaa

SEQ ID NO: 730113 - RNA, 17 nt, Artificial Sequence
  Synthetic
uugagucucaaaaucaa

SEQ ID NO: 730114 - RNA, 17 nt, Artificial Sequence
  Synthetic
ugaaauuguaaaaucaa

SEQ ID NO: 730115 - RNA, 17 nt, Artificial Sequence
  Synthetic
auauuuuuuaaaaucaa

SEQ ID NO: 730116 - RNA, 17 nt, Artificial Sequence
  Synthetic
cauucauggcaaaucaa

SEQ ID NO: 730117 - RNA, 17 nt, Artificial Sequence
  Synthetic
uuugacccagaaaucaa

SEQ ID NO: 730118 - RNA, 17 nt, Artificial Sequence
  Synthetic
cuagaucaugaaaucaa

SEQ ID NO: 730119 - RNA, 17 nt, Artificial Sequence
  Synthetic
cuauauaccuaaaucaa

SEQ ID NO: 730120 - RNA, 17 nt, Artificial Sequence
  Synthetic
agaucuccuuaaaucaa

SEQ ID NO: 730121 - RNA, 17 nt, Artificial Sequence
  Synthetic
acauagcacccaaucaa

SEQ ID NO: 730122 - RNA, 17 nt, Artificial Sequence
  Synthetic
auccguuuaucaaucaa

SEQ ID NO: 730123 - RNA, 17 nt, Artificial Sequence
  Synthetic
auaaaagguucaaucaa

SEQ ID NO: 730124 - RNA, 17 nt, Artificial Sequence
  Synthetic
ucauuauuuucaaucaa

SEQ ID NO: 730125 - RNA, 17 nt, Artificial Sequence
  Synthetic
ucuagaaagggaaucaa

SEQ ID NO: 730126 - RNA, 17 nt, Artificial Sequence
  Synthetic
uguuaggauggaaucaa

SEQ ID NO: 730127 - RNA, 17 nt, Artificial Sequence
  Synthetic
aaaagcacuggaaucaa

SEQ ID NO: 730128 - RNA, 17 nt, Artificial Sequence
  Synthetic
acugucacaugaaucaa

SEQ ID NO: 730129 - RNA, 17 nt, Artificial Sequence
  Synthetic
uacagcuacugaaucaa

SEQ ID NO: 730130 - RNA, 17 nt, Artificial Sequence
  Synthetic
uguugucugugaaucaa

SEQ ID NO: 730131 - RNA, 17 nt, Artificial Sequence
  Synthetic
ucuuucguuugaaucaa

SEQ ID NO: 730132 - RNA, 17 nt, Artificial Sequence
  Synthetic
aucauaagaauaaucaa

SEQ ID NO: 730133 - RNA, 17 nt, Artificial Sequence
  Synthetic
auauagaagauaaucaa

SEQ ID NO: 730134 - RNA, 17 nt, Artificial Sequence
  Synthetic
cauuuugaacuaaucaa

SEQ ID NO: 730135 - RNA, 17 nt, Artificial Sequence
  Synthetic
uccauucugcuaaucaa

SEQ ID NO: 730136 - RNA, 17 nt, Artificial Sequence
  Synthetic
augcauacucuaaucaa

SEQ ID NO: 730137 - RNA, 17 nt, Artificial Sequence
  Synthetic
uuugagugucuaaucaa

SEQ ID NO: 730138 - RNA, 17 nt, Artificial Sequence
  Synthetic
aaacacagaguaaucaa

SEQ ID NO: 730139 - RNA, 17 nt, Artificial Sequence
  Synthetic
auaggcaggguaaucaa

SEQ ID NO: 730140 - RNA, 17 nt, Artificial Sequence
  Synthetic
aguugaaauguaaucaa

SEQ ID NO: 730141 - RNA, 17 nt, Artificial Sequence
  Synthetic
uuuuguuguuuaaucaa

SEQ ID NO: 730142 - RNA, 17 nt, Artificial Sequence
  Synthetic
uuuuuuuuuuuaaucaa

SEQ ID NO: 730143 - RNA, 17 nt, Artificial Sequence
  Synthetic
uuucuucagaacaucaa

SEQ ID NO: 730144 - RNA, 17 nt, Artificial Sequence
  Synthetic
uacaauaguaacaucaa

SEQ ID NO: 730145 - RNA, 17 nt, Artificial Sequence
  Synthetic
aaaacuucccacaucaa

SEQ ID NO: 730146 - RNA, 17 nt, Artificial Sequence
  Synthetic
acuacugagcacaucaa

SEQ ID NO: 730147 - RNA, 17 nt, Artificial Sequence
  Synthetic
aaaaguucucacaucaa

SEQ ID NO: 730148 - RNA, 17 nt, Artificial Sequence
  Synthetic
accuagaugaccaucaa

SEQ ID NO: 730149 - RNA, 17 nt, Artificial Sequence
  Synthetic
accuaaaugcccaucaa

SEQ ID NO: 730150 - RNA, 17 nt, Artificial Sequence
  Synthetic
cuacguguggccaucaa

SEQ ID NO: 730151 - RNA, 17 nt, Artificial Sequence
  Synthetic
uuuuucuucuccaucaa

SEQ ID NO: 730152 - RNA, 17 nt, Artificial Sequence
  Synthetic
auuuccccuagcaucaa

SEQ ID NO: 730153 - RNA, 17 nt, Artificial Sequence
  Synthetic
auaccauaaaucaucaa

SEQ ID NO: 730154 - RNA, 17 nt, Artificial Sequence
  Synthetic
aaagugacaaucaucaa

SEQ ID NO: 730155 - RNA, 17 nt, Artificial Sequence
  Synthetic
uagggaaggaucaucaa

SEQ ID NO: 730156 - RNA, 17 nt, Artificial Sequence
  Synthetic
cugcucugacucaucaa

SEQ ID NO: 730157 - RNA, 17 nt, Artificial Sequence
  Synthetic
uuaauugaauucaucaa

SEQ ID NO: 730158 - RNA, 17 nt, Artificial Sequence
  Synthetic
aaacaguucaagaucaa

SEQ ID NO: 730159 - RNA, 17 nt, Artificial Sequence
  Synthetic
aggcaucagcagaucaa

SEQ ID NO: 730160 - RNA, 17 nt, Artificial Sequence
  Synthetic
uuaaauauucagaucaa

SEQ ID NO: 730161 - RNA, 17 nt, Artificial Sequence
  Synthetic
agggacugagagaucaa

SEQ ID NO: 730162 - RNA, 17 nt, Artificial Sequence
  Synthetic
acagacauauagaucaa

SEQ ID NO: 730163 - RNA, 17 nt, Artificial Sequence
  Synthetic
acagagauauagaucaa

SEQ ID NO: 730164 - RNA, 17 nt, Artificial Sequence
  Synthetic
ugaucacugaugaucaa

SEQ ID NO: 730165 - RNA, 17 nt, Artificial Sequence
  Synthetic
aaaaaucaauugaucaa

SEQ ID NO: 730166 - RNA, 17 nt, Artificial Sequence
  Synthetic
aaggacauuuugaucaa

SEQ ID NO: 730167 - RNA, 17 nt, Artificial Sequence
  Synthetic
auucacggccauaucaa

SEQ ID NO: 730168 - RNA, 17 nt, Artificial Sequence
  Synthetic
aaaaucucaacuaucaa

SEQ ID NO: 730169 - RNA, 17 nt, Artificial Sequence
  Synthetic
acugucaucacuaucaa

SEQ ID NO: 730170 - RNA, 17 nt, Artificial Sequence
  Synthetic
cuaaagugaucuaucaa

SEQ ID NO: 730171 - RNA, 17 nt, Artificial Sequence
  Synthetic
uuuaauacuaguaucaa

SEQ ID NO: 730172 - RNA, 17 nt, Artificial Sequence
  Synthetic
uaaauguuguguaucaa

SEQ ID NO: 730173 - RNA, 17 nt, Artificial Sequence
  Synthetic
uguauuucaauuaucaa

SEQ ID NO: 730174 - RNA, 17 nt, Artificial Sequence
  Synthetic
aaugccagaauuaucaa

SEQ ID NO: 730175 - RNA, 17 nt, Artificial Sequence
  Synthetic
aaucuaaacauuaucaa

SEQ ID NO: 730176 - RNA, 17 nt, Artificial Sequence
  Synthetic
aaucuggcacuuaucaa

SEQ ID NO: 730177 - RNA, 17 nt, Artificial Sequence
  Synthetic
uugggaagaguuaucaa

SEQ ID NO: 730178 - RNA, 17 nt, Artificial Sequence
  Synthetic
uccuacucauuuaucaa

SEQ ID NO: 730179 - RNA, 17 nt, Artificial Sequence
  Synthetic
ugagagacguuuaucaa

SEQ ID NO: 730180 - RNA, 17 nt, Artificial Sequence
  Synthetic
agcaauuauaaacucaa

SEQ ID NO: 730181 - RNA, 17 nt, Artificial Sequence
  Synthetic
cagauggaagaacucaa

SEQ ID NO: 730182 - RNA, 17 nt, Artificial Sequence
  Synthetic
aaaagacaguaacucaa

SEQ ID NO: 730183 - RNA, 17 nt, Artificial Sequence
  Synthetic
agugaugaguaacucaa

SEQ ID NO: 730184 - RNA, 17 nt, Artificial Sequence
  Synthetic
uacuccuacccacucaa

SEQ ID NO: 730185 - RNA, 17 nt, Artificial Sequence
  Synthetic
auguaguagucacucaa

SEQ ID NO: 730186 - RNA, 17 nt, Artificial Sequence
  Synthetic
agaaaaaaaauacucaa

SEQ ID NO: 730187 - RNA, 17 nt, Artificial Sequence
  Synthetic
uauuuuagaauacucaa

SEQ ID NO: 730188 - RNA, 17 nt, Artificial Sequence
  Synthetic
ugugaggccauacucaa

SEQ ID NO: 730189 - RNA, 17 nt, Artificial Sequence
  Synthetic
acauauaaauuacucaa

SEQ ID NO: 730190 - RNA, 17 nt, Artificial Sequence
  Synthetic
uauccaagaaaccucaa

SEQ ID NO: 730191 - RNA, 17 nt, Artificial Sequence
  Synthetic
uuugacugaaaccucaa

SEQ ID NO: 730192 - RNA, 17 nt, Artificial Sequence
  Synthetic
uguauggacaaccucaa

SEQ ID NO: 730193 - RNA, 17 nt, Artificial Sequence
  Synthetic
ugucauaucaaccucaa

SEQ ID NO: 730194 - RNA, 17 nt, Artificial Sequence
  Synthetic
auguauguuaaccucaa

SEQ ID NO: 730195 - RNA, 17 nt, Artificial Sequence
  Synthetic
aacuauuaccaccucaa

SEQ ID NO: 730196 - RNA, 17 nt, Artificial Sequence
  Synthetic
cauaguggagaccucaa

SEQ ID NO: 730197 - RNA, 17 nt, Artificial Sequence
  Synthetic
aauuucagauaccucaa

SEQ ID NO: 730198 - RNA, 17 nt, Artificial Sequence
  Synthetic
uauuucaaagcccucaa

SEQ ID NO: 730199 - RNA, 17 nt, Artificial Sequence
  Synthetic
ugaacacagagccucaa

SEQ ID NO: 730200 - RNA, 17 nt, Artificial Sequence
  Synthetic
acuuuaccaggccucaa

SEQ ID NO: 730201 - RNA, 17 nt, Artificial Sequence
  Synthetic
cuccaugagggccucaa

SEQ ID NO: 730202 - RNA, 17 nt, Artificial Sequence
  Synthetic
ugaacuucuggccucaa

SEQ ID NO: 730203 - RNA, 17 nt, Artificial Sequence
  Synthetic
acaguuugaugccucaa

SEQ ID NO: 730204 - RNA, 17 nt, Artificial Sequence
  Synthetic
cucuaccucugccucaa

SEQ ID NO: 730205 - RNA, 17 nt, Artificial Sequence
  Synthetic
caguguccuugccucaa

SEQ ID NO: 730206 - RNA, 17 nt, Artificial Sequence
  Synthetic
aauaccaccuuccucaa

SEQ ID NO: 730207 - RNA, 17 nt, Artificial Sequence
  Synthetic
ugauuaucuuuccucaa

SEQ ID NO: 730208 - RNA, 17 nt, Artificial Sequence
  Synthetic
uguagaauaaagcucaa

SEQ ID NO: 730209 - RNA, 17 nt, Artificial Sequence
  Synthetic
uuucaauucaagcucaa

SEQ ID NO: 730210 - RNA, 17 nt, Artificial Sequence
  Synthetic
ucugauccccagcucaa

SEQ ID NO: 730211 - RNA, 17 nt, Artificial Sequence
  Synthetic
uguacuuccuggcucaa

SEQ ID NO: 730212 - RNA, 17 nt, Artificial Sequence
  Synthetic
agauuuacaaugcucaa

SEQ ID NO: 730213 - RNA, 17 nt, Artificial Sequence
  Synthetic
agauaagagaugcucaa

SEQ ID NO: 730214 - RNA, 17 nt, Artificial Sequence
  Synthetic
uccuagccucugcucaa

SEQ ID NO: 730215 - RNA, 17 nt, Artificial Sequence
  Synthetic
aggguucuucugcucaa

SEQ ID NO: 730216 - RNA, 17 nt, Artificial Sequence
  Synthetic
ccauaguaagugcucaa

SEQ ID NO: 730217 - RNA, 17 nt, Artificial Sequence
  Synthetic
cugacacuauugcucaa

SEQ ID NO: 730218 - RNA, 17 nt, Artificial Sequence
  Synthetic
uuaagagacuugcucaa

SEQ ID NO: 730219 - RNA, 17 nt, Artificial Sequence
  Synthetic
uuccaaucuuugcucaa

SEQ ID NO: 730220 - RNA, 17 nt, Artificial Sequence
  Synthetic
ugcccacaaaaucucaa

SEQ ID NO: 730221 - RNA, 17 nt, Artificial Sequence
  Synthetic
auugaaaccaaucucaa

SEQ ID NO: 730222 - RNA, 17 nt, Artificial Sequence
  Synthetic
ugagcuguguaucucaa

SEQ ID NO: 730223 - RNA, 17 nt, Artificial Sequence
  Synthetic
ccucuuuucacucucaa

SEQ ID NO: 730224 - RNA, 17 nt, Artificial Sequence
  Synthetic
ucauuagauacucucaa

SEQ ID NO: 730225 - RNA, 17 nt, Artificial Sequence
  Synthetic
cagggguguccucucaa

SEQ ID NO: 730226 - RNA, 17 nt, Artificial Sequence
  Synthetic
acagccaaugcucucaa

SEQ ID NO: 730227 - RNA, 17 nt, Artificial Sequence
  Synthetic
aaucauacaucucucaa

SEQ ID NO: 730228 - RNA, 17 nt, Artificial Sequence
  Synthetic
ucuuuugagucucucaa

SEQ ID NO: 730229 - RNA, 17 nt, Artificial Sequence
  Synthetic
uccuuuccuucucucaa

SEQ ID NO: 730230 - RNA, 17 nt, Artificial Sequence
  Synthetic
uguuuuccuucucucaa

SEQ ID NO: 730231 - RNA, 17 nt, Artificial Sequence
  Synthetic
uugcaguuuucucucaa

SEQ ID NO: 730232 - RNA, 17 nt, Artificial Sequence
  Synthetic
uauaaaaugugucucaa

SEQ ID NO: 730233 - RNA, 17 nt, Artificial Sequence
  Synthetic
uaaugacugugucucaa

SEQ ID NO: 730234 - RNA, 17 nt, Artificial Sequence
  Synthetic
cuuagcuccauucucaa

SEQ ID NO: 730235 - RNA, 17 nt, Artificial Sequence
  Synthetic
caggguuucauucucaa

SEQ ID NO: 730236 - RNA, 17 nt, Artificial Sequence
  Synthetic
uaguagccccuucucaa

SEQ ID NO: 730237 - RNA, 17 nt, Artificial Sequence
  Synthetic
ccacuaggccuucucaa

SEQ ID NO: 730238 - RNA, 17 nt, Artificial Sequence
  Synthetic
aggagaaagcuucucaa

SEQ ID NO: 730239 - RNA, 17 nt, Artificial Sequence
  Synthetic
uuauagaaucuucucaa

SEQ ID NO: 730240 - RNA, 17 nt, Artificial Sequence
  Synthetic
acauuucaaguucucaa

SEQ ID NO: 730241 - RNA, 17 nt, Artificial Sequence
  Synthetic
uuacucacaguucucaa

SEQ ID NO: 730242 - RNA, 17 nt, Artificial Sequence
  Synthetic
agaguaguaguucucaa

SEQ ID NO: 730243 - RNA, 17 nt, Artificial Sequence
  Synthetic
aacacaaagguucucaa

SEQ ID NO: 730244 - RNA, 17 nt, Artificial Sequence
  Synthetic
aauaucaguguucucaa

SEQ ID NO: 730245 - RNA, 17 nt, Artificial Sequence
  Synthetic
uuggagauauuucucaa

SEQ ID NO: 730246 - RNA, 17 nt, Artificial Sequence
  Synthetic
cccuuauuauuucucaa

SEQ ID NO: 730247 - RNA, 17 nt, Artificial Sequence
  Synthetic
auuuauaauuuucucaa

SEQ ID NO: 730248 - RNA, 17 nt, Artificial Sequence
  Synthetic
uaacuacuuuuucucaa

SEQ ID NO: 730249 - RNA, 17 nt, Artificial Sequence
  Synthetic
auagugacaaaagucaa

SEQ ID NO: 730250 - RNA, 17 nt, Artificial Sequence
  Synthetic
augcucuuaaaagucaa

SEQ ID NO: 730251 - RNA, 17 nt, Artificial Sequence
  Synthetic
uaugugaagaaagucaa

SEQ ID NO: 730252 - RNA, 17 nt, Artificial Sequence
  Synthetic
ucugugaagaaagucaa

SEQ ID NO: 730253 - RNA, 17 nt, Artificial Sequence
  Synthetic
ucagcccuuaaagucaa

SEQ ID NO: 730254 - RNA, 17 nt, Artificial Sequence
  Synthetic
auugucuuuaaagucaa

SEQ ID NO: 730255 - RNA, 17 nt, Artificial Sequence
  Synthetic
auagaggcccaagucaa

SEQ ID NO: 730256 - RNA, 17 nt, Artificial Sequence
  Synthetic
aguuuaggguaagucaa

SEQ ID NO: 730257 - RNA, 17 nt, Artificial Sequence
  Synthetic
aaguccagagcagucaa

SEQ ID NO: 730258 - RNA, 17 nt, Artificial Sequence
  Synthetic
caacacaagucagucaa

SEQ ID NO: 730259 - RNA, 17 nt, Artificial Sequence
  Synthetic
agaaggauuagagucaa

SEQ ID NO: 730260 - RNA, 17 nt, Artificial Sequence
  Synthetic
uuagaaaagggagucaa

SEQ ID NO: 730261 - RNA, 17 nt, Artificial Sequence
  Synthetic
cuaguugcaugagucaa

SEQ ID NO: 730262 - RNA, 17 nt, Artificial Sequence
  Synthetic
ugagauuauugagucaa

SEQ ID NO: 730263 - RNA, 17 nt, Artificial Sequence
  Synthetic
uaaacaggaauagucaa

SEQ ID NO: 730264 - RNA, 17 nt, Artificial Sequence
  Synthetic
agaucaaaaguagucaa

SEQ ID NO: 730265 - RNA, 17 nt, Artificial Sequence
  Synthetic
uaaauaguccacgucaa

SEQ ID NO: 730266 - RNA, 17 nt, Artificial Sequence
  Synthetic
ucaguuuuuugcgucaa

SEQ ID NO: 730267 - RNA, 17 nt, Artificial Sequence
  Synthetic
ucacuuugcuucgucaa

SEQ ID NO: 730268 - RNA, 17 nt, Artificial Sequence
  Synthetic
ucuugaggaaaggucaa

SEQ ID NO: 730269 - RNA, 17 nt, Artificial Sequence
  Synthetic
acaaacgugaaggucaa

SEQ ID NO: 730270 - RNA, 17 nt, Artificial Sequence
  Synthetic
acacugcaaugggucaa

SEQ ID NO: 730271 - RNA, 17 nt, Artificial Sequence
  Synthetic
uuggacuaaugggucaa

SEQ ID NO: 730272 - RNA, 17 nt, Artificial Sequence
  Synthetic
uuaaaaaaaauggucaa

SEQ ID NO: 730273 - RNA, 17 nt, Artificial Sequence
  Synthetic
accauaucauuggucaa

SEQ ID NO: 730274 - RNA, 17 nt, Artificial Sequence
  Synthetic
cauggucuauuggucaa

SEQ ID NO: 730275 - RNA, 17 nt, Artificial Sequence
  Synthetic
cuguugaauuuggucaa

SEQ ID NO: 730276 - RNA, 17 nt, Artificial Sequence
  Synthetic
accaagcucaaugucaa

SEQ ID NO: 730277 - RNA, 17 nt, Artificial Sequence
  Synthetic
uuccuauagaaugucaa

SEQ ID NO: 730278 - RNA, 17 nt, Artificial Sequence
  Synthetic
agugccuagaaugucaa

SEQ ID NO: 730279 - RNA, 17 nt, Artificial Sequence
  Synthetic
caauccccacaugucaa

SEQ ID NO: 730280 - RNA, 17 nt, Artificial Sequence
  Synthetic
uaauccccacaugucaa

SEQ ID NO: 730281 - RNA, 17 nt, Artificial Sequence
  Synthetic
acagcaucccaugucaa

SEQ ID NO: 730282 - RNA, 17 nt, Artificial Sequence
  Synthetic
cuacagauugaugucaa

SEQ ID NO: 730283 - RNA, 17 nt, Artificial Sequence
  Synthetic
cugagcucaacugucaa

SEQ ID NO: 730284 - RNA, 17 nt, Artificial Sequence
  Synthetic
acaccggggccugucaa

SEQ ID NO: 730285 - RNA, 17 nt, Artificial Sequence
  Synthetic
ucuguggauccugucaa

SEQ ID NO: 730286 - RNA, 17 nt, Artificial Sequence
  Synthetic
aauuaagguagugucaa

SEQ ID NO: 730287 - RNA, 17 nt, Artificial Sequence
  Synthetic
uaauccccacgugucaa

SEQ ID NO: 730288 - RNA, 17 nt, Artificial Sequence
  Synthetic
uuauucacaggugucaa

SEQ ID NO: 730289 - RNA, 17 nt, Artificial Sequence
  Synthetic
uaauccccaggugucaa

SEQ ID NO: 730290 - RNA, 17 nt, Artificial Sequence
  Synthetic
uugucauuuggugucaa

SEQ ID NO: 730291 - RNA, 17 nt, Artificial Sequence
  Synthetic
uaauccccgugugucaa

SEQ ID NO: 730292 - RNA, 17 nt, Artificial Sequence
  Synthetic
aauauucauugugucaa

SEQ ID NO: 730293 - RNA, 17 nt, Artificial Sequence
  Synthetic
aauauaucuugugucaa

SEQ ID NO: 730294 - RNA, 17 nt, Artificial Sequence
  Synthetic
auuuuuauuauugucaa

SEQ ID NO: 730295 - RNA, 17 nt, Artificial Sequence
  Synthetic
uuguugaauuuugucaa

SEQ ID NO: 730296 - RNA, 17 nt, Artificial Sequence
  Synthetic
caauaaccuuuugucaa

SEQ ID NO: 730297 - RNA, 17 nt, Artificial Sequence
  Synthetic
uuaucuccuuuugucaa

SEQ ID NO: 730298 - RNA, 17 nt, Artificial Sequence
  Synthetic
uuuucucuuuuugucaa

SEQ ID NO: 730299 - RNA, 17 nt, Artificial Sequence
  Synthetic
ugaaaaucaaaauucaa

SEQ ID NO: 730300 - RNA, 17 nt, Artificial Sequence
  Synthetic
auaccagauaaauucaa

SEQ ID NO: 730301 - RNA, 17 nt, Artificial Sequence
  Synthetic
uuuaucuauaaauucaa

SEQ ID NO: 730302 - RNA, 17 nt, Artificial Sequence
  Synthetic
acaauuucacaauucaa

SEQ ID NO: 730303 - RNA, 17 nt, Artificial Sequence
  Synthetic
auuccuaugcaauucaa

SEQ ID NO: 730304 - RNA, 17 nt, Artificial Sequence
  Synthetic
aaauugacagaauucaa

SEQ ID NO: 730305 - RNA, 17 nt, Artificial Sequence
  Synthetic
uaguaccaggaauucaa

SEQ ID NO: 730306 - RNA, 17 nt, Artificial Sequence
  Synthetic
cuuuuguacuaauucaa

SEQ ID NO: 730307 - RNA, 17 nt, Artificial Sequence
  Synthetic
uggagaaaaacauucaa

SEQ ID NO: 730308 - RNA, 17 nt, Artificial Sequence
  Synthetic
agucucacuacauucaa

SEQ ID NO: 730309 - RNA, 17 nt, Artificial Sequence
  Synthetic
ccaccaaucccauucaa

SEQ ID NO: 730310 - RNA, 17 nt, Artificial Sequence
  Synthetic
uaaaaccaagcauucaa

SEQ ID NO: 730311 - RNA, 17 nt, Artificial Sequence
  Synthetic
uuuaauagaucauucaa

SEQ ID NO: 730312 - RNA, 17 nt, Artificial Sequence
  Synthetic
cacauuggcucauucaa

SEQ ID NO: 730313 - RNA, 17 nt, Artificial Sequence
  Synthetic
aacugaaagucauucaa

SEQ ID NO: 730314 - RNA, 17 nt, Artificial Sequence
  Synthetic
cacuccccuucauucaa

SEQ ID NO: 730315 - RNA, 17 nt, Artificial Sequence
  Synthetic
aauucuuaaagauucaa

SEQ ID NO: 730316 - RNA, 17 nt, Artificial Sequence
  Synthetic
aguuuauauagauucaa

SEQ ID NO: 730317 - RNA, 17 nt, Artificial Sequence
  Synthetic
cuuuucuuuagauucaa

SEQ ID NO: 730318 - RNA, 17 nt, Artificial Sequence
  Synthetic
ucagguuacugauucaa

SEQ ID NO: 730319 - RNA, 17 nt, Artificial Sequence
  Synthetic
acagagcucugauucaa

SEQ ID NO: 730320 - RNA, 17 nt, Artificial Sequence
  Synthetic
uuuaaguugugauucaa

SEQ ID NO: 730321 - RNA, 17 nt, Artificial Sequence
  Synthetic
uccauauacauauucaa

SEQ ID NO: 730322 - RNA, 17 nt, Artificial Sequence
  Synthetic
uuuaccugcauauucaa

SEQ ID NO: 730323 - RNA, 17 nt, Artificial Sequence
  Synthetic
aggaaaacuauauucaa

SEQ ID NO: 730324 - RNA, 17 nt, Artificial Sequence
  Synthetic
uauauauuuauauucaa

SEQ ID NO: 730325 - RNA, 17 nt, Artificial Sequence
  Synthetic
auuuacuuccuauucaa

SEQ ID NO: 730326 - RNA, 17 nt, Artificial Sequence
  Synthetic
acucacuaaaacuucaa

SEQ ID NO: 730327 - RNA, 17 nt, Artificial Sequence
  Synthetic
ucauaaugaaacuucaa

SEQ ID NO: 730328 - RNA, 17 nt, Artificial Sequence
  Synthetic
auauuuguaaacuucaa

SEQ ID NO: 730329 - RNA, 17 nt, Artificial Sequence
  Synthetic
cuaaagaugaacuucaa

SEQ ID NO: 730330 - RNA, 17 nt, Artificial Sequence
  Synthetic
uuacaaauacacuucaa

SEQ ID NO: 730331 - RNA, 17 nt, Artificial Sequence
  Synthetic
uaauguuaagacuucaa

SEQ ID NO: 730332 - RNA, 17 nt, Artificial Sequence
  Synthetic
uagcacauagacuucaa

SEQ ID NO: 730333 - RNA, 17 nt, Artificial Sequence
  Synthetic
aaaucucuggacuucaa

SEQ ID NO: 730334 - RNA, 17 nt, Artificial Sequence
  Synthetic
augugugaauacuucaa

SEQ ID NO: 730335 - RNA, 17 nt, Artificial Sequence
  Synthetic
cauccaugucccuucaa

SEQ ID NO: 730336 - RNA, 17 nt, Artificial Sequence
  Synthetic
uauccaugucccuucaa

SEQ ID NO: 730337 - RNA, 17 nt, Artificial Sequence
  Synthetic
cgaggugaugccuucaa

SEQ ID NO: 730338 - RNA, 17 nt, Artificial Sequence
  Synthetic
auaguauuaagcuucaa

SEQ ID NO: 730339 - RNA, 17 nt, Artificial Sequence
  Synthetic
ccuuacaauggcuucaa

SEQ ID NO: 730340 - RNA, 17 nt, Artificial Sequence
  Synthetic
uaaggaggcugcuucaa

SEQ ID NO: 730341 - RNA, 17 nt, Artificial Sequence
  Synthetic
aaugaagggugcuucaa
